United States Patent Application Publication US 2005/0244851 A1 - sequence listing, part 73

SEQ ID NO: 2840381 - DNA, 25 bp, Homo sapien
accacagagttagcgccgccgctgg

SEQ ID NO: 2840382 - DNA, 25 bp, Homo sapien
accaagaccacagagttagcgccgc

SEQ ID NO: 2840383 - DNA, 25 bp, Homo sapien
ggctctgacgtaggacaccggctcc

SEQ ID NO: 2840384 - DNA, 25 bp, Homo sapien
aggcagctgcatgtgttgcaatccg

SEQ ID NO: 2840385 - DNA, 25 bp, Homo sapien
gcggcggcggctctgacgtaggaca

SEQ ID NO: 2840386 - DNA, 25 bp, Homo sapien
atgtgttgcaatccgctcacatggg

SEQ ID NO: 2840387 - DNA, 25 bp, Homo sapien
tccgcgccgccttgtgaggtaaggc

SEQ ID NO: 2840388 - DNA, 25 bp, Homo sapien
gctctcgcgagtttactgagagccc

SEQ ID NO: 2840389 - DNA, 25 bp, Homo sapien
aggaagcgggcggaagccggtggct

SEQ ID NO: 2840390 - DNA, 25 bp, Homo sapien
ccggcaaggcgagaggaggaagcgg

SEQ ID NO: 2840391 - DNA, 25 bp, Homo sapien
ctttgcgactcgaagctaggcactt

SEQ ID NO: 2840392 - DNA, 25 bp, Homo sapien
tgaggctttgcgactcgaagctagg

SEQ ID NO: 2840393 - DNA, 25 bp, Homo sapien
ttgcgactcgaagctaggcacttgg

SEQ ID NO: 2840394 - DNA, 25 bp, Homo sapien
ggacatctgaggctttgcgactcga

SEQ ID NO: 2840395 - DNA, 25 bp, Homo sapien
gcgaagaagcgcctcgcgctcagcg

SEQ ID NO: 2840396 - DNA, 25 bp, Homo sapien
aagtgctgcggtctgcgtgcgtcat

SEQ ID NO: 2840397 - DNA, 25 bp, Homo sapien
gcttcttcgctgacgaagtgctgcg

SEQ ID NO: 2840398 - DNA, 25 bp, Homo sapien
cggtttgaacggtgcttgagaagcc

SEQ ID NO: 2840399 - DNA, 25 bp, Homo sapien
cacggaatagtgtggaggagtcctg

SEQ ID NO: 2840400 - DNA, 25 bp, Homo sapien
agtcctggccagtaggtctggatga

SEQ ID NO: 2840401 - DNA, 25 bp, Homo sapien
ggaggagtcctggccagtaggtctg

SEQ ID NO: 2840402 - DNA, 25 bp, Homo sapien
ctggatgaggaacctgcctccgggc

SEQ ID NO: 2840403 - DNA, 25 bp, Homo sapien
aggcctgttttctctcgccccagag

SEQ ID NO: 2840404 - DNA, 25 bp, Homo sapien
taacctcggactaggacaccactgt

SEQ ID NO: 2840405 - DNA, 25 bp, Homo sapien
tagaactgccagagctaagacatcc

SEQ ID NO: 2840406 - DNA, 25 bp, Homo sapien
caacagctttcccagcagtggactg

SEQ ID NO: 2840407 - DNA, 25 bp, Homo sapien
gggacctcggttccataattgtgag

SEQ ID NO: 2840408 - DNA, 25 bp, Homo sapien
tttgggacaagccagtacactgagg

SEQ ID NO: 2840409 - DNA, 25 bp, Homo sapien
cattgtgtctgatattctaagccca

SEQ ID NO: 2840410 - DNA, 25 bp, Homo sapien
gaatcttgactagcattaagccagt

SEQ ID NO: 2840411 - DNA, 25 bp, Homo sapien
tgggcaagggccaaccaaaaatgct

SEQ ID NO: 2840412 - DNA, 25 bp, Homo sapien
aagctaaatctcagggcatcacccc

SEQ ID NO: 2840413 - DNA, 25 bp, Homo sapien
gaaatatgggaagcatgagccatgg

SEQ ID NO: 2840414 - DNA, 25 bp, Homo sapien
gaaagcaacctgaaaatagccacct

SEQ ID NO: 2840415 - DNA, 25 bp, Homo sapien
taaccagtgttagcaaatcctgtat

SEQ ID NO: 2840416 - DNA, 25 bp, Homo sapien
cacagggcagaaggtagctagaaaa

SEQ ID NO: 2840417 - DNA, 25 bp, Homo sapien
tataaatagctaagtttcccattgt

SEQ ID NO: 2840418 - DNA, 25 bp, Homo sapien
cagaatgggtaagagaacaatcatc

SEQ ID NO: 2840419 - DNA, 25 bp, Homo sapien
gttaaaggtctagcctcattcctac

SEQ ID NO: 2840420 - DNA, 25 bp, Homo sapien
ctcagttgaaggaccccatgtacat

SEQ ID NO: 2840421 - DNA, 25 bp, Homo sapien
tgtgcgagatggtttcaccccttga

SEQ ID NO: 2840422 - DNA, 25 bp, Homo sapien
cttgacttgcaaggcctcagttgaa

SEQ ID NO: 2840423 - DNA, 25 bp, Homo sapien
gaaggatctcatccccatatgtggt

SEQ ID NO: 2840424 - DNA, 25 bp, Homo sapien
ccagtgccagaacttccagagcctt

SEQ ID NO: 2840425 - DNA, 25 bp, Homo sapien
ttccagagccttctcgctcagatgc

SEQ ID NO: 2840426 - DNA, 25 bp, Homo sapien
agaacttccagagccttctcgctca

SEQ ID NO: 2840427 - DNA, 25 bp, Homo sapien
aacttccagagccttctcgctcaga

SEQ ID NO: 2840428 - DNA, 25 bp, Homo sapien
catttcgaacagcttcagtgatgcc

SEQ ID NO: 2840429 - DNA, 25 bp, Homo sapien
caggagctccctcattttggaaatc

SEQ ID NO: 2840430 - DNA, 25 bp, Homo sapien
gctgtcttttctagccaggagctcc

SEQ ID NO: 2840431 - DNA, 25 bp, Homo sapien
ggatgctgcctgtctaatattttct

SEQ ID NO: 2840432 - DNA, 25 bp, Homo sapien
caggtaattggtccttgaattcttc

SEQ ID NO: 2840433 - DNA, 25 bp, Homo sapien
agcaggtaattggtccttgaattct

SEQ ID NO: 2840434 - DNA, 25 bp, Homo sapien
gcaggtaattggtccttgaattctt

SEQ ID NO: 2840435 - DNA, 25 bp, Homo sapien
taaacgaagactttccaatcaacca

SEQ ID NO: 2840436 - DNA, 25 bp, Homo sapien
gcatgaaagagtctgggatggcttt

SEQ ID NO: 2840437 - DNA, 25 bp, Homo sapien
tgcaaacataaggtataaacaacgg

SEQ ID NO: 2840438 - DNA, 25 bp, Homo sapien
acatcagaattgtgacagggaaaac

SEQ ID NO: 2840439 - DNA, 25 bp, Homo sapien
tttcgccggtcttcttcagcatatt

SEQ ID NO: 2840440 - DNA, 25 bp, Homo sapien
cttctttcgccggtcttcttcagca

SEQ ID NO: 2840441 - DNA, 25 bp, Homo sapien
tctttgcttaatccaccagaagact

SEQ ID NO: 2840442 - DNA, 25 bp, Homo sapien
tcatctttgcttaatccaccagaag

SEQ ID NO: 2840443 - DNA, 25 bp, Homo sapien
tctttagcagaaacatgtactatcc

SEQ ID NO: 2840444 - DNA, 25 bp, Homo sapien
tagcagaaacatgtactatcccatt

SEQ ID NO: 2840445 - DNA, 25 bp, Homo sapien
cagaaacatgtactatcccattggc

SEQ ID NO: 2840446 - DNA, 25 bp, Homo sapien
ttatctttagcagaaacatgtacta

SEQ ID NO: 2840447 - DNA, 25 bp, Homo sapien
tctcaagactactcagtatgtatgt

SEQ ID NO: 2840448 - DNA, 25 bp, Homo sapien
gaggcatagtattcaggattcacaa

SEQ ID NO: 2840449 - DNA, 25 bp, Homo sapien
gtatgtatgtgtatgccagcagttt

SEQ ID NO: 2840450 - DNA, 25 bp, Homo sapien
gccatgggtatctagttgcatccct

SEQ ID NO: 2840451 - DNA, 25 bp, Homo sapien
tttaatttccacttgcgtttgacca

SEQ ID NO: 2840452 - DNA, 25 bp, Homo sapien
gaccatcagcggcagtagagaatac

SEQ ID NO: 2840453 - DNA, 25 bp, Homo sapien
gcgtttgaccatcagcggcagtaga

SEQ ID NO: 2840454 - DNA, 25 bp, Homo sapien
ttccacttgcgtttgaccatcagcg

SEQ ID NO: 2840455 - DNA, 25 bp, Homo sapien
tgaaagccaaaggtttacattccaa

SEQ ID NO: 2840456 - DNA, 25 bp, Homo sapien
tacattccaagactggaagactcct

SEQ ID NO: 2840457 - DNA, 25 bp, Homo sapien
tttacggtatgttcagaacaaaggc

SEQ ID NO: 2840458 - DNA, 25 bp, Homo sapien
ttgtcaatgtgattaacctactcca

SEQ ID NO: 2840459 - DNA, 25 bp, Homo sapien
gataagaacactcccctaagtctgg

SEQ ID NO: 2840460 - DNA, 25 bp, Homo sapien
gaacaagccatgtccaagtagccct

SEQ ID NO: 2840461 - DNA, 25 bp, Homo sapien
gtggctgcaattacatccgtcatag

SEQ ID NO: 2840462 - DNA, 25 bp, Homo sapien
agtagccctgcttggtatctcggca

SEQ ID NO: 2840463 - DNA, 25 bp, Homo sapien
cttcttggttggaatagtggtattc

SEQ ID NO: 2840464 - DNA, 25 bp, Homo sapien
agcctcatcaggattgacagcttta

SEQ ID NO: 2840465 - DNA, 25 bp, Homo sapien
gaatagtggtattcctattaataag

SEQ ID NO: 2840466 - DNA, 25 bp, Homo sapien
catcaggattgacagctttacttgg

SEQ ID NO: 2840467 - DNA, 25 bp, Homo sapien
acctgtcggcccacacttgggaact

SEQ ID NO: 2840468 - DNA, 25 bp, Homo sapien
agaacctgtcggcccacacttggga

SEQ ID NO: 2840469 - DNA, 25 bp, Homo sapien
aaaagaacctgtcggcccacacttg

SEQ ID NO: 2840470 - DNA, 25 bp, Homo sapien
ctgtcggcccacacttgggaactac

SEQ ID NO: 2840471 - DNA, 25 bp, Homo sapien
taggcagctgtagcaataatttgca

SEQ ID NO: 2840472 - DNA, 25 bp, Homo sapien
taaagaccaaattatcataggcagc

SEQ ID NO: 2840473 - DNA, 25 bp, Homo sapien
acttgggttcctgctaatgatcttc

SEQ ID NO: 2840474 - DNA, 25 bp, Homo sapien
caagacaggctaactcaaatctgag

SEQ ID NO: 2840475 - DNA, 25 bp, Homo sapien
cttaatatatgaggcatccacctgg

SEQ ID NO: 2840476 - DNA, 25 bp, Homo sapien
tttcttaatatatgaggcatccacc

SEQ ID NO: 2840477 - DNA, 25 bp, Homo sapien
taatatatgaggcatccacctggtc

SEQ ID NO: 2840478 - DNA, 25 bp, Homo sapien
tcttaatatatgaggcatccacctg

SEQ ID NO: 2840479 - DNA, 25 bp, Homo sapien
taatcctatttaggctaccaagaag

SEQ ID NO: 2840480 - DNA, 25 bp, Homo sapien
aaacaaggtcactatcttaggtcca

SEQ ID NO: 2840481 - DNA, 25 bp, Homo sapien
taggtccaagataatcctatttagg

SEQ ID NO: 2840482 - DNA, 25 bp, Homo sapien
caaggtcactatcttaggtccaaga

SEQ ID NO: 2840483 - DNA, 25 bp, Homo sapien
tccacacgttctttcagaatgatgt

SEQ ID NO: 2840484 - DNA, 25 bp, Homo sapien
tcagtcattagttttccacacgttc

SEQ ID NO: 2840485 - DNA, 25 bp, Homo sapien
tagttttccacacgttctttcagaa

SEQ ID NO: 2840486 - DNA, 25 bp, Homo sapien
cgttctttcagaatgatgtgttgaa

SEQ ID NO: 2840487 - DNA, 25 bp, Homo sapien
tgttcccctctgacctcaaactttg

SEQ ID NO: 2840488 - DNA, 25 bp, Homo sapien
tttgtcaaagagatgcactaagctg

SEQ ID NO: 2840489 - DNA, 25 bp, Homo sapien
gcagaatgggccatatatttgtgcc

SEQ ID NO: 2840490 - DNA, 25 bp, Homo sapien
tctatgactgagttcgggatcctcc

SEQ ID NO: 2840491 - DNA, 25 bp, Homo sapien
agcacgggtcaacttcatattcaaa

SEQ ID NO: 2840492 - DNA, 25 bp, Homo sapien
ttgagcacgggtcaacttcatattc

SEQ ID NO: 2840493 - DNA, 25 bp, Homo sapien
aattgagcacgggtcaacttcatat

SEQ ID NO: 2840494 - DNA, 25 bp, Homo sapien
caaattgagcacgggtcaacttcat

SEQ ID NO: 2840495 - DNA, 25 bp, Homo sapien
tattttaaataagctccggctgaaa

SEQ ID NO: 2840496 - DNA, 25 bp, Homo sapien
tatccatcaagactgctcgaatttt

SEQ ID NO: 2840497 - DNA, 25 bp, Homo sapien
gactgctcgaattttccgtgtctca

SEQ ID NO: 2840498 - DNA, 25 bp, Homo sapien
taagctccggctgaaaatatccatc

SEQ ID NO: 2840499 - DNA, 25 bp, Homo sapien
gcagcttcccgtaccctctgaagtg

SEQ ID NO: 2840500 - DNA, 25 bp, Homo sapien
agcagcttcccgtaccctctgaagt

SEQ ID NO: 2840501 - DNA, 25 bp, Homo sapien
caaacaccagcattagtgaggtgat

SEQ ID NO: 2840502 - DNA, 25 bp, Homo sapien
gaagacattgaacaccaaacaccag

SEQ ID NO: 2840503 - DNA, 25 bp, Homo sapien
aacgtctacatattaaccacattgg

SEQ ID NO: 2840504 - DNA, 25 bp, Homo sapien
tgaactgaactcgtaaacaaagcaa

SEQ ID NO: 2840505 - DNA, 25 bp, Homo sapien
caaggcctggtcaaagtcttcccca

SEQ ID NO: 2840506 - DNA, 25 bp, Homo sapien
gcaaggcctggtcaaagtcttcccc

SEQ ID NO: 2840507 - DNA, 25 bp, Homo sapien
tagcaaggcctggtcaaagtcttcc

SEQ ID NO: 2840508 - DNA, 25 bp, Homo sapien
agcaaggcctggtcaaagtcttccc

SEQ ID NO: 2840509 - DNA, 25 bp, Homo sapien
tactagttaaattaccatggcccaa

SEQ ID NO: 2840510 - DNA, 25 bp, Homo sapien
gaacaaaacctatcaccaggatata

SEQ ID NO: 2840511 - DNA, 25 bp, Homo sapien
ctttagtttcacacatccaggtgag

SEQ ID NO: 2840512 - DNA, 25 bp, Homo sapien
cagtaaaagcactgtaaaaggctca

SEQ ID NO: 2840513 - DNA, 25 bp, Homo sapien
atttgtctagaccataggcaagagc

SEQ ID NO: 2840514 - DNA, 25 bp, Homo sapien
cagtccagatatctggccagcatct

SEQ ID NO: 2840515 - DNA, 25 bp, Homo sapien
gtctagaccataggcaagagcagca

SEQ ID NO: 2840516 - DNA, 25 bp, Homo sapien
tcacccgaagcacattcagtccaga

SEQ ID NO: 2840517 - DNA, 25 bp, Homo sapien
ttttttgctgtgtgccccaagtaat

SEQ ID NO: 2840518 - DNA, 25 bp, Homo sapien
taaaaacccaagatcaggccgggca

SEQ ID NO: 2840519 - DNA, 25 bp, Homo sapien
tgacctaatatgtccttgcaggaaa

SEQ ID NO: 2840520 - DNA, 25 bp, Homo sapien
tgcaggaaacactccaagtaaatac

SEQ ID NO: 2840521 - DNA, 25 bp, Homo sapien
attaatatagcccaacaacctgtgt

SEQ ID NO: 2840522 - DNA, 25 bp, Homo sapien
cctaacagggacaaaagcttaatgt

SEQ ID NO: 2840523 - DNA, 25 bp, Homo sapien
cacagggagctagtgatctcacagg

SEQ ID NO: 2840524 - DNA, 25 bp, Homo sapien
cacagattcatctacaggagctgga

SEQ ID NO: 2840525 - DNA, 25 bp, Homo sapien
gccagccaccattagtgagatttga

SEQ ID NO: 2840526 - DNA, 25 bp, Homo sapien
ctccaatctgactcggagaatacaa

SEQ ID NO: 2840527 - DNA, 25 bp, Homo sapien
tccaatctgactcggagaatacaat

SEQ ID NO: 2840528 - DNA, 25 bp, Homo sapien
atttagcgccccaggcagaagattt

SEQ ID NO: 2840529 - DNA, 25 bp, Homo sapien
tctttatttagcgccccaggcagaa

SEQ ID NO: 2840530 - DNA, 25 bp, Homo sapien
tttgatgaaaccgttactgtatgat

SEQ ID NO: 2840531 - DNA, 25 bp, Homo sapien
gatgaaaccgttactgtatgatcca

SEQ ID NO: 2840532 - DNA, 25 bp, Homo sapien
gacagcctgtcgcttggccggcatt

SEQ ID NO: 2840533 - DNA, 25 bp, Homo sapien
tatcgccggccaatgagacgcttgg

SEQ ID NO: 2840534 - DNA, 25 bp, Homo sapien
gacgcttggtagcataaaatgtatt

SEQ ID NO: 2840535 - DNA, 25 bp, Homo sapien
tggccggcattccaacaagtcgctc

SEQ ID NO: 2840536 - DNA, 25 bp, Homo sapien
ttgtatgtatctaacttcccagaaa

SEQ ID NO: 2840537 - DNA, 25 bp, Homo sapien
tgtggtatagaggtaggactactaa

SEQ ID NO: 2840538 - DNA, 25 bp, Homo sapien
gcttaagactcttgtcaggtgaacc

SEQ ID NO: 2840539 - DNA, 25 bp, Homo sapien
caggtgaacctttgtagtgctgata

SEQ ID NO: 2840540 - DNA, 25 bp, Homo sapien
acatgcaacctttattcccaccggg

SEQ ID NO: 2840541 - DNA, 25 bp, Homo sapien
gaagcctccttactctgtacatgca

SEQ ID NO: 2840542 - DNA, 25 bp, Homo sapien
tatcccacttgtttggcaccaagag

SEQ ID NO: 2840543 - DNA, 25 bp, Homo sapien
caccgggttcttagcaagatttaga

SEQ ID NO: 2840544 - DNA, 25 bp, Homo sapien
acccaaatcaataccaacaactgct

SEQ ID NO: 2840545 - DNA, 25 bp, Homo sapien
cacgcaggagttggtagtacccaaa

SEQ ID NO: 2840546 - DNA, 25 bp, Homo sapien
aactgctcccttgattgcttctgat

SEQ ID NO: 2840547 - DNA, 25 bp, Homo sapien
ttccataactgccacgcaggagttg

SEQ ID NO: 2840548 - DNA, 25 bp, Homo sapien
taaaagcctcatgactaaggccatt

SEQ ID NO: 2840549 - DNA, 25 bp, Homo sapien
ctaaaagcctcatgactaaggccat

SEQ ID NO: 2840550 - DNA, 25 bp, Homo sapien
aaaagcctcatgactaaggccattc

SEQ ID NO: 2840551 - DNA, 25 bp, Homo sapien
aaaaaactgactcagtcaccaacca

SEQ ID NO: 2840552 - DNA, 25 bp, Homo sapien
actcagtcaccaaccagtgtgtatc

SEQ ID NO: 2840553 - DNA, 25 bp, Homo sapien
aaagaaaaaactgactcagtcacca

SEQ ID NO: 2840554 - DNA, 25 bp, Homo sapien
agaaaaaactgactcagtcaccaac

SEQ ID NO: 2840555 - DNA, 25 bp, Homo sapien
cccgcctgacctatactggagaatt

SEQ ID NO: 2840556 - DNA, 25 bp, Homo sapien
gcgctaactatggaaggcccgttac

SEQ ID NO: 2840557 - DNA, 25 bp, Homo sapien
tgggcaaaatcttgacccggcagcg

SEQ ID NO: 2840558 - DNA, 25 bp, Homo sapien
gaaatgacactctagatcgcgaggg

SEQ ID NO: 2840559 - DNA, 25 bp, Homo sapien
gctgcggcgcccacgagacgggctg

SEQ ID NO: 2840560 - DNA, 25 bp, Homo sapien
cggcgcccacgagacgggctgctgc

SEQ ID NO: 2840561 - DNA, 25 bp, Homo sapien
gcggcgcccacgagacgggctgctg

SEQ ID NO: 2840562 - DNA, 25 bp, Homo sapien
tgcggcgcccacgagacgggctgct

SEQ ID NO: 2840563 - DNA, 25 bp, Homo sapien
taaatggaggagtacgaggcagcaa

SEQ ID NO: 2840564 - DNA, 25 bp, Homo sapien
agcaaacaagcgctccgacggcaaa

SEQ ID NO: 2840565 - DNA, 25 bp, Homo sapien
gagctgcgcgatgcggtggcggcag

SEQ ID NO: 2840566 - DNA, 25 bp, Homo sapien
tccgacggcaaagagctgcgcgatg

SEQ ID NO: 2840567 - DNA, 25 bp, Homo sapien
gccgcctgaccagaggatactcgac

SEQ ID NO: 2840568 - DNA, 25 bp, Homo sapien
cgtacaggtaatatgctccgcagca

SEQ ID NO: 2840569 - DNA, 25 bp, Homo sapien
ctcccggagccagggcgtacaggta

SEQ ID NO: 2840570 - DNA, 25 bp, Homo sapien
gaccagaggatactcgactgccgct

SEQ ID NO: 2840571 - DNA, 25 bp, Homo sapien
aagttcccagctgatgcggatgcca

SEQ ID NO: 2840572 - DNA, 25 bp, Homo sapien
caaccacgttgggagaatcactgac

SEQ ID NO: 2840573 - DNA, 25 bp, Homo sapien
tgacattccccttcagtccgagagg

SEQ ID NO: 2840574 - DNA, 25 bp, Homo sapien
aaacaagtttgcctgatgccacacc

SEQ ID NO: 2840575 - DNA, 25 bp, Homo sapien
ctaaatgtcatcaaaggtgaaactt

SEQ ID NO: 2840576 - DNA, 25 bp, Homo sapien
aaatgtcatcaaaggtgaaacttgc

SEQ ID NO: 2840577 - DNA, 25 bp, Homo sapien
atgtcatcaaaggtgaaacttgctt

SEQ ID NO: 2840578 - DNA, 25 bp, Homo sapien
aatgtcatcaaaggtgaaacttgct

SEQ ID NO: 2840579 - DNA, 25 bp, Homo sapien
agcatcaggatcccagatggtccca

SEQ ID NO: 2840580 - DNA, 25 bp, Homo sapien
gctgtacagcatcaggatcccagat

SEQ ID NO: 2840581 - DNA, 25 bp, Homo sapien
cagcatcaggatcccagatggtccc

SEQ ID NO: 2840582 - DNA, 25 bp, Homo sapien
gcatcaggatcccagatggtcccat

SEQ ID NO: 2840583 - DNA, 25 bp, Homo sapien
tagtttttctcagctgcaggctcac

SEQ ID NO: 2840584 - DNA, 25 bp, Homo sapien
ctagtttttctcagctgcaggctca

SEQ ID NO: 2840585 - DNA, 25 bp, Homo sapien
gggtgttcctcaaaccctctgggca

SEQ ID NO: 2840586 - DNA, 25 bp, Homo sapien
aaaccctctgggcacggcgtctttg

SEQ ID NO: 2840587 - DNA, 25 bp, Homo sapien
gtgttcctcaaaccctctgggcacg

SEQ ID NO: 2840588 - DNA, 25 bp, Homo sapien
gggcacggcgtctttgcctgtgatt

SEQ ID NO: 2840589 - DNA, 25 bp, Homo sapien
cactggctccgaatgtttgaaatca

SEQ ID NO: 2840590 - DNA, 25 bp, Homo sapien
gggacactggctccgaatgtttgaa

SEQ ID NO: 2840591 - DNA, 25 bp, Homo sapien
ttgaaatcagtaataacctagaggc

SEQ ID NO: 2840592 - DNA, 25 bp, Homo sapien
tcagtaataacctagaggctgggtg

SEQ ID NO: 2840593 - DNA, 25 bp, Homo sapien
attttagcccattaaggccgctgct

SEQ ID NO: 2840594 - DNA, 25 bp, Homo sapien
attttcctcaggcaccgcatcaaac

SEQ ID NO: 2840595 - DNA, 25 bp, Homo sapien
cattaaggccgctgctttccaaggc

SEQ ID NO: 2840596 - DNA, 25 bp, Homo sapien
gcaccgcatcaaacttgttctctag

SEQ ID NO: 2840597 - DNA, 25 bp, Homo sapien
catgactaggcgtgttcctgtccat

SEQ ID NO: 2840598 - DNA, 25 bp, Homo sapien
ggagaataagcataggagcaaggag

SEQ ID NO: 2840599 - DNA, 25 bp, Homo sapien
agaataagcataggagcaaggaggt

SEQ ID NO: 2840600 - DNA, 25 bp, Homo sapien
taagcataggagcaaggaggtgggt

SEQ ID NO: 2840601 - DNA, 25 bp, Homo sapien
agggagaataagcataggagcaagg

SEQ ID NO: 2840602 - DNA, 25 bp, Homo sapien
tcagtacaacaagcagatgcctcca

SEQ ID NO: 2840603 - DNA, 25 bp, Homo sapien
cagtacaacaagcagatgcctccaa

SEQ ID NO: 2840604 - DNA, 25 bp, Homo sapien
tgcaacccgtcttcaggcatcagct

SEQ ID NO: 2840605 - DNA, 25 bp, Homo sapien
atgcaacccgtcttcaggcatcagc

SEQ ID NO: 2840606 - DNA, 25 bp, Homo sapien
aagccaatggcatcctctgttagaa

SEQ ID NO: 2840607 - DNA, 25 bp, Homo sapien
taaagccaatggcatcctctgttag

SEQ ID NO: 2840608 - DNA, 25 bp, Homo sapien
ggtaaagccaatggcatcctctgtt

SEQ ID NO: 2840609 - DNA, 25 bp, Homo sapien
tgggtaaagccaatggcatcctctg

SEQ ID NO: 2840610 - DNA, 25 bp, Homo sapien
atgggaagcactggagggtgatttt

SEQ ID NO: 2840611 - DNA, 25 bp, Homo sapien
gatgggaagcactggagggtgattt

SEQ ID NO: 2840612 - DNA, 25 bp, Homo sapien
tgggaagcactggagggtgattttt

SEQ ID NO: 2840613 - DNA, 25 bp, Homo sapien
tccgctctcaagtaggcccaggtgt

SEQ ID NO: 2840614 - DNA, 25 bp, Homo sapien
cccaggtaataagcgtagtaagcca

SEQ ID NO: 2840615 - DNA, 25 bp, Homo sapien
cacgcgtactcagtgtttctggagg

SEQ ID NO: 2840616 - DNA, 25 bp, Homo sapien
tctcctttgtatccacgcgtactca

SEQ ID NO: 2840617 - DNA, 25 bp, Homo sapien
gttgccagactctcttcgcggtggg

SEQ ID NO: 2840618 - DNA, 25 bp, Homo sapien
ctcccggcctaagctcccactaggg

SEQ ID NO: 2840619 - DNA, 25 bp, Homo sapien
cggtccggcgttgccagactctctt

SEQ ID NO: 2840620 - DNA, 25 bp, Homo sapien
ggctgttccaggagtcaccgctcct

SEQ ID NO: 2840621 - DNA, 25 bp, Homo sapien
gtgcgtgcgagtgtgaagcacttgt

SEQ ID NO: 2840622 - DNA, 25 bp, Homo sapien
gtgcgagtgtgaagcacttgttgga

SEQ ID NO: 2840623 - DNA, 25 bp, Homo sapien
tgcgtgcgagtgtgaagcacttgtt

SEQ ID NO: 2840624 - DNA, 25 bp, Homo sapien
cgagtgtgaagcacttgttggaaaa

SEQ ID NO: 2840625 - DNA, 25 bp, Homo sapien
tccaaggttgactccctcttacgtc

SEQ ID NO: 2840626 - DNA, 25 bp, Homo sapien
gttgactccctcttacgtcctcttg

SEQ ID NO: 2840627 - DNA, 25 bp, Homo sapien
atgcaggcggcggttggcccagttc

SEQ ID NO: 2840628 - DNA, 25 bp, Homo sapien
gcccagttccaaggttgactccctc

SEQ ID NO: 2840629 - DNA, 25 bp, Homo sapien
tgtcaagtctacgactaaattcggg

SEQ ID NO: 2840630 - DNA, 25 bp, Homo sapien
caggataggcattttgtggagcgaa

SEQ ID NO: 2840631 - DNA, 25 bp, Homo sapien
caattatttggaaaagagcgagata

SEQ ID NO: 2840632 - DNA, 25 bp, Homo sapien
ttttttggtgcgtgtgttttgtaca

SEQ ID NO: 2840633 - DNA, 25 bp, Homo sapien
gaagtatgccacaactccatttcta

SEQ ID NO: 2840634 - DNA, 25 bp, Homo sapien
tctaatggagcttgaaattagcatg

SEQ ID NO: 2840635 - DNA, 25 bp, Homo sapien
gatgggctgtcatcgatcaacccct

SEQ ID NO: 2840636 - DNA, 25 bp, Homo sapien
ccagctgtaagtttggagtaatgca

SEQ ID NO: 2840637 - DNA, 25 bp, Homo sapien
tcatatggggcggttgccaggcgga

SEQ ID NO: 2840638 - DNA, 25 bp, Homo sapien
ggcggctggcctggcgggggctgac

SEQ ID NO: 2840639 - DNA, 25 bp, Homo sapien
tctcatatggggcggttgccaggcg

SEQ ID NO: 2840640 - DNA, 25 bp, Homo sapien
ggtcgcggccgggtagaggcgctcc

SEQ ID NO: 2840641 - DNA, 25 bp, Homo sapien
gcagcgcacgcctgcaaatcgcagg

SEQ ID NO: 2840642 - DNA, 25 bp, Homo sapien
cgtggcagcgcacgcctgcaaatcg

SEQ ID NO: 2840643 - DNA, 25 bp, Homo sapien
gcgtggcagcgcacgcctgcaaatc

SEQ ID NO: 2840644 - DNA, 25 bp, Homo sapien
tggcagcgcacgcctgcaaatcgca

SEQ ID NO: 2840645 - DNA, 25 bp, Homo sapien
gtgttccaggtgaccagcatccttt

SEQ ID NO: 2840646 - DNA, 25 bp, Homo sapien
gcatggccgatttaagactttttca

SEQ ID NO: 2840647 - DNA, 25 bp, Homo sapien
ttgccactttactttcgcttaggta

SEQ ID NO: 2840648 - DNA, 25 bp, Homo sapien
gatccttgttgatatgcatggccga

SEQ ID NO: 2840649 - DNA, 25 bp, Homo sapien
gctggaagtatagaggcatgatctc

SEQ ID NO: 2840650 - DNA, 25 bp, Homo sapien
taattctaattccatatggtcagag

SEQ ID NO: 2840651 - DNA, 25 bp, Homo sapien
gttttatgacccagtgctacctttg

SEQ ID NO: 2840652 - DNA, 25 bp, Homo sapien
tgtttgcacttgacaaataatatgt

SEQ ID NO: 2840653 - DNA, 25 bp, Homo sapien
gcatctttgaagaataggtgatttt

SEQ ID NO: 2840654 - DNA, 25 bp, Homo sapien
tagtcatcatagaaggtgatgctac

SEQ ID NO: 2840655 - DNA, 25 bp, Homo sapien
tgatgctactttgcctgtgggtgaa

SEQ ID NO: 2840656 - DNA, 25 bp, Homo sapien
ggtgaaggtggactctgacagcatc

SEQ ID NO: 2840657 - DNA, 25 bp, Homo sapien
ggatgtttatctgtagcaagccaag

SEQ ID NO: 2840658 - DNA, 25 bp, Homo sapien
ggctttgcctattcctccatgtggt

SEQ ID NO: 2840659 - DNA, 25 bp, Homo sapien
aataagtgcatctgggcaaacacgg

SEQ ID NO: 2840660 - DNA, 25 bp, Homo sapien
gcaaacacggcagactactggcagt

SEQ ID NO: 2840661 - DNA, 25 bp, Homo sapien
cgtcatccagggtggaggaggtcat

SEQ ID NO: 2840662 - DNA, 25 bp, Homo sapien
tgagtcgtcatccagggtggaggag

SEQ ID NO: 2840663 - DNA, 25 bp, Homo sapien
agtcgtcatccagggtggaggaggt

SEQ ID NO: 2840664 - DNA, 25 bp, Homo sapien
tcgtcatccagggtggaggaggtca

SEQ ID NO: 2840665 - DNA, 25 bp, Homo sapien
caactgaattgaactgggctgagac

SEQ ID NO: 2840666 - DNA, 25 bp, Homo sapien
tgtgtaaccaagatccgcagcgttg

SEQ ID NO: 2840667 - DNA, 25 bp, Homo sapien
gaaagtatgcctcgctagccttggc

SEQ ID NO: 2840668 - DNA, 25 bp, Homo sapien
caagtactatgagtttgccccaggt

SEQ ID NO: 2840669 - DNA, 25 bp, Homo sapien
agagcagtgatcaaacaggtattga

SEQ ID NO: 2840670 - DNA, 25 bp, Homo sapien
gatctatatctgtttctgcccaata

SEQ ID NO: 2840671 - DNA, 25 bp, Homo sapien
taagcagcaagatagttgtggtaca

SEQ ID NO: 2840672 - DNA, 25 bp, Homo sapien
tccaacaggagtgcaaattaatgtg

SEQ ID NO: 2840673 - DNA, 25 bp, Homo sapien
cagaacaggcgtactgggatagtcc

SEQ ID NO: 2840674 - DNA, 25 bp, Homo sapien
tggagtgttcccaccgaccttggaa

SEQ ID NO: 2840675 - DNA, 25 bp, Homo sapien
gcttttctaaagtgccccaggtcca

SEQ ID NO: 2840676 - DNA, 25 bp, Homo sapien
gattgccagagagaccaacggttgt

SEQ ID NO: 2840677 - DNA, 25 bp, Homo sapien
agcggcatttgggtggacacgccat

SEQ ID NO: 2840678 - DNA, 25 bp, Homo sapien
caagtaagttgactgaagctggcaa

SEQ ID NO: 2840679 - DNA, 25 bp, Homo sapien
aagagcagcttctcgcagcggcatt

SEQ ID NO: 2840680 - DNA, 25 bp, Homo sapien
ggaagccctgagagtcgcagtagaa

SEQ ID NO: 2840681 - DNA, 25 bp, Homo sapien
gcataggggcccctaatggccactt

SEQ ID NO: 2840682 - DNA, 25 bp, Homo sapien
ctcattgcatatattgctgccagca

SEQ ID NO: 2840683 - DNA, 25 bp, Homo sapien
cctaatggccacttgaaatgtaagc

SEQ ID NO: 2840684 - DNA, 25 bp, Homo sapien
ttaaaaccatactcattgcatatat

SEQ ID NO: 2840685 - DNA, 25 bp, Homo sapien
tgtctctgtcatcatcgatatatgc

SEQ ID NO: 2840686 - DNA, 25 bp, Homo sapien
tttttcagcagaacatatgggctat

SEQ ID NO: 2840687 - DNA, 25 bp, Homo sapien
taaaagcgtgattccttgttgaatg

SEQ ID NO: 2840688 - DNA, 25 bp, Homo sapien
tatgactggaccaaaacttaagcca

SEQ ID NO: 2840689 - DNA, 25 bp, Homo sapien
tatgtgctgcgaccacacagaactg

SEQ ID NO: 2840690 - DNA, 25 bp, Homo sapien
tcaacgcagtgagtctgtaaaaggc

SEQ ID NO: 2840691 - DNA, 25 bp, Homo sapien
cattcttctgagcacattggaggct

SEQ ID NO: 2840692 - DNA, 25 bp, Homo sapien
gaactgtatataggctgacgtcacc

SEQ ID NO: 2840693 - DNA, 25 bp, Homo sapien
tccaaagggagaacaatgggctaaa

SEQ ID NO: 2840694 - DNA, 25 bp, Homo sapien
catagagagataggtggcattttcc

SEQ ID NO: 2840695 - DNA, 25 bp, Homo sapien
tctactggcttgtgtactaagagca

SEQ ID NO: 2840696 - DNA, 25 bp, Homo sapien
ctacatgatgtaggcatttccaggg

SEQ ID NO: 2840697 - DNA, 25 bp, Homo sapien
tgcctgctgtcacgcctggccattt

SEQ ID NO: 2840698 - DNA, 25 bp, Homo sapien
aggtgcctgctgtcacgcctggcca

SEQ ID NO: 2840699 - DNA, 25 bp, Homo sapien
gtgcctgctgtcacgcctggccatt

SEQ ID NO: 2840700 - DNA, 25 bp, Homo sapien
tcgaactcccaatcttgatcaagtg

SEQ ID NO: 2840701 - DNA, 25 bp, Homo sapien
gaggctgtcatcattccggaaggag

SEQ ID NO: 2840702 - DNA, 25 bp, Homo sapien
ccattgagctcacagttggtcagca

SEQ ID NO: 2840703 - DNA, 25 bp, Homo sapien
catgttcgttcctatcagcgtggat

SEQ ID NO: 2840704 - DNA, 25 bp, Homo sapien
ccatacataggtgctgctgctcagt

SEQ ID NO: 2840705 - DNA, 25 bp, Homo sapien
tttgggacatggtcttgcagtcatg

SEQ ID NO: 2840706 - DNA, 25 bp, Homo sapien
gggacatggtcttgcagtcatggct

SEQ ID NO: 2840707 - DNA, 25 bp, Homo sapien
gacatggtcttgcagtcatggcttg

SEQ ID NO: 2840708 - DNA, 25 bp, Homo sapien
tgggacatggtcttgcagtcatggc

SEQ ID NO: 2840709 - DNA, 25 bp, Homo sapien
cagcgaatgctttttaagtgcccag

SEQ ID NO: 2840710 - DNA, 25 bp, Homo sapien
gaaggcagtggcctcaaataaagga

SEQ ID NO: 2840711 - DNA, 25 bp, Homo sapien
tctggccctctagaaagactctgaa

SEQ ID NO: 2840712 - DNA, 25 bp, Homo sapien
tctgaagcacacatgacagcgaatg

SEQ ID NO: 2840713 - DNA, 25 bp, Homo sapien
taccagtgaagcctggtaactgtta

SEQ ID NO: 2840714 - DNA, 25 bp, Homo sapien
tgttaaatatggttaggatgggcag

SEQ ID NO: 2840715 - DNA, 25 bp, Homo sapien
aaattggaagctttaactcattgcc

SEQ ID NO: 2840716 - DNA, 25 bp, Homo sapien
ctgcagtttctttaatagacaggga

SEQ ID NO: 2840717 - DNA, 25 bp, Homo sapien
tgagagatctgaccctcccttcatt

SEQ ID NO: 2840718 - DNA, 25 bp, Homo sapien
tacatatttcgtttgaaatgctttg

SEQ ID NO: 2840719 - DNA, 25 bp, Homo sapien
tgaaatgctttgtgagagatctgac

SEQ ID NO: 2840720 - DNA, 25 bp, Homo sapien
ggctcacatcactcactaatcccag

SEQ ID NO: 2840721 - DNA, 25 bp, Homo sapien
ggtcattcacgtagtcacctcagag

SEQ ID NO: 2840722 - DNA, 25 bp, Homo sapien
gatagatgccagcttacagttgcca

SEQ ID NO: 2840723 - DNA, 25 bp, Homo sapien
tcagagatggacaactatgagccag

SEQ ID NO: 2840724 - DNA, 25 bp, Homo sapien
gatttggtctcatggcacatcgggc

SEQ ID NO: 2840725 - DNA, 25 bp, Homo sapien
cagctgatagctggccagagtgccc

SEQ ID NO: 2840726 - DNA, 25 bp, Homo sapien
tcagtgatagcaattgagccccaca

SEQ ID NO: 2840727 - DNA, 25 bp, Homo sapien
gatgtcagaagcaggacgagcgtcc

SEQ ID NO: 2840728 - DNA, 25 bp, Homo sapien
tgtggcacctgctagtcaaatgtag

SEQ ID NO: 2840729 - DNA, 25 bp, Homo sapien
actccttggaaatctgtcgtgaaca

SEQ ID NO: 2840730 - DNA, 25 bp, Homo sapien
gaaagccagtcagagccattgcatt

SEQ ID NO: 2840731 - DNA, 25 bp, Homo sapien
taacagtggtacattcaagaaagcc

SEQ ID NO: 2840732 - DNA, 25 bp, Homo sapien
gtcgtgaacagcgagcacatccctg

SEQ ID NO: 2840733 - DNA, 25 bp, Homo sapien
gacagtgaaggcatcctacgtcgcc

SEQ ID NO: 2840734 - DNA, 25 bp, Homo sapien
tcagaagaagcacgtgaacccggtg

SEQ ID NO: 2840735 - DNA, 25 bp, Homo sapien
gattaaacgggcatctcagaagaag

SEQ ID NO: 2840736 - DNA, 25 bp, Homo sapien
ccctcagcgagttcaaagctatgga

SEQ ID NO: 2840737 - DNA, 25 bp, Homo sapien
tagtaatgctctgaccaagccgaga

SEQ ID NO: 2840738 - DNA, 25 bp, Homo sapien
ggcatcttaggaagcagtccctgga

SEQ ID NO: 2840739 - DNA, 25 bp, Homo sapien
tcagttgagagggtgcagtccagac

SEQ ID NO: 2840740 - DNA, 25 bp, Homo sapien
tactaatgtacgctgctgcaggaca

SEQ ID NO: 2840741 - DNA, 25 bp, Homo sapien
actggcaattgtcttgagacctcac

SEQ ID NO: 2840742 - DNA, 25 bp, Homo sapien
ctcgtcaaggtgactgccttccact

SEQ ID NO: 2840743 - DNA, 25 bp, Homo sapien
ggcaattgtcttgagacctcactgt

SEQ ID NO: 2840744 - DNA, 25 bp, Homo sapien
tccacctcccctcgtcaaggtgact

SEQ ID NO: 2840745 - DNA, 25 bp, Homo sapien
tgtgcgacccgagatgtcagtgcca

SEQ ID NO: 2840746 - DNA, 25 bp, Homo sapien
tcatctgtgcgacccgagatgtcag

SEQ ID NO: 2840747 - DNA, 25 bp, Homo sapien
cccatttcatctgtgcgacccgaga

SEQ ID NO: 2840748 - DNA, 25 bp, Homo sapien
cgacccgagatgtcagtgccattgc

SEQ ID NO: 2840749 - DNA, 25 bp, Homo sapien
tcgtggcccctgacattgaggtgct

SEQ ID NO: 2840750 - DNA, 25 bp, Homo sapien
tccttctcctcgtggcccctgacat

SEQ ID NO: 2840751 - DNA, 25 bp, Homo sapien
tcctcgtggcccctgacattgaggt

SEQ ID NO: 2840752 - DNA, 25 bp, Homo sapien
gcccctgacattgaggtgctccagg

SEQ ID NO: 2840753 - DNA, 25 bp, Homo sapien
caaaaagattcgatgcctgtagtcc

SEQ ID NO: 2840754 - DNA, 25 bp, Homo sapien
tgagccttgacctatttacagtacc

SEQ ID NO: 2840755 - DNA, 25 bp, Homo sapien
gacgcacaggttttcacatgaacac

SEQ ID NO: 2840756 - DNA, 25 bp, Homo sapien
cacacccgacctcaacatatttttt

SEQ ID NO: 2840757 - DNA, 25 bp, Homo sapien
aatcagcaagtgttagccctccaac

SEQ ID NO: 2840758 - DNA, 25 bp, Homo sapien
cagtaggtctgtccatgtgcttaga

SEQ ID NO: 2840759 - DNA, 25 bp, Homo sapien
cattcccagggtacactccatttgg

SEQ ID NO: 2840760 - DNA, 25 bp, Homo sapien
ctgatacctaaagaattcctacggg

SEQ ID NO: 2840761 - DNA, 25 bp, Homo sapien
cctgggcctgcgcatgttatgttac

SEQ ID NO: 2840762 - DNA, 25 bp, Homo sapien
cattgtctagtattggtgtcagggc

SEQ ID NO: 2840763 - DNA, 25 bp, Homo sapien
tgctagtgaaaccacataggtctgg

SEQ ID NO: 2840764 - DNA, 25 bp, Homo sapien
tccatttctttagtacctgtagggc

SEQ ID NO: 2840765 - DNA, 25 bp, Homo sapien
tgacaccccgttttcatccgtgagg

SEQ ID NO: 2840766 - DNA, 25 bp, Homo sapien
ctaatacagtgagaggccgtgtttc

SEQ ID NO: 2840767 - DNA, 25 bp, Homo sapien
tcgtagagcctatagtgacaccccg

SEQ ID NO: 2840768 - DNA, 25 bp, Homo sapien
gccgtgtttctcaaggaattggtcc

SEQ ID NO: 2840769 - DNA, 25 bp, Homo sapien
gctcccttgtgtgaggttcccaggc

SEQ ID NO: 2840770 - DNA, 25 bp, Homo sapien
taaacatcaacagggtccacctcag

SEQ ID NO: 2840771 - DNA, 25 bp, Homo sapien
tgttacttaattgtacacttgcatc

SEQ ID NO: 2840772 - DNA, 25 bp, Homo sapien
tggccacattctgaaccctgcggct

SEQ ID NO: 2840773 - DNA, 25 bp, Homo sapien
gaagcagagacttgcaactcctggg

SEQ ID NO: 2840774 - DNA, 25 bp, Homo sapien
tgggctgagccctgcacgtcagcag

SEQ ID NO: 2840775 - DNA, 25 bp, Homo sapien
gcaattaagcgacttcccaaggtac

SEQ ID NO: 2840776 - DNA, 25 bp, Homo sapien
taatggcactcctgacagatgagga

SEQ ID NO: 2840777 - DNA, 25 bp, Homo sapien
tcagcctcactagcggcatcccagt

SEQ ID NO: 2840778 - DNA, 25 bp, Homo sapien
ggccttcaggtttccatttaatggc

SEQ ID NO: 2840779 - DNA, 25 bp, Homo sapien
cagcactgccaagatgtcctcctgc

SEQ ID NO: 2840780 - DNA, 25 bp, Homo sapien
gtttccatttaatggccaagccagc

SEQ ID NO: 2840781 - DNA, 25 bp, Homo sapien
aggaggtgtacctggcgatactgct

SEQ ID NO: 2840782 - DNA, 25 bp, Homo sapien
gggacatctcctgggtcagctcagc

SEQ ID NO: 2840783 - DNA, 25 bp, Homo sapien
tctcacgggcatcatgctcgggcag

SEQ ID NO: 2840784 - DNA, 25 bp, Homo sapien
tcagcaagctgttgacagagcccag

SEQ ID NO: 2840785 - DNA, 25 bp, Homo sapien
ctgaaccatgacaagcaggcaggtt

SEQ ID NO: 2840786 - DNA, 25 bp, Homo sapien
cagcagcgggaaagccaacacctga

SEQ ID NO: 2840787 - DNA, 25 bp, Homo sapien
gaaagccaacacctgaaccatgaca

SEQ ID NO: 2840788 - DNA, 25 bp, Homo sapien
gaaccatgacaagcaggcaggttac

SEQ ID NO: 2840789 - DNA, 25 bp, Homo sapien
gaagtcgtggggctgattggggctg

SEQ ID NO: 2840790 - DNA, 25 bp, Homo sapien
tgcttcctgcggcagcaggaagtcg

SEQ ID NO: 2840791 - DNA, 25 bp, Homo sapien
tcctgcggcagcaggaagtcgtggg

SEQ ID NO: 2840792 - DNA, 25 bp, Homo sapien
ctgtgcttcctgcggcagcaggaag

SEQ ID NO: 2840793 - DNA, 25 bp, Homo sapien
ctgaggaggggtgcaatcctgcatc

SEQ ID NO: 2840794 - DNA, 25 bp, Homo sapien
ttatcaattggatctgagcaccaca

SEQ ID NO: 2840795 - DNA, 25 bp, Homo sapien
aggccttatcaattggatctgagca

SEQ ID NO: 2840796 - DNA, 25 bp, Homo sapien
tcaattggatctgagcaccacatgg

SEQ ID NO: 2840797 - DNA, 25 bp, Homo sapien
gccttatcaattggatctgagcacc

SEQ ID NO: 2840798 - DNA, 25 bp, Homo sapien
gcacggcgagcacctccgtgccctt

SEQ ID NO: 2840799 - DNA, 25 bp, Homo sapien
ttctccgtgaccaggtcgtagagca

SEQ ID NO: 2840800 - DNA, 25 bp, Homo sapien
ccgagcttcaggaactgccgctggg

SEQ ID NO: 2840801 - DNA, 25 bp, Homo sapien
agcagtgtgaccacgcgcacggcga

SEQ ID NO: 2840802 - DNA, 25 bp, Homo sapien
ccccttcgatggcctccacctggac

SEQ ID NO: 2840803 - DNA, 25 bp, Homo sapien
cttcttctttgcagtgagcggctgc

SEQ ID NO: 2840804 - DNA, 25 bp, Homo sapien
ttcttctttgcagtgagcggctgct

SEQ ID NO: 2840805 - DNA, 25 bp, Homo sapien
ggggaagaagcacaggacagcatga

SEQ ID NO: 2840806 - DNA, 25 bp, Homo sapien
ctggggaagaagcacaggacagcat

SEQ ID NO: 2840807 - DNA, 25 bp, Homo sapien
ggaagaagcacaggacagcatgact

SEQ ID NO: 2840808 - DNA, 25 bp, Homo sapien
agaagcacaggacagcatgactacc

SEQ ID NO: 2840809 - DNA, 25 bp, Homo sapien
aagatagctccccacttctattctg

SEQ ID NO: 2840810 - DNA, 25 bp, Homo sapien
agatagctccccacttctattctga

SEQ ID NO: 2840811 - DNA, 25 bp, Homo sapien
ctgaaatcaggttcataaggcaata

SEQ ID NO: 2840812 - DNA, 25 bp, Homo sapien
tgctgaaatcaggttcataaggcaa

SEQ ID NO: 2840813 - DNA, 25 bp, Homo sapien
tcaggttcataaggcaataaattca

SEQ ID NO: 2840814 - DNA, 25 bp, Homo sapien
aaatcaggttcataaggcaataaat

SEQ ID NO: 2840815 - DNA, 25 bp, Homo sapien
aagtctgtgggtacggcaggaccat

SEQ ID NO: 2840816 - DNA, 25 bp, Homo sapien
gtctgtgggtacggcaggaccatgg

SEQ ID NO: 2840817 - DNA, 25 bp, Homo sapien
agtctgtgggtacggcaggaccatg

SEQ ID NO: 2840818 - DNA, 25 bp, Homo sapien
caagtctgtgggtacggcaggacca

SEQ ID NO: 2840819 - DNA, 25 bp, Homo sapien
catacgatgtacacagcagcctgtc

SEQ ID NO: 2840820 - DNA, 25 bp, Homo sapien
tgatgtccataagtctcacaattgg

SEQ ID NO: 2840821 - DNA, 25 bp, Homo sapien
tttatgaaaagtgcaggccagtggt

SEQ ID NO: 2840822 - DNA, 25 bp, Homo sapien
ttttgaccccacgtccgatttatgc

SEQ ID NO: 2840823 - DNA, 25 bp, Homo sapien
ggcactcggcctcaaatctacgtct

SEQ ID NO: 2840824 - DNA, 25 bp, Homo sapien
gaaacgcagacttcctctgtgtcta

SEQ ID NO: 2840825 - DNA, 25 bp, Homo sapien
gcctggcaaatcttatgaaaaagaa

SEQ ID NO: 2840826 - DNA, 25 bp, Homo sapien
tataccggcctaatctgccagcctg

SEQ ID NO: 2840827 - DNA, 25 bp, Homo sapien
tagaagatttccaactgcccagata

SEQ ID NO: 2840828 - DNA, 25 bp, Homo sapien
cagagagacctaggtgaaagtccga

SEQ ID NO: 2840829 - DNA, 25 bp, Homo sapien
tctacacggagggtaaagagttgac

SEQ ID NO: 2840830 - DNA, 25 bp, Homo sapien
tgggctaaaagccaatgacctggac

SEQ ID NO: 2840831 - DNA, 25 bp, Homo sapien
aatccccattagctctttcctgcag

SEQ ID NO: 2840832 - DNA, 25 bp, Homo sapien
cattctcttgcctactgggatataa

SEQ ID NO: 2840833 - DNA, 25 bp, Homo sapien
gcttgagaacaatcaaatgctaggc

SEQ ID NO: 2840834 - DNA, 25 bp, Homo sapien
tcaaatcgggtgttagaaatagtcc

SEQ ID NO: 2840835 - DNA, 25 bp, Homo sapien
gaatatgcttcagaagcagtgacag

SEQ ID NO: 2840836 - DNA, 25 bp, Homo sapien
ggctcagcgtttccattcaagaggt

SEQ ID NO: 2840837 - DNA, 25 bp, Homo sapien
tgaggcggtagagcacagcttctga

SEQ ID NO: 2840838 - DNA, 25 bp, Homo sapien
gcgtttccattcaagaggtctgctg

SEQ ID NO: 2840839 - DNA, 25 bp, Homo sapien
tcctcactgggctccaaccaacagg

SEQ ID NO: 2840840 - DNA, 25 bp, Homo sapien
ggctccaaccaacaggctcagtcat

SEQ ID NO: 2840841 - DNA, 25 bp, Homo sapien
acggcacactcttctaacatcctca

SEQ ID NO: 2840842 - DNA, 25 bp, Homo sapien
actgggctccaaccaacaggctcag

SEQ ID NO: 2840843 - DNA, 25 bp, Homo sapien
tttgaaggtctggttcaacgcagcc

SEQ ID NO: 2840844 - DNA, 25 bp, Homo sapien
ttgaaggtctggttcaacgcagcca

SEQ ID NO: 2840845 - DNA, 25 bp, Homo sapien
tgaaggtctggttcaacgcagccat

SEQ ID NO: 2840846 - DNA, 25 bp, Homo sapien
cccttattcttcattgcaatcctca

SEQ ID NO: 2840847 - DNA, 25 bp, Homo sapien
ccttattcttcattgcaatcctcag

SEQ ID NO: 2840848 - DNA, 25 bp, Homo sapien
gccaccacgcaggccattacctccc

SEQ ID NO: 2840849 - DNA, 25 bp, Homo sapien
ccacgcaggccattacctcccttat

SEQ ID NO: 2840850 - DNA, 25 bp, Homo sapien
gctttgaagtcacgctgcctgggtt

SEQ ID NO: 2840851 - DNA, 25 bp, Homo sapien
gcatgcagtgactctcagctcggtg

SEQ ID NO: 2840852 - DNA, 25 bp, Homo sapien
tgggcgacactaggcaagtacttaa

SEQ ID NO: 2840853 - DNA, 25 bp, Homo sapien
tctgacacagtctagctgggcgaca

SEQ ID NO: 2840854 - DNA, 25 bp, Homo sapien
gaagcccttagacatgaccactcct

SEQ ID NO: 2840855 - DNA, 25 bp, Homo sapien
acaagtcagtgggatgccggtgctc

SEQ ID NO: 2840856 - DNA, 25 bp, Homo sapien
gagggtggcatcaagcactattcca

SEQ ID NO: 2840857 - DNA, 25 bp, Homo sapien
gaatcacacctaccagttgggcgtg

SEQ ID NO: 2840858 - DNA, 25 bp, Homo sapien
caaatcactgcagcagaggtactga

SEQ ID NO: 2840859 - DNA, 25 bp, Homo sapien
aaatcactgcagcagaggtactgag

SEQ ID NO: 2840860 - DNA, 25 bp, Homo sapien
atcactgcagcagaggtactgagtg

SEQ ID NO: 2840861 - DNA, 25 bp, Homo sapien
aatcactgcagcagaggtactgagt

SEQ ID NO: 2840862 - DNA, 25 bp, Homo sapien
tctttatgagatccacatttttatc

SEQ ID NO: 2840863 - DNA, 25 bp, Homo sapien
ggtgctactgcttctatcaaactgt

SEQ ID NO: 2840864 - DNA, 25 bp, Homo sapien
tactgatctagcaaacaatggtgct

SEQ ID NO: 2840865 - DNA, 25 bp, Homo sapien
caccctactgatctagcaaacaatg

SEQ ID NO: 2840866 - DNA, 25 bp, Homo sapien
atctgatgactagtgaagctgagca

SEQ ID NO: 2840867 - DNA, 25 bp, Homo sapien
ttatctgatgactagtgaagctgag

SEQ ID NO: 2840868 - DNA, 25 bp, Homo sapien
tgatgactagtgaagctgagcatct

SEQ ID NO: 2840869 - DNA, 25 bp, Homo sapien
ctgatgactagtgaagctgagcatc

SEQ ID NO: 2840870 - DNA, 25 bp, Homo sapien
tgggaatacaggtgtgagccaccat

SEQ ID NO: 2840871 - DNA, 25 bp, Homo sapien
tgagccaccatgcccggccgaggat

SEQ ID NO: 2840872 - DNA, 25 bp, Homo sapien
tgcccaccttggcctcccaaagtgc

SEQ ID NO: 2840873 - DNA, 25 bp, Homo sapien
cctggcctcaggtgaaatgcccacc

SEQ ID NO: 2840874 - DNA, 25 bp, Homo sapien
gtgatgtaaataggcatctttgtct

SEQ ID NO: 2840875 - DNA, 25 bp, Homo sapien
tgatgtaaataggcatctttgtctt

SEQ ID NO: 2840876 - DNA, 25 bp, Homo sapien
tttccttgaatccagatgtctaacg

SEQ ID NO: 2840877 - DNA, 25 bp, Homo sapien
gaatccagatgtctaacgggaggtg

SEQ ID NO: 2840878 - DNA, 25 bp, Homo sapien
aatgttgtaggcaatggaaccacag

SEQ ID NO: 2840879 - DNA, 25 bp, Homo sapien
ttgaatccagatgtctaacgggagg

SEQ ID NO: 2840880 - DNA, 25 bp, Homo sapien
catcttggctcctccaatttttatt

SEQ ID NO: 2840881 - DNA, 25 bp, Homo sapien
aaattattaatagagacaggttctc

SEQ ID NO: 2840882 - DNA, 25 bp, Homo sapien
tcggctcccgcaccgtgcgcgcacc

SEQ ID NO: 2840883 - DNA, 25 bp, Homo sapien
agccactgcaccccatctagctata

SEQ ID NO: 2840884 - DNA, 25 bp, Homo sapien
aacatatcgtagagctccagcatgg

SEQ ID NO: 2840885 - DNA, 25 bp, Homo sapien
catatcgtagagctccagcatgggg

SEQ ID NO: 2840886 - DNA, 25 bp, Homo sapien
acatatcgtagagctccagcatggg

SEQ ID NO: 2840887 - DNA, 25 bp, Homo sapien
tgacattattaaattcccctgcagt

SEQ ID NO: 2840888 - DNA, 25 bp, Homo sapien
cagtggctctacagtttcttgttgg

SEQ ID NO: 2840889 - DNA, 25 bp, Homo sapien
tttcttacagggctaccacataaag

SEQ ID NO: 2840890 - DNA, 25 bp, Homo sapien
caggtatttgaactaagagagtttc

SEQ ID NO: 2840891 - DNA, 25 bp, Homo sapien
atcccaatctccaaccttctatttt

SEQ ID NO: 2840892 - DNA, 25 bp, Homo sapien
ggggctatacactcatttccatggc

SEQ ID NO: 2840893 - DNA, 25 bp, Homo sapien
cctcatcccaatctccaaccttcta

SEQ ID NO: 2840894 - DNA, 25 bp, Homo sapien
ttctgggccttcagccagtggggct

SEQ ID NO: 2840895 - DNA, 25 bp, Homo sapien
tgcagaaaacattgacatttccatg

SEQ ID NO: 2840896 - DNA, 25 bp, Homo sapien
cattgacatttccatggtgtttggg

SEQ ID NO: 2840897 - DNA, 25 bp, Homo sapien
tccatggtgtttgggagcctgctgt

SEQ ID NO: 2840898 - DNA, 25 bp, Homo sapien
gacatttccatggtgtttgggagcc

SEQ ID NO: 2840899 - DNA, 25 bp, Homo sapien
cagccctccagtgagccatcaaaaa

SEQ ID NO: 2840900 - DNA, 25 bp, Homo sapien
ctggcgccataccatgctgtcacgg

SEQ ID NO: 2840901 - DNA, 25 bp, Homo sapien
tgctgtcacggtaacagccctccag

SEQ ID NO: 2840902 - DNA, 25 bp, Homo sapien
gtaacagccctccagtgagccatca

SEQ ID NO: 2840903 - DNA, 25 bp, Homo sapien
agcacaaacgcagcatactccttca

SEQ ID NO: 2840904 - DNA, 25 bp, Homo sapien
aacgcagcatactccttcacgaggg

SEQ ID NO: 2840905 - DNA, 25 bp, Homo sapien
aaagcaggtcctgcgcattgtccat

SEQ ID NO: 2840906 - DNA, 25 bp, Homo sapien
gaccaccaaaggaaagcaggtcctg

SEQ ID NO: 2840907 - DNA, 25 bp, Homo sapien
acttatggacgaagaaatacagtac

SEQ ID NO: 2840908 - DNA, 25 bp, Homo sapien
ttaaaagtctgacttatggacgaag

SEQ ID NO: 2840909 - DNA, 25 bp, Homo sapien
tctgacttatggacgaagaaataca

SEQ ID NO: 2840910 - DNA, 25 bp, Homo sapien
aaagtctgacttatggacgaagaaa

SEQ ID NO: 2840911 - DNA, 25 bp, Homo sapien
tattgaacttgttgatcagccgtac

SEQ ID NO: 2840912 - DNA, 25 bp, Homo sapien
ggaagagccgctttacctcagcctg

SEQ ID NO: 2840913 - DNA, 25 bp, Homo sapien
gatctgcatgtcagtctcaatgaca

SEQ ID NO: 2840914 - DNA, 25 bp, Homo sapien
tattcaagatcaaagagcgcagcaa

SEQ ID NO: 2840915 - DNA, 25 bp, Homo sapien
tgccatgtcataagaactctttacc

SEQ ID NO: 2840916 - DNA, 25 bp, Homo sapien
tacctggtcctagttcccaaagatg

SEQ ID NO: 2840917 - DNA, 25 bp, Homo sapien
gtgccatgtcataagaactctttac

SEQ ID NO: 2840918 - DNA, 25 bp, Homo sapien
ggtcctagttcccaaagatgttcta

SEQ ID NO: 2840919 - DNA, 25 bp, Homo sapien
gggtactgaatatggtcaaatgctc

SEQ ID NO: 2840920 - DNA, 25 bp, Homo sapien
tactgcattggctatgactgtgttg

SEQ ID NO: 2840921 - DNA, 25 bp, Homo sapien
gctctttgggagttatacatggaca

SEQ ID NO: 2840922 - DNA, 25 bp, Homo sapien
tatcttgtgacattgctgaactcac

SEQ ID NO: 2840923 - DNA, 25 bp, Homo sapien
acccctccagtcaccggctgccttg

SEQ ID NO: 2840924 - DNA, 25 bp, Homo sapien
gaaggcactgcctcaatcagggcct

SEQ ID NO: 2840925 - DNA, 25 bp, Homo sapien
atttctttctgtcccttggcagttc

SEQ ID NO: 2840926 - DNA, 25 bp, Homo sapien
cactgcctcaatcagggcctgtctg

SEQ ID NO: 2840927 - DNA, 25 bp, Homo sapien
ttcggagacagacccagggggccaa

SEQ ID NO: 2840928 - DNA, 25 bp, Homo sapien
tttcggagacagacccagggggcca

SEQ ID NO: 2840929 - DNA, 25 bp, Homo sapien
tcggagacagacccagggggccaat

SEQ ID NO: 2840930 - DNA, 25 bp, Homo sapien
cttgggggccagtgccagataccag

SEQ ID NO: 2840931 - DNA, 25 bp, Homo sapien
cagtgccagataccagcaatgatac

SEQ ID NO: 2840932 - DNA, 25 bp, Homo sapien
gggggccagtgccagataccagcaa

SEQ ID NO: 2840933 - DNA, 25 bp, Homo sapien
ggccagtgccagataccagcaatga

SEQ ID NO: 2840934 - DNA, 25 bp, Homo sapien
tgctactgagcctatctggtgactt

SEQ ID NO: 2840935 - DNA, 25 bp, Homo sapien
tgctgagactttgcttcaagggtgc

SEQ ID NO: 2840936 - DNA, 25 bp, Homo sapien
aatgagtcgacgtggttcctggtga

SEQ ID NO: 2840937 - DNA, 25 bp, Homo sapien
ggacattaatccctcttgagcctaa

SEQ ID NO: 2840938 - DNA, 25 bp, Homo sapien
tgtactaacaagacaccacataggc

SEQ ID NO: 2840939 - DNA, 25 bp, Homo sapien
caggacttagcacctcagtgatggt

SEQ ID NO: 2840940 - DNA, 25 bp, Homo sapien
tttatttgccaatcccagtgccagc

SEQ ID NO: 2840941 - DNA, 25 bp, Homo sapien
gagtcagtccagataggctccaaat

SEQ ID NO: 2840942 - DNA, 25 bp, Homo sapien
tctgtggtaggacacaattgcgagc

SEQ ID NO: 2840943 - DNA, 25 bp, Homo sapien
tacacaagctgtcaagaggctaatg

SEQ ID NO: 2840944 - DNA, 25 bp, Homo sapien
taaagacgtggagactgagcctgca

SEQ ID NO: 2840945 - DNA, 25 bp, Homo sapien
tcagtcccacatggaaccgacagtg

SEQ ID NO: 2840946 - DNA, 25 bp, Homo sapien
tgagatcctgagatgtgtaggtgtt

SEQ ID NO: 2840947 - DNA, 25 bp, Homo sapien
tgtaggtgttggtgttgatatccag

SEQ ID NO: 2840948 - DNA, 25 bp, Homo sapien
gtaggtgttggtgttgatatccagc

SEQ ID NO: 2840949 - DNA, 25 bp, Homo sapien
atgtgtaggtgttggtgttgatatc

SEQ ID NO: 2840950 - DNA, 25 bp, Homo sapien
cctgtcgctggtgtgtgtcttcaaa

SEQ ID NO: 2840951 - DNA, 25 bp, Homo sapien
accctgtcgctggtgtgtgtcttca

SEQ ID NO: 2840952 - DNA, 25 bp, Homo sapien
cacaccctgtcgctggtgtgtgtct

SEQ ID NO: 2840953 - DNA, 25 bp, Homo sapien
agacacacaccctgtcgctggtgtg

SEQ ID NO: 2840954 - DNA, 25 bp, Homo sapien
gtgcacatggaccagctgagtgacc

SEQ ID NO: 2840955 - DNA, 25 bp, Homo sapien
ggagtaattgtctgacctgggccac

SEQ ID NO: 2840956 - DNA, 25 bp, Homo sapien
tgccacctgaaaaaagtgcacatgg

SEQ ID NO: 2840957 - DNA, 25 bp, Homo sapien
caagtataggcctacctggaggaat

SEQ ID NO: 2840958 - DNA, 25 bp, Homo sapien
tctttccccagtctgaagattcagc

SEQ ID NO: 2840959 - DNA, 25 bp, Homo sapien
tattggagttttgcctctctttccc

SEQ ID NO: 2840960 - DNA, 25 bp, Homo sapien
tacgtgggatcctgcagggacagcc

SEQ ID NO: 2840961 - DNA, 25 bp, Homo sapien
caaattatttcggaacttgtcctca

SEQ ID NO: 2840962 - DNA, 25 bp, Homo sapien
cagtcactctatccccaatcaagat

SEQ ID NO: 2840963 - DNA, 25 bp, Homo sapien
cccaatcaagatgccagggatatcg

SEQ ID NO: 2840964 - DNA, 25 bp, Homo sapien
tctatccccaatcaagatgccaggg

SEQ ID NO: 2840965 - DNA, 25 bp, Homo sapien
agatgccagggatatcgcacaccat

SEQ ID NO: 2840966 - DNA, 25 bp, Homo sapien
caggatttgatgaactattggtcat

SEQ ID NO: 2840967 - DNA, 25 bp, Homo sapien
gataacaggatttgatgaactattg

SEQ ID NO: 2840968 - DNA, 25 bp, Homo sapien
ctctgataacaggatttgatgaact

SEQ ID NO: 2840969 - DNA, 25 bp, Homo sapien
aacaggatttgatgaactattggtc

SEQ ID NO: 2840970 - DNA, 25 bp, Homo sapien
ctactcaatcactagttcagattct

SEQ ID NO: 2840971 - DNA, 25 bp, Homo sapien
ttctctagttagcacatactactca

SEQ ID NO: 2840972 - DNA, 25 bp, Homo sapien
acattctctagttagcacatactac

SEQ ID NO: 2840973 - DNA, 25 bp, Homo sapien
tcagattcttacccttcccttgaac

SEQ ID NO: 2840974 - DNA, 25 bp, Homo sapien
cagaaccgctacatctttgggctca

SEQ ID NO: 2840975 - DNA, 25 bp, Homo sapien
tgttcaggcctcaaatcagtatgac

SEQ ID NO: 2840976 - DNA, 25 bp, Homo sapien
tcttccttgagacaggcgaaatgga

SEQ ID NO: 2840977 - DNA, 25 bp, Homo sapien
tttgggctcaagacaacgggaacat

SEQ ID NO: 2840978 - DNA, 25 bp, Homo sapien
ggctgaaacgcgaggacttgcttga

SEQ ID NO: 2840979 - DNA, 25 bp, Homo sapien
cataccctggccattgcgctgagga

SEQ ID NO: 2840980 - DNA, 25 bp, Homo sapien
ggtgttattgaacaggtgccgtcca

SEQ ID NO: 2840981 - DNA, 25 bp, Homo sapien
taacccagtccgtgtgtgtgaaaag

SEQ ID NO: 2840982 - DNA, 25 bp, Homo sapien
cttctctggctttactccacatcaa

SEQ ID NO: 2840983 - DNA, 25 bp, Homo sapien
tctggctttactccacatcaaaaag

SEQ ID NO: 2840984 - DNA, 25 bp, Homo sapien
ggctttactccacatcaaaaagtcc

SEQ ID NO: 2840985 - DNA, 25 bp, Homo sapien
tgtgagtagatgaattttccttctc

SEQ ID NO: 2840986 - DNA, 25 bp, Homo sapien
ggccaggttgttctcaaactcccaa

SEQ ID NO: 2840987 - DNA, 25 bp, Homo sapien
tgttggccaggttgttctcaaactc

SEQ ID NO: 2840988 - DNA, 25 bp, Homo sapien
gccaggttgttctcaaactcccaac

SEQ ID NO: 2840989 - DNA, 25 bp, Homo sapien
ttggccaggttgttctcaaactccc

SEQ ID NO: 2840990 - DNA, 25 bp, Homo sapien
tgtgtgggagtcagcataagcatga

SEQ ID NO: 2840991 - DNA, 25 bp, Homo sapien
ggtgagggttcctacaacaagtgct

SEQ ID NO: 2840992 - DNA, 25 bp, Homo sapien
tgccaagccctatttgctgcaggcc

SEQ ID NO: 2840993 - DNA, 25 bp, Homo sapien
ggaggcacttatggaccatgggaaa

SEQ ID NO: 2840994 - DNA, 25 bp, Homo sapien
atggctgccccggtagcaatcgtgc

SEQ ID NO: 2840995 - DNA, 25 bp, Homo sapien
gatgatctctgcaagcgaagccgtg

SEQ ID NO: 2840996 - DNA, 25 bp, Homo sapien
agaatagtggctttccctagggaag

SEQ ID NO: 2840997 - DNA, 25 bp, Homo sapien
cagtccacccttgagcacaggctta

SEQ ID NO: 2840998 - DNA, 25 bp, Homo sapien
tcagcgaaatacgtggctggaagaa

SEQ ID NO: 2840999 - DNA, 25 bp, Homo sapien
cctctctggcaacgctaatgtgttt

SEQ ID NO: 2841000 - DNA, 25 bp, Homo sapien
tggcaacgctaatgtgtttttcctc

SEQ ID NO: 2841001 - DNA, 25 bp, Homo sapien
gttctgactgatcagcgaaatacgt

SEQ ID NO: 2841002 - DNA, 25 bp, Homo sapien
agcctgccgagcgcctgcgattgca

SEQ ID NO: 2841003 - DNA, 25 bp, Homo sapien
cctgccgagcgcctgcgattgcagg

SEQ ID NO: 2841004 - DNA, 25 bp, Homo sapien
cgcctgcgattgcaggtgcgcgccg

SEQ ID NO: 2841005 - DNA, 25 bp, Homo sapien
tgccgagcgcctgcgattgcaggtg

SEQ ID NO: 2841006 - DNA, 25 bp, Homo sapien
atctactggcttgtcagttctcctc

SEQ ID NO: 2841007 - DNA, 25 bp, Homo sapien
aaatctactggcttgtcagttctcc

SEQ ID NO: 2841008 - DNA, 25 bp, Homo sapien
tttaaatctactggcttgtcagttc

SEQ ID NO: 2841009 - DNA, 25 bp, Homo sapien
cctttaaatctactggcttgtcagt

SEQ ID NO: 2841010 - DNA, 25 bp, Homo sapien
aaaatacttccaccaagacatccaa

SEQ ID NO: 2841011 - DNA, 25 bp, Homo sapien
tacttccaccaagacatccaaaaca

SEQ ID NO: 2841012 - DNA, 25 bp, Homo sapien
caccaagacatccaaaacactttgg

SEQ ID NO: 2841013 - DNA, 25 bp, Homo sapien
tttgtaagattatgagctggataga

SEQ ID NO: 2841014 - DNA, 25 bp, Homo sapien
gaaggcccacgaagtcatgagtttg

SEQ ID NO: 2841015 - DNA, 25 bp, Homo sapien
gcagggaaggcccacgaagtcatga

SEQ ID NO: 2841016 - DNA, 25 bp, Homo sapien
agggaaggcccacgaagtcatgagt

SEQ ID NO: 2841017 - DNA, 25 bp, Homo sapien
gactgcagggaaggcccacgaagtc

SEQ ID NO: 2841018 - DNA, 25 bp, Homo sapien
aaggaccagtgggactaagttctca

SEQ ID NO: 2841019 - DNA, 25 bp, Homo sapien
gatatagtccgtatcttccacgccc

SEQ ID NO: 2841020 - DNA, 25 bp, Homo sapien
gatgaagggagctactgactcaacc

SEQ ID NO: 2841021 - DNA, 25 bp, Homo sapien
taagttctcaagtgaagccaggttg

SEQ ID NO: 2841022 - DNA, 25 bp, Homo sapien
acctccaggacttcggcatccagct

SEQ ID NO: 2841023 - DNA, 25 bp, Homo sapien
cgtcgggtggaacacctccaggact

SEQ ID NO: 2841024 - DNA, 25 bp, Homo sapien
gctgaagggcctgccactcatgcgt

SEQ ID NO: 2841025 - DNA, 25 bp, Homo sapien
tctgggttggtcagggcaaactcct

SEQ ID NO: 2841026 - DNA, 25 bp, Homo sapien
gctgtagccagtcccattctcaggg

SEQ ID NO: 2841027 - DNA, 25 bp, Homo sapien
ctgtagccagtcccattctcagggg

SEQ ID NO: 2841028 - DNA, 25 bp, Homo sapien
aggagccatcctagatgaaggcagg

SEQ ID NO: 2841029 - DNA, 25 bp, Homo sapien
gagccatcctagatgaaggcaggct

SEQ ID NO: 2841030 - DNA, 25 bp, Homo sapien
ggagccatcctagatgaaggcaggc

SEQ ID NO: 2841031 - DNA, 25 bp, Homo sapien
gaggagccatcctagatgaaggcag

SEQ ID NO: 2841032 - DNA, 25 bp, Homo sapien
cctgcatagaggtataacgagtctt

SEQ ID NO: 2841033 - DNA, 25 bp, Homo sapien
tgtcagacatttcctgcatagaggt

SEQ ID NO: 2841034 - DNA, 25 bp, Homo sapien
ccagccatccaacaagagatatgcc

SEQ ID NO: 2841035 - DNA, 25 bp, Homo sapien
ctaccacttctagataattctgaag

SEQ ID NO: 2841036 - DNA, 25 bp, Homo sapien
caatctgtattgccagcttactgca

SEQ ID NO: 2841037 - DNA, 25 bp, Homo sapien
ctgtattgccagcttactgcagccc

SEQ ID NO: 2841038 - DNA, 25 bp, Homo sapien
tccacacaattcagacaagactggg

SEQ ID NO: 2841039 - DNA, 25 bp, Homo sapien
tctgtattgccagcttactgcagcc

SEQ ID NO: 2841040 - DNA, 25 bp, Homo sapien
gctgtctctcgaggggtctgtgaaa

SEQ ID NO: 2841041 - DNA, 25 bp, Homo sapien
atgctctttccatagccgtgctgtc

SEQ ID NO: 2841042 - DNA, 25 bp, Homo sapien
ccatagccgtgctgtctctcgaggg

SEQ ID NO: 2841043 - DNA, 25 bp, Homo sapien
tttccatagccgtgctgtctctcga

SEQ ID NO: 2841044 - DNA, 25 bp, Homo sapien
tggctttcattaggtaggtacaagg

SEQ ID NO: 2841045 - DNA, 25 bp, Homo sapien
aacacagattcacagggagaacttg

SEQ ID NO: 2841046 - DNA, 25 bp, Homo sapien
ggaattatcttcccacaagcatttc

SEQ ID NO: 2841047 - DNA, 25 bp, Homo sapien
caatgtggagtataagctctagcca

SEQ ID NO: 2841048 - DNA, 25 bp, Homo sapien
aacccctcggatttagcagtacctg

SEQ ID NO: 2841049 - DNA, 25 bp, Homo sapien
tgtaactgaaaggtcaactggttcc

SEQ ID NO: 2841050 - DNA, 25 bp, Homo sapien
caaatgggcccctaaagatgttgaa

SEQ ID NO: 2841051 - DNA, 25 bp, Homo sapien
tctagaaatgacagcaagcttaccc

SEQ ID NO: 2841052 - DNA, 25 bp, Homo sapien
cacagggaagcggatgattcaccca

SEQ ID NO: 2841053 - DNA, 25 bp, Homo sapien
taactctccgcaaagaataggaagc

SEQ ID NO: 2841054 - DNA, 25 bp, Homo sapien
catcctgaaaggagggttcaaacca

SEQ ID NO: 2841055 - DNA, 25 bp, Homo sapien
gacaggcctgtgtaactaagcatcc

SEQ ID NO: 2841056 - DNA, 25 bp, Homo sapien
tctcacaggatctggccatttaaaa

SEQ ID NO: 2841057 - DNA, 25 bp, Homo sapien
gcctagtgggaggtgactaagtcat

SEQ ID NO: 2841058 - DNA, 25 bp, Homo sapien
ccccttgctgttttcacaaaagtga

SEQ ID NO: 2841059 - DNA, 25 bp, Homo sapien
tgctccagacatgtaagacgtgcca

SEQ ID NO: 2841060 - DNA, 25 bp, Homo sapien
cccggactttcctgcttttggcact

SEQ ID NO: 2841061 - DNA, 25 bp, Homo sapien
taaaagtcccacatacggatatccc

SEQ ID NO: 2841062 - DNA, 25 bp, Homo sapien
aacccaaagggttgagtcttagatg

SEQ ID NO: 2841063 - DNA, 25 bp, Homo sapien
taatggtcatgggtagggtaactaa

SEQ ID NO: 2841064 - DNA, 25 bp, Homo sapien
ctttcagtttcacttaattagcctc

SEQ ID NO: 2841065 - DNA, 25 bp, Homo sapien
acacaccagggctcacagttggcct

SEQ ID NO: 2841066 - DNA, 25 bp, Homo sapien
cctcagtagagaagtaatagctggc

SEQ ID NO: 2841067 - DNA, 25 bp, Homo sapien
cagtttcacttaattagcctcttct

SEQ ID NO: 2841068 - DNA, 25 bp, Homo sapien
aacgcggcggcgaccgtctgagccg

SEQ ID NO: 2841069 - DNA, 25 bp, Homo sapien
ttcggcctccggcagccgagtggca

SEQ ID NO: 2841070 - DNA, 25 bp, Homo sapien
cggcggcgaccgtctgagccggtga

SEQ ID NO: 2841071 - DNA, 25 bp, Homo sapien
gtggcagacacaactcccacaattc

SEQ ID NO: 2841072 - DNA, 25 bp, Homo sapien
aatcccataaaccaaggcatataag

SEQ ID NO: 2841073 - DNA, 25 bp, Homo sapien
taaaccaaggcatataaggcatcct

SEQ ID NO: 2841074 - DNA, 25 bp, Homo sapien
ataaggcatcctcataaccaccagg

SEQ ID NO: 2841075 - DNA, 25 bp, Homo sapien
ggcatataaggcatcctcataacca

SEQ ID NO: 2841076 - DNA, 25 bp, Homo sapien
tctttgaccggcaaggcacatgatc

SEQ ID NO: 2841077 - DNA, 25 bp, Homo sapien
tgaccggcaaggcacatgatctaga

SEQ ID NO: 2841078 - DNA, 25 bp, Homo sapien
gcaaggcacatgatctagaaagcat

SEQ ID NO: 2841079 - DNA, 25 bp, Homo sapien
ggccagatctttgaccggcaaggca

SEQ ID NO: 2841080 - DNA, 25 bp, Homo sapien
tgagagtgaactgagtgcagatgct

SEQ ID NO: 2841081 - DNA, 25 bp, Homo sapien
gggagccatcgccgccctgcctctc

SEQ ID NO: 2841082 - DNA, 25 bp, Homo sapien
gatgctgaagctgctatatcgctct

SEQ ID NO: 2841083 - DNA, 25 bp, Homo sapien
cccgcggggtgccagtgagagtgaa

SEQ ID NO: 2841084 - DNA, 25 bp, Homo sapien
ttccaaggccaagaggaagttcatt

SEQ ID NO: 2841085 - DNA, 25 bp, Homo sapien
agttcattttcacgccaaagtcttc

SEQ ID NO: 2841086 - DNA, 25 bp, Homo sapien
cattttcacgccaaagtcttctgcc

SEQ ID NO: 2841087 - DNA, 25 bp, Homo sapien
gctgaattgtaactggtgatttcca

SEQ ID NO: 2841088 - DNA, 25 bp, Homo sapien
ctgtaaaatgggcggagtattttgc

SEQ ID NO: 2841089 - DNA, 25 bp, Homo sapien
taaaatgggcggagtattttgcagg

SEQ ID NO: 2841090 - DNA, 25 bp, Homo sapien
gttttttgaatcagtgctggtgagt

SEQ ID NO: 2841091 - DNA, 25 bp, Homo sapien
aatgggcggagtattttgcagggtt

SEQ ID NO: 2841092 - DNA, 25 bp, Homo sapien
accaaagatttcttgagagccttca

SEQ ID NO: 2841093 - DNA, 25 bp, Homo sapien
tttctcatctggctcataccaaaat

SEQ ID NO: 2841094 - DNA, 25 bp, Homo sapien
aacaccaaagatttcttgagagcct

SEQ ID NO: 2841095 - DNA, 25 bp, Homo sapien
ggctcataccaaaatcttagtaaca

SEQ ID NO: 2841096 - DNA, 25 bp, Homo sapien
tacaagccagtgtggtaaccagcct

SEQ ID NO: 2841097 - DNA, 25 bp, Homo sapien
tgaatgaaataatgaggccaggcct

SEQ ID NO: 2841098 - DNA, 25 bp, Homo sapien
ggactgtcctcgttcaggctccaac

SEQ ID NO: 2841099 - DNA, 25 bp, Homo sapien
tcccatatggtaccagggtttgtct

SEQ ID NO: 2841100 - DNA, 25 bp, Homo sapien
cagtttaatgaatttccggcaaatg

SEQ ID NO: 2841101 - DNA, 25 bp, Homo sapien
tattggagggccaatttggacattg

SEQ ID NO: 2841102 - DNA, 25 bp, Homo sapien
atgaatttccggcaaatggtttcag

SEQ ID NO: 2841103 - DNA, 25 bp, Homo sapien
taagcgacaagtgaaatctcctctg

SEQ ID NO: 2841104 - DNA, 25 bp, Homo sapien
gacctatagcccaaaaagttgacca

SEQ ID NO: 2841105 - DNA, 25 bp, Homo sapien
caaaggtctgcatagctccctgtcc

SEQ ID NO: 2841106 - DNA, 25 bp, Homo sapien
caaactcagagctaatggacttccc

SEQ ID NO: 2841107 - DNA, 25 bp, Homo sapien
gaccacttgttcaacaggacatgaa

SEQ ID NO: 2841108 - DNA, 25 bp, Homo sapien
aagccacgcccagtagccgccccgg

SEQ ID NO: 2841109 - DNA, 25 bp, Homo sapien
cgaagccacgcccagtagccgcccc

SEQ ID NO: 2841110 - DNA, 25 bp, Homo sapien
caccgaagccacgcccagtagccgc

SEQ ID NO: 2841111 - DNA, 25 bp, Homo sapien
accgaagccacgcccagtagccgcc

SEQ ID NO: 2841112 - DNA, 25 bp, Homo sapien
tgctagatcccaatcgcagtgcttg

SEQ ID NO: 2841113 - DNA, 25 bp, Homo sapien
tgtgcagttttcaggtaaatatccc

SEQ ID NO: 2841114 - DNA, 25 bp, Homo sapien
ggacctccctgaatgttgcataaaa

SEQ ID NO: 2841115 - DNA, 25 bp, Homo sapien
cctgtgggctagttggtatctatca

SEQ ID NO: 2841116 - DNA, 25 bp, Homo sapien
tcaggaccccagatgtctgacagcc

SEQ ID NO: 2841117 - DNA, 25 bp, Homo sapien
acatctacctccatcaggaccccag

SEQ ID NO: 2841118 - DNA, 25 bp, Homo sapien
tacctccatcaggaccccagatgtc

SEQ ID NO: 2841119 - DNA, 25 bp, Homo sapien
ccatcaggaccccagatgtctgaca

SEQ ID NO: 2841120 - DNA, 25 bp, Homo sapien
tttccaaagctagctacatggtggg

SEQ ID NO: 2841121 - DNA, 25 bp, Homo sapien
ttgcagagtagaaagcagatcagct

SEQ ID NO: 2841122 - DNA, 25 bp, Homo sapien
gaccagaggctgttgtttcatctaa

SEQ ID NO: 2841123 - DNA, 25 bp, Homo sapien
gatcagttggaatcagacttgcaga

SEQ ID NO: 2841124 - DNA, 25 bp, Homo sapien
tgacaaacagccttttcgggaatgg

SEQ ID NO: 2841125 - DNA, 25 bp, Homo sapien
gactcgaactcgtaagccacgtctg

SEQ ID NO: 2841126 - DNA, 25 bp, Homo sapien
ttaaagaacaacgaccgcaggcgag

SEQ ID NO: 2841127 - DNA, 25 bp, Homo sapien
tttcccgcctcagctggatgacgga

SEQ ID NO: 2841128 - DNA, 25 bp, Homo sapien
agggtgcggcgggagattttgggtg

SEQ ID NO: 2841129 - DNA, 25 bp, Homo sapien
caaccagccttctagggcggcggag

SEQ ID NO: 2841130 - DNA, 25 bp, Homo sapien
tgagcggtccgggagggaaacacgc

SEQ ID NO: 2841131 - DNA, 25 bp, Homo sapien
cagtggcggcgcaaccagccttcta

SEQ ID NO: 2841132 - DNA, 25 bp, Homo sapien
tcgtactgcgtcgtggaacaagccg

SEQ ID NO: 2841133 - DNA, 25 bp, Homo sapien
gcgcggcgttagctggacatcagaa

SEQ ID NO: 2841134 - DNA, 25 bp, Homo sapien
tagcgccagtgccaaataacccgtt

SEQ ID NO: 2841135 - DNA, 25 bp, Homo sapien
ccaaaatggaggatttcgcagactc

SEQ ID NO: 2841136 - DNA, 25 bp, Homo sapien
gagtaccgtggtgtagtcgccgcat

SEQ ID NO: 2841137 - DNA, 25 bp, Homo sapien
tctttgcatttcgagctctgtgcca

SEQ ID NO: 2841138 - DNA, 25 bp, Homo sapien
tcctccagagaggatcgtgtggtgt

SEQ ID NO: 2841139 - DNA, 25 bp, Homo sapien
tttatcaaaatagtattagtccagg

SEQ ID NO: 2841140 - DNA, 25 bp, Homo sapien
ggtgttgaactctcggagctcttag

SEQ ID NO: 2841141 - DNA, 25 bp, Homo sapien
gagcatcacgtagttcaaatcccta

SEQ ID NO: 2841142 - DNA, 25 bp, Homo sapien
tatgatcagtggctcacggctcaca

SEQ ID NO: 2841143 - DNA, 25 bp, Homo sapien
taaagcccagataggtcgtgaccag

SEQ ID NO: 2841144 - DNA, 25 bp, Homo sapien
tccagctgttggagacgctgaagca

SEQ ID NO: 2841145 - DNA, 25 bp, Homo sapien
tttgagcactcaacttaagcagtag

SEQ ID NO: 2841146 - DNA, 25 bp, Homo sapien
gaggattattaggatattaaccgtc

SEQ ID NO: 2841147 - DNA, 25 bp, Homo sapien
taacacacgggaacctataccatat

SEQ ID NO: 2841148 - DNA, 25 bp, Homo sapien
ttttacttggttctttctgatagtg

SEQ ID NO: 2841149 - DNA, 25 bp, Homo sapien
tgataataggtctcattttccaaag

SEQ ID NO: 2841150 - DNA, 25 bp, Homo sapien
ggttctttctgatagtgataatagg

SEQ ID NO: 2841151 - DNA, 25 bp, Homo sapien
tctgatagtgataataggtctcatt

SEQ ID NO: 2841152 - DNA, 25 bp, Homo sapien
gatgaaccagggtactgcacgcctt

SEQ ID NO: 2841153 - DNA, 25 bp, Homo sapien
tcaacaccgtggagatgcagaccag

SEQ ID NO: 2841154 - DNA, 25 bp, Homo sapien
tgtctgcggcaggaataggccttct

SEQ ID NO: 2841155 - DNA, 25 bp, Homo sapien
tcatctctcagtagggactcacagg

SEQ ID NO: 2841156 - DNA, 25 bp, Homo sapien
tcgtggtcctagtctcaacccagtg

SEQ ID NO: 2841157 - DNA, 25 bp, Homo sapien
caacccagtgcttgattatgaccat

SEQ ID NO: 2841158 - DNA, 25 bp, Homo sapien
gatgacagattaagagatggagaaa

SEQ ID NO: 2841159 - DNA, 25 bp, Homo sapien
tggaagtcgttctcaagaatctggt

SEQ ID NO: 2841160 - DNA, 25 bp, Homo sapien
aatggaaccatgagaggacttcgag

SEQ ID NO: 2841161 - DNA, 25 bp, Homo sapien
ttaaaaaatcttcgctactggagtc

SEQ ID NO: 2841162 - DNA, 25 bp, Homo sapien
tttaggtcccgtgtgaattcataga

SEQ ID NO: 2841163 - DNA, 25 bp, Homo sapien
tgggacatcatgaacacaatggaac

SEQ ID NO: 2841164 - DNA, 25 bp, Homo sapien
cctcagtgtagagtccagggatata

SEQ ID NO: 2841165 - DNA, 25 bp, Homo sapien
ctttaaacaacgtggaggattggat

SEQ ID NO: 2841166 - DNA, 25 bp, Homo sapien
ccaaccagtaatagatcagtagtac

SEQ ID NO: 2841167 - DNA, 25 bp, Homo sapien
tgattttacaggagttacctcagtg

SEQ ID NO: 2841168 - DNA, 25 bp, Homo sapien
cagccaaggcttctaaattttgtga

SEQ ID NO: 2841169 - DNA, 25 bp, Homo sapien
tgttcgcagctcattgcactctcta

SEQ ID NO: 2841170 - DNA, 25 bp, Homo sapien
tgaagtgcgcttaggtgttcgcagc

SEQ ID NO: 2841171 - DNA, 25 bp, Homo sapien
aattttgtgaacttacctgtggctc

SEQ ID NO: 2841172 - DNA, 25 bp, Homo sapien
taccaatccgcagctttttgaaagc

SEQ ID NO: 2841173 - DNA, 25 bp, Homo sapien
taacacggaccaaagattcacatct

SEQ ID NO: 2841174 - DNA, 25 bp, Homo sapien
cctatgagactcttgtcccagtgaa

SEQ ID NO: 2841175 - DNA, 25 bp, Homo sapien
tgtgggtgttacagaaattacctca

SEQ ID NO: 2841176 - DNA, 25 bp, Homo sapien
taaagctacccagaatggaatcctg

SEQ ID NO: 2841177 - DNA, 25 bp, Homo sapien
tgtttctaacacttagactctcaga

SEQ ID NO: 2841178 - DNA, 25 bp, Homo sapien
tgttcttgtttctatgtaacccaca

SEQ ID NO: 2841179 - DNA, 25 bp, Homo sapien
catttctaattctttgtgcggcact

SEQ ID NO: 2841180 - DNA, 25 bp, Homo sapien
acctagttacttcacagatactctg

SEQ ID NO: 2841181 - DNA, 25 bp, Homo sapien
gactttgacctagttacttcacaga

SEQ ID NO: 2841182 - DNA, 25 bp, Homo sapien
ttgacctagttacttcacagatact

SEQ ID NO: 2841183 - DNA, 25 bp, Homo sapien
aatgtagactttgacctagttactt

SEQ ID NO: 2841184 - DNA, 25 bp, Homo sapien
tagagtgtaacggtgcaatctctgc

SEQ ID NO: 2841185 - DNA, 25 bp, Homo sapien
tgtgccaggccgcaaattttactta

SEQ ID NO: 2841186 - DNA, 25 bp, Homo sapien
tcttggcctcaggtggactacccgc

SEQ ID NO: 2841187 - DNA, 25 bp, Homo sapien
gaggcaggggtttcgcggtgttgcc

SEQ ID NO: 2841188 - DNA, 25 bp, Homo sapien
tagtccaattggcatagtaaatgat

SEQ ID NO: 2841189 - DNA, 25 bp, Homo sapien
gatccttaggtagtaattgtcatta

SEQ ID NO: 2841190 - DNA, 25 bp, Homo sapien
tttcagatctataccaaaatgatgg

SEQ ID NO: 2841191 - DNA, 25 bp, Homo sapien
gaaaattaatctgaggtggcctttg

SEQ ID NO: 2841192 - DNA, 25 bp, Homo sapien
agcataggcagtggagtgagaccct

SEQ ID NO: 2841193 - DNA, 25 bp, Homo sapien
ggcaaagtggcatgctcgtacagtt

SEQ ID NO: 2841194 - DNA, 25 bp, Homo sapien
taaatccctagacattgggaggctg

SEQ ID NO: 2841195 - DNA, 25 bp, Homo sapien
gagaccgccctgacaacatattgag

SEQ ID NO: 2841196 - DNA, 25 bp, Homo sapien
gcagagtgtatatagatggcttagt

SEQ ID NO: 2841197 - DNA, 25 bp, Homo sapien
gatggcttagtatttggcactaaag

SEQ ID NO: 2841198 - DNA, 25 bp, Homo sapien
tatatagatggcttagtatttggca

SEQ ID NO: 2841199 - DNA, 25 bp, Homo sapien
tagtatttggcactaaagtgattct

SEQ ID NO: 2841200 - DNA, 25 bp, Homo sapien
gagtgcaatggcacaatctcagctc

SEQ ID NO: 2841201 - DNA, 25 bp, Homo sapien
caggcgtgtgccacttcgcctggct

SEQ ID NO: 2841202 - DNA, 25 bp, Homo sapien
agctcactgcaacctctgcgtcccg

SEQ ID NO: 2841203 - DNA, 25 bp, Homo sapien
gaattttgctcttgttccccaagct

SEQ ID NO: 2841204 - DNA, 25 bp, Homo sapien
gagatcttactgcttgtcacttgaa

SEQ ID NO: 2841205 - DNA, 25 bp, Homo sapien
ttggccataatcctagatgcacgct

SEQ ID NO: 2841206 - DNA, 25 bp, Homo sapien
tatcagaatggcaacagacagaagt

SEQ ID NO: 2841207 - DNA, 25 bp, Homo sapien
tgtacctgcacatgtgacctttgtg

SEQ ID NO: 2841208 - DNA, 25 bp, Homo sapien
gggcccaagtgatctgctcgcttca

SEQ ID NO: 2841209 - DNA, 25 bp, Homo sapien
gctcatgccactatacctggctagt

SEQ ID NO: 2841210 - DNA, 25 bp, Homo sapien
accatccctggccaagaaacaaagt

SEQ ID NO: 2841211 - DNA, 25 bp, Homo sapien
ccaccatccctggccaagaaacaaa

SEQ ID NO: 2841212 - DNA, 25 bp, Homo sapien
ttcgacacactgcacagcttcggga

SEQ ID NO: 2841213 - DNA, 25 bp, Homo sapien
gagagattggaggttttaatggaaa

SEQ ID NO: 2841214 - DNA, 25 bp, Homo sapien
cacatatacccttaaaggaagaccg

SEQ ID NO: 2841215 - DNA, 25 bp, Homo sapien
gttgtcctcttcgacacactgcaca

SEQ ID NO: 2841216 - DNA, 25 bp, Homo sapien
tgtgaaagtccacgcctgtgtatct

SEQ ID NO: 2841217 - DNA, 25 bp, Homo sapien
gtgtatcttgtcagggtgctcttca

SEQ ID NO: 2841218 - DNA, 25 bp, Homo sapien
agtccacgcctgtgtatcttgtcag

SEQ ID NO: 2841219 - DNA, 25 bp, Homo sapien
gatgtctgtgaaagtccacgcctgt

SEQ ID NO: 2841220 - DNA, 25 bp, Homo sapien
ttccagagagaacgtgcgacagcgt

SEQ ID NO: 2841221 - DNA, 25 bp, Homo sapien
acagacttcggggtcgcgcgttctc

SEQ ID NO: 2841222 - DNA, 25 bp, Homo sapien
catatcatcattctcggaagatggg

SEQ ID NO: 2841223 - DNA, 25 bp, Homo sapien
tgtgggaacagtggtacgcccccat

SEQ ID NO: 2841224 - DNA, 25 bp, Homo sapien
gcggggttggcggcgacggaagtga

SEQ ID NO: 2841225 - DNA, 25 bp, Homo sapien
ctggagaagggaggcggcgggcgaa

SEQ ID NO: 2841226 - DNA, 25 bp, Homo sapien
aagggaggcggcgggcgaagcgcac

SEQ ID NO: 2841227 - DNA, 25 bp, Homo sapien
agaagggaggcggcgggcgaagcgc

SEQ ID NO: 2841228 - DNA, 25 bp, Homo sapien
tggagaagggaggcggcgggcgaag

SEQ ID NO: 2841229 - DNA, 25 bp, Homo sapien
tccgcggaggccgacaggattcgtt

SEQ ID NO: 2841230 - DNA, 25 bp, Homo sapien
gctgcctgtggagatccgcggaggc

SEQ ID NO: 2841231 - DNA, 25 bp, Homo sapien
tggagatccgcggaggccgacagga

SEQ ID NO: 2841232 - DNA, 25 bp, Homo sapien
gcctgtggagatccgcggaggccga

SEQ ID NO: 2841233 - DNA, 25 bp, Homo sapien
acaggggtgcggaggtcgagggaca

SEQ ID NO: 2841234 - DNA, 25 bp, Homo sapien
tcctctcgggcagagtggcgacagg

SEQ ID NO: 2841235 - DNA, 25 bp, Homo sapien
tcgagggacagcaagtcggcgacgg

SEQ ID NO: 2841236 - DNA, 25 bp, Homo sapien
ctgggtggttggccaccgagtccat

SEQ ID NO: 2841237 - DNA, 25 bp, Homo sapien
gagcttgggccgacttcgtctctgt

SEQ ID NO: 2841238 - DNA, 25 bp, Homo sapien
ttattaatgatttggatctcgcagc

SEQ ID NO: 2841239 - DNA, 25 bp, Homo sapien
ctatccgggtcctcagtggcgcgag

SEQ ID NO: 2841240 - DNA, 25 bp, Homo sapien
ttctccgagacatggccgtcgcttt

SEQ ID NO: 2841241 - DNA, 25 bp, Homo sapien
cacgccaggccatacaacattttta

SEQ ID NO: 2841242 - DNA, 25 bp, Homo sapien
tttattcaaacatgaaggcaaaaga

SEQ ID NO: 2841243 - DNA, 25 bp, Homo sapien
tattggccgggcttttctagaactc

SEQ ID NO: 2841244 - DNA, 25 bp, Homo sapien
acatttttattcaaacatgaaggca

SEQ ID NO: 2841245 - DNA, 25 bp, Homo sapien
ggaagggagaatatatcctgtccaa

SEQ ID NO: 2841246 - DNA, 25 bp, Homo sapien
gaagggagaatatatcctgtccaaa

SEQ ID NO: 2841247 - DNA, 25 bp, Homo sapien
gggaagggagaatatatcctgtcca

SEQ ID NO: 2841248 - DNA, 25 bp, Homo sapien
tttgaatcccagagaaaggtgactt

SEQ ID NO: 2841249 - DNA, 25 bp, Homo sapien
gcatacctacatttcaggccctgga

SEQ ID NO: 2841250 - DNA, 25 bp, Homo sapien
taagactcagactttggcccattcc

SEQ ID NO: 2841251 - DNA, 25 bp, Homo sapien
tgttcttcctagatgctgacaagtc

SEQ ID NO: 2841252 - DNA, 25 bp, Homo sapien
gcaaggaaagaagcaccagtcaagt

SEQ ID NO: 2841253 - DNA, 25 bp, Homo sapien
tttgttaaccatcacgagagtctgc

SEQ ID NO: 2841254 - DNA, 25 bp, Homo sapien
tcatatttgggtaggttaagctgcc

SEQ ID NO: 2841255 - DNA, 25 bp, Homo sapien
gcagatgagtgccagtccagccttt

SEQ ID NO: 2841256 - DNA, 25 bp, Homo sapien
ggaattgcaatctgatcttttgaac

SEQ ID NO: 2841257 - DNA, 25 bp, Homo sapien
gtgcacacagatgcagtttctgtat

SEQ ID NO: 2841258 - DNA, 25 bp, Homo sapien
gaattgcaatctgatcttttgaact

SEQ ID NO: 2841259 - DNA, 25 bp, Homo sapien
ctggaattgcaatctgatcttttga

SEQ ID NO: 2841260 - DNA, 25 bp, Homo sapien
gagccccagctttccactgtatcag

SEQ ID NO: 2841261 - DNA, 25 bp, Homo sapien
gaggctggaagacatgtcactgttg

SEQ ID NO: 2841262 - DNA, 25 bp, Homo sapien
tgtatcagaccacgctcctctgggc

SEQ ID NO: 2841263 - DNA, 25 bp, Homo sapien
cccaatggggaaatcgtagctcttg

SEQ ID NO: 2841264 - DNA, 25 bp, Homo sapien
aaggcacccgcccacaaacatctcc

SEQ ID NO: 2841265 - DNA, 25 bp, Homo sapien
acccgcccacaaacatctccgtggt

SEQ ID NO: 2841266 - DNA, 25 bp, Homo sapien
cgcccacaaacatctccgtggtcag

SEQ ID NO: 2841267 - DNA, 25 bp, Homo sapien
acaaacatctccgtggtcagcagca

SEQ ID NO: 2841268 - DNA, 25 bp, Homo sapien
gggccaatgggtgtcatggcccaat

SEQ ID NO: 2841269 - DNA, 25 bp, Homo sapien
aagggccaatgggtgtcatggccca

SEQ ID NO: 2841270 - DNA, 25 bp, Homo sapien
gccaagggccaatgggtgtcatggc

SEQ ID NO: 2841271 - DNA, 25 bp, Homo sapien
taggccaagggccaatgggtgtcat

SEQ ID NO: 2841272 - DNA, 25 bp, Homo sapien
ctttggagacagtaaacagctggag

SEQ ID NO: 2841273 - DNA, 25 bp, Homo sapien
ttggagacagtaaacagctggaggc

SEQ ID NO: 2841274 - DNA, 25 bp, Homo sapien
ggagacagtaaacagctggaggcac

SEQ ID NO: 2841275 - DNA, 25 bp, Homo sapien
cccgcctttggagacagtaaacagc

SEQ ID NO: 2841276 - DNA, 25 bp, Homo sapien
cagcgtgagcccgaagaacatggaa

SEQ ID NO: 2841277 - DNA, 25 bp, Homo sapien
aatcccagcacgaagaggttgcgag

SEQ ID NO: 2841278 - DNA, 25 bp, Homo sapien
tattgatggcgccagggttggactc

SEQ ID NO: 2841279 - DNA, 25 bp, Homo sapien
ggttgcgagaggagttcatgtccac

SEQ ID NO: 2841280 - DNA, 25 bp, Homo sapien
cgacccgtggcccgcgccagacact

SEQ ID NO: 2841281 - DNA, 25 bp, Homo sapien
cgcgacccgtggcccgcgccagaca

SEQ ID NO: 2841282 - DNA, 25 bp, Homo sapien
gacccgtggcccgcgccagacactc

SEQ ID NO: 2841283 - DNA, 25 bp, Homo sapien
gcgacccgtggcccgcgccagacac

SEQ ID NO: 2841284 - DNA, 25 bp, Homo sapien
agaagagggccgtgaacttgccgat

SEQ ID NO: 2841285 - DNA, 25 bp, Homo sapien
ggtcagggagcgaggagaagagggc

SEQ ID NO: 2841286 - DNA, 25 bp, Homo sapien
aggaccagcatgatagccgcaccat

SEQ ID NO: 2841287 - DNA, 25 bp, Homo sapien
acttgccgatggtgcccaggaccag

SEQ ID NO: 2841288 - DNA, 25 bp, Homo sapien
atttggctctggctcgtcgcgacac

SEQ ID NO: 2841289 - DNA, 25 bp, Homo sapien
aattagggcaggatttggctctggc

SEQ ID NO: 2841290 - DNA, 25 bp, Homo sapien
gcaggatttggctctggctcgtcgc

SEQ ID NO: 2841291 - DNA, 25 bp, Homo sapien
ttagggcaggatttggctctggctc

SEQ ID NO: 2841292 - DNA, 25 bp, Homo sapien
taattcccaggacgccaatgttggg

SEQ ID NO: 2841293 - DNA, 25 bp, Homo sapien
aatgttgggactggacgaggtggac

SEQ ID NO: 2841294 - DNA, 25 bp, Homo sapien
gaggtggacccgttgcccgtgccca

SEQ ID NO: 2841295 - DNA, 25 bp, Homo sapien
tagccccgcgatgatgcagcaaatg

SEQ ID NO: 2841296 - DNA, 25 bp, Homo sapien
tcaatgatgcctgccagagtggcgc

SEQ ID NO: 2841297 - DNA, 25 bp, Homo sapien
cagagtggcgctgaacattcccagg

SEQ ID NO: 2841298 - DNA, 25 bp, Homo sapien
caggcgggcacaggcgtagtaatct

SEQ ID NO: 2841299 - DNA, 25 bp, Homo sapien
taatctccgatggactcaatgatgc

SEQ ID NO: 2841300 - DNA, 25 bp, Homo sapien
tgcggatccagggtgcaatagccat

SEQ ID NO: 2841301 - DNA, 25 bp, Homo sapien
catgatgtcaccacgggcatcggtt

SEQ ID NO: 2841302 - DNA, 25 bp, Homo sapien
gtcaggacatagcagagcagccaca

SEQ ID NO: 2841303 - DNA, 25 bp, Homo sapien
gcatcggttcgtgcctggaagccat

SEQ ID NO: 2841304 - DNA, 25 bp, Homo sapien
gaaggtgaggttgcgcaggtactgg

SEQ ID NO: 2841305 - DNA, 25 bp, Homo sapien
ttgccccagcggtagacaggcagca

SEQ ID NO: 2841306 - DNA, 25 bp, Homo sapien
ggaaacattttgaagatctggatgc

SEQ ID NO: 2841307 - DNA, 25 bp, Homo sapien
agagtgaggcccttgccccagcggt

SEQ ID NO: 2841308 - DNA, 25 bp, Homo sapien
gctcggtcgccagcagcttggaaga

SEQ ID NO: 2841309 - DNA, 25 bp, Homo sapien
gtgagaggcccaatgtagttgagca

SEQ ID NO: 2841310 - DNA, 25 bp, Homo sapien
caagctgagatgccccagtgggagc

SEQ ID NO: 2841311 - DNA, 25 bp, Homo sapien
gaaaggccaatgagggagacagtgg

SEQ ID NO: 2841312 - DNA, 25 bp, Homo sapien
tgccaaatatgagaggtgttcaggg

SEQ ID NO: 2841313 - DNA, 25 bp, Homo sapien
ctcccgtatccgtgggtgccaaata

SEQ ID NO: 2841314 - DNA, 25 bp, Homo sapien
gtatccgtgggtgccaaatatgaga

SEQ ID NO: 2841315 - DNA, 25 bp, Homo sapien
gggcagactccagttaccgtagatc

SEQ ID NO: 2841316 - DNA, 25 bp, Homo sapien
gtatggctttggctggaaccagaaa

SEQ ID NO: 2841317 - DNA, 25 bp, Homo sapien
ctccagagccagtatggctttggct

SEQ ID NO: 2841318 - DNA, 25 bp, Homo sapien
gccagtatggctttggctggaacca

SEQ ID NO: 2841319 - DNA, 25 bp, Homo sapien
cagagccagtatggctttggctgga

SEQ ID NO: 2841320 - DNA, 25 bp, Homo sapien
gatgcccacggtggtctggatgaga

SEQ ID NO: 2841321 - DNA, 25 bp, Homo sapien
cggatgcccacggtggtctggatga

SEQ ID NO: 2841322 - DNA, 25 bp, Homo sapien
cggtggtctggatgagagtggtgat

SEQ ID NO: 2841323 - DNA, 25 bp, Homo sapien
gtggtctggatgagagtggtgatgc

SEQ ID NO: 2841324 - DNA, 25 bp, Homo sapien
tgtgctggtcgtggcccacacacag

SEQ ID NO: 2841325 - DNA, 25 bp, Homo sapien
aagggcacggcgatggtaccactga

SEQ ID NO: 2841326 - DNA, 25 bp, Homo sapien
ggtgccgatgagctgactaaccatg

SEQ ID NO: 2841327 - DNA, 25 bp, Homo sapien
ggcacggcgatggtaccactgaagc

SEQ ID NO: 2841328 - DNA, 25 bp, Homo sapien
ggtggcacgtcctcgatcttgtaca

SEQ ID NO: 2841329 - DNA, 25 bp, Homo sapien
aggatgcacaggtaccaaggtggca

SEQ ID NO: 2841330 - DNA, 25 bp, Homo sapien
gtaccaaggtggcacgtcctcgatc

SEQ ID NO: 2841331 - DNA, 25 bp, Homo sapien
cctcgatcttgtacaacatgtcaaa

SEQ ID NO: 2841332 - DNA, 25 bp, Homo sapien
ctgtgtccggccctcgaggtcctcc

SEQ ID NO: 2841333 - DNA, 25 bp, Homo sapien
tccggccctcgaggtcctcctgggc

SEQ ID NO: 2841334 - DNA, 25 bp, Homo sapien
tgtccggccctcgaggtcctcctgg

SEQ ID NO: 2841335 - DNA, 25 bp, Homo sapien
cctcgaggtcctcctgggccctcat

SEQ ID NO: 2841336 - DNA, 25 bp, Homo sapien
ctttggggcacaggtttgagcagtt

SEQ ID NO: 2841337 - DNA, 25 bp, Homo sapien
gaggagaagaggggatgacttgaca

SEQ ID NO: 2841338 - DNA, 25 bp, Homo sapien
ccaggccctgcctgaagggccaagg

SEQ ID NO: 2841339 - DNA, 25 bp, Homo sapien
catggccaggccctgcctgaagggc

SEQ ID NO: 2841340 - DNA, 25 bp, Homo sapien
agggccaaggggcagcaccgctctc

SEQ ID NO: 2841341 - DNA, 25 bp, Homo sapien
ttctgggtcgctgtgcccatggcca

SEQ ID NO: 2841342 - DNA, 25 bp, Homo sapien
aagttgtagggatgcaaatttggcc

SEQ ID NO: 2841343 - DNA, 25 bp, Homo sapien
ggaagttgtagggatgcaaatttgg

SEQ ID NO: 2841344 - DNA, 25 bp, Homo sapien
gttgtagggatgcaaatttggcctt

SEQ ID NO: 2841345 - DNA, 25 bp, Homo sapien
ctggaagttgtagggatgcaaattt

SEQ ID NO: 2841346 - DNA, 25 bp, Homo sapien
cactctagcaaattagttgaactca

SEQ ID NO: 2841347 - DNA, 25 bp, Homo sapien
tctgagctctgcgaaccactctagc

SEQ ID NO: 2841348 - DNA, 25 bp, Homo sapien
gagttggaactggtgtctgaatggg

SEQ ID NO: 2841349 - DNA, 25 bp, Homo sapien
gatagtgccagaattgaattttgga

SEQ ID NO: 2841350 - DNA, 25 bp, Homo sapien
cagcagaaacaccaatgtctgcact

SEQ ID NO: 2841351 - DNA, 25 bp, Homo sapien
tcagcagaaacaccaatgtctgcac

SEQ ID NO: 2841352 - DNA, 25 bp, Homo sapien
gtcactgggttttatttgagtccag

SEQ ID NO: 2841353 - DNA, 25 bp, Homo sapien
aggcccgagtgccctgaggctggag

SEQ ID NO: 2841354 - DNA, 25 bp, Homo sapien
ccagcttctttcagaggagggtaga

SEQ ID NO: 2841355 - DNA, 25 bp, Homo sapien
agaccgtcagagcaagccccagctt

SEQ ID NO: 2841356 - DNA, 25 bp, Homo sapien
agagctcttctcttgtggctgacac

SEQ ID NO: 2841357 - DNA, 25 bp, Homo sapien
tagagctcttctcttgtggctgaca

SEQ ID NO: 2841358 - DNA, 25 bp, Homo sapien
ctagagctcttctcttgtggctgac

SEQ ID NO: 2841359 - DNA, 25 bp, Homo sapien
catagatctggtcttctccaaactc

SEQ ID NO: 2841360 - DNA, 25 bp, Homo sapien
ccaagtagtgcaaacatgtcctgga

SEQ ID NO: 2841361 - DNA, 25 bp, Homo sapien
tccaaactcccccaagtagtgcaaa

SEQ ID NO: 2841362 - DNA, 25 bp, Homo sapien
tggggtcccccacatagcaatgcct

SEQ ID NO: 2841363 - DNA, 25 bp, Homo sapien
cccacagtggggcaaaccaaggctc

SEQ ID NO: 2841364 - DNA, 25 bp, Homo sapien
ccacagtggggcaaaccaaggctcc

SEQ ID NO: 2841365 - DNA, 25 bp, Homo sapien
gtaggccaggggccccctgtgacca

SEQ ID NO: 2841366 - DNA, 25 bp, Homo sapien
taggccaggggccccctgtgaccat

SEQ ID NO: 2841367 - DNA, 25 bp, Homo sapien
tggtaggccaggggccccctgtgac

SEQ ID NO: 2841368 - DNA, 25 bp, Homo sapien
ctggtaggccaggggccccctgtga

SEQ ID NO: 2841369 - DNA, 25 bp, Homo sapien
cgctgatgcttggctctggcccctc

SEQ ID NO: 2841370 - DNA, 25 bp, Homo sapien
acgctgatgcttggctctggcccct

SEQ ID NO: 2841371 - DNA, 25 bp, Homo sapien
cacgctgatgcttggctctggcccc

SEQ ID NO: 2841372 - DNA, 25 bp, Homo sapien
gctgatgcttggctctggcccctcg

SEQ ID NO: 2841373 - DNA, 25 bp, Homo sapien
acttggtccacttctcgaactccgt

SEQ ID NO: 2841374 - DNA, 25 bp, Homo sapien
cgtttcacttggtccacttctcgaa

SEQ ID NO: 2841375 - DNA, 25 bp, Homo sapien
cctgtgagacgtttcacttggtcca

SEQ ID NO: 2841376 - DNA, 25 bp, Homo sapien
tgagacgtttcacttggtccacttc

SEQ ID NO: 2841377 - DNA, 25 bp, Homo sapien
agaggagtacagttttggcaggagc

SEQ ID NO: 2841378 - DNA, 25 bp, Homo sapien
gaggagtacagttttggcaggagcc

SEQ ID NO: 2841379 - DNA, 25 bp, Homo sapien
agcagctccggtccaggacatccgt

SEQ ID NO: 2841380 - DNA, 25 bp, Homo sapien
tgaggtatgaagtttggtctctgcc

SEQ ID NO: 2841381 - DNA, 25 bp, Homo sapien
tccaggacatccgtgtagaccaact

SEQ ID NO: 2841382 - DNA, 25 bp, Homo sapien
ctctgcctttgccagattttgccac

SEQ ID NO: 2841383 - DNA, 25 bp, Homo sapien
tgctgctcagttagggggaggtggg

SEQ ID NO: 2841384 - DNA, 25 bp, Homo sapien
aggactgctgctcagttagggggag

SEQ ID NO: 2841385 - DNA, 25 bp, Homo sapien
gaggtggggaggataggagcagagt

SEQ ID NO: 2841386 - DNA, 25 bp, Homo sapien
gactgctgctcagttagggggaggt

SEQ ID NO: 2841387 - DNA, 25 bp, Homo sapien
tgcaggcgctcacacgtgtgcactt

SEQ ID NO: 2841388 - DNA, 25 bp, Homo sapien
caagagagccgtttgagcaggaagc

SEQ ID NO: 2841389 - DNA, 25 bp, Homo sapien
tgtgaagccagacacacgcatactc

SEQ ID NO: 2841390 - DNA, 25 bp, Homo sapien
tagagagagtctcacgccgttcgtc

SEQ ID NO: 2841391 - DNA, 25 bp, Homo sapien
tctcaaaatactgaggaggtctccc

SEQ ID NO: 2841392 - DNA, 25 bp, Homo sapien
taaggacaagtgagtgattccctgg

SEQ ID NO: 2841393 - DNA, 25 bp, Homo sapien
gatcaaaggccggtggtggaatgtg

SEQ ID NO: 2841394 - DNA, 25 bp, Homo sapien
tctcccagattgtctgctgttaggc

SEQ ID NO: 2841395 - DNA, 25 bp, Homo sapien
catcacagcgcaggtgagcgggcat

SEQ ID NO: 2841396 - DNA, 25 bp, Homo sapien
tgggctgagtacatctcctcatcat

SEQ ID NO: 2841397 - DNA, 25 bp, Homo sapien
tcatcatccagttgtggggctgtgg

SEQ ID NO: 2841398 - DNA, 25 bp, Homo sapien
cgggcatgtgggctgagtacatctc

SEQ ID NO: 2841399 - DNA, 25 bp, Homo sapien
ctgtccccgaggccccctgggatgg

SEQ ID NO: 2841400 - DNA, 25 bp, Homo sapien
ggccccctgggatggcccaggctcc

SEQ ID NO: 2841401 - DNA, 25 bp, Homo sapien
agcagcagtggcagtgacagcctca

SEQ ID NO: 2841402 - DNA, 25 bp, Homo sapien
gcagcagtggcagtgacagcctcat

SEQ ID NO: 2841403 - DNA, 25 bp, Homo sapien
tcagcaagtgtagtctgtggttgag

SEQ ID NO: 2841404 - DNA, 25 bp, Homo sapien
ccccgaagatgccacgtgggcattg

SEQ ID NO: 2841405 - DNA, 25 bp, Homo sapien
agaacacctggcctagaccaatggg

SEQ ID NO: 2841406 - DNA, 25 bp, Homo sapien
ggccccaggagccagttcagcaagt

SEQ ID NO: 2841407 - DNA, 25 bp, Homo sapien
cttgctgtgactggtctgtagggcc

SEQ ID NO: 2841408 - DNA, 25 bp, Homo sapien
ctggcatctccagctagaaaatggc

SEQ ID NO: 2841409 - DNA, 25 bp, Homo sapien
ggagtggaacctgccaagagcttca

SEQ ID NO: 2841410 - DNA, 25 bp, Homo sapien
ggcctggaacaacgaaggcatccat

SEQ ID NO: 2841411 - DNA, 25 bp, Homo sapien
caatgaacccttgccgggctgggtg

SEQ ID NO: 2841412 - DNA, 25 bp, Homo sapien
aacaatgaacccttgccgggctggg

SEQ ID NO: 2841413 - DNA, 25 bp, Homo sapien
agcgggaacaatgaacccttgccgg

SEQ ID NO: 2841414 - DNA, 25 bp, Homo sapien
ggaacaatgaacccttgccgggctg

SEQ ID NO: 2841415 - DNA, 25 bp, Homo sapien
cggcaggtagtaggtcccgtccagg

SEQ ID NO: 2841416 - DNA, 25 bp, Homo sapien
tataggcccataggcgggcgggtag

SEQ ID NO: 2841417 - DNA, 25 bp, Homo sapien
tgcccactctcagggtcgaagagca

SEQ ID NO: 2841418 - DNA, 25 bp, Homo sapien
cacaaagtagtagcggccgctctcg

SEQ ID NO: 2841419 - DNA, 25 bp, Homo sapien
gggagtggcgcctggacggcagccg

SEQ ID NO: 2841420 - DNA, 25 bp, Homo sapien
tcggtttgggtgctatcccagggct

SEQ ID NO: 2841421 - DNA, 25 bp, Homo sapien
ggtgtcttcggtttgggtgctatcc

SEQ ID NO: 2841422 - DNA, 25 bp, Homo sapien
taggtggtgtcttcggtttgggtgc

SEQ ID NO: 2841423 - DNA, 25 bp, Homo sapien
ctagagggctggtccgaccgtcgcc

SEQ ID NO: 2841424 - DNA, 25 bp, Homo sapien
agcgctgggatgagctgcgggcgcc

SEQ ID NO: 2841425 - DNA, 25 bp, Homo sapien
ctgctggccctacgggggagcgctg

SEQ ID NO: 2841426 - DNA, 25 bp, Homo sapien
gggcggggcgatcggacccctgctg

SEQ ID NO: 2841427 - DNA, 25 bp, Homo sapien
gcaggcggatctctgtgcgcttgaa

SEQ ID NO: 2841428 - DNA, 25 bp, Homo sapien
aagcctggcgcgtacgtggtcttca

SEQ ID NO: 2841429 - DNA, 25 bp, Homo sapien
aagacttccgggcacttatccgcgt

SEQ ID NO: 2841430 - DNA, 25 bp, Homo sapien
ggcaccaccggtagaaaatccttga

SEQ ID NO: 2841431 - DNA, 25 bp, Homo sapien
tggagtgccgggtgcggacggtgta

SEQ ID NO: 2841432 - DNA, 25 bp, Homo sapien
tggatggactctgcatctctgttgg

SEQ ID NO: 2841433 - DNA, 25 bp, Homo sapien
gcaagatctgaaatttcccgcgtgg

SEQ ID NO: 2841434 - DNA, 25 bp, Homo sapien
acggtgtaggcggtgccaactcctc

SEQ ID NO: 2841435 - DNA, 25 bp, Homo sapien
cgcatccgcgactgccgaatgtgga

SEQ ID NO: 2841436 - DNA, 25 bp, Homo sapien
ccaataggacgatctggagcctccc

SEQ ID NO: 2841437 - DNA, 25 bp, Homo sapien
gtaaatgctatcgatgagcccggcc

SEQ ID NO: 2841438 - DNA, 25 bp, Homo sapien
cccatgggatcccatgtctcttggg

SEQ ID NO: 2841439 - DNA, 25 bp, Homo sapien
ggcttcagggaacaatgggctactc

SEQ ID NO: 2841440 - DNA, 25 bp, Homo sapien
cttcagggaacaatgggctactcac

SEQ ID NO: 2841441 - DNA, 25 bp, Homo sapien
tttcccactcggaggaggcttcagg

SEQ ID NO: 2841442 - DNA, 25 bp, Homo sapien
gtttcctcgacggcaggattttgat

SEQ ID NO: 2841443 - DNA, 25 bp, Homo sapien
agttttctggccaacgccgtctgca

SEQ ID NO: 2841444 - DNA, 25 bp, Homo sapien
ggatcctacactcaaaaggcggact

SEQ ID NO: 2841445 - DNA, 25 bp, Homo sapien
aattatctcgtacgcgaagtggccg

SEQ ID NO: 2841446 - DNA, 25 bp, Homo sapien
ctctgaacagttcgatccggcgcct

SEQ ID NO: 2841447 - DNA, 25 bp, Homo sapien
ggaaccggtgcgcaggagcagccgg

SEQ ID NO: 2841448 - DNA, 25 bp, Homo sapien
agcgactcgtccagggaaccggtgc

SEQ ID NO: 2841449 - DNA, 25 bp, Homo sapien
tcgtccagggaaccggtgcgcagga

SEQ ID NO: 2841450 - DNA, 25 bp, Homo sapien
ccagcgactcgtccagggaaccggt

SEQ ID NO: 2841451 - DNA, 25 bp, Homo sapien
ccgggggcgcagctcgatctgacgc

SEQ ID NO: 2841452 - DNA, 25 bp, Homo sapien
ggggcgcagctcgatctgacgcttg

SEQ ID NO: 2841453 - DNA, 25 bp, Homo sapien
agctcgatctgacgcttgggcactg

SEQ ID NO: 2841454 - DNA, 25 bp, Homo sapien
gatctgacgcttgggcactgtccgg

SEQ ID NO: 2841455 - DNA, 25 bp, Homo sapien
ggccggctccgtgaactgttgttgc

SEQ ID NO: 2841456 - DNA, 25 bp, Homo sapien
ccggagaacctggagccgtgtagta

SEQ ID NO: 2841457 - DNA, 25 bp, Homo sapien
tgtagtaggagcctgacgaaccgga

SEQ ID NO: 2841458 - DNA, 25 bp, Homo sapien
ggtccgacgccgaagatgacttcca

SEQ ID NO: 2841459 - DNA, 25 bp, Homo sapien
ctggcggggcgagcgcggtcagcat

SEQ ID NO: 2841460 - DNA, 25 bp, Homo sapien
tgtgagcgggtgaaccagaccttca

SEQ ID NO: 2841461 - DNA, 25 bp, Homo sapien
gaacaggccctggataccgatgtgg

SEQ ID NO: 2841462 - DNA, 25 bp, Homo sapien
tccaagctttggctgacaggcaggt

SEQ ID NO: 2841463 - DNA, 25 bp, Homo sapien
tagagctcttaagggtgcacacacc

SEQ ID NO: 2841464 - DNA, 25 bp, Homo sapien
ttgtggacccctaccactatccaag

SEQ ID NO: 2841465 - DNA, 25 bp, Homo sapien
tggtgcctaccagacaacaaagacc

SEQ ID NO: 2841466 - DNA, 25 bp, Homo sapien
ccctaccactatccaagagggaggg

SEQ ID NO: 2841467 - DNA, 25 bp, Homo sapien
ccaaaggaagcggtggtgcctacca

SEQ ID NO: 2841468 - DNA, 25 bp, Homo sapien
ttatttttccctgggatgctggtgg

SEQ ID NO: 2841469 - DNA, 25 bp, Homo sapien
ggatgctggtggctgcgggcctgac

SEQ ID NO: 2841470 - DNA, 25 bp, Homo sapien
tatttttccctgggatgctggtggc

SEQ ID NO: 2841471 - DNA, 25 bp, Homo sapien
ctgggatgctggtggctgcgggcct

SEQ ID NO: 2841472 - DNA, 25 bp, Homo sapien
ctgggccatgtagctctcctgctgc

SEQ ID NO: 2841473 - DNA, 25 bp, Homo sapien
ctgctgcttctggatccggaagtca

SEQ ID NO: 2841474 - DNA, 25 bp, Homo sapien
acctgggccatgtagctctcctgct

SEQ ID NO: 2841475 - DNA, 25 bp, Homo sapien
gatccggaagtcagacatgtgattc

SEQ ID NO: 2841476 - DNA, 25 bp, Homo sapien
ctgcaacggagccggctggtggtgg

SEQ ID NO: 2841477 - DNA, 25 bp, Homo sapien
tgcaacggagccggctggtggtggg

SEQ ID NO: 2841478 - DNA, 25 bp, Homo sapien
tgctttataatgtgagactcaatct

SEQ ID NO: 2841479 - DNA, 25 bp, Homo sapien
cttcttgctttataatgtgagactc

SEQ ID NO: 2841480 - DNA, 25 bp, Homo sapien
taacttgctgcaactctttaatctc

SEQ ID NO: 2841481 - DNA, 25 bp, Homo sapien
gctgcaactctttaatctcattctc

SEQ ID NO: 2841482 - DNA, 25 bp, Homo sapien
aatgacttcacaagtctattctgga

SEQ ID NO: 2841483 - DNA, 25 bp, Homo sapien
gacttcacaagtctattctggacca

SEQ ID NO: 2841484 - DNA, 25 bp, Homo sapien
ttctggaccagaggacccacatgag

SEQ ID NO: 2841485 - DNA, 25 bp, Homo sapien
caagtctattctggaccagaggacc

SEQ ID NO: 2841486 - DNA, 25 bp, Homo sapien
tatccctaaggcctaaaacagcacc

SEQ ID NO: 2841487 - DNA, 25 bp, Homo sapien
gggagttgcctcgattttcagacct

SEQ ID NO: 2841488 - DNA, 25 bp, Homo sapien
tgcagaccgaatgaacgggatgtcc

SEQ ID NO: 2841489 - DNA, 25 bp, Homo sapien
ccgctgctgggatgtaaggtccaca

SEQ ID NO: 2841490 - DNA, 25 bp, Homo sapien
gctcaggagttgggggctgcaatga

SEQ ID NO: 2841491 - DNA, 25 bp, Homo sapien
gagctcaggagttgggggctgcaat

SEQ ID NO: 2841492 - DNA, 25 bp, Homo sapien
gcctatagtcctggctacttgctga

SEQ ID NO: 2841493 - DNA, 25 bp, Homo sapien
ctatagtcctggctacttgctgagg

SEQ ID NO: 2841494 - DNA, 25 bp, Homo sapien
gcccattcctttatggcggtgaaga

SEQ ID NO: 2841495 - DNA, 25 bp, Homo sapien
tgaagaatatagtacaccgactgct

SEQ ID NO: 2841496 - DNA, 25 bp, Homo sapien
gggagcaagcccattcctttatggc

SEQ ID NO: 2841497 - DNA, 25 bp, Homo sapien
tatggcggtgaagaatatagtacac

SEQ ID NO: 2841498 - DNA, 25 bp, Homo sapien
tgaaaccctgcctttgacacaggca

SEQ ID NO: 2841499 - DNA, 25 bp, Homo sapien
gacaggtgttagagtgaaaccctgc

SEQ ID NO: 2841500 - DNA, 25 bp, Homo sapien
ttatataaccgtggtggagagcacg

SEQ ID NO: 2841501 - DNA, 25 bp, Homo sapien
caggcactgggtggttaggaaagag

SEQ ID NO: 2841502 - DNA, 25 bp, Homo sapien
tgaaggactttgctcttgacactgg

SEQ ID NO: 2841503 - DNA, 25 bp, Homo sapien
ctgaaggactttgctcttgacactg

SEQ ID NO: 2841504 - DNA, 25 bp, Homo sapien
ccttggttttggcatgggcagcttt

SEQ ID NO: 2841505 - DNA, 25 bp, Homo sapien
cacctctacctctccgagggcaaac

SEQ ID NO: 2841506 - DNA, 25 bp, Homo sapien
caaactgtaacttctcctcttcctt

SEQ ID NO: 2841507 - DNA, 25 bp, Homo sapien
tttctccagctgcttggatagcacc

SEQ ID NO: 2841508 - DNA, 25 bp, Homo sapien
caaaattttcgtcctggagaaccat

SEQ ID NO: 2841509 - DNA, 25 bp, Homo sapien
gcaacagagcctggctgagggaggg

SEQ ID NO: 2841510 - DNA, 25 bp, Homo sapien
cagagcctggctgagggagggcctg

SEQ ID NO: 2841511 - DNA, 25 bp, Homo sapien
aacagagcctggctgagggagggcc

SEQ ID NO: 2841512 - DNA, 25 bp, Homo sapien
ctgcaacagagcctggctgagggag

SEQ ID NO: 2841513 - DNA, 25 bp, Homo sapien
aagggccaaatctgcgcttactgca

SEQ ID NO: 2841514 - DNA, 25 bp, Homo sapien
cctaagttagcgctggcaagggcca

SEQ ID NO: 2841515 - DNA, 25 bp, Homo sapien
ggattctatcatgcctacccaggta

SEQ ID NO: 2841516 - DNA, 25 bp, Homo sapien
tcttgcagcaaccaggcaaacggaa

SEQ ID NO: 2841517 - DNA, 25 bp, Homo sapien
tagttcctcctgagactcaatcacg

SEQ ID NO: 2841518 - DNA, 25 bp, Homo sapien
ggtggattagttcctcctgagactc

SEQ ID NO: 2841519 - DNA, 25 bp, Homo sapien
cctcagctggtggattagttcctcc

SEQ ID NO: 2841520 - DNA, 25 bp, Homo sapien
gactcaatcacgtcccgcagttgat

SEQ ID NO: 2841521 - DNA, 25 bp, Homo sapien
tcgaccacccgaggggcgtcgccat

SEQ ID NO: 2841522 - DNA, 25 bp, Homo sapien
ctaaagcgagacacacagatcctga

SEQ ID NO: 2841523 - DNA, 25 bp, Homo sapien
ttcgaccacccgaggggcgtcgcca

SEQ ID NO: 2841524 - DNA, 25 bp, Homo sapien
ctgaccccgccttcgaccacccgag

SEQ ID NO: 2841525 - DNA, 25 bp, Homo sapien
gagtctgcactagagtcatgtgcca

SEQ ID NO: 2841526 - DNA, 25 bp, Homo sapien
gctctgggcactagagtctgcacta

SEQ ID NO: 2841527 - DNA, 25 bp, Homo sapien
tcaaagtcttcatactctgatacca

SEQ ID NO: 2841528 - DNA, 25 bp, Homo sapien
ggcactagagtctgcactagagtca

SEQ ID NO: 2841529 - DNA, 25 bp, Homo sapien
atgtcccttgatatccaacatccac

SEQ ID NO: 2841530 - DNA, 25 bp, Homo sapien
tgctctctgcgtacttggggcaaaa

SEQ ID NO: 2841531 - DNA, 25 bp, Homo sapien
caggctgctctctgcgtacttgggg

SEQ ID NO: 2841532 - DNA, 25 bp, Homo sapien
ctctctgcgtacttggggcaaaacc

SEQ ID NO: 2841533 - DNA, 25 bp, Homo sapien
gctgctctctgcgtacttggggcaa

SEQ ID NO: 2841534 - DNA, 25 bp, Homo sapien
ctggagagcagtaggctccagcagc

SEQ ID NO: 2841535 - DNA, 25 bp, Homo sapien
tggagagcagtaggctccagcagcc

SEQ ID NO: 2841536 - DNA, 25 bp, Homo sapien
ggagagcagtaggctccagcagcca

SEQ ID NO: 2841537 - DNA, 25 bp, Homo sapien
gagagcagtaggctccagcagccac

SEQ ID NO: 2841538 - DNA, 25 bp, Homo sapien
gaagcttacacatttcccggcctga

SEQ ID NO: 2841539 - DNA, 25 bp, Homo sapien
tatgaatgaagtgcaagctcctgtg

SEQ ID NO: 2841540 - DNA, 25 bp, Homo sapien
taacagaaagccactggaacggcac

SEQ ID NO: 2841541 - DNA, 25 bp, Homo sapien
tcaagattcttagtccaccaggagc

SEQ ID NO: 2841542 - DNA, 25 bp, Homo sapien
gaaaatatgtgtgagagcccctgct

SEQ ID NO: 2841543 - DNA, 25 bp, Homo sapien
tgtcctgaacagatgcaagattgcc

SEQ ID NO: 2841544 - DNA, 25 bp, Homo sapien
tgtgtgactacctgattcctgggca

SEQ ID NO: 2841545 - DNA, 25 bp, Homo sapien
tcttccaaaggacgtaggcgagagg

SEQ ID NO: 2841546 - DNA, 25 bp, Homo sapien
cagatgctgctcagtagttttaatt

SEQ ID NO: 2841547 - DNA, 25 bp, Homo sapien
ccgcctccagatgctgctcagtagt

SEQ ID NO: 2841548 - DNA, 25 bp, Homo sapien
cctggcccccgcctccagatgctgc

SEQ ID NO: 2841549 - DNA, 25 bp, Homo sapien
cctccagatgctgctcagtagtttt

SEQ ID NO: 2841550 - DNA, 25 bp, Homo sapien
tagatgaactactcctggtccctgg

SEQ ID NO: 2841551 - DNA, 25 bp, Homo sapien
gaaagctgggcaggaacatgttcca

SEQ ID NO: 2841552 - DNA, 25 bp, Homo sapien
gagacggaatccaatgccttgccat

SEQ ID NO: 2841553 - DNA, 25 bp, Homo sapien
tctgctctgggatgccctgaactcc

SEQ ID NO: 2841554 - DNA, 25 bp, Homo sapien
gttcatctctgtataatcctgccaa

SEQ ID NO: 2841555 - DNA, 25 bp, Homo sapien
cagttttcaagtttcagcgactctg

SEQ ID NO: 2841556 - DNA, 25 bp, Homo sapien
gctttctgtttcaatcgttcatctc

SEQ ID NO: 2841557 - DNA, 25 bp, Homo sapien
tctgcgtaggccaatgagtttggaa

SEQ ID NO: 2841558 - DNA, 25 bp, Homo sapien
agtgagaccaccctatagcctccta

SEQ ID NO: 2841559 - DNA, 25 bp, Homo sapien
catttggcaccagacttaggaaacc

SEQ ID NO: 2841560 - DNA, 25 bp, Homo sapien
gacttaggaaacctgcgcatgtgca

SEQ ID NO: 2841561 - DNA, 25 bp, Homo sapien
cctacaaacgggattccaacagcag

SEQ ID NO: 2841562 - DNA, 25 bp, Homo sapien
ggtgtgtgtttcctgaaagcctcca

SEQ ID NO: 2841563 - DNA, 25 bp, Homo sapien
tggtggaacgaaagacacctgtctg

SEQ ID NO: 2841564 - DNA, 25 bp, Homo sapien
cctgaagagcacctttagagacgta

SEQ ID NO: 2841565 - DNA, 25 bp, Homo sapien
cagcaggcagctactcaatgtttaa

SEQ ID NO: 2841566 - DNA, 25 bp, Homo sapien
tcttcttagcagaaagttccccttc

SEQ ID NO: 2841567 - DNA, 25 bp, Homo sapien
tccttcaatgaacaaagggtcaact

SEQ ID NO: 2841568 - DNA, 25 bp, Homo sapien
tgaaggccacttcaacaagctgatg

SEQ ID NO: 2841569 - DNA, 25 bp, Homo sapien
cagtgtttcaaggaatcatgtccca

SEQ ID NO: 2841570 - DNA, 25 bp, Homo sapien
gttctcaaatggcacttgggttgtg

SEQ ID NO: 2841571 - DNA, 25 bp, Homo sapien
tgttctcaaatggcacttgggttgt

SEQ ID NO: 2841572 - DNA, 25 bp, Homo sapien
gctgcacttgctgctggattcggag

SEQ ID NO: 2841573 - DNA, 25 bp, Homo sapien
tgctggattcggagggcagatgctg

SEQ ID NO: 2841574 - DNA, 25 bp, Homo sapien
cctgctgttgttattcacaatcctc

SEQ ID NO: 2841575 - DNA, 25 bp, Homo sapien
catttgttgagcacttgttctgaag

SEQ ID NO: 2841576 - DNA, 25 bp, Homo sapien
ttctactcctgagaatcctctcttc

SEQ ID NO: 2841577 - DNA, 25 bp, Homo sapien
tgttattcacaatcctcagcatttt

SEQ ID NO: 2841578 - DNA, 25 bp, Homo sapien
tgatactcagtaataaggctttaga

SEQ ID NO: 2841579 - DNA, 25 bp, Homo sapien
gatactcagtaataaggctttagaa

SEQ ID NO: 2841580 - DNA, 25 bp, Homo sapien
tcaagtgggaccaaaggtgaagctg

SEQ ID NO: 2841581 - DNA, 25 bp, Homo sapien
ctggagctgtaagccagtggcagat

SEQ ID NO: 2841582 - DNA, 25 bp, Homo sapien
tagaagacacagtcactaacgcggt

SEQ ID NO: 2841583 - DNA, 25 bp, Homo sapien
tgcagacactcctagtaacacttgc

SEQ ID NO: 2841584 - DNA, 25 bp, Homo sapien
tccaagtcatgcagagaagctcctc

SEQ ID NO: 2841585 - DNA, 25 bp, Homo sapien
tccaacaactagtctggatataatc

SEQ ID NO: 2841586 - DNA, 25 bp, Homo sapien
ttctccttccaacaactagtctgga

SEQ ID NO: 2841587 - DNA, 25 bp, Homo sapien
tctagaaatggtgtagcccaaggtc

SEQ ID NO: 2841588 - DNA, 25 bp, Homo sapien
tatttggcaatattactcttagcac

SEQ ID NO: 2841589 - DNA, 25 bp, Homo sapien
ttggcaatattactcttagcactgc

SEQ ID NO: 2841590 - DNA, 25 bp, Homo sapien
atttggcaatattactcttagcact

SEQ ID NO: 2841591 - DNA, 25 bp, Homo sapien
tttggcaatattactcttagcactg

SEQ ID NO: 2841592 - DNA, 25 bp, Homo sapien
ggagcttacagagcaggtccgtgct

SEQ ID NO: 2841593 - DNA, 25 bp, Homo sapien
cccgctggcctcacaagaaagaaag

SEQ ID NO: 2841594 - DNA, 25 bp, Homo sapien
cctctctatgaaggctaggtgcagt

SEQ ID NO: 2841595 - DNA, 25 bp, Homo sapien
gaaacagagggaatcaggccagtgt

SEQ ID NO: 2841596 - DNA, 25 bp, Homo sapien
gactatatgggggattagtagccag

SEQ ID NO: 2841597 - DNA, 25 bp, Homo sapien
tcacaatcacaagaactggaagtag

SEQ ID NO: 2841598 - DNA, 25 bp, Homo sapien
tatgggggattagtagccagcagct

SEQ ID NO: 2841599 - DNA, 25 bp, Homo sapien
atcacaatcacaagaactggaagta

SEQ ID NO: 2841600 - DNA, 25 bp, Homo sapien
taaatattttgaagaggattcctat

SEQ ID NO: 2841601 - DNA, 25 bp, Homo sapien
ttctaaatattttgaagaggattcc

SEQ ID NO: 2841602 - DNA, 25 bp, Homo sapien
ctttagttctaaatattttgaagag

SEQ ID NO: 2841603 - DNA, 25 bp, Homo sapien
tagttctaaatattttgaagaggat

SEQ ID NO: 2841604 - DNA, 25 bp, Homo sapien
tctcatgtcggtgccgtcgacggta

SEQ ID NO: 2841605 - DNA, 25 bp, Homo sapien
tgtgtcctctcatgtcggtgccgtc

SEQ ID NO: 2841606 - DNA, 25 bp, Homo sapien
cggtaatagtaagtgtcatctgtca

SEQ ID NO: 2841607 - DNA, 25 bp, Homo sapien
ccgtcgacggtaatagtaagtgtca

SEQ ID NO: 2841608 - DNA, 25 bp, Homo sapien
ataattataaggtctggctcgaggg

SEQ ID NO: 2841609 - DNA, 25 bp, Homo sapien
tcttatcaggattgctcaggactgc

SEQ ID NO: 2841610 - DNA, 25 bp, Homo sapien
gttcatctccgtattcatcatagcg

SEQ ID NO: 2841611 - DNA, 25 bp, Homo sapien
tcctccaaagaagacgttgaacagc

SEQ ID NO: 2841612 - DNA, 25 bp, Homo sapien
cagggcgagttttctgtaagctttc

SEQ ID NO: 2841613 - DNA, 25 bp, Homo sapien
taagctcttcgtcactagcatctcg

SEQ ID NO: 2841614 - DNA, 25 bp, Homo sapien
actagcatctcgagaaactcccaga

SEQ ID NO: 2841615 - DNA, 25 bp, Homo sapien
gagcacagttcttgtcagggtgaaa

SEQ ID NO: 2841616 - DNA, 25 bp, Homo sapien
gagaaataatccacgtaccataaag

SEQ ID NO: 2841617 - DNA, 25 bp, Homo sapien
cacaggttggactctaatgcagggt

SEQ ID NO: 2841618 - DNA, 25 bp, Homo sapien
gaaactctatactccttagtagtca

SEQ ID NO: 2841619 - DNA, 25 bp, Homo sapien
tgggctgtcagcagatcccttccac

SEQ ID NO: 2841620 - DNA, 25 bp, Homo sapien
ggcatgcaccataaccctgagttaa

SEQ ID NO: 2841621 - DNA, 25 bp, Homo sapien
gcgatggcatgttttcgactcactg

SEQ ID NO: 2841622 - DNA, 25 bp, Homo sapien
tacttcctgacttcacgaagaaaat

SEQ ID NO: 2841623 - DNA, 25 bp, Homo sapien
ttaaaggcagtcccttaatggcaaa

SEQ ID NO: 2841624 - DNA, 25 bp, Homo sapien
gggatattggttgataatttagact

SEQ ID NO: 2841625 - DNA, 25 bp, Homo sapien
tattgtactaatgaagtttcgccat

SEQ ID NO: 2841626 - DNA, 25 bp, Homo sapien
tgtctggttttggttacagagttaa

SEQ ID NO: 2841627 - DNA, 25 bp, Homo sapien
ctcgcccttcctggctccatcaatc

SEQ ID NO: 2841628 - DNA, 25 bp, Homo sapien
ttgtgccttcatgcagttacagcag

SEQ ID NO: 2841629 - DNA, 25 bp, Homo sapien
gtttcttctaactgcgtcaatgtaa

SEQ ID NO: 2841630 - DNA, 25 bp, Homo sapien
cctgccgggtctgagtccactcatt

SEQ ID NO: 2841631 - DNA, 25 bp, Homo sapien
cagctgttcctcactatacgtggag

SEQ ID NO: 2841632 - DNA, 25 bp, Homo sapien
cgctccccgctgcccagagtcgccg

SEQ ID NO: 2841633 - DNA, 25 bp, Homo sapien
ccccgctgcccagagtcgccgccat

SEQ ID NO: 2841634 - DNA, 25 bp, Homo sapien
cttccgtccagcgctccccgctgcc

SEQ ID NO: 2841635 - DNA, 25 bp, Homo sapien
ctccccgctgcccagagtcgccgcc

SEQ ID NO: 2841636 - DNA, 25 bp, Homo sapien
tccgccgagcctcccccgtgcccga

SEQ ID NO: 2841637 - DNA, 25 bp, Homo sapien
atcggttcccaatcagcaggtccgc

SEQ ID NO: 2841638 - DNA, 25 bp, Homo sapien
gttcccaatcagcaggtccgccgag

SEQ ID NO: 2841639 - DNA, 25 bp, Homo sapien
ggttcccaatcagcaggtccgccga

SEQ ID NO: 2841640 - DNA, 25 bp, Homo sapien
gaccaaatcaatcatgatatcaact

SEQ ID NO: 2841641 - DNA, 25 bp, Homo sapien
aatcaatcatgatatcaactagcac

SEQ ID NO: 2841642 - DNA, 25 bp, Homo sapien
gaagaccaaatcaatcatgatatca

SEQ ID NO: 2841643 - DNA, 25 bp, Homo sapien
ccaagaagaccaaatcaatcatgat

SEQ ID NO: 2841644 - DNA, 25 bp, Homo sapien
tcattgcgtgatcctgaacatctcc

SEQ ID NO: 2841645 - DNA, 25 bp, Homo sapien
tataggtgttatattaatagctggg

SEQ ID NO: 2841646 - DNA, 25 bp, Homo sapien
acaaaactcagataacaaggccttt

SEQ ID NO: 2841647 - DNA, 25 bp, Homo sapien
tttgccacaaatcattgcgtgatcc

SEQ ID NO: 2841648 - DNA, 25 bp, Homo sapien
atcaggtggttgaatataaaaagga

SEQ ID NO: 2841649 - DNA, 25 bp, Homo sapien
agggaactgatcagggacatccatc

SEQ ID NO: 2841650 - DNA, 25 bp, Homo sapien
gagggtgggatagaccttggagtcc

SEQ ID NO: 2841651 - DNA, 25 bp, Homo sapien
ccgcctgctctagaagatggacagc

SEQ ID NO: 2841652 - DNA, 25 bp, Homo sapien
tgccctatatgattgagatgctgcc

SEQ ID NO: 2841653 - DNA, 25 bp, Homo sapien
gtcctgtgccctatatgattgagat

SEQ ID NO: 2841654 - DNA, 25 bp, Homo sapien
tgattgagatgctgccccatccagc

SEQ ID NO: 2841655 - DNA, 25 bp, Homo sapien
cctatatgattgagatgctgcccca

SEQ ID NO: 2841656 - DNA, 25 bp, Homo sapien
taaggaccacgtagtcctgtgtgag

SEQ ID NO: 2841657 - DNA, 25 bp, Homo sapien
cacgtagtcctgtgtgagaaaaggg

SEQ ID NO: 2841658 - DNA, 25 bp, Homo sapien
gaccacgtagtcctgtgtgagaaaa

SEQ ID NO: 2841659 - DNA, 25 bp, Homo sapien
cctgtttaaggaccacgtagtcctg

SEQ ID NO: 2841660 - DNA, 25 bp, Homo sapien
cttatgactaacagcttatatacgc

SEQ ID NO: 2841661 - DNA, 25 bp, Homo sapien
tatatacgcaggtcattgcccagag

SEQ ID NO: 2841662 - DNA, 25 bp, Homo sapien
aacagcttatatacgcaggtcattg

SEQ ID NO: 2841663 - DNA, 25 bp, Homo sapien
tgtgtggttttataatgaagatgac

SEQ ID NO: 2841664 - DNA, 25 bp, Homo sapien
ttagaatgaagccccatgtccttga

SEQ ID NO: 2841665 - DNA, 25 bp, Homo sapien
tagaatgaagccccatgtccttgac

SEQ ID NO: 2841666 - DNA, 25 bp, Homo sapien
tatgatgagcagctgtactcagtgc

SEQ ID NO: 2841667 - DNA, 25 bp, Homo sapien
agtatgatgagcagctgtactcagt

SEQ ID NO: 2841668 - DNA, 25 bp, Homo sapien
cagtatgatgagcagctgtactcag

SEQ ID NO: 2841669 - DNA, 25 bp, Homo sapien
gtatgatgagcagctgtactcagtg

SEQ ID NO: 2841670 - DNA, 25 bp, Homo sapien
gcaggcagaataacaacagcacaaa

SEQ ID NO: 2841671 - DNA, 25 bp, Homo sapien
acaacagcacaaacagaatcctaga

SEQ ID NO: 2841672 - DNA, 25 bp, Homo sapien
acagcacaaacagaatcctagacat

SEQ ID NO: 2841673 - DNA, 25 bp, Homo sapien
caggcagaataacaacagcacaaac

SEQ ID NO: 2841674 - DNA, 25 bp, Homo sapien
gatggcttggcctgttagcctctga

SEQ ID NO: 2841675 - DNA, 25 bp, Homo sapien
gcttggcctgttagcctctgaggaa

SEQ ID NO: 2841676 - DNA, 25 bp, Homo sapien
tggcttggcctgttagcctctgagg

SEQ ID NO: 2841677 - DNA, 25 bp, Homo sapien
acagatggcttggcctgttagcctc

SEQ ID NO: 2841678 - DNA, 25 bp, Homo sapien
tggtcagacttagaccgccaaggcc

SEQ ID NO: 2841679 - DNA, 25 bp, Homo sapien
gtcagacttagaccgccaaggcctc

SEQ ID NO: 2841680 - DNA, 25 bp, Homo sapien
tgtggtcagacttagaccgccaagg

SEQ ID NO: 2841681 - DNA, 25 bp, Homo sapien
ctctgtggtcagacttagaccgcca

SEQ ID NO: 2841682 - DNA, 25 bp, Homo sapien
tctgggtcattgtgggctgggagtt

SEQ ID NO: 2841683 - DNA, 25 bp, Homo sapien
agaggtctgggtcattgtgggctgg

SEQ ID NO: 2841684 - DNA, 25 bp, Homo sapien
gtctgggtcattgtgggctgggagt

SEQ ID NO: 2841685 - DNA, 25 bp, Homo sapien
aggtctgggtcattgtgggctggga

SEQ ID NO: 2841686 - DNA, 25 bp, Homo sapien
gaggaagcccaggatcacccagcac

SEQ ID NO: 2841687 - DNA, 25 bp, Homo sapien
agcacagctgcatggctcctgcggt

SEQ ID NO: 2841688 - DNA, 25 bp, Homo sapien
caggatcacccagcacagctgcatg

SEQ ID NO: 2841689 - DNA, 25 bp, Homo sapien
acagctgcatggctcctgcggtgcc

SEQ ID NO: 2841690 - DNA, 25 bp, Homo sapien
gcgggcaggcagcagctcagtggag

SEQ ID NO: 2841691 - DNA, 25 bp, Homo sapien
tcagctgggtatgtggcgggcaggc

SEQ ID NO: 2841692 - DNA, 25 bp, Homo sapien
gtcagctgggtatgtggcgggcagg

SEQ ID NO: 2841693 - DNA, 25 bp, Homo sapien
ggcaggcagcagctcagtggaggct

SEQ ID NO: 2841694 - DNA, 25 bp, Homo sapien
ccaggcccagcatcgatgaagtcac

SEQ ID NO: 2841695 - DNA, 25 bp, Homo sapien
tgtggtcaccgtcattgtcgctgtc

SEQ ID NO: 2841696 - DNA, 25 bp, Homo sapien
aacctcgagttgacgggctgcctgt

SEQ ID NO: 2841697 - DNA, 25 bp, Homo sapien
cagtctgcatcatagtggcagtcca

SEQ ID NO: 2841698 - DNA, 25 bp, Homo sapien
taccattgagagagttcggcgtccc

SEQ ID NO: 2841699 - DNA, 25 bp, Homo sapien
cacaggttgaagacaccgaggctca

SEQ ID NO: 2841700 - DNA, 25 bp, Homo sapien
tagtcatgattacgcaagagttgcc

SEQ ID NO: 2841701 - DNA, 25 bp, Homo sapien
ggagagtccatagcaaccttgatgc

SEQ ID NO: 2841702 - DNA, 25 bp, Homo sapien
tcaggctcttgggacatcgtggagg

SEQ ID NO: 2841703 - DNA, 25 bp, Homo sapien
ctcttgggacatcgtggaggtactg

SEQ ID NO: 2841704 - DNA, 25 bp, Homo sapien
caagagaaatccgtgcggagaggga

SEQ ID NO: 2841705 - DNA, 25 bp, Homo sapien
gaggtcttcaagctgcccacagtaa

SEQ ID NO: 2841706 - DNA, 25 bp, Homo sapien
acctcctgggacagcgagaagctgc

SEQ ID NO: 2841707 - DNA, 25 bp, Homo sapien
cagcgagaagctgctgtcatctgca

SEQ ID NO: 2841708 - DNA, 25 bp, Homo sapien
aggtgccggagaacctcctgggaca

SEQ ID NO: 2841709 - DNA, 25 bp, Homo sapien
tcctcctgccgcaggtgccggagaa

SEQ ID NO: 2841710 - DNA, 25 bp, Homo sapien
ctgtattgtgacatggcaaacaaag

SEQ ID NO: 2841711 - DNA, 25 bp, Homo sapien
gaggcggcagttgttctgagactca

SEQ ID NO: 2841712 - DNA, 25 bp, Homo sapien
caaacaaagtctgcaagggggtggc

SEQ ID NO: 2841713 - DNA, 25 bp, Homo sapien
caggatgtcctcaagtgtccggcag

SEQ ID NO: 2841714 - DNA, 25 bp, Homo sapien
caatgggaggagaatatacagccgc

SEQ ID NO: 2841715 - DNA, 25 bp, Homo sapien
tgatgccagcatggtcaccggtctg

SEQ ID NO: 2841716 - DNA, 25 bp, Homo sapien
tgtaaacccgatccttgatgccagc

SEQ ID NO: 2841717 - DNA, 25 bp, Homo sapien
ttgtaagttcgaatccgggcctgga

SEQ ID NO: 2841718 - DNA, 25 bp, Homo sapien
ctcagatgtctatgtcagcgccacc

SEQ ID NO: 2841719 - DNA, 25 bp, Homo sapien
gaagagctgccgctttagcctgcaa

SEQ ID NO: 2841720 - DNA, 25 bp, Homo sapien
aaacacacaggcttagggcaggcac

SEQ ID NO: 2841721 - DNA, 25 bp, Homo sapien
gatcagtctcctagcggaagcccta

SEQ ID NO: 2841722 - DNA, 25 bp, Homo sapien
gataatcacttgaacttggaaggag

SEQ ID NO: 2841723 - DNA, 25 bp, Homo sapien
tcacttgaacttggaaggaggaggt

SEQ ID NO: 2841724 - DNA, 25 bp, Homo sapien
taatcacttgaacttggaaggagga

SEQ ID NO: 2841725 - DNA, 25 bp, Homo sapien
aggataatcacttgaacttggaagg

SEQ ID NO: 2841726 - DNA, 25 bp, Homo sapien
tcagccgcagatatccgatgtaata

SEQ ID NO: 2841727 - DNA, 25 bp, Homo sapien
cgatgtaatatgaccatgccagccc

SEQ ID NO: 2841728 - DNA, 25 bp, Homo sapien
agcccatgggccacgttgaaattcc

SEQ ID NO: 2841729 - DNA, 25 bp, Homo sapien
catgggccacgttgaaattcccttt

SEQ ID NO: 2841730 - DNA, 25 bp, Homo sapien
tccatcaaggacacccagagaactc

SEQ ID NO: 2841731 - DNA, 25 bp, Homo sapien
gacttgatccctcttttgccattgc

SEQ ID NO: 2841732 - DNA, 25 bp, Homo sapien
ccatggactccagcctttaaaccag

SEQ ID NO: 2841733 - DNA, 25 bp, Homo sapien
tccaggacattataggttctactcc

SEQ ID NO: 2841734 - DNA, 25 bp, Homo sapien
cccaggagggcaagcatccaagtga

SEQ ID NO: 2841735 - DNA, 25 bp, Homo sapien
tagtagaaatagatggacagcagca

SEQ ID NO: 2841736 - DNA, 25 bp, Homo sapien
aggatgttcagtgcctgcgagaggc

SEQ ID NO: 2841737 - DNA, 25 bp, Homo sapien
ccgaccgcatttgggagggagtagt

SEQ ID NO: 2841738 - DNA, 25 bp, Homo sapien
tggataccccgtccctgggtactgc

SEQ ID NO: 2841739 - DNA, 25 bp, Homo sapien
gtgacacacgttggataccccgtcc

SEQ ID NO: 2841740 - DNA, 25 bp, Homo sapien
cagggctaggcatcaagggagtgac

SEQ ID NO: 2841741 - DNA, 25 bp, Homo sapien
atcaagggagtgacacacgttggat

SEQ ID NO: 2841742 - DNA, 25 bp, Homo sapien
accaggtaccggagagtgtgctctg

SEQ ID NO: 2841743 - DNA, 25 bp, Homo sapien
ggagcaccaggtaccggagagtgtg

SEQ ID NO: 2841744 - DNA, 25 bp, Homo sapien
caggctgcagaccccgtttaacagc

SEQ ID NO: 2841745 - DNA, 25 bp, Homo sapien
tgcagaccccgtttaacagcagtcc

SEQ ID NO: 2841746 - DNA, 25 bp, Homo sapien
ctgggacacgggatggatggatgca

SEQ ID NO: 2841747 - DNA, 25 bp, Homo sapien
ggatggatggatgcaggctggagtg

SEQ ID NO: 2841748 - DNA, 25 bp, Homo sapien
cgggatggatggatgcaggctggag

SEQ ID NO: 2841749 - DNA, 25 bp, Homo sapien
atggatggatgcaggctggagtggg

SEQ ID NO: 2841750 - DNA, 25 bp, Homo sapien
gaggaccttagtcaacaaagtggaa

SEQ ID NO: 2841751 - DNA, 25 bp, Homo sapien
cagggaggaccttagtcaacaaagt

SEQ ID NO: 2841752 - DNA, 25 bp, Homo sapien
ggtttggcgttctgccaggctgatc

SEQ ID NO: 2841753 - DNA, 25 bp, Homo sapien
gggccctaggtttggcgttctgcca

SEQ ID NO: 2841754 - DNA, 25 bp, Homo sapien
gatgacgaggagagaaggcccggcg

SEQ ID NO: 2841755 - DNA, 25 bp, Homo sapien
ctacgagcagccaagggcagcttct

SEQ ID NO: 2841756 - DNA, 25 bp, Homo sapien
ccggcgctacgagcagccaagggca

SEQ ID NO: 2841757 - DNA, 25 bp, Homo sapien
aaggcccggcgctacgagcagccaa

SEQ ID NO: 2841758 - DNA, 25 bp, Homo sapien
gaaaatgagatgttaacaacgattg

SEQ ID NO: 2841759 - DNA, 25 bp, Homo sapien
ctgaaaatgagatgttaacaacgat

SEQ ID NO: 2841760 - DNA, 25 bp, Homo sapien
aaatgagatgttaacaacgattggt

SEQ ID NO: 2841761 - DNA, 25 bp, Homo sapien
aaaatgagatgttaacaacgattgg

SEQ ID NO: 2841762 - DNA, 25 bp, Homo sapien
acagctctgaacagcgggttcccct

SEQ ID NO: 2841763 - DNA, 25 bp, Homo sapien
aagccaccacgatcaaacacactgt

SEQ ID NO: 2841764 - DNA, 25 bp, Homo sapien
tgaacagcgggttcccctcaagcca

SEQ ID NO: 2841765 - DNA, 25 bp, Homo sapien
gtcacagctctgaacagcgggttcc

SEQ ID NO: 2841766 - DNA, 25 bp, Homo sapien
gatgattccccgtctcatatttttc

SEQ ID NO: 2841767 - DNA, 25 bp, Homo sapien
atcacacgatgattccccgtctcat

SEQ ID NO: 2841768 - DNA, 25 bp, Homo sapien
cagcacacacatcacacgatgattc

SEQ ID NO: 2841769 - DNA, 25 bp, Homo sapien
acacactcagccaaaggcagcacac

SEQ ID NO: 2841770 - DNA, 25 bp, Homo sapien
agtgaaaaatgaacagttatttccg

SEQ ID NO: 2841771 - DNA, 25 bp, Homo sapien
gggaggagtgaaaaatgaacagtta

SEQ ID NO: 2841772 - DNA, 25 bp, Homo sapien
aggagtgaaaaatgaacagttattt

SEQ ID NO: 2841773 - DNA, 25 bp, Homo sapien
ggaggagtgaaaaatgaacagttat

SEQ ID NO: 2841774 - DNA, 25 bp, Homo sapien
gcagagcagcagtagttcattcctg

SEQ ID NO: 2841775 - DNA, 25 bp, Homo sapien
ccgcagagcagcagtagttcattcc

SEQ ID NO: 2841776 - DNA, 25 bp, Homo sapien
gtccaggtcagaggggtcctcgccc

SEQ ID NO: 2841777 - DNA, 25 bp, Homo sapien
gtcagaggggtcctcgccctgaacc

SEQ ID NO: 2841778 - DNA, 25 bp, Homo sapien
tcacctgcccactggcatcaggtgc

SEQ ID NO: 2841779 - DNA, 25 bp, Homo sapien
cacctgcccactggcatcaggtgcc

SEQ ID NO: 2841780 - DNA, 25 bp, Homo sapien
tccatcacctgaacggaagacaatg

SEQ ID NO: 2841781 - DNA, 25 bp, Homo sapien
gtccatcacctgaacggaagacaat

SEQ ID NO: 2841782 - DNA, 25 bp, Homo sapien
tcacagatagcctgggtccatcacc

SEQ ID NO: 2841783 - DNA, 25 bp, Homo sapien
cacagatagcctgggtccatcacct

SEQ ID NO: 2841784 - DNA, 25 bp, Homo sapien
gaaggcgtggacggagccctttctc

SEQ ID NO: 2841785 - DNA, 25 bp, Homo sapien
ttgatctctaggtggggtggctagc

SEQ ID NO: 2841786 - DNA, 25 bp, Homo sapien
tttgatctctaggtggggtggctag

SEQ ID NO: 2841787 - DNA, 25 bp, Homo sapien
aaggcgtggacggagccctttctca

SEQ ID NO: 2841788 - DNA, 25 bp, Homo sapien
tttctcactagcgactcgggcctct

SEQ ID NO: 2841789 - DNA, 25 bp, Homo sapien
agcgactcgggcctctcaaaaccag

SEQ ID NO: 2841790 - DNA, 25 bp, Homo sapien
tcactagcgactcgggcctctcaaa

SEQ ID NO: 2841791 - DNA, 25 bp, Homo sapien
aggcagctttctcactagcgactcg

SEQ ID NO: 2841792 - DNA, 25 bp, Homo sapien
cagtgggcacggaaaagggacaaag

SEQ ID NO: 2841793 - DNA, 25 bp, Homo sapien
aagcagtgggcacggaaaagggaca

SEQ ID NO: 2841794 - DNA, 25 bp, Homo sapien
gcagtgggcacggaaaagggacaaa

SEQ ID NO: 2841795 - DNA, 25 bp, Homo sapien
agcagtgggcacggaaaagggacaa

SEQ ID NO: 2841796 - DNA, 25 bp, Homo sapien
ttcactaagctgagcagagtctgga

SEQ ID NO: 2841797 - DNA, 25 bp, Homo sapien
tgacgcagctggtacagtgcttgct

SEQ ID NO: 2841798 - DNA, 25 bp, Homo sapien
tcactgcaacccgagcggctatgag

SEQ ID NO: 2841799 - DNA, 25 bp, Homo sapien
gtccggaaggccaatctcactgcaa

SEQ ID NO: 2841800 - DNA, 25 bp, Homo sapien
ctccggctgtccgaccaagagaggc

SEQ ID NO: 2841801 - DNA, 25 bp, Homo sapien
gccgagcccgaggcttgggcttttg

SEQ ID NO: 2841802 - DNA, 25 bp, Homo sapien
gcggagggatctgcggcggtttagg

SEQ ID NO: 2841803 - DNA, 25 bp, Homo sapien
ggcggtttaggaggcggcgctgatc

SEQ ID NO: 2841804 - DNA, 25 bp, Homo sapien
cacttgagggccattgtcgggccag

SEQ ID NO: 2841805 - DNA, 25 bp, Homo sapien
caggcccgcatggtgtggactctta

SEQ ID NO: 2841806 - DNA, 25 bp, Homo sapien
aatccacaaggtaagcggccggagg

SEQ ID NO: 2841807 - DNA, 25 bp, Homo sapien
gacagaggtcgaaagggcttctcgc

SEQ ID NO: 2841808 - DNA, 25 bp, Homo sapien
ttgaatagctgacttcctaggcatg

SEQ ID NO: 2841809 - DNA, 25 bp, Homo sapien
cccattgcttggcttctataattga

SEQ ID NO: 2841810 - DNA, 25 bp, Homo sapien
gagctcttcacaaagtatggcttga

SEQ ID NO: 2841811 - DNA, 25 bp, Homo sapien
tgtcctagtaatgtgtctgcagtgg

SEQ ID NO: 2841812 - DNA, 25 bp, Homo sapien
gacgtcaggagatccgtccgtctcg

SEQ ID NO: 2841813 - DNA, 25 bp, Homo sapien
ggtgtcctactagttgcagataacg

SEQ ID NO: 2841814 - DNA, 25 bp, Homo sapien
caaacaaagtaatgccaggattatc

SEQ ID NO: 2841815 - DNA, 25 bp, Homo sapien
cagataacgtttggcatacatagct

SEQ ID NO: 2841816 - DNA, 25 bp, Homo sapien
tagcatccaaacttatcgaaggttt

SEQ ID NO: 2841817 - DNA, 25 bp, Homo sapien
agcatccaaacttatcgaaggtttt

SEQ ID NO: 2841818 - DNA, 25 bp, Homo sapien
gcatccaaacttatcgaaggttttc

SEQ ID NO: 2841819 - DNA, 25 bp, Homo sapien
ttagcatccaaacttatcgaaggtt

SEQ ID NO: 2841820 - DNA, 25 bp, Homo sapien
gcatggtattctgtgtttgccaaca

SEQ ID NO: 2841821 - DNA, 25 bp, Homo sapien
ttctctaggaagcatgcatgaggca

SEQ ID NO: 2841822 - DNA, 25 bp, Homo sapien
tagaatcgtttcttagtgtgtagac

SEQ ID NO: 2841823 - DNA, 25 bp, Homo sapien
cgtattcctagtacctaaagcatgg

SEQ ID NO: 2841824 - DNA, 25 bp, Homo sapien
aatttaacagtttatgtgactattg

SEQ ID NO: 2841825 - DNA, 25 bp, Homo sapien
agacggtggtaaccgtggtcagact

SEQ ID NO: 2841826 - DNA, 25 bp, Homo sapien
tgtgactattgatctacccatctta

SEQ ID NO: 2841827 - DNA, 25 bp, Homo sapien
aatagagagccagtcttgtagcata

SEQ ID NO: 2841828 - DNA, 25 bp, Homo sapien
ctcactccatcttccgcctcttggg

SEQ ID NO: 2841829 - DNA, 25 bp, Homo sapien
ttggctcactccatcttccgcctct

SEQ ID NO: 2841830 - DNA, 25 bp, Homo sapien
ttccagtgattctcccgcttcagcc

SEQ ID NO: 2841831 - DNA, 25 bp, Homo sapien
ggctcactccatcttccgcctcttg

SEQ ID NO: 2841832 - DNA, 25 bp, Homo sapien
tagattacaccccaaatgacagttt

SEQ ID NO: 2841833 - DNA, 25 bp, Homo sapien
ttcactatttagattacaccccaaa

SEQ ID NO: 2841834 - DNA, 25 bp, Homo sapien
cagctattttaatccacacttacag

SEQ ID NO: 2841835 - DNA, 25 bp, Homo sapien
tacagtcaggataattcttgcacag

SEQ ID NO: 2841836 - DNA, 25 bp, Homo sapien
cagtagtgttgacagttgttgaatt

SEQ ID NO: 2841837 - DNA, 25 bp, Homo sapien
caacagtagtgttgacagttgttga

SEQ ID NO: 2841838 - DNA, 25 bp, Homo sapien
caagcaacagtagtgttgacagttg

SEQ ID NO: 2841839 - DNA, 25 bp, Homo sapien
tgttgacagttgttgaatttgagct

SEQ ID NO: 2841840 - DNA, 25 bp, Homo sapien
ttcataaaggctcatcagataggcc

SEQ ID NO: 2841841 - DNA, 25 bp, Homo sapien
catgagttacacataagttggtgtc

SEQ ID NO: 2841842 - DNA, 25 bp, Homo sapien
agtcctgagcaacttcttgtatcag

SEQ ID NO: 2841843 - DNA, 25 bp, Homo sapien
gaagtgtagatttgtttcgaagtcc

SEQ ID NO: 2841844 - DNA, 25 bp, Homo sapien
tggatttttatatggcttcttagtc

SEQ ID NO: 2841845 - DNA, 25 bp, Homo sapien
attctggtggatttttatatggctt

SEQ ID NO: 2841846 - DNA, 25 bp, Homo sapien
tctggtggatttttatatggcttct

SEQ ID NO: 2841847 - DNA, 25 bp, Homo sapien
tttttatatggcttcttagtcttca

SEQ ID NO: 2841848 - DNA, 25 bp, Homo sapien
tagaggtatagatttgtagagccca

SEQ ID NO: 2841849 - DNA, 25 bp, Homo sapien
aaatagatcggttccagcacatgca

SEQ ID NO: 2841850 - DNA, 25 bp, Homo sapien
cactcatattcttcaagtagaggta

SEQ ID NO: 2841851 - DNA, 25 bp, Homo sapien
tagagcccagtctgccagtatgtgt

SEQ ID NO: 2841852 - DNA, 25 bp, Homo sapien
gaagcccttgatctctataggatag

SEQ ID NO: 2841853 - DNA, 25 bp, Homo sapien
gttattatctcttggtacagaacac

SEQ ID NO: 2841854 - DNA, 25 bp, Homo sapien
tggtaggaatatgagcgaatccttt

SEQ ID NO: 2841855 - DNA, 25 bp, Homo sapien
gctgaatttatgtgttgggagtaaa

SEQ ID NO: 2841856 - DNA, 25 bp, Homo sapien
tcttctgaagcaataaacccattca

SEQ ID NO: 2841857 - DNA, 25 bp, Homo sapien
tattcaaatgttcttctgaagcaat

SEQ ID NO: 2841858 - DNA, 25 bp, Homo sapien
aatgttcttctgaagcaataaaccc

SEQ ID NO: 2841859 - DNA, 25 bp, Homo sapien
tgttcttctgaagcaataaacccat

SEQ ID NO: 2841860 - DNA, 25 bp, Homo sapien
tacaggtacaacagaatagctcggg

SEQ ID NO: 2841861 - DNA, 25 bp, Homo sapien
tttgactgctttctatgagcccacg

SEQ ID NO: 2841862 - DNA, 25 bp, Homo sapien
gctgcgtgttgtacatacttggaac

SEQ ID NO: 2841863 - DNA, 25 bp, Homo sapien
ccaagcttctctttgtgtgtacagg

SEQ ID NO: 2841864 - DNA, 25 bp, Homo sapien
cacatcctgcattttaaggtctaag

SEQ ID NO: 2841865 - DNA, 25 bp, Homo sapien
gttatgaccaaccagattaaactct

SEQ ID NO: 2841866 - DNA, 25 bp, Homo sapien
tggagctattagtacatcaagtgtg

SEQ ID NO: 2841867 - DNA, 25 bp, Homo sapien
cattttattccgaaggagctacgtc

SEQ ID NO: 2841868 - DNA, 25 bp, Homo sapien
cagtcttgtttggagagtctacata

SEQ ID NO: 2841869 - DNA, 25 bp, Homo sapien
tgtgacattcccttggtacatagga

SEQ ID NO: 2841870 - DNA, 25 bp, Homo sapien
gaggcataagcttaagagcatttcc

SEQ ID NO: 2841871 - DNA, 25 bp, Homo sapien
taaagacccaattgctcctctggag

SEQ ID NO: 2841872 - DNA, 25 bp, Homo sapien
ttaactacatactgttgaccgtggg

SEQ ID NO: 2841873 - DNA, 25 bp, Homo sapien
tagagagcagccagcttattaccat

SEQ ID NO: 2841874 - DNA, 25 bp, Homo sapien
tgcagtcggagtcatgacagcacag

SEQ ID NO: 2841875 - DNA, 25 bp, Homo sapien
tgaccgtgggtcagttgcacagatc

SEQ ID NO: 2841876 - DNA, 25 bp, Homo sapien
tatgctttgctattggcgaatcagt

SEQ ID NO: 2841877 - DNA, 25 bp, Homo sapien
tgtcgtatgtaaaatccagtctgta

SEQ ID NO: 2841878 - DNA, 25 bp, Homo sapien
tcattgtcctgcgagtttatgcact

SEQ ID NO: 2841879 - DNA, 25 bp, Homo sapien
tcagtagtcaaaggtatcattgtcc

SEQ ID NO: 2841880 - DNA, 25 bp, Homo sapien
tctaaattatggctggaatgcctat

SEQ ID NO: 2841881 - DNA, 25 bp, Homo sapien
agacctgggtagcttgtcaggagaa

SEQ ID NO: 2841882 - DNA, 25 bp, Homo sapien
tacactaacctagcaatagaggcct

SEQ ID NO: 2841883 - DNA, 25 bp, Homo sapien
aaaggtagttgtcagagagagaccc

SEQ ID NO: 2841884 - DNA, 25 bp, Homo sapien
ggaaaagccaagaagaggccattga

SEQ ID NO: 2841885 - DNA, 25 bp, Homo sapien
cgtcctgtgtaagttgttattggta

SEQ ID NO: 2841886 - DNA, 25 bp, Homo sapien
gattgcccaacattgtactctgaaa

SEQ ID NO: 2841887 - DNA, 25 bp, Homo sapien
aatggttgatcccatttggaaaagc

SEQ ID NO: 2841888 - DNA, 25 bp, Homo sapien
cagcacatggctccttagaccttga

SEQ ID NO: 2841889 - DNA, 25 bp, Homo sapien
ctgggcaaccagcacatggctcctt

SEQ ID NO: 2841890 - DNA, 25 bp, Homo sapien
catggctccttagaccttgaagatg

SEQ ID NO: 2841891 - DNA, 25 bp, Homo sapien
ggcaaccagcacatggctccttaga

SEQ ID NO: 2841892 - DNA, 25 bp, Homo sapien
cctgcctggtgaataaaagcctggg

SEQ ID NO: 2841893 - DNA, 25 bp, Homo sapien
gggaggatttgcctccagccacgga

SEQ ID NO: 2841894 - DNA, 25 bp, Homo sapien
caaaagggaatccagttgtcctgcc

SEQ ID NO: 2841895 - DNA, 25 bp, Homo sapien
ggatttgcctccagccacggaggag

SEQ ID NO: 2841896 - DNA, 25 bp, Homo sapien
ccctggctacaagagatttcctgga

SEQ ID NO: 2841897 - DNA, 25 bp, Homo sapien
ggagctccctggctacaagagattt

SEQ ID NO: 2841898 - DNA, 25 bp, Homo sapien
ccacaggagtggcctttaagggtgt

SEQ ID NO: 2841899 - DNA, 25 bp, Homo sapien
tttaagggtgtgctgaaggactgat

SEQ ID NO: 2841900 - DNA, 25 bp, Homo sapien
caggatgctaccgtctttctgagca

SEQ ID NO: 2841901 - DNA, 25 bp, Homo sapien
tgtgggattatttgcgcctcctcca

SEQ ID NO: 2841902 - DNA, 25 bp, Homo sapien
cacttgtccccgagtggacgggttg

SEQ ID NO: 2841903 - DNA, 25 bp, Homo sapien
ctggaactgttgctgtgtgggatta

SEQ ID NO: 2841904 - DNA, 25 bp, Homo sapien
tgaggttcatagaagctcggcccaa

SEQ ID NO: 2841905 - DNA, 25 bp, Homo sapien
ggttcatagaagctcggcccaaggt

SEQ ID NO: 2841906 - DNA, 25 bp, Homo sapien
ttcatagaagctcggcccaaggtca

SEQ ID NO: 2841907 - DNA, 25 bp, Homo sapien
actgaggttcatagaagctcggccc

SEQ ID NO: 2841908 - DNA, 25 bp, Homo sapien
gtgggtcaccctctgaaaaccatcc

SEQ ID NO: 2841909 - DNA, 25 bp, Homo sapien
ttggaagtgctgacgtggctctggg

SEQ ID NO: 2841910 - DNA, 25 bp, Homo sapien
cagctgagtgggtcaccctctgaaa

SEQ ID NO: 2841911 - DNA, 25 bp, Homo sapien
ccagactccccggttggaagtgctg

SEQ ID NO: 2841912 - DNA, 25 bp, Homo sapien
gggccttggaagtcagaatggcaga

SEQ ID NO: 2841913 - DNA, 25 bp, Homo sapien
ccttggaagtcagaatggcagaagg

SEQ ID NO: 2841914 - DNA, 25 bp, Homo sapien
aaagggccttggaagtcagaatggc

SEQ ID NO: 2841915 - DNA, 25 bp, Homo sapien
aagggccttggaagtcagaatggca

SEQ ID NO: 2841916 - DNA, 25 bp, Homo sapien
taaacatttagcaccaactgggacc

SEQ ID NO: 2841917 - DNA, 25 bp, Homo sapien
aggtgtggccactagagcccccaca

SEQ ID NO: 2841918 - DNA, 25 bp, Homo sapien
gacttggtccagccacatcccgatg

SEQ ID NO: 2841919 - DNA, 25 bp, Homo sapien
agatggatctaaggaaaggaatcca

SEQ ID NO: 2841920 - DNA, 25 bp, Homo sapien
ttcaaagagcagttcatcccgggcc

SEQ ID NO: 2841921 - DNA, 25 bp, Homo sapien
cagttcaaagagcagttcatcccgg

SEQ ID NO: 2841922 - DNA, 25 bp, Homo sapien
ccaagcactgtctgagcaccccatt

SEQ ID NO: 2841923 - DNA, 25 bp, Homo sapien
aaagagcagttcatcccgggcccac

SEQ ID NO: 2841924 - DNA, 25 bp, Homo sapien
tccctcccggtcctcgaagcttctg

SEQ ID NO: 2841925 - DNA, 25 bp, Homo sapien
tcccggtcctcgaagcttctggccc

SEQ ID NO: 2841926 - DNA, 25 bp, Homo sapien
ccggtcctcgaagcttctggccccg

SEQ ID NO: 2841927 - DNA, 25 bp, Homo sapien
cctcccggtcctcgaagcttctggc

SEQ ID NO: 2841928 - DNA, 25 bp, Homo sapien
agctgtgaggcccagccgtccctcc

SEQ ID NO: 2841929 - DNA, 25 bp, Homo sapien
ctttcttgatagggtggctggcagc

SEQ ID NO: 2841930 - DNA, 25 bp, Homo sapien
tggaaggccggctgtacccagatca

SEQ ID NO: 2841931 - DNA, 25 bp, Homo sapien
gcagcggctgtgttgacaggcctcc

SEQ ID NO: 2841932 - DNA, 25 bp, Homo sapien
ccagtggggcgggtcctatcttctt

SEQ ID NO: 2841933 - DNA, 25 bp, Homo sapien
tctttgaggaccacaatttttccat

SEQ ID NO: 2841934 - DNA, 25 bp, Homo sapien
cctatcttctttgaggaccacaatt

SEQ ID NO: 2841935 - DNA, 25 bp, Homo sapien
gggcgggtcctatcttctttgagga

SEQ ID NO: 2841936 - DNA, 25 bp, Homo sapien
tccagcaacagccggcagggccggg

SEQ ID NO: 2841937 - DNA, 25 bp, Homo sapien
ttccagcaacagccggcagggccgg

SEQ ID NO: 2841938 - DNA, 25 bp, Homo sapien
cagggccgggcggcttcccagctcc

SEQ ID NO: 2841939 - DNA, 25 bp, Homo sapien
cgggtgcccgcgcagccaagtattt

SEQ ID NO: 2841940 - DNA, 25 bp, Homo sapien
agcaggctcagaacagcgggtgccc

SEQ ID NO: 2841941 - DNA, 25 bp, Homo sapien
ccaagtatttgctcgagctgtcaga

SEQ ID NO: 2841942 - DNA, 25 bp, Homo sapien
tcagaacagcgggtgcccgcgcagc

SEQ ID NO: 2841943 - DNA, 25 bp, Homo sapien
cccagctcaggtttcgatgaaacag

SEQ ID NO: 2841944 - DNA, 25 bp, Homo sapien
gcgggacaggcaagatgacccgata

SEQ ID NO: 2841945 - DNA, 25 bp, Homo sapien
gatgacccgataggcttttcccagc

SEQ ID NO: 2841946 - DNA, 25 bp, Homo sapien
ctcaggtttcgatgaaacaggaacc

SEQ ID NO: 2841947 - DNA, 25 bp, Homo sapien
acacagttctccataaacgactgga

SEQ ID NO: 2841948 - DNA, 25 bp, Homo sapien
cagttctccataaacgactggaccg

SEQ ID NO: 2841949 - DNA, 25 bp, Homo sapien
tctccataaacgactggaccgtggt

SEQ ID NO: 2841950 - DNA, 25 bp, Homo sapien
taaacgactggaccgtggttgagga

SEQ ID NO: 2841951 - DNA, 25 bp, Homo sapien
agagggaccccggtgacctggctgg

SEQ ID NO: 2841952 - DNA, 25 bp, Homo sapien
gcagagggaccccggtgacctggct

SEQ ID NO: 2841953 - DNA, 25 bp, Homo sapien
ctgggcagagggaccccggtgacct

SEQ ID NO: 2841954 - DNA, 25 bp, Homo sapien
tgggcagagggaccccggtgacctg

SEQ ID NO: 2841955 - DNA, 25 bp, Homo sapien
ccaggccgactaattaggcccggct

SEQ ID NO: 2841956 - DNA, 25 bp, Homo sapien
caggccgactaattaggcccggcta

SEQ ID NO: 2841957 - DNA, 25 bp, Homo sapien
gcccgaggtgatggcggctgttcct

SEQ ID NO: 2841958 - DNA, 25 bp, Homo sapien
cgcgtttctcggggcgggagccagc

SEQ ID NO: 2841959 - DNA, 25 bp, Homo sapien
gccccagagctggccgcgtttctcg

SEQ ID NO: 2841960 - DNA, 25 bp, Homo sapien
aggcccgaggtgatggcggctgttc

SEQ ID NO: 2841961 - DNA, 25 bp, Homo sapien
agagatatgcttatcccaggcggag

SEQ ID NO: 2841962 - DNA, 25 bp, Homo sapien
ctgaaccccatcgtggcgtgcaggt

SEQ ID NO: 2841963 - DNA, 25 bp, Homo sapien
ccatcgtggcgtgcaggtctgagta

SEQ ID NO: 2841964 - DNA, 25 bp, Homo sapien
tgagcacggatccagttcctcttgg

SEQ ID NO: 2841965 - DNA, 25 bp, Homo sapien
aggcaggccctgggcactgaggcac

SEQ ID NO: 2841966 - DNA, 25 bp, Homo sapien
ccaggcaggccctgggcactgaggc

SEQ ID NO: 2841967 - DNA, 25 bp, Homo sapien
caggcaggccctgggcactgaggca

SEQ ID NO: 2841968 - DNA, 25 bp, Homo sapien
agtgcttgggacaaccgccatagcg

SEQ ID NO: 2841969 - DNA, 25 bp, Homo sapien
gcccgcctgccgtaatgatttttta

SEQ ID NO: 2841970 - DNA, 25 bp, Homo sapien
ttttaattatgcagccagtgctcgg

SEQ ID NO: 2841971 - DNA, 25 bp, Homo sapien
tctaagcgtgagctcacactcagct

SEQ ID NO: 2841972 - DNA, 25 bp, Homo sapien
aactcaaaaccctgggccagccgcg

SEQ ID NO: 2841973 - DNA, 25 bp, Homo sapien
tcccgttctgcttcctgcggaggct

SEQ ID NO: 2841974 - DNA, 25 bp, Homo sapien
aggctgcggaatgcccggagctctg

SEQ ID NO: 2841975 - DNA, 25 bp, Homo sapien
aaccctgggccagccgcgggtggcg

SEQ ID NO: 2841976 - DNA, 25 bp, Homo sapien
cctgggcaaagaatggacaatcagt

SEQ ID NO: 2841977 - DNA, 25 bp, Homo sapien
tgtatccatccacgcgtgcagagct

SEQ ID NO: 2841978 - DNA, 25 bp, Homo sapien
ctataaagtaccgagacttcctggg

SEQ ID NO: 2841979 - DNA, 25 bp, Homo sapien
ttgatggcgccgtgtagaagccgct

SEQ ID NO: 2841980 - DNA, 25 bp, Homo sapien
gcttaaccctctcgctacttggagg

SEQ ID NO: 2841981 - DNA, 25 bp, Homo sapien
gacagccccgctgtggtgagaacag

SEQ ID NO: 2841982 - DNA, 25 bp, Homo sapien
tagtgtcagcgctatggcctcagtt

SEQ ID NO: 2841983 - DNA, 25 bp, Homo sapien
caagtactgcgaggaagcttaaccc

SEQ ID NO: 2841984 - DNA, 25 bp, Homo sapien
cacagggtcatgctaatattctcta

SEQ ID NO: 2841985 - DNA, 25 bp, Homo sapien
atattctctatgtcattccaatttt

SEQ ID NO: 2841986 - DNA, 25 bp, Homo sapien
cttgcacagggtcatgctaatattc

SEQ ID NO: 2841987 - DNA, 25 bp, Homo sapien
ttagtgtatgtgctattgaagcaag

SEQ ID NO: 2841988 - DNA, 25 bp, Homo sapien
ggtgcctgcaagcaagctcggctaa

SEQ ID NO: 2841989 - DNA, 25 bp, Homo sapien
tacaggtgcctgcaagcaagctcgg

SEQ ID NO: 2841990 - DNA, 25 bp, Homo sapien
tgcctgcaagcaagctcggctaatt

SEQ ID NO: 2841991 - DNA, 25 bp, Homo sapien
caggtgcctgcaagcaagctcggct

SEQ ID NO: 2841992 - DNA, 25 bp, Homo sapien
tagggctgtcagtttagcaggcaac

SEQ ID NO: 2841993 - DNA, 25 bp, Homo sapien
tcagcatacaaggtagagaagccag

SEQ ID NO: 2841994 - DNA, 25 bp, Homo sapien
aaatgctggttgctttgtgctgaca

SEQ ID NO: 2841995 - DNA, 25 bp, Homo sapien
gcaagaccataggagatcagccacc

SEQ ID NO: 2841996 - DNA, 25 bp, Homo sapien
ctcttgttcatatacactgtcaggc

SEQ ID NO: 2841997 - DNA, 25 bp, Homo sapien
gcctcttgttcatatacactgtcag

SEQ ID NO: 2841998 - DNA, 25 bp, Homo sapien
aaggctatgtagagttgagtgacag

SEQ ID NO: 2841999 - DNA, 25 bp, Homo sapien
tctgggtgaaggctatgtagagttg

SEQ ID NO: 2842000 - DNA, 25 bp, Homo sapien
tatctcgccgccaaagtttcacagc

SEQ ID NO: 2842001 - DNA, 25 bp, Homo sapien
tcacgccgtcagacccaatttatct

SEQ ID NO: 2842002 - DNA, 25 bp, Homo sapien
gggatgttttccaatacgacagcat

SEQ ID NO: 2842003 - DNA, 25 bp, Homo sapien
acagccatctgctcgagtggaacgg

SEQ ID NO: 2842004 - DNA, 25 bp, Homo sapien
cggctttgtgtgcaccggccgcggt

SEQ ID NO: 2842005 - DNA, 25 bp, Homo sapien
ggcggctttgtgtgcaccggccgcg

SEQ ID NO: 2842006 - DNA, 25 bp, Homo sapien
tgggctgagcctcggtaatttccga

SEQ ID NO: 2842007 - DNA, 25 bp, Homo sapien
agcctcggtaatttccgagtcggcg

SEQ ID NO: 2842008 - DNA, 25 bp, Homo sapien
tggggcctgtcaagttggggttgtg

SEQ ID NO: 2842009 - DNA, 25 bp, Homo sapien
gggcctgtcaagttggggttgtgga

SEQ ID NO: 2842010 - DNA, 25 bp, Homo sapien
agttctggggcctgtcaagttgggg

SEQ ID NO: 2842011 - DNA, 25 bp, Homo sapien
cctagttctggggcctgtcaagttg

SEQ ID NO: 2842012 - DNA, 25 bp, Homo sapien
cttcttaatggattctcctccagct

SEQ ID NO: 2842013 - DNA, 25 bp, Homo sapien
gcaggggccttcttaatggattctc

SEQ ID NO: 2842014 - DNA, 25 bp, Homo sapien
gccttcttaatggattctcctccag

SEQ ID NO: 2842015 - DNA, 25 bp, Homo sapien
gggccttcttaatggattctcctcc

SEQ ID NO: 2842016 - DNA, 25 bp, Homo sapien
tgccagatccacaggtgtgctcacg

SEQ ID NO: 2842017 - DNA, 25 bp, Homo sapien
caggtgtgctcacgggggacccaca

SEQ ID NO: 2842018 - DNA, 25 bp, Homo sapien
cacgggggacccacaggtgtgctca

SEQ ID NO: 2842019 - DNA, 25 bp, Homo sapien
ccagatccacaggtgtgctcacggg

SEQ ID NO: 2842020 - DNA, 25 bp, Homo sapien
gtgacttccatgacccacccgatgt

SEQ ID NO: 2842021 - DNA, 25 bp, Homo sapien
agggacatttctgatctaagtcctg

SEQ ID NO: 2842022 - DNA, 25 bp, Homo sapien
gtgccatactgttccagggcttcag

SEQ ID NO: 2842023 - DNA, 25 bp, Homo sapien
tcctggctgtgaaagtggcgctgtt

SEQ ID NO: 2842024 - DNA, 25 bp, Homo sapien
gagggcgcgcgaggccgagtgggga

SEQ ID NO: 2842025 - DNA, 25 bp, Homo sapien
gggcgggcgaggacgccgagctatg

SEQ ID NO: 2842026 - DNA, 25 bp, Homo sapien
gagcagcgggaaggtcaggggcgcc

SEQ ID NO: 2842027 - DNA, 25 bp, Homo sapien
gacgccgagctatgagaggagggag

SEQ ID NO: 2842028 - DNA, 25 bp, Homo sapien
tagccagagtggtcttgatcttctg

SEQ ID NO: 2842029 - DNA, 25 bp, Homo sapien
cctcgtgatccacctgtcttggctt

SEQ ID NO: 2842030 - DNA, 25 bp, Homo sapien
agccagagtggtcttgatcttctga

SEQ ID NO: 2842031 - DNA, 25 bp, Homo sapien
tggccccatgctggccgggcctcgt

SEQ ID NO: 2842032 - DNA, 25 bp, Homo sapien
ctctcggcactgcaagtccctggca

SEQ ID NO: 2842033 - DNA, 25 bp, Homo sapien
ctgcaagtccctggcactcctgtgg

SEQ ID NO: 2842034 - DNA, 25 bp, Homo sapien
ctggccccatgctggccgggcctcg

SEQ ID NO: 2842035 - DNA, 25 bp, Homo sapien
gtcgtagagcttgggcagtctccct

SEQ ID NO: 2842036 - DNA, 25 bp, Homo sapien
gattgcacaggcaggtcgtagagct

SEQ ID NO: 2842037 - DNA, 25 bp, Homo sapien
aggtgactggccccttacctcagcc

SEQ ID NO: 2842038 - DNA, 25 bp, Homo sapien
tctccagcccgtggccttgctctcc

SEQ ID NO: 2842039 - DNA, 25 bp, Homo sapien
gggctggcgtgtgtgtcggggggct

SEQ ID NO: 2842040 - DNA, 25 bp, Homo sapien
tggccccccgcactccctgctcctc

SEQ ID NO: 2842041 - DNA, 25 bp, Homo sapien
tgctcctcccttggcggcgtctccc

SEQ ID NO: 2842042 - DNA, 25 bp, Homo sapien
gcgtctcccgggggctggcgtgtgt

SEQ ID NO: 2842043 - DNA, 25 bp, Homo sapien
tttgtataatctgggggtacgcgtg

SEQ ID NO: 2842044 - DNA, 25 bp, Homo sapien
agccaccttcacgaggctgcagctt

SEQ ID NO: 2842045 - DNA, 25 bp, Homo sapien
ttcacgaggctgcagctttgaggat

SEQ ID NO: 2842046 - DNA, 25 bp, Homo sapien
cagtttcccaactttgacagccctg

SEQ ID NO: 2842047 - DNA, 25 bp, Homo sapien
catctacctggtaatctgcgcacca

SEQ ID NO: 2842048 - DNA, 25 bp, Homo sapien
acctggtaatctgcgcaccaggtca

SEQ ID NO: 2842049 - DNA, 25 bp, Homo sapien
ggtcagcaaatctgactgaacccct

SEQ ID NO: 2842050 - DNA, 25 bp, Homo sapien
ctgaacccctacatcagaccagatg

SEQ ID NO: 2842051 - DNA, 25 bp, Homo sapien
ttcgtaccacatgctgttgtatttt

SEQ ID NO: 2842052 - DNA, 25 bp, Homo sapien
accacatgctgttgtattttcatca

SEQ ID NO: 2842053 - DNA, 25 bp, Homo sapien
ccacatgctgttgtattttcatcaa

SEQ ID NO: 2842054 - DNA, 25 bp, Homo sapien
tcgtaccacatgctgttgtattttc

SEQ ID NO: 2842055 - DNA, 25 bp, Homo sapien
aggatggttttgaccctggatgccc

SEQ ID NO: 2842056 - DNA, 25 bp, Homo sapien
gatgatgtagatctcgctgccctta

SEQ ID NO: 2842057 - DNA, 25 bp, Homo sapien
ccctggatgcccgatgatgtagatc

SEQ ID NO: 2842058 - DNA, 25 bp, Homo sapien
ggttttgaccctggatgcccgatga

SEQ ID NO: 2842059 - DNA, 25 bp, Homo sapien
tcagctgaagtgtgttttagaccca

SEQ ID NO: 2842060 - DNA, 25 bp, Homo sapien
tgccacttgacgatcacggattagc

SEQ ID NO: 2842061 - DNA, 25 bp, Homo sapien
tgaaattgaaaacgccatgtggcac

SEQ ID NO: 2842062 - DNA, 25 bp, Homo sapien
gattagctagcacctttaagccctg

SEQ ID NO: 2842063 - DNA, 25 bp, Homo sapien
ccacatagagattggtgggttcatt

SEQ ID NO: 2842064 - DNA, 25 bp, Homo sapien
tgggttcattgggtggcttctgact

SEQ ID NO: 2842065 - DNA, 25 bp, Homo sapien
tcaaccgagggccacatagagattg

SEQ ID NO: 2842066 - DNA, 25 bp, Homo sapien
aaccgagggccacatagagattggt

SEQ ID NO: 2842067 - DNA, 25 bp, Homo sapien
tttgggtggaagacgtccgtgtgtc

SEQ ID NO: 2842068 - DNA, 25 bp, Homo sapien
gggtggaagacgtccgtgtgtctgg

SEQ ID NO: 2842069 - DNA, 25 bp, Homo sapien
tgtttgggtggaagacgtccgtgtg

SEQ ID NO: 2842070 - DNA, 25 bp, Homo sapien
tcagctgtttgggtggaagacgtcc

SEQ ID NO: 2842071 - DNA, 25 bp, Homo sapien
ccagggcaggaactgggccagagtt

SEQ ID NO: 2842072 - DNA, 25 bp, Homo sapien
caggaactgggccagagttccaacg

SEQ ID NO: 2842073 - DNA, 25 bp, Homo sapien
cagtccggcccatagatccagggca

SEQ ID NO: 2842074 - DNA, 25 bp, Homo sapien
tcagtccggcccatagatccagggc

SEQ ID NO: 2842075 - DNA, 25 bp, Homo sapien
cctttttgacaaattagcagtggac

SEQ ID NO: 2842076 - DNA, 25 bp, Homo sapien
gacaaattagcagtggacccagttt

SEQ ID NO: 2842077 - DNA, 25 bp, Homo sapien
aatgttcaagtgtcaacagtcaggt

SEQ ID NO: 2842078 - DNA, 25 bp, Homo sapien
caggactggagacgagtggatgtca

SEQ ID NO: 2842079 - DNA, 25 bp, Homo sapien
tgaccatgcatccaatctaaagaat

SEQ ID NO: 2842080 - DNA, 25 bp, Homo sapien
gggaatacactgtcgagtggctctt

SEQ ID NO: 2842081 - DNA, 25 bp, Homo sapien
tgtcgagtggctcttctcggtccca

SEQ ID NO: 2842082 - DNA, 25 bp, Homo sapien
ggtcccagcgtgaccatgcatccaa

SEQ ID NO: 2842083 - DNA, 25 bp, Homo sapien
gacctgtaaacgaaggtgctgcaga

SEQ ID NO: 2842084 - DNA, 25 bp, Homo sapien
aagacgacctgtaaacgaaggtgct

SEQ ID NO: 2842085 - DNA, 25 bp, Homo sapien
ctgaaatgcaaaggacatgcaggtg

SEQ ID NO: 2842086 - DNA, 25 bp, Homo sapien
catgcaggtgtaaaatagaaaagac

SEQ ID NO: 2842087 - DNA, 25 bp, Homo sapien
cccctggaagttaccccagctccag

SEQ ID NO: 2842088 - DNA, 25 bp, Homo sapien
tcaggctcttggggaaacgtttctc

SEQ ID NO: 2842089 - DNA, 25 bp, Homo sapien
gacaggagccgccaacattgggccc

SEQ ID NO: 2842090 - DNA, 25 bp, Homo sapien
cattcgggtagctgtgtctttatct

SEQ ID NO: 2842091 - DNA, 25 bp, Homo sapien
tccagtaggcggtctctggtctcct

SEQ ID NO: 2842092 - DNA, 25 bp, Homo sapien
acgcctttgccgttagctagtatta

SEQ ID NO: 2842093 - DNA, 25 bp, Homo sapien
aaatcaggatgttacatataaatag

SEQ ID NO: 2842094 - DNA, 25 bp, Homo sapien
tctccttaaagatagtggggcgggc

SEQ ID NO: 2842095 - DNA, 25 bp, Homo sapien
gcggcccgcggctgtgtctgctgct

SEQ ID NO: 2842096 - DNA, 25 bp, Homo sapien
gtgagtagtaagtcctgctgtcggc

SEQ ID NO: 2842097 - DNA, 25 bp, Homo sapien
agtggcgccgagtcctgcttggccc

SEQ ID NO: 2842098 - DNA, 25 bp, Homo sapien
tgctggcccgcgtgctgtggctgtc

SEQ ID NO: 2842099 - DNA, 25 bp, Homo sapien
gagcgcagcgcgtcgtgcgccccac

SEQ ID NO: 2842100 - DNA, 25 bp, Homo sapien
cgagcgcagcgcgtcgtgcgcccca

SEQ ID NO: 2842101 - DNA, 25 bp, Homo sapien
ggcggcgagtccgagcgcagcgcgt

SEQ ID NO: 2842102 - DNA, 25 bp, Homo sapien
cgtcgtcgtccgacgccgaggctga

SEQ ID NO: 2842103 - DNA, 25 bp, Homo sapien
caggcccaggaaaggtgtgctctcg

SEQ ID NO: 2842104 - DNA, 25 bp, Homo sapien
aaaggtgtgctctcggccgccagcg

SEQ ID NO: 2842105 - DNA, 25 bp, Homo sapien
tgctcagcgacagcgagtccctcgc

SEQ ID NO: 2842106 - DNA, 25 bp, Homo sapien
acgtcctgcgggacgcaccgcgcgc

SEQ ID NO: 2842107 - DNA, 25 bp, Homo sapien
gcgcgcactcctgcgtggtctcgta

SEQ ID NO: 2842108 - DNA, 25 bp, Homo sapien
cccgccgacgtcctgcgggacgcac

SEQ ID NO: 2842109 - DNA, 25 bp, Homo sapien
cgccagcccgttgaggcgcgagcgg

SEQ ID NO: 2842110 - DNA, 25 bp, Homo sapien
gtcctcggggatgcggaaggggctg

SEQ ID NO: 2842111 - DNA, 25 bp, Homo sapien
tcgtcgtcctcggggatgcggaagg

SEQ ID NO: 2842112 - DNA, 25 bp, Homo sapien
cgtcgtcctcggggatgcggaaggg

SEQ ID NO: 2842113 - DNA, 25 bp, Homo sapien
gatctcgaaagttggcacctgcgtg

SEQ ID NO: 2842114 - DNA, 25 bp, Homo sapien
gtcatagctgcgctgcatgtctgcg

SEQ ID NO: 2842115 - DNA, 25 bp, Homo sapien
ggtgccgcagtaacggctgctgctc

SEQ ID NO: 2842116 - DNA, 25 bp, Homo sapien
gctgctcggccaggcggtaactgat

SEQ ID NO: 2842117 - DNA, 25 bp, Homo sapien
agaggcagaggcatgggccagggcc

SEQ ID NO: 2842118 - DNA, 25 bp, Homo sapien
ggcagaggcatgggccagggccagg

SEQ ID NO: 2842119 - DNA, 25 bp, Homo sapien
ggagaggcagaggcatgggccaggg

SEQ ID NO: 2842120 - DNA, 25 bp, Homo sapien
gaggcagaggcatgggccagggcca

SEQ ID NO: 2842121 - DNA, 25 bp, Homo sapien
tctgtaagacccttccgccagtccc

SEQ ID NO: 2842122 - DNA, 25 bp, Homo sapien
tcaggctcacgctggggtacatgtt

SEQ ID NO: 2842123 - DNA, 25 bp, Homo sapien
atctggtttaataccgcagctctgt

SEQ ID NO: 2842124 - DNA, 25 bp, Homo sapien
ttaataccgcagctctgtaagaccc

SEQ ID NO: 2842125 - DNA, 25 bp, Homo sapien
gcccggctgcctgtttgttcttgat

SEQ ID NO: 2842126 - DNA, 25 bp, Homo sapien
ttaaattagatggtcactgtccacc

SEQ ID NO: 2842127 - DNA, 25 bp, Homo sapien
tctagtgtgaaaagtgtcctgggag

SEQ ID NO: 2842128 - DNA, 25 bp, Homo sapien
ttaacatgccgatggctctgagcag

SEQ ID NO: 2842129 - DNA, 25 bp, Homo sapien
tcgcgaagggagtccacggaatcgt

SEQ ID NO: 2842130 - DNA, 25 bp, Homo sapien
ccactgatgatagcatgatccccga

SEQ ID NO: 2842131 - DNA, 25 bp, Homo sapien
gaagtcaggctctcagaacgttcca

SEQ ID NO: 2842132 - DNA, 25 bp, Homo sapien
gaacgttccaggctccacgtgtggc

SEQ ID NO: 2842133 - DNA, 25 bp, Homo sapien
aaggagaacaggagtggctcccaga

SEQ ID NO: 2842134 - DNA, 25 bp, Homo sapien
tctgtggctggcacgttcttggaaa

SEQ ID NO: 2842135 - DNA, 25 bp, Homo sapien
tttctctcctgatgacatggtctgt

SEQ ID NO: 2842136 - DNA, 25 bp, Homo sapien
ggagtggctcccagagaaggtggtc

SEQ ID NO: 2842137 - DNA, 25 bp, Homo sapien
tcagaagggggccccaggaaagcca

SEQ ID NO: 2842138 - DNA, 25 bp, Homo sapien
ttctgccggaggtggttgtgcatct

SEQ ID NO: 2842139 - DNA, 25 bp, Homo sapien
ccattggccaagctccggttctgat

SEQ ID NO: 2842140 - DNA, 25 bp, Homo sapien
ggttgtgcatctgcttccgctgttt

SEQ ID NO: 2842141 - DNA, 25 bp, Homo sapien
tgatgggccgggcacatgttctgcc

SEQ ID NO: 2842142 - DNA, 25 bp, Homo sapien
gaggacccatcagtttgctcaaggt

SEQ ID NO: 2842143 - DNA, 25 bp, Homo sapien
aacacaaaggtccacgaggacccat

SEQ ID NO: 2842144 - DNA, 25 bp, Homo sapien
ggtccacgaggacccatcagtttgc

SEQ ID NO: 2842145 - DNA, 25 bp, Homo sapien
cacctactaagtacccgcaaaaatg

SEQ ID NO: 2842146 - DNA, 25 bp, Homo sapien
ccacgaccagcagagccacgcagat

SEQ ID NO: 2842147 - DNA, 25 bp, Homo sapien
ccagcagagccacgcagatgcccgt

SEQ ID NO: 2842148 - DNA, 25 bp, Homo sapien
aggccaccacacagacgatgcccac

SEQ ID NO: 2842149 - DNA, 25 bp, Homo sapien
agacgatgcccacgaccagcagagc

SEQ ID NO: 2842150 - DNA, 25 bp, Homo sapien
cctcttctggtacagctcctcggct

SEQ ID NO: 2842151 - DNA, 25 bp, Homo sapien
ggaccctcttctggtacagctcctc

SEQ ID NO: 2842152 - DNA, 25 bp, Homo sapien
tcaggaccctcttctggtacagctc

SEQ ID NO: 2842153 - DNA, 25 bp, Homo sapien
ctcttctggtacagctcctcggctt

SEQ ID NO: 2842154 - DNA, 25 bp, Homo sapien
agtgctcaaaccttaacacaaaggc

SEQ ID NO: 2842155 - DNA, 25 bp, Homo sapien
aacacaaaggcattcacagcccctc

SEQ ID NO: 2842156 - DNA, 25 bp, Homo sapien
gtgctcaaaccttaacacaaaggca

SEQ ID NO: 2842157 - DNA, 25 bp, Homo sapien
acagtgctcaaaccttaacacaaag

SEQ ID NO: 2842158 - DNA, 25 bp, Homo sapien
gcagaggcgcaagagtcagttggca

SEQ ID NO: 2842159 - DNA, 25 bp, Homo sapien
gagcaaactgcaactcacaggaaga

SEQ ID NO: 2842160 - DNA, 25 bp, Homo sapien
catggtgcctgagcctgatttcact

SEQ ID NO: 2842161 - DNA, 25 bp, Homo sapien
aattacagtcttggaagtgggatcc

SEQ ID NO: 2842162 - DNA, 25 bp, Homo sapien
gctccagatagcaggtcacttctct

SEQ ID NO: 2842163 - DNA, 25 bp, Homo sapien
cgtggcaatccgcaggaagtcctgc

SEQ ID NO: 2842164 - DNA, 25 bp, Homo sapien
gtgtctgatattctcatctgccttg

SEQ ID NO: 2842165 - DNA, 25 bp, Homo sapien
gcttccccaggtgtatagtcagcac

SEQ ID NO: 2842166 - DNA, 25 bp, Homo sapien
tatagtcagcaccactagatccagg

SEQ ID NO: 2842167 - DNA, 25 bp, Homo sapien
ggaaccgaatagtagcagctgcagc

SEQ ID NO: 2842168 - DNA, 25 bp, Homo sapien
caaaggccagtactgtttagagtgg

SEQ ID NO: 2842169 - DNA, 25 bp, Homo sapien
ctaactggcctcctctttgagtcaa

SEQ ID NO: 2842170 - DNA, 25 bp, Homo sapien
cagcttctagggctcctaactggcc

SEQ ID NO: 2842171 - DNA, 25 bp, Homo sapien
atgtcccatgccatacagtcatagg

SEQ ID NO: 2842172 - DNA, 25 bp, Homo sapien
acatgtcccatgccatacagtcata

SEQ ID NO: 2842173 - DNA, 25 bp, Homo sapien
tgtcccatgccatacagtcataggc

SEQ ID NO: 2842174 - DNA, 25 bp, Homo sapien
tcccatgccatacagtcataggctg

SEQ ID NO: 2842175 - DNA, 25 bp, Homo sapien
gacacttggttccacactcctcatg

SEQ ID NO: 2842176 - DNA, 25 bp, Homo sapien
ctcccagtatccagtgccatgtgga

SEQ ID NO: 2842177 - DNA, 25 bp, Homo sapien
ccagtgccatgtggacacttggttc

SEQ ID NO: 2842178 - DNA, 25 bp, Homo sapien
ggacacttggttccacactcctcat

SEQ ID NO: 2842179 - DNA, 25 bp, Homo sapien
tgtccccggtgtatcccacaggaca

SEQ ID NO: 2842180 - DNA, 25 bp, Homo sapien
actgctgacacctgtccccggtgta

SEQ ID NO: 2842181 - DNA, 25 bp, Homo sapien
gagaagttgaccattgcgaactgct

SEQ ID NO: 2842182 - DNA, 25 bp, Homo sapien
cattgcgaactgctgacacctgtcc

SEQ ID NO: 2842183 - DNA, 25 bp, Homo sapien
tccttgccaccgttaccatttgtat

SEQ ID NO: 2842184 - DNA, 25 bp, Homo sapien
taccatttgtattggccttgccact

SEQ ID NO: 2842185 - DNA, 25 bp, Homo sapien
ccaggatagcaagacacaggcattg

SEQ ID NO: 2842186 - DNA, 25 bp, Homo sapien
aggcattgcaacaccccggcacggg

SEQ ID NO: 2842187 - DNA, 25 bp, Homo sapien
ccagaagctttctaaggagcaggga

SEQ ID NO: 2842188 - DNA, 25 bp, Homo sapien
cagaagctttctaaggagcagggac

SEQ ID NO: 2842189 - DNA, 25 bp, Homo sapien
tacaatcgcaaaggcagtttctcca

SEQ ID NO: 2842190 - DNA, 25 bp, Homo sapien
tctctgtccgaagaatccatttgga

SEQ ID NO: 2842191 - DNA, 25 bp, Homo sapien
tccaaacatctctgtccgaagaatc

SEQ ID NO: 2842192 - DNA, 25 bp, Homo sapien
ttaggatctggcatgtacaatcgca

SEQ ID NO: 2842193 - DNA, 25 bp, Homo sapien
tcagttatgactctggggaaggtct

SEQ ID NO: 2842194 - DNA, 25 bp, Homo sapien
tcatcagttatgactctggggaagg

SEQ ID NO: 2842195 - DNA, 25 bp, Homo sapien
caggtcatcagttatgactctgggg

SEQ ID NO: 2842196 - DNA, 25 bp, Homo sapien
ggtcatcagttatgactctggggaa

SEQ ID NO: 2842197 - DNA, 25 bp, Homo sapien
gggtggatgaaggatggcggtgtgc

SEQ ID NO: 2842198 - DNA, 25 bp, Homo sapien
atgtgtgctgccctcacccggggga

SEQ ID NO: 2842199 - DNA, 25 bp, Homo sapien
tctccttttggtagcctggggataa

SEQ ID NO: 2842200 - DNA, 25 bp, Homo sapien
agcctggggataatgccatgtgtgc

SEQ ID NO: 2842201 - DNA, 25 bp, Homo sapien
gtccacccgcagaatggcctctggg

SEQ ID NO: 2842202 - DNA, 25 bp, Homo sapien
ccagctcgtccacccgcagaatggc

SEQ ID NO: 2842203 - DNA, 25 bp, Homo sapien
ttcaggtgtcatcaggaaccccaag

SEQ ID NO: 2842204 - DNA, 25 bp, Homo sapien
ccattcaggtgtcatcaggaacccc

SEQ ID NO: 2842205 - DNA, 25 bp, Homo sapien
ccttctccagcacagctctgaggac

SEQ ID NO: 2842206 - DNA, 25 bp, Homo sapien
cccttctccagcacagctctgagga

SEQ ID NO: 2842207 - DNA, 25 bp, Homo sapien
ccccctgcccttctccagcacagct

SEQ ID NO: 2842208 - DNA, 25 bp, Homo sapien
ctgcccttctccagcacagctctga

SEQ ID NO: 2842209 - DNA, 25 bp, Homo sapien
gttctgaccgcatctccaccagggc

SEQ ID NO: 2842210 - DNA, 25 bp, Homo sapien
ccaggaaccttggctggaaccaggg

SEQ ID NO: 2842211 - DNA, 25 bp, Homo sapien
tccaggaaccttggctggaaccagg

SEQ ID NO: 2842212 - DNA, 25 bp, Homo sapien
ttctgaccgcatctccaccagggct

SEQ ID NO: 2842213 - DNA, 25 bp, Homo sapien
gtggctctgggtaccaagttctaag

SEQ ID NO: 2842214 - DNA, 25 bp, Homo sapien
tggctctgggtaccaagttctaagc

SEQ ID NO: 2842215 - DNA, 25 bp, Homo sapien
cacaccgaactctagcactggagcc

SEQ ID NO: 2842216 - DNA, 25 bp, Homo sapien
gcccacaccgaactctagcactgga

SEQ ID NO: 2842217 - DNA, 25 bp, Homo sapien
cttgcccacaccgaactctagcact

SEQ ID NO: 2842218 - DNA, 25 bp, Homo sapien
accgaactctagcactggagccctg

SEQ ID NO: 2842219 - DNA, 25 bp, Homo sapien
attcccgggcaagggtgtgcccagg

SEQ ID NO: 2842220 - DNA, 25 bp, Homo sapien
ggtgtgcccaggaagggggctgtgg

SEQ ID NO: 2842221 - DNA, 25 bp, Homo sapien
tgtgcccaggaagggggctgtggat

SEQ ID NO: 2842222 - DNA, 25 bp, Homo sapien
cccgggcaagggtgtgcccaggaag

SEQ ID NO: 2842223 - DNA, 25 bp, Homo sapien
agagaatctgtccagggggcactgt

SEQ ID NO: 2842224 - DNA, 25 bp, Homo sapien
cagagaatctgtccagggggcactg

SEQ ID NO: 2842225 - DNA, 25 bp, Homo sapien
tgtccagggggcactgtaggcccag

SEQ ID NO: 2842226 - DNA, 25 bp, Homo sapien
atctgtccagggggcactgtaggcc

SEQ ID NO: 2842227 - DNA, 25 bp, Homo sapien
tagagtagtgtccttgctggtatcc

SEQ ID NO: 2842228 - DNA, 25 bp, Homo sapien
ctagagtagtgtccttgctggtatc

SEQ ID NO: 2842229 - DNA, 25 bp, Homo sapien
gtatcccctcatcccatggagtggg

SEQ ID NO: 2842230 - DNA, 25 bp, Homo sapien
tgctggtatcccctcatcccatgga

SEQ ID NO: 2842231 - DNA, 25 bp, Homo sapien
gatgccctcgatgtagtagcagacg

SEQ ID NO: 2842232 - DNA, 25 bp, Homo sapien
caggagagctggttgatgccctcga

SEQ ID NO: 2842233 - DNA, 25 bp, Homo sapien
ccattgacgcaataggacttggctg

SEQ ID NO: 2842234 - DNA, 25 bp, Homo sapien
ttggctgtctcgttgcacttccggg

SEQ ID NO: 2842235 - DNA, 25 bp, Homo sapien
cagggtgtggttgctgcaggtctca

SEQ ID NO: 2842236 - DNA, 25 bp, Homo sapien
gatgagtcagagggggcagaccaca

SEQ ID NO: 2842237 - DNA, 25 bp, Homo sapien
gcagaccacagggtgtggttgctgc

SEQ ID NO: 2842238 - DNA, 25 bp, Homo sapien
accacagggtgtggttgctgcaggt

SEQ ID NO: 2842239 - DNA, 25 bp, Homo sapien
cgctgttgacgtaaagccggccccg

SEQ ID NO: 2842240 - DNA, 25 bp, Homo sapien
ttctcggcctcgcagacatactccc

SEQ ID NO: 2842241 - DNA, 25 bp, Homo sapien
caccttgttgaactgtagtcgtgag

SEQ ID NO: 2842242 - DNA, 25 bp, Homo sapien
tccttccccaggatgttctcggcct

SEQ ID NO: 2842243 - DNA, 25 bp, Homo sapien
tatttgatgcgaatgtctcggctgc

SEQ ID NO: 2842244 - DNA, 25 bp, Homo sapien
tctcggctgcggttgagctccttgc

SEQ ID NO: 2842245 - DNA, 25 bp, Homo sapien
cttgaaccaacggtaggaaggctgg

SEQ ID NO: 2842246 - DNA, 25 bp, Homo sapien
tgcctcacacttcagcgattgcttc

SEQ ID NO: 2842247 - DNA, 25 bp, Homo sapien
ttaaccctggatgctaatcggaatc

SEQ ID NO: 2842248 - DNA, 25 bp, Homo sapien
ggagtccccagtcattgcttatgtt

SEQ ID NO: 2842249 - DNA, 25 bp, Homo sapien
tctgttggactttttggaacttcat

SEQ ID NO: 2842250 - DNA, 25 bp, Homo sapien
gcttatgttaggtcttaaccctgga

SEQ ID NO: 2842251 - DNA, 25 bp, Homo sapien
aaggccagggagagatacctcatcc

SEQ ID NO: 2842252 - DNA, 25 bp, Homo sapien
agtcacgcaggtccacgccgcagtg

SEQ ID NO: 2842253 - DNA, 25 bp, Homo sapien
agagtcacgcaggtccacgccgcag

SEQ ID NO: 2842254 - DNA, 25 bp, Homo sapien
gagagatacctcatccccagagtca

SEQ ID NO: 2842255 - DNA, 25 bp, Homo sapien
ggtatgggtagcaactgggaaacca

SEQ ID NO: 2842256 - DNA, 25 bp, Homo sapien
caggtatgggtagcaactgggaaac

SEQ ID NO: 2842257 - DNA, 25 bp, Homo sapien
atgagtgggcttattacccaacacc

SEQ ID NO: 2842258 - DNA, 25 bp, Homo sapien
catgagtgggcttattacccaacac

SEQ ID NO: 2842259 - DNA, 25 bp, Homo sapien
tgagtgggcttattacccaacaccc

SEQ ID NO: 2842260 - DNA, 25 bp, Homo sapien
ggcagaaatgggcaaagagcttttc

SEQ ID NO: 2842261 - DNA, 25 bp, Homo sapien
tctggcagaaatgggcaaagagctt

SEQ ID NO: 2842262 - DNA, 25 bp, Homo sapien
ttgtctggcagaaatgggcaaagag

SEQ ID NO: 2842263 - DNA, 25 bp, Homo sapien
tgtctggcagaaatgggcaaagagc

SEQ ID NO: 2842264 - DNA, 25 bp, Homo sapien
tgagcgggcggcaggtttctcccag

SEQ ID NO: 2842265 - DNA, 25 bp, Homo sapien
tttctgggcgcgcggaggtgcccta

SEQ ID NO: 2842266 - DNA, 25 bp, Homo sapien
gcgggcggcaggtttctcccaggga

SEQ ID NO: 2842267 - DNA, 25 bp, Homo sapien
ccgggtttctgggcgcgcggaggtg

SEQ ID NO: 2842268 - DNA, 25 bp, Homo sapien
tctccccgggatcgggctccctctc

SEQ ID NO: 2842269 - DNA, 25 bp, Homo sapien
cgggatcgggctccctctcccgctt

SEQ ID NO: 2842270 - DNA, 25 bp, Homo sapien
ccgcttcctcccctctgggtgcttc

SEQ ID NO: 2842271 - DNA, 25 bp, Homo sapien
ctctgggtgcttcttgccgcggccg

SEQ ID NO: 2842272 - DNA, 25 bp, Homo sapien
tctccttaggagagcctgaagcagg

SEQ ID NO: 2842273 - DNA, 25 bp, Homo sapien
gaagggtccgaaggcctctctggac

SEQ ID NO: 2842274 - DNA, 25 bp, Homo sapien
gcttaggactctgggtcaaggccag

SEQ ID NO: 2842275 - DNA, 25 bp, Homo sapien
cctcaggaagggtccgaaggcctct

SEQ ID NO: 2842276 - DNA, 25 bp, Homo sapien
gaggtgatggccccgcaaagggctg

SEQ ID NO: 2842277 - DNA, 25 bp, Homo sapien
tgatggccccgcaaagggctgatct

SEQ ID NO: 2842278 - DNA, 25 bp, Homo sapien
gctgatcttggggcgcaagtctgtc

SEQ ID NO: 2842279 - DNA, 25 bp, Homo sapien
tcttggggcgcaagtctgtctcatc

SEQ ID NO: 2842280 - DNA, 25 bp, Homo sapien
tctggggcttcttgtcctggatgaa

SEQ ID NO: 2842281 - DNA, 25 bp, Homo sapien
gggcttcttgtcctggatgaagccc

SEQ ID NO: 2842282 - DNA, 25 bp, Homo sapien
ctggggcttcttgtcctggatgaag

SEQ ID NO: 2842283 - DNA, 25 bp, Homo sapien
cttctggggcttcttgtcctggatg

SEQ ID NO: 2842284 - DNA, 25 bp, Homo sapien
tatagcatttatgagcccagaggca

SEQ ID NO: 2842285 - DNA, 25 bp, Homo sapien
gccgtggttcccagaaacagttgtc

SEQ ID NO: 2842286 - DNA, 25 bp, Homo sapien
tatccattctgggaggtcaggctgc

SEQ ID NO: 2842287 - DNA, 25 bp, Homo sapien
gagagacaattcaacccaggctggc

SEQ ID NO: 2842288 - DNA, 25 bp, Homo sapien
cattcctgcccgtttcttagttctg

SEQ ID NO: 2842289 - DNA, 25 bp, Homo sapien
gtctttgattcattcctgcccgttt

SEQ ID NO: 2842290 - DNA, 25 bp, Homo sapien
gcccattacataactctgtttggga

SEQ ID NO: 2842291 - DNA, 25 bp, Homo sapien
gcccgccccacccactagctctgag

SEQ ID NO: 2842292 - DNA, 25 bp, Homo sapien
gctggattcccttgttcataacttc

SEQ ID NO: 2842293 - DNA, 25 bp, Homo sapien
tgaaatgataataaccttccctggc

SEQ ID NO: 2842294 - DNA, 25 bp, Homo sapien
tcatccttaatatccggagatttca

SEQ ID NO: 2842295 - DNA, 25 bp, Homo sapien
attaacccagctaataacttccctg

SEQ ID NO: 2842296 - DNA, 25 bp, Homo sapien
gacatccggaggcagatgggtttgg

SEQ ID NO: 2842297 - DNA, 25 bp, Homo sapien
ttactcccaggacatccggaggcag

SEQ ID NO: 2842298 - DNA, 25 bp, Homo sapien
gatgacagcccatgaaattctctcc

SEQ ID NO: 2842299 - DNA, 25 bp, Homo sapien
gtgatgacagcccatgaaattctct

SEQ ID NO: 2842300 - DNA, 25 bp, Homo sapien
cattcccctggcagatatccttgaa

SEQ ID NO: 2842301 - DNA, 25 bp, Homo sapien
accgactgccattcaacactttcaa

SEQ ID NO: 2842302 - DNA, 25 bp, Homo sapien
cctggcagatatccttgaaggctgg

SEQ ID NO: 2842303 - DNA, 25 bp, Homo sapien
gaagagtctaaaagtcaccgactgc

SEQ ID NO: 2842304 - DNA, 25 bp, Homo sapien
tgggaagggccggcctcccagcagc

SEQ ID NO: 2842305 - DNA, 25 bp, Homo sapien
gaagggccggcctcccagcagccat

SEQ ID NO: 2842306 - DNA, 25 bp, Homo sapien
ggtgggaagggccggcctcccagca

SEQ ID NO: 2842307 - DNA, 25 bp, Homo sapien
ggaagggccggcctcccagcagcca

SEQ ID NO: 2842308 - DNA, 25 bp, Homo sapien
gattcctgaatacacaggcaacaag

SEQ ID NO: 2842309 - DNA, 25 bp, Homo sapien
agaacttgattcacctctggtggca

SEQ ID NO: 2842310 - DNA, 25 bp, Homo sapien
aaggacaatgagaacttgattcacc

SEQ ID NO: 2842311 - DNA, 25 bp, Homo sapien
ggccatgggattcctgaatacacag

SEQ ID NO: 2842312 - DNA, 25 bp, Homo sapien
aaagaagacatggtgattgaatgac

SEQ ID NO: 2842313 - DNA, 25 bp, Homo sapien
caaagtggtcaaaagaagacatggt

SEQ ID NO: 2842314 - DNA, 25 bp, Homo sapien
aaaagaagacatggtgattgaatga

SEQ ID NO: 2842315 - DNA, 25 bp, Homo sapien
agtggtcaaaagaagacatggtgat

SEQ ID NO: 2842316 - DNA, 25 bp, Homo sapien
ctctggatgtaaggcagaccattca

SEQ ID NO: 2842317 - DNA, 25 bp, Homo sapien
agctctggatgtaaggcagaccatt

SEQ ID NO: 2842318 - DNA, 25 bp, Homo sapien
gaggccctgaggctgtaacaccaca

SEQ ID NO: 2842319 - DNA, 25 bp, Homo sapien
aggagaagcgcaaagcccacattgt

SEQ ID NO: 2842320 - DNA, 25 bp, Homo sapien
ctttgacttttgacatgggagactt

SEQ ID NO: 2842321 - DNA, 25 bp, Homo sapien
tacatccggcgagtaagacgttaga

SEQ ID NO: 2842322 - DNA, 25 bp, Homo sapien
cataattcagcgattacacagtcca

SEQ ID NO: 2842323 - DNA, 25 bp, Homo sapien
caatttgaataagcacgagacaggc

SEQ ID NO: 2842324 - DNA, 25 bp, Homo sapien
acaatcaacagaccttgtaattccc

SEQ ID NO: 2842325 - DNA, 25 bp, Homo sapien
atcaacagaccttgtaattccccca

SEQ ID NO: 2842326 - DNA, 25 bp, Homo sapien
catcacaatcaacagaccttgtaat

SEQ ID NO: 2842327 - DNA, 25 bp, Homo sapien
caacagaccttgtaattcccccaga

SEQ ID NO: 2842328 - DNA, 25 bp, Homo sapien
cagtcagtgcacaggatcttgccca

SEQ ID NO: 2842329 - DNA, 25 bp, Homo sapien
cttaaagactaagggctgttccgtg

SEQ ID NO: 2842330 - DNA, 25 bp, Homo sapien
caggaaaaagatgtagcgctggttc

SEQ ID NO: 2842331 - DNA, 25 bp, Homo sapien
tggttcctttcgagcggcacacagg

SEQ ID NO: 2842332 - DNA, 25 bp, Homo sapien
gggtgccttgtacgcctggtcctgc

SEQ ID NO: 2842333 - DNA, 25 bp, Homo sapien
gagcgacacaccgaagagcagcatg

SEQ ID NO: 2842334 - DNA, 25 bp, Homo sapien
ttgaggctgggcgagtagcaggcga

SEQ ID NO: 2842335 - DNA, 25 bp, Homo sapien
cggctctcgggtgctgttggagctg

SEQ ID NO: 2842336 - DNA, 25 bp, Homo sapien
gctgttgctgcggccgcggctctgg

SEQ ID NO: 2842337 - DNA, 25 bp, Homo sapien
tgcggccgcggctctgggggcgcag

SEQ ID NO: 2842338 - DNA, 25 bp, Homo sapien
tctgggggcgcagcgggacgagaga

SEQ ID NO: 2842339 - DNA, 25 bp, Homo sapien
tgcggctgttgctgcggccgcggct

SEQ ID NO: 2842340 - DNA, 25 bp, Homo sapien
ctgtagctgctgcaccgacccttct

SEQ ID NO: 2842341 - DNA, 25 bp, Homo sapien
tgtagctgctgcaccgacccttctc

SEQ ID NO: 2842342 - DNA, 25 bp, Homo sapien
ccatttggggggctccgccgctcag

SEQ ID NO: 2842343 - DNA, 25 bp, Homo sapien
gggcaggcggcaagcgggccgcgat

SEQ ID NO: 2842344 - DNA, 25 bp, Homo sapien
agcgctcccaccctgtgcgccagga

SEQ ID NO: 2842345 - DNA, 25 bp, Homo sapien
cggaaacagcgtaacgttagcgcct

SEQ ID NO: 2842346 - DNA, 25 bp, Homo sapien
gcactgctttagtgcccgccttcag

SEQ ID NO: 2842347 - DNA, 25 bp, Homo sapien
gaagcttgggactgcactgctttag

SEQ ID NO: 2842348 - DNA, 25 bp, Homo sapien
tgggactgcactgctttagtgcccg

SEQ ID NO: 2842349 - DNA, 25 bp, Homo sapien
agtagggagcgcggcttctgcaggg

SEQ ID NO: 2842350 - DNA, 25 bp, Homo sapien
gttgttccatctgggataataataa

SEQ ID NO: 2842351 - DNA, 25 bp, Homo sapien
ccactccccaatttgctgaaaaggg

SEQ ID NO: 2842352 - DNA, 25 bp, Homo sapien
cagcccctctgtctgagttgttcca

SEQ ID NO: 2842353 - DNA, 25 bp, Homo sapien
ctatggctgtgtttggagtcgaggg

SEQ ID NO: 2842354 - DNA, 25 bp, Homo sapien
ttagtaatcacaagattgctcgatg

SEQ ID NO: 2842355 - DNA, 25 bp, Homo sapien
tcacaagattgctcgatgatcagag

SEQ ID NO: 2842356 - DNA, 25 bp, Homo sapien
caagattgctcgatgatcagagttt

SEQ ID NO: 2842357 - DNA, 25 bp, Homo sapien
aatcacaagattgctcgatgatcag

SEQ ID NO: 2842358 - DNA, 25 bp, Homo sapien
tgtccatcagctcaggtttttcatc

SEQ ID NO: 2842359 - DNA, 25 bp, Homo sapien
cattgtccatcagctcaggtttttc

SEQ ID NO: 2842360 - DNA, 25 bp, Homo sapien
ggcattgtccatcagctcaggtttt

SEQ ID NO: 2842361 - DNA, 25 bp, Homo sapien
gtccatcagctcaggtttttcatca

SEQ ID NO: 2842362 - DNA, 25 bp, Homo sapien
gagaaaaagaggagcagaattccat

SEQ ID NO: 2842363 - DNA, 25 bp, Homo sapien
ctagagaaaaagaggagcagaattc

SEQ ID NO: 2842364 - DNA, 25 bp, Homo sapien
tagagaaaaagaggagcagaattcc

SEQ ID NO: 2842365 - DNA, 25 bp, Homo sapien
agagaaaaagaggagcagaattcca

SEQ ID NO: 2842366 - DNA, 25 bp, Homo sapien
tttgtagtggcaagttctcaaactg

SEQ ID NO: 2842367 - DNA, 25 bp, Homo sapien
ccaggatcactatttgtagtggcaa

SEQ ID NO: 2842368 - DNA, 25 bp, Homo sapien
catcatagcccaggatcactatttg

SEQ ID NO: 2842369 - DNA, 25 bp, Homo sapien
cactatttgtagtggcaagttctca

SEQ ID NO: 2842370 - DNA, 25 bp, Homo sapien
gatagatccactctttggaaaagcc

SEQ ID NO: 2842371 - DNA, 25 bp, Homo sapien
gcagaggagttttagagctaccaca

SEQ ID NO: 2842372 - DNA, 25 bp, Homo sapien
tctactttgttttcggaggcacttc

SEQ ID NO: 2842373 - DNA, 25 bp, Homo sapien
aatggcctggattagcttcagaagg

SEQ ID NO: 2842374 - DNA, 25 bp, Homo sapien
tattccttggtggttgtatttacac

SEQ ID NO: 2842375 - DNA, 25 bp, Homo sapien
tagaaaacacttgatccaaataacc

SEQ ID NO: 2842376 - DNA, 25 bp, Homo sapien
gggacacagggagaactactataaa

SEQ ID NO: 2842377 - DNA, 25 bp, Homo sapien
gattgtcatacctctatattccttg

SEQ ID NO: 2842378 - DNA, 25 bp, Homo sapien
tatgtgaacaatttaggaaagccag

SEQ ID NO: 2842379 - DNA, 25 bp, Homo sapien
tcaacaagggtcaacaataaagtct

SEQ ID NO: 2842380 - DNA, 25 bp, Homo sapien
tcacttctgtaagtctgaatgacgg

SEQ ID NO: 2842381 - DNA, 25 bp, Homo sapien
caagtagagttctcttcaacaaggg

SEQ ID NO: 2842382 - DNA, 25 bp, Homo sapien
ctccagctaggaattaataagcgtg

SEQ ID NO: 2842383 - DNA, 25 bp, Homo sapien
tcaggcactgcctacaatacgtaag

SEQ ID NO: 2842384 - DNA, 25 bp, Homo sapien
taacagggaagttgaactgtttcgc

SEQ ID NO: 2842385 - DNA, 25 bp, Homo sapien
gagctttaatcctctgtgccagata

SEQ ID NO: 2842386 - DNA, 25 bp, Homo sapien
tccccggagatgaaaggcctattgc

SEQ ID NO: 2842387 - DNA, 25 bp, Homo sapien
tattcagtgttgcaggatggagacg

SEQ ID NO: 2842388 - DNA, 25 bp, Homo sapien
aacatattacactgcgtgggaggct

SEQ ID NO: 2842389 - DNA, 25 bp, Homo sapien
gaaagcgagcaaaagcgttaccgtg

SEQ ID NO: 2842390 - DNA, 25 bp, Homo sapien
caaacgagtaataggtccttctggg

SEQ ID NO: 2842391 - DNA, 25 bp, Homo sapien
agggccctaagttggagctggcgca

SEQ ID NO: 2842392 - DNA, 25 bp, Homo sapien
cttcagggttctatccccgccagag

SEQ ID NO: 2842393 - DNA, 25 bp, Homo sapien
gcttcggccttcagaagccaaacga

SEQ ID NO: 2842394 - DNA, 25 bp, Homo sapien
cccgcggaatgttgacgcgccagga

SEQ ID NO: 2842395 - DNA, 25 bp, Homo sapien
caggagccgatagggcgcgctcacg

SEQ ID NO: 2842396 - DNA, 25 bp, Homo sapien
cccaaggcctggcccgcggaatgtt

SEQ ID NO: 2842397 - DNA, 25 bp, Homo sapien
atgttgacgcgccaggagccgatag

SEQ ID NO: 2842398 - DNA, 25 bp, Homo sapien
tcgcctggagtcacgcacggagcgc

SEQ ID NO: 2842399 - DNA, 25 bp, Homo sapien
gtcgcctggagtcacgcacggagcg

SEQ ID NO: 2842400 - DNA, 25 bp, Homo sapien
cacggagcgccgggttacgcgccga

SEQ ID NO: 2842401 - DNA, 25 bp, Homo sapien
agcgccgggttacgcgccgacgtct

SEQ ID NO: 2842402 - DNA, 25 bp, Homo sapien
caaaaggaacggatgtgaagctgag

SEQ ID NO: 2842403 - DNA, 25 bp, Homo sapien
cctctgcctttgtccgagggcaaaa

SEQ ID NO: 2842404 - DNA, 25 bp, Homo sapien
ctgacatcgcagatgaagccgggcc

SEQ ID NO: 2842405 - DNA, 25 bp, Homo sapien
ccaaagatgggtggcccgaacaagg

SEQ ID NO: 2842406 - DNA, 25 bp, Homo sapien
tttctgtccggccaggcgcttttgg

SEQ ID NO: 2842407 - DNA, 25 bp, Homo sapien
gaggtcccagagctttacaataggc

SEQ ID NO: 2842408 - DNA, 25 bp, Homo sapien
tgtctaagcttgtgttcggtgtcct

SEQ ID NO: 2842409 - DNA, 25 bp, Homo sapien
ttttggacagcttttcgcagcggtg

SEQ ID NO: 2842410 - DNA, 25 bp, Homo sapien
tcggaatccctgtatatagacgtct

SEQ ID NO: 2842411 - DNA, 25 bp, Homo sapien
gattgctactgttcgagcctggagg

SEQ ID NO: 2842412 - DNA, 25 bp, Homo sapien
ggattgtaccagatcttagcctcag

SEQ ID NO: 2842413 - DNA, 25 bp, Homo sapien
catcagttgcctctgcgctgggtaa

SEQ ID NO: 2842414 - DNA, 25 bp, Homo sapien
gtacagtagggcgccctgctactgt

SEQ ID NO: 2842415 - DNA, 25 bp, Homo sapien
tacagtagggcgccctgctactgta

SEQ ID NO: 2842416 - DNA, 25 bp, Homo sapien
cgtacagtagggcgccctgctactg

SEQ ID NO: 2842417 - DNA, 25 bp, Homo sapien
tcccgcagatctcgcgagagtggct

SEQ ID NO: 2842418 - DNA, 25 bp, Homo sapien
gtctctcccgcagatctcgcgagag

SEQ ID NO: 2842419 - DNA, 25 bp, Homo sapien
atctcgcgagagtggctgactggct

SEQ ID NO: 2842420 - DNA, 25 bp, Homo sapien
ggtctcgtctgtctcgtctctcccg

SEQ ID NO: 2842421 - DNA, 25 bp, Homo sapien
tgtgggctccaacaagtacggcgtg

SEQ ID NO: 2842422 - DNA, 25 bp, Homo sapien
gacacaccttctgcaagtactcgga

SEQ ID NO: 2842423 - DNA, 25 bp, Homo sapien
gactgtggacaacaagcgcttcttc

SEQ ID NO: 2842424 - DNA, 25 bp, Homo sapien
tcatcgacgactacggagtggagga

SEQ ID NO: 2842425 - DNA, 25 bp, Homo sapien
ttcttgacttgccacccatcgctgg

SEQ ID NO: 2842426 - DNA, 25 bp, Homo sapien
cagaacctccaccaactgacagttt

SEQ ID NO: 2842427 - DNA, 25 bp, Homo sapien
ccatataaaacagtaagcagctgct

SEQ ID NO: 2842428 - DNA, 25 bp, Homo sapien
ggaagaagattgatcaaactgaatg

SEQ ID NO: 2842429 - DNA, 25 bp, Homo sapien
gttccccaagtgtacaagccttcta

SEQ ID NO: 2842430 - DNA, 25 bp, Homo sapien
tatgctaagtgtatttgtgttcccc

SEQ ID NO: 2842431 - DNA, 25 bp, Homo sapien
tatagttatcctactgagccatgga

SEQ ID NO: 2842432 - DNA, 25 bp, Homo sapien
taggagagcactttaccaagctggt

SEQ ID NO: 2842433 - DNA, 25 bp, Homo sapien
tgagatctactgtatgtgttgaata

SEQ ID NO: 2842434 - DNA, 25 bp, Homo sapien
tatgaggtgaccgtacagtagttag

SEQ ID NO: 2842435 - DNA, 25 bp, Homo sapien
ccctggttgagtgtgttgtcttcgt

SEQ ID NO: 2842436 - DNA, 25 bp, Homo sapien
gagcttttacagtgcataatgtgac

SEQ ID NO: 2842437 - DNA, 25 bp, Homo sapien
gaattttgagactttggcccacaca

SEQ ID NO: 2842438 - DNA, 25 bp, Homo sapien
gaaaaggtactatgatggagtccga

SEQ ID NO: 2842439 - DNA, 25 bp, Homo sapien
gacagcttttctggtcaaggcaagt

SEQ ID NO: 2842440 - DNA, 25 bp, Homo sapien
tagcacaattgtggaatgacagctt

SEQ ID NO: 2842441 - DNA, 25 bp, Homo sapien
agcaatttgtccctggcctttttcg

SEQ ID NO: 2842442 - DNA, 25 bp, Homo sapien
tgaattacgggtatccctctaagtc

SEQ ID NO: 2842443 - DNA, 25 bp, Homo sapien
caatttgtccctggcctttttcgag

SEQ ID NO: 2842444 - DNA, 25 bp, Homo sapien
aatgaattacgggtatccctctaag

SEQ ID NO: 2842445 - DNA, 25 bp, Homo sapien
ggtggcccctactagcaaaatgtga

SEQ ID NO: 2842446 - DNA, 25 bp, Homo sapien
gctatttataaggagtcagggcatc

SEQ ID NO: 2842447 - DNA, 25 bp, Homo sapien
gaattattgttagatggtggcccct

SEQ ID NO: 2842448 - DNA, 25 bp, Homo sapien
tcagggcatctctagacatgggagc

SEQ ID NO: 2842449 - DNA, 25 bp, Homo sapien
gcattctgtataggaccaaaaagga

SEQ ID NO: 2842450 - DNA, 25 bp, Homo sapien
tgctgaaaacttttgtcgtttgaat

SEQ ID NO: 2842451 - DNA, 25 bp, Homo sapien
cacttaaacagacgttgttgggtag

SEQ ID NO: 2842452 - DNA, 25 bp, Homo sapien
gagcagcattcagacctatatagaa

SEQ ID NO: 2842453 - DNA, 25 bp, Homo sapien
tattctgatgtaagattaactttat

SEQ ID NO: 2842454 - DNA, 25 bp, Homo sapien
tattaagttatattctgatgtaaga

SEQ ID NO: 2842455 - DNA, 25 bp, Homo sapien
gacagtattaagttatattctgatg

SEQ ID NO: 2842456 - DNA, 25 bp, Homo sapien
ctgttgctgacagtattaagttata

SEQ ID NO: 2842457 - DNA, 25 bp, Homo sapien
ctaagctttgtccagacacagtgat

SEQ ID NO: 2842458 - DNA, 25 bp, Homo sapien
aagctttgtccagacacagtgatat

SEQ ID NO: 2842459 - DNA, 25 bp, Homo sapien
taagctttgtccagacacagtgata

SEQ ID NO: 2842460 - DNA, 25 bp, Homo sapien
agctttgtccagacacagtgatatc

SEQ ID NO: 2842461 - DNA, 25 bp, Homo sapien
gctagctcttgggaactctgcagga

SEQ ID NO: 2842462 - DNA, 25 bp, Homo sapien
tgcaggacttctgctggtccacagt

SEQ ID NO: 2842463 - DNA, 25 bp, Homo sapien
aagtctgagctttttgagaaccaca

SEQ ID NO: 2842464 - DNA, 25 bp, Homo sapien
cacagtggtgacaggtgcatctttc

SEQ ID NO: 2842465 - DNA, 25 bp, Homo sapien
gcagagcacgaggaggcatctgcca

SEQ ID NO: 2842466 - DNA, 25 bp, Homo sapien
agccccagcagttcaaaactgccag

SEQ ID NO: 2842467 - DNA, 25 bp, Homo sapien
cttcagaagacctgggacattgcca

SEQ ID NO: 2842468 - DNA, 25 bp, Homo sapien
tcattttcttcagggaggaccagaa

SEQ ID NO: 2842469 - DNA, 25 bp, Homo sapien
agccatcacttcagagcaggctact

SEQ ID NO: 2842470 - DNA, 25 bp, Homo sapien
accctgcttccccacctacaggcat

SEQ ID NO: 2842471 - DNA, 25 bp, Homo sapien
tttggtagtatatgagccatcctct

SEQ ID NO: 2842472 - DNA, 25 bp, Homo sapien
cagaaggaggagagatatggggaca

SEQ ID NO: 2842473 - DNA, 25 bp, Homo sapien
aggaggagagatatggggacatttt

SEQ ID NO: 2842474 - DNA, 25 bp, Homo sapien
tcaggtcactgcagaaggaggagag

SEQ ID NO: 2842475 - DNA, 25 bp, Homo sapien
gaaggaggagagatatggggacatt

SEQ ID NO: 2842476 - DNA, 25 bp, Homo sapien
cctcacccctccgaagcagccgcgg

SEQ ID NO: 2842477 - DNA, 25 bp, Homo sapien
ttaaggaggggacgagggagacgca

SEQ ID NO: 2842478 - DNA, 25 bp, Homo sapien
ctggaggacgccggaatttaaggag

SEQ ID NO: 2842479 - DNA, 25 bp, Homo sapien
ggagacgcagctctgtttctcgctg

SEQ ID NO: 2842480 - DNA, 25 bp, Homo sapien
cgagccgggcctccacgacacagtc

SEQ ID NO: 2842481 - DNA, 25 bp, Homo sapien
tctgcctgttcggacccgagccggg

SEQ ID NO: 2842482 - DNA, 25 bp, Homo sapien
gcacctgttggagcgggcctctgcc

SEQ ID NO: 2842483 - DNA, 25 bp, Homo sapien
cccttgggcggcgaaacggccacat

SEQ ID NO: 2842484 - DNA, 25 bp, Homo sapien
ctccagaccgttgtctggagaccca

SEQ ID NO: 2842485 - DNA, 25 bp, Homo sapien
cagcggggacttccagatcctcaag

SEQ ID NO: 2842486 - DNA, 25 bp, Homo sapien
gggacttccagatcctcaaggattc

SEQ ID NO: 2842487 - DNA, 25 bp, Homo sapien
gatcctcaaggattctccagaccgt

SEQ ID NO: 2842488 - DNA, 25 bp, Homo sapien
ctggcacggcctggctagcatcgtc

SEQ ID NO: 2842489 - DNA, 25 bp, Homo sapien
tggctagcatcgtcgtcccacacgt

SEQ ID NO: 2842490 - DNA, 25 bp, Homo sapien
catcgtcgtcccacacgtcagagta

SEQ ID NO: 2842491 - DNA, 25 bp, Homo sapien
tcgtcccacacgtcagagtagccat

SEQ ID NO: 2842492 - DNA, 25 bp, Homo sapien
ctgagctcaagcaatttgcccacct

SEQ ID NO: 2842493 - DNA, 25 bp, Homo sapien
catgctgcccaggtgtgtctcaatc

SEQ ID NO: 2842494 - DNA, 25 bp, Homo sapien
tgctgcccaggtgtgtctcaatctc

SEQ ID NO: 2842495 - DNA, 25 bp, Homo sapien
accatgctgcccaggtgtgtctcaa

SEQ ID NO: 2842496 - DNA, 25 bp, Homo sapien
tatcgggtggagtctcggagaacca

SEQ ID NO: 2842497 - DNA, 25 bp, Homo sapien
tctggaccaacaagacacgaggagg

SEQ ID NO: 2842498 - DNA, 25 bp, Homo sapien
gagtcctaagtatccagcgcagctg

SEQ ID NO: 2842499 - DNA, 25 bp, Homo sapien
cattccgctcaggtacagctcggga

SEQ ID NO: 2842500 - DNA, 25 bp, Homo sapien
ttatccagtcggttcgtggagagga

SEQ ID NO: 2842501 - DNA, 25 bp, Homo sapien
atcaggcacggacagggcgcgtccc

SEQ ID NO: 2842502 - DNA, 25 bp, Homo sapien
ctggctcaggcaggggttcgcgcag

SEQ ID NO: 2842503 - DNA, 25 bp, Homo sapien
tcagacccgaccgttatccagtcgg

SEQ ID NO: 2842504 - DNA, 25 bp, Homo sapien
tgccgccagctggatccctcccggc

SEQ ID NO: 2842505 - DNA, 25 bp, Homo sapien
cccgcggctactctggggctcctgg

SEQ ID NO: 2842506 - DNA, 25 bp, Homo sapien
cagctggatccctcccggcgccccg

SEQ ID NO: 2842507 - DNA, 25 bp, Homo sapien
gcgccgcgcgtctcggcggtggact

SEQ ID NO: 2842508 - DNA, 25 bp, Homo sapien
ttctcgtctcacgaggagtcggcgg

SEQ ID NO: 2842509 - DNA, 25 bp, Homo sapien
gcgtcgctgcggttctcgtctcacg

SEQ ID NO: 2842510 - DNA, 25 bp, Homo sapien
ccttgggctgcgatttctgaggcgc

SEQ ID NO: 2842511 - DNA, 25 bp, Homo sapien
ttctggatttcttcgccttgggctg

SEQ ID NO: 2842512 - DNA, 25 bp, Homo sapien
gggagcggagcggaagtaactagtg

SEQ ID NO: 2842513 - DNA, 25 bp, Homo sapien
gggcagggggcaggtcgcgagtccc

SEQ ID NO: 2842514 - DNA, 25 bp, Homo sapien
gagcggaagtaactagtgactggaa

SEQ ID NO: 2842515 - DNA, 25 bp, Homo sapien
cggaagtaactagtgactggaagta

SEQ ID NO: 2842516 - DNA, 25 bp, Homo sapien
tgttttctgggaggtagtgaaatta

SEQ ID NO: 2842517 - DNA, 25 bp, Homo sapien
gaaaacagaattggacctccaggga

SEQ ID NO: 2842518 - DNA, 25 bp, Homo sapien
ctgttttctgggaggtagtgaaatt

SEQ ID NO: 2842519 - DNA, 25 bp, Homo sapien
tctgttttctgggaggtagtgaaat

SEQ ID NO: 2842520 - DNA, 25 bp, Homo sapien
cctggctatctaagacctttttgct

SEQ ID NO: 2842521 - DNA, 25 bp, Homo sapien
ctaatgatagaaactgaagttatca

SEQ ID NO: 2842522 - DNA, 25 bp, Homo sapien
ccaatcttcattgtccgtaaagcct

SEQ ID NO: 2842523 - DNA, 25 bp, Homo sapien
cattgtccgtaaagcctattccttt

SEQ ID NO: 2842524 - DNA, 25 bp, Homo sapien
tcttcattgtccgtaaagcctattc

SEQ ID NO: 2842525 - DNA, 25 bp, Homo sapien
caggcagtcctctagcttttgcaga

SEQ ID NO: 2842526 - DNA, 25 bp, Homo sapien
gggacccttccataagctgaatgca

SEQ ID NO: 2842527 - DNA, 25 bp, Homo sapien
tgtggggacccttccataagctgaa

SEQ ID NO: 2842528 - DNA, 25 bp, Homo sapien
gctgaatgcagaggggaatactgca

SEQ ID NO: 2842529 - DNA, 25 bp, Homo sapien
gatgcccttgttcagcgaaaggtcc

SEQ ID NO: 2842530 - DNA, 25 bp, Homo sapien
gttgcactgttactgggagcactgc

SEQ ID NO: 2842531 - DNA, 25 bp, Homo sapien
cgaaaggtcccatatctgagctgtg

SEQ ID NO: 2842532 - DNA, 25 bp, Homo sapien
tatgctgactatcagaggtctcctg

SEQ ID NO: 2842533 - DNA, 25 bp, Homo sapien
tcagctgagtagacgctgaagttcc

SEQ ID NO: 2842534 - DNA, 25 bp, Homo sapien
tagacgctgaagttcctgacaaggg

SEQ ID NO: 2842535 - DNA, 25 bp, Homo sapien
cctggtgctgctgaggtcgctgact

SEQ ID NO: 2842536 - DNA, 25 bp, Homo sapien
aaagcggagtatgatggatgttcac

SEQ ID NO: 2842537 - DNA, 25 bp, Homo sapien
cactgaggaggtggacttttctcca

SEQ ID NO: 2842538 - DNA, 25 bp, Homo sapien
tcactgaggaggtggacttttctcc

SEQ ID NO: 2842539 - DNA, 25 bp, Homo sapien
actgaggaggtggacttttctccag

SEQ ID NO: 2842540 - DNA, 25 bp, Homo sapien
ggaatgtacacgctgcaccagcacg

SEQ ID NO: 2842541 - DNA, 25 bp, Homo sapien
caggcacctcggttctttagcagtg

SEQ ID NO: 2842542 - DNA, 25 bp, Homo sapien
gcatttctgtggatgtgcgcgtccc

SEQ ID NO: 2842543 - DNA, 25 bp, Homo sapien
caagctttgtacatgcacctggacc

SEQ ID NO: 2842544 - DNA, 25 bp, Homo sapien
tggccaaagtggcagtgggcactgg

SEQ ID NO: 2842545 - DNA, 25 bp, Homo sapien
cagtagtcctagatcctgggaccaa

SEQ ID NO: 2842546 - DNA, 25 bp, Homo sapien
tactggttggtgtgtctggtggcca

SEQ ID NO: 2842547 - DNA, 25 bp, Homo sapien
tcatctctgggaatgtacaatacag

SEQ ID NO: 2842548 - DNA, 25 bp, Homo sapien
agagagaggcgctgccgagagaggt

SEQ ID NO: 2842549 - DNA, 25 bp, Homo sapien
actcagcgtgccctgtaatagcaat

SEQ ID NO: 2842550 - DNA, 25 bp, Homo sapien
agcaatgacaccaggctccagagag

SEQ ID NO: 2842551 - DNA, 25 bp, Homo sapien
cgtgccctgtaatagcaatgacacc

SEQ ID NO: 2842552 - DNA, 25 bp, Homo sapien
tctggttgccttggcatggggccat

SEQ ID NO: 2842553 - DNA, 25 bp, Homo sapien
tagggttggccaactctggttgcct

SEQ ID NO: 2842554 - DNA, 25 bp, Homo sapien
aaccaagtagggttggccaactctg

SEQ ID NO: 2842555 - DNA, 25 bp, Homo sapien
ccaagtagggttggccaactctggt

SEQ ID NO: 2842556 - DNA, 25 bp, Homo sapien
cacctctgacaggtgtgcctgcccc

SEQ ID NO: 2842557 - DNA, 25 bp, Homo sapien
agcccagccgtcctgtcctgccagc

SEQ ID NO: 2842558 - DNA, 25 bp, Homo sapien
ctgaccagaccagcccagccgtcct

SEQ ID NO: 2842559 - DNA, 25 bp, Homo sapien
cagaccagcccagccgtcctgtcct

SEQ ID NO: 2842560 - DNA, 25 bp, Homo sapien
tgtaacacatcaatcatggaatgat

SEQ ID NO: 2842561 - DNA, 25 bp, Homo sapien
gaatgatttctctgctaacagccgc

SEQ ID NO: 2842562 - DNA, 25 bp, Homo sapien
aattatacattcaaggtagtggcca

SEQ ID NO: 2842563 - DNA, 25 bp, Homo sapien
gccaaaggcttagttgtgaaaaata

SEQ ID NO: 2842564 - DNA, 25 bp, Homo sapien
accgctcctggctgaagttttccct

SEQ ID NO: 2842565 - DNA, 25 bp, Homo sapien
gagaagccgcagctgacagctagct

SEQ ID NO: 2842566 - DNA, 25 bp, Homo sapien
cttccctccgaagcagtggacgtgc

SEQ ID NO: 2842567 - DNA, 25 bp, Homo sapien
agcaagtccgattttcctccatcag

SEQ ID NO: 2842568 - DNA, 25 bp, Homo sapien
tcctcttctgtctactgcatgcagg

SEQ ID NO: 2842569 - DNA, 25 bp, Homo sapien
tctgttccatccctctgctcaagaa

SEQ ID NO: 2842570 - DNA, 25 bp, Homo sapien
gctgagcgttagtcaaaggtacagg

SEQ ID NO: 2842571 - DNA, 25 bp, Homo sapien
caggcccggaagctgagcgttagtc

SEQ ID NO: 2842572 - DNA, 25 bp, Homo sapien
gccatcagcatctcccggatgttgt

SEQ ID NO: 2842573 - DNA, 25 bp, Homo sapien
tgcaatatgagagacagacaaaggt

SEQ ID NO: 2842574 - DNA, 25 bp, Homo sapien
caaaggttaggaccagagtgaatgg

SEQ ID NO: 2842575 - DNA, 25 bp, Homo sapien
tcaggagtatactgcaagccaggta

SEQ ID NO: 2842576 - DNA, 25 bp, Homo sapien
agctttgatgtccaatggttatggc

SEQ ID NO: 2842577 - DNA, 25 bp, Homo sapien
aaccatgggtgatcacgggcaggca

SEQ ID NO: 2842578 - DNA, 25 bp, Homo sapien
cgaaccatgggtgatcacgggcagg

SEQ ID NO: 2842579 - DNA, 25 bp, Homo sapien
tccgaaccatgggtgatcacgggca

SEQ ID NO: 2842580 - DNA, 25 bp, Homo sapien
ctccgaaccatgggtgatcacgggc

SEQ ID NO: 2842581 - DNA, 25 bp, Homo sapien
acaaaggccaggaaattccaggaca

SEQ ID NO: 2842582 - DNA, 25 bp, Homo sapien
tacatgaagttatcccagacagaca

SEQ ID NO: 2842583 - DNA, 25 bp, Homo sapien
gacaaagctcctgtccgtaacagac

SEQ ID NO: 2842584 - DNA, 25 bp, Homo sapien
gactctaaaaaacaggcgtctcagt

SEQ ID NO: 2842585 - DNA, 25 bp, Homo sapien
cccagaagtatggtggttttaccag

SEQ ID NO: 2842586 - DNA, 25 bp, Homo sapien
tccttgccccgaggacatagttgtg

SEQ ID NO: 2842587 - DNA, 25 bp, Homo sapien
catagttgtggctgtattcccagtt

SEQ ID NO: 2842588 - DNA, 25 bp, Homo sapien
cagacatgaaatgaagcctccgttt

SEQ ID NO: 2842589 - DNA, 25 bp, Homo sapien
ggagctccataaaaactcatggcca

SEQ ID NO: 2842590 - DNA, 25 bp, Homo sapien
tacatatagaggctttttcctacag

SEQ ID NO: 2842591 - DNA, 25 bp, Homo sapien
gccaccgcgcttagctatttattaa

SEQ ID NO: 2842592 - DNA, 25 bp, Homo sapien
tgtcctaagttgcagagaattcctt

SEQ ID NO: 2842593 - DNA, 25 bp, Homo sapien
ccagctttgcttatatagtccatca

SEQ ID NO: 2842594 - DNA, 25 bp, Homo sapien
aaatgctaaactgtgctgaatggtc

SEQ ID NO: 2842595 - DNA, 25 bp, Homo sapien
tctgttgcacttacctgggaaaatg

SEQ ID NO: 2842596 - DNA, 25 bp, Homo sapien
gcatttcttcaacctcgtcacgcaa

SEQ ID NO: 2842597 - DNA, 25 bp, Homo sapien
ctaagggaatgtgggtacctgagcc

SEQ ID NO: 2842598 - DNA, 25 bp, Homo sapien
taatctctagcacaaccgctgaatc

SEQ ID NO: 2842599 - DNA, 25 bp, Homo sapien
cacagttgcctggttaatctctagc

SEQ ID NO: 2842600 - DNA, 25 bp, Homo sapien
gaatccgagcatgctctttcagccc

SEQ ID NO: 2842601 - DNA, 25 bp, Homo sapien
ggaagctggtgaacctgtatatgca

SEQ ID NO: 2842602 - DNA, 25 bp, Homo sapien
caacattctgcatcagaagtggcgc

SEQ ID NO: 2842603 - DNA, 25 bp, Homo sapien
tgctgagctaaccagggtggtgaaa

SEQ ID NO: 2842604 - DNA, 25 bp, Homo sapien
caacagccctgggattgcaacattc

SEQ ID NO: 2842605 - DNA, 25 bp, Homo sapien
gactttaggttgaaggctgacttta

SEQ ID NO: 2842606 - DNA, 25 bp, Homo sapien
tgaaggctgactttaggttgaagca

SEQ ID NO: 2842607 - DNA, 25 bp, Homo sapien
tataacagactttaggttgaaggct

SEQ ID NO: 2842608 - DNA, 25 bp, Homo sapien
ggttgaagcagtaactggcctccac

SEQ ID NO: 2842609 - DNA, 25 bp, Homo sapien
ggtcaggagctcatctctagatcat

SEQ ID NO: 2842610 - DNA, 25 bp, Homo sapien
tcctaactgcaaaagaggcccatta

SEQ ID NO: 2842611 - DNA, 25 bp, Homo sapien
aaaaacataaggcaatggtggcaaa

SEQ ID NO: 2842612 - DNA, 25 bp, Homo sapien
tgcttacctccaaaaaagttagcaa

SEQ ID NO: 2842613 - DNA, 25 bp, Homo sapien
caagttgtagctcccaaattcagca

SEQ ID NO: 2842614 - DNA, 25 bp, Homo sapien
taacctaagatactgcatactccca

SEQ ID NO: 2842615 - DNA, 25 bp, Homo sapien
atcctcaggaggctacaagttgtag

SEQ ID NO: 2842616 - DNA, 25 bp, Homo sapien
cacatgttgggaaatcttggtccct

SEQ ID NO: 2842617 - DNA, 25 bp, Homo sapien
tactttggcaggcaggcatacattt

SEQ ID NO: 2842618 - DNA, 25 bp, Homo sapien
caaaagttaactcctattgccaata

SEQ ID NO: 2842619 - DNA, 25 bp, Homo sapien
gcttcacggctccaacgtaattata

SEQ ID NO: 2842620 - DNA, 25 bp, Homo sapien
cacaataagattactactttctccc

SEQ ID NO: 2842621 - DNA, 25 bp, Homo sapien
tctctaacagctgactgtgaattgc

SEQ ID NO: 2842622 - DNA, 25 bp, Homo sapien
tttctgcttctctaacagctgactg

SEQ ID NO: 2842623 - DNA, 25 bp, Homo sapien
agctgactgtgaattgcttccttgg

SEQ ID NO: 2842624 - DNA, 25 bp, Homo sapien
aattgcttccttggactgaagaata

SEQ ID NO: 2842625 - DNA, 25 bp, Homo sapien
tctttcaggactgtctaaggaagct

SEQ ID NO: 2842626 - DNA, 25 bp, Homo sapien
tagccccaagtaagtgaactgaaat

SEQ ID NO: 2842627 - DNA, 25 bp, Homo sapien
gggaagaccccagttatgcaaatct

SEQ ID NO: 2842628 - DNA, 25 bp, Homo sapien
tatgagttcctcaaacaaaaagcac

SEQ ID NO: 2842629 - DNA, 25 bp, Homo sapien
gcatgttcagcatctatgatcactt

SEQ ID NO: 2842630 - DNA, 25 bp, Homo sapien
tcaacatggcccaaattaaactcat

SEQ ID NO: 2842631 - DNA, 25 bp, Homo sapien
gcctcaacttagctaataaccctca

SEQ ID NO: 2842632 - DNA, 25 bp, Homo sapien
acattccctataagtagtttcacca

SEQ ID NO: 2842633 - DNA, 25 bp, Homo sapien
cattaagcagattatgttccttgac

SEQ ID NO: 2842634 - DNA, 25 bp, Homo sapien
taacagttcaagactgctgctacct

SEQ ID NO: 2842635 - DNA, 25 bp, Homo sapien
tcagctaattaagtcagttacagca

SEQ ID NO: 2842636 - DNA, 25 bp, Homo sapien
gcactatgagataagtggcagctaa

SEQ ID NO: 2842637 - DNA, 25 bp, Homo sapien
taccaaagtcatgatctctgtatct

SEQ ID NO: 2842638 - DNA, 25 bp, Homo sapien
tgtcaataactttggcttgaagctc

SEQ ID NO: 2842639 - DNA, 25 bp, Homo sapien
ttcagctctagatccacgggggcgg

SEQ ID NO: 2842640 - DNA, 25 bp, Homo sapien
gctctagatccacgggggcggccat

SEQ ID NO: 2842641 - DNA, 25 bp, Homo sapien
cagctctagatccacgggggcggcc

SEQ ID NO: 2842642 - DNA, 25 bp, Homo sapien
tcttcagctctagatccacgggggc

SEQ ID NO: 2842643 - DNA, 25 bp, Homo sapien
tggcttgctcctccgtatcttccag

SEQ ID NO: 2842644 - DNA, 25 bp, Homo sapien
cccatgtggctttaagcagtttgcc

SEQ ID NO: 2842645 - DNA, 25 bp, Homo sapien
gtgtcttcactacctgaccggtcag

SEQ ID NO: 2842646 - DNA, 25 bp, Homo sapien
cagacatagcccaacgcgcagattt

SEQ ID NO: 2842647 - DNA, 25 bp, Homo sapien
cttcacttctgtctgtcctgtatct

SEQ ID NO: 2842648 - DNA, 25 bp, Homo sapien
cacttctgtctgtcctgtatctgtg

SEQ ID NO: 2842649 - DNA, 25 bp, Homo sapien
tgtctgtcctgtatctgtgtaaaca

SEQ ID NO: 2842650 - DNA, 25 bp, Homo sapien
tctgtctgtcctgtatctgtgtaaa

SEQ ID NO: 2842651 - DNA, 25 bp, Homo sapien
cagcagcctctgttttcatagctca

SEQ ID NO: 2842652 - DNA, 25 bp, Homo sapien
ctgggctgagcacgcgctctgccaa

SEQ ID NO: 2842653 - DNA, 25 bp, Homo sapien
aaagaagttagcaagctctggcaga

SEQ ID NO: 2842654 - DNA, 25 bp, Homo sapien
gggcattcagctcctgttctggcag

SEQ ID NO: 2842655 - DNA, 25 bp, Homo sapien
catggagtagcaccagaagaatggc

SEQ ID NO: 2842656 - DNA, 25 bp, Homo sapien
catactctgtttggcacttgaaggc

SEQ ID NO: 2842657 - DNA, 25 bp, Homo sapien
tatgggaggcccaatcctagacggc

SEQ ID NO: 2842658 - DNA, 25 bp, Homo sapien
gaaccatcctagctttgtggcaaag

SEQ ID NO: 2842659 - DNA, 25 bp, Homo sapien
tgtcttctcagaggtagcagtcccc

SEQ ID NO: 2842660 - DNA, 25 bp, Homo sapien
cttgtgtcttctcagaggtagcagt

SEQ ID NO: 2842661 - DNA, 25 bp, Homo sapien
ctcagaggtagcagtccccagccga

SEQ ID NO: 2842662 - DNA, 25 bp, Homo sapien
agaggtagcagtccccagccgattc

SEQ ID NO: 2842663 - DNA, 25 bp, Homo sapien
cagtgggaattagtcatgcccaact

SEQ ID NO: 2842664 - DNA, 25 bp, Homo sapien
tcagtgggaattagtcatgcccaac

SEQ ID NO: 2842665 - DNA, 25 bp, Homo sapien
aattagtcatgcccaacttcacttt

SEQ ID NO: 2842666 - DNA, 25 bp, Homo sapien
tgggaattagtcatgcccaacttca

SEQ ID NO: 2842667 - DNA, 25 bp, Homo sapien
gaaaagcccaggcagtagggcagcc

SEQ ID NO: 2842668 - DNA, 25 bp, Homo sapien
gagttacactgcttgaaaacaggca

SEQ ID NO: 2842669 - DNA, 25 bp, Homo sapien
tagggcagcccaaactctggtcaaa

SEQ ID NO: 2842670 - DNA, 25 bp, Homo sapien
taagccctgcctgctatgacaaagt

SEQ ID NO: 2842671 - DNA, 25 bp, Homo sapien
tataagcgattttccactgggaggc

SEQ ID NO: 2842672 - DNA, 25 bp, Homo sapien
cacggccaggatggttgtgtggtca

SEQ ID NO: 2842673 - DNA, 25 bp, Homo sapien
tgtgtggtcataggtatataagcga

SEQ ID NO: 2842674 - DNA, 25 bp, Homo sapien
taaacatgagaagccccacgatgac

SEQ ID NO: 2842675 - DNA, 25 bp, Homo sapien
catcccagagatcctttgatataag

SEQ ID NO: 2842676 - DNA, 25 bp, Homo sapien
atcccagagatcctttgatataagt

SEQ ID NO: 2842677 - DNA, 25 bp, Homo sapien
ttcctttatctgagcatcccagaga

SEQ ID NO: 2842678 - DNA, 25 bp, Homo sapien
cctttatctgagcatcccagagatc

SEQ ID NO: 2842679 - DNA, 25 bp, Homo sapien
gaacgtgcacagatgtcacattccc

SEQ ID NO: 2842680 - DNA, 25 bp, Homo sapien
ggtctggagtcaaacaagagccaca

SEQ ID NO: 2842681 - DNA, 25 bp, Homo sapien
agatccccagatgaacgtgcacaga

SEQ ID NO: 2842682 - DNA, 25 bp, Homo sapien
gacacaccctggctagtggttcctg

SEQ ID NO: 2842683 - DNA, 25 bp, Homo sapien
tcctccttgtttggtgtggccagtg

SEQ ID NO: 2842684 - DNA, 25 bp, Homo sapien
gctccttcacatatttgcattctcc

SEQ ID NO: 2842685 - DNA, 25 bp, Homo sapien
ttgtatttccgaagacatgggtccc

SEQ ID NO: 2842686 - DNA, 25 bp, Homo sapien
caggagggagcccggagctccttca

SEQ ID NO: 2842687 - DNA, 25 bp, Homo sapien
aaatcagaagagcatagtgcttgaa

SEQ ID NO: 2842688 - DNA, 25 bp, Homo sapien
agcactctgttaaagtctgactctt

SEQ ID NO: 2842689 - DNA, 25 bp, Homo sapien
aaaggagtatatatgctttgattcc

SEQ ID NO: 2842690 - DNA, 25 bp, Homo sapien
gaaaagcactctgttaaagtctgac

SEQ ID NO: 2842691 - DNA, 25 bp, Homo sapien
ctcggtaggaagtagaagctagggt

SEQ ID NO: 2842692 - DNA, 25 bp, Homo sapien
caccagaaagagggaacctcggtag

SEQ ID NO: 2842693 - DNA, 25 bp, Homo sapien
acctcggtaggaagtagaagctagg

SEQ ID NO: 2842694 - DNA, 25 bp, Homo sapien
gaacctcggtaggaagtagaagcta

SEQ ID NO: 2842695 - DNA, 25 bp, Homo sapien
tgaccagggactatgcctatcagcc

SEQ ID NO: 2842696 - DNA, 25 bp, Homo sapien
ccttagtactatgagcccagggcag

SEQ ID NO: 2842697 - DNA, 25 bp, Homo sapien
acttagagtctcaagctagagggac

SEQ ID NO: 2842698 - DNA, 25 bp, Homo sapien
tggagggctcctaatataagaacag

SEQ ID NO: 2842699 - DNA, 25 bp, Homo sapien
tactcaaggtcatgcaggattggga

SEQ ID NO: 2842700 - DNA, 25 bp, Homo sapien
tcatgcaggattgggattagaactg

SEQ ID NO: 2842701 - DNA, 25 bp, Homo sapien
caaggtcatgcaggattgggattag

SEQ ID NO: 2842702 - DNA, 25 bp, Homo sapien
ggtcatgcaggattgggattagaac

SEQ ID NO: 2842703 - DNA, 25 bp, Homo sapien
cactttctagagatgtgcctgggca

SEQ ID NO: 2842704 - DNA, 25 bp, Homo sapien
tgatacaggtggtcagaggaaccca

SEQ ID NO: 2842705 - DNA, 25 bp, Homo sapien
gcaggtttccggtagcattcacaga

SEQ ID NO: 2842706 - DNA, 25 bp, Homo sapien
cattccagggtacagtgctgagtcc

SEQ ID NO: 2842707 - DNA, 25 bp, Homo sapien
gagggtccgggttgctggttccagc

SEQ ID NO: 2842708 - DNA, 25 bp, Homo sapien
cggccgcctcctaggggtagcagct

SEQ ID NO: 2842709 - DNA, 25 bp, Homo sapien
tcttgcaagtcacggactttccggt

SEQ ID NO: 2842710 - DNA, 25 bp, Homo sapien
gtagcagctggtccgtggatacagt

SEQ ID NO: 2842711 - DNA, 25 bp, Homo sapien
cagcaccaccgacggcagcagcttc

SEQ ID NO: 2842712 - DNA, 25 bp, Homo sapien
gcttcagcaccaccgacggcagcag

SEQ ID NO: 2842713 - DNA, 25 bp, Homo sapien
agcttcagcaccaccgacggcagca

SEQ ID NO: 2842714 - DNA, 25 bp, Homo sapien
agagcttcagcaccaccgacggcag

SEQ ID NO: 2842715 - DNA, 25 bp, Homo sapien
agtcactttcgaagcggcggccact

SEQ ID NO: 2842716 - DNA, 25 bp, Homo sapien
cgaggcaccagtcactttcgaagcg

SEQ ID NO: 2842717 - DNA, 25 bp, Homo sapien
gtcactttcgaagcggcggccactg

SEQ ID NO: 2842718 - DNA, 25 bp, Homo sapien
gcaccagtcactttcgaagcggcgg

SEQ ID NO: 2842719 - DNA, 25 bp, Homo sapien
agagggcggcgttcacaatttttgg

SEQ ID NO: 2842720 - DNA, 25 bp, Homo sapien
tggcggagagcggttcctacctttc

SEQ ID NO: 2842721 - DNA, 25 bp, Homo sapien
ctgagctgagttctgttccgggcct

SEQ ID NO: 2842722 - DNA, 25 bp, Homo sapien
cgcgtagctccttcggccgaatgag

SEQ ID NO: 2842723 - DNA, 25 bp, Homo sapien
tgccagatagagcacttgccggatt

SEQ ID NO: 2842724 - DNA, 25 bp, Homo sapien
cttgctccagtaacctaggcctagg

SEQ ID NO: 2842725 - DNA, 25 bp, Homo sapien
taaccagagttgaagttgcaggcac

SEQ ID NO: 2842726 - DNA, 25 bp, Homo sapien
aaattagacacgtgaatgccagccg

SEQ ID NO: 2842727 - DNA, 25 bp, Homo sapien
cactgtgaggagtcgaagcagattc

SEQ ID NO: 2842728 - DNA, 25 bp, Homo sapien
atcagagcccactccaagtcttggt

SEQ ID NO: 2842729 - DNA, 25 bp, Homo sapien
catcctgcagactagatgtctctga

SEQ ID NO: 2842730 - DNA, 25 bp, Homo sapien
ttcacctttgtgaaggagtgtgggc

SEQ ID NO: 2842731 - DNA, 25 bp, Homo sapien
tattttaggcattgctctaagcact

SEQ ID NO: 2842732 - DNA, 25 bp, Homo sapien
tcacaggggttcaaggcccattcag

SEQ ID NO: 2842733 - DNA, 25 bp, Homo sapien
tgagtcacttgtccgtaaggttggg

SEQ ID NO: 2842734 - DNA, 25 bp, Homo sapien
ccctcaggctcctttgagtcacttg

SEQ ID NO: 2842735 - DNA, 25 bp, Homo sapien
cattcagtccgcaggccagtttcta

SEQ ID NO: 2842736 - DNA, 25 bp, Homo sapien
gcctgtgctctatggcatcttcctg

SEQ ID NO: 2842737 - DNA, 25 bp, Homo sapien
gtggcagcgctcagcagcattcagg

SEQ ID NO: 2842738 - DNA, 25 bp, Homo sapien
cagacctggatgctagatgctagag

SEQ ID NO: 2842739 - DNA, 25 bp, Homo sapien
caataagatcggcatgaaacatgtg

SEQ ID NO: 2842740 - DNA, 25 bp, Homo sapien
gtggcgtgattttggctcattgcat

SEQ ID NO: 2842741 - DNA, 25 bp, Homo sapien
cgcctcctgggttcaggctattccc

SEQ ID NO: 2842742 - DNA, 25 bp, Homo sapien
cgtgattttggctcattgcatcctc

SEQ ID NO: 2842743 - DNA, 25 bp, Homo sapien
gcgtgattttggctcattgcatcct

SEQ ID NO: 2842744 - DNA, 25 bp, Homo sapien
tagtcagggataacttcacctaggg

SEQ ID NO: 2842745 - DNA, 25 bp, Homo sapien
tgtttccaactattacaagggagga

SEQ ID NO: 2842746 - DNA, 25 bp, Homo sapien
taaaatgtccggagaaaatgcaggt

SEQ ID NO: 2842747 - DNA, 25 bp, Homo sapien
tgacctccaagtgcaacaaatatgt

SEQ ID NO: 2842748 - DNA, 25 bp, Homo sapien
caaaattcccaatgcttactatatt

SEQ ID NO: 2842749 - DNA, 25 bp, Homo sapien
tcaaaattcccaatgcttactatat

SEQ ID NO: 2842750 - DNA, 25 bp, Homo sapien
tatatttcaaggccatggcaggtta

SEQ ID NO: 2842751 - DNA, 25 bp, Homo sapien
atttcaaggccatggcaggttattg

SEQ ID NO: 2842752 - DNA, 25 bp, Homo sapien
tccaccttgaggtcggattccgcac

SEQ ID NO: 2842753 - DNA, 25 bp, Homo sapien
gcaccagaactcgaaactgcctcgg

SEQ ID NO: 2842754 - DNA, 25 bp, Homo sapien
aaatgaaacagcaaacgcgccgaag

SEQ ID NO: 2842755 - DNA, 25 bp, Homo sapien
cacagaggagcgagttgaaagtcac

SEQ ID NO: 2842756 - DNA, 25 bp, Homo sapien
gcaagcaggagaacgcggccccgct

SEQ ID NO: 2842757 - DNA, 25 bp, Homo sapien
acagttcccggtactgaggcatggc

SEQ ID NO: 2842758 - DNA, 25 bp, Homo sapien
tggcgggcgggtcgagtctccccaa

SEQ ID NO: 2842759 - DNA, 25 bp, Homo sapien
gctgggcgatcctgcccgaaggcgc

SEQ ID NO: 2842760 - DNA, 25 bp, Homo sapien
ctcaactcagaaaggcgggaggcgc

SEQ ID NO: 2842761 - DNA, 25 bp, Homo sapien
gagatcggccttgcccctcgactgt

SEQ ID NO: 2842762 - DNA, 25 bp, Homo sapien
tagcccccggcaaataggttacaca

SEQ ID NO: 2842763 - DNA, 25 bp, Homo sapien
gcgcgctaggctcaactcagaaagg

SEQ ID NO: 2842764 - DNA, 25 bp, Homo sapien
ggcgcctcttgcatccttgacgtag

SEQ ID NO: 2842765 - DNA, 25 bp, Homo sapien
aattcttgcgggtcatcacttcagc

SEQ ID NO: 2842766 - DNA, 25 bp, Homo sapien
tattctccggccatagtctcggcgc

SEQ ID NO: 2842767 - DNA, 25 bp, Homo sapien
gatcaatggtactcccacaggccaa

SEQ ID NO: 2842768 - DNA, 25 bp, Homo sapien
acgaagagcctgagcgacgggtcac

SEQ ID NO: 2842769 - DNA, 25 bp, Homo sapien
tgagaagttagtggcgctgctggga

SEQ ID NO: 2842770 - DNA, 25 bp, Homo sapien
tttggccaatgatctgcagccgcca

SEQ ID NO: 2842771 - DNA, 25 bp, Homo sapien
agccgccagggtattgcagccagtg

SEQ ID NO: 2842772 - DNA, 25 bp, Homo sapien
acaatgctgactgatagcggaggcg

SEQ ID NO: 2842773 - DNA, 25 bp, Homo sapien
accgcgagtgggtcggcaccgtctc

SEQ ID NO: 2842774 - DNA, 25 bp, Homo sapien
tccggctccgggtgcgaacaatgct

SEQ ID NO: 2842775 - DNA, 25 bp, Homo sapien
agtgggtcggcaccgtctccggctc

SEQ ID NO: 2842776 - DNA, 25 bp, Homo sapien
gggccagcgtcgggagtcggcagca

SEQ ID NO: 2842777 - DNA, 25 bp, Homo sapien
gccagcgtcgggagtcggcagcagc

SEQ ID NO: 2842778 - DNA, 25 bp, Homo sapien
cgggccagcgtcgggagtcggcagc

SEQ ID NO: 2842779 - DNA, 25 bp, Homo sapien
ccgggccagcgtcgggagtcggcag

SEQ ID NO: 2842780 - DNA, 25 bp, Homo sapien
cctctggcagtgacgaggacgaagt

SEQ ID NO: 2842781 - DNA, 25 bp, Homo sapien
cctggtggagcccttctgtgacagc

SEQ ID NO: 2842782 - DNA, 25 bp, Homo sapien
cccacacattgtgaggcgtgaattc

SEQ ID NO: 2842783 - DNA, 25 bp, Homo sapien
gacgaagtgtccgaggtaaggctcc

SEQ ID NO: 2842784 - DNA, 25 bp, Homo sapien
caggttcccgtcaccattcgtagac

SEQ ID NO: 2842785 - DNA, 25 bp, Homo sapien
gcctagtgagccctcggcttactct

SEQ ID NO: 2842786 - DNA, 25 bp, Homo sapien
ggacaggttcccgtcaccattcgta

SEQ ID NO: 2842787 - DNA, 25 bp, Homo sapien
tctttagctcgagcgggacaggttc

SEQ ID NO: 2842788 - DNA, 25 bp, Homo sapien
ccagtagaacccgattatgatagcc

SEQ ID NO: 2842789 - DNA, 25 bp, Homo sapien
taaggtaaacaaggtgagtcactgc

SEQ ID NO: 2842790 - DNA, 25 bp, Homo sapien
tgtgcattagaagcatccctggcct

SEQ ID NO: 2842791 - DNA, 25 bp, Homo sapien
cctggttgagagctaccggtctaga

SEQ ID NO: 2842792 - DNA, 25 bp, Homo sapien
gaagtttttgtgttcgagcaaagtg

SEQ ID NO: 2842793 - DNA, 25 bp, Homo sapien
agggacttcaaaagataatagattc

SEQ ID NO: 2842794 - DNA, 25 bp, Homo sapien
taacttagatttaggaaaagcatga

SEQ ID NO: 2842795 - DNA, 25 bp, Homo sapien
gcatgatggttcttttttgtgctac

SEQ ID NO: 2842796 - DNA, 25 bp, Homo sapien
gcactgacacggatgaaagcagaaa

SEQ ID NO: 2842797 - DNA, 25 bp, Homo sapien
gaaaacagccacaatgcaggacaag

SEQ ID NO: 2842798 - DNA, 25 bp, Homo sapien
ctgctgcactgacacggatgaaagc

SEQ ID NO: 2842799 - DNA, 25 bp, Homo sapien
aaacagccacaatgcaggacaagtg

SEQ ID NO: 2842800 - DNA, 25 bp, Homo sapien
aaggagaaagcctgctgtgtttggc

SEQ ID NO: 2842801 - DNA, 25 bp, Homo sapien
aatgctgttcgtaaattgctagatg

SEQ ID NO: 2842802 - DNA, 25 bp, Homo sapien
gcagtctagcagaagcttgttcaga

SEQ ID NO: 2842803 - DNA, 25 bp, Homo sapien
gggatgttaatgctgttcgtaaatt

SEQ ID NO: 2842804 - DNA, 25 bp, Homo sapien
tttccgtgttccagtagatttccca

SEQ ID NO: 2842805 - DNA, 25 bp, Homo sapien
tattgtttcgggaggtccacatctg

SEQ ID NO: 2842806 - DNA, 25 bp, Homo sapien
cattctttttcacaggtacccagtg

SEQ ID NO: 2842807 - DNA, 25 bp, Homo sapien
tatctacgcataaacacctgagtta

SEQ ID NO: 2842808 - DNA, 25 bp, Homo sapien
cacgtttacaggttcagattccata

SEQ ID NO: 2842809 - DNA, 25 bp, Homo sapien
tagctgcaagtctcaaaacaggatt

SEQ ID NO: 2842810 - DNA, 25 bp, Homo sapien
gatgtgaacatgtgagcttctactc

SEQ ID NO: 2842811 - DNA, 25 bp, Homo sapien
tagaggccatacagattattctgca

SEQ ID NO: 2842812 - DNA, 25 bp, Homo sapien
ctagagtacaaaagcgtgattatag

SEQ ID NO: 2842813 - DNA, 25 bp, Homo sapien
aggctagagtacaaaagcgtgatta

SEQ ID NO: 2842814 - DNA, 25 bp, Homo sapien
gctagagtacaaaagcgtgattata

SEQ ID NO: 2842815 - DNA, 25 bp, Homo sapien
tagagtacaaaagcgtgattatagc

SEQ ID NO: 2842816 - DNA, 25 bp, Homo sapien
tatttgagatccagttgggaatgct

SEQ ID NO: 2842817 - DNA, 25 bp, Homo sapien
gatgaaatggcgactttacctgtgg

SEQ ID NO: 2842818 - DNA, 25 bp, Homo sapien
gtttaagctgtcactacatcatggc

SEQ ID NO: 2842819 - DNA, 25 bp, Homo sapien
caccgggctagctaattttacattt

SEQ ID NO: 2842820 - DNA, 25 bp, Homo sapien
aaggtcactacaaattttgtgaact

SEQ ID NO: 2842821 - DNA, 25 bp, Homo sapien
cactacaaattttgtgaactcctga

SEQ ID NO: 2842822 - DNA, 25 bp, Homo sapien
tcactacaaattttgtgaactcctg

SEQ ID NO: 2842823 - DNA, 25 bp, Homo sapien
ggtcactacaaattttgtgaactcc

SEQ ID NO: 2842824 - DNA, 25 bp, Homo sapien
gggaaatacgccactttggctggca

SEQ ID NO: 2842825 - DNA, 25 bp, Homo sapien
gaaaatcacacctcttatgtcagca

SEQ ID NO: 2842826 - DNA, 25 bp, Homo sapien
tggatgcagcagataaccggaaaat

SEQ ID NO: 2842827 - DNA, 25 bp, Homo sapien
cagttgctagtgcaagcaggtgctg

SEQ ID NO: 2842828 - DNA, 25 bp, Homo sapien
tggtcacctgatctctttatgcgtt

SEQ ID NO: 2842829 - DNA, 25 bp, Homo sapien
tgtggaccatagtcacagtgactac

SEQ ID NO: 2842830 - DNA, 25 bp, Homo sapien
tatgccaaagtgtgcagttaggaac

SEQ ID NO: 2842831 - DNA, 25 bp, Homo sapien
tatattctgaaaggttggtcacctg

SEQ ID NO: 2842832 - DNA, 25 bp, Homo sapien
gaagcaaataagaatgcgagtattc

SEQ ID NO: 2842833 - DNA, 25 bp, Homo sapien
tcaatgtgtcgaaaccattgtgaag

SEQ ID NO: 2842834 - DNA, 25 bp, Homo sapien
aaaaatgtcatcaatgtgtcgaaac

SEQ ID NO: 2842835 - DNA, 25 bp, Homo sapien
aaaccattgtgaaggctaaagacca

SEQ ID NO: 2842836 - DNA, 25 bp, Homo sapien
aaagaaacccctcctacagcacatt

SEQ ID NO: 2842837 - DNA, 25 bp, Homo sapien
tgtctttagcccaacaaaaggcaga

SEQ ID NO: 2842838 - DNA, 25 bp, Homo sapien
gtagcagtggtggtaaaagccaaga

SEQ ID NO: 2842839 - DNA, 25 bp, Homo sapien
gattcagataacttggacagcacag

SEQ ID NO: 2842840 - DNA, 25 bp, Homo sapien
gaaattgtctgttccagcctcagtg

SEQ ID NO: 2842841 - DNA, 25 bp, Homo sapien
ttactggtgcccatattgatgtgga

SEQ ID NO: 2842842 - DNA, 25 bp, Homo sapien
tgggaagaggaggatgcaacatcac

SEQ ID NO: 2842843 - DNA, 25 bp, Homo sapien
taagaatggcgagagaatgatcaca

SEQ ID NO: 2842844 - DNA, 25 bp, Homo sapien
gacaagcacttgtagttccctgcct

SEQ ID NO: 2842845 - DNA, 25 bp, Homo sapien
tgcacctatcactagcgggcaagct

SEQ ID NO: 2842846 - DNA, 25 bp, Homo sapien
gaacctgctccattgactttgacat

SEQ ID NO: 2842847 - DNA, 25 bp, Homo sapien
caaacagttgcagtagctctgccag

SEQ ID NO: 2842848 - DNA, 25 bp, Homo sapien
gagtcagtgccagtcaagatcgaaa

SEQ ID NO: 2842849 - DNA, 25 bp, Homo sapien
caaggagggtctgttgcacaagccc

SEQ ID NO: 2842850 - DNA, 25 bp, Homo sapien
gaccagttttgtcgctcccgttgga

SEQ ID NO: 2842851 - DNA, 25 bp, Homo sapien
cgttgggccaaccaaaaggagtcag

SEQ ID NO: 2842852 - DNA, 25 bp, Homo sapien
gagccttaagtccatattctgcacc

SEQ ID NO: 2842853 - DNA, 25 bp, Homo sapien
gagcagtagtcagtagtcagagcct

SEQ ID NO: 2842854 - DNA, 25 bp, Homo sapien
acatttggataaaacctagctcagg

SEQ ID NO: 2842855 - DNA, 25 bp, Homo sapien
gactatttggatcccagtagcctgc

SEQ ID NO: 2842856 - DNA, 25 bp, Homo sapien
tacccacatcttggttaggtctgga

SEQ ID NO: 2842857 - DNA, 25 bp, Homo sapien
gatcatctacgaccgaaagttcctg

SEQ ID NO: 2842858 - DNA, 25 bp, Homo sapien
caggagatagcccaggtaacagcac

SEQ ID NO: 2842859 - DNA, 25 bp, Homo sapien
gagatacccggtaaggaaagcagga

SEQ ID NO: 2842860 - DNA, 25 bp, Homo sapien
aacagaggtttgcagatacacaggg

SEQ ID NO: 2842861 - DNA, 25 bp, Homo sapien
tacagtggcaggttacatgagcctc

SEQ ID NO: 2842862 - DNA, 25 bp, Homo sapien
ttggaaaagaggtgctgtcccagcc

SEQ ID NO: 2842863 - DNA, 25 bp, Homo sapien
gaacctgaggcacgctacagtggca

SEQ ID NO: 2842864 - DNA, 25 bp, Homo sapien
ttgaaatgcatgttatgagtaacac

SEQ ID NO: 2842865 - DNA, 25 bp, Homo sapien
tgagtaacacatgaactccctctgg

SEQ ID NO: 2842866 - DNA, 25 bp, Homo sapien
agggagccaagtgacagaaggtctc

SEQ ID NO: 2842867 - DNA, 25 bp, Homo sapien
acttcttccctcataggtgggtcag

SEQ ID NO: 2842868 - DNA, 25 bp, Homo sapien
cctggtatggtatggttcttctcag

SEQ ID NO: 2842869 - DNA, 25 bp, Homo sapien
agatttctcttcattggctgcctcc

SEQ ID NO: 2842870 - DNA, 25 bp, Homo sapien
cctgctggaagcctggtatggtatg

SEQ ID NO: 2842871 - DNA, 25 bp, Homo sapien
tatggttcttctcagctgtggctgc

SEQ ID NO: 2842872 - DNA, 25 bp, Homo sapien
tttctgcaattaatcttttaactcc

SEQ ID NO: 2842873 - DNA, 25 bp, Homo sapien
tgaaaacagactcctcttttctgca

SEQ ID NO: 2842874 - DNA, 25 bp, Homo sapien
tcttttctgcaattaatcttttaac

SEQ ID NO: 2842875 - DNA, 25 bp, Homo sapien
ctgcaattaatcttttaactcctac

SEQ ID NO: 2842876 - DNA, 25 bp, Homo sapien
tggatgtcatctgctgcgtcccacc

SEQ ID NO: 2842877 - DNA, 25 bp, Homo sapien
tgcgtcccaccggtggcttgaaagc

SEQ ID NO: 2842878 - DNA, 25 bp, Homo sapien
gcgtcccaccggtggcttgaaagct

SEQ ID NO: 2842879 - DNA, 25 bp, Homo sapien
atgtcatctgctgcgtcccaccggt

SEQ ID NO: 2842880 - DNA, 25 bp, Homo sapien
tgcaccagtagagccattctcttct

SEQ ID NO: 2842881 - DNA, 25 bp, Homo sapien
gccaggcgtcggctgatgtcatcac

SEQ ID NO: 2842882 - DNA, 25 bp, Homo sapien
tctcttctttacaggtattgacaac

SEQ ID NO: 2842883 - DNA, 25 bp, Homo sapien
cttgcaccagtagagccattctctt

SEQ ID NO: 2842884 - DNA, 25 bp, Homo sapien
tcatttctttgggaaggccttagca

SEQ ID NO: 2842885 - DNA, 25 bp, Homo sapien
agcagattctgaaggagtccgtaac

SEQ ID NO: 2842886 - DNA, 25 bp, Homo sapien
tccactgggtcagagggtctatctc

SEQ ID NO: 2842887 - DNA, 25 bp, Homo sapien
tgggaaccattcctgcatttggctg

SEQ ID NO: 2842888 - DNA, 25 bp, Homo sapien
tgtggccacggcagtcttccaatgc

SEQ ID NO: 2842889 - DNA, 25 bp, Homo sapien
gactgggaaacttgtgggctccacg

SEQ ID NO: 2842890 - DNA, 25 bp, Homo sapien
ggacctgggagccttacttgaagga

SEQ ID NO: 2842891 - DNA, 25 bp, Homo sapien
cacagcctcagactcgactgggaaa

SEQ ID NO: 2842892 - DNA, 25 bp, Homo sapien
ccaggagaagtctctgatgcgggga

SEQ ID NO: 2842893 - DNA, 25 bp, Homo sapien
tgggggaggcccaggagaagtctct

SEQ ID NO: 2842894 - DNA, 25 bp, Homo sapien
gggaggcccaggagaagtctctgat

SEQ ID NO: 2842895 - DNA, 25 bp, Homo sapien
gaggcccaggagaagtctctgatgc

SEQ ID NO: 2842896 - DNA, 25 bp, Homo sapien
gaagggctactctctgagacaactt

SEQ ID NO: 2842897 - DNA, 25 bp, Homo sapien
cactctacgccagacaatatgctag

SEQ ID NO: 2842898 - DNA, 25 bp, Homo sapien
gcaggatcaagcaacatggcttaaa

SEQ ID NO: 2842899 - DNA, 25 bp, Homo sapien
tatgcatttatgaagtccccactct

SEQ ID NO: 2842900 - DNA, 25 bp, Homo sapien
ttgaaatgctagagtgccctacggc

SEQ ID NO: 2842901 - DNA, 25 bp, Homo sapien
taacagcctaaacttcacatggccc

SEQ ID NO: 2842902 - DNA, 25 bp, Homo sapien
tggccatattcaagcccatgacatc

SEQ ID NO: 2842903 - DNA, 25 bp, Homo sapien
ccatgacatcaaataccatccttgt

SEQ ID NO: 2842904 - DNA, 25 bp, Homo sapien
ctcttggtaagcagcgagcgcctgg

SEQ ID NO: 2842905 - DNA, 25 bp, Homo sapien
ggtgcggcgaccctcttggtaagca

SEQ ID NO: 2842906 - DNA, 25 bp, Homo sapien
cgggtcgttccagccgcgttccttg

SEQ ID NO: 2842907 - DNA, 25 bp, Homo sapien
tgcagcccgtatgagaactgcggcg

SEQ ID NO: 2842908 - DNA, 25 bp, Homo sapien
taggccggggcgacaacctagtgcc

SEQ ID NO: 2842909 - DNA, 25 bp, Homo sapien
gaactccactgttagcttatactgg

SEQ ID NO: 2842910 - DNA, 25 bp, Homo sapien
acagagggtccatactaagcgccgc

SEQ ID NO: 2842911 - DNA, 25 bp, Homo sapien
atgtgtgaagcgagcccggaactcc

SEQ ID NO: 2842912 - DNA, 25 bp, Homo sapien
ccggcttcacgtacagctccgccat

SEQ ID NO: 2842913 - DNA, 25 bp, Homo sapien
ccacttccgcttggccagcggggca

SEQ ID NO: 2842914 - DNA, 25 bp, Homo sapien
ctccacttccgcttggccagcgggg

SEQ ID NO: 2842915 - DNA, 25 bp, Homo sapien
acttccgcttggccagcggggcagc

SEQ ID NO: 2842916 - DNA, 25 bp, Homo sapien
cttggccagcggggcagcgcgtcat

SEQ ID NO: 2842917 - DNA, 25 bp, Homo sapien
tctcaggccaggttaagtgtctcac

SEQ ID NO: 2842918 - DNA, 25 bp, Homo sapien
gatgctggttcacaaccgtcgggag

SEQ ID NO: 2842919 - DNA, 25 bp, Homo sapien
tcagatgtcagttcttcaggaggcc

SEQ ID NO: 2842920 - DNA, 25 bp, Homo sapien
tgcggcaactccctaagactcgaag

SEQ ID NO: 2842921 - DNA, 25 bp, Homo sapien
tacagagttaggcatggacccagag

SEQ ID NO: 2842922 - DNA, 25 bp, Homo sapien
taaatagacggtggacaaggatcgg

SEQ ID NO: 2842923 - DNA, 25 bp, Homo sapien
gcaaggaacacaaggacccaaggaa

SEQ ID NO: 2842924 - DNA, 25 bp, Homo sapien
tcctacgttgtggtgcagtgcctcc

SEQ ID NO: 2842925 - DNA, 25 bp, Homo sapien
tagggcatatggagcagagagggtt

SEQ ID NO: 2842926 - DNA, 25 bp, Homo sapien
aaagagaagacaccccgctttcgag

SEQ ID NO: 2842927 - DNA, 25 bp, Homo sapien
agagagggtttcagccggaaggcat

SEQ ID NO: 2842928 - DNA, 25 bp, Homo sapien
ggaaggcatcaagaaaagagaagac

SEQ ID NO: 2842929 - DNA, 25 bp, Homo sapien
catggagctggtccgcttgagccgc

SEQ ID NO: 2842930 - DNA, 25 bp, Homo sapien
caggccttgcctcgagctgcagagg

SEQ ID NO: 2842931 - DNA, 25 bp, Homo sapien
atggagctggtccgcttgagccgca

SEQ ID NO: 2842932 - DNA, 25 bp, Homo sapien
tggagctggtccgcttgagccgcag

SEQ ID NO: 2842933 - DNA, 25 bp, Homo sapien
gctggcaccagaaggctgcgcactg

SEQ ID NO: 2842934 - DNA, 25 bp, Homo sapien
agcttcagagagtccccctgcatgg

SEQ ID NO: 2842935 - DNA, 25 bp, Homo sapien
gcactggaagctctgacggcccagg

SEQ ID NO: 2842936 - DNA, 25 bp, Homo sapien
gcctgcacagcttcagagagtcccc

SEQ ID NO: 2842937 - DNA, 25 bp, Homo sapien
cagcgatgaggccaaaggtgtgtgg

SEQ ID NO: 2842938 - DNA, 25 bp, Homo sapien
ataaatgtcacaaggcgcacagggc

SEQ ID NO: 2842939 - DNA, 25 bp, Homo sapien
cagggcactgccacaatggctcctc

SEQ ID NO: 2842940 - DNA, 25 bp, Homo sapien
tgggtcgcggccaacaccaataaat

SEQ ID NO: 2842941 - DNA, 25 bp, Homo sapien
aagcccccaacttcaccctcttctg

SEQ ID NO: 2842942 - DNA, 25 bp, Homo sapien
agcccccaacttcaccctcttctgg

SEQ ID NO: 2842943 - DNA, 25 bp, Homo sapien
gagggtaccaatggcctcgttcagc

SEQ ID NO: 2842944 - DNA, 25 bp, Homo sapien
cggtgagggtaccaatggcctcgtt

SEQ ID NO: 2842945 - DNA, 25 bp, Homo sapien
ggtgtgcagtcatgagagagtcaga

SEQ ID NO: 2842946 - DNA, 25 bp, Homo sapien
ccctggcggtgagggtaccaatggc

SEQ ID NO: 2842947 - DNA, 25 bp, Homo sapien
ggcagtgtccccatatacagtgcct

SEQ ID NO: 2842948 - DNA, 25 bp, Homo sapien
tatacagtgcctcgtacttctgagc

SEQ ID NO: 2842949 - DNA, 25 bp, Homo sapien
tgcctcgtacttctgagcagcttgg

SEQ ID NO: 2842950 - DNA, 25 bp, Homo sapien
cagcttggcttaccgcatccagcag

SEQ ID NO: 2842951 - DNA, 25 bp, Homo sapien
ggcaggtcttcaggagagatggggt

SEQ ID NO: 2842952 - DNA, 25 bp, Homo sapien
tggcaggtcttcaggagagatgggg

SEQ ID NO: 2842953 - DNA, 25 bp, Homo sapien
cttgccgtggcaggtcttcaggaga

SEQ ID NO: 2842954 - DNA, 25 bp, Homo sapien
gccgtggcaggtcttcaggagagat

SEQ ID NO: 2842955 - DNA, 25 bp, Homo sapien
cagcaagaggcatcaccactgacct

SEQ ID NO: 2842956 - DNA, 25 bp, Homo sapien
gggagcagcaagaggcatcaccact

SEQ ID NO: 2842957 - DNA, 25 bp, Homo sapien
ggcatcaccactgacctctactcgc

SEQ ID NO: 2842958 - DNA, 25 bp, Homo sapien
actgacctctactcgctctgacaag

SEQ ID NO: 2842959 - DNA, 25 bp, Homo sapien
ccccaactaccttggaagcttcaga

SEQ ID NO: 2842960 - DNA, 25 bp, Homo sapien
taccttggaagcttcagacccaacc

SEQ ID NO: 2842961 - DNA, 25 bp, Homo sapien
tggaagcttcagacccaacccctta

SEQ ID NO: 2842962 - DNA, 25 bp, Homo sapien
aactaccttggaagcttcagaccca

SEQ ID NO: 2842963 - DNA, 25 bp, Homo sapien
tggcacttgagcatacagctatctt

SEQ ID NO: 2842964 - DNA, 25 bp, Homo sapien
catggcacttgagcatacagctatc

SEQ ID NO: 2842965 - DNA, 25 bp, Homo sapien
cacttgagcatacagctatctttgt

SEQ ID NO: 2842966 - DNA, 25 bp, Homo sapien
cttgagcatacagctatctttgtca

SEQ ID NO: 2842967 - DNA, 25 bp, Homo sapien
gatggagtagggacatcagggatgg

SEQ ID NO: 2842968 - DNA, 25 bp, Homo sapien
tgttccggaagcatgtgggagcaca

SEQ ID NO: 2842969 - DNA, 25 bp, Homo sapien
ctgttccggaagcatgtgggagcac

SEQ ID NO: 2842970 - DNA, 25 bp, Homo sapien
agcccagcctctcggactctcccca

SEQ ID NO: 2842971 - DNA, 25 bp, Homo sapien
cagcctctcggactctccccaaact

SEQ ID NO: 2842972 - DNA, 25 bp, Homo sapien
cccagcctctcggactctccccaaa

SEQ ID NO: 2842973 - DNA, 25 bp, Homo sapien
ccagcctctcggactctccccaaac

SEQ ID NO: 2842974 - DNA, 25 bp, Homo sapien
tgtccaggggttcaagtactgggga

SEQ ID NO: 2842975 - DNA, 25 bp, Homo sapien
tgtgtccaggggttcaagtactggg

SEQ ID NO: 2842976 - DNA, 25 bp, Homo sapien
ctgtgtccaggggttcaagtactgg

SEQ ID NO: 2842977 - DNA, 25 bp, Homo sapien
aagtagctcttgcttgggggatgta

SEQ ID NO: 2842978 - DNA, 25 bp, Homo sapien
gcttgggggatgtaggcatcctcac

SEQ ID NO: 2842979 - DNA, 25 bp, Homo sapien
ggagaagtagctcttgcttggggga

SEQ ID NO: 2842980 - DNA, 25 bp, Homo sapien
cttgcttgggggatgtaggcatcct

SEQ ID NO: 2842981 - DNA, 25 bp, Homo sapien
ccacgccccacacacggatgtgcac

SEQ ID NO: 2842982 - DNA, 25 bp, Homo sapien
cccacgccccacacacggatgtgca

SEQ ID NO: 2842983 - DNA, 25 bp, Homo sapien
ccccacgccccacacacggatgtgc

SEQ ID NO: 2842984 - DNA, 25 bp, Homo sapien
gaggctggcagtggatcagactgtg

SEQ ID NO: 2842985 - DNA, 25 bp, Homo sapien
ggattcactaggctcatggcatcct

SEQ ID NO: 2842986 - DNA, 25 bp, Homo sapien
tggcagtggatcagactgtggtcca

SEQ ID NO: 2842987 - DNA, 25 bp, Homo sapien
aggggattcactaggctcatggcat

SEQ ID NO: 2842988 - DNA, 25 bp, Homo sapien
aggtacctctacccagcccagagag

SEQ ID NO: 2842989 - DNA, 25 bp, Homo sapien
ctcttccccggtgccaggtcctctt

SEQ ID NO: 2842990 - DNA, 25 bp, Homo sapien
cagttattgactgcaatactgctct

SEQ ID NO: 2842991 - DNA, 25 bp, Homo sapien
gccaggtcctcttcaggtacctcta

SEQ ID NO: 2842992 - DNA, 25 bp, Homo sapien
ggacctcccaatgccctcaggccca

SEQ ID NO: 2842993 - DNA, 25 bp, Homo sapien
tgttcagtccaatcccacccttgtc

SEQ ID NO: 2842994 - DNA, 25 bp, Homo sapien
tcacccttgatcacctctgttcagt

SEQ ID NO: 2842995 - DNA, 25 bp, Homo sapien
cacaatacatactccctgtcttcac

SEQ ID NO: 2842996 - DNA, 25 bp, Homo sapien
tgtaggattccccaccataccagga

SEQ ID NO: 2842997 - DNA, 25 bp, Homo sapien
cccaccataccaggacagagagtta

SEQ ID NO: 2842998 - DNA, 25 bp, Homo sapien
tgctctggatgtaggattccccacc

SEQ ID NO: 2842999 - DNA, 25 bp, Homo sapien
ccatgctctggatgtaggattcccc

SEQ ID NO: 2843000 - DNA, 25 bp, Homo sapien
cactggtgaggcctagacaacttga

SEQ ID NO: 2843001 - DNA, 25 bp, Homo sapien
gagcagagctgttaagaggaccaca

SEQ ID NO: 2843002 - DNA, 25 bp, Homo sapien
caacttgataagcacaggatgaggg

SEQ ID NO: 2843003 - DNA, 25 bp, Homo sapien
gaaaattcaggacataggacccaga

SEQ ID NO: 2843004 - DNA, 25 bp, Homo sapien
ctccggtccagtgaactctccaggc

SEQ ID NO: 2843005 - DNA, 25 bp, Homo sapien
tccggtccagtgaactctccaggct

SEQ ID NO: 2843006 - DNA, 25 bp, Homo sapien
gatctccctttggggggccgcagtc

SEQ ID NO: 2843007 - DNA, 25 bp, Homo sapien
tccaggctggagaaggatctccctt

SEQ ID NO: 2843008 - DNA, 25 bp, Homo sapien
cagacctaggtccacacatgggctc

SEQ ID NO: 2843009 - DNA, 25 bp, Homo sapien
gttagtcagtttaacagcagaccta

SEQ ID NO: 2843010 - DNA, 25 bp, Homo sapien
cagtttaacagcagacctaggtcca

SEQ ID NO: 2843011 - DNA, 25 bp, Homo sapien
tgtagagtgggagttagtcagttta

SEQ ID NO: 2843012 - DNA, 25 bp, Homo sapien
tgcatctcctagttcccaggttggg

SEQ ID NO: 2843013 - DNA, 25 bp, Homo sapien
tgggtacatgccagtagtaagtacc

SEQ ID NO: 2843014 - DNA, 25 bp, Homo sapien
ctgccactgggtgctaccgctgggt

SEQ ID NO: 2843015 - DNA, 25 bp, Homo sapien
tgcagcatcgtggatcttcctccag

SEQ ID NO: 2843016 - DNA, 25 bp, Homo sapien
ccctggtccctacacagagaggtat

SEQ ID NO: 2843017 - DNA, 25 bp, Homo sapien
gatccaggctcctcaatcttgaaga

SEQ ID NO: 2843018 - DNA, 25 bp, Homo sapien
catcacatgtaaagaccgggttcat

SEQ ID NO: 2843019 - DNA, 25 bp, Homo sapien
acaggaacaccggattagagaggag

SEQ ID NO: 2843020 - DNA, 25 bp, Homo sapien
agagtagcctttcggattccctcgt

SEQ ID NO: 2843021 - DNA, 25 bp, Homo sapien
cgtctttgagccccagagtagcctt

SEQ ID NO: 2843022 - DNA, 25 bp, Homo sapien
gccccagagtagcctttcggattcc

SEQ ID NO: 2843023 - DNA, 25 bp, Homo sapien
tttgagccccagagtagcctttcgg

SEQ ID NO: 2843024 - DNA, 25 bp, Homo sapien
cagttgaccagaatgatggccagca

SEQ ID NO: 2843025 - DNA, 25 bp, Homo sapien
catcgcagttgaccagaatgatggc

SEQ ID NO: 2843026 - DNA, 25 bp, Homo sapien
tcgcagttgaccagaatgatggcca

SEQ ID NO: 2843027 - DNA, 25 bp, Homo sapien
cgcagttgaccagaatgatggccag

SEQ ID NO: 2843028 - DNA, 25 bp, Homo sapien
tgtaaacgggcgtctggatccccga

SEQ ID NO: 2843029 - DNA, 25 bp, Homo sapien
actatgaactcatcaggcgcctgaa

SEQ ID NO: 2843030 - DNA, 25 bp, Homo sapien
actcgcgcacgagtgagatcatcgc

SEQ ID NO: 2843031 - DNA, 25 bp, Homo sapien
gatccccgaatggttgcgtgtttcc

SEQ ID NO: 2843032 - DNA, 25 bp, Homo sapien
cgcagcctgagactcgacgggaggg

SEQ ID NO: 2843033 - DNA, 25 bp, Homo sapien
acgcagcctgagactcgacgggagg

SEQ ID NO: 2843034 - DNA, 25 bp, Homo sapien
tgggcttgactcatctcagggaatg

SEQ ID NO: 2843035 - DNA, 25 bp, Homo sapien
tcagggaatgtagcccctgggccct

SEQ ID NO: 2843036 - DNA, 25 bp, Homo sapien
aatgcctagagacatgctccctgcc

SEQ ID NO: 2843037 - DNA, 25 bp, Homo sapien
gctttgtcctgcatgaacagagttg

SEQ ID NO: 2843038 - DNA, 25 bp, Homo sapien
catctgtcttaaaatcatggccagg

SEQ ID NO: 2843039 - DNA, 25 bp, Homo sapien
caggccctgattctatgatagaata

SEQ ID NO: 2843040 - DNA, 25 bp, Homo sapien
aagccgatgtggtttcggttttcat

SEQ ID NO: 2843041 - DNA, 25 bp, Homo sapien
aaaactcttaagaaagccgatgtgg

SEQ ID NO: 2843042 - DNA, 25 bp, Homo sapien
ggtttcttccagggtgcccgccagc

SEQ ID NO: 2843043 - DNA, 25 bp, Homo sapien
gtttcttccagggtgcccgccagca

SEQ ID NO: 2843044 - DNA, 25 bp, Homo sapien
tttcttccagggtgcccgccagcag

SEQ ID NO: 2843045 - DNA, 25 bp, Homo sapien
ctgcagtgatgatgctctgtggtca

SEQ ID NO: 2843046 - DNA, 25 bp, Homo sapien
cagtgatgatgctctgtggtcatgg

SEQ ID NO: 2843047 - DNA, 25 bp, Homo sapien
gtgatgatgctctgtggtcatggcc

SEQ ID NO: 2843048 - DNA, 25 bp, Homo sapien
gcagtgatgatgctctgtggtcatg

SEQ ID NO: 2843049 - DNA, 25 bp, Homo sapien
cacatgcaggtcatagagggctgcc

SEQ ID NO: 2843050 - DNA, 25 bp, Homo sapien
catgcaggtcatagagggctgccag

SEQ ID NO: 2843051 - DNA, 25 bp, Homo sapien
ctgcacatgcaggtcatagagggct

SEQ ID NO: 2843052 - DNA, 25 bp, Homo sapien
tgatgggcagcacatggtgtgtctg

SEQ ID NO: 2843053 - DNA, 25 bp, Homo sapien
gaatctcagcaccatctgttcctgc

SEQ ID NO: 2843054 - DNA, 25 bp, Homo sapien
tgttcctgctgccatctctgcctct

SEQ ID NO: 2843055 - DNA, 25 bp, Homo sapien
gccatctctgcctctcctcgcaggc

SEQ ID NO: 2843056 - DNA, 25 bp, Homo sapien
ctggaatctcagcaccatctgttcc

SEQ ID NO: 2843057 - DNA, 25 bp, Homo sapien
tcagccaccaggcctttgacctggt

SEQ ID NO: 2843058 - DNA, 25 bp, Homo sapien
agcttctctcgaatccaaatttggt

SEQ ID NO: 2843059 - DNA, 25 bp, Homo sapien
tcttcagccaccaggcctttgacct

SEQ ID NO: 2843060 - DNA, 25 bp, Homo sapien
ctctcgaatccaaatttggtgctgc

SEQ ID NO: 2843061 - DNA, 25 bp, Homo sapien
caagaagagcggccgggccacatct

SEQ ID NO: 2843062 - DNA, 25 bp, Homo sapien
tgggccaagaagagcggccgggcca

SEQ ID NO: 2843063 - DNA, 25 bp, Homo sapien
agagcggccgggccacatctggtat

SEQ ID NO: 2843064 - DNA, 25 bp, Homo sapien
ctgggccaagaagagcggccgggcc

SEQ ID NO: 2843065 - DNA, 25 bp, Homo sapien
ttggtcagaagttcatgtgtgtgca

SEQ ID NO: 2843066 - DNA, 25 bp, Homo sapien
gtgtgtgcacggatttaggaccaga

SEQ ID NO: 2843067 - DNA, 25 bp, Homo sapien
ttccaatagaacctcatcaccaggg

SEQ ID NO: 2843068 - DNA, 25 bp, Homo sapien
ggaccagagcccaacttttccaata

SEQ ID NO: 2843069 - DNA, 25 bp, Homo sapien
ccatggctagcccaggtgccctcag

SEQ ID NO: 2843070 - DNA, 25 bp, Homo sapien
tggccatggctagcccaggtgccct

SEQ ID NO: 2843071 - DNA, 25 bp, Homo sapien
gccatggctagcccaggtgccctca

SEQ ID NO: 2843072 - DNA, 25 bp, Homo sapien
tcctcaaggaggcctaaacgcaggg

SEQ ID NO: 2843073 - DNA, 25 bp, Homo sapien
gctggcttagcccactgtccgtcag

SEQ ID NO: 2843074 - DNA, 25 bp, Homo sapien
gggcccgagcctcttctactgcatc

SEQ ID NO: 2843075 - DNA, 25 bp, Homo sapien
tccgtcagggtgtcctcaaggaggc

SEQ ID NO: 2843076 - DNA, 25 bp, Homo sapien
cagcctggagcaaactgagggagct

SEQ ID NO: 2843077 - DNA, 25 bp, Homo sapien
gagcagcctggagcaaactgaggga

SEQ ID NO: 2843078 - DNA, 25 bp, Homo sapien
tgaggcccccaacagagcagcctgg

SEQ ID NO: 2843079 - DNA, 25 bp, Homo sapien
gcctggagcaaactgagggagctac

SEQ ID NO: 2843080 - DNA, 25 bp, Homo sapien
cttcccaaagaactccacactctcc

SEQ ID NO: 2843081 - DNA, 25 bp, Homo sapien
aagaactccacactctccccctggc

SEQ ID NO: 2843082 - DNA, 25 bp, Homo sapien
tcccaaagaactccacactctcccc

SEQ ID NO: 2843083 - DNA, 25 bp, Homo sapien
tcagagcttcccaaagaactccaca

SEQ ID NO: 2843084 - DNA, 25 bp, Homo sapien
ccaggcgaagaagtaggccactgta

SEQ ID NO: 2843085 - DNA, 25 bp, Homo sapien
acaatccagggcaaagagccctccg

SEQ ID NO: 2843086 - DNA, 25 bp, Homo sapien
ggtccaggcgaagaagtaggccact

SEQ ID NO: 2843087 - DNA, 25 bp, Homo sapien
gagccatgagacaatccagggcaaa

SEQ ID NO: 2843088 - DNA, 25 bp, Homo sapien
caccagccaacacccgcagcagggg

SEQ ID NO: 2843089 - DNA, 25 bp, Homo sapien
accagccaacacccgcagcaggggg

SEQ ID NO: 2843090 - DNA, 25 bp, Homo sapien
acttcaccagccaacacccgcagca

SEQ ID NO: 2843091 - DNA, 25 bp, Homo sapien
caacttcaccagccaacacccgcag

SEQ ID NO: 2843092 - DNA, 25 bp, Homo sapien
aggacgaggctggcgaatcacttga

SEQ ID NO: 2843093 - DNA, 25 bp, Homo sapien
agtaatacattctccatgggcatgg

SEQ ID NO: 2843094 - DNA, 25 bp, Homo sapien
aagtaatacattctccatgggcatg

SEQ ID NO: 2843095 - DNA, 25 bp, Homo sapien
caaaagtaatacattctccatgggc

SEQ ID NO: 2843096 - DNA, 25 bp, Homo sapien
gaaagggccaaacttgataatcgtc

SEQ ID NO: 2843097 - DNA, 25 bp, Homo sapien
agaggagcaactttcagccagaggc

SEQ ID NO: 2843098 - DNA, 25 bp, Homo sapien
tacaagaggatctcaagaaagcaga

SEQ ID NO: 2843099 - DNA, 25 bp, Homo sapien
tcagtccctagtagcactgtcagag

SEQ ID NO: 2843100 - DNA, 25 bp, Homo sapien
gagccccttgccacacacgctgggt

SEQ ID NO: 2843101 - DNA, 25 bp, Homo sapien
ctgtaggatccgtagagccccttgc

SEQ ID NO: 2843102 - DNA, 25 bp, Homo sapien
ctgggagctgtaggatccgtagagc

SEQ ID NO: 2843103 - DNA, 25 bp, Homo sapien
ttgccacacacgctgggtcccgggc

SEQ ID NO: 2843104 - DNA, 25 bp, Homo sapien
gacatggtgagagtgagcagacagc

SEQ ID NO: 2843105 - DNA, 25 bp, Homo sapien
acatggtgagagtgagcagacagca

SEQ ID NO: 2843106 - DNA, 25 bp, Homo sapien
caggacatggtgagagtgagcagac

SEQ ID NO: 2843107 - DNA, 25 bp, Homo sapien
ggcaggacatggtgagagtgagcag

SEQ ID NO: 2843108 - DNA, 25 bp, Homo sapien
aggaaagggtggactcaggccaaat

SEQ ID NO: 2843109 - DNA, 25 bp, Homo sapien
ggatggggtgacagatactctcctg

SEQ ID NO: 2843110 - DNA, 25 bp, Homo sapien
ggactcaggccaaatgcctagcggg

SEQ ID NO: 2843111 - DNA, 25 bp, Homo sapien
aagggtggactcaggccaaatgcct

SEQ ID NO: 2843112 - DNA, 25 bp, Homo sapien
agtcagacacctccacttcagtggc

SEQ ID NO: 2843113 - DNA, 25 bp, Homo sapien
tgaggcagcttttgagtcagacacc

SEQ ID NO: 2843114 - DNA, 25 bp, Homo sapien
ctgaggcagcttttgagtcagacac

SEQ ID NO: 2843115 - DNA, 25 bp, Homo sapien
ggcagcttttgagtcagacacctcc

SEQ ID NO: 2843116 - DNA, 25 bp, Homo sapien
tgaacagggtagttgagatcactcc

SEQ ID NO: 2843117 - DNA, 25 bp, Homo sapien
agcagcccctgaccctgtaagcatg

SEQ ID NO: 2843118 - DNA, 25 bp, Homo sapien
ttggaggtccccatagcctataacc

SEQ ID NO: 2843119 - DNA, 25 bp, Homo sapien
ctcagctccgaagcaccagggttct

SEQ ID NO: 2843120 - DNA, 25 bp, Homo sapien
cagcaccgacaggttctccacccct

SEQ ID NO: 2843121 - DNA, 25 bp, Homo sapien
acacgtccagcaccgacaggttctc

SEQ ID NO: 2843122 - DNA, 25 bp, Homo sapien
tccagcaccgacaggttctccaccc

SEQ ID NO: 2843123 - DNA, 25 bp, Homo sapien
gcaccgacaggttctccacccctgg

SEQ ID NO: 2843124 - DNA, 25 bp, Homo sapien
gaggggcagagcttcttcaaacagc

SEQ ID NO: 2843125 - DNA, 25 bp, Homo sapien
ctgcaccaggctaagagtgctaagc

SEQ ID NO: 2843126 - DNA, 25 bp, Homo sapien
tgaggggcagagcttcttcaaacag

SEQ ID NO: 2843127 - DNA, 25 bp, Homo sapien
gggccacactgtaccctcggcccag

SEQ ID NO: 2843128 - DNA, 25 bp, Homo sapien
gagcccagtgtggattggacacgtg

SEQ ID NO: 2843129 - DNA, 25 bp, Homo sapien
cccagtgtggattggacacgtgcca

SEQ ID NO: 2843130 - DNA, 25 bp, Homo sapien
cacaagtcggggtgcctctgtttcc

SEQ ID NO: 2843131 - DNA, 25 bp, Homo sapien
tcaaaggtgaagttttgttcctgtg

SEQ ID NO: 2843132 - DNA, 25 bp, Homo sapien
tgtcaaaggtgaagttttgttcctg

SEQ ID NO: 2843133 - DNA, 25 bp, Homo sapien
caaaggtgaagttttgttcctgtgg

SEQ ID NO: 2843134 - DNA, 25 bp, Homo sapien
tgccccaaacgagcggcatgccatg

SEQ ID NO: 2843135 - DNA, 25 bp, Homo sapien
tgcagacctggcctgaaaggggtat

SEQ ID NO: 2843136 - DNA, 25 bp, Homo sapien
ggctttgccccaaacgagcggcatg

SEQ ID NO: 2843137 - DNA, 25 bp, Homo sapien
ggacacacatctgtgccaacaggaa

SEQ ID NO: 2843138 - DNA, 25 bp, Homo sapien
ttgaattctaaacagtgagccacac

SEQ ID NO: 2843139 - DNA, 25 bp, Homo sapien
gcaggagtagctcctttcagatggg

SEQ ID NO: 2843140 - DNA, 25 bp, Homo sapien
cacttgtgaactaggtaccagtccc

SEQ ID NO: 2843141 - DNA, 25 bp, Homo sapien
taaaactaatccctccacttgtgaa

SEQ ID NO: 2843142 - DNA, 25 bp, Homo sapien
accaggctcatctctcatcgttttt

SEQ ID NO: 2843143 - DNA, 25 bp, Homo sapien
tgcaccaggctcatctctcatcgtt

SEQ ID NO: 2843144 - DNA, 25 bp, Homo sapien
actgcaccaggctcatctctcatcg

SEQ ID NO: 2843145 - DNA, 25 bp, Homo sapien
gctcatctctcatcgtttttttttg

SEQ ID NO: 2843146 - DNA, 25 bp, Homo sapien
tggtcgaaaagtcctcaacgtcctg

SEQ ID NO: 2843147 - DNA, 25 bp, Homo sapien
ctgaagccaaggcagtttgagtcca

SEQ ID NO: 2843148 - DNA, 25 bp, Homo sapien
tcgaaaagtcctcaacgtcctgacg

SEQ ID NO: 2843149 - DNA, 25 bp, Homo sapien
ccaaggcagtttgagtccattcatt

SEQ ID NO: 2843150 - DNA, 25 bp, Homo sapien
gcaaagccccgggccccttggagca

SEQ ID NO: 2843151 - DNA, 25 bp, Homo sapien
caaagccccgggccccttggagcag

SEQ ID NO: 2843152 - DNA, 25 bp, Homo sapien
gcagcaccagggttcccgacacccc

SEQ ID NO: 2843153 - DNA, 25 bp, Homo sapien
agcagcaccagggttcccgacaccc

SEQ ID NO: 2843154 - DNA, 25 bp, Homo sapien
ccggagttcattgagccctcgtggg

SEQ ID NO: 2843155 - DNA, 25 bp, Homo sapien
cacaggctgggaccacgccggagtt

SEQ ID NO: 2843156 - DNA, 25 bp, Homo sapien
cgacagggtcgaacgtgcacaggct

SEQ ID NO: 2843157 - DNA, 25 bp, Homo sapien
gggaccacgccggagttcattgagc

SEQ ID NO: 2843158 - DNA, 25 bp, Homo sapien
gaaacggctctaggttgagaccgcc

SEQ ID NO: 2843159 - DNA, 25 bp, Homo sapien
catctcggagcgctagggtttacgg

SEQ ID NO: 2843160 - DNA, 25 bp, Homo sapien
cgctagattctggatggccgggaac

SEQ ID NO: 2843161 - DNA, 25 bp, Homo sapien
cgcatcgacgcgctttagaaacggc

SEQ ID NO: 2843162 - DNA, 25 bp, Homo sapien
tggctcccgagtggcacgcgttcga

SEQ ID NO: 2843163 - DNA, 25 bp, Homo sapien
gttcgaccccaagaccctacactca

SEQ ID NO: 2843164 - DNA, 25 bp, Homo sapien
agtggcacgcgttcgaccccaagac

SEQ ID NO: 2843165 - DNA, 25 bp, Homo sapien
ctgtggctcccgagtggcacgcgtt

SEQ ID NO: 2843166 - DNA, 25 bp, Homo sapien
ttctttcctacacagcggcacccgc

SEQ ID NO: 2843167 - DNA, 25 bp, Homo sapien
ggcacccgccggcttccaggcttca

SEQ ID NO: 2843168 - DNA, 25 bp, Homo sapien
tcacacttgtgaactcttcggctgc

SEQ ID NO: 2843169 - DNA, 25 bp, Homo sapien
ggtcgataagtcttccgaacctctg

SEQ ID NO: 2843170 - DNA, 25 bp, Homo sapien
aatgccctgttgactcgggagccta

SEQ ID NO: 2843171 - DNA, 25 bp, Homo sapien
gattctgcagggcatctagggttct

SEQ ID NO: 2843172 - DNA, 25 bp, Homo sapien
gatgatcctcagtgccttaggccag

SEQ ID NO: 2843173 - DNA, 25 bp, Homo sapien
gagcctaagccttctctggtgggtg

SEQ ID NO: 2843174 - DNA, 25 bp, Homo sapien
tatcctcagatatttaactgcatgt

SEQ ID NO: 2843175 - DNA, 25 bp, Homo sapien
aatccaagtccctgaatatcctcag

SEQ ID NO: 2843176 - DNA, 25 bp, Homo sapien
ccagagaatctacttgattcatttc

SEQ ID NO: 2843177 - DNA, 25 bp, Homo sapien
tcttggtttatgttgatctcctgcc

SEQ ID NO: 2843178 - DNA, 25 bp, Homo sapien
gcagctctcatcagtgggatccgca

SEQ ID NO: 2843179 - DNA, 25 bp, Homo sapien
tgacaattcaatgacgcttcaagcg

SEQ ID NO: 2843180 - DNA, 25 bp, Homo sapien
tgctggcttgggtcactcgaggtca

SEQ ID NO: 2843181 - DNA, 25 bp, Homo sapien
tagtgaaacggcatcatggcgcttc

SEQ ID NO: 2843182 - DNA, 25 bp, Homo sapien
gtcaggctggtctggaacacctggc

SEQ ID NO: 2843183 - DNA, 25 bp, Homo sapien
ggcgcgcgccaccactaatttttgt

SEQ ID NO: 2843184 - DNA, 25 bp, Homo sapien
gtttgtcaggctggtctggaacacc

SEQ ID NO: 2843185 - DNA, 25 bp, Homo sapien
ttgtcaggctggtctggaacacctg

SEQ ID NO: 2843186 - DNA, 25 bp, Homo sapien
ggtagatgaggacaagaacaccctg

SEQ ID NO: 2843187 - DNA, 25 bp, Homo sapien
gcacaagctttatgaggaataggag

SEQ ID NO: 2843188 - DNA, 25 bp, Homo sapien
gctactttgcctcagtggttgcaca

SEQ ID NO: 2843189 - DNA, 25 bp, Homo sapien
tgaggaataggagaacacatttttt

SEQ ID NO: 2843190 - DNA, 25 bp, Homo sapien
cagggctctggttacctgatcagca

SEQ ID NO: 2843191 - DNA, 25 bp, Homo sapien
gggacattcgtctcttggccaaatg

SEQ ID NO: 2843192 - DNA, 25 bp, Homo sapien
gaagttgttcaaagggacattcgtc

SEQ ID NO: 2843193 - DNA, 25 bp, Homo sapien
cacttagaacgttctccagggctct

SEQ ID NO: 2843194 - DNA, 25 bp, Homo sapien
gagggaggtgtctttaactattctg

SEQ ID NO: 2843195 - DNA, 25 bp, Homo sapien
ctttaactattctgcaccctggagg

SEQ ID NO: 2843196 - DNA, 25 bp, Homo sapien
tgtctttaactattctgcaccctgg

SEQ ID NO: 2843197 - DNA, 25 bp, Homo sapien
agagagagggaggtgtctttaacta

SEQ ID NO: 2843198 - DNA, 25 bp, Homo sapien
agagatatgatcaaaatacatttgg

SEQ ID NO: 2843199 - DNA, 25 bp, Homo sapien
ttaaagagatatgatcaaaatacat

SEQ ID NO: 2843200 - DNA, 25 bp, Homo sapien
tgttaagacaggaagagtattaaag

SEQ ID NO: 2843201 - DNA, 25 bp, Homo sapien
tagtcttgttaagacaggaagagta

SEQ ID NO: 2843202 - DNA, 25 bp, Homo sapien
gctgggtacccattctctaggctcc

SEQ ID NO: 2843203 - DNA, 25 bp, Homo sapien
cccagggcaccatatagttaaaagc

SEQ ID NO: 2843204 - DNA, 25 bp, Homo sapien
acattgccatgccagtcttagaggg

SEQ ID NO: 2843205 - DNA, 25 bp, Homo sapien
gacactggctacacgttatttggag

SEQ ID NO: 2843206 - DNA, 25 bp, Homo sapien
tgcgggacgccaggggtctggggct

SEQ ID NO: 2843207 - DNA, 25 bp, Homo sapien
gtgagtgcgggacgccaggggtctg

SEQ ID NO: 2843208 - DNA, 25 bp, Homo sapien
gagtgcgggacgccaggggtctggg

SEQ ID NO: 2843209 - DNA, 25 bp, Homo sapien
agtgcgggacgccaggggtctgggg

SEQ ID NO: 2843210 - DNA, 25 bp, Homo sapien
gcgggacgccaggggtctggggctc

SEQ ID NO: 2843211 - DNA, 25 bp, Homo sapien
tgagtgcgggacgccaggggtctgg

SEQ ID NO: 2843212 - DNA, 25 bp, Homo sapien
ccagacccctggcgtcccgcactca

SEQ ID NO: 2843213 - DNA, 25 bp, Homo sapien
ccccagacccctggcgtcccgcact

SEQ ID NO: 2843214 - DNA, 25 bp, Homo sapien
gccccagacccctggcgtcccgcac

SEQ ID NO: 2843215 - DNA, 25 bp, Homo sapien
agccccagacccctggcgtcccgca

SEQ ID NO: 2843216 - DNA, 25 bp, Homo sapien
cagacccctggcgtcccgcactcac

SEQ ID NO: 2843217 - DNA, 25 bp, Homo sapien
gagccccagacccctggcgtcccgc

SEQ ID NO: 2843218 - DNA, 25 bp, Homo sapien
tgaagaaggcgaatcccgacctacc

SEQ ID NO: 2843219 - DNA, 25 bp, Homo sapien
gctgaagaaggcgaatcccgaccta

SEQ ID NO: 2843220 - DNA, 25 bp, Homo sapien
attgagaaacgctacgtggagctga

SEQ ID NO: 2843221 - DNA, 25 bp, Homo sapien
aatccgcgaatgctccgatgtgcag

SEQ ID NO: 2843222 - DNA, 25 bp, Homo sapien
tgagaaacgctacgtggagctgaag

SEQ ID NO: 2843223 - DNA, 25 bp, Homo sapien
atcctaatccgcgaatgctccgatg

SEQ ID NO: 2843224 - DNA, 25 bp, Homo sapien
taggtcgggattcgccttcttcagc

SEQ ID NO: 2843225 - DNA, 25 bp, Homo sapien
ggtaggtcgggattcgccttcttca

SEQ ID NO: 2843226 - DNA, 25 bp, Homo sapien
cttcagctccacgtagcgtttctca

SEQ ID NO: 2843227 - DNA, 25 bp, Homo sapien
catcggagcattcgcggattaggat

SEQ ID NO: 2843228 - DNA, 25 bp, Homo sapien
tcagctccacgtagcgtttctcaat

SEQ ID NO: 2843229 - DNA, 25 bp, Homo sapien
ctgcacatcggagcattcgcggatt

SEQ ID NO: 2843230 - DNA, 25 bp, Homo sapien
cgggacgccagggtcacgacctcga

SEQ ID NO: 2843231 - DNA, 25 bp, Homo sapien
gggacgccagggtcacgacctcgac

SEQ ID NO: 2843232 - DNA, 25 bp, Homo sapien
gcttcgggacgccagggtcacgacc

SEQ ID NO: 2843233 - DNA, 25 bp, Homo sapien
gtcacgacctcgacctccctgaagt

SEQ ID NO: 2843234 - DNA, 25 bp, Homo sapien
cttcgggacgccagggtcacgacct

SEQ ID NO: 2843235 - DNA, 25 bp, Homo sapien
ttcgggacgccagggtcacgacctc

SEQ ID NO: 2843236 - DNA, 25 bp, Homo sapien
gtcgaggtcgtgaccctggcgtccc

SEQ ID NO: 2843237 - DNA, 25 bp, Homo sapien
ggtcgtgaccctggcgtcccgaagc

SEQ ID NO: 2843238 - DNA, 25 bp, Homo sapien
gaggtcgtgaccctggcgtcccgaa

SEQ ID NO: 2843239 - DNA, 25 bp, Homo sapien
acttcagggaggtcgaggtcgtgac

SEQ ID NO: 2843240 - DNA, 25 bp, Homo sapien
tcgaggtcgtgaccctggcgtcccg

SEQ ID NO: 2843241 - DNA, 25 bp, Homo sapien
tcagggaggtcgaggtcgtgaccct

SEQ ID NO: 2843242 - DNA, 25 bp, Homo sapien
cggccgcagcaagtcgaggagtcgg

SEQ ID NO: 2843243 - DNA, 25 bp, Homo sapien
acttatgtcagcgctcgcccggcag

SEQ ID NO: 2843244 - DNA, 25 bp, Homo sapien
aaagctgggcctgcgtgagattcgc

SEQ ID NO: 2843245 - DNA, 25 bp, Homo sapien
tcgcatccacttatgtcagcgctcg

SEQ ID NO: 2843246 - DNA, 25 bp, Homo sapien
gcaaagctgggcctgcgtgagattc

SEQ ID NO: 2843247 - DNA, 25 bp, Homo sapien
tgggcctgcgtgagattcgcatcca

SEQ ID NO: 2843248 - DNA, 25 bp, Homo sapien
cgagcgctgacataagtggatgcga

SEQ ID NO: 2843249 - DNA, 25 bp, Homo sapien
tttgccccgactcctcgacttgctg

SEQ ID NO: 2843250 - DNA, 25 bp, Homo sapien
tggctgccgggcgagcgctgacata

SEQ ID NO: 2843251 - DNA, 25 bp, Homo sapien
gaatctcacgcaggcccagctttgc

SEQ ID NO: 2843252 - DNA, 25 bp, Homo sapien
tggatgcgaatctcacgcaggccca

SEQ ID NO: 2843253 - DNA, 25 bp, Homo sapien
ccgggcgagcgctgacataagtgga

SEQ ID NO: 2843254 - DNA, 25 bp, Homo sapien
gcaaagaaattgacctcgcagcggt

SEQ ID NO: 2843255 - DNA, 25 bp, Homo sapien
gaagaaataacggatggcctgagcc

SEQ ID NO: 2843256 - DNA, 25 bp, Homo sapien
gaagctacaataatgcgccaagtgc

SEQ ID NO: 2843257 - DNA, 25 bp, Homo sapien
ctatgggctaggctttagggtccgc

SEQ ID NO: 2843258 - DNA, 25 bp, Homo sapien
tcagaccggagcacttggcctgaag

SEQ ID NO: 2843259 - DNA, 25 bp, Homo sapien
gaagacctggaattggcgacttcga

SEQ ID NO: 2843260 - DNA, 25 bp, Homo sapien
tataaaagtattgtaggaccgctgc

SEQ ID NO: 2843261 - DNA, 25 bp, Homo sapien
tatcgaagtcgccaattccaggtct

SEQ ID NO: 2843262 - DNA, 25 bp, Homo sapien
gaacgataacaaaatgccggagcga

SEQ ID NO: 2843263 - DNA, 25 bp, Homo sapien
tgcactgtgggaaagagcttgtcgc

SEQ ID NO: 2843264 - DNA, 25 bp, Homo sapien
gatagtaaggctcaggccatccgtt

SEQ ID NO: 2843265 - DNA, 25 bp, Homo sapien
ttggtgacagcgaaagaacgataac

SEQ ID NO: 2843266 - DNA, 25 bp, Homo sapien
gagcccagtccttcatagcctggag

SEQ ID NO: 2843267 - DNA, 25 bp, Homo sapien
aagatgggccggaatgagtctgaca

SEQ ID NO: 2843268 - DNA, 25 bp, Homo sapien
ctaggaatctagaaccacagctcag

SEQ ID NO: 2843269 - DNA, 25 bp, Homo sapien
ctactgggcacactggctagagagc

SEQ ID NO: 2843270 - DNA, 25 bp, Homo sapien
gagatcagattagcagcccatcagg

SEQ ID NO: 2843271 - DNA, 25 bp, Homo sapien
tctttccccagggactaggcctgaa

SEQ ID NO: 2843272 - DNA, 25 bp, Homo sapien
ttcctagacagtaaggatgctctct

SEQ ID NO: 2843273 - DNA, 25 bp, Homo sapien
tcacatgcagaaagtcatcagtcct

SEQ ID NO: 2843274 - DNA, 25 bp, Homo sapien
gaataatgatcctcactgatgggca

SEQ ID NO: 2843275 - DNA, 25 bp, Homo sapien
tctagccagtgtgcccagtagagaa

SEQ ID NO: 2843276 - DNA, 25 bp, Homo sapien
gatgggctgctaatctgatctccag

SEQ ID NO: 2843277 - DNA, 25 bp, Homo sapien
ctgagctgtggttctagattcctag

SEQ ID NO: 2843278 - DNA, 25 bp, Homo sapien
gcagctattcactctaccagtgtaa

SEQ ID NO: 2843279 - DNA, 25 bp, Homo sapien
cactgatgtgaggaagtacttgccc

SEQ ID NO: 2843280 - DNA, 25 bp, Homo sapien
caaactctaagctagggcaagacag

SEQ ID NO: 2843281 - DNA, 25 bp, Homo sapien
cacccggcctggatatgaatttata

SEQ ID NO: 2843282 - DNA, 25 bp, Homo sapien
ataaatacaaccagcatagaaagac

SEQ ID NO: 2843283 - DNA, 25 bp, Homo sapien
cagaaaccaaaaccagaatgccatg

SEQ ID NO: 2843284 - DNA, 25 bp, Homo sapien
taaatacaaccagcatagaaagacc

SEQ ID NO: 2843285 - DNA, 25 bp, Homo sapien
caaggaacggccatggaagatcact

SEQ ID NO: 2843286 - DNA, 25 bp, Homo sapien
acaaggaacggccatggaagatcac

SEQ ID NO: 2843287 - DNA, 25 bp, Homo sapien
gacaaggaacggccatggaagatca

SEQ ID NO: 2843288 - DNA, 25 bp, Homo sapien
ggacaaggaacggccatggaagatc

SEQ ID NO: 2843289 - DNA, 25 bp, Homo sapien
ccaggtgccataggtccctgtccca

SEQ ID NO: 2843290 - DNA, 25 bp, Homo sapien
tgcccccaggtgccataggtccctg

SEQ ID NO: 2843291 - DNA, 25 bp, Homo sapien
ccccaggtgccataggtccctgtcc

SEQ ID NO: 2843292 - DNA, 25 bp, Homo sapien
ggtgccataggtccctgtcccagca

SEQ ID NO: 2843293 - DNA, 25 bp, Homo sapien
ggtcagaaagtggccacccaggcct

SEQ ID NO: 2843294 - DNA, 25 bp, Homo sapien
acaggctctgcatgcccattcaggg

SEQ ID NO: 2843295 - DNA, 25 bp, Homo sapien
ctgacacaggctctgcatgcccatt

SEQ ID NO: 2843296 - DNA, 25 bp, Homo sapien
ggctctgcatgcccattcagggtgc

SEQ ID NO: 2843297 - DNA, 25 bp, Homo sapien
agaccacaggaggttggccccagac

SEQ ID NO: 2843298 - DNA, 25 bp, Homo sapien
agcagaccacaggaggttggcccca

SEQ ID NO: 2843299 - DNA, 25 bp, Homo sapien
cccagcagaccacaggaggttggcc

SEQ ID NO: 2843300 - DNA, 25 bp, Homo sapien
accacaggaggttggccccagactc

SEQ ID NO: 2843301 - DNA, 25 bp, Homo sapien
caacccagatgaggccgctgaaggg

SEQ ID NO: 2843302 - DNA, 25 bp, Homo sapien
gaatcaccacctggtaccagaagcg

SEQ ID NO: 2843303 - DNA, 25 bp, Homo sapien
ccagcttcattcgttggcacagcaa

SEQ ID NO: 2843304 - DNA, 25 bp, Homo sapien
aagggcaccggatgcccaggaatca

SEQ ID NO: 2843305 - DNA, 25 bp, Homo sapien
gcagccgcccgatgaacacctctga

SEQ ID NO: 2843306 - DNA, 25 bp, Homo sapien
tttgagcagagcgatctgcccgggc

SEQ ID NO: 2843307 - DNA, 25 bp, Homo sapien
tcaggccgctgaaggtcatcatcag

SEQ ID NO: 2843308 - DNA, 25 bp, Homo sapien
gcggaactcgtagaggcggcccacg

SEQ ID NO: 2843309 - DNA, 25 bp, Homo sapien
ccgtaccctgggtggttggcataat

SEQ ID NO: 2843310 - DNA, 25 bp, Homo sapien
gctttcgaattctgagcccacggac

SEQ ID NO: 2843311 - DNA, 25 bp, Homo sapien
tgcaaggccaccgtcaggcgacgct

SEQ ID NO: 2843312 - DNA, 25 bp, Homo sapien
aattaggtgactgcgctaacaaggg

SEQ ID NO: 2843313 - DNA, 25 bp, Homo sapien
cgcagtttctgacagtgaaggctcg

SEQ ID NO: 2843314 - DNA, 25 bp, Homo sapien
ctggtgtagccggacaggcggaggg

SEQ ID NO: 2843315 - DNA, 25 bp, Homo sapien
ggtggacgtggagccacagttcctc

SEQ ID NO: 2843316 - DNA, 25 bp, Homo sapien
tctgacagtgaaggctcggagcagc

SEQ ID NO: 2843317 - DNA, 25 bp, Homo sapien
ctgggggtggcccgccatacttcct

SEQ ID NO: 2843318 - DNA, 25 bp, Homo sapien
ttcctctgcccgttcacctgcacca

SEQ ID NO: 2843319 - DNA, 25 bp, Homo sapien
gcccgccatacttcctctgcccgtt

SEQ ID NO: 2843320 - DNA, 25 bp, Homo sapien
tcctctgcccgttcacctgcaccag

SEQ ID NO: 2843321 - DNA, 25 bp, Homo sapien
cagctggccccctcgtaccctcttt

SEQ ID NO: 2843322 - DNA, 25 bp, Homo sapien
ggctctccagctggccccctcgtac

SEQ ID NO: 2843323 - DNA, 25 bp, Homo sapien
tccagctggccccctcgtaccctct

SEQ ID NO: 2843324 - DNA, 25 bp, Homo sapien
tctccagctggccccctcgtaccct

SEQ ID NO: 2843325 - DNA, 25 bp, Homo sapien
ggcggggctaggcatcactgacaca

SEQ ID NO: 2843326 - DNA, 25 bp, Homo sapien
aggcggggctaggcatcactgacac

SEQ ID NO: 2843327 - DNA, 25 bp, Homo sapien
aaggcggggctaggcatcactgaca

SEQ ID NO: 2843328 - DNA, 25 bp, Homo sapien
gaaggcggggctaggcatcactgac

SEQ ID NO: 2843329 - DNA, 25 bp, Homo sapien
gcatctgctccaactggtgcggggc

SEQ ID NO: 2843330 - DNA, 25 bp, Homo sapien
aggcatctgctccaactggtgcggg

SEQ ID NO: 2843331 - DNA, 25 bp, Homo sapien
tttattggacctttggcaattggtg

SEQ ID NO: 2843332 - DNA, 25 bp, Homo sapien
catctgctccaactggtgcggggcc

SEQ ID NO: 2843333 - DNA, 25 bp, Homo sapien
gagcacagactggactaagcctcct

SEQ ID NO: 2843334 - DNA, 25 bp, Homo sapien
tatgaaaaaggtgttgtacctggcc

SEQ ID NO: 2843335 - DNA, 25 bp, Homo sapien
tccgctgaaacggaaaagtgcaaag

SEQ ID NO: 2843336 - DNA, 25 bp, Homo sapien
tcaaaggctctgttctgaccactct

SEQ ID NO: 2843337 - DNA, 25 bp, Homo sapien
caaggtcttctcttcggacatccac

SEQ ID NO: 2843338 - DNA, 25 bp, Homo sapien
tcgccgatgatagccaccagtggga

SEQ ID NO: 2843339 - DNA, 25 bp, Homo sapien
tgagttcctgctcgccgatgatagc

SEQ ID NO: 2843340 - DNA, 25 bp, Homo sapien
tgatgaccccatccttgagttcctg

SEQ ID NO: 2843341 - DNA, 25 bp, Homo sapien
tcttccctgctcgtcactgaacgga

SEQ ID NO: 2843342 - DNA, 25 bp, Homo sapien
taactggttcagtagctttgggttc

SEQ ID NO: 2843343 - DNA, 25 bp, Homo sapien
ctggttcagtagctttgggttcttc

SEQ ID NO: 2843344 - DNA, 25 bp, Homo sapien
tggttcagtagctttgggttcttct

SEQ ID NO: 2843345 - DNA, 25 bp, Homo sapien
aactggttcagtagctttgggttct

SEQ ID NO: 2843346 - DNA, 25 bp, Homo sapien
caggatccattatgggtgagctttt

SEQ ID NO: 2843347 - DNA, 25 bp, Homo sapien
ctacttttgagaagtaatggcagga

SEQ ID NO: 2843348 - DNA, 25 bp, Homo sapien
tgtccagcacacctaagtttgctgc

SEQ ID NO: 2843349 - DNA, 25 bp, Homo sapien
acacctaagtttgctgccaccctgg

SEQ ID NO: 2843350 - DNA, 25 bp, Homo sapien
tgtgtctccgtggtccgtatcttct

SEQ ID NO: 2843351 - DNA, 25 bp, Homo sapien
acagttctgagacaagctttagtct

SEQ ID NO: 2843352 - DNA, 25 bp, Homo sapien
cacagttctgagacaagctttagtc

SEQ ID NO: 2843353 - DNA, 25 bp, Homo sapien
gtctccgtggtccgtatcttctcct

SEQ ID NO: 2843354 - DNA, 25 bp, Homo sapien
caaagcaggctctagtcgggatttt

SEQ ID NO: 2843355 - DNA, 25 bp, Homo sapien
tcttctcatctagcaccttgggcat

SEQ ID NO: 2843356 - DNA, 25 bp, Homo sapien
gactgacttgtacataggacgtatc

SEQ ID NO: 2843357 - DNA, 25 bp, Homo sapien
cttagggcaagagtaaaggtagctt

SEQ ID NO: 2843358 - DNA, 25 bp, Homo sapien
gatcagatagcttaggtgccaccac

SEQ ID NO: 2843359 - DNA, 25 bp, Homo sapien
agagtcacggtagccatctgaggga

SEQ ID NO: 2843360 - DNA, 25 bp, Homo sapien
acttcagttacagggcacaggcgtg

SEQ ID NO: 2843361 - DNA, 25 bp, Homo sapien
taagtcttggatacaccagcccagg

SEQ ID NO: 2843362 - DNA, 25 bp, Homo sapien
atcaccccagtgtagtaatccagcc

SEQ ID NO: 2843363 - DNA, 25 bp, Homo sapien
tttggggtcgaacatgcccactagc

SEQ ID NO: 2843364 - DNA, 25 bp, Homo sapien
tctgttccacgatggagaaaatccg

SEQ ID NO: 2843365 - DNA, 25 bp, Homo sapien
acacatggcaccttgcgccctttgg

SEQ ID NO: 2843366 - DNA, 25 bp, Homo sapien
tcatcaatgccaaatagggtcaggt

SEQ ID NO: 2843367 - DNA, 25 bp, Homo sapien
agagcaacttcaggtctcccaggcc

SEQ ID NO: 2843368 - DNA, 25 bp, Homo sapien
gagcagctgttccaccagggatacc

SEQ ID NO: 2843369 - DNA, 25 bp, Homo sapien
gcctgcttgttttgggatagtttag

SEQ ID NO: 2843370 - DNA, 25 bp, Homo sapien
ctcaggtgcaaggcccttctctccc

SEQ ID NO: 2843371 - DNA, 25 bp, Homo sapien
ccacctcaggtgcaaggcccttctc

SEQ ID NO: 2843372 - DNA, 25 bp, Homo sapien
acctcaggtgcaaggcccttctctc

SEQ ID NO: 2843373 - DNA, 25 bp, Homo sapien
tcattcttcacctcttcccaggaca

SEQ ID NO: 2843374 - DNA, 25 bp, Homo sapien
cacagatagcaaacatcccatctag

SEQ ID NO: 2843375 - DNA, 25 bp, Homo sapien
gatggtacggaacttgctgtcagaa

SEQ ID NO: 2843376 - DNA, 25 bp, Homo sapien
catctagaatgcgtcgatcgtttac

SEQ ID NO: 2843377 - DNA, 25 bp, Homo sapien
ccagcttgtctactgaggagcagat

SEQ ID NO: 2843378 - DNA, 25 bp, Homo sapien
gtcatggtcacttaggctactggtc

SEQ ID NO: 2843379 - DNA, 25 bp, Homo sapien
tacatgacctgcaatagtcatggtc

SEQ ID NO: 2843380 - DNA, 25 bp, Homo sapien
accaatgcatagtgaggggggaatc

SEQ ID NO: 2843381 - DNA, 25 bp, Homo sapien
cttttcttacatgacctgcaatagt

SEQ ID NO: 2843382 - DNA, 25 bp, Homo sapien
tcaggcactctgcatcagggatcat

SEQ ID NO: 2843383 - DNA, 25 bp, Homo sapien
gtgaactcaggatctcgcacatgat

SEQ ID NO: 2843384 - DNA, 25 bp, Homo sapien
cttgaccaggaagtcgcctatctga

SEQ ID NO: 2843385 - DNA, 25 bp, Homo sapien
cagggatcatgggatcaaagttccc

SEQ ID NO: 2843386 - DNA, 25 bp, Homo sapien
ggcatctttgggcttctcaccagtt

SEQ ID NO: 2843387 - DNA, 25 bp, Homo sapien
tagccagcggtcttcagggattcac

SEQ ID NO: 2843388 - DNA, 25 bp, Homo sapien
catgggctgggtatcaagtttactc

SEQ ID NO: 2843389 - DNA, 25 bp, Homo sapien
agaagccctggcatcagtctggatg

SEQ ID NO: 2843390 - DNA, 25 bp, Homo sapien
tggctgggttatcccgccgatatac

SEQ ID NO: 2843391 - DNA, 25 bp, Homo sapien
ccggtatcggccacgggtcatggct

SEQ ID NO: 2843392 - DNA, 25 bp, Homo sapien
tggtagaattcccggtatcggccac

SEQ ID NO: 2843393 - DNA, 25 bp, Homo sapien
gccacgggtcatggctgggttatcc

SEQ ID NO: 2843394 - DNA, 25 bp, Homo sapien
tcagtttattcattgccaaataccg

SEQ ID NO: 2843395 - DNA, 25 bp, Homo sapien
tagcgtttaatgttggtcagtttat

SEQ ID NO: 2843396 - DNA, 25 bp, Homo sapien
tatgtggtagcgtttaatgttggtc

SEQ ID NO: 2843397 - DNA, 25 bp, Homo sapien
ttgccaaataccgagcaaaaggaac

SEQ ID NO: 2843398 - DNA, 25 bp, Homo sapien
gtccttcaggtcatagataagcttg

SEQ ID NO: 2843399 - DNA, 25 bp, Homo sapien
gtcatagcgaagggacaggagctcc

SEQ ID NO: 2843400 - DNA, 25 bp, Homo sapien
tccttcaggtcatagataagcttgg

SEQ ID NO: 2843401 - DNA, 25 bp, Homo sapien
ggtcatagcgaagggacaggagctc

SEQ ID NO: 2843402 - DNA, 25 bp, Homo sapien
gattacgtcaaacaccttctcgcga

SEQ ID NO: 2843403 - DNA, 25 bp, Homo sapien
aatgacttctgcaccgtggcgcttg

SEQ ID NO: 2843404 - DNA, 25 bp, Homo sapien
ttctcgcgaactgccatctgccggg

SEQ ID NO: 2843405 - DNA, 25 bp, Homo sapien
tggcgcttgaagcaacggatgatta

SEQ ID NO: 2843406 - DNA, 25 bp, Homo sapien
tacatcagaatccaacaagtggttg

SEQ ID NO: 2843407 - DNA, 25 bp, Homo sapien
caatctgtcgtgatatgtcgtgctg

SEQ ID NO: 2843408 - DNA, 25 bp, Homo sapien
tctggtaacaactctatgacatagg

SEQ ID NO: 2843409 - DNA, 25 bp, Homo sapien
catgttcgtggcagtcaggactaga

SEQ ID NO: 2843410 - DNA, 25 bp, Homo sapien
tgttaacacaacgaaaaaggcagat

SEQ ID NO: 2843411 - DNA, 25 bp, Homo sapien
gaattattatagaagggccaggcgc

SEQ ID NO: 2843412 - DNA, 25 bp, Homo sapien
gcagttctactcaccagcgcttttg

SEQ ID NO: 2843413 - DNA, 25 bp, Homo sapien
gtcttaatgtatgctaaggcaccag

SEQ ID NO: 2843414 - DNA, 25 bp, Homo sapien
ttcttcttgcatcacatcagcagga

SEQ ID NO: 2843415 - DNA, 25 bp, Homo sapien
cagctcaatgaatttaggatcccaa

SEQ ID NO: 2843416 - DNA, 25 bp, Homo sapien
tcattgatgatcaccactttgggat

SEQ ID NO: 2843417 - DNA, 25 bp, Homo sapien
taaaactgatcactagtgaggacag

SEQ ID NO: 2843418 - DNA, 25 bp, Homo sapien
cccagaatgactcaggtagagtcca

SEQ ID NO: 2843419 - DNA, 25 bp, Homo sapien
cagaatgactcaggtagagtccagt

SEQ ID NO: 2843420 - DNA, 25 bp, Homo sapien
gaatgaacgaaggagtagcagcagc

SEQ ID NO: 2843421 - DNA, 25 bp, Homo sapien
ccagaatgactcaggtagagtccag

SEQ ID NO: 2843422 - DNA, 25 bp, Homo sapien
gctttcatcaggacccagctgtgcc

SEQ ID NO: 2843423 - DNA, 25 bp, Homo sapien
gttttgagcacaaatttctgtttgc

SEQ ID NO: 2843424 - DNA, 25 bp, Homo sapien
tctgtttgctttcatcaggacccag

SEQ ID NO: 2843425 - DNA, 25 bp, Homo sapien
ttcagtttcaggagtttcgccacct

SEQ ID NO: 2843426 - DNA, 25 bp, Homo sapien
cctccagcgccgcacgctctgccat

SEQ ID NO: 2843427 - DNA, 25 bp, Homo sapien
tctgctgcttgaggcctcgcacgcg

SEQ ID NO: 2843428 - DNA, 25 bp, Homo sapien
ttctgctgcttgaggcctcgcacgc

SEQ ID NO: 2843429 - DNA, 25 bp, Homo sapien
tgctgcttgaggcctcgcacgcgct

SEQ ID NO: 2843430 - DNA, 25 bp, Homo sapien
ccgaagctggctactaagggaactt

SEQ ID NO: 2843431 - DNA, 25 bp, Homo sapien
tgacttccggctatcgagtcgctgg

SEQ ID NO: 2843432 - DNA, 25 bp, Homo sapien
tgaggtgcgcaaacgcccgagtttt

SEQ ID NO: 2843433 - DNA, 25 bp, Homo sapien
tcagccttcgtgactagtgaggtgc

SEQ ID NO: 2843434 - DNA, 25 bp, Homo sapien
ctccttcccaggccttttgttcctg

SEQ ID NO: 2843435 - DNA, 25 bp, Homo sapien
tgcaccggggcggtccgttgccaaa

SEQ ID NO: 2843436 - DNA, 25 bp, Homo sapien
gaattatctctggtctgtcccagca

SEQ ID NO: 2843437 - DNA, 25 bp, Homo sapien
ggtctccagatctgaacgcatagcc

SEQ ID NO: 2843438 - DNA, 25 bp, Homo sapien
gcgatgcccctgctcggacttcttc

SEQ ID NO: 2843439 - DNA, 25 bp, Homo sapien
tattccataccgtgccatggaggct

SEQ ID NO: 2843440 - DNA, 25 bp, Homo sapien
cagatgctatcctaagggcatggca

SEQ ID NO: 2843441 - DNA, 25 bp, Homo sapien
tagcccatccattgcttacagtaga

SEQ ID NO: 2843442 - DNA, 25 bp, Homo sapien
ttttggagaccatttcctgtgccag

SEQ ID NO: 2843443 - DNA, 25 bp, Homo sapien
ctagttgtaaaagtcgatttgatca

SEQ ID NO: 2843444 - DNA, 25 bp, Homo sapien
cacgaagtgaccctgtgtggttgtt

SEQ ID NO: 2843445 - DNA, 25 bp, Homo sapien
tcgatttgatcacgaagtgaccctg

SEQ ID NO: 2843446 - DNA, 25 bp, Homo sapien
taaaagtcgatttgatcacgaagtg

SEQ ID NO: 2843447 - DNA, 25 bp, Homo sapien
aggtgggggcgtttcgagagttgtg

SEQ ID NO: 2843448 - DNA, 25 bp, Homo sapien
tgggggcgtttcgagagttgtggac

SEQ ID NO: 2843449 - DNA, 25 bp, Homo sapien
ggcgtttcgagagttgtggaccagg

SEQ ID NO: 2843450 - DNA, 25 bp, Homo sapien
ggggcgtttcgagagttgtggacca

SEQ ID NO: 2843451 - DNA, 25 bp, Homo sapien
cttttcactgctgaagttcagctcc

SEQ ID NO: 2843452 - DNA, 25 bp, Homo sapien
tttcactgctgaagttcagctccct

SEQ ID NO: 2843453 - DNA, 25 bp, Homo sapien
tcactgctgaagttcagctcccttt

SEQ ID NO: 2843454 - DNA, 25 bp, Homo sapien
actgctgaagttcagctccctttcc

SEQ ID NO: 2843455 - DNA, 25 bp, Homo sapien
tccactcaagatgggactctctttt

SEQ ID NO: 2843456 - DNA, 25 bp, Homo sapien
gcatgtctccactcaagatgggact

SEQ ID NO: 2843457 - DNA, 25 bp, Homo sapien
tctccactcaagatgggactctctt

SEQ ID NO: 2843458 - DNA, 25 bp, Homo sapien
tgtctccactcaagatgggactctc

SEQ ID NO: 2843459 - DNA, 25 bp, Homo sapien
taaaagtcgatttgatcacaaagtg

SEQ ID NO: 2843460 - DNA, 25 bp, Homo sapien
aagtgaccctgcgtggttgttttgg

SEQ ID NO: 2843461 - DNA, 25 bp, Homo sapien
gatttgatcacaaagtgaccctgcg

SEQ ID NO: 2843462 - DNA, 25 bp, Homo sapien
tacttgtaaaagtcgatttgatcac

SEQ ID NO: 2843463 - DNA, 25 bp, Homo sapien
gaggagaccgggcacgttcaagatg

SEQ ID NO: 2843464 - DNA, 25 bp, Homo sapien
ggagaccgggcacgttcaagatggt

SEQ ID NO: 2843465 - DNA, 25 bp, Homo sapien
aggagaccgggcacgttcaagatgg

SEQ ID NO: 2843466 - DNA, 25 bp, Homo sapien
acgttcaagatggtatggccaaaga

SEQ ID NO: 2843467 - DNA, 25 bp, Homo sapien
aaacttccttgttgtacttatgcat

SEQ ID NO: 2843468 - DNA, 25 bp, Homo sapien
gtggagtaaatgtaatattccccat

SEQ ID NO: 2843469 - DNA, 25 bp, Homo sapien
ggtggagtaaatgtaatattcccca

SEQ ID NO: 2843470 - DNA, 25 bp, Homo sapien
ggagtaaatgtaatattccccattc

SEQ ID NO: 2843471 - DNA, 25 bp, Homo sapien
agtaaatgtaatattccccattcat

SEQ ID NO: 2843472 - DNA, 25 bp, Homo sapien
gctttctatcgaaaagactttaaca

SEQ ID NO: 2843473 - DNA, 25 bp, Homo sapien
tatttgaataccaatttctcacttg

SEQ ID NO: 2843474 - DNA, 25 bp, Homo sapien
ctcacttggaataacgaagttcttc

SEQ ID NO: 2843475 - DNA, 25 bp, Homo sapien
aagttcttccctccgcggaagactg

SEQ ID NO: 2843476 - DNA, 25 bp, Homo sapien
tgacaccagacttagactagggttc

SEQ ID NO: 2843477 - DNA, 25 bp, Homo sapien
agacttagactagggttccacctca

SEQ ID NO: 2843478 - DNA, 25 bp, Homo sapien
tatctgacaccagacttagactagg

SEQ ID NO: 2843479 - DNA, 25 bp, Homo sapien
ctcaacaccagtatctgacaccaga

SEQ ID NO: 2843480 - DNA, 25 bp, Homo sapien
tattgactgattaccctgacgttgg

SEQ ID NO: 2843481 - DNA, 25 bp, Homo sapien
tagtgaccctcagcaatttgtatgg

SEQ ID NO: 2843482 - DNA, 25 bp, Homo sapien
tccaagatgctggaccagggctgta

SEQ ID NO: 2843483 - DNA, 25 bp, Homo sapien
gccattgcctcaagtacctgcgtta

SEQ ID NO: 2843484 - DNA, 25 bp, Homo sapien
gaaatgaggccaaggtggtaataaa

SEQ ID NO: 2843485 - DNA, 25 bp, Homo sapien
tgttcaaggagtagcagagacgtct

SEQ ID NO: 2843486 - DNA, 25 bp, Homo sapien
aaactacagcaaatgccctaaggaa

SEQ ID NO: 2843487 - DNA, 25 bp, Homo sapien
gatgaatgtcacaatattaaagagc

SEQ ID NO: 2843488 - DNA, 25 bp, Homo sapien
tttgaccaggccgtatacagagtcc

SEQ ID NO: 2843489 - DNA, 25 bp, Homo sapien
tatttgcctatcagagaggacgctc

SEQ ID NO: 2843490 - DNA, 25 bp, Homo sapien
gataacgccccactgtttgaccagg

SEQ ID NO: 2843491 - DNA, 25 bp, Homo sapien
tccacctggagttgatcgccgacag

SEQ ID NO: 2843492 - DNA, 25 bp, Homo sapien
gaaaagctgtcataggaagtcccca

SEQ ID NO: 2843493 - DNA, 25 bp, Homo sapien
caacagcatatgtattgaggtccca

SEQ ID NO: 2843494 - DNA, 25 bp, Homo sapien
gaatggtgtgtcacttccaagcaga

SEQ ID NO: 2843495 - DNA, 25 bp, Homo sapien
taagcactggttgatactgagacac

SEQ ID NO: 2843496 - DNA, 25 bp, Homo sapien
gacccatgtctagccaatgtgagaa

SEQ ID NO: 2843497 - DNA, 25 bp, Homo sapien
ttacccatttccatgtatgagtcag

SEQ ID NO: 2843498 - DNA, 25 bp, Homo sapien
ttgccagcagatgggaaaagtctat

SEQ ID NO: 2843499 - DNA, 25 bp, Homo sapien
aattatggaagggtgtagacccagc

SEQ ID NO: 2843500 - DNA, 25 bp, Homo sapien
gtatacatacgatggactagtattc

SEQ ID NO: 2843501 - DNA, 25 bp, Homo sapien
gactaaaatacctttgattactatg

SEQ ID NO: 2843502 - DNA, 25 bp, Homo sapien
catccacggatgcttgaatgaataa

SEQ ID NO: 2843503 - DNA, 25 bp, Homo sapien
caaatgtccacgaatacttgaatga

SEQ ID NO: 2843504 - DNA, 25 bp, Homo sapien
tgtcgctgtccaccatagagtgttc

SEQ ID NO: 2843505 - DNA, 25 bp, Homo sapien
cagagcccctttgttacttcagaga

SEQ ID NO: 2843506 - DNA, 25 bp, Homo sapien
gcagcaggactttaacagagactag

SEQ ID NO: 2843507 - DNA, 25 bp, Homo sapien
cggagcgcggaatgtagcatccacg

SEQ ID NO: 2843508 - DNA, 25 bp, Homo sapien
tataaggactttgaggagtgaccga

SEQ ID NO: 2843509 - DNA, 25 bp, Homo sapien
gattgaaatcccatcgtaccaagag

SEQ ID NO: 2843510 - DNA, 25 bp, Homo sapien
catgggagggaattacagacattct

SEQ ID NO: 2843511 - DNA, 25 bp, Homo sapien
tacttacacgtttagccacatgatg

SEQ ID NO: 2843512 - DNA, 25 bp, Homo sapien
tctcggttttcgctagagggcgcat

SEQ ID NO: 2843513 - DNA, 25 bp, Homo sapien
ttatttccgaatcccgacagcctgg

SEQ ID NO: 2843514 - DNA, 25 bp, Homo sapien
tctcctggcgagaagatcctggagc

SEQ ID NO: 2843515 - DNA, 25 bp, Homo sapien
ggacattaatgacaacgcgccagtt

SEQ ID NO: 2843516 - DNA, 25 bp, Homo sapien
tcataatgagtagagcagcctgctc

SEQ ID NO: 2843517 - DNA, 25 bp, Homo sapien
aatttcaaatgatgtgtccttgagt

SEQ ID NO: 2843518 - DNA, 25 bp, Homo sapien
tcttttgtacgtgatgaggcatttt

SEQ ID NO: 2843519 - DNA, 25 bp, Homo sapien
gaggatgtcctatcaatttcttagg

SEQ ID NO: 2843520 - DNA, 25 bp, Homo sapien
taatataggtgacatgggaaatgct

SEQ ID NO: 2843521 - DNA, 25 bp, Homo sapien
caaactattttctaggagtcagcat

SEQ ID NO: 2843522 - DNA, 25 bp, Homo sapien
tcagcatgtataggtgaaagtgaca

SEQ ID NO: 2843523 - DNA, 25 bp, Homo sapien
gatagcatgtgaaagacagatggac

SEQ ID NO: 2843524 - DNA, 25 bp, Homo sapien
tcttaggaagtagagaactatagcg

SEQ ID NO: 2843525 - DNA, 25 bp, Homo sapien
taagaggtgctagaaaggtacatca

SEQ ID NO: 2843526 - DNA, 25 bp, Homo sapien
cccttgttgaaggagaccgtgaaga

SEQ ID NO: 2843527 - DNA, 25 bp, Homo sapien
tgtgcctgctgagaatcatcgaatt

SEQ ID NO: 2843528 - DNA, 25 bp, Homo sapien
tactcatcacggtactggacaacaa

SEQ ID NO: 2843529 - DNA, 25 bp, Homo sapien
gaggctgtcgataaaggcttcccac

SEQ ID NO: 2843530 - DNA, 25 bp, Homo sapien
gacaatgccccagtgttcgacagaa

SEQ ID NO: 2843531 - DNA, 25 bp, Homo sapien
tatcggaacgctggtgattcacccc

SEQ ID NO: 2843532 - DNA, 25 bp, Homo sapien
ttttgaagccacatgatgtcgctgt

SEQ ID NO: 2843533 - DNA, 25 bp, Homo sapien
cttttgaagccacatgatgtcgctg

SEQ ID NO: 2843534 - DNA, 25 bp, Homo sapien
tgtgatcgacctagacgcagatgcc

SEQ ID NO: 2843535 - DNA, 25 bp, Homo sapien
tctctgtgctgaacgatggcgaaca

SEQ ID NO: 2843536 - DNA, 25 bp, Homo sapien
tgttcgtgaaggagaacaacccgcc

SEQ ID NO: 2843537 - DNA, 25 bp, Homo sapien
gaatctgttcatcgcggaatccagg

SEQ ID NO: 2843538 - DNA, 25 bp, Homo sapien
tacggctcaacgcttctgattcgga

SEQ ID NO: 2843539 - DNA, 25 bp, Homo sapien
gatttccactagaaggcgcatctga

SEQ ID NO: 2843540 - DNA, 25 bp, Homo sapien
gcaactgatggaggcaaacctgaat

SEQ ID NO: 2843541 - DNA, 25 bp, Homo sapien
tgttagatgccaatgataacgcccc

SEQ ID NO: 2843542 - DNA, 25 bp, Homo sapien
gacaactttgtctgcgctgctggcg

SEQ ID NO: 2843543 - DNA, 25 bp, Homo sapien
taacttcagtgccaagggacagacg

SEQ ID NO: 2843544 - DNA, 25 bp, Homo sapien
gatctggtcttactcgcagcaaagg

SEQ ID NO: 2843545 - DNA, 25 bp, Homo sapien
ttgtggagctgataccgcgcctgtt

SEQ ID NO: 2843546 - DNA, 25 bp, Homo sapien
tctatgttttaagcacaatatcagg

SEQ ID NO: 2843547 - DNA, 25 bp, Homo sapien
tggagataaaccatcaaaactatag

SEQ ID NO: 2843548 - DNA, 25 bp, Homo sapien
ccttgcagtatttttagattggaga

SEQ ID NO: 2843549 - DNA, 25 bp, Homo sapien
taaatcctaagggtatatgaaaaga

SEQ ID NO: 2843550 - DNA, 25 bp, Homo sapien
gagaatgctctattgacctacaggc

SEQ ID NO: 2843551 - DNA, 25 bp, Homo sapien
gataactctcctgaagtcgccgtga

SEQ ID NO: 2843552 - DNA, 25 bp, Homo sapien
ggaatctaagcaatcggactcgcgt

SEQ ID NO: 2843553 - DNA, 25 bp, Homo sapien
tctcgctcagagaacaaaagctgct

SEQ ID NO: 2843554 - DNA, 25 bp, Homo sapien
tgattatcggaccaagaggcccggg

SEQ ID NO: 2843555 - DNA, 25 bp, Homo sapien
ggcaagcgatcccttaaaactgatt

SEQ ID NO: 2843556 - DNA, 25 bp, Homo sapien
gaggcccgggatcccagcgtctgct

SEQ ID NO: 2843557 - DNA, 25 bp, Homo sapien
aaaactgattgtcccaactcagagg

SEQ ID NO: 2843558 - DNA, 25 bp, Homo sapien
tgacggcagcgaatacccggagttg

SEQ ID NO: 2843559 - DNA, 25 bp, Homo sapien
cgacgagggaagcaatgggatacta

SEQ ID NO: 2843560 - DNA, 25 bp, Homo sapien
ccgaatgcccaagatgacgacgagg

SEQ ID NO: 2843561 - DNA, 25 bp, Homo sapien
tggatctacccagcggcaatttggt

SEQ ID NO: 2843562 - DNA, 25 bp, Homo sapien
gccaatataggtgagctccgtactg

SEQ ID NO: 2843563 - DNA, 25 bp, Homo sapien
tgtcccagtggaaattgtgccccgc

SEQ ID NO: 2843564 - DNA, 25 bp, Homo sapien
gatgctgacagtggttctaatgcct

SEQ ID NO: 2843565 - DNA, 25 bp, Homo sapien
ccaggactggacacttggtcacaaa

SEQ ID NO: 2843566 - DNA, 25 bp, Homo sapien
tggccgtgttcctgcggtccgctgg

SEQ ID NO: 2843567 - DNA, 25 bp, Homo sapien
gagcagtccgggttcgctgtccgcc

SEQ ID NO: 2843568 - DNA, 25 bp, Homo sapien
gagagacggtggagactggatgaac

SEQ ID NO: 2843569 - DNA, 25 bp, Homo sapien
tcggcgcggaatcagagcaggactt

SEQ ID NO: 2843570 - DNA, 25 bp, Homo sapien
tgccagagttctcttcgcagcttat

SEQ ID NO: 2843571 - DNA, 25 bp, Homo sapien
agttctcttcgcagcttatgtaaag

SEQ ID NO: 2843572 - DNA, 25 bp, Homo sapien
cagcttatgtaaagaatttgtttgt

SEQ ID NO: 2843573 - DNA, 25 bp, Homo sapien
cagagttctcttcgcagcttatgta

SEQ ID NO: 2843574 - DNA, 25 bp, Homo sapien
tctagcctcttaacaggcccattca

SEQ ID NO: 2843575 - DNA, 25 bp, Homo sapien
cattcatttgggtcttgactgcatc

SEQ ID NO: 2843576 - DNA, 25 bp, Homo sapien
gatttatatgtgtctgaaatcctcc

SEQ ID NO: 2843577 - DNA, 25 bp, Homo sapien
cagtcttgtctttgcctgagggtga

SEQ ID NO: 2843578 - DNA, 25 bp, Homo sapien
gctgtatgctatgctaagactcctg

SEQ ID NO: 2843579 - DNA, 25 bp, Homo sapien
gagccatctcgtgccaagacttctg

SEQ ID NO: 2843580 - DNA, 25 bp, Homo sapien
gacttgtcttggtgtgctagcctac

SEQ ID NO: 2843581 - DNA, 25 bp, Homo sapien
tattccatgagggtgtgcaagcaca

SEQ ID NO: 2843582 - DNA, 25 bp, Homo sapien
tcttgcatgttagccaacgcctgga

SEQ ID NO: 2843583 - DNA, 25 bp, Homo sapien
tcttgaaggttaaagttgaagcgcc

SEQ ID NO: 2843584 - DNA, 25 bp, Homo sapien
gaagcgccctggtttcgaatcagca

SEQ ID NO: 2843585 - DNA, 25 bp, Homo sapien
gaatcagcaatgactcggaagtccc

SEQ ID NO: 2843586 - DNA, 25 bp, Homo sapien
ttgtgcaagccgaggtattggccgc

SEQ ID NO: 2843587 - DNA, 25 bp, Homo sapien
cacacggaggttgggtaatctagcc

SEQ ID NO: 2843588 - DNA, 25 bp, Homo sapien
tgtcggaataaaccaacacacggag

SEQ ID NO: 2843589 - DNA, 25 bp, Homo sapien
aaatgtagtccgtcccagtgctggt

SEQ ID NO: 2843590 - DNA, 25 bp, Homo sapien
ctggcattgtaaattagccagtcac

SEQ ID NO: 2843591 - DNA, 25 bp, Homo sapien
tctggcattgtaaattagccagtca

SEQ ID NO: 2843592 - DNA, 25 bp, Homo sapien
gaaccagttgggattggccatttcc

SEQ ID NO: 2843593 - DNA, 25 bp, Homo sapien
tctgcagcgagtcatgggaccgaac

SEQ ID NO: 2843594 - DNA, 25 bp, Homo sapien
ggtgaaaatctctgcagcgagtcat

SEQ ID NO: 2843595 - DNA, 25 bp, Homo sapien
tgggaccgaactgggcggtgtcgct

SEQ ID NO: 2843596 - DNA, 25 bp, Homo sapien
agagatttcctttacatgacagctt

SEQ ID NO: 2843597 - DNA, 25 bp, Homo sapien
tacatgacagcttccggtagggcgg

SEQ ID NO: 2843598 - DNA, 25 bp, Homo sapien
gcgttccgaaaagtggatccacctg

SEQ ID NO: 2843599 - DNA, 25 bp, Homo sapien
tctgggcgtggccagagagatttcc

SEQ ID NO: 2843600 - DNA, 25 bp, Homo sapien
aagaagacgtaaacagggctagcag

SEQ ID NO: 2843601 - DNA, 25 bp, Homo sapien
ttacagaccctctgaccatggaaat

SEQ ID NO: 2843602 - DNA, 25 bp, Homo sapien
ctgtggttggccagttctcagaata

SEQ ID NO: 2843603 - DNA, 25 bp, Homo sapien
ctgctttttagagcttgctcaagtt

SEQ ID NO: 2843604 - DNA, 25 bp, Homo sapien
cgcagagtgtgcagatgtagcttaa

SEQ ID NO: 2843605 - DNA, 25 bp, Homo sapien
ggaagactctgcaggatccttgtgc

SEQ ID NO: 2843606 - DNA, 25 bp, Homo sapien
taaacttgttgctgttcgcccacag

SEQ ID NO: 2843607 - DNA, 25 bp, Homo sapien
gcttgaacgactaatctcattggct

SEQ ID NO: 2843608 - DNA, 25 bp, Homo sapien
tctgattgcagagagcgcgcttgtg

SEQ ID NO: 2843609 - DNA, 25 bp, Homo sapien
cgcggctggtttccgagggcaacaa

SEQ ID NO: 2843610 - DNA, 25 bp, Homo sapien
caactatccgctattcagtggcaga

SEQ ID NO: 2843611 - DNA, 25 bp, Homo sapien
tttgtggccaacgtagctaaggacc

SEQ ID NO: 2843612 - DNA, 25 bp, Homo sapien
gtgagctgagctgagactgtgccac

SEQ ID NO: 2843613 - DNA, 25 bp, Homo sapien
tgagactgtgccactgaattccagt

SEQ ID NO: 2843614 - DNA, 25 bp, Homo sapien
cagtgagctgagctgagactgtgcc

SEQ ID NO: 2843615 - DNA, 25 bp, Homo sapien
tgcagtgagctgagctgagactgtg

SEQ ID NO: 2843616 - DNA, 25 bp, Homo sapien
aattgtgtagaagtacaaaagcggc

SEQ ID NO: 2843617 - DNA, 25 bp, Homo sapien
caagcgcccattatttggccttggt

SEQ ID NO: 2843618 - DNA, 25 bp, Homo sapien
caaaagcggctacattgaacacata

SEQ ID NO: 2843619 - DNA, 25 bp, Homo sapien
tcactagtattaagagcaaacattc

SEQ ID NO: 2843620 - DNA, 25 bp, Homo sapien
caactagggttgataagaataatcg

SEQ ID NO: 2843621 - DNA, 25 bp, Homo sapien
ccaagattttgtaactgcaagcgaa

SEQ ID NO: 2843622 - DNA, 25 bp, Homo sapien
cattttatttccctagattgcattt

SEQ ID NO: 2843623 - DNA, 25 bp, Homo sapien
tataacatgagaaactcctccagta

SEQ ID NO: 2843624 - DNA, 25 bp, Homo sapien
tcagcttggcgacattccctggaag

SEQ ID NO: 2843625 - DNA, 25 bp, Homo sapien
cacggatccagtgtggtaaaccagc

SEQ ID NO: 2843626 - DNA, 25 bp, Homo sapien
tcactaggccgtctacaaaggttgt

SEQ ID NO: 2843627 - DNA, 25 bp, Homo sapien
taagaaggcgaattaaaccacaggc

SEQ ID NO: 2843628 - DNA, 25 bp, Homo sapien
ttccctggtctccatcaacgcggac

SEQ ID NO: 2843629 - DNA, 25 bp, Homo sapien
ggtctccatcaacgcggacaacggc

SEQ ID NO: 2843630 - DNA, 25 bp, Homo sapien
ggacaacggccacctgtttgccctc

SEQ ID NO: 2843631 - DNA, 25 bp, Homo sapien
acaacggccacctgtttgccctcag

SEQ ID NO: 2843632 - DNA, 25 bp, Homo sapien
actggaaagtagttgtgtggctctg

SEQ ID NO: 2843633 - DNA, 25 bp, Homo sapien
tcattaacagtactggaaagtagtt

SEQ ID NO: 2843634 - DNA, 25 bp, Homo sapien
cagtactggaaagtagttgtgtggc

SEQ ID NO: 2843635 - DNA, 25 bp, Homo sapien
ggatggcttaggtttcattaacagt

SEQ ID NO: 2843636 - DNA, 25 bp, Homo sapien
cctacttgccacttgtatgatgata

SEQ ID NO: 2843637 - DNA, 25 bp, Homo sapien
tgccacttgtatgatgatataggag

SEQ ID NO: 2843638 - DNA, 25 bp, Homo sapien
taatacctacttgccacttgtatga

SEQ ID NO: 2843639 - DNA, 25 bp, Homo sapien
tattattaatacctacttgccactt

SEQ ID NO: 2843640 - DNA, 25 bp, Homo sapien
cacagtagtacttgttttgacaatc

SEQ ID NO: 2843641 - DNA, 25 bp, Homo sapien
aaagacgtattcctcagccctctct

SEQ ID NO: 2843642 - DNA, 25 bp, Homo sapien
ctgtgtgctttgatgtccctggttt

SEQ ID NO: 2843643 - DNA, 25 bp, Homo sapien
cacagctgcccaaagacgtattcct

SEQ ID NO: 2843644 - DNA, 25 bp, Homo sapien
gccctctcttggtatccatctgcat

SEQ ID NO: 2843645 - DNA, 25 bp, Homo sapien
ttgactatactaggctaagccctct

SEQ ID NO: 2843646 - DNA, 25 bp, Homo sapien
tcttgtgaccaccacatgtctagtg

SEQ ID NO: 2843647 - DNA, 25 bp, Homo sapien
taaacatgcacttcactacattggt

SEQ ID NO: 2843648 - DNA, 25 bp, Homo sapien
aataaaactgttaaatcatggcctg

SEQ ID NO: 2843649 - DNA, 25 bp, Homo sapien
gaggcaactccatattataacgtgg

SEQ ID NO: 2843650 - DNA, 25 bp, Homo sapien
aatgccccggaaactgtagttgccg

SEQ ID NO: 2843651 - DNA, 25 bp, Homo sapien
aaagggcattggatttcgaggcaac

SEQ ID NO: 2843652 - DNA, 25 bp, Homo sapien
gacaacggtaggatgatttgctcca

SEQ ID NO: 2843653 - DNA, 25 bp, Homo sapien
cttgagggtacttgacaatatgaac

SEQ ID NO: 2843654 - DNA, 25 bp, Homo sapien
tgcagtaactcctacagtgtgtaac

SEQ ID NO: 2843655 - DNA, 25 bp, Homo sapien
tagctattggtaagagttgtttcac

SEQ ID NO: 2843656 - DNA, 25 bp, Homo sapien
taagaactaatgatggctaaacact

SEQ ID NO: 2843657 - DNA, 25 bp, Homo sapien
ggaaaagggtcaattattctgccat

SEQ ID NO: 2843658 - DNA, 25 bp, Homo sapien
gacattggagattctagtcactgaa

SEQ ID NO: 2843659 - DNA, 25 bp, Homo sapien
taagagtattcattggacattggag

SEQ ID NO: 2843660 - DNA, 25 bp, Homo sapien
tatcacaggtaaagagttaagacct

SEQ ID NO: 2843661 - DNA, 25 bp, Homo sapien
aagatgtacttgtgaaactgttctc

SEQ ID NO: 2843662 - DNA, 25 bp, Homo sapien
gaactaccactgattgcaattttgc

SEQ ID NO: 2843663 - DNA, 25 bp, Homo sapien
tgcagtgtctactcatagtgtctat

SEQ ID NO: 2843664 - DNA, 25 bp, Homo sapien
tataggtaccatgaaaaagatgtac

SEQ ID NO: 2843665 - DNA, 25 bp, Homo sapien
ttggatggatgcacaatcggagaca

SEQ ID NO: 2843666 - DNA, 25 bp, Homo sapien
taagatgacggaaaatacaactgcc

SEQ ID NO: 2843667 - DNA, 25 bp, Homo sapien
cctctttaagacaccgttgggctgc

SEQ ID NO: 2843668 - DNA, 25 bp, Homo sapien
gaatagctgagccagagcgaacgtg

SEQ ID NO: 2843669 - DNA, 25 bp, Homo sapien
gagatggagtctcgtaaagttacct

SEQ ID NO: 2843670 - DNA, 25 bp, Homo sapien
gccaatgtgcccatccaaagtttta

SEQ ID NO: 2843671 - DNA, 25 bp, Homo sapien
tattcatcatagtatacattggcgg

SEQ ID NO: 2843672 - DNA, 25 bp, Homo sapien
tcttttgcagcgatgagattttgcc

SEQ ID NO: 2843673 - DNA, 25 bp, Homo sapien
gcaaaactccatcaaaataaaataa

SEQ ID NO: 2843674 - DNA, 25 bp, Homo sapien
aaaattctatgaaaaaagacactag

SEQ ID NO: 2843675 - DNA, 25 bp, Homo sapien
agaactttgaataaaattctatgaa

SEQ ID NO: 2843676 - DNA, 25 bp, Homo sapien
aaagaactttgaataaaattctatg

SEQ ID NO: 2843677 - DNA, 25 bp, Homo sapien
tcacagatgattaggacatagttcc

SEQ ID NO: 2843678 - DNA, 25 bp, Homo sapien
tagaggagggacagcttaaatgcat

SEQ ID NO: 2843679 - DNA, 25 bp, Homo sapien
taagtagcccacacattgaagaaga

SEQ ID NO: 2843680 - DNA, 25 bp, Homo sapien
tttatgcatgtcctaatacaggcag

SEQ ID NO: 2843681 - DNA, 25 bp, Homo sapien
ctgcccctcgcctccctggtctcca

SEQ ID NO: 2843682 - DNA, 25 bp, Homo sapien
caagtattgcatatcattgtgaata

SEQ ID NO: 2843683 - DNA, 25 bp, Homo sapien
tcaattttcaagtattgcatatcat

SEQ ID NO: 2843684 - DNA, 25 bp, Homo sapien
tgtagagacggatcgtcaccatatt

SEQ ID NO: 2843685 - DNA, 25 bp, Homo sapien
ccatatttcttaggctggcctttaa

SEQ ID NO: 2843686 - DNA, 25 bp, Homo sapien
ggcgctgcaggataatatcaagaaa

SEQ ID NO: 2843687 - DNA, 25 bp, Homo sapien
gggagaacctagaagccattcaaca

SEQ ID NO: 2843688 - DNA, 25 bp, Homo sapien
tagaccctgttatccagtacacgcg

SEQ ID NO: 2843689 - DNA, 25 bp, Homo sapien
gtacacgcggagaactgggaagaca

SEQ ID NO: 2843690 - DNA, 25 bp, Homo sapien
gactgtggatcctctatccaaagca

SEQ ID NO: 2843691 - DNA, 25 bp, Homo sapien
gagagccggaatttgcttagtcatt

SEQ ID NO: 2843692 - DNA, 25 bp, Homo sapien
cataattgcttgttatctggttagg

SEQ ID NO: 2843693 - DNA, 25 bp, Homo sapien
ccttcaagtttaatcgcacactggg

SEQ ID NO: 2843694 - DNA, 25 bp, Homo sapien
tatcaacgataacgctccggaactg

SEQ ID NO: 2843695 - DNA, 25 bp, Homo sapien
gaccggagacctgcaagtaaatgag

SEQ ID NO: 2843696 - DNA, 25 bp, Homo sapien
tcatggcagtagatggcgggactcc

SEQ ID NO: 2843697 - DNA, 25 bp, Homo sapien
tttccgctagagattcagacatggg

SEQ ID NO: 2843698 - DNA, 25 bp, Homo sapien
gctggtctcctacgtcaatgacaaa

SEQ ID NO: 2843699 - DNA, 25 bp, Homo sapien
gctgaaaaccgagtacaacataacg

SEQ ID NO: 2843700 - DNA, 25 bp, Homo sapien
caaagagattagagccgagtacaac

SEQ ID NO: 2843701 - DNA, 25 bp, Homo sapien
caaaatgatgttccgttcatgccga

SEQ ID NO: 2843702 - DNA, 25 bp, Homo sapien
ggtctccatcaacacagacaacggc

SEQ ID NO: 2843703 - DNA, 25 bp, Homo sapien
cctcgcctccctggtctccatcaac

SEQ ID NO: 2843704 - DNA, 25 bp, Homo sapien
ctccatcaacacagacaacggccac

SEQ ID NO: 2843705 - DNA, 25 bp, Homo sapien
cccctcgcctccctggtctccatca

SEQ ID NO: 2843706 - DNA, 25 bp, Homo sapien
cctggctgtcgtagcagttgctcaa

SEQ ID NO: 2843707 - DNA, 25 bp, Homo sapien
tgctgagcgagcgtgacacagccaa

SEQ ID NO: 2843708 - DNA, 25 bp, Homo sapien
gccctgcaggagttcgagttccgcg

SEQ ID NO: 2843709 - DNA, 25 bp, Homo sapien
tgtgggcgcacaatgcactgacagg

SEQ ID NO: 2843710 - DNA, 25 bp, Homo sapien
tgttatccctaagcatccgggcgct

SEQ ID NO: 2843711 - DNA, 25 bp, Homo sapien
cacaggctgttgacttgaagactcc

SEQ ID NO: 2843712 - DNA, 25 bp, Homo sapien
tgaagtgtttctgacgcgaggctcc

SEQ ID NO: 2843713 - DNA, 25 bp, Homo sapien
cgaggctccgggacaaatgaattca

SEQ ID NO: 2843714 - DNA, 25 bp, Homo sapien
tgtagcgtctatctagcccacctga

SEQ ID NO: 2843715 - DNA, 25 bp, Homo sapien
taagatgatcctagctggcctaatc

SEQ ID NO: 2843716 - DNA, 25 bp, Homo sapien
tataagggacatgcactagcttttg

SEQ ID NO: 2843717 - DNA, 25 bp, Homo sapien
cctgcattgttggtaagttagacct

SEQ ID NO: 2843718 - DNA, 25 bp, Homo sapien
taagtacatctatactacgtcagat

SEQ ID NO: 2843719 - DNA, 25 bp, Homo sapien
aataaatacgagagagacaaggcag

SEQ ID NO: 2843720 - DNA, 25 bp, Homo sapien
gaagttctaacatgtgaggttgaaa

SEQ ID NO: 2843721 - DNA, 25 bp, Homo sapien
aggcatggtgatgcgcaactgtggt

SEQ ID NO: 2843722 - DNA, 25 bp, Homo sapien
tggcgctgcaggctaaggcttcaaa

SEQ ID NO: 2843723 - DNA, 25 bp, Homo sapien
tagcaattcgtttcgaagcaaagac

SEQ ID NO: 2843724 - DNA, 25 bp, Homo sapien
tagatcaattgtagcaattcgtttc

SEQ ID NO: 2843725 - DNA, 25 bp, Homo sapien
gaagcaaagacaacgcatggtggcg

SEQ ID NO: 2843726 - DNA, 25 bp, Homo sapien
tggcctcggtgtcttcgctcttcct

SEQ ID NO: 2843727 - DNA, 25 bp, Homo sapien
cattggcctcggtgtcttcgctctt

SEQ ID NO: 2843728 - DNA, 25 bp, Homo sapien
gtggcattggcctcggtgtcttcgc

SEQ ID NO: 2843729 - DNA, 25 bp, Homo sapien
ggtggtggcattggcctcggtgtct

SEQ ID NO: 2843730 - DNA, 25 bp, Homo sapien
gactggacaggctttctaataccca

SEQ ID NO: 2843731 - DNA, 25 bp, Homo sapien
taggaccaagtaatgcatctcctgc

SEQ ID NO: 2843732 - DNA, 25 bp, Homo sapien
cgtataaggccaatagacactagga

SEQ ID NO: 2843733 - DNA, 25 bp, Homo sapien
caacatggataagtttaagctactc

SEQ ID NO: 2843734 - DNA, 25 bp, Homo sapien
gagggtagtccagaacagattgaca

SEQ ID NO: 2843735 - DNA, 25 bp, Homo sapien
gatactcaggtacctggtaaagcat

SEQ ID NO: 2843736 - DNA, 25 bp, Homo sapien
agcgtggctgggcaccatttaatca

SEQ ID NO: 2843737 - DNA, 25 bp, Homo sapien
taggttgagtaaggaagatcaggcc

SEQ ID NO: 2843738 - DNA, 25 bp, Homo sapien
agaagaattggttgaattcaggagg

SEQ ID NO: 2843739 - DNA, 25 bp, Homo sapien
ttcaggaggcggaggttgcagtgag

SEQ ID NO: 2843740 - DNA, 25 bp, Homo sapien
gaggcagaagaattggttgaattca

SEQ ID NO: 2843741 - DNA, 25 bp, Homo sapien
ggcagaagaattggttgaattcagg

SEQ ID NO: 2843742 - DNA, 25 bp, Homo sapien
tccagcaagtgcaagagcagcaact

SEQ ID NO: 2843743 - DNA, 25 bp, Homo sapien
gctgaaccctgtgatgaactgtagt

SEQ ID NO: 2843744 - DNA, 25 bp, Homo sapien
ttttcagattaggtacatagggcca

SEQ ID NO: 2843745 - DNA, 25 bp, Homo sapien
tagaggcccttccataaagttaaga

SEQ ID NO: 2843746 - DNA, 25 bp, Homo sapien
catcaaatggacagggcctagttca

SEQ ID NO: 2843747 - DNA, 25 bp, Homo sapien
tctccctgacgcaaaaaacgatcgg

SEQ ID NO: 2843748 - DNA, 25 bp, Homo sapien
cgagttttcggcgacgtaggccata

SEQ ID NO: 2843749 - DNA, 25 bp, Homo sapien
tattgtgtcgaagggctgcccagtc

SEQ ID NO: 2843750 - DNA, 25 bp, Homo sapien
cttggatgccaggaccggacttcat

SEQ ID NO: 2843751 - DNA, 25 bp, Homo sapien
aggcgactaactccccagagcgtga

SEQ ID NO: 2843752 - DNA, 25 bp, Homo sapien
tggctctaccgcctgttctgggctc

SEQ ID NO: 2843753 - DNA, 25 bp, Homo sapien
ttcgctcactcgtctgagggtccca

SEQ ID NO: 2843754 - DNA, 25 bp, Homo sapien
gcgtgagaccggcttttcacgtcca

SEQ ID NO: 2843755 - DNA, 25 bp, Homo sapien
cccaccagaatcaagatggcataat

SEQ ID NO: 2843756 - DNA, 25 bp, Homo sapien
aatcaagatggcataataagtgacc

SEQ ID NO: 2843757 - DNA, 25 bp, Homo sapien
ccagaatcaagatggcataataagt

SEQ ID NO: 2843758 - DNA, 25 bp, Homo sapien
caagatggcataataagtgacctct

SEQ ID NO: 2843759 - DNA, 25 bp, Homo sapien
gaagagcaaggtcttaatacccagt

SEQ ID NO: 2843760 - DNA, 25 bp, Homo sapien
tctaatgctgaccagtctgaagact

SEQ ID NO: 2843761 - DNA, 25 bp, Homo sapien
acagtaaagtcctgcaatgaagcta

SEQ ID NO: 2843762 - DNA, 25 bp, Homo sapien
gaaagaacttaacagaacacacagc

SEQ ID NO: 2843763 - DNA, 25 bp, Homo sapien
gaggcagagtaattccgtggttcca

SEQ ID NO: 2843764 - DNA, 25 bp, Homo sapien
tgaggccaatggaacacggtccact

SEQ ID NO: 2843765 - DNA, 25 bp, Homo sapien
tagaggcatattctggaggcagacg

SEQ ID NO: 2843766 - DNA, 25 bp, Homo sapien
tgtttgagctcatccagtacagcct

SEQ ID NO: 2843767 - DNA, 25 bp, Homo sapien
gaataccagtcgttaacacaaaggc

SEQ ID NO: 2843768 - DNA, 25 bp, Homo sapien
cagatgcaatgccaagtcccaacct

SEQ ID NO: 2843769 - DNA, 25 bp, Homo sapien
taaatatgctgtgaccgaataccag

SEQ ID NO: 2843770 - DNA, 25 bp, Homo sapien
tgtagatcagcagctaagcgtctat

SEQ ID NO: 2843771 - DNA, 25 bp, Homo sapien
gattataagttcagtttcaccgggc

SEQ ID NO: 2843772 - DNA, 25 bp, Homo sapien
cgaaatcttgccgagaggcgcagct

SEQ ID NO: 2843773 - DNA, 25 bp, Homo sapien
cactaccgattactgatgaaagggc

SEQ ID NO: 2843774 - DNA, 25 bp, Homo sapien
tgccgcttggcagagtgatccacta

SEQ ID NO: 2843775 - DNA, 25 bp, Homo sapien
ggactgtgggcgccgctgttcacta

SEQ ID NO: 2843776 - DNA, 25 bp, Homo sapien
taggactgtgggcgccgctgttcac

SEQ ID NO: 2843777 - DNA, 25 bp, Homo sapien
ttaggactgtgggcgccgctgttca

SEQ ID NO: 2843778 - DNA, 25 bp, Homo sapien
actgtgggcgccgctgttcactaat

SEQ ID NO: 2843779 - DNA, 25 bp, Homo sapien
tctgcctagacaccattagtgaatg

SEQ ID NO: 2843780 - DNA, 25 bp, Homo sapien
gctgatatctgtagacttaagtgaa

SEQ ID NO: 2843781 - DNA, 25 bp, Homo sapien
ggaaagtttgtgttaagccatgtag

SEQ ID NO: 2843782 - DNA, 25 bp, Homo sapien
tctgttttgggaagtctagctgata

SEQ ID NO: 2843783 - DNA, 25 bp, Homo sapien
ttaataatcatacactttgcttgcc

SEQ ID NO: 2843784 - DNA, 25 bp, Homo sapien
ttgtgaatgcaaagataactatgga

SEQ ID NO: 2843785 - DNA, 25 bp, Homo sapien
tgagagctataacctccaaacatga

SEQ ID NO: 2843786 - DNA, 25 bp, Homo sapien
tttgcttgcctcaacaagaagttca

SEQ ID NO: 2843787 - DNA, 25 bp, Homo sapien
cctaaaatgtagtgagcagttgagt

SEQ ID NO: 2843788 - DNA, 25 bp, Homo sapien
gtgagcagttgagttcaggacaaga

SEQ ID NO: 2843789 - DNA, 25 bp, Homo sapien
caatctatgtgttgcacatacagga

SEQ ID NO: 2843790 - DNA, 25 bp, Homo sapien
acaagacatactttgcggtgattca

SEQ ID NO: 2843791 - DNA, 25 bp, Homo sapien
caaatccaagaatactcaatgcagt

SEQ ID NO: 2843792 - DNA, 25 bp, Homo sapien
cctcctgggtggtcacatattgaaa

SEQ ID NO: 2843793 - DNA, 25 bp, Homo sapien
gacttccatacagaagtgcctgtca

SEQ ID NO: 2843794 - DNA, 25 bp, Homo sapien
tgattagctttgcagaaccttgtag

SEQ ID NO: 2843795 - DNA, 25 bp, Homo sapien
gaggatctctctcaacacggtgtaa

SEQ ID NO: 2843796 - DNA, 25 bp, Homo sapien
gatcagattatggaggattcccctc

SEQ ID NO: 2843797 - DNA, 25 bp, Homo sapien
gaagactctggaccgagaaacgcag

SEQ ID NO: 2843798 - DNA, 25 bp, Homo sapien
caatcctgatggtggcaaatatcca

SEQ ID NO: 2843799 - DNA, 25 bp, Homo sapien
ggaggtctctttaccaccacgacga

SEQ ID NO: 2843800 - DNA, 25 bp, Homo sapien
ttaatgcaacggatccagacgaggg

SEQ ID NO: 2843801 - DNA, 25 bp, Homo sapien
gagtccgcatcgtctccagagggaa

SEQ ID NO: 2843802 - DNA, 25 bp, Homo sapien
cacagctttagatggaggcgatccc

SEQ ID NO: 2843803 - DNA, 25 bp, Homo sapien
tggtgaagtcaacgacaatgctccg

SEQ ID NO: 2843804 - DNA, 25 bp, Homo sapien
taagcttgtaacagatgggaccctg

SEQ ID NO: 2843805 - DNA, 25 bp, Homo sapien
gaaccctggacggtgatcactctgt

SEQ ID NO: 2843806 - DNA, 25 bp, Homo sapien
tgtaactgaggacgcagaaccctgg

SEQ ID NO: 2843807 - DNA, 25 bp, Homo sapien
caggccatcgagcccgggcttttca

SEQ ID NO: 2843808 - DNA, 25 bp, Homo sapien
ggccatcgagcccgggcttttcagc

SEQ ID NO: 2843809 - DNA, 25 bp, Homo sapien
catcgagcccgggcttttcagcctg

SEQ ID NO: 2843810 - DNA, 25 bp, Homo sapien
tcgagcccgggcttttcagcctggg

SEQ ID NO: 2843811 - DNA, 25 bp, Homo sapien
tcttcttcctcgcagtgattttggc

SEQ ID NO: 2843812 - DNA, 25 bp, Homo sapien
atttctatgctcttcttcctcgcag

SEQ ID NO: 2843813 - DNA, 25 bp, Homo sapien
cgcagtgattttggcggtcgccttg

SEQ ID NO: 2843814 - DNA, 25 bp, Homo sapien
tcctcgcagtgattttggcggtcgc

SEQ ID NO: 2843815 - DNA, 25 bp, Homo sapien
tcaagcagagcctcgtagtggccgt

SEQ ID NO: 2843816 - DNA, 25 bp, Homo sapien
tcttctcggtgggtctgcacacggg

SEQ ID NO: 2843817 - DNA, 25 bp, Homo sapien
tgctggacagagacgcgctcaagca

SEQ ID NO: 2843818 - DNA, 25 bp, Homo sapien
ggcagcctcgagtctccagctaact

SEQ ID NO: 2843819 - DNA, 25 bp, Homo sapien
tagaccttgtaaccgggatgctgac

SEQ ID NO: 2843820 - DNA, 25 bp, Homo sapien
tagtctccagttagtgctgacggcg

SEQ ID NO: 2843821 - DNA, 25 bp, Homo sapien
tgcaacggatctggatgaaggcccc

SEQ ID NO: 2843822 - DNA, 25 bp, Homo sapien
tatgcaccgatactggcaaggcgct

SEQ ID NO: 2843823 - DNA, 25 bp, Homo sapien
agcgactgccgctctaagtgccggg

SEQ ID NO: 2843824 - DNA, 25 bp, Homo sapien
ttgggccagaggtccggatggtccc

SEQ ID NO: 2843825 - DNA, 25 bp, Homo sapien
gggcgggcaggactctacgatcctt

SEQ ID NO: 2843826 - DNA, 25 bp, Homo sapien
ggactccgtctcaagggtcggcgac

SEQ ID NO: 2843827 - DNA, 25 bp, Homo sapien
tgtgtctaagaatacagtggctgag

SEQ ID NO: 2843828 - DNA, 25 bp, Homo sapien
gactcccgatacacctggaatgcta

SEQ ID NO: 2843829 - DNA, 25 bp, Homo sapien
acttggccagttatccttttggaga

SEQ ID NO: 2843830 - DNA, 25 bp, Homo sapien
ccactggcagttccggagcttcctt

SEQ ID NO: 2843831 - DNA, 25 bp, Homo sapien
agccccgcccaacacggactggcgt

SEQ ID NO: 2843832 - DNA, 25 bp, Homo sapien
cgcccaacacggactggcgtttctc

SEQ ID NO: 2843833 - DNA, 25 bp, Homo sapien
ccgcccaacacggactggcgtttct

SEQ ID NO: 2843834 - DNA, 25 bp, Homo sapien
aagccccgcccaacacggactggcg

SEQ ID NO: 2843835 - DNA, 25 bp, Homo sapien
gcctcttgagggaaataaacaggta

SEQ ID NO: 2843836 - DNA, 25 bp, Homo sapien
tcaaatttaactgggagccctgtac

SEQ ID NO: 2843837 - DNA, 25 bp, Homo sapien
ccagagactgagtatgaaagtggca

SEQ ID NO: 2843838 - DNA, 25 bp, Homo sapien
agctgttgtggccttgcgccctgag

SEQ ID NO: 2843839 - DNA, 25 bp, Homo sapien
tagggagggcattttgctaccaagc

SEQ ID NO: 2843840 - DNA, 25 bp, Homo sapien
ttttggaggacatgatcaccatccc

SEQ ID NO: 2843841 - DNA, 25 bp, Homo sapien
gagactccactgcatgttccaagac

SEQ ID NO: 2843842 - DNA, 25 bp, Homo sapien
ccccatggtactgatgcttgctgga

SEQ ID NO: 2843843 - DNA, 25 bp, Homo sapien
atcccagaagcctatgaggcaaggg

SEQ ID NO: 2843844 - DNA, 25 bp, Homo sapien
gcaaaagtatcaccctaagccagag

SEQ ID NO: 2843845 - DNA, 25 bp, Homo sapien
taataactctaattctgggccaagc

SEQ ID NO: 2843846 - DNA, 25 bp, Homo sapien
cagcaatgaaaggagggatctagcc

SEQ ID NO: 2843847 - DNA, 25 bp, Homo sapien
gaggaatatccccttgagcctttag

SEQ ID NO: 2843848 - DNA, 25 bp, Homo sapien
tggcttcctcaaggattgtggggaa

SEQ ID NO: 2843849 - DNA, 25 bp, Homo sapien
gatgtgactgcacacccggccttcc

SEQ ID NO: 2843850 - DNA, 25 bp, Homo sapien
cttgcacggccaaccaactccttgg

SEQ ID NO: 2843851 - DNA, 25 bp, Homo sapien
ctccgaagctagcagagatgtgact

SEQ ID NO: 2843852 - DNA, 25 bp, Homo sapien
caagtcttaaccaggtcttctctcc

SEQ ID NO: 2843853 - DNA, 25 bp, Homo sapien
tgccaaagcccaagtcttaaccagg

SEQ ID NO: 2843854 - DNA, 25 bp, Homo sapien
ggctgcccatagatcaagcagggaa

SEQ ID NO: 2843855 - DNA, 25 bp, Homo sapien
gagaggctgcccatagatcaagcag

SEQ ID NO: 2843856 - DNA, 25 bp, Homo sapien
tacttcccaggggcacaagaggttg

SEQ ID NO: 2843857 - DNA, 25 bp, Homo sapien
tctacttcccaggggcacaagaggt

SEQ ID NO: 2843858 - DNA, 25 bp, Homo sapien
ctacttcccaggggcacaagaggtt

SEQ ID NO: 2843859 - DNA, 25 bp, Homo sapien
tcagtaggaaataatgttgtaagaa

SEQ ID NO: 2843860 - DNA, 25 bp, Homo sapien
cagtaggaaataatgttgtaagaac

SEQ ID NO: 2843861 - DNA, 25 bp, Homo sapien
tataggtagaaatgggcagccagcc

SEQ ID NO: 2843862 - DNA, 25 bp, Homo sapien
tacagatgaaactcacagtgatggc

SEQ ID NO: 2843863 - DNA, 25 bp, Homo sapien
aaatgggcctacacaatgcaacagc

SEQ ID NO: 2843864 - DNA, 25 bp, Homo sapien
taggctagcatgctctaaggtcccc

SEQ ID NO: 2843865 - DNA, 25 bp, Homo sapien
gggccctctcttccgtcggaatgct

SEQ ID NO: 2843866 - DNA, 25 bp, Homo sapien
tgacggggccctctcttccgtcgga

SEQ ID NO: 2843867 - DNA, 25 bp, Homo sapien
ttccgtcggaatgctgcccctgact

SEQ ID NO: 2843868 - DNA, 25 bp, Homo sapien
gaatgctgcccctgactgcagggct

SEQ ID NO: 2843869 - DNA, 25 bp, Homo sapien
cagctggcagctaagaagaggcaaa

SEQ ID NO: 2843870 - DNA, 25 bp, Homo sapien
agagctcagccttaagtctcacacg

SEQ ID NO: 2843871 - DNA, 25 bp, Homo sapien
gatgtgaactcttcagccagagcag

SEQ ID NO: 2843872 - DNA, 25 bp, Homo sapien
tgaagtactgcctccagtggctaag

SEQ ID NO: 2843873 - DNA, 25 bp, Homo sapien
tctccttggctagttttgctcgcct

SEQ ID NO: 2843874 - DNA, 25 bp, Homo sapien
gctagttttgctcgcctcatctttt

SEQ ID NO: 2843875 - DNA, 25 bp, Homo sapien
ttcatgtctatgagttgctctctct

SEQ ID NO: 2843876 - DNA, 25 bp, Homo sapien
tcatgtctatgagttgctctctctt

SEQ ID NO: 2843877 - DNA, 25 bp, Homo sapien
aaaacatattccgaaaattgtgaag

SEQ ID NO: 2843878 - DNA, 25 bp, Homo sapien
tcaaagaggaagtactcgcccagct

SEQ ID NO: 2843879 - DNA, 25 bp, Homo sapien
cttgttatactgttcctgtgcatcc

SEQ ID NO: 2843880 - DNA, 25 bp, Homo sapien
gttagaatgcatcatccgcagcttg

SEQ ID NO: 2843881 - DNA, 25 bp, Homo sapien
tctgaacatcacgttccacatcaga

SEQ ID NO: 2843882 - DNA, 25 bp, Homo sapien
gaaattctgaacatcacgttccaca

SEQ ID NO: 2843883 - DNA, 25 bp, Homo sapien
catcacgttccacatcagaaatttg

SEQ ID NO: 2843884 - DNA, 25 bp, Homo sapien
gcagctgggaaattctgaacatcac

SEQ ID NO: 2843885 - DNA, 25 bp, Homo sapien
tctcacatctagactgtgtcttatt

SEQ ID NO: 2843886 - DNA, 25 bp, Homo sapien
tcttatttccctccccatgcagaga

SEQ ID NO: 2843887 - DNA, 25 bp, Homo sapien
ttgaaatagtctgaactgaaaatgc

SEQ ID NO: 2843888 - DNA, 25 bp, Homo sapien
aatagtctgaactgaaaatgctctc

SEQ ID NO: 2843889 - DNA, 25 bp, Homo sapien
ttgggctctagcttcattccaaact

SEQ ID NO: 2843890 - DNA, 25 bp, Homo sapien
gggctctagcttcattccaaactgc

SEQ ID NO: 2843891 - DNA, 25 bp, Homo sapien
ttttgggctctagcttcattccaaa

SEQ ID NO: 2843892 - DNA, 25 bp, Homo sapien
ctagcttcattccaaactgccccac

SEQ ID NO: 2843893 - DNA, 25 bp, Homo sapien
catcgggatagtcattctcacacaa

SEQ ID NO: 2843894 - DNA, 25 bp, Homo sapien
ctcagccaagaagtgtaacaacgtc

SEQ ID NO: 2843895 - DNA, 25 bp, Homo sapien
tctccacatgggcaagctcgtctgg

SEQ ID NO: 2843896 - DNA, 25 bp, Homo sapien
tctggaaacttgaggacatcgggat

SEQ ID NO: 2843897 - DNA, 25 bp, Homo sapien
gattggaaaagctctcactcttacg

SEQ ID NO: 2843898 - DNA, 25 bp, Homo sapien
ccagcatttctggagccagcattca

SEQ ID NO: 2843899 - DNA, 25 bp, Homo sapien
ttgatattctccacttgctcgctga

SEQ ID NO: 2843900 - DNA, 25 bp, Homo sapien
ttacgtaactcctcacatgcagcag

SEQ ID NO: 2843901 - DNA, 25 bp, Homo sapien
aaagcatttttaactgctctggctc

SEQ ID NO: 2843902 - DNA, 25 bp, Homo sapien
gaaagcatttttaactgctctggct

SEQ ID NO: 2843903 - DNA, 25 bp, Homo sapien
tgttgtcagtcccacactctgctca

SEQ ID NO: 2843904 - DNA, 25 bp, Homo sapien
cagaagtaatctgaccaccagagaa

SEQ ID NO: 2843905 - DNA, 25 bp, Homo sapien
gggaattcgctaacaactcaagcct

SEQ ID NO: 2843906 - DNA, 25 bp, Homo sapien
aagaaacatatggtgggagaagaga

SEQ ID NO: 2843907 - DNA, 25 bp, Homo sapien
cctccaggatgacattcttaatctc

SEQ ID NO: 2843908 - DNA, 25 bp, Homo sapien
tcaccttagtttcaggccctgatca

SEQ ID NO: 2843909 - DNA, 25 bp, Homo sapien
tatagtctccccttaccttagcaat

SEQ ID NO: 2843910 - DNA, 25 bp, Homo sapien
tcctgaactgcacaatgttatctca

SEQ ID NO: 2843911 - DNA, 25 bp, Homo sapien
tgacataactcatctctgcctatag

SEQ ID NO: 2843912 - DNA, 25 bp, Homo sapien
ctttgaatccaacacctttaactct

SEQ ID NO: 2843913 - DNA, 25 bp, Homo sapien
tgtctttgaatccaacacctttaac

SEQ ID NO: 2843914 - DNA, 25 bp, Homo sapien
tctccaccttcttgatccttcttgg

SEQ ID NO: 2843915 - DNA, 25 bp, Homo sapien
ggctgtctttgaatccaacaccttt

SEQ ID NO: 2843916 - DNA, 25 bp, Homo sapien
ctagcagggaaaagattagaaaagc

SEQ ID NO: 2843917 - DNA, 25 bp, Homo sapien
gggaaaagattagaaaagcatgatt

SEQ ID NO: 2843918 - DNA, 25 bp, Homo sapien
gcagggaaaagattagaaaagcatg

SEQ ID NO: 2843919 - DNA, 25 bp, Homo sapien
aaagattagaaaagcatgattaaaa

SEQ ID NO: 2843920 - DNA, 25 bp, Homo sapien
ggaaatagattcttctttagagcct

SEQ ID NO: 2843921 - DNA, 25 bp, Homo sapien
tagctacaaggattcttataagaag

SEQ ID NO: 2843922 - DNA, 25 bp, Homo sapien
ggaatctgggcaggcattagacatt

SEQ ID NO: 2843923 - DNA, 25 bp, Homo sapien
taagaaggagatacgaggaccagag

SEQ ID NO: 2843924 - DNA, 25 bp, Homo sapien
cactgttagtaggtgtccggcagcc

SEQ ID NO: 2843925 - DNA, 25 bp, Homo sapien
gactgagtcagttgtatccgcacgg

SEQ ID NO: 2843926 - DNA, 25 bp, Homo sapien
aaagagtacgtagctgcgcctcagc

SEQ ID NO: 2843927 - DNA, 25 bp, Homo sapien
cactaagtgctggatttgagcccaa

SEQ ID NO: 2843928 - DNA, 25 bp, Homo sapien
ctgctggttttcgtcatactgctgt

SEQ ID NO: 2843929 - DNA, 25 bp, Homo sapien
gctgctggttttcgtcatactgctg

SEQ ID NO: 2843930 - DNA, 25 bp, Homo sapien
tgctggttttcgtcatactgctgtt

SEQ ID NO: 2843931 - DNA, 25 bp, Homo sapien
ctggttttcgtcatactgctgtttt

SEQ ID NO: 2843932 - DNA, 25 bp, Homo sapien
ctgaaagtcacctgatcttctcctc

SEQ ID NO: 2843933 - DNA, 25 bp, Homo sapien
ggaccgccatctctgttactgaaag

SEQ ID NO: 2843934 - DNA, 25 bp, Homo sapien
ctgttactgaaagtcacctgatctt

SEQ ID NO: 2843935 - DNA, 25 bp, Homo sapien
ttctcctccaatccctagtctctga

SEQ ID NO: 2843936 - DNA, 25 bp, Homo sapien
gaagtgctctagaatcttctccaag

SEQ ID NO: 2843937 - DNA, 25 bp, Homo sapien
ggcagacgaaatctcaggtccaagt

SEQ ID NO: 2843938 - DNA, 25 bp, Homo sapien
tagaactgaatgctagtacttggct

SEQ ID NO: 2843939 - DNA, 25 bp, Homo sapien
tgtagtaccctaacaaaatctctgt

SEQ ID NO: 2843940 - DNA, 25 bp, Homo sapien
caaatagtgtaaggtcaagggatcc

SEQ ID NO: 2843941 - DNA, 25 bp, Homo sapien
cacactaaagctgggatggctagaa

SEQ ID NO: 2843942 - DNA, 25 bp, Homo sapien
tcttatacctagcaacttgggccca

SEQ ID NO: 2843943 - DNA, 25 bp, Homo sapien
taaggctaggaactgactgtaccaa

SEQ ID NO: 2843944 - DNA, 25 bp, Homo sapien
ctcttactttaacaagtctaatgtt

SEQ ID NO: 2843945 - DNA, 25 bp, Homo sapien
ttactttaacaagtctaatgttcca

SEQ ID NO: 2843946 - DNA, 25 bp, Homo sapien
tcttactttaacaagtctaatgttc

SEQ ID NO: 2843947 - DNA, 25 bp, Homo sapien
cattgttctcaaagcggtcctcctt

SEQ ID NO: 2843948 - DNA, 25 bp, Homo sapien
tttggcgaaaagttcattgttctca

SEQ ID NO: 2843949 - DNA, 25 bp, Homo sapien
caaagcggtcctccttcacctttgt

SEQ ID NO: 2843950 - DNA, 25 bp, Homo sapien
ggcgaaaagttcattgttctcaaag

SEQ ID NO: 2843951 - DNA, 25 bp, Homo sapien
cctctggcttataaagctttttggg

SEQ ID NO: 2843952 - DNA, 25 bp, Homo sapien
aggtggaggcatacccattccgggt

SEQ ID NO: 2843953 - DNA, 25 bp, Homo sapien
aggcatacccattccgggtggaggt

SEQ ID NO: 2843954 - DNA, 25 bp, Homo sapien
ctgcaggaactccaaatccaaatgg

SEQ ID NO: 2843955 - DNA, 25 bp, Homo sapien
tggggggattctagcactcccaggc

SEQ ID NO: 2843956 - DNA, 25 bp, Homo sapien
gggatgccaacaccctcaggcaaag

SEQ ID NO: 2843957 - DNA, 25 bp, Homo sapien
gggatggtagcatccccagacaaag

SEQ ID NO: 2843958 - DNA, 25 bp, Homo sapien
tggggggatggcagtacctccaggc

SEQ ID NO: 2843959 - DNA, 25 bp, Homo sapien
gggtgaggagatgcaaacaccccca

SEQ ID NO: 2843960 - DNA, 25 bp, Homo sapien
ggtgaggagatgcaaacacccccag

SEQ ID NO: 2843961 - DNA, 25 bp, Homo sapien
tgaggagatgcaaacacccccaggc

SEQ ID NO: 2843962 - DNA, 25 bp, Homo sapien
ggggtgaggagatgcaaacaccccc

SEQ ID NO: 2843963 - DNA, 25 bp, Homo sapien
ggtggaataatagtgccagagtcac

SEQ ID NO: 2843964 - DNA, 25 bp, Homo sapien
tggtggtggaataatagtgccagag

SEQ ID NO: 2843965 - DNA, 25 bp, Homo sapien
gtggtggaataatagtgccagagtc

SEQ ID NO: 2843966 - DNA, 25 bp, Homo sapien
aggtggtggtggaataatagtgcca

SEQ ID NO: 2843967 - DNA, 25 bp, Homo sapien
gaacagaaggaggtacagtaatagc

SEQ ID NO: 2843968 - DNA, 25 bp, Homo sapien
ccagttcctttgtcagcttggcaac

SEQ ID NO: 2843969 - DNA, 25 bp, Homo sapien
caggagcacgactaggaacagaagg

SEQ ID NO: 2843970 - DNA, 25 bp, Homo sapien
gtacagtaatagctgccgcagagag

SEQ ID NO: 2843971 - DNA, 25 bp, Homo sapien
tctgccttccctgctcaggcattac

SEQ ID NO: 2843972 - DNA, 25 bp, Homo sapien
tcattctgccttccctgctcaggca

SEQ ID NO: 2843973 - DNA, 25 bp, Homo sapien
ttacaggtcattctgccttccctgc

SEQ ID NO: 2843974 - DNA, 25 bp, Homo sapien
attctgccttccctgctcaggcatt

SEQ ID NO: 2843975 - DNA, 25 bp, Homo sapien
gctcatgtcgggctgttaactctga

SEQ ID NO: 2843976 - DNA, 25 bp, Homo sapien
tgtagctcatgtcgggctgttaact

SEQ ID NO: 2843977 - DNA, 25 bp, Homo sapien
ttccacctgtagctcatgtcgggct

SEQ ID NO: 2843978 - DNA, 25 bp, Homo sapien
cacctgtagctcatgtcgggctgtt

SEQ ID NO: 2843979 - DNA, 25 bp, Homo sapien
cacctttgtcttatcaatcatttga

SEQ ID NO: 2843980 - DNA, 25 bp, Homo sapien
tctccacctttgtcttatcaatcat

SEQ ID NO: 2843981 - DNA, 25 bp, Homo sapien
ccacctttgtcttatcaatcatttg

SEQ ID NO: 2843982 - DNA, 25 bp, Homo sapien
tccacctttgtcttatcaatcattt

SEQ ID NO: 2843983 - DNA, 25 bp, Homo sapien
caatctggaggtgccggcacttgaa

SEQ ID NO: 2843984 - DNA, 25 bp, Homo sapien
gatcagccccgttcttgtgcagaac

SEQ ID NO: 2843985 - DNA, 25 bp, Homo sapien
ggcacttgaagtcaggatcagcccc

SEQ ID NO: 2843986 - DNA, 25 bp, Homo sapien
gcagaactatctgggaaatacattc

SEQ ID NO: 2843987 - DNA, 25 bp, Homo sapien
gaacggcatttcaccttatacactc

SEQ ID NO: 2843988 - DNA, 25 bp, Homo sapien
aaaacagaacggcatttcaccttat

SEQ ID NO: 2843989 - DNA, 25 bp, Homo sapien
ctccaaaaacagaacggcatttcac

SEQ ID NO: 2843990 - DNA, 25 bp, Homo sapien
ggcatttcaccttatacactctgac

SEQ ID NO: 2843991 - DNA, 25 bp, Homo sapien
caagagtaagtgctgcaggatggaa

SEQ ID NO: 2843992 - DNA, 25 bp, Homo sapien
tagtcatttcggaccaagagtaagt

SEQ ID NO: 2843993 - DNA, 25 bp, Homo sapien
ggcctcatagtcatttcggaccaag

SEQ ID NO: 2843994 - DNA, 25 bp, Homo sapien
gaccaagagtaagtgctgcaggatg

SEQ ID NO: 2843995 - DNA, 25 bp, Homo sapien
cagaaattatgtttgacaggtggct

SEQ ID NO: 2843996 - DNA, 25 bp, Homo sapien
tatgcagaaattatgtttgacaggt

SEQ ID NO: 2843997 - DNA, 25 bp, Homo sapien
gacaggtggcttatttaactcttga

SEQ ID NO: 2843998 - DNA, 25 bp, Homo sapien
tgacaggtggcttatttaactcttg

SEQ ID NO: 2843999 - DNA, 25 bp, Homo sapien
aacaaccctcagatcacctttactg

SEQ ID NO: 2844000 - DNA, 25 bp, Homo sapien
agcctgatgctctgttctgagtcat

SEQ ID NO: 2844001 - DNA, 25 bp, Homo sapien
ccctgatctatgataagctaagtaa

SEQ ID NO: 2844002 - DNA, 25 bp, Homo sapien
taatgagaagacacataagcctgat

SEQ ID NO: 2844003 - DNA, 25 bp, Homo sapien
cacatttagttgcactctcatatct

SEQ ID NO: 2844004 - DNA, 25 bp, Homo sapien
ccttcaggtcataggaatcctcttc

SEQ ID NO: 2844005 - DNA, 25 bp, Homo sapien
ccatctccatgcgaatgtcatccag

SEQ ID NO: 2844006 - DNA, 25 bp, Homo sapien
cagccgtcccttcaggtcataggaa

SEQ ID NO: 2844007 - DNA, 25 bp, Homo sapien
atgagagcattgatcagctgtaggc

SEQ ID NO: 2844008 - DNA, 25 bp, Homo sapien
cccaaacgcatcagttcacttctga

SEQ ID NO: 2844009 - DNA, 25 bp, Homo sapien
gaagtcaagttcctccgctggtgtg

SEQ ID NO: 2844010 - DNA, 25 bp, Homo sapien
tctgatgtgaactcggaagtcaagt

SEQ ID NO: 2844011 - DNA, 25 bp, Homo sapien
atgcattcttaggtccccaatacaa

SEQ ID NO: 2844012 - DNA, 25 bp, Homo sapien
tgcattcttaggtccccaatacaac

SEQ ID NO: 2844013 - DNA, 25 bp, Homo sapien
cttcttagaaagaaggttaatcatt

SEQ ID NO: 2844014 - DNA, 25 bp, Homo sapien
gttaatcattttcccttcataacag

SEQ ID NO: 2844015 - DNA, 25 bp, Homo sapien
ggttaatcattttcccttcataaca

SEQ ID NO: 2844016 - DNA, 25 bp, Homo sapien
aatcattttcccttcataacagatt

SEQ ID NO: 2844017 - DNA, 25 bp, Homo sapien
agctctttctgtcattgcctccaaa

SEQ ID NO: 2844018 - DNA, 25 bp, Homo sapien
ctttttaatccatccagcagcggct

SEQ ID NO: 2844019 - DNA, 25 bp, Homo sapien
ttttaatccatccagcagcggctgg

SEQ ID NO: 2844020 - DNA, 25 bp, Homo sapien
cttcagtgcaatagtggttccactt

SEQ ID NO: 2844021 - DNA, 25 bp, Homo sapien
cagcttagctgcatcaatcatcatg

SEQ ID NO: 2844022 - DNA, 25 bp, Homo sapien
catcatgttgggaacagcaggatcc

SEQ ID NO: 2844023 - DNA, 25 bp, Homo sapien
cctctggctgcggtagaatacaaag

SEQ ID NO: 2844024 - DNA, 25 bp, Homo sapien
ttcttctgtctccaacatggtcttg

SEQ ID NO: 2844025 - DNA, 25 bp, Homo sapien
ctcatgcttgttccggctatcgtaa

SEQ ID NO: 2844026 - DNA, 25 bp, Homo sapien
aaaagctttcaagcagcgaatgatc

SEQ ID NO: 2844027 - DNA, 25 bp, Homo sapien
cagcgaatgatctcatgcttgttcc

SEQ ID NO: 2844028 - DNA, 25 bp, Homo sapien
ctttcaagcagcgaatgatctcatg

SEQ ID NO: 2844029 - DNA, 25 bp, Homo sapien
ctttctcatcatgaagtcgtttaag

SEQ ID NO: 2844030 - DNA, 25 bp, Homo sapien
gaggccaagccttcagcaccaaatg

SEQ ID NO: 2844031 - DNA, 25 bp, Homo sapien
aataaggaggccaagccttcagcac

SEQ ID NO: 2844032 - DNA, 25 bp, Homo sapien
catgaagtcgtttaagaatgtccaa

SEQ ID NO: 2844033 - DNA, 25 bp, Homo sapien
ctgacctcaactcctgaatatacat

SEQ ID NO: 2844034 - DNA, 25 bp, Homo sapien
gcagaggcatatcccgcaagcctga

SEQ ID NO: 2844035 - DNA, 25 bp, Homo sapien
tatacatcatggcagacttagagct

SEQ ID NO: 2844036 - DNA, 25 bp, Homo sapien
tgagagacacacgaagggactccag

SEQ ID NO: 2844037 - DNA, 25 bp, Homo sapien
ccttctccctcaaaggttgctgttt

SEQ ID NO: 2844038 - DNA, 25 bp, Homo sapien
tgtacaagtattgggacaccatctc

SEQ ID NO: 2844039 - DNA, 25 bp, Homo sapien
cttggaggtgtacaagtattgggac

SEQ ID NO: 2844040 - DNA, 25 bp, Homo sapien
aagtattgggacaccatctccctct

SEQ ID NO: 2844041 - DNA, 25 bp, Homo sapien
gttcaaagagaaccagcacttgttc

SEQ ID NO: 2844042 - DNA, 25 bp, Homo sapien
atgactgtgctgtgggatcatcccc

SEQ ID NO: 2844043 - DNA, 25 bp, Homo sapien
ctgaaacatcttgcaatgactgtgc

SEQ ID NO: 2844044 - DNA, 25 bp, Homo sapien
caaagagaaccagcacttgttcatc

SEQ ID NO: 2844045 - DNA, 25 bp, Homo sapien
tcatctgccatgagccgcttcagag

SEQ ID NO: 2844046 - DNA, 25 bp, Homo sapien
ctcatctgccatgagccgcttcaga

SEQ ID NO: 2844047 - DNA, 25 bp, Homo sapien
catctgccatgagccgcttcagagt

SEQ ID NO: 2844048 - DNA, 25 bp, Homo sapien
acagaaaatataaaggccaacatcc

SEQ ID NO: 2844049 - DNA, 25 bp, Homo sapien
aactagaaggtagatgtgctttgtc

SEQ ID NO: 2844050 - DNA, 25 bp, Homo sapien
tgaatccttggataaaacagaaaat

SEQ ID NO: 2844051 - DNA, 25 bp, Homo sapien
tgctggcaagcaactagaaggtaga

SEQ ID NO: 2844052 - DNA, 25 bp, Homo sapien
tgatgcaaggaaagagcctacaagg

SEQ ID NO: 2844053 - DNA, 25 bp, Homo sapien
gcaaattttgaagactgggactaga

SEQ ID NO: 2844054 - DNA, 25 bp, Homo sapien
ctaggctggctgtggtaaatatctc

SEQ ID NO: 2844055 - DNA, 25 bp, Homo sapien
caaacccttactgtcctaggctggc

SEQ ID NO: 2844056 - DNA, 25 bp, Homo sapien
cctcaaccatgccattgggaaacta

SEQ ID NO: 2844057 - DNA, 25 bp, Homo sapien
tgccagggtccctatactaaaaaga

SEQ ID NO: 2844058 - DNA, 25 bp, Homo sapien
gtttaagaagcagttagatccctag

SEQ ID NO: 2844059 - DNA, 25 bp, Homo sapien
caccagatacctatggaaatgggag

SEQ ID NO: 2844060 - DNA, 25 bp, Homo sapien
tgaaagccagcatgcatagtctgtc

SEQ ID NO: 2844061 - DNA, 25 bp, Homo sapien
ggtgaaagccagcatgcatagtctg

SEQ ID NO: 2844062 - DNA, 25 bp, Homo sapien
gaaggtgaaagccagcatgcatagt

SEQ ID NO: 2844063 - DNA, 25 bp, Homo sapien
gaaagccagcatgcatagtctgtca

SEQ ID NO: 2844064 - DNA, 25 bp, Homo sapien
gtcaccaaagaaggagggggtgtca

SEQ ID NO: 2844065 - DNA, 25 bp, Homo sapien
aaatttcttagatttgccgccgtcg

SEQ ID NO: 2844066 - DNA, 25 bp, Homo sapien
atctgggctccggcccttcttcttg

SEQ ID NO: 2844067 - DNA, 25 bp, Homo sapien
tttcttagatttgccgccgtcgccg

SEQ ID NO: 2844068 - DNA, 25 bp, Homo sapien
tctgggctccggcccttcttcttgt

SEQ ID NO: 2844069 - DNA, 25 bp, Homo sapien
ggttcacgctggccggcgaccccgc

SEQ ID NO: 2844070 - DNA, 25 bp, Homo sapien
cggttcacgctggccggcgaccccg

SEQ ID NO: 2844071 - DNA, 25 bp, Homo sapien
gcgccccgcctcattagcatgccgg

SEQ ID NO: 2844072 - DNA, 25 bp, Homo sapien
gaatatacaacgacgacgcctcgct

SEQ ID NO: 2844073 - DNA, 25 bp, Homo sapien
agtcgctctttagccagccgccgcg

SEQ ID NO: 2844074 - DNA, 25 bp, Homo sapien
gctgcgcgcgcctcatgaatataca

SEQ ID NO: 2844075 - DNA, 25 bp, Homo sapien
tagagccccagtacctagtcaaggg

SEQ ID NO: 2844076 - DNA, 25 bp, Homo sapien
tcggtccagggcaagcactagacta

SEQ ID NO: 2844077 - DNA, 25 bp, Homo sapien
tgacagttacgtggctaccagtcgg

SEQ ID NO: 2844078 - DNA, 25 bp, Homo sapien
caatgtgtgcaatacccatggaaca

SEQ ID NO: 2844079 - DNA, 25 bp, Homo sapien
gataatgggcaacttcttctgtcag

SEQ ID NO: 2844080 - DNA, 25 bp, Homo sapien
ttcttcacatagacagataatgggc

SEQ ID NO: 2844081 - DNA, 25 bp, Homo sapien
gaggaagtgacccatctatcagtcc

SEQ ID NO: 2844082 - DNA, 25 bp, Homo sapien
cctaacgtaggataagtgctgaatg

SEQ ID NO: 2844083 - DNA, 25 bp, Homo sapien
ggtaccattgtcaggccttgggaga

SEQ ID NO: 2844084 - DNA, 25 bp, Homo sapien
aaatctctgggttcgagggaagcag

SEQ ID NO: 2844085 - DNA, 25 bp, Homo sapien
attcaggtgttagggagccagagcc

SEQ ID NO: 2844086 - DNA, 25 bp, Homo sapien
aaagcaggtagatggttcgagaacc

SEQ ID NO: 2844087 - DNA, 25 bp, Homo sapien
ggtctccatcatagaactcattggg

SEQ ID NO: 2844088 - DNA, 25 bp, Homo sapien
catggtctccatcatagaactcatt

SEQ ID NO: 2844089 - DNA, 25 bp, Homo sapien
catcatagaactcattgggtgcctc

SEQ ID NO: 2844090 - DNA, 25 bp, Homo sapien
atagaactcattgggtgcctctggc

SEQ ID NO: 2844091 - DNA, 25 bp, Homo sapien
gttgagaaccactcctcctcttgtt

SEQ ID NO: 2844092 - DNA, 25 bp, Homo sapien
caggatctcactctaagttctaatc

SEQ ID NO: 2844093 - DNA, 25 bp, Homo sapien
tcctcttgttggtagagactgctat

SEQ ID NO: 2844094 - DNA, 25 bp, Homo sapien
ttcacgtatcaaataaacattaagg

SEQ ID NO: 2844095 - DNA, 25 bp, Homo sapien
cctgatctttaactagccatgtgac

SEQ ID NO: 2844096 - DNA, 25 bp, Homo sapien
caggaaaggccttatctgcatggtg

SEQ ID NO: 2844097 - DNA, 25 bp, Homo sapien
tcagagttgtctgatggcaacagaa

SEQ ID NO: 2844098 - DNA, 25 bp, Homo sapien
cagaaagttacttaagtctcgccgg

SEQ ID NO: 2844099 - DNA, 25 bp, Homo sapien
ggattgtgtgaacgccaacaccata

SEQ ID NO: 2844100 - DNA, 25 bp, Homo sapien
tactcctgtggaataggtctgggat

SEQ ID NO: 2844101 - DNA, 25 bp, Homo sapien
tctatagaaaaaggtctatccaaaa

SEQ ID NO: 2844102 - DNA, 25 bp, Homo sapien
tgtagcagactaaaggaggtaagcc

SEQ ID NO: 2844103 - DNA, 25 bp, Homo sapien
gcctattgaaagtaggctgaagtcc

SEQ ID NO: 2844104 - DNA, 25 bp, Homo sapien
tccccagcaagcctattgaaagtag

SEQ ID NO: 2844105 - DNA, 25 bp, Homo sapien
cccagcaagcctattgaaagtaggc

SEQ ID NO: 2844106 - DNA, 25 bp, Homo sapien
ttgaaagtaggctgaagtccctgct

SEQ ID NO: 2844107 - DNA, 25 bp, Homo sapien
ggcacgtcatgaatctggacactag

SEQ ID NO: 2844108 - DNA, 25 bp, Homo sapien
gacactaggtgcatggttcagcatc

SEQ ID NO: 2844109 - DNA, 25 bp, Homo sapien
caaagattgtctggcggatctggtc

SEQ ID NO: 2844110 - DNA, 25 bp, Homo sapien
gtcaggaggtctgcaggcacgtcat

SEQ ID NO: 2844111 - DNA, 25 bp, Homo sapien
tcagtggtacctctagttcaggtcc

SEQ ID NO: 2844112 - DNA, 25 bp, Homo sapien
gaaatgaggaatacagagtgagcag

SEQ ID NO: 2844113 - DNA, 25 bp, Homo sapien
gacatggaatctcctagctgccttt

SEQ ID NO: 2844114 - DNA, 25 bp, Homo sapien
tacccctaccatactggttttcatc

SEQ ID NO: 2844115 - DNA, 25 bp, Homo sapien
tgatggcttagaacttccttctctt

SEQ ID NO: 2844116 - DNA, 25 bp, Homo sapien
actgtgatggcttagaacttccttc

SEQ ID NO: 2844117 - DNA, 25 bp, Homo sapien
tcccacatctttgacctctcctggg

SEQ ID NO: 2844118 - DNA, 25 bp, Homo sapien
cctttcaggagaagtttgtgctcag

SEQ ID NO: 2844119 - DNA, 25 bp, Homo sapien
gtctggggcaaagtactcgaagtat

SEQ ID NO: 2844120 - DNA, 25 bp, Homo sapien
ctgattctcgatgcgggtgctgaca

SEQ ID NO: 2844121 - DNA, 25 bp, Homo sapien
ctggcgtgagttctgattctcgatg

SEQ ID NO: 2844122 - DNA, 25 bp, Homo sapien
gagttctgattctcgatgcgggtgc

SEQ ID NO: 2844123 - DNA, 25 bp, Homo sapien
catgtgccttcaaaccaggtcattc

SEQ ID NO: 2844124 - DNA, 25 bp, Homo sapien
gaatctggtgagaatggccttcctg

SEQ ID NO: 2844125 - DNA, 25 bp, Homo sapien
ccagagcacctacataatagctgcc

SEQ ID NO: 2844126 - DNA, 25 bp, Homo sapien
gctcagactgagaaaggcagctaac

SEQ ID NO: 2844127 - DNA, 25 bp, Homo sapien
tcttctaccagcagcgatgtctcat

SEQ ID NO: 2844128 - DNA, 25 bp, Homo sapien
taccagcagcgatgtctcatatgtc

SEQ ID NO: 2844129 - DNA, 25 bp, Homo sapien
atagggaagctcctcactaatggcc

SEQ ID NO: 2844130 - DNA, 25 bp, Homo sapien
cactatagggaagctcctcactaat

SEQ ID NO: 2844131 - DNA, 25 bp, Homo sapien
gagggacaccctagctcacactgga

SEQ ID NO: 2844132 - DNA, 25 bp, Homo sapien
acccatgtggccatatctgagggac

SEQ ID NO: 2844133 - DNA, 25 bp, Homo sapien
ccatgtggccatatctgagggacac

SEQ ID NO: 2844134 - DNA, 25 bp, Homo sapien
ggacaccctagctcacactggacaa

SEQ ID NO: 2844135 - DNA, 25 bp, Homo sapien
tgaagctcttgacatattcaacgca

SEQ ID NO: 2844136 - DNA, 25 bp, Homo sapien
cagcagcgggcaacatttcggacag

SEQ ID NO: 2844137 - DNA, 25 bp, Homo sapien
caacatttcggacagtataaccacc

SEQ ID NO: 2844138 - DNA, 25 bp, Homo sapien
caccacccagcacgagtagagggat

SEQ ID NO: 2844139 - DNA, 25 bp, Homo sapien
gaggaagatgtggaggaggttatca

SEQ ID NO: 2844140 - DNA, 25 bp, Homo sapien
tttaggtattgcctgaaaggagcac

SEQ ID NO: 2844141 - DNA, 25 bp, Homo sapien
aatctttatcttgatagtgaaattc

SEQ ID NO: 2844142 - DNA, 25 bp, Homo sapien
taagatttgggtatactttatatgc

SEQ ID NO: 2844143 - DNA, 25 bp, Homo sapien
ccgaaaccatgctatctcaagtagg

SEQ ID NO: 2844144 - DNA, 25 bp, Homo sapien
gaatgaatgaccatctagggaaccc

SEQ ID NO: 2844145 - DNA, 25 bp, Homo sapien
aactgtaaactccatgggagactcc

SEQ ID NO: 2844146 - DNA, 25 bp, Homo sapien
tcttagtctccaggtctcaactcaa

SEQ ID NO: 2844147 - DNA, 25 bp, Homo sapien
agcagcccaatcgatcacagcccag

SEQ ID NO: 2844148 - DNA, 25 bp, Homo sapien
tgccctcggatgctgaggttaaagc

SEQ ID NO: 2844149 - DNA, 25 bp, Homo sapien
gttaaagcagcccaatcgatcacag

SEQ ID NO: 2844150 - DNA, 25 bp, Homo sapien
tgctgaggttaaagcagcccaatcg

SEQ ID NO: 2844151 - DNA, 25 bp, Homo sapien
cagaacatcacagataccccttcca

SEQ ID NO: 2844152 - DNA, 25 bp, Homo sapien
tgcagtgatcagaactgatcagaac

SEQ ID NO: 2844153 - DNA, 25 bp, Homo sapien
aagcccaggcagaacactcctgagg

SEQ ID NO: 2844154 - DNA, 25 bp, Homo sapien
gcagaacactcctgaggaggaactg

SEQ ID NO: 2844155 - DNA, 25 bp, Homo sapien
tagaagtccactacctggttgataa

SEQ ID NO: 2844156 - DNA, 25 bp, Homo sapien
taaccggctggaaaaggtgcttgta

SEQ ID NO: 2844157 - DNA, 25 bp, Homo sapien
ttggtagaagtccactacctggttg

SEQ ID NO: 2844158 - DNA, 25 bp, Homo sapien
tacctggttgataaccggctggaaa

SEQ ID NO: 2844159 - DNA, 25 bp, Homo sapien
gaagggatcccagactgctatgagt

SEQ ID NO: 2844160 - DNA, 25 bp, Homo sapien
ttaaggacaactggcccaacagcag

SEQ ID NO: 2844161 - DNA, 25 bp, Homo sapien
ccaacagcagacaataccaggcaga

SEQ ID NO: 2844162 - DNA, 25 bp, Homo sapien
gagtgactgatgaaagccaatgact

SEQ ID NO: 2844163 - DNA, 25 bp, Homo sapien
tctgccccgacttcatacatgtcac

SEQ ID NO: 2844164 - DNA, 25 bp, Homo sapien
cacgttcagacagtagtagcggcca

SEQ ID NO: 2844165 - DNA, 25 bp, Homo sapien
cagacagtagtagcggccactctct

SEQ ID NO: 2844166 - DNA, 25 bp, Homo sapien
actctctgccccgacttcatacatg

SEQ ID NO: 2844167 - DNA, 25 bp, Homo sapien
aagcttcttgaaccccgtcaccatg

SEQ ID NO: 2844168 - DNA, 25 bp, Homo sapien
ccgtatttgtggaaggacaccgtca

SEQ ID NO: 2844169 - DNA, 25 bp, Homo sapien
tgtcaatgtagagcacccgagggtg

SEQ ID NO: 2844170 - DNA, 25 bp, Homo sapien
cccggtcagtgaggtagaaagcttc

SEQ ID NO: 2844171 - DNA, 25 bp, Homo sapien
gcctgaataaagcatcaagaacttg

SEQ ID NO: 2844172 - DNA, 25 bp, Homo sapien
caagaacttgggagaagctaatcag

SEQ ID NO: 2844173 - DNA, 25 bp, Homo sapien
ccagggtctgagctagaagtgaacc

SEQ ID NO: 2844174 - DNA, 25 bp, Homo sapien
caaacaccgggtctcgaattgtgaa

SEQ ID NO: 2844175 - DNA, 25 bp, Homo sapien
caatcacaatgtcgttgacatagca

SEQ ID NO: 2844176 - DNA, 25 bp, Homo sapien
gctccaggatgccaatcacaatgtc

SEQ ID NO: 2844177 - DNA, 25 bp, Homo sapien
gatgccaatcacaatgtcgttgaca

SEQ ID NO: 2844178 - DNA, 25 bp, Homo sapien
tgtcgttgacatagcagaagccaga

SEQ ID NO: 2844179 - DNA, 25 bp, Homo sapien
ccccaccatcatcctaaacacctac

SEQ ID NO: 2844180 - DNA, 25 bp, Homo sapien
caccatcatcctaaacacctaccct

SEQ ID NO: 2844181 - DNA, 25 bp, Homo sapien
cagtggtctcataaagagaagagca

SEQ ID NO: 2844182 - DNA, 25 bp, Homo sapien
ctaccctaggatggccactgtcttt

SEQ ID NO: 2844183 - DNA, 25 bp, Homo sapien
caccagcccagttaatggcaatatc

SEQ ID NO: 2844184 - DNA, 25 bp, Homo sapien
accaccagcccagttaatggcaata

SEQ ID NO: 2844185 - DNA, 25 bp, Homo sapien
gaccaccagcccagttaatggcaat

SEQ ID NO: 2844186 - DNA, 25 bp, Homo sapien
cagaccaccagcccagttaatggca

SEQ ID NO: 2844187 - DNA, 25 bp, Homo sapien
gatcagggttaaatcccgagtccag

SEQ ID NO: 2844188 - DNA, 25 bp, Homo sapien
ctgggagcccaggatcagggttaaa

SEQ ID NO: 2844189 - DNA, 25 bp, Homo sapien
gacaaacacctaagtcacagtcctt

SEQ ID NO: 2844190 - DNA, 25 bp, Homo sapien
taaatcccgagtccagggatccaga

SEQ ID NO: 2844191 - DNA, 25 bp, Homo sapien
tccttgcagagatgcgcctgtgtaa

SEQ ID NO: 2844192 - DNA, 25 bp, Homo sapien
gcgagcagaactcaaagagcccggg

SEQ ID NO: 2844193 - DNA, 25 bp, Homo sapien
cagagatgcgcctgtgtaacgcgag

SEQ ID NO: 2844194 - DNA, 25 bp, Homo sapien
cctgtgtaacgcgagcagaactcaa

SEQ ID NO: 2844195 - DNA, 25 bp, Homo sapien
agaggaacaagttggaaccctcctg

SEQ ID NO: 2844196 - DNA, 25 bp, Homo sapien
aacaagttggaaccctcctgcctct

SEQ ID NO: 2844197 - DNA, 25 bp, Homo sapien
ccatcctagattcctccaatctcca

SEQ ID NO: 2844198 - DNA, 25 bp, Homo sapien
tccctctcctacacacgtgggctat

SEQ ID NO: 2844199 - DNA, 25 bp, Homo sapien
ggcgctggccctataccttgatata

SEQ ID NO: 2844200 - DNA, 25 bp, Homo sapien
tagtgcagctgatacatttgaccat

SEQ ID NO: 2844201 - DNA, 25 bp, Homo sapien
ccgggttcaagcaagaattgtaggg

SEQ ID NO: 2844202 - DNA, 25 bp, Homo sapien
ggcaatccctagttttaggtctcaa

SEQ ID NO: 2844203 - DNA, 25 bp, Homo sapien
gcacgtgccaccacacatgactaat

SEQ ID NO: 2844204 - DNA, 25 bp, Homo sapien
cacgtgccaccacacatgactaatt

SEQ ID NO: 2844205 - DNA, 25 bp, Homo sapien
cccagtgtggcgtaagggctgaccc

SEQ ID NO: 2844206 - DNA, 25 bp, Homo sapien
tgtgcaagacagagctctatgggct

SEQ ID NO: 2844207 - DNA, 25 bp, Homo sapien
taatcgcacaaagagcatctacggg

SEQ ID NO: 2844208 - DNA, 25 bp, Homo sapien
tgatgcagcataaatagcccagaga

SEQ ID NO: 2844209 - DNA, 25 bp, Homo sapien
tttaaaacaatctaacatgagggag

SEQ ID NO: 2844210 - DNA, 25 bp, Homo sapien
gagtatagatgaagtaagagtggcc

SEQ ID NO: 2844211 - DNA, 25 bp, Homo sapien
caacccttggcataatacctagcag

SEQ ID NO: 2844212 - DNA, 25 bp, Homo sapien
tctacaggatcaacaacctggtttc

SEQ ID NO: 2844213 - DNA, 25 bp, Homo sapien
tagagtgtggcttatctttgttgtc

SEQ ID NO: 2844214 - DNA, 25 bp, Homo sapien
tggatgatacaagctcaatgtaaac

SEQ ID NO: 2844215 - DNA, 25 bp, Homo sapien
cccagagggtctaaccctgactctt

SEQ ID NO: 2844216 - DNA, 25 bp, Homo sapien
taatgatatcaaaccactccttcgt

SEQ ID NO: 2844217 - DNA, 25 bp, Homo sapien
actcttggtgaagccttgcatattg

SEQ ID NO: 2844218 - DNA, 25 bp, Homo sapien
ttgcatattggtggggctgactctc

SEQ ID NO: 2844219 - DNA, 25 bp, Homo sapien
aaggcattaagactcttggtgaagc

SEQ ID NO: 2844220 - DNA, 25 bp, Homo sapien
cagtcatcgcctacgttgaaggcat

SEQ ID NO: 2844221 - DNA, 25 bp, Homo sapien
gggaggcctggtatggcttgaagac

SEQ ID NO: 2844222 - DNA, 25 bp, Homo sapien
gttgggaggcctggtatggcttgaa

SEQ ID NO: 2844223 - DNA, 25 bp, Homo sapien
ttgggaggcctggtatggcttgaag

SEQ ID NO: 2844224 - DNA, 25 bp, Homo sapien
tgggaggcctggtatggcttgaaga

SEQ ID NO: 2844225 - DNA, 25 bp, Homo sapien
gagagactccgattaaccaggtaag

SEQ ID NO: 2844226 - DNA, 25 bp, Homo sapien
gttattacaaatgagccccctgaag

SEQ ID NO: 2844227 - DNA, 25 bp, Homo sapien
ctggagactatatgaagccaaacat

SEQ ID NO: 2844228 - DNA, 25 bp, Homo sapien
gaagccaaacatagcattcccctca

SEQ ID NO: 2844229 - DNA, 25 bp, Homo sapien
gattcctgcactaacatcacctcag

SEQ ID NO: 2844230 - DNA, 25 bp, Homo sapien
caggtacatacaggcaaacaatctc

SEQ ID NO: 2844231 - DNA, 25 bp, Homo sapien
gcctatcgtaccttctcaactttga

SEQ ID NO: 2844232 - DNA, 25 bp, Homo sapien
ttccctagcaacacataaagcctgg

SEQ ID NO: 2844233 - DNA, 25 bp, Homo sapien
cacgcctggcgtggcttaactgtta

SEQ ID NO: 2844234 - DNA, 25 bp, Homo sapien
agcgattaagcagaaccatgtagag

SEQ ID NO: 2844235 - DNA, 25 bp, Homo sapien
gttactatcccatatcacagccata

SEQ ID NO: 2844236 - DNA, 25 bp, Homo sapien
gaaaaactggatagcgattaagcag

SEQ ID NO: 2844237 - DNA, 25 bp, Homo sapien
taaaatatcgcctctgttccacacg

SEQ ID NO: 2844238 - DNA, 25 bp, Homo sapien
cacatttacaaagacggcagcatcg

SEQ ID NO: 2844239 - DNA, 25 bp, Homo sapien
gatacagtgatatccgctcccctaa

SEQ ID NO: 2844240 - DNA, 25 bp, Homo sapien
taaccctaattcctgaggccaaggc

SEQ ID NO: 2844241 - DNA, 25 bp, Homo sapien
taaccctaggccaagggctagtgtg

SEQ ID NO: 2844242 - DNA, 25 bp, Homo sapien
tgagaaagtactttccattaagcag

SEQ ID NO: 2844243 - DNA, 25 bp, Homo sapien
tgcctacagtcagagggtggccgac

SEQ ID NO: 2844244 - DNA, 25 bp, Homo sapien
cctgcactttcaaggtactcctggt

SEQ ID NO: 2844245 - DNA, 25 bp, Homo sapien
catcttcttatagagaccgtaatgc

SEQ ID NO: 2844246 - DNA, 25 bp, Homo sapien
gaccgtaatgcaggaccaggctatg

SEQ ID NO: 2844247 - DNA, 25 bp, Homo sapien
ggaccaggctatgggtcaatgccag

SEQ ID NO: 2844248 - DNA, 25 bp, Homo sapien
caatgccaggcgatggggcttcata

SEQ ID NO: 2844249 - DNA, 25 bp, Homo sapien
tcgtagaaataggccacggtcttgg

SEQ ID NO: 2844250 - DNA, 25 bp, Homo sapien
tgcccacgtcggggtcgtagaaata

SEQ ID NO: 2844251 - DNA, 25 bp, Homo sapien
gtcgtagaaataggccacggtcttg

SEQ ID NO: 2844252 - DNA, 25 bp, Homo sapien
cgtagaaataggccacggtcttggc

SEQ ID NO: 2844253 - DNA, 25 bp, Homo sapien
ggtgccggcgggagcaggccccgca

SEQ ID NO: 2844254 - DNA, 25 bp, Homo sapien
gagcaggccccgcacctccgccgcc

SEQ ID NO: 2844255 - DNA, 25 bp, Homo sapien
ccggcgggagcaggccccgcacctc

SEQ ID NO: 2844256 - DNA, 25 bp, Homo sapien
cgggagcaggccccgcacctccgcc

SEQ ID NO: 2844257 - DNA, 25 bp, Homo sapien
cccagccctcggagaagattcctga

SEQ ID NO: 2844258 - DNA, 25 bp, Homo sapien
gcaggccgtggtcacttctctagga

SEQ ID NO: 2844259 - DNA, 25 bp, Homo sapien
tcggagaagattcctgactctccgc

SEQ ID NO: 2844260 - DNA, 25 bp, Homo sapien
ctcaaaggtgcggaaagccggcttc

SEQ ID NO: 2844261 - DNA, 25 bp, Homo sapien
ggaagtagccaccaaactcaggatg

SEQ ID NO: 2844262 - DNA, 25 bp, Homo sapien
gatcaccaggtaggaaaacacagcc

SEQ ID NO: 2844263 - DNA, 25 bp, Homo sapien
gagtctgcctgagccctaaatgagg

SEQ ID NO: 2844264 - DNA, 25 bp, Homo sapien
gagaagcgctatggactgcacgaac

SEQ ID NO: 2844265 - DNA, 25 bp, Homo sapien
catcactgggggtcaaggcttccct

SEQ ID NO: 2844266 - DNA, 25 bp, Homo sapien
taagggcgattccagcttttggctg

SEQ ID NO: 2844267 - DNA, 25 bp, Homo sapien
agcttgaagatagggacagcagcat

SEQ ID NO: 2844268 - DNA, 25 bp, Homo sapien
tggctgtgttgctctggatcattga

SEQ ID NO: 2844269 - DNA, 25 bp, Homo sapien
caggatccggggctttagccggcgg

SEQ ID NO: 2844270 - DNA, 25 bp, Homo sapien
gccaggatccggggctttagccggc

SEQ ID NO: 2844271 - DNA, 25 bp, Homo sapien
ggtggccaggatccggggctttagc

SEQ ID NO: 2844272 - DNA, 25 bp, Homo sapien
tggccaggatccggggctttagccg

SEQ ID NO: 2844273 - DNA, 25 bp, Homo sapien
gtcgaggtgccatcatgtccaggaa

SEQ ID NO: 2844274 - DNA, 25 bp, Homo sapien
gagtcgaggtgccatcatgtccagg

SEQ ID NO: 2844275 - DNA, 25 bp, Homo sapien
gaggtgccatcatgtccaggaaccc

SEQ ID NO: 2844276 - DNA, 25 bp, Homo sapien
tcgaggtgccatcatgtccaggaac

SEQ ID NO: 2844277 - DNA, 25 bp, Homo sapien
ggaaataagaaccacaagtcagtct

SEQ ID NO: 2844278 - DNA, 25 bp, Homo sapien
tcaacatttattgggcaactgctgt

SEQ ID NO: 2844279 - DNA, 25 bp, Homo sapien
gataggatgcatagtgctcccaccc

SEQ ID NO: 2844280 - DNA, 25 bp, Homo sapien
tggaaataacagactcccaggactc

SEQ ID NO: 2844281 - DNA, 25 bp, Homo sapien
tttgagttacaggtacactagaagc

SEQ ID NO: 2844282 - DNA, 25 bp, Homo sapien
tatctggacactaggagcaaaaggt

SEQ ID NO: 2844283 - DNA, 25 bp, Homo sapien
taatgatacaaagctaggtatctgg

SEQ ID NO: 2844284 - DNA, 25 bp, Homo sapien
gacaccgtgagagaagttagctaat

SEQ ID NO: 2844285 - DNA, 25 bp, Homo sapien
taggagcaaaaggtgcatattggga

SEQ ID NO: 2844286 - DNA, 25 bp, Homo sapien
gcccatccaacacagaggtaggtgc

SEQ ID NO: 2844287 - DNA, 25 bp, Homo sapien
ccatccaacacagaggtaggtgcag

SEQ ID NO: 2844288 - DNA, 25 bp, Homo sapien
cagggggcccatccaacacagaggt

SEQ ID NO: 2844289 - DNA, 25 bp, Homo sapien
gggcccatccaacacagaggtaggt

SEQ ID NO: 2844290 - DNA, 25 bp, Homo sapien
tctactccatcttgggcccggggca

SEQ ID NO: 2844291 - DNA, 25 bp, Homo sapien
tccagaagccgtcatctactccatc

SEQ ID NO: 2844292 - DNA, 25 bp, Homo sapien
ggcagcagacggatgagtgccccct

SEQ ID NO: 2844293 - DNA, 25 bp, Homo sapien
tctgtccggtgtagctgtacagggc

SEQ ID NO: 2844294 - DNA, 25 bp, Homo sapien
caaagcctacctcgccgtgctggtt

SEQ ID NO: 2844295 - DNA, 25 bp, Homo sapien
gctctgccccgcagggattgtcact

SEQ ID NO: 2844296 - DNA, 25 bp, Homo sapien
ggtccgggaagttgagatatcgctc

SEQ ID NO: 2844297 - DNA, 25 bp, Homo sapien
gggattgtcactgtcttggctgctc

SEQ ID NO: 2844298 - DNA, 25 bp, Homo sapien
ctctatgacctccagccactcaccc

SEQ ID NO: 2844299 - DNA, 25 bp, Homo sapien
tgatagcgaaataccacgtgtgcag

SEQ ID NO: 2844300 - DNA, 25 bp, Homo sapien
tagcgaaataccacgtgtgcagggc

SEQ ID NO: 2844301 - DNA, 25 bp, Homo sapien
ctgatagcgaaataccacgtgtgca

SEQ ID NO: 2844302 - DNA, 25 bp, Homo sapien
gatagcgaaataccacgtgtgcagg

SEQ ID NO: 2844303 - DNA, 25 bp, Homo sapien
agcgctccacatctaagccagcccc

SEQ ID NO: 2844304 - DNA, 25 bp, Homo sapien
ggttggagagaggtccctctgggac

SEQ ID NO: 2844305 - DNA, 25 bp, Homo sapien
ctctgggacagccgagcctcactga

SEQ ID NO: 2844306 - DNA, 25 bp, Homo sapien
agccagcgctccacatctaagccag

SEQ ID NO: 2844307 - DNA, 25 bp, Homo sapien
tgtgcccggcggatgctctctcgca

SEQ ID NO: 2844308 - DNA, 25 bp, Homo sapien
tcctgtaacctctgttctatgcttg

SEQ ID NO: 2844309 - DNA, 25 bp, Homo sapien
ttcctgtaacctctgttctatgctt

SEQ ID NO: 2844310 - DNA, 25 bp, Homo sapien
cccggcggatgctctctcgcacttc

SEQ ID NO: 2844311 - DNA, 25 bp, Homo sapien
tactatgggactggtactttgctag

SEQ ID NO: 2844312 - DNA, 25 bp, Homo sapien
gacttactatgggactggtactttg

SEQ ID NO: 2844313 - DNA, 25 bp, Homo sapien
gggactggtactttgctagttgcat

SEQ ID NO: 2844314 - DNA, 25 bp, Homo sapien
tactgtggggcatgacttactatgg

SEQ ID NO: 2844315 - DNA, 25 bp, Homo sapien
ctgagacaagaaggtgcacatgaca

SEQ ID NO: 2844316 - DNA, 25 bp, Homo sapien
gctacagaactaggaagcaacagaa

SEQ ID NO: 2844317 - DNA, 25 bp, Homo sapien
gaacctatgtcggtctagctccaaa

SEQ ID NO: 2844318 - DNA, 25 bp, Homo sapien
taatcttccctatgaggtgggtgct

SEQ ID NO: 2844319 - DNA, 25 bp, Homo sapien
tcggctggtcaagcgctgaacctct

SEQ ID NO: 2844320 - DNA, 25 bp, Homo sapien
cgggcagctcggctggtcaagcgct

SEQ ID NO: 2844321 - DNA, 25 bp, Homo sapien
gcagctcggctggtcaagcgctgaa

SEQ ID NO: 2844322 - DNA, 25 bp, Homo sapien
agctcggctggtcaagcgctgaacc

SEQ ID NO: 2844323 - DNA, 25 bp, Homo sapien
gaaaatacaccaggctcctgaagaa

SEQ ID NO: 2844324 - DNA, 25 bp, Homo sapien
aaacagcttcaggtcttgctcccag

SEQ ID NO: 2844325 - DNA, 25 bp, Homo sapien
tgggggaaaatacaccaggctcctg

SEQ ID NO: 2844326 - DNA, 25 bp, Homo sapien
aagaaacagcttcaggtcttgctcc

SEQ ID NO: 2844327 - DNA, 25 bp, Homo sapien
tccaggatgacctctgcggcttcca

SEQ ID NO: 2844328 - DNA, 25 bp, Homo sapien
tgggaggttgtctgctccccgcggt

SEQ ID NO: 2844329 - DNA, 25 bp, Homo sapien
tcagggaggtcagggggtccctcaa

SEQ ID NO: 2844330 - DNA, 25 bp, Homo sapien
tccccgcggtgggcatgctccagga

SEQ ID NO: 2844331 - DNA, 25 bp, Homo sapien
gctgctgggagtactgggctgactg

SEQ ID NO: 2844332 - DNA, 25 bp, Homo sapien
gccaccaagttaagcaggtactcat

SEQ ID NO: 2844333 - DNA, 25 bp, Homo sapien
caggtactcattgcgggctgcttgc

SEQ ID NO: 2844334 - DNA, 25 bp, Homo sapien
cgaggtgggcattggtagccaccaa

SEQ ID NO: 2844335 - DNA, 25 bp, Homo sapien
gatcccatggtcacttcggtttagc

SEQ ID NO: 2844336 - DNA, 25 bp, Homo sapien
gactggtccgagagtggaagatccc

SEQ ID NO: 2844337 - DNA, 25 bp, Homo sapien
tctggagactggtccgagagtggaa

SEQ ID NO: 2844338 - DNA, 25 bp, Homo sapien
agactggtccgagagtggaagatcc

SEQ ID NO: 2844339 - DNA, 25 bp, Homo sapien
gacttcggctcagctcccggacaga

SEQ ID NO: 2844340 - DNA, 25 bp, Homo sapien
gttcccgctgcccatacagcttccg

SEQ ID NO: 2844341 - DNA, 25 bp, Homo sapien
agcacctcagcctgcgccctctgga

SEQ ID NO: 2844342 - DNA, 25 bp, Homo sapien
tacagcttccgacttcggctcagct

SEQ ID NO: 2844343 - DNA, 25 bp, Homo sapien
tgtaccccctgctaggtcacggtat

SEQ ID NO: 2844344 - DNA, 25 bp, Homo sapien
tgctccttggcgctccgccctgtac

SEQ ID NO: 2844345 - DNA, 25 bp, Homo sapien
cggtatcggtcagacgcctggagtc

SEQ ID NO: 2844346 - DNA, 25 bp, Homo sapien
taggtcacggtatcggtcagacgcc

SEQ ID NO: 2844347 - DNA, 25 bp, Homo sapien
tcaccgctccggtgcccttccctct

SEQ ID NO: 2844348 - DNA, 25 bp, Homo sapien
ctcaccgctccggtgcccttccctc

SEQ ID NO: 2844349 - DNA, 25 bp, Homo sapien
tcaggaatgggccagccagtttctg

SEQ ID NO: 2844350 - DNA, 25 bp, Homo sapien
gcccatactcccgttcaatggctgc

SEQ ID NO: 2844351 - DNA, 25 bp, Homo sapien
ctgcccatactcccgttcaatggct

SEQ ID NO: 2844352 - DNA, 25 bp, Homo sapien
tgcccatactcccgttcaatggctg

SEQ ID NO: 2844353 - DNA, 25 bp, Homo sapien
ccatactcccgttcaatggctgccc

SEQ ID NO: 2844354 - DNA, 25 bp, Homo sapien
tccaggaagcgaagcttcacctcct

SEQ ID NO: 2844355 - DNA, 25 bp, Homo sapien
ttccaggaagcgaagcttcacctcc

SEQ ID NO: 2844356 - DNA, 25 bp, Homo sapien
aggatgaagaccccagcgcaaggac

SEQ ID NO: 2844357 - DNA, 25 bp, Homo sapien
tggactccggaactggaggaagccc

SEQ ID NO: 2844358 - DNA, 25 bp, Homo sapien
cactggactccggaactggaggaag

SEQ ID NO: 2844359 - DNA, 25 bp, Homo sapien
ctccgctccagcaaggcggtcagcc

SEQ ID NO: 2844360 - DNA, 25 bp, Homo sapien
agcaaggcggtcagccactggactc

SEQ ID NO: 2844361 - DNA, 25 bp, Homo sapien
ttaactggaaaagccagcgtgagcg

SEQ ID NO: 2844362 - DNA, 25 bp, Homo sapien
tcccgcttaactggaaaagccagcg

SEQ ID NO: 2844363 - DNA, 25 bp, Homo sapien
attcccgcttaactggaaaagccag

SEQ ID NO: 2844364 - DNA, 25 bp, Homo sapien
cgcttaactggaaaagccagcgtga

SEQ ID NO: 2844365 - DNA, 25 bp, Homo sapien
ttgttcatgctatatccccagacct

SEQ ID NO: 2844366 - DNA, 25 bp, Homo sapien
tgttcatgctatatccccagacctg

SEQ ID NO: 2844367 - DNA, 25 bp, Homo sapien
tcatgctatatccccagacctggca

SEQ ID NO: 2844368 - DNA, 25 bp, Homo sapien
gttcatgctatatccccagacctgg

SEQ ID NO: 2844369 - DNA, 25 bp, Homo sapien
acaggatagactttaacatcaccca

SEQ ID NO: 2844370 - DNA, 25 bp, Homo sapien
ggcttcacggtagtcccagaatgta

SEQ ID NO: 2844371 - DNA, 25 bp, Homo sapien
tcccaggtttattgacaattactca

SEQ ID NO: 2844372 - DNA, 25 bp, Homo sapien
tcccagaatgtaggaagtgggacag

SEQ ID NO: 2844373 - DNA, 25 bp, Homo sapien
tggtatagataaatgggctgggccc

SEQ ID NO: 2844374 - DNA, 25 bp, Homo sapien
ggtacctaccctctcagactgctgg

SEQ ID NO: 2844375 - DNA, 25 bp, Homo sapien
caaaatctctcatggaacccctacg

SEQ ID NO: 2844376 - DNA, 25 bp, Homo sapien
caacagtgccacgataagagtttct

SEQ ID NO: 2844377 - DNA, 25 bp, Homo sapien
gccaggtgtctgtgttggaaggcca

SEQ ID NO: 2844378 - DNA, 25 bp, Homo sapien
gctggagggtggactggaagtgcat

SEQ ID NO: 2844379 - DNA, 25 bp, Homo sapien
gtgtctgtgttggaaggccagtggg

SEQ ID NO: 2844380 - DNA, 25 bp, Homo sapien
gggaagccaggtgtctgtgttggaa

SEQ ID NO: 2844381 - DNA, 25 bp, Homo sapien
cctcctggccaagggtgcttgactt

SEQ ID NO: 2844382 - DNA, 25 bp, Homo sapien
caagggtgcttgacttggagagaaa

SEQ ID NO: 2844383 - DNA, 25 bp, Homo sapien
cctggccaagggtgcttgacttgga

SEQ ID NO: 2844384 - DNA, 25 bp, Homo sapien
gccaagggtgcttgacttggagaga

SEQ ID NO: 2844385 - DNA, 25 bp, Homo sapien
ttcactgtccactcccgtgtggtgg

SEQ ID NO: 2844386 - DNA, 25 bp, Homo sapien
tgtccactcccgtgtggtggagaag

SEQ ID NO: 2844387 - DNA, 25 bp, Homo sapien
ggaggtagaagtgtcctggatcaac

SEQ ID NO: 2844388 - DNA, 25 bp, Homo sapien
agtgtcctggatcaactcagggaag

SEQ ID NO: 2844389 - DNA, 25 bp, Homo sapien
tcatacactggctcctcgtacacag

SEQ ID NO: 2844390 - DNA, 25 bp, Homo sapien
atacactggctcctcgtacacaggc

SEQ ID NO: 2844391 - DNA, 25 bp, Homo sapien
cctcatacactggctcctcgtacac

SEQ ID NO: 2844392 - DNA, 25 bp, Homo sapien
tacactggctcctcgtacacaggct

SEQ ID NO: 2844393 - DNA, 25 bp, Homo sapien
accgctggagcaggcacaatactca

SEQ ID NO: 2844394 - DNA, 25 bp, Homo sapien
aatacagggttgacaggcacaccgc

SEQ ID NO: 2844395 - DNA, 25 bp, Homo sapien
ggaatacagggttgacaggcacacc

SEQ ID NO: 2844396 - DNA, 25 bp, Homo sapien
ttgacaggcacaccgctggagcagg

SEQ ID NO: 2844397 - DNA, 25 bp, Homo sapien
atggacagggtcctccggttgtgta

SEQ ID NO: 2844398 - DNA, 25 bp, Homo sapien
aaagaacatggacagggtcctccgg

SEQ ID NO: 2844399 - DNA, 25 bp, Homo sapien
cagggtcctccggttgtgtagtcgc

SEQ ID NO: 2844400 - DNA, 25 bp, Homo sapien
aacatggacagggtcctccggttgt

SEQ ID NO: 2844401 - DNA, 25 bp, Homo sapien
ggcatagtgccaaacttctgacggg

SEQ ID NO: 2844402 - DNA, 25 bp, Homo sapien
actgtcatccccacggataggcagc

SEQ ID NO: 2844403 - DNA, 25 bp, Homo sapien
gaatggcgtcgtaagaccactggct

SEQ ID NO: 2844404 - DNA, 25 bp, Homo sapien
cccacggataggcagcaaaggcata

SEQ ID NO: 2844405 - DNA, 25 bp, Homo sapien
catcagtgggcatgaaaggcactga

SEQ ID NO: 2844406 - DNA, 25 bp, Homo sapien
gcgtgaggggttggcatcagtgggc

SEQ ID NO: 2844407 - DNA, 25 bp, Homo sapien
gcatcagtgggcatgaaaggcactg

SEQ ID NO: 2844408 - DNA, 25 bp, Homo sapien
ctggtgggagcgtgaggggttggca

SEQ ID NO: 2844409 - DNA, 25 bp, Homo sapien
tttaaggatgctggtggtccaatcc

SEQ ID NO: 2844410 - DNA, 25 bp, Homo sapien
ctgggctttaaggatgctggtggtc

SEQ ID NO: 2844411 - DNA, 25 bp, Homo sapien
gctttaaggatgctggtggtccaat

SEQ ID NO: 2844412 - DNA, 25 bp, Homo sapien
gatgctggtggtccaatcccacatt

SEQ ID NO: 2844413 - DNA, 25 bp, Homo sapien
ttctctagtatcaatgtgaagcccc

SEQ ID NO: 2844414 - DNA, 25 bp, Homo sapien
ctctagtatcaatgtgaagccccac

SEQ ID NO: 2844415 - DNA, 25 bp, Homo sapien
tctctagtatcaatgtgaagcccca

SEQ ID NO: 2844416 - DNA, 25 bp, Homo sapien
tcttctctagtatcaatgtgaagcc

SEQ ID NO: 2844417 - DNA, 25 bp, Homo sapien
caggtagaccttggcaccttccaaa

SEQ ID NO: 2844418 - DNA, 25 bp, Homo sapien
gccactcccgttctggtttagagct

SEQ ID NO: 2844419 - DNA, 25 bp, Homo sapien
aggccactcccgttctggtttagag

SEQ ID NO: 2844420 - DNA, 25 bp, Homo sapien
ggctttaacttcttgcggattccca

SEQ ID NO: 2844421 - DNA, 25 bp, Homo sapien
gtcaagacgtcatggaagcaatggg

SEQ ID NO: 2844422 - DNA, 25 bp, Homo sapien
ggagagatgagagatcatggttaat

SEQ ID NO: 2844423 - DNA, 25 bp, Homo sapien
aacagagtcagcgagatggagagat

SEQ ID NO: 2844424 - DNA, 25 bp, Homo sapien
gaagcaatgagattgatgagagtat

SEQ ID NO: 2844425 - DNA, 25 bp, Homo sapien
cacccgtgggctctcacgtcggata

SEQ ID NO: 2844426 - DNA, 25 bp, Homo sapien
caggcagcggccacgcagcagaaag

SEQ ID NO: 2844427 - DNA, 25 bp, Homo sapien
tcctggaagcggcttcccagcaagc

SEQ ID NO: 2844428 - DNA, 25 bp, Homo sapien
gcttcccagcaagcgaggtggctcc

SEQ ID NO: 2844429 - DNA, 25 bp, Homo sapien
ccagggggacttttttcaagagcag

SEQ ID NO: 2844430 - DNA, 25 bp, Homo sapien
gccagggggacttttttcaagagca

SEQ ID NO: 2844431 - DNA, 25 bp, Homo sapien
tttttcaagagcagggaagctgagc

SEQ ID NO: 2844432 - DNA, 25 bp, Homo sapien
acttttttcaagagcagggaagctg

SEQ ID NO: 2844433 - DNA, 25 bp, Homo sapien
agcctgctctaagaccttttccttg

SEQ ID NO: 2844434 - DNA, 25 bp, Homo sapien
aagcctgctctaagaccttttcctt

SEQ ID NO: 2844435 - DNA, 25 bp, Homo sapien
gcctgctctaagaccttttccttgg

SEQ ID NO: 2844436 - DNA, 25 bp, Homo sapien
cagtacctggttagtcagctcctca

SEQ ID NO: 2844437 - DNA, 25 bp, Homo sapien
ccccatgctcgcgaatctcaaaagt

SEQ ID NO: 2844438 - DNA, 25 bp, Homo sapien
tcgcgaatctcaaaagtcacccaca

SEQ ID NO: 2844439 - DNA, 25 bp, Homo sapien
ctccagtacctggttagtcagctcc

SEQ ID NO: 2844440 - DNA, 25 bp, Homo sapien
gctgctctatataaacttccatgat

SEQ ID NO: 2844441 - DNA, 25 bp, Homo sapien
tgctctatataaacttccatgatga

SEQ ID NO: 2844442 - DNA, 25 bp, Homo sapien
ggagctgctgctctatataaacttc

SEQ ID NO: 2844443 - DNA, 25 bp, Homo sapien
gctctatataaacttccatgatgag

SEQ ID NO: 2844444 - DNA, 25 bp, Homo sapien
ggtgataagactgacctccaagtca

SEQ ID NO: 2844445 - DNA, 25 bp, Homo sapien
caggtggtgataagactgacctcca

SEQ ID NO: 2844446 - DNA, 25 bp, Homo sapien
ttccaggtggtgataagactgacct

SEQ ID NO: 2844447 - DNA, 25 bp, Homo sapien
gataagactgacctccaagtcaatc

SEQ ID NO: 2844448 - DNA, 25 bp, Homo sapien
tctggaacacgctgggtgcaaacag

SEQ ID NO: 2844449 - DNA, 25 bp, Homo sapien
tcaatgagctcttgcagcactcgca

SEQ ID NO: 2844450 - DNA, 25 bp, Homo sapien
gcacatctggtttagagccgcacat

SEQ ID NO: 2844451 - DNA, 25 bp, Homo sapien
agcagagccaagttccgcgtgcaca

SEQ ID NO: 2844452 - DNA, 25 bp, Homo sapien
cagctagaatgacggcaccagatta

SEQ ID NO: 2844453 - DNA, 25 bp, Homo sapien
gataccttcacttaacaactgtttg

SEQ ID NO: 2844454 - DNA, 25 bp, Homo sapien
taaagcctaggtctgcctgatccct

SEQ ID NO: 2844455 - DNA, 25 bp, Homo sapien
aagggttctgcagagggtctagcca

SEQ ID NO: 2844456 - DNA, 25 bp, Homo sapien
agtgtgcggcggttgacccgcggca

SEQ ID NO: 2844457 - DNA, 25 bp, Homo sapien
tagagatgcccaatgagggtggcca

SEQ ID NO: 2844458 - DNA, 25 bp, Homo sapien
ttctccaggcgctgattcttctggg

SEQ ID NO: 2844459 - DNA, 25 bp, Homo sapien
gcagccaatcacatctttatatttc

SEQ ID NO: 2844460 - DNA, 25 bp, Homo sapien
cacaaatgcaggatggatgtgtctc

SEQ ID NO: 2844461 - DNA, 25 bp, Homo sapien
gatttttaggcacaaatgcaggatg

SEQ ID NO: 2844462 - DNA, 25 bp, Homo sapien
tacagagggagggatttttaggcac

SEQ ID NO: 2844463 - DNA, 25 bp, Homo sapien
aagaaagagtggcagctggtacaga

SEQ ID NO: 2844464 - DNA, 25 bp, Homo sapien
ccctgagccaagtctctggatgatc

SEQ ID NO: 2844465 - DNA, 25 bp, Homo sapien
agggctgccaaaccatggattctgg

SEQ ID NO: 2844466 - DNA, 25 bp, Homo sapien
ctgccaaaccatggattctggtggg

SEQ ID NO: 2844467 - DNA, 25 bp, Homo sapien
cagagatcctggttgggccttggct

SEQ ID NO: 2844468 - DNA, 25 bp, Homo sapien
gcagaggtcacagggtcatcgagct

SEQ ID NO: 2844469 - DNA, 25 bp, Homo sapien
ccagcgaggcagcaaccgtgcagag

SEQ ID NO: 2844470 - DNA, 25 bp, Homo sapien
cctccagcgaggcagcaaccgtgca

SEQ ID NO: 2844471 - DNA, 25 bp, Homo sapien
agaggtcacagggtcatcgagctca

SEQ ID NO: 2844472 - DNA, 25 bp, Homo sapien
gagcttcaccgaccgggcatcccga

SEQ ID NO: 2844473 - DNA, 25 bp, Homo sapien
tccggtatacaccttccagccggag

SEQ ID NO: 2844474 - DNA, 25 bp, Homo sapien
atcccgacggaactcagccaggagt

SEQ ID NO: 2844475 - DNA, 25 bp, Homo sapien
tccacaaagtgctcccctggtcgga

SEQ ID NO: 2844476 - DNA, 25 bp, Homo sapien
tgaggagagccagccgtctctgctc

SEQ ID NO: 2844477 - DNA, 25 bp, Homo sapien
aggagagccagccgtctctgctcac

SEQ ID NO: 2844478 - DNA, 25 bp, Homo sapien
ctgaggagagccagccgtctctgct

SEQ ID NO: 2844479 - DNA, 25 bp, Homo sapien
agagccagccgtctctgctcaccat

SEQ ID NO: 2844480 - DNA, 25 bp, Homo sapien
gttattgtaaccagaggctagcagg

SEQ ID NO: 2844481 - DNA, 25 bp, Homo sapien
gtatgctgactaaacaatggtggtg

SEQ ID NO: 2844482 - DNA, 25 bp, Homo sapien
gtgtctgacacacggtagcagctca

SEQ ID NO: 2844483 - DNA, 25 bp, Homo sapien
aataagcttcctaggaccctcctag

SEQ ID NO: 2844484 - DNA, 25 bp, Homo sapien
tttcctccttcgaacacgagagagg

SEQ ID NO: 2844485 - DNA, 25 bp, Homo sapien
tatttcctccttcgaacacgagaga

SEQ ID NO: 2844486 - DNA, 25 bp, Homo sapien
atttcctccttcgaacacgagagag

SEQ ID NO: 2844487 - DNA, 25 bp, Homo sapien
tggctcagtaccagccagtgcctac

SEQ ID NO: 2844488 - DNA, 25 bp, Homo sapien
ggctcagtaccagccagtgcctact

SEQ ID NO: 2844489 - DNA, 25 bp, Homo sapien
tcagtaccagccagtgcctactcac

SEQ ID NO: 2844490 - DNA, 25 bp, Homo sapien
ctcagtaccagccagtgcctactca

SEQ ID NO: 2844491 - DNA, 25 bp, Homo sapien
catgctgggtaacaaaactgatgca

SEQ ID NO: 2844492 - DNA, 25 bp, Homo sapien
gatgatggggatgtcaccccggctc

SEQ ID NO: 2844493 - DNA, 25 bp, Homo sapien
caatggctgcgttccatgccgtgaa

SEQ ID NO: 2844494 - DNA, 25 bp, Homo sapien
actgatgcaggcatccacgatgatg

SEQ ID NO: 2844495 - DNA, 25 bp, Homo sapien
cagatgcatggggaccagacttccc

SEQ ID NO: 2844496 - DNA, 25 bp, Homo sapien
ggcagcaacacccaacccaaatcat

SEQ ID NO: 2844497 - DNA, 25 bp, Homo sapien
gagccagctccgacaggcccagatg

SEQ ID NO: 2844498 - DNA, 25 bp, Homo sapien
ctgaatcagagccagctccgacagg

SEQ ID NO: 2844499 - DNA, 25 bp, Homo sapien
gaccaaatgctctttcttatctggg

SEQ ID NO: 2844500 - DNA, 25 bp, Homo sapien
tgtctccaccaggaccaaatgctct

SEQ ID NO: 2844501 - DNA, 25 bp, Homo sapien
caccaggaccaaatgctctttctta

SEQ ID NO: 2844502 - DNA, 25 bp, Homo sapien
tcttatctggggtgtcagctgcaga

SEQ ID NO: 2844503 - DNA, 25 bp, Homo sapien
gtagccgccgcagatgcaccatgtc

SEQ ID NO: 2844504 - DNA, 25 bp, Homo sapien
tggtcaccacgaaggaggccaaacc

SEQ ID NO: 2844505 - DNA, 25 bp, Homo sapien
acaggaagaggtggtcaccacgaag

SEQ ID NO: 2844506 - DNA, 25 bp, Homo sapien
tgatctcctgtagccgccgcagatg

SEQ ID NO: 2844507 - DNA, 25 bp, Homo sapien
cgcagccataggcggcccagccgca

SEQ ID NO: 2844508 - DNA, 25 bp, Homo sapien
gcagccataggcggcccagccgcag

SEQ ID NO: 2844509 - DNA, 25 bp, Homo sapien
tggtggcagctcagcggggagaacc

SEQ ID NO: 2844510 - DNA, 25 bp, Homo sapien
ggtggcagctcagcggggagaacca

SEQ ID NO: 2844511 - DNA, 25 bp, Homo sapien
ctggtggcagctcagcggggagaac

SEQ ID NO: 2844512 - DNA, 25 bp, Homo sapien
agaaatgagagtgaccggggtagcg

SEQ ID NO: 2844513 - DNA, 25 bp, Homo sapien
tgtaggctcaaacctccgaggctca

SEQ ID NO: 2844514 - DNA, 25 bp, Homo sapien
ctgtaggctcaaacctccgaggctc

SEQ ID NO: 2844515 - DNA, 25 bp, Homo sapien
aggtagcagttcaggagggcatggg

SEQ ID NO: 2844516 - DNA, 25 bp, Homo sapien
gtagcagttcaggagggcatgggca

SEQ ID NO: 2844517 - DNA, 25 bp, Homo sapien
ctgccaggtagcagttcaggagggc

SEQ ID NO: 2844518 - DNA, 25 bp, Homo sapien
ccaggtagcagttcaggagggcatg

SEQ ID NO: 2844519 - DNA, 25 bp, Homo sapien
cttgcccacagcactagtccaggcc

SEQ ID NO: 2844520 - DNA, 25 bp, Homo sapien
tgtgccaaaatgctggatcctcccc

SEQ ID NO: 2844521 - DNA, 25 bp, Homo sapien
tggatcctccccccagcgaggatga

SEQ ID NO: 2844522 - DNA, 25 bp, Homo sapien
gtccaggcctccagactgtcagctc

SEQ ID NO: 2844523 - DNA, 25 bp, Homo sapien
ggctgttttccgatgcaaacatttc

SEQ ID NO: 2844524 - DNA, 25 bp, Homo sapien
gggttcagggctgttttccgatgca

SEQ ID NO: 2844525 - DNA, 25 bp, Homo sapien
cagcacacaccaaaggcgcggggga

SEQ ID NO: 2844526 - DNA, 25 bp, Homo sapien
gggctcacacccagacatacaatat

SEQ ID NO: 2844527 - DNA, 25 bp, Homo sapien
atccactttctgtccctgtatcctc

SEQ ID NO: 2844528 - DNA, 25 bp, Homo sapien
actttctgtccctgtatcctcccat

SEQ ID NO: 2844529 - DNA, 25 bp, Homo sapien
ccatccactttctgtccctgtatcc

SEQ ID NO: 2844530 - DNA, 25 bp, Homo sapien
ctgtccctgtatcctcccatccctt

SEQ ID NO: 2844531 - DNA, 25 bp, Homo sapien
aagccgctgtaagtagcacgcacca

SEQ ID NO: 2844532 - DNA, 25 bp, Homo sapien
tgcagtacaggaagccgctgtaagt

SEQ ID NO: 2844533 - DNA, 25 bp, Homo sapien
caccacctcattgtacacaccaggg

SEQ ID NO: 2844534 - DNA, 25 bp, Homo sapien
ccagctttgttgctgacgggactgc

SEQ ID NO: 2844535 - DNA, 25 bp, Homo sapien
gccatcaggggctggggggaaccag

SEQ ID NO: 2844536 - DNA, 25 bp, Homo sapien
aggccagggcagctgccatcagggg

SEQ ID NO: 2844537 - DNA, 25 bp, Homo sapien
ctgagggcaagaggccagggcagct

SEQ ID NO: 2844538 - DNA, 25 bp, Homo sapien
gctggggggaaccagggctcctcgc

SEQ ID NO: 2844539 - DNA, 25 bp, Homo sapien
ttcaaaggcctcaacacagaggagc

SEQ ID NO: 2844540 - DNA, 25 bp, Homo sapien
cttcaaaggcctcaacacagaggag

SEQ ID NO: 2844541 - DNA, 25 bp, Homo sapien
cagacggtactttcgggagatgaac

SEQ ID NO: 2844542 - DNA, 25 bp, Homo sapien
gagaagctggctatgatctgggtac

SEQ ID NO: 2844543 - DNA, 25 bp, Homo sapien
caggggtcgcatctggatgtagtcc

SEQ ID NO: 2844544 - DNA, 25 bp, Homo sapien
tggggcttccggaagagacccagac

SEQ ID NO: 2844545 - DNA, 25 bp, Homo sapien
tgcccagaagcggttggcacgatca

SEQ ID NO: 2844546 - DNA, 25 bp, Homo sapien
gaagcggttggcacgatcatttccc

SEQ ID NO: 2844547 - DNA, 25 bp, Homo sapien
gttggcacgatcatttcccaggaca

SEQ ID NO: 2844548 - DNA, 25 bp, Homo sapien
cggttggcacgatcatttcccagga

SEQ ID NO: 2844549 - DNA, 25 bp, Homo sapien
ctgtactatctcattactccagaca

SEQ ID NO: 2844550 - DNA, 25 bp, Homo sapien
cagacactcgtgtccagcttcaggc

SEQ ID NO: 2844551 - DNA, 25 bp, Homo sapien
tcattactccagacactcgtgtcca

SEQ ID NO: 2844552 - DNA, 25 bp, Homo sapien
tccagacactcgtgtccagcttcag

SEQ ID NO: 2844553 - DNA, 25 bp, Homo sapien
agatcccagaacccagggcccggtg

SEQ ID NO: 2844554 - DNA, 25 bp, Homo sapien
ttggagatcccagaacccagggccc

SEQ ID NO: 2844555 - DNA, 25 bp, Homo sapien
tggagatcccagaacccagggcccg

SEQ ID NO: 2844556 - DNA, 25 bp, Homo sapien
cttggagatcccagaacccagggcc

SEQ ID NO: 2844557 - DNA, 25 bp, Homo sapien
ctgcacactgcttgcagatgaccac

SEQ ID NO: 2844558 - DNA, 25 bp, Homo sapien
gcacactgccggttggcccgattag

SEQ ID NO: 2844559 - DNA, 25 bp, Homo sapien
gggtctcggttactgcttcctgcag

SEQ ID NO: 2844560 - DNA, 25 bp, Homo sapien
atctgggcgggaggacccacagtcc

SEQ ID NO: 2844561 - DNA, 25 bp, Homo sapien
gcccgattagaccagatcttctcag

SEQ ID NO: 2844562 - DNA, 25 bp, Homo sapien
ttgcctcccactggcccaggcccca

SEQ ID NO: 2844563 - DNA, 25 bp, Homo sapien
tgcctcccactggcccaggccccac

SEQ ID NO: 2844564 - DNA, 25 bp, Homo sapien
cttgcctcccactggcccaggcccc

SEQ ID NO: 2844565 - DNA, 25 bp, Homo sapien
ccttgcctcccactggcccaggccc

SEQ ID NO: 2844566 - DNA, 25 bp, Homo sapien
tgtgagcaggtcaaagcttcgactc

SEQ ID NO: 2844567 - DNA, 25 bp, Homo sapien
gaagcagatcccgatgcccagagag

SEQ ID NO: 2844568 - DNA, 25 bp, Homo sapien
tgcagccctgcagttcgatgaagca

SEQ ID NO: 2844569 - DNA, 25 bp, Homo sapien
gcttcgactcttggtctcccggacg

SEQ ID NO: 2844570 - DNA, 25 bp, Homo sapien
tcactcttgtacagtgccagctctc

SEQ ID NO: 2844571 - DNA, 25 bp, Homo sapien
tgcagcgtggagcaccacatgtccc

SEQ ID NO: 2844572 - DNA, 25 bp, Homo sapien
ttggccttgtgtccacgcagctcca

SEQ ID NO: 2844573 - DNA, 25 bp, Homo sapien
gtggagcaccacatgtcccgctgag

SEQ ID NO: 2844574 - DNA, 25 bp, Homo sapien
acacgaacaccctctggccggtgat

SEQ ID NO: 2844575 - DNA, 25 bp, Homo sapien
accctctggccggtgatgacctgga

SEQ ID NO: 2844576 - DNA, 25 bp, Homo sapien
cctcgctctctgtgcggaacacgaa

SEQ ID NO: 2844577 - DNA, 25 bp, Homo sapien
tgctgctgcgggtcatctcaatggc

SEQ ID NO: 2844578 - DNA, 25 bp, Homo sapien
tcccattgaactgcacaaagcgtct

SEQ ID NO: 2844579 - DNA, 25 bp, Homo sapien
tcactgccaaagtacatcagactcc

SEQ ID NO: 2844580 - DNA, 25 bp, Homo sapien
actcctcccattgaactgcacaaag

SEQ ID NO: 2844581 - DNA, 25 bp, Homo sapien
aaagtacatcagactcctcccattg

SEQ ID NO: 2844582 - DNA, 25 bp, Homo sapien
tgggcgataagagggtggagtctcc

SEQ ID NO: 2844583 - DNA, 25 bp, Homo sapien
gtgaaatgaggtcatcactggtctc

SEQ ID NO: 2844584 - DNA, 25 bp, Homo sapien
ggcggtctgccgtgaaggagaagct

SEQ ID NO: 2844585 - DNA, 25 bp, Homo sapien
gtctccaggtagctcaaggctggca

SEQ ID NO: 2844586 - DNA, 25 bp, Homo sapien
gtaatcagataagaacccccacaga

SEQ ID NO: 2844587 - DNA, 25 bp, Homo sapien
agtgccatgtttacccaatttcacg

SEQ ID NO: 2844588 - DNA, 25 bp, Homo sapien
taaacactcgtgtctaaagccagac

SEQ ID NO: 2844589 - DNA, 25 bp, Homo sapien
cagcctatgatacagctaatgttga

SEQ ID NO: 2844590 - DNA, 25 bp, Homo sapien
ggacaccatagtacaggcaaccagg

SEQ ID NO: 2844591 - DNA, 25 bp, Homo sapien
caggcaaccaggatccatgatgtgc

SEQ ID NO: 2844592 - DNA, 25 bp, Homo sapien
ccacaggttggacaccatagtacag

SEQ ID NO: 2844593 - DNA, 25 bp, Homo sapien
tagtacaggcaaccaggatccatga

SEQ ID NO: 2844594 - DNA, 25 bp, Homo sapien
ggggcagagatttgggagctgtctg

SEQ ID NO: 2844595 - DNA, 25 bp, Homo sapien
gggcagagatttgggagctgtctgg

SEQ ID NO: 2844596 - DNA, 25 bp, Homo sapien
gggtgggggcagagatttgggagct

SEQ ID NO: 2844597 - DNA, 25 bp, Homo sapien
tgggggcagagatttgggagctgtc

SEQ ID NO: 2844598 - DNA, 25 bp, Homo sapien
cgtcggaacgtgtctgcatactgct

SEQ ID NO: 2844599 - DNA, 25 bp, Homo sapien
tagaatgcgtttccggtgccctgtg

SEQ ID NO: 2844600 - DNA, 25 bp, Homo sapien
cctcttgagtccaggccgaagtaga

SEQ ID NO: 2844601 - DNA, 25 bp, Homo sapien
ctgagtccaccaaacacggtcctgg

SEQ ID NO: 2844602 - DNA, 25 bp, Homo sapien
atgctgaaaggcctgcgatctggaa

SEQ ID NO: 2844603 - DNA, 25 bp, Homo sapien
cagcaatggctctctacttagggaa

SEQ ID NO: 2844604 - DNA, 25 bp, Homo sapien
tgccccaggttcacagtaagtcagt

SEQ ID NO: 2844605 - DNA, 25 bp, Homo sapien
catccaactgagtaagcatgggaca

SEQ ID NO: 2844606 - DNA, 25 bp, Homo sapien
cttgtgcaagcgcaggcctccaaag

SEQ ID NO: 2844607 - DNA, 25 bp, Homo sapien
cttcttgcccaaccgccgcgcttat

SEQ ID NO: 2844608 - DNA, 25 bp, Homo sapien
gctcgtccgaggttctgggtcccgc

SEQ ID NO: 2844609 - DNA, 25 bp, Homo sapien
gggccccggccactccttgtgcaag

SEQ ID NO: 2844610 - DNA, 25 bp, Homo sapien
caagctggcgtgactttggtgcaag

SEQ ID NO: 2844611 - DNA, 25 bp, Homo sapien
tcagacagccgactgttgggagtct

SEQ ID NO: 2844612 - DNA, 25 bp, Homo sapien
gctccagcggccgaatggacaggcc

SEQ ID NO: 2844613 - DNA, 25 bp, Homo sapien
aggaaagggcgcgttcccacatatg

SEQ ID NO: 2844614 - DNA, 25 bp, Homo sapien
ctgaaggctcggttctgtgtcagtg

SEQ ID NO: 2844615 - DNA, 25 bp, Homo sapien
ctgaagcccaaggtgactcgagagc

SEQ ID NO: 2844616 - DNA, 25 bp, Homo sapien
atgctgaatcggctctgaagcccaa

SEQ ID NO: 2844617 - DNA, 25 bp, Homo sapien
gcagggatgctgaatcggctctgaa

SEQ ID NO: 2844618 - DNA, 25 bp, Homo sapien
tccagcccgctgtcggtcgctgtaa

SEQ ID NO: 2844619 - DNA, 25 bp, Homo sapien
ccgtcatttgatttgggatgggatg

SEQ ID NO: 2844620 - DNA, 25 bp, Homo sapien
tgcgacatccaacatccgtcatttg

SEQ ID NO: 2844621 - DNA, 25 bp, Homo sapien
taatatccctatcattcctgcgaca

SEQ ID NO: 2844622 - DNA, 25 bp, Homo sapien
ctgcgtggaaggacccctcgtgtca

SEQ ID NO: 2844623 - DNA, 25 bp, Homo sapien
tctctgtgcgcttcagacccgtggg

SEQ ID NO: 2844624 - DNA, 25 bp, Homo sapien
agaggactgccagcttcgccggtca

SEQ ID NO: 2844625 - DNA, 25 bp, Homo sapien
ttgcgaacagatgcgagaactctct

SEQ ID NO: 2844626 - DNA, 25 bp, Homo sapien
gggagcgcggtacagacaaacacag

SEQ ID NO: 2844627 - DNA, 25 bp, Homo sapien
caggctgcttttctcgcccgaaaga

SEQ ID NO: 2844628 - DNA, 25 bp, Homo sapien
ccggctgttcgcctggaggacgcag

SEQ ID NO: 2844629 - DNA, 25 bp, Homo sapien
tgttcgcctggaggacgcagggctt

SEQ ID NO: 2844630 - DNA, 25 bp, Homo sapien
caggttctgcggtttcgacaacttc

SEQ ID NO: 2844631 - DNA, 25 bp, Homo sapien
atgtcacaggctcttaaagtctcca

SEQ ID NO: 2844632 - DNA, 25 bp, Homo sapien
atttttagcccgcaccaggaggaga

SEQ ID NO: 2844633 - DNA, 25 bp, Homo sapien
gcgtctcctgcagttatacacgtca

SEQ ID NO: 2844634 - DNA, 25 bp, Homo sapien
tgggagaaagaatgtgtttcctggt

SEQ ID NO: 2844635 - DNA, 25 bp, Homo sapien
cttaaggtgctgagagctttccaaa

SEQ ID NO: 2844636 - DNA, 25 bp, Homo sapien
gagagctttccaaacacagaatagc

SEQ ID NO: 2844637 - DNA, 25 bp, Homo sapien
gagctttccaaacacagaatagctc

SEQ ID NO: 2844638 - DNA, 25 bp, Homo sapien
ctgagagctttccaaacacagaata

SEQ ID NO: 2844639 - DNA, 25 bp, Homo sapien
ggagaacctgcaacacttttgctcc

SEQ ID NO: 2844640 - DNA, 25 bp, Homo sapien
ggggagaacctgcaacacttttgct

SEQ ID NO: 2844641 - DNA, 25 bp, Homo sapien
agaacctgcaacacttttgctcctc

SEQ ID NO: 2844642 - DNA, 25 bp, Homo sapien
ctgcaacacttttgctcctcccaga

SEQ ID NO: 2844643 - DNA, 25 bp, Homo sapien
cagaggatgttacagcctgggtccc

SEQ ID NO: 2844644 - DNA, 25 bp, Homo sapien
tctcactccgtaatggtttcttggc

SEQ ID NO: 2844645 - DNA, 25 bp, Homo sapien
caaatgctaggagttgggcagttcc

SEQ ID NO: 2844646 - DNA, 25 bp, Homo sapien
tccagaaacgtgctgcttccttgga

SEQ ID NO: 2844647 - DNA, 25 bp, Homo sapien
agctgcaatgtggtgaggatgtgtt

SEQ ID NO: 2844648 - DNA, 25 bp, Homo sapien
tgcagccctcgcagggcagctgcaa

SEQ ID NO: 2844649 - DNA, 25 bp, Homo sapien
gcagccctcgcagggcagctgcaat

SEQ ID NO: 2844650 - DNA, 25 bp, Homo sapien
caatgtggtgaggatgtgtttctcc

SEQ ID NO: 2844651 - DNA, 25 bp, Homo sapien
gggcagcctcttcgtgaagtgccac

SEQ ID NO: 2844652 - DNA, 25 bp, Homo sapien
gaagtgccacagatttcctagaaat

SEQ ID NO: 2844653 - DNA, 25 bp, Homo sapien
tcgtgaagtgccacagatttcctag

SEQ ID NO: 2844654 - DNA, 25 bp, Homo sapien
gcctcttcgtgaagtgccacagatt

SEQ ID NO: 2844655 - DNA, 25 bp, Homo sapien
taaaggttattgtatgattgcagat

SEQ ID NO: 2844656 - DNA, 25 bp, Homo sapien
ttaattgacacagatgaaaccctca

SEQ ID NO: 2844657 - DNA, 25 bp, Homo sapien
aggaattaattgacacagatgaaac

SEQ ID NO: 2844658 - DNA, 25 bp, Homo sapien
tattgtatgattgcagattccacca

SEQ ID NO: 2844659 - DNA, 25 bp, Homo sapien
atttccccggcaaatgaaaatcact

SEQ ID NO: 2844660 - DNA, 25 bp, Homo sapien
tcactttaggattgagattgcatat

SEQ ID NO: 2844661 - DNA, 25 bp, Homo sapien
tcttcaaatttccccggcaaatgaa

SEQ ID NO: 2844662 - DNA, 25 bp, Homo sapien
tcccatgttgtctgaacagccagta

SEQ ID NO: 2844663 - DNA, 25 bp, Homo sapien
cttgcaggagggctgtctcccatgt

SEQ ID NO: 2844664 - DNA, 25 bp, Homo sapien
tgcaggagggctgtctcccatgttg

SEQ ID NO: 2844665 - DNA, 25 bp, Homo sapien
gaacagccagtagctacagatgtcc

SEQ ID NO: 2844666 - DNA, 25 bp, Homo sapien
agtgggacagcctgggtatgtccac

SEQ ID NO: 2844667 - DNA, 25 bp, Homo sapien
tatgtccacgctgggcctcatcccg

SEQ ID NO: 2844668 - DNA, 25 bp, Homo sapien
ggacagcctgggtatgtccacgctg

SEQ ID NO: 2844669 - DNA, 25 bp, Homo sapien
gaggagtgggacagcctgggtatgt

SEQ ID NO: 2844670 - DNA, 25 bp, Homo sapien
tgtcagtctagtattgtggtgagga

SEQ ID NO: 2844671 - DNA, 25 bp, Homo sapien
tatggtggctggatcaagctgttct

SEQ ID NO: 2844672 - DNA, 25 bp, Homo sapien
tttctccattctggaggttcaggaa

SEQ ID NO: 2844673 - DNA, 25 bp, Homo sapien
tcaaggggctccagatagaccgtgg

SEQ ID NO: 2844674 - DNA, 25 bp, Homo sapien
cactccgagaagtagccctgggtct

SEQ ID NO: 2844675 - DNA, 25 bp, Homo sapien
actccgagaagtagccctgggtctg

SEQ ID NO: 2844676 - DNA, 25 bp, Homo sapien
tcactccgagaagtagccctgggtc

SEQ ID NO: 2844677 - DNA, 25 bp, Homo sapien
cgtgtgcacacattcccgagagcat

SEQ ID NO: 2844678 - DNA, 25 bp, Homo sapien
tcaaatctaaagcctgaattcctcc

SEQ ID NO: 2844679 - DNA, 25 bp, Homo sapien
ggcccggcaggtgggcgtgtgcaca

SEQ ID NO: 2844680 - DNA, 25 bp, Homo sapien
gtgggatgttggctgtcactaggga

SEQ ID NO: 2844681 - DNA, 25 bp, Homo sapien
tccctattttgaagacgagaaacca

SEQ ID NO: 2844682 - DNA, 25 bp, Homo sapien
ttcatacaaccctatagggtaggta

SEQ ID NO: 2844683 - DNA, 25 bp, Homo sapien
aaaatatttagcctagtgccttgca

SEQ ID NO: 2844684 - DNA, 25 bp, Homo sapien
tagcctatgttacccatatatcagg

SEQ ID NO: 2844685 - DNA, 25 bp, Homo sapien
attttatggctgctcaggtggcagg

SEQ ID NO: 2844686 - DNA, 25 bp, Homo sapien
cattttatggctgctcaggtggcag

SEQ ID NO: 2844687 - DNA, 25 bp, Homo sapien
gggagtcccttctggcagccagttg

SEQ ID NO: 2844688 - DNA, 25 bp, Homo sapien
gagtaggagcctgcatgcagaaagc

SEQ ID NO: 2844689 - DNA, 25 bp, Homo sapien
gagcgcctcattggccagacatctg

SEQ ID NO: 2844690 - DNA, 25 bp, Homo sapien
catccccagggaatggaagtcagac

SEQ ID NO: 2844691 - DNA, 25 bp, Homo sapien
gaagcaatgggatttgacccctgca

SEQ ID NO: 2844692 - DNA, 25 bp, Homo sapien
aatgggatttgacccctgcacacac

SEQ ID NO: 2844693 - DNA, 25 bp, Homo sapien
tagaagcaatgggatttgacccctg

SEQ ID NO: 2844694 - DNA, 25 bp, Homo sapien
agcaatgggatttgacccctgcaca

SEQ ID NO: 2844695 - DNA, 25 bp, Homo sapien
ctttcctcctaaatatggtggtggg

SEQ ID NO: 2844696 - DNA, 25 bp, Homo sapien
cctcctaaatatggtggtgggtaat

SEQ ID NO: 2844697 - DNA, 25 bp, Homo sapien
taaatatggtggtgggtaatggcca

SEQ ID NO: 2844698 - DNA, 25 bp, Homo sapien
cctaaatatggtggtgggtaatggc

SEQ ID NO: 2844699 - DNA, 25 bp, Homo sapien
cgttcccctccgtagtcacttggag

SEQ ID NO: 2844700 - DNA, 25 bp, Homo sapien
tctctaaggggcactaaaacttcac

SEQ ID NO: 2844701 - DNA, 25 bp, Homo sapien
tctaaggggcactaaaacttcacta

SEQ ID NO: 2844702 - DNA, 25 bp, Homo sapien
ccctccgtagtcacttggagaagag

SEQ ID NO: 2844703 - DNA, 25 bp, Homo sapien
gggccgacgggctacaattgttcat

SEQ ID NO: 2844704 - DNA, 25 bp, Homo sapien
cctctctgatgggtagcgttgccta

SEQ ID NO: 2844705 - DNA, 25 bp, Homo sapien
taagcatagctctgaactgggcagc

SEQ ID NO: 2844706 - DNA, 25 bp, Homo sapien
tgctaggtacagaggtgagatcccc

SEQ ID NO: 2844707 - DNA, 25 bp, Homo sapien
ggcctgatggatctccaagcaaggg

SEQ ID NO: 2844708 - DNA, 25 bp, Homo sapien
cagcaaggcttgggcctgatggatc

SEQ ID NO: 2844709 - DNA, 25 bp, Homo sapien
aaggcttgggcctgatggatctcca

SEQ ID NO: 2844710 - DNA, 25 bp, Homo sapien
cttgggcctgatggatctccaagca

SEQ ID NO: 2844711 - DNA, 25 bp, Homo sapien
caaacacagggctctgcagtaggtc

SEQ ID NO: 2844712 - DNA, 25 bp, Homo sapien
gaggaagacctagtttggtctccca

SEQ ID NO: 2844713 - DNA, 25 bp, Homo sapien
taggttctttgaatggaaccctggc

SEQ ID NO: 2844714 - DNA, 25 bp, Homo sapien
taaacatcttgacctctattagcag

SEQ ID NO: 2844715 - DNA, 25 bp, Homo sapien
ccagtttggtccatcaaccaacatg

SEQ ID NO: 2844716 - DNA, 25 bp, Homo sapien
gccagtttggtccatcaaccaacat

SEQ ID NO: 2844717 - DNA, 25 bp, Homo sapien
tgcatccctccaccaacccgggagg

SEQ ID NO: 2844718 - DNA, 25 bp, Homo sapien
tccaccaacccgggaggctgttgcc

SEQ ID NO: 2844719 - DNA, 25 bp, Homo sapien
tgggctgcagccgttctgttgaata

SEQ ID NO: 2844720 - DNA, 25 bp, Homo sapien
ctgcagccgttctgttgaataggag

SEQ ID NO: 2844721 - DNA, 25 bp, Homo sapien
agatgtgggctgcagccgttctgtt

SEQ ID NO: 2844722 - DNA, 25 bp, Homo sapien
atgtgggctgcagccgttctgttga

SEQ ID NO: 2844723 - DNA, 25 bp, Homo sapien
agacatgactgtctgcggcccgtac

SEQ ID NO: 2844724 - DNA, 25 bp, Homo sapien
gctgcttattgcagagtcctccagg

SEQ ID NO: 2844725 - DNA, 25 bp, Homo sapien
tggaaagtggagctgaaaacaaggc

SEQ ID NO: 2844726 - DNA, 25 bp, Homo sapien
tctgggtagatctccatcagccggg

SEQ ID NO: 2844727 - DNA, 25 bp, Homo sapien
taatgtagtaaatggccctattaaa

SEQ ID NO: 2844728 - DNA, 25 bp, Homo sapien
ttcgctttgatgtagcgtttctgca

SEQ ID NO: 2844729 - DNA, 25 bp, Homo sapien
gagaaaattcgctttgatgtagcgt

SEQ ID NO: 2844730 - DNA, 25 bp, Homo sapien
aatacagctgagaaaattcgctttg

SEQ ID NO: 2844731 - DNA, 25 bp, Homo sapien
gacttgtatatagccctgtgagcag

SEQ ID NO: 2844732 - DNA, 25 bp, Homo sapien
ccccatcactgtacaagggcagagg

SEQ ID NO: 2844733 - DNA, 25 bp, Homo sapien
gaggacccctccctgtgaaagtgag

SEQ ID NO: 2844734 - DNA, 25 bp, Homo sapien
tcagtctctgttcagcacgccaagg

SEQ ID NO: 2844735 - DNA, 25 bp, Homo sapien
ccagtggctagcatagggtctgaca

SEQ ID NO: 2844736 - DNA, 25 bp, Homo sapien
tctaagctctatgaggcagggttca

SEQ ID NO: 2844737 - DNA, 25 bp, Homo sapien
tgagagaactacaagggcctccttg

SEQ ID NO: 2844738 - DNA, 25 bp, Homo sapien
tttgctcatcgttgtactccagtgg

SEQ ID NO: 2844739 - DNA, 25 bp, Homo sapien
aaagcgccttaagctccttggagga

SEQ ID NO: 2844740 - DNA, 25 bp, Homo sapien
aaggtggtatatgagtgtaataaca

SEQ ID NO: 2844741 - DNA, 25 bp, Homo sapien
cagggttgctgaaagattattagat

SEQ ID NO: 2844742 - DNA, 25 bp, Homo sapien
taacaatcctatctgtcagagccat

SEQ ID NO: 2844743 - DNA, 25 bp, Homo sapien
ttgaaacgcaggattaataagaaga

SEQ ID NO: 2844744 - DNA, 25 bp, Homo sapien
ggcttttatctcttccggctgtgca

SEQ ID NO: 2844745 - DNA, 25 bp, Homo sapien
gggatgagccggcttttatctcttc

SEQ ID NO: 2844746 - DNA, 25 bp, Homo sapien
aggattaataagaagaggccggtgt

SEQ ID NO: 2844747 - DNA, 25 bp, Homo sapien
ttggtgtgatttattctttatcata

SEQ ID NO: 2844748 - DNA, 25 bp, Homo sapien
ggtgtgatttattctttatcatata

SEQ ID NO: 2844749 - DNA, 25 bp, Homo sapien
tatttggtgtgatttattctttatc

SEQ ID NO: 2844750 - DNA, 25 bp, Homo sapien
tttatttggtgtgatttattcttta

SEQ ID NO: 2844751 - DNA, 25 bp, Homo sapien
cctgtacatcctgtgccggatgatg

SEQ ID NO: 2844752 - DNA, 25 bp, Homo sapien
gacttgagcttaagggaagaatcag

SEQ ID NO: 2844753 - DNA, 25 bp, Homo sapien
aacactcatggacagccaaccagca

SEQ ID NO: 2844754 - DNA, 25 bp, Homo sapien
tggagactctggtccgggaagccat

SEQ ID NO: 2844755 - DNA, 25 bp, Homo sapien
tcatgatagtgaacgcgataaggct

SEQ ID NO: 2844756 - DNA, 25 bp, Homo sapien
gatctgcattggtctataggtacac

SEQ ID NO: 2844757 - DNA, 25 bp, Homo sapien
gcatgagttggacagagtacccact

SEQ ID NO: 2844758 - DNA, 25 bp, Homo sapien
gcaggcactctttggctgttcgaaa

SEQ ID NO: 2844759 - DNA, 25 bp, Homo sapien
gatggaggtcattaccccaacactg

SEQ ID NO: 2844760 - DNA, 25 bp, Homo sapien
tgggtgcccagtaaaggacagctcc

SEQ ID NO: 2844761 - DNA, 25 bp, Homo sapien
gcaggtaaggaacgcaaagcaccca

SEQ ID NO: 2844762 - DNA, 25 bp, Homo sapien
cagagatagtgcctacctaacgagg

SEQ ID NO: 2844763 - DNA, 25 bp, Homo sapien
gttacgtgcccaccctgggatcctg

SEQ ID NO: 2844764 - DNA, 25 bp, Homo sapien
gaagacacagattgaccaggtcaag

SEQ ID NO: 2844765 - DNA, 25 bp, Homo sapien
accgtgtcctggagatggaagacac

SEQ ID NO: 2844766 - DNA, 25 bp, Homo sapien
gattaacttttaatgagtcaccgtg

SEQ ID NO: 2844767 - DNA, 25 bp, Homo sapien
caaattgtgcaagcagcaggccgct

SEQ ID NO: 2844768 - DNA, 25 bp, Homo sapien
tattaatatcagacacgtggcaggg

SEQ ID NO: 2844769 - DNA, 25 bp, Homo sapien
caggccgctgtaattagaccaagga

SEQ ID NO: 2844770 - DNA, 25 bp, Homo sapien
gagattctaaactacccaagggcag

SEQ ID NO: 2844771 - DNA, 25 bp, Homo sapien
tctgaggaggtactcctgggagcct

SEQ ID NO: 2844772 - DNA, 25 bp, Homo sapien
ggacacatgggcataagtgacccct

SEQ ID NO: 2844773 - DNA, 25 bp, Homo sapien
caaggatctgaagttcccaagctct

SEQ ID NO: 2844774 - DNA, 25 bp, Homo sapien
gacaggactagtggcctcagcagct

SEQ ID NO: 2844775 - DNA, 25 bp, Homo sapien
ctggagtacactggccaaccttcag

SEQ ID NO: 2844776 - DNA, 25 bp, Homo sapien
gcctgccacttagtaggtgttagac

SEQ ID NO: 2844777 - DNA, 25 bp, Homo sapien
gagagagagagtaggcatcatgcct

SEQ ID NO: 2844778 - DNA, 25 bp, Homo sapien
caccataatgctagcacctgagaca

SEQ ID NO: 2844779 - DNA, 25 bp, Homo sapien
gctcagcaaacaaaccggaaacgaa

SEQ ID NO: 2844780 - DNA, 25 bp, Homo sapien
attacacgggtctttcattgacagc

SEQ ID NO: 2844781 - DNA, 25 bp, Homo sapien
tgacagctcagcaaacaaaccggaa

SEQ ID NO: 2844782 - DNA, 25 bp, Homo sapien
ggtgcctgcgcatgctcgcggcggg

SEQ ID NO: 2844783 - DNA, 25 bp, Homo sapien
gcaagggccataccctgagtctcca

SEQ ID NO: 2844784 - DNA, 25 bp, Homo sapien
tccccaagcttagactaagtcaagc

SEQ ID NO: 2844785 - DNA, 25 bp, Homo sapien
gtacaagagtcaagaccccagcagc

SEQ ID NO: 2844786 - DNA, 25 bp, Homo sapien
tgtacccaccgctcgcaatcttgga

SEQ ID NO: 2844787 - DNA, 25 bp, Homo sapien
gagttagaagtacgctgcccaccct

SEQ ID NO: 2844788 - DNA, 25 bp, Homo sapien
cctgcttcagggctaaaattgggca

SEQ ID NO: 2844789 - DNA, 25 bp, Homo sapien
tcggccatgagggaaacaatgagtt

SEQ ID NO: 2844790 - DNA, 25 bp, Homo sapien
tacaacatggaacaatagaggcctg

SEQ ID NO: 2844791 - DNA, 25 bp, Homo sapien
ggtgggaagtccgaggtctgggtca

SEQ ID NO: 2844792 - DNA, 25 bp, Homo sapien
tcacaggtagatctcgcgcttggcc

SEQ ID NO: 2844793 - DNA, 25 bp, Homo sapien
cgtctgggcagatgccggtgtggct

SEQ ID NO: 2844794 - DNA, 25 bp, Homo sapien
caggaatcatggctactgtgggaga

SEQ ID NO: 2844795 - DNA, 25 bp, Homo sapien
gctcctgccctcctcggtcctggta

SEQ ID NO: 2844796 - DNA, 25 bp, Homo sapien
caggaggcgcacgggggccgttttg

SEQ ID NO: 2844797 - DNA, 25 bp, Homo sapien
gccggcgcccgcaggctcctgccct

SEQ ID NO: 2844798 - DNA, 25 bp, Homo sapien
tgccctcctcggtcctggtaaggca

SEQ ID NO: 2844799 - DNA, 25 bp, Homo sapien
gcatgtgtcagagtggccaaactca

SEQ ID NO: 2844800 - DNA, 25 bp, Homo sapien
tgtcatggcgacatcaggcaaaggg

SEQ ID NO: 2844801 - DNA, 25 bp, Homo sapien
cactcccgggtacatgtgcctgtca

SEQ ID NO: 2844802 - DNA, 25 bp, Homo sapien
agtttgagggcgctgctcttggtcc

SEQ ID NO: 2844803 - DNA, 25 bp, Homo sapien
gatgacttgctggacggcgtctcag

SEQ ID NO: 2844804 - DNA, 25 bp, Homo sapien
ggtggtgcgctcatagtgatcctca

SEQ ID NO: 2844805 - DNA, 25 bp, Homo sapien
catctctcctatgctgccatcaggg

SEQ ID NO: 2844806 - DNA, 25 bp, Homo sapien
caggccactgtcatagtaactgtgc

SEQ ID NO: 2844807 - DNA, 25 bp, Homo sapien
ctggtggccgagaaggtgacgcggc

SEQ ID NO: 2844808 - DNA, 25 bp, Homo sapien
tggccgagaaggtgacgcggcggtg

SEQ ID NO: 2844809 - DNA, 25 bp, Homo sapien
tggctggtggccgagaaggtgacgc

SEQ ID NO: 2844810 - DNA, 25 bp, Homo sapien
ccgagaaggtgacgcggcggtgagg

SEQ ID NO: 2844811 - DNA, 25 bp, Homo sapien
taagcgaccgttcttggaatccttg

SEQ ID NO: 2844812 - DNA, 25 bp, Homo sapien
ggaatccttgtattgatctaaaaca

SEQ ID NO: 2844813 - DNA, 25 bp, Homo sapien
atcttcaggaataagcgaccgttct

SEQ ID NO: 2844814 - DNA, 25 bp, Homo sapien
caggaataagcgaccgttcttggaa

SEQ ID NO: 2844815 - DNA, 25 bp, Homo sapien
gcacctaggtctggtctgacataga

SEQ ID NO: 2844816 - DNA, 25 bp, Homo sapien
gaggttaatgcacaatacacacaga

SEQ ID NO: 2844817 - DNA, 25 bp, Homo sapien
ggcacaatgggaaggtgccctcccc

SEQ ID NO: 2844818 - DNA, 25 bp, Homo sapien
aacacgggcaggcacagtaaacctg

SEQ ID NO: 2844819 - DNA, 25 bp, Homo sapien
ggtccagatggctccgtggtagggg

SEQ ID NO: 2844820 - DNA, 25 bp, Homo sapien
gtccagatggctccgtggtaggggt

SEQ ID NO: 2844821 - DNA, 25 bp, Homo sapien
agatggctccgtggtaggggtgggg

SEQ ID NO: 2844822 - DNA, 25 bp, Homo sapien
ccagatggctccgtggtaggggtgg

SEQ ID NO: 2844823 - DNA, 25 bp, Homo sapien
caatgtcaatatccagcggcgtgtc

SEQ ID NO: 2844824 - DNA, 25 bp, Homo sapien
tggtgacaccaacgtaagctgagcg

SEQ ID NO: 2844825 - DNA, 25 bp, Homo sapien
tagtcggagtactgctcagagcccg

SEQ ID NO: 2844826 - DNA, 25 bp, Homo sapien
gagtccataagggttgccacctgca

SEQ ID NO: 2844827 - DNA, 25 bp, Homo sapien
caccgggccctgaacagtgataagt

SEQ ID NO: 2844828 - DNA, 25 bp, Homo sapien
cagtgttcctgtccagtcgaagaag

SEQ ID NO: 2844829 - DNA, 25 bp, Homo sapien
gcgcctggtggaatgtgtattcgat

SEQ ID NO: 2844830 - DNA, 25 bp, Homo sapien
agaagacgcctcacaacttcgggcg

SEQ ID NO: 2844831 - DNA, 25 bp, Homo sapien
caggttgcccatcacaatgagctgt

SEQ ID NO: 2844832 - DNA, 25 bp, Homo sapien
cctgcaccttgatggtgaggtcata

SEQ ID NO: 2844833 - DNA, 25 bp, Homo sapien
tcattggtgtcaagcacggtgacac

SEQ ID NO: 2844834 - DNA, 25 bp, Homo sapien
ttctcagatagttcggcctcatagg

SEQ ID NO: 2844835 - DNA, 25 bp, Homo sapien
cagcccaaatagctcctgggcctca

SEQ ID NO: 2844836 - DNA, 25 bp, Homo sapien
aatagctcctgggcctcaggcccag

SEQ ID NO: 2844837 - DNA, 25 bp, Homo sapien
atagctcctgggcctcaggcccagc

SEQ ID NO: 2844838 - DNA, 25 bp, Homo sapien
ctgcagcccaaatagctcctgggcc

SEQ ID NO: 2844839 - DNA, 25 bp, Homo sapien
tctggaaaaccatagtcggctgcga

SEQ ID NO: 2844840 - DNA, 25 bp, Homo sapien
ctgtcttgccatccacgcgaaggta

SEQ ID NO: 2844841 - DNA, 25 bp, Homo sapien
tgcagctcataggatgccacaccgt

SEQ ID NO: 2844842 - DNA, 25 bp, Homo sapien
gaggtctcggtggtgaaaatgtcac

SEQ ID NO: 2844843 - DNA, 25 bp, Homo sapien
tacccgagtggcgtggcctggggat

SEQ ID NO: 2844844 - DNA, 25 bp, Homo sapien
ctacccgagtggcgtggcctgggga

SEQ ID NO: 2844845 - DNA, 25 bp, Homo sapien
acccgagtggcgtggcctggggatg

SEQ ID NO: 2844846 - DNA, 25 bp, Homo sapien
cccgagtggcgtggcctggggatgg

SEQ ID NO: 2844847 - DNA, 25 bp, Homo sapien
ggagggcagcagtagccgttgcccc

SEQ ID NO: 2844848 - DNA, 25 bp, Homo sapien
ctgggctgtgcctcaggtgctccat

SEQ ID NO: 2844849 - DNA, 25 bp, Homo sapien
agcagtagccgttgccccccagggc

SEQ ID NO: 2844850 - DNA, 25 bp, Homo sapien
agggcagcagtagccgttgcccccc

SEQ ID NO: 2844851 - DNA, 25 bp, Homo sapien
ctgggaggccccagaatcaggaggg

SEQ ID NO: 2844852 - DNA, 25 bp, Homo sapien
cctgggaggccccagaatcaggagg

SEQ ID NO: 2844853 - DNA, 25 bp, Homo sapien
ggggaagaggcaaaacagaggccat

SEQ ID NO: 2844854 - DNA, 25 bp, Homo sapien
caaggggaagaggcaaaacagaggc

SEQ ID NO: 2844855 - DNA, 25 bp, Homo sapien
ctgcaaggggaagaggcaaaacaga

SEQ ID NO: 2844856 - DNA, 25 bp, Homo sapien
tgcaaggggaagaggcaaaacagag

SEQ ID NO: 2844857 - DNA, 25 bp, Homo sapien
tcccaaccctctcaaatgggtagta

SEQ ID NO: 2844858 - DNA, 25 bp, Homo sapien
gaagtagtatgtggaagaaccagga

SEQ ID NO: 2844859 - DNA, 25 bp, Homo sapien
atatctgaggctagaatctgattcc

SEQ ID NO: 2844860 - DNA, 25 bp, Homo sapien
tacactccttcccatactacagatg

SEQ ID NO: 2844861 - DNA, 25 bp, Homo sapien
aaatggggttgcgtggggtggagct

SEQ ID NO: 2844862 - DNA, 25 bp, Homo sapien
tggagctgaacagaagcctcccaca

SEQ ID NO: 2844863 - DNA, 25 bp, Homo sapien
ggtggagctgaacagaagcctccca

SEQ ID NO: 2844864 - DNA, 25 bp, Homo sapien
ggggtggagctgaacagaagcctcc

SEQ ID NO: 2844865 - DNA, 25 bp, Homo sapien
cctatgaaggcaatgatggtatgtc

SEQ ID NO: 2844866 - DNA, 25 bp, Homo sapien
tccttggttcgatgaataaacaagc

SEQ ID NO: 2844867 - DNA, 25 bp, Homo sapien
gaacctgtttccatactgtgaaatg

SEQ ID NO: 2844868 - DNA, 25 bp, Homo sapien
caatcccctcgctggttggtaagtc

SEQ ID NO: 2844869 - DNA, 25 bp, Homo sapien
ggtgctagaagcctcgcggcgtctt

SEQ ID NO: 2844870 - DNA, 25 bp, Homo sapien
gcgcggagcgactcctcccagagga

SEQ ID NO: 2844871 - DNA, 25 bp, Homo sapien
agtccgcaccgccttggtcagcggg

SEQ ID NO: 2844872 - DNA, 25 bp, Homo sapien
gtcttcctgcacgaagcgacccaag

SEQ ID NO: 2844873 - DNA, 25 bp, Homo sapien
atgcctgccgcgatctccgttctgg

SEQ ID NO: 2844874 - DNA, 25 bp, Homo sapien
tcgcctacaaattctgctcctatgc

SEQ ID NO: 2844875 - DNA, 25 bp, Homo sapien
gcgatctccgttctggctccagggc

SEQ ID NO: 2844876 - DNA, 25 bp, Homo sapien
ggtgcgagaccacctcgcctacaaa

SEQ ID NO: 2844877 - DNA, 25 bp, Homo sapien
ccgcctccgggcagcgccggccgcc

SEQ ID NO: 2844878 - DNA, 25 bp, Homo sapien
agcgccggccgcccgccccgctgtc

SEQ ID NO: 2844879 - DNA, 25 bp, Homo sapien
cgcctccgggcagcgccggccgccc

SEQ ID NO: 2844880 - DNA, 25 bp, Homo sapien
gccggccgcccgccccgctgtccat

SEQ ID NO: 2844881 - DNA, 25 bp, Homo sapien
ggctggagctgcagttcgggctccg

SEQ ID NO: 2844882 - DNA, 25 bp, Homo sapien
tgggcgcagcagcccggcggctttg

SEQ ID NO: 2844883 - DNA, 25 bp, Homo sapien
tgggctgcggctccgcacggctggg

SEQ ID NO: 2844884 - DNA, 25 bp, Homo sapien
ggcgcagcagcccggcggctttgcg

SEQ ID NO: 2844885 - DNA, 25 bp, Homo sapien
agatgaatctcttctccggggccca

SEQ ID NO: 2844886 - DNA, 25 bp, Homo sapien
gaccagagtctccttgatctggagg

SEQ ID NO: 2844887 - DNA, 25 bp, Homo sapien
tctaagaaagggaccatggaattcc

SEQ ID NO: 2844888 - DNA, 25 bp, Homo sapien
tggcatgcggctctcaaaggcccca

SEQ ID NO: 2844889 - DNA, 25 bp, Homo sapien
gctattgtaagtctatccaccacta

SEQ ID NO: 2844890 - DNA, 25 bp, Homo sapien
cgggtgacgggacggcgtgcagggt

SEQ ID NO: 2844891 - DNA, 25 bp, Homo sapien
acgggacggcgtgcagggtgcagag

SEQ ID NO: 2844892 - DNA, 25 bp, Homo sapien
gcgcggcgggtgacgggacggcgtg

SEQ ID NO: 2844893 - DNA, 25 bp, Homo sapien
gcagagcagggcccgcacgctccgc

SEQ ID NO: 2844894 - DNA, 25 bp, Homo sapien
cccatgtagtacatgcagagaaggg

SEQ ID NO: 2844895 - DNA, 25 bp, Homo sapien
tcccatgtagtacatgcagagaagg

SEQ ID NO: 2844896 - DNA, 25 bp, Homo sapien
agtcccatgtagtacatgcagagaa

SEQ ID NO: 2844897 - DNA, 25 bp, Homo sapien
gactggatgtgagatacataggggg

SEQ ID NO: 2844898 - DNA, 25 bp, Homo sapien
ctcacagctgctcttaagttagatt

SEQ ID NO: 2844899 - DNA, 25 bp, Homo sapien
cagctgctcttaagttagattcttc

SEQ ID NO: 2844900 - DNA, 25 bp, Homo sapien
ctctaggtgtactcacagctgctct

SEQ ID NO: 2844901 - DNA, 25 bp, Homo sapien
tgctcttaagttagattcttcttca

SEQ ID NO: 2844902 - DNA, 25 bp, Homo sapien
taccgctatgccaggtgcctactac

SEQ ID NO: 2844903 - DNA, 25 bp, Homo sapien
gctatgccaggtgcctactacgaga

SEQ ID NO: 2844904 - DNA, 25 bp, Homo sapien
tatgccaggtgcctactacgagacc

SEQ ID NO: 2844905 - DNA, 25 bp, Homo sapien
gccaggtgcctactacgagacccag

SEQ ID NO: 2844906 - DNA, 25 bp, Homo sapien
tgttaccagcagtcagccgctctgg

SEQ ID NO: 2844907 - DNA, 25 bp, Homo sapien
ccttggtgtgcagaggaatctggga

SEQ ID NO: 2844908 - DNA, 25 bp, Homo sapien
agtcagccgctctgggaaatgaggc

SEQ ID NO: 2844909 - DNA, 25 bp, Homo sapien
aggccttgagatgttaccagcagtc

SEQ ID NO: 2844910 - DNA, 25 bp, Homo sapien
gcccagcgacctgacagttacagga

SEQ ID NO: 2844911 - DNA, 25 bp, Homo sapien
gcagcttgaacaccctgctagcagg

SEQ ID NO: 2844912 - DNA, 25 bp, Homo sapien
gataaaacatagtccctggtgcctc

SEQ ID NO: 2844913 - DNA, 25 bp, Homo sapien
tgcagaagtgggcatctcggagcca

SEQ ID NO: 2844914 - DNA, 25 bp, Homo sapien
tcccaagcaatttcacgtacatggc

SEQ ID NO: 2844915 - DNA, 25 bp, Homo sapien
tgactgatctttccccccgcttggt

SEQ ID NO: 2844916 - DNA, 25 bp, Homo sapien
tggtaagtgactgatctttcccccc

SEQ ID NO: 2844917 - DNA, 25 bp, Homo sapien
caatttcacgtacatggctggtaag

SEQ ID NO: 2844918 - DNA, 25 bp, Homo sapien
caagggcatttcaccacagagagga

SEQ ID NO: 2844919 - DNA, 25 bp, Homo sapien
gagagtatagattttgaggtcccca

SEQ ID NO: 2844920 - DNA, 25 bp, Homo sapien
gaattaggccatcctcgagactagc

SEQ ID NO: 2844921 - DNA, 25 bp, Homo sapien
gaaagtgtgtgaagacccaggtctg

SEQ ID NO: 2844922 - DNA, 25 bp, Homo sapien
ttgaatagcatagatgtggttgaga

SEQ ID NO: 2844923 - DNA, 25 bp, Homo sapien
gaatttgtgaatagctattccctgg

SEQ ID NO: 2844924 - DNA, 25 bp, Homo sapien
ggatgttagcccaagttgaatagca

SEQ ID NO: 2844925 - DNA, 25 bp, Homo sapien
ctaatgagtccagttactgaatttg

SEQ ID NO: 2844926 - DNA, 25 bp, Homo sapien
catacacccccattctgatcaaagt

SEQ ID NO: 2844927 - DNA, 25 bp, Homo sapien
acaggagcagctctacgcaggagtt

SEQ ID NO: 2844928 - DNA, 25 bp, Homo sapien
tcagaacaggagcagctctacgcag

SEQ ID NO: 2844929 - DNA, 25 bp, Homo sapien
gctctacgcaggagttctccaggtt

SEQ ID NO: 2844930 - DNA, 25 bp, Homo sapien
tgatgcacattatccctagttggga

SEQ ID NO: 2844931 - DNA, 25 bp, Homo sapien
ggagagacccacactatttagaagc

SEQ ID NO: 2844932 - DNA, 25 bp, Homo sapien
gccgatttcatagacccagttcaca

SEQ ID NO: 2844933 - DNA, 25 bp, Homo sapien
agtgaggtgaggagaaactctgccc

SEQ ID NO: 2844934 - DNA, 25 bp, Homo sapien
gaatgtagagaggtgcgggcctgga

SEQ ID NO: 2844935 - DNA, 25 bp, Homo sapien
gatgacatccgcacttgaagagcta

SEQ ID NO: 2844936 - DNA, 25 bp, Homo sapien
gaagagctacttgttgggaaagaac

SEQ ID NO: 2844937 - DNA, 25 bp, Homo sapien
gcatcagttcagatccaagttcctt

SEQ ID NO: 2844938 - DNA, 25 bp, Homo sapien
ccagtgtgacggtcttgccagggat

SEQ ID NO: 2844939 - DNA, 25 bp, Homo sapien
cctgttactgtgtaccaaggtgccc

SEQ ID NO: 2844940 - DNA, 25 bp, Homo sapien
ggagctcgagcaagttcactgctgc

SEQ ID NO: 2844941 - DNA, 25 bp, Homo sapien
caagccccatatccgtgtctgtgaa

SEQ ID NO: 2844942 - DNA, 25 bp, Homo sapien
tgctacccaagaaggccaccctttc

SEQ ID NO: 2844943 - DNA, 25 bp, Homo sapien
cctttattgataggtcagagagcat

SEQ ID NO: 2844944 - DNA, 25 bp, Homo sapien
ctgactcctgctacccaagaaggcc

SEQ ID NO: 2844945 - DNA, 25 bp, Homo sapien
tgcttttcctttattgataggtcag

SEQ ID NO: 2844946 - DNA, 25 bp, Homo sapien
ttctgccagaggactgaccctttgt

SEQ ID NO: 2844947 - DNA, 25 bp, Homo sapien
caggccgccgctagctagtgagtta

SEQ ID NO: 2844948 - DNA, 25 bp, Homo sapien
tgtgctccacatatgttttgccagg

SEQ ID NO: 2844949 - DNA, 25 bp, Homo sapien
gcatcagtcaccctaaagttctcag

SEQ ID NO: 2844950 - DNA, 25 bp, Homo sapien
tgctcttgccctcagtccccgtctt

SEQ ID NO: 2844951 - DNA, 25 bp, Homo sapien
tctgctcttgccctcagtccccgtc

SEQ ID NO: 2844952 - DNA, 25 bp, Homo sapien
ctcttgccctcagtccccgtctttc

SEQ ID NO: 2844953 - DNA, 25 bp, Homo sapien
cttgccctcagtccccgtctttcca

SEQ ID NO: 2844954 - DNA, 25 bp, Homo sapien
ggtccccttgcactttcatgcctga

SEQ ID NO: 2844955 - DNA, 25 bp, Homo sapien
gggtccccttgcactttcatgcctg

SEQ ID NO: 2844956 - DNA, 25 bp, Homo sapien
gtggccaagtctaaactgagggtcc

SEQ ID NO: 2844957 - DNA, 25 bp, Homo sapien
ggtggccaagtctaaactgagggtc

SEQ ID NO: 2844958 - DNA, 25 bp, Homo sapien
tggtggccaagtctaaactgagggt

SEQ ID NO: 2844959 - DNA, 25 bp, Homo sapien
tccacgggcatgctggagcgctgtt

SEQ ID NO: 2844960 - DNA, 25 bp, Homo sapien
tcatctccgagacaaaggtgctggc

SEQ ID NO: 2844961 - DNA, 25 bp, Homo sapien
ctctgccttgccgaacgtctggaag

SEQ ID NO: 2844962 - DNA, 25 bp, Homo sapien
gagatcacattgtcacggtagttgg

SEQ ID NO: 2844963 - DNA, 25 bp, Homo sapien
tcttcttctagcagttgcttcacag

SEQ ID NO: 2844964 - DNA, 25 bp, Homo sapien
ttcacagagaggtcctcttcaggat

SEQ ID NO: 2844965 - DNA, 25 bp, Homo sapien
ctggggtccagcagacttgacagct

SEQ ID NO: 2844966 - DNA, 25 bp, Homo sapien
ccagcagacttgacagctcttcttc

SEQ ID NO: 2844967 - DNA, 25 bp, Homo sapien
gccatctgtgtctgggattgcactc

SEQ ID NO: 2844968 - DNA, 25 bp, Homo sapien
gggccatctgtgtctgggattgcac

SEQ ID NO: 2844969 - DNA, 25 bp, Homo sapien
gcctccagcccttgcacttgggcca

SEQ ID NO: 2844970 - DNA, 25 bp, Homo sapien
agcccttgcacttgggccatctgtg

SEQ ID NO: 2844971 - DNA, 25 bp, Homo sapien
cgtaggagtccttctgtttgtttgg

SEQ ID NO: 2844972 - DNA, 25 bp, Homo sapien
tttgttcccctgtagccatttctgc

SEQ ID NO: 2844973 - DNA, 25 bp, Homo sapien
ttttgttcccctgtagccatttctg

SEQ ID NO: 2844974 - DNA, 25 bp, Homo sapien
taaggcgtaggagtccttctgtttg

SEQ ID NO: 2844975 - DNA, 25 bp, Homo sapien
cctggcttggccaagtacttatttc

SEQ ID NO: 2844976 - DNA, 25 bp, Homo sapien
tggcttggccaagtacttatttcct

SEQ ID NO: 2844977 - DNA, 25 bp, Homo sapien
ctcctggcttggccaagtacttatt

SEQ ID NO: 2844978 - DNA, 25 bp, Homo sapien
gcctcctggcttggccaagtactta

SEQ ID NO: 2844979 - DNA, 25 bp, Homo sapien
caaagcatcagaaagtgccaggtga

SEQ ID NO: 2844980 - DNA, 25 bp, Homo sapien
cctctggacaactctacaaggtaga

SEQ ID NO: 2844981 - DNA, 25 bp, Homo sapien
taagttcagccgatcacaaagctgt

SEQ ID NO: 2844982 - DNA, 25 bp, Homo sapien
gaagaaacatgaggactgtgcaggt

SEQ ID NO: 2844983 - DNA, 25 bp, Homo sapien
tgggactgcccgacttcacaaggct

SEQ ID NO: 2844984 - DNA, 25 bp, Homo sapien
tcttggctgataagggctggagtcc

SEQ ID NO: 2844985 - DNA, 25 bp, Homo sapien
ttggtgacattgacgaacagctgcc

SEQ ID NO: 2844986 - DNA, 25 bp, Homo sapien
gaggcattcacaagcacggagaggc

SEQ ID NO: 2844987 - DNA, 25 bp, Homo sapien
catgtgcttactgaggaagaactcc

SEQ ID NO: 2844988 - DNA, 25 bp, Homo sapien
gaagagcttctgacaccagtgatgg

SEQ ID NO: 2844989 - DNA, 25 bp, Homo sapien
gtcgacgcagaatgacctggcctgt

SEQ ID NO: 2844990 - DNA, 25 bp, Homo sapien
tgaacatccacctcgtaggcagggt

SEQ ID NO: 2844991 - DNA, 25 bp, Homo sapien
tggcggtcagttttatgagaagcgt

SEQ ID NO: 2844992 - DNA, 25 bp, Homo sapien
tgtggcggtcagttttatgagaagc

SEQ ID NO: 2844993 - DNA, 25 bp, Homo sapien
ctgtggcggtcagttttatgagaag

SEQ ID NO: 2844994 - DNA, 25 bp, Homo sapien
gcggtcagttttatgagaagcgtac

SEQ ID NO: 2844995 - DNA, 25 bp, Homo sapien
gacgttgaccttgaccaagctggta

SEQ ID NO: 2844996 - DNA, 25 bp, Homo sapien
gacacttggtatttcaccgtgagag

SEQ ID NO: 2844997 - DNA, 25 bp, Homo sapien
tctcagcaaacgcagggctattgtc

SEQ ID NO: 2844998 - DNA, 25 bp, Homo sapien
ttccagtgccagtgaactctcagca

SEQ ID NO: 2844999 - DNA, 25 bp, Homo sapien
ctaaaagaaataagtagccacctgg

SEQ ID NO: 2845000 - DNA, 25 bp, Homo sapien
ccaaaagccccagcagaagttgcag

SEQ ID NO: 2845001 - DNA, 25 bp, Homo sapien
gttctttcaaggctggacaagtcct

SEQ ID NO: 2845002 - DNA, 25 bp, Homo sapien
ggatggcttgatcagccccgtgctc

SEQ ID NO: 2845003 - DNA, 25 bp, Homo sapien
gctggacaagtcctccagtgtttcc

SEQ ID NO: 2845004 - DNA, 25 bp, Homo sapien
ctggatggcttgatcagccccgtgc

SEQ ID NO: 2845005 - DNA, 25 bp, Homo sapien
aaacgccgatcaagaattgccaggg

SEQ ID NO: 2845006 - DNA, 25 bp, Homo sapien
cgatctgagatgtccaaacgccgat

SEQ ID NO: 2845007 - DNA, 25 bp, Homo sapien
gggaactagttggtccacttcagca

SEQ ID NO: 2845008 - DNA, 25 bp, Homo sapien
gcaaatgatggacaagagctggtct

SEQ ID NO: 2845009 - DNA, 25 bp, Homo sapien
gggactctgactgccaaacagttgc

SEQ ID NO: 2845010 - DNA, 25 bp, Homo sapien
tgggactctgactgccaaacagttg

SEQ ID NO: 2845011 - DNA, 25 bp, Homo sapien
tgtgggactctgactgccaaacagt

SEQ ID NO: 2845012 - DNA, 25 bp, Homo sapien
gtgggactctgactgccaaacagtt

SEQ ID NO: 2845013 - DNA, 25 bp, Homo sapien
gatcacccgtttttgtctcactgga

SEQ ID NO: 2845014 - DNA, 25 bp, Homo sapien
gaaaacttgagcctccacctgcttg

SEQ ID NO: 2845015 - DNA, 25 bp, Homo sapien
gaatagtagccctttcagcaggaaa

SEQ ID NO: 2845016 - DNA, 25 bp, Homo sapien
tcctgtgaagctaagtggcctgccg

SEQ ID NO: 2845017 - DNA, 25 bp, Homo sapien
aacctgtgcaacttgaccgtgtggc

SEQ ID NO: 2845018 - DNA, 25 bp, Homo sapien
tgtgcaacttgaccgtgtggctctc

SEQ ID NO: 2845019 - DNA, 25 bp, Homo sapien
tgcccacactgacttatgagggtgc

SEQ ID NO: 2845020 - DNA, 25 bp, Homo sapien
atggtcttgattccagaagctgcaa

SEQ ID NO: 2845021 - DNA, 25 bp, Homo sapien
tcagaggcccacatgataatagact

SEQ ID NO: 2845022 - DNA, 25 bp, Homo sapien
tcaggtctgctaacccctatagtga

SEQ ID NO: 2845023 - DNA, 25 bp, Homo sapien
acaaatgcaggcaccgtcaggtctg

SEQ ID NO: 2845024 - DNA, 25 bp, Homo sapien
gcaaagtttcgggacagctaccaga

SEQ ID NO: 2845025 - DNA, 25 bp, Homo sapien
tatgtagtatgagttccacatcttg

SEQ ID NO: 2845026 - DNA, 25 bp, Homo sapien
tggagagggtcctaacaccatcttt

SEQ ID NO: 2845027 - DNA, 25 bp, Homo sapien
tggcctcttacccagcttcagcagt

SEQ ID NO: 2845028 - DNA, 25 bp, Homo sapien
gctccaccagttagagaataaatgg

SEQ ID NO: 2845029 - DNA, 25 bp, Homo sapien
agcttcccttttagtatttatcaca

SEQ ID NO: 2845030 - DNA, 25 bp, Homo sapien
gaaaagaggttggagaatggcttct

SEQ ID NO: 2845031 - DNA, 25 bp, Homo sapien
ggcttcttcataggacttggtagct

SEQ ID NO: 2845032 - DNA, 25 bp, Homo sapien
tggtagctcacacagcactcatagc

SEQ ID NO: 2845033 - DNA, 25 bp, Homo sapien
agtttgacactatggcaaaaccccg

SEQ ID NO: 2845034 - DNA, 25 bp, Homo sapien
agtccaagagtttgacactatggca

SEQ ID NO: 2845035 - DNA, 25 bp, Homo sapien
tccaagagtttgacactatggcaaa

SEQ ID NO: 2845036 - DNA, 25 bp, Homo sapien
caagagtttgacactatggcaaaac

SEQ ID NO: 2845037 - DNA, 25 bp, Homo sapien
gcagtagaagccagattgaagagta

SEQ ID NO: 2845038 - DNA, 25 bp, Homo sapien
agtagaagccagattgaagagtatc

SEQ ID NO: 2845039 - DNA, 25 bp, Homo sapien
gtagaagccagattgaagagtatcg

SEQ ID NO: 2845040 - DNA, 25 bp, Homo sapien
cagtagaagccagattgaagagtat

SEQ ID NO: 2845041 - DNA, 25 bp, Homo sapien
gcccatgttgtggaactcccataga

SEQ ID NO: 2845042 - DNA, 25 bp, Homo sapien
cccatgttgtggaactcccatagag

SEQ ID NO: 2845043 - DNA, 25 bp, Homo sapien
tactggctgtatgcaatatttctgt

SEQ ID NO: 2845044 - DNA, 25 bp, Homo sapien
tctctctagagcaaacccttacaaa

SEQ ID NO: 2845045 - DNA, 25 bp, Homo sapien
aattagacggatgtaacaagatgac

SEQ ID NO: 2845046 - DNA, 25 bp, Homo sapien
tctgttggatttgcatgggttctct

SEQ ID NO: 2845047 - DNA, 25 bp, Homo sapien
ggtagattgttcagagggacccata

SEQ ID NO: 2845048 - DNA, 25 bp, Homo sapien
catgtggtactactgaagaaggtgc

SEQ ID NO: 2845049 - DNA, 25 bp, Homo sapien
caagtactcatccaccttaaatggg

SEQ ID NO: 2845050 - DNA, 25 bp, Homo sapien
cctgcgtagaagatatggaagaacg

SEQ ID NO: 2845051 - DNA, 25 bp, Homo sapien
taaagatcttctctaacaagctatg

SEQ ID NO: 2845052 - DNA, 25 bp, Homo sapien
tactacagtagttccagtcctaact

SEQ ID NO: 2845053 - DNA, 25 bp, Homo sapien
tccttatcattggtgggaggcttgg

SEQ ID NO: 2845054 - DNA, 25 bp, Homo sapien
cagaaaaattgaactacagcttgag

SEQ ID NO: 2845055 - DNA, 25 bp, Homo sapien
taaacaaatccattgatccatgagc

SEQ ID NO: 2845056 - DNA, 25 bp, Homo sapien
gaatgacggcacaatcacatagaaa

SEQ ID NO: 2845057 - DNA, 25 bp, Homo sapien
tgagcttaaaacagaatgacggcac

SEQ ID NO: 2845058 - DNA, 25 bp, Homo sapien
acattgtaaacaaatccattgatcc

SEQ ID NO: 2845059 - DNA, 25 bp, Homo sapien
tagcttcaaacaggcacaaaaacag

SEQ ID NO: 2845060 - DNA, 25 bp, Homo sapien
ggctaggctctcaaaggtctttccc

SEQ ID NO: 2845061 - DNA, 25 bp, Homo sapien
ttaggcctgggctaggctctcaaag

SEQ ID NO: 2845062 - DNA, 25 bp, Homo sapien
agcagtagcttcaaacaggcacaaa

SEQ ID NO: 2845063 - DNA, 25 bp, Homo sapien
tatgtaaaacagaggagccacagtg

SEQ ID NO: 2845064 - DNA, 25 bp, Homo sapien
tgccttttggtgctggagagtccct

SEQ ID NO: 2845065 - DNA, 25 bp, Homo sapien
gcagtgtctgttgccccagtggacc

SEQ ID NO: 2845066 - DNA, 25 bp, Homo sapien
ccagagcaacagaccaccttgggat

SEQ ID NO: 2845067 - DNA, 25 bp, Homo sapien
gcctcatggccaagaacaataagtt

SEQ ID NO: 2845068 - DNA, 25 bp, Homo sapien
tagctaaactccgtgactaggctcc

SEQ ID NO: 2845069 - DNA, 25 bp, Homo sapien
cagtgcgtgtaaggagagaaattcc

SEQ ID NO: 2845070 - DNA, 25 bp, Homo sapien
tacttgacactaggtcccagcacag

SEQ ID NO: 2845071 - DNA, 25 bp, Homo sapien
gggtccaccaacttgttatgaacaa

SEQ ID NO: 2845072 - DNA, 25 bp, Homo sapien
actgtacaaggggtccaccaacttg

SEQ ID NO: 2845073 - DNA, 25 bp, Homo sapien
ctaatcgctgtatggtttcttcgaa

SEQ ID NO: 2845074 - DNA, 25 bp, Homo sapien
ttcgaagattggcttttctcagttt

SEQ ID NO: 2845075 - DNA, 25 bp, Homo sapien
tcgtcacacacaaacacggtgcggg

SEQ ID NO: 2845076 - DNA, 25 bp, Homo sapien
gacacggtccacatgtggttcactc

SEQ ID NO: 2845077 - DNA, 25 bp, Homo sapien
ggaaggcagacacggtccacatgtg

SEQ ID NO: 2845078 - DNA, 25 bp, Homo sapien
cactttcagctccaaggtggcatcc

SEQ ID NO: 2845079 - DNA, 25 bp, Homo sapien
tgagcacctgtgataaggatcatca

SEQ ID NO: 2845080 - DNA, 25 bp, Homo sapien
cttgtgagcacctgtgataaggatc

SEQ ID NO: 2845081 - DNA, 25 bp, Homo sapien
gagcacctgtgataaggatcatcac

SEQ ID NO: 2845082 - DNA, 25 bp, Homo sapien
tgtgagcacctgtgataaggatcat

SEQ ID NO: 2845083 - DNA, 25 bp, Homo sapien
agcgcaagctggtggggcccttatg

SEQ ID NO: 2845084 - DNA, 25 bp, Homo sapien
accagcgcaagctggtggggccctt

SEQ ID NO: 2845085 - DNA, 25 bp, Homo sapien
cagcgcaagctggtggggcccttat

SEQ ID NO: 2845086 - DNA, 25 bp, Homo sapien
ccaccagcgcaagctggtggggccc

SEQ ID NO: 2845087 - DNA, 25 bp, Homo sapien
ccacccccaccgtcaaggccatggt

SEQ ID NO: 2845088 - DNA, 25 bp, Homo sapien
ccaccgtcaaggccatggtgggcac

SEQ ID NO: 2845089 - DNA, 25 bp, Homo sapien
tctctagcatccatgacagtgccca

SEQ ID NO: 2845090 - DNA, 25 bp, Homo sapien
ccccaccgtcaaggccatggtgggc

SEQ ID NO: 2845091 - DNA, 25 bp, Homo sapien
tggtgagttctccatcgaagaacct

SEQ ID NO: 2845092 - DNA, 25 bp, Homo sapien
ttgaaggcaatgtgtccatcagggc

SEQ ID NO: 2845093 - DNA, 25 bp, Homo sapien
tcttcacacgggtcctggacaccag

SEQ ID NO: 2845094 - DNA, 25 bp, Homo sapien
tggagcctggctcgttgaaggcaat

SEQ ID NO: 2845095 - DNA, 25 bp, Homo sapien
taggtcgactgcattcccatccaga

SEQ ID NO: 2845096 - DNA, 25 bp, Homo sapien
tctgggtggatgtcaatgtgcttga

SEQ ID NO: 2845097 - DNA, 25 bp, Homo sapien
taactctccgggtggtctcgaggaa

SEQ ID NO: 2845098 - DNA, 25 bp, Homo sapien
tccacatgaaggagtggtaactctc

SEQ ID NO: 2845099 - DNA, 25 bp, Homo sapien
cagcttcttgtagcagccaagtggg

SEQ ID NO: 2845100 - DNA, 25 bp, Homo sapien
cttatagtattcaatcagcttcttg

SEQ ID NO: 2845101 - DNA, 25 bp, Homo sapien
cacgtactcatccatgttgaaggtc

SEQ ID NO: 2845102 - DNA, 25 bp, Homo sapien
tattcaatcagcttcttgtagcagc

SEQ ID NO: 2845103 - DNA, 25 bp, Homo sapien
gtgcttcagggttcaaggaagactt

SEQ ID NO: 2845104 - DNA, 25 bp, Homo sapien
tgcttcagggttcaaggaagacttc

SEQ ID NO: 2845105 - DNA, 25 bp, Homo sapien
gtagggccactagggcaaacccatc

SEQ ID NO: 2845106 - DNA, 25 bp, Homo sapien
gctgctttcaaacaacagaagggtt

SEQ ID NO: 2845107 - DNA, 25 bp, Homo sapien
cagaagggttaagttgttgcaacag

SEQ ID NO: 2845108 - DNA, 25 bp, Homo sapien
catagacacgctaatggatgggtca

SEQ ID NO: 2845109 - DNA, 25 bp, Homo sapien
tccacccttatccacggcaccctct

SEQ ID NO: 2845110 - DNA, 25 bp, Homo sapien
actctctccacccttatccacggca

SEQ ID NO: 2845111 - DNA, 25 bp, Homo sapien
ctactctctccacccttatccacgg

SEQ ID NO: 2845112 - DNA, 25 bp, Homo sapien
cttatccacggcaccctctccatcc

SEQ ID NO: 2845113 - DNA, 25 bp, Homo sapien
cctgatgtatttagccgcccactcg

SEQ ID NO: 2845114 - DNA, 25 bp, Homo sapien
ctgagaatagtgctccaggatgatg

SEQ ID NO: 2845115 - DNA, 25 bp, Homo sapien
ccactcgctcgcctgagaatagtgc

SEQ ID NO: 2845116 - DNA, 25 bp, Homo sapien
ctgggttaaactggatgatgcggtt

SEQ ID NO: 2845117 - DNA, 25 bp, Homo sapien
acagaccacgaggaggcgccactgg

SEQ ID NO: 2845118 - DNA, 25 bp, Homo sapien
gaggctaggccagtcgtctccacca

SEQ ID NO: 2845119 - DNA, 25 bp, Homo sapien
ggagaagcttctcttacccagcaac

SEQ ID NO: 2845120 - DNA, 25 bp, Homo sapien
gaatcaatggtaaggggcagagaaa

SEQ ID NO: 2845121 - DNA, 25 bp, Homo sapien
acctgcaggacctcggtcaaaggac

SEQ ID NO: 2845122 - DNA, 25 bp, Homo sapien
gtcaaaggacctaagttctctctga

SEQ ID NO: 2845123 - DNA, 25 bp, Homo sapien
caggacctcggtcaaaggacctaag

SEQ ID NO: 2845124 - DNA, 25 bp, Homo sapien
ctcggtcaaaggacctaagttctct

SEQ ID NO: 2845125 - DNA, 25 bp, Homo sapien
aattgggacaatagtacctacttca

SEQ ID NO: 2845126 - DNA, 25 bp, Homo sapien
tatgtaaaaattgggacaatagtac

SEQ ID NO: 2845127 - DNA, 25 bp, Homo sapien
tgggacaatagtacctacttcacag

SEQ ID NO: 2845128 - DNA, 25 bp, Homo sapien
ctatgtaaaaattgggacaatagta

SEQ ID NO: 2845129 - DNA, 25 bp, Homo sapien
cacgacgggtaatatgaaatgagag

SEQ ID NO: 2845130 - DNA, 25 bp, Homo sapien
gagaatgcatgtaaacaacttagta

SEQ ID NO: 2845131 - DNA, 25 bp, Homo sapien
aacttagtattttctacgttggctg

SEQ ID NO: 2845132 - DNA, 25 bp, Homo sapien
taccatccagatagatgctcggctc

SEQ ID NO: 2845133 - DNA, 25 bp, Homo sapien
ccagcactgcggttagtgggagtgt

SEQ ID NO: 2845134 - DNA, 25 bp, Homo sapien
taatcgctccagaaggaggacattt

SEQ ID NO: 2845135 - DNA, 25 bp, Homo sapien
tggaaaatgtgtgagggcggctccc

SEQ ID NO: 2845136 - DNA, 25 bp, Homo sapien
cttgctttgcgaacccctctgggtc

SEQ ID NO: 2845137 - DNA, 25 bp, Homo sapien
ggctgcagcgactgcgccggcggcc

SEQ ID NO: 2845138 - DNA, 25 bp, Homo sapien
acggacgcctcccgcggcggctgca

SEQ ID NO: 2845139 - DNA, 25 bp, Homo sapien
gcggcggctgcagcgactgcgccgg

SEQ ID NO: 2845140 - DNA, 25 bp, Homo sapien
gcggctgcagcgactgcgccggcgg

SEQ ID NO: 2845141 - DNA, 25 bp, Homo sapien
tgaccagccaaagtggggttctacc

SEQ ID NO: 2845142 - DNA, 25 bp, Homo sapien
ttctcagttgtttctcccttcttct

SEQ ID NO: 2845143 - DNA, 25 bp, Homo sapien
tgtagtaaacttctgtcagtccttt

SEQ ID NO: 2845144 - DNA, 25 bp, Homo sapien
tcctttcaatttagctctgttcttc

SEQ ID NO: 2845145 - DNA, 25 bp, Homo sapien
aaagcccagatgtgaaaccaccaaa

SEQ ID NO: 2845146 - DNA, 25 bp, Homo sapien
tcaaaagcccagatgtgaaaccacc

SEQ ID NO: 2845147 - DNA, 25 bp, Homo sapien
caaaagcccagatgtgaaaccacca

SEQ ID NO: 2845148 - DNA, 25 bp, Homo sapien
ctcaaaagcccagatgtgaaaccac

SEQ ID NO: 2845149 - DNA, 25 bp, Homo sapien
gcgaatgactgagaagaagagctca

SEQ ID NO: 2845150 - DNA, 25 bp, Homo sapien
atagcgaatgactgagaagaagagc

SEQ ID NO: 2845151 - DNA, 25 bp, Homo sapien
gaagagctcatgataaatgtgctta

SEQ ID NO: 2845152 - DNA, 25 bp, Homo sapien
aagagctcatgataaatgtgcttaa

SEQ ID NO: 2845153 - DNA, 25 bp, Homo sapien
gcttgctttgaaggtaataactcct

SEQ ID NO: 2845154 - DNA, 25 bp, Homo sapien
tcagcttgctttgaaggtaataact

SEQ ID NO: 2845155 - DNA, 25 bp, Homo sapien
cagcttgctttgaaggtaataactc

SEQ ID NO: 2845156 - DNA, 25 bp, Homo sapien
tgctttgaaggtaataactcctttc

SEQ ID NO: 2845157 - DNA, 25 bp, Homo sapien
catcttccagtgtgagtactggtga

SEQ ID NO: 2845158 - DNA, 25 bp, Homo sapien
gctttctgtatagggagcatcttcc

SEQ ID NO: 2845159 - DNA, 25 bp, Homo sapien
cagtttctaggacatgctttctgta

SEQ ID NO: 2845160 - DNA, 25 bp, Homo sapien
actggtgatgttccactcgtcagag

SEQ ID NO: 2845161 - DNA, 25 bp, Homo sapien
attcaggcctgatgtctcgatacag

SEQ ID NO: 2845162 - DNA, 25 bp, Homo sapien
tttattcaggcctgatgtctcgata

SEQ ID NO: 2845163 - DNA, 25 bp, Homo sapien
aagatgtttattcaggcctgatgtc

SEQ ID NO: 2845164 - DNA, 25 bp, Homo sapien
gaaaagatgtttattcaggcctgat

SEQ ID NO: 2845165 - DNA, 25 bp, Homo sapien
catcatcatattggtgtgacctcct

SEQ ID NO: 2845166 - DNA, 25 bp, Homo sapien
gaaaaccatcatcatattggtgtga

SEQ ID NO: 2845167 - DNA, 25 bp, Homo sapien
tcatattggtgtgacctccttcctc

SEQ ID NO: 2845168 - DNA, 25 bp, Homo sapien
aaaccatcatcatattggtgtgacc

SEQ ID NO: 2845169 - DNA, 25 bp, Homo sapien
ttcctcctgggtggccaaatctgcc

SEQ ID NO: 2845170 - DNA, 25 bp, Homo sapien
ccttcttctgagcagccaggaagat

SEQ ID NO: 2845171 - DNA, 25 bp, Homo sapien
cagccaggaagatggcttgttcctt

SEQ ID NO: 2845172 - DNA, 25 bp, Homo sapien
ctgagcagccaggaagatggcttgt

SEQ ID NO: 2845173 - DNA, 25 bp, Homo sapien
tggaaagctgcaaactcttctgaac

SEQ ID NO: 2845174 - DNA, 25 bp, Homo sapien
ctggaaagctgcaaactcttctgaa

SEQ ID NO: 2845175 - DNA, 25 bp, Homo sapien
aaatgtcccgtcaggcttcagaaaa

SEQ ID NO: 2845176 - DNA, 25 bp, Homo sapien
caaaattggttgatggaagcccttc

SEQ ID NO: 2845177 - DNA, 25 bp, Homo sapien
gcccgcacgatggtccggatcacat

SEQ ID NO: 2845178 - DNA, 25 bp, Homo sapien
cgatggtccggatcacatcgccgac

SEQ ID NO: 2845179 - DNA, 25 bp, Homo sapien
tcaggcttgagtggaacaaggacca

SEQ ID NO: 2845180 - DNA, 25 bp, Homo sapien
catgagtctccgatcattgtcttca

SEQ ID NO: 2845181 - DNA, 25 bp, Homo sapien
ggaacaaggaccagctgttaccatg

SEQ ID NO: 2845182 - DNA, 25 bp, Homo sapien
catgaggaccttctcgggatctccc

SEQ ID NO: 2845183 - DNA, 25 bp, Homo sapien
gggttgcccttggaatgctgaacca

SEQ ID NO: 2845184 - DNA, 25 bp, Homo sapien
tgaggggttgcccttggaatgctga

SEQ ID NO: 2845185 - DNA, 25 bp, Homo sapien
aggggttgcccttggaatgctgaac

SEQ ID NO: 2845186 - DNA, 25 bp, Homo sapien
ggttgcccttggaatgctgaaccat

SEQ ID NO: 2845187 - DNA, 25 bp, Homo sapien
ccttccccaagaatgcgaagtaaat

SEQ ID NO: 2845188 - DNA, 25 bp, Homo sapien
caattgccagtttgaagaggatcct

SEQ ID NO: 2845189 - DNA, 25 bp, Homo sapien
ccttctcacgtgcaggaggcactcc

SEQ ID NO: 2845190 - DNA, 25 bp, Homo sapien
cactccttccccaagaatgcgaagt

SEQ ID NO: 2845191 - DNA, 25 bp, Homo sapien
gatgggagacaaaaagttgtcaaaa

SEQ ID NO: 2845192 - DNA, 25 bp, Homo sapien
tgatgggagacaaaaagttgtcaaa

SEQ ID NO: 2845193 - DNA, 25 bp, Homo sapien
aatcagttctgttggttctgttggc

SEQ ID NO: 2845194 - DNA, 25 bp, Homo sapien
taggcccttaatttatcttagttga

SEQ ID NO: 2845195 - DNA, 25 bp, Homo sapien
aattctaggacagcaagtaatcttt

SEQ ID NO: 2845196 - DNA, 25 bp, Homo sapien
aagtgtaatcagttctgttggttct

SEQ ID NO: 2845197 - DNA, 25 bp, Homo sapien
gaaagccaatgatgattaatcctgc

SEQ ID NO: 2845198 - DNA, 25 bp, Homo sapien
cagtgagtgtgtttttgctgtgtgc

SEQ ID NO: 2845199 - DNA, 25 bp, Homo sapien
aagaactctgtaattgcaatttggc

SEQ ID NO: 2845200 - DNA, 25 bp, Homo sapien
tatcagagcccaagagtagagacac

SEQ ID NO: 2845201 - DNA, 25 bp, Homo sapien
tcatggtatatgaaccttacctcaa

SEQ ID NO: 2845202 - DNA, 25 bp, Homo sapien
cataatgaaggtgctaaatggcact

SEQ ID NO: 2845203 - DNA, 25 bp, Homo sapien
gatggaaatgttccgtcaaagaaca

SEQ ID NO: 2845204 - DNA, 25 bp, Homo sapien
tggctcacacttatactccctgtgc

SEQ ID NO: 2845205 - DNA, 25 bp, Homo sapien
tgggttttagttactgaagatgtga

SEQ ID NO: 2845206 - DNA, 25 bp, Homo sapien
cactccaggggaggaagttgacacg

SEQ ID NO: 2845207 - DNA, 25 bp, Homo sapien
gattctttcataacagtgctcactc

SEQ ID NO: 2845208 - DNA, 25 bp, Homo sapien
cttgtaccccgattctttcataaca

SEQ ID NO: 2845209 - DNA, 25 bp, Homo sapien
gggcccctgagggtcacttctcttc

SEQ ID NO: 2845210 - DNA, 25 bp, Homo sapien
caacacggcttcttccactaagggc

SEQ ID NO: 2845211 - DNA, 25 bp, Homo sapien
taacacatatgcgtctcccctgaca

SEQ ID NO: 2845212 - DNA, 25 bp, Homo sapien
gaagacttgtagtaaccagcgtgca

SEQ ID NO: 2845213 - DNA, 25 bp, Homo sapien
tgtgcaatcgtgtttctgctgatac

SEQ ID NO: 2845214 - DNA, 25 bp, Homo sapien
ttcccgtgtgcaatcgtgtttctgc

SEQ ID NO: 2845215 - DNA, 25 bp, Homo sapien
ccgtgtgcaatcgtgtttctgctga

SEQ ID NO: 2845216 - DNA, 25 bp, Homo sapien
gcaatcgtgtttctgctgatactct

SEQ ID NO: 2845217 - DNA, 25 bp, Homo sapien
ttggttaagacaactggttggaaca

SEQ ID NO: 2845218 - DNA, 25 bp, Homo sapien
cttttcaaggcacttggttaagaca

SEQ ID NO: 2845219 - DNA, 25 bp, Homo sapien
tggttaagacaactggttggaacat

SEQ ID NO: 2845220 - DNA, 25 bp, Homo sapien
cgccggggcttggcaggccgcgctg

SEQ ID NO: 2845221 - DNA, 25 bp, Homo sapien
cgacgccggggcttggcaggccgcg

SEQ ID NO: 2845222 - DNA, 25 bp, Homo sapien
tcgacgccggggcttggcaggccgc

SEQ ID NO: 2845223 - DNA, 25 bp, Homo sapien
cggggcttggcaggccgcgctgggc

SEQ ID NO: 2845224 - DNA, 25 bp, Homo sapien
gaattaaactcataagagggatctt

SEQ ID NO: 2845225 - DNA, 25 bp, Homo sapien
catagtgagttcagattccatctag

SEQ ID NO: 2845226 - DNA, 25 bp, Homo sapien
gggacatagtgagttcagattccat

SEQ ID NO: 2845227 - DNA, 25 bp, Homo sapien
tcataagagggatcttcacattgat

SEQ ID NO: 2845228 - DNA, 25 bp, Homo sapien
gttgtaagcttttcccccacatagc

SEQ ID NO: 2845229 - DNA, 25 bp, Homo sapien
cgtagtgccaccttatttattataa

SEQ ID NO: 2845230 - DNA, 25 bp, Homo sapien
catagctaatatgtactcatctata

SEQ ID NO: 2845231 - DNA, 25 bp, Homo sapien
tataataatggactttaggttaaga

SEQ ID NO: 2845232 - DNA, 25 bp, Homo sapien
tatcagcatattggcacaggtcccc

SEQ ID NO: 2845233 - DNA, 25 bp, Homo sapien
taacaaaaacctagctcaaaatggc

SEQ ID NO: 2845234 - DNA, 25 bp, Homo sapien
tcagggttaaaagatggcagtttca

SEQ ID NO: 2845235 - DNA, 25 bp, Homo sapien
tttgacatcatcaaggacagctgac

SEQ ID NO: 2845236 - DNA, 25 bp, Homo sapien
ttctcttactgaacaagcaaaggga

SEQ ID NO: 2845237 - DNA, 25 bp, Homo sapien
taatacggtccagagtccctaagat

SEQ ID NO: 2845238 - DNA, 25 bp, Homo sapien
ggtgattgagattacccactggtga

SEQ ID NO: 2845239 - DNA, 25 bp, Homo sapien
caggctttgactttgagggatctat

SEQ ID NO: 2845240 - DNA, 25 bp, Homo sapien
catgagccatgtccctgtagtcggt

SEQ ID NO: 2845241 - DNA, 25 bp, Homo sapien
tatagcctgtattcacaattctgcg

SEQ ID NO: 2845242 - DNA, 25 bp, Homo sapien
gtctcctggtgattaggccaaagtc

SEQ ID NO: 2845243 - DNA, 25 bp, Homo sapien
aattctgtatgaacacctggaagca

SEQ ID NO: 2845244 - DNA, 25 bp, Homo sapien
tggaaaggtattcataggaaccgcg

SEQ ID NO: 2845245 - DNA, 25 bp, Homo sapien
tgggctgcaggacgactaggattca

SEQ ID NO: 2845246 - DNA, 25 bp, Homo sapien
taggattcacccataacgacacagt

SEQ ID NO: 2845247 - DNA, 25 bp, Homo sapien
taaactagcttggaccttgggctgc

SEQ ID NO: 2845248 - DNA, 25 bp, Homo sapien
gacttaagtacaaagtcgtgatctt

SEQ ID NO: 2845249 - DNA, 25 bp, Homo sapien
cttaagtacaaagtcgtgatcttgg

SEQ ID NO: 2845250 - DNA, 25 bp, Homo sapien
ttaagtacaaagtcgtgatcttggc

SEQ ID NO: 2845251 - DNA, 25 bp, Homo sapien
acttaagtacaaagtcgtgatcttg

SEQ ID NO: 2845252 - DNA, 25 bp, Homo sapien
taacaaagattagtgctggagctct

SEQ ID NO: 2845253 - DNA, 25 bp, Homo sapien
ccttaacaaagattagtgctggagc

SEQ ID NO: 2845254 - DNA, 25 bp, Homo sapien
aagattagtgctggagctctgggaa

SEQ ID NO: 2845255 - DNA, 25 bp, Homo sapien
caaagattagtgctggagctctggg

SEQ ID NO: 2845256 - DNA, 25 bp, Homo sapien
ttcagttgtctggaaggttcgcgag

SEQ ID NO: 2845257 - DNA, 25 bp, Homo sapien
gtctggaaggttcgcgagtgatata

SEQ ID NO: 2845258 - DNA, 25 bp, Homo sapien
aaggttcgcgagtgatatacgcagc

SEQ ID NO: 2845259 - DNA, 25 bp, Homo sapien
tcagttgtctggaaggttcgcgagt

SEQ ID NO: 2845260 - DNA, 25 bp, Homo sapien
gtttgtgttgttagagcatgaactc

SEQ ID NO: 2845261 - DNA, 25 bp, Homo sapien
ttgatctacactttaacacattcct

SEQ ID NO: 2845262 - DNA, 25 bp, Homo sapien
taacaacaatagaacactcatcatc

SEQ ID NO: 2845263 - DNA, 25 bp, Homo sapien
tgtcccttcttgatctacactttaa

SEQ ID NO: 2845264 - DNA, 25 bp, Homo sapien
tagagaagagtgagtaaagctgccc

SEQ ID NO: 2845265 - DNA, 25 bp, Homo sapien
gcaaaatggtatctcgagacaggat

SEQ ID NO: 2845266 - DNA, 25 bp, Homo sapien
tccagaattgaacagcaacagcgct

SEQ ID NO: 2845267 - DNA, 25 bp, Homo sapien
tcacccggtggacggagcaagaatc

SEQ ID NO: 2845268 - DNA, 25 bp, Homo sapien
tgacagctgaatcctcactgggtga

SEQ ID NO: 2845269 - DNA, 25 bp, Homo sapien
ccatgcccgaggcaccttgaggaca

SEQ ID NO: 2845270 - DNA, 25 bp, Homo sapien
taagggcgaattaggtttctctctg

SEQ ID NO: 2845271 - DNA, 25 bp, Homo sapien
ggacaacatggaaagcaacccagga

SEQ ID NO: 2845272 - DNA, 25 bp, Homo sapien
tgttggtcagtgctttaaatggatc

SEQ ID NO: 2845273 - DNA, 25 bp, Homo sapien
aagtgttggtcagtgctttaaatgg

SEQ ID NO: 2845274 - DNA, 25 bp, Homo sapien
tcagtgctttaaatggatcaaccat

SEQ ID NO: 2845275 - DNA, 25 bp, Homo sapien
tggtcagtgctttaaatggatcaac

SEQ ID NO: 2845276 - DNA, 25 bp, Homo sapien
aacaggccatttagcattatctctg

SEQ ID NO: 2845277 - DNA, 25 bp, Homo sapien
tgtacaacaggccatttagcattat

SEQ ID NO: 2845278 - DNA, 25 bp, Homo sapien
ttctgtacaacaggccatttagcat

SEQ ID NO: 2845279 - DNA, 25 bp, Homo sapien
catttagcattatctctgtgctctc

SEQ ID NO: 2845280 - DNA, 25 bp, Homo sapien
tctttgcttgttcccagaccgaacc

SEQ ID NO: 2845281 - DNA, 25 bp, Homo sapien
ggtgcagctgtaggtgctctttgct

SEQ ID NO: 2845282 - DNA, 25 bp, Homo sapien
tgtaggtgctctttgcttgttccca

SEQ ID NO: 2845283 - DNA, 25 bp, Homo sapien
gaccgaaccactggcataaaatgcc

SEQ ID NO: 2845284 - DNA, 25 bp, Homo sapien
catgaacgcccagtaaattcattca

SEQ ID NO: 2845285 - DNA, 25 bp, Homo sapien
agtgccgtggtgcatgaacgcccag

SEQ ID NO: 2845286 - DNA, 25 bp, Homo sapien
taaagtgccttacacagtgccgtgg

SEQ ID NO: 2845287 - DNA, 25 bp, Homo sapien
aaagggaggagtcactttgtagtga

SEQ ID NO: 2845288 - DNA, 25 bp, Homo sapien
tgcacgcagttacccacagcagaaa

SEQ ID NO: 2845289 - DNA, 25 bp, Homo sapien
gcaggatgccctagtgaatcgtaca

SEQ ID NO: 2845290 - DNA, 25 bp, Homo sapien
aaccagaaggctagtgaggctcgca

SEQ ID NO: 2845291 - DNA, 25 bp, Homo sapien
taacatgaaaccaagctgtgggaca

SEQ ID NO: 2845292 - DNA, 25 bp, Homo sapien
ggcgggaactaaccagcacttttca

SEQ ID NO: 2845293 - DNA, 25 bp, Homo sapien
aaaggtcaagccgaggcatcgtcca

SEQ ID NO: 2845294 - DNA, 25 bp, Homo sapien
caggtgcccctcgagttaagacaga

SEQ ID NO: 2845295 - DNA, 25 bp, Homo sapien
caggaaagccttagttgtgcccaat

SEQ ID NO: 2845296 - DNA, 25 bp, Homo sapien
taaatcgactctccacagaacgggt

SEQ ID NO: 2845297 - DNA, 25 bp, Homo sapien
gattgctacacaaccaagctgggag

SEQ ID NO: 2845298 - DNA, 25 bp, Homo sapien
gattttgaaatcagcccttcctggg

SEQ ID NO: 2845299 - DNA, 25 bp, Homo sapien
caaactggaaatgctacggacgctc

SEQ ID NO: 2845300 - DNA, 25 bp, Homo sapien
catcgtcctcattcgtgcagtggta

SEQ ID NO: 2845301 - DNA, 25 bp, Homo sapien
tgcacgtgccatagttgaccagagt

SEQ ID NO: 2845302 - DNA, 25 bp, Homo sapien
aagaagtgcttgtccagctcgggtg

SEQ ID NO: 2845303 - DNA, 25 bp, Homo sapien
cgcccgctgaaggagatccaatggt

SEQ ID NO: 2845304 - DNA, 25 bp, Homo sapien
ctgtacggagaaacaggcttctagg

SEQ ID NO: 2845305 - DNA, 25 bp, Homo sapien
tacggagaaacaggcttctaggggc

SEQ ID NO: 2845306 - DNA, 25 bp, Homo sapien
tgtacggagaaacaggcttctaggg

SEQ ID NO: 2845307 - DNA, 25 bp, Homo sapien
agcaaaagaaatgggcaatgctcag

SEQ ID NO: 2845308 - DNA, 25 bp, Homo sapien
aagcaaaagaaatgggcaatgctca

SEQ ID NO: 2845309 - DNA, 25 bp, Homo sapien
aaagcaaaagaaatgggcaatgctc

SEQ ID NO: 2845310 - DNA, 25 bp, Homo sapien
ttaataggccttggaatcagaaagc

SEQ ID NO: 2845311 - DNA, 25 bp, Homo sapien
gaatcagaaagcagattccccaatt

SEQ ID NO: 2845312 - DNA, 25 bp, Homo sapien
cagaaagcagattccccaattcatg

SEQ ID NO: 2845313 - DNA, 25 bp, Homo sapien
atcagaaagcagattccccaattca

SEQ ID NO: 2845314 - DNA, 25 bp, Homo sapien
aggcaatggggatgttggcattcac

SEQ ID NO: 2845315 - DNA, 25 bp, Homo sapien
ggcaatggggatgttggcattcaca

SEQ ID NO: 2845316 - DNA, 25 bp, Homo sapien
gatgcagcatccgatggctccactg

SEQ ID NO: 2845317 - DNA, 25 bp, Homo sapien
ttggcccacgatgacttggctctct

SEQ ID NO: 2845318 - DNA, 25 bp, Homo sapien
gacttggctctctggggacgatgca

SEQ ID NO: 2845319 - DNA, 25 bp, Homo sapien
gatgggagcttggcccacgatgact

SEQ ID NO: 2845320 - DNA, 25 bp, Homo sapien
ctgagctgcctatttaagaacccct

SEQ ID NO: 2845321 - DNA, 25 bp, Homo sapien
ccaaatcagagttccactgctggcc

SEQ ID NO: 2845322 - DNA, 25 bp, Homo sapien
tataaccccgatgtagtaggattcc

SEQ ID NO: 2845323 - DNA, 25 bp, Homo sapien
ggattcctttcaaccaccagctcag

SEQ ID NO: 2845324 - DNA, 25 bp, Homo sapien
taggtggtactcttacgaactggca

SEQ ID NO: 2845325 - DNA, 25 bp, Homo sapien
gcttcccctgcaaggtagtaagaga

SEQ ID NO: 2845326 - DNA, 25 bp, Homo sapien
tctgcaatgcaaccaacagggaagg

SEQ ID NO: 2845327 - DNA, 25 bp, Homo sapien
cacaaagggtcatagagctagcaag

SEQ ID NO: 2845328 - DNA, 25 bp, Homo sapien
tcattgatggggtccctggcccagg

SEQ ID NO: 2845329 - DNA, 25 bp, Homo sapien
cattgatggggtccctggcccaggt

SEQ ID NO: 2845330 - DNA, 25 bp, Homo sapien
ttcattgatggggtccctggcccag

SEQ ID NO: 2845331 - DNA, 25 bp, Homo sapien
cttcattgatggggtccctggccca

SEQ ID NO: 2845332 - DNA, 25 bp, Homo sapien
gaaccagccagtctgacactcactg

SEQ ID NO: 2845333 - DNA, 25 bp, Homo sapien
gaacacgcgcaacactgtatttgct

SEQ ID NO: 2845334 - DNA, 25 bp, Homo sapien
gagtcctagaatactgaatcagcag

SEQ ID NO: 2845335 - DNA, 25 bp, Homo sapien
gaatcagcaggatatcaaaatcccc

SEQ ID NO: 2845336 - DNA, 25 bp, Homo sapien
gctgcaaaccgctcaatacaggctg

SEQ ID NO: 2845337 - DNA, 25 bp, Homo sapien
caggctgcaaaccgctcaatacagg

SEQ ID NO: 2845338 - DNA, 25 bp, Homo sapien
ctgcaaaccgctcaatacaggctgg

SEQ ID NO: 2845339 - DNA, 25 bp, Homo sapien
ggctgcaaaccgctcaatacaggct

SEQ ID NO: 2845340 - DNA, 25 bp, Homo sapien
tctggaagggacaatacagctttct

SEQ ID NO: 2845341 - DNA, 25 bp, Homo sapien
ggtttgcctagtcacacatctgctc

SEQ ID NO: 2845342 - DNA, 25 bp, Homo sapien
acatctgctctgttctagcccctgg

SEQ ID NO: 2845343 - DNA, 25 bp, Homo sapien
taaggccatgcttagcaggtttgcc

SEQ ID NO: 2845344 - DNA, 25 bp, Homo sapien
tacagacacagacgagtgcttgctc

SEQ ID NO: 2845345 - DNA, 25 bp, Homo sapien
taagagattgataaacccgcagttc

SEQ ID NO: 2845346 - DNA, 25 bp, Homo sapien
cagtgcaatattgggtagggcctca

SEQ ID NO: 2845347 - DNA, 25 bp, Homo sapien
ttgaatcccgagagacttgtcaggg

SEQ ID NO: 2845348 - DNA, 25 bp, Homo sapien
cgtctctatcctcttctctgtgatg

SEQ ID NO: 2845349 - DNA, 25 bp, Homo sapien
gtctctatcctcttctctgtgatgt

SEQ ID NO: 2845350 - DNA, 25 bp, Homo sapien
ctatcctcttctctgtgatgtcaag

SEQ ID NO: 2845351 - DNA, 25 bp, Homo sapien
ctctatcctcttctctgtgatgtca

SEQ ID NO: 2845352 - DNA, 25 bp, Homo sapien
aacggcggtgccaggctgtgaacac

SEQ ID NO: 2845353 - DNA, 25 bp, Homo sapien
ttggcaatgcccaggggtcggaaac

SEQ ID NO: 2845354 - DNA, 25 bp, Homo sapien
tcggaaacggcggtgccaggctgtg

SEQ ID NO: 2845355 - DNA, 25 bp, Homo sapien
gggaagccgggcttggcaatgccca

SEQ ID NO: 2845356 - DNA, 25 bp, Homo sapien
tgaggagctgcagggtcacaagcat

SEQ ID NO: 2845357 - DNA, 25 bp, Homo sapien
ttgaggagctgcagggtcacaagca

SEQ ID NO: 2845358 - DNA, 25 bp, Homo sapien
tttgaggagctgcagggtcacaagc

SEQ ID NO: 2845359 - DNA, 25 bp, Homo sapien
tccgcggcgatgttgcaaccactgc

SEQ ID NO: 2845360 - DNA, 25 bp, Homo sapien
cgtctgtgtaaatcctgaagccggg

SEQ ID NO: 2845361 - DNA, 25 bp, Homo sapien
ggttagccgccgctgtactcgcaga

SEQ ID NO: 2845362 - DNA, 25 bp, Homo sapien
cggaggaaccggcaaggctccctgc

SEQ ID NO: 2845363 - DNA, 25 bp, Homo sapien
aaatggcttttttatgaatgggagg

SEQ ID NO: 2845364 - DNA, 25 bp, Homo sapien
atggcttttttatgaatgggaggga

SEQ ID NO: 2845365 - DNA, 25 bp, Homo sapien
gaaaatggcttttttatgaatggga

SEQ ID NO: 2845366 - DNA, 25 bp, Homo sapien
tgggaaaatggcttttttatgaatg

SEQ ID NO: 2845367 - DNA, 25 bp, Homo sapien
cctggaacggaggagcctgtagcct

SEQ ID NO: 2845368 - DNA, 25 bp, Homo sapien
gggatcctttcttcgctgttaatga

SEQ ID NO: 2845369 - DNA, 25 bp, Homo sapien
gggtggcctcaggattaaataacaa

SEQ ID NO: 2845370 - DNA, 25 bp, Homo sapien
tgaggatcagctcaagccggtgaaa

SEQ ID NO: 2845371 - DNA, 25 bp, Homo sapien
taaccaagatcaacccttgtttgaa

SEQ ID NO: 2845372 - DNA, 25 bp, Homo sapien
ctgaatgtgtatgctgttggttctc

SEQ ID NO: 2845373 - DNA, 25 bp, Homo sapien
gatcaacccttgtttgaagagtttc

SEQ ID NO: 2845374 - DNA, 25 bp, Homo sapien
gatataaggctgaatgtgtatgctg

SEQ ID NO: 2845375 - DNA, 25 bp, Homo sapien
tgccaaatgtttcctctgtctggcc

SEQ ID NO: 2845376 - DNA, 25 bp, Homo sapien
cctttaacaatttatgggaatcatc

SEQ ID NO: 2845377 - DNA, 25 bp, Homo sapien
gccaaggcatacctttaacaattta

SEQ ID NO: 2845378 - DNA, 25 bp, Homo sapien
ctgtctggccaaggcatacctttaa

SEQ ID NO: 2845379 - DNA, 25 bp, Homo sapien
ccatgtcccctaatgacgtcactta

SEQ ID NO: 2845380 - DNA, 25 bp, Homo sapien
tcccctaatgacgtcacttattgac

SEQ ID NO: 2845381 - DNA, 25 bp, Homo sapien
ctaatgacgtcacttattgacttcg

SEQ ID NO: 2845382 - DNA, 25 bp, Homo sapien
tgcccatgtcccctaatgacgtcac

SEQ ID NO: 2845383 - DNA, 25 bp, Homo sapien
cttgggctgtttctacaactagctt

SEQ ID NO: 2845384 - DNA, 25 bp, Homo sapien
tttatgtggaaatctacttgggctg

SEQ ID NO: 2845385 - DNA, 25 bp, Homo sapien
gtttctacaactagcttgcccctct

SEQ ID NO: 2845386 - DNA, 25 bp, Homo sapien
tatgtggaaatctacttgggctgtt

SEQ ID NO: 2845387 - DNA, 25 bp, Homo sapien
tccaggagcactttggagcagcagg

SEQ ID NO: 2845388 - DNA, 25 bp, Homo sapien
gttggctgaatcctcgtgccctcca

SEQ ID NO: 2845389 - DNA, 25 bp, Homo sapien
ctggcccaccatggctttctgggtt

SEQ ID NO: 2845390 - DNA, 25 bp, Homo sapien
aggcaggtctgcattcaccctcagg

SEQ ID NO: 2845391 - DNA, 25 bp, Homo sapien
cctgtgtacttcatctgcttcttgc

SEQ ID NO: 2845392 - DNA, 25 bp, Homo sapien
ctgacagtggacagtcctgtgtact

SEQ ID NO: 2845393 - DNA, 25 bp, Homo sapien
gcttcttgcagggaaaccaacagaa

SEQ ID NO: 2845394 - DNA, 25 bp, Homo sapien
agggaaaccaacagaagcggtctct

SEQ ID NO: 2845395 - DNA, 25 bp, Homo sapien
tgtaaaggcaggtaggggggatgtc

SEQ ID NO: 2845396 - DNA, 25 bp, Homo sapien
aatgtaaaggcaggtaggggggatg

SEQ ID NO: 2845397 - DNA, 25 bp, Homo sapien
ctagggaagttaatgtaaaggcagg

SEQ ID NO: 2845398 - DNA, 25 bp, Homo sapien
gcctagggaagttaatgtaaaggca

SEQ ID NO: 2845399 - DNA, 25 bp, Homo sapien
ctcctcctcagggaatcgaacccca

SEQ ID NO: 2845400 - DNA, 25 bp, Homo sapien
tcctcctcagggaatcgaaccccag

SEQ ID NO: 2845401 - DNA, 25 bp, Homo sapien
ctgaggccccgaatataagtagatg

SEQ ID NO: 2845402 - DNA, 25 bp, Homo sapien
tacaggagcctctaagtggaagtgg

SEQ ID NO: 2845403 - DNA, 25 bp, Homo sapien
gggaggctgtcacttgcacaaggtc

SEQ ID NO: 2845404 - DNA, 25 bp, Homo sapien
tctgagtttggacttagcccctctg

SEQ ID NO: 2845405 - DNA, 25 bp, Homo sapien
gatctgccaacctaagcagggctgg

SEQ ID NO: 2845406 - DNA, 25 bp, Homo sapien
taggtgccagcccaatccacttttg

SEQ ID NO: 2845407 - DNA, 25 bp, Homo sapien
gcagtgggtttagcctgagatgcct

SEQ ID NO: 2845408 - DNA, 25 bp, Homo sapien
caggagtctgcgcttggaattgtca

SEQ ID NO: 2845409 - DNA, 25 bp, Homo sapien
gagagttcccatagctttcaacagt

SEQ ID NO: 2845410 - DNA, 25 bp, Homo sapien
gaatttggtttccatgtacaattcc

SEQ ID NO: 2845411 - DNA, 25 bp, Homo sapien
tccatgtacaattccctgcggagag

SEQ ID NO: 2845412 - DNA, 25 bp, Homo sapien
cctgcggagagttcccatagctttc

SEQ ID NO: 2845413 - DNA, 25 bp, Homo sapien
ttccccttgtgtgacctccgcttgt

SEQ ID NO: 2845414 - DNA, 25 bp, Homo sapien
gtgtgacctccgcttgtccccaggg

SEQ ID NO: 2845415 - DNA, 25 bp, Homo sapien
cttccccttgtgtgacctccgcttg

SEQ ID NO: 2845416 - DNA, 25 bp, Homo sapien
cttgtgtgacctccgcttgtcccca

SEQ ID NO: 2845417 - DNA, 25 bp, Homo sapien
tctgtggtgaactccccgctgacat

SEQ ID NO: 2845418 - DNA, 25 bp, Homo sapien
tgacatccacagcgcttggaggtga

SEQ ID NO: 2845419 - DNA, 25 bp, Homo sapien
tcttggctcctcagttctcggtctg

SEQ ID NO: 2845420 - DNA, 25 bp, Homo sapien
tctcggtctgtggtgaactccccgc

SEQ ID NO: 2845421 - DNA, 25 bp, Homo sapien
ctgtgatgaactgtcggcagatgtt

SEQ ID NO: 2845422 - DNA, 25 bp, Homo sapien
ccttgactgagtctgtgatgaactg

SEQ ID NO: 2845423 - DNA, 25 bp, Homo sapien
tatatccttgactgagtctgtgatg

SEQ ID NO: 2845424 - DNA, 25 bp, Homo sapien
actgagtctgtgatgaactgtcggc

SEQ ID NO: 2845425 - DNA, 25 bp, Homo sapien
aggcatggacttggcttggctttcc

SEQ ID NO: 2845426 - DNA, 25 bp, Homo sapien
ggacatctcttgttctctcgtcttg

SEQ ID NO: 2845427 - DNA, 25 bp, Homo sapien
ctgggtaatttctgaggcatggact

SEQ ID NO: 2845428 - DNA, 25 bp, Homo sapien
ttctctcgtcttgtctggtttgtcc

SEQ ID NO: 2845429 - DNA, 25 bp, Homo sapien
ttcaagccgaccacactggaactaa

SEQ ID NO: 2845430 - DNA, 25 bp, Homo sapien
gtccttcaagccgaccacactggaa

SEQ ID NO: 2845431 - DNA, 25 bp, Homo sapien
cttcatggtccttcaagccgaccac

SEQ ID NO: 2845432 - DNA, 25 bp, Homo sapien
atggtccttcaagccgaccacactg

SEQ ID NO: 2845433 - DNA, 25 bp, Homo sapien
gaagaaagtgttcaacccagagtct

SEQ ID NO: 2845434 - DNA, 25 bp, Homo sapien
aagtgttcaacccagagtctgcagt

SEQ ID NO: 2845435 - DNA, 25 bp, Homo sapien
tgaagaaagtgttcaacccagagtc

SEQ ID NO: 2845436 - DNA, 25 bp, Homo sapien
gaaagtgttcaacccagagtctgca

SEQ ID NO: 2845437 - DNA, 25 bp, Homo sapien
tcagtattggctttcagctctcctg

SEQ ID NO: 2845438 - DNA, 25 bp, Homo sapien
ccttcctcgtcagtattggctttca

SEQ ID NO: 2845439 - DNA, 25 bp, Homo sapien
tctcctggcccgacatcctgtggac

SEQ ID NO: 2845440 - DNA, 25 bp, Homo sapien
ttggcccttcctcgtcagtattggc

SEQ ID NO: 2845441 - DNA, 25 bp, Homo sapien
ggctctaccctggcattctgagtcc

SEQ ID NO: 2845442 - DNA, 25 bp, Homo sapien
taccctggcattctgagtcccccat

SEQ ID NO: 2845443 - DNA, 25 bp, Homo sapien
ctctaccctggcattctgagtcccc

SEQ ID NO: 2845444 - DNA, 25 bp, Homo sapien
aaggctctaccctggcattctgagt

SEQ ID NO: 2845445 - DNA, 25 bp, Homo sapien
tcaacctgctatgtcactaggggca

SEQ ID NO: 2845446 - DNA, 25 bp, Homo sapien
tcgtcaggaagtccatggtcagttc

SEQ ID NO: 2845447 - DNA, 25 bp, Homo sapien
gcattcagagaggtcgtcaggaagt

SEQ ID NO: 2845448 - DNA, 25 bp, Homo sapien
aggaagtccatggtcagttcattga

SEQ ID NO: 2845449 - DNA, 25 bp, Homo sapien
cagtaggaccaaaattagcttctga

SEQ ID NO: 2845450 - DNA, 25 bp, Homo sapien
ccagtaggaccaaaattagcttctg

SEQ ID NO: 2845451 - DNA, 25 bp, Homo sapien
accagtaggaccaaaattagcttct

SEQ ID NO: 2845452 - DNA, 25 bp, Homo sapien
ctaggcagataaggagagtaatgtc

SEQ ID NO: 2845453 - DNA, 25 bp, Homo sapien
aatgtctctgaattcctgttgtttc

SEQ ID NO: 2845454 - DNA, 25 bp, Homo sapien
ggcagataaggagagtaatgtctct

SEQ ID NO: 2845455 - DNA, 25 bp, Homo sapien
gagtggctaggcagataaggagagt

SEQ ID NO: 2845456 - DNA, 25 bp, Homo sapien
ttggagcatgtaatagggaactgtg

SEQ ID NO: 2845457 - DNA, 25 bp, Homo sapien
cttccaagtgtttttcggtctcttg

SEQ ID NO: 2845458 - DNA, 25 bp, Homo sapien
tcttgtttgtctgggttggagcatg

SEQ ID NO: 2845459 - DNA, 25 bp, Homo sapien
gagcatgtaatagggaactgtgttt

SEQ ID NO: 2845460 - DNA, 25 bp, Homo sapien
accaggatgtgtaccagagagggct

SEQ ID NO: 2845461 - DNA, 25 bp, Homo sapien
aaccaggatgtgtaccagagagggc

SEQ ID NO: 2845462 - DNA, 25 bp, Homo sapien
ggccagaagcctcctgtttacaatt

SEQ ID NO: 2845463 - DNA, 25 bp, Homo sapien
cctgtttacaatttccctattcctg

SEQ ID NO: 2845464 - DNA, 25 bp, Homo sapien
ctgtgtgtgtcttcgcctgtaggcc

SEQ ID NO: 2845465 - DNA, 25 bp, Homo sapien
tagcatgaagtaggcctcagaggcc

SEQ ID NO: 2845466 - DNA, 25 bp, Homo sapien
ggacatgcccttaacagacgaacta

SEQ ID NO: 2845467 - DNA, 25 bp, Homo sapien
tagggcaggatctctgtgtagccat

SEQ ID NO: 2845468 - DNA, 25 bp, Homo sapien
gattgtttcgttagcccatgccaag

SEQ ID NO: 2845469 - DNA, 25 bp, Homo sapien
caatactgaccgtcagtgggtggca

SEQ ID NO: 2845470 - DNA, 25 bp, Homo sapien
tgtgtatcaatttaactaactccat

SEQ ID NO: 2845471 - DNA, 25 bp, Homo sapien
ggagaatgcgtcagacccttttctg

SEQ ID NO: 2845472 - DNA, 25 bp, Homo sapien
tatcaatttaactaactccatatac

SEQ ID NO: 2845473 - DNA, 25 bp, Homo sapien
tgtatcaatttaactaactccatat

SEQ ID NO: 2845474 - DNA, 25 bp, Homo sapien
tctgcaaacaaatgtaagacttcgg

SEQ ID NO: 2845475 - DNA, 25 bp, Homo sapien
tcttctgctctgcaaacaaatgtaa

SEQ ID NO: 2845476 - DNA, 25 bp, Homo sapien
caaacaaatgtaagacttcggtcat

SEQ ID NO: 2845477 - DNA, 25 bp, Homo sapien
tgcaaacaaatgtaagacttcggtc

SEQ ID NO: 2845478 - DNA, 25 bp, Homo sapien
caccaaagaacaggttattatcagt

SEQ ID NO: 2845479 - DNA, 25 bp, Homo sapien
accaaagaacaggttattatcagtt

SEQ ID NO: 2845480 - DNA, 25 bp, Homo sapien
acaccaaagaacaggttattatcag

SEQ ID NO: 2845481 - DNA, 25 bp, Homo sapien
ttacatatgtgagcgtttcttgcta

SEQ ID NO: 2845482 - DNA, 25 bp, Homo sapien
tatgtgagcgtttcttgctacggcc

SEQ ID NO: 2845483 - DNA, 25 bp, Homo sapien
tgagcgtttcttgctacggccattt

SEQ ID NO: 2845484 - DNA, 25 bp, Homo sapien
catatgtgagcgtttcttgctacgg

SEQ ID NO: 2845485 - DNA, 25 bp, Homo sapien
tgctggaagagttgggtcagatgcc

SEQ ID NO: 2845486 - DNA, 25 bp, Homo sapien
ggttgacattgaagttcaccagctc

SEQ ID NO: 2845487 - DNA, 25 bp, Homo sapien
caaaatgcccccagatgttgagcca

SEQ ID NO: 2845488 - DNA, 25 bp, Homo sapien
cctgtttgcagtctggagggttgac

SEQ ID NO: 2845489 - DNA, 25 bp, Homo sapien
ttgaaagggtgatgagatgcaagtt

SEQ ID NO: 2845490 - DNA, 25 bp, Homo sapien
ttaatcacgttgtctgatttaatag

SEQ ID NO: 2845491 - DNA, 25 bp, Homo sapien
atagcattgggggtcttaaaaatct

SEQ ID NO: 2845492 - DNA, 25 bp, Homo sapien
tgggtgtccttaatcacgttgtctg

SEQ ID NO: 2845493 - DNA, 25 bp, Homo sapien
agggctcatcaatatactgtgatct

SEQ ID NO: 2845494 - DNA, 25 bp, Homo sapien
atactgtgatctctgaccacccaac

SEQ ID NO: 2845495 - DNA, 25 bp, Homo sapien
ttagggctcatcaatatactgtgat

SEQ ID NO: 2845496 - DNA, 25 bp, Homo sapien
atatactgtgatctctgaccaccca

SEQ ID NO: 2845497 - DNA, 25 bp, Homo sapien
cagtctcagagtatatgcagcagta

SEQ ID NO: 2845498 - DNA, 25 bp, Homo sapien
tgtcctggatctgtacatccgtgta

SEQ ID NO: 2845499 - DNA, 25 bp, Homo sapien
ggataaatgcttaaaacaagatgaa

SEQ ID NO: 2845500 - DNA, 25 bp, Homo sapien
tttatccccaatatccagcgagctg

SEQ ID NO: 2845501 - DNA, 25 bp, Homo sapien
taaaatctccactggttccttcttg

SEQ ID NO: 2845502 - DNA, 25 bp, Homo sapien
cttaaaatctccactggttccttct

SEQ ID NO: 2845503 - DNA, 25 bp, Homo sapien
ctgcttaaaatctccactggttcct

SEQ ID NO: 2845504 - DNA, 25 bp, Homo sapien
aaaatctccactggttccttcttgc

SEQ ID NO: 2845505 - DNA, 25 bp, Homo sapien
tttattaatatttgtaaggtgcaga

SEQ ID NO: 2845506 - DNA, 25 bp, Homo sapien
catttattaatatttgtaaggtgca

SEQ ID NO: 2845507 - DNA, 25 bp, Homo sapien
aacatttattaatatttgtaaggtg

SEQ ID NO: 2845508 - DNA, 25 bp, Homo sapien
ttattggaacatttattaatatttg

SEQ ID NO: 2845509 - DNA, 25 bp, Homo sapien
gtgagtttagttgtcagcagtacac

SEQ ID NO: 2845510 - DNA, 25 bp, Homo sapien
tttagttgtcagcagtacactcaag

SEQ ID NO: 2845511 - DNA, 25 bp, Homo sapien
tcatcagaggtctgctttgcagcct

SEQ ID NO: 2845512 - DNA, 25 bp, Homo sapien
agtttagttgtcagcagtacactca

SEQ ID NO: 2845513 - DNA, 25 bp, Homo sapien
tttgcctctgacacaaagcaaggac

SEQ ID NO: 2845514 - DNA, 25 bp, Homo sapien
gcaaggaccttcagtactagctgat

SEQ ID NO: 2845515 - DNA, 25 bp, Homo sapien
tcttatcatgccttccaaggaaacc

SEQ ID NO: 2845516 - DNA, 25 bp, Homo sapien
tgttcatacacactgttggccattg

SEQ ID NO: 2845517 - DNA, 25 bp, Homo sapien
tccaccaccatcacattgcaaacga

SEQ ID NO: 2845518 - DNA, 25 bp, Homo sapien
catcacattgcaaacgaccaaaagc

SEQ ID NO: 2845519 - DNA, 25 bp, Homo sapien
tcacattgcaaacgaccaaaagcac

SEQ ID NO: 2845520 - DNA, 25 bp, Homo sapien
caccatcacattgcaaacgaccaaa

SEQ ID NO: 2845521 - DNA, 25 bp, Homo sapien
gacaggagctggctatgagacttac

SEQ ID NO: 2845522 - DNA, 25 bp, Homo sapien
cagagctggcccgaaaatgaatcca

SEQ ID NO: 2845523 - DNA, 25 bp, Homo sapien
tcaaaacagagcagggaactaccaa

SEQ ID NO: 2845524 - DNA, 25 bp, Homo sapien
tgaatccatatgagagtcacgtgac

SEQ ID NO: 2845525 - DNA, 25 bp, Homo sapien
tgccctgggagaagatacagcagca

SEQ ID NO: 2845526 - DNA, 25 bp, Homo sapien
cacacagtaggcaccttaatagtca

SEQ ID NO: 2845527 - DNA, 25 bp, Homo sapien
gacaaggtccccagtatccagtaca

SEQ ID NO: 2845528 - DNA, 25 bp, Homo sapien
taagtttaccttgccatgtcctctg

SEQ ID NO: 2845529 - DNA, 25 bp, Homo sapien
ttttccttggccaatgttatgcttg

SEQ ID NO: 2845530 - DNA, 25 bp, Homo sapien
cataatgtcagcttacttaggtcaa

SEQ ID NO: 2845531 - DNA, 25 bp, Homo sapien
tcctctctgggtatctttttctggc

SEQ ID NO: 2845532 - DNA, 25 bp, Homo sapien
taaagagacgttaagccacactgca

SEQ ID NO: 2845533 - DNA, 25 bp, Homo sapien
tcaaggcgtggtaatgactcccaag

SEQ ID NO: 2845534 - DNA, 25 bp, Homo sapien
gggcgtcgaaccaccttcatttgaa

SEQ ID NO: 2845535 - DNA, 25 bp, Homo sapien
taactctttaggaccaggaccctgc

SEQ ID NO: 2845536 - DNA, 25 bp, Homo sapien
gaggacccctcgaaacttctctgga

SEQ ID NO: 2845537 - DNA, 25 bp, Homo sapien
catgcttcttggatatataggtgtt

SEQ ID NO: 2845538 - DNA, 25 bp, Homo sapien
tgagtccgaggaccgcgtttgcagc

SEQ ID NO: 2845539 - DNA, 25 bp, Homo sapien
tgttgtaatggttctcctccagcct

SEQ ID NO: 2845540 - DNA, 25 bp, Homo sapien
tggccatagtgagtccgaggaccgc

SEQ ID NO: 2845541 - DNA, 25 bp, Homo sapien
tctcggtactctttatatacacctc

SEQ ID NO: 2845542 - DNA, 25 bp, Homo sapien
gctttccgcactgagctgcagctga

SEQ ID NO: 2845543 - DNA, 25 bp, Homo sapien
tggccaagtactggccagtctcggt

SEQ ID NO: 2845544 - DNA, 25 bp, Homo sapien
tgagccgtataaaagcccgtcggtg

SEQ ID NO: 2845545 - DNA, 25 bp, Homo sapien
gctttggttggtagatctcgacccc

SEQ ID NO: 2845546 - DNA, 25 bp, Homo sapien
gagtgaaatctagaccaggaaccag

SEQ ID NO: 2845547 - DNA, 25 bp, Homo sapien
ccaatagttagttccctaggaggat

SEQ ID NO: 2845548 - DNA, 25 bp, Homo sapien
ggaattaattctagactcttcggga

SEQ ID NO: 2845549 - DNA, 25 bp, Homo sapien
cttggtgtccagctctctagtgtga

SEQ ID NO: 2845550 - DNA, 25 bp, Homo sapien
cggcttgtgtagctggcttggtgtc

SEQ ID NO: 2845551 - DNA, 25 bp, Homo sapien
ctagtgtgacttcattccagttttc

SEQ ID NO: 2845552 - DNA, 25 bp, Homo sapien
caggctgagcggcttgtgtagctgg

SEQ ID NO: 2845553 - DNA, 25 bp, Homo sapien
ctgcatgattagggatacagacaaa

SEQ ID NO: 2845554 - DNA, 25 bp, Homo sapien
ggcttctgcatgattagggatacag

SEQ ID NO: 2845555 - DNA, 25 bp, Homo sapien
cttctgcatgattagggatacagac

SEQ ID NO: 2845556 - DNA, 25 bp, Homo sapien
tctgcatgattagggatacagacaa

SEQ ID NO: 2845557 - DNA, 25 bp, Homo sapien
cacaataacaaaagctgcaattgtt

SEQ ID NO: 2845558 - DNA, 25 bp, Homo sapien
aacaaaagctgcaattgtttttgag

SEQ ID NO: 2845559 - DNA, 25 bp, Homo sapien
tgggagtgatacagcaacacaataa

SEQ ID NO: 2845560 - DNA, 25 bp, Homo sapien
ctgggagtgatacagcaacacaata

SEQ ID NO: 2845561 - DNA, 25 bp, Homo sapien
cagaagagctagcttaaccccaagg

SEQ ID NO: 2845562 - DNA, 25 bp, Homo sapien
agttgtgccagtgttacacacccag

SEQ ID NO: 2845563 - DNA, 25 bp, Homo sapien
ttctgaggaccggagagcattccct

SEQ ID NO: 2845564 - DNA, 25 bp, Homo sapien
actgtggactccagaagttgtgcca

SEQ ID NO: 2845565 - DNA, 25 bp, Homo sapien
ctcgtgtaaacgccagcatccatcc

SEQ ID NO: 2845566 - DNA, 25 bp, Homo sapien
tcgtgtaaacgccagcatccatccc

SEQ ID NO: 2845567 - DNA, 25 bp, Homo sapien
gaagtggtcatttgttcttagagcc

SEQ ID NO: 2845568 - DNA, 25 bp, Homo sapien
gcaacctctggtgcatggtccatga

SEQ ID NO: 2845569 - DNA, 25 bp, Homo sapien
atctgagggtacagcgtgagcacca

SEQ ID NO: 2845570 - DNA, 25 bp, Homo sapien
gcgtgagcaccagcgaagtggtcat

SEQ ID NO: 2845571 - DNA, 25 bp, Homo sapien
tccactgtgccatccggaaggatcc

SEQ ID NO: 2845572 - DNA, 25 bp, Homo sapien
cctgtcccttgtcccatccactgtg

SEQ ID NO: 2845573 - DNA, 25 bp, Homo sapien
ccggaaggatcctcaggaagtggcc

SEQ ID NO: 2845574 - DNA, 25 bp, Homo sapien
cccgttgctacagtagaggagtttg

SEQ ID NO: 2845575 - DNA, 25 bp, Homo sapien
gattaaacttctcggtcagggctgt

SEQ ID NO: 2845576 - DNA, 25 bp, Homo sapien
gaggcagattaaacttctcggtcag

SEQ ID NO: 2845577 - DNA, 25 bp, Homo sapien
aacttctcggtcagggctgtgaagg

SEQ ID NO: 2845578 - DNA, 25 bp, Homo sapien
cagattaaacttctcggtcagggct

SEQ ID NO: 2845579 - DNA, 25 bp, Homo sapien
gctgctgcttgtggcgctttcaaga

SEQ ID NO: 2845580 - DNA, 25 bp, Homo sapien
tcttagcccaaacattgtgctgctg

SEQ ID NO: 2845581 - DNA, 25 bp, Homo sapien
caggtcttagcccaaacattgtgct

SEQ ID NO: 2845582 - DNA, 25 bp, Homo sapien
ggtcttagcccaaacattgtgctgc

SEQ ID NO: 2845583 - DNA, 25 bp, Homo sapien
ccaggtcttagcccaaacattgtgc

SEQ ID NO: 2845584 - DNA, 25 bp, Homo sapien
taggtgggttcattcccctgtgctc

SEQ ID NO: 2845585 - DNA, 25 bp, Homo sapien
ggtgggttcattcccctgtgctctc

SEQ ID NO: 2845586 - DNA, 25 bp, Homo sapien
tttaggtgggttcattcccctgtgc

SEQ ID NO: 2845587 - DNA, 25 bp, Homo sapien
cagtttaggtgggttcattcccctg

SEQ ID NO: 2845588 - DNA, 25 bp, Homo sapien
atttcccatcacgtctccctccaaa

SEQ ID NO: 2845589 - DNA, 25 bp, Homo sapien
tcccatctatatccccctgcctaaa

SEQ ID NO: 2845590 - DNA, 25 bp, Homo sapien
tctatatccccctgcctaaactctt

SEQ ID NO: 2845591 - DNA, 25 bp, Homo sapien
ctctgggaggttcagcccttactcc

SEQ ID NO: 2845592 - DNA, 25 bp, Homo sapien
ccatgggcagaatgctgtagacatc

SEQ ID NO: 2845593 - DNA, 25 bp, Homo sapien
ctgccatgggcagaatgctgtagac

SEQ ID NO: 2845594 - DNA, 25 bp, Homo sapien
gcctgccatgggcagaatgctgtag

SEQ ID NO: 2845595 - DNA, 25 bp, Homo sapien
tcagtgcctgccatgggcagaatgc

SEQ ID NO: 2845596 - DNA, 25 bp, Homo sapien
tgtttttggctaggaaggaaatgaa

SEQ ID NO: 2845597 - DNA, 25 bp, Homo sapien
gaatagtattctctgtgcaatcacc

SEQ ID NO: 2845598 - DNA, 25 bp, Homo sapien
taccctagcctgttttaatgcccca

SEQ ID NO: 2845599 - DNA, 25 bp, Homo sapien
gaaaagggaagctgtcctcgactga

SEQ ID NO: 2845600 - DNA, 25 bp, Homo sapien
agcaggtacaccaatgcatctgcac

SEQ ID NO: 2845601 - DNA, 25 bp, Homo sapien
tctctgaactgagccagaaaccgga

SEQ ID NO: 2845602 - DNA, 25 bp, Homo sapien
ctgagccagaaaccggatctcaaaa

SEQ ID NO: 2845603 - DNA, 25 bp, Homo sapien
gaactgagccagaaaccggatctca

SEQ ID NO: 2845604 - DNA, 25 bp, Homo sapien
gccagaaaccggatctcaaaaactg

SEQ ID NO: 2845605 - DNA, 25 bp, Homo sapien
gaagaaaccagcttgtactgcctat

SEQ ID NO: 2845606 - DNA, 25 bp, Homo sapien
tactgcctatcaacagatttgcaaa

SEQ ID NO: 2845607 - DNA, 25 bp, Homo sapien
attgaatgttgtgatataattctcc

SEQ ID NO: 2845608 - DNA, 25 bp, Homo sapien
ccagcttgtactgcctatcaacaga

SEQ ID NO: 2845609 - DNA, 25 bp, Homo sapien
aatttctcagtagggaccaacagct

SEQ ID NO: 2845610 - DNA, 25 bp, Homo sapien
cattcctgggtgctaacagtaaaga

SEQ ID NO: 2845611 - DNA, 25 bp, Homo sapien
taggaggcaataccctgagttactg

SEQ ID NO: 2845612 - DNA, 25 bp, Homo sapien
ggtgaccgctaaggaatcaggcttc

SEQ ID NO: 2845613 - DNA, 25 bp, Homo sapien
tgagcagtgaactcactcactaagg

SEQ ID NO: 2845614 - DNA, 25 bp, Homo sapien
gagcagtgaactcactcactaagga

SEQ ID NO: 2845615 - DNA, 25 bp, Homo sapien
gtgaactcactcactaaggaatccc

SEQ ID NO: 2845616 - DNA, 25 bp, Homo sapien
gcagtgaactcactcactaaggaat

SEQ ID NO: 2845617 - DNA, 25 bp, Homo sapien
tctctgaactctccttctagagtca

SEQ ID NO: 2845618 - DNA, 25 bp, Homo sapien
tcaattttggttgcttacaattaag

SEQ ID NO: 2845619 - DNA, 25 bp, Homo sapien
agcaaccccaggttctctgaactct

SEQ ID NO: 2845620 - DNA, 25 bp, Homo sapien
actctccttctagagtcaattttgg

SEQ ID NO: 2845621 - DNA, 25 bp, Homo sapien
cttagtataaatcctctggctgttg

SEQ ID NO: 2845622 - DNA, 25 bp, Homo sapien
tggtttccaaaactccctgagcatg

SEQ ID NO: 2845623 - DNA, 25 bp, Homo sapien
tgttggtttccaaaactccctgagc

SEQ ID NO: 2845624 - DNA, 25 bp, Homo sapien
aatcctctggctgttggtttccaaa

SEQ ID NO: 2845625 - DNA, 25 bp, Homo sapien
aaagacacatccgacctgagccagc

SEQ ID NO: 2845626 - DNA, 25 bp, Homo sapien
cgagtgtgaattgttaaaaagacac

SEQ ID NO: 2845627 - DNA, 25 bp, Homo sapien
gagtttatgctcatttctgtggcct

SEQ ID NO: 2845628 - DNA, 25 bp, Homo sapien
tggagctgtgcccacatatcgagtg

SEQ ID NO: 2845629 - DNA, 25 bp, Homo sapien
gtctgccccttcgaggttcatctga

SEQ ID NO: 2845630 - DNA, 25 bp, Homo sapien
tggacattgtgttgcgatttgatac

SEQ ID NO: 2845631 - DNA, 25 bp, Homo sapien
cataaataactagtggaatcttgga

SEQ ID NO: 2845632 - DNA, 25 bp, Homo sapien
gcaaaagtggggcataaataactag

SEQ ID NO: 2845633 - DNA, 25 bp, Homo sapien
ttggatgacattgcctggctcttcc

SEQ ID NO: 2845634 - DNA, 25 bp, Homo sapien
cttcgactccatgaatgttgtggcc

SEQ ID NO: 2845635 - DNA, 25 bp, Homo sapien
tggcctcgttggaaggaaacactcc

SEQ ID NO: 2845636 - DNA, 25 bp, Homo sapien
cctttgcctggcgagtgggccccag

SEQ ID NO: 2845637 - DNA, 25 bp, Homo sapien
agaaagagggagaaggggcttctct

SEQ ID NO: 2845638 - DNA, 25 bp, Homo sapien
gagggagaaggggcttctcttctac

SEQ ID NO: 2845639 - DNA, 25 bp, Homo sapien
aagagggagaaggggcttctcttct

SEQ ID NO: 2845640 - DNA, 25 bp, Homo sapien
gagagaaagagggagaaggggcttc

SEQ ID NO: 2845641 - DNA, 25 bp, Homo sapien
tgttatagtgaaacaggcatgtatt

SEQ ID NO: 2845642 - DNA, 25 bp, Homo sapien
ttggttccatggtcgccatccttgt

SEQ ID NO: 2845643 - DNA, 25 bp, Homo sapien
tcaccagatcttgcgtcagtttttt

SEQ ID NO: 2845644 - DNA, 25 bp, Homo sapien
aaatgcttcaccagatcttgcgtca

SEQ ID NO: 2845645 - DNA, 25 bp, Homo sapien
ctgtgcctggcatacaaaatgtttt

SEQ ID NO: 2845646 - DNA, 25 bp, Homo sapien
aggcgtgcacaactgtgcctggcat

SEQ ID NO: 2845647 - DNA, 25 bp, Homo sapien
tacaggcgtgcacaactgtgcctgg

SEQ ID NO: 2845648 - DNA, 25 bp, Homo sapien
tgtgcctggcatacaaaatgtttta

SEQ ID NO: 2845649 - DNA, 25 bp, Homo sapien
cactaagccgactaagccagagcag

SEQ ID NO: 2845650 - DNA, 25 bp, Homo sapien
ccactagggtggatttttccaggct

SEQ ID NO: 2845651 - DNA, 25 bp, Homo sapien
aggcttccgaagtgagttctctgca

SEQ ID NO: 2845652 - DNA, 25 bp, Homo sapien
tctgcagagatgacactaagccgac

SEQ ID NO: 2845653 - DNA, 25 bp, Homo sapien
tgatgcaaaagtctcagctttactt

SEQ ID NO: 2845654 - DNA, 25 bp, Homo sapien
atgcaaaagtctcagctttactttc

SEQ ID NO: 2845655 - DNA, 25 bp, Homo sapien
gatgcaaaagtctcagctttacttt

SEQ ID NO: 2845656 - DNA, 25 bp, Homo sapien
ttgatgcaaaagtctcagctttact

SEQ ID NO: 2845657 - DNA, 25 bp, Homo sapien
caaattgggcttcgggtactctgca

SEQ ID NO: 2845658 - DNA, 25 bp, Homo sapien
tgggcttcgggtactctgcactcct

SEQ ID NO: 2845659 - DNA, 25 bp, Homo sapien
tgcactcctcctttcagcgccctct

SEQ ID NO: 2845660 - DNA, 25 bp, Homo sapien
ggcaaattgggcttcgggtactctg

SEQ ID NO: 2845661 - DNA, 25 bp, Homo sapien
gggctctgcctggactaatctctgc

SEQ ID NO: 2845662 - DNA, 25 bp, Homo sapien
taatctctgccattcgccacagtcc

SEQ ID NO: 2845663 - DNA, 25 bp, Homo sapien
ctgccattcgccacagtccctgatg

SEQ ID NO: 2845664 - DNA, 25 bp, Homo sapien
aaatcaccttctgaatgcacgcctg

SEQ ID NO: 2845665 - DNA, 25 bp, Homo sapien
gaggctatgaaagaaggacttgttc

SEQ ID NO: 2845666 - DNA, 25 bp, Homo sapien
tcttcctatgtccactcactttgtc

SEQ ID NO: 2845667 - DNA, 25 bp, Homo sapien
caccagttatagtggagtaggaccc

SEQ ID NO: 2845668 - DNA, 25 bp, Homo sapien
ctctctatgcatgacaccagttata

SEQ ID NO: 2845669 - DNA, 25 bp, Homo sapien
cactgggtcggggagctaactcgta

SEQ ID NO: 2845670 - DNA, 25 bp, Homo sapien
ctcccactgggtcggggagctaact

SEQ ID NO: 2845671 - DNA, 25 bp, Homo sapien
cagccgggatgctcaagtcctccca

SEQ ID NO: 2845672 - DNA, 25 bp, Homo sapien
gcctggctcgccctcagccgggatg

SEQ ID NO: 2845673 - DNA, 25 bp, Homo sapien
gtgtcttcttctcagagtagcccgg

SEQ ID NO: 2845674 - DNA, 25 bp, Homo sapien
agagtagcccggctctctgaacctc

SEQ ID NO: 2845675 - DNA, 25 bp, Homo sapien
aggccgagggctgtacctctctcca

SEQ ID NO: 2845676 - DNA, 25 bp, Homo sapien
ctaaagagcttgtaggccgagggct

SEQ ID NO: 2845677 - DNA, 25 bp, Homo sapien
tccagataccatgccacagagctgg

SEQ ID NO: 2845678 - DNA, 25 bp, Homo sapien
tacccgtccctagggctctgtggga

SEQ ID NO: 2845679 - DNA, 25 bp, Homo sapien
agctctaagcaacccctactctgga

SEQ ID NO: 2845680 - DNA, 25 bp, Homo sapien
tcagcctctaggtctatctccggtc

SEQ ID NO: 2845681 - DNA, 25 bp, Homo sapien
ctttgccttggctctggggtgcttt

SEQ ID NO: 2845682 - DNA, 25 bp, Homo sapien
ctttctggggcagtgacagcttctg

SEQ ID NO: 2845683 - DNA, 25 bp, Homo sapien
tctttgccttggctctggggtgctt

SEQ ID NO: 2845684 - DNA, 25 bp, Homo sapien
ggtgctttctttctggggcagtgac

SEQ ID NO: 2845685 - DNA, 25 bp, Homo sapien
ctaccaggacagctgcaggcaggct

SEQ ID NO: 2845686 - DNA, 25 bp, Homo sapien
taccaggacagctgcaggcaggctg

SEQ ID NO: 2845687 - DNA, 25 bp, Homo sapien
aaaaggaggcgatgccctgattccc

SEQ ID NO: 2845688 - DNA, 25 bp, Homo sapien
cccattcaccatcagaagggagtgt

SEQ ID NO: 2845689 - DNA, 25 bp, Homo sapien
cctgattcccctggagcgaaggctg

SEQ ID NO: 2845690 - DNA, 25 bp, Homo sapien
cctgctccctttctggtatgaatgg

SEQ ID NO: 2845691 - DNA, 25 bp, Homo sapien
tgttagtaggttggcctcctagcct

SEQ ID NO: 2845692 - DNA, 25 bp, Homo sapien
ctgttagtaggttggcctcctagcc

SEQ ID NO: 2845693 - DNA, 25 bp, Homo sapien
ttggcctcctagccttggggatcct

SEQ ID NO: 2845694 - DNA, 25 bp, Homo sapien
ctaattccaccctttcatactgatc

SEQ ID NO: 2845695 - DNA, 25 bp, Homo sapien
tccaccctttcatactgatcagctt

SEQ ID NO: 2845696 - DNA, 25 bp, Homo sapien
aattccaccctttcatactgatcag

SEQ ID NO: 2845697 - DNA, 25 bp, Homo sapien
ttccaccctttcatactgatcagct

SEQ ID NO: 2845698 - DNA, 25 bp, Homo sapien
ggtatctgatctcatcacacttctg

SEQ ID NO: 2845699 - DNA, 25 bp, Homo sapien
ttctgccaggaggtgaaatcgaaga

SEQ ID NO: 2845700 - DNA, 25 bp, Homo sapien
tattctctgggacgcaaaaccatgg

SEQ ID NO: 2845701 - DNA, 25 bp, Homo sapien
ggctacattcttgatgctcagtgtc

SEQ ID NO: 2845702 - DNA, 25 bp, Homo sapien
cccgttctgatgaggagtgctagca

SEQ ID NO: 2845703 - DNA, 25 bp, Homo sapien
tccaagggctttgcccgttctgatg

SEQ ID NO: 2845704 - DNA, 25 bp, Homo sapien
aggccatgcaggttccaagggcttt

SEQ ID NO: 2845705 - DNA, 25 bp, Homo sapien
ctttgcccgttctgatgaggagtgc

SEQ ID NO: 2845706 - DNA, 25 bp, Homo sapien
tcctgctctgtagcttgagtggagc

SEQ ID NO: 2845707 - DNA, 25 bp, Homo sapien
ggagcaggagatgggtccgtggagg

SEQ ID NO: 2845708 - DNA, 25 bp, Homo sapien
gctgagtcctgctctgtagcttgag

SEQ ID NO: 2845709 - DNA, 25 bp, Homo sapien
tgagtggagcaggagatgggtccgt

SEQ ID NO: 2845710 - DNA, 25 bp, Homo sapien
gaaccatggattaatgcagctgctg

SEQ ID NO: 2845711 - DNA, 25 bp, Homo sapien
tactcatgtataagattcagaggca

SEQ ID NO: 2845712 - DNA, 25 bp, Homo sapien
tattcctgccctgtaaatgcagata

SEQ ID NO: 2845713 - DNA, 25 bp, Homo sapien
ccaacaattatagaagaataggcca

SEQ ID NO: 2845714 - DNA, 25 bp, Homo sapien
ggaattcagacattcatccaaagga

SEQ ID NO: 2845715 - DNA, 25 bp, Homo sapien
gaaagtgatttctgcggcttaactg

SEQ ID NO: 2845716 - DNA, 25 bp, Homo sapien
caatgtgtgactggtccatgcccac

SEQ ID NO: 2845717 - DNA, 25 bp, Homo sapien
tcagagacaatgtacatgggagtgc

SEQ ID NO: 2845718 - DNA, 25 bp, Homo sapien
ttaagtcatcgctagcaggttcgag

SEQ ID NO: 2845719 - DNA, 25 bp, Homo sapien
atcgctagcaggttcgagcggccca

SEQ ID NO: 2845720 - DNA, 25 bp, Homo sapien
agtcatcgctagcaggttcgagcgg

SEQ ID NO: 2845721 - DNA, 25 bp, Homo sapien
tagcaggttcgagcggcccagacac

SEQ ID NO: 2845722 - DNA, 25 bp, Homo sapien
gagtacagtggcatgtggcatgatc

SEQ ID NO: 2845723 - DNA, 25 bp, Homo sapien
gttgaagtgattctcgtgcctcagc

SEQ ID NO: 2845724 - DNA, 25 bp, Homo sapien
gctcactgcaacctctgccttccag

SEQ ID NO: 2845725 - DNA, 25 bp, Homo sapien
tacagtggcatgtggcatgatctcg

SEQ ID NO: 2845726 - DNA, 25 bp, Homo sapien
caactgttacagagctattaccttg

SEQ ID NO: 2845727 - DNA, 25 bp, Homo sapien
catactaatagtacagttgaccatc

SEQ ID NO: 2845728 - DNA, 25 bp, Homo sapien
gagaagatacattaccagagtgtca

SEQ ID NO: 2845729 - DNA, 25 bp, Homo sapien
tgggaaaagagcatcattactgaac

SEQ ID NO: 2845730 - DNA, 25 bp, Homo sapien
gattgggcagactgtgagcagccta

SEQ ID NO: 2845731 - DNA, 25 bp, Homo sapien
gaggccaaggcaacgcagttactcc

SEQ ID NO: 2845732 - DNA, 25 bp, Homo sapien
tattttagtattaggcaccaccagg

SEQ ID NO: 2845733 - DNA, 25 bp, Homo sapien
tgagataatccctgaagccgacctg

SEQ ID NO: 2845734 - DNA, 25 bp, Homo sapien
ttcttttccgctatgtcccagcctt

SEQ ID NO: 2845735 - DNA, 25 bp, Homo sapien
ttttccgctatgtcccagcctttct

SEQ ID NO: 2845736 - DNA, 25 bp, Homo sapien
tcttttccgctatgtcccagccttt

SEQ ID NO: 2845737 - DNA, 25 bp, Homo sapien
tttccgctatgtcccagcctttctc

SEQ ID NO: 2845738 - DNA, 25 bp, Homo sapien
cagctggtgcaattctgcattccca

SEQ ID NO: 2845739 - DNA, 25 bp, Homo sapien
tcagatcagctggtgcaattctgca

SEQ ID NO: 2845740 - DNA, 25 bp, Homo sapien
tcccagcagcactctgttcttcctg

SEQ ID NO: 2845741 - DNA, 25 bp, Homo sapien
gcagcactctgttcttcctgttttg

SEQ ID NO: 2845742 - DNA, 25 bp, Homo sapien
tatttggctgatgaattcttctcaa

SEQ ID NO: 2845743 - DNA, 25 bp, Homo sapien
gaattcttctcaaaatgatacttta

SEQ ID NO: 2845744 - DNA, 25 bp, Homo sapien
ggcagtatttggctgatgaattctt

SEQ ID NO: 2845745 - DNA, 25 bp, Homo sapien
agtatttggctgatgaattcttctc

SEQ ID NO: 2845746 - DNA, 25 bp, Homo sapien
ttcctcttcgcttcctgtagtatga

SEQ ID NO: 2845747 - DNA, 25 bp, Homo sapien
tcttcgcttcctgtagtatgagggt

SEQ ID NO: 2845748 - DNA, 25 bp, Homo sapien
cttcctgtagtatgagggttgttcg

SEQ ID NO: 2845749 - DNA, 25 bp, Homo sapien
tagtatgagggttgttcgggcagac

SEQ ID NO: 2845750 - DNA, 25 bp, Homo sapien
cggtctgccgttgtttgtggaggag

SEQ ID NO: 2845751 - DNA, 25 bp, Homo sapien
tctgccgttgtttgtggaggaggga

SEQ ID NO: 2845752 - DNA, 25 bp, Homo sapien
ttgtttgtggaggagggagagtgag

SEQ ID NO: 2845753 - DNA, 25 bp, Homo sapien
ctgccgttgtttgtggaggagggag

SEQ ID NO: 2845754 - DNA, 25 bp, Homo sapien
tgcgctctttctgtgtgagcaaggg

SEQ ID NO: 2845755 - DNA, 25 bp, Homo sapien
tctttctgtgtgagcaagggtcatg

SEQ ID NO: 2845756 - DNA, 25 bp, Homo sapien
tatttgcgctctttctgtgtgagca

SEQ ID NO: 2845757 - DNA, 25 bp, Homo sapien
ctgatatttgcgctctttctgtgtg

SEQ ID NO: 2845758 - DNA, 25 bp, Homo sapien
tgtcctctagcaatagtttgggttt

SEQ ID NO: 2845759 - DNA, 25 bp, Homo sapien
ccttccggaacttgataaaataatg

SEQ ID NO: 2845760 - DNA, 25 bp, Homo sapien
tgacagtctcgctccttccggaact

SEQ ID NO: 2845761 - DNA, 25 bp, Homo sapien
gataagcacttgttctagagggttg

SEQ ID NO: 2845762 - DNA, 25 bp, Homo sapien
tgcattctcgcatgttgatgcattt

SEQ ID NO: 2845763 - DNA, 25 bp, Homo sapien
cctgtggactgccagcagttgaatt

SEQ ID NO: 2845764 - DNA, 25 bp, Homo sapien
cacatgcattctcgcatgttgatgc

SEQ ID NO: 2845765 - DNA, 25 bp, Homo sapien
cagcagttgaattggttttccatga

SEQ ID NO: 2845766 - DNA, 25 bp, Homo sapien
gcaagtgtgaaaagtgttgggagaa

SEQ ID NO: 2845767 - DNA, 25 bp, Homo sapien
agcaagtgtgaaaagtgttgggaga

SEQ ID NO: 2845768 - DNA, 25 bp, Homo sapien
gctgcccatactgagcaagtgtgaa

SEQ ID NO: 2845769 - DNA, 25 bp, Homo sapien
attcttccaagaacagtggaaatgt

SEQ ID NO: 2845770 - DNA, 25 bp, Homo sapien
tccaccttcagcgtacgatgtgtga

SEQ ID NO: 2845771 - DNA, 25 bp, Homo sapien
caagaacagtggaaatgttgcacaa

SEQ ID NO: 2845772 - DNA, 25 bp, Homo sapien
ccttcagcgtacgatgtgtgaggag

SEQ ID NO: 2845773 - DNA, 25 bp, Homo sapien
catgctccactgtcgcactggatct

SEQ ID NO: 2845774 - DNA, 25 bp, Homo sapien
catgacatcccggttgttgttcctg

SEQ ID NO: 2845775 - DNA, 25 bp, Homo sapien
agtgcgcccgcatgacatcccggtt

SEQ ID NO: 2845776 - DNA, 25 bp, Homo sapien
tctcctctgcgcacacatgctccac

SEQ ID NO: 2845777 - DNA, 25 bp, Homo sapien
cagagaagattagctgggcagagcc

SEQ ID NO: 2845778 - DNA, 25 bp, Homo sapien
ccaagagtgcttggctctccagctg

SEQ ID NO: 2845779 - DNA, 25 bp, Homo sapien
gcagagcctgtattggcagctccag

SEQ ID NO: 2845780 - DNA, 25 bp, Homo sapien
caggtttaatatttgcaggctcaga

SEQ ID NO: 2845781 - DNA, 25 bp, Homo sapien
ccttgcttcctgtggtattagtggc

SEQ ID NO: 2845782 - DNA, 25 bp, Homo sapien
ggattcagttttgatcctaattatg

SEQ ID NO: 2845783 - DNA, 25 bp, Homo sapien
cctaattatgctgtgtggactgacg

SEQ ID NO: 2845784 - DNA, 25 bp, Homo sapien
tattctgatgcttaggagttgccac

SEQ ID NO: 2845785 - DNA, 25 bp, Homo sapien
tccaacctgctggtaaacttccact

SEQ ID NO: 2845786 - DNA, 25 bp, Homo sapien
aagattctcctttggttgattctcc

SEQ ID NO: 2845787 - DNA, 25 bp, Homo sapien
tctccaacctgctggtaaacttcca

SEQ ID NO: 2845788 - DNA, 25 bp, Homo sapien
ctcctttctccaacctgctggtaaa

SEQ ID NO: 2845789 - DNA, 25 bp, Homo sapien
acatcatccgcctgggggagataag

SEQ ID NO: 2845790 - DNA, 25 bp, Homo sapien
gggagataagaggttttctgaatct

SEQ ID NO: 2845791 - DNA, 25 bp, Homo sapien
gagataagaggttttctgaatctgc

SEQ ID NO: 2845792 - DNA, 25 bp, Homo sapien
cgtggctgatgtggtcggtgggcac

SEQ ID NO: 2845793 - DNA, 25 bp, Homo sapien
gagagacactgtggtggtgacttca

SEQ ID NO: 2845794 - DNA, 25 bp, Homo sapien
tgtggtggtgacttcatccctatac

SEQ ID NO: 2845795 - DNA, 25 bp, Homo sapien
actgtggtggtgacttcatccctat

SEQ ID NO: 2845796 - DNA, 25 bp, Homo sapien
gtggtgacttcatccctatacccct

SEQ ID NO: 2845797 - DNA, 25 bp, Homo sapien
tgggaggttcacctctgatgaaggc

SEQ ID NO: 2845798 - DNA, 25 bp, Homo sapien
taatggacttatggagtgcccaact

SEQ ID NO: 2845799 - DNA, 25 bp, Homo sapien
tcagtcaagcagtagagtgttgggc

SEQ ID NO: 2845800 - DNA, 25 bp, Homo sapien
catgaagggatatgatcctcatcct

SEQ ID NO: 2845801 - DNA, 25 bp, Homo sapien
cagctgtctgtcatgggtcctctct

SEQ ID NO: 2845802 - DNA, 25 bp, Homo sapien
tcaggtattccacctgtaagccagc

SEQ ID NO: 2845803 - DNA, 25 bp, Homo sapien
tgaagtctctctggggctcgtgtcc

SEQ ID NO: 2845804 - DNA, 25 bp, Homo sapien
tctctggagactctcaggtattcca

SEQ ID NO: 2845805 - DNA, 25 bp, Homo sapien
cgagtctccgtagacatttgggtct

SEQ ID NO: 2845806 - DNA, 25 bp, Homo sapien
tgtaatctcataaacagacatggaa

SEQ ID NO: 2845807 - DNA, 25 bp, Homo sapien
tgaagctcttctgaacccgaaccat

SEQ ID NO: 2845808 - DNA, 25 bp, Homo sapien
tatctttgtgtaaatgaagctcttc

SEQ ID NO: 2845809 - DNA, 25 bp, Homo sapien
ggaaagctgtcgagtaaccctggaa

SEQ ID NO: 2845810 - DNA, 25 bp, Homo sapien
caggatcctgaatgtgttgctaaac

SEQ ID NO: 2845811 - DNA, 25 bp, Homo sapien
gaggtgccagcttagagaaaattcc

SEQ ID NO: 2845812 - DNA, 25 bp, Homo sapien
tgagttggtatagccagtggtccca

SEQ ID NO: 2845813 - DNA, 25 bp, Homo sapien
tgccgtggttatacatctaggaagc

SEQ ID NO: 2845814 - DNA, 25 bp, Homo sapien
tgccctgaggtgtaatcctggtaac

SEQ ID NO: 2845815 - DNA, 25 bp, Homo sapien
tagttcagttgctagtctgccgtgg

SEQ ID NO: 2845816 - DNA, 25 bp, Homo sapien
cctggtaacgctgggagacaagtaa

SEQ ID NO: 2845817 - DNA, 25 bp, Homo sapien
taaagcattgctgattcatatcctc

SEQ ID NO: 2845818 - DNA, 25 bp, Homo sapien
taaagcaatgctagggtaaaggaaa

SEQ ID NO: 2845819 - DNA, 25 bp, Homo sapien
agtcatgtctcaccagtcagcttca

SEQ ID NO: 2845820 - DNA, 25 bp, Homo sapien
gcataatggatgatataatggccag

SEQ ID NO: 2845821 - DNA, 25 bp, Homo sapien
ctggcaaacatagacgtatctcttg

SEQ ID NO: 2845822 - DNA, 25 bp, Homo sapien
gatctggcaaacatagacgtatctc

SEQ ID NO: 2845823 - DNA, 25 bp, Homo sapien
caaacatagacgtatctcttgaggg

SEQ ID NO: 2845824 - DNA, 25 bp, Homo sapien
catagacgtatctcttgagggctag

SEQ ID NO: 2845825 - DNA, 25 bp, Homo sapien
gctgtgtttgtaaatgtatgttggt

SEQ ID NO: 2845826 - DNA, 25 bp, Homo sapien
ggctgtgtttgtaaatgtatgttgg

SEQ ID NO: 2845827 - DNA, 25 bp, Homo sapien
gtgtttgtaaatgtatgttggttgc

SEQ ID NO: 2845828 - DNA, 25 bp, Homo sapien
ctggctgtgtttgtaaatgtatgtt

SEQ ID NO: 2845829 - DNA, 25 bp, Homo sapien
cttttattattaatttgcttactgg

SEQ ID NO: 2845830 - DNA, 25 bp, Homo sapien
tcactgctacctttaccttcctggt

SEQ ID NO: 2845831 - DNA, 25 bp, Homo sapien
tgcacctggctgactttttaaatat

SEQ ID NO: 2845832 - DNA, 25 bp, Homo sapien
ggctcactgctacctttaccttcct

SEQ ID NO: 2845833 - DNA, 25 bp, Homo sapien
agcctttgagtagcattttgcagaa

SEQ ID NO: 2845834 - DNA, 25 bp, Homo sapien
gcctttctagttttgattattggag

SEQ ID NO: 2845835 - DNA, 25 bp, Homo sapien
tatataacttcacagtcctcttttc

SEQ ID NO: 2845836 - DNA, 25 bp, Homo sapien
cagacattgcacattacctaaattg

SEQ ID NO: 2845837 - DNA, 25 bp, Homo sapien
gatgacagttgagtaccagttccac

SEQ ID NO: 2845838 - DNA, 25 bp, Homo sapien
catggccatcgggtctgaaagaggc

SEQ ID NO: 2845839 - DNA, 25 bp, Homo sapien
gacatagaaggttccaggtgcaccc

SEQ ID NO: 2845840 - DNA, 25 bp, Homo sapien
cagttccacacaacctagagtcagg

SEQ ID NO: 2845841 - DNA, 25 bp, Homo sapien
ggatgctttgagctgcaagaaacag

SEQ ID NO: 2845842 - DNA, 25 bp, Homo sapien
tttctcagctcatgaaggactcagg

SEQ ID NO: 2845843 - DNA, 25 bp, Homo sapien
tgtgttggctagctcctcgcagagt

SEQ ID NO: 2845844 - DNA, 25 bp, Homo sapien
ccttgcatgttagtgcttgtccaga

SEQ ID NO: 2845845 - DNA, 25 bp, Homo sapien
tataagtcactattcttgattctct

SEQ ID NO: 2845846 - DNA, 25 bp, Homo sapien
ttataagtcactattcttgattctc

SEQ ID NO: 2845847 - DNA, 25 bp, Homo sapien
tcagtaggcggtaaaggaacacaaa

SEQ ID NO: 2845848 - DNA, 25 bp, Homo sapien
ttgcaagcaggtcttgctatgtact

SEQ ID NO: 2845849 - DNA, 25 bp, Homo sapien
tgggtcttgttggtgtattgcaagc

SEQ ID NO: 2845850 - DNA, 25 bp, Homo sapien
caggtcttgctatgtacttggagat

SEQ ID NO: 2845851 - DNA, 25 bp, Homo sapien
tgtctggtatcctggcctttttcca

SEQ ID NO: 2845852 - DNA, 25 bp, Homo sapien
catctatttcagtctgtctggtatc

SEQ ID NO: 2845853 - DNA, 25 bp, Homo sapien
cactgacttttcgtccattatagaa

SEQ ID NO: 2845854 - DNA, 25 bp, Homo sapien
ggtactgtaaggatccactgacttt

SEQ ID NO: 2845855 - DNA, 25 bp, Homo sapien
tttgttcccttgagcggaatgcatg

SEQ ID NO: 2845856 - DNA, 25 bp, Homo sapien
gagcggaatgcatggggtgcttatg

SEQ ID NO: 2845857 - DNA, 25 bp, Homo sapien
aatgcatggggtgcttatgggaaat

SEQ ID NO: 2845858 - DNA, 25 bp, Homo sapien
ttgagcggaatgcatggggtgctta

SEQ ID NO: 2845859 - DNA, 25 bp, Homo sapien
tgccctctccagcgtggcatacaaa

SEQ ID NO: 2845860 - DNA, 25 bp, Homo sapien
tctccagcgtggcatacaaagacat

SEQ ID NO: 2845861 - DNA, 25 bp, Homo sapien
ccctctccagcgtggcatacaaaga

SEQ ID NO: 2845862 - DNA, 25 bp, Homo sapien
cctctccagcgtggcatacaaagac

SEQ ID NO: 2845863 - DNA, 25 bp, Homo sapien
tccttaaccgaaagaatgtcctgaa

SEQ ID NO: 2845864 - DNA, 25 bp, Homo sapien
cttaaccgaaagaatgtcctgaatt

SEQ ID NO: 2845865 - DNA, 25 bp, Homo sapien
ccttaaccgaaagaatgtcctgaat

SEQ ID NO: 2845866 - DNA, 25 bp, Homo sapien
ctccttaaccgaaagaatgtcctga

SEQ ID NO: 2845867 - DNA, 25 bp, Homo sapien
tgacctaccttgtactttgagtgga

SEQ ID NO: 2845868 - DNA, 25 bp, Homo sapien
gcatatgcatatagtcggaaaagga

SEQ ID NO: 2845869 - DNA, 25 bp, Homo sapien
aactctaccaacattcaacaagtgg

SEQ ID NO: 2845870 - DNA, 25 bp, Homo sapien
gcagttacattaagatctattgacc

SEQ ID NO: 2845871 - DNA, 25 bp, Homo sapien
tcctttataatagcgctgcctcaat

SEQ ID NO: 2845872 - DNA, 25 bp, Homo sapien
taaaaagttgtagttctgccttgga

SEQ ID NO: 2845873 - DNA, 25 bp, Homo sapien
tctaagcatacaattccgcaatgtc

SEQ ID NO: 2845874 - DNA, 25 bp, Homo sapien
tctaatgttagggttcagaccatgt

SEQ ID NO: 2845875 - DNA, 25 bp, Homo sapien
taatcagggatccttgacaggcctc

SEQ ID NO: 2845876 - DNA, 25 bp, Homo sapien
tctagcacagggattcaatagggaa

SEQ ID NO: 2845877 - DNA, 25 bp, Homo sapien
ggaagtaacccaccattagctagag

SEQ ID NO: 2845878 - DNA, 25 bp, Homo sapien
gaagaagttggaactgagaccctac

SEQ ID NO: 2845879 - DNA, 25 bp, Homo sapien
tatgcatccgggtagacgtttgtgt

SEQ ID NO: 2845880 - DNA, 25 bp, Homo sapien
tcatagccttgcagcactgtgttcc

SEQ ID NO: 2845881 - DNA, 25 bp, Homo sapien
gcattctgctgatcaccaaggttcg

SEQ ID NO: 2845882 - DNA, 25 bp, Homo sapien
tagccttggtacaggtctcatagcc

SEQ ID NO: 2845883 - DNA, 25 bp, Homo sapien
cagccaccatgacaagagcagatgt

SEQ ID NO: 2845884 - DNA, 25 bp, Homo sapien
ggcaggataccaagcgaaactacca

SEQ ID NO: 2845885 - DNA, 25 bp, Homo sapien
tagttcacggcatataagtggctca

SEQ ID NO: 2845886 - DNA, 25 bp, Homo sapien
gaaactaccaactaacagtgtggct

SEQ ID NO: 2845887 - DNA, 25 bp, Homo sapien
gttctgaggattaaggcccttcaaa

SEQ ID NO: 2845888 - DNA, 25 bp, Homo sapien
tataactcgtttctgtgaggtacag

SEQ ID NO: 2845889 - DNA, 25 bp, Homo sapien
taaagtagtggccttccttaccata

SEQ ID NO: 2845890 - DNA, 25 bp, Homo sapien
gacagtgagctactttgccttgaag

SEQ ID NO: 2845891 - DNA, 25 bp, Homo sapien
ctgcactggttttgttgagtggaac

SEQ ID NO: 2845892 - DNA, 25 bp, Homo sapien
gctggcctggttgcatgctgaagct

SEQ ID NO: 2845893 - DNA, 25 bp, Homo sapien
tctgtgcaaagctggggtcgaatca

SEQ ID NO: 2845894 - DNA, 25 bp, Homo sapien
tttttacacatcaccatggggctgg

SEQ ID NO: 2845895 - DNA, 25 bp, Homo sapien
aggtagagcacgttcgaagactgcc

SEQ ID NO: 2845896 - DNA, 25 bp, Homo sapien
agcaggaactgaaggtagagcacgt

SEQ ID NO: 2845897 - DNA, 25 bp, Homo sapien
gaactgaaggtagagcacgttcgaa

SEQ ID NO: 2845898 - DNA, 25 bp, Homo sapien
ctgaaggtagagcacgttcgaagac

SEQ ID NO: 2845899 - DNA, 25 bp, Homo sapien
caatgtacatgatcgaagaagcttc

SEQ ID NO: 2845900 - DNA, 25 bp, Homo sapien
ggaatgtgacatggccctgacagca

SEQ ID NO: 2845901 - DNA, 25 bp, Homo sapien
aactcatgtgcgtgggctcagggca

SEQ ID NO: 2845902 - DNA, 25 bp, Homo sapien
gaacagacgtttacttggacgtgga

SEQ ID NO: 2845903 - DNA, 25 bp, Homo sapien
catgttctcggcgccatccagccct

SEQ ID NO: 2845904 - DNA, 25 bp, Homo sapien
acgtccagcgactcatcccccgtca

SEQ ID NO: 2845905 - DNA, 25 bp, Homo sapien
tccagcgactcatcccccgtcaggt

SEQ ID NO: 2845906 - DNA, 25 bp, Homo sapien
atccagccctatgcccacctcatcc

SEQ ID NO: 2845907 - DNA, 25 bp, Homo sapien
ccgttgttctctcattggctcggtc

SEQ ID NO: 2845908 - DNA, 25 bp, Homo sapien
ctgccgttgttctctcattggctcg

SEQ ID NO: 2845909 - DNA, 25 bp, Homo sapien
tgccgttgttctctcattggctcgg

SEQ ID NO: 2845910 - DNA, 25 bp, Homo sapien
gccgttgttctctcattggctcggt

SEQ ID NO: 2845911 - DNA, 25 bp, Homo sapien
tcagtgtcataacaggctccatttg

SEQ ID NO: 2845912 - DNA, 25 bp, Homo sapien
ggaggtctctacagtctggtcttaa

SEQ ID NO: 2845913 - DNA, 25 bp, Homo sapien
agcttgcccctgttttgtcccatta

SEQ ID NO: 2845914 - DNA, 25 bp, Homo sapien
tggctaatgtgaactggattctcct

SEQ ID NO: 2845915 - DNA, 25 bp, Homo sapien
gatgctgcctcccaatgggtgatgc

SEQ ID NO: 2845916 - DNA, 25 bp, Homo sapien
gagcacaccctagtaacctcttgag

SEQ ID NO: 2845917 - DNA, 25 bp, Homo sapien
catcggaatatatttggagcacacc

SEQ ID NO: 2845918 - DNA, 25 bp, Homo sapien
gaattagggtggtctacttgaggca

SEQ ID NO: 2845919 - DNA, 25 bp, Homo sapien
caccgatcggctgggtgctgaaccg

SEQ ID NO: 2845920 - DNA, 25 bp, Homo sapien
gctgaaccgcctctctgtaattgta

SEQ ID NO: 2845921 - DNA, 25 bp, Homo sapien
tcaaatgtgtttggcagccacaccg

SEQ ID NO: 2845922 - DNA, 25 bp, Homo sapien
cagcagagcagcgaatcttgcacag

SEQ ID NO: 2845923 - DNA, 25 bp, Homo sapien
cactgagtcttcgcattcatcatgt

SEQ ID NO: 2845924 - DNA, 25 bp, Homo sapien
actgagtcttcgcattcatcatgtc

SEQ ID NO: 2845925 - DNA, 25 bp, Homo sapien
tcactgagtcttcgcattcatcatg

SEQ ID NO: 2845926 - DNA, 25 bp, Homo sapien
gactccctgatgggctcagtggagg

SEQ ID NO: 2845927 - DNA, 25 bp, Homo sapien
gagcaagttgaaattatggccgtag

SEQ ID NO: 2845928 - DNA, 25 bp, Homo sapien
agttgaaattatggccgtagaggat

SEQ ID NO: 2845929 - DNA, 25 bp, Homo sapien
caagttgaaattatggccgtagagg

SEQ ID NO: 2845930 - DNA, 25 bp, Homo sapien
aaattatggccgtagaggatggcca

SEQ ID NO: 2845931 - DNA, 25 bp, Homo sapien
gcactcaacaaccttcgttctaatt

SEQ ID NO: 2845932 - DNA, 25 bp, Homo sapien
ttacgtatgatatttagaaccagga

SEQ ID NO: 2845933 - DNA, 25 bp, Homo sapien
caggattcaactgaccctggcactc

SEQ ID NO: 2845934 - DNA, 25 bp, Homo sapien
tgttccaagtttctgaccgtttcta

SEQ ID NO: 2845935 - DNA, 25 bp, Homo sapien
ttttaactgtgctcttgagcctggc

SEQ ID NO: 2845936 - DNA, 25 bp, Homo sapien
cttagaccctgttttgtaccagcaa

SEQ ID NO: 2845937 - DNA, 25 bp, Homo sapien
tgttttgtaccagcaataattaagt

SEQ ID NO: 2845938 - DNA, 25 bp, Homo sapien
gctcttgagcctggccttccttaga

SEQ ID NO: 2845939 - DNA, 25 bp, Homo sapien
cttccagattcctgccgcttatctt

SEQ ID NO: 2845940 - DNA, 25 bp, Homo sapien
ttccagattcctgccgcttatcttc

SEQ ID NO: 2845941 - DNA, 25 bp, Homo sapien
gcttccagattcctgccgcttatct

SEQ ID NO: 2845942 - DNA, 25 bp, Homo sapien
ttcactgcgtaggtaaaaagacact

SEQ ID NO: 2845943 - DNA, 25 bp, Homo sapien
catatttggcattgctgtaaatggc

SEQ ID NO: 2845944 - DNA, 25 bp, Homo sapien
gctaacatttactgccaattcggta

SEQ ID NO: 2845945 - DNA, 25 bp, Homo sapien
ccacacaaggttttacagtctgaca

SEQ ID NO: 2845946 - DNA, 25 bp, Homo sapien
tgaaaacctggtcactaatcctggg

SEQ ID NO: 2845947 - DNA, 25 bp, Homo sapien
tacagctacagtcagggagtgacca

SEQ ID NO: 2845948 - DNA, 25 bp, Homo sapien
cttaggtgaaactggaattgctccc

SEQ ID NO: 2845949 - DNA, 25 bp, Homo sapien
gaaaagcctcctatagttgtcgatg

SEQ ID NO: 2845950 - DNA, 25 bp, Homo sapien
aaatattacattcccttttagagag

SEQ ID NO: 2845951 - DNA, 25 bp, Homo sapien
cactgtcattgataagaatattcaa

SEQ ID NO: 2845952 - DNA, 25 bp, Homo sapien
ttatccagccgggttacacaccatc

SEQ ID NO: 2845953 - DNA, 25 bp, Homo sapien
gataatctacgttttagaagctctt

SEQ ID NO: 2845954 - DNA, 25 bp, Homo sapien
tcttcccctagagcaaactgtttgg

SEQ ID NO: 2845955 - DNA, 25 bp, Homo sapien
gtttctgagaccatcgctgcctgta

SEQ ID NO: 2845956 - DNA, 25 bp, Homo sapien
gagtaaactaaacctgcgctgacag

SEQ ID NO: 2845957 - DNA, 25 bp, Homo sapien
tacagaaagttggtaaggtgcacac

SEQ ID NO: 2845958 - DNA, 25 bp, Homo sapien
tattttggtatctgattggtgatga

SEQ ID NO: 2845959 - DNA, 25 bp, Homo sapien
aatgtttggaagcaatagttaagga

SEQ ID NO: 2845960 - DNA, 25 bp, Homo sapien
ttcaatactcatggtcttatccaaa

SEQ ID NO: 2845961 - DNA, 25 bp, Homo sapien
taacatctcggggaattcaatactc

SEQ ID NO: 2845962 - DNA, 25 bp, Homo sapien
ttggctcttcagaccgtccttagga

SEQ ID NO: 2845963 - DNA, 25 bp, Homo sapien
gacaatggcttttcctagctctttg

SEQ ID NO: 2845964 - DNA, 25 bp, Homo sapien
ttcatgcatagaatccaagagtttt

SEQ ID NO: 2845965 - DNA, 25 bp, Homo sapien
gataaaaccgctgccagttctggct

SEQ ID NO: 2845966 - DNA, 25 bp, Homo sapien
ctaaaaggttaagatgaagtcagtt

SEQ ID NO: 2845967 - DNA, 25 bp, Homo sapien
aaggttaagatgaagtcagttaaag

SEQ ID NO: 2845968 - DNA, 25 bp, Homo sapien
taaaaggttaagatgaagtcagtta

SEQ ID NO: 2845969 - DNA, 25 bp, Homo sapien
gttaagatgaagtcagttaaaggat

SEQ ID NO: 2845970 - DNA, 25 bp, Homo sapien
tatacatgcaagatgggcatttaac

SEQ ID NO: 2845971 - DNA, 25 bp, Homo sapien
acattgtttatgtactcttactgca

SEQ ID NO: 2845972 - DNA, 25 bp, Homo sapien
tttttatacatgcaagatgggcatt

SEQ ID NO: 2845973 - DNA, 25 bp, Homo sapien
gtactcttactgcactctaaaatat

SEQ ID NO: 2845974 - DNA, 25 bp, Homo sapien
tataactgtgcactctccagagagg

SEQ ID NO: 2845975 - DNA, 25 bp, Homo sapien
tgaagaccgcttaatcaggagtgat

SEQ ID NO: 2845976 - DNA, 25 bp, Homo sapien
tcttagtagggagcaaatatctgtc

SEQ ID NO: 2845977 - DNA, 25 bp, Homo sapien
gacttgaatataacctccttgagca

SEQ ID NO: 2845978 - DNA, 25 bp, Homo sapien
gaaattgcaacagggactatatggc

SEQ ID NO: 2845979 - DNA, 25 bp, Homo sapien
taagaggctagtactaccctggtag

SEQ ID NO: 2845980 - DNA, 25 bp, Homo sapien
ggaaagaggatttgatggtctcccc

SEQ ID NO: 2845981 - DNA, 25 bp, Homo sapien
gggacacctctatggatcctacaaa

SEQ ID NO: 2845982 - DNA, 25 bp, Homo sapien
cagagactgtgcaaagctaacaaca

SEQ ID NO: 2845983 - DNA, 25 bp, Homo sapien
gccatgcctgttctatttgagtacc

SEQ ID NO: 2845984 - DNA, 25 bp, Homo sapien
tcagattagcttggagcattcagtc

SEQ ID NO: 2845985 - DNA, 25 bp, Homo sapien
gccacaagggcagagtttagtagct

SEQ ID NO: 2845986 - DNA, 25 bp, Homo sapien
agttgtcatccttgaaacttacttt

SEQ ID NO: 2845987 - DNA, 25 bp, Homo sapien
ataccctatttctagttgtcatcct

SEQ ID NO: 2845988 - DNA, 25 bp, Homo sapien
tagtaaatgtcagtttaaatgtatc

SEQ ID NO: 2845989 - DNA, 25 bp, Homo sapien
tctagttgtcatccttgaaacttac

SEQ ID NO: 2845990 - DNA, 25 bp, Homo sapien
tgtctcttcagaccgtgggtttttc

SEQ ID NO: 2845991 - DNA, 25 bp, Homo sapien
gatgagcccatcaacatcattctgc

SEQ ID NO: 2845992 - DNA, 25 bp, Homo sapien
ggagcctttaacctactaatcatag

SEQ ID NO: 2845993 - DNA, 25 bp, Homo sapien
tgtcatatctgaggactgcttctga

SEQ ID NO: 2845994 - DNA, 25 bp, Homo sapien
gggcaggccttttgttgtgaacact

SEQ ID NO: 2845995 - DNA, 25 bp, Homo sapien
tcttcaccataagaaccttgtggag

SEQ ID NO: 2845996 - DNA, 25 bp, Homo sapien
gaaggctaaggaagggctagaatcc

SEQ ID NO: 2845997 - DNA, 25 bp, Homo sapien
tcctggagccctgtttatatggtgg

SEQ ID NO: 2845998 - DNA, 25 bp, Homo sapien
caggtaacattaaacgtctctagca

SEQ ID NO: 2845999 - DNA, 25 bp, Homo sapien
tctttaacaagtgtaccgctacagg

SEQ ID NO: 2846000 - DNA, 25 bp, Homo sapien
tgtgcaacatccatagcttacagtt

SEQ ID NO: 2846001 - DNA, 25 bp, Homo sapien
ctttatcgggttctcttgccttgac

SEQ ID NO: 2846002 - DNA, 25 bp, Homo sapien
gactagtaggaaataatagtagact

SEQ ID NO: 2846003 - DNA, 25 bp, Homo sapien
ggaaataatagtagacttggtataa

SEQ ID NO: 2846004 - DNA, 25 bp, Homo sapien
cttttgacataaggtgaaaaggtgt

SEQ ID NO: 2846005 - DNA, 25 bp, Homo sapien
gtttctaggccttcatatttcatgc

SEQ ID NO: 2846006 - DNA, 25 bp, Homo sapien
tacatgcagggtagagtcattctct

SEQ ID NO: 2846007 - DNA, 25 bp, Homo sapien
gagatactcttcataagatacctga

SEQ ID NO: 2846008 - DNA, 25 bp, Homo sapien
gagaagcagtaaggttttcatacag

SEQ ID NO: 2846009 - DNA, 25 bp, Homo sapien
taactcagaggaaacatacagcatg

SEQ ID NO: 2846010 - DNA, 25 bp, Homo sapien
tcttggctgtttaaatagactaatg

SEQ ID NO: 2846011 - DNA, 25 bp, Homo sapien
tagttagaaatactgctacttcccc

SEQ ID NO: 2846012 - DNA, 25 bp, Homo sapien
tactagttgctcatttaaatcaagg

SEQ ID NO: 2846013 - DNA, 25 bp, Homo sapien
tgaataatctaatgtaacagtggag

SEQ ID NO: 2846014 - DNA, 25 bp, Homo sapien
gaaacatccaggagtactgcagtag

SEQ ID NO: 2846015 - DNA, 25 bp, Homo sapien
tgtctatatgatctccaccccagag

SEQ ID NO: 2846016 - DNA, 25 bp, Homo sapien
actgcagtagggtcatttggtcatc

SEQ ID NO: 2846017 - DNA, 25 bp, Homo sapien
cagcaggtttgcacttgattgtcta

SEQ ID NO: 2846018 - DNA, 25 bp, Homo sapien
gcgtagtcatgatcctccaagttga

SEQ ID NO: 2846019 - DNA, 25 bp, Homo sapien
acttgccgccctcctaacatgttga

SEQ ID NO: 2846020 - DNA, 25 bp, Homo sapien
ctccaacagtgacaccagggtaggg

SEQ ID NO: 2846021 - DNA, 25 bp, Homo sapien
gagactcctgtagtggcctgctgaa

SEQ ID NO: 2846022 - DNA, 25 bp, Homo sapien
aacacagatctccaagtaaaaggta

SEQ ID NO: 2846023 - DNA, 25 bp, Homo sapien
ccccgcttgaagatctgtaataaaa

SEQ ID NO: 2846024 - DNA, 25 bp, Homo sapien
tcaggtcatggagttgaacgtttct

SEQ ID NO: 2846025 - DNA, 25 bp, Homo sapien
cagaaggattctcacaaacttcggg

SEQ ID NO: 2846026 - DNA, 25 bp, Homo sapien
tacatctgcttacgtgtatcttcaa

SEQ ID NO: 2846027 - DNA, 25 bp, Homo sapien
atactgaactgactacattaattac

SEQ ID NO: 2846028 - DNA, 25 bp, Homo sapien
gctagtcaagcatatatatactgaa

SEQ ID NO: 2846029 - DNA, 25 bp, Homo sapien
tataagctacagagacaaacaattg

SEQ ID NO: 2846030 - DNA, 25 bp, Homo sapien
tcttcgaattttatcgatgatgcaa

SEQ ID NO: 2846031 - DNA, 25 bp, Homo sapien
tccttccagcacataggtaattgtg

SEQ ID NO: 2846032 - DNA, 25 bp, Homo sapien
tccaggttcattccagcctgaagac

SEQ ID NO: 2846033 - DNA, 25 bp, Homo sapien
acattttcgatagcggcatgctggg

SEQ ID NO: 2846034 - DNA, 25 bp, Homo sapien
gaggtcgagaggtcaaaaacaacaa

SEQ ID NO: 2846035 - DNA, 25 bp, Homo sapien
cccacaggtattgccttgagggaat

SEQ ID NO: 2846036 - DNA, 25 bp, Homo sapien
gaatataaccaagacacccacaggt

SEQ ID NO: 2846037 - DNA, 25 bp, Homo sapien
cctacattgccattatgaggtcgag

SEQ ID NO: 2846038 - DNA, 25 bp, Homo sapien
gaatctctaaatcactgtcctacag

SEQ ID NO: 2846039 - DNA, 25 bp, Homo sapien
tgagctataggatcagaggcaatgt

SEQ ID NO: 2846040 - DNA, 25 bp, Homo sapien
gatgtgcacattacgccaatcttga

SEQ ID NO: 2846041 - DNA, 25 bp, Homo sapien
tttatcccaggtatgtcttgtgcac

SEQ ID NO: 2846042 - DNA, 25 bp, Homo sapien
gccagtaaagttggtgactttgaaa

SEQ ID NO: 2846043 - DNA, 25 bp, Homo sapien
tgactttgaaacctattagcttatg

SEQ ID NO: 2846044 - DNA, 25 bp, Homo sapien
ggccagtaaagttggtgactttgaa

SEQ ID NO: 2846045 - DNA, 25 bp, Homo sapien
gaaacctattagcttatggaagtta

SEQ ID NO: 2846046 - DNA, 25 bp, Homo sapien
aagactccataatgacatcctgaag

SEQ ID NO: 2846047 - DNA, 25 bp, Homo sapien
gttaagactccataatgacatcctg

SEQ ID NO: 2846048 - DNA, 25 bp, Homo sapien
taagactccataatgacatcctgaa

SEQ ID NO: 2846049 - DNA, 25 bp, Homo sapien
caagttaagactccataatgacatc

SEQ ID NO: 2846050 - DNA, 25 bp, Homo sapien
tggaggagagcttacatctggtctc

SEQ ID NO: 2846051 - DNA, 25 bp, Homo sapien
gtttgggaggtggtcctgttgttgc

SEQ ID NO: 2846052 - DNA, 25 bp, Homo sapien
ggaggagagcttacatctggtctca

SEQ ID NO: 2846053 - DNA, 25 bp, Homo sapien
agagtttgggaggtggtcctgttgt

SEQ ID NO: 2846054 - DNA, 25 bp, Homo sapien
tcccaaaaagatgcctcctatgcct

SEQ ID NO: 2846055 - DNA, 25 bp, Homo sapien
tctggcttgcagtaagattggacaa

SEQ ID NO: 2846056 - DNA, 25 bp, Homo sapien
cactctatgactgtttggcttgaag

SEQ ID NO: 2846057 - DNA, 25 bp, Homo sapien
aaaagtgagttccattctgcccact

SEQ ID NO: 2846058 - DNA, 25 bp, Homo sapien
cgggttcagtgctattgctctcaaa

SEQ ID NO: 2846059 - DNA, 25 bp, Homo sapien
gaatgtgaatgtcagccataagaaa

SEQ ID NO: 2846060 - DNA, 25 bp, Homo sapien
taaaagctttgtcagagtttgtatc

SEQ ID NO: 2846061 - DNA, 25 bp, Homo sapien
tttcatataagcagttctgcatgca

SEQ ID NO: 2846062 - DNA, 25 bp, Homo sapien
ggatcataacatctgagctataagg

SEQ ID NO: 2846063 - DNA, 25 bp, Homo sapien
aaccacactgtggatcataacatct

SEQ ID NO: 2846064 - DNA, 25 bp, Homo sapien
taacatctgagctataaggattaag

SEQ ID NO: 2846065 - DNA, 25 bp, Homo sapien
gctataaggattaagagtgtaactg

SEQ ID NO: 2846066 - DNA, 25 bp, Homo sapien
tgcgccagtgcactccagctgggcg

SEQ ID NO: 2846067 - DNA, 25 bp, Homo sapien
gattgcgccagtgcactccagctgg

SEQ ID NO: 2846068 - DNA, 25 bp, Homo sapien
ttgcgccagtgcactccagctgggc

SEQ ID NO: 2846069 - DNA, 25 bp, Homo sapien
attgcgccagtgcactccagctggg

SEQ ID NO: 2846070 - DNA, 25 bp, Homo sapien
tacttaccgatgtattagaggtgcc

SEQ ID NO: 2846071 - DNA, 25 bp, Homo sapien
gaaacagatagcatgacctccccta

SEQ ID NO: 2846072 - DNA, 25 bp, Homo sapien
tccaggtgtactgtaggacatacca

SEQ ID NO: 2846073 - DNA, 25 bp, Homo sapien
tgtggcctggaagcaacagctatac

SEQ ID NO: 2846074 - DNA, 25 bp, Homo sapien
gggcctagattttatcatgacctct

SEQ ID NO: 2846075 - DNA, 25 bp, Homo sapien
ccagcatcatagataaatgaactgc

SEQ ID NO: 2846076 - DNA, 25 bp, Homo sapien
gaactgcaaatctcattcactcaat

SEQ ID NO: 2846077 - DNA, 25 bp, Homo sapien
cctacagggatttagttgtggcact

SEQ ID NO: 2846078 - DNA, 25 bp, Homo sapien
cccaaatttggttgacgtcgtgatt

SEQ ID NO: 2846079 - DNA, 25 bp, Homo sapien
gttaacaaagtatagcagcaaaatt

SEQ ID NO: 2846080 - DNA, 25 bp, Homo sapien
taaaaacgtagcatgccattgttca

SEQ ID NO: 2846081 - DNA, 25 bp, Homo sapien
cgtcgtgattacaaggagatcgcca

SEQ ID NO: 2846082 - DNA, 25 bp, Homo sapien
cctagagttcccatgtacgagaaga

SEQ ID NO: 2846083 - DNA, 25 bp, Homo sapien
gagtcgactgatatgcatgttccca

SEQ ID NO: 2846084 - DNA, 25 bp, Homo sapien
tgttcccagctgaagtcaaacgaag

SEQ ID NO: 2846085 - DNA, 25 bp, Homo sapien
gactatgatgtaccttacgaagaaa

SEQ ID NO: 2846086 - DNA, 25 bp, Homo sapien
tattgttgcattacatgtggtaaaa

SEQ ID NO: 2846087 - DNA, 25 bp, Homo sapien
ttattgttgcattacatgtggtaaa

SEQ ID NO: 2846088 - DNA, 25 bp, Homo sapien
tcaaggttaagaagggttagcatcc

SEQ ID NO: 2846089 - DNA, 25 bp, Homo sapien
cttcttcactggacaattgcctact

SEQ ID NO: 2846090 - DNA, 25 bp, Homo sapien
ttcaaggttaagaagggttagcatc

SEQ ID NO: 2846091 - DNA, 25 bp, Homo sapien
attcaaggttaagaagggttagcat

SEQ ID NO: 2846092 - DNA, 25 bp, Homo sapien
catattaagggcaccggctacagac

SEQ ID NO: 2846093 - DNA, 25 bp, Homo sapien
tatagcaccttggaatagcagccag

SEQ ID NO: 2846094 - DNA, 25 bp, Homo sapien
tcctcccagactttagcaaggtcgg

SEQ ID NO: 2846095 - DNA, 25 bp, Homo sapien
tgtacattgtagaataccacaccgg

SEQ ID NO: 2846096 - DNA, 25 bp, Homo sapien
gagtgatggcaatctgatcctagag

SEQ ID NO: 2846097 - DNA, 25 bp, Homo sapien
ggtctgtataaaagcaagatatcag

SEQ ID NO: 2846098 - DNA, 25 bp, Homo sapien
caagatatcaggaacctataagtgg

SEQ ID NO: 2846099 - DNA, 25 bp, Homo sapien
ggttggaagcttcgcatctgagagt

SEQ ID NO: 2846100 - DNA, 25 bp, Homo sapien
tgctccagcagactgtaaactcctg

SEQ ID NO: 2846101 - DNA, 25 bp, Homo sapien
tataaatcattttggtctcttcata

SEQ ID NO: 2846102 - DNA, 25 bp, Homo sapien
gatttttactacatagtctagcacc

SEQ ID NO: 2846103 - DNA, 25 bp, Homo sapien
cagtccttgctaagacgtaagagtg

SEQ ID NO: 2846104 - DNA, 25 bp, Homo sapien
cctgaagactgtttacactactgga

SEQ ID NO: 2846105 - DNA, 25 bp, Homo sapien
gattagtaaccatgctaacagcaga

SEQ ID NO: 2846106 - DNA, 25 bp, Homo sapien
ttgatcaaagaggaacataagggtt

SEQ ID NO: 2846107 - DNA, 25 bp, Homo sapien
taacagcagagagccacttgacaat

SEQ ID NO: 2846108 - DNA, 25 bp, Homo sapien
tctgtgacttaagggtatcagggtt

SEQ ID NO: 2846109 - DNA, 25 bp, Homo sapien
gagatttagaatgaatgatggagga

SEQ ID NO: 2846110 - DNA, 25 bp, Homo sapien
cagggtttggataaggtgcggtgga

SEQ ID NO: 2846111 - DNA, 25 bp, Homo sapien
tggaggactggagatttagaatgaa

SEQ ID NO: 2846112 - DNA, 25 bp, Homo sapien
tgtattccttgatttggcagacagg

SEQ ID NO: 2846113 - DNA, 25 bp, Homo sapien
aacaaagcaggtttaggagggcact

SEQ ID NO: 2846114 - DNA, 25 bp, Homo sapien
gctgtgatctcggttacactgggaa

SEQ ID NO: 2846115 - DNA, 25 bp, Homo sapien
cactgtaacctttccctaatgaagc

SEQ ID NO: 2846116 - DNA, 25 bp, Homo sapien
ctgacctcctggtatattcttcagc

SEQ ID NO: 2846117 - DNA, 25 bp, Homo sapien
cttcgcccacactagctctaccatt

SEQ ID NO: 2846118 - DNA, 25 bp, Homo sapien
acctcctggtatattcttcagcacc

SEQ ID NO: 2846119 - DNA, 25 bp, Homo sapien
cccacactagctctaccattctctg

SEQ ID NO: 2846120 - DNA, 25 bp, Homo sapien
ctgagggagctgaagtttccgttga

SEQ ID NO: 2846121 - DNA, 25 bp, Homo sapien
tgagaccagagcatcaactgaggcc

SEQ ID NO: 2846122 - DNA, 25 bp, Homo sapien
tttctgaacactgaactcgacctgc

SEQ ID NO: 2846123 - DNA, 25 bp, Homo sapien
gatacaccctatcagcaggcaatat

SEQ ID NO: 2846124 - DNA, 25 bp, Homo sapien
gccatgctaggatggctcttccttc

SEQ ID NO: 2846125 - DNA, 25 bp, Homo sapien
ctgccatgctaggatggctcttcct

SEQ ID NO: 2846126 - DNA, 25 bp, Homo sapien
tgccatgctaggatggctcttcctt

SEQ ID NO: 2846127 - DNA, 25 bp, Homo sapien
tttatttaaagattcgctgttgaca

SEQ ID NO: 2846128 - DNA, 25 bp, Homo sapien
aagtaaacgtacatgcacaaatcct

SEQ ID NO: 2846129 - DNA, 25 bp, Homo sapien
tgtcaggtaaaaaccctctcactat

SEQ ID NO: 2846130 - DNA, 25 bp, Homo sapien
gatacatgaggaactaacataccca

SEQ ID NO: 2846131 - DNA, 25 bp, Homo sapien
gataattaaagaagcctaccaggga

SEQ ID NO: 2846132 - DNA, 25 bp, Homo sapien
catggatattgacagaattgagact

SEQ ID NO: 2846133 - DNA, 25 bp, Homo sapien
gagatattcaaactggcaacaccgc

SEQ ID NO: 2846134 - DNA, 25 bp, Homo sapien
tccagatgtctagaagagacccaga

SEQ ID NO: 2846135 - DNA, 25 bp, Homo sapien
ttggctatcaaatatactttcataa

SEQ ID NO: 2846136 - DNA, 25 bp, Homo sapien
tttggctatcaaatatactttcata

SEQ ID NO: 2846137 - DNA, 25 bp, Homo sapien
atttggctatcaaatatactttcat

SEQ ID NO: 2846138 - DNA, 25 bp, Homo sapien
gcagaaatgtgccttcgtcaataag

SEQ ID NO: 2846139 - DNA, 25 bp, Homo sapien
tcttcgtaaagtcagaaggtcagta

SEQ ID NO: 2846140 - DNA, 25 bp, Homo sapien
ttagactctgccgaaaactgaattt

SEQ ID NO: 2846141 - DNA, 25 bp, Homo sapien
ccagatacagatgcgattactaatg

SEQ ID NO: 2846142 - DNA, 25 bp, Homo sapien
aacccgctgattaatcaatcttgtg

SEQ ID NO: 2846143 - DNA, 25 bp, Homo sapien
ccaggttaggatagctttcacagaa

SEQ ID NO: 2846144 - DNA, 25 bp, Homo sapien
tgggaacgatgaatatcactaacat

SEQ ID NO: 2846145 - DNA, 25 bp, Homo sapien
caatcttgtgtcactacaatccaca

SEQ ID NO: 2846146 - DNA, 25 bp, Homo sapien
tcttaaagagattgatcagcagaca

SEQ ID NO: 2846147 - DNA, 25 bp, Homo sapien
tgttttgcaccatgttgacaccaat

SEQ ID NO: 2846148 - DNA, 25 bp, Homo sapien
ggccatcagttatctacttgagaac

SEQ ID NO: 2846149 - DNA, 25 bp, Homo sapien
gaagcttaacaattttggccatcag

SEQ ID NO: 2846150 - DNA, 25 bp, Homo sapien
gggcttgacaaaaccagatctccat

SEQ ID NO: 2846151 - DNA, 25 bp, Homo sapien
tatcaacaggtctgatctccaagga

SEQ ID NO: 2846152 - DNA, 25 bp, Homo sapien
caatttcacattgccaccgttggtg

SEQ ID NO: 2846153 - DNA, 25 bp, Homo sapien
atgaatcgtcttctcccgccagagg

SEQ ID NO: 2846154 - DNA, 25 bp, Homo sapien
caaaagtcttcgctgcttggagtct

SEQ ID NO: 2846155 - DNA, 25 bp, Homo sapien
gtgagggtgaagacgcagaaacctt

SEQ ID NO: 2846156 - DNA, 25 bp, Homo sapien
tttggacagatctggctgctgcgca

SEQ ID NO: 2846157 - DNA, 25 bp, Homo sapien
tgattgagaagcgacagccagtgag

SEQ ID NO: 2846158 - DNA, 25 bp, Homo sapien
aagcacactgctggggttttcttct

SEQ ID NO: 2846159 - DNA, 25 bp, Homo sapien
gagcaagcacactgctggggttttc

SEQ ID NO: 2846160 - DNA, 25 bp, Homo sapien
gcaagcacactgctggggttttctt

SEQ ID NO: 2846161 - DNA, 25 bp, Homo sapien
ctgagcaagcacactgctggggttt

SEQ ID NO: 2846162 - DNA, 25 bp, Homo sapien
tctctgccccgtttatctgaggcga

SEQ ID NO: 2846163 - DNA, 25 bp, Homo sapien
tttccatgccgcttttttgacagct

SEQ ID NO: 2846164 - DNA, 25 bp, Homo sapien
ggtatcgaatggagcccaatgaatt

SEQ ID NO: 2846165 - DNA, 25 bp, Homo sapien
cgatctctaaacacgaggtatcgaa

SEQ ID NO: 2846166 - DNA, 25 bp, Homo sapien
cggcagttcgacagggctccgctcg

SEQ ID NO: 2846167 - DNA, 25 bp, Homo sapien
tccgctcgccgtccgaggtcaggtt

SEQ ID NO: 2846168 - DNA, 25 bp, Homo sapien
gaaaagaggccaggattcccgcgag

SEQ ID NO: 2846169 - DNA, 25 bp, Homo sapien
gattcccgcgaggaatgagaggctc

SEQ ID NO: 2846170 - DNA, 25 bp, Homo sapien
ccgccgcagccgagataaacaactt

SEQ ID NO: 2846171 - DNA, 25 bp, Homo sapien
aacttagcttgtgaacgcagaagga

SEQ ID NO: 2846172 - DNA, 25 bp, Homo sapien
cagccgagataaacaacttagcttg

SEQ ID NO: 2846173 - DNA, 25 bp, Homo sapien
ttagcttgtgaacgcagaaggagca

SEQ ID NO: 2846174 - DNA, 25 bp, Homo sapien
tatttaagaaagtctcccattgccc

SEQ ID NO: 2846175 - DNA, 25 bp, Homo sapien
cgcgggtcgaggttccgggcgcgcg

SEQ ID NO: 2846176 - DNA, 25 bp, Homo sapien
ggtcgaggttccgggcgcgcgtgcc

SEQ ID NO: 2846177 - DNA, 25 bp, Homo sapien
ctatttaagaaagtctcccattgcc

SEQ ID NO: 2846178 - DNA, 25 bp, Homo sapien
cgtcacagacacgagctcgcaaaat

SEQ ID NO: 2846179 - DNA, 25 bp, Homo sapien
gtgactcgggctcccgtcacagaca

SEQ ID NO: 2846180 - DNA, 25 bp, Homo sapien
gacacgagctcgcaaaatggaggag

SEQ ID NO: 2846181 - DNA, 25 bp, Homo sapien
caggcggtgactcgggctcccgtca

SEQ ID NO: 2846182 - DNA, 25 bp, Homo sapien
tgggcgagcgagcgggaccgagcgg

SEQ ID NO: 2846183 - DNA, 25 bp, Homo sapien
ttggtgacgcttggcaactgcaggg

SEQ ID NO: 2846184 - DNA, 25 bp, Homo sapien
tgttggtgacgcttggcaactgcag

SEQ ID NO: 2846185 - DNA, 25 bp, Homo sapien
ctgttggtgacgcttggcaactgca

SEQ ID NO: 2846186 - DNA, 25 bp, Homo sapien
gttggtgacgcttggcaactgcagg

SEQ ID NO: 2846187 - DNA, 25 bp, Homo sapien
tctggggcggcgttaagagggccac

SEQ ID NO: 2846188 - DNA, 25 bp, Homo sapien
ccagtttcttttctcgctacctcct

SEQ ID NO: 2846189 - DNA, 25 bp, Homo sapien
tcttttctcgctacctccttcccgc

SEQ ID NO: 2846190 - DNA, 25 bp, Homo sapien
tggtctctctggggcggcgttaaga

SEQ ID NO: 2846191 - DNA, 25 bp, Homo sapien
tgccccttggcggcaagcgccgcca

SEQ ID NO: 2846192 - DNA, 25 bp, Homo sapien
ccttggcggcaagcgccgccagtgc

SEQ ID NO: 2846193 - DNA, 25 bp, Homo sapien
gctctgccccttggcggcaagcgcc

SEQ ID NO: 2846194 - DNA, 25 bp, Homo sapien
ccccttggcggcaagcgccgccagt

SEQ ID NO: 2846195 - DNA, 25 bp, Homo sapien
gggggagtcgcgtgccggcaggtcc

SEQ ID NO: 2846196 - DNA, 25 bp, Homo sapien
caccgcatcatctgggcggccgggt

SEQ ID NO: 2846197 - DNA, 25 bp, Homo sapien
ccccaccaccgcatcatctgggcgg

SEQ ID NO: 2846198 - DNA, 25 bp, Homo sapien
ccgcgctctcgcactgggagagaag

SEQ ID NO: 2846199 - DNA, 25 bp, Homo sapien
tcttccccgagtctgcgaggcggcg

SEQ ID NO: 2846200 - DNA, 25 bp, Homo sapien
gaaggaggcgccgcctgccaagttc

SEQ ID NO: 2846201 - DNA, 25 bp, Homo sapien
cctcttccccgagtctgcgaggcgg

SEQ ID NO: 2846202 - DNA, 25 bp, Homo sapien
ggaggcgccgcctgccaagttcaac

SEQ ID NO: 2846203 - DNA, 25 bp, Homo sapien
cgcccaatgtgctcacactcgaagg

SEQ ID NO: 2846204 - DNA, 25 bp, Homo sapien
tcgaaggaagttgcacgccaaatgc

SEQ ID NO: 2846205 - DNA, 25 bp, Homo sapien
taagttgctggcgaaatatagcccc

SEQ ID NO: 2846206 - DNA, 25 bp, Homo sapien
aatgcaaaacctccagcgagctgga

SEQ ID NO: 2846207 - DNA, 25 bp, Homo sapien
catttgctgccctcgactctgtgcg

SEQ ID NO: 2846208 - DNA, 25 bp, Homo sapien
tgctcaccctatcacgttcatagga

SEQ ID NO: 2846209 - DNA, 25 bp, Homo sapien
cacccccgaatcttgacatttgctg

SEQ ID NO: 2846210 - DNA, 25 bp, Homo sapien
ccgcgtccaagttcccggtgcaggc

SEQ ID NO: 2846211 - DNA, 25 bp, Homo sapien
tgttcctgttaggagcttccccctc

SEQ ID NO: 2846212 - DNA, 25 bp, Homo sapien
gttcctgttaggagcttccccctca

SEQ ID NO: 2846213 - DNA, 25 bp, Homo sapien
gatgttcctgttaggagcttccccc

SEQ ID NO: 2846214 - DNA, 25 bp, Homo sapien
agatgttcctgttaggagcttcccc

SEQ ID NO: 2846215 - DNA, 25 bp, Homo sapien
tcttggcaaaggttcgcgatcgcgg

SEQ ID NO: 2846216 - DNA, 25 bp, Homo sapien
gctctgacatcttgaagacgattgg

SEQ ID NO: 2846217 - DNA, 25 bp, Homo sapien
ccgccatcttggtagggtacagtgt

SEQ ID NO: 2846218 - DNA, 25 bp, Homo sapien
agcaagcctcttgtccggagacgat

SEQ ID NO: 2846219 - DNA, 25 bp, Homo sapien
gaactgttggtagctcaactggtgg

SEQ ID NO: 2846220 - DNA, 25 bp, Homo sapien
catggttccagtgttcagcgcaccc

SEQ ID NO: 2846221 - DNA, 25 bp, Homo sapien
cagaatcgtgtgaagtgcagaagtg

SEQ ID NO: 2846222 - DNA, 25 bp, Homo sapien
gtacagtaataagcaacaaatggca

SEQ ID NO: 2846223 - DNA, 25 bp, Homo sapien
tcacgcaaatgtctcaagcctctgc

SEQ ID NO: 2846224 - DNA, 25 bp, Homo sapien
caaatgtctcaagcctctgcactgg

SEQ ID NO: 2846225 - DNA, 25 bp, Homo sapien
gcaggaagccagaaccagtaataga

SEQ ID NO: 2846226 - DNA, 25 bp, Homo sapien
aaccagtaatagaagcagtaggcac

SEQ ID NO: 2846227 - DNA, 25 bp, Homo sapien
tgaaggcaggggtcagggaaggctc

SEQ ID NO: 2846228 - DNA, 25 bp, Homo sapien
tcagaaggtgaaggcaggggtcagg

SEQ ID NO: 2846229 - DNA, 25 bp, Homo sapien
ggtgaaggcaggggtcagggaaggc

SEQ ID NO: 2846230 - DNA, 25 bp, Homo sapien
agaaggtgaaggcaggggtcaggga

SEQ ID NO: 2846231 - DNA, 25 bp, Homo sapien
tgcagagtatggaacacagtcacag

SEQ ID NO: 2846232 - DNA, 25 bp, Homo sapien
tcattgcagagtatggaacacagtc

SEQ ID NO: 2846233 - DNA, 25 bp, Homo sapien
gagtatggaacacagtcacagccag

SEQ ID NO: 2846234 - DNA, 25 bp, Homo sapien
cagagtatggaacacagtcacagcc

SEQ ID NO: 2846235 - DNA, 25 bp, Homo sapien
gatacattgatacaaatcagctaaa

SEQ ID NO: 2846236 - DNA, 25 bp, Homo sapien
aattacatgtcaatagtcataacaa

SEQ ID NO: 2846237 - DNA, 25 bp, Homo sapien
agcacgagttatgccattaatattc

SEQ ID NO: 2846238 - DNA, 25 bp, Homo sapien
aaattattaaccaacatatgctccc

SEQ ID NO: 2846239 - DNA, 25 bp, Homo sapien
tgacaaataaggcaagaagaagagg

SEQ ID NO: 2846240 - DNA, 25 bp, Homo sapien
acaaataaggcaagaagaagagggg

SEQ ID NO: 2846241 - DNA, 25 bp, Homo sapien
gacaaataaggcaagaagaagaggg

SEQ ID NO: 2846242 - DNA, 25 bp, Homo sapien
gatggctgcatcaggccccattaac

SEQ ID NO: 2846243 - DNA, 25 bp, Homo sapien
atcctagtgggaaggccgtagccag

SEQ ID NO: 2846244 - DNA, 25 bp, Homo sapien
caatgtccactagcaaccttctgaa

SEQ ID NO: 2846245 - DNA, 25 bp, Homo sapien
ggaggacctgctagcaataccgttc

SEQ ID NO: 2846246 - DNA, 25 bp, Homo sapien
agttaattcttcacacaccagccag

SEQ ID NO: 2846247 - DNA, 25 bp, Homo sapien
tacagttaattcttcacacaccagc

SEQ ID NO: 2846248 - DNA, 25 bp, Homo sapien
gcccatctacagttaattcttcaca

SEQ ID NO: 2846249 - DNA, 25 bp, Homo sapien
cacacttgcccatctacagttaatt

SEQ ID NO: 2846250 - DNA, 25 bp, Homo sapien
ctttgcttggaaccttcagcagttc

SEQ ID NO: 2846251 - DNA, 25 bp, Homo sapien
ggcggtcctttgcttggaaccttca

SEQ ID NO: 2846252 - DNA, 25 bp, Homo sapien
ggtcctttgcttggaaccttcagca

SEQ ID NO: 2846253 - DNA, 25 bp, Homo sapien
tcctttgcttggaaccttcagcagt

SEQ ID NO: 2846254 - DNA, 25 bp, Homo sapien
ctaaagcccgaggagggtaggagct

SEQ ID NO: 2846255 - DNA, 25 bp, Homo sapien
tccccattctcgcacagagaaggca

SEQ ID NO: 2846256 - DNA, 25 bp, Homo sapien
agcccgaggagggtaggagctgcat

SEQ ID NO: 2846257 - DNA, 25 bp, Homo sapien
gaaggcactcattaagtgcttatca

SEQ ID NO: 2846258 - DNA, 25 bp, Homo sapien
tatgaagcccaatgataggcaaact

SEQ ID NO: 2846259 - DNA, 25 bp, Homo sapien
ggcaaactaacctagtgctggaaat

SEQ ID NO: 2846260 - DNA, 25 bp, Homo sapien
gattacctgagtataagcaattgaa

SEQ ID NO: 2846261 - DNA, 25 bp, Homo sapien
cttggcgggagaaactttcttggca

SEQ ID NO: 2846262 - DNA, 25 bp, Homo sapien
tgtttctcgagtcctccgggtccca

SEQ ID NO: 2846263 - DNA, 25 bp, Homo sapien
cagtggatcaggttttgtttctcga

SEQ ID NO: 2846264 - DNA, 25 bp, Homo sapien
tgtggttccataattccagcctcct

SEQ ID NO: 2846265 - DNA, 25 bp, Homo sapien
cccatctaagcgtttctgtccagaa

SEQ ID NO: 2846266 - DNA, 25 bp, Homo sapien
tctgctaccgaatctgctgactcct

SEQ ID NO: 2846267 - DNA, 25 bp, Homo sapien
gagaaatccacttcattgcgtgtcc

SEQ ID NO: 2846268 - DNA, 25 bp, Homo sapien
ggaagggaggtacacagagaaatcc

SEQ ID NO: 2846269 - DNA, 25 bp, Homo sapien
tgtcaccacgccctgttcagcaaaa

SEQ ID NO: 2846270 - DNA, 25 bp, Homo sapien
gacacggttccagacatgaatattc

SEQ ID NO: 2846271 - DNA, 25 bp, Homo sapien
tccagacacggttccagacatgaat

SEQ ID NO: 2846272 - DNA, 25 bp, Homo sapien
cagacacggttccagacatgaatat

SEQ ID NO: 2846273 - DNA, 25 bp, Homo sapien
cacggttccagacatgaatattcat

SEQ ID NO: 2846274 - DNA, 25 bp, Homo sapien
agcatagatagcagtggctgtggct

SEQ ID NO: 2846275 - DNA, 25 bp, Homo sapien
ttgctgtactgacctgctggttggg

SEQ ID NO: 2846276 - DNA, 25 bp, Homo sapien
ccagttgcaagttgctgtactgacc

SEQ ID NO: 2846277 - DNA, 25 bp, Homo sapien
tggagccagttgcaagttgctgtac

SEQ ID NO: 2846278 - DNA, 25 bp, Homo sapien
ttctataccaagagtcgcagttggg

SEQ ID NO: 2846279 - DNA, 25 bp, Homo sapien
tgcctcttctataccaagagtcgca

SEQ ID NO: 2846280 - DNA, 25 bp, Homo sapien
aggtgaagtgcagtctactgcctct

SEQ ID NO: 2846281 - DNA, 25 bp, Homo sapien
gaagtgcagtctactgcctcttcta

SEQ ID NO: 2846282 - DNA, 25 bp, Homo sapien
gtttgatttcttgggaactggcttg

SEQ ID NO: 2846283 - DNA, 25 bp, Homo sapien
tgcatttgcgcacggatgtttgatt

SEQ ID NO: 2846284 - DNA, 25 bp, Homo sapien
cttgctttgcaagtacatatttctg

SEQ ID NO: 2846285 - DNA, 25 bp, Homo sapien
cacatttactataaaggtctctcca

SEQ ID NO: 2846286 - DNA, 25 bp, Homo sapien
tggtttggtaaccagcatccagtca

SEQ ID NO: 2846287 - DNA, 25 bp, Homo sapien
tccaaagcagctagcgtaaccacct

SEQ ID NO: 2846288 - DNA, 25 bp, Homo sapien
agctagcgtaaccaccttcttcatc

SEQ ID NO: 2846289 - DNA, 25 bp, Homo sapien
cttctccaaagcagctagcgtaacc

SEQ ID NO: 2846290 - DNA, 25 bp, Homo sapien
aaagcagctagcgtaaccaccttct

SEQ ID NO: 2846291 - DNA, 25 bp, Homo sapien
ttgccttcattcctacaccaggagt

SEQ ID NO: 2846292 - DNA, 25 bp, Homo sapien
gagtcatgactgcagcatgccttca

SEQ ID NO: 2846293 - DNA, 25 bp, Homo sapien
catgccttcaggatgactgttatca

SEQ ID NO: 2846294 - DNA, 25 bp, Homo sapien
cttaggaagtctgctccagcttggc

SEQ ID NO: 2846295 - DNA, 25 bp, Homo sapien
gccagcatgctctgcataggaagcc

SEQ ID NO: 2846296 - DNA, 25 bp, Homo sapien
catgctctgcataggaagcctgaga

SEQ ID NO: 2846297 - DNA, 25 bp, Homo sapien
ccaagcaaagccagcatgctctgca

SEQ ID NO: 2846298 - DNA, 25 bp, Homo sapien
ggaagcctgagatgatggagtccac

SEQ ID NO: 2846299 - DNA, 25 bp, Homo sapien
ggcagtgagaagtggacagttctgc

SEQ ID NO: 2846300 - DNA, 25 bp, Homo sapien
gcagtgagaagtggacagttctgca

SEQ ID NO: 2846301 - DNA, 25 bp, Homo sapien
tcctgtcccagccagattccctcgc

SEQ ID NO: 2846302 - DNA, 25 bp, Homo sapien
ctcttacagccaggccagtagcctt

SEQ ID NO: 2846303 - DNA, 25 bp, Homo sapien
cccagccagattccctcgcagaaag

SEQ ID NO: 2846304 - DNA, 25 bp, Homo sapien
ccagtagccttcttcttcaccccat

SEQ ID NO: 2846305 - DNA, 25 bp, Homo sapien
gctcaactgcgcaggcagcagcgtt

SEQ ID NO: 2846306 - DNA, 25 bp, Homo sapien
cagggctcaactgcgcaggcagcag

SEQ ID NO: 2846307 - DNA, 25 bp, Homo sapien
gccagggctcaactgcgcaggcagc

SEQ ID NO: 2846308 - DNA, 25 bp, Homo sapien
actgcgcaggcagcagcgtttgaac

SEQ ID NO: 2846309 - DNA, 25 bp, Homo sapien
gttgctcaactccacatttatccta

SEQ ID NO: 2846310 - DNA, 25 bp, Homo sapien
taagttctccggcacactgaagagc

SEQ ID NO: 2846311 - DNA, 25 bp, Homo sapien
ccttgtcataccgaacgaacccagg

SEQ ID NO: 2846312 - DNA, 25 bp, Homo sapien
aagtttaagttctccggcacactga

SEQ ID NO: 2846313 - DNA, 25 bp, Homo sapien
cgtgggtgggttttacgttgagcat

SEQ ID NO: 2846314 - DNA, 25 bp, Homo sapien
ttacgttgagcatctgtgccccttg

SEQ ID NO: 2846315 - DNA, 25 bp, Homo sapien
ggtgggttttacgttgagcatctgt

SEQ ID NO: 2846316 - DNA, 25 bp, Homo sapien
ggttttacgttgagcatctgtgccc

SEQ ID NO: 2846317 - DNA, 25 bp, Homo sapien
aatggcccattaagaactcgttggt

SEQ ID NO: 2846318 - DNA, 25 bp, Homo sapien
aaatctatatcgtggtgactcaaaa

SEQ ID NO: 2846319 - DNA, 25 bp, Homo sapien
tggtcatatcagatgaggaagcatt

SEQ ID NO: 2846320 - DNA, 25 bp, Homo sapien
gggtgaatataaatctatatcgtgg

SEQ ID NO: 2846321 - DNA, 25 bp, Homo sapien
cttttggcctgtgtcatacaaaacc

SEQ ID NO: 2846322 - DNA, 25 bp, Homo sapien
ttttggcctgtgtcatacaaaacca

SEQ ID NO: 2846323 - DNA, 25 bp, Homo sapien
tttggcctgtgtcatacaaaaccat

SEQ ID NO: 2846324 - DNA, 25 bp, Homo sapien
aattcatgaagcgatatttactaga

SEQ ID NO: 2846325 - DNA, 25 bp, Homo sapien
cctccgggtcaaaatccagatccaa

SEQ ID NO: 2846326 - DNA, 25 bp, Homo sapien
accagtggctcctccgggtcaaaat

SEQ ID NO: 2846327 - DNA, 25 bp, Homo sapien
tttactagatagcttcacctgggct

SEQ ID NO: 2846328 - DNA, 25 bp, Homo sapien
cgaacttgtttccattgagttttgc

SEQ ID NO: 2846329 - DNA, 25 bp, Homo sapien
gacagctgtctcttgagctcgaaga

SEQ ID NO: 2846330 - DNA, 25 bp, Homo sapien
tgaacacgaacttgtttccattgag

SEQ ID NO: 2846331 - DNA, 25 bp, Homo sapien
gaaaccacagttgtttgaacacgaa

SEQ ID NO: 2846332 - DNA, 25 bp, Homo sapien
ttcccaaacataactcccatatttg

SEQ ID NO: 2846333 - DNA, 25 bp, Homo sapien
aaacataactcccatatttgcattc

SEQ ID NO: 2846334 - DNA, 25 bp, Homo sapien
ccaaacataactcccatatttgcat

SEQ ID NO: 2846335 - DNA, 25 bp, Homo sapien
gttcttcccaaacataactcccata

SEQ ID NO: 2846336 - DNA, 25 bp, Homo sapien
cacagggtgtgacaagttcagactc

SEQ ID NO: 2846337 - DNA, 25 bp, Homo sapien
ggatacctctatccactggtagaaa

SEQ ID NO: 2846338 - DNA, 25 bp, Homo sapien
gaggtaagaattctactccacactg

SEQ ID NO: 2846339 - DNA, 25 bp, Homo sapien
gaacaacttcaagagcattgaggta

SEQ ID NO: 2846340 - DNA, 25 bp, Homo sapien
cacctctgacaccatggacatgatc

SEQ ID NO: 2846341 - DNA, 25 bp, Homo sapien
ttgttgacacatctggatcctcagc

SEQ ID NO: 2846342 - DNA, 25 bp, Homo sapien
tccagtgttccagcagtgcgtgcat

SEQ ID NO: 2846343 - DNA, 25 bp, Homo sapien
gacaccatggacatgatcatgacac

SEQ ID NO: 2846344 - DNA, 25 bp, Homo sapien
cttgttgaaattggccaatataatg

SEQ ID NO: 2846345 - DNA, 25 bp, Homo sapien
attgatatttaccttgttgaaattg

SEQ ID NO: 2846346 - DNA, 25 bp, Homo sapien
ttgttgaaattggccaatataatga

SEQ ID NO: 2846347 - DNA, 25 bp, Homo sapien
ttgatatttaccttgttgaaattgg

SEQ ID NO: 2846348 - DNA, 25 bp, Homo sapien
ctgaagaatgtgcatgaattctatt

SEQ ID NO: 2846349 - DNA, 25 bp, Homo sapien
gttttaatcgattgtacctctttga

SEQ ID NO: 2846350 - DNA, 25 bp, Homo sapien
acagttttaatcgattgtacctctt

SEQ ID NO: 2846351 - DNA, 25 bp, Homo sapien
gaagaatgtgcatgaattctattca

SEQ ID NO: 2846352 - DNA, 25 bp, Homo sapien
tatagttagctagcactcacaagtg

SEQ ID NO: 2846353 - DNA, 25 bp, Homo sapien
tacatagccatcacctaggagttcg

SEQ ID NO: 2846354 - DNA, 25 bp, Homo sapien
ggagtctctattggtgtcaacacag

SEQ ID NO: 2846355 - DNA, 25 bp, Homo sapien
cagtggttcgcaagattaagcatac

SEQ ID NO: 2846356 - DNA, 25 bp, Homo sapien
tctctgtgtgccagctccgtgccat

SEQ ID NO: 2846357 - DNA, 25 bp, Homo sapien
gatgtgatgtagatccctctctgtg

SEQ ID NO: 2846358 - DNA, 25 bp, Homo sapien
caatcccatcattaacctggatgtg

SEQ ID NO: 2846359 - DNA, 25 bp, Homo sapien
tctgtagcgtccacatgtgtcccaa

SEQ ID NO: 2846360 - DNA, 25 bp, Homo sapien
gcaagcacctcagtgcgggtagagt

SEQ ID NO: 2846361 - DNA, 25 bp, Homo sapien
ggtagagtgtgatcggcaccagggc

SEQ ID NO: 2846362 - DNA, 25 bp, Homo sapien
cgggtagagtgtgatcggcaccagg

SEQ ID NO: 2846363 - DNA, 25 bp, Homo sapien
acctcagtgcgggtagagtgtgatc

SEQ ID NO: 2846364 - DNA, 25 bp, Homo sapien
gatctctcatccagggagcccccac

SEQ ID NO: 2846365 - DNA, 25 bp, Homo sapien
gaagatctctcatccagggagcccc

SEQ ID NO: 2846366 - DNA, 25 bp, Homo sapien
taggaagatctctcatccagggagc

SEQ ID NO: 2846367 - DNA, 25 bp, Homo sapien
ttaggaagatctctcatccagggag

SEQ ID NO: 2846368 - DNA, 25 bp, Homo sapien
caagtgcccggcttccagtttaggc

SEQ ID NO: 2846369 - DNA, 25 bp, Homo sapien
ccaagtgcccggcttccagtttagg

SEQ ID NO: 2846370 - DNA, 25 bp, Homo sapien
caggcagcaagccaacgtacagtga

SEQ ID NO: 2846371 - DNA, 25 bp, Homo sapien
aggcagcaagccaacgtacagtgag

SEQ ID NO: 2846372 - DNA, 25 bp, Homo sapien
cttctgtagccaccgaccatagctg

SEQ ID NO: 2846373 - DNA, 25 bp, Homo sapien
gcagctcctgccattgccaactcaa

SEQ ID NO: 2846374 - DNA, 25 bp, Homo sapien
tcctgccattgccaactcaacagag

SEQ ID NO: 2846375 - DNA, 25 bp, Homo sapien
ggccttctgtagccaccgaccatag

SEQ ID NO: 2846376 - DNA, 25 bp, Homo sapien
tagggcgccagtgcttgcagctgga

SEQ ID NO: 2846377 - DNA, 25 bp, Homo sapien
gggcgccagtgcttgcagctggagt

SEQ ID NO: 2846378 - DNA, 25 bp, Homo sapien
cttagggcgccagtgcttgcagctg

SEQ ID NO: 2846379 - DNA, 25 bp, Homo sapien
ttagggcgccagtgcttgcagctgg

SEQ ID NO: 2846380 - DNA, 25 bp, Homo sapien
gagcatagcaccagggcggtgctac

SEQ ID NO: 2846381 - DNA, 25 bp, Homo sapien
tgagcatagcaccagggcggtgcta

SEQ ID NO: 2846382 - DNA, 25 bp, Homo sapien
agcatagcaccagggcggtgctaca

SEQ ID NO: 2846383 - DNA, 25 bp, Homo sapien
atgagcatagcaccagggcggtgct

SEQ ID NO: 2846384 - DNA, 25 bp, Homo sapien
gggcacacaatcatactgtttagat

SEQ ID NO: 2846385 - DNA, 25 bp, Homo sapien
tttgaaagccatttcaattggctgc

SEQ ID NO: 2846386 - DNA, 25 bp, Homo sapien
atactgtttagatgccaaggcctgc

SEQ ID NO: 2846387 - DNA, 25 bp, Homo sapien
gctccaaatagctctaggacttaac

SEQ ID NO: 2846388 - DNA, 25 bp, Homo sapien
tccatgtctgtgttaaggttttgcc

SEQ ID NO: 2846389 - DNA, 25 bp, Homo sapien
tcaccatattaaggagaagccagtc

SEQ ID NO: 2846390 - DNA, 25 bp, Homo sapien
gaagaaccactttatctctgggtca

SEQ ID NO: 2846391 - DNA, 25 bp, Homo sapien
tgtactccgtgggtctgtgcctgct

SEQ ID NO: 2846392 - DNA, 25 bp, Homo sapien
agacagctgcttggaaagcttgtca

SEQ ID NO: 2846393 - DNA, 25 bp, Homo sapien
tttaactccccacccaagacagctg

SEQ ID NO: 2846394 - DNA, 25 bp, Homo sapien
ccacccaagacagctgcttggaaag

SEQ ID NO: 2846395 - DNA, 25 bp, Homo sapien
cccaagacagctgcttggaaagctt

SEQ ID NO: 2846396 - DNA, 25 bp, Homo sapien
cagggtgacattgcttagggaaatg

SEQ ID NO: 2846397 - DNA, 25 bp, Homo sapien
cagtttaacaacgtccagggtgaca

SEQ ID NO: 2846398 - DNA, 25 bp, Homo sapien
gaaatggagtgttattctgcagcag

SEQ ID NO: 2846399 - DNA, 25 bp, Homo sapien
gacactcctgatttagaggatgtgg

SEQ ID NO: 2846400 - DNA, 25 bp, Homo sapien
cagaccatcatccaatcttgttgat

SEQ ID NO: 2846401 - DNA, 25 bp, Homo sapien
agaccatcatccaatcttgttgatt

SEQ ID NO: 2846402 - DNA, 25 bp, Homo sapien
ccagaccatcatccaatcttgttga

SEQ ID NO: 2846403 - DNA, 25 bp, Homo sapien
cactcttcagttagaagtcctccag

SEQ ID NO: 2846404 - DNA, 25 bp, Homo sapien
tcactcttcagttagaagtcctcca

SEQ ID NO: 2846405 - DNA, 25 bp, Homo sapien
actcttcagttagaagtcctccagg

SEQ ID NO: 2846406 - DNA, 25 bp, Homo sapien
tctgggacccatacagttaacctgc

SEQ ID NO: 2846407 - DNA, 25 bp, Homo sapien
taagcatcttggcacacttgtagag

SEQ ID NO: 2846408 - DNA, 25 bp, Homo sapien
cacagatttccctgagtcttgaaga

SEQ ID NO: 2846409 - DNA, 25 bp, Homo sapien
gaggttacttgacatcgacaatagt

SEQ ID NO: 2846410 - DNA, 25 bp, Homo sapien
gagagttttgcaaagctgcagctcc

SEQ ID NO: 2846411 - DNA, 25 bp, Homo sapien
ctatagttctggagagttttgcaaa

SEQ ID NO: 2846412 - DNA, 25 bp, Homo sapien
tggagagttttgcaaagctgcagct

SEQ ID NO: 2846413 - DNA, 25 bp, Homo sapien
atagttctggagagttttgcaaagc

SEQ ID NO: 2846414 - DNA, 25 bp, Homo sapien
tctctctctccgcatgttggccgtg

SEQ ID NO: 2846415 - DNA, 25 bp, Homo sapien
gacccgaatgtacctgtcttgggcc

SEQ ID NO: 2846416 - DNA, 25 bp, Homo sapien
cgcatgttggccgtgacccgaatgt

SEQ ID NO: 2846417 - DNA, 25 bp, Homo sapien
tgttggccgtgacccgaatgtacct

SEQ ID NO: 2846418 - DNA, 25 bp, Homo sapien
gttgcccttagcagcgccctgtaac

SEQ ID NO: 2846419 - DNA, 25 bp, Homo sapien
cagagaaatggggttgcccttagca

SEQ ID NO: 2846420 - DNA, 25 bp, Homo sapien
cttagcagcgccctgtaacaggcac

SEQ ID NO: 2846421 - DNA, 25 bp, Homo sapien
tagcagcgccctgtaacaggcactt

SEQ ID NO: 2846422 - DNA, 25 bp, Homo sapien
ttgctccagggttcctcactatcac

SEQ ID NO: 2846423 - DNA, 25 bp, Homo sapien
tgatgccttagggtctgaaagagaa

SEQ ID NO: 2846424 - DNA, 25 bp, Homo sapien
ctcagagtgctggtaatgtgcagac

SEQ ID NO: 2846425 - DNA, 25 bp, Homo sapien
cagacttcagtgtaggtgatgcctt

SEQ ID NO: 2846426 - DNA, 25 bp, Homo sapien
taagcacttggtctaaccacaggca

SEQ ID NO: 2846427 - DNA, 25 bp, Homo sapien
tctgccgataatttggttaggtcat

SEQ ID NO: 2846428 - DNA, 25 bp, Homo sapien
caaacatctgccgataatttggtta

SEQ ID NO: 2846429 - DNA, 25 bp, Homo sapien
ctaaccacaggcagttgataataaa

SEQ ID NO: 2846430 - DNA, 25 bp, Homo sapien
ttcaactttgaggaccagaaataat

SEQ ID NO: 2846431 - DNA, 25 bp, Homo sapien
tttgatttttctgtcatctggctca

SEQ ID NO: 2846432 - DNA, 25 bp, Homo sapien
gattttcaactttgaggaccagaaa

SEQ ID NO: 2846433 - DNA, 25 bp, Homo sapien
ggtagattttcaactttgaggacca

SEQ ID NO: 2846434 - DNA, 25 bp, Homo sapien
cggatagtttccagttgaggttcgg

SEQ ID NO: 2846435 - DNA, 25 bp, Homo sapien
ttcggtttcatagcccattgcctgg

SEQ ID NO: 2846436 - DNA, 25 bp, Homo sapien
gaggttcggtttcatagcccattgc

SEQ ID NO: 2846437 - DNA, 25 bp, Homo sapien
atttagggcggatagtttccagttg

SEQ ID NO: 2846438 - DNA, 25 bp, Homo sapien
ttttttatttcagacttttgctcca

SEQ ID NO: 2846439 - DNA, 25 bp, Homo sapien
tttttatttcagacttttgctccat

SEQ ID NO: 2846440 - DNA, 25 bp, Homo sapien
tggccccaacaaatgctctttccat

SEQ ID NO: 2846441 - DNA, 25 bp, Homo sapien
ctggccccaacaaatgctctttcca

SEQ ID NO: 2846442 - DNA, 25 bp, Homo sapien
actggccccaacaaatgctctttcc

SEQ ID NO: 2846443 - DNA, 25 bp, Homo sapien
tagcagtgcggtaaagtggaactcc

SEQ ID NO: 2846444 - DNA, 25 bp, Homo sapien
taaagtggaactccgtgtattagct

SEQ ID NO: 2846445 - DNA, 25 bp, Homo sapien
catatgtagcagtgcggtaaagtgg

SEQ ID NO: 2846446 - DNA, 25 bp, Homo sapien
gaactccgtgtattagctttagctg

SEQ ID NO: 2846447 - DNA, 25 bp, Homo sapien
aatacttgaagtttagaatagtgat

SEQ ID NO: 2846448 - DNA, 25 bp, Homo sapien
ggtcccgcaaatagttaaatctgaa

SEQ ID NO: 2846449 - DNA, 25 bp, Homo sapien
gggtgcttggtcccgcaaatagtta

SEQ ID NO: 2846450 - DNA, 25 bp, Homo sapien
tggcttagagtctttgggtttgtag

SEQ ID NO: 2846451 - DNA, 25 bp, Homo sapien
cttctctctgccttcctcctttgga

SEQ ID NO: 2846452 - DNA, 25 bp, Homo sapien
ctctctgccttcctcctttggagca

SEQ ID NO: 2846453 - DNA, 25 bp, Homo sapien
ctctgccttcctcctttggagcacg

SEQ ID NO: 2846454 - DNA, 25 bp, Homo sapien
ttctctctgccttcctcctttggag

SEQ ID NO: 2846455 - DNA, 25 bp, Homo sapien
ggagccatttctgcttccgaagggt

SEQ ID NO: 2846456 - DNA, 25 bp, Homo sapien
cattttttgcaccagaggaggtcac

SEQ ID NO: 2846457 - DNA, 25 bp, Homo sapien
tattgagctcttaccacgtggcaga

SEQ ID NO: 2846458 - DNA, 25 bp, Homo sapien
acaagagaagtgtcctactggcagg

SEQ ID NO: 2846459 - DNA, 25 bp, Homo sapien
taaacaggatgtccgtttttctctc

SEQ ID NO: 2846460 - DNA, 25 bp, Homo sapien
gatgaggagtaaacaggatgtccgt

SEQ ID NO: 2846461 - DNA, 25 bp, Homo sapien
aagatgaggagtaaacaggatgtcc

SEQ ID NO: 2846462 - DNA, 25 bp, Homo sapien
tgaggagtaaacaggatgtccgttt

SEQ ID NO: 2846463 - DNA, 25 bp, Homo sapien
tctaagtaggcaattggcaatgaat

SEQ ID NO: 2846464 - DNA, 25 bp, Homo sapien
tatggcacataattctaagtaggca

SEQ ID NO: 2846465 - DNA, 25 bp, Homo sapien
cgagtgtagttatggcacataattc

SEQ ID NO: 2846466 - DNA, 25 bp, Homo sapien
tctgtccctgtttcgagtgtagtta

SEQ ID NO: 2846467 - DNA, 25 bp, Homo sapien
tagtctggcataaaataaggctaaa

SEQ ID NO: 2846468 - DNA, 25 bp, Homo sapien
ggtccctggagtcagctagtctggc

SEQ ID NO: 2846469 - DNA, 25 bp, Homo sapien
tgtcagccagctccaaatcagccat

SEQ ID NO: 2846470 - DNA, 25 bp, Homo sapien
gttttacatcagcatactcctctgg

SEQ ID NO: 2846471 - DNA, 25 bp, Homo sapien
tgtgtaagtttcttacaggtatgga

SEQ ID NO: 2846472 - DNA, 25 bp, Homo sapien
agtttcttacaggtatggatttcag

SEQ ID NO: 2846473 - DNA, 25 bp, Homo sapien
cttacaggtatggatttcagttagt

SEQ ID NO: 2846474 - DNA, 25 bp, Homo sapien
aaggactgtgtaagtttcttacagg

SEQ ID NO: 2846475 - DNA, 25 bp, Homo sapien
aatgttcaaattccggcatctgagg

SEQ ID NO: 2846476 - DNA, 25 bp, Homo sapien
gggttgacacggatgcctcttggca

SEQ ID NO: 2846477 - DNA, 25 bp, Homo sapien
ggaactgtaccattgctttgaggca

SEQ ID NO: 2846478 - DNA, 25 bp, Homo sapien
tcttggcaccatgcaaagatgctga

SEQ ID NO: 2846479 - DNA, 25 bp, Homo sapien
taagtcggcagcgttgcaagtccag

SEQ ID NO: 2846480 - DNA, 25 bp, Homo sapien
ttgttagaaacatctggaatactga

SEQ ID NO: 2846481 - DNA, 25 bp, Homo sapien
cacaccagacgtctggattgttaga

SEQ ID NO: 2846482 - DNA, 25 bp, Homo sapien
tctggataggccttgccaacacacc

SEQ ID NO: 2846483 - DNA, 25 bp, Homo sapien
ctgtgcctctcgaccagctgggtga

SEQ ID NO: 2846484 - DNA, 25 bp, Homo sapien
gaatagaggatacatactgccaccc

SEQ ID NO: 2846485 - DNA, 25 bp, Homo sapien
aacacgagcttttctaatgctaaac

SEQ ID NO: 2846486 - DNA, 25 bp, Homo sapien
gcctgcactgatgcctgtggtagaa

SEQ ID NO: 2846487 - DNA, 25 bp, Homo sapien
tctcatgtagttgagagcacggctc

SEQ ID NO: 2846488 - DNA, 25 bp, Homo sapien
cacggctctctgctgtgatttactg

SEQ ID NO: 2846489 - DNA, 25 bp, Homo sapien
ggaacgctctgtgcagcattggaac

SEQ ID NO: 2846490 - DNA, 25 bp, Homo sapien
gggctccgtgacaaaggccttggaa

SEQ ID NO: 2846491 - DNA, 25 bp, Homo sapien
ccagggaaagtggaacaggaggatg

SEQ ID NO: 2846492 - DNA, 25 bp, Homo sapien
aacaggaggatgaatccgagggaca

SEQ ID NO: 2846493 - DNA, 25 bp, Homo sapien
gatgaatccgagggacaaactccat

SEQ ID NO: 2846494 - DNA, 25 bp, Homo sapien
catatcttcacccagggaaagtgga

SEQ ID NO: 2846495 - DNA, 25 bp, Homo sapien
gatagctttgtctttgcgcgccaag

SEQ ID NO: 2846496 - DNA, 25 bp, Homo sapien
ccagtcacttgtcgtgtctccatgt

SEQ ID NO: 2846497 - DNA, 25 bp, Homo sapien
gactccttaatccagtcacttgtcg

SEQ ID NO: 2846498 - DNA, 25 bp, Homo sapien
tacaaattctgtgaccatggctgat

SEQ ID NO: 2846499 - DNA, 25 bp, Homo sapien
catggtttagttccaatctttccaa

SEQ ID NO: 2846500 - DNA, 25 bp, Homo sapien
tctggaccgaggaaagatcttattt

SEQ ID NO: 2846501 - DNA, 25 bp, Homo sapien
gagcaagacgaaaataagagaagac

SEQ ID NO: 2846502 - DNA, 25 bp, Homo sapien
gtctgtcttacgtggagcaagacga

SEQ ID NO: 2846503 - DNA, 25 bp, Homo sapien
tgcagctggacctattgggctttgc

SEQ ID NO: 2846504 - DNA, 25 bp, Homo sapien
gcatttggaaactctgaaagtgaaa

SEQ ID NO: 2846505 - DNA, 25 bp, Homo sapien
gctggacctattgggctttgcattt

SEQ ID NO: 2846506 - DNA, 25 bp, Homo sapien
tgggctttgcatttggaaactctga

SEQ ID NO: 2846507 - DNA, 25 bp, Homo sapien
tggcagtaaatccttagcatggagc

SEQ ID NO: 2846508 - DNA, 25 bp, Homo sapien
cttttctccggagggtatccaggtg

SEQ ID NO: 2846509 - DNA, 25 bp, Homo sapien
gatccagtaaagtctttgatttcac

SEQ ID NO: 2846510 - DNA, 25 bp, Homo sapien
tatccaggtgtatagatccagtaaa

SEQ ID NO: 2846511 - DNA, 25 bp, Homo sapien
tcaccatgcactgggaacgtttgtt

SEQ ID NO: 2846512 - DNA, 25 bp, Homo sapien
gattcaaattggtcctccagggaga

SEQ ID NO: 2846513 - DNA, 25 bp, Homo sapien
tcatatccatgctacgaacacactc

SEQ ID NO: 2846514 - DNA, 25 bp, Homo sapien
tctccgagagttggaaataagctct

SEQ ID NO: 2846515 - DNA, 25 bp, Homo sapien
taacaagatatggagtcagtgacct

SEQ ID NO: 2846516 - DNA, 25 bp, Homo sapien
ggctctgactatttcaataacaaga

SEQ ID NO: 2846517 - DNA, 25 bp, Homo sapien
tccatggcagttgaatgcttctccc

SEQ ID NO: 2846518 - DNA, 25 bp, Homo sapien
ggtggagttgcaaaggctctgacta

SEQ ID NO: 2846519 - DNA, 25 bp, Homo sapien
gattgtgaaggcaaaggtctgcagc

SEQ ID NO: 2846520 - DNA, 25 bp, Homo sapien
aaccagggcctacgtgcagtttctg

SEQ ID NO: 2846521 - DNA, 25 bp, Homo sapien
tgtcatccttgcaccccatagggtt

SEQ ID NO: 2846522 - DNA, 25 bp, Homo sapien
ccatgatgaccaacacgtgtgctgt

SEQ ID NO: 2846523 - DNA, 25 bp, Homo sapien
tctatctgattgttggacccagccc

SEQ ID NO: 2846524 - DNA, 25 bp, Homo sapien
gcccagggctcctttggagctgtgt

SEQ ID NO: 2846525 - DNA, 25 bp, Homo sapien
ctatgcatgcctgtcctaggtccat

SEQ ID NO: 2846526 - DNA, 25 bp, Homo sapien
tgacctcggtccctggtaccacagg

SEQ ID NO: 2846527 - DNA, 25 bp, Homo sapien
gaacatctttaaatggtatgataca

SEQ ID NO: 2846528 - DNA, 25 bp, Homo sapien
aggaacatctttaaatggtatgata

SEQ ID NO: 2846529 - DNA, 25 bp, Homo sapien
ggaacatctttaaatggtatgatac

SEQ ID NO: 2846530 - DNA, 25 bp, Homo sapien
taggaacatctttaaatggtatgat

SEQ ID NO: 2846531 - DNA, 25 bp, Homo sapien
tttcttcaagagtagtgcagctttc

SEQ ID NO: 2846532 - DNA, 25 bp, Homo sapien
gctttcttcaagagtagtgcagctt

SEQ ID NO: 2846533 - DNA, 25 bp, Homo sapien
ttgctttcttcaagagtagtgcagc

SEQ ID NO: 2846534 - DNA, 25 bp, Homo sapien
tgctttcttcaagagtagtgcagct

SEQ ID NO: 2846535 - DNA, 25 bp, Homo sapien
tgctaatagagatgaacgtccttgg

SEQ ID NO: 2846536 - DNA, 25 bp, Homo sapien
aactctgaactatgggtgatatgcc

SEQ ID NO: 2846537 - DNA, 25 bp, Homo sapien
tacctacaagattgagagaggcact

SEQ ID NO: 2846538 - DNA, 25 bp, Homo sapien
tcaatgcaattagactggaaggaca

SEQ ID NO: 2846539 - DNA, 25 bp, Homo sapien
tagagcactatcagcctgggaatgg

SEQ ID NO: 2846540 - DNA, 25 bp, Homo sapien
agaatagcttaattgtcgatgtgta

SEQ ID NO: 2846541 - DNA, 25 bp, Homo sapien
tgctttttacagctctctaactgtt

SEQ ID NO: 2846542 - DNA, 25 bp, Homo sapien
tcataggctctattctgatcagaat

SEQ ID NO: 2846543 - DNA, 25 bp, Homo sapien
caaacactgtatgcttggcagggta

SEQ ID NO: 2846544 - DNA, 25 bp, Homo sapien
cactgtatgcttggcagggtaatga

SEQ ID NO: 2846545 - DNA, 25 bp, Homo sapien
aaaacaaacactgtatgcttggcag

SEQ ID NO: 2846546 - DNA, 25 bp, Homo sapien
gcttggcagggtaatgacatcattc

SEQ ID NO: 2846547 - DNA, 25 bp, Homo sapien
tgcttccgataaatcctaaatacac

SEQ ID NO: 2846548 - DNA, 25 bp, Homo sapien
tgttactggcacactgcttccgata

SEQ ID NO: 2846549 - DNA, 25 bp, Homo sapien
gaaaccttgttactggcacactgct

SEQ ID NO: 2846550 - DNA, 25 bp, Homo sapien
caacaaccttgaaaccttgttactg

SEQ ID NO: 2846551 - DNA, 25 bp, Homo sapien
agagacactctcattaactcatctg

SEQ ID NO: 2846552 - DNA, 25 bp, Homo sapien
aacagttgaaatttgacatgtcaca

SEQ ID NO: 2846553 - DNA, 25 bp, Homo sapien
taggaggcttgctctaggtagtatt

SEQ ID NO: 2846554 - DNA, 25 bp, Homo sapien
gaaggcccagggctagtctttggta

SEQ ID NO: 2846555 - DNA, 25 bp, Homo sapien
tgttaagtctaaccaacagcgagat

SEQ ID NO: 2846556 - DNA, 25 bp, Homo sapien
tctctctggcaagagaacatgacaa

SEQ ID NO: 2846557 - DNA, 25 bp, Homo sapien
gggtttctccagacgattaatgaag

SEQ ID NO: 2846558 - DNA, 25 bp, Homo sapien
gttttgacagagcaacagttaagca

SEQ ID NO: 2846559 - DNA, 25 bp, Homo sapien
catttaaagctagtcacaccgcagg

SEQ ID NO: 2846560 - DNA, 25 bp, Homo sapien
cattccaggtccctaaggttgagtt

SEQ ID NO: 2846561 - DNA, 25 bp, Homo sapien
ttttcaatggctgcaggaaccagaa

SEQ ID NO: 2846562 - DNA, 25 bp, Homo sapien
taaatctgcatgagagttgcgctgc

SEQ ID NO: 2846563 - DNA, 25 bp, Homo sapien
ccagcagtgagaatgattcctacca

SEQ ID NO: 2846564 - DNA, 25 bp, Homo sapien
gactccatataacaaagcgcaagga

SEQ ID NO: 2846565 - DNA, 25 bp, Homo sapien
gatatgctactaaaagttgctgtcc

SEQ ID NO: 2846566 - DNA, 25 bp, Homo sapien
tcaaaagacggaaatcagggcaaag

SEQ ID NO: 2846567 - DNA, 25 bp, Homo sapien
taagatataagtagcacccttgccc

SEQ ID NO: 2846568 - DNA, 25 bp, Homo sapien
ccctggcctctgtacataagatata

SEQ ID NO: 2846569 - DNA, 25 bp, Homo sapien
gaccactggtaatgtctaacactag

SEQ ID NO: 2846570 - DNA, 25 bp, Homo sapien
gagacaatctgcacactggccaaga

SEQ ID NO: 2846571 - DNA, 25 bp, Homo sapien
tctatctgagaaacaccgcaggctg

SEQ ID NO: 2846572 - DNA, 25 bp, Homo sapien
ttcatttccagttagaaagctgccc

SEQ ID NO: 2846573 - DNA, 25 bp, Homo sapien
aagtatgcaacagggcgatctcggc

SEQ ID NO: 2846574 - DNA, 25 bp, Homo sapien
taatttgaacactaatgacttgacc

SEQ ID NO: 2846575 - DNA, 25 bp, Homo sapien
ggacacttgccacacaaccaaatga

SEQ ID NO: 2846576 - DNA, 25 bp, Homo sapien
gaagacaatatccaaggacacttgc

SEQ ID NO: 2846577 - DNA, 25 bp, Homo sapien
gaaagtaggatcatgggcagaagac

SEQ ID NO: 2846578 - DNA, 25 bp, Homo sapien
cttgccacacaaccaaatgaaacac

SEQ ID NO: 2846579 - DNA, 25 bp, Homo sapien
actgatcccgtatacatagccaaac

SEQ ID NO: 2846580 - DNA, 25 bp, Homo sapien
catagccaaactggattttgccagc

SEQ ID NO: 2846581 - DNA, 25 bp, Homo sapien
tacatagccaaactggattttgcca

SEQ ID NO: 2846582 - DNA, 25 bp, Homo sapien
tccaattgcactgatcccgtataca

SEQ ID NO: 2846583 - DNA, 25 bp, Homo sapien
tcaggagcactcagttcaagcccag

SEQ ID NO: 2846584 - DNA, 25 bp, Homo sapien
gaacaaactttgtattcaggtcaca

SEQ ID NO: 2846585 - DNA, 25 bp, Homo sapien
taggagaatgcctctacagattatg

SEQ ID NO: 2846586 - DNA, 25 bp, Homo sapien
tgtgttctcacataacctgtcttgt

SEQ ID NO: 2846587 - DNA, 25 bp, Homo sapien
catcaaagacttgaggtgtaaagcg

SEQ ID NO: 2846588 - DNA, 25 bp, Homo sapien
taggtataaatacaagcaactcagt

SEQ ID NO: 2846589 - DNA, 25 bp, Homo sapien
gctacacttactatagatggagaac

SEQ ID NO: 2846590 - DNA, 25 bp, Homo sapien
tgttctttaattgcaccctgaaggt

SEQ ID NO: 2846591 - DNA, 25 bp, Homo sapien
aatgtggctccaaaagcaaggcaaa

SEQ ID NO: 2846592 - DNA, 25 bp, Homo sapien
gcaaggcaaaaaaccattggacctg

SEQ ID NO: 2846593 - DNA, 25 bp, Homo sapien
gctgccatctgctacttttaacgga

SEQ ID NO: 2846594 - DNA, 25 bp, Homo sapien
taatactgttagtgttttttgccag

SEQ ID NO: 2846595 - DNA, 25 bp, Homo sapien
cctggcctggatgatattatttcag

SEQ ID NO: 2846596 - DNA, 25 bp, Homo sapien
cctggatgatattatttcagtgagc

SEQ ID NO: 2846597 - DNA, 25 bp, Homo sapien
ggcctggatgatattatttcagtga

SEQ ID NO: 2846598 - DNA, 25 bp, Homo sapien
ctggcctggatgatattatttcagt

SEQ ID NO: 2846599 - DNA, 25 bp, Homo sapien
actacgtctctatgcatatgtgtgc

SEQ ID NO: 2846600 - DNA, 25 bp, Homo sapien
tcccttaggtatgactgcatagcaa

SEQ ID NO: 2846601 - DNA, 25 bp, Homo sapien
gaaaagggtatggatctgatgaaac

SEQ ID NO: 2846602 - DNA, 25 bp, Homo sapien
tcttctgaggagagtgttcatacct

SEQ ID NO: 2846603 - DNA, 25 bp, Homo sapien
catgtctggagggacaaatctgcct

SEQ ID NO: 2846604 - DNA, 25 bp, Homo sapien
aaatctgccttgctgcgaatagtca

SEQ ID NO: 2846605 - DNA, 25 bp, Homo sapien
gctggtaaatctgcccggtgtatgg

SEQ ID NO: 2846606 - DNA, 25 bp, Homo sapien
taataaaggtggctcatcctcaaag

SEQ ID NO: 2846607 - DNA, 25 bp, Homo sapien
tgatcatcgatgctgtaacttgtct

SEQ ID NO: 2846608 - DNA, 25 bp, Homo sapien
cctccataatcataggactgctgtg

SEQ ID NO: 2846609 - DNA, 25 bp, Homo sapien
ttgctatagggtcctccacttcctc

SEQ ID NO: 2846610 - DNA, 25 bp, Homo sapien
taacttgtctggtagaaatccgtgt

SEQ ID NO: 2846611 - DNA, 25 bp, Homo sapien
aacaagcccatttgcacgggtgtgg

SEQ ID NO: 2846612 - DNA, 25 bp, Homo sapien
aaaataaggcctgcggcctgccagg

SEQ ID NO: 2846613 - DNA, 25 bp, Homo sapien
actgggctttacagctgacaaggcg

SEQ ID NO: 2846614 - DNA, 25 bp, Homo sapien
gagaagctgaacactgtgccacggg

SEQ ID NO: 2846615 - DNA, 25 bp, Homo sapien
tgaaccagccccgttgctacgtgtc

SEQ ID NO: 2846616 - DNA, 25 bp, Homo sapien
gtagcttcactaatcccaaacaacc

SEQ ID NO: 2846617 - DNA, 25 bp, Homo sapien
cgctggcggcaaaggcagtagcttc

SEQ ID NO: 2846618 - DNA, 25 bp, Homo sapien
gctacgtgtcacagggccaaagaac

SEQ ID NO: 2846619 - DNA, 25 bp, Homo sapien
ggcccgtgccaaagaggaaagtgct

SEQ ID NO: 2846620 - DNA, 25 bp, Homo sapien
caattgctgcttactcgtaggtagg

SEQ ID NO: 2846621 - DNA, 25 bp, Homo sapien
accaggaaagcgcaggcgtagcaat

SEQ ID NO: 2846622 - DNA, 25 bp, Homo sapien
aaagcgcaggcgtagcaattgctgc

SEQ ID NO: 2846623 - DNA, 25 bp, Homo sapien
taggtgatggaggaagactgggagg

SEQ ID NO: 2846624 - DNA, 25 bp, Homo sapien
ggtgatggaggaagactgggaggcg

SEQ ID NO: 2846625 - DNA, 25 bp, Homo sapien
aggtgatggaggaagactgggaggc

SEQ ID NO: 2846626 - DNA, 25 bp, Homo sapien
ctaggtgatggaggaagactgggag

SEQ ID NO: 2846627 - DNA, 25 bp, Homo sapien
taagccaaggtatcctgctgatgcc

SEQ ID NO: 2846628 - DNA, 25 bp, Homo sapien
caaggtatcctgctgatgcccctta

SEQ ID NO: 2846629 - DNA, 25 bp, Homo sapien
gactttgaaatgtaagccaaggtat

SEQ ID NO: 2846630 - DNA, 25 bp, Homo sapien
tagaaattttgagaacatccactaa

SEQ ID NO: 2846631 - DNA, 25 bp, Homo sapien
aatctccaagggcaaatgtgcttag

SEQ ID NO: 2846632 - DNA, 25 bp, Homo sapien
gagttctgagtatcactttactttc

SEQ ID NO: 2846633 - DNA, 25 bp, Homo sapien
tgtgcttagagttctgagtatcact

SEQ ID NO: 2846634 - DNA, 25 bp, Homo sapien
cactttactttctcgtattcctctc

SEQ ID NO: 2846635 - DNA, 25 bp, Homo sapien
ctttatgcctcaattggagtttaac

SEQ ID NO: 2846636 - DNA, 25 bp, Homo sapien
ctatgtttgggcatcttttgtaatt

SEQ ID NO: 2846637 - DNA, 25 bp, Homo sapien
tatgcctcaattggagtttaacaac

SEQ ID NO: 2846638 - DNA, 25 bp, Homo sapien
agaactcaatttctatgtttgggca

SEQ ID NO: 2846639 - DNA, 25 bp, Homo sapien
cataacacgatgagtgtgcagcatc

SEQ ID NO: 2846640 - DNA, 25 bp, Homo sapien
tgtggtgaggacttgatggtcatcc

SEQ ID NO: 2846641 - DNA, 25 bp, Homo sapien
tcctccctgatagcgaaggctgtca

SEQ ID NO: 2846642 - DNA, 25 bp, Homo sapien
tggtgataatgcaggaatccttggg

SEQ ID NO: 2846643 - DNA, 25 bp, Homo sapien
taagagaaatctgttgccgtatgct

SEQ ID NO: 2846644 - DNA, 25 bp, Homo sapien
tccgggagtgccatcccacagtgtt

SEQ ID NO: 2846645 - DNA, 25 bp, Homo sapien
tcagccttcagtccgggagtgccat

SEQ ID NO: 2846646 - DNA, 25 bp, Homo sapien
gtatgctgttcagccttcagtccgg

SEQ ID NO: 2846647 - DNA, 25 bp, Homo sapien
cttggaaactccagactccaggaca

SEQ ID NO: 2846648 - DNA, 25 bp, Homo sapien
gaagtggctgcgcagcactgcgtcc

SEQ ID NO: 2846649 - DNA, 25 bp, Homo sapien
gcgcgcctggcaatcgcgtgcccac

SEQ ID NO: 2846650 - DNA, 25 bp, Homo sapien
ggtgatggaggtaaagacaaggaag

SEQ ID NO: 2846651 - DNA, 25 bp, Homo sapien
acagcatccgaactgcactgggaac

SEQ ID NO: 2846652 - DNA, 25 bp, Homo sapien
tacctgggaccctagcagggcacat

SEQ ID NO: 2846653 - DNA, 25 bp, Homo sapien
gaacatgggagtccgtttgcccttg

SEQ ID NO: 2846654 - DNA, 25 bp, Homo sapien
ggatggtttcttgcctgcactgctg

SEQ ID NO: 2846655 - DNA, 25 bp, Homo sapien
tagtggacaggtattgtcttcttcc

SEQ ID NO: 2846656 - DNA, 25 bp, Homo sapien
ttagtggacaggtattgtcttcttc

SEQ ID NO: 2846657 - DNA, 25 bp, Homo sapien
agagataagattccggctttttagc

SEQ ID NO: 2846658 - DNA, 25 bp, Homo sapien
tggtaaatttcccactagtgtagag

SEQ ID NO: 2846659 - DNA, 25 bp, Homo sapien
caaaggctcatctgtccaacacgat

SEQ ID NO: 2846660 - DNA, 25 bp, Homo sapien
gcatttctgtgttcatcaaaggctc

SEQ ID NO: 2846661 - DNA, 25 bp, Homo sapien
tttagatttatctggacaggctcca

SEQ ID NO: 2846662 - DNA, 25 bp, Homo sapien
tccattctcctgactatgtcgtttc

SEQ ID NO: 2846663 - DNA, 25 bp, Homo sapien
caaaatcagcagtgcattgcactgt

SEQ ID NO: 2846664 - DNA, 25 bp, Homo sapien
aatcagcagtgcattgcactgttta

SEQ ID NO: 2846665 - DNA, 25 bp, Homo sapien
cagcagtgcattgcactgtttaatg

SEQ ID NO: 2846666 - DNA, 25 bp, Homo sapien
aacaaaatcagcagtgcattgcact

SEQ ID NO: 2846667 - DNA, 25 bp, Homo sapien
ggtcaactctgtttccatctgattt

SEQ ID NO: 2846668 - DNA, 25 bp, Homo sapien
gagggcttgataccatcaaggtcaa

SEQ ID NO: 2846669 - DNA, 25 bp, Homo sapien
taaggaatcttaactgccggagctt

SEQ ID NO: 2846670 - DNA, 25 bp, Homo sapien
tctgaaatctatactgtgagggctt

SEQ ID NO: 2846671 - DNA, 25 bp, Homo sapien
agataaggcagagttgcccaggtgt

SEQ ID NO: 2846672 - DNA, 25 bp, Homo sapien
tatctggttgcaataaatctgcttc

SEQ ID NO: 2846673 - DNA, 25 bp, Homo sapien
gcccaggtgtttgaattgtgccaac

SEQ ID NO: 2846674 - DNA, 25 bp, Homo sapien
ggcagagttgcccaggtgtttgaat

SEQ ID NO: 2846675 - DNA, 25 bp, Homo sapien
tcgaagtgtcttgagctttagtctg

SEQ ID NO: 2846676 - DNA, 25 bp, Homo sapien
gaagtgtcttgagctttagtctgaa

SEQ ID NO: 2846677 - DNA, 25 bp, Homo sapien
tcttgagctttagtctgaatctgat

SEQ ID NO: 2846678 - DNA, 25 bp, Homo sapien
tgtcttgagctttagtctgaatctg

SEQ ID NO: 2846679 - DNA, 25 bp, Homo sapien
cacaatgcagtaattcagggcacca

SEQ ID NO: 2846680 - DNA, 25 bp, Homo sapien
agagagcacaatgcagtaattcagg

SEQ ID NO: 2846681 - DNA, 25 bp, Homo sapien
caatgcagtaattcagggcaccata

SEQ ID NO: 2846682 - DNA, 25 bp, Homo sapien
agtaattcagggcaccatattttgc

SEQ ID NO: 2846683 - DNA, 25 bp, Homo sapien
gaccatgtagctggctccctttata

SEQ ID NO: 2846684 - DNA, 25 bp, Homo sapien
gacaaacagatgcaagtaggtgacc

SEQ ID NO: 2846685 - DNA, 25 bp, Homo sapien
tcagacgagtggctaaagaaatggg

SEQ ID NO: 2846686 - DNA, 25 bp, Homo sapien
gacctgtcaaaagctagcaaaaacc

SEQ ID NO: 2846687 - DNA, 25 bp, Homo sapien
tgggctttacaaactccttggcagg

SEQ ID NO: 2846688 - DNA, 25 bp, Homo sapien
taagacctaccttgggatcacctgg

SEQ ID NO: 2846689 - DNA, 25 bp, Homo sapien
caaccctggctgctatgctaggaaa

SEQ ID NO: 2846690 - DNA, 25 bp, Homo sapien
ctaccactggtggagctaagctcaa

SEQ ID NO: 2846691 - DNA, 25 bp, Homo sapien
caggtaccaaactagctttaaccag

SEQ ID NO: 2846692 - DNA, 25 bp, Homo sapien
tgggttgttacaacaacaggtacca

SEQ ID NO: 2846693 - DNA, 25 bp, Homo sapien
caacaacaggtaccaaactagcttt

SEQ ID NO: 2846694 - DNA, 25 bp, Homo sapien
ccagtttggggtcaaaatccacaga

SEQ ID NO: 2846695 - DNA, 25 bp, Homo sapien
acatgccttttaggctgcacagacc

SEQ ID NO: 2846696 - DNA, 25 bp, Homo sapien
aatactgaatcaactggtaaatcac

SEQ ID NO: 2846697 - DNA, 25 bp, Homo sapien
caacaagccgtctgcttataaatac

SEQ ID NO: 2846698 - DNA, 25 bp, Homo sapien
ttctgaagccaacaagccgtctgct

SEQ ID NO: 2846699 - DNA, 25 bp, Homo sapien
gatccttagaacctccacctatggc

SEQ ID NO: 2846700 - DNA, 25 bp, Homo sapien
tatggccagcccaagatccttagag

SEQ ID NO: 2846701 - DNA, 25 bp, Homo sapien
gctttattgccatggactcctttga

SEQ ID NO: 2846702 - DNA, 25 bp, Homo sapien
tgtatacattttcaacgacttcgta

SEQ ID NO: 2846703 - DNA, 25 bp, Homo sapien
tgcatggcactgtaggtacagaaat

SEQ ID NO: 2846704 - DNA, 25 bp, Homo sapien
ctctgcatggcactgtaggtacaga

SEQ ID NO: 2846705 - DNA, 25 bp, Homo sapien
catggcactgtaggtacagaaatga

SEQ ID NO: 2846706 - DNA, 25 bp, Homo sapien
tggcactgtaggtacagaaatgaga

SEQ ID NO: 2846707 - DNA, 25 bp, Homo sapien
aaagttgatatccaggttgccatgg

SEQ ID NO: 2846708 - DNA, 25 bp, Homo sapien
tatccaggttgccatgggtgtatgg

SEQ ID NO: 2846709 - DNA, 25 bp, Homo sapien
ggcccagtaggcaaagttgatatcc

SEQ ID NO: 2846710 - DNA, 25 bp, Homo sapien
gggcccagtaggcaaagttgatatc

SEQ ID NO: 2846711 - DNA, 25 bp, Homo sapien
gaaaacttctatacggcctctcatt

SEQ ID NO: 2846712 - DNA, 25 bp, Homo sapien
tatacggcctctcatttggccactc

SEQ ID NO: 2846713 - DNA, 25 bp, Homo sapien
ttctatacggcctctcatttggcca

SEQ ID NO: 2846714 - DNA, 25 bp, Homo sapien
cctccactgaaaacttctatacggc

SEQ ID NO: 2846715 - DNA, 25 bp, Homo sapien
ctttttcacgggatggatctcttgt

SEQ ID NO: 2846716 - DNA, 25 bp, Homo sapien
ttctccctagtcttttctcatgcca

SEQ ID NO: 2846717 - DNA, 25 bp, Homo sapien
gccactgaactgcatcatatgttaa

SEQ ID NO: 2846718 - DNA, 25 bp, Homo sapien
tgtttctgtagctgatttgaaggca

SEQ ID NO: 2846719 - DNA, 25 bp, Homo sapien
cagtttgaatgccagtggggtaaga

SEQ ID NO: 2846720 - DNA, 25 bp, Homo sapien
tgccatcagtactccatctggttcc

SEQ ID NO: 2846721 - DNA, 25 bp, Homo sapien
ggtaagagagtgactcagtgctgaa

SEQ ID NO: 2846722 - DNA, 25 bp, Homo sapien
gagtgactcagtgctgaaggaattt

SEQ ID NO: 2846723 - DNA, 25 bp, Homo sapien
cacagacgttacaattactccagca

SEQ ID NO: 2846724 - DNA, 25 bp, Homo sapien
tttcggcacattccggacttgctta

SEQ ID NO: 2846725 - DNA, 25 bp, Homo sapien
tgtctccactgttgcacagacgtta

SEQ ID NO: 2846726 - DNA, 25 bp, Homo sapien
tactccagcaatactaggattggca

SEQ ID NO: 2846727 - DNA, 25 bp, Homo sapien
gatgaggaatgtgaataggcttgtt

SEQ ID NO: 2846728 - DNA, 25 bp, Homo sapien
gattgtaggaacaatgataaagatg

SEQ ID NO: 2846729 - DNA, 25 bp, Homo sapien
cattgattgtaggaacaatgataaa

SEQ ID NO: 2846730 - DNA, 25 bp, Homo sapien
ctagcatggacattgattgtaggaa

SEQ ID NO: 2846731 - DNA, 25 bp, Homo sapien
tattgttttcaagccctactactac

SEQ ID NO: 2846732 - DNA, 25 bp, Homo sapien
tactacatcgttgggatatagcagg

SEQ ID NO: 2846733 - DNA, 25 bp, Homo sapien
ggaagtaagtccaggaagctaaagc

SEQ ID NO: 2846734 - DNA, 25 bp, Homo sapien
tgtactctgtgaataataagcaata

SEQ ID NO: 2846735 - DNA, 25 bp, Homo sapien
tgctgataccttgcatgaacatatc

SEQ ID NO: 2846736 - DNA, 25 bp, Homo sapien
caataaagaagacaggggttgggca

SEQ ID NO: 2846737 - DNA, 25 bp, Homo sapien
taaaaagagctactcccaaaggaga

SEQ ID NO: 2846738 - DNA, 25 bp, Homo sapien
ggcagtaaaaagagctactcccaaa

SEQ ID NO: 2846739 - DNA, 25 bp, Homo sapien
cacagtaggcatcacaaaccgaaat

SEQ ID NO: 2846740 - DNA, 25 bp, Homo sapien
gtcacagtaggcatcacaaaccgaa

SEQ ID NO: 2846741 - DNA, 25 bp, Homo sapien
cagtaggcatcacaaaccgaaatac

SEQ ID NO: 2846742 - DNA, 25 bp, Homo sapien
tgtcacagtaggcatcacaaaccga

SEQ ID NO: 2846743 - DNA, 25 bp, Homo sapien
ctgccatcagggttttctgataatg

SEQ ID NO: 2846744 - DNA, 25 bp, Homo sapien
gataatgcattctgtgaggcagctg

SEQ ID NO: 2846745 - DNA, 25 bp, Homo sapien
tggtagagttaatgtgtctacgata

SEQ ID NO: 2846746 - DNA, 25 bp, Homo sapien
tgcttgtgaaaaacaatgtggtggt

SEQ ID NO: 2846747 - DNA, 25 bp, Homo sapien
tacagtcagcttgtctctagggttg

SEQ ID NO: 2846748 - DNA, 25 bp, Homo sapien
ggagattactcacctgttacagtca

SEQ ID NO: 2846749 - DNA, 25 bp, Homo sapien
ctgaccgtgtgggaagatttacctt

SEQ ID NO: 2846750 - DNA, 25 bp, Homo sapien
caatgaaactaaaggatccactgag

SEQ ID NO: 2846751 - DNA, 25 bp, Homo sapien
tgtaacagtgttaagcatgctccac

SEQ ID NO: 2846752 - DNA, 25 bp, Homo sapien
ggattggcctcacggaaagagaaag

SEQ ID NO: 2846753 - DNA, 25 bp, Homo sapien
tgttcatggcttagaggattggcct

SEQ ID NO: 2846754 - DNA, 25 bp, Homo sapien
aatatgatctggtgccctaaatacc

SEQ ID NO: 2846755 - DNA, 25 bp, Homo sapien
tcagcagagtatgaatctgaatgga

SEQ ID NO: 2846756 - DNA, 25 bp, Homo sapien
tcacatcttactattccagtgcccg

SEQ ID NO: 2846757 - DNA, 25 bp, Homo sapien
tggagttcagcagagtatgaatctg

SEQ ID NO: 2846758 - DNA, 25 bp, Homo sapien
aaccagagcctcacatcttactatt

SEQ ID NO: 2846759 - DNA, 25 bp, Homo sapien
atgccacagccttgtgactagcaga

SEQ ID NO: 2846760 - DNA, 25 bp, Homo sapien
cagccttgtgactagcagagttgac

SEQ ID NO: 2846761 - DNA, 25 bp, Homo sapien
ctgtgatattaagaaggctcttctt

SEQ ID NO: 2846762 - DNA, 25 bp, Homo sapien
agcagagttgactgtgatattaaga

SEQ ID NO: 2846763 - DNA, 25 bp, Homo sapien
tgcttctttttactccttaatccaa

SEQ ID NO: 2846764 - DNA, 25 bp, Homo sapien
tgtctgtgagtcaggacaggccttt

SEQ ID NO: 2846765 - DNA, 25 bp, Homo sapien
cttctgtctgtgagtcaggacaggc

SEQ ID NO: 2846766 - DNA, 25 bp, Homo sapien
tctgtgagtcaggacaggccttttc

SEQ ID NO: 2846767 - DNA, 25 bp, Homo sapien
tgagtcaggacaggccttttctcct

SEQ ID NO: 2846768 - DNA, 25 bp, Homo sapien
tgcatgagcatcctgattggcctta

SEQ ID NO: 2846769 - DNA, 25 bp, Homo sapien
tatagattgttgtagaccggttgct

SEQ ID NO: 2846770 - DNA, 25 bp, Homo sapien
tgtaggtctgccagcactgagcttc

SEQ ID NO: 2846771 - DNA, 25 bp, Homo sapien
cacagggttctgtagctcttgaaca

SEQ ID NO: 2846772 - DNA, 25 bp, Homo sapien
cattcatagccacatgctttgcata

SEQ ID NO: 2846773 - DNA, 25 bp, Homo sapien
ttcatagccacatgctttgcatatt

SEQ ID NO: 2846774 - DNA, 25 bp, Homo sapien
tcattcatagccacatgctttgcat

SEQ ID NO: 2846775 - DNA, 25 bp, Homo sapien
tcatagccacatgctttgcatatta

SEQ ID NO: 2846776 - DNA, 25 bp, Homo sapien
tgacttgggtcagtttgttgcacat

SEQ ID NO: 2846777 - DNA, 25 bp, Homo sapien
gcagttcgcttgtacataaatgtaa

SEQ ID NO: 2846778 - DNA, 25 bp, Homo sapien
cattgatgaataacaagtgacaccc

SEQ ID NO: 2846779 - DNA, 25 bp, Homo sapien
gtgacacccaatgaaattacctctt

SEQ ID NO: 2846780 - DNA, 25 bp, Homo sapien
cttgggatgtaacactgtagatctt

SEQ ID NO: 2846781 - DNA, 25 bp, Homo sapien
gtagatcttcgcctgctgtatttct

SEQ ID NO: 2846782 - DNA, 25 bp, Homo sapien
tcttacctatttgtttttgcgagaa

SEQ ID NO: 2846783 - DNA, 25 bp, Homo sapien
ttcttacctatttgtttttgcgaga

SEQ ID NO: 2846784 - DNA, 25 bp, Homo sapien
gccgatgtgccgctttgcctgagca

SEQ ID NO: 2846785 - DNA, 25 bp, Homo sapien
agttgccgatgtgccgctttgcctg

SEQ ID NO: 2846786 - DNA, 25 bp, Homo sapien
tcagttgccgatgtgccgctttgcc

SEQ ID NO: 2846787 - DNA, 25 bp, Homo sapien
cgatgtgccgctttgcctgagcatt

SEQ ID NO: 2846788 - DNA, 25 bp, Homo sapien
catctgttggcttggcagctgtgac

SEQ ID NO: 2846789 - DNA, 25 bp, Homo sapien
cttggcagctgtgacagttgacaac

SEQ ID NO: 2846790 - DNA, 25 bp, Homo sapien
ttggcttggcagctgtgacagttga

SEQ ID NO: 2846791 - DNA, 25 bp, Homo sapien
ggcttggcagctgtgacagttgaca

SEQ ID NO: 2846792 - DNA, 25 bp, Homo sapien
ctctttgacagagcgcgcagctttg

SEQ ID NO: 2846793 - DNA, 25 bp, Homo sapien
ttgcagggacatggaccttgagagc

SEQ ID NO: 2846794 - DNA, 25 bp, Homo sapien
ctggtcctcgtctatcagggatgat

SEQ ID NO: 2846795 - DNA, 25 bp, Homo sapien
agggatgatcgtcctctttgacaga

SEQ ID NO: 2846796 - DNA, 25 bp, Homo sapien
gatgagtttccaagtaggtgctgct

SEQ ID NO: 2846797 - DNA, 25 bp, Homo sapien
ggacacctctgttaccagcccacat

SEQ ID NO: 2846798 - DNA, 25 bp, Homo sapien
tgctgtgtctggctgtttgatagga

SEQ ID NO: 2846799 - DNA, 25 bp, Homo sapien
ctgtttgataggagcctcatctggg

SEQ ID NO: 2846800 - DNA, 25 bp, Homo sapien
ctctccctaaggtttctggtacact

SEQ ID NO: 2846801 - DNA, 25 bp, Homo sapien
ccctaaggtttctggtacactgatg

SEQ ID NO: 2846802 - DNA, 25 bp, Homo sapien
acactgatggacttctttccctata

SEQ ID NO: 2846803 - DNA, 25 bp, Homo sapien
tggtacactgatggacttctttccc

SEQ ID NO: 2846804 - DNA, 25 bp, Homo sapien
tcagactgagaatgtacaatgcact

SEQ ID NO: 2846805 - DNA, 25 bp, Homo sapien
gctacatttatattagttgccatgg

SEQ ID NO: 2846806 - DNA, 25 bp, Homo sapien
tgtgcccacgtaatgtaccagtttg

SEQ ID NO: 2846807 - DNA, 25 bp, Homo sapien
taacttgtttgtgcccacgtaatgt

SEQ ID NO: 2846808 - DNA, 25 bp, Homo sapien
tgctttttctgggtccgttgggcag

SEQ ID NO: 2846809 - DNA, 25 bp, Homo sapien
ggcagtcccactaaactttccatgc

SEQ ID NO: 2846810 - DNA, 25 bp, Homo sapien
tagggtagatacttctagtgccaac

SEQ ID NO: 2846811 - DNA, 25 bp, Homo sapien
taactctgttctctctagcatctag

SEQ ID NO: 2846812 - DNA, 25 bp, Homo sapien
tcaagctgcctttgtctgtggtagc

SEQ ID NO: 2846813 - DNA, 25 bp, Homo sapien
gaactccaaatagatagaccgagga

SEQ ID NO: 2846814 - DNA, 25 bp, Homo sapien
tccaggtttttggtagcggatgtcg

SEQ ID NO: 2846815 - DNA, 25 bp, Homo sapien
ggtgatccagcagaaaagaactcca

SEQ ID NO: 2846816 - DNA, 25 bp, Homo sapien
ccttagcacattagggtagcatctt

SEQ ID NO: 2846817 - DNA, 25 bp, Homo sapien
gagagatggccaaccgatttcccgt

SEQ ID NO: 2846818 - DNA, 25 bp, Homo sapien
gcataccgctcccagtggaagtgaa

SEQ ID NO: 2846819 - DNA, 25 bp, Homo sapien
tcgtatctcccttaagccgacaggg

SEQ ID NO: 2846820 - DNA, 25 bp, Homo sapien
gattcttcccgcactatacccagag

SEQ ID NO: 2846821 - DNA, 25 bp, Homo sapien
tctaagtgaacaacccctgagcaga

SEQ ID NO: 2846822 - DNA, 25 bp, Homo sapien
cttctaagtgaacaacccctgagca

SEQ ID NO: 2846823 - DNA, 25 bp, Homo sapien
ttctaagtgaacaacccctgagcag

SEQ ID NO: 2846824 - DNA, 25 bp, Homo sapien
catgttgttcaaaggcaggatgggc

SEQ ID NO: 2846825 - DNA, 25 bp, Homo sapien
gttgttcaaaggcaggatgggcaat

SEQ ID NO: 2846826 - DNA, 25 bp, Homo sapien
caaaggcaggatgggcaattctcaa

SEQ ID NO: 2846827 - DNA, 25 bp, Homo sapien
ttcaaaggcaggatgggcaattctc

SEQ ID NO: 2846828 - DNA, 25 bp, Homo sapien
cagttttcagccagttccccttgtg

SEQ ID NO: 2846829 - DNA, 25 bp, Homo sapien
gttccccttgtgacttgtaggtgcc

SEQ ID NO: 2846830 - DNA, 25 bp, Homo sapien
ccccttgtgacttgtaggtgcctgt

SEQ ID NO: 2846831 - DNA, 25 bp, Homo sapien
cttgtgacttgtaggtgcctgtgcc

SEQ ID NO: 2846832 - DNA, 25 bp, Homo sapien
ctgaattttacttgtacactgaggc

SEQ ID NO: 2846833 - DNA, 25 bp, Homo sapien
cactgaggcattttctggccctcat

SEQ ID NO: 2846834 - DNA, 25 bp, Homo sapien
ctgcccttagctcactgaattttac

SEQ ID NO: 2846835 - DNA, 25 bp, Homo sapien
gaattttacttgtacactgaggcat

SEQ ID NO: 2846836 - DNA, 25 bp, Homo sapien
gacttctccttattagatttctccc

SEQ ID NO: 2846837 - DNA, 25 bp, Homo sapien
gattccattagctggagtttccctg

SEQ ID NO: 2846838 - DNA, 25 bp, Homo sapien
cttctcagagatgactttgatactg

SEQ ID NO: 2846839 - DNA, 25 bp, Homo sapien
ttccctgggtttttgattggtgctg

SEQ ID NO: 2846840 - DNA, 25 bp, Homo sapien
acttttcccctcatagacaatgcca

SEQ ID NO: 2846841 - DNA, 25 bp, Homo sapien
cacttttcccctcatagacaatgcc

SEQ ID NO: 2846842 - DNA, 25 bp, Homo sapien
tcacttttcccctcatagacaatgc

SEQ ID NO: 2846843 - DNA, 25 bp, Homo sapien
cttttcccctcatagacaatgccac

SEQ ID NO: 2846844 - DNA, 25 bp, Homo sapien
cagggttaccaactgtgtttatgct

SEQ ID NO: 2846845 - DNA, 25 bp, Homo sapien
cctttctatggggtttatcatcagg

SEQ ID NO: 2846846 - DNA, 25 bp, Homo sapien
actgtgtttatgcttgacctttcta

SEQ ID NO: 2846847 - DNA, 25 bp, Homo sapien
caggagttttatagatgaaggttcc

SEQ ID NO: 2846848 - DNA, 25 bp, Homo sapien
ggaatttctctactttgtcaattgt

SEQ ID NO: 2846849 - DNA, 25 bp, Homo sapien
ctctatgaatgtgtacttcatcctt

SEQ ID NO: 2846850 - DNA, 25 bp, Homo sapien
tctatgaatgtgtacttcatccttt

SEQ ID NO: 2846851 - DNA, 25 bp, Homo sapien
tcctccggagatggaatttctctac

SEQ ID NO: 2846852 - DNA, 25 bp, Homo sapien
gaaggcaatttagggttgatataat

SEQ ID NO: 2846853 - DNA, 25 bp, Homo sapien
tatcactgtaagtagatggttttat

SEQ ID NO: 2846854 - DNA, 25 bp, Homo sapien
tggttttattaaacagctgcagggt

SEQ ID NO: 2846855 - DNA, 25 bp, Homo sapien
ctttggaaggcaatttagggttgat

SEQ ID NO: 2846856 - DNA, 25 bp, Homo sapien
tgcacggaaagttcggatgatggct

SEQ ID NO: 2846857 - DNA, 25 bp, Homo sapien
ctaagcaggctgtttatttgcacgg

SEQ ID NO: 2846858 - DNA, 25 bp, Homo sapien
tgtttatttgcacggaaagttcgga

SEQ ID NO: 2846859 - DNA, 25 bp, Homo sapien
caggctgtttatttgcacggaaagt

SEQ ID NO: 2846860 - DNA, 25 bp, Homo sapien
tgtttaaggtccgtgttctcagcaa

SEQ ID NO: 2846861 - DNA, 25 bp, Homo sapien
tttattacattcatctcaattgtaa

SEQ ID NO: 2846862 - DNA, 25 bp, Homo sapien
ttaaggtccgtgttctcagcaaggc

SEQ ID NO: 2846863 - DNA, 25 bp, Homo sapien
catgtttaaggtccgtgttctcagc

SEQ ID NO: 2846864 - DNA, 25 bp, Homo sapien
ttctctccaattactctgaacctag

SEQ ID NO: 2846865 - DNA, 25 bp, Homo sapien
caattactctgaacctagaagtttc

SEQ ID NO: 2846866 - DNA, 25 bp, Homo sapien
caccatcagtaaacctaaacttgta

SEQ ID NO: 2846867 - DNA, 25 bp, Homo sapien
caagttgacattctcaccatcagta

SEQ ID NO: 2846868 - DNA, 25 bp, Homo sapien
ccatgatggcttcttttatccccat

SEQ ID NO: 2846869 - DNA, 25 bp, Homo sapien
cttgtccatgatggcttcttttatc

SEQ ID NO: 2846870 - DNA, 25 bp, Homo sapien
tttttcttgtccatgatggcttctt

SEQ ID NO: 2846871 - DNA, 25 bp, Homo sapien
tgtccatgatggcttcttttatccc

SEQ ID NO: 2846872 - DNA, 25 bp, Homo sapien
tgactttgaactaagagcagtttca

SEQ ID NO: 2846873 - DNA, 25 bp, Homo sapien
tcaggcataatgtcgttacctcttg

SEQ ID NO: 2846874 - DNA, 25 bp, Homo sapien
gaactaagagcagtttcaggcataa

SEQ ID NO: 2846875 - DNA, 25 bp, Homo sapien
taatgtcgttacctcttgggccatc

SEQ ID NO: 2846876 - DNA, 25 bp, Homo sapien
ttgcattcatgatggtactgtactt

SEQ ID NO: 2846877 - DNA, 25 bp, Homo sapien
tcatgatggtactgtactttgtgtt

SEQ ID NO: 2846878 - DNA, 25 bp, Homo sapien
gatggtactgtactttgtgtttttc

SEQ ID NO: 2846879 - DNA, 25 bp, Homo sapien
gcattcatgatggtactgtactttg

SEQ ID NO: 2846880 - DNA, 25 bp, Homo sapien
cacagatttcttagggggtgtccaa

SEQ ID NO: 2846881 - DNA, 25 bp, Homo sapien
gcaagtctaccaatagttcacaggt

SEQ ID NO: 2846882 - DNA, 25 bp, Homo sapien
gagctgacagtcccacagatttctt

SEQ ID NO: 2846883 - DNA, 25 bp, Homo sapien
gattactgagtatggtccttcccac

SEQ ID NO: 2846884 - DNA, 25 bp, Homo sapien
ggcatttgactgagtggatctgagc

SEQ ID NO: 2846885 - DNA, 25 bp, Homo sapien
catttgactgagtggatctgagctc

SEQ ID NO: 2846886 - DNA, 25 bp, Homo sapien
tctggcatttgactgagtggatctg

SEQ ID NO: 2846887 - DNA, 25 bp, Homo sapien
atttgactgagtggatctgagctct

SEQ ID NO: 2846888 - DNA, 25 bp, Homo sapien
ctcccacggaatttgaggtagccat

SEQ ID NO: 2846889 - DNA, 25 bp, Homo sapien
tttgctcccacggaatttgaggtag

SEQ ID NO: 2846890 - DNA, 25 bp, Homo sapien
tgctcccacggaatttgaggtagcc

SEQ ID NO: 2846891 - DNA, 25 bp, Homo sapien
gctcccacggaatttgaggtagcca

SEQ ID NO: 2846892 - DNA, 25 bp, Homo sapien
gtacaacccgcttatatattgagaa

SEQ ID NO: 2846893 - DNA, 25 bp, Homo sapien
gaagtacaacccgcttatatattga

SEQ ID NO: 2846894 - DNA, 25 bp, Homo sapien
ttggaagtacaacccgcttatatat

SEQ ID NO: 2846895 - DNA, 25 bp, Homo sapien
tttggaagtacaacccgcttatata

SEQ ID NO: 2846896 - DNA, 25 bp, Homo sapien
tcattctaaatgcgtgtgcgtgtgc

SEQ ID NO: 2846897 - DNA, 25 bp, Homo sapien
tgagatgctgccgtagggagtttgc

SEQ ID NO: 2846898 - DNA, 25 bp, Homo sapien
gatgctgccgtagggagtttgctct

SEQ ID NO: 2846899 - DNA, 25 bp, Homo sapien
ccgtagggagtttgctctgggatat

SEQ ID NO: 2846900 - DNA, 25 bp, Homo sapien
atctcccctgctcactttgatctct

SEQ ID NO: 2846901 - DNA, 25 bp, Homo sapien
actgttccttcttatctggctcaga

SEQ ID NO: 2846902 - DNA, 25 bp, Homo sapien
ttaaatcagattacacagaccccag

SEQ ID NO: 2846903 - DNA, 25 bp, Homo sapien
tcttcccctgtattaaggccactgg

SEQ ID NO: 2846904 - DNA, 25 bp, Homo sapien
aattatcatctgaagtgaagcctgg

SEQ ID NO: 2846905 - DNA, 25 bp, Homo sapien
tcctgtggcctacttcagagttagg

SEQ ID NO: 2846906 - DNA, 25 bp, Homo sapien
ccataagtccttttttgtaactcag

SEQ ID NO: 2846907 - DNA, 25 bp, Homo sapien
cagagacaacctctcaaaatagcca

SEQ ID NO: 2846908 - DNA, 25 bp, Homo sapien
aactcagactaatgttttctacagc

SEQ ID NO: 2846909 - DNA, 25 bp, Homo sapien
cctctcaaaatagccacatctgatg

SEQ ID NO: 2846910 - DNA, 25 bp, Homo sapien
catggtaagtgccatcgacaggtct

SEQ ID NO: 2846911 - DNA, 25 bp, Homo sapien
gtaagtgccatcgacaggtctgaaa

SEQ ID NO: 2846912 - DNA, 25 bp, Homo sapien
ggtaagtgccatcgacaggtctgaa

SEQ ID NO: 2846913 - DNA, 25 bp, Homo sapien
tggtaagtgccatcgacaggtctga

SEQ ID NO: 2846914 - DNA, 25 bp, Homo sapien
ttcatcgaatgcaattttttgtcac

SEQ ID NO: 2846915 - DNA, 25 bp, Homo sapien
catgagctgtgcactttttcttgct

SEQ ID NO: 2846916 - DNA, 25 bp, Homo sapien
tcatgagctgtgcactttttcttgc

SEQ ID NO: 2846917 - DNA, 25 bp, Homo sapien
actttttcttgcttcatcgaatgca

SEQ ID NO: 2846918 - DNA, 25 bp, Homo sapien
cttcctcaagtgtaacaaaattgtc

SEQ ID NO: 2846919 - DNA, 25 bp, Homo sapien
tctttaattatacctgatggcattt

SEQ ID NO: 2846920 - DNA, 25 bp, Homo sapien
taattatacctgatggcattttgaa

SEQ ID NO: 2846921 - DNA, 25 bp, Homo sapien
cttgctcccaggttatagagtccat

SEQ ID NO: 2846922 - DNA, 25 bp, Homo sapien
tcttgctcccaggttatagagtcca

SEQ ID NO: 2846923 - DNA, 25 bp, Homo sapien
catgctatgattcaaggtaggtctt

SEQ ID NO: 2846924 - DNA, 25 bp, Homo sapien
taactggttacttgtgtagtcctct

SEQ ID NO: 2846925 - DNA, 25 bp, Homo sapien
ttttctactggaccatcattgatgt

SEQ ID NO: 2846926 - DNA, 25 bp, Homo sapien
gtttttaagcatgctatgattcaag

SEQ ID NO: 2846927 - DNA, 25 bp, Homo sapien
cttcatgcctggtaatttggaacac

SEQ ID NO: 2846928 - DNA, 25 bp, Homo sapien
gcctggtaatttggaacactcgcat

SEQ ID NO: 2846929 - DNA, 25 bp, Homo sapien
catgcctggtaatttggaacactcg

SEQ ID NO: 2846930 - DNA, 25 bp, Homo sapien
tttagtacttgtgattttagtgaga

SEQ ID NO: 2846931 - DNA, 25 bp, Homo sapien
cggcaggacttgatgttcaactact

SEQ ID NO: 2846932 - DNA, 25 bp, Homo sapien
atgtctccaagattcgatggaggcg

SEQ ID NO: 2846933 - DNA, 25 bp, Homo sapien
ctccaagattcgatggaggcggcag

SEQ ID NO: 2846934 - DNA, 25 bp, Homo sapien
ggacttgatgttcaactactgactt

SEQ ID NO: 2846935 - DNA, 25 bp, Homo sapien
tggactgcttgctaaggaaggattt

SEQ ID NO: 2846936 - DNA, 25 bp, Homo sapien
tcattccttcacagctcgccgtgga

SEQ ID NO: 2846937 - DNA, 25 bp, Homo sapien
tcgccgtggactgcttgctaaggaa

SEQ ID NO: 2846938 - DNA, 25 bp, Homo sapien
tcacagctcgccgtggactgcttgc

SEQ ID NO: 2846939 - DNA, 25 bp, Homo sapien
catgtgctaatgaagtagagaacac

SEQ ID NO: 2846940 - DNA, 25 bp, Homo sapien
ggcagcttccacttggcacatgtgc

SEQ ID NO: 2846941 - DNA, 25 bp, Homo sapien
gggaagacactaggggcagcttcca

SEQ ID NO: 2846942 - DNA, 25 bp, Homo sapien
cacttggcacatgtgctaatgaagt

SEQ ID NO: 2846943 - DNA, 25 bp, Homo sapien
cagccagtttgcttgagctgacttt

SEQ ID NO: 2846944 - DNA, 25 bp, Homo sapien
agccagtttgcttgagctgactttg

SEQ ID NO: 2846945 - DNA, 25 bp, Homo sapien
catccatacatgtacaaaccttctc

SEQ ID NO: 2846946 - DNA, 25 bp, Homo sapien
cgtgctcaaggacataacatccata

SEQ ID NO: 2846947 - DNA, 25 bp, Homo sapien
tggagaaccagatattcaaatcatt

SEQ ID NO: 2846948 - DNA, 25 bp, Homo sapien
accttctcatgcaaattggagaacc

SEQ ID NO: 2846949 - DNA, 25 bp, Homo sapien
gaagatccagttgcctgcaggtaca

SEQ ID NO: 2846950 - DNA, 25 bp, Homo sapien
caccgttaaatgagagaagatccag

SEQ ID NO: 2846951 - DNA, 25 bp, Homo sapien
caggtacaactcctagtaagtctca

SEQ ID NO: 2846952 - DNA, 25 bp, Homo sapien
tgcaggtacaactcctagtaagtct

SEQ ID NO: 2846953 - DNA, 25 bp, Homo sapien
tcttcaacgggagcacattgttctt

SEQ ID NO: 2846954 - DNA, 25 bp, Homo sapien
ggagcacattgttcttgtggttctg

SEQ ID NO: 2846955 - DNA, 25 bp, Homo sapien
cagtgttcttcaacgggagcacatt

SEQ ID NO: 2846956 - DNA, 25 bp, Homo sapien
catcagtgttcttcaacgggagcac

SEQ ID NO: 2846957 - DNA, 25 bp, Homo sapien
gtaagagatacttcagtgccactac

SEQ ID NO: 2846958 - DNA, 25 bp, Homo sapien
cacttttacggtagacattacttgg

SEQ ID NO: 2846959 - DNA, 25 bp, Homo sapien
ttgcattacacttttacggtagaca

SEQ ID NO: 2846960 - DNA, 25 bp, Homo sapien
tcagtgccactacttgcattacact

SEQ ID NO: 2846961 - DNA, 25 bp, Homo sapien
tctgtgcctaaaaggaatccattat

SEQ ID NO: 2846962 - DNA, 25 bp, Homo sapien
gatatagttctgatttgggaaggag

SEQ ID NO: 2846963 - DNA, 25 bp, Homo sapien
tcagccattgtacttttgaggtccc

SEQ ID NO: 2846964 - DNA, 25 bp, Homo sapien
caggattacagatgctgtgatagat

SEQ ID NO: 2846965 - DNA, 25 bp, Homo sapien
ccatcccaggtttgtcagccagaaa

SEQ ID NO: 2846966 - DNA, 25 bp, Homo sapien
agaagtccgactgcatctgctgctc

SEQ ID NO: 2846967 - DNA, 25 bp, Homo sapien
agaaagtcttgtcctgttacctgca

SEQ ID NO: 2846968 - DNA, 25 bp, Homo sapien
ttagaagtccgactgcatctgctgc

SEQ ID NO: 2846969 - DNA, 25 bp, Homo sapien
gcatatagcagtaaacacatggagt

SEQ ID NO: 2846970 - DNA, 25 bp, Homo sapien
ggtgaattaaacagtgatgagtgct

SEQ ID NO: 2846971 - DNA, 25 bp, Homo sapien
tataggaatatggagtggaagatct

SEQ ID NO: 2846972 - DNA, 25 bp, Homo sapien
tggaagatctaggttcatcaggcag

SEQ ID NO: 2846973 - DNA, 25 bp, Homo sapien
agattccagacaccgggaactcacg

SEQ ID NO: 2846974 - DNA, 25 bp, Homo sapien
tgctcgggcccgagtggttcactgc

SEQ ID NO: 2846975 - DNA, 25 bp, Homo sapien
tacagtggtggcctgaacacctcct

SEQ ID NO: 2846976 - DNA, 25 bp, Homo sapien
cactgcaccgtgaagacagattcca

SEQ ID NO: 2846977 - DNA, 25 bp, Homo sapien
tgatggattgtcagagccagaggtt

SEQ ID NO: 2846978 - DNA, 25 bp, Homo sapien
taaccaaatgatggattgtcagagc

SEQ ID NO: 2846979 - DNA, 25 bp, Homo sapien
tactgagggaaactccgatgtaacc

SEQ ID NO: 2846980 - DNA, 25 bp, Homo sapien
tccgatgtaaccaaatgatggattg

SEQ ID NO: 2846981 - DNA, 25 bp, Homo sapien
tcagccgcccctagaatcagcatta

SEQ ID NO: 2846982 - DNA, 25 bp, Homo sapien
cattacaagttcatttcagccgccc

SEQ ID NO: 2846983 - DNA, 25 bp, Homo sapien
cacgccctagcagagacagttattc

SEQ ID NO: 2846984 - DNA, 25 bp, Homo sapien
caccttagtggtttgggagcttctc

SEQ ID NO: 2846985 - DNA, 25 bp, Homo sapien
agaatctctccatggcacaagcagc

SEQ ID NO: 2846986 - DNA, 25 bp, Homo sapien
cagaatctctccatggcacaagcag

SEQ ID NO: 2846987 - DNA, 25 bp, Homo sapien
ccagaatctctccatggcacaagca

SEQ ID NO: 2846988 - DNA, 25 bp, Homo sapien
gagatgatctgagagctatgcccaa

SEQ ID NO: 2846989 - DNA, 25 bp, Homo sapien
gatgatctgagagctatgcccaaca

SEQ ID NO: 2846990 - DNA, 25 bp, Homo sapien
ggcaggagagagatgatctgagagc

SEQ ID NO: 2846991 - DNA, 25 bp, Homo sapien
gagagagatgatctgagagctatgc

SEQ ID NO: 2846992 - DNA, 25 bp, Homo sapien
tgtcatatcactttatagtcaggga

SEQ ID NO: 2846993 - DNA, 25 bp, Homo sapien
tagccatgggtatggctccacaaag

SEQ ID NO: 2846994 - DNA, 25 bp, Homo sapien
gtctagatagttacttagccatggg

SEQ ID NO: 2846995 - DNA, 25 bp, Homo sapien
gaagcccaggtatgattcctaatcc

SEQ ID NO: 2846996 - DNA, 25 bp, Homo sapien
gatctcatgctgtgttattcagcta

SEQ ID NO: 2846997 - DNA, 25 bp, Homo sapien
tgtttcaggcacagatacactctta

SEQ ID NO: 2846998 - DNA, 25 bp, Homo sapien
gacaccactgttgtggatgacctta

SEQ ID NO: 2846999 - DNA, 25 bp, Homo sapien
tgtgtgcacttggactaccttgcaa

SEQ ID NO: 2847000 - DNA, 25 bp, Homo sapien
tatctctgccttgcagtgtgtgcac

SEQ ID NO: 2847001 - DNA, 25 bp, Homo sapien
ggtggcattcaatctatcacagctg

SEQ ID NO: 2847002 - DNA, 25 bp, Homo sapien
gaggttagcataatcaatactctgg

SEQ ID NO: 2847003 - DNA, 25 bp, Homo sapien
taatctttgattaagcctgtgcttg

SEQ ID NO: 2847004 - DNA, 25 bp, Homo sapien
ggatttgccagaatacctagtgcta

SEQ ID NO: 2847005 - DNA, 25 bp, Homo sapien
gatgtcagcaatacagctctggtcc

SEQ ID NO: 2847006 - DNA, 25 bp, Homo sapien
atgatgctccccgaaagatgcctgc

SEQ ID NO: 2847007 - DNA, 25 bp, Homo sapien
cctgcctctatggtatcttctgctg

SEQ ID NO: 2847008 - DNA, 25 bp, Homo sapien
gcaggagccagatgtcagcaataca

SEQ ID NO: 2847009 - DNA, 25 bp, Homo sapien
cgtggagccaactgtccatttgttc

SEQ ID NO: 2847010 - DNA, 25 bp, Homo sapien
tggagccaactgtccatttgttcat

SEQ ID NO: 2847011 - DNA, 25 bp, Homo sapien
acgtggagccaactgtccatttgtt

SEQ ID NO: 2847012 - DNA, 25 bp, Homo sapien
gtggagccaactgtccatttgttca

SEQ ID NO: 2847013 - DNA, 25 bp, Homo sapien
aagccaatttatcatggtggattac

SEQ ID NO: 2847014 - DNA, 25 bp, Homo sapien
aatttgctgattgtgtgtcttgcgg

SEQ ID NO: 2847015 - DNA, 25 bp, Homo sapien
ttttgaagtatcttacagggttctc

SEQ ID NO: 2847016 - DNA, 25 bp, Homo sapien
tccctttgcaaatggcctgaccttt

SEQ ID NO: 2847017 - DNA, 25 bp, Homo sapien
tgtcttgcggaggatcttttttgaa

SEQ ID NO: 2847018 - DNA, 25 bp, Homo sapien
cagtggatctagtctcatagtagca

SEQ ID NO: 2847019 - DNA, 25 bp, Homo sapien
tataaggttgattcagccagctgga

SEQ ID NO: 2847020 - DNA, 25 bp, Homo sapien
ggtttcttaatgataggaatccact

SEQ ID NO: 2847021 - DNA, 25 bp, Homo sapien
ccaagtgtttcatagtgcagtgaca

SEQ ID NO: 2847022 - DNA, 25 bp, Homo sapien
ccaacaacgtaaagagccttggtat

SEQ ID NO: 2847023 - DNA, 25 bp, Homo sapien
aataatctgtggtaatcgtattagg

SEQ ID NO: 2847024 - DNA, 25 bp, Homo sapien
aaataatctgtggtaatcgtattag

SEQ ID NO: 2847025 - DNA, 25 bp, Homo sapien
atacaaactctaatatattcataca

SEQ ID NO: 2847026 - DNA, 25 bp, Homo sapien
caaaataatctgtggtaatcgtatt

SEQ ID NO: 2847027 - DNA, 25 bp, Homo sapien
ctggaaggtacagtgtaagagtgaa

SEQ ID NO: 2847028 - DNA, 25 bp, Homo sapien
tatagtctgcgtgttatactgcatg

SEQ ID NO: 2847029 - DNA, 25 bp, Homo sapien
ccagaacagtagtttctgatgactg

SEQ ID NO: 2847030 - DNA, 25 bp, Homo sapien
tagagggtcgataggaatgtgttac

SEQ ID NO: 2847031 - DNA, 25 bp, Homo sapien
tccactcccaatcactagtctttct

SEQ ID NO: 2847032 - DNA, 25 bp, Homo sapien
tagtaatgttctagaaacatgtttc

SEQ ID NO: 2847033 - DNA, 25 bp, Homo sapien
gaaacatgtttcagcatagacaatt

SEQ ID NO: 2847034 - DNA, 25 bp, Homo sapien
gagttgagcatcacagccctaatgt

SEQ ID NO: 2847035 - DNA, 25 bp, Homo sapien
ggaacttcccaattcagtcttctga

SEQ ID NO: 2847036 - DNA, 25 bp, Homo sapien
gctgttgtagtttagccagtcaata

SEQ ID NO: 2847037 - DNA, 25 bp, Homo sapien
cacccttgaagaaatttatgagagc

SEQ ID NO: 2847038 - DNA, 25 bp, Homo sapien
gattgacaattgaccttccttttgg

SEQ ID NO: 2847039 - DNA, 25 bp, Homo sapien
agttcattctcttcactaaccaggt

SEQ ID NO: 2847040 - DNA, 25 bp, Homo sapien
tagcaagcaatgaaagagtcatggc

SEQ ID NO: 2847041 - DNA, 25 bp, Homo sapien
tcactaaccaggtctagagaaaaga

SEQ ID NO: 2847042 - DNA, 25 bp, Homo sapien
ccaaggccatatagcaagcaatgaa

SEQ ID NO: 2847043 - DNA, 25 bp, Homo sapien
gacaccagctgctgataaactgtct

SEQ ID NO: 2847044 - DNA, 25 bp, Homo sapien
gtctctgacttggacatctcagtgg

SEQ ID NO: 2847045 - DNA, 25 bp, Homo sapien
tgtctctgacttggacatctcagtg

SEQ ID NO: 2847046 - DNA, 25 bp, Homo sapien
agctgctgataaactgtctctgact

SEQ ID NO: 2847047 - DNA, 25 bp, Homo sapien
gccatagcttatatctcccacagca

SEQ ID NO: 2847048 - DNA, 25 bp, Homo sapien
tttctctgatgcagcgatgctgtca

SEQ ID NO: 2847049 - DNA, 25 bp, Homo sapien
gagcagcagccatagcttatatctc

SEQ ID NO: 2847050 - DNA, 25 bp, Homo sapien
gatgcagcgatgctgtcagcttctt

SEQ ID NO: 2847051 - DNA, 25 bp, Homo sapien
gtgggatcagatgggatgctctgca

SEQ ID NO: 2847052 - DNA, 25 bp, Homo sapien
ctctgcagaattgcctgggattggc

SEQ ID NO: 2847053 - DNA, 25 bp, Homo sapien
tgctctgtaatacttcaggttagtc

SEQ ID NO: 2847054 - DNA, 25 bp, Homo sapien
gtaatacttcaggttagtccatcca

SEQ ID NO: 2847055 - DNA, 25 bp, Homo sapien
agcaggctatcctccagtctccgaa

SEQ ID NO: 2847056 - DNA, 25 bp, Homo sapien
ggaaacctctatcccagcaggctat

SEQ ID NO: 2847057 - DNA, 25 bp, Homo sapien
tgtgaaacccttccatgagacttgg

SEQ ID NO: 2847058 - DNA, 25 bp, Homo sapien
gctgtgtgctagtccactctgaggc

SEQ ID NO: 2847059 - DNA, 25 bp, Homo sapien
gacgcctagttgttctttgactcag

SEQ ID NO: 2847060 - DNA, 25 bp, Homo sapien
gacaaaaatggaaacggctgagtct

SEQ ID NO: 2847061 - DNA, 25 bp, Homo sapien
gaacccaatctgaacatgacgccta

SEQ ID NO: 2847062 - DNA, 25 bp, Homo sapien
ctttgactcagtttaaatgatgtga

SEQ ID NO: 2847063 - DNA, 25 bp, Homo sapien
taacgggaaggactctgatatgggt

SEQ ID NO: 2847064 - DNA, 25 bp, Homo sapien
tcttagcagtaaagatcccacagag

SEQ ID NO: 2847065 - DNA, 25 bp, Homo sapien
caatgacctccaaaggcctgtgtca

SEQ ID NO: 2847066 - DNA, 25 bp, Homo sapien
gatgacgtaatactctaagcctgat

SEQ ID NO: 2847067 - DNA, 25 bp, Homo sapien
gaggattcagttccagaagaaagag

SEQ ID NO: 2847068 - DNA, 25 bp, Homo sapien
aatggcctccagaacatttttgacg

SEQ ID NO: 2847069 - DNA, 25 bp, Homo sapien
tgtttgccctgtgactatgccagag

SEQ ID NO: 2847070 - DNA, 25 bp, Homo sapien
ggtaaaggaactgcttcccagtctc

SEQ ID NO: 2847071 - DNA, 25 bp, Homo sapien
aacatgggttttggatccacgccag

SEQ ID NO: 2847072 - DNA, 25 bp, Homo sapien
ggttttggatccacgccagatgtta

SEQ ID NO: 2847073 - DNA, 25 bp, Homo sapien
cacgccagatgttaacacaggctct

SEQ ID NO: 2847074 - DNA, 25 bp, Homo sapien
cagtctttatttccccatttataag

SEQ ID NO: 2847075 - DNA, 25 bp, Homo sapien
taatataattctggagcccattctg

SEQ ID NO: 2847076 - DNA, 25 bp, Homo sapien
catggcaagtggtagaaactccaga

SEQ ID NO: 2847077 - DNA, 25 bp, Homo sapien
caaagaggctttatccgaataagag

SEQ ID NO: 2847078 - DNA, 25 bp, Homo sapien
gagcaaatgccttaattcgttaata

SEQ ID NO: 2847079 - DNA, 25 bp, Homo sapien
ggatgtaactagacctcttactcca

SEQ ID NO: 2847080 - DNA, 25 bp, Homo sapien
ctaagggatgtaactagacctctta

SEQ ID NO: 2847081 - DNA, 25 bp, Homo sapien
agggatgtaactagacctcttactc

SEQ ID NO: 2847082 - DNA, 25 bp, Homo sapien
agtcagcctctataattctttggtc

SEQ ID NO: 2847083 - DNA, 25 bp, Homo sapien
gatagaagtatataacttgaggaag

SEQ ID NO: 2847084 - DNA, 25 bp, Homo sapien
tccagtagatagaagtatataactt

SEQ ID NO: 2847085 - DNA, 25 bp, Homo sapien
aatgtcaattttccagtagatagaa

SEQ ID NO: 2847086 - DNA, 25 bp, Homo sapien
caattttccagtagatagaagtata

SEQ ID NO: 2847087 - DNA, 25 bp, Homo sapien
cagatgatgagttggagagggtcat

SEQ ID NO: 2847088 - DNA, 25 bp, Homo sapien
caggacagctgatctcagatgatga

SEQ ID NO: 2847089 - DNA, 25 bp, Homo sapien
ggacagctgatctcagatgatgagt

SEQ ID NO: 2847090 - DNA, 25 bp, Homo sapien
ctcagatgatgagttggagagggtc

SEQ ID NO: 2847091 - DNA, 25 bp, Homo sapien
gtctatgcttcaggacagtccatct

SEQ ID NO: 2847092 - DNA, 25 bp, Homo sapien
ttctaatttcccttcacatcacatc

SEQ ID NO: 2847093 - DNA, 25 bp, Homo sapien
gcttcaggacagtccatcttctaat

SEQ ID NO: 2847094 - DNA, 25 bp, Homo sapien
cttcacatcacatcctagaacagga

SEQ ID NO: 2847095 - DNA, 25 bp, Homo sapien
ctcccaagtctctgctcccatcact

SEQ ID NO: 2847096 - DNA, 25 bp, Homo sapien
tcccaagtctctgctcccatcactc

SEQ ID NO: 2847097 - DNA, 25 bp, Homo sapien
ctctgctccagctgtgtgaatgagt

SEQ ID NO: 2847098 - DNA, 25 bp, Homo sapien
tgctccagctgtgtgaatgagtcat

SEQ ID NO: 2847099 - DNA, 25 bp, Homo sapien
caggcagaacaggtaaggcaacgtg

SEQ ID NO: 2847100 - DNA, 25 bp, Homo sapien
gacttttattagagtaactggccca

SEQ ID NO: 2847101 - DNA, 25 bp, Homo sapien
gctgagaagcgatacacataacatt

SEQ ID NO: 2847102 - DNA, 25 bp, Homo sapien
ggttaggataattgccacagggaga

SEQ ID NO: 2847103 - DNA, 25 bp, Homo sapien
tcttcataggaacacaggaagctat

SEQ ID NO: 2847104 - DNA, 25 bp, Homo sapien
gaaagctatcactaaccacagtgcc

SEQ ID NO: 2847105 - DNA, 25 bp, Homo sapien
atgcacatgcatagctttaattgag

SEQ ID NO: 2847106 - DNA, 25 bp, Homo sapien
gatgatcttcaagaaatgcacatgc

SEQ ID NO: 2847107 - DNA, 25 bp, Homo sapien
cttcaatagcagccattcctgtgtc

SEQ ID NO: 2847108 - DNA, 25 bp, Homo sapien
cttctgaactggtggtaaaggcagg

SEQ ID NO: 2847109 - DNA, 25 bp, Homo sapien
ttcccctgaagtgtctaaagtgact

SEQ ID NO: 2847110 - DNA, 25 bp, Homo sapien
ttgttcctggcatacaggacataac

SEQ ID NO: 2847111 - DNA, 25 bp, Homo sapien
ggttacagtcataggatttgagcag

SEQ ID NO: 2847112 - DNA, 25 bp, Homo sapien
gagcagcaattctccttctggacgg

SEQ ID NO: 2847113 - DNA, 25 bp, Homo sapien
tgggttacagtcataggatttgagc

SEQ ID NO: 2847114 - DNA, 25 bp, Homo sapien
tctgggttacagtcataggatttga

SEQ ID NO: 2847115 - DNA, 25 bp, Homo sapien
ccattttaaattacgagcagtagaa

SEQ ID NO: 2847116 - DNA, 25 bp, Homo sapien
gaatgcagataagccttctccattt

SEQ ID NO: 2847117 - DNA, 25 bp, Homo sapien
cttgaaagtgccaaagcaatgatct

SEQ ID NO: 2847118 - DNA, 25 bp, Homo sapien
taaaagtcatggttggataaaatct

SEQ ID NO: 2847119 - DNA, 25 bp, Homo sapien
gatgtactctccatgaggacaagtc

SEQ ID NO: 2847120 - DNA, 25 bp, Homo sapien
tcagctcattgttgacctcctcagg

SEQ ID NO: 2847121 - DNA, 25 bp, Homo sapien
tgtattaagacagcaaaggcattta

SEQ ID NO: 2847122 - DNA, 25 bp, Homo sapien
tcctcagggagagctttccttgccc

SEQ ID NO: 2847123 - DNA, 25 bp, Homo sapien
gagtcaaaagctttaaggcttccat

SEQ ID NO: 2847124 - DNA, 25 bp, Homo sapien
aactatgtctgagagtcaaaagctt

SEQ ID NO: 2847125 - DNA, 25 bp, Homo sapien
agcagctttagaattggctttagaa

SEQ ID NO: 2847126 - DNA, 25 bp, Homo sapien
gacactcagaattctccaagcagct

SEQ ID NO: 2847127 - DNA, 25 bp, Homo sapien
gcaaagatttattcagcccactgga

SEQ ID NO: 2847128 - DNA, 25 bp, Homo sapien
gcccactggaattggcatatatttt

SEQ ID NO: 2847129 - DNA, 25 bp, Homo sapien
aagaaacatggcagtctgctccttc

SEQ ID NO: 2847130 - DNA, 25 bp, Homo sapien
tttattcagcccactggaattggca

SEQ ID NO: 2847131 - DNA, 25 bp, Homo sapien
gagagccttgtccatccattacagc

SEQ ID NO: 2847132 - DNA, 25 bp, Homo sapien
actgagagccttgtccatccattac

SEQ ID NO: 2847133 - DNA, 25 bp, Homo sapien
tttcaactgagagccttgtccatcc

SEQ ID NO: 2847134 - DNA, 25 bp, Homo sapien
ttgttttcaactgagagccttgtcc

SEQ ID NO: 2847135 - DNA, 25 bp, Homo sapien
tagattatgtgcaggacaccgtgcc

SEQ ID NO: 2847136 - DNA, 25 bp, Homo sapien
tgcatatattgcgtctggaacagag

SEQ ID NO: 2847137 - DNA, 25 bp, Homo sapien
tgccggcagtaattagtcacccttt

SEQ ID NO: 2847138 - DNA, 25 bp, Homo sapien
tgttgctacctcaagggagcatgag

SEQ ID NO: 2847139 - DNA, 25 bp, Homo sapien
tgaaggtcccaacttcctatctcgg

SEQ ID NO: 2847140 - DNA, 25 bp, Homo sapien
tatctcggccaatagccatgatgac

SEQ ID NO: 2847141 - DNA, 25 bp, Homo sapien
aatccaggctcaactgaccacaaac

SEQ ID NO: 2847142 - DNA, 25 bp, Homo sapien
ttaaggctttttgtatccatgaagg

SEQ ID NO: 2847143 - DNA, 25 bp, Homo sapien
ctgtttctgtcttacgctcgagata

SEQ ID NO: 2847144 - DNA, 25 bp, Homo sapien
ttctgtcttacgctcgagatacttg

SEQ ID NO: 2847145 - DNA, 25 bp, Homo sapien
ctgtcttacgctcgagatacttgaa

SEQ ID NO: 2847146 - DNA, 25 bp, Homo sapien
cttacgctcgagatacttgaatgca

SEQ ID NO: 2847147 - DNA, 25 bp, Homo sapien
aacttaccatatagatgataaactc

SEQ ID NO: 2847148 - DNA, 25 bp, Homo sapien
aaacttaccatatagatgataaact

SEQ ID NO: 2847149 - DNA, 25 bp, Homo sapien
tatttaattctatcgatgagatttt

SEQ ID NO: 2847150 - DNA, 25 bp, Homo sapien
cttatttaattctatcgatgagatt

SEQ ID NO: 2847151 - DNA, 25 bp, Homo sapien
tctacttatttaattctatcgatga

SEQ ID NO: 2847152 - DNA, 25 bp, Homo sapien
tacttatttaattctatcgatgaga

SEQ ID NO: 2847153 - DNA, 25 bp, Homo sapien
tgcatcagcatactccaatatcatg

SEQ ID NO: 2847154 - DNA, 25 bp, Homo sapien
tgggaagctttgcatcagcatactc

SEQ ID NO: 2847155 - DNA, 25 bp, Homo sapien
gagttgggaagctttgcatcagcat

SEQ ID NO: 2847156 - DNA, 25 bp, Homo sapien
gctttgcatcagcatactccaatat

SEQ ID NO: 2847157 - DNA, 25 bp, Homo sapien
gctgctggctttacgtctcattaga

SEQ ID NO: 2847158 - DNA, 25 bp, Homo sapien
tgtggatctcttagaaagcaatgca

SEQ ID NO: 2847159 - DNA, 25 bp, Homo sapien
catagcaggagacaggatcctttcc

SEQ ID NO: 2847160 - DNA, 25 bp, Homo sapien
gcaaactctgccacaaggatgcaaa

SEQ ID NO: 2847161 - DNA, 25 bp, Homo sapien
tagttggtttccctgatgcagattt

SEQ ID NO: 2847162 - DNA, 25 bp, Homo sapien
tctcgtccttaaagtatggtgcttc

SEQ ID NO: 2847163 - DNA, 25 bp, Homo sapien
atttgatctctgcatccctctcgtc

SEQ ID NO: 2847164 - DNA, 25 bp, Homo sapien
aaagacttagttggtttccctgatg

SEQ ID NO: 2847165 - DNA, 25 bp, Homo sapien
taacaactattcctgtagtattagc

SEQ ID NO: 2847166 - DNA, 25 bp, Homo sapien
gataaccatgcagtagaaaccatac

SEQ ID NO: 2847167 - DNA, 25 bp, Homo sapien
tccactttatgatgctgtgagagtg

SEQ ID NO: 2847168 - DNA, 25 bp, Homo sapien
tttcatgcagtacaatcaggcctcc

SEQ ID NO: 2847169 - DNA, 25 bp, Homo sapien
catctcaaggagacgagtagcactg

SEQ ID NO: 2847170 - DNA, 25 bp, Homo sapien
caccattctgcctgatgaggattct

SEQ ID NO: 2847171 - DNA, 25 bp, Homo sapien
aattcaccgtcactcctaagatctg

SEQ ID NO: 2847172 - DNA, 25 bp, Homo sapien
gaatgccaggatcacctctatggga

SEQ ID NO: 2847173 - DNA, 25 bp, Homo sapien
tgatcctctctttcttcatggcttt

SEQ ID NO: 2847174 - DNA, 25 bp, Homo sapien
ttcttcatggctttctgtttccttc

SEQ ID NO: 2847175 - DNA, 25 bp, Homo sapien
ctctctttcttcatggctttctgtt

SEQ ID NO: 2847176 - DNA, 25 bp, Homo sapien
ctgatcctctctttcttcatggctt

SEQ ID NO: 2847177 - DNA, 25 bp, Homo sapien
gcctgtttagttgttctcatccaga

SEQ ID NO: 2847178 - DNA, 25 bp, Homo sapien
gtatcattccgcctgtttagttgtt

SEQ ID NO: 2847179 - DNA, 25 bp, Homo sapien
cattccgcctgtttagttgttctca

SEQ ID NO: 2847180 - DNA, 25 bp, Homo sapien
tcaccagaagcagaatactgctaag

SEQ ID NO: 2847181 - DNA, 25 bp, Homo sapien
ggcactggggcagaatcaagtccag

SEQ ID NO: 2847182 - DNA, 25 bp, Homo sapien
ctggggcagaatcaagtccagcacc

SEQ ID NO: 2847183 - DNA, 25 bp, Homo sapien
cactggggcagaatcaagtccagca

SEQ ID NO: 2847184 - DNA, 25 bp, Homo sapien
caggcactggggcagaatcaagtcc

SEQ ID NO: 2847185 - DNA, 25 bp, Homo sapien
tagatttcaatgtgagcagcagaat

SEQ ID NO: 2847186 - DNA, 25 bp, Homo sapien
ctggaagagcaggtagatttcaatg

SEQ ID NO: 2847187 - DNA, 25 bp, Homo sapien
gcagaattgacaaatcattggcaat

SEQ ID NO: 2847188 - DNA, 25 bp, Homo sapien
ggcaatcgctgtctggaacactgtg

SEQ ID NO: 2847189 - DNA, 25 bp, Homo sapien
ctccatacttcaacccattccccat

SEQ ID NO: 2847190 - DNA, 25 bp, Homo sapien
tctccatacttcaacccattcccca

SEQ ID NO: 2847191 - DNA, 25 bp, Homo sapien
gtctccatacttcaacccattcccc

SEQ ID NO: 2847192 - DNA, 25 bp, Homo sapien
acgtctccatacttcaacccattcc

SEQ ID NO: 2847193 - DNA, 25 bp, Homo sapien
cctcaaaatatttgtcaccaagccc

SEQ ID NO: 2847194 - DNA, 25 bp, Homo sapien
tatttgtcaccaagccctataacat

SEQ ID NO: 2847195 - DNA, 25 bp, Homo sapien
aagccctataacatcccctcttgcc

SEQ ID NO: 2847196 - DNA, 25 bp, Homo sapien
aaatatttgtcaccaagccctataa

SEQ ID NO: 2847197 - DNA, 25 bp, Homo sapien
ttctctctcccagcagtagaattgg

SEQ ID NO: 2847198 - DNA, 25 bp, Homo sapien
cagtagaattgggatccagtgtgaa

SEQ ID NO: 2847199 - DNA, 25 bp, Homo sapien
gggctatggaaagccatattctggc

SEQ ID NO: 2847200 - DNA, 25 bp, Homo sapien
gaatttcttttgttagctcaaactg

SEQ ID NO: 2847201 - DNA, 25 bp, Homo sapien
cagaggataatgaaccccacagctg

SEQ ID NO: 2847202 - DNA, 25 bp, Homo sapien
ttctgtctgcttcggcagtggcctc

SEQ ID NO: 2847203 - DNA, 25 bp, Homo sapien
gacagcagaggataatgaaccccac

SEQ ID NO: 2847204 - DNA, 25 bp, Homo sapien
gtctgcttcggcagtggcctcttca

SEQ ID NO: 2847205 - DNA, 25 bp, Homo sapien
aaaagtactcagggggaagctgctt

SEQ ID NO: 2847206 - DNA, 25 bp, Homo sapien
aaaaagtactcagggggaagctgct

SEQ ID NO: 2847207 - DNA, 25 bp, Homo sapien
agacaaattagttctagattatttt

SEQ ID NO: 2847208 - DNA, 25 bp, Homo sapien
ttagacaaattagttctagattatt

SEQ ID NO: 2847209 - DNA, 25 bp, Homo sapien
agtgcctgatgctacattcatcacc

SEQ ID NO: 2847210 - DNA, 25 bp, Homo sapien
attagacaaattagttctagattat

SEQ ID NO: 2847211 - DNA, 25 bp, Homo sapien
cagcggttcctgttacttgccaatg

SEQ ID NO: 2847212 - DNA, 25 bp, Homo sapien
ttaggtgacacgctcccttcctgag

SEQ ID NO: 2847213 - DNA, 25 bp, Homo sapien
aattaaagagcccagcagcggttcc

SEQ ID NO: 2847214 - DNA, 25 bp, Homo sapien
tgccaatgaccatcgaggttgatca

SEQ ID NO: 2847215 - DNA, 25 bp, Homo sapien
tgcctggaaccggacaaatacagag

SEQ ID NO: 2847216 - DNA, 25 bp, Homo sapien
aaagaagcctcgatgggctgggccc

SEQ ID NO: 2847217 - DNA, 25 bp, Homo sapien
tgcctctactcagggatataccagg

SEQ ID NO: 2847218 - DNA, 25 bp, Homo sapien
taagcagagcgacacaaagttttct

SEQ ID NO: 2847219 - DNA, 25 bp, Homo sapien
caatgcctctcattggcatcctgaa

SEQ ID NO: 2847220 - DNA, 25 bp, Homo sapien
tatgcaagggcttgacaaggtttca

SEQ ID NO: 2847221 - DNA, 25 bp, Homo sapien
cattggcatcctgaaatcatatatg

SEQ ID NO: 2847222 - DNA, 25 bp, Homo sapien
gtctttgacacgatgccttcagctg

SEQ ID NO: 2847223 - DNA, 25 bp, Homo sapien
gtacgtcacctaaagaaattcatga

SEQ ID NO: 2847224 - DNA, 25 bp, Homo sapien
tcttcccacagtcaaaatgcctcag

SEQ ID NO: 2847225 - DNA, 25 bp, Homo sapien
gaaggtactgcctcaaactacagct

SEQ ID NO: 2847226 - DNA, 25 bp, Homo sapien
taccaagtggatttctagcagaagc

SEQ ID NO: 2847227 - DNA, 25 bp, Homo sapien
tagccatttgccagtttagcagcca

SEQ ID NO: 2847228 - DNA, 25 bp, Homo sapien
gagacacctttcattcgttcgttca

SEQ ID NO: 2847229 - DNA, 25 bp, Homo sapien
gatctctgcttactgaaccctcgat

SEQ ID NO: 2847230 - DNA, 25 bp, Homo sapien
tccaagattcaggaattatggtccc

SEQ ID NO: 2847231 - DNA, 25 bp, Homo sapien
caaaaacagaccctggtgtttggtg

SEQ ID NO: 2847232 - DNA, 25 bp, Homo sapien
accatcaatcctttgtattcttggg

SEQ ID NO: 2847233 - DNA, 25 bp, Homo sapien
cacagctgccgcacaaatttctttt

SEQ ID NO: 2847234 - DNA, 25 bp, Homo sapien
ttaatagcacagctgccgcacaaat

SEQ ID NO: 2847235 - DNA, 25 bp, Homo sapien
tggggaatacctttggcagtgcatc

SEQ ID NO: 2847236 - DNA, 25 bp, Homo sapien
cagtgcatctaacacccaggtgagc

SEQ ID NO: 2847237 - DNA, 25 bp, Homo sapien
acagtgtgtcctaatgtggcaaaag

SEQ ID NO: 2847238 - DNA, 25 bp, Homo sapien
caaataccaatatcggttccacctg

SEQ ID NO: 2847239 - DNA, 25 bp, Homo sapien
gaccacagagactatggctgcccat

SEQ ID NO: 2847240 - DNA, 25 bp, Homo sapien
aaattacagccactgggagccaggc

SEQ ID NO: 2847241 - DNA, 25 bp, Homo sapien
atacggaccacagagactatggctg

SEQ ID NO: 2847242 - DNA, 25 bp, Homo sapien
ctgtgtgaccacttgtggaaattac

SEQ ID NO: 2847243 - DNA, 25 bp, Homo sapien
cagggcacccctaataaaacttcag

SEQ ID NO: 2847244 - DNA, 25 bp, Homo sapien
ttaaaatctcacacaagaaggcaag

SEQ ID NO: 2847245 - DNA, 25 bp, Homo sapien
gacattcgggtcttctgttctctaa

SEQ ID NO: 2847246 - DNA, 25 bp, Homo sapien
gggcttgagttccacaatcactaga

SEQ ID NO: 2847247 - DNA, 25 bp, Homo sapien
ggtactggagcatcacacaacaaat

SEQ ID NO: 2847248 - DNA, 25 bp, Homo sapien
gattccatgtggtagacatgcccca

SEQ ID NO: 2847249 - DNA, 25 bp, Homo sapien
tatgacaaccaaatagctgccccag

SEQ ID NO: 2847250 - DNA, 25 bp, Homo sapien
caacagcacatagccaggtcttggg

SEQ ID NO: 2847251 - DNA, 25 bp, Homo sapien
taaccattgctaatcgagcttggag

SEQ ID NO: 2847252 - DNA, 25 bp, Homo sapien
caagatgtgagacaaacgctgggct

SEQ ID NO: 2847253 - DNA, 25 bp, Homo sapien
taagcacagcagtcaaccaggagaa

SEQ ID NO: 2847254 - DNA, 25 bp, Homo sapien
ccagcccagattggcatgtggatca

SEQ ID NO: 2847255 - DNA, 25 bp, Homo sapien
tgaaatcttgagaaagttgggccac

SEQ ID NO: 2847256 - DNA, 25 bp, Homo sapien
ccccagtgtatagaggagccacttt

SEQ ID NO: 2847257 - DNA, 25 bp, Homo sapien
tgtaaatagttttccgcaggagcca

SEQ ID NO: 2847258 - DNA, 25 bp, Homo sapien
tgacaacggctgcagttgactggac

SEQ ID NO: 2847259 - DNA, 25 bp, Homo sapien
tgggctgttagcagccagatgcact

SEQ ID NO: 2847260 - DNA, 25 bp, Homo sapien
aaacagagaattgggctgttagcag

SEQ ID NO: 2847261 - DNA, 25 bp, Homo sapien
tgggcccgaaagggaatatagtctc

SEQ ID NO: 2847262 - DNA, 25 bp, Homo sapien
agagtggtgggaccagtaaaacaga

SEQ ID NO: 2847263 - DNA, 25 bp, Homo sapien
tgcaaagagattaaaaagcacacac

SEQ ID NO: 2847264 - DNA, 25 bp, Homo sapien
gctgtgcaaagagattaaaaagcac

SEQ ID NO: 2847265 - DNA, 25 bp, Homo sapien
gagattaaaaagcacacacaggaag

SEQ ID NO: 2847266 - DNA, 25 bp, Homo sapien
gatgagctgtgcaaagagattaaaa

SEQ ID NO: 2847267 - DNA, 25 bp, Homo sapien
caagctggcatcaaagacactgtct

SEQ ID NO: 2847268 - DNA, 25 bp, Homo sapien
cgggtgggacaaatcctcgtgtgct

SEQ ID NO: 2847269 - DNA, 25 bp, Homo sapien
aacagcattctcagtcgggtgggac

SEQ ID NO: 2847270 - DNA, 25 bp, Homo sapien
tatgccagtgccaagtttcctcatg

SEQ ID NO: 2847271 - DNA, 25 bp, Homo sapien
taggagtagaagttgtacgttccaa

SEQ ID NO: 2847272 - DNA, 25 bp, Homo sapien
tgtagtaggagtagaagttgtacgt

SEQ ID NO: 2847273 - DNA, 25 bp, Homo sapien
aagttgtacgttccaatcataaagg

SEQ ID NO: 2847274 - DNA, 25 bp, Homo sapien
gagtagaagttgtacgttccaatca

SEQ ID NO: 2847275 - DNA, 25 bp, Homo sapien
ctgaggatcagaggggtcccactcc

SEQ ID NO: 2847276 - DNA, 25 bp, Homo sapien
aggatcagaggggtcccactccctc

SEQ ID NO: 2847277 - DNA, 25 bp, Homo sapien
gaggatcagaggggtcccactccct

SEQ ID NO: 2847278 - DNA, 25 bp, Homo sapien
tgaggatcagaggggtcccactccc

SEQ ID NO: 2847279 - DNA, 25 bp, Homo sapien
aaattcaagtaagcagaatgtttgc

SEQ ID NO: 2847280 - DNA, 25 bp, Homo sapien
gaaattcaagtaagcagaatgtttg

SEQ ID NO: 2847281 - DNA, 25 bp, Homo sapien
aattcaagtaagcagaatgtttgct

SEQ ID NO: 2847282 - DNA, 25 bp, Homo sapien
cagtgatgctctgggtttcggaagc

SEQ ID NO: 2847283 - DNA, 25 bp, Homo sapien
gggtttcggaagcatgccagaatgc

SEQ ID NO: 2847284 - DNA, 25 bp, Homo sapien
tttcggaagcatgccagaatgccct

SEQ ID NO: 2847285 - DNA, 25 bp, Homo sapien
tatcatttgtatcagtgatgctctg

SEQ ID NO: 2847286 - DNA, 25 bp, Homo sapien
tgatgctgcaaaaattgctaacata

SEQ ID NO: 2847287 - DNA, 25 bp, Homo sapien
gaatgatgctgcaaaaattgctaac

SEQ ID NO: 2847288 - DNA, 25 bp, Homo sapien
atgaatgatgctgcaaaaattgcta

SEQ ID NO: 2847289 - DNA, 25 bp, Homo sapien
aatgatgctgcaaaaattgctaaca

SEQ ID NO: 2847290 - DNA, 25 bp, Homo sapien
aatttctttacatttagcccatatc

SEQ ID NO: 2847291 - DNA, 25 bp, Homo sapien
caagcatattccacaactcaaacaa

SEQ ID NO: 2847292 - DNA, 25 bp, Homo sapien
cttggggccttgagtccaaatttct

SEQ ID NO: 2847293 - DNA, 25 bp, Homo sapien
caaaatcaagcatattccacaactc

SEQ ID NO: 2847294 - DNA, 25 bp, Homo sapien
cctctgttctcattaaatctgtttt

SEQ ID NO: 2847295 - DNA, 25 bp, Homo sapien
tttttctctagcagaggcaggttac

SEQ ID NO: 2847296 - DNA, 25 bp, Homo sapien
tgtttttctctagcagaggcaggtt

SEQ ID NO: 2847297 - DNA, 25 bp, Homo sapien
ttctctagcagaggcaggttaccca

SEQ ID NO: 2847298 - DNA, 25 bp, Homo sapien
tctgaataaacaagcctcagattcc

SEQ ID NO: 2847299 - DNA, 25 bp, Homo sapien
tttcttgccccatgttgggcagcca

SEQ ID NO: 2847300 - DNA, 25 bp, Homo sapien
gataaagtgggtccagagggccaat

SEQ ID NO: 2847301 - DNA, 25 bp, Homo sapien
tcagtcatccttgggtgtccgttga

SEQ ID NO: 2847302 - DNA, 25 bp, Homo sapien
caataataacactatcactaaaggt

SEQ ID NO: 2847303 - DNA, 25 bp, Homo sapien
ttctgtgacaatggttacaataatt

SEQ ID NO: 2847304 - DNA, 25 bp, Homo sapien
tcctggtaatgagctatacctgcat

SEQ ID NO: 2847305 - DNA, 25 bp, Homo sapien
tatacctgcataccagtctggacat

SEQ ID NO: 2847306 - DNA, 25 bp, Homo sapien
gagctacatgcaaccctgatgctgg

SEQ ID NO: 2847307 - DNA, 25 bp, Homo sapien
cacagctacatcttaaggtccggcc

SEQ ID NO: 2847308 - DNA, 25 bp, Homo sapien
caaacaggctgtgcacgaagtagta

SEQ ID NO: 2847309 - DNA, 25 bp, Homo sapien
tcaggatcaccttgggagctacatg

SEQ ID NO: 2847310 - DNA, 25 bp, Homo sapien
gactgagaacctgcacgttagcacg

SEQ ID NO: 2847311 - DNA, 25 bp, Homo sapien
tagagaaagcttcctagaggtaggc

SEQ ID NO: 2847312 - DNA, 25 bp, Homo sapien
tctagtgtgcccaataagcctgtac

SEQ ID NO: 2847313 - DNA, 25 bp, Homo sapien
gagaatcacagggtaaatcatcgcc

SEQ ID NO: 2847314 - DNA, 25 bp, Homo sapien
acaaccgcactgtgctggaaccggg

SEQ ID NO: 2847315 - DNA, 25 bp, Homo sapien
tcactgtagtgttcttagctgccca

SEQ ID NO: 2847316 - DNA, 25 bp, Homo sapien
gatgccttggttccactacctgaga

SEQ ID NO: 2847317 - DNA, 25 bp, Homo sapien
tgagaagcaacccaggcatcagaat

SEQ ID NO: 2847318 - DNA, 25 bp, Homo sapien
cattggcggaaagacctgtgcctga

SEQ ID NO: 2847319 - DNA, 25 bp, Homo sapien
caagactctccagtaacggcctgaa

SEQ ID NO: 2847320 - DNA, 25 bp, Homo sapien
tgtctgttgacttaaaaccctgcac

SEQ ID NO: 2847321 - DNA, 25 bp, Homo sapien
ttaatcatcataacgcattggcgga

SEQ ID NO: 2847322 - DNA, 25 bp, Homo sapien
aggtaccagttcaactcccttattg

SEQ ID NO: 2847323 - DNA, 25 bp, Homo sapien
cacccgtgaatcaggtaccagttca

SEQ ID NO: 2847324 - DNA, 25 bp, Homo sapien
tccagtccacccgtgaatcaggtac

SEQ ID NO: 2847325 - DNA, 25 bp, Homo sapien
gtgaatcaggtaccagttcaactcc

SEQ ID NO: 2847326 - DNA, 25 bp, Homo sapien
caggcctttatcctgtccttagctg

SEQ ID NO: 2847327 - DNA, 25 bp, Homo sapien
ctgataacataagggcacaagcacc

SEQ ID NO: 2847328 - DNA, 25 bp, Homo sapien
ttagctgccctgacaccatcatcag

SEQ ID NO: 2847329 - DNA, 25 bp, Homo sapien
gaatcctaggaacaacggtgctgat

SEQ ID NO: 2847330 - DNA, 25 bp, Homo sapien
tcataaaaatccagcaagaaggtct

SEQ ID NO: 2847331 - DNA, 25 bp, Homo sapien
tgagtcccactattcgaagcaggct

SEQ ID NO: 2847332 - DNA, 25 bp, Homo sapien
gaaggtcttatctccctgagtccca

SEQ ID NO: 2847333 - DNA, 25 bp, Homo sapien
tatgtcctggcaagaaggtcttctc

SEQ ID NO: 2847334 - DNA, 25 bp, Homo sapien
aaataagtagacatggatacagctc

SEQ ID NO: 2847335 - DNA, 25 bp, Homo sapien
ataagtagacatggatacagctctc

SEQ ID NO: 2847336 - DNA, 25 bp, Homo sapien
ataaataagtagacatggatacagc

SEQ ID NO: 2847337 - DNA, 25 bp, Homo sapien
aaataaataagtagacatggataca

SEQ ID NO: 2847338 - DNA, 25 bp, Homo sapien
tttctgaagcaactcttcagagtcc

SEQ ID NO: 2847339 - DNA, 25 bp, Homo sapien
tgaaattgcatttctccctcctaat

SEQ ID NO: 2847340 - DNA, 25 bp, Homo sapien
agagtccacttgaattctatcacta

SEQ ID NO: 2847341 - DNA, 25 bp, Homo sapien
cactacggataattcttgaaattgc

SEQ ID NO: 2847342 - DNA, 25 bp, Homo sapien
ttattcagctaagggggcaccacac

SEQ ID NO: 2847343 - DNA, 25 bp, Homo sapien
tttagcagcatctccatgattctaa

SEQ ID NO: 2847344 - DNA, 25 bp, Homo sapien
tgttcctttagcagcatctccatga

SEQ ID NO: 2847345 - DNA, 25 bp, Homo sapien
gcagcatctccatgattctaattcc

SEQ ID NO: 2847346 - DNA, 25 bp, Homo sapien
tagcagcatctccatgattctaatt

SEQ ID NO: 2847347 - DNA, 25 bp, Homo sapien
tatatgcagataatagcctaaaaat

SEQ ID NO: 2847348 - DNA, 25 bp, Homo sapien
tacatacaggaaagctactaaatga

SEQ ID NO: 2847349 - DNA, 25 bp, Homo sapien
gtttatagttacctcttatctgtag

SEQ ID NO: 2847350 - DNA, 25 bp, Homo sapien
aaaagctacatacaggaaagctact

SEQ ID NO: 2847351 - DNA, 25 bp, Homo sapien
ttccctgcaaaagctatgtttcatc

SEQ ID NO: 2847352 - DNA, 25 bp, Homo sapien
caaaagctatgtttcatcagacgaa

SEQ ID NO: 2847353 - DNA, 25 bp, Homo sapien
agctatgtttcatcagacgaaaact

SEQ ID NO: 2847354 - DNA, 25 bp, Homo sapien
tgcaaaagctatgtttcatcagacg

SEQ ID NO: 2847355 - DNA, 25 bp, Homo sapien
gacttgcccgcattgtttcagtgac

SEQ ID NO: 2847356 - DNA, 25 bp, Homo sapien
taggccagaccttcttaaaagcgat

SEQ ID NO: 2847357 - DNA, 25 bp, Homo sapien
aaaataacaagcatacaccccaagg

SEQ ID NO: 2847358 - DNA, 25 bp, Homo sapien
tagctgtagcatgtctaggccagac

SEQ ID NO: 2847359 - DNA, 25 bp, Homo sapien
taacaatggttctttacaccagcgg

SEQ ID NO: 2847360 - DNA, 25 bp, Homo sapien
gaagcctaagctcccttgagaatag

SEQ ID NO: 2847361 - DNA, 25 bp, Homo sapien
tgaaaacaagggtccattgccagga

SEQ ID NO: 2847362 - DNA, 25 bp, Homo sapien
ccaggaagtctctgagggtcataac

SEQ ID NO: 2847363 - DNA, 25 bp, Homo sapien
cctgcctctttgaatgaactctgtc

SEQ ID NO: 2847364 - DNA, 25 bp, Homo sapien
tccaacccctgtgattgaaatcctg

SEQ ID NO: 2847365 - DNA, 25 bp, Homo sapien
atcctgcctctttgaatgaactctg

SEQ ID NO: 2847366 - DNA, 25 bp, Homo sapien
gagaaatccaacccctgtgattgaa

SEQ ID NO: 2847367 - DNA, 25 bp, Homo sapien
tgaatctggtgctgccacttactgg

SEQ ID NO: 2847368 - DNA, 25 bp, Homo sapien
catacatcaagcacttagagcagag

SEQ ID NO: 2847369 - DNA, 25 bp, Homo sapien
cacaaggcagcctaactgatacagg

SEQ ID NO: 2847370 - DNA, 25 bp, Homo sapien
gaaatactgcccacttggctatgag

SEQ ID NO: 2847371 - DNA, 25 bp, Homo sapien
tttccatactttcccggaagacaga

SEQ ID NO: 2847372 - DNA, 25 bp, Homo sapien
catactgtgtccacgtaaggcagtg

SEQ ID NO: 2847373 - DNA, 25 bp, Homo sapien
cacgtaaggcagtgactccgtatgg

SEQ ID NO: 2847374 - DNA, 25 bp, Homo sapien
cagactcttccttcatggatgcata

SEQ ID NO: 2847375 - DNA, 25 bp, Homo sapien
taattggatattaggtactttcaaa

SEQ ID NO: 2847376 - DNA, 25 bp, Homo sapien
attggatattaggtactttcaaaat

SEQ ID NO: 2847377 - DNA, 25 bp, Homo sapien
tggatattaggtactttcaaaatgc

SEQ ID NO: 2847378 - DNA, 25 bp, Homo sapien
ttggatattaggtactttcaaaatg

SEQ ID NO: 2847379 - DNA, 25 bp, Homo sapien
aaagaatcaccagagtgcttaagga

SEQ ID NO: 2847380 - DNA, 25 bp, Homo sapien
ccaacaaagaatcaccagagtgctt

SEQ ID NO: 2847381 - DNA, 25 bp, Homo sapien
acaaagaatcaccagagtgcttaag

SEQ ID NO: 2847382 - DNA, 25 bp, Homo sapien
caacaaagaatcaccagagtgctta

SEQ ID NO: 2847383 - DNA, 25 bp, Homo sapien
taaaatttctggaaccacgttctga

SEQ ID NO: 2847384 - DNA, 25 bp, Homo sapien
tctggaaccacgttctgacagattg

SEQ ID NO: 2847385 - DNA, 25 bp, Homo sapien
aatttctggaaccacgttctgacag

SEQ ID NO: 2847386 - DNA, 25 bp, Homo sapien
gttctgacagattgcaatcctcttt

SEQ ID NO: 2847387 - DNA, 25 bp, Homo sapien
ctgtagatgacccctgttgattcat

SEQ ID NO: 2847388 - DNA, 25 bp, Homo sapien
tttactgagatgacatttttatcca

SEQ ID NO: 2847389 - DNA, 25 bp, Homo sapien
ttactgagatgacatttttatccat

SEQ ID NO: 2847390 - DNA, 25 bp, Homo sapien
gatttttactgagatgacattttta

SEQ ID NO: 2847391 - DNA, 25 bp, Homo sapien
tttttactgagatgacatttttatc

SEQ ID NO: 2847392 - DNA, 25 bp, Homo sapien
cagaattgatcaagctgaatcagga

SEQ ID NO: 2847393 - DNA, 25 bp, Homo sapien
gagcagctactgtgttcacgcaggg

SEQ ID NO: 2847394 - DNA, 25 bp, Homo sapien
tcacgcagggtgctatcctagagaa

SEQ ID NO: 2847395 - DNA, 25 bp, Homo sapien
caggatcacacccatcaaagactta

SEQ ID NO: 2847396 - DNA, 25 bp, Homo sapien
caatggcctcccctcgcttttaagg

SEQ ID NO: 2847397 - DNA, 25 bp, Homo sapien
gagtaagcaacctgcacgatgtccc

SEQ ID NO: 2847398 - DNA, 25 bp, Homo sapien
gtcagtgatgaaccggaaagctcca

SEQ ID NO: 2847399 - DNA, 25 bp, Homo sapien
agctccacacgtcggtcatctgcaa

SEQ ID NO: 2847400 - DNA, 25 bp, Homo sapien
cacgagctgggattcccggaggctc

SEQ ID NO: 2847401 - DNA, 25 bp, Homo sapien
gagctgggattcccggaggctcttc

SEQ ID NO: 2847402 - DNA, 25 bp, Homo sapien
cgagctgggattcccggaggctctt

SEQ ID NO: 2847403 - DNA, 25 bp, Homo sapien
acgagctgggattcccggaggctct

SEQ ID NO: 2847404 - DNA, 25 bp, Homo sapien
gagtcttcgaggaaatccctctcga

SEQ ID NO: 2847405 - DNA, 25 bp, Homo sapien
caaagcccgcagctggaaagagaca

SEQ ID NO: 2847406 - DNA, 25 bp, Homo sapien
ccagcttccgcgtggatgaaggaga

SEQ ID NO: 2847407 - DNA, 25 bp, Homo sapien
caggtgtgaacgtgatgccaagcac

SEQ ID NO: 2847408 - DNA, 25 bp, Homo sapien
agctggcgaccacctgctcgaaggg

SEQ ID NO: 2847409 - DNA, 25 bp, Homo sapien
agaaagctggcgaccacctgctcga

SEQ ID NO: 2847410 - DNA, 25 bp, Homo sapien
ctttcggagaaagctggcgaccacc

SEQ ID NO: 2847411 - DNA, 25 bp, Homo sapien
cacctgctcgaaggggtacttgtac

SEQ ID NO: 2847412 - DNA, 25 bp, Homo sapien
ggtgcacatccaccgagacccccat

SEQ ID NO: 2847413 - DNA, 25 bp, Homo sapien
tggtgcacatccaccgagaccccca

SEQ ID NO: 2847414 - DNA, 25 bp, Homo sapien
ctggtgcacatccaccgagaccccc

SEQ ID NO: 2847415 - DNA, 25 bp, Homo sapien
gcgccgcgggccccgcgcaccggcc

SEQ ID NO: 2847416 - DNA, 25 bp, Homo sapien
gccgcgggccccgcgcaccggccac

SEQ ID NO: 2847417 - DNA, 25 bp, Homo sapien
ccgcgcgccgcgggccccgcgcacc

SEQ ID NO: 2847418 - DNA, 25 bp, Homo sapien
gcgcgccgcgggccccgcgcaccgg

SEQ ID NO: 2847419 - DNA, 25 bp, Homo sapien
catgggcgtggcctttttcctccgc

SEQ ID NO: 2847420 - DNA, 25 bp, Homo sapien
agccacatgggcgtggcctttttcc

SEQ ID NO: 2847421 - DNA, 25 bp, Homo sapien
ctttcgaaactttattggccactcg

SEQ ID NO: 2847422 - DNA, 25 bp, Homo sapien
ggagaaacgcgcagtcggccacgcc

SEQ ID NO: 2847423 - DNA, 25 bp, Homo sapien
gccgcgcctgccgagaaaagcttct

SEQ ID NO: 2847424 - DNA, 25 bp, Homo sapien
gccccgcggtctccacgctggcggc

SEQ ID NO: 2847425 - DNA, 25 bp, Homo sapien
gctggcggcgccagagcggccctgg

SEQ ID NO: 2847426 - DNA, 25 bp, Homo sapien
gcgcctgccgagaaaagcttctctg

SEQ ID NO: 2847427 - DNA, 25 bp, Homo sapien
ggctttctgaaacgtgtgccagact

SEQ ID NO: 2847428 - DNA, 25 bp, Homo sapien
cagtttgcacaacagtaatcttact

SEQ ID NO: 2847429 - DNA, 25 bp, Homo sapien
aacagtaatcttacttgctgggtcc

SEQ ID NO: 2847430 - DNA, 25 bp, Homo sapien
caacatgagcctattatcttgtagc

SEQ ID NO: 2847431 - DNA, 25 bp, Homo sapien
cacagtgaacatcccattttgcttg

SEQ ID NO: 2847432 - DNA, 25 bp, Homo sapien
tgtggcctgctagtgcgttcagcgt

SEQ ID NO: 2847433 - DNA, 25 bp, Homo sapien
tctccacagtgaacatcccattttg

SEQ ID NO: 2847434 - DNA, 25 bp, Homo sapien
cagcgttggctgtccgtttcctctt

SEQ ID NO: 2847435 - DNA, 25 bp, Homo sapien
ctgcttaatcagaaattcagtttga

SEQ ID NO: 2847436 - DNA, 25 bp, Homo sapien
gattgcaaatctggcaaggctgtag

SEQ ID NO: 2847437 - DNA, 25 bp, Homo sapien
ctattgattgcaaatctggcaaggc

SEQ ID NO: 2847438 - DNA, 25 bp, Homo sapien
gcaaatctggcaaggctgtaggcca

SEQ ID NO: 2847439 - DNA, 25 bp, Homo sapien
ttgattgcaaatctggcaaggctgt

SEQ ID NO: 2847440 - DNA, 25 bp, Homo sapien
ggactccttaaatctgttggccagc

SEQ ID NO: 2847441 - DNA, 25 bp, Homo sapien
aaacagctgtcctcgggaatatccc

SEQ ID NO: 2847442 - DNA, 25 bp, Homo sapien
aacttgctgccgtggcacagagagc

SEQ ID NO: 2847443 - DNA, 25 bp, Homo sapien
gaccctcggcagtgaaaacagctgt

SEQ ID NO: 2847444 - DNA, 25 bp, Homo sapien
actgcagactccaaggcttgtagag

SEQ ID NO: 2847445 - DNA, 25 bp, Homo sapien
actagctccatgaccaagaagaggg

SEQ ID NO: 2847446 - DNA, 25 bp, Homo sapien
acctctactagctccatgaccaaga

SEQ ID NO: 2847447 - DNA, 25 bp, Homo sapien
agatggtaaccagtgccaattgaga

SEQ ID NO: 2847448 - DNA, 25 bp, Homo sapien
ttagtgtagatgattatctttccaa

SEQ ID NO: 2847449 - DNA, 25 bp, Homo sapien
ggttcgaatgattttcaggttatta

SEQ ID NO: 2847450 - DNA, 25 bp, Homo sapien
ggtccctgcctccatagctttcttc

SEQ ID NO: 2847451 - DNA, 25 bp, Homo sapien
ttctgcctccaccaaaggtctatcg

SEQ ID NO: 2847452 - DNA, 25 bp, Homo sapien
gatcctctgagcagtcagcttaggg

SEQ ID NO: 2847453 - DNA, 25 bp, Homo sapien
caaggtgtaggcattaccctctcta

SEQ ID NO: 2847454 - DNA, 25 bp, Homo sapien
aaagacctgcttcaatactcgaccg

SEQ ID NO: 2847455 - DNA, 25 bp, Homo sapien
tgtaatcgttgaaccgaggctggcc

SEQ ID NO: 2847456 - DNA, 25 bp, Homo sapien
gcatcacaggccaaactccccacgt

SEQ ID NO: 2847457 - DNA, 25 bp, Homo sapien
tagacgaggagtgtggtggaaaaac

SEQ ID NO: 2847458 - DNA, 25 bp, Homo sapien
cagaggacccagtagacgaggagtg

SEQ ID NO: 2847459 - DNA, 25 bp, Homo sapien
aactccccacgtcagaatgtaaagg

SEQ ID NO: 2847460 - DNA, 25 bp, Homo sapien
gtcacatagacaaatcagggaaagt

SEQ ID NO: 2847461 - DNA, 25 bp, Homo sapien
ccaaaaccaaccgaacattgctgga

SEQ ID NO: 2847462 - DNA, 25 bp, Homo sapien
tcttgcggtcaagtcggggcagact

SEQ ID NO: 2847463 - DNA, 25 bp, Homo sapien
ggcagactcctcattagagcttgca

SEQ ID NO: 2847464 - DNA, 25 bp, Homo sapien
aaagcccttagtgggtaatgatgcc

SEQ ID NO: 2847465 - DNA, 25 bp, Homo sapien
caattcctattaactgagtattcac

SEQ ID NO: 2847466 - DNA, 25 bp, Homo sapien
ctgaacacgttgattcaattcctat

SEQ ID NO: 2847467 - DNA, 25 bp, Homo sapien
tcacccaactttccggagaagcaaa

SEQ ID NO: 2847468 - DNA, 25 bp, Homo sapien
cataccctcaattggagaggaaatc

SEQ ID NO: 2847469 - DNA, 25 bp, Homo sapien
taccctcaattggagaggaaatctc

SEQ ID NO: 2847470 - DNA, 25 bp, Homo sapien
tgcaaacataccctcaattggagag

SEQ ID NO: 2847471 - DNA, 25 bp, Homo sapien
caaacataccctcaattggagagga

SEQ ID NO: 2847472 - DNA, 25 bp, Homo sapien
aatcccttgatctttctgggcacag

SEQ ID NO: 2847473 - DNA, 25 bp, Homo sapien
taacagggctgggtaaggcgatccc

SEQ ID NO: 2847474 - DNA, 25 bp, Homo sapien
gctgccgcgctgacatctttggaga

SEQ ID NO: 2847475 - DNA, 25 bp, Homo sapien
caacaaaagcgtggtaagtaggcag

SEQ ID NO: 2847476 - DNA, 25 bp, Homo sapien
aaagttttcaaagcggttggcagca

SEQ ID NO: 2847477 - DNA, 25 bp, Homo sapien
tttgagaagctcgatgtcacagcca

SEQ ID NO: 2847478 - DNA, 25 bp, Homo sapien
gttttccaacattgaggcgctgccg

SEQ ID NO: 2847479 - DNA, 25 bp, Homo sapien
ggctagtgcctaatgtcagaatcca

SEQ ID NO: 2847480 - DNA, 25 bp, Homo sapien
tctacagagggttttcaaggcccac

SEQ ID NO: 2847481 - DNA, 25 bp, Homo sapien
cattgcggggcacataagttgttgg

SEQ ID NO: 2847482 - DNA, 25 bp, Homo sapien
cccaacaccgctcgctttggaaaat

SEQ ID NO: 2847483 - DNA, 25 bp, Homo sapien
ctctcaggtgccacttgcatgcaca

SEQ ID NO: 2847484 - DNA, 25 bp, Homo sapien
caagagtagatgtaagagaacgtgg

SEQ ID NO: 2847485 - DNA, 25 bp, Homo sapien
ggtttttgcagaattaagaatgata

SEQ ID NO: 2847486 - DNA, 25 bp, Homo sapien
agaattaagaatgatatcgctgtac

SEQ ID NO: 2847487 - DNA, 25 bp, Homo sapien
attaagaatgatatcgctgtacaca

SEQ ID NO: 2847488 - DNA, 25 bp, Homo sapien
tggtttttgcagaattaagaatgat

SEQ ID NO: 2847489 - DNA, 25 bp, Homo sapien
taattggttgccaaggcgatacggc

SEQ ID NO: 2847490 - DNA, 25 bp, Homo sapien
ttgccaaggcgatacggcagaatca

SEQ ID NO: 2847491 - DNA, 25 bp, Homo sapien
aggcgatacggcagaatcacagggc

SEQ ID NO: 2847492 - DNA, 25 bp, Homo sapien
gtattttaattggttgccaaggcga

SEQ ID NO: 2847493 - DNA, 25 bp, Homo sapien
tcagtttgctgggcttgggtcagaa

SEQ ID NO: 2847494 - DNA, 25 bp, Homo sapien
gctgggcttgggtcagaagcctcca

SEQ ID NO: 2847495 - DNA, 25 bp, Homo sapien
gggcttgggtcagaagcctccacac

SEQ ID NO: 2847496 - DNA, 25 bp, Homo sapien
tttgctgggcttgggtcagaagcct

SEQ ID NO: 2847497 - DNA, 25 bp, Homo sapien
gtttagggcactttcagacctctgg

SEQ ID NO: 2847498 - DNA, 25 bp, Homo sapien
gaattccattggaaacacgaacaca

SEQ ID NO: 2847499 - DNA, 25 bp, Homo sapien
tgtggtgttttacagcgtggcctgt

SEQ ID NO: 2847500 - DNA, 25 bp, Homo sapien
cgaacacatccaagatcatgtgtgg

SEQ ID NO: 2847501 - DNA, 25 bp, Homo sapien
atactccaccagcccagaaaagaag

SEQ ID NO: 2847502 - DNA, 25 bp, Homo sapien
agcccagaaaagaagctctaccggc

SEQ ID NO: 2847503 - DNA, 25 bp, Homo sapien
tccaccagcccagaaaagaagctct

SEQ ID NO: 2847504 - DNA, 25 bp, Homo sapien
cagcccagaaaagaagctctaccgg

SEQ ID NO: 2847505 - DNA, 25 bp, Homo sapien
ggaaatgatgcaacaagccaataac

SEQ ID NO: 2847506 - DNA, 25 bp, Homo sapien
gaactctgcaaggaccgatgtctgt

SEQ ID NO: 2847507 - DNA, 25 bp, Homo sapien
cagatgcctgttctggttactggag

SEQ ID NO: 2847508 - DNA, 25 bp, Homo sapien
tacctgactaaagctgagcagctgg

SEQ ID NO: 2847509 - DNA, 25 bp, Homo sapien
ttgcccactcgtagtacttgctctg

SEQ ID NO: 2847510 - DNA, 25 bp, Homo sapien
gcaatgggctagatgtgatatctcc

SEQ ID NO: 2847511 - DNA, 25 bp, Homo sapien
tccccatagatcaggctccagggtg

SEQ ID NO: 2847512 - DNA, 25 bp, Homo sapien
ggcaatcatcagtgacggcccagag

SEQ ID NO: 2847513 - DNA, 25 bp, Homo sapien
ctgttccctttgctggagctgccag

SEQ ID NO: 2847514 - DNA, 25 bp, Homo sapien
tctcctgttccctttgctggagctg

SEQ ID NO: 2847515 - DNA, 25 bp, Homo sapien
ctggagctgccagctggcacttttt

SEQ ID NO: 2847516 - DNA, 25 bp, Homo sapien
agctggcactttttgtcactcatca

SEQ ID NO: 2847517 - DNA, 25 bp, Homo sapien
ggcagacgcagagtctcccggagcc

SEQ ID NO: 2847518 - DNA, 25 bp, Homo sapien
ggagccctgtgtcagtgttaatgtt

SEQ ID NO: 2847519 - DNA, 25 bp, Homo sapien
cctgtgtcagtgttaatgttagaaa

SEQ ID NO: 2847520 - DNA, 25 bp, Homo sapien
agggcagacgcagagtctcccggag

SEQ ID NO: 2847521 - DNA, 25 bp, Homo sapien
tagagaagaacaaaggtcgccagtc

SEQ ID NO: 2847522 - DNA, 25 bp, Homo sapien
agcccatggagaaagcagacgttcc

SEQ ID NO: 2847523 - DNA, 25 bp, Homo sapien
tatggtagagatcagcaccccagtg

SEQ ID NO: 2847524 - DNA, 25 bp, Homo sapien
gaggcaacacgtctaccctccgtag

SEQ ID NO: 2847525 - DNA, 25 bp, Homo sapien
tgaagtatttctagcagcatgtggc

SEQ ID NO: 2847526 - DNA, 25 bp, Homo sapien
cgtggcaatccagaagctgaagtat

SEQ ID NO: 2847527 - DNA, 25 bp, Homo sapien
tggtcactgtgttgccaactgaaga

SEQ ID NO: 2847528 - DNA, 25 bp, Homo sapien
tgtggctatttaggttgaagggtac

SEQ ID NO: 2847529 - DNA, 25 bp, Homo sapien
tcacttatgtgctcttgagtttcca

SEQ ID NO: 2847530 - DNA, 25 bp, Homo sapien
gagcaagcttgatgttttgttcact

SEQ ID NO: 2847531 - DNA, 25 bp, Homo sapien
acttttaagagcaagcttgatgttt

SEQ ID NO: 2847532 - DNA, 25 bp, Homo sapien
caacatgcgtaagattgaaaaactt

SEQ ID NO: 2847533 - DNA, 25 bp, Homo sapien
accttcccgcatggcatgtttgcca

SEQ ID NO: 2847534 - DNA, 25 bp, Homo sapien
tgcctgtgcagtcgccttgtttaca

SEQ ID NO: 2847535 - DNA, 25 bp, Homo sapien
gggctaatcttactgcctgcctgtg

SEQ ID NO: 2847536 - DNA, 25 bp, Homo sapien
catccttgccactgccgtaggctgg

SEQ ID NO: 2847537 - DNA, 25 bp, Homo sapien
ctgtcctcacctggcaagcgtccaa

SEQ ID NO: 2847538 - DNA, 25 bp, Homo sapien
tgtcctcacctggcaagcgtccaaa

SEQ ID NO: 2847539 - DNA, 25 bp, Homo sapien
ctcacctggcaagcgtccaaagccc

SEQ ID NO: 2847540 - DNA, 25 bp, Homo sapien
cacctggcaagcgtccaaagcccat

SEQ ID NO: 2847541 - DNA, 25 bp, Homo sapien
tgatttccgcagaaccacacagagc

SEQ ID NO: 2847542 - DNA, 25 bp, Homo sapien
gaccctggtggactttgtggccaca

SEQ ID NO: 2847543 - DNA, 25 bp, Homo sapien
cacttgctgagatcactgagcctgt

SEQ ID NO: 2847544 - DNA, 25 bp, Homo sapien
gccagcaagcatgccatccagaagg

SEQ ID NO: 2847545 - DNA, 25 bp, Homo sapien
cactggcctgagtcctaagttagac

SEQ ID NO: 2847546 - DNA, 25 bp, Homo sapien
ggatccacagaattcaatcacttgt

SEQ ID NO: 2847547 - DNA, 25 bp, Homo sapien
gaagccatataactgtggattctgc

SEQ ID NO: 2847548 - DNA, 25 bp, Homo sapien
tctggtagatggtagagccactggc

SEQ ID NO: 2847549 - DNA, 25 bp, Homo sapien
tgccttattgattgagcctctgatc

SEQ ID NO: 2847550 - DNA, 25 bp, Homo sapien
tattgattgagcctctgatccatag

SEQ ID NO: 2847551 - DNA, 25 bp, Homo sapien
ttttcctttgccttattgattgagc

SEQ ID NO: 2847552 - DNA, 25 bp, Homo sapien
gagcctctgatccataggttcccat

SEQ ID NO: 2847553 - DNA, 25 bp, Homo sapien
aaccttgtgccgtttagctatcacc

SEQ ID NO: 2847554 - DNA, 25 bp, Homo sapien
ccaacccttggaaattatcatctat

SEQ ID NO: 2847555 - DNA, 25 bp, Homo sapien
tatgcagtgctaagagttcctcagg

SEQ ID NO: 2847556 - DNA, 25 bp, Homo sapien
tgtcatgtctgtttgaaggaaccag

SEQ ID NO: 2847557 - DNA, 25 bp, Homo sapien
tcatccatgttctcttatgtatcaa

SEQ ID NO: 2847558 - DNA, 25 bp, Homo sapien
ggcatcttcccaaacaattacgtca

SEQ ID NO: 2847559 - DNA, 25 bp, Homo sapien
gtctccttggtcaccgggcgagtcg

SEQ ID NO: 2847560 - DNA, 25 bp, Homo sapien
ccattttcaggtgtgtcgcctccaa

SEQ ID NO: 2847561 - DNA, 25 bp, Homo sapien
ccgatgagctggacctgcaaaaggg

SEQ ID NO: 2847562 - DNA, 25 bp, Homo sapien
ggcagccacatagcttctggactcc

SEQ ID NO: 2847563 - DNA, 25 bp, Homo sapien
gcagccacatagcttctggactccc

SEQ ID NO: 2847564 - DNA, 25 bp, Homo sapien
tccagtaacaaatgtgacagccact

SEQ ID NO: 2847565 - DNA, 25 bp, Homo sapien
aatgacctgtttctacctgtaggat

SEQ ID NO: 2847566 - DNA, 25 bp, Homo sapien
tagggcataagaaactccagtaaca

SEQ ID NO: 2847567 - DNA, 25 bp, Homo sapien
acctgagttgtacctaaagtgtgac

SEQ ID NO: 2847568 - DNA, 25 bp, Homo sapien
tacatcacaataaatgtcgttaaaa

SEQ ID NO: 2847569 - DNA, 25 bp, Homo sapien
cacaataaatgtcgttaaaaagagc

SEQ ID NO: 2847570 - DNA, 25 bp, Homo sapien
tcacaataaatgtcgttaaaaagag

SEQ ID NO: 2847571 - DNA, 25 bp, Homo sapien
catcacaataaatgtcgttaaaaag

SEQ ID NO: 2847572 - DNA, 25 bp, Homo sapien
tgctactcgcttgggatgcagatgc

SEQ ID NO: 2847573 - DNA, 25 bp, Homo sapien
cactgctactcgcttgggatgcaga

SEQ ID NO: 2847574 - DNA, 25 bp, Homo sapien
ctgctactcgcttgggatgcagatg

SEQ ID NO: 2847575 - DNA, 25 bp, Homo sapien
gctactcgcttgggatgcagatgct

SEQ ID NO: 2847576 - DNA, 25 bp, Homo sapien
gataatacagatcaaagcggccatc

SEQ ID NO: 2847577 - DNA, 25 bp, Homo sapien
ctctgggcccattgtgatattaaca

SEQ ID NO: 2847578 - DNA, 25 bp, Homo sapien
gatattaacaggttgaaccttctcc

SEQ ID NO: 2847579 - DNA, 25 bp, Homo sapien
ggtggacacccagcatcagcactgg

SEQ ID NO: 2847580 - DNA, 25 bp, Homo sapien
ggtttggctgcactttcctctggag

SEQ ID NO: 2847581 - DNA, 25 bp, Homo sapien
gggctgccagagaggtttggctgca

SEQ ID NO: 2847582 - DNA, 25 bp, Homo sapien
ccagagaggtttggctgcactttcc

SEQ ID NO: 2847583 - DNA, 25 bp, Homo sapien
gctgcactttcctctggagcatcct

SEQ ID NO: 2847584 - DNA, 25 bp, Homo sapien
agagcctgccttggtcatcttccca

SEQ ID NO: 2847585 - DNA, 25 bp, Homo sapien
cctgccttggtcatcttcccaggag

SEQ ID NO: 2847586 - DNA, 25 bp, Homo sapien
gagcctgccttggtcatcttcccag

SEQ ID NO: 2847587 - DNA, 25 bp, Homo sapien
cttacagagcctgccttggtcatct

SEQ ID NO: 2847588 - DNA, 25 bp, Homo sapien
agagagcaaatgatctgctgggatg

SEQ ID NO: 2847589 - DNA, 25 bp, Homo sapien
atgatctgctgggatggaaactgct

SEQ ID NO: 2847590 - DNA, 25 bp, Homo sapien
gatggaaactgctcaatggagagtt

SEQ ID NO: 2847591 - DNA, 25 bp, Homo sapien
ggatgcagaagagagcaaatgatct

SEQ ID NO: 2847592 - DNA, 25 bp, Homo sapien
taatagagcataatgatcaagaaaa

SEQ ID NO: 2847593 - DNA, 25 bp, Homo sapien
aatagagcataatgatcaagaaaat

SEQ ID NO: 2847594 - DNA, 25 bp, Homo sapien
ctaatagagcataatgatcaagaaa

SEQ ID NO: 2847595 - DNA, 25 bp, Homo sapien
cactttgacggatgggaattgctaa

SEQ ID NO: 2847596 - DNA, 25 bp, Homo sapien
tgctctggacatccaaaagggaggg

SEQ ID NO: 2847597 - DNA, 25 bp, Homo sapien
gaattgctaagtttcagtggaggta

SEQ ID NO: 2847598 - DNA, 25 bp, Homo sapien
gtttgtacaaccatgagggcccaca

SEQ ID NO: 2847599 - DNA, 25 bp, Homo sapien
tgttccactgagaggtttgagagga

SEQ ID NO: 2847600 - DNA, 25 bp, Homo sapien
gcaattgttccactgagaggtttga

SEQ ID NO: 2847601 - DNA, 25 bp, Homo sapien
ttgttccactgagaggtttgagagg

SEQ ID NO: 2847602 - DNA, 25 bp, Homo sapien
aattgttccactgagaggtttgaga

SEQ ID NO: 2847603 - DNA, 25 bp, Homo sapien
tccttagtcattgggactgcacaga

SEQ ID NO: 2847604 - DNA, 25 bp, Homo sapien
cagggtgtccttagtcattgggact

SEQ ID NO: 2847605 - DNA, 25 bp, Homo sapien
tcatcttgagttcccgggccacctg

SEQ ID NO: 2847606 - DNA, 25 bp, Homo sapien
tcatagacttgggaggtcctcatct

SEQ ID NO: 2847607 - DNA, 25 bp, Homo sapien
tggacccaggtaacaacggccaaca

SEQ ID NO: 2847608 - DNA, 25 bp, Homo sapien
gccaacaaagacactctccataatg

SEQ ID NO: 2847609 - DNA, 25 bp, Homo sapien
attctcagtgcaaaggtggacccag

SEQ ID NO: 2847610 - DNA, 25 bp, Homo sapien
ggtgccaattctcagtgcaaaggtg

SEQ ID NO: 2847611 - DNA, 25 bp, Homo sapien
tggcgatgtcacactcaagacacat

SEQ ID NO: 2847612 - DNA, 25 bp, Homo sapien
ctggcgatgtcacactcaagacaca

SEQ ID NO: 2847613 - DNA, 25 bp, Homo sapien
ttaagaaattagctccagatatgtt

SEQ ID NO: 2847614 - DNA, 25 bp, Homo sapien
ccagatatgttgatatggtctgatc

SEQ ID NO: 2847615 - DNA, 25 bp, Homo sapien
aattagctccagatatgttgatatg

SEQ ID NO: 2847616 - DNA, 25 bp, Homo sapien
gatatggtctgatcacctaggtatg

SEQ ID NO: 2847617 - DNA, 25 bp, Homo sapien
tgtgattgtcgtcctgccactggct

SEQ ID NO: 2847618 - DNA, 25 bp, Homo sapien
gacactgaagagaccggtgctccag

SEQ ID NO: 2847619 - DNA, 25 bp, Homo sapien
ccccgccagtctggacaattgctgt

SEQ ID NO: 2847620 - DNA, 25 bp, Homo sapien
ctggctccccgaacaggctgcttca

SEQ ID NO: 2847621 - DNA, 25 bp, Homo sapien
ttccctctttttgacctcactccat

SEQ ID NO: 2847622 - DNA, 25 bp, Homo sapien
cctcttctagcacaagccctaccat

SEQ ID NO: 2847623 - DNA, 25 bp, Homo sapien
tgacatgtgtgacaacagaggtgag

SEQ ID NO: 2847624 - DNA, 25 bp, Homo sapien
cagaggtgagtatatgttgagtaag

SEQ ID NO: 2847625 - DNA, 25 bp, Homo sapien
aggaaagatcctcaggacacctgaa

SEQ ID NO: 2847626 - DNA, 25 bp, Homo sapien
tccaaaccaattcatagtgagaagt

SEQ ID NO: 2847627 - DNA, 25 bp, Homo sapien
tgtatctctacacataagaagcata

SEQ ID NO: 2847628 - DNA, 25 bp, Homo sapien
ataatagaataagcccagtgtagcc

SEQ ID NO: 2847629 - DNA, 25 bp, Homo sapien
tgagtaccagatgaagtaatgggct

SEQ ID NO: 2847630 - DNA, 25 bp, Homo sapien
gggcttatgctcagacgactcctta

SEQ ID NO: 2847631 - DNA, 25 bp, Homo sapien
tgcagctccgagtaattggccaaga

SEQ ID NO: 2847632 - DNA, 25 bp, Homo sapien
tggccaagagcatcctagtagcaaa

SEQ ID NO: 2847633 - DNA, 25 bp, Homo sapien
tagtggtccctaactgcggagagca

SEQ ID NO: 2847634 - DNA, 25 bp, Homo sapien
tgtgataaaccatatgactaggcct

SEQ ID NO: 2847635 - DNA, 25 bp, Homo sapien
gattgattgatggattgattgagac

SEQ ID NO: 2847636 - DNA, 25 bp, Homo sapien
catgacctctattttattgattgat

SEQ ID NO: 2847637 - DNA, 25 bp, Homo sapien
atgacctctattttattgattgatt

SEQ ID NO: 2847638 - DNA, 25 bp, Homo sapien
gattgatggattgattgagacagag

SEQ ID NO: 2847639 - DNA, 25 bp, Homo sapien
gcatgacctttaaacacaattggac

SEQ ID NO: 2847640 - DNA, 25 bp, Homo sapien
taaagtacacctcataaaagaagca

SEQ ID NO: 2847641 - DNA, 25 bp, Homo sapien
gaaacttctaggaaatagcaacaat

SEQ ID NO: 2847642 - DNA, 25 bp, Homo sapien
aggtacaccttagccttcatcaaag

SEQ ID NO: 2847643 - DNA, 25 bp, Homo sapien
tggatggttagaaatgaaatcaatc

SEQ ID NO: 2847644 - DNA, 25 bp, Homo sapien
gagtagtagtattcctaagaaacca

SEQ ID NO: 2847645 - DNA, 25 bp, Homo sapien
tgatagccaatcagtagacacaatc

SEQ ID NO: 2847646 - DNA, 25 bp, Homo sapien
tccagcctaaggttctgatagccaa

SEQ ID NO: 2847647 - DNA, 25 bp, Homo sapien
agattattgtatcgccaatatccac

SEQ ID NO: 2847648 - DNA, 25 bp, Homo sapien
tagattattgtatcgccaatatcca

SEQ ID NO: 2847649 - DNA, 25 bp, Homo sapien
gatagattattgtatcgccaatatc

SEQ ID NO: 2847650 - DNA, 25 bp, Homo sapien
cagatagattattgtatcgccaata

SEQ ID NO: 2847651 - DNA, 25 bp, Homo sapien
tcccaggacaggaactcgtcgaggc

SEQ ID NO: 2847652 - DNA, 25 bp, Homo sapien
caacagtggatcatcaaatctcatc

SEQ ID NO: 2847653 - DNA, 25 bp, Homo sapien
cgtcgaggccccaacagtggatcat

SEQ ID NO: 2847654 - DNA, 25 bp, Homo sapien
atgggggtcttctcggtgtactcct

SEQ ID NO: 2847655 - DNA, 25 bp, Homo sapien
taaggccttttactgcggatctgcc

SEQ ID NO: 2847656 - DNA, 25 bp, Homo sapien
tctttggagagtttctgcagggacc

SEQ ID NO: 2847657 - DNA, 25 bp, Homo sapien
tgcaattcaacgtacacatcagtgg

SEQ ID NO: 2847658 - DNA, 25 bp, Homo sapien
aagactttaatgcagctggcggcca

SEQ ID NO: 2847659 - DNA, 25 bp, Homo sapien
aacgcctgattatggaatcacagtt

SEQ ID NO: 2847660 - DNA, 25 bp, Homo sapien
cattaaacgcctgattatggaatca

SEQ ID NO: 2847661 - DNA, 25 bp, Homo sapien
taaacgcctgattatggaatcacag

SEQ ID NO: 2847662 - DNA, 25 bp, Homo sapien
ctttaattcctcgattcattttcat

SEQ ID NO: 2847663 - DNA, 25 bp, Homo sapien
tcaccagagaaacggacacaccagg

SEQ ID NO: 2847664 - DNA, 25 bp, Homo sapien
tcaattttggttgagaagtggccat

SEQ ID NO: 2847665 - DNA, 25 bp, Homo sapien
attcaccagagaaacggacacacca

SEQ ID NO: 2847666 - DNA, 25 bp, Homo sapien
attttggttgagaagtggccattgg

SEQ ID NO: 2847667 - DNA, 25 bp, Homo sapien
caaacttgacttctatgtgttctag

SEQ ID NO: 2847668 - DNA, 25 bp, Homo sapien
gtcttccctgattttatcttctgct

SEQ ID NO: 2847669 - DNA, 25 bp, Homo sapien
ttctgcttcggaggcaaacttgact

SEQ ID NO: 2847670 - DNA, 25 bp, Homo sapien
tttatcttctgcttcggaggcaaac

SEQ ID NO: 2847671 - DNA, 25 bp, Homo sapien
aaatccagaatacgaggccccatct

SEQ ID NO: 2847672 - DNA, 25 bp, Homo sapien
ctcaagcgaattagtcagatagact

SEQ ID NO: 2847673 - DNA, 25 bp, Homo sapien
ctaattgcaaatccagaatacgagg

SEQ ID NO: 2847674 - DNA, 25 bp, Homo sapien
ttgcaaatccagaatacgaggcccc

SEQ ID NO: 2847675 - DNA, 25 bp, Homo sapien
tgtcaggcagttttccgttattggc

SEQ ID NO: 2847676 - DNA, 25 bp, Homo sapien
tagttcactagcaatgactttgttg

SEQ ID NO: 2847677 - DNA, 25 bp, Homo sapien
tcagttctggcatactgcctagttc

SEQ ID NO: 2847678 - DNA, 25 bp, Homo sapien
gactttgttgtcaggcagttttccg

SEQ ID NO: 2847679 - DNA, 25 bp, Homo sapien
tacgtagaacagacagggtggtatg

SEQ ID NO: 2847680 - DNA, 25 bp, Homo sapien
agtgtttacgtagaacagacagggt

SEQ ID NO: 2847681 - DNA, 25 bp, Homo sapien
tatgttgccaaggtggatagttctt

SEQ ID NO: 2847682 - DNA, 25 bp, Homo sapien
atggtgcaatgtgagggcttctgca

SEQ ID NO: 2847683 - DNA, 25 bp, Homo sapien
taaggtcatgtgttacttccataag

SEQ ID NO: 2847684 - DNA, 25 bp, Homo sapien
tcttgagtcgtagtctaaggtcatg

SEQ ID NO: 2847685 - DNA, 25 bp, Homo sapien
tagctggcatcatatagttcttgag

SEQ ID NO: 2847686 - DNA, 25 bp, Homo sapien
tccataagatactgtgaggagtgta

SEQ ID NO: 2847687 - DNA, 25 bp, Homo sapien
cagaatggagcgaggagaagtgtct

SEQ ID NO: 2847688 - DNA, 25 bp, Homo sapien
aattcacggtacttatcttttgcgg

SEQ ID NO: 2847689 - DNA, 25 bp, Homo sapien
aataaaccggaacacaagttctctg

SEQ ID NO: 2847690 - DNA, 25 bp, Homo sapien
gagtgtccagatgtgctcacacaaa

SEQ ID NO: 2847691 - DNA, 25 bp, Homo sapien
aactgtatattaagggtgactgctc

SEQ ID NO: 2847692 - DNA, 25 bp, Homo sapien
gaggaaatactgacaccttgtggaa

SEQ ID NO: 2847693 - DNA, 25 bp, Homo sapien
tacaacacattgctatgcccagcca

SEQ ID NO: 2847694 - DNA, 25 bp, Homo sapien
ggattttcagtctacactttaggcg

SEQ ID NO: 2847695 - DNA, 25 bp, Homo sapien
ctgtttttataattcctgcattcaa

SEQ ID NO: 2847696 - DNA, 25 bp, Homo sapien
acatcatcttttcatagttttgatc

SEQ ID NO: 2847697 - DNA, 25 bp, Homo sapien
ttttataattcctgcattcaattca

SEQ ID NO: 2847698 - DNA, 25 bp, Homo sapien
atcatcttttcatagttttgatctg

SEQ ID NO: 2847699 - DNA, 25 bp, Homo sapien
tgtcatctgacactgcttagggctc

SEQ ID NO: 2847700 - DNA, 25 bp, Homo sapien
tacttagcatagtacccggcacaag

SEQ ID NO: 2847701 - DNA, 25 bp, Homo sapien
gaagcaagttcatatcccaagtttg

SEQ ID NO: 2847702 - DNA, 25 bp, Homo sapien
taccagtgcgtaggatgactccaaa

SEQ ID NO: 2847703 - DNA, 25 bp, Homo sapien
aaaactctatcattgaaagtgctgg

SEQ ID NO: 2847704 - DNA, 25 bp, Homo sapien
gcaaaaactctatcattgaaagtgc

SEQ ID NO: 2847705 - DNA, 25 bp, Homo sapien
aaactctatcattgaaagtgctggc

SEQ ID NO: 2847706 - DNA, 25 bp, Homo sapien
caaaaactctatcattgaaagtgct

SEQ ID NO: 2847707 - DNA, 25 bp, Homo sapien
tgtacagacggagaatacctgcatc

SEQ ID NO: 2847708 - DNA, 25 bp, Homo sapien
ggcatcttctacagtgtcaccagca

SEQ ID NO: 2847709 - DNA, 25 bp, Homo sapien
agcatcagccagagccaaacgcatt

SEQ ID NO: 2847710 - DNA, 25 bp, Homo sapien
tcacccactctacccaggtgtacag

SEQ ID NO: 2847711 - DNA, 25 bp, Homo sapien
gctgaaaatttgtcaatagcttggg

SEQ ID NO: 2847712 - DNA, 25 bp, Homo sapien
gaaaatttgtcaatagcttgggtca

SEQ ID NO: 2847713 - DNA, 25 bp, Homo sapien
tgaaaatttgtcaatagcttgggtc

SEQ ID NO: 2847714 - DNA, 25 bp, Homo sapien
aaaatttgtcaatagcttgggtcaa

SEQ ID NO: 2847715 - DNA, 25 bp, Homo sapien
cagcagaagcatagagaggactact

SEQ ID NO: 2847716 - DNA, 25 bp, Homo sapien
cagtagtgatagtaacagcagaagc

SEQ ID NO: 2847717 - DNA, 25 bp, Homo sapien
cttgggaaggagcattacgtgacat

SEQ ID NO: 2847718 - DNA, 25 bp, Homo sapien
gaggactactatactgcttgggaag

SEQ ID NO: 2847719 - DNA, 25 bp, Homo sapien
agactgagaccatcctggcgaacac

SEQ ID NO: 2847720 - DNA, 25 bp, Homo sapien
gatcatgagatcaggagactgagac

SEQ ID NO: 2847721 - DNA, 25 bp, Homo sapien
ggaggctgagggcagatcatgagat

SEQ ID NO: 2847722 - DNA, 25 bp, Homo sapien
gactgagaccatcctggcgaacacg

SEQ ID NO: 2847723 - DNA, 25 bp, Homo sapien
agatgtccatttgctctcacagctg

SEQ ID NO: 2847724 - DNA, 25 bp, Homo sapien
gaggagatgtccatttgctctcaca

SEQ ID NO: 2847725 - DNA, 25 bp, Homo sapien
ggagatgtccatttgctctcacagc

SEQ ID NO: 2847726 - DNA, 25 bp, Homo sapien
tcaggaggagatgtccatttgctct

SEQ ID NO: 2847727 - DNA, 25 bp, Homo sapien
tgaattactagcagaccagcaatgc

SEQ ID NO: 2847728 - DNA, 25 bp, Homo sapien
cagctactcggaagtgtgaggatca

SEQ ID NO: 2847729 - DNA, 25 bp, Homo sapien
gagatatgacatgctttggtgcctg

SEQ ID NO: 2847730 - DNA, 25 bp, Homo sapien
cagctacttgaggaactagagggaa

SEQ ID NO: 2847731 - DNA, 25 bp, Homo sapien
caatcaataaatctagtccacacct

SEQ ID NO: 2847732 - DNA, 25 bp, Homo sapien
tagtccacacctattttatcattca

SEQ ID NO: 2847733 - DNA, 25 bp, Homo sapien
aagccacaagacacccctattgaca

SEQ ID NO: 2847734 - DNA, 25 bp, Homo sapien
caagacacccctattgacaatcaat

SEQ ID NO: 2847735 - DNA, 25 bp, Homo sapien
gacgcgaagatcaacaggataccag

SEQ ID NO: 2847736 - DNA, 25 bp, Homo sapien
tttgttccggccacatagccacatg

SEQ ID NO: 2847737 - DNA, 25 bp, Homo sapien
aagatccttgccagagacgcgaaga

SEQ ID NO: 2847738 - DNA, 25 bp, Homo sapien
cctttgcaatctgagtcttaggaaa

SEQ ID NO: 2847739 - DNA, 25 bp, Homo sapien
aatcaaatatcacaactcttactga

SEQ ID NO: 2847740 - DNA, 25 bp, Homo sapien
atatcacaactcttactgacaaatt

SEQ ID NO: 2847741 - DNA, 25 bp, Homo sapien
tgacaaattatgctcctttccctta

SEQ ID NO: 2847742 - DNA, 25 bp, Homo sapien
cttactgacaaattatgctcctttc

SEQ ID NO: 2847743 - DNA, 25 bp, Homo sapien
ggtgtgcaactgtgtaaaatgccat

SEQ ID NO: 2847744 - DNA, 25 bp, Homo sapien
aagtgattcaatcagccactgctca

SEQ ID NO: 2847745 - DNA, 25 bp, Homo sapien
cccctgcaataggtgtgcaactgtg

SEQ ID NO: 2847746 - DNA, 25 bp, Homo sapien
tgccatgtaaatagtggagtcagaa

SEQ ID NO: 2847747 - DNA, 25 bp, Homo sapien
gttcttgagcaagcatgttcttgta

SEQ ID NO: 2847748 - DNA, 25 bp, Homo sapien
ggcttcaaaattcctcctggtctcc

SEQ ID NO: 2847749 - DNA, 25 bp, Homo sapien
tagccaacctaaggtggcttcaaaa

SEQ ID NO: 2847750 - DNA, 25 bp, Homo sapien
ttcaaaattcctcctggtctcctca

SEQ ID NO: 2847751 - DNA, 25 bp, Homo sapien
tgtttccacatttttcatctccttt

SEQ ID NO: 2847752 - DNA, 25 bp, Homo sapien
cctttttcctccttcatcactttct

SEQ ID NO: 2847753 - DNA, 25 bp, Homo sapien
tccttcatcactttctcccatctta

SEQ ID NO: 2847754 - DNA, 25 bp, Homo sapien
tttcctccttcatcactttctccca

SEQ ID NO: 2847755 - DNA, 25 bp, Homo sapien
caggttcttcaagcactgagatgtc

SEQ ID NO: 2847756 - DNA, 25 bp, Homo sapien
attctcttctccataatccaagtac

SEQ ID NO: 2847757 - DNA, 25 bp, Homo sapien
ctgagatgtctgtttcttccaattc

SEQ ID NO: 2847758 - DNA, 25 bp, Homo sapien
gtttccaggttcttcaagcactgag

SEQ ID NO: 2847759 - DNA, 25 bp, Homo sapien
agccacaacacattcatctgacgac

SEQ ID NO: 2847760 - DNA, 25 bp, Homo sapien
tggttccatgtaaataagtgcatct

SEQ ID NO: 2847761 - DNA, 25 bp, Homo sapien
ctggacatcacttgtttctctggtt

SEQ ID NO: 2847762 - DNA, 25 bp, Homo sapien
gtttctctggttccatgtaaataag

SEQ ID NO: 2847763 - DNA, 25 bp, Homo sapien
tggacatcacttgtttctctggttc

SEQ ID NO: 2847764 - DNA, 25 bp, Homo sapien
tcatgtgacccttctacttcacact

SEQ ID NO: 2847765 - DNA, 25 bp, Homo sapien
tgtgcacagccctatggcagctttt

SEQ ID NO: 2847766 - DNA, 25 bp, Homo sapien
ggcacatgtcaacccacccagttaa

SEQ ID NO: 2847767 - DNA, 25 bp, Homo sapien
ttaatgctatgatgatcctaaacat

SEQ ID NO: 2847768 - DNA, 25 bp, Homo sapien
agataaggtgagactgaaaagaaga

SEQ ID NO: 2847769 - DNA, 25 bp, Homo sapien
aagtcatttaaagaagtgggtatct

SEQ ID NO: 2847770 - DNA, 25 bp, Homo sapien
agagagagataaggtgagactgaaa

SEQ ID NO: 2847771 - DNA, 25 bp, Homo sapien
gagagataaggtgagactgaaaaga

SEQ ID NO: 2847772 - DNA, 25 bp, Homo sapien
ggaattagaggcagacactaccatg

SEQ ID NO: 2847773 - DNA, 25 bp, Homo sapien
gcctggccacctagaccttttgagc

SEQ ID NO: 2847774 - DNA, 25 bp, Homo sapien
catactagatgttggtacacattcc

SEQ ID NO: 2847775 - DNA, 25 bp, Homo sapien
ccttttgagctagagattggcagaa

SEQ ID NO: 2847776 - DNA, 25 bp, Homo sapien
ataggtctattttctgccgcaaaac

SEQ ID NO: 2847777 - DNA, 25 bp, Homo sapien
gaaaggattgtaactaccagtatct

SEQ ID NO: 2847778 - DNA, 25 bp, Homo sapien
tcaaagttctctacacatgctatgc

SEQ ID NO: 2847779 - DNA, 25 bp, Homo sapien
catgctatgcacacatcgactttaa

SEQ ID NO: 2847780 - DNA, 25 bp, Homo sapien
aacagccttcagagcatagcctatc

SEQ ID NO: 2847781 - DNA, 25 bp, Homo sapien
taacactgtcaagtctattaacagc

SEQ ID NO: 2847782 - DNA, 25 bp, Homo sapien
tgctaataacactgtcaagtctatt

SEQ ID NO: 2847783 - DNA, 25 bp, Homo sapien
cttcagagcatagcctatcacatac

SEQ ID NO: 2847784 - DNA, 25 bp, Homo sapien
tctgtcctttaaatccatccaccaa

SEQ ID NO: 2847785 - DNA, 25 bp, Homo sapien
gaaccttctgtcctttaaatccatc

SEQ ID NO: 2847786 - DNA, 25 bp, Homo sapien
tcttgaaccttctgtcctttaaatc

SEQ ID NO: 2847787 - DNA, 25 bp, Homo sapien
ttttctgaatagtcttctttacatc

SEQ ID NO: 2847788 - DNA, 25 bp, Homo sapien
cccggtcattctggctctgaatttt

SEQ ID NO: 2847789 - DNA, 25 bp, Homo sapien
gcttctgcaagtttttcccggtcat

SEQ ID NO: 2847790 - DNA, 25 bp, Homo sapien
aatccttttagatatatcttctcct

SEQ ID NO: 2847791 - DNA, 25 bp, Homo sapien
gtttttcccggtcattctggctctg

SEQ ID NO: 2847792 - DNA, 25 bp, Homo sapien
aagaccatgtcatctctaattccat

SEQ ID NO: 2847793 - DNA, 25 bp, Homo sapien
caagaccatgtcatctctaattcca

SEQ ID NO: 2847794 - DNA, 25 bp, Homo sapien
gcaagaccatgtcatctctaattcc

SEQ ID NO: 2847795 - DNA, 25 bp, Homo sapien
gaaggaacacttgtaaccacaccag

SEQ ID NO: 2847796 - DNA, 25 bp, Homo sapien
gcagcaatatcatcaggggagtcgg

SEQ ID NO: 2847797 - DNA, 25 bp, Homo sapien
ttcttcaagtctctgagggcagcaa

SEQ ID NO: 2847798 - DNA, 25 bp, Homo sapien
ttcaagtctctgagggcagcaatat

SEQ ID NO: 2847799 - DNA, 25 bp, Homo sapien
accttgtatgatgttaaaggtgcag

SEQ ID NO: 2847800 - DNA, 25 bp, Homo sapien
taatagttagcattgggagaacata

SEQ ID NO: 2847801 - DNA, 25 bp, Homo sapien
aaggtgcagaaagtgatgcaccaag

SEQ ID NO: 2847802 - DNA, 25 bp, Homo sapien
ggagaacatagatcaccttgtatga

SEQ ID NO: 2847803 - DNA, 25 bp, Homo sapien
ttgtctgcccaaacatggtctcagg

SEQ ID NO: 2847804 - DNA, 25 bp, Homo sapien
taattccttaacaacaggcaccacg

SEQ ID NO: 2847805 - DNA, 25 bp, Homo sapien
tgtacttcatatcaggacgaaccca

SEQ ID NO: 2847806 - DNA, 25 bp, Homo sapien
tcaggtctgagagtagcagccacca

SEQ ID NO: 2847807 - DNA, 25 bp, Homo sapien
taaagtatattcctgaggtccaaca

SEQ ID NO: 2847808 - DNA, 25 bp, Homo sapien
aagtatattcctgaggtccaacacc

SEQ ID NO: 2847809 - DNA, 25 bp, Homo sapien
atttagatgggtatggctcaagcac

SEQ ID NO: 2847810 - DNA, 25 bp, Homo sapien
tcaagcaccttcaatttgagtaaag

SEQ ID NO: 2847811 - DNA, 25 bp, Homo sapien
ctatcatgatccatgcaaggctgtc

SEQ ID NO: 2847812 - DNA, 25 bp, Homo sapien
tttgtctatcatgatccatgcaagg

SEQ ID NO: 2847813 - DNA, 25 bp, Homo sapien
ccagtttgtctatcatgatccatgc

SEQ ID NO: 2847814 - DNA, 25 bp, Homo sapien
tgtctatcatgatccatgcaaggct

SEQ ID NO: 2847815 - DNA, 25 bp, Homo sapien
taatgttaaaaattgccatctgaca

SEQ ID NO: 2847816 - DNA, 25 bp, Homo sapien
tggtgatgaaggaacgacgccagtc

SEQ ID NO: 2847817 - DNA, 25 bp, Homo sapien
tagtaaggattaacatcagtggtga

SEQ ID NO: 2847818 - DNA, 25 bp, Homo sapien
aaaattgccatctgacaaatgaatc

SEQ ID NO: 2847819 - DNA, 25 bp, Homo sapien
ctgaatagccagtggcgggaaataa

SEQ ID NO: 2847820 - DNA, 25 bp, Homo sapien
tgccccactggtatttagaagatcc

SEQ ID NO: 2847821 - DNA, 25 bp, Homo sapien
gccagtggcgggaaataatcaagcc

SEQ ID NO: 2847822 - DNA, 25 bp, Homo sapien
caagggatttcataatgccccactg

SEQ ID NO: 2847823 - DNA, 25 bp, Homo sapien
tgtgctagtactgggaatgcacata

SEQ ID NO: 2847824 - DNA, 25 bp, Homo sapien
cactgtgctagtactgggaatgcac

SEQ ID NO: 2847825 - DNA, 25 bp, Homo sapien
gctagtactgggaatgcacatataa

SEQ ID NO: 2847826 - DNA, 25 bp, Homo sapien
gtactgggaatgcacatataaatca

SEQ ID NO: 2847827 - DNA, 25 bp, Homo sapien
tggaaaatcaggggggcaaccatac

SEQ ID NO: 2847828 - DNA, 25 bp, Homo sapien
atcaggggggcaaccatacagctct

SEQ ID NO: 2847829 - DNA, 25 bp, Homo sapien
aggggggcaaccatacagctctatt

SEQ ID NO: 2847830 - DNA, 25 bp, Homo sapien
aaatcaggggggcaaccatacagct

SEQ ID NO: 2847831 - DNA, 25 bp, Homo sapien
ttaataggcattccagtacagtgca

SEQ ID NO: 2847832 - DNA, 25 bp, Homo sapien
cctttcaatcgctggtaccctacag

SEQ ID NO: 2847833 - DNA, 25 bp, Homo sapien
tttcctttcaatcgctggtacccta

SEQ ID NO: 2847834 - DNA, 25 bp, Homo sapien
taataggcattccagtacagtgcag

SEQ ID NO: 2847835 - DNA, 25 bp, Homo sapien
aacgtgtgtcccaaatgaaggcgtc

SEQ ID NO: 2847836 - DNA, 25 bp, Homo sapien
tgtgtcccaaatgaaggcgtccatt

SEQ ID NO: 2847837 - DNA, 25 bp, Homo sapien
aggcgtccattcatatatggatatg

SEQ ID NO: 2847838 - DNA, 25 bp, Homo sapien
tatggatatgggaaggttacaaaat

SEQ ID NO: 2847839 - DNA, 25 bp, Homo sapien
ccacaagagataaccgacattctga

SEQ ID NO: 2847840 - DNA, 25 bp, Homo sapien
tatgaatccactgaaactacctgtt

SEQ ID NO: 2847841 - DNA, 25 bp, Homo sapien
gtttgcacacttggcagcaccctta

SEQ ID NO: 2847842 - DNA, 25 bp, Homo sapien
tgtaaacacaccatctgacttatga

SEQ ID NO: 2847843 - DNA, 25 bp, Homo sapien
aatttcgttttatcagtcagcaaag

SEQ ID NO: 2847844 - DNA, 25 bp, Homo sapien
tggagataataatcgtctatgagtc

SEQ ID NO: 2847845 - DNA, 25 bp, Homo sapien
tcatgtcatgatctacgtttgtctt

SEQ ID NO: 2847846 - DNA, 25 bp, Homo sapien
tattttagtatcaaggcaatgcagt

SEQ ID NO: 2847847 - DNA, 25 bp, Homo sapien
cactctctcagtatcccatttctgt

SEQ ID NO: 2847848 - DNA, 25 bp, Homo sapien
tctaaattagatgcattgacctcaa

SEQ ID NO: 2847849 - DNA, 25 bp, Homo sapien
tgtttctctaaattagatgcattga

SEQ ID NO: 2847850 - DNA, 25 bp, Homo sapien
ttgacctcaaacactctctcagtat

SEQ ID NO: 2847851 - DNA, 25 bp, Homo sapien
caaagtctctacgaaaggcacgcct

SEQ ID NO: 2847852 - DNA, 25 bp, Homo sapien
cggctctccacctcgattttagaaa

SEQ ID NO: 2847853 - DNA, 25 bp, Homo sapien
atggagagcccctagagactggcca

SEQ ID NO: 2847854 - DNA, 25 bp, Homo sapien
taagcgtggctctcttttagaaaag

SEQ ID NO: 2847855 - DNA, 25 bp, Homo sapien
aatccacgacaatgaccctggcgac

SEQ ID NO: 2847856 - DNA, 25 bp, Homo sapien
tgaccctggcgacctccacaaagga

SEQ ID NO: 2847857 - DNA, 25 bp, Homo sapien
tgtgcaaatccacgacaatgaccct

SEQ ID NO: 2847858 - DNA, 25 bp, Homo sapien
cagccgactgtgcaaatccacgaca

SEQ ID NO: 2847859 - DNA, 25 bp, Homo sapien
gcaatcatccggctccttactaact

SEQ ID NO: 2847860 - DNA, 25 bp, Homo sapien
aatcatccggctccttactaactac

SEQ ID NO: 2847861 - DNA, 25 bp, Homo sapien
ctgctgaggcaatcatccggctcct

SEQ ID NO: 2847862 - DNA, 25 bp, Homo sapien
tgaggcaatcatccggctccttact

SEQ ID NO: 2847863 - DNA, 25 bp, Homo sapien
ttctgcaagtgggaaaggtctaagt

SEQ ID NO: 2847864 - DNA, 25 bp, Homo sapien
gatccatattcagaaacatgtaaat

SEQ ID NO: 2847865 - DNA, 25 bp, Homo sapien
tcctaaagcaagtaaatggtaatgg

SEQ ID NO: 2847866 - DNA, 25 bp, Homo sapien
ggtgtaggaccttactctttgatct

SEQ ID NO: 2847867 - DNA, 25 bp, Homo sapien
tgaaggttcctataacgtcagagaa

SEQ ID NO: 2847868 - DNA, 25 bp, Homo sapien
gatcattagactccttgaaggttcc

SEQ ID NO: 2847869 - DNA, 25 bp, Homo sapien
gaaactttattatccatacccagca

SEQ ID NO: 2847870 - DNA, 25 bp, Homo sapien
gttttgcccattcctaacatataga

SEQ ID NO: 2847871 - DNA, 25 bp, Homo sapien
tatcattttgcaagtaggtcagaag

SEQ ID NO: 2847872 - DNA, 25 bp, Homo sapien
tatagccgctgtgtactctgttgta

SEQ ID NO: 2847873 - DNA, 25 bp, Homo sapien
ctagcagtgtacaagatgtcctgtt

SEQ ID NO: 2847874 - DNA, 25 bp, Homo sapien
tctcttccataaggtaggactcatt

SEQ ID NO: 2847875 - DNA, 25 bp, Homo sapien
tggtagatctcagtacagacagttc

SEQ ID NO: 2847876 - DNA, 25 bp, Homo sapien
gcatttttatatctgcgggagggtc

SEQ ID NO: 2847877 - DNA, 25 bp, Homo sapien
tatatgcaaataccaccaccctgtt

SEQ ID NO: 2847878 - DNA, 25 bp, Homo sapien
tttcaagaactcagacacagcgtcc

SEQ ID NO: 2847879 - DNA, 25 bp, Homo sapien
tcactgtccaagataaaaaggtaac

SEQ ID NO: 2847880 - DNA, 25 bp, Homo sapien
gcatctaaagcaagttctgtccctc

SEQ ID NO: 2847881 - DNA, 25 bp, Homo sapien
gacagtttaaacgtgatagagggaa

SEQ ID NO: 2847882 - DNA, 25 bp, Homo sapien
taatagccaccagttgactaggtca

SEQ ID NO: 2847883 - DNA, 25 bp, Homo sapien
tatgcttcatagacttagggtagca

SEQ ID NO: 2847884 - DNA, 25 bp, Homo sapien
tggtaacagtagatggcttcacttg

SEQ ID NO: 2847885 - DNA, 25 bp, Homo sapien
gaggttttgattatcatcactggca

SEQ ID NO: 2847886 - DNA, 25 bp, Homo sapien
gtctgttttacaaccatggaggatt

SEQ ID NO: 2847887 - DNA, 25 bp, Homo sapien
tatttagtctggctgttgcaaaggc

SEQ ID NO: 2847888 - DNA, 25 bp, Homo sapien
ggcttgagggttatccagggcatca

SEQ ID NO: 2847889 - DNA, 25 bp, Homo sapien
agcaaaccttctcagtcgtccaggc

SEQ ID NO: 2847890 - DNA, 25 bp, Homo sapien
ctgcagcagagtcaaagcaaacctt

SEQ ID NO: 2847891 - DNA, 25 bp, Homo sapien
aactgtaatgaagaaggatttggat

SEQ ID NO: 2847892 - DNA, 25 bp, Homo sapien
catctgaaagggtggtttcttcatc

SEQ ID NO: 2847893 - DNA, 25 bp, Homo sapien
tacaattggtgtctgggtgagagta

SEQ ID NO: 2847894 - DNA, 25 bp, Homo sapien
gatttggatgaaggttacattctca

SEQ ID NO: 2847895 - DNA, 25 bp, Homo sapien
cagctaggtctgtggttggaactaa

SEQ ID NO: 2847896 - DNA, 25 bp, Homo sapien
ggtctgtggttggaactaaaatctg

SEQ ID NO: 2847897 - DNA, 25 bp, Homo sapien
cttcagctaggtctgtggttggaac

SEQ ID NO: 2847898 - DNA, 25 bp, Homo sapien
gctaggtctgtggttggaactaaaa

SEQ ID NO: 2847899 - DNA, 25 bp, Homo sapien
tgctgggcccctgtgtaggaaaagt

SEQ ID NO: 2847900 - DNA, 25 bp, Homo sapien
tctgttctttgcttctcgtctgcca

SEQ ID NO: 2847901 - DNA, 25 bp, Homo sapien
aaagtctgttctttgcttctcgtct

SEQ ID NO: 2847902 - DNA, 25 bp, Homo sapien
ctgctgggcccctgtgtaggaaaag

SEQ ID NO: 2847903 - DNA, 25 bp, Homo sapien
cctcgatcagattgtacaatggaac

SEQ ID NO: 2847904 - DNA, 25 bp, Homo sapien
gatgcctggacgtttagctcatgaa

SEQ ID NO: 2847905 - DNA, 25 bp, Homo sapien
aatgaataagagcatcaagccaggt

SEQ ID NO: 2847906 - DNA, 25 bp, Homo sapien
gctcatgaataattgactgtctggg

SEQ ID NO: 2847907 - DNA, 25 bp, Homo sapien
tcaaccatgaatgagtcatcactgt

SEQ ID NO: 2847908 - DNA, 25 bp, Homo sapien
ccatttccaaaggttcaaccatgaa

SEQ ID NO: 2847909 - DNA, 25 bp, Homo sapien
ggttcaaccatgaatgagtcatcac

SEQ ID NO: 2847910 - DNA, 25 bp, Homo sapien
caaaggttcaaccatgaatgagtca

SEQ ID NO: 2847911 - DNA, 25 bp, Homo sapien
gcccagaacaatcgccgctgtctga

SEQ ID NO: 2847912 - DNA, 25 bp, Homo sapien
tttcatgtcgcccagaacaatcgcc

SEQ ID NO: 2847913 - DNA, 25 bp, Homo sapien
atgtttttttcatgtcgcccagaac

SEQ ID NO: 2847914 - DNA, 25 bp, Homo sapien
gacaggcactagcttcatgtttttt

SEQ ID NO: 2847915 - DNA, 25 bp, Homo sapien
gagagaaccggaaatctgcctccat

SEQ ID NO: 2847916 - DNA, 25 bp, Homo sapien
catgttcgggctctggagagaaccg

SEQ ID NO: 2847917 - DNA, 25 bp, Homo sapien
taagaagagccttcgcatgttcggg

SEQ ID NO: 2847918 - DNA, 25 bp, Homo sapien
gctccagaaggacgcgcttttgcgg

SEQ ID NO: 2847919 - DNA, 25 bp, Homo sapien
cactcttcggcttgcttcaggaagc

SEQ ID NO: 2847920 - DNA, 25 bp, Homo sapien
gctgcagcccggtcagcgaagcgct

SEQ ID NO: 2847921 - DNA, 25 bp, Homo sapien
atgtggtttccccaggattgtgtag

SEQ ID NO: 2847922 - DNA, 25 bp, Homo sapien
tgagtgcgccggaacggcgccgtcg

SEQ ID NO: 2847923 - DNA, 25 bp, Homo sapien
acttgtaccaagagaaagtgaagtc

SEQ ID NO: 2847924 - DNA, 25 bp, Homo sapien
agactcagctgagagtttctttaac

SEQ ID NO: 2847925 - DNA, 25 bp, Homo sapien
gctgagagtttctttaacttgtacc

SEQ ID NO: 2847926 - DNA, 25 bp, Homo sapien
taccaagagaaagtgaagtcagtat

SEQ ID NO: 2847927 - DNA, 25 bp, Homo sapien
gaacgaagtattctctccctgggag

SEQ ID NO: 2847928 - DNA, 25 bp, Homo sapien
ctctcggagtggttgtcacgggcaa

SEQ ID NO: 2847929 - DNA, 25 bp, Homo sapien
ccctgggagtgcctggtgcgaatac

SEQ ID NO: 2847930 - DNA, 25 bp, Homo sapien
tcacgggcaagacggaagcttaaaa

SEQ ID NO: 2847931 - DNA, 25 bp, Homo sapien
tatccttgaatagccacacactggg

SEQ ID NO: 2847932 - DNA, 25 bp, Homo sapien
tacataattctcacacgggtccaaa

SEQ ID NO: 2847933 - DNA, 25 bp, Homo sapien
ggtgcagattgaggtgaaccagtta

SEQ ID NO: 2847934 - DNA, 25 bp, Homo sapien
cgggtccaaagaaacactgcaatat

SEQ ID NO: 2847935 - DNA, 25 bp, Homo sapien
cattgagccgagatcgtgtcattgc

SEQ ID NO: 2847936 - DNA, 25 bp, Homo sapien
attgagccgagatcgtgtcattgca

SEQ ID NO: 2847937 - DNA, 25 bp, Homo sapien
agccgagatcgtgtcattgcactcc

SEQ ID NO: 2847938 - DNA, 25 bp, Homo sapien
cgagatcgtgtcattgcactccagc

SEQ ID NO: 2847939 - DNA, 25 bp, Homo sapien
gaaagcccctgcaatatccaaacag

SEQ ID NO: 2847940 - DNA, 25 bp, Homo sapien
tggcaaattcaggaacagcacagag

SEQ ID NO: 2847941 - DNA, 25 bp, Homo sapien
aactcagaaacctggaaggctggca

SEQ ID NO: 2847942 - DNA, 25 bp, Homo sapien
tgtcctcatgtctcctgtgcggtgt

SEQ ID NO: 2847943 - DNA, 25 bp, Homo sapien
gagcagggtacaggagaatccccag

SEQ ID NO: 2847944 - DNA, 25 bp, Homo sapien
tgtacttcctatgggctccaccgta

SEQ ID NO: 2847945 - DNA, 25 bp, Homo sapien
tgtgtagactaatcaactggagcag

SEQ ID NO: 2847946 - DNA, 25 bp, Homo sapien
gacccatgggacactcaactagtta

SEQ ID NO: 2847947 - DNA, 25 bp, Homo sapien
tatctcaagtactgagcatggtggc

SEQ ID NO: 2847948 - DNA, 25 bp, Homo sapien
ctcagatatctcaagtactgagcat

SEQ ID NO: 2847949 - DNA, 25 bp, Homo sapien
cagatatctcaagtactgagcatgg

SEQ ID NO: 2847950 - DNA, 25 bp, Homo sapien
gatatctcaagtactgagcatggtg

SEQ ID NO: 2847951 - DNA, 25 bp, Homo sapien
gatggcttctggctgaacccttgga

SEQ ID NO: 2847952 - DNA, 25 bp, Homo sapien
ccatcagagtggtccaaaaattgga

SEQ ID NO: 2847953 - DNA, 25 bp, Homo sapien
gagtttgacttaatctctgtggcca

SEQ ID NO: 2847954 - DNA, 25 bp, Homo sapien
taaagtccccaatactggtcatagc

SEQ ID NO: 2847955 - DNA, 25 bp, Homo sapien
ggcttgtaaatatacccgatttgga

SEQ ID NO: 2847956 - DNA, 25 bp, Homo sapien
ccatggtctgaagaaggacctgtgg

SEQ ID NO: 2847957 - DNA, 25 bp, Homo sapien
tcagatgccagctgtacgttgccat

SEQ ID NO: 2847958 - DNA, 25 bp, Homo sapien
gccactgttttagcctgagggccct

SEQ ID NO: 2847959 - DNA, 25 bp, Homo sapien
gagagtgtaacagctcagccccttt

SEQ ID NO: 2847960 - DNA, 25 bp, Homo sapien
gcactatccttggttacaaagagcc

SEQ ID NO: 2847961 - DNA, 25 bp, Homo sapien
taagggatgtcactagcatgaatgg

SEQ ID NO: 2847962 - DNA, 25 bp, Homo sapien
gacaagcccctttcatggacagtgt

SEQ ID NO: 2847963 - DNA, 25 bp, Homo sapien
gaccaagcaagtaggaagaggctcc

SEQ ID NO: 2847964 - DNA, 25 bp, Homo sapien
tcatagaccaagcaagtaggaagag

SEQ ID NO: 2847965 - DNA, 25 bp, Homo sapien
catagaccaagcaagtaggaagagg

SEQ ID NO: 2847966 - DNA, 25 bp, Homo sapien
tagaccaagcaagtaggaagaggct

SEQ ID NO: 2847967 - DNA, 25 bp, Homo sapien
gaagggagacacgaaacctctctgc

SEQ ID NO: 2847968 - DNA, 25 bp, Homo sapien
tatttgatgcagtggccagtcaaca

SEQ ID NO: 2847969 - DNA, 25 bp, Homo sapien
gctgacgtgcttcccctagaaccga

SEQ ID NO: 2847970 - DNA, 25 bp, Homo sapien
aatgggtcagcaaccctatgcataa

SEQ ID NO: 2847971 - DNA, 25 bp, Homo sapien
cattaaagttttgacgctgctgaga

SEQ ID NO: 2847972 - DNA, 25 bp, Homo sapien
catgtggtagacagtccctcggtcc

SEQ ID NO: 2847973 - DNA, 25 bp, Homo sapien
gctgagagcccatgtggtagacagt

SEQ ID NO: 2847974 - DNA, 25 bp, Homo sapien
cagtccctcggtcctactttcaaat

SEQ ID NO: 2847975 - DNA, 25 bp, Homo sapien
acagtgacacggagagagctgccaa

SEQ ID NO: 2847976 - DNA, 25 bp, Homo sapien
cttcaggaccctctggtgggttgga

SEQ ID NO: 2847977 - DNA, 25 bp, Homo sapien
cagctatgacacacgtttgaagagc

SEQ ID NO: 2847978 - DNA, 25 bp, Homo sapien
aggacaagaaaatcagctatgacac

SEQ ID NO: 2847979 - DNA, 25 bp, Homo sapien
ggacagagagttccccaatgcaagg

SEQ ID NO: 2847980 - DNA, 25 bp, Homo sapien
aagaggttcttggataggacagaga

SEQ ID NO: 2847981 - DNA, 25 bp, Homo sapien
taggctaagctatctgtgtaaggaa

SEQ ID NO: 2847982 - DNA, 25 bp, Homo sapien
cagttggtccaagtagaaggtgtat

SEQ ID NO: 2847983 - DNA, 25 bp, Homo sapien
gggcgccttgcccaatagcaaagaa

SEQ ID NO: 2847984 - DNA, 25 bp, Homo sapien
ccccatttcgaagattgatggaaag

SEQ ID NO: 2847985 - DNA, 25 bp, Homo sapien
tctagccaataggagacgtcgggtc

SEQ ID NO: 2847986 - DNA, 25 bp, Homo sapien
gaaagtttgaccaaccgcatctcag

SEQ ID NO: 2847987 - DNA, 25 bp, Homo sapien
gccatgtggagatccggggcggacg

SEQ ID NO: 2847988 - DNA, 25 bp, Homo sapien
ctgccatgtggagatccggggcgga

SEQ ID NO: 2847989 - DNA, 25 bp, Homo sapien
catgtggagatccggggcggacggt

SEQ ID NO: 2847990 - DNA, 25 bp, Homo sapien
tgtggagatccggggcggacggtgg

SEQ ID NO: 2847991 - DNA, 25 bp, Homo sapien
cataagcttaggaagtgctctgcga

SEQ ID NO: 2847992 - DNA, 25 bp, Homo sapien
gccagtgctctagagttgggtaaaa

SEQ ID NO: 2847993 - DNA, 25 bp, Homo sapien
ttggtgaggagagaacccataagct

SEQ ID NO: 2847994 - DNA, 25 bp, Homo sapien
gacttacctagtccttgagtctggt

SEQ ID NO: 2847995 - DNA, 25 bp, Homo sapien
cagcaaatctataatctaccttcaa

SEQ ID NO: 2847996 - DNA, 25 bp, Homo sapien
caatgtgccagatatgtattttagt

SEQ ID NO: 2847997 - DNA, 25 bp, Homo sapien
catttcagtttatggctctatcaaa

SEQ ID NO: 2847998 - DNA, 25 bp, Homo sapien
catgtaggtctaatcatggacttga

SEQ ID NO: 2847999 - DNA, 25 bp, Homo sapien
gaattcttatcttccagaggctaca

SEQ ID NO: 2848000 - DNA, 25 bp, Homo sapien
tatcccctctgaattatagaccgag

SEQ ID NO: 2848001 - DNA, 25 bp, Homo sapien
cacggtcataactaacatgttggcc

SEQ ID NO: 2848002 - DNA, 25 bp, Homo sapien
tctcaggtatggaaccacggtcata

SEQ ID NO: 2848003 - DNA, 25 bp, Homo sapien
tgtgaaatacaatttagtaggtaaa

SEQ ID NO: 2848004 - DNA, 25 bp, Homo sapien
gctttgacagaacctctactgcagg

SEQ ID NO: 2848005 - DNA, 25 bp, Homo sapien
taggtaaaattaggactagcaggtc

SEQ ID NO: 2848006 - DNA, 25 bp, Homo sapien
gccggtccactacagggctggtcct

SEQ ID NO: 2848007 - DNA, 25 bp, Homo sapien
taatcactttgacagcaacatcttt

SEQ ID NO: 2848008 - DNA, 25 bp, Homo sapien
gcaatattgataagcagcagtacaa

SEQ ID NO: 2848009 - DNA, 25 bp, Homo sapien
tattacttctaacatggttctctac

SEQ ID NO: 2848010 - DNA, 25 bp, Homo sapien
gggaagccaagttctaattctgaaa

SEQ ID NO: 2848011 - DNA, 25 bp, Homo sapien
aactgctctacgtcaggaaggatgg

SEQ ID NO: 2848012 - DNA, 25 bp, Homo sapien
gaagaccctctgagttgccagctgg

SEQ ID NO: 2848013 - DNA, 25 bp, Homo sapien
cagctggtgtttcctgagactctga

SEQ ID NO: 2848014 - DNA, 25 bp, Homo sapien
tcctgtacagaagggactgtgtccc

SEQ ID NO: 2848015 - DNA, 25 bp, Homo sapien
caacgattgtcaggctcttggctgc

SEQ ID NO: 2848016 - DNA, 25 bp, Homo sapien
gatactcacttgcttggctgggtca

SEQ ID NO: 2848017 - DNA, 25 bp, Homo sapien
ggtgctaaagaaccattccggcagg

SEQ ID NO: 2848018 - DNA, 25 bp, Homo sapien
cgtagctcggataggtgcagaaaac

SEQ ID NO: 2848019 - DNA, 25 bp, Homo sapien
agttagagtctgcaaaggcagctgc

SEQ ID NO: 2848020 - DNA, 25 bp, Homo sapien
ttagagtctgcaaaggcagctgcca

SEQ ID NO: 2848021 - DNA, 25 bp, Homo sapien
ctggagttagagtctgcaaaggcag

SEQ ID NO: 2848022 - DNA, 25 bp, Homo sapien
agagtctgcaaaggcagctgccagc

SEQ ID NO: 2848023 - DNA, 25 bp, Homo sapien
cagcttcttacagaagttagattct

SEQ ID NO: 2848024 - DNA, 25 bp, Homo sapien
acagcttcttacagaagttagattc

SEQ ID NO: 2848025 - DNA, 25 bp, Homo sapien
gggaccttcctgagtgacatgtcca

SEQ ID NO: 2848026 - DNA, 25 bp, Homo sapien
gaaaggccataatacacagtcagtg

SEQ ID NO: 2848027 - DNA, 25 bp, Homo sapien
gtttcactcctacacgcaatgttgg

SEQ ID NO: 2848028 - DNA, 25 bp, Homo sapien
gaggcttcctttctctagtccccag

SEQ ID NO: 2848029 - DNA, 25 bp, Homo sapien
ggagtgttgttccagaatacaggtg

SEQ ID NO: 2848030 - DNA, 25 bp, Homo sapien
agtgttgttccagaatacaggtgca

SEQ ID NO: 2848031 - DNA, 25 bp, Homo sapien
tgttgttccagaatacaggtgcaag

SEQ ID NO: 2848032 - DNA, 25 bp, Homo sapien
ctggagtgttgttccagaatacagg

SEQ ID NO: 2848033 - DNA, 25 bp, Homo sapien
ctgttggttatgtagccctgaagtc

SEQ ID NO: 2848034 - DNA, 25 bp, Homo sapien
gtggctactcctacaagagacctcc

SEQ ID NO: 2848035 - DNA, 25 bp, Homo sapien
agacctccctcctacttttgctgtt

SEQ ID NO: 2848036 - DNA, 25 bp, Homo sapien
gtctgagtggctactcctacaagag

SEQ ID NO: 2848037 - DNA, 25 bp, Homo sapien
cagcaccaacgagagtggtttccat

SEQ ID NO: 2848038 - DNA, 25 bp, Homo sapien
ggccggtgtgattgtgatgctctct

SEQ ID NO: 2848039 - DNA, 25 bp, Homo sapien
tcttcagcaccaacgagagtggttt

SEQ ID NO: 2848040 - DNA, 25 bp, Homo sapien
tctcttcagcaccaacgagagtggt

SEQ ID NO: 2848041 - DNA, 25 bp, Homo sapien
acagaatccagcaggtggaatggca

SEQ ID NO: 2848042 - DNA, 25 bp, Homo sapien
tacagaatccagcaggtggaatggc

SEQ ID NO: 2848043 - DNA, 25 bp, Homo sapien
cagaatccagcaggtggaatggcat

SEQ ID NO: 2848044 - DNA, 25 bp, Homo sapien
tatttgagtgaaacagaatttctgg

SEQ ID NO: 2848045 - DNA, 25 bp, Homo sapien
tccaagttgtatttgagtgaaacag

SEQ ID NO: 2848046 - DNA, 25 bp, Homo sapien
tctcagttttcgtgaattcagcttg

SEQ ID NO: 2848047 - DNA, 25 bp, Homo sapien
taattctcagttttcgtgaattcag

SEQ ID NO: 2848048 - DNA, 25 bp, Homo sapien
ccaggtaggtacacataaatttgac

SEQ ID NO: 2848049 - DNA, 25 bp, Homo sapien
tcattggtggcaaatgtccctgacg

SEQ ID NO: 2848050 - DNA, 25 bp, Homo sapien
gacgtaaacacttggttctgatctg

SEQ ID NO: 2848051 - DNA, 25 bp, Homo sapien
tagactacccaacgctcattggtgg

SEQ ID NO: 2848052 - DNA, 25 bp, Homo sapien
ttgaataacatgttggttatgtgta

SEQ ID NO: 2848053 - DNA, 25 bp, Homo sapien
gaataacatgttggttatgtgtagc

SEQ ID NO: 2848054 - DNA, 25 bp, Homo sapien
gtgtagcatgctggttatgtgtagc

SEQ ID NO: 2848055 - DNA, 25 bp, Homo sapien
aataacatgttggttatgtgtagca

SEQ ID NO: 2848056 - DNA, 25 bp, Homo sapien
tgtagtgtgctggttacgcgtagca

SEQ ID NO: 2848057 - DNA, 25 bp, Homo sapien
gtgtagtgtgctggttacgcgtagc

SEQ ID NO: 2848058 - DNA, 25 bp, Homo sapien
tagtgtgctggttacgcgtagcatc

SEQ ID NO: 2848059 - DNA, 25 bp, Homo sapien
gtagtgtgctggttacgcgtagcat

SEQ ID NO: 2848060 - DNA, 25 bp, Homo sapien
caaggataatgaattccgagatgat

SEQ ID NO: 2848061 - DNA, 25 bp, Homo sapien
atttctacaaggataatgaattccg

SEQ ID NO: 2848062 - DNA, 25 bp, Homo sapien
atgaattccgagatgattccctgag

SEQ ID NO: 2848063 - DNA, 25 bp, Homo sapien
cagctgggaagcatcctccatttct

SEQ ID NO: 2848064 - DNA, 25 bp, Homo sapien
tctcttgggacaccgtgggattcat

SEQ ID NO: 2848065 - DNA, 25 bp, Homo sapien
caaccccgtgctggtcaaagtgaag

SEQ ID NO: 2848066 - DNA, 25 bp, Homo sapien
tactgttcttggtgaagcctctcca

SEQ ID NO: 2848067 - DNA, 25 bp, Homo sapien
gagtcatgatccatgcctgaaatgg

SEQ ID NO: 2848068 - DNA, 25 bp, Homo sapien
aggccattccgcagtgtatttcaga

SEQ ID NO: 2848069 - DNA, 25 bp, Homo sapien
gcctttttcctgttagagtccagca

SEQ ID NO: 2848070 - DNA, 25 bp, Homo sapien
tcacgagaatagcaccaagaagatg

SEQ ID NO: 2848071 - DNA, 25 bp, Homo sapien
tccagcatagactgaaaggccattc

SEQ ID NO: 2848072 - DNA, 25 bp, Homo sapien
gatgcagtcctcatggaactaaggg

SEQ ID NO: 2848073 - DNA, 25 bp, Homo sapien
caggagtggcctaaacaatgatgca

SEQ ID NO: 2848074 - DNA, 25 bp, Homo sapien
catcttataagcttcctgtgggcaa

SEQ ID NO: 2848075 - DNA, 25 bp, Homo sapien
gaaggtaatgcatcaggcagggaca

SEQ ID NO: 2848076 - DNA, 25 bp, Homo sapien
tccacgctagggaaaataatcaagc

SEQ ID NO: 2848077 - DNA, 25 bp, Homo sapien
gatggttctgccaccagcagtttaa

SEQ ID NO: 2848078 - DNA, 25 bp, Homo sapien
taatcaagccaaggtaactctgcat

SEQ ID NO: 2848079 - DNA, 25 bp, Homo sapien
aaatggcgtgtttgtgagtatccac

SEQ ID NO: 2848080 - DNA, 25 bp, Homo sapien
ctgactccatttcacttccaagatc

SEQ ID NO: 2848081 - DNA, 25 bp, Homo sapien
aggcctgactccatttcacttccaa

SEQ ID NO: 2848082 - DNA, 25 bp, Homo sapien
aaccaggcctgactccatttcactt

SEQ ID NO: 2848083 - DNA, 25 bp, Homo sapien
gcctgactccatttcacttccaaga

SEQ ID NO: 2848084 - DNA, 25 bp, Homo sapien
tgatggctcttaccaagcagcaggc

SEQ ID NO: 2848085 - DNA, 25 bp, Homo sapien
taacgtcaggaactgaatgttgcgc

SEQ ID NO: 2848086 - DNA, 25 bp, Homo sapien
gtatagggcccttagaatcgaacca

SEQ ID NO: 2848087 - DNA, 25 bp, Homo sapien
catctatatgctaagggtgttggac

SEQ ID NO: 2848088 - DNA, 25 bp, Homo sapien
tttacttgagatgcctaaggcgagg

SEQ ID NO: 2848089 - DNA, 25 bp, Homo sapien
tgggctgcatctaacaagactgttt

SEQ ID NO: 2848090 - DNA, 25 bp, Homo sapien
taaatgtaggccaataacccagtgg

SEQ ID NO: 2848091 - DNA, 25 bp, Homo sapien
ccgacgtggtacagacagaggagct

SEQ ID NO: 2848092 - DNA, 25 bp, Homo sapien
ggtgtgccacatagaaccttctgga

SEQ ID NO: 2848093 - DNA, 25 bp, Homo sapien
ttataaatctggatcctcaactggg

SEQ ID NO: 2848094 - DNA, 25 bp, Homo sapien
ccaggactcggcctttagaagtcaa

SEQ ID NO: 2848095 - DNA, 25 bp, Homo sapien
gattggacttcacaactcagcgttt

SEQ ID NO: 2848096 - DNA, 25 bp, Homo sapien
cattttatcgcagcagacacctagg

SEQ ID NO: 2848097 - DNA, 25 bp, Homo sapien
taggaacaaaacactggacccacca

SEQ ID NO: 2848098 - DNA, 25 bp, Homo sapien
tatggaagaattactgttagctggc

SEQ ID NO: 2848099 - DNA, 25 bp, Homo sapien
gacccaccagagaaaactgggcaat

SEQ ID NO: 2848100 - DNA, 25 bp, Homo sapien
gattattaagtaataacttgtccac

SEQ ID NO: 2848101 - DNA, 25 bp, Homo sapien
agattattaagtaataacttgtcca

SEQ ID NO: 2848102 - DNA, 25 bp, Homo sapien
ttaaagtcaatgcatcaaatgaaga

SEQ ID NO: 2848103 - DNA, 25 bp, Homo sapien
taaagtcaatgcatcaaatgaagac

SEQ ID NO: 2848104 - DNA, 25 bp, Homo sapien
cctggaatatatataggttatttgt

SEQ ID NO: 2848105 - DNA, 25 bp, Homo sapien
aggttatttgtagccgccactgcta

SEQ ID NO: 2848106 - DNA, 25 bp, Homo sapien
tataggttatttgtagccgccactg

SEQ ID NO: 2848107 - DNA, 25 bp, Homo sapien
atttgtagccgccactgctataata

SEQ ID NO: 2848108 - DNA, 25 bp, Homo sapien
catcacgcttggtgtttctgtcgaa

SEQ ID NO: 2848109 - DNA, 25 bp, Homo sapien
gtttctgtcgaacatcctgaagaag

SEQ ID NO: 2848110 - DNA, 25 bp, Homo sapien
agaagttgttgtaggagcctgtcat

SEQ ID NO: 2848111 - DNA, 25 bp, Homo sapien
cctcgaagcctcaagggtcacatca

SEQ ID NO: 2848112 - DNA, 25 bp, Homo sapien
taggcatagctgcaatcgatcagga

SEQ ID NO: 2848113 - DNA, 25 bp, Homo sapien
tgctagtggcatcgtgcacgaaccc

SEQ ID NO: 2848114 - DNA, 25 bp, Homo sapien
gagaactagctctgaattcggcctt

SEQ ID NO: 2848115 - DNA, 25 bp, Homo sapien
ggagagtggcaaacacccaatgtct

SEQ ID NO: 2848116 - DNA, 25 bp, Homo sapien
gcttgctgcggaggtagtcatgaac

SEQ ID NO: 2848117 - DNA, 25 bp, Homo sapien
agtcattttcatagagggaacacag

SEQ ID NO: 2848118 - DNA, 25 bp, Homo sapien
cagcttgctgcggaggtagtcatga

SEQ ID NO: 2848119 - DNA, 25 bp, Homo sapien
ttcatagagggaacacagcttgctg

SEQ ID NO: 2848120 - DNA, 25 bp, Homo sapien
tgctgtcactccacatgccagtgtt

SEQ ID NO: 2848121 - DNA, 25 bp, Homo sapien
ggaatttggatctcctctgaagaca

SEQ ID NO: 2848122 - DNA, 25 bp, Homo sapien
gagtccctaatcctcatcccttgaa

SEQ ID NO: 2848123 - DNA, 25 bp, Homo sapien
gccctgctggaacacagagtcatca

SEQ ID NO: 2848124 - DNA, 25 bp, Homo sapien
ggctgaacttcacatccgaaatcga

SEQ ID NO: 2848125 - DNA, 25 bp, Homo sapien
actttgacggtcaagtagtccctgg

SEQ ID NO: 2848126 - DNA, 25 bp, Homo sapien
tcatgatatacctcccactgtggct

SEQ ID NO: 2848127 - DNA, 25 bp, Homo sapien
tgatctgttgcttggatcttccggc

SEQ ID NO: 2848128 - DNA, 25 bp, Homo sapien
cttgtatagtcccactttggtgcct

SEQ ID NO: 2848129 - DNA, 25 bp, Homo sapien
agtcccactttggtgcctctgttgc

SEQ ID NO: 2848130 - DNA, 25 bp, Homo sapien
tatagtcccactttggtgcctctgt

SEQ ID NO: 2848131 - DNA, 25 bp, Homo sapien
tgtatagtcccactttggtgcctct

SEQ ID NO: 2848132 - DNA, 25 bp, Homo sapien
atttcttctacagggaagcacggct

SEQ ID NO: 2848133 - DNA, 25 bp, Homo sapien
ttctacagggaagcacggctggcac

SEQ ID NO: 2848134 - DNA, 25 bp, Homo sapien
ttcttctacagggaagcacggctgg

SEQ ID NO: 2848135 - DNA, 25 bp, Homo sapien
catttcttctacagggaagcacggc

SEQ ID NO: 2848136 - DNA, 25 bp, Homo sapien
cttccgtttggagacatggttgaca

SEQ ID NO: 2848137 - DNA, 25 bp, Homo sapien
ggacacaactggcaattttcctaca

SEQ ID NO: 2848138 - DNA, 25 bp, Homo sapien
ggagagaaaagcctcgccgattgag

SEQ ID NO: 2848139 - DNA, 25 bp, Homo sapien
cttcagagacatgcaggcaacagtt

SEQ ID NO: 2848140 - DNA, 25 bp, Homo sapien
tatacagaagacacatccaataatt

SEQ ID NO: 2848141 - DNA, 25 bp, Homo sapien
cagtgagagaaacggccaacaattt

SEQ ID NO: 2848142 - DNA, 25 bp, Homo sapien
tccaataattttgcccagtgagaga

SEQ ID NO: 2848143 - DNA, 25 bp, Homo sapien
cacagagggtaagaactccctcgga

SEQ ID NO: 2848144 - DNA, 25 bp, Homo sapien
gcaggccacacctgtgacctgatta

SEQ ID NO: 2848145 - DNA, 25 bp, Homo sapien
tgtgatcaaacatacgtcctctgta

SEQ ID NO: 2848146 - DNA, 25 bp, Homo sapien
tgattaactccctgcagtgatgatg

SEQ ID NO: 2848147 - DNA, 25 bp, Homo sapien
gtgacctgattaactccctgcagtg

SEQ ID NO: 2848148 - DNA, 25 bp, Homo sapien
taatcatttattagccaagcgggac

SEQ ID NO: 2848149 - DNA, 25 bp, Homo sapien
tacacattcctacagccagtgggct

SEQ ID NO: 2848150 - DNA, 25 bp, Homo sapien
cagtgagcatctcgacaggagccta

SEQ ID NO: 2848151 - DNA, 25 bp, Homo sapien
tgagtggcaaaagtgtccatgggcc

SEQ ID NO: 2848152 - DNA, 25 bp, Homo sapien
gcaaatgtgtactgggaacctacta

SEQ ID NO: 2848153 - DNA, 25 bp, Homo sapien
tacctctcaataagatggaagctcg

SEQ ID NO: 2848154 - DNA, 25 bp, Homo sapien
gaaggtctgcccaaaccacaatgga

SEQ ID NO: 2848155 - DNA, 25 bp, Homo sapien
taaatgtcggtgtggccttcacctc

SEQ ID NO: 2848156 - DNA, 25 bp, Homo sapien
gctgctgctgtacacgaaggtgttg

SEQ ID NO: 2848157 - DNA, 25 bp, Homo sapien
agatgcccgcatgtcacacagccgg

SEQ ID NO: 2848158 - DNA, 25 bp, Homo sapien
gctgtacacgaaggtgttgcaatga

SEQ ID NO: 2848159 - DNA, 25 bp, Homo sapien
cacagccggattgtccctttgctgc

SEQ ID NO: 2848160 - DNA, 25 bp, Homo sapien
gttggctggcttaatgtccacaata

SEQ ID NO: 2848161 - DNA, 25 bp, Homo sapien
ttggctggcttaatgtccacaatat

SEQ ID NO: 2848162 - DNA, 25 bp, Homo sapien
gaaggggagaattagcaatggcacc

SEQ ID NO: 2848163 - DNA, 25 bp, Homo sapien
ggcacagacgagtcaaggaaggaac

SEQ ID NO: 2848164 - DNA, 25 bp, Homo sapien
aggggagaattagcaatggcaccat

SEQ ID NO: 2848165 - DNA, 25 bp, Homo sapien
ctggcacagacgagtcaaggaagga

SEQ ID NO: 2848166 - DNA, 25 bp, Homo sapien
acagaggggccgaggtactgtctga

SEQ ID NO: 2848167 - DNA, 25 bp, Homo sapien
cacccagagcttgggggatcaggac

SEQ ID NO: 2848168 - DNA, 25 bp, Homo sapien
ctccacccagagcttgggggatcag

SEQ ID NO: 2848169 - DNA, 25 bp, Homo sapien
ggccgaggtactgtctgaggaccca

SEQ ID NO: 2848170 - DNA, 25 bp, Homo sapien
gaatttgggacacaagcctgataag

SEQ ID NO: 2848171 - DNA, 25 bp, Homo sapien
gaggatttggtgagttctagaaaca

SEQ ID NO: 2848172 - DNA, 25 bp, Homo sapien
gcacaactctaaagggcgatccatg

SEQ ID NO: 2848173 - DNA, 25 bp, Homo sapien
gatgggagaggatattcaacatctg

SEQ ID NO: 2848174 - DNA, 25 bp, Homo sapien
caaagaggactccaagggatattcc

SEQ ID NO: 2848175 - DNA, 25 bp, Homo sapien
tgatgatgagacactggaaatctcc

SEQ ID NO: 2848176 - DNA, 25 bp, Homo sapien
tattgggcagggtgaaagccactga

SEQ ID NO: 2848177 - DNA, 25 bp, Homo sapien
tcctaggctcaatatgaggagactg

SEQ ID NO: 2848178 - DNA, 25 bp, Homo sapien
taggttaatcctcaggtcatcagcg

SEQ ID NO: 2848179 - DNA, 25 bp, Homo sapien
gtcatcagcggacatgtaggtttca

SEQ ID NO: 2848180 - DNA, 25 bp, Homo sapien
catcaggtccatgggtctcaggaca

SEQ ID NO: 2848181 - DNA, 25 bp, Homo sapien
taggtttcatagtcgctgttgacag

SEQ ID NO: 2848182 - DNA, 25 bp, Homo sapien
ctgcccagtgactcccctcacaagg

SEQ ID NO: 2848183 - DNA, 25 bp, Homo sapien
ggttcaagcaggacacgatggaccg

SEQ ID NO: 2848184 - DNA, 25 bp, Homo sapien
caggacacgatggaccgattaggaa

SEQ ID NO: 2848185 - DNA, 25 bp, Homo sapien
cgatggaccgattaggaaaccacat

SEQ ID NO: 2848186 - DNA, 25 bp, Homo sapien
actgtgtttttcatctgctctggcc

SEQ ID NO: 2848187 - DNA, 25 bp, Homo sapien
tgcgactgtgtttttcatctgctct

SEQ ID NO: 2848188 - DNA, 25 bp, Homo sapien
tgtgtttttcatctgctctggccac

SEQ ID NO: 2848189 - DNA, 25 bp, Homo sapien
tgtttttcatctgctctggccacat

SEQ ID NO: 2848190 - DNA, 25 bp, Homo sapien
tccggacactattccctgagtcagg

SEQ ID NO: 2848191 - DNA, 25 bp, Homo sapien
ctgagtcaggtccacagtcaattgt

SEQ ID NO: 2848192 - DNA, 25 bp, Homo sapien
ggcaggaaggagatccggacactat

SEQ ID NO: 2848193 - DNA, 25 bp, Homo sapien
ccacagtcaattgttaaggttgtct

SEQ ID NO: 2848194 - DNA, 25 bp, Homo sapien
tgatcaatacgggagttttcacttg

SEQ ID NO: 2848195 - DNA, 25 bp, Homo sapien
tgtggacatcctaacagcatagggc

SEQ ID NO: 2848196 - DNA, 25 bp, Homo sapien
ctgatcaatacgggagttttcactt

SEQ ID NO: 2848197 - DNA, 25 bp, Homo sapien
gacatcctaacagcatagggcacta

SEQ ID NO: 2848198 - DNA, 25 bp, Homo sapien
ggtccattctgaaagattgcttggg

SEQ ID NO: 2848199 - DNA, 25 bp, Homo sapien
cattaacttccaattgtagaaaaat

SEQ ID NO: 2848200 - DNA, 25 bp, Homo sapien
aatggtccattctgaaagattgctt

SEQ ID NO: 2848201 - DNA, 25 bp, Homo sapien
gactatgaggttttagcatctcttc

SEQ ID NO: 2848202 - DNA, 25 bp, Homo sapien
tgccaggaactatctaggcggcttt

SEQ ID NO: 2848203 - DNA, 25 bp, Homo sapien
catttagctatctgggcaaagtagg

SEQ ID NO: 2848204 - DNA, 25 bp, Homo sapien
tctaggcggcttttccatgttggtg

SEQ ID NO: 2848205 - DNA, 25 bp, Homo sapien
caaagtagggctgttccaaaaaatg

SEQ ID NO: 2848206 - DNA, 25 bp, Homo sapien
attcctttccttgttgctaaaccat

SEQ ID NO: 2848207 - DNA, 25 bp, Homo sapien
caaacacaaacctaacacctttcag

SEQ ID NO: 2848208 - DNA, 25 bp, Homo sapien
tagaaaattcctttccttgttgcta

SEQ ID NO: 2848209 - DNA, 25 bp, Homo sapien
cacaaacctaacacctttcaggtag

SEQ ID NO: 2848210 - DNA, 25 bp, Homo sapien
cactggcagctgataataatgagaa

SEQ ID NO: 2848211 - DNA, 25 bp, Homo sapien
atgagaaaaagaatacctccaggct

SEQ ID NO: 2848212 - DNA, 25 bp, Homo sapien
aaaatgccgatttcaacctggccta

SEQ ID NO: 2848213 - DNA, 25 bp, Homo sapien
gccgatttcaacctggcctaggttc

SEQ ID NO: 2848214 - DNA, 25 bp, Homo sapien
atggaggttctccagagctgaaagc

SEQ ID NO: 2848215 - DNA, 25 bp, Homo sapien
ggttctccagagctgaaagcatagg

SEQ ID NO: 2848216 - DNA, 25 bp, Homo sapien
tggaggttctccagagctgaaagca

SEQ ID NO: 2848217 - DNA, 25 bp, Homo sapien
gaggttctccagagctgaaagcata

SEQ ID NO: 2848218 - DNA, 25 bp, Homo sapien
cttggcacctttcctgcttctccat

SEQ ID NO: 2848219 - DNA, 25 bp, Homo sapien
agaaggcttggcacctttcctgctt

SEQ ID NO: 2848220 - DNA, 25 bp, Homo sapien
ttagaaggcttggcacctttcctgc

SEQ ID NO: 2848221 - DNA, 25 bp, Homo sapien
ggcttggcacctttcctgcttctcc

SEQ ID NO: 2848222 - DNA, 25 bp, Homo sapien
tcctcatctttcagattgtagcctt

SEQ ID NO: 2848223 - DNA, 25 bp, Homo sapien
ggcctcttatcacgctcgctgactt

SEQ ID NO: 2848224 - DNA, 25 bp, Homo sapien
ttctggcctcttatcacgctcgctg

SEQ ID NO: 2848225 - DNA, 25 bp, Homo sapien
tcagattgtagccttctggcctctt

SEQ ID NO: 2848226 - DNA, 25 bp, Homo sapien
taagtcagaattatagtgaaaagca

SEQ ID NO: 2848227 - DNA, 25 bp, Homo sapien
ctgtagtgggcaaccagattaagtc

SEQ ID NO: 2848228 - DNA, 25 bp, Homo sapien
aaagcaagctcataagggagttttc

SEQ ID NO: 2848229 - DNA, 25 bp, Homo sapien
tagtgggcaaccagattaagtcaga

SEQ ID NO: 2848230 - DNA, 25 bp, Homo sapien
tatctataccaacgtctatccctgc

SEQ ID NO: 2848231 - DNA, 25 bp, Homo sapien
gtagtttatcatcgcttgtggcagc

SEQ ID NO: 2848232 - DNA, 25 bp, Homo sapien
ggactaatcgtaggaggcttactag

SEQ ID NO: 2848233 - DNA, 25 bp, Homo sapien
aattccccatggttgggttgcctgg

SEQ ID NO: 2848234 - DNA, 25 bp, Homo sapien
caaattgacaagttgcccatactgc

SEQ ID NO: 2848235 - DNA, 25 bp, Homo sapien
tgaatctgcaaagcccgttagtgaa

SEQ ID NO: 2848236 - DNA, 25 bp, Homo sapien
gccaagtcttcgagttttaaatgca

SEQ ID NO: 2848237 - DNA, 25 bp, Homo sapien
gataatcctaaaccagctgcgtccg

SEQ ID NO: 2848238 - DNA, 25 bp, Homo sapien
aatttttgtcagagagacacacagc

SEQ ID NO: 2848239 - DNA, 25 bp, Homo sapien
gaaaactgcagataatgggtctcac

SEQ ID NO: 2848240 - DNA, 25 bp, Homo sapien
tcttaagacaggaagtcacattcca

SEQ ID NO: 2848241 - DNA, 25 bp, Homo sapien
gccaacctcacagagacagcatgtt

SEQ ID NO: 2848242 - DNA, 25 bp, Homo sapien
gaatgtgctgtaaacattgtattca

SEQ ID NO: 2848243 - DNA, 25 bp, Homo sapien
tattcacccctacgatgaacctgat

SEQ ID NO: 2848244 - DNA, 25 bp, Homo sapien
aactcttcaggtaatcgaactcggg

SEQ ID NO: 2848245 - DNA, 25 bp, Homo sapien
gaagaaagtaagctgcattctgctg

SEQ ID NO: 2848246 - DNA, 25 bp, Homo sapien
tcctctagcgctgattatgcaatga

SEQ ID NO: 2848247 - DNA, 25 bp, Homo sapien
tgatgagagaattaaacacaagggc

SEQ ID NO: 2848248 - DNA, 25 bp, Homo sapien
cagcagggactacatacatgatgag

SEQ ID NO: 2848249 - DNA, 25 bp, Homo sapien
tgtgcctcctgagaattcactcctg

SEQ ID NO: 2848250 - DNA, 25 bp, Homo sapien
aaaagcaggtctgccctagatgatg

SEQ ID NO: 2848251 - DNA, 25 bp, Homo sapien
gtctgccctagatgatgtcacatgg

SEQ ID NO: 2848252 - DNA, 25 bp, Homo sapien
acatgggtttgtttctcggatttag

SEQ ID NO: 2848253 - DNA, 25 bp, Homo sapien
gtttgtttctcggatttagtgctca

SEQ ID NO: 2848254 - DNA, 25 bp, Homo sapien
tgaatcaggcttcccaaatatttca

SEQ ID NO: 2848255 - DNA, 25 bp, Homo sapien
tgtgtcccccatcattctacgaatg

SEQ ID NO: 2848256 - DNA, 25 bp, Homo sapien
attgaacaaaactaccctgctttag

SEQ ID NO: 2848257 - DNA, 25 bp, Homo sapien
agcttaacgcttaactgcaggttct

SEQ ID NO: 2848258 - DNA, 25 bp, Homo sapien
ctcctgctctcgttgaaatattaca

SEQ ID NO: 2848259 - DNA, 25 bp, Homo sapien
cgctagtaattctcccgtgtggttg

SEQ ID NO: 2848260 - DNA, 25 bp, Homo sapien
cccttgtcccctgtcgctagtaatt

SEQ ID NO: 2848261 - DNA, 25 bp, Homo sapien
cgtgtggttgaattctaccgtagag

SEQ ID NO: 2848262 - DNA, 25 bp, Homo sapien
gttttgcggggtcacttctaggctg

SEQ ID NO: 2848263 - DNA, 25 bp, Homo sapien
tgtgttgagaaggttttgcggggtc

SEQ ID NO: 2848264 - DNA, 25 bp, Homo sapien
tgttgagaaggttttgcggggtcac

SEQ ID NO: 2848265 - DNA, 25 bp, Homo sapien
ttttgcggggtcacttctaggctgg

SEQ ID NO: 2848266 - DNA, 25 bp, Homo sapien
cacttgagcaggaaatcagaggaca

SEQ ID NO: 2848267 - DNA, 25 bp, Homo sapien
acttgagcaggaaatcagaggacac

SEQ ID NO: 2848268 - DNA, 25 bp, Homo sapien
tcacttgagcaggaaatcagaggac

SEQ ID NO: 2848269 - DNA, 25 bp, Homo sapien
accatggccctggtggagctggtgc

SEQ ID NO: 2848270 - DNA, 25 bp, Homo sapien
cccatctcgggtcttgatcttcttc

SEQ ID NO: 2848271 - DNA, 25 bp, Homo sapien
ctggtgcggctgaaggagctggaac

SEQ ID NO: 2848272 - DNA, 25 bp, Homo sapien
cagcttcccatctcgggtcttgatc

SEQ ID NO: 2848273 - DNA, 25 bp, Homo sapien
tgcgccagagcgagagctggagctc

SEQ ID NO: 2848274 - DNA, 25 bp, Homo sapien
ccgtagctgaggccagagcctgtga

SEQ ID NO: 2848275 - DNA, 25 bp, Homo sapien
ctgcgccagagcgagagctggagct

SEQ ID NO: 2848276 - DNA, 25 bp, Homo sapien
ggccagagcctgtgaggcccccata

SEQ ID NO: 2848277 - DNA, 25 bp, Homo sapien
tactcatgttctccatcttccagca

SEQ ID NO: 2848278 - DNA, 25 bp, Homo sapien
gtatggatactcatgttctccatct

SEQ ID NO: 2848279 - DNA, 25 bp, Homo sapien
ggatactcatgttctccatcttcca

SEQ ID NO: 2848280 - DNA, 25 bp, Homo sapien
cgtatggatactcatgttctccatc

SEQ ID NO: 2848281 - DNA, 25 bp, Homo sapien
tccttaatgaccagctccctgcgct

SEQ ID NO: 2848282 - DNA, 25 bp, Homo sapien
tggtctgctgaagggcggcctccag

SEQ ID NO: 2848283 - DNA, 25 bp, Homo sapien
ccctgcgctgctccgcatctgcgat

SEQ ID NO: 2848284 - DNA, 25 bp, Homo sapien
cagggaaatcctcccgcctttgagg

SEQ ID NO: 2848285 - DNA, 25 bp, Homo sapien
gcaggtcttcccagccagcgtctgc

SEQ ID NO: 2848286 - DNA, 25 bp, Homo sapien
agccagcgtctgcagctcctcatac

SEQ ID NO: 2848287 - DNA, 25 bp, Homo sapien
caggtcttcccagccagcgtctgca

SEQ ID NO: 2848288 - DNA, 25 bp, Homo sapien
cccagccagcgtctgcagctcctca

SEQ ID NO: 2848289 - DNA, 25 bp, Homo sapien
ctcagcccgactgcggttggcgatc

SEQ ID NO: 2848290 - DNA, 25 bp, Homo sapien
atacatgctctcggcctcagcccga

SEQ ID NO: 2848291 - DNA, 25 bp, Homo sapien
gatctgatacatgctctcggcctca

SEQ ID NO: 2848292 - DNA, 25 bp, Homo sapien
tgatacatgctctcggcctcagccc

SEQ ID NO: 2848293 - DNA, 25 bp, Homo sapien
atgctgtccgtgtccagggagcggc

SEQ ID NO: 2848294 - DNA, 25 bp, Homo sapien
gagcggctgttgtcaatggacagca

SEQ ID NO: 2848295 - DNA, 25 bp, Homo sapien
cagcgatgatgctgtccgtgtccag

SEQ ID NO: 2848296 - DNA, 25 bp, Homo sapien
ggagcggctgttgtcaatggacagc

SEQ ID NO: 2848297 - DNA, 25 bp, Homo sapien
tcctgggtgcacacagcatggatgt

SEQ ID NO: 2848298 - DNA, 25 bp, Homo sapien
cagcatggatgttggggttcacctt

SEQ ID NO: 2848299 - DNA, 25 bp, Homo sapien
tgcacacagcatggatgttggggtt

SEQ ID NO: 2848300 - DNA, 25 bp, Homo sapien
gcatggatgttggggttcaccttca

SEQ ID NO: 2848301 - DNA, 25 bp, Homo sapien
ctgggacggcagtgatgcctcccat

SEQ ID NO: 2848302 - DNA, 25 bp, Homo sapien
tcaggagaagctcaaggagctgatg

SEQ ID NO: 2848303 - DNA, 25 bp, Homo sapien
gagaagctcaaggagctgatgcaga

SEQ ID NO: 2848304 - DNA, 25 bp, Homo sapien
aggagaagctcaaggagctgatgca

SEQ ID NO: 2848305 - DNA, 25 bp, Homo sapien
aagctcaaggagctgatgcagacac

SEQ ID NO: 2848306 - DNA, 25 bp, Homo sapien
agctgcagaaggcccgggtgccaga

SEQ ID NO: 2848307 - DNA, 25 bp, Homo sapien
gagcagctgcagaaggcccgggtgc

SEQ ID NO: 2848308 - DNA, 25 bp, Homo sapien
caggcccactcgtgtaggagcagct

SEQ ID NO: 2848309 - DNA, 25 bp, Homo sapien
aggcccactcgtgtaggagcagctg

SEQ ID NO: 2848310 - DNA, 25 bp, Homo sapien
cacagagaatagacagtatagaacc

SEQ ID NO: 2848311 - DNA, 25 bp, Homo sapien
tgctccatgacagaactagggtttt

SEQ ID NO: 2848312 - DNA, 25 bp, Homo sapien
gacacaccattttgaatctgaccaa

SEQ ID NO: 2848313 - DNA, 25 bp, Homo sapien
gaatgctacctacttaacagggctg

SEQ ID NO: 2848314 - DNA, 25 bp, Homo sapien
tacttgccataggaaggctcagcca

SEQ ID NO: 2848315 - DNA, 25 bp, Homo sapien
ataatacttgccataggaaggctca

SEQ ID NO: 2848316 - DNA, 25 bp, Homo sapien
ggaatagctgctactgaaatggcat

SEQ ID NO: 2848317 - DNA, 25 bp, Homo sapien
tcagccagagtccgggaatagctgc

SEQ ID NO: 2848318 - DNA, 25 bp, Homo sapien
tgagccatgatggaagcacttcctc

SEQ ID NO: 2848319 - DNA, 25 bp, Homo sapien
tcaagtcactgttcatggcagcaat

SEQ ID NO: 2848320 - DNA, 25 bp, Homo sapien
tctagaggatgccaactactgtgtt

SEQ ID NO: 2848321 - DNA, 25 bp, Homo sapien
ggcttagaccctgactacaacttca

SEQ ID NO: 2848322 - DNA, 25 bp, Homo sapien
tctgaagattactgaaagctttgca

SEQ ID NO: 2848323 - DNA, 25 bp, Homo sapien
ttttatctgaagattactgaaagct

SEQ ID NO: 2848324 - DNA, 25 bp, Homo sapien
ttgcaaacattaattaagccaacct

SEQ ID NO: 2848325 - DNA, 25 bp, Homo sapien
agccaacctcataacactcagggaa

SEQ ID NO: 2848326 - DNA, 25 bp, Homo sapien
tgttgtagccaatgcttcccaagaa

SEQ ID NO: 2848327 - DNA, 25 bp, Homo sapien
ccatgcaagtcctaagaactggttg

SEQ ID NO: 2848328 - DNA, 25 bp, Homo sapien
gatttgctgtcgcatctgcctagtg

SEQ ID NO: 2848329 - DNA, 25 bp, Homo sapien
caggccaggcaaagcttttgtaacc

SEQ ID NO: 2848330 - DNA, 25 bp, Homo sapien
ttagacccaaagctcccagtgccag

SEQ ID NO: 2848331 - DNA, 25 bp, Homo sapien
aaggccatgttaagtgacttgacaa

SEQ ID NO: 2848332 - DNA, 25 bp, Homo sapien
ctcatcagtggccaagaagactgaa

SEQ ID NO: 2848333 - DNA, 25 bp, Homo sapien
catcagtggccaagaagactgaatg

SEQ ID NO: 2848334 - DNA, 25 bp, Homo sapien
aggggataacaacttctttgtctat

SEQ ID NO: 2848335 - DNA, 25 bp, Homo sapien
tggtggtaatctctagagaggggag

SEQ ID NO: 2848336 - DNA, 25 bp, Homo sapien
gataacaacttctttgtctatattc

SEQ ID NO: 2848337 - DNA, 25 bp, Homo sapien
gagtggggtcaaagaggggataaca

SEQ ID NO: 2848338 - DNA, 25 bp, Homo sapien
tagtttccccaggtctaaagactca

SEQ ID NO: 2848339 - DNA, 25 bp, Homo sapien
atattaaatgactgccggcccggtg

SEQ ID NO: 2848340 - DNA, 25 bp, Homo sapien
gcatattaaatgactgccggcccgg

SEQ ID NO: 2848341 - DNA, 25 bp, Homo sapien
gtctaaagactcatagtggtaccac

SEQ ID NO: 2848342 - DNA, 25 bp, Homo sapien
tcaaaccaacttgcctgctttcttt

SEQ ID NO: 2848343 - DNA, 25 bp, Homo sapien
cagtttcttatttgcactagatgac

SEQ ID NO: 2848344 - DNA, 25 bp, Homo sapien
cattcttgctatttcaaacccagtc

SEQ ID NO: 2848345 - DNA, 25 bp, Homo sapien
tttgtgtcctcacatcattcttgct

SEQ ID NO: 2848346 - DNA, 25 bp, Homo sapien
tttgtgccgtccaatgggttaatca

SEQ ID NO: 2848347 - DNA, 25 bp, Homo sapien
ctctagtagacctgctgagacagaa

SEQ ID NO: 2848348 - DNA, 25 bp, Homo sapien
taaatgtaaaatcctcgaggcagaa

SEQ ID NO: 2848349 - DNA, 25 bp, Homo sapien
taaagccttctatgtggccgtcagg

SEQ ID NO: 2848350 - DNA, 25 bp, Homo sapien
gaaatgccagctgctaacactggtg

SEQ ID NO: 2848351 - DNA, 25 bp, Homo sapien
tattggcatgctacagggaactggg

SEQ ID NO: 2848352 - DNA, 25 bp, Homo sapien
aaacctggcactctgacctcatggg

SEQ ID NO: 2848353 - DNA, 25 bp, Homo sapien
gtcactatcacactaaagcctggca

SEQ ID NO: 2848354 - DNA, 25 bp, Homo sapien
gctaaatgaactcctactcactggg

SEQ ID NO: 2848355 - DNA, 25 bp, Homo sapien
ttgaagaatatcagtaaggcagtgg

SEQ ID NO: 2848356 - DNA, 25 bp, Homo sapien
gaagaatatcagtaaggcagtggat

SEQ ID NO: 2848357 - DNA, 25 bp, Homo sapien
tatcagtaaggcagtggattgtggc

SEQ ID NO: 2848358 - DNA, 25 bp, Homo sapien
gaatatcagtaaggcagtggattgt

SEQ ID NO: 2848359 - DNA, 25 bp, Homo sapien
tcagtgggctacatggagagttctc

SEQ ID NO: 2848360 - DNA, 25 bp, Homo sapien
ttctcgggcacaaaatctccagctg

SEQ ID NO: 2848361 - DNA, 25 bp, Homo sapien
gactccccgatgtaaagatagtgtc

SEQ ID NO: 2848362 - DNA, 25 bp, Homo sapien
gaagaattggcacaaggcctgcaaa

SEQ ID NO: 2848363 - DNA, 25 bp, Homo sapien
caaaagggactgtttggagacactc

SEQ ID NO: 2848364 - DNA, 25 bp, Homo sapien
gagatttcatctgacagcctgcata

SEQ ID NO: 2848365 - DNA, 25 bp, Homo sapien
gagacactccctccatgtgaaccaa

SEQ ID NO: 2848366 - DNA, 25 bp, Homo sapien
tacctatggtggacttgctctgtgg

SEQ ID NO: 2848367 - DNA, 25 bp, Homo sapien
gaaagagcacccagaacacatcggt

SEQ ID NO: 2848368 - DNA, 25 bp, Homo sapien
tgtagcacagaccatagatcaaggc

SEQ ID NO: 2848369 - DNA, 25 bp, Homo sapien
taaagtatcgactccatgcacagca

SEQ ID NO: 2848370 - DNA, 25 bp, Homo sapien
tcaataccgtatccttgggaccaag

SEQ ID NO: 2848371 - DNA, 25 bp, Homo sapien
gacaatcatgtacgctttctttcat

SEQ ID NO: 2848372 - DNA, 25 bp, Homo sapien
catgtacgctttctttcatggtggc

SEQ ID NO: 2848373 - DNA, 25 bp, Homo sapien
agacagacaatcatgtacgctttct

SEQ ID NO: 2848374 - DNA, 25 bp, Homo sapien
tgtacgctttctttcatggtggcgt

SEQ ID NO: 2848375 - DNA, 25 bp, Homo sapien
tctgtatcaatgaccaaatcagtgg

SEQ ID NO: 2848376 - DNA, 25 bp, Homo sapien
aatcagggctggtgcattgctttca

SEQ ID NO: 2848377 - DNA, 25 bp, Homo sapien
gtgagatctacaaactagaatcagg

SEQ ID NO: 2848378 - DNA, 25 bp, Homo sapien
taatgcacattctctagttgaaggt

SEQ ID NO: 2848379 - DNA, 25 bp, Homo sapien
tacaggacagccttccgaatcagga

SEQ ID NO: 2848380 - DNA, 25 bp, Homo sapien
cttactcagagctaagaggcccaag

SEQ ID NO: 2848381 - DNA, 25 bp, Homo sapien
catagagaagaacgggtaagtgagc

SEQ ID NO: 2848382 - DNA, 25 bp, Homo sapien
taccagagagtgactgtatggacaa

SEQ ID NO: 2848383 - DNA, 25 bp, Homo sapien
tgggccaaagaacaccaactcttgt

SEQ ID NO: 2848384 - DNA, 25 bp, Homo sapien
gaaatgtgggttatatgcttaagca

SEQ ID NO: 2848385 - DNA, 25 bp, Homo sapien
aatgaatgattcttatgggccaaag

SEQ ID NO: 2848386 - DNA, 25 bp, Homo sapien
gggagtacaattgtaggttgccaaa

SEQ ID NO: 2848387 - DNA, 25 bp, Homo sapien
ttgcctgcttttccgggatgaatac

SEQ ID NO: 2848388 - DNA, 25 bp, Homo sapien
gggatgaatactttagcaactgctg

SEQ ID NO: 2848389 - DNA, 25 bp, Homo sapien
cttttccgggatgaatactttagca

SEQ ID NO: 2848390 - DNA, 25 bp, Homo sapien
tttgcctgcttttccgggatgaata

SEQ ID NO: 2848391 - DNA, 25 bp, Homo sapien
tggctgtgtttggacagccacaact

SEQ ID NO: 2848392 - DNA, 25 bp, Homo sapien
acttcttggctgtgtttggacagcc

SEQ ID NO: 2848393 - DNA, 25 bp, Homo sapien
gacttcttggctgtgtttggacagc

SEQ ID NO: 2848394 - DNA, 25 bp, Homo sapien
tcttggctgtgtttggacagccaca

SEQ ID NO: 2848395 - DNA, 25 bp, Homo sapien
gatcagccactgaggaatcgacttc

SEQ ID NO: 2848396 - DNA, 25 bp, Homo sapien
tctgaagtgcttgatcagccactga

SEQ ID NO: 2848397 - DNA, 25 bp, Homo sapien
gcttgatcagccactgaggaatcga

SEQ ID NO: 2848398 - DNA, 25 bp, Homo sapien
tgaggaatcgacttcatgggaattc

SEQ ID NO: 2848399 - DNA, 25 bp, Homo sapien
taggccaccgtaatctctcaactga

SEQ ID NO: 2848400 - DNA, 25 bp, Homo sapien
gatgctggtctagaatattcctcta

SEQ ID NO: 2848401 - DNA, 25 bp, Homo sapien
tcatgcagatcttagaacattgttc

SEQ ID NO: 2848402 - DNA, 25 bp, Homo sapien
tacatcagactatgggtgggaaaac

SEQ ID NO: 2848403 - DNA, 25 bp, Homo sapien
tgcactaagcactctccacaattct

SEQ ID NO: 2848404 - DNA, 25 bp, Homo sapien
tgtgccaagacttgtttcaagtact

SEQ ID NO: 2848405 - DNA, 25 bp, Homo sapien
aagccacatgcccaaacctaggcgt

SEQ ID NO: 2848406 - DNA, 25 bp, Homo sapien
gtcctgtgtgccaagacttgtttca

SEQ ID NO: 2848407 - DNA, 25 bp, Homo sapien
gaagtcatgatgtacagctcaccct

SEQ ID NO: 2848408 - DNA, 25 bp, Homo sapien
ctcgtgattgaagaccacagagata

SEQ ID NO: 2848409 - DNA, 25 bp, Homo sapien
agtaaggtatactgtaggatgctcc

SEQ ID NO: 2848410 - DNA, 25 bp, Homo sapien
tccatcctatcacatcaatcaaagg

SEQ ID NO: 2848411 - DNA, 25 bp, Homo sapien
gaaaataagacctgagaacagcctt

SEQ ID NO: 2848412 - DNA, 25 bp, Homo sapien
ggaggatcactccaatagcacagca

SEQ ID NO: 2848413 - DNA, 25 bp, Homo sapien
gactgcttcacgtgggcatatatta

SEQ ID NO: 2848414 - DNA, 25 bp, Homo sapien
taactgggctctaatgtgacactct

SEQ ID NO: 2848415 - DNA, 25 bp, Homo sapien
ctagctcagtcaagtttccaaaagg

SEQ ID NO: 2848416 - DNA, 25 bp, Homo sapien
ggaaagccccgttatcaggccacga

SEQ ID NO: 2848417 - DNA, 25 bp, Homo sapien
caatctgcagattgacaaagccctc

SEQ ID NO: 2848418 - DNA, 25 bp, Homo sapien
ggccacgagcaggacttaaattaac

SEQ ID NO: 2848419 - DNA, 25 bp, Homo sapien
ggtcctaagttcacaatacgatggc

SEQ ID NO: 2848420 - DNA, 25 bp, Homo sapien
tgcagggagcacattgggaattatc

SEQ ID NO: 2848421 - DNA, 25 bp, Homo sapien
caatgactgctaatgtgttggccag

SEQ ID NO: 2848422 - DNA, 25 bp, Homo sapien
tgccaaaagattgtgtgaccacctc

SEQ ID NO: 2848423 - DNA, 25 bp, Homo sapien
aggtgttttcatctggataattcat

SEQ ID NO: 2848424 - DNA, 25 bp, Homo sapien
ctctgtcttgggttctcccttggct

SEQ ID NO: 2848425 - DNA, 25 bp, Homo sapien
ttctctgtcttgggttctcccttgg

SEQ ID NO: 2848426 - DNA, 25 bp, Homo sapien
tacaatagccttatgaggttaagca

SEQ ID NO: 2848427 - DNA, 25 bp, Homo sapien
ggcaccgtcacttttaatacttaca

SEQ ID NO: 2848428 - DNA, 25 bp, Homo sapien
tattttcctgggactgtcatgagca

SEQ ID NO: 2848429 - DNA, 25 bp, Homo sapien
tcatgagcacattacaggcaccgtc

SEQ ID NO: 2848430 - DNA, 25 bp, Homo sapien
gttgattaactccactggatctcag

SEQ ID NO: 2848431 - DNA, 25 bp, Homo sapien
agtcttttctccaccataaactagg

SEQ ID NO: 2848432 - DNA, 25 bp, Homo sapien
gctcggttttatgaatcagtctcta

SEQ ID NO: 2848433 - DNA, 25 bp, Homo sapien
ggtatgtgatcatagacaagttgat

SEQ ID NO: 2848434 - DNA, 25 bp, Homo sapien
atatttgttgagcagagtagataag

SEQ ID NO: 2848435 - DNA, 25 bp, Homo sapien
tatatttgttgagcagagtagataa

SEQ ID NO: 2848436 - DNA, 25 bp, Homo sapien
ctattttacataactccttccttgc

SEQ ID NO: 2848437 - DNA, 25 bp, Homo sapien
ctttatatttgttgagcagagtaga

SEQ ID NO: 2848438 - DNA, 25 bp, Homo sapien
tatctaacaatcctacacatgtact

SEQ ID NO: 2848439 - DNA, 25 bp, Homo sapien
aatcctacacatgtacttctaaacc

SEQ ID NO: 2848440 - DNA, 25 bp, Homo sapien
tatctatctaacaatcctacacatg

SEQ ID NO: 2848441 - DNA, 25 bp, Homo sapien
agcttatctatctaacaatcctaca

SEQ ID NO: 2848442 - DNA, 25 bp, Homo sapien
cccagataagttcatgttggtatga

SEQ ID NO: 2848443 - DNA, 25 bp, Homo sapien
ggcaaaccccccagataagttcatg

SEQ ID NO: 2848444 - DNA, 25 bp, Homo sapien
tcaagagccagtaagcgtggcaaac

SEQ ID NO: 2848445 - DNA, 25 bp, Homo sapien
aagagccagtaagcgtggcaaaccc

SEQ ID NO: 2848446 - DNA, 25 bp, Homo sapien
tgtgatgtggcaccaccatcctgct

SEQ ID NO: 2848447 - DNA, 25 bp, Homo sapien
cagctcaacaacatgggctctttgg

SEQ ID NO: 2848448 - DNA, 25 bp, Homo sapien
ggtttcctctcaaggtatctagcag

SEQ ID NO: 2848449 - DNA, 25 bp, Homo sapien
tacatcagagagtagaacgtggcct

SEQ ID NO: 2848450 - DNA, 25 bp, Homo sapien
ggtccgatagtcactaatccactga

SEQ ID NO: 2848451 - DNA, 25 bp, Homo sapien
aactggctttggcaaaacatgccag

SEQ ID NO: 2848452 - DNA, 25 bp, Homo sapien
gcagacctctccagtaggtccgata

SEQ ID NO: 2848453 - DNA, 25 bp, Homo sapien
ctaatccactgactaaacattttaa

SEQ ID NO: 2848454 - DNA, 25 bp, Homo sapien
gaagaactcaggtgaatattcgcta

SEQ ID NO: 2848455 - DNA, 25 bp, Homo sapien
taattcccagagactagtcacatag

SEQ ID NO: 2848456 - DNA, 25 bp, Homo sapien
gaattgtttctcaccacaatggcag

SEQ ID NO: 2848457 - DNA, 25 bp, Homo sapien
cgcgcccgtcgtcaaactaatgtgt

SEQ ID NO: 2848458 - DNA, 25 bp, Homo sapien
atcatggatgaagctacctttgact

SEQ ID NO: 2848459 - DNA, 25 bp, Homo sapien
catgtaataactcatataatatgaa

SEQ ID NO: 2848460 - DNA, 25 bp, Homo sapien
tggatgaagctacctttgactttct

SEQ ID NO: 2848461 - DNA, 25 bp, Homo sapien
tcatccccctcatagccaatattaa

SEQ ID NO: 2848462 - DNA, 25 bp, Homo sapien
agagggacctgcaagtctaaactcc

SEQ ID NO: 2848463 - DNA, 25 bp, Homo sapien
ggacctggctttacctcattcagag

SEQ ID NO: 2848464 - DNA, 25 bp, Homo sapien
gaaaagaatatgtaactggctgctc

SEQ ID NO: 2848465 - DNA, 25 bp, Homo sapien
aaaccattactaagcacctgtgtgc

SEQ ID NO: 2848466 - DNA, 25 bp, Homo sapien
gtttgcatgtccctacagatctgcg

SEQ ID NO: 2848467 - DNA, 25 bp, Homo sapien
tagttcagggttctagggaagctct

SEQ ID NO: 2848468 - DNA, 25 bp, Homo sapien
taagcatgttgccagctgaagtaca

SEQ ID NO: 2848469 - DNA, 25 bp, Homo sapien
tgcaggatatgtcagctggaaacac

SEQ ID NO: 2848470 - DNA, 25 bp, Homo sapien
ttactgggtcgtagaattcagcttc

SEQ ID NO: 2848471 - DNA, 25 bp, Homo sapien
tgaacgccgagctcgcctcgcggag

SEQ ID NO: 2848472 - DNA, 25 bp, Homo sapien
gggcccggaggagtctccgccacta

SEQ ID NO: 2848473 - DNA, 25 bp, Homo sapien
gcccggatggatgcgaggtgcactg

SEQ ID NO: 2848474 - DNA, 25 bp, Homo sapien
cacctgctgctgaacgccgagctcg

SEQ ID NO: 2848475 - DNA, 25 bp, Homo sapien
cggccccaacggcggaatgcggcgg

SEQ ID NO: 2848476 - DNA, 25 bp, Homo sapien
gcgcccggccccaacggcggaatgc

SEQ ID NO: 2848477 - DNA, 25 bp, Homo sapien
cccaacggcggaatgcggcggggct

SEQ ID NO: 2848478 - DNA, 25 bp, Homo sapien
caacggcggaatgcggcggggctgg

SEQ ID NO: 2848479 - DNA, 25 bp, Homo sapien
ggtcgcgcaggaaactgttgttgat

SEQ ID NO: 2848480 - DNA, 25 bp, Homo sapien
gttgttgattttgcgggtatcaatg

SEQ ID NO: 2848481 - DNA, 25 bp, Homo sapien
cttcggtcgcatagctgtggtcgcg

SEQ ID NO: 2848482 - DNA, 25 bp, Homo sapien
ttgattttgcgggtatcaatgtcct

SEQ ID NO: 2848483 - DNA, 25 bp, Homo sapien
gacagcaggcttacttgcgtgggaa

SEQ ID NO: 2848484 - DNA, 25 bp, Homo sapien
accagaagccggcagacaagtatcc

SEQ ID NO: 2848485 - DNA, 25 bp, Homo sapien
cagaagccggcagacaagtatccat

SEQ ID NO: 2848486 - DNA, 25 bp, Homo sapien
ttacttgcgtgggaaccagaagccg

SEQ ID NO: 2848487 - DNA, 25 bp, Homo sapien
agtgggactgcaccatggtccgagc

SEQ ID NO: 2848488 - DNA, 25 bp, Homo sapien
cagtgggactgcaccatggtccgag

SEQ ID NO: 2848489 - DNA, 25 bp, Homo sapien
cctccgggtgccaagatacgccgtg

SEQ ID NO: 2848490 - DNA, 25 bp, Homo sapien
cagctccagttcccagcgaggatgc

SEQ ID NO: 2848491 - DNA, 25 bp, Homo sapien
ataaaaacccggcaatggagctgtc

SEQ ID NO: 2848492 - DNA, 25 bp, Homo sapien
tccactcgggttctgcgaggctgcg

SEQ ID NO: 2848493 - DNA, 25 bp, Homo sapien
cgggcagccgcgacaaaatggtgcc

SEQ ID NO: 2848494 - DNA, 25 bp, Homo sapien
ggagagcgggcagccgcgacaaaat

SEQ ID NO: 2848495 - DNA, 25 bp, Homo sapien
cgcgacaaaatggtgcctttctgga

SEQ ID NO: 2848496 - DNA, 25 bp, Homo sapien
gggagatgcccaacaggttcccctc

SEQ ID NO: 2848497 - DNA, 25 bp, Homo sapien
gcagtggcgagatggcagggacagg

SEQ ID NO: 2848498 - DNA, 25 bp, Homo sapien
tgcagtggcgagatggcagggacag

SEQ ID NO: 2848499 - DNA, 25 bp, Homo sapien
gctgcagccggcgccagcgcactca

SEQ ID NO: 2848500 - DNA, 25 bp, Homo sapien
ctggccggaatgagggtgctggtcc

SEQ ID NO: 2848501 - DNA, 25 bp, Homo sapien
tggccggaatgagggtgctggtccc

SEQ ID NO: 2848502 - DNA, 25 bp, Homo sapien
ctggtcccacgggagggcggctccg

SEQ ID NO: 2848503 - DNA, 25 bp, Homo sapien
ctcacacccacacgcgcgcactcgc

SEQ ID NO: 2848504 - DNA, 25 bp, Homo sapien
cctcacacccacacgcgcgcactcg

SEQ ID NO: 2848505 - DNA, 25 bp, Homo sapien
gccagccctggacaaaattgtaaag

SEQ ID NO: 2848506 - DNA, 25 bp, Homo sapien
cagccctggacaaaattgtaaagta

SEQ ID NO: 2848507 - DNA, 25 bp, Homo sapien
ggccagccctggacaaaattgtaaa

SEQ ID NO: 2848508 - DNA, 25 bp, Homo sapien
aggagctgtatcagtcctcctgagc

SEQ ID NO: 2848509 - DNA, 25 bp, Homo sapien
gcaggaggagctgtatcagtcctcc

SEQ ID NO: 2848510 - DNA, 25 bp, Homo sapien
ggaggagctgtatcagtcctcctga

SEQ ID NO: 2848511 - DNA, 25 bp, Homo sapien
ctgcaggaggagctgtatcagtcct

SEQ ID NO: 2848512 - DNA, 25 bp, Homo sapien
ctgagccaatctgctattcttcttc

SEQ ID NO: 2848513 - DNA, 25 bp, Homo sapien
ccactggcatctcagaatcaacaaa

SEQ ID NO: 2848514 - DNA, 25 bp, Homo sapien
ctaaagacctcaccatgtgcacact

SEQ ID NO: 2848515 - DNA, 25 bp, Homo sapien
taaagacctcaccatgtgcacactc

SEQ ID NO: 2848516 - DNA, 25 bp, Homo sapien
tggcatctcagaatcaacaaacaca

SEQ ID NO: 2848517 - DNA, 25 bp, Homo sapien
gatgacctagagtgttgagaaactt

SEQ ID NO: 2848518 - DNA, 25 bp, Homo sapien
agaaaaagtttagcagtctgcaccc

SEQ ID NO: 2848519 - DNA, 25 bp, Homo sapien
tacactagtcagtgtcagacctagg

SEQ ID NO: 2848520 - DNA, 25 bp, Homo sapien
ggtgtgttaaacaattactgagaca

SEQ ID NO: 2848521 - DNA, 25 bp, Homo sapien
ctcagcctcctgagtagctgagaca

SEQ ID NO: 2848522 - DNA, 25 bp, Homo sapien
agtagtgtgatctcagctcactgca

SEQ ID NO: 2848523 - DNA, 25 bp, Homo sapien
tgttttgtcccccaagttggagtgc

SEQ ID NO: 2848524 - DNA, 25 bp, Homo sapien
tcctgagttcaagcaaagctcctgc

SEQ ID NO: 2848525 - DNA, 25 bp, Homo sapien
actgcatcctggtacgtcattacaa

SEQ ID NO: 2848526 - DNA, 25 bp, Homo sapien
tggtggcagtttacacaattgtccc

SEQ ID NO: 2848527 - DNA, 25 bp, Homo sapien
gcttgtgtaacttggactcagagga

SEQ ID NO: 2848528 - DNA, 25 bp, Homo sapien
gagaacatccatggggtcctttggg

SEQ ID NO: 2848529 - DNA, 25 bp, Homo sapien
caaggatgcgaagtatctgtttaac

SEQ ID NO: 2848530 - DNA, 25 bp, Homo sapien
taacagtaaagtgccaagcaatctg

SEQ ID NO: 2848531 - DNA, 25 bp, Homo sapien
gttttatttgctactcaaggatgcg

SEQ ID NO: 2848532 - DNA, 25 bp, Homo sapien
cttttactgagtcctgttgttttat

SEQ ID NO: 2848533 - DNA, 25 bp, Homo sapien
ggtagtggataacaggcaacctata

SEQ ID NO: 2848534 - DNA, 25 bp, Homo sapien
taggtggtagtggataacaggcaac

SEQ ID NO: 2848535 - DNA, 25 bp, Homo sapien
ttctgtttctcaactataggtggta

SEQ ID NO: 2848536 - DNA, 25 bp, Homo sapien
caactataggtggtagtggataaca

SEQ ID NO: 2848537 - DNA, 25 bp, Homo sapien
tattggtgttactcacatgttggac

SEQ ID NO: 2848538 - DNA, 25 bp, Homo sapien
aggaagcagcctagtgttcttggca

SEQ ID NO: 2848539 - DNA, 25 bp, Homo sapien
actgtaagctagatggtaggaagca

SEQ ID NO: 2848540 - DNA, 25 bp, Homo sapien
tcctagctcagagactgccgggatg

SEQ ID NO: 2848541 - DNA, 25 bp, Homo sapien
ctaggtgacaactttgattgtttca

SEQ ID NO: 2848542 - DNA, 25 bp, Homo sapien
tccagaaaaacaagtatgacagagg

SEQ ID NO: 2848543 - DNA, 25 bp, Homo sapien
tcatgctcatcctcatatttactct

SEQ ID NO: 2848544 - DNA, 25 bp, Homo sapien
gacaactttgattgtttcatgctca

SEQ ID NO: 2848545 - DNA, 25 bp, Homo sapien
gatgttcttctctgacacccctgtg

SEQ ID NO: 2848546 - DNA, 25 bp, Homo sapien
tgatgttcttctctgacacccctgt

SEQ ID NO: 2848547 - DNA, 25 bp, Homo sapien
ttcttctctgacacccctgtgctgt

SEQ ID NO: 2848548 - DNA, 25 bp, Homo sapien
tgttcttctctgacacccctgtgct

SEQ ID NO: 2848549 - DNA, 25 bp, Homo sapien
tataatggtagctgcctgaagttga

SEQ ID NO: 2848550 - DNA, 25 bp, Homo sapien
gacaactgcaactgaaaagcacaaa

SEQ ID NO: 2848551 - DNA, 25 bp, Homo sapien
ttggatctggtctcttggacttctg

SEQ ID NO: 2848552 - DNA, 25 bp, Homo sapien
aataagagaattacaggtttcaatg

SEQ ID NO: 2848553 - DNA, 25 bp, Homo sapien
gctcttcaaactggttgagtctcct

SEQ ID NO: 2848554 - DNA, 25 bp, Homo sapien
caaactggttgagtctccttcaaca

SEQ ID NO: 2848555 - DNA, 25 bp, Homo sapien
ctttgcttggtgtctgcactgccca

SEQ ID NO: 2848556 - DNA, 25 bp, Homo sapien
tctattgacaactttgcttggtgtc

SEQ ID NO: 2848557 - DNA, 25 bp, Homo sapien
gcttgctgtaccttggcagaaccta

SEQ ID NO: 2848558 - DNA, 25 bp, Homo sapien
ttgctgtaccttggcagaacctata

SEQ ID NO: 2848559 - DNA, 25 bp, Homo sapien
ggcttgctgtaccttggcagaacct

SEQ ID NO: 2848560 - DNA, 25 bp, Homo sapien
gctgtaccttggcagaacctatagg

SEQ ID NO: 2848561 - DNA, 25 bp, Homo sapien
gtcatagctaaaagtccactctttg

SEQ ID NO: 2848562 - DNA, 25 bp, Homo sapien
ctagagtcatagctaaaagtccact

SEQ ID NO: 2848563 - DNA, 25 bp, Homo sapien
ccaacctcctcctagagtcatagct

SEQ ID NO: 2848564 - DNA, 25 bp, Homo sapien
tagctaaaagtccactctttgcctt

SEQ ID NO: 2848565 - DNA, 25 bp, Homo sapien
cattgacattgtggtttctcttgaa

SEQ ID NO: 2848566 - DNA, 25 bp, Homo sapien
attgacattgtggtttctcttgaac

SEQ ID NO: 2848567 - DNA, 25 bp, Homo sapien
gggactcattgacattgtggtttct

SEQ ID NO: 2848568 - DNA, 25 bp, Homo sapien
tgggactcattgacattgtggtttc

SEQ ID NO: 2848569 - DNA, 25 bp, Homo sapien
tggaactgtccggaaatagcaccct

SEQ ID NO: 2848570 - DNA, 25 bp, Homo sapien
tattcctagcaactctagtcgaggg

SEQ ID NO: 2848571 - DNA, 25 bp, Homo sapien
tagtcgagggtaaacaagaggcact

SEQ ID NO: 2848572 - DNA, 25 bp, Homo sapien
tgatcaacttaaccccagtcaaggg

SEQ ID NO: 2848573 - DNA, 25 bp, Homo sapien
aaggcactgtctatgagccagaaca

SEQ ID NO: 2848574 - DNA, 25 bp, Homo sapien
tatctgaggcctgaaagtgtgagcc

SEQ ID NO: 2848575 - DNA, 25 bp, Homo sapien
tgtgaggtacagctagaaggcactg

SEQ ID NO: 2848576 - DNA, 25 bp, Homo sapien
tgtaataggctccagatagatcctc

SEQ ID NO: 2848577 - DNA, 25 bp, Homo sapien
gattgtgagccataagaatgccagt

SEQ ID NO: 2848578 - DNA, 25 bp, Homo sapien
tgattgaagcgccacatctacttgg

SEQ ID NO: 2848579 - DNA, 25 bp, Homo sapien
tcatttgaaactgcccaagtgcttg

SEQ ID NO: 2848580 - DNA, 25 bp, Homo sapien
tagagctacaagtctcagagccctg

SEQ ID NO: 2848581 - DNA, 25 bp, Homo sapien
tgttctcaagattaccaaaggccat

SEQ ID NO: 2848582 - DNA, 25 bp, Homo sapien
gcacaatcagaaggaatgagtttcc

SEQ ID NO: 2848583 - DNA, 25 bp, Homo sapien
taggacatttgtccaccgctggtgc

SEQ ID NO: 2848584 - DNA, 25 bp, Homo sapien
cagactttagtactggactaggaca

SEQ ID NO: 2848585 - DNA, 25 bp, Homo sapien
aatccagcttactgaaacaagcact

SEQ ID NO: 2848586 - DNA, 25 bp, Homo sapien
tgaagacaatatcccttcgtatctc

SEQ ID NO: 2848587 - DNA, 25 bp, Homo sapien
taaggagttatatgagaggatccaa

SEQ ID NO: 2848588 - DNA, 25 bp, Homo sapien
tatcccttcgtatctctttccgtga

SEQ ID NO: 2848589 - DNA, 25 bp, Homo sapien
tcttttctgccaaacagatttttat

SEQ ID NO: 2848590 - DNA, 25 bp, Homo sapien
acatttcttttctgccaaacagatt

SEQ ID NO: 2848591 - DNA, 25 bp, Homo sapien
aacagatttttatcttggaaagcaa

SEQ ID NO: 2848592 - DNA, 25 bp, Homo sapien
gatttttatcttggaaagcaaatac

SEQ ID NO: 2848593 - DNA, 25 bp, Homo sapien
gatatattgactaccttgctcccca

SEQ ID NO: 2848594 - DNA, 25 bp, Homo sapien
gtaatagttgtttgggcactgtcca

SEQ ID NO: 2848595 - DNA, 25 bp, Homo sapien
gcactgtccaagtccgatatattga

SEQ ID NO: 2848596 - DNA, 25 bp, Homo sapien
cccagaggcttttcgtaacaagaag

SEQ ID NO: 2848597 - DNA, 25 bp, Homo sapien
tctgagtcccaagtctgttgcttag

SEQ ID NO: 2848598 - DNA, 25 bp, Homo sapien
gactgtgggtctattagcataagct

SEQ ID NO: 2848599 - DNA, 25 bp, Homo sapien
tacactagaactgttaggccgaaag

SEQ ID NO: 2848600 - DNA, 25 bp, Homo sapien
cataagctagaactgtaagtggtga

SEQ ID NO: 2848601 - DNA, 25 bp, Homo sapien
tcacttagactttctgtgagagatc

SEQ ID NO: 2848602 - DNA, 25 bp, Homo sapien
cttgttgctcaaatcacttagactt

SEQ ID NO: 2848603 - DNA, 25 bp, Homo sapien
gctcaaatcacttagactttctgtg

SEQ ID NO: 2848604 - DNA, 25 bp, Homo sapien
tgcttgatgaggcaatacattctct

SEQ ID NO: 2848605 - DNA, 25 bp, Homo sapien
ttcactcctggagatgaactccaga

SEQ ID NO: 2848606 - DNA, 25 bp, Homo sapien
agttcttcaaattcactcctggaga

SEQ ID NO: 2848607 - DNA, 25 bp, Homo sapien
ctggagatgaactccagatttaaat

SEQ ID NO: 2848608 - DNA, 25 bp, Homo sapien
tcactcctggagatgaactccagat

SEQ ID NO: 2848609 - DNA, 25 bp, Homo sapien
gttcctcagatacagcaacgagcag

SEQ ID NO: 2848610 - DNA, 25 bp, Homo sapien
ccagtgggccagtgctaggtctaga

SEQ ID NO: 2848611 - DNA, 25 bp, Homo sapien
gagaaaattcagtaggcaccagttg

SEQ ID NO: 2848612 - DNA, 25 bp, Homo sapien
ttaatcgcagatctcccgaaggccc

SEQ ID NO: 2848613 - DNA, 25 bp, Homo sapien
ctgaacttccaggttagtcctccac

SEQ ID NO: 2848614 - DNA, 25 bp, Homo sapien
aacttccaggttagtcctccactca

SEQ ID NO: 2848615 - DNA, 25 bp, Homo sapien
caggttagtcctccactcacacttg

SEQ ID NO: 2848616 - DNA, 25 bp, Homo sapien
ggttagtcctccactcacacttgga

SEQ ID NO: 2848617 - DNA, 25 bp, Homo sapien
ggtcacacatggaagaggctgttgt

SEQ ID NO: 2848618 - DNA, 25 bp, Homo sapien
ggctgttgtgtccatcttgtccaca

SEQ ID NO: 2848619 - DNA, 25 bp, Homo sapien
gatttcagcttgttgacttgcagcc

SEQ ID NO: 2848620 - DNA, 25 bp, Homo sapien
tgtccacactgatttcagcttgttg

SEQ ID NO: 2848621 - DNA, 25 bp, Homo sapien
tctatcttcgcgcagttgtcaaact

SEQ ID NO: 2848622 - DNA, 25 bp, Homo sapien
gcagttgtcaaactgacacaaagac

SEQ ID NO: 2848623 - DNA, 25 bp, Homo sapien
cacaaagacctgagaactgtattct

SEQ ID NO: 2848624 - DNA, 25 bp, Homo sapien
gggtgttcctgcttatgtagactcc

SEQ ID NO: 2848625 - DNA, 25 bp, Homo sapien
cgagaattcggttgtgagtctgata

SEQ ID NO: 2848626 - DNA, 25 bp, Homo sapien
agataattgtgggttcataagcact

SEQ ID NO: 2848627 - DNA, 25 bp, Homo sapien
tctttggaagataaccagtctccta

SEQ ID NO: 2848628 - DNA, 25 bp, Homo sapien
gatccctatgctgcccttttacatc

SEQ ID NO: 2848629 - DNA, 25 bp, Homo sapien
caggtaggaacttaaattactgatt

SEQ ID NO: 2848630 - DNA, 25 bp, Homo sapien
tacttcacttctaaccagttcttac

SEQ ID NO: 2848631 - DNA, 25 bp, Homo sapien
gaagtcaaaccctaacctctgcagc

SEQ ID NO: 2848632 - DNA, 25 bp, Homo sapien
cccaggtggtcagcatttggtcaat

SEQ ID NO: 2848633 - DNA, 25 bp, Homo sapien
tatctgctgactatttgtattacat

SEQ ID NO: 2848634 - DNA, 25 bp, Homo sapien
taataaacatgggactgcagacatc

SEQ ID NO: 2848635 - DNA, 25 bp, Homo sapien
ttcatatatctgctgactatttgta

SEQ ID NO: 2848636 - DNA, 25 bp, Homo sapien
tcccagtgattacaaatgttgagca

SEQ ID NO: 2848637 - DNA, 25 bp, Homo sapien
tttcttctcatccataggttgtctc

SEQ ID NO: 2848638 - DNA, 25 bp, Homo sapien
cagtgcagagaaagaatctatcagt

SEQ ID NO: 2848639 - DNA, 25 bp, Homo sapien
ttaccataataacaagaagaggcac

SEQ ID NO: 2848640 - DNA, 25 bp, Homo sapien
caaacttgggcagtacagcacagtg

SEQ ID NO: 2848641 - DNA, 25 bp, Homo sapien
taatagaaccctctgacaagtatcc

SEQ ID NO: 2848642 - DNA, 25 bp, Homo sapien
tgaacatattcatgtatagtcaatt

SEQ ID NO: 2848643 - DNA, 25 bp, Homo sapien
gcaatctacagagtccatggaatcc

SEQ ID NO: 2848644 - DNA, 25 bp, Homo sapien
agcaatctacagagtccatggaatc

SEQ ID NO: 2848645 - DNA, 25 bp, Homo sapien
agaaatgaacatattcatgtatagt

SEQ ID NO: 2848646 - DNA, 25 bp, Homo sapien
tgatatgggaatttctaagttctct

SEQ ID NO: 2848647 - DNA, 25 bp, Homo sapien
gattctctatggctgaacgtgcagg

SEQ ID NO: 2848648 - DNA, 25 bp, Homo sapien
tataagaactgattctctatggctg

SEQ ID NO: 2848649 - DNA, 25 bp, Homo sapien
ttgaattcaggaatgatatgggaat

SEQ ID NO: 2848650 - DNA, 25 bp, Homo sapien
actggcatttaaaaaaggcatagtg

SEQ ID NO: 2848651 - DNA, 25 bp, Homo sapien
gcatttaaaaaaggcatagtgcctt

SEQ ID NO: 2848652 - DNA, 25 bp, Homo sapien
tggcatttaaaaaaggcatagtgcc

SEQ ID NO: 2848653 - DNA, 25 bp, Homo sapien
caggtactggcatttaaaaaaggca

SEQ ID NO: 2848654 - DNA, 25 bp, Homo sapien
gccatggagataggtctgaaaaaga

SEQ ID NO: 2848655 - DNA, 25 bp, Homo sapien
gaatgagggaatccaactgggctgc

SEQ ID NO: 2848656 - DNA, 25 bp, Homo sapien
tgcacaaggcagtaagccctccagg

SEQ ID NO: 2848657 - DNA, 25 bp, Homo sapien
tctctactctgacccctggtaaaaa

SEQ ID NO: 2848658 - DNA, 25 bp, Homo sapien
ctttaaacagagaggcagtagggat

SEQ ID NO: 2848659 - DNA, 25 bp, Homo sapien
ctgaactaaatgaccctctaagggc

SEQ ID NO: 2848660 - DNA, 25 bp, Homo sapien
tggaagttgctaagcctctctgggc

SEQ ID NO: 2848661 - DNA, 25 bp, Homo sapien
tagtgctgctgatttagacaccaag

SEQ ID NO: 2848662 - DNA, 25 bp, Homo sapien
aatacttactgatcacataggttta

SEQ ID NO: 2848663 - DNA, 25 bp, Homo sapien
cacataggtttatagtaattgattg

SEQ ID NO: 2848664 - DNA, 25 bp, Homo sapien
ttgattgagataacacccatagagt

SEQ ID NO: 2848665 - DNA, 25 bp, Homo sapien
attgattgagataacacccatagag

SEQ ID NO: 2848666 - DNA, 25 bp, Homo sapien
ggcttcaccagaaacccatcccgcc

SEQ ID NO: 2848667 - DNA, 25 bp, Homo sapien
tgttgaagctacccagtctctgata

SEQ ID NO: 2848668 - DNA, 25 bp, Homo sapien
agcaccttaatctagcctctggaac

SEQ ID NO: 2848669 - DNA, 25 bp, Homo sapien
aaatcaatctctattgttgaagcta

SEQ ID NO: 2848670 - DNA, 25 bp, Homo sapien
gaattgcatgttgctgtatatcacc

SEQ ID NO: 2848671 - DNA, 25 bp, Homo sapien
ttgagtctttccatctgtgaacatg

SEQ ID NO: 2848672 - DNA, 25 bp, Homo sapien
ttaagaattagcttttcagtttcca

SEQ ID NO: 2848673 - DNA, 25 bp, Homo sapien
gatgttttgaccctctgtacttaga

SEQ ID NO: 2848674 - DNA, 25 bp, Homo sapien
aaggcgaaggggaagcaaggcacat

SEQ ID NO: 2848675 - DNA, 25 bp, Homo sapien
agaaggcgaaggggaagcaaggcac

SEQ ID NO: 2848676 - DNA, 25 bp, Homo sapien
gaaggcgaaggggaagcaaggcaca

SEQ ID NO: 2848677 - DNA, 25 bp, Homo sapien
gacttagagaattgggcattataaa

SEQ ID NO: 2848678 - DNA, 25 bp, Homo sapien
tagagaattgggcattataaacagc

SEQ ID NO: 2848679 - DNA, 25 bp, Homo sapien
tgttccctggtgctaagtccagagt

SEQ ID NO: 2848680 - DNA, 25 bp, Homo sapien
accatcattgttccctggtgctaag

SEQ ID NO: 2848681 - DNA, 25 bp, Homo sapien
gaaagctccccaagccacaatgatg

SEQ ID NO: 2848682 - DNA, 25 bp, Homo sapien
gatctgcactatttggttgccctgg

SEQ ID NO: 2848683 - DNA, 25 bp, Homo sapien
tgcttccttaatgaggtccacagag

SEQ ID NO: 2848684 - DNA, 25 bp, Homo sapien
caaaaccctgattatggatctgcac

SEQ ID NO: 2848685 - DNA, 25 bp, Homo sapien
tggaagaaaggatggtgttcggagg

SEQ ID NO: 2848686 - DNA, 25 bp, Homo sapien
ctggaagaaaggatggtgttcggag

SEQ ID NO: 2848687 - DNA, 25 bp, Homo sapien
gctggaagaaaggatggtgttcgga

SEQ ID NO: 2848688 - DNA, 25 bp, Homo sapien
agctggaagaaaggatggtgttcgg

SEQ ID NO: 2848689 - DNA, 25 bp, Homo sapien
agatgtaaggcaggtaacgagagaa

SEQ ID NO: 2848690 - DNA, 25 bp, Homo sapien
aagatgtaaggcaggtaacgagaga

SEQ ID NO: 2848691 - DNA, 25 bp, Homo sapien
gatgtaaggcaggtaacgagagaag

SEQ ID NO: 2848692 - DNA, 25 bp, Homo sapien
atcagcgccaggaagcactgcctta

SEQ ID NO: 2848693 - DNA, 25 bp, Homo sapien
tcggccttttaagctggctacatca

SEQ ID NO: 2848694 - DNA, 25 bp, Homo sapien
tgcatgcagctcaaactcagaagcc

SEQ ID NO: 2848695 - DNA, 25 bp, Homo sapien
caagcaagccgggatatagcctctt

SEQ ID NO: 2848696 - DNA, 25 bp, Homo sapien
ccttgctgcaaagccgagattttgt

SEQ ID NO: 2848697 - DNA, 25 bp, Homo sapien
caaagccgagattttgttgtggcat

SEQ ID NO: 2848698 - DNA, 25 bp, Homo sapien
cttgaatcacatcctcattccttgc

SEQ ID NO: 2848699 - DNA, 25 bp, Homo sapien
gttgtggcatcctccactcaggcat

SEQ ID NO: 2848700 - DNA, 25 bp, Homo sapien
ttcttctggcagattggagcgccat

SEQ ID NO: 2848701 - DNA, 25 bp, Homo sapien
gcaagcctcctcatatcaagacatt

SEQ ID NO: 2848702 - DNA, 25 bp, Homo sapien
ctgcagagtacagcaagcctcctca

SEQ ID NO: 2848703 - DNA, 25 bp, Homo sapien
gacattctccatcacagctgagaaa

SEQ ID NO: 2848704 - DNA, 25 bp, Homo sapien
ccagtgttagtaacggtgtccacca

SEQ ID NO: 2848705 - DNA, 25 bp, Homo sapien
accaaccacccaattgttcaaagct

SEQ ID NO: 2848706 - DNA, 25 bp, Homo sapien
catgcctggagcctgttatctcttc

SEQ ID NO: 2848707 - DNA, 25 bp, Homo sapien
taaaatctagcctattgcctccaaa

SEQ ID NO: 2848708 - DNA, 25 bp, Homo sapien
tgaagcaccatagtgtgtcctgggt

SEQ ID NO: 2848709 - DNA, 25 bp, Homo sapien
tctgtggttccaatctcgatagtgc

SEQ ID NO: 2848710 - DNA, 25 bp, Homo sapien
gttccaatctcgatagtgcctttca

SEQ ID NO: 2848711 - DNA, 25 bp, Homo sapien
tgcctttcacttggctgaagcacca

SEQ ID NO: 2848712 - DNA, 25 bp, Homo sapien
cctagtgagtcctgagaggacggtc

SEQ ID NO: 2848713 - DNA, 25 bp, Homo sapien
gagaagagaccctagtgagtcctga

SEQ ID NO: 2848714 - DNA, 25 bp, Homo sapien
caggtatcatctcgtcagagaagag

SEQ ID NO: 2848715 - DNA, 25 bp, Homo sapien
gagaggacggtcagtctgcaagtac

SEQ ID NO: 2848716 - DNA, 25 bp, Homo sapien
gagtggttacgaaggacttgcagtc

SEQ ID NO: 2848717 - DNA, 25 bp, Homo sapien
cctggcagcgtcctggagtggttac

SEQ ID NO: 2848718 - DNA, 25 bp, Homo sapien
gctctgtctcctccgtttgaccagg

SEQ ID NO: 2848719 - DNA, 25 bp, Homo sapien
tcccctgtgtgactggcccttttca

SEQ ID NO: 2848720 - DNA, 25 bp, Homo sapien
gaaggccagaatagagaatcgctgt

SEQ ID NO: 2848721 - DNA, 25 bp, Homo sapien
gagcagttagagtttccttggcagc

SEQ ID NO: 2848722 - DNA, 25 bp, Homo sapien
tcaaggtcttaggaggccaggcatc

SEQ ID NO: 2848723 - DNA, 25 bp, Homo sapien
ctctgggatcttcatacacagacag

SEQ ID NO: 2848724 - DNA, 25 bp, Homo sapien
agtccccaggtttgtagcaaatgtc

SEQ ID NO: 2848725 - DNA, 25 bp, Homo sapien
tggttaaggtgctacctttccgaca

SEQ ID NO: 2848726 - DNA, 25 bp, Homo sapien
ctacctttccgacaatctgtggaca

SEQ ID NO: 2848727 - DNA, 25 bp, Homo sapien
caaatgtcagcaacttggtgctgtt

SEQ ID NO: 2848728 - DNA, 25 bp, Homo sapien
acagatgagtacattgggtcacaaa

SEQ ID NO: 2848729 - DNA, 25 bp, Homo sapien
gagtcttcaatcacttgtcccatga

SEQ ID NO: 2848730 - DNA, 25 bp, Homo sapien
gaatccgagctgttctgtatgcaga

SEQ ID NO: 2848731 - DNA, 25 bp, Homo sapien
tgtctccctctacacagcaagttgg

SEQ ID NO: 2848732 - DNA, 25 bp, Homo sapien
ctccaaagtgtgattcttaatctca

SEQ ID NO: 2848733 - DNA, 25 bp, Homo sapien
caagtcgggaagtagtggcttcaaa

SEQ ID NO: 2848734 - DNA, 25 bp, Homo sapien
gattcttaatctcaggctttccaga

SEQ ID NO: 2848735 - DNA, 25 bp, Homo sapien
ggctttccagacaagtcgggaagta

SEQ ID NO: 2848736 - DNA, 25 bp, Homo sapien
ttccactgtgcaaaaactcccagac

SEQ ID NO: 2848737 - DNA, 25 bp, Homo sapien
tgttgtttgtattgaaaagccacac

SEQ ID NO: 2848738 - DNA, 25 bp, Homo sapien
aaagccacacccttttgatctttag

SEQ ID NO: 2848739 - DNA, 25 bp, Homo sapien
gatctttagaaccaatccatagtcc

SEQ ID NO: 2848740 - DNA, 25 bp, Homo sapien
aagctcagggtgcatggacttctta

SEQ ID NO: 2848741 - DNA, 25 bp, Homo sapien
gatcacagggattctcagagtcaag

SEQ ID NO: 2848742 - DNA, 25 bp, Homo sapien
aatagctctgaggtccaagcactgc

SEQ ID NO: 2848743 - DNA, 25 bp, Homo sapien
gctgggaactgaatgcctacacgtg

SEQ ID NO: 2848744 - DNA, 25 bp, Homo sapien
taaccgtctcttataggctaattgt

SEQ ID NO: 2848745 - DNA, 25 bp, Homo sapien
cacacattaaccgtctcttataggc

SEQ ID NO: 2848746 - DNA, 25 bp, Homo sapien
ccgtctcttataggctaattgtgtc

SEQ ID NO: 2848747 - DNA, 25 bp, Homo sapien
ctgcttcacacattaaccgtctctt

SEQ ID NO: 2848748 - DNA, 25 bp, Homo sapien
ccagctccgtgtgggtgttcagtgc

SEQ ID NO: 2848749 - DNA, 25 bp, Homo sapien
tccagcccaccttgtgatataacag

SEQ ID NO: 2848750 - DNA, 25 bp, Homo sapien
gggatttggatccaggtagcctgtc

SEQ ID NO: 2848751 - DNA, 25 bp, Homo sapien
tcaccacctgaattgggagccttgg

SEQ ID NO: 2848752 - DNA, 25 bp, Homo sapien
ctacttcccactggtgaagtgtcac

SEQ ID NO: 2848753 - DNA, 25 bp, Homo sapien
ctctacttcccactggtgaagtgtc

SEQ ID NO: 2848754 - DNA, 25 bp, Homo sapien
tctacttcccactggtgaagtgtca

SEQ ID NO: 2848755 - DNA, 25 bp, Homo sapien
tacttcccactggtgaagtgtcacc

SEQ ID NO: 2848756 - DNA, 25 bp, Homo sapien
gagttatgcacgatcctgaaccatc

SEQ ID NO: 2848757 - DNA, 25 bp, Homo sapien
gatcctgaaccatcccacgatgtgg

SEQ ID NO: 2848758 - DNA, 25 bp, Homo sapien
tctgccttcatagagttatgcacga

SEQ ID NO: 2848759 - DNA, 25 bp, Homo sapien
atctgaatctgccttcatagagtta

SEQ ID NO: 2848760 - DNA, 25 bp, Homo sapien
ctgaaggagttgcttgcttatattc

SEQ ID NO: 2848761 - DNA, 25 bp, Homo sapien
gatacggagtgggattaggagggaa

SEQ ID NO: 2848762 - DNA, 25 bp, Homo sapien
ctgcagatacggagtgggattagga

SEQ ID NO: 2848763 - DNA, 25 bp, Homo sapien
cagatacggagtgggattaggaggg

SEQ ID NO: 2848764 - DNA, 25 bp, Homo sapien
tggataactcaaccacctgactgag

SEQ ID NO: 2848765 - DNA, 25 bp, Homo sapien
aatctcttggtactctcaggtgcag

SEQ ID NO: 2848766 - DNA, 25 bp, Homo sapien
tggaaatcgtaatctctggctcagg

SEQ ID NO: 2848767 - DNA, 25 bp, Homo sapien
gaccctctggttatgaaggcttgga

SEQ ID NO: 2848768 - DNA, 25 bp, Homo sapien
cctgtactccagttagcaaagcctc

SEQ ID NO: 2848769 - DNA, 25 bp, Homo sapien
ctgtactccagttagcaaagcctca

SEQ ID NO: 2848770 - DNA, 25 bp, Homo sapien
tgtactccagttagcaaagcctcag

SEQ ID NO: 2848771 - DNA, 25 bp, Homo sapien
ctgtgcgtcctggtggctccggacc

SEQ ID NO: 2848772 - DNA, 25 bp, Homo sapien
ggtccttgtctagtctcagcaggcg

SEQ ID NO: 2848773 - DNA, 25 bp, Homo sapien
tcagcaggcggcaaacggaccccag

SEQ ID NO: 2848774 - DNA, 25 bp, Homo sapien
agcgcggcgggacctccatccgtag

SEQ ID NO: 2848775 - DNA, 25 bp, Homo sapien
tgtgaagctctttaatgaacagggc

SEQ ID NO: 2848776 - DNA, 25 bp, Homo sapien
accaaggatcaactaggcatttcca

SEQ ID NO: 2848777 - DNA, 25 bp, Homo sapien
caaggttatgtctaaaccaaggatc

SEQ ID NO: 2848778 - DNA, 25 bp, Homo sapien
ctggactcggcatggacagctctgg

SEQ ID NO: 2848779 - DNA, 25 bp, Homo sapien
ttatggctactcctgttgatgtatc

SEQ ID NO: 2848780 - DNA, 25 bp, Homo sapien
tgttgatgtatccatttggccacac

SEQ ID NO: 2848781 - DNA, 25 bp, Homo sapien
ttggccacacttcttaaacttctcc

SEQ ID NO: 2848782 - DNA, 25 bp, Homo sapien
tactcctgttgatgtatccatttgg

SEQ ID NO: 2848783 - DNA, 25 bp, Homo sapien
ccagaaggagttcataattttcaac

SEQ ID NO: 2848784 - DNA, 25 bp, Homo sapien
cagaaggagttcataattttcaaca

SEQ ID NO: 2848785 - DNA, 25 bp, Homo sapien
agaaggagttcataattttcaacag

SEQ ID NO: 2848786 - DNA, 25 bp, Homo sapien
tccagaaggagttcataattttcaa

SEQ ID NO: 2848787 - DNA, 25 bp, Homo sapien
ccaagacaggcaagttcatggagac

SEQ ID NO: 2848788 - DNA, 25 bp, Homo sapien
gaacagtggtatcatgtctcccttc

SEQ ID NO: 2848789 - DNA, 25 bp, Homo sapien
taagggaacagtggtatcatgtctc

SEQ ID NO: 2848790 - DNA, 25 bp, Homo sapien
ttcatggagactaagggaacagtgg

SEQ ID NO: 2848791 - DNA, 25 bp, Homo sapien
ccactagatgttctattatcatagc

SEQ ID NO: 2848792 - DNA, 25 bp, Homo sapien
cttctgataggaaagtttcaaccag

SEQ ID NO: 2848793 - DNA, 25 bp, Homo sapien
cacagagcattgctaaattaattac

SEQ ID NO: 2848794 - DNA, 25 bp, Homo sapien
tctaattaattagtagctaggcttc

SEQ ID NO: 2848795 - DNA, 25 bp, Homo sapien
gtctgactgatattaaacactgata

SEQ ID NO: 2848796 - DNA, 25 bp, Homo sapien
cacttatctgtgctgttgtgaacag

SEQ ID NO: 2848797 - DNA, 25 bp, Homo sapien
gtttctgtacccagttgtccctgta

SEQ ID NO: 2848798 - DNA, 25 bp, Homo sapien
tgtgattcctgtttattacaaattc

SEQ ID NO: 2848799 - DNA, 25 bp, Homo sapien
aatcagatagacgatccagcgtgcc

SEQ ID NO: 2848800 - DNA, 25 bp, Homo sapien
cgtctttaagctgtgggtgccctca

SEQ ID NO: 2848801 - DNA, 25 bp, Homo sapien
taaaatcctgacttgggatgccaga

SEQ ID NO: 2848802 - DNA, 25 bp, Homo sapien
tatagacagtcgtgaagaacaaggc

SEQ ID NO: 2848803 - DNA, 25 bp, Homo sapien
ggagtcaaacaaatcaaggctatgc

SEQ ID NO: 2848804 - DNA, 25 bp, Homo sapien
cttctcggcagaccctagggagctg

SEQ ID NO: 2848805 - DNA, 25 bp, Homo sapien
tcttccatggaaataacgtacgtca

SEQ ID NO: 2848806 - DNA, 25 bp, Homo sapien
tattcgtaaagctaggcaagcgagc

SEQ ID NO: 2848807 - DNA, 25 bp, Homo sapien
gcgaaccccctcatccacttgggtg

SEQ ID NO: 2848808 - DNA, 25 bp, Homo sapien
ttgctggctgagcgaaccccctcat

SEQ ID NO: 2848809 - DNA, 25 bp, Homo sapien
atgtgatattagaacggccgcctgg

SEQ ID NO: 2848810 - DNA, 25 bp, Homo sapien
tgtgatattagaacggccgcctggg

SEQ ID NO: 2848811 - DNA, 25 bp, Homo sapien
ctacagttggaaataaattcccagg

SEQ ID NO: 2848812 - DNA, 25 bp, Homo sapien
tgcaagatatgaagtgccttgctgg

SEQ ID NO: 2848813 - DNA, 25 bp, Homo sapien
cattccagtctatcaggtcttctag

SEQ ID NO: 2848814 - DNA, 25 bp, Homo sapien
aacttccattccagtctatcaggtc

SEQ ID NO: 2848815 - DNA, 25 bp, Homo sapien
agaaacttccattccagtctatcag

SEQ ID NO: 2848816 - DNA, 25 bp, Homo sapien
tccattccagtctatcaggtcttct

SEQ ID NO: 2848817 - DNA, 25 bp, Homo sapien
caggcaatgttttccgtgcttaacc

SEQ ID NO: 2848818 - DNA, 25 bp, Homo sapien
caccaccatggtttgagagaggtgc

SEQ ID NO: 2848819 - DNA, 25 bp, Homo sapien
gacgtgacactcattgtggcaggca

SEQ ID NO: 2848820 - DNA, 25 bp, Homo sapien
ttctgaaaggttaggtcacttgccc

SEQ ID NO: 2848821 - DNA, 25 bp, Homo sapien
aatcctaggttagaagacgctactg

SEQ ID NO: 2848822 - DNA, 25 bp, Homo sapien
ggtaagactaatcacatggctaaca

SEQ ID NO: 2848823 - DNA, 25 bp, Homo sapien
gactactggttatggagcaactgaa

SEQ ID NO: 2848824 - DNA, 25 bp, Homo sapien
gcgctcataggctaatgctggaaat

SEQ ID NO: 2848825 - DNA, 25 bp, Homo sapien
tatcttttgatgagcctgtcccact

SEQ ID NO: 2848826 - DNA, 25 bp, Homo sapien
atcttttgatgagcctgtcccactc

SEQ ID NO: 2848827 - DNA, 25 bp, Homo sapien
ttatcttttgatgagcctgtcccac

SEQ ID NO: 2848828 - DNA, 25 bp, Homo sapien
cttttgatgagcctgtcccactcac

SEQ ID NO: 2848829 - DNA, 25 bp, Homo sapien
gtggtcaggtcaaacacaggcccat

SEQ ID NO: 2848830 - DNA, 25 bp, Homo sapien
tgacaggctaaatcccgactgatga

SEQ ID NO: 2848831 - DNA, 25 bp, Homo sapien
ggcccatcgtacatgccccttggga

SEQ ID NO: 2848832 - DNA, 25 bp, Homo sapien
gatgaagattcctcacaggtgggtt

SEQ ID NO: 2848833 - DNA, 25 bp, Homo sapien
tgcaccacctcagagctccaatgct

SEQ ID NO: 2848834 - DNA, 25 bp, Homo sapien
atctctgagcgtgagtggaacacaa

SEQ ID NO: 2848835 - DNA, 25 bp, Homo sapien
tctctgagcgtgagtggaacacaaa

SEQ ID NO: 2848836 - DNA, 25 bp, Homo sapien
tatctctgagcgtgagtggaacaca

SEQ ID NO: 2848837 - DNA, 25 bp, Homo sapien
ctgcagggtatgaagcggccagccc

SEQ ID NO: 2848838 - DNA, 25 bp, Homo sapien
cttcctccgtgctttaatgcgcttg

SEQ ID NO: 2848839 - DNA, 25 bp, Homo sapien
tcacgtgcaggttgccatcttccag

SEQ ID NO: 2848840 - DNA, 25 bp, Homo sapien
agacatagtcggagaacgggctgca

SEQ ID NO: 2848841 - DNA, 25 bp, Homo sapien
caggcacaaaggatcattgcacgcc

SEQ ID NO: 2848842 - DNA, 25 bp, Homo sapien
ttccggaagttaggtatagccacag

SEQ ID NO: 2848843 - DNA, 25 bp, Homo sapien
catgtgagaggcagtgacgtacacc

SEQ ID NO: 2848844 - DNA, 25 bp, Homo sapien
agagccagtagaccattcaccaggt

SEQ ID NO: 2848845 - DNA, 25 bp, Homo sapien
tctggatcccagatgacgaggtcgc

SEQ ID NO: 2848846 - DNA, 25 bp, Homo sapien
gaggtcgctgtcagaacccacagat

SEQ ID NO: 2848847 - DNA, 25 bp, Homo sapien
tgtgcttgtcacagccacgaactgg

SEQ ID NO: 2848848 - DNA, 25 bp, Homo sapien
agagacgatcttcacagcatctgga

SEQ ID NO: 2848849 - DNA, 25 bp, Homo sapien
gccctcaggaatggctgtgaagttg

SEQ ID NO: 2848850 - DNA, 25 bp, Homo sapien
gctcctccacaccattggtgccctc

SEQ ID NO: 2848851 - DNA, 25 bp, Homo sapien
ctccacaccattggtgccctcagga

SEQ ID NO: 2848852 - DNA, 25 bp, Homo sapien
ccacaccattggtgccctcaggaat

SEQ ID NO: 2848853 - DNA, 25 bp, Homo sapien
ctggcaaaggagaaaagctccacat

SEQ ID NO: 2848854 - DNA, 25 bp, Homo sapien
gcaaaggagaaaagctccacatgaa

SEQ ID NO: 2848855 - DNA, 25 bp, Homo sapien
aaaggagaaaagctccacatgaaca

SEQ ID NO: 2848856 - DNA, 25 bp, Homo sapien
ggagaaaagctccacatgaacaggg

SEQ ID NO: 2848857 - DNA, 25 bp, Homo sapien
caaggagttgatgtagtccggagta

SEQ ID NO: 2848858 - DNA, 25 bp, Homo sapien
taatgggttccatctatgccgaggc

SEQ ID NO: 2848859 - DNA, 25 bp, Homo sapien
gatgtcacaaatgcagccgccttgg

SEQ ID NO: 2848860 - DNA, 25 bp, Homo sapien
tggccagcaaggagttgatgtagtc

SEQ ID NO: 2848861 - DNA, 25 bp, Homo sapien
gagggcaattggtttggctggcaat

SEQ ID NO: 2848862 - DNA, 25 bp, Homo sapien
gtgatggcacggaacacagcctcag

SEQ ID NO: 2848863 - DNA, 25 bp, Homo sapien
tcctggcttgtgagatgaggtcagc

SEQ ID NO: 2848864 - DNA, 25 bp, Homo sapien
cctttgtgacgtagagagggcaatt

SEQ ID NO: 2848865 - DNA, 25 bp, Homo sapien
gaacctctcaaactggtggctccca

SEQ ID NO: 2848866 - DNA, 25 bp, Homo sapien
tagaaacatgaacctctcaaactgg

SEQ ID NO: 2848867 - DNA, 25 bp, Homo sapien
aaaagtctccaggagtcaatagaaa

SEQ ID NO: 2848868 - DNA, 25 bp, Homo sapien
tctccaggagtcaatagaaacatga

SEQ ID NO: 2848869 - DNA, 25 bp, Homo sapien
ggcagttaggcatcatggttcctca

SEQ ID NO: 2848870 - DNA, 25 bp, Homo sapien
tgtctaaaataaccagccaaggcag

SEQ ID NO: 2848871 - DNA, 25 bp, Homo sapien
gatagcctatatccacatctcagat

SEQ ID NO: 2848872 - DNA, 25 bp, Homo sapien
gaatctctgggcaaacacaatagca

SEQ ID NO: 2848873 - DNA, 25 bp, Homo sapien
gcccaatggctgtataatgcaaacc

SEQ ID NO: 2848874 - DNA, 25 bp, Homo sapien
taccaaaaatagcttgcagatgccc

SEQ ID NO: 2848875 - DNA, 25 bp, Homo sapien
gacattctggttagcctgtggagcc

SEQ ID NO: 2848876 - DNA, 25 bp, Homo sapien
ccccttgagggttggctactgatat

SEQ ID NO: 2848877 - DNA, 25 bp, Homo sapien
ccatttccaacatgcgggtttgctc

SEQ ID NO: 2848878 - DNA, 25 bp, Homo sapien
tcttctggcctgctcagtacatggc

SEQ ID NO: 2848879 - DNA, 25 bp, Homo sapien
gggccagttatccccatttccaaca

SEQ ID NO: 2848880 - DNA, 25 bp, Homo sapien
tggcctgctcagtacatggccttct

SEQ ID NO: 2848881 - DNA, 25 bp, Homo sapien
cagcatgaacttgagcaatggcccc

SEQ ID NO: 2848882 - DNA, 25 bp, Homo sapien
ccaggcaggtgaagatctcatagag

SEQ ID NO: 2848883 - DNA, 25 bp, Homo sapien
aacttgagcaatggcccccagctct

SEQ ID NO: 2848884 - DNA, 25 bp, Homo sapien
atgaacttgagcaatggcccccagc

SEQ ID NO: 2848885 - DNA, 25 bp, Homo sapien
caagcacttttagcagccccacaga

SEQ ID NO: 2848886 - DNA, 25 bp, Homo sapien
aagcacttttagcagccccacagaa

SEQ ID NO: 2848887 - DNA, 25 bp, Homo sapien
ttgcaagcacttttagcagccccac

SEQ ID NO: 2848888 - DNA, 25 bp, Homo sapien
gcaagcacttttagcagccccacag

SEQ ID NO: 2848889 - DNA, 25 bp, Homo sapien
ccaaaccacatagcaaatgggttgt

SEQ ID NO: 2848890 - DNA, 25 bp, Homo sapien
caaaccacatagcaaatgggttgtt

SEQ ID NO: 2848891 - DNA, 25 bp, Homo sapien
aaccacatagcaaatgggttgttac

SEQ ID NO: 2848892 - DNA, 25 bp, Homo sapien
cccaaaccacatagcaaatgggttg

SEQ ID NO: 2848893 - DNA, 25 bp, Homo sapien
taagccatataaaccatgaaggagt

SEQ ID NO: 2848894 - DNA, 25 bp, Homo sapien
ctctgtgttagatacttgatacaaa

SEQ ID NO: 2848895 - DNA, 25 bp, Homo sapien
gatacaaatccttataagccatata

SEQ ID NO: 2848896 - DNA, 25 bp, Homo sapien
catataaaccatgaaggagttaacc

SEQ ID NO: 2848897 - DNA, 25 bp, Homo sapien
ccaggccgccttacaatgctgagca

SEQ ID NO: 2848898 - DNA, 25 bp, Homo sapien
ccccaggccgccttacaatgctgag

SEQ ID NO: 2848899 - DNA, 25 bp, Homo sapien
acccccaggccgccttacaatgctg

SEQ ID NO: 2848900 - DNA, 25 bp, Homo sapien
caggccgccttacaatgctgagcac

SEQ ID NO: 2848901 - DNA, 25 bp, Homo sapien
gcttgacgctgtcattccagtgggt

SEQ ID NO: 2848902 - DNA, 25 bp, Homo sapien
ctgcttgacgctgtcattccagtgg

SEQ ID NO: 2848903 - DNA, 25 bp, Homo sapien
tgcttgacgctgtcattccagtggg

SEQ ID NO: 2848904 - DNA, 25 bp, Homo sapien
cctcagtcaggctggactcaggctc

SEQ ID NO: 2848905 - DNA, 25 bp, Homo sapien
ctccatttctcataggcctcagtca

SEQ ID NO: 2848906 - DNA, 25 bp, Homo sapien
tctcataggcctcagtcaggctgga

SEQ ID NO: 2848907 - DNA, 25 bp, Homo sapien
acatgcagggcatagtcacagcaac

SEQ ID NO: 2848908 - DNA, 25 bp, Homo sapien
ttatcggaaagcaaatgcgtggagc

SEQ ID NO: 2848909 - DNA, 25 bp, Homo sapien
tggagaattgcaccctgaattgcac

SEQ ID NO: 2848910 - DNA, 25 bp, Homo sapien
tcaaggatgccaaacaggtccaact

SEQ ID NO: 2848911 - DNA, 25 bp, Homo sapien
agcagcctgagtgcacttatcggaa

SEQ ID NO: 2848912 - DNA, 25 bp, Homo sapien
gactgccctggaatgctattggttc

SEQ ID NO: 2848913 - DNA, 25 bp, Homo sapien
caatggcatgcaactccctagattt

SEQ ID NO: 2848914 - DNA, 25 bp, Homo sapien
tgttaaaataaacagtgctctctgc

SEQ ID NO: 2848915 - DNA, 25 bp, Homo sapien
tgaattggtcaaaatacagcgcaga

SEQ ID NO: 2848916 - DNA, 25 bp, Homo sapien
aatttccgagaaatgtaattctcca

SEQ ID NO: 2848917 - DNA, 25 bp, Homo sapien
gagaaatgtaattctccataatccc

SEQ ID NO: 2848918 - DNA, 25 bp, Homo sapien
aatgtaattctccataatccctctc

SEQ ID NO: 2848919 - DNA, 25 bp, Homo sapien
cactgaagtttacaaaatttccgag

SEQ ID NO: 2848920 - DNA, 25 bp, Homo sapien
gtttcatcttctatccataactttt

SEQ ID NO: 2848921 - DNA, 25 bp, Homo sapien
tgtttcatcttctatccataacttt

SEQ ID NO: 2848922 - DNA, 25 bp, Homo sapien
catcttctatccataactttttaag

SEQ ID NO: 2848923 - DNA, 25 bp, Homo sapien
ttcatcttctatccataacttttta

SEQ ID NO: 2848924 - DNA, 25 bp, Homo sapien
ctttagttacagggagctgcccatt

SEQ ID NO: 2848925 - DNA, 25 bp, Homo sapien
tctttagttacagggagctgcccat

SEQ ID NO: 2848926 - DNA, 25 bp, Homo sapien
ggacatcgatgcctccagggatcac

SEQ ID NO: 2848927 - DNA, 25 bp, Homo sapien
tctggaagtgagtatggacatcgat

SEQ ID NO: 2848928 - DNA, 25 bp, Homo sapien
gtgccacctgctaaggccgcctttg

SEQ ID NO: 2848929 - DNA, 25 bp, Homo sapien
gaagtcatctactgtggtcattccc

SEQ ID NO: 2848930 - DNA, 25 bp, Homo sapien
ttctgcctcccttgataaggagacg

SEQ ID NO: 2848931 - DNA, 25 bp, Homo sapien
gatcatcattgacgattctgcctcc

SEQ ID NO: 2848932 - DNA, 25 bp, Homo sapien
gcctcccttgataaggagacggtca

SEQ ID NO: 2848933 - DNA, 25 bp, Homo sapien
tccatgtaaatatcagcataaaagg

SEQ ID NO: 2848934 - DNA, 25 bp, Homo sapien
tttcctccacgatgtgtgacctgac

SEQ ID NO: 2848935 - DNA, 25 bp, Homo sapien
tcctccacgatgtgtgacctgacct

SEQ ID NO: 2848936 - DNA, 25 bp, Homo sapien
gtgtgacctgaccttccagcaaatt

SEQ ID NO: 2848937 - DNA, 25 bp, Homo sapien
gtgacctgaccttccagcaaatttc

SEQ ID NO: 2848938 - DNA, 25 bp, Homo sapien
tcataactcaatgctttcctgattt

SEQ ID NO: 2848939 - DNA, 25 bp, Homo sapien
tctcataactcaatgctttcctgat

SEQ ID NO: 2848940 - DNA, 25 bp, Homo sapien
cctctcataactcaatgctttcctg

SEQ ID NO: 2848941 - DNA, 25 bp, Homo sapien
ctccctctcataactcaatgctttc

SEQ ID NO: 2848942 - DNA, 25 bp, Homo sapien
gtgtgtcactgtcttgcagcccagc

SEQ ID NO: 2848943 - DNA, 25 bp, Homo sapien
ggccctgcacagctaccaagagcta

SEQ ID NO: 2848944 - DNA, 25 bp, Homo sapien
taccaagagctacgtgtgtcactgt

SEQ ID NO: 2848945 - DNA, 25 bp, Homo sapien
gagctacgtgtgtcactgtcttgca

SEQ ID NO: 2848946 - DNA, 25 bp, Homo sapien
tatgaaagacgacataaaggtctgc

SEQ ID NO: 2848947 - DNA, 25 bp, Homo sapien
gaaatgatgtctttgttgcaggcaa

SEQ ID NO: 2848948 - DNA, 25 bp, Homo sapien
ggcccctgaaacaagctcagaatga

SEQ ID NO: 2848949 - DNA, 25 bp, Homo sapien
gcaataagtatccaggtaggcccct

SEQ ID NO: 2848950 - DNA, 25 bp, Homo sapien
caatgacttgcttgttctgctaaag

SEQ ID NO: 2848951 - DNA, 25 bp, Homo sapien
gagtctggccttatttagaagttaa

SEQ ID NO: 2848952 - DNA, 25 bp, Homo sapien
ccagtgatcctatgccttaagagtc

SEQ ID NO: 2848953 - DNA, 25 bp, Homo sapien
caagtgatggatggactttctggca

SEQ ID NO: 2848954 - DNA, 25 bp, Homo sapien
ctgtgtttcgtatattgaaataggc

SEQ ID NO: 2848955 - DNA, 25 bp, Homo sapien
cgtatattgaaataggcatatgttg

SEQ ID NO: 2848956 - DNA, 25 bp, Homo sapien
aggcatatgttgatgaaagagggac

SEQ ID NO: 2848957 - DNA, 25 bp, Homo sapien
tgatgaaagagggacttcacagcaa

SEQ ID NO: 2848958 - DNA, 25 bp, Homo sapien
tgttactccagttcataaggtccct

SEQ ID NO: 2848959 - DNA, 25 bp, Homo sapien
taaatgacacccattgaagcaagag

SEQ ID NO: 2848960 - DNA, 25 bp, Homo sapien
tacacgccctagaccgaactttgca

SEQ ID NO: 2848961 - DNA, 25 bp, Homo sapien
caaaggtcggattgcatttgtccct

SEQ ID NO: 2848962 - DNA, 25 bp, Homo sapien
tggggcggcaaaaaccgacactcca

SEQ ID NO: 2848963 - DNA, 25 bp, Homo sapien
aaccgacactccaggcggagcagtg

SEQ ID NO: 2848964 - DNA, 25 bp, Homo sapien
taaataatccaaagttctccgtgcc

SEQ ID NO: 2848965 - DNA, 25 bp, Homo sapien
gcggcaaaaaccgacactccaggcg

SEQ ID NO: 2848966 - DNA, 25 bp, Homo sapien
cgtgatccgcgggatgttcttcttg

SEQ ID NO: 2848967 - DNA, 25 bp, Homo sapien
gtgatccgcgggatgttcttcttgc

SEQ ID NO: 2848968 - DNA, 25 bp, Homo sapien
gtgaatggtgcgctggccgcgccgc

SEQ ID NO: 2848969 - DNA, 25 bp, Homo sapien
cgccccgagatcaggtggagtgaat

SEQ ID NO: 2848970 - DNA, 25 bp, Homo sapien
gtggagtgaatggtgcgctggccgc

SEQ ID NO: 2848971 - DNA, 25 bp, Homo sapien
cacagcgccccgagatcaggtggag

SEQ ID NO: 2848972 - DNA, 25 bp, Homo sapien
ctcctccacccgcgttcacgcccgg

SEQ ID NO: 2848973 - DNA, 25 bp, Homo sapien
caccctcctccacccgcgttcacgc

SEQ ID NO: 2848974 - DNA, 25 bp, Homo sapien
tgccagagacaatagtaaatctccc

SEQ ID NO: 2848975 - DNA, 25 bp, Homo sapien
ccagagacaatagtaaatctccccg

SEQ ID NO: 2848976 - DNA, 25 bp, Homo sapien
tcagaatggagacggttcccggctt

SEQ ID NO: 2848977 - DNA, 25 bp, Homo sapien
tccccgccctagtttcagaatggag

SEQ ID NO: 2848978 - DNA, 25 bp, Homo sapien
tttcagaatggagacggttcccggc

SEQ ID NO: 2848979 - DNA, 25 bp, Homo sapien
cttccccgccctagtttcagaatgg

SEQ ID NO: 2848980 - DNA, 25 bp, Homo sapien
ggcacggtagcagtggactcaacca

SEQ ID NO: 2848981 - DNA, 25 bp, Homo sapien
agactggtccgactctgcaacctgg

SEQ ID NO: 2848982 - DNA, 25 bp, Homo sapien
tagaaaatggaaagccgtgactcgc

SEQ ID NO: 2848983 - DNA, 25 bp, Homo sapien
taatgaaccacgtgcactgctcaca

SEQ ID NO: 2848984 - DNA, 25 bp, Homo sapien
taaatcatacgggaaccagactttg

SEQ ID NO: 2848985 - DNA, 25 bp, Homo sapien
tctccctaggttgctctgtactacg

SEQ ID NO: 2848986 - DNA, 25 bp, Homo sapien
gagaccaacagccaagttcctcagt

SEQ ID NO: 2848987 - DNA, 25 bp, Homo sapien
tttgaaaggctatatgaacaccagg

SEQ ID NO: 2848988 - DNA, 25 bp, Homo sapien
tatgaactgctaagaggaaaatgtc

SEQ ID NO: 2848989 - DNA, 25 bp, Homo sapien
tatcctggctacataaaatacttgc

SEQ ID NO: 2848990 - DNA, 25 bp, Homo sapien
cacaatggtggctagtaagtacagt

SEQ ID NO: 2848991 - DNA, 25 bp, Homo sapien
ggcaaattatgaattctggacacag

SEQ ID NO: 2848992 - DNA, 25 bp, Homo sapien
ccacagcatcgtagaaaatgtagaa

SEQ ID NO: 2848993 - DNA, 25 bp, Homo sapien
acagcatcgtagaaaatgtagaaaa

SEQ ID NO: 2848994 - DNA, 25 bp, Homo sapien
cacagcatcgtagaaaatgtagaaa

SEQ ID NO: 2848995 - DNA, 25 bp, Homo sapien
agctttattttaagcttgacctcct

SEQ ID NO: 2848996 - DNA, 25 bp, Homo sapien
tttaagcttgacctccttcttccta

SEQ ID NO: 2848997 - DNA, 25 bp, Homo sapien
cctaatcactcggatttcctgtatt

SEQ ID NO: 2848998 - DNA, 25 bp, Homo sapien
tctagcactccggtaaagctttatt

SEQ ID NO: 2848999 - DNA, 25 bp, Homo sapien
tgtttttaacaagccttgcctccat

SEQ ID NO: 2849000 - DNA, 25 bp, Homo sapien
tccaggttatcctcttcaacctccc

SEQ ID NO: 2849001 - DNA, 25 bp, Homo sapien
tctcctgtctttgtttttaacaagc

SEQ ID NO: 2849002 - DNA, 25 bp, Homo sapien
ttccaggttatcctcttcaacctcc

SEQ ID NO: 2849003 - DNA, 25 bp, Homo sapien
tccagccaatgatgtgtcgatgtag

SEQ ID NO: 2849004 - DNA, 25 bp, Homo sapien
actactctcgtgtggagtgttgcca

SEQ ID NO: 2849005 - DNA, 25 bp, Homo sapien
tagagtatagtgtcacgatctgggc

SEQ ID NO: 2849006 - DNA, 25 bp, Homo sapien
tcaattgtaaaaaatcgactactct

SEQ ID NO: 2849007 - DNA, 25 bp, Homo sapien
ggaggccggctttctgactcagacg

SEQ ID NO: 2849008 - DNA, 25 bp, Homo sapien
tctcacctggtgcaaagagcaaagc

SEQ ID NO: 2849009 - DNA, 25 bp, Homo sapien
aatactgcatctcctcacttttggg

SEQ ID NO: 2849010 - DNA, 25 bp, Homo sapien
tctagggccgctttcataagggcac

SEQ ID NO: 2849011 - DNA, 25 bp, Homo sapien
ccagcatattatctggcttacatca

SEQ ID NO: 2849012 - DNA, 25 bp, Homo sapien
tccctttctctagttaccattctta

SEQ ID NO: 2849013 - DNA, 25 bp, Homo sapien
gagaattgctaggtttaaaggagga

SEQ ID NO: 2849014 - DNA, 25 bp, Homo sapien
tctggcttacatcaggggtgtttca

SEQ ID NO: 2849015 - DNA, 25 bp, Homo sapien
tgcggccattacctagacaagggtg

SEQ ID NO: 2849016 - DNA, 25 bp, Homo sapien
tacatgcggatggattttgcggcca

SEQ ID NO: 2849017 - DNA, 25 bp, Homo sapien
caagggtgagggcatctgattatta

SEQ ID NO: 2849018 - DNA, 25 bp, Homo sapien
tttggcacatttaagagcagcaggg

SEQ ID NO: 2849019 - DNA, 25 bp, Homo sapien
agtcgcgctacgctcagtggaggat

SEQ ID NO: 2849020 - DNA, 25 bp, Homo sapien
ctggagaaagttgtgcccgggccat

SEQ ID NO: 2849021 - DNA, 25 bp, Homo sapien
taggaagtcgcgctacgctcagtgg

SEQ ID NO: 2849022 - DNA, 25 bp, Homo sapien
gctacgctcagtggaggatgaccct

SEQ ID NO: 2849023 - DNA, 25 bp, Homo sapien
ctgcaacacctctttgccggtggcg

SEQ ID NO: 2849024 - DNA, 25 bp, Homo sapien
cctctttgccggtggcgctccggat

SEQ ID NO: 2849025 - DNA, 25 bp, Homo sapien
gcaacacctctttgccggtggcgct

SEQ ID NO: 2849026 - DNA, 25 bp, Homo sapien
cacctctttgccggtggcgctccgg

SEQ ID NO: 2849027 - DNA, 25 bp, Homo sapien
gccttggcccctgcgcggggtgtcc

SEQ ID NO: 2849028 - DNA, 25 bp, Homo sapien
ccctgcgcggggtgtccccctcgat

SEQ ID NO: 2849029 - DNA, 25 bp, Homo sapien
ctgcgcggggtgtccccctcgatcc

SEQ ID NO: 2849030 - DNA, 25 bp, Homo sapien
tgcgcggggtgtccccctcgatccc

SEQ ID NO: 2849031 - DNA, 25 bp, Homo sapien
tccgaggagtcttcgcgccccgctg

SEQ ID NO: 2849032 - DNA, 25 bp, Homo sapien
ctccgaggagtcttcgcgccccgct

SEQ ID NO: 2849033 - DNA, 25 bp, Homo sapien
tggccgctccgaggagtcttcgcgc

SEQ ID NO: 2849034 - DNA, 25 bp, Homo sapien
gccctggccgctccgaggagtcttc

SEQ ID NO: 2849035 - DNA, 25 bp, Homo sapien
cgttgcagaacatgccgccgtattt

SEQ ID NO: 2849036 - DNA, 25 bp, Homo sapien
gccctccacgttgcagaacatgccg

SEQ ID NO: 2849037 - DNA, 25 bp, Homo sapien
atgccgccgtatttctgccgcggga

SEQ ID NO: 2849038 - DNA, 25 bp, Homo sapien
gggcatcgaaatccagcgtcttgct

SEQ ID NO: 2849039 - DNA, 25 bp, Homo sapien
tacacgggcagatcgtcttcgtggg

SEQ ID NO: 2849040 - DNA, 25 bp, Homo sapien
ccggcccgaggccatggttcaagca

SEQ ID NO: 2849041 - DNA, 25 bp, Homo sapien
atggttcaagcacgaaagcggcccg

SEQ ID NO: 2849042 - DNA, 25 bp, Homo sapien
ttcttccccagaggcggaaagggca

SEQ ID NO: 2849043 - DNA, 25 bp, Homo sapien
tcaagttggctgagtccgatgactc

SEQ ID NO: 2849044 - DNA, 25 bp, Homo sapien
ttgagctctcacaatgagttccagg

SEQ ID NO: 2849045 - DNA, 25 bp, Homo sapien
tacaacttagccctgtgactgatgg

SEQ ID NO: 2849046 - DNA, 25 bp, Homo sapien
tggaacactactactatcaagttgg

SEQ ID NO: 2849047 - DNA, 25 bp, Homo sapien
cttgaagggctgtaatgagaggcat

SEQ ID NO: 2849048 - DNA, 25 bp, Homo sapien
ttgttgagtccgttttgcctggtgg

SEQ ID NO: 2849049 - DNA, 25 bp, Homo sapien
gtgggcccgggcaacctcactgatg

SEQ ID NO: 2849050 - DNA, 25 bp, Homo sapien
tgcagggtcctagcatgtgtctggc

SEQ ID NO: 2849051 - DNA, 25 bp, Homo sapien
tgtagcctattccaggtgtagcctg

SEQ ID NO: 2849052 - DNA, 25 bp, Homo sapien
tattccaggtgtagcctgttccagg

SEQ ID NO: 2849053 - DNA, 25 bp, Homo sapien
tagcctattccaggtgtagcctgtt

SEQ ID NO: 2849054 - DNA, 25 bp, Homo sapien
atgtgtagcctattccaggtgtagc

SEQ ID NO: 2849055 - DNA, 25 bp, Homo sapien
ggaattagggagtgaatctgatgaa

SEQ ID NO: 2849056 - DNA, 25 bp, Homo sapien
ttagggagtgaatctgatgaactgc

SEQ ID NO: 2849057 - DNA, 25 bp, Homo sapien
ggagtgaatctgatgaactgccttg

SEQ ID NO: 2849058 - DNA, 25 bp, Homo sapien
agtgaatctgatgaactgccttgac

SEQ ID NO: 2849059 - DNA, 25 bp, Homo sapien
tatctggcgtctgaccaagtctgaa

SEQ ID NO: 2849060 - DNA, 25 bp, Homo sapien
gtcgctaagtttcgctgggtctttg

SEQ ID NO: 2849061 - DNA, 25 bp, Homo sapien
caagtctgaaactatttggaggtcg

SEQ ID NO: 2849062 - DNA, 25 bp, Homo sapien
tgcggcgaagaaagcaatccagcct

SEQ ID NO: 2849063 - DNA, 25 bp, Homo sapien
gcagcagcagcgcagaaaaaacctt

SEQ ID NO: 2849064 - DNA, 25 bp, Homo sapien
catattcggtgtacttcagaggatc

SEQ ID NO: 2849065 - DNA, 25 bp, Homo sapien
agctctgtgaaattggacccttggc

SEQ ID NO: 2849066 - DNA, 25 bp, Homo sapien
gaagtacacgtttagtaagcgctca

SEQ ID NO: 2849067 - DNA, 25 bp, Homo sapien
aatagaatttggcacttgaagaggc

SEQ ID NO: 2849068 - DNA, 25 bp, Homo sapien
gaactaaaccgccaaactaatgaca

SEQ ID NO: 2849069 - DNA, 25 bp, Homo sapien
aagaggccttacagggattagctcc

SEQ ID NO: 2849070 - DNA, 25 bp, Homo sapien
aaaggattgtgaatctgccctgccc

SEQ ID NO: 2849071 - DNA, 25 bp, Homo sapien
aataaagaatccagcaggaggccgg

SEQ ID NO: 2849072 - DNA, 25 bp, Homo sapien
tagatttactcatatgggccctgca

SEQ ID NO: 2849073 - DNA, 25 bp, Homo sapien
taatgactggctctcctgtggtaaa

SEQ ID NO: 2849074 - DNA, 25 bp, Homo sapien
caagttggctagtgttgggtcacca

SEQ ID NO: 2849075 - DNA, 25 bp, Homo sapien
tcacatgtcacattcgctcgggtcc

SEQ ID NO: 2849076 - DNA, 25 bp, Homo sapien
tcgctcgggtcctttgacttcgtta

SEQ ID NO: 2849077 - DNA, 25 bp, Homo sapien
tcgttaccagttttgttgtggtcac

SEQ ID NO: 2849078 - DNA, 25 bp, Homo sapien
cacttctcatctgtcgtctgtggaa

SEQ ID NO: 2849079 - DNA, 25 bp, Homo sapien
tcttcccatttacgatgcggatgtc

SEQ ID NO: 2849080 - DNA, 25 bp, Homo sapien
ttttcttcccatttacgatgcggat

SEQ ID NO: 2849081 - DNA, 25 bp, Homo sapien
atttacgatgcggatgtctctgttc

SEQ ID NO: 2849082 - DNA, 25 bp, Homo sapien
cccatttacgatgcggatgtctctg

SEQ ID NO: 2849083 - DNA, 25 bp, Homo sapien
agcaaatccctgtagtaagaaacca

SEQ ID NO: 2849084 - DNA, 25 bp, Homo sapien
acagaaaagcaaatccctgtagtaa

SEQ ID NO: 2849085 - DNA, 25 bp, Homo sapien
aaagacagaaaagcaaatccctgta

SEQ ID NO: 2849086 - DNA, 25 bp, Homo sapien
aaacaatcataaagacagaaaagca

SEQ ID NO: 2849087 - DNA, 25 bp, Homo sapien
gtaaatagctcttcataggtattcc

SEQ ID NO: 2849088 - DNA, 25 bp, Homo sapien
tttattgtaaatagctcttcatagg

SEQ ID NO: 2849089 - DNA, 25 bp, Homo sapien
taggtattcctcgtgcttcactccc

SEQ ID NO: 2849090 - DNA, 25 bp, Homo sapien
tagctcttcataggtattcctcgtg

SEQ ID NO: 2849091 - DNA, 25 bp, Homo sapien
tagcttttgatctccctctcactgg

SEQ ID NO: 2849092 - DNA, 25 bp, Homo sapien
tgtaggaactgtcaagtaagaaacc

SEQ ID NO: 2849093 - DNA, 25 bp, Homo sapien
tgatctgcagaaactagttccattg

SEQ ID NO: 2849094 - DNA, 25 bp, Homo sapien
taactttggttccatgcccaagaca

SEQ ID NO: 2849095 - DNA, 25 bp, Homo sapien
tatgcaagttacatctctaagctta

SEQ ID NO: 2849096 - DNA, 25 bp, Homo sapien
tcttatgcaagttacatctctaagc

SEQ ID NO: 2849097 - DNA, 25 bp, Homo sapien
acatctctaagcttagttactttaa

SEQ ID NO: 2849098 - DNA, 25 bp, Homo sapien
caagttacatctctaagcttagtta

SEQ ID NO: 2849099 - DNA, 25 bp, Homo sapien
atggtgcgatctcagctcactgcaa

SEQ ID NO: 2849100 - DNA, 25 bp, Homo sapien
agatggggtctcattttgtcgccca

SEQ ID NO: 2849101 - DNA, 25 bp, Homo sapien
cctccacctcccaggttcaagcaat

SEQ ID NO: 2849102 - DNA, 25 bp, Homo sapien
ctggaatgcaatggtgcgatctcag

SEQ ID NO: 2849103 - DNA, 25 bp, Homo sapien
tctgatgaggatacatatgaacgcc

SEQ ID NO: 2849104 - DNA, 25 bp, Homo sapien
tatgaacgccaatgttgcttgaaac

SEQ ID NO: 2849105 - DNA, 25 bp, Homo sapien
gaggctgcctgggtacaaattggta

SEQ ID NO: 2849106 - DNA, 25 bp, Homo sapien
taaaagcaatacctatcccacaggg

SEQ ID NO: 2849107 - DNA, 25 bp, Homo sapien
tttccatcctacaaggctgtcatct

SEQ ID NO: 2849108 - DNA, 25 bp, Homo sapien
tgacagacaaaggatagtggtcaat

SEQ ID NO: 2849109 - DNA, 25 bp, Homo sapien
cttgacagacaaaggatagtggtca

SEQ ID NO: 2849110 - DNA, 25 bp, Homo sapien
catcctacaaggctgtcatctttct

SEQ ID NO: 2849111 - DNA, 25 bp, Homo sapien
caaggccatagaataaaggcaagag

SEQ ID NO: 2849112 - DNA, 25 bp, Homo sapien
tcaaggccatagaataaaggcaaga

SEQ ID NO: 2849113 - DNA, 25 bp, Homo sapien
gaagagtatctctggcatacaggat

SEQ ID NO: 2849114 - DNA, 25 bp, Homo sapien
tgaagagtatctctggcatacagga

SEQ ID NO: 2849115 - DNA, 25 bp, Homo sapien
cctgagtgggtgttcacgtaccaca

SEQ ID NO: 2849116 - DNA, 25 bp, Homo sapien
gttcacgtaccacaagggaagaatg

SEQ ID NO: 2849117 - DNA, 25 bp, Homo sapien
gaataagagctatgtggtgctgagc

SEQ ID NO: 2849118 - DNA, 25 bp, Homo sapien
tctgccttgttgattagtctaatat

SEQ ID NO: 2849119 - DNA, 25 bp, Homo sapien
aagagctatgtggtgctgagcagaa

SEQ ID NO: 2849120 - DNA, 25 bp, Homo sapien
ttctgccttgttgattagtctaata

SEQ ID NO: 2849121 - DNA, 25 bp, Homo sapien
ggatgtctgttttatcttctaagtc

SEQ ID NO: 2849122 - DNA, 25 bp, Homo sapien
tgtctgttttatcttctaagtcacg

SEQ ID NO: 2849123 - DNA, 25 bp, Homo sapien
tctggatgtctgttttatcttctaa

SEQ ID NO: 2849124 - DNA, 25 bp, Homo sapien
gttttatcttctaagtcacgaattc

SEQ ID NO: 2849125 - DNA, 25 bp, Homo sapien
ttttgtatgtgcatgaaggtagaaa

SEQ ID NO: 2849126 - DNA, 25 bp, Homo sapien
tttgtatgtgcatgaaggtagaaaa

SEQ ID NO: 2849127 - DNA, 25 bp, Homo sapien
ttgtatgtgcatgaaggtagaaaac

SEQ ID NO: 2849128 - DNA, 25 bp, Homo sapien
tgtgcatgaaggtagaaaacaatgg

SEQ ID NO: 2849129 - DNA, 25 bp, Homo sapien
tacaaagtagcttctagttcctgga

SEQ ID NO: 2849130 - DNA, 25 bp, Homo sapien
gcatttgccgccgtaacttttctac

SEQ ID NO: 2849131 - DNA, 25 bp, Homo sapien
aatctgacagtcatactctctgctc

SEQ ID NO: 2849132 - DNA, 25 bp, Homo sapien
ttgctgtaagagctccattctctcc

SEQ ID NO: 2849133 - DNA, 25 bp, Homo sapien
ggcaaatagaattagaaaagtctaa

SEQ ID NO: 2849134 - DNA, 25 bp, Homo sapien
ctggcaaatagaattagaaaagtct

SEQ ID NO: 2849135 - DNA, 25 bp, Homo sapien
tggcaaatagaattagaaaagtcta

SEQ ID NO: 2849136 - DNA, 25 bp, Homo sapien
agttcttcctccagatagcctttta

SEQ ID NO: 2849137 - DNA, 25 bp, Homo sapien
ctagttcttcctccagatagccttt

SEQ ID NO: 2849138 - DNA, 25 bp, Homo sapien
catatatgcttggtcaagagcttgt

SEQ ID NO: 2849139 - DNA, 25 bp, Homo sapien
ttcttcctccagatagccttttatt

SEQ ID NO: 2849140 - DNA, 25 bp, Homo sapien
atctttttggttgtgggaacacagg

SEQ ID NO: 2849141 - DNA, 25 bp, Homo sapien
attcccatcaatagtaaagaagggt

SEQ ID NO: 2849142 - DNA, 25 bp, Homo sapien
gggtgtataaatatctcttccagac

SEQ ID NO: 2849143 - DNA, 25 bp, Homo sapien
gaagtggtattgctgaatcacatag

SEQ ID NO: 2849144 - DNA, 25 bp, Homo sapien
gagaatatagcctgaaattgtttgg

SEQ ID NO: 2849145 - DNA, 25 bp, Homo sapien
tcatcagtgccagataaaactggta

SEQ ID NO: 2849146 - DNA, 25 bp, Homo sapien
tcggcattagttttggatattttcc

SEQ ID NO: 2849147 - DNA, 25 bp, Homo sapien
gaaagatgacaaactttcatcagtg

SEQ ID NO: 2849148 - DNA, 25 bp, Homo sapien
catcattttctggtgtagggcagcc

SEQ ID NO: 2849149 - DNA, 25 bp, Homo sapien
ttccatcattttctggtgtagggca

SEQ ID NO: 2849150 - DNA, 25 bp, Homo sapien
caattccatcattttctggtgtagg

SEQ ID NO: 2849151 - DNA, 25 bp, Homo sapien
cattttctggtgtagggcagcctca

SEQ ID NO: 2849152 - DNA, 25 bp, Homo sapien
tgacatggctgcttgatatggtgta

SEQ ID NO: 2849153 - DNA, 25 bp, Homo sapien
cagtgacgttatctcggctcctgca

SEQ ID NO: 2849154 - DNA, 25 bp, Homo sapien
ggctgcttgatatggtgtatatctg

SEQ ID NO: 2849155 - DNA, 25 bp, Homo sapien
aaagtgtttgacatggctgcttgat

SEQ ID NO: 2849156 - DNA, 25 bp, Homo sapien
agtgctggcctgaattatggccact

SEQ ID NO: 2849157 - DNA, 25 bp, Homo sapien
ggcctgaattatggccacttgttct

SEQ ID NO: 2849158 - DNA, 25 bp, Homo sapien
gaattatggccacttgttcttcatt

SEQ ID NO: 2849159 - DNA, 25 bp, Homo sapien
tgctggcctgaattatggccacttg

SEQ ID NO: 2849160 - DNA, 25 bp, Homo sapien
cccattatcacccaagatatcaagc

SEQ ID NO: 2849161 - DNA, 25 bp, Homo sapien
ttatcacccaagatatcaagctgct

SEQ ID NO: 2849162 - DNA, 25 bp, Homo sapien
caagatatcaagctgctttatgaga

SEQ ID NO: 2849163 - DNA, 25 bp, Homo sapien
tcacccaagatatcaagctgcttta

SEQ ID NO: 2849164 - DNA, 25 bp, Homo sapien
tgtagagcactcacaccatctgaga

SEQ ID NO: 2849165 - DNA, 25 bp, Homo sapien
agattaaatggaggggatcgtctct

SEQ ID NO: 2849166 - DNA, 25 bp, Homo sapien
tctttcatacagtagatctgtagag

SEQ ID NO: 2849167 - DNA, 25 bp, Homo sapien
ccatctgagaatgggtgaatttgga

SEQ ID NO: 2849168 - DNA, 25 bp, Homo sapien
ttctagctctaggtttcgaaactcc

SEQ ID NO: 2849169 - DNA, 25 bp, Homo sapien
tagctctaggtttcgaaactccagc

SEQ ID NO: 2849170 - DNA, 25 bp, Homo sapien
gctctaggtttcgaaactccagcag

SEQ ID NO: 2849171 - DNA, 25 bp, Homo sapien
gtctctggcgtcctgtagttcttgt

SEQ ID NO: 2849172 - DNA, 25 bp, Homo sapien
tcctctgccccgctagggtgttgtg

SEQ ID NO: 2849173 - DNA, 25 bp, Homo sapien
agcagtgccggaaaagcctcccctt

SEQ ID NO: 2849174 - DNA, 25 bp, Homo sapien
tgatggcggtgacagggatgcggtt

SEQ ID NO: 2849175 - DNA, 25 bp, Homo sapien
atgcggttgagcacgcagccgagga

SEQ ID NO: 2849176 - DNA, 25 bp, Homo sapien
ctcctggtttctcttaatgaaaagt

SEQ ID NO: 2849177 - DNA, 25 bp, Homo sapien
ctggtttctcttaatgaaaagttgt

SEQ ID NO: 2849178 - DNA, 25 bp, Homo sapien
cctggtttctcttaatgaaaagttg

SEQ ID NO: 2849179 - DNA, 25 bp, Homo sapien
tggctttataccttagcacctctgc

SEQ ID NO: 2849180 - DNA, 25 bp, Homo sapien
ccttagcacctctgcttggagctgt

SEQ ID NO: 2849181 - DNA, 25 bp, Homo sapien
tataccttagcacctctgcttggag

SEQ ID NO: 2849182 - DNA, 25 bp, Homo sapien
gagccagagtcgcttccaggtcttc

SEQ ID NO: 2849183 - DNA, 25 bp, Homo sapien
cttggcttctcgttcagcgtcgatg

SEQ ID NO: 2849184 - DNA, 25 bp, Homo sapien
gctcctgtaggagggcatatgctct

SEQ ID NO: 2849185 - DNA, 25 bp, Homo sapien
gttaattgtcgaaatcttagttcag

SEQ ID NO: 2849186 - DNA, 25 bp, Homo sapien
gttcagcgtcgatgatgcctcccgt

SEQ ID NO: 2849187 - DNA, 25 bp, Homo sapien
tctgaatccatagagtcctcatcat

SEQ ID NO: 2849188 - DNA, 25 bp, Homo sapien
atcatagccaataaacgggtccaaa

SEQ ID NO: 2849189 - DNA, 25 bp, Homo sapien
tcatagccaataaacgggtccaaaa

SEQ ID NO: 2849190 - DNA, 25 bp, Homo sapien
atgatgtctctgaatccatagagtc

SEQ ID NO: 2849191 - DNA, 25 bp, Homo sapien
ttctacggatgagcttttctcggtc

SEQ ID NO: 2849192 - DNA, 25 bp, Homo sapien
ctatgctttcttctacggatgagct

SEQ ID NO: 2849193 - DNA, 25 bp, Homo sapien
taattggcttggaacttcttctatg

SEQ ID NO: 2849194 - DNA, 25 bp, Homo sapien
ggcttggaacttcttctatgctttc

SEQ ID NO: 2849195 - DNA, 25 bp, Homo sapien
gagctcatcaataatgttctgttgc

SEQ ID NO: 2849196 - DNA, 25 bp, Homo sapien
cttcattagcttggtcgaggtcatt

SEQ ID NO: 2849197 - DNA, 25 bp, Homo sapien
cattagcttggtcgaggtcattcag

SEQ ID NO: 2849198 - DNA, 25 bp, Homo sapien
ttagcttggtcgaggtcattcagag

SEQ ID NO: 2849199 - DNA, 25 bp, Homo sapien
gcgaggcacttgttcctttccagga

SEQ ID NO: 2849200 - DNA, 25 bp, Homo sapien
tcatcgtttctcttggcgaggcact

SEQ ID NO: 2849201 - DNA, 25 bp, Homo sapien
agtttttcttccatgcgctgcaagg

SEQ ID NO: 2849202 - DNA, 25 bp, Homo sapien
aaggacaccatcagttcatcgtttc

SEQ ID NO: 2849203 - DNA, 25 bp, Homo sapien
attcaattcagctattctcttttga

SEQ ID NO: 2849204 - DNA, 25 bp, Homo sapien
tctaattttcttatagtggcattca

SEQ ID NO: 2849205 - DNA, 25 bp, Homo sapien
caattcagctattctcttttgattt

SEQ ID NO: 2849206 - DNA, 25 bp, Homo sapien
ttctaattttcttatagtggcattc

SEQ ID NO: 2849207 - DNA, 25 bp, Homo sapien
tctgtacatagcctgtctgggtctc

SEQ ID NO: 2849208 - DNA, 25 bp, Homo sapien
cagaaagagttgttcgtccaaagcc

SEQ ID NO: 2849209 - DNA, 25 bp, Homo sapien
ggaatttctcgttttgggctgctca

SEQ ID NO: 2849210 - DNA, 25 bp, Homo sapien
ggactgctgcagtgttcggaaccat

SEQ ID NO: 2849211 - DNA, 25 bp, Homo sapien
gaagagatgggttctacatgggtct

SEQ ID NO: 2849212 - DNA, 25 bp, Homo sapien
ggtctgatgggattactgtactaac

SEQ ID NO: 2849213 - DNA, 25 bp, Homo sapien
cacagcgctctgaaacctggaagag

SEQ ID NO: 2849214 - DNA, 25 bp, Homo sapien
agaaaacacatgaagaagcaaaccc

SEQ ID NO: 2849215 - DNA, 25 bp, Homo sapien
ttggatcatattgctcagagcctcg

SEQ ID NO: 2849216 - DNA, 25 bp, Homo sapien
tgtgtcaaacagtttccgggcctcc

SEQ ID NO: 2849217 - DNA, 25 bp, Homo sapien
gacatttcctgctcgtgctgcttga

SEQ ID NO: 2849218 - DNA, 25 bp, Homo sapien
tgggactgatgctcactccgaaggt

SEQ ID NO: 2849219 - DNA, 25 bp, Homo sapien
tcccaggagtaatagctagttgagt

SEQ ID NO: 2849220 - DNA, 25 bp, Homo sapien
gaaaaatcttaagattgagactcca

SEQ ID NO: 2849221 - DNA, 25 bp, Homo sapien
tatcgagtctccaccatctgtaaaa

SEQ ID NO: 2849222 - DNA, 25 bp, Homo sapien
tgagactccatattttaaccactgt

SEQ ID NO: 2849223 - DNA, 25 bp, Homo sapien
tgcaatggctggtgggtaacaaggg

SEQ ID NO: 2849224 - DNA, 25 bp, Homo sapien
gcaatggctggtgggtaacaaggga

SEQ ID NO: 2849225 - DNA, 25 bp, Homo sapien
actgcaatggctggtgggtaacaag

SEQ ID NO: 2849226 - DNA, 25 bp, Homo sapien
gactgcaatggctggtgggtaacaa

SEQ ID NO: 2849227 - DNA, 25 bp, Homo sapien
ggttcccagtctcgagattgacaag

SEQ ID NO: 2849228 - DNA, 25 bp, Homo sapien
gcagtagcagtttagggttcccagt

SEQ ID NO: 2849229 - DNA, 25 bp, Homo sapien
taactgcaattaaaggagtctgcct

SEQ ID NO: 2849230 - DNA, 25 bp, Homo sapien
agtattggcagtgttgaagtcctca

SEQ ID NO: 2849231 - DNA, 25 bp, Homo sapien
cttctcttgatgcagctctatctga

SEQ ID NO: 2849232 - DNA, 25 bp, Homo sapien
ccttggtaaggtctcctcaatcgct

SEQ ID NO: 2849233 - DNA, 25 bp, Homo sapien
gcaggtgctgccatgttactgtttc

SEQ ID NO: 2849234 - DNA, 25 bp, Homo sapien
tactgtttcttatcctggagtacga

SEQ ID NO: 2849235 - DNA, 25 bp, Homo sapien
gcatctactgtgtggtgctccttgg

SEQ ID NO: 2849236 - DNA, 25 bp, Homo sapien
gatgtttcacttggttgctccctca

SEQ ID NO: 2849237 - DNA, 25 bp, Homo sapien
taggccagggaacaaattttagagc

SEQ ID NO: 2849238 - DNA, 25 bp, Homo sapien
ctaacaatattacggagggctgcat

SEQ ID NO: 2849239 - DNA, 25 bp, Homo sapien
aattttgacatcgtaaccacacagc

SEQ ID NO: 2849240 - DNA, 25 bp, Homo sapien
tgagagacagctactcttaagctgt

SEQ ID NO: 2849241 - DNA, 25 bp, Homo sapien
ttttccagaaatcttgtgtacacag

SEQ ID NO: 2849242 - DNA, 25 bp, Homo sapien
cacgtttgagagacagctactctta

SEQ ID NO: 2849243 - DNA, 25 bp, Homo sapien
tccagaaatcttgtgtacacagcac

SEQ ID NO: 2849244 - DNA, 25 bp, Homo sapien
taattagaatctgtgcatccctcac

SEQ ID NO: 2849245 - DNA, 25 bp, Homo sapien
ttttgtagaaggctggttaacctgc

SEQ ID NO: 2849246 - DNA, 25 bp, Homo sapien
gattaggttgaggtttgacacacag

SEQ ID NO: 2849247 - DNA, 25 bp, Homo sapien
tcaagccaaggctgtctgacctgag

SEQ ID NO: 2849248 - DNA, 25 bp, Homo sapien
gtttgggagatgtagtttggctttc

SEQ ID NO: 2849249 - DNA, 25 bp, Homo sapien
ccgacatggatgacttttaagagaa

SEQ ID NO: 2849250 - DNA, 25 bp, Homo sapien
gagaaaggacttttgtatctctttc

SEQ ID NO: 2849251 - DNA, 25 bp, Homo sapien
ttcaagtcaagtggtgtgtttggga

SEQ ID NO: 2849252 - DNA, 25 bp, Homo sapien
taaatagtttgactgggacacagct

SEQ ID NO: 2849253 - DNA, 25 bp, Homo sapien
ggatcaccctgactataatacaatg

SEQ ID NO: 2849254 - DNA, 25 bp, Homo sapien
acttagtgcctgagaaatcattgca

SEQ ID NO: 2849255 - DNA, 25 bp, Homo sapien
tgtgacagagacctaccttaaggcc

SEQ ID NO: 2849256 - DNA, 25 bp, Homo sapien
cagagtgaaactccaaatcatattg

SEQ ID NO: 2849257 - DNA, 25 bp, Homo sapien
tcctgtagtcctcctaacgcaatga

SEQ ID NO: 2849258 - DNA, 25 bp, Homo sapien
cgcaatgatgcaactacactgacat

SEQ ID NO: 2849259 - DNA, 25 bp, Homo sapien
tttttggtctggaacactgtagcca

SEQ ID NO: 2849260 - DNA, 25 bp, Homo sapien
ccttaaggatgcagtatctgggctg

SEQ ID NO: 2849261 - DNA, 25 bp, Homo sapien
gcctggcagcataccacattatatg

SEQ ID NO: 2849262 - DNA, 25 bp, Homo sapien
tctcaatgagatcggccagtcaatc

SEQ ID NO: 2849263 - DNA, 25 bp, Homo sapien
tggattgaatagttagcctggcagc

SEQ ID NO: 2849264 - DNA, 25 bp, Homo sapien
tttgcagttggggatttatccagag

SEQ ID NO: 2849265 - DNA, 25 bp, Homo sapien
tgcagttggggatttatccagaggt

SEQ ID NO: 2849266 - DNA, 25 bp, Homo sapien
ttatccagaggtgaaattcctgtga

SEQ ID NO: 2849267 - DNA, 25 bp, Homo sapien
aattcctgtgaaactgctctctgga

SEQ ID NO: 2849268 - DNA, 25 bp, Homo sapien
tttaagtgtgcatttggatactgga

SEQ ID NO: 2849269 - DNA, 25 bp, Homo sapien
aagtgtgcatttggatactggactc

SEQ ID NO: 2849270 - DNA, 25 bp, Homo sapien
tgtgcatttggatactggactctta

SEQ ID NO: 2849271 - DNA, 25 bp, Homo sapien
gcatttggatactggactcttaaac

SEQ ID NO: 2849272 - DNA, 25 bp, Homo sapien
tctagtctgaggcacgggagtcatt

SEQ ID NO: 2849273 - DNA, 25 bp, Homo sapien
tatttctgaagaaggcccaaccctg

SEQ ID NO: 2849274 - DNA, 25 bp, Homo sapien
taataaaaggtcaagcagatcccag

SEQ ID NO: 2849275 - DNA, 25 bp, Homo sapien
tgaaatccattatcctgggcgggaa

SEQ ID NO: 2849276 - DNA, 25 bp, Homo sapien
tccgaacccaacatcagcagtggct

SEQ ID NO: 2849277 - DNA, 25 bp, Homo sapien
tggcgatggtgcgaataggaaccac

SEQ ID NO: 2849278 - DNA, 25 bp, Homo sapien
gctgagacccggagaagctgtttaa

SEQ ID NO: 2849279 - DNA, 25 bp, Homo sapien
ttttccttgtgaccgagtcggatgc

SEQ ID NO: 2849280 - DNA, 25 bp, Homo sapien
gagtatcagcaatagaggcggcggc

SEQ ID NO: 2849281 - DNA, 25 bp, Homo sapien
agtatcagcaatagaggcggcggcg

SEQ ID NO: 2849282 - DNA, 25 bp, Homo sapien
gtatcagcaatagaggcggcggcgg

SEQ ID NO: 2849283 - DNA, 25 bp, Homo sapien
agagtatcagcaatagaggcggcgg

SEQ ID NO: 2849284 - DNA, 25 bp, Homo sapien
ggtgagctcggaagcagccaggaac

SEQ ID NO: 2849285 - DNA, 25 bp, Homo sapien
ggggtgagctcggaagcagccagga

SEQ ID NO: 2849286 - DNA, 25 bp, Homo sapien
gggtgagctcggaagcagccaggaa

SEQ ID NO: 2849287 - DNA, 25 bp, Homo sapien
caatgataagcgaccaagctcaggg

SEQ ID NO: 2849288 - DNA, 25 bp, Homo sapien
ccctctaggatgctcttgatgtctc

SEQ ID NO: 2849289 - DNA, 25 bp, Homo sapien
acccctgctgcggtagaggctgctg

SEQ ID NO: 2849290 - DNA, 25 bp, Homo sapien
gggagtgaatttgtgctgctgccct

SEQ ID NO: 2849291 - DNA, 25 bp, Homo sapien
actttctttggacttgccagattgg

SEQ ID NO: 2849292 - DNA, 25 bp, Homo sapien
ccatctgctgaaacacaatatggcc

SEQ ID NO: 2849293 - DNA, 25 bp, Homo sapien
catctgctgaaacacaatatggcca

SEQ ID NO: 2849294 - DNA, 25 bp, Homo sapien
tggacttgccagattgggttttaaa

SEQ ID NO: 2849295 - DNA, 25 bp, Homo sapien
tgctgatgattgtcctggggatgtt

SEQ ID NO: 2849296 - DNA, 25 bp, Homo sapien
gcaattgctgatgattgtcctgggg

SEQ ID NO: 2849297 - DNA, 25 bp, Homo sapien
accggttcctataaggtggaggcat

SEQ ID NO: 2849298 - DNA, 25 bp, Homo sapien
aattgctgatgattgtcctggggat

SEQ ID NO: 2849299 - DNA, 25 bp, Homo sapien
aggtcctcctcaggttgatattatt

SEQ ID NO: 2849300 - DNA, 25 bp, Homo sapien
caggtcctcctcaggttgatattat

SEQ ID NO: 2849301 - DNA, 25 bp, Homo sapien
gcaggtcctcctcaggttgatatta

SEQ ID NO: 2849302 - DNA, 25 bp, Homo sapien
gctgttcctgtgatactgttacacg

SEQ ID NO: 2849303 - DNA, 25 bp, Homo sapien
gaatcatttagcacccatccctttg

SEQ ID NO: 2849304 - DNA, 25 bp, Homo sapien
caggaaagatcaggcttgtggacac

SEQ ID NO: 2849305 - DNA, 25 bp, Homo sapien
taatttggatcatgtgggtgctaaa

SEQ ID NO: 2849306 - DNA, 25 bp, Homo sapien
tcaggccctatgaagcagatctccc

SEQ ID NO: 2849307 - DNA, 25 bp, Homo sapien
accattcaccttagtaactaatggg

SEQ ID NO: 2849308 - DNA, 25 bp, Homo sapien
catccaagccccgggttatcaggga

SEQ ID NO: 2849309 - DNA, 25 bp, Homo sapien
agggacaaccacaggctctacgtta

SEQ ID NO: 2849310 - DNA, 25 bp, Homo sapien
ttcagatacatttattcaacaataa

SEQ ID NO: 2849311 - DNA, 25 bp, Homo sapien
gatacatttattcaacaataaggcc

SEQ ID NO: 2849312 - DNA, 25 bp, Homo sapien
tattcagatacatttattcaacaat

SEQ ID NO: 2849313 - DNA, 25 bp, Homo sapien
cagatacatttattcaacaataagg

SEQ ID NO: 2849314 - DNA, 25 bp, Homo sapien
ggtgacctgatgggatttcaaaacc

SEQ ID NO: 2849315 - DNA, 25 bp, Homo sapien
gacctgatgggatttcaaaaccttg

SEQ ID NO: 2849316 - DNA, 25 bp, Homo sapien
ctgatgggatttcaaaaccttggtt

SEQ ID NO: 2849317 - DNA, 25 bp, Homo sapien
gtgacctgatgggatttcaaaacct

SEQ ID NO: 2849318 - DNA, 25 bp, Homo sapien
ggcccagatttttgaatgaggatag

SEQ ID NO: 2849319 - DNA, 25 bp, Homo sapien
aggcccagatttttgaatgaggata

SEQ ID NO: 2849320 - DNA, 25 bp, Homo sapien
aatgaggatagaagtctggcgtttc

SEQ ID NO: 2849321 - DNA, 25 bp, Homo sapien
ttgaatgaggatagaagtctggcgt

SEQ ID NO: 2849322 - DNA, 25 bp, Homo sapien
tttaatgctttcttgtcccacaatc

SEQ ID NO: 2849323 - DNA, 25 bp, Homo sapien
tttttaatgctttcttgtcccacaa

SEQ ID NO: 2849324 - DNA, 25 bp, Homo sapien
taatgctttcttgtcccacaatcat

SEQ ID NO: 2849325 - DNA, 25 bp, Homo sapien
gctttcttgtcccacaatcattaac

SEQ ID NO: 2849326 - DNA, 25 bp, Homo sapien
gagacatgctaaggtttcagttgct

SEQ ID NO: 2849327 - DNA, 25 bp, Homo sapien
gcacccggctggcattctattcttt

SEQ ID NO: 2849328 - DNA, 25 bp, Homo sapien
gaagccatcctatacatgctcatga

SEQ ID NO: 2849329 - DNA, 25 bp, Homo sapien
cacaagtaagacagggaatattagc

SEQ ID NO: 2849330 - DNA, 25 bp, Homo sapien
cataacacgcattcattgggataag

SEQ ID NO: 2849331 - DNA, 25 bp, Homo sapien
cttggtgcatccattaagttcattg

SEQ ID NO: 2849332 - DNA, 25 bp, Homo sapien
taagtatttccatcagtcccacaga

SEQ ID NO: 2849333 - DNA, 25 bp, Homo sapien
gtcccacagacagggtcatatatct

SEQ ID NO: 2849334 - DNA, 25 bp, Homo sapien
tctcttcccagggagtcagctccag

SEQ ID NO: 2849335 - DNA, 25 bp, Homo sapien
tcttcccagggagtcagctccagtg

SEQ ID NO: 2849336 - DNA, 25 bp, Homo sapien
tcccagggagtcagctccagtgtta

SEQ ID NO: 2849337 - DNA, 25 bp, Homo sapien
ttcccagggagtcagctccagtgtt

SEQ ID NO: 2849338 - DNA, 25 bp, Homo sapien
tgtgacttctttactaggctctttc

SEQ ID NO: 2849339 - DNA, 25 bp, Homo sapien
tttactaggctctttcattccccac

SEQ ID NO: 2849340 - DNA, 25 bp, Homo sapien
cagatatggtaagttgggtcctaaa

SEQ ID NO: 2849341 - DNA, 25 bp, Homo sapien
gaagtcagatctattcttcatcaga

SEQ ID NO: 2849342 - DNA, 25 bp, Homo sapien
gcagttggaggtatatgtgcaccat

SEQ ID NO: 2849343 - DNA, 25 bp, Homo sapien
tattaattaacatgcatgaggaggg

SEQ ID NO: 2849344 - DNA, 25 bp, Homo sapien
tgtgcaccatctattcaagcagaat

SEQ ID NO: 2849345 - DNA, 25 bp, Homo sapien
gatccttcactacatgagaggtgaa

SEQ ID NO: 2849346 - DNA, 25 bp, Homo sapien
ttaggtccaaaacatctctcgaaga

SEQ ID NO: 2849347 - DNA, 25 bp, Homo sapien
agggtcagccacatcaatagaggaa

SEQ ID NO: 2849348 - DNA, 25 bp, Homo sapien
ttctctaccatatcccaacaaaggg

SEQ ID NO: 2849349 - DNA, 25 bp, Homo sapien
gcttcacaaagcaacaggtcaaaac

SEQ ID NO: 2849350 - DNA, 25 bp, Homo sapien
aacagggccaaggcactgagaagaa

SEQ ID NO: 2849351 - DNA, 25 bp, Homo sapien
gaagaaagatgcctgttaccttcat

SEQ ID NO: 2849352 - DNA, 25 bp, Homo sapien
gccaaggcactgagaagaaagatgc

SEQ ID NO: 2849353 - DNA, 25 bp, Homo sapien
cagatagactcaacagggccaaggc

SEQ ID NO: 2849354 - DNA, 25 bp, Homo sapien
cgcacttaccacgtctcttcagaag

SEQ ID NO: 2849355 - DNA, 25 bp, Homo sapien
tactgggctatatcacagatctccc

SEQ ID NO: 2849356 - DNA, 25 bp, Homo sapien
actctgtgtcatagcctggcctcca

SEQ ID NO: 2849357 - DNA, 25 bp, Homo sapien
ctgcgtccagaggtcagttgaaaac

SEQ ID NO: 2849358 - DNA, 25 bp, Homo sapien
aggagaagtattgagcaaaagggag

SEQ ID NO: 2849359 - DNA, 25 bp, Homo sapien
caaggagaagtattgagcaaaaggg

SEQ ID NO: 2849360 - DNA, 25 bp, Homo sapien
gcagcagcaaggagaagtattgagc

SEQ ID NO: 2849361 - DNA, 25 bp, Homo sapien
gcagcaaggagaagtattgagcaaa

SEQ ID NO: 2849362 - DNA, 25 bp, Homo sapien
ccgctgaatagcttctattatagct

SEQ ID NO: 2849363 - DNA, 25 bp, Homo sapien
ttcccagtaccgctgaatagcttct

SEQ ID NO: 2849364 - DNA, 25 bp, Homo sapien
tgtgttcccagtaccgctgaatagc

SEQ ID NO: 2849365 - DNA, 25 bp, Homo sapien
cagtaccgctgaatagcttctatta

SEQ ID NO: 2849366 - DNA, 25 bp, Homo sapien
tatttttgaagtacggcccatagca

SEQ ID NO: 2849367 - DNA, 25 bp, Homo sapien
gctaataggaggtatcagaaacagt

SEQ ID NO: 2849368 - DNA, 25 bp, Homo sapien
ggaaagagtctcctataatggctaa

SEQ ID NO: 2849369 - DNA, 25 bp, Homo sapien
taataggaggtatcgggaacaagct

SEQ ID NO: 2849370 - DNA, 25 bp, Homo sapien
taaaaggagctgtagaataaagttg

SEQ ID NO: 2849371 - DNA, 25 bp, Homo sapien
aattcatcaaatgcacaatcaagac

SEQ ID NO: 2849372 - DNA, 25 bp, Homo sapien
taagaagcaagaacacttgcttccc

SEQ ID NO: 2849373 - DNA, 25 bp, Homo sapien
ccaagaagtcagtcccctaattgct

SEQ ID NO: 2849374 - DNA, 25 bp, Homo sapien
tccaaagccaccctgttaacaagag

SEQ ID NO: 2849375 - DNA, 25 bp, Homo sapien
tctaatactcaccaacactgtaagg

SEQ ID NO: 2849376 - DNA, 25 bp, Homo sapien
caagagttgtctagaatcatggtct

SEQ ID NO: 2849377 - DNA, 25 bp, Homo sapien
catgtatcagactaacttggaggga

SEQ ID NO: 2849378 - DNA, 25 bp, Homo sapien
ccgttctaaggcagctagcagggag

SEQ ID NO: 2849379 - DNA, 25 bp, Homo sapien
aggtggttaccacagtcgcaaggac

SEQ ID NO: 2849380 - DNA, 25 bp, Homo sapien
aggagtaaggccacctggttcaggc

SEQ ID NO: 2849381 - DNA, 25 bp, Homo sapien
ggacacttgcaagggcaaccagcag

SEQ ID NO: 2849382 - DNA, 25 bp, Homo sapien
aaaaagtgggctgttgtgaccagcg

SEQ ID NO: 2849383 - DNA, 25 bp, Homo sapien
tgttccaggactagattggccacag

SEQ ID NO: 2849384 - DNA, 25 bp, Homo sapien
caaattgccaaaagccaggtcctca

SEQ ID NO: 2849385 - DNA, 25 bp, Homo sapien
ttggccacaggatcacaagtcagtg

SEQ ID NO: 2849386 - DNA, 25 bp, Homo sapien
ctgtgcaggacatgtggaatccaac

SEQ ID NO: 2849387 - DNA, 25 bp, Homo sapien
gagcagacttgaccctctccaaaga

SEQ ID NO: 2849388 - DNA, 25 bp, Homo sapien
tgggactctccacagtcaacagtga

SEQ ID NO: 2849389 - DNA, 25 bp, Homo sapien
tcacaatagtcaaacatggacgtgg

SEQ ID NO: 2849390 - DNA, 25 bp, Homo sapien
catggtggataccagagctacccta

SEQ ID NO: 2849391 - DNA, 25 bp, Homo sapien
gagcaaaagtatggaagggaccttc

SEQ ID NO: 2849392 - DNA, 25 bp, Homo sapien
agaactcgcttagaaacactgtgaa

SEQ ID NO: 2849393 - DNA, 25 bp, Homo sapien
caaggagtatttcctgcagggactg

SEQ ID NO: 2849394 - DNA, 25 bp, Homo sapien
gatcaagtcattccagatcaaggac

SEQ ID NO: 2849395 - DNA, 25 bp, Homo sapien
gacaaagcttatcagtcaatcagag

SEQ ID NO: 2849396 - DNA, 25 bp, Homo sapien
tgctgaggagcgaacggtagacttc

SEQ ID NO: 2849397 - DNA, 25 bp, Homo sapien
taatccccatgagcagatactcctg

SEQ ID NO: 2849398 - DNA, 25 bp, Homo sapien
caatgtcagcatactggttttgatg

SEQ ID NO: 2849399 - DNA, 25 bp, Homo sapien
ctatagtgagcatgcatattttgca

SEQ ID NO: 2849400 - DNA, 25 bp, Homo sapien
tatataagagctgtatgagagatcc

SEQ ID NO: 2849401 - DNA, 25 bp, Homo sapien
gaaaatatgctggattgctctgtat

SEQ ID NO: 2849402 - DNA, 25 bp, Homo sapien
gggagagatagaaaccacacaaata

SEQ ID NO: 2849403 - DNA, 25 bp, Homo sapien
caactaaatggcaactacctgatgc

SEQ ID NO: 2849404 - DNA, 25 bp, Homo sapien
taacagtgatagctattggtcattc

SEQ ID NO: 2849405 - DNA, 25 bp, Homo sapien
cagcagagggcgctcattattagca

SEQ ID NO: 2849406 - DNA, 25 bp, Homo sapien
tccgagggagcatgaatggttcttt

SEQ ID NO: 2849407 - DNA, 25 bp, Homo sapien
tatcttctgcatcaagactgtgagg

SEQ ID NO: 2849408 - DNA, 25 bp, Homo sapien
gtatgtttagttggttatgcacgca

SEQ ID NO: 2849409 - DNA, 25 bp, Homo sapien
gctgcaccgtgttgagtatgtttag

SEQ ID NO: 2849410 - DNA, 25 bp, Homo sapien
caactatgtgatcccaaagcgccat

SEQ ID NO: 2849411 - DNA, 25 bp, Homo sapien
tcccaaagcgccatatttattctaa

SEQ ID NO: 2849412 - DNA, 25 bp, Homo sapien
tgtgatcccaaagcgccatatttat

SEQ ID NO: 2849413 - DNA, 25 bp, Homo sapien
ccaaagcgccatatttattctaact

SEQ ID NO: 2849414 - DNA, 25 bp, Homo sapien
gagttctgtttggttgaagccagag

SEQ ID NO: 2849415 - DNA, 25 bp, Homo sapien
tcctgagaactcgttgggagttgct

SEQ ID NO: 2849416 - DNA, 25 bp, Homo sapien
aagccagagcctgaatcctgagaac

SEQ ID NO: 2849417 - DNA, 25 bp, Homo sapien
caaactggaaaagcaggatttggct

SEQ ID NO: 2849418 - DNA, 25 bp, Homo sapien
tcactttgatgaatgttttccttca

SEQ ID NO: 2849419 - DNA, 25 bp, Homo sapien
ttccttcattatcatcaaattccat

SEQ ID NO: 2849420 - DNA, 25 bp, Homo sapien
ccttcattatcatcaaattccataa

SEQ ID NO: 2849421 - DNA, 25 bp, Homo sapien
ttttccttcattatcatcaaattcc

SEQ ID NO: 2849422 - DNA, 25 bp, Homo sapien
gtgtggtcattatcaacagagaatt

SEQ ID NO: 2849423 - DNA, 25 bp, Homo sapien
tgtgtggtcattatcaacagagaat

SEQ ID NO: 2849424 - DNA, 25 bp, Homo sapien
acatggagcggaggatgaactcgac

SEQ ID NO: 2849425 - DNA, 25 bp, Homo sapien
ctttgggtctttgcccgagtcgtct

SEQ ID NO: 2849426 - DNA, 25 bp, Homo sapien
ctctgtgcccaggaggcttaggaat

SEQ ID NO: 2849427 - DNA, 25 bp, Homo sapien
gagtcgtctggcttgtcgtctggct

SEQ ID NO: 2849428 - DNA, 25 bp, Homo sapien
tcaggcgaagtactgagacagccat

SEQ ID NO: 2849429 - DNA, 25 bp, Homo sapien
caactgtcaggcgaagtactgagac

SEQ ID NO: 2849430 - DNA, 25 bp, Homo sapien
ctgcatagcaggtcaggaataagac

SEQ ID NO: 2849431 - DNA, 25 bp, Homo sapien
aggaataagacaagcagtcccagga

SEQ ID NO: 2849432 - DNA, 25 bp, Homo sapien
gggtattcgtgcagataaattgttc

SEQ ID NO: 2849433 - DNA, 25 bp, Homo sapien
tctggtagcacggggtattcgtgca

SEQ ID NO: 2849434 - DNA, 25 bp, Homo sapien
cacggggtattcgtgcagataaatt

SEQ ID NO: 2849435 - DNA, 25 bp, Homo sapien
tagcacggggtattcgtgcagataa

SEQ ID NO: 2849436 - DNA, 25 bp, Homo sapien
atttccttcccacaaggttctagca

SEQ ID NO: 2849437 - DNA, 25 bp, Homo sapien
aatgctattgccacctatgtgagca

SEQ ID NO: 2849438 - DNA, 25 bp, Homo sapien
tggccaaaccaactgtacccctgaa

SEQ ID NO: 2849439 - DNA, 25 bp, Homo sapien
tctgtgtgggagagcaatgctattg

SEQ ID NO: 2849440 - DNA, 25 bp, Homo sapien
tttctgggtggaccagctcatcttc

SEQ ID NO: 2849441 - DNA, 25 bp, Homo sapien
ctcaaattttctgggtggaccagct

SEQ ID NO: 2849442 - DNA, 25 bp, Homo sapien
ttcctcaaattttctgggtggacca

SEQ ID NO: 2849443 - DNA, 25 bp, Homo sapien
caaattttctgggtggaccagctca

SEQ ID NO: 2849444 - DNA, 25 bp, Homo sapien
tgattctttcaacccattagcataa

SEQ ID NO: 2849445 - DNA, 25 bp, Homo sapien
gttgattctttcaacccattagcat

SEQ ID NO: 2849446 - DNA, 25 bp, Homo sapien
ttgattctttcaacccattagcata

SEQ ID NO: 2849447 - DNA, 25 bp, Homo sapien
cctgaatgtgataatggtcatggtg

SEQ ID NO: 2849448 - DNA, 25 bp, Homo sapien
caaggtgtgatgagatcttgtgaaa

SEQ ID NO: 2849449 - DNA, 25 bp, Homo sapien
ttgtgaaaccgaacgacaatttgat

SEQ ID NO: 2849450 - DNA, 25 bp, Homo sapien
ggtaaaagaccattcaaattcctga

SEQ ID NO: 2849451 - DNA, 25 bp, Homo sapien
gaattagcttaaggtctgaaatgag

SEQ ID NO: 2849452 - DNA, 25 bp, Homo sapien
tgaaatgagttccttcccacgggta

SEQ ID NO: 2849453 - DNA, 25 bp, Homo sapien
taaggtctgaaatgagttccttccc

SEQ ID NO: 2849454 - DNA, 25 bp, Homo sapien
gggatgagaattagcttaaggtctg

SEQ ID NO: 2849455 - DNA, 25 bp, Homo sapien
catcaagaatgtggactctgcttgg

SEQ ID NO: 2849456 - DNA, 25 bp, Homo sapien
tgtctgccctctaatacccaggtac

SEQ ID NO: 2849457 - DNA, 25 bp, Homo sapien
ttcaactcgtccagcttcctgaagg

SEQ ID NO: 2849458 - DNA, 25 bp, Homo sapien
tctgcttggcagttcaactcgtcca

SEQ ID NO: 2849459 - DNA, 25 bp, Homo sapien
acaaggtctgattgatcattcatga

SEQ ID NO: 2849460 - DNA, 25 bp, Homo sapien
gccactgtacccaactgttcattta

SEQ ID NO: 2849461 - DNA, 25 bp, Homo sapien
gtatgtgagatcatgggtctctgca

SEQ ID NO: 2849462 - DNA, 25 bp, Homo sapien
ggagtgcagggtatgtgagatcatg

SEQ ID NO: 2849463 - DNA, 25 bp, Homo sapien
caacccttcaaggtgtgtaccctga

SEQ ID NO: 2849464 - DNA, 25 bp, Homo sapien
ttggccatcgcaacgggtcaagctc

SEQ ID NO: 2849465 - DNA, 25 bp, Homo sapien
tgtaccctgatcacatgggtgatac

SEQ ID NO: 2849466 - DNA, 25 bp, Homo sapien
taagttaatactgcccaagttctgg

SEQ ID NO: 2849467 - DNA, 25 bp, Homo sapien
tgcagggtaagctccttgtctctta

SEQ ID NO: 2849468 - DNA, 25 bp, Homo sapien
gcagggtaagctccttgtctcttac

SEQ ID NO: 2849469 - DNA, 25 bp, Homo sapien
atgcagggtaagctccttgtctctt

SEQ ID NO: 2849470 - DNA, 25 bp, Homo sapien
tcatctccactttgctctccaggaa

SEQ ID NO: 2849471 - DNA, 25 bp, Homo sapien
tctccactttgctctccaggaatgc

SEQ ID NO: 2849472 - DNA, 25 bp, Homo sapien
tccactttgctctccaggaatgcca

SEQ ID NO: 2849473 - DNA, 25 bp, Homo sapien
ccactttgctctccaggaatgccat

SEQ ID NO: 2849474 - DNA, 25 bp, Homo sapien
aatgcaaaaaccacggtatatggga

SEQ ID NO: 2849475 - DNA, 25 bp, Homo sapien
cagccacataaaggaaatcacaaga

SEQ ID NO: 2849476 - DNA, 25 bp, Homo sapien
gcaaaaaccacggtatatgggatct

SEQ ID NO: 2849477 - DNA, 25 bp, Homo sapien
aaaaccacggtatatgggatctgtg

SEQ ID NO: 2849478 - DNA, 25 bp, Homo sapien
ttcctccacacagcttcctcacttc

SEQ ID NO: 2849479 - DNA, 25 bp, Homo sapien
ttcttcacttctttcagtttcaaac

SEQ ID NO: 2849480 - DNA, 25 bp, Homo sapien
acacagcttcctcacttccttttcc

SEQ ID NO: 2849481 - DNA, 25 bp, Homo sapien
ctcttttagcttttcctccacacag

SEQ ID NO: 2849482 - DNA, 25 bp, Homo sapien
tgagctgtatgctctgggaaagttc

SEQ ID NO: 2849483 - DNA, 25 bp, Homo sapien
catttctttgttgtgagctggaaat

SEQ ID NO: 2849484 - DNA, 25 bp, Homo sapien
aagttcttttcctgagtggatctca

SEQ ID NO: 2849485 - DNA, 25 bp, Homo sapien
tccttgatggacatttctttgttgt

SEQ ID NO: 2849486 - DNA, 25 bp, Homo sapien
gtcctctagtaagcactgttatttc

SEQ ID NO: 2849487 - DNA, 25 bp, Homo sapien
tagacctactgtggagacaagtaat

SEQ ID NO: 2849488 - DNA, 25 bp, Homo sapien
caatctcaagttaatctacagctct

SEQ ID NO: 2849489 - DNA, 25 bp, Homo sapien
tagcaaaagggagaatactgtgggt

SEQ ID NO: 2849490 - DNA, 25 bp, Homo sapien
atttcatagctaaattggcatcctg

SEQ ID NO: 2849491 - DNA, 25 bp, Homo sapien
cacatatctgtgtccagatcatcca

SEQ ID NO: 2849492 - DNA, 25 bp, Homo sapien
ccacatatctgtgtccagatcatcc

SEQ ID NO: 2849493 - DNA, 25 bp, Homo sapien
acatatctgtgtccagatcatccat

SEQ ID NO: 2849494 - DNA, 25 bp, Homo sapien
tccttaacaagacactggctggcaa

SEQ ID NO: 2849495 - DNA, 25 bp, Homo sapien
tacagctcattatatcagtccagca

SEQ ID NO: 2849496 - DNA, 25 bp, Homo sapien
ggctggcaaatgaatctgcaatatg

SEQ ID NO: 2849497 - DNA, 25 bp, Homo sapien
aataagaattatcccaagaaagcaa

SEQ ID NO: 2849498 - DNA, 25 bp, Homo sapien
tttcagttcatatgattgtaactgc

SEQ ID NO: 2849499 - DNA, 25 bp, Homo sapien
cagattctggcgatggctgtacaac

SEQ ID NO: 2849500 - DNA, 25 bp, Homo sapien
aatattttaagaccagattctggcg

SEQ ID NO: 2849501 - DNA, 25 bp, Homo sapien
actgctttggaatgatttgtacatt

SEQ ID NO: 2849502 - DNA, 25 bp, Homo sapien
tatattattaggtgaatatatgctc

SEQ ID NO: 2849503 - DNA, 25 bp, Homo sapien
tatgctcatgattgttatactttct

SEQ ID NO: 2849504 - DNA, 25 bp, Homo sapien
tcacttatgatacatttttggactc

SEQ ID NO: 2849505 - DNA, 25 bp, Homo sapien
cacttatgatacatttttggactca

SEQ ID NO: 2849506 - DNA, 25 bp, Homo sapien
tctctaccttcaatgctagatttgg

SEQ ID NO: 2849507 - DNA, 25 bp, Homo sapien
ttaccaaatagctaaggcatcttac

SEQ ID NO: 2849508 - DNA, 25 bp, Homo sapien
ggcatcttactgtcctatatcttgt

SEQ ID NO: 2849509 - DNA, 25 bp, Homo sapien
ggttatcaattgtcttcaccaacaa

SEQ ID NO: 2849510 - DNA, 25 bp, Homo sapien
aaagatatcccctgacccctattga

SEQ ID NO: 2849511 - DNA, 25 bp, Homo sapien
aagatatcccctgacccctattgat

SEQ ID NO: 2849512 - DNA, 25 bp, Homo sapien
gaaagatatcccctgacccctattg

SEQ ID NO: 2849513 - DNA, 25 bp, Homo sapien
tgaaagatatcccctgacccctatt

SEQ ID NO: 2849514 - DNA, 25 bp, Homo sapien
ttctatttcttaacaatagccacaa

SEQ ID NO: 2849515 - DNA, 25 bp, Homo sapien
tattctatttcttaacaatagccac

SEQ ID NO: 2849516 - DNA, 25 bp, Homo sapien
atagccacaacagtacaaacctcat

SEQ ID NO: 2849517 - DNA, 25 bp, Homo sapien
caatagccacaacagtacaaacctc

SEQ ID NO: 2849518 - DNA, 25 bp, Homo sapien
caactgctcctcttcaactgattct

SEQ ID NO: 2849519 - DNA, 25 bp, Homo sapien
agctttgcacttctaactgtgcaat

SEQ ID NO: 2849520 - DNA, 25 bp, Homo sapien
caactgattcttgcttcgctctctt

SEQ ID NO: 2849521 - DNA, 25 bp, Homo sapien
cacttctaactgtgcaatttgttct

SEQ ID NO: 2849522 - DNA, 25 bp, Homo sapien
agggacaaaggtgagtgcaaccttc

SEQ ID NO: 2849523 - DNA, 25 bp, Homo sapien
gtggattcacgtaactcctctggag

SEQ ID NO: 2849524 - DNA, 25 bp, Homo sapien
agtggattcacgtaactcctctgga

SEQ ID NO: 2849525 - DNA, 25 bp, Homo sapien
ctcaaagagtctgggattcaacatc

SEQ ID NO: 2849526 - DNA, 25 bp, Homo sapien
tggtatagacaagcatgcctgaatc

SEQ ID NO: 2849527 - DNA, 25 bp, Homo sapien
gattaaaatagctgtgggaccccag

SEQ ID NO: 2849528 - DNA, 25 bp, Homo sapien
tacaaggaaagtccatcccgaggga

SEQ ID NO: 2849529 - DNA, 25 bp, Homo sapien
gttgtctagggacctcaatagcccc

SEQ ID NO: 2849530 - DNA, 25 bp, Homo sapien
tgtctagggacctcaatagccccat

SEQ ID NO: 2849531 - DNA, 25 bp, Homo sapien
ttgtctagggacctcaatagcccca

SEQ ID NO: 2849532 - DNA, 25 bp, Homo sapien
ctcttttcagtctccttttcaacca

SEQ ID NO: 2849533 - DNA, 25 bp, Homo sapien
tcttttcagtctccttttcaaccat

SEQ ID NO: 2849534 - DNA, 25 bp, Homo sapien
tggcctcttttcagtctccttttca

SEQ ID NO: 2849535 - DNA, 25 bp, Homo sapien
gcctcttttcagtctccttttcaac

SEQ ID NO: 2849536 - DNA, 25 bp, Homo sapien
ctttacctgatatccagtgctctgg

SEQ ID NO: 2849537 - DNA, 25 bp, Homo sapien
actatttggtgttaatgcaatcaac

SEQ ID NO: 2849538 - DNA, 25 bp, Homo sapien
tgctctggcctgctgaactatttgg

SEQ ID NO: 2849539 - DNA, 25 bp, Homo sapien
ttacctgatatccagtgctctggcc

SEQ ID NO: 2849540 - DNA, 25 bp, Homo sapien
tggtgaaaccacattataatatctt

SEQ ID NO: 2849541 - DNA, 25 bp, Homo sapien
gaatcagaaaagcaatactaagcgc

SEQ ID NO: 2849542 - DNA, 25 bp, Homo sapien
agcgcatcctagagtttgtaaaatc

SEQ ID NO: 2849543 - DNA, 25 bp, Homo sapien
gaaaagcaatactaagcgcatccta

SEQ ID NO: 2849544 - DNA, 25 bp, Homo sapien
tctagccatcaagggaagccagagt

SEQ ID NO: 2849545 - DNA, 25 bp, Homo sapien
tcaaggaccttctagcaaacagagg

SEQ ID NO: 2849546 - DNA, 25 bp, Homo sapien
caacacgggaatctagggtcatcaa

SEQ ID NO: 2849547 - DNA, 25 bp, Homo sapien
tagccaacaggagaagccagagtct

SEQ ID NO: 2849548 - DNA, 25 bp, Homo sapien
gatatatcttactcttgcccagctc

SEQ ID NO: 2849549 - DNA, 25 bp, Homo sapien
catcagatgagatcaaactgtcaac

SEQ ID NO: 2849550 - DNA, 25 bp, Homo sapien
tagttgtctaaggataatgccctcc

SEQ ID NO: 2849551 - DNA, 25 bp, Homo sapien
aaagtttcctactggacatcagatg

SEQ ID NO: 2849552 - DNA, 25 bp, Homo sapien
tgcttttttatccatcctggccctc

SEQ ID NO: 2849553 - DNA, 25 bp, Homo sapien
tctgtgtgcttaaagggtgtttttg

SEQ ID NO: 2849554 - DNA, 25 bp, Homo sapien
tttgtatagactggtaacagtcttt

SEQ ID NO: 2849555 - DNA, 25 bp, Homo sapien
agtggtctgtgtgcttaaagggtgt

SEQ ID NO: 2849556 - DNA, 25 bp, Homo sapien
tagggaggtatgcaatcactgtcgg

SEQ ID NO: 2849557 - DNA, 25 bp, Homo sapien
catgagagtggcacacattagctcc

SEQ ID NO: 2849558 - DNA, 25 bp, Homo sapien
gaagacaaatgggatctgggttcca

SEQ ID NO: 2849559 - DNA, 25 bp, Homo sapien
cactgtcggctggagtttggatgac

SEQ ID NO: 2849560 - DNA, 25 bp, Homo sapien
tattaacagatataggcaaggcctt

SEQ ID NO: 2849561 - DNA, 25 bp, Homo sapien
caaggcatccatggtaaggttctaa

SEQ ID NO: 2849562 - DNA, 25 bp, Homo sapien
tagcaagtcaacatggtctttggca

SEQ ID NO: 2849563 - DNA, 25 bp, Homo sapien
caagaacacagtaaacaaccgaata

SEQ ID NO: 2849564 - DNA, 25 bp, Homo sapien
gaacaggtgcgacttctgagaagaa

SEQ ID NO: 2849565 - DNA, 25 bp, Homo sapien
tacgtccttggctacagactcctgg

SEQ ID NO: 2849566 - DNA, 25 bp, Homo sapien
tctccttagtccaagtcagcggtgg

SEQ ID NO: 2849567 - DNA, 25 bp, Homo sapien
tcagctatgcgatgagtcagcctcc

SEQ ID NO: 2849568 - DNA, 25 bp, Homo sapien
ctgcgcccgacctgtttcctgcctt

SEQ ID NO: 2849569 - DNA, 25 bp, Homo sapien
gaataccctggtcagaacttctaat

SEQ ID NO: 2849570 - DNA, 25 bp, Homo sapien
gcatatgttaaacgaacgttgcatc

SEQ ID NO: 2849571 - DNA, 25 bp, Homo sapien
aacgttgcatcgcaaggatgaagcc

SEQ ID NO: 2849572 - DNA, 25 bp, Homo sapien
ttatttcactagaagggtccagaga

SEQ ID NO: 2849573 - DNA, 25 bp, Homo sapien
gttctgctggcaatagagaccctca

SEQ ID NO: 2849574 - DNA, 25 bp, Homo sapien
gattgcgttacaccatgagaaacca

SEQ ID NO: 2849575 - DNA, 25 bp, Homo sapien
tcgtgacgacagcaccaaggtggat

SEQ ID NO: 2849576 - DNA, 25 bp, Homo sapien
taaacaaagatatcccagacaacct

SEQ ID NO: 2849577 - DNA, 25 bp, Homo sapien
cagattgggcctagatttacttcca

SEQ ID NO: 2849578 - DNA, 25 bp, Homo sapien
gatgttcccttcatgtgctccagaa

SEQ ID NO: 2849579 - DNA, 25 bp, Homo sapien
ctccactggtagaggaactcacagg

SEQ ID NO: 2849580 - DNA, 25 bp, Homo sapien
gactatataaacagttgagctaggt

SEQ ID NO: 2849581 - DNA, 25 bp, Homo sapien
cttcttagagtaggcagggtttcac

SEQ ID NO: 2849582 - DNA, 25 bp, Homo sapien
agctctgttgcgctctcagatgcag

SEQ ID NO: 2849583 - DNA, 25 bp, Homo sapien
ggctcacgggtctgcagacagtgca

SEQ ID NO: 2849584 - DNA, 25 bp, Homo sapien
ggttccagtagccttgactgccact

SEQ ID NO: 2849585 - DNA, 25 bp, Homo sapien
cctcttgctgtcatttctaagtttt

SEQ ID NO: 2849586 - DNA, 25 bp, Homo sapien
ctggttccagtagccttgactgcca

SEQ ID NO: 2849587 - DNA, 25 bp, Homo sapien
tggttccagtagccttgactgccac

SEQ ID NO: 2849588 - DNA, 25 bp, Homo sapien
gctctgatagtatggaatcacatcc

SEQ ID NO: 2849589 - DNA, 25 bp, Homo sapien
gatgctctgatagtatggaatcaca

SEQ ID NO: 2849590 - DNA, 25 bp, Homo sapien
gatagtatggaatcacatccatttc

SEQ ID NO: 2849591 - DNA, 25 bp, Homo sapien
cccagatgctctgatagtatggaat

SEQ ID NO: 2849592 - DNA, 25 bp, Homo sapien
caatgcatcatggatttttccagca

SEQ ID NO: 2849593 - DNA, 25 bp, Homo sapien
ggaagcattaccttgtcctgtttaa

SEQ ID NO: 2849594 - DNA, 25 bp, Homo sapien
caagaccagtagaggaagttgctgc

SEQ ID NO: 2849595 - DNA, 25 bp, Homo sapien
cattagcaagggtttagaaggtgaa

SEQ ID NO: 2849596 - DNA, 25 bp, Homo sapien
cactcctaggactggtgtattcctt

SEQ ID NO: 2849597 - DNA, 25 bp, Homo sapien
gacatgctacatttaggcagtatcc

SEQ ID NO: 2849598 - DNA, 25 bp, Homo sapien
ccttgtattgatgcagtgatggtag

SEQ ID NO: 2849599 - DNA, 25 bp, Homo sapien
tagattatgtctgggcactcctagg

SEQ ID NO: 2849600 - DNA, 25 bp, Homo sapien
taagcttcatgaagtagggatcctg

SEQ ID NO: 2849601 - DNA, 25 bp, Homo sapien
gagaactagaatgttggaggccaca

SEQ ID NO: 2849602 - DNA, 25 bp, Homo sapien
tgcagacttgttatgttgggctcca

SEQ ID NO: 2849603 - DNA, 25 bp, Homo sapien
ccttgacagggcactctagaactgc

SEQ ID NO: 2849604 - DNA, 25 bp, Homo sapien
cacaaggacatgatcataatcaggg

SEQ ID NO: 2849605 - DNA, 25 bp, Homo sapien
ggtcacaaggacatgatcataatca

SEQ ID NO: 2849606 - DNA, 25 bp, Homo sapien
tcagtggtcacaaggacatgatcat

SEQ ID NO: 2849607 - DNA, 25 bp, Homo sapien
aggacatgatcataatcagggctat

SEQ ID NO: 2849608 - DNA, 25 bp, Homo sapien
caactggtcactgcaagtttgctgc

SEQ ID NO: 2849609 - DNA, 25 bp, Homo sapien
tgtctggaagacatctccccaagag

SEQ ID NO: 2849610 - DNA, 25 bp, Homo sapien
gaatatctttgaggtcgtccatgct

SEQ ID NO: 2849611 - DNA, 25 bp, Homo sapien
tacacaatgacaagcatagcaagat

SEQ ID NO: 2849612 - DNA, 25 bp, Homo sapien
cttctgctctgtacagtggtctatt

SEQ ID NO: 2849613 - DNA, 25 bp, Homo sapien
ttctgctctgtacagtggtctattt

SEQ ID NO: 2849614 - DNA, 25 bp, Homo sapien
ctgggatatggtcgatgcagctgta

SEQ ID NO: 2849615 - DNA, 25 bp, Homo sapien
atatggtcgatgcagctgtagtgac

SEQ ID NO: 2849616 - DNA, 25 bp, Homo sapien
ttcctctggtaagcatctggttatt

SEQ ID NO: 2849617 - DNA, 25 bp, Homo sapien
catctggttattaatgagcactccc

SEQ ID NO: 2849618 - DNA, 25 bp, Homo sapien
ggtaagcatctggttattaatgagc

SEQ ID NO: 2849619 - DNA, 25 bp, Homo sapien
tccctctctgtcatccataaagtct

SEQ ID NO: 2849620 - DNA, 25 bp, Homo sapien
gagttcaattcctggatatcttttt

SEQ ID NO: 2849621 - DNA, 25 bp, Homo sapien
aagtctgttttatccgagactaggg

SEQ ID NO: 2849622 - DNA, 25 bp, Homo sapien
agtctgttttatccgagactagggt

SEQ ID NO: 2849623 - DNA, 25 bp, Homo sapien
gatatcttttttaactttctgtctc

SEQ ID NO: 2849624 - DNA, 25 bp, Homo sapien
gattatgatttagtaggattcttta

SEQ ID NO: 2849625 - DNA, 25 bp, Homo sapien
ctttactaaattgggagctggggag

SEQ ID NO: 2849626 - DNA, 25 bp, Homo sapien
gggggtcagtgcatagaaaacttaa

SEQ ID NO: 2849627 - DNA, 25 bp, Homo sapien
caactctggacacaacagggacaag

SEQ ID NO: 2849628 - DNA, 25 bp, Homo sapien
ccatgttgtaggatgcatcagttat

SEQ ID NO: 2849629 - DNA, 25 bp, Homo sapien
ttcgacggcatacaaagggattcca

SEQ ID NO: 2849630 - DNA, 25 bp, Homo sapien
aaactgcatggatgattgctacttc

SEQ ID NO: 2849631 - DNA, 25 bp, Homo sapien
catgttgtggtcataattcgacggc

SEQ ID NO: 2849632 - DNA, 25 bp, Homo sapien
gaaaagagatttcatcaggtcatgg

SEQ ID NO: 2849633 - DNA, 25 bp, Homo sapien
aagagatttcatcaggtcatggttc

SEQ ID NO: 2849634 - DNA, 25 bp, Homo sapien
tggttctgtgggctgtacaggcttc

SEQ ID NO: 2849635 - DNA, 25 bp, Homo sapien
aaggtgacaaggaagcaagcacatc

SEQ ID NO: 2849636 - DNA, 25 bp, Homo sapien
cagaagggatgacttaacattaaca

SEQ ID NO: 2849637 - DNA, 25 bp, Homo sapien
attaacatctttaactgcgcccccg

SEQ ID NO: 2849638 - DNA, 25 bp, Homo sapien
tagttgaatgattctgggaaaatct

SEQ ID NO: 2849639 - DNA, 25 bp, Homo sapien
gataatgtcccgaaatcacagaagg

SEQ ID NO: 2849640 - DNA, 25 bp, Homo sapien
tatcgacttcgcaaatgacaaaggc

SEQ ID NO: 2849641 - DNA, 25 bp, Homo sapien
tcacacacacaatatggacacgggt

SEQ ID NO: 2849642 - DNA, 25 bp, Homo sapien
tgtcaggtgaaagaacagcaacccg

SEQ ID NO: 2849643 - DNA, 25 bp, Homo sapien
aacactccggaaatatgcgagcggc

SEQ ID NO: 2849644 - DNA, 25 bp, Homo sapien
tgggacttgtggtgtgtgaatttca

SEQ ID NO: 2849645 - DNA, 25 bp, Homo sapien
ttgggacttgtggtgtgtgaatttc

SEQ ID NO: 2849646 - DNA, 25 bp, Homo sapien
ggacttgtggtgtgtgaatttcaag

SEQ ID NO: 2849647 - DNA, 25 bp, Homo sapien
acttgtggtgtgtgaatttcaagtg

SEQ ID NO: 2849648 - DNA, 25 bp, Homo sapien
agtacctgagatgaaatactcagca

SEQ ID NO: 2849649 - DNA, 25 bp, Homo sapien
gtacctgagatgaaatactcagcat

SEQ ID NO: 2849650 - DNA, 25 bp, Homo sapien
cagtacctgagatgaaatactcagc

SEQ ID NO: 2849651 - DNA, 25 bp, Homo sapien
gaagccatttccgtagtgcacgtga

SEQ ID NO: 2849652 - DNA, 25 bp, Homo sapien
tgctaagcttttcctcgaccctgag

SEQ ID NO: 2849653 - DNA, 25 bp, Homo sapien
cacgtgaatgttaatggagtcccaa

SEQ ID NO: 2849654 - DNA, 25 bp, Homo sapien
tggcaggcatagtgtctgctaagct

SEQ ID NO: 2849655 - DNA, 25 bp, Homo sapien
aaacccctagtttgtgaccagagag

SEQ ID NO: 2849656 - DNA, 25 bp, Homo sapien
gatgttactaaccagtgccatgggt

SEQ ID NO: 2849657 - DNA, 25 bp, Homo sapien
tgtgagagacgtattcccatgagct

SEQ ID NO: 2849658 - DNA, 25 bp, Homo sapien
cagagagtaggcactaaagcccagt

SEQ ID NO: 2849659 - DNA, 25 bp, Homo sapien
actttgtaaggacggtgaacagcgg

SEQ ID NO: 2849660 - DNA, 25 bp, Homo sapien
tgaatggcccggatggtacgagatc

SEQ ID NO: 2849661 - DNA, 25 bp, Homo sapien
tagccctacagaagtggatgtgtcc

SEQ ID NO: 2849662 - DNA, 25 bp, Homo sapien
aacaaggatgtttatcccagctgca

SEQ ID NO: 2849663 - DNA, 25 bp, Homo sapien
tcatgcaaacatgaatgcgaatgaa

SEQ ID NO: 2849664 - DNA, 25 bp, Homo sapien
cgaatgaatggctaagttgtgagcc

SEQ ID NO: 2849665 - DNA, 25 bp, Homo sapien
ggctctcagcccctactacctgatg

SEQ ID NO: 2849666 - DNA, 25 bp, Homo sapien
agggtgacctgttcatgcaaacatg

SEQ ID NO: 2849667 - DNA, 25 bp, Homo sapien
tcagaagcatgattccagggattct

SEQ ID NO: 2849668 - DNA, 25 bp, Homo sapien
tatgggcagtttctcgagttcctga

SEQ ID NO: 2849669 - DNA, 25 bp, Homo sapien
gatgtcccctgtgcagaacggtgta

SEQ ID NO: 2849670 - DNA, 25 bp, Homo sapien
gaagcatgattccagggattctggg

SEQ ID NO: 2849671 - DNA, 25 bp, Homo sapien
aaatgtcccagtgagatatgcaaga

SEQ ID NO: 2849672 - DNA, 25 bp, Homo sapien
cagtgaagggcatgagtccgagttc

SEQ ID NO: 2849673 - DNA, 25 bp, Homo sapien
gagtcgtagatgctcagcctccaaa

SEQ ID NO: 2849674 - DNA, 25 bp, Homo sapien
cactattaactagggtggccaggaa

SEQ ID NO: 2849675 - DNA, 25 bp, Homo sapien
tgaattcagagctcacagttgcgtt

SEQ ID NO: 2849676 - DNA, 25 bp, Homo sapien
attcagagctcacagttgcgttcat

SEQ ID NO: 2849677 - DNA, 25 bp, Homo sapien
aattcagagctcacagttgcgttca

SEQ ID NO: 2849678 - DNA, 25 bp, Homo sapien
tgtgaattcagagctcacagttgcg

SEQ ID NO: 2849679 - DNA, 25 bp, Homo sapien
gatctcggttagtgtgtcagggttc

SEQ ID NO: 2849680 - DNA, 25 bp, Homo sapien
catgccttggacatatcagagtgga

SEQ ID NO: 2849681 - DNA, 25 bp, Homo sapien
tgtcctcatggagctagcagtgtag

SEQ ID NO: 2849682 - DNA, 25 bp, Homo sapien
cagtgtagtgtgagagaccacagcc

SEQ ID NO: 2849683 - DNA, 25 bp, Homo sapien
ctggtctattgcagaagagcaggag

SEQ ID NO: 2849684 - DNA, 25 bp, Homo sapien
gacaggaactggtctattgcagaag

SEQ ID NO: 2849685 - DNA, 25 bp, Homo sapien
caggaactggtctattgcagaagag

SEQ ID NO: 2849686 - DNA, 25 bp, Homo sapien
ggaactggtctattgcagaagagca

SEQ ID NO: 2849687 - DNA, 25 bp, Homo sapien
acaattaagcggtgttgaatgttcc

SEQ ID NO: 2849688 - DNA, 25 bp, Homo sapien
gatctcccacaattaagcggtgttg

SEQ ID NO: 2849689 - DNA, 25 bp, Homo sapien
ttgatctcccacaattaagcggtgt

SEQ ID NO: 2849690 - DNA, 25 bp, Homo sapien
tcccacaattaagcggtgttgaatg

SEQ ID NO: 2849691 - DNA, 25 bp, Homo sapien
cccagtccaaaagctctgcttgtcg

SEQ ID NO: 2849692 - DNA, 25 bp, Homo sapien
tgaacatttccccagtccaaaagct

SEQ ID NO: 2849693 - DNA, 25 bp, Homo sapien
agctctgcttgtcgtagtggcagtc

SEQ ID NO: 2849694 - DNA, 25 bp, Homo sapien
ttgtcgtagtggcagtctgagtcct

SEQ ID NO: 2849695 - DNA, 25 bp, Homo sapien
cactggcataggtgtctgggtctgc

SEQ ID NO: 2849696 - DNA, 25 bp, Homo sapien
gattaatcacagtccaggctggcca

SEQ ID NO: 2849697 - DNA, 25 bp, Homo sapien
cagggtatatgcaaccacagaaggt

SEQ ID NO: 2849698 - DNA, 25 bp, Homo sapien
caaaccggtctggaagattaatcac

SEQ ID NO: 2849699 - DNA, 25 bp, Homo sapien
ccagggagattatggttgttgcccc

SEQ ID NO: 2849700 - DNA, 25 bp, Homo sapien
tatgtggagatagctaatttggatg

SEQ ID NO: 2849701 - DNA, 25 bp, Homo sapien
ggtatgtaggcctgagaacacccag

SEQ ID NO: 2849702 - DNA, 25 bp, Homo sapien
aatttggatgcttctctttggtatg

SEQ ID NO: 2849703 - DNA, 25 bp, Homo sapien
cattttccatgcgtgcagattatgt

SEQ ID NO: 2849704 - DNA, 25 bp, Homo sapien
attttccatgcgtgcagattatgtt

SEQ ID NO: 2849705 - DNA, 25 bp, Homo sapien
ttttccatgcgtgcagattatgttt

SEQ ID NO: 2849706 - DNA, 25 bp, Homo sapien
agaattggccacagtcctcaaggag

SEQ ID NO: 2849707 - DNA, 25 bp, Homo sapien
aatgagcaataagaattggccacag

SEQ ID NO: 2849708 - DNA, 25 bp, Homo sapien
gcaataagaattggccacagtcctc

SEQ ID NO: 2849709 - DNA, 25 bp, Homo sapien
taagaattggccacagtcctcaagg

SEQ ID NO: 2849710 - DNA, 25 bp, Homo sapien
gatggtttggtcaatcttctcttcc

SEQ ID NO: 2849711 - DNA, 25 bp, Homo sapien
caaagtttcttcctgtcggtttcag

SEQ ID NO: 2849712 - DNA, 25 bp, Homo sapien
tcttcctgtcggtttcagttccaga

SEQ ID NO: 2849713 - DNA, 25 bp, Homo sapien
ttctttttggcatttggatggtttg

SEQ ID NO: 2849714 - DNA, 25 bp, Homo sapien
gagaatatgataaataatcctgaga

SEQ ID NO: 2849715 - DNA, 25 bp, Homo sapien
aatctcacatggctctgggtttggc

SEQ ID NO: 2849716 - DNA, 25 bp, Homo sapien
aactgacaccttataagcaataaga

SEQ ID NO: 2849717 - DNA, 25 bp, Homo sapien
gatgctattaaaccacagccaagat

SEQ ID NO: 2849718 - DNA, 25 bp, Homo sapien
gctatggggcattcgcaagagccac

SEQ ID NO: 2849719 - DNA, 25 bp, Homo sapien
ttcccgggacttctgctatggggca

SEQ ID NO: 2849720 - DNA, 25 bp, Homo sapien
ggacttctgctatggggcattcgca

SEQ ID NO: 2849721 - DNA, 25 bp, Homo sapien
ggcattcgcaagagccactgactca

SEQ ID NO: 2849722 - DNA, 25 bp, Homo sapien
aagaggatgcacgtttggacccaga

SEQ ID NO: 2849723 - DNA, 25 bp, Homo sapien
tgaacatggctgtgacggacgtgac

SEQ ID NO: 2849724 - DNA, 25 bp, Homo sapien
caagtaagcaagacaggagcgacgc

SEQ ID NO: 2849725 - DNA, 25 bp, Homo sapien
tcagtgaccgagataggacgcagca

SEQ ID NO: 2849726 - DNA, 25 bp, Homo sapien
gaagttgctggcgggtgacactgac

SEQ ID NO: 2849727 - DNA, 25 bp, Homo sapien
gttgctggcgggtgacactgactct

SEQ ID NO: 2849728 - DNA, 25 bp, Homo sapien
agttgctggcgggtgacactgactc

SEQ ID NO: 2849729 - DNA, 25 bp, Homo sapien
aagttgctggcgggtgacactgact

SEQ ID NO: 2849730 - DNA, 25 bp, Homo sapien
caagtgggtggtaagatagcccaga

SEQ ID NO: 2849731 - DNA, 25 bp, Homo sapien
gacagtgagtcaggtacataaagaa

SEQ ID NO: 2849732 - DNA, 25 bp, Homo sapien
caacccctaaacagtgctcttgaga

SEQ ID NO: 2849733 - DNA, 25 bp, Homo sapien
aagaagggcaagtgggtggtaagat

SEQ ID NO: 2849734 - DNA, 25 bp, Homo sapien
ttcgctatttgtttgggaaaagctg

SEQ ID NO: 2849735 - DNA, 25 bp, Homo sapien
gcagagatgatccagagacaatata

SEQ ID NO: 2849736 - DNA, 25 bp, Homo sapien
tattgcacgaagagttaggtcaggg

SEQ ID NO: 2849737 - DNA, 25 bp, Homo sapien
tgtatgtttattgcacgaagagtta

SEQ ID NO: 2849738 - DNA, 25 bp, Homo sapien
tcttccccagaaatgttgactaatg

SEQ ID NO: 2849739 - DNA, 25 bp, Homo sapien
caacacttttaattgactgatggtc

SEQ ID NO: 2849740 - DNA, 25 bp, Homo sapien
gaacattcagttcttccagttactg

SEQ ID NO: 2849741 - DNA, 25 bp, Homo sapien
ccagttactgatattcggtcaatca

SEQ ID NO: 2849742 - DNA, 25 bp, Homo sapien
gctctgactaaattggaaggtctgt

SEQ ID NO: 2849743 - DNA, 25 bp, Homo sapien
ccaatgggtatctcagtgtgctttg

SEQ ID NO: 2849744 - DNA, 25 bp, Homo sapien
tgggaatatggttttccaatgggta

SEQ ID NO: 2849745 - DNA, 25 bp, Homo sapien
agctgctctgactaaattggaaggt

SEQ ID NO: 2849746 - DNA, 25 bp, Homo sapien
gatctctgagggctggtacacagaa

SEQ ID NO: 2849747 - DNA, 25 bp, Homo sapien
aacctcgacaccctgacagtgggtg

SEQ ID NO: 2849748 - DNA, 25 bp, Homo sapien
cctttttactgcgagcgctgatctc

SEQ ID NO: 2849749 - DNA, 25 bp, Homo sapien
atccctttttactgcgagcgctgat

SEQ ID NO: 2849750 - DNA, 25 bp, Homo sapien
ccaccaagccagaagctggaacttt

SEQ ID NO: 2849751 - DNA, 25 bp, Homo sapien
tccaccaagccagaagctggaactt

SEQ ID NO: 2849752 - DNA, 25 bp, Homo sapien
caccaagccagaagctggaactttt

SEQ ID NO: 2849753 - DNA, 25 bp, Homo sapien
ctgatccacaaaagtctaggaccat

SEQ ID NO: 2849754 - DNA, 25 bp, Homo sapien
tctgatccacaaaagtctaggacca

SEQ ID NO: 2849755 - DNA, 25 bp, Homo sapien
ttgcaaactctatgcaggtttcagg

SEQ ID NO: 2849756 - DNA, 25 bp, Homo sapien
tctgagtaatacaaatcaaccaaat

SEQ ID NO: 2849757 - DNA, 25 bp, Homo sapien
tttataatctttgcaaactctatgc

SEQ ID NO: 2849758 - DNA, 25 bp, Homo sapien
ccaaatcaatgaactcccttagtat

SEQ ID NO: 2849759 - DNA, 25 bp, Homo sapien
gatgagtgctatgctggtctgccga

SEQ ID NO: 2849760 - DNA, 25 bp, Homo sapien
ggaattgatatagccgagccagagg

SEQ ID NO: 2849761 - DNA, 25 bp, Homo sapien
taataggccagcaccatgaggagaa

SEQ ID NO: 2849762 - DNA, 25 bp, Homo sapien
gaggcagaagcaacccatgatgatg

SEQ ID NO: 2849763 - DNA, 25 bp, Homo sapien
cacagtacgtagagttagagttctg

SEQ ID NO: 2849764 - DNA, 25 bp, Homo sapien
cgtagagttagagttctggttgaac

SEQ ID NO: 2849765 - DNA, 25 bp, Homo sapien
gaagacacagtacgtagagttagag

SEQ ID NO: 2849766 - DNA, 25 bp, Homo sapien
tagagttctggttgaacttcctctt

SEQ ID NO: 2849767 - DNA, 25 bp, Homo sapien
tggcccaggccttggtttagactcc

SEQ ID NO: 2849768 - DNA, 25 bp, Homo sapien
tgttcctatagaccaaaggctggca

SEQ ID NO: 2849769 - DNA, 25 bp, Homo sapien
gggtcatcttgttcctatagaccaa

SEQ ID NO: 2849770 - DNA, 25 bp, Homo sapien
tatgccaatgttattccagccttgc

SEQ ID NO: 2849771 - DNA, 25 bp, Homo sapien
cagcattaatgcgatgcgcagaggg

SEQ ID NO: 2849772 - DNA, 25 bp, Homo sapien
caacactatcccgatgcctgtgcat

SEQ ID NO: 2849773 - DNA, 25 bp, Homo sapien
ttccaacactatcccgatgcctgtg

SEQ ID NO: 2849774 - DNA, 25 bp, Homo sapien
ccaacactatcccgatgcctgtgca

SEQ ID NO: 2849775 - DNA, 25 bp, Homo sapien
tgttccaacactatcccgatgcctg

SEQ ID NO: 2849776 - DNA, 25 bp, Homo sapien
cccgtgttggagcacgaggagcagg

SEQ ID NO: 2849777 - DNA, 25 bp, Homo sapien
gagggtggaatgaggagagccccgt

SEQ ID NO: 2849778 - DNA, 25 bp, Homo sapien
tctttgaagaggtggtagtaggatg

SEQ ID NO: 2849779 - DNA, 25 bp, Homo sapien
gaggtggtagtaggatgggttgaga

SEQ ID NO: 2849780 - DNA, 25 bp, Homo sapien
caaggcactgaggagcagctgacga

SEQ ID NO: 2849781 - DNA, 25 bp, Homo sapien
ggcactgaggagcagctgacgacat

SEQ ID NO: 2849782 - DNA, 25 bp, Homo sapien
ccgctttcctacaaggcactgagga

SEQ ID NO: 2849783 - DNA, 25 bp, Homo sapien
cgctttcctacaaggcactgaggag

SEQ ID NO: 2849784 - DNA, 25 bp, Homo sapien
ttgacttttctagcctaggggtgac

SEQ ID NO: 2849785 - DNA, 25 bp, Homo sapien
gggtgacccgatcagactttctcct

SEQ ID NO: 2849786 - DNA, 25 bp, Homo sapien
gcacttcaaatccttcgggagttat

SEQ ID NO: 2849787 - DNA, 25 bp, Homo sapien
ctttctcttgttaatagcacttcaa

SEQ ID NO: 2849788 - DNA, 25 bp, Homo sapien
gacgtccagagatgtccgaacaaga

SEQ ID NO: 2849789 - DNA, 25 bp, Homo sapien
taaatccagatgtcttgaaccagct

SEQ ID NO: 2849790 - DNA, 25 bp, Homo sapien
tgaaccagctcaatggcaccaaagg

SEQ ID NO: 2849791 - DNA, 25 bp, Homo sapien
tgccgttgtgagcaggacgtccaga

SEQ ID NO: 2849792 - DNA, 25 bp, Homo sapien
ccccaagatggccatcaggataacc

SEQ ID NO: 2849793 - DNA, 25 bp, Homo sapien
gataaccgtcgagagaaacgtgagc

SEQ ID NO: 2849794 - DNA, 25 bp, Homo sapien
tcaggataaccgtcgagagaaacgt

SEQ ID NO: 2849795 - DNA, 25 bp, Homo sapien
gatggccatcaggataaccgtcgag

SEQ ID NO: 2849796 - DNA, 25 bp, Homo sapien
gaaagcagtatagtgattccgcaaa

SEQ ID NO: 2849797 - DNA, 25 bp, Homo sapien
catcagtcacaatggctattagtaa

SEQ ID NO: 2849798 - DNA, 25 bp, Homo sapien
tgacagaggtccaatatccaacatt

SEQ ID NO: 2849799 - DNA, 25 bp, Homo sapien
tatgcccaggcgaatataaatcatt

SEQ ID NO: 2849800 - DNA, 25 bp, Homo sapien
caaatttatcacatcatctacgtta

SEQ ID NO: 2849801 - DNA, 25 bp, Homo sapien
acttgcagttagtctacttctcacc

SEQ ID NO: 2849802 - DNA, 25 bp, Homo sapien
cgttggttgagttgcacatagcata

SEQ ID NO: 2849803 - DNA, 25 bp, Homo sapien
taatacgttggttgagttgcacata

SEQ ID NO: 2849804 - DNA, 25 bp, Homo sapien
actgtggagatgatgagtcctttgc

SEQ ID NO: 2849805 - DNA, 25 bp, Homo sapien
gaagctgcctggtcatttttcggct

SEQ ID NO: 2849806 - DNA, 25 bp, Homo sapien
ctgtggttgaagctctagtcctgga

SEQ ID NO: 2849807 - DNA, 25 bp, Homo sapien
aataccccaaggagggctgtggttg

SEQ ID NO: 2849808 - DNA, 25 bp, Homo sapien
tagtgcaaaatgcagcccttttaac

SEQ ID NO: 2849809 - DNA, 25 bp, Homo sapien
ctagtgcaaaatgcagcccttttaa

SEQ ID NO: 2849810 - DNA, 25 bp, Homo sapien
gtgcaaaatgcagcccttttaacat

SEQ ID NO: 2849811 - DNA, 25 bp, Homo sapien
agtgcaaaatgcagcccttttaaca

SEQ ID NO: 2849812 - DNA, 25 bp, Homo sapien
tccaattacatgactccacttggtg

SEQ ID NO: 2849813 - DNA, 25 bp, Homo sapien
ggtgcctagtttatgacctccaaag

SEQ ID NO: 2849814 - DNA, 25 bp, Homo sapien
tacatgactccacttggtgcctagt

SEQ ID NO: 2849815 - DNA, 25 bp, Homo sapien
aagctctgcttagtgactactttca

SEQ ID NO: 2849816 - DNA, 25 bp, Homo sapien
actctctgctgccctaatcctctta

SEQ ID NO: 2849817 - DNA, 25 bp, Homo sapien
tctgctgccctaatcctcttaaacc

SEQ ID NO: 2849818 - DNA, 25 bp, Homo sapien
gctgccctaatcctcttaaacctca

SEQ ID NO: 2849819 - DNA, 25 bp, Homo sapien
tgccctaatcctcttaaacctcata

SEQ ID NO: 2849820 - DNA, 25 bp, Homo sapien
aatcagcatcccacggacttccgat

SEQ ID NO: 2849821 - DNA, 25 bp, Homo sapien
tacagatgatcagttgcttcagaca

SEQ ID NO: 2849822 - DNA, 25 bp, Homo sapien
caattgcagcatatggcgtttgtgc

SEQ ID NO: 2849823 - DNA, 25 bp, Homo sapien
gacttccgatcaaagactgtggctg

SEQ ID NO: 2849824 - DNA, 25 bp, Homo sapien
tagaggtagggactaagcacttcag

SEQ ID NO: 2849825 - DNA, 25 bp, Homo sapien
gaggtagggactaagcacttcaggt

SEQ ID NO: 2849826 - DNA, 25 bp, Homo sapien
ctttgcagggtagaggtagggacta

SEQ ID NO: 2849827 - DNA, 25 bp, Homo sapien
ggtagaggtagggactaagcacttc

SEQ ID NO: 2849828 - DNA, 25 bp, Homo sapien
ttgtgtgtgatttgcctggtccagc

SEQ ID NO: 2849829 - DNA, 25 bp, Homo sapien
ctagccatcgacacaatgcaaaatt

SEQ ID NO: 2849830 - DNA, 25 bp, Homo sapien
gccatcgacacaatgcaaaattgaa

SEQ ID NO: 2849831 - DNA, 25 bp, Homo sapien
catcgacacaatgcaaaattgaaaa

SEQ ID NO: 2849832 - DNA, 25 bp, Homo sapien
tgccacctcctcacgtgtacacccc

SEQ ID NO: 2849833 - DNA, 25 bp, Homo sapien
ccacctcctcacgtgtacaccccat

SEQ ID NO: 2849834 - DNA, 25 bp, Homo sapien
ttagaagaacagtcactgccacctc

SEQ ID NO: 2849835 - DNA, 25 bp, Homo sapien
actgccacctcctcacgtgtacacc

SEQ ID NO: 2849836 - DNA, 25 bp, Homo sapien
ctgaatgttccacagttatctccat

SEQ ID NO: 2849837 - DNA, 25 bp, Homo sapien
aagaagccagatacaccagggttga

SEQ ID NO: 2849838 - DNA, 25 bp, Homo sapien
gcaacagacccagaacgatgcaggt

SEQ ID NO: 2849839 - DNA, 25 bp, Homo sapien
gctacaagtcataggcaaggctcca

SEQ ID NO: 2849840 - DNA, 25 bp, Homo sapien
ttctgaagccgggtgaagcagcctc

SEQ ID NO: 2849841 - DNA, 25 bp, Homo sapien
cttcttgacctctttaacatctcct

SEQ ID NO: 2849842 - DNA, 25 bp, Homo sapien
ggcaatggttgtgcctccagcagac

SEQ ID NO: 2849843 - DNA, 25 bp, Homo sapien
ccagcagacccataacagcaaggag

SEQ ID NO: 2849844 - DNA, 25 bp, Homo sapien
aggaggatcatgaggcttcttgacc

SEQ ID NO: 2849845 - DNA, 25 bp, Homo sapien
caagaccaggagtcaaagagacaca

SEQ ID NO: 2849846 - DNA, 25 bp, Homo sapien
gtatggaatccagcacaagaccagg

SEQ ID NO: 2849847 - DNA, 25 bp, Homo sapien
gagacacaagatcttaacccagatg

SEQ ID NO: 2849848 - DNA, 25 bp, Homo sapien
tgtgacctgcactaaatctccgttt

SEQ ID NO: 2849849 - DNA, 25 bp, Homo sapien
ctcacattagcatcaagtttgtcca

SEQ ID NO: 2849850 - DNA, 25 bp, Homo sapien
tcacattagcatcaagtttgtccat

SEQ ID NO: 2849851 - DNA, 25 bp, Homo sapien
gagttggatttcaatgcccacaggg

SEQ ID NO: 2849852 - DNA, 25 bp, Homo sapien
gaaataagcatgagtgagttggatt

SEQ ID NO: 2849853 - DNA, 25 bp, Homo sapien
tcaagagcataaggtcactgtcaca

SEQ ID NO: 2849854 - DNA, 25 bp, Homo sapien
cactattgtcttagttgggacccca

SEQ ID NO: 2849855 - DNA, 25 bp, Homo sapien
cacaatttgttggttagagctatcc

SEQ ID NO: 2849856 - DNA, 25 bp, Homo sapien
gagcagccctccaaaaatgtttcag

SEQ ID NO: 2849857 - DNA, 25 bp, Homo sapien
tgccctggcagattcgagcggccac

SEQ ID NO: 2849858 - DNA, 25 bp, Homo sapien
gcgagggagcgaggtgccctggcag

SEQ ID NO: 2849859 - DNA, 25 bp, Homo sapien
agaggcgagggagcgaggtgccctg

SEQ ID NO: 2849860 - DNA, 25 bp, Homo sapien
ccagaggcgagggagcgaggtgccc

SEQ ID NO: 2849861 - DNA, 25 bp, Homo sapien
taattcaccctggatgatcatggaa

SEQ ID NO: 2849862 - DNA, 25 bp, Homo sapien
acaacatccacgctgctggtctcag

SEQ ID NO: 2849863 - DNA, 25 bp, Homo sapien
ttttggatatacaacatccacgctg

SEQ ID NO: 2849864 - DNA, 25 bp, Homo sapien
ctggtctaattcaccctggatgatc

SEQ ID NO: 2849865 - DNA, 25 bp, Homo sapien
gagtatctttctgatccagaaggca

SEQ ID NO: 2849866 - DNA, 25 bp, Homo sapien
aggcgtacgaggtggcacatactca

SEQ ID NO: 2849867 - DNA, 25 bp, Homo sapien
cactccggtgataacaaagcctggc

SEQ ID NO: 2849868 - DNA, 25 bp, Homo sapien
tgcaggcacacaagtttagctctgg

SEQ ID NO: 2849869 - DNA, 25 bp, Homo sapien
aagcttcacatttggccactttcct

SEQ ID NO: 2849870 - DNA, 25 bp, Homo sapien
cttcaatcataaagcttcacatttg

SEQ ID NO: 2849871 - DNA, 25 bp, Homo sapien
tcacatttggccactttcctctccc

SEQ ID NO: 2849872 - DNA, 25 bp, Homo sapien
gcttcacatttggccactttcctct

SEQ ID NO: 2849873 - DNA, 25 bp, Homo sapien
gttggttgctatcatcacttgggtc

SEQ ID NO: 2849874 - DNA, 25 bp, Homo sapien
ggttgctatcatcacttgggtctct

SEQ ID NO: 2849875 - DNA, 25 bp, Homo sapien
aatggttggttgctatcatcacttg

SEQ ID NO: 2849876 - DNA, 25 bp, Homo sapien
tggttggttgctatcatcacttggg

SEQ ID NO: 2849877 - DNA, 25 bp, Homo sapien
cactagaatcttctgaggcgggaat

SEQ ID NO: 2849878 - DNA, 25 bp, Homo sapien
catcgtcggaaattaagttctgagc

SEQ ID NO: 2849879 - DNA, 25 bp, Homo sapien
tattccagtttcacgaggaaaatct

SEQ ID NO: 2849880 - DNA, 25 bp, Homo sapien
ttaaggtagcattgtgatcccactg

SEQ ID NO: 2849881 - DNA, 25 bp, Homo sapien
tgaaatgaagccagtcttcagcaag

SEQ ID NO: 2849882 - DNA, 25 bp, Homo sapien
ttttgaagcagctcttgaagactcc

SEQ ID NO: 2849883 - DNA, 25 bp, Homo sapien
ccttcatggtaagcaccgtatctcc

SEQ ID NO: 2849884 - DNA, 25 bp, Homo sapien
tattgcactgtattaaaacgatgca

SEQ ID NO: 2849885 - DNA, 25 bp, Homo sapien
ggaatatagggaaagtccttctcta

SEQ ID NO: 2849886 - DNA, 25 bp, Homo sapien
aaagtccttctctaggttcccatgg

SEQ ID NO: 2849887 - DNA, 25 bp, Homo sapien
tgaagcccaaagaggtggggaatat

SEQ ID NO: 2849888 - DNA, 25 bp, Homo sapien
gtccttctctaggttcccatgggaa

SEQ ID NO: 2849889 - DNA, 25 bp, Homo sapien
cttgctctgtggtgggctctgtctt

SEQ ID NO: 2849890 - DNA, 25 bp, Homo sapien
ctctgtggtgggctctgtcttcatc

SEQ ID NO: 2849891 - DNA, 25 bp, Homo sapien
tctgtcttcatcctgtctctttccc

SEQ ID NO: 2849892 - DNA, 25 bp, Homo sapien
tgtggtgggctctgtcttcatcctg

SEQ ID NO: 2849893 - DNA, 25 bp, Homo sapien
catgactgatcccttgcactgtttg

SEQ ID NO: 2849894 - DNA, 25 bp, Homo sapien
tatccatgactgatcccttgcactg

SEQ ID NO: 2849895 - DNA, 25 bp, Homo sapien
aattatccatgactgatcccttgca

SEQ ID NO: 2849896 - DNA, 25 bp, Homo sapien
ccaaattatccatgactgatccctt

SEQ ID NO: 2849897 - DNA, 25 bp, Homo sapien
gggctagtaatggacatgtagttaa

SEQ ID NO: 2849898 - DNA, 25 bp, Homo sapien
caggtctggactttaagagaacaca

SEQ ID NO: 2849899 - DNA, 25 bp, Homo sapien
catgtagttaagcaggcagttgttg

SEQ ID NO: 2849900 - DNA, 25 bp, Homo sapien
gacgcctctgtgatacaggtctgga

SEQ ID NO: 2849901 - DNA, 25 bp, Homo sapien
gctctgctgtagaaaaccgggtagc

SEQ ID NO: 2849902 - DNA, 25 bp, Homo sapien
tgctgtagaaaaccgggtagcattt

SEQ ID NO: 2849903 - DNA, 25 bp, Homo sapien
tgctctgctgtagaaaaccgggtag

SEQ ID NO: 2849904 - DNA, 25 bp, Homo sapien
tctgctgtagaaaaccgggtagcat

SEQ ID NO: 2849905 - DNA, 25 bp, Homo sapien
tgtttcttcctctgggctggtctgt

SEQ ID NO: 2849906 - DNA, 25 bp, Homo sapien
agttgctgctggcaacaggatccag

SEQ ID NO: 2849907 - DNA, 25 bp, Homo sapien
gctggtctgtggctgatgcagaatc

SEQ ID NO: 2849908 - DNA, 25 bp, Homo sapien
ggctgatgcagaatcctcctgctcc

SEQ ID NO: 2849909 - DNA, 25 bp, Homo sapien
ttgtcctgacttcggcgacagccac

SEQ ID NO: 2849910 - DNA, 25 bp, Homo sapien
aattgtcctgacttcggcgacagcc

SEQ ID NO: 2849911 - DNA, 25 bp, Homo sapien
cccactcctcaggatgtaagctcca

SEQ ID NO: 2849912 - DNA, 25 bp, Homo sapien
tctccaattgtcctgacttcggcga

SEQ ID NO: 2849913 - DNA, 25 bp, Homo sapien
ctgaccagtactgccgtttggaact

SEQ ID NO: 2849914 - DNA, 25 bp, Homo sapien
gaatgaaagccagtaagtgatcgcc

SEQ ID NO: 2849915 - DNA, 25 bp, Homo sapien
gatcgcctgtaggactcagtttccc

SEQ ID NO: 2849916 - DNA, 25 bp, Homo sapien
gaacttgtgtgaatgaaagccagta

SEQ ID NO: 2849917 - DNA, 25 bp, Homo sapien
tcccacacctttcttctgccaaccc

SEQ ID NO: 2849918 - DNA, 25 bp, Homo sapien
ccacacctttcttctgccaacccat

SEQ ID NO: 2849919 - DNA, 25 bp, Homo sapien
ctcccacacctttcttctgccaacc

SEQ ID NO: 2849920 - DNA, 25 bp, Homo sapien
cccacacctttcttctgccaaccca

SEQ ID NO: 2849921 - DNA, 25 bp, Homo sapien
gtgctcctcggcagagctcaaggac

SEQ ID NO: 2849922 - DNA, 25 bp, Homo sapien
gacactattcagttcctctccatgc

SEQ ID NO: 2849923 - DNA, 25 bp, Homo sapien
agataaagtctgtgctcctcggcag

SEQ ID NO: 2849924 - DNA, 25 bp, Homo sapien
agctcaaggacactattcagttcct

SEQ ID NO: 2849925 - DNA, 25 bp, Homo sapien
tctaaaaatttctggccactagcca

SEQ ID NO: 2849926 - DNA, 25 bp, Homo sapien
tgttgtcgattggtaactttcctcc

SEQ ID NO: 2849927 - DNA, 25 bp, Homo sapien
ttggcatcacctttctgcattcgtg

SEQ ID NO: 2849928 - DNA, 25 bp, Homo sapien
cactagccagccagtggattccacg

SEQ ID NO: 2849929 - DNA, 25 bp, Homo sapien
gaacttctgatagctttaatatgac

SEQ ID NO: 2849930 - DNA, 25 bp, Homo sapien
gccactgggctatcacacctgctct

SEQ ID NO: 2849931 - DNA, 25 bp, Homo sapien
tggtttgtaccccagtcatttggat

SEQ ID NO: 2849932 - DNA, 25 bp, Homo sapien
tatcaaatataagttcaaacctctc

SEQ ID NO: 2849933 - DNA, 25 bp, Homo sapien
ggtatgaagaattctggacccaact

SEQ ID NO: 2849934 - DNA, 25 bp, Homo sapien
gcatgtcctccattatcgaatgagt

SEQ ID NO: 2849935 - DNA, 25 bp, Homo sapien
gctgttgctcacgctgcttatgaca

SEQ ID NO: 2849936 - DNA, 25 bp, Homo sapien
tctggacccaacttcaactggcatg

SEQ ID NO: 2849937 - DNA, 25 bp, Homo sapien
cacacgactttctctggcccctgtg

SEQ ID NO: 2849938 - DNA, 25 bp, Homo sapien
ctctgagtcaggcttcttgtttctc

SEQ ID NO: 2849939 - DNA, 25 bp, Homo sapien
ccatcctgctctgagtcaggcttct

SEQ ID NO: 2849940 - DNA, 25 bp, Homo sapien
acgactttctctggcccctgtgagc

SEQ ID NO: 2849941 - DNA, 25 bp, Homo sapien
tcttgacatgctcagaagttgagaa

SEQ ID NO: 2849942 - DNA, 25 bp, Homo sapien
ccagatggggcagcaacgcaggggc

SEQ ID NO: 2849943 - DNA, 25 bp, Homo sapien
catgctcagaagttgagaattatta

SEQ ID NO: 2849944 - DNA, 25 bp, Homo sapien
gacatgctcagaagttgagaattat

SEQ ID NO: 2849945 - DNA, 25 bp, Homo sapien
gctgcagcacgctgtgagggacatg

SEQ ID NO: 2849946 - DNA, 25 bp, Homo sapien
ctgcagcacgctgtgagggacatgc

SEQ ID NO: 2849947 - DNA, 25 bp, Homo sapien
gcagcacgctgtgagggacatgcag

SEQ ID NO: 2849948 - DNA, 25 bp, Homo sapien
tgcagcacgctgtgagggacatgca

SEQ ID NO: 2849949 - DNA, 25 bp, Homo sapien
attagcctagacctatgtagggtca

SEQ ID NO: 2849950 - DNA, 25 bp, Homo sapien
tgtagggtcaggatcataaaaatcg

SEQ ID NO: 2849951 - DNA, 25 bp, Homo sapien
cataaaaatcggcaccttccatctc

SEQ ID NO: 2849952 - DNA, 25 bp, Homo sapien
ctactggaaggcctttaagggcaat

SEQ ID NO: 2849953 - DNA, 25 bp, Homo sapien
gagagagacaacagtgtgacgttga

SEQ ID NO: 2849954 - DNA, 25 bp, Homo sapien
gaaagcatattattccccaaacagt

SEQ ID NO: 2849955 - DNA, 25 bp, Homo sapien
gaggagctggatcattcataactta

SEQ ID NO: 2849956 - DNA, 25 bp, Homo sapien
actgcagtgtgtgcttactgatatg

SEQ ID NO: 2849957 - DNA, 25 bp, Homo sapien
tgctcttcttggaaggcttctccat

SEQ ID NO: 2849958 - DNA, 25 bp, Homo sapien
ctgctcttcttggaaggcttctcca

SEQ ID NO: 2849959 - DNA, 25 bp, Homo sapien
gccacactcagtccactgctctcct

SEQ ID NO: 2849960 - DNA, 25 bp, Homo sapien
ctgtcctacagccacactcagtcca

SEQ ID NO: 2849961 - DNA, 25 bp, Homo sapien
tacagccacactcagtccactgctc

SEQ ID NO: 2849962 - DNA, 25 bp, Homo sapien
tatctgaattcattgccccttcctg

SEQ ID NO: 2849963 - DNA, 25 bp, Homo sapien
ggcaatgtgctggtcatcacagcca

SEQ ID NO: 2849964 - DNA, 25 bp, Homo sapien
gaacggcagcgccttcttgctggca

SEQ ID NO: 2849965 - DNA, 25 bp, Homo sapien
cacgacgtcacgcaggaaagggacg

SEQ ID NO: 2849966 - DNA, 25 bp, Homo sapien
tgccaagttcgagcgtctgcagacg

SEQ ID NO: 2849967 - DNA, 25 bp, Homo sapien
gcttcagttgttttcccgagcaaag

SEQ ID NO: 2849968 - DNA, 25 bp, Homo sapien
tatctcggacctttcagctgtgaac

SEQ ID NO: 2849969 - DNA, 25 bp, Homo sapien
ggcagggatttgaggagcagcttca

SEQ ID NO: 2849970 - DNA, 25 bp, Homo sapien
gctgtgaacatggactcttccccca

SEQ ID NO: 2849971 - DNA, 25 bp, Homo sapien
agctgggagattccttagctcttta

SEQ ID NO: 2849972 - DNA, 25 bp, Homo sapien
ccagatgtcggtgttgtatatatac

SEQ ID NO: 2849973 - DNA, 25 bp, Homo sapien
ttttgcctaaaggaatgtctaatgt

SEQ ID NO: 2849974 - DNA, 25 bp, Homo sapien
tctttataaccagatgtcggtgttg

SEQ ID NO: 2849975 - DNA, 25 bp, Homo sapien
gagcattctaggcatatcttaatcc

SEQ ID NO: 2849976 - DNA, 25 bp, Homo sapien
gttggcttttgtcagtgtcccttcg

SEQ ID NO: 2849977 - DNA, 25 bp, Homo sapien
taagggtcctgataagcaagagcat

SEQ ID NO: 2849978 - DNA, 25 bp, Homo sapien
catgctggccacctaaggtttgtgt

SEQ ID NO: 2849979 - DNA, 25 bp, Homo sapien
gcaataaggttaagcagttttccaa

SEQ ID NO: 2849980 - DNA, 25 bp, Homo sapien
tcggaatcattgcacttcctctggt

SEQ ID NO: 2849981 - DNA, 25 bp, Homo sapien
tctgcaaagactattacatccttct

SEQ ID NO: 2849982 - DNA, 25 bp, Homo sapien
tgacctactaactcccagagcgaga

SEQ ID NO: 2849983 - DNA, 25 bp, Homo sapien
tcacctctaaagagagatgctttgg

SEQ ID NO: 2849984 - DNA, 25 bp, Homo sapien
gatgctttggtttatatgggtcctc

SEQ ID NO: 2849985 - DNA, 25 bp, Homo sapien
tgtcatagcccagccactaagagtc

SEQ ID NO: 2849986 - DNA, 25 bp, Homo sapien
ggtccctggctagcactggaacact

SEQ ID NO: 2849987 - DNA, 25 bp, Homo sapien
tctcttggctggctcaatttcccac

SEQ ID NO: 2849988 - DNA, 25 bp, Homo sapien
ttcatttctcttggctggctcaatt

SEQ ID NO: 2849989 - DNA, 25 bp, Homo sapien
catttctcttggctggctcaatttc

SEQ ID NO: 2849990 - DNA, 25 bp, Homo sapien
tttctcttggctggctcaatttccc

SEQ ID NO: 2849991 - DNA, 25 bp, Homo sapien
tactatcaatcaggaaccactgagc

SEQ ID NO: 2849992 - DNA, 25 bp, Homo sapien
gataagtggcattactatcaatcag

SEQ ID NO: 2849993 - DNA, 25 bp, Homo sapien
actgagcttctaaatcacctgattt

SEQ ID NO: 2849994 - DNA, 25 bp, Homo sapien
ctaaaattgataagtggcattacta

SEQ ID NO: 2849995 - DNA, 25 bp, Homo sapien
tggcatctggcttatcattccctat

SEQ ID NO: 2849996 - DNA, 25 bp, Homo sapien
ggcatctggcttatcattccctatt

SEQ ID NO: 2849997 - DNA, 25 bp, Homo sapien
cttatgtgattggttggcatctggc

SEQ ID NO: 2849998 - DNA, 25 bp, Homo sapien
gttggcatctggcttatcattccct

SEQ ID NO: 2849999 - DNA, 25 bp, Homo sapien
cttaagagatgccaatccttgatgt

SEQ ID NO: 2850000 - DNA, 25 bp, Homo sapien
agagatgccaatccttgatgttggg

SEQ ID NO: 2850001 - DNA, 25 bp, Homo sapien
cttcccttaagagatgccaatcctt

SEQ ID NO: 2850002 - DNA, 25 bp, Homo sapien
caatccttgatgttggggagcccca

SEQ ID NO: 2850003 - DNA, 25 bp, Homo sapien
cctaggttatgtgcctgagctcaat

SEQ ID NO: 2850004 - DNA, 25 bp, Homo sapien
tgacactgtgttagacagcacatgg

SEQ ID NO: 2850005 - DNA, 25 bp, Homo sapien
gaggaactattggaggaccccttga

SEQ ID NO: 2850006 - DNA, 25 bp, Homo sapien
tatgtagtctgccagctggattgca

SEQ ID NO: 2850007 - DNA, 25 bp, Homo sapien
tctggttggcttccggtgggagtct

SEQ ID NO: 2850008 - DNA, 25 bp, Homo sapien
ctggttggcttccggtgggagtctt

SEQ ID NO: 2850009 - DNA, 25 bp, Homo sapien
atctggttggcttccggtgggagtc

SEQ ID NO: 2850010 - DNA, 25 bp, Homo sapien
catctggttggcttccggtgggagt

SEQ ID NO: 2850011 - DNA, 25 bp, Homo sapien
tgatgtagtgttactcatctgtttt

SEQ ID NO: 2850012 - DNA, 25 bp, Homo sapien
ttagtttgatgtagtgttactcatc

SEQ ID NO: 2850013 - DNA, 25 bp, Homo sapien
agtttgatgtagtgttactcatctg

SEQ ID NO: 2850014 - DNA, 25 bp, Homo sapien
tttgatgtagtgttactcatctgtt

SEQ ID NO: 2850015 - DNA, 25 bp, Homo sapien
ggcactcagtggaactaggatagtt

SEQ ID NO: 2850016 - DNA, 25 bp, Homo sapien
cccagccagtagaccaaagggcatt

SEQ ID NO: 2850017 - DNA, 25 bp, Homo sapien
ggtgaccaggttgacactttgttgc

SEQ ID NO: 2850018 - DNA, 25 bp, Homo sapien
tttccctgctgatctagggtgacca

SEQ ID NO: 2850019 - DNA, 25 bp, Homo sapien
atgtttgtcgaatgaggacatggcc

SEQ ID NO: 2850020 - DNA, 25 bp, Homo sapien
ggcccactgatctgtgagttcttgt

SEQ ID NO: 2850021 - DNA, 25 bp, Homo sapien
caatatatgtttgtcgaatgaggac

SEQ ID NO: 2850022 - DNA, 25 bp, Homo sapien
gcacctgcacaaaagtgatcaatat

SEQ ID NO: 2850023 - DNA, 25 bp, Homo sapien
agattcctggcagcagtgcgtggcc

SEQ ID NO: 2850024 - DNA, 25 bp, Homo sapien
tcctggcagcagtgcgtggcctgaa

SEQ ID NO: 2850025 - DNA, 25 bp, Homo sapien
cgtggcctgaagatctctgcagggt

SEQ ID NO: 2850026 - DNA, 25 bp, Homo sapien
ctctgcagggtaatttctacagtct

SEQ ID NO: 2850027 - DNA, 25 bp, Homo sapien
ctccaagaaaggagttctggagcag

SEQ ID NO: 2850028 - DNA, 25 bp, Homo sapien
ctggttcttcagagacggctccctg

SEQ ID NO: 2850029 - DNA, 25 bp, Homo sapien
gttcttcagagacggctccctgcca

SEQ ID NO: 2850030 - DNA, 25 bp, Homo sapien
tctggagcagtgagaactggctgcc

SEQ ID NO: 2850031 - DNA, 25 bp, Homo sapien
ctgctccacaggctctgtcacttgt

SEQ ID NO: 2850032 - DNA, 25 bp, Homo sapien
tcctatgaccaactgaataagattc

SEQ ID NO: 2850033 - DNA, 25 bp, Homo sapien
cacttgtcctatgaccaactgaata

SEQ ID NO: 2850034 - DNA, 25 bp, Homo sapien
cacaggctctgtcacttgtcctatg

SEQ ID NO: 2850035 - DNA, 25 bp, Homo sapien
aaactgagtcctcattacctctctc

SEQ ID NO: 2850036 - DNA, 25 bp, Homo sapien
aaaactgagtcctcattacctctct

SEQ ID NO: 2850037 - DNA, 25 bp, Homo sapien
gctaaatgggtcagcatctccacag

SEQ ID NO: 2850038 - DNA, 25 bp, Homo sapien
caggtaaaagctaaatgggtcagca

SEQ ID NO: 2850039 - DNA, 25 bp, Homo sapien
gggtcagcatctccacagttagtct

SEQ ID NO: 2850040 - DNA, 25 bp, Homo sapien
taaaagctaaatgggtcagcatctc

SEQ ID NO: 2850041 - DNA, 25 bp, Homo sapien
caggcatccacgtcagggtggccat

SEQ ID NO: 2850042 - DNA, 25 bp, Homo sapien
attgccctcagttgggtctgccctg

SEQ ID NO: 2850043 - DNA, 25 bp, Homo sapien
ggaccattgccctcagttgggtctg

SEQ ID NO: 2850044 - DNA, 25 bp, Homo sapien
tggccatagctctaaggaccattgc

SEQ ID NO: 2850045 - DNA, 25 bp, Homo sapien
caaccccacagattgttgtccttgg

SEQ ID NO: 2850046 - DNA, 25 bp, Homo sapien
gattcaagatatctccacccgagct

SEQ ID NO: 2850047 - DNA, 25 bp, Homo sapien
caggtcaaggagataagggctctga

SEQ ID NO: 2850048 - DNA, 25 bp, Homo sapien
gccgagggccaagacttttccatga

SEQ ID NO: 2850049 - DNA, 25 bp, Homo sapien
tgagagccctaagtatactcaggat

SEQ ID NO: 2850050 - DNA, 25 bp, Homo sapien
caagacgatctagggaaatggttcc

SEQ ID NO: 2850051 - DNA, 25 bp, Homo sapien
ggttcccagacctcagcatgcatca

SEQ ID NO: 2850052 - DNA, 25 bp, Homo sapien
gagctgccttatcattatctctggg

SEQ ID NO: 2850053 - DNA, 25 bp, Homo sapien
gccagcaacagtttgatgtctgcag

SEQ ID NO: 2850054 - DNA, 25 bp, Homo sapien
ctggccagcaacagtttgatgtctg

SEQ ID NO: 2850055 - DNA, 25 bp, Homo sapien
tggccagcaacagtttgatgtctgc

SEQ ID NO: 2850056 - DNA, 25 bp, Homo sapien
ggccagcaacagtttgatgtctgca

SEQ ID NO: 2850057 - DNA, 25 bp, Homo sapien
aaggagatttgcagttgtgaacact

SEQ ID NO: 2850058 - DNA, 25 bp, Homo sapien
tcattcgggaaggagatttgcagtt

SEQ ID NO: 2850059 - DNA, 25 bp, Homo sapien
tttgcagttgtgaacactgaccagc

SEQ ID NO: 2850060 - DNA, 25 bp, Homo sapien
gcagtgacagctcattcgggaagga

SEQ ID NO: 2850061 - DNA, 25 bp, Homo sapien
ttgaactctgatgggtctgaggtca

SEQ ID NO: 2850062 - DNA, 25 bp, Homo sapien
ctgaggccaactggaaatctgggcc

SEQ ID NO: 2850063 - DNA, 25 bp, Homo sapien
tgaggtcatggttgttgtcaggaca

SEQ ID NO: 2850064 - DNA, 25 bp, Homo sapien
tactgtggtctttgcaattgaactc

SEQ ID NO: 2850065 - DNA, 25 bp, Homo sapien
tgtgcttgaatgacattcatcaagg

SEQ ID NO: 2850066 - DNA, 25 bp, Homo sapien
ctccaccagggcatacacgtctaga

SEQ ID NO: 2850067 - DNA, 25 bp, Homo sapien
aaaccaggctttgtgcttgaatgac

SEQ ID NO: 2850068 - DNA, 25 bp, Homo sapien
tacacgtctagagggaagggagcat

SEQ ID NO: 2850069 - DNA, 25 bp, Homo sapien
ctgatcccttgagccgtgtttttcc

SEQ ID NO: 2850070 - DNA, 25 bp, Homo sapien
tacctaacccatgcgatgcaaactg

SEQ ID NO: 2850071 - DNA, 25 bp, Homo sapien
caaactggactacgttccaaatcca

SEQ ID NO: 2850072 - DNA, 25 bp, Homo sapien
taagcctgcactagacaatgagttg

SEQ ID NO: 2850073 - DNA, 25 bp, Homo sapien
taactttaggagactgacgcagcag

SEQ ID NO: 2850074 - DNA, 25 bp, Homo sapien
taaaatggcgggagagtatgtcact

SEQ ID NO: 2850075 - DNA, 25 bp, Homo sapien
tagaagatgttggtctcaggcccag

SEQ ID NO: 2850076 - DNA, 25 bp, Homo sapien
gaaaaaggcactctccgcattgtag

SEQ ID NO: 2850077 - DNA, 25 bp, Homo sapien
tccttttgaaaagctcccactctct

SEQ ID NO: 2850078 - DNA, 25 bp, Homo sapien
ttttgaaaagctcccactctctcca

SEQ ID NO: 2850079 - DNA, 25 bp, Homo sapien
cttttgaaaagctcccactctctcc

SEQ ID NO: 2850080 - DNA, 25 bp, Homo sapien
attccttttgaaaagctcccactct

SEQ ID NO: 2850081 - DNA, 25 bp, Homo sapien
gacttcatgtctgtgctgggagcaa

SEQ ID NO: 2850082 - DNA, 25 bp, Homo sapien
tatccctgaagggtaaatgtccaca

SEQ ID NO: 2850083 - DNA, 25 bp, Homo sapien
cctgggcaagctaatctggttaact

SEQ ID NO: 2850084 - DNA, 25 bp, Homo sapien
cctaggagtagcaattctggatcac

SEQ ID NO: 2850085 - DNA, 25 bp, Homo sapien
tataaggcaagttctgggataaccc

SEQ ID NO: 2850086 - DNA, 25 bp, Homo sapien
gaggtcccagccaagttcacaaact

SEQ ID NO: 2850087 - DNA, 25 bp, Homo sapien
tccaaggtcccaaagctatctgact

SEQ ID NO: 2850088 - DNA, 25 bp, Homo sapien
tatttgcaataagcaaggccctgag

SEQ ID NO: 2850089 - DNA, 25 bp, Homo sapien
gaatcagtgtgactaatttccaggt

SEQ ID NO: 2850090 - DNA, 25 bp, Homo sapien
tagtaacatcaagtagtctccagac

SEQ ID NO: 2850091 - DNA, 25 bp, Homo sapien
tttccaggtagaatgagaggctctt

SEQ ID NO: 2850092 - DNA, 25 bp, Homo sapien
gaagtttcttgagtgggcttccacc

SEQ ID NO: 2850093 - DNA, 25 bp, Homo sapien
catgcacagctcatagggtttgggt

SEQ ID NO: 2850094 - DNA, 25 bp, Homo sapien
gaactaggttcagaccccagatcac

SEQ ID NO: 2850095 - DNA, 25 bp, Homo sapien
tgaatgaaaacttagcccacagcgt

SEQ ID NO: 2850096 - DNA, 25 bp, Homo sapien
tatacacaaggagtgacagaactag

SEQ ID NO: 2850097 - DNA, 25 bp, Homo sapien
ctacgatggaaaattcagtggcaga

SEQ ID NO: 2850098 - DNA, 25 bp, Homo sapien
aactgctctgtattgaacatttatc

SEQ ID NO: 2850099 - DNA, 25 bp, Homo sapien
acagctaacctacacaaagaatgtg

SEQ ID NO: 2850100 - DNA, 25 bp, Homo sapien
ttataagccatcattgtaaaattcc

SEQ ID NO: 2850101 - DNA, 25 bp, Homo sapien
tctactaccatgcatcccagacagg

SEQ ID NO: 2850102 - DNA, 25 bp, Homo sapien
caagagcttaacaacttgcctgagg

SEQ ID NO: 2850103 - DNA, 25 bp, Homo sapien
gataaacatgaagcaccaagagctt

SEQ ID NO: 2850104 - DNA, 25 bp, Homo sapien
caagatctatctagcttaagttcca

SEQ ID NO: 2850105 - DNA, 25 bp, Homo sapien
tgttatttcagcctagcccgtggca

SEQ ID NO: 2850106 - DNA, 25 bp, Homo sapien
caagcacctgagtctagaaggtcga

SEQ ID NO: 2850107 - DNA, 25 bp, Homo sapien
agctcttaggactgtaaaacaaccg

SEQ ID NO: 2850108 - DNA, 25 bp, Homo sapien
ggtcaccaggattaccacgcagctg

SEQ ID NO: 2850109 - DNA, 25 bp, Homo sapien
aaagtcaccttcacacatatttggc

SEQ ID NO: 2850110 - DNA, 25 bp, Homo sapien
gtcaccttcacacatatttggcccg

SEQ ID NO: 2850111 - DNA, 25 bp, Homo sapien
ccttcacacatatttggcccgtgca

SEQ ID NO: 2850112 - DNA, 25 bp, Homo sapien
tcacacatatttggcccgtgcaagg

SEQ ID NO: 2850113 - DNA, 25 bp, Homo sapien
gagatgtgtcacctgacagaaacac

SEQ ID NO: 2850114 - DNA, 25 bp, Homo sapien
tccaatcctgttctaaagtaaccaa

SEQ ID NO: 2850115 - DNA, 25 bp, Homo sapien
gaatgattgtgttgatttcagccca

SEQ ID NO: 2850116 - DNA, 25 bp, Homo sapien
cccagtatttcaggctgatgaaaca

SEQ ID NO: 2850117 - DNA, 25 bp, Homo sapien
gggtgaacgaagtgcacattcccag

SEQ ID NO: 2850118 - DNA, 25 bp, Homo sapien
ggagggtgaacgaagtgcacattcc

SEQ ID NO: 2850119 - DNA, 25 bp, Homo sapien
ggtgaacgaagtgcacattcccaga

SEQ ID NO: 2850120 - DNA, 25 bp, Homo sapien
ccttagaggagggtgaacgaagtgc

SEQ ID NO: 2850121 - DNA, 25 bp, Homo sapien
aatagcactgctgaaaaacccagag

SEQ ID NO: 2850122 - DNA, 25 bp, Homo sapien
tgcccaaggtcgcactgcaatttaa

SEQ ID NO: 2850123 - DNA, 25 bp, Homo sapien
gaagccctgaacagcagaaatcctg

SEQ ID NO: 2850124 - DNA, 25 bp, Homo sapien
caatgtgtctgggagaaagttaccc

SEQ ID NO: 2850125 - DNA, 25 bp, Homo sapien
gaactagtatacctgaaagctgaga

SEQ ID NO: 2850126 - DNA, 25 bp, Homo sapien
cagggaactagtatacctgaaagct

SEQ ID NO: 2850127 - DNA, 25 bp, Homo sapien
tggacagggaactagtatacctgaa

SEQ ID NO: 2850128 - DNA, 25 bp, Homo sapien
tactgttggacagggaactagtata

SEQ ID NO: 2850129 - DNA, 25 bp, Homo sapien
tgactagaagatgcaatggcggctc

SEQ ID NO: 2850130 - DNA, 25 bp, Homo sapien
tcaggttatagaaagagtcactccc

SEQ ID NO: 2850131 - DNA, 25 bp, Homo sapien
tccaaagggaatagctggcccacat

SEQ ID NO: 2850132 - DNA, 25 bp, Homo sapien
gacgagtcagcgttctgggatccag

SEQ ID NO: 2850133 - DNA, 25 bp, Homo sapien
ctgaggtcgcaggaagccctgactg

SEQ ID NO: 2850134 - DNA, 25 bp, Homo sapien
gaagccctgactgtaccactgaact

SEQ ID NO: 2850135 - DNA, 25 bp, Homo sapien
ggaagccctgactgtaccactgaac

SEQ ID NO: 2850136 - DNA, 25 bp, Homo sapien
gtctgaggtcgcaggaagccctgac

SEQ ID NO: 2850137 - DNA, 25 bp, Homo sapien
cattgtggatgagacaaaatgtgtg

SEQ ID NO: 2850138 - DNA, 25 bp, Homo sapien
catcaagtcctccatctcatctgcc

SEQ ID NO: 2850139 - DNA, 25 bp, Homo sapien
tcatctgcccccattgtggatgaga

SEQ ID NO: 2850140 - DNA, 25 bp, Homo sapien
ggtattctctcccatccatcaagtc

SEQ ID NO: 2850141 - DNA, 25 bp, Homo sapien
tccaagtcaggtttcgtgcaatcca

SEQ ID NO: 2850142 - DNA, 25 bp, Homo sapien
aacagtcaaccggtaaaggctccag

SEQ ID NO: 2850143 - DNA, 25 bp, Homo sapien
gctaggccaggtaaggactcggacc

SEQ ID NO: 2850144 - DNA, 25 bp, Homo sapien
ccctgagaaaatcggtgaagagcac

SEQ ID NO: 2850145 - DNA, 25 bp, Homo sapien
tcatcacccagcaggaccgctgctg

SEQ ID NO: 2850146 - DNA, 25 bp, Homo sapien
cagcctgctcctaatggtgtcctga

SEQ ID NO: 2850147 - DNA, 25 bp, Homo sapien
ggccagaaggaagtactcagtggca

SEQ ID NO: 2850148 - DNA, 25 bp, Homo sapien
gaaggaagtactcagtggcatcatg

SEQ ID NO: 2850149 - DNA, 25 bp, Homo sapien
gaaccatggtctactcctcagcgaa

SEQ ID NO: 2850150 - DNA, 25 bp, Homo sapien
caagatggctagagggtgcttcact

SEQ ID NO: 2850151 - DNA, 25 bp, Homo sapien
tcagaggtggacttgaacctgccag

SEQ ID NO: 2850152 - DNA, 25 bp, Homo sapien
ccataggcccttgagagacttacag

SEQ ID NO: 2850153 - DNA, 25 bp, Homo sapien
gggtggtggctgtcaggaaatctgg

SEQ ID NO: 2850154 - DNA, 25 bp, Homo sapien
gtggtggctgtcaggaaatctggga

SEQ ID NO: 2850155 - DNA, 25 bp, Homo sapien
aggaaatctgggaagtctggctctt

SEQ ID NO: 2850156 - DNA, 25 bp, Homo sapien
gaaatctgggaagtctggctcttac

SEQ ID NO: 2850157 - DNA, 25 bp, Homo sapien
cagggtcttcaggtagcagtcctca

SEQ ID NO: 2850158 - DNA, 25 bp, Homo sapien
catacatgtgcagggagtagtacac

SEQ ID NO: 2850159 - DNA, 25 bp, Homo sapien
tacactgtagccaggcggtgaaagg

SEQ ID NO: 2850160 - DNA, 25 bp, Homo sapien
gaaggtgagtctgcccaggcgataa

SEQ ID NO: 2850161 - DNA, 25 bp, Homo sapien
cctgcaaccaacactttgcatcatt

SEQ ID NO: 2850162 - DNA, 25 bp, Homo sapien
atcctgcaaccaacactttgcatca

SEQ ID NO: 2850163 - DNA, 25 bp, Homo sapien
tcctgcaaccaacactttgcatcat

SEQ ID NO: 2850164 - DNA, 25 bp, Homo sapien
aggcctttcctgagattagcacaca

SEQ ID NO: 2850165 - DNA, 25 bp, Homo sapien
tgtacccaggattgtgctatggctg

SEQ ID NO: 2850166 - DNA, 25 bp, Homo sapien
caaggtggctgtgggataccatcta

SEQ ID NO: 2850167 - DNA, 25 bp, Homo sapien
cagagaattatcttgggtaccacca

SEQ ID NO: 2850168 - DNA, 25 bp, Homo sapien
cagcttattgaaaatccggagctca

SEQ ID NO: 2850169 - DNA, 25 bp, Homo sapien
gccttcaacctccttgctaaaggaa

SEQ ID NO: 2850170 - DNA, 25 bp, Homo sapien
ccttcgaggctaatctgcagctctg

SEQ ID NO: 2850171 - DNA, 25 bp, Homo sapien
ggagctcagttctcaccgccttcaa

SEQ ID NO: 2850172 - DNA, 25 bp, Homo sapien
cattgaagaacacatcacctgcttc

SEQ ID NO: 2850173 - DNA, 25 bp, Homo sapien
ctgcatgatgcctgtggcgggtccc

SEQ ID NO: 2850174 - DNA, 25 bp, Homo sapien
gtggcgggtcccattgaagaacaca

SEQ ID NO: 2850175 - DNA, 25 bp, Homo sapien
acatcacctgcttcttcataaagtt

SEQ ID NO: 2850176 - DNA, 25 bp, Homo sapien
tgaggtagtggagtcgccccgcccc

SEQ ID NO: 2850177 - DNA, 25 bp, Homo sapien
atgaggtagtggagtcgccccgccc

SEQ ID NO: 2850178 - DNA, 25 bp, Homo sapien
catgaggtagtggagtcgccccgcc

SEQ ID NO: 2850179 - DNA, 25 bp, Homo sapien
gaggtagtggagtcgccccgcccca

SEQ ID NO: 2850180 - DNA, 25 bp, Homo sapien
ctttgagctttgtgagaatgcaaat

SEQ ID NO: 2850181 - DNA, 25 bp, Homo sapien
ttgagctttgtgagaatgcaaatcc

SEQ ID NO: 2850182 - DNA, 25 bp, Homo sapien
tttgagctttgtgagaatgcaaatc

SEQ ID NO: 2850183 - DNA, 25 bp, Homo sapien
tgcccaaggctacaccactaataag

SEQ ID NO: 2850184 - DNA, 25 bp, Homo sapien
cctgtgacaggtggttatagaaaca

SEQ ID NO: 2850185 - DNA, 25 bp, Homo sapien
gagacctatctatgtatcaggcaca

SEQ ID NO: 2850186 - DNA, 25 bp, Homo sapien
ttggcaatgaagacctcctgaaggt

SEQ ID NO: 2850187 - DNA, 25 bp, Homo sapien
gccagccagtgctcatggtaggtga

SEQ ID NO: 2850188 - DNA, 25 bp, Homo sapien
cggtatttaggttccgataaagctg

SEQ ID NO: 2850189 - DNA, 25 bp, Homo sapien
taggtgatgcatgcctcagggtttg

SEQ ID NO: 2850190 - DNA, 25 bp, Homo sapien
ttaggttccgataaagctgccccag

SEQ ID NO: 2850191 - DNA, 25 bp, Homo sapien
gggacatgaatgagatgacttgaga

SEQ ID NO: 2850192 - DNA, 25 bp, Homo sapien
gacatgaatgagatgacttgagata

SEQ ID NO: 2850193 - DNA, 25 bp, Homo sapien
ggacatgaatgagatgacttgagat

SEQ ID NO: 2850194 - DNA, 25 bp, Homo sapien
tggatggcaccgtcaggagacctgt

SEQ ID NO: 2850195 - DNA, 25 bp, Homo sapien
cctggctggctaagagataggccca

SEQ ID NO: 2850196 - DNA, 25 bp, Homo sapien
caatagagtcgtacagcctgcagga

SEQ ID NO: 2850197 - DNA, 25 bp, Homo sapien
tcatgcttggcactagactcacggt

SEQ ID NO: 2850198 - DNA, 25 bp, Homo sapien
ctaaggtggccgctcttggcaagag

SEQ ID NO: 2850199 - DNA, 25 bp, Homo sapien
aaagttgagcaaccttgggcacctg

SEQ ID NO: 2850200 - DNA, 25 bp, Homo sapien
taaggacaggcaaagttgagcaacc

SEQ ID NO: 2850201 - DNA, 25 bp, Homo sapien
gctgtcctcaaggatgaatgtcagg

SEQ ID NO: 2850202 - DNA, 25 bp, Homo sapien
actcagatcatttggaggattctgg

SEQ ID NO: 2850203 - DNA, 25 bp, Homo sapien
ggattctggatggattcaaacccac

SEQ ID NO: 2850204 - DNA, 25 bp, Homo sapien
cactcagatcatttggaggattctg

SEQ ID NO: 2850205 - DNA, 25 bp, Homo sapien
gaggattctggatggattcaaaccc

SEQ ID NO: 2850206 - DNA, 25 bp, Homo sapien
gaggaagctggaacactcagtctgc

SEQ ID NO: 2850207 - DNA, 25 bp, Homo sapien
gacagatgtgatgtcagtgcgagca

SEQ ID NO: 2850208 - DNA, 25 bp, Homo sapien
atgtgatgtcagtgcgagcaagagt

SEQ ID NO: 2850209 - DNA, 25 bp, Homo sapien
cccagggccaacagggagcatctct

SEQ ID NO: 2850210 - DNA, 25 bp, Homo sapien
acgagagagaggcaatattcaaagg

SEQ ID NO: 2850211 - DNA, 25 bp, Homo sapien
cgagagagaggcaatattcaaagga

SEQ ID NO: 2850212 - DNA, 25 bp, Homo sapien
gagagagaggcaatattcaaaggaa

SEQ ID NO: 2850213 - DNA, 25 bp, Homo sapien
ccaaactacatgagtcgttcttcaa

SEQ ID NO: 2850214 - DNA, 25 bp, Homo sapien
ttctggtaacttcctccaaactaca

SEQ ID NO: 2850215 - DNA, 25 bp, Homo sapien
tgactcactttcctacctatgacct

SEQ ID NO: 2850216 - DNA, 25 bp, Homo sapien
aagcactgactcactttcctaccta

SEQ ID NO: 2850217 - DNA, 25 bp, Homo sapien
ataaactgaactgacgcattctctc

SEQ ID NO: 2850218 - DNA, 25 bp, Homo sapien
ggcaccctcgaagctcaactgcaaa

SEQ ID NO: 2850219 - DNA, 25 bp, Homo sapien
tcagtgaccacctgttaaaataaac

SEQ ID NO: 2850220 - DNA, 25 bp, Homo sapien
tctcctttctatcactctctgtatc

SEQ ID NO: 2850221 - DNA, 25 bp, Homo sapien
tctcaatgctttctccctggtagaa

SEQ ID NO: 2850222 - DNA, 25 bp, Homo sapien
gctcataacccgtcaaggccttaca

SEQ ID NO: 2850223 - DNA, 25 bp, Homo sapien
gaacttgtcgactttccaatgaacc

SEQ ID NO: 2850224 - DNA, 25 bp, Homo sapien
aggtatgacaaagccgatgatctca

SEQ ID NO: 2850225 - DNA, 25 bp, Homo sapien
aatctgataggagcctgtccaatcc

SEQ ID NO: 2850226 - DNA, 25 bp, Homo sapien
gataggagcctgtccaatccctctt

SEQ ID NO: 2850227 - DNA, 25 bp, Homo sapien
ttcctggataattctttaggaacca

SEQ ID NO: 2850228 - DNA, 25 bp, Homo sapien
tcctggataattctttaggaaccac

SEQ ID NO: 2850229 - DNA, 25 bp, Homo sapien
tccaaggctgacaccagtaccaggc

SEQ ID NO: 2850230 - DNA, 25 bp, Homo sapien
ctgacaccagtaccaggccccgctg

SEQ ID NO: 2850231 - DNA, 25 bp, Homo sapien
tgacaccagtaccaggccccgctga

SEQ ID NO: 2850232 - DNA, 25 bp, Homo sapien
cagaggctccaaggctgacaccagt

SEQ ID NO: 2850233 - DNA, 25 bp, Homo sapien
caaagacacgccttccaactcggag

SEQ ID NO: 2850234 - DNA, 25 bp, Homo sapien
gattaactcattcttgcaaagtgtc

SEQ ID NO: 2850235 - DNA, 25 bp, Homo sapien
tctcggctggtggagtcacggagca

SEQ ID NO: 2850236 - DNA, 25 bp, Homo sapien
gcaaagtgtcaagcattccccttcc

SEQ ID NO: 2850237 - DNA, 25 bp, Homo sapien
tccaggtgtttatcatctacagaca

SEQ ID NO: 2850238 - DNA, 25 bp, Homo sapien
ccagtacttgtggtcaaagaggaga

SEQ ID NO: 2850239 - DNA, 25 bp, Homo sapien
gagtcccaggtatattgtttccagg

SEQ ID NO: 2850240 - DNA, 25 bp, Homo sapien
tcctccaccaatatgcagttgagcc

SEQ ID NO: 2850241 - DNA, 25 bp, Homo sapien
ctaagaagtcaagccaacaagattt

SEQ ID NO: 2850242 - DNA, 25 bp, Homo sapien
ctgaacaaaatgatttctgacatag

SEQ ID NO: 2850243 - DNA, 25 bp, Homo sapien
tcttaattaccagagccaggccaat

SEQ ID NO: 2850244 - DNA, 25 bp, Homo sapien
caccacagtggaactgacgctgcat

SEQ ID NO: 2850245 - DNA, 25 bp, Homo sapien
aacagactctatgtgctgccaacga

SEQ ID NO: 2850246 - DNA, 25 bp, Homo sapien
aacgagccggtctatggagcacagt

SEQ ID NO: 2850247 - DNA, 25 bp, Homo sapien
taaattgtggaggaggtcatcctcc

SEQ ID NO: 2850248 - DNA, 25 bp, Homo sapien
ctaaattgtggaggaggtcatcctc

SEQ ID NO: 2850249 - DNA, 25 bp, Homo sapien
gctaaattgtggaggaggtcatcct

SEQ ID NO: 2850250 - DNA, 25 bp, Homo sapien
aattgtggaggaggtcatcctccac

SEQ ID NO: 2850251 - DNA, 25 bp, Homo sapien
taaggtaggtggagaacttccagat

SEQ ID NO: 2850252 - DNA, 25 bp, Homo sapien
aactgggccctctgagactggatac

SEQ ID NO: 2850253 - DNA, 25 bp, Homo sapien
ggatactgaccaaccttgctgagag

SEQ ID NO: 2850254 - DNA, 25 bp, Homo sapien
tactgaccaaccttgctgagaggtc

SEQ ID NO: 2850255 - DNA, 25 bp, Homo sapien
tctacagtaccaatagcagccagtg

SEQ ID NO: 2850256 - DNA, 25 bp, Homo sapien
tataatactgctatacagcggcagc

SEQ ID NO: 2850257 - DNA, 25 bp, Homo sapien
tgttgtttgtccaagcctccggagt

SEQ ID NO: 2850258 - DNA, 25 bp, Homo sapien
tatacttagcggttaccaggagctg

SEQ ID NO: 2850259 - DNA, 25 bp, Homo sapien
taggggtccatttacacacctcctg

SEQ ID NO: 2850260 - DNA, 25 bp, Homo sapien
tggagcggctctttacacagaagga

SEQ ID NO: 2850261 - DNA, 25 bp, Homo sapien
tcctgtaggggtccatttacacacc

SEQ ID NO: 2850262 - DNA, 25 bp, Homo sapien
ctggagcggctctttacacagaagg

SEQ ID NO: 2850263 - DNA, 25 bp, Homo sapien
tattcagatgaggctatacactcac

SEQ ID NO: 2850264 - DNA, 25 bp, Homo sapien
cttgtattcagatgaggctatacac

SEQ ID NO: 2850265 - DNA, 25 bp, Homo sapien
tgtattcagatgaggctatacactc

SEQ ID NO: 2850266 - DNA, 25 bp, Homo sapien
ccttgtattcagatgaggctataca

SEQ ID NO: 2850267 - DNA, 25 bp, Homo sapien
gatacagttggatccttggaaggag

SEQ ID NO: 2850268 - DNA, 25 bp, Homo sapien
tacagttggatccttggaaggagtt

SEQ ID NO: 2850269 - DNA, 25 bp, Homo sapien
tcgatacagttggatccttggaagg

SEQ ID NO: 2850270 - DNA, 25 bp, Homo sapien
acagttggatccttggaaggagttt

SEQ ID NO: 2850271 - DNA, 25 bp, Homo sapien
tttttgaatgataaagtccctcctc

SEQ ID NO: 2850272 - DNA, 25 bp, Homo sapien
atttttgaatgataaagtccctcct

SEQ ID NO: 2850273 - DNA, 25 bp, Homo sapien
ttttgaatgataaagtccctcctcc

SEQ ID NO: 2850274 - DNA, 25 bp, Homo sapien
tatttttgaatgataaagtccctcc

SEQ ID NO: 2850275 - DNA, 25 bp, Homo sapien
ctgtatccttccgattttagcatac

SEQ ID NO: 2850276 - DNA, 25 bp, Homo sapien
ctctgtatccttccgattttagcat

SEQ ID NO: 2850277 - DNA, 25 bp, Homo sapien
tctctgtatccttccgattttagca

SEQ ID NO: 2850278 - DNA, 25 bp, Homo sapien
tatccttccgattttagcatacatg

SEQ ID NO: 2850279 - DNA, 25 bp, Homo sapien
taatccaactgggttatgcagtgcc

SEQ ID NO: 2850280 - DNA, 25 bp, Homo sapien
catgtgacccatgtgaacccagtct

SEQ ID NO: 2850281 - DNA, 25 bp, Homo sapien
gaacaagtggcaatcagacagtcct

SEQ ID NO: 2850282 - DNA, 25 bp, Homo sapien
ggaccctcatcagcacacttagtga

SEQ ID NO: 2850283 - DNA, 25 bp, Homo sapien
agtgctcagtgctatcaagagcctt

SEQ ID NO: 2850284 - DNA, 25 bp, Homo sapien
gtccattagccctgaggactcactg

SEQ ID NO: 2850285 - DNA, 25 bp, Homo sapien
ctgaggactcactgttttggtgtct

SEQ ID NO: 2850286 - DNA, 25 bp, Homo sapien
ctcagtgctatcaagagccttctcc

SEQ ID NO: 2850287 - DNA, 25 bp, Homo sapien
gcctgaactttcttcctgtcctggg

SEQ ID NO: 2850288 - DNA, 25 bp, Homo sapien
tgcctgaactttcttcctgtcctgg

SEQ ID NO: 2850289 - DNA, 25 bp, Homo sapien
ctgaactttcttcctgtcctggggg

SEQ ID NO: 2850290 - DNA, 25 bp, Homo sapien
cctgaactttcttcctgtcctgggg

SEQ ID NO: 2850291 - DNA, 25 bp, Homo sapien
catctttgggagaaaagtttctcca

SEQ ID NO: 2850292 - DNA, 25 bp, Homo sapien
tgagcctctactggaccatccactt

SEQ ID NO: 2850293 - DNA, 25 bp, Homo sapien
gccagaaagcacaatcatctcccca

SEQ ID NO: 2850294 - DNA, 25 bp, Homo sapien
tgggccccgggtcagactccgctcc

SEQ ID NO: 2850295 - DNA, 25 bp, Homo sapien
ctggggatgcagaagcagccaccca

SEQ ID NO: 2850296 - DNA, 25 bp, Homo sapien
tggggatgcagaagcagccacccat

SEQ ID NO: 2850297 - DNA, 25 bp, Homo sapien
gtgtgtaccatcctaccctggccga

SEQ ID NO: 2850298 - DNA, 25 bp, Homo sapien
ctccctggcacacgagggaccgagg

SEQ ID NO: 2850299 - DNA, 25 bp, Homo sapien
ggccagaagagtgctgcaagggaca

SEQ ID NO: 2850300 - DNA, 25 bp, Homo sapien
gcaagggacagcctcccaacggtgt

SEQ ID NO: 2850301 - DNA, 25 bp, Homo sapien
cagacgtcatgcaggagttacacca

SEQ ID NO: 2850302 - DNA, 25 bp, Homo sapien
tgaatgtagccaccctccaagtatg

SEQ ID NO: 2850303 - DNA, 25 bp, Homo sapien
tttgatggccttcatagagcgctgc

SEQ ID NO: 2850304 - DNA, 25 bp, Homo sapien
tccagtctaactgagagcaggctga

SEQ ID NO: 2850305 - DNA, 25 bp, Homo sapien
atggggtgacagaatcccgggaact

SEQ ID NO: 2850306 - DNA, 25 bp, Homo sapien
tccagccgtcttgaaacacagcagg

SEQ ID NO: 2850307 - DNA, 25 bp, Homo sapien
gatggttctgagctggcaatgtagg

SEQ ID NO: 2850308 - DNA, 25 bp, Homo sapien
tgggaatttatggcacccctccagc

SEQ ID NO: 2850309 - DNA, 25 bp, Homo sapien
tgaaatagatgaccttggagtcagg

SEQ ID NO: 2850310 - DNA, 25 bp, Homo sapien
ctgaaatagatgaccttggagtcag

SEQ ID NO: 2850311 - DNA, 25 bp, Homo sapien
gcttgatttcactggaattgcccca

SEQ ID NO: 2850312 - DNA, 25 bp, Homo sapien
tcatgcttgatttcactggaattgc

SEQ ID NO: 2850313 - DNA, 25 bp, Homo sapien
ttgatttcactggaattgccccaca

SEQ ID NO: 2850314 - DNA, 25 bp, Homo sapien
tgcttgatttcactggaattgcccc

SEQ ID NO: 2850315 - DNA, 25 bp, Homo sapien
agaaataagaggacaggtgaccagc

SEQ ID NO: 2850316 - DNA, 25 bp, Homo sapien
ggaatcctcaggaactctaggcttg

SEQ ID NO: 2850317 - DNA, 25 bp, Homo sapien
tgtctctctcaaagaggacagaaat

SEQ ID NO: 2850318 - DNA, 25 bp, Homo sapien
aatgagcagtggtcaactattttcc

SEQ ID NO: 2850319 - DNA, 25 bp, Homo sapien
tgtggagctgggtcattcctctgag

SEQ ID NO: 2850320 - DNA, 25 bp, Homo sapien
gctgcttgcttgtgtggagctgggt

SEQ ID NO: 2850321 - DNA, 25 bp, Homo sapien
gctccttggctgcttgcttgtgtgg

SEQ ID NO: 2850322 - DNA, 25 bp, Homo sapien
ttgcttgtgtggagctgggtcattc

SEQ ID NO: 2850323 - DNA, 25 bp, Homo sapien
ccagccttcggttgctgtgattcaa

SEQ ID NO: 2850324 - DNA, 25 bp, Homo sapien
gatatgcaaggagccagttcccctc

SEQ ID NO: 2850325 - DNA, 25 bp, Homo sapien
tctgtaccaattgtgcaatctctgg

SEQ ID NO: 2850326 - DNA, 25 bp, Homo sapien
caaggagctccgatatctggatagt

SEQ ID NO: 2850327 - DNA, 25 bp, Homo sapien
ccaggcacaggagaatgttgtagtc

SEQ ID NO: 2850328 - DNA, 25 bp, Homo sapien
cacaggagaatgttgtagtccacct

SEQ ID NO: 2850329 - DNA, 25 bp, Homo sapien
ttcagtgtgagaggaccccttaaaa

SEQ ID NO: 2850330 - DNA, 25 bp, Homo sapien
ggcacaggagaatgttgtagtccac

SEQ ID NO: 2850331 - DNA, 25 bp, Homo sapien
aatcaccagggcatttaaccaaagc

SEQ ID NO: 2850332 - DNA, 25 bp, Homo sapien
aaggccttgggttcagcctcttcac

SEQ ID NO: 2850333 - DNA, 25 bp, Homo sapien
tcggatttaatgtcaggatttaaaa

SEQ ID NO: 2850334 - DNA, 25 bp, Homo sapien
caggattctgaggttccagagggaa

SEQ ID NO: 2850335 - DNA, 25 bp, Homo sapien
gtcctatcagcacagctactggtat

SEQ ID NO: 2850336 - DNA, 25 bp, Homo sapien
ggtcctatcagcacagctactggta

SEQ ID NO: 2850337 - DNA, 25 bp, Homo sapien
ctatcagcacagctactggtatacc

SEQ ID NO: 2850338 - DNA, 25 bp, Homo sapien
tcctatcagcacagctactggtata

SEQ ID NO: 2850339 - DNA, 25 bp, Homo sapien
aaagccaactgctctttccaaagca

SEQ ID NO: 2850340 - DNA, 25 bp, Homo sapien
caaagcaccagctccccttttcttg

SEQ ID NO: 2850341 - DNA, 25 bp, Homo sapien
ccggaaaagccaactgctctttcca

SEQ ID NO: 2850342 - DNA, 25 bp, Homo sapien
ttccaaagcaccagctccccttttc

SEQ ID NO: 2850343 - DNA, 25 bp, Homo sapien
tgcagaaatggtctctgcactatct

SEQ ID NO: 2850344 - DNA, 25 bp, Homo sapien
tgatcacacgtctcttcccaaccca

SEQ ID NO: 2850345 - DNA, 25 bp, Homo sapien
ctgatcacacgtctcttcccaaccc

SEQ ID NO: 2850346 - DNA, 25 bp, Homo sapien
gaacgaccgtgaggacattagggct

SEQ ID NO: 2850347 - DNA, 25 bp, Homo sapien
agagctgtctatgaatcacctggga

SEQ ID NO: 2850348 - DNA, 25 bp, Homo sapien
tatctcaggcgtttgttatcgacac

SEQ ID NO: 2850349 - DNA, 25 bp, Homo sapien
tgttctccacggtatccccagaagc

SEQ ID NO: 2850350 - DNA, 25 bp, Homo sapien
gagggaaaacaagcgctcaagcact

SEQ ID NO: 2850351 - DNA, 25 bp, Homo sapien
tatcattgtcgagcccttagaaccc

SEQ ID NO: 2850352 - DNA, 25 bp, Homo sapien
ttgagcctagactgcgccaagcttg

SEQ ID NO: 2850353 - DNA, 25 bp, Homo sapien
gcagagccgggtggaaactgtcttc

SEQ ID NO: 2850354 - DNA, 25 bp, Homo sapien
caccagaatggtgggcctgactgtg

SEQ ID NO: 2850355 - DNA, 25 bp, Homo sapien
tgggaacgagtgtgttgcatttgcc

SEQ ID NO: 2850356 - DNA, 25 bp, Homo sapien
aaaagttgcataaccatttgacggg

SEQ ID NO: 2850357 - DNA, 25 bp, Homo sapien
cattacagcgttgtttagccacaga

SEQ ID NO: 2850358 - DNA, 25 bp, Homo sapien
tcatacagtaaaagcaccttgaagg

SEQ ID NO: 2850359 - DNA, 25 bp, Homo sapien
gaagcaggtgataccactttgagaa

SEQ ID NO: 2850360 - DNA, 25 bp, Homo sapien
tggcacatgatatggtgacagcgct

SEQ ID NO: 2850361 - DNA, 25 bp, Homo sapien
tgacagcgcttttgatacacattag

SEQ ID NO: 2850362 - DNA, 25 bp, Homo sapien
agcatcatagagaccctgagccaca

SEQ ID NO: 2850363 - DNA, 25 bp, Homo sapien
acttccccaatgtttcctgcttgtc

SEQ ID NO: 2850364 - DNA, 25 bp, Homo sapien
ccagcatcatagagaccctgagcca

SEQ ID NO: 2850365 - DNA, 25 bp, Homo sapien
cagcatcatagagaccctgagccac

SEQ ID NO: 2850366 - DNA, 25 bp, Homo sapien
caagaagtaggaaccgccgggcgcg

SEQ ID NO: 2850367 - DNA, 25 bp, Homo sapien
attagccggacgtcgtggcgggtgc

SEQ ID NO: 2850368 - DNA, 25 bp, Homo sapien
gccggacgtcgtggcgggtgcctgt

SEQ ID NO: 2850369 - DNA, 25 bp, Homo sapien
gtggctcacgcctgtaatcccagca

SEQ ID NO: 2850370 - DNA, 25 bp, Homo sapien
taataagaatggttccctggcacat

SEQ ID NO: 2850371 - DNA, 25 bp, Homo sapien
cgggcaatccggcagctgaaacttc

SEQ ID NO: 2850372 - DNA, 25 bp, Homo sapien
aactctgcgatgttatgggctgcca

SEQ ID NO: 2850373 - DNA, 25 bp, Homo sapien
acggacacaggcacagtcaacagca

SEQ ID NO: 2850374 - DNA, 25 bp, Homo sapien
ggaacatgctgatgagcctggcaga

SEQ ID NO: 2850375 - DNA, 25 bp, Homo sapien
tgaagaaggcagcacgagccgtgtt

SEQ ID NO: 2850376 - DNA, 25 bp, Homo sapien
tctggctggccaagagcatgccgtt

SEQ ID NO: 2850377 - DNA, 25 bp, Homo sapien
tgtcctgacaacacgtttctgaaga

SEQ ID NO: 2850378 - DNA, 25 bp, Homo sapien
cagaggactcgtacttccaccctgc

SEQ ID NO: 2850379 - DNA, 25 bp, Homo sapien
gaggactcgtacttccaccctgctg

SEQ ID NO: 2850380 - DNA, 25 bp, Homo sapien
caggcccgggccatctgtgaaagga

SEQ ID NO: 2850381 - DNA, 25 bp, Homo sapien
ggttcccagaggactcgtacttcca

SEQ ID NO: 2850382 - DNA, 25 bp, Homo sapien
ccatgccagggatgctgcccaaagc

SEQ ID NO: 2850383 - DNA, 25 bp, Homo sapien
agggatgctgcccaaagctgacatc

SEQ ID NO: 2850384 - DNA, 25 bp, Homo sapien
tggagcagcaatcactgcttcttca

SEQ ID NO: 2850385 - DNA, 25 bp, Homo sapien
agctgacatccctggccctggagca

SEQ ID NO: 2850386 - DNA, 25 bp, Homo sapien
cttctttggtatttagcagatgcct

SEQ ID NO: 2850387 - DNA, 25 bp, Homo sapien
ttgggctctaattgagaagccagag

SEQ ID NO: 2850388 - DNA, 25 bp, Homo sapien
gagtgaaagcggctgcaccctgcat

SEQ ID NO: 2850389 - DNA, 25 bp, Homo sapien
agaagccagagtgaaagcggctgca

SEQ ID NO: 2850390 - DNA, 25 bp, Homo sapien
ttatgtgtggcatcccctgggccct

SEQ ID NO: 2850391 - DNA, 25 bp, Homo sapien
ggttatgtgtggcatcccctgggcc

SEQ ID NO: 2850392 - DNA, 25 bp, Homo sapien
ctgggccctgggctgctgtgtgctc

SEQ ID NO: 2850393 - DNA, 25 bp, Homo sapien
gggccctgggctgctgtgtgctcat

SEQ ID NO: 2850394 - DNA, 25 bp, Homo sapien
gaccctgcagtctaatacgggaaac

SEQ ID NO: 2850395 - DNA, 25 bp, Homo sapien
gatcaggagcccagacaagctttat

SEQ ID NO: 2850396 - DNA, 25 bp, Homo sapien
tttgggccctcagagtaccttgttg

SEQ ID NO: 2850397 - DNA, 25 bp, Homo sapien
tatgaccccagacccttctaggtgc

SEQ ID NO: 2850398 - DNA, 25 bp, Homo sapien
aactctgtagagcagtgaaggactg

SEQ ID NO: 2850399 - DNA, 25 bp, Homo sapien
gactgcgtgggctgcggaaaagctg

SEQ ID NO: 2850400 - DNA, 25 bp, Homo sapien
ccttcagaagagtcgtttgttggct

SEQ ID NO: 2850401 - DNA, 25 bp, Homo sapien
cgtgggctgcggaaaagctgttgga

SEQ ID NO: 2850402 - DNA, 25 bp, Homo sapien
gattttaccacttctagccctgaag

SEQ ID NO: 2850403 - DNA, 25 bp, Homo sapien
gaaaagtgagaccaagacatgcagt

SEQ ID NO: 2850404 - DNA, 25 bp, Homo sapien
tagagacagagctaaaatctaggac

SEQ ID NO: 2850405 - DNA, 25 bp, Homo sapien
tccaggctgctgtatctaccgatac

SEQ ID NO: 2850406 - DNA, 25 bp, Homo sapien
tcagttttgccaaggcactgttgcc

SEQ ID NO: 2850407 - DNA, 25 bp, Homo sapien
tttaggaaaatgctaggcttcagtt

SEQ ID NO: 2850408 - DNA, 25 bp, Homo sapien
gggcatgacatttaggaaaatgcta

SEQ ID NO: 2850409 - DNA, 25 bp, Homo sapien
gttttcaacaccatccaagactggg

SEQ ID NO: 2850410 - DNA, 25 bp, Homo sapien
gatcctgagagagaatgcaccatta

SEQ ID NO: 2850411 - DNA, 25 bp, Homo sapien
taacattagtggtaagggcctctca

SEQ ID NO: 2850412 - DNA, 25 bp, Homo sapien
tgggatgtcctcaaagcaagcctgt

SEQ ID NO: 2850413 - DNA, 25 bp, Homo sapien
tgagcaaatcagtcaaaggccctgc

SEQ ID NO: 2850414 - DNA, 25 bp, Homo sapien
taaattggatctctctactgacagc

SEQ ID NO: 2850415 - DNA, 25 bp, Homo sapien
taactcagaaaaggtgcactaagct

SEQ ID NO: 2850416 - DNA, 25 bp, Homo sapien
gagatgttcaagtgagggcctccca

SEQ ID NO: 2850417 - DNA, 25 bp, Homo sapien
taggtctagagtagcaatttcccgg

SEQ ID NO: 2850418 - DNA, 25 bp, Homo sapien
tggcactaaagcagactcaagagga

SEQ ID NO: 2850419 - DNA, 25 bp, Homo sapien
ggcactaaagcagactcaagaggag

SEQ ID NO: 2850420 - DNA, 25 bp, Homo sapien
gcttgtccctaaagcttcctgtagc

SEQ ID NO: 2850421 - DNA, 25 bp, Homo sapien
accatgagaaatggtcatgcagcca

SEQ ID NO: 2850422 - DNA, 25 bp, Homo sapien
gctgaagctgatccaccacgctctg

SEQ ID NO: 2850423 - DNA, 25 bp, Homo sapien
gaccatgagaaatggtcatgcagcc

SEQ ID NO: 2850424 - DNA, 25 bp, Homo sapien
agagatggtaggacctgcccagtgt

SEQ ID NO: 2850425 - DNA, 25 bp, Homo sapien
tacttcaggtggaagcttgaagctg

SEQ ID NO: 2850426 - DNA, 25 bp, Homo sapien
gcagaccgattctgacacttacaga

SEQ ID NO: 2850427 - DNA, 25 bp, Homo sapien
ggcagctgagccagcagaccgattc

SEQ ID NO: 2850428 - DNA, 25 bp, Homo sapien
aaattagcccaacgtgattgtgtgc

SEQ ID NO: 2850429 - DNA, 25 bp, Homo sapien
tgcattttgcctggacttcggtccc

SEQ ID NO: 2850430 - DNA, 25 bp, Homo sapien
tcacatggccatgcgccgtggctta

SEQ ID NO: 2850431 - DNA, 25 bp, Homo sapien
gggaaaatgttagttcacatggcca

SEQ ID NO: 2850432 - DNA, 25 bp, Homo sapien
ctctctgcttcgtggcccctttctt

SEQ ID NO: 2850433 - DNA, 25 bp, Homo sapien
tgagtgccccaaggtccaactctct

SEQ ID NO: 2850434 - DNA, 25 bp, Homo sapien
cctaaagaaggtgcctgaagaagtc

SEQ ID NO: 2850435 - DNA, 25 bp, Homo sapien
ctgcttcgtggcccctttcttaaat

SEQ ID NO: 2850436 - DNA, 25 bp, Homo sapien
tttgagcgcccacgaagaactttct

SEQ ID NO: 2850437 - DNA, 25 bp, Homo sapien
gcagtctccccaaatcagtgagcac

SEQ ID NO: 2850438 - DNA, 25 bp, Homo sapien
gctgatgctgaccatgtggtttcca

SEQ ID NO: 2850439 - DNA, 25 bp, Homo sapien
tcaacacccccaattaggagctcag

SEQ ID NO: 2850440 - DNA, 25 bp, Homo sapien
gggtgagcctcaaatctagtcatta

SEQ ID NO: 2850441 - DNA, 25 bp, Homo sapien
tcaacagaagtggacagggcctagg

SEQ ID NO: 2850442 - DNA, 25 bp, Homo sapien
ggcaatgcagttaaaagggtgagcc

SEQ ID NO: 2850443 - DNA, 25 bp, Homo sapien
cattacaccagtcaacagaagtgga

SEQ ID NO: 2850444 - DNA, 25 bp, Homo sapien
gccctggattgtaacctctcccttg

SEQ ID NO: 2850445 - DNA, 25 bp, Homo sapien
tctaggattcctggtaggaaaagga

SEQ ID NO: 2850446 - DNA, 25 bp, Homo sapien
tcccttgtccaaatctaggattcct

SEQ ID NO: 2850447 - DNA, 25 bp, Homo sapien
caccacttccaactggcccctttgc

SEQ ID NO: 2850448 - DNA, 25 bp, Homo sapien
gggctggcagggcaaccataccata

SEQ ID NO: 2850449 - DNA, 25 bp, Homo sapien
agtgttggccaacaccgctcatggc

SEQ ID NO: 2850450 - DNA, 25 bp, Homo sapien
gaaaggttcttggtctatgcctctg

SEQ ID NO: 2850451 - DNA, 25 bp, Homo sapien
gagtggctgcttatgagattccaaa

SEQ ID NO: 2850452 - DNA, 25 bp, Homo sapien
gaggctggcgatgtgacatggcaaa

SEQ ID NO: 2850453 - DNA, 25 bp, Homo sapien
tgtgacatggcaaatgtagaactga

SEQ ID NO: 2850454 - DNA, 25 bp, Homo sapien
caagaggctggcgatgtgacatggc

SEQ ID NO: 2850455 - DNA, 25 bp, Homo sapien
tgacatggcaaatgtagaactgact

SEQ ID NO: 2850456 - DNA, 25 bp, Homo sapien
ttgagcacctgctgaatactgagca

SEQ ID NO: 2850457 - DNA, 25 bp, Homo sapien
agcacctctgatgttgagcacctgc

SEQ ID NO: 2850458 - DNA, 25 bp, Homo sapien
tgagcacctctgatgttgagcacct

SEQ ID NO: 2850459 - DNA, 25 bp, Homo sapien
tgttgagcacctgctgaatactgag

SEQ ID NO: 2850460 - DNA, 25 bp, Homo sapien
caatagcgggtatcgtaaggcatgt

SEQ ID NO: 2850461 - DNA, 25 bp, Homo sapien
caaacataacggatgtaaggcagaa

SEQ ID NO: 2850462 - DNA, 25 bp, Homo sapien
tatgcagctagagcagacccaggaa

SEQ ID NO: 2850463 - DNA, 25 bp, Homo sapien
gaaagtgtgcgtgatgttaatgaaa

SEQ ID NO: 2850464 - DNA, 25 bp, Homo sapien
gccacagagccaaacgtggactaga

SEQ ID NO: 2850465 - DNA, 25 bp, Homo sapien
cacagagccaaacgtggactagaag

SEQ ID NO: 2850466 - DNA, 25 bp, Homo sapien
gttcatagacatgggcaccagctgt

SEQ ID NO: 2850467 - DNA, 25 bp, Homo sapien
cagagccaaacgtggactagaaggc

SEQ ID NO: 2850468 - DNA, 25 bp, Homo sapien
ccaaaggccggaagtcaccatctat

SEQ ID NO: 2850469 - DNA, 25 bp, Homo sapien
gagagaaaccaaaggccggaagtca

SEQ ID NO: 2850470 - DNA, 25 bp, Homo sapien
tggtccaatatgattggcccagaga

SEQ ID NO: 2850471 - DNA, 25 bp, Homo sapien
tggcctggtccaatatgattggccc

SEQ ID NO: 2850472 - DNA, 25 bp, Homo sapien
tgcggtggtaagaccccatcgctag

SEQ ID NO: 2850473 - DNA, 25 bp, Homo sapien
ccatcgctagcggagtgcaagcaaa

SEQ ID NO: 2850474 - DNA, 25 bp, Homo sapien
aacagtctccgcattccggcatgga

SEQ ID NO: 2850475 - DNA, 25 bp, Homo sapien
gataaaaacgcgctccaacagtctc

SEQ ID NO: 2850476 - DNA, 25 bp, Homo sapien
aagtcaggcttggcgagctcagagg

SEQ ID NO: 2850477 - DNA, 25 bp, Homo sapien
ttccagttcaacctcctcacttgcc

SEQ ID NO: 2850478 - DNA, 25 bp, Homo sapien
cctcacttgcccctccccaacagag

SEQ ID NO: 2850479 - DNA, 25 bp, Homo sapien
gtcaggcttggcgagctcagagggc

SEQ ID NO: 2850480 - DNA, 25 bp, Homo sapien
tcacttgcttcttccacaagctact

SEQ ID NO: 2850481 - DNA, 25 bp, Homo sapien
tcttccacaagctactccaactctg

SEQ ID NO: 2850482 - DNA, 25 bp, Homo sapien
aagactgctttacagaacttcactt

SEQ ID NO: 2850483 - DNA, 25 bp, Homo sapien
taagactgctttacagaacttcact

SEQ ID NO: 2850484 - DNA, 25 bp, Homo sapien
tccttctatggtaatggtcttttga

SEQ ID NO: 2850485 - DNA, 25 bp, Homo sapien
aggaacccttatccatattcgaatc

SEQ ID NO: 2850486 - DNA, 25 bp, Homo sapien
ttgaaaggaacccttatccatattc

SEQ ID NO: 2850487 - DNA, 25 bp, Homo sapien
agttcatttcctactccttctatgg

SEQ ID NO: 2850488 - DNA, 25 bp, Homo sapien
gggtccttggaatgtgagcactctg

SEQ ID NO: 2850489 - DNA, 25 bp, Homo sapien
ttggaatgtgagcactctgagggaa

SEQ ID NO: 2850490 - DNA, 25 bp, Homo sapien
tccttggaatgtgagcactctgagg

SEQ ID NO: 2850491 - DNA, 25 bp, Homo sapien
aggggcttcgccagctccttgtgcc

SEQ ID NO: 2850492 - DNA, 25 bp, Homo sapien
ggcaagtcgcctgagtacatcagct

SEQ ID NO: 2850493 - DNA, 25 bp, Homo sapien
tctgggacccggcaagtcgcctgag

SEQ ID NO: 2850494 - DNA, 25 bp, Homo sapien
gaggactactatgaagaggcccttc

SEQ ID NO: 2850495 - DNA, 25 bp, Homo sapien
catcagctcccacagtaagttctgg

SEQ ID NO: 2850496 - DNA, 25 bp, Homo sapien
aagagaaggagcgtgcctgtttgga

SEQ ID NO: 2850497 - DNA, 25 bp, Homo sapien
gagaaggagcgtgcctgtttggaac

SEQ ID NO: 2850498 - DNA, 25 bp, Homo sapien
agagaaggagcgtgcctgtttggaa

SEQ ID NO: 2850499 - DNA, 25 bp, Homo sapien
tagacagagtgcagctactggaatc

SEQ ID NO: 2850500 - DNA, 25 bp, Homo sapien
cattcctcatatgctttagacagag

SEQ ID NO: 2850501 - DNA, 25 bp, Homo sapien
tgaacaaaagctatagaggacatgc

SEQ ID NO: 2850502 - DNA, 25 bp, Homo sapien
tatccctgcctgcatacatgtgaac

SEQ ID NO: 2850503 - DNA, 25 bp, Homo sapien
aggatgttgtagggtagggtctctc

SEQ ID NO: 2850504 - DNA, 25 bp, Homo sapien
agtaaatcaagtcccttacctatgt

SEQ ID NO: 2850505 - DNA, 25 bp, Homo sapien
cttacctatgttctgacactgaggc

SEQ ID NO: 2850506 - DNA, 25 bp, Homo sapien
tgaggctcttggagctatgggttag

SEQ ID NO: 2850507 - DNA, 25 bp, Homo sapien
tgttactataactgaaaacactttc

SEQ ID NO: 2850508 - DNA, 25 bp, Homo sapien
taattttggcttatgatggcatttc

SEQ ID NO: 2850509 - DNA, 25 bp, Homo sapien
cttcctgttttaggggatggccgct

SEQ ID NO: 2850510 - DNA, 25 bp, Homo sapien
ccagagattccatctgggaagatct

SEQ ID NO: 2850511 - DNA, 25 bp, Homo sapien
tggaagaggccttaatgatcaaatc

SEQ ID NO: 2850512 - DNA, 25 bp, Homo sapien
tctttttaggactggacacaaggaa

SEQ ID NO: 2850513 - DNA, 25 bp, Homo sapien
catctgtgtaaacattgagctcacc

SEQ ID NO: 2850514 - DNA, 25 bp, Homo sapien
agtcagattttaggaaggcagtcaa

SEQ ID NO: 2850515 - DNA, 25 bp, Homo sapien
gctttggctcactctcacttgaaga

SEQ ID NO: 2850516 - DNA, 25 bp, Homo sapien
gtgctctcattcatggcaaaggatt

SEQ ID NO: 2850517 - DNA, 25 bp, Homo sapien
tatggctgtctaaagtctagggaaa

SEQ ID NO: 2850518 - DNA, 25 bp, Homo sapien
gatgatactaaggaagctttggctc

SEQ ID NO: 2850519 - DNA, 25 bp, Homo sapien
cagcagtatagaaagcatagggctt

SEQ ID NO: 2850520 - DNA, 25 bp, Homo sapien
tctgccagaggaagtctgtttttca

SEQ ID NO: 2850521 - DNA, 25 bp, Homo sapien
tcagcatatgaatgaggtagcgtct

SEQ ID NO: 2850522 - DNA, 25 bp, Homo sapien
taaactagcaagtctgagctgctgc

SEQ ID NO: 2850523 - DNA, 25 bp, Homo sapien
cagagctaataacgcagaggctgga

SEQ ID NO: 2850524 - DNA, 25 bp, Homo sapien
ttacaaccacctagaaaggtggagc

SEQ ID NO: 2850525 - DNA, 25 bp, Homo sapien
agcacttgcagacactgcaaaaggc

SEQ ID NO: 2850526 - DNA, 25 bp, Homo sapien
tatctcataagatggttacaaccac

SEQ ID NO: 2850527 - DNA, 25 bp, Homo sapien
actacgggagggaatataaggcaga

SEQ ID NO: 2850528 - DNA, 25 bp, Homo sapien
tcatagctcctggttactgtggact

SEQ ID NO: 2850529 - DNA, 25 bp, Homo sapien
gacaatcaattgaggcaacctacaa

SEQ ID NO: 2850530 - DNA, 25 bp, Homo sapien
ttgaagtacctagttcagaactccc

SEQ ID NO: 2850531 - DNA, 25 bp, Homo sapien
ataattggtattggcccagcactgg

SEQ ID NO: 2850532 - DNA, 25 bp, Homo sapien
taaagtccaggcatagagcactgtg

SEQ ID NO: 2850533 - DNA, 25 bp, Homo sapien
gcttaaagcagtcaggtcctatccc

SEQ ID NO: 2850534 - DNA, 25 bp, Homo sapien
gggctctcaagtccagtgaactcga

SEQ ID NO: 2850535 - DNA, 25 bp, Homo sapien
ggaattctttgttctgacccaccta

SEQ ID NO: 2850536 - DNA, 25 bp, Homo sapien
tagaggcgtctgtgcactcattcac

SEQ ID NO: 2850537 - DNA, 25 bp, Homo sapien
caggtgacccaagcaaaatttcagg

SEQ ID NO: 2850538 - DNA, 25 bp, Homo sapien
tgttctgacccacctatgaaggcat

SEQ ID NO: 2850539 - DNA, 25 bp, Homo sapien
gtgtctggaacccagccgaagcttc

SEQ ID NO: 2850540 - DNA, 25 bp, Homo sapien
cagccgaagcttcctggggtaattt

SEQ ID NO: 2850541 - DNA, 25 bp, Homo sapien
agcggctgctgaagggatcagcatg

SEQ ID NO: 2850542 - DNA, 25 bp, Homo sapien
gaagggatcagcatgcgctggcaca

SEQ ID NO: 2850543 - DNA, 25 bp, Homo sapien
tcttgctttcaaaagtcagtgttta

SEQ ID NO: 2850544 - DNA, 25 bp, Homo sapien
cttgctttcaaaagtcagtgtttac

SEQ ID NO: 2850545 - DNA, 25 bp, Homo sapien
gcaaggaggatggtctcgggctgct

SEQ ID NO: 2850546 - DNA, 25 bp, Homo sapien
ggcacaaaggtgcaaggaggatggt

SEQ ID NO: 2850547 - DNA, 25 bp, Homo sapien
acaaaggtgcaaggaggatggtctc

SEQ ID NO: 2850548 - DNA, 25 bp, Homo sapien
caaggaggatggtctcgggctgctg

SEQ ID NO: 2850549 - DNA, 25 bp, Homo sapien
tcctcctgcatggtgaaggggttca

SEQ ID NO: 2850550 - DNA, 25 bp, Homo sapien
ggtctccatgactgcgcgctggcgg

SEQ ID NO: 2850551 - DNA, 25 bp, Homo sapien
aggaacctggctgaacaccggcacg

SEQ ID NO: 2850552 - DNA, 25 bp, Homo sapien
gcagcccacagcgatggtctccatg

SEQ ID NO: 2850553 - DNA, 25 bp, Homo sapien
agtcgagagccccaaggttatccag

SEQ ID NO: 2850554 - DNA, 25 bp, Homo sapien
ttcaaggtcaccagtcacccagctt

SEQ ID NO: 2850555 - DNA, 25 bp, Homo sapien
gaaagggccagtcagcacccatact

SEQ ID NO: 2850556 - DNA, 25 bp, Homo sapien
aactgaagatcatggaaggcaagtc

SEQ ID NO: 2850557 - DNA, 25 bp, Homo sapien
tccacagctgcaagttgacctcaca

SEQ ID NO: 2850558 - DNA, 25 bp, Homo sapien
catactcctccatgcgggcatacgg

SEQ ID NO: 2850559 - DNA, 25 bp, Homo sapien
atctcctcgatgttcctctcatact

SEQ ID NO: 2850560 - DNA, 25 bp, Homo sapien
tcctcttgttggacatccacagctg

SEQ ID NO: 2850561 - DNA, 25 bp, Homo sapien
ttcctcttgcttttggggctcctgg

SEQ ID NO: 2850562 - DNA, 25 bp, Homo sapien
ccagccccaggaagatggaaatggt

SEQ ID NO: 2850563 - DNA, 25 bp, Homo sapien
gccaggggcccaggccgcccttgcc

SEQ ID NO: 2850564 - DNA, 25 bp, Homo sapien
ccccaggaagatggaaatggtaaga

SEQ ID NO: 2850565 - DNA, 25 bp, Homo sapien
gggtgcggcagggaagcgccacgta

SEQ ID NO: 2850566 - DNA, 25 bp, Homo sapien
ggggtgcggcagggaagcgccacgt

SEQ ID NO: 2850567 - DNA, 25 bp, Homo sapien
ggtgcggcagggaagcgccacgtac

SEQ ID NO: 2850568 - DNA, 25 bp, Homo sapien
ctgctgcccgcctggaaccccagat

SEQ ID NO: 2850569 - DNA, 25 bp, Homo sapien
gctgcccgcctggaaccccagatgc

SEQ ID NO: 2850570 - DNA, 25 bp, Homo sapien
tgctgcccgcctggaaccccagatg

SEQ ID NO: 2850571 - DNA, 25 bp, Homo sapien
tttcccccaaagctgtcagcgtctc

SEQ ID NO: 2850572 - DNA, 25 bp, Homo sapien
acgtctggattcacaagatctggaa

SEQ ID NO: 2850573 - DNA, 25 bp, Homo sapien
aggacgtctggattcacaagatctg

SEQ ID NO: 2850574 - DNA, 25 bp, Homo sapien
gacgtctggattcacaagatctgga

SEQ ID NO: 2850575 - DNA, 25 bp, Homo sapien
cacagagcaccgaaggatatccaag

SEQ ID NO: 2850576 - DNA, 25 bp, Homo sapien
gaaggatatccaagttatttctgcc

SEQ ID NO: 2850577 - DNA, 25 bp, Homo sapien
ctttgccccagcttagggaaagtga

SEQ ID NO: 2850578 - DNA, 25 bp, Homo sapien
actggaaccagcagcagttagaggt

SEQ ID NO: 2850579 - DNA, 25 bp, Homo sapien
cccagagctgtgagataaattccca

SEQ ID NO: 2850580 - DNA, 25 bp, Homo sapien
gagtgtttggttacagcagccctgc

SEQ ID NO: 2850581 - DNA, 25 bp, Homo sapien
gacttagtccaggttcaaagggctg

SEQ ID NO: 2850582 - DNA, 25 bp, Homo sapien
gccaacgggatatatagagacacag

SEQ ID NO: 2850583 - DNA, 25 bp, Homo sapien
tttgggaggactgggctacaccatt

SEQ ID NO: 2850584 - DNA, 25 bp, Homo sapien
agtaatattcgagttgtcagtcagg

SEQ ID NO: 2850585 - DNA, 25 bp, Homo sapien
cacggtagtggaagacggtgctccc

SEQ ID NO: 2850586 - DNA, 25 bp, Homo sapien
tcagtcaggttcactactcccaaag

SEQ ID NO: 2850587 - DNA, 25 bp, Homo sapien
tctgtcgacctgttttctctaggaa

SEQ ID NO: 2850588 - DNA, 25 bp, Homo sapien
tctctaggaatggagggatttcaag

SEQ ID NO: 2850589 - DNA, 25 bp, Homo sapien
caagccgcagtctgtcgacctgttt

SEQ ID NO: 2850590 - DNA, 25 bp, Homo sapien
ttttctctaggaatggagggatttc

SEQ ID NO: 2850591 - DNA, 25 bp, Homo sapien
tggaggttcccagaaagtctcagaa

SEQ ID NO: 2850592 - DNA, 25 bp, Homo sapien
ggcccaggcctcgtttgcatgatga

SEQ ID NO: 2850593 - DNA, 25 bp, Homo sapien
catgatgatgggagtagcttcccac

SEQ ID NO: 2850594 - DNA, 25 bp, Homo sapien
actggaggttcccagaaagtctcag

SEQ ID NO: 2850595 - DNA, 25 bp, Homo sapien
gcaagataccctgagctatgttgag

SEQ ID NO: 2850596 - DNA, 25 bp, Homo sapien
aatgcccagagttgctgaagagctc

SEQ ID NO: 2850597 - DNA, 25 bp, Homo sapien
agaagtgggaatgaaacccggccag

SEQ ID NO: 2850598 - DNA, 25 bp, Homo sapien
ccctgagctatgttgagggagaagt

SEQ ID NO: 2850599 - DNA, 25 bp, Homo sapien
aaagaggcaggaggaatcaaaagtc

SEQ ID NO: 2850600 - DNA, 25 bp, Homo sapien
gaggcaggaggaatcaaaagtcaga

SEQ ID NO: 2850601 - DNA, 25 bp, Homo sapien
ggcaggaggaatcaaaagtcagagg

SEQ ID NO: 2850602 - DNA, 25 bp, Homo sapien
aagaggcaggaggaatcaaaagtca

SEQ ID NO: 2850603 - DNA, 25 bp, Homo sapien
taatctctgaggtcctcactgctgg

SEQ ID NO: 2850604 - DNA, 25 bp, Homo sapien
catcactgactcaagtggctgttct

SEQ ID NO: 2850605 - DNA, 25 bp, Homo sapien
tcctgcaattttccaactaaactct

SEQ ID NO: 2850606 - DNA, 25 bp, Homo sapien
cctcttcctgcaattttccaactaa

SEQ ID NO: 2850607 - DNA, 25 bp, Homo sapien
tgaccaaagagacttggagcctggt

SEQ ID NO: 2850608 - DNA, 25 bp, Homo sapien
ggacaccaggcctgaccaaagagac

SEQ ID NO: 2850609 - DNA, 25 bp, Homo sapien
gttccccggggaacattcagctgat

SEQ ID NO: 2850610 - DNA, 25 bp, Homo sapien
agcctggttgtgagatggagttccc

SEQ ID NO: 2850611 - DNA, 25 bp, Homo sapien
agtggacagcagtgtgggagaggat

SEQ ID NO: 2850612 - DNA, 25 bp, Homo sapien
gagaggaccaagaagtcaagggcat

SEQ ID NO: 2850613 - DNA, 25 bp, Homo sapien
gggcttggggcagtggacagcagtg

SEQ ID NO: 2850614 - DNA, 25 bp, Homo sapien
agaggatggagaggaccaagaagtc

SEQ ID NO: 2850615 - DNA, 25 bp, Homo sapien
cttccgtaacccagggattcaagca

SEQ ID NO: 2850616 - DNA, 25 bp, Homo sapien
ttccgtaacccagggattcaagcaa

SEQ ID NO: 2850617 - DNA, 25 bp, Homo sapien
gcaacttccgtaacccagggattca

SEQ ID NO: 2850618 - DNA, 25 bp, Homo sapien
actgcaacttccgtaacccagggat

SEQ ID NO: 2850619 - DNA, 25 bp, Homo sapien
actcataagtgactttgaggatcag

SEQ ID NO: 2850620 - DNA, 25 bp, Homo sapien
gcaataggtgttgccctggaaagca

SEQ ID NO: 2850621 - DNA, 25 bp, Homo sapien
gcaaggtcctggagagtgagaccct

SEQ ID NO: 2850622 - DNA, 25 bp, Homo sapien
gaaaattattggtacttaactcata

SEQ ID NO: 2850623 - DNA, 25 bp, Homo sapien
ggcagccatttatcataggtttatg

SEQ ID NO: 2850624 - DNA, 25 bp, Homo sapien
ggttgggctttgctatggccccagc

SEQ ID NO: 2850625 - DNA, 25 bp, Homo sapien
tcagcctcaaactgcgttcccagag

SEQ ID NO: 2850626 - DNA, 25 bp, Homo sapien
atggaaagggccacgcaagggctcc

SEQ ID NO: 2850627 - DNA, 25 bp, Homo sapien
tggagatctagccaggtcagaccca

SEQ ID NO: 2850628 - DNA, 25 bp, Homo sapien
cagtgaccactaagcaatgcaagaa

SEQ ID NO: 2850629 - DNA, 25 bp, Homo sapien
atcatcatgtaccaagccacaggtc

SEQ ID NO: 2850630 - DNA, 25 bp, Homo sapien
caccaaatggcattacctaggtcca

SEQ ID NO: 2850631 - DNA, 25 bp, Homo sapien
gtctgagatgaagcactgtagctca

SEQ ID NO: 2850632 - DNA, 25 bp, Homo sapien
agcactgtagctcaggaagagagaa

SEQ ID NO: 2850633 - DNA, 25 bp, Homo sapien
ggagtctgagatgaagcactgtagc

SEQ ID NO: 2850634 - DNA, 25 bp, Homo sapien
gatgaagcactgtagctcaggaaga

SEQ ID NO: 2850635 - DNA, 25 bp, Homo sapien
gctaagatggggattcctggaaata

SEQ ID NO: 2850636 - DNA, 25 bp, Homo sapien
ttgtcctcacggtccagttttccca

SEQ ID NO: 2850637 - DNA, 25 bp, Homo sapien
tgtcctcacggtccagttttcccag

SEQ ID NO: 2850638 - DNA, 25 bp, Homo sapien
atgctaagatggggattcctggaaa

SEQ ID NO: 2850639 - DNA, 25 bp, Homo sapien
cagcggttgaaccaggacaccatca

SEQ ID NO: 2850640 - DNA, 25 bp, Homo sapien
caggcatgcgtttcttgtctccacc

SEQ ID NO: 2850641 - DNA, 25 bp, Homo sapien
gggctgcggtattgcatccacatga

SEQ ID NO: 2850642 - DNA, 25 bp, Homo sapien
tcagcactgccgtactcttgggaaa

SEQ ID NO: 2850643 - DNA, 25 bp, Homo sapien
taactatcatgttgtggccccaacc

SEQ ID NO: 2850644 - DNA, 25 bp, Homo sapien
aaccccatttgacctagcctggctg

SEQ ID NO: 2850645 - DNA, 25 bp, Homo sapien
aagcaaaccttcattgagacccaag

SEQ ID NO: 2850646 - DNA, 25 bp, Homo sapien
gagacccaagcggtctctcctgtgc

SEQ ID NO: 2850647 - DNA, 25 bp, Homo sapien
ctaaaatcggcctgttggatcttgt

SEQ ID NO: 2850648 - DNA, 25 bp, Homo sapien
acagcagatgtgcgcctgttctctg

SEQ ID NO: 2850649 - DNA, 25 bp, Homo sapien
ccctgcactgccttggccctggggc

SEQ ID NO: 2850650 - DNA, 25 bp, Homo sapien
cctgagccatcgttgaggacggtgt

SEQ ID NO: 2850651 - DNA, 25 bp, Homo sapien
gggtcgctgaccaagtcgtctcatg

SEQ ID NO: 2850652 - DNA, 25 bp, Homo sapien
aatgccagactgagctatctgaacc

SEQ ID NO: 2850653 - DNA, 25 bp, Homo sapien
tagaagtgggatctcggtccctgcg

SEQ ID NO: 2850654 - DNA, 25 bp, Homo sapien
tctttgtcctggacccctgggcggc

SEQ ID NO: 2850655 - DNA, 25 bp, Homo sapien
ctctggcacattagcattctctttg

SEQ ID NO: 2850656 - DNA, 25 bp, Homo sapien
tgggcggccgacacccccgcactct

SEQ ID NO: 2850657 - DNA, 25 bp, Homo sapien
agtcccagagcatccggccctgaca

SEQ ID NO: 2850658 - DNA, 25 bp, Homo sapien
tggtgttccccgacatcggtcaggc

SEQ ID NO: 2850659 - DNA, 25 bp, Homo sapien
gttcaaatgactgcctcacaaatgg

SEQ ID NO: 2850660 - DNA, 25 bp, Homo sapien
catcggtcaggctgccaagcaaaca

SEQ ID NO: 2850661 - DNA, 25 bp, Homo sapien
ggcagttcaaatgactgcctcacaa

SEQ ID NO: 2850662 - DNA, 25 bp, Homo sapien
cagtgccagggctgcaattgcagca

SEQ ID NO: 2850663 - DNA, 25 bp, Homo sapien
ggagcagctgtcctcggaccccagt

SEQ ID NO: 2850664 - DNA, 25 bp, Homo sapien
tgactaaagaggtcacgcagcccgg

SEQ ID NO: 2850665 - DNA, 25 bp, Homo sapien
agcttcctgactaaagaggtcacgc

SEQ ID NO: 2850666 - DNA, 25 bp, Homo sapien
ctctgggcctcggtatactgcgaga

SEQ ID NO: 2850667 - DNA, 25 bp, Homo sapien
gtccagccgtgggacctctctgggc

SEQ ID NO: 2850668 - DNA, 25 bp, Homo sapien
actgcgagatgccaccaaggctgac

SEQ ID NO: 2850669 - DNA, 25 bp, Homo sapien
tcgtccagccgtgggacctctctgg

SEQ ID NO: 2850670 - DNA, 25 bp, Homo sapien
tgcttgaccccagatacacattctt

SEQ ID NO: 2850671 - DNA, 25 bp, Homo sapien
cgatacatgaaagaccccagcctct

SEQ ID NO: 2850672 - DNA, 25 bp, Homo sapien
aaggaccttccctggcaatgggcct

SEQ ID NO: 2850673 - DNA, 25 bp, Homo sapien
gagcttccgtgtccccgatacatga

SEQ ID NO: 2850674 - DNA, 25 bp, Homo sapien
tccagttaatttcccaccaggctgc

SEQ ID NO: 2850675 - DNA, 25 bp, Homo sapien
ccttgaattcacattcccgaaaaga

SEQ ID NO: 2850676 - DNA, 25 bp, Homo sapien
aaagaggatctacttgtccagttaa

SEQ ID NO: 2850677 - DNA, 25 bp, Homo sapien
cacattcccgaaaagaggatctact

SEQ ID NO: 2850678 - DNA, 25 bp, Homo sapien
ctcttctgtgagtcgaacaggcagc

SEQ ID NO: 2850679 - DNA, 25 bp, Homo sapien
cctcaccacctaactgagacctgat

SEQ ID NO: 2850680 - DNA, 25 bp, Homo sapien
gtgagtcgaacaggcagcttctccc

SEQ ID NO: 2850681 - DNA, 25 bp, Homo sapien
tctgtgagtcgaacaggcagcttct

SEQ ID NO: 2850682 - DNA, 25 bp, Homo sapien
ctgaagttgcttccagcaaggtgtc

SEQ ID NO: 2850683 - DNA, 25 bp, Homo sapien
tgaagttgcttccagcaaggtgtcc

SEQ ID NO: 2850684 - DNA, 25 bp, Homo sapien
agggaggaatcacaggaataaagga

SEQ ID NO: 2850685 - DNA, 25 bp, Homo sapien
tactgggactgcgacaagttccagg

SEQ ID NO: 2850686 - DNA, 25 bp, Homo sapien
ctggcaggacaaagcagtctttacc

SEQ ID NO: 2850687 - DNA, 25 bp, Homo sapien
caagttccaggaaccacgctctggc

SEQ ID NO: 2850688 - DNA, 25 bp, Homo sapien
aggaacccaagagggagccgatcac

SEQ ID NO: 2850689 - DNA, 25 bp, Homo sapien
gggtgccggcccgggtgatgtccat

SEQ ID NO: 2850690 - DNA, 25 bp, Homo sapien
gccggcccgggtgatgtccattcac

SEQ ID NO: 2850691 - DNA, 25 bp, Homo sapien
ccggcccgggtgatgtccattcaca

SEQ ID NO: 2850692 - DNA, 25 bp, Homo sapien
gtgccggcccgggtgatgtccattc

SEQ ID NO: 2850693 - DNA, 25 bp, Homo sapien
gcgcagccttgtaggacacacacaa

SEQ ID NO: 2850694 - DNA, 25 bp, Homo sapien
tctcctggacctgcatattttgtgg

SEQ ID NO: 2850695 - DNA, 25 bp, Homo sapien
tactaatgagccacaaaatgaccaa

SEQ ID NO: 2850696 - DNA, 25 bp, Homo sapien
tatttgaaggccaaaggatcaagac

SEQ ID NO: 2850697 - DNA, 25 bp, Homo sapien
gacaggatgtacttcacagggcgct

SEQ ID NO: 2850698 - DNA, 25 bp, Homo sapien
tagttgcccaaccttccagtcattc

SEQ ID NO: 2850699 - DNA, 25 bp, Homo sapien
tgatataacaagaggagcaccatgg

SEQ ID NO: 2850700 - DNA, 25 bp, Homo sapien
tggctaatactatcaatctctgggt

SEQ ID NO: 2850701 - DNA, 25 bp, Homo sapien
ttaaattagctgacattcaagttag

SEQ ID NO: 2850702 - DNA, 25 bp, Homo sapien
tcaacatggaatcatggtatcttat

SEQ ID NO: 2850703 - DNA, 25 bp, Homo sapien
caacatggaatcatggtatcttatt

SEQ ID NO: 2850704 - DNA, 25 bp, Homo sapien
attcaagttagagctttctcttctc

SEQ ID NO: 2850705 - DNA, 25 bp, Homo sapien
gagtatgtcctcaaaactggtctaa

SEQ ID NO: 2850706 - DNA, 25 bp, Homo sapien
ttgtggcaccataatagaatgttcc

SEQ ID NO: 2850707 - DNA, 25 bp, Homo sapien
tgattcaacacaaactgcatgggct

SEQ ID NO: 2850708 - DNA, 25 bp, Homo sapien
cacttggttcatcgccatctttggc

SEQ ID NO: 2850709 - DNA, 25 bp, Homo sapien
cagactagttggaaaacgacccagg

SEQ ID NO: 2850710 - DNA, 25 bp, Homo sapien
taactgagctaaaaatgtctaggcc

SEQ ID NO: 2850711 - DNA, 25 bp, Homo sapien
gacacacatattgatctgctgacac

SEQ ID NO: 2850712 - DNA, 25 bp, Homo sapien
ctcacttaagagagcagcacaccca

SEQ ID NO: 2850713 - DNA, 25 bp, Homo sapien
aaacatttatgagtactgcaaggac

SEQ ID NO: 2850714 - DNA, 25 bp, Homo sapien
ctgcaaggactaacagaaacaggaa

SEQ ID NO: 2850715 - DNA, 25 bp, Homo sapien
gataagcacaaccatatgggaggag

SEQ ID NO: 2850716 - DNA, 25 bp, Homo sapien
tgggaaatcattgtgaaagcaaacc

SEQ ID NO: 2850717 - DNA, 25 bp, Homo sapien
gaatggccatctcccaacattttaa

SEQ ID NO: 2850718 - DNA, 25 bp, Homo sapien
tgcaccccccaatgggtgaacaaag

SEQ ID NO: 2850719 - DNA, 25 bp, Homo sapien
ttgttataccttcccaaaacagaga

SEQ ID NO: 2850720 - DNA, 25 bp, Homo sapien
acagagacattcaacagtagttaga

SEQ ID NO: 2850721 - DNA, 25 bp, Homo sapien
caaatacctcaaccgacaagggtgg

SEQ ID NO: 2850722 - DNA, 25 bp, Homo sapien
aatatcttgctagagggagttcagc

SEQ ID NO: 2850723 - DNA, 25 bp, Homo sapien
aaagaagctgcctaccccagaagtt

SEQ ID NO: 2850724 - DNA, 25 bp, Homo sapien
gctgcagatggaatgacgatatacc

SEQ ID NO: 2850725 - DNA, 25 bp, Homo sapien
tctgaccaaacacgtgtcaatttac

SEQ ID NO: 2850726 - DNA, 25 bp, Homo sapien
ttgacacaatctgaccaaacacgtg

SEQ ID NO: 2850727 - DNA, 25 bp, Homo sapien
cacaatctgaccaaacacgtgtcaa

SEQ ID NO: 2850728 - DNA, 25 bp, Homo sapien
gaccaaacacgtgtcaatttacaat

SEQ ID NO: 2850729 - DNA, 25 bp, Homo sapien
agaagattgagaggaagcgcacgca

SEQ ID NO: 2850730 - DNA, 25 bp, Homo sapien
ctccaagggtgaaagtcaactgctt

SEQ ID NO: 2850731 - DNA, 25 bp, Homo sapien
ataggctcccggcagcatttccaga

SEQ ID NO: 2850732 - DNA, 25 bp, Homo sapien
gggagggtcaacaatcactgaacct

SEQ ID NO: 2850733 - DNA, 25 bp, Homo sapien
atttttattcaaaatcagtccagct

SEQ ID NO: 2850734 - DNA, 25 bp, Homo sapien
tcatttttattcaaaatcagtccag

SEQ ID NO: 2850735 - DNA, 25 bp, Homo sapien
ttttattcaaaatcagtccagctgc

SEQ ID NO: 2850736 - DNA, 25 bp, Homo sapien
tattcaaaatcagtccagctgctag

SEQ ID NO: 2850737 - DNA, 25 bp, Homo sapien
gggcagcagctacaataccaagttc

SEQ ID NO: 2850738 - DNA, 25 bp, Homo sapien
caataccaagttctggcagttgcag

SEQ ID NO: 2850739 - DNA, 25 bp, Homo sapien
ccaagttctggcagttgcagtacta

SEQ ID NO: 2850740 - DNA, 25 bp, Homo sapien
cagttgcagtactagatattgtgcc

SEQ ID NO: 2850741 - DNA, 25 bp, Homo sapien
ataacacgaaacctaaattgacttg

SEQ ID NO: 2850742 - DNA, 25 bp, Homo sapien
atgtaacaaatggcttgaagtagtc

SEQ ID NO: 2850743 - DNA, 25 bp, Homo sapien
taacacgaaacctaaattgacttgc

SEQ ID NO: 2850744 - DNA, 25 bp, Homo sapien
aacacgaaacctaaattgacttgca

SEQ ID NO: 2850745 - DNA, 25 bp, Homo sapien
ttatttaatagtgagtcagcaaggc

SEQ ID NO: 2850746 - DNA, 25 bp, Homo sapien
tttaatagtgagtcagcaaggcatt

SEQ ID NO: 2850747 - DNA, 25 bp, Homo sapien
tatttaatagtgagtcagcaaggca

SEQ ID NO: 2850748 - DNA, 25 bp, Homo sapien
ttaatagtgagtcagcaaggcattt

SEQ ID NO: 2850749 - DNA, 25 bp, Homo sapien
taaaaacaaaatcccagatcatata

SEQ ID NO: 2850750 - DNA, 25 bp, Homo sapien
tgtaaacaaaaaagctcccatttca

SEQ ID NO: 2850751 - DNA, 25 bp, Homo sapien
aataaaaacaaaatcccagatcata

SEQ ID NO: 2850752 - DNA, 25 bp, Homo sapien
aaataaaaacaaaatcccagatcat

SEQ ID NO: 2850753 - DNA, 25 bp, Homo sapien
ttatctaagcaacatacatacatgt

SEQ ID NO: 2850754 - DNA, 25 bp, Homo sapien
tttatctaagcaacatacatacatg

SEQ ID NO: 2850755 - DNA, 25 bp, Homo sapien
cacaattaagcaggcagagtctttc

SEQ ID NO: 2850756 - DNA, 25 bp, Homo sapien
tttaacaaccatcacaactgtggct

SEQ ID NO: 2850757 - DNA, 25 bp, Homo sapien
aacactggaatctttggttgctacc

SEQ ID NO: 2850758 - DNA, 25 bp, Homo sapien
gatggaaaaaccctaagaatgcaca

SEQ ID NO: 2850759 - DNA, 25 bp, Homo sapien
aaccactggctagtgtacatatgaa

SEQ ID NO: 2850760 - DNA, 25 bp, Homo sapien
tccacaaccactggctagtgtacat

SEQ ID NO: 2850761 - DNA, 25 bp, Homo sapien
cacaaccactggctagtgtacatat

SEQ ID NO: 2850762 - DNA, 25 bp, Homo sapien
caaccactggctagtgtacatatga

SEQ ID NO: 2850763 - DNA, 25 bp, Homo sapien
ggaactgagccaataattatagtgg

SEQ ID NO: 2850764 - DNA, 25 bp, Homo sapien
tctaggaaggagtggtacagtgaat

SEQ ID NO: 2850765 - DNA, 25 bp, Homo sapien
cgtctcttgtgaaaagtattagctc

SEQ ID NO: 2850766 - DNA, 25 bp, Homo sapien
tagtggctcatgttatttcgtctct

SEQ ID NO: 2850767 - DNA, 25 bp, Homo sapien
taaacatttgttgggccatctccca

SEQ ID NO: 2850768 - DNA, 25 bp, Homo sapien
ttaccggccgcattagaaagattgt

SEQ ID NO: 2850769 - DNA, 25 bp, Homo sapien
taagcaccgtttttcctctcaccag

SEQ ID NO: 2850770 - DNA, 25 bp, Homo sapien
taatagatctttgttgcctgggtac

SEQ ID NO: 2850771 - DNA, 25 bp, Homo sapien
tcaacagtcttgcagtactaagcat

SEQ ID NO: 2850772 - DNA, 25 bp, Homo sapien
tatcttgcagattaggtggctcatc

SEQ ID NO: 2850773 - DNA, 25 bp, Homo sapien
gacctgttatctgaggaattgctga

SEQ ID NO: 2850774 - DNA, 25 bp, Homo sapien
ggtagaatagagcagtcaaatccag

SEQ ID NO: 2850775 - DNA, 25 bp, Homo sapien
atattctatccctgcccgccaccca

SEQ ID NO: 2850776 - DNA, 25 bp, Homo sapien
aactaacaaggatattctatccctg

SEQ ID NO: 2850777 - DNA, 25 bp, Homo sapien
gattaagaagttaatagcttaatta

SEQ ID NO: 2850778 - DNA, 25 bp, Homo sapien
tttatataactaacaaggatattct

SEQ ID NO: 2850779 - DNA, 25 bp, Homo sapien
tcaaagggatatttacgtagcagta

SEQ ID NO: 2850780 - DNA, 25 bp, Homo sapien
atagaaccagaaactagttcaaagg

SEQ ID NO: 2850781 - DNA, 25 bp, Homo sapien
taaggcttgtaagtttgtgatgggc

SEQ ID NO: 2850782 - DNA, 25 bp, Homo sapien
taggatcccttcaagctacaagaca

SEQ ID NO: 2850783 - DNA, 25 bp, Homo sapien
ggaggtatacactattcctaaactg

SEQ ID NO: 2850784 - DNA, 25 bp, Homo sapien
cagtgcctggctgcttgtgtggttc

SEQ ID NO: 2850785 - DNA, 25 bp, Homo sapien
gctacacatttctgacgttctggag

SEQ ID NO: 2850786 - DNA, 25 bp, Homo sapien
ctatgttgtccggatggttctcaaa

SEQ ID NO: 2850787 - DNA, 25 bp, Homo sapien
taacagttgtgctatcatccagatg

SEQ ID NO: 2850788 - DNA, 25 bp, Homo sapien
tgcattcaacaccactgagtcatag

SEQ ID NO: 2850789 - DNA, 25 bp, Homo sapien
ttctaggtcttctaacagttgtgct

SEQ ID NO: 2850790 - DNA, 25 bp, Homo sapien
tagcaacgctgtattcttctaggtc

SEQ ID NO: 2850791 - DNA, 25 bp, Homo sapien
gaatttgaaggtccagcagtcttgg

SEQ ID NO: 2850792 - DNA, 25 bp, Homo sapien
tgttgggttatttagatctttccag

SEQ ID NO: 2850793 - DNA, 25 bp, Homo sapien
cacaaaccaactcttgcactttcat

SEQ ID NO: 2850794 - DNA, 25 bp, Homo sapien
cttgcactttcatccgcatttcctg

SEQ ID NO: 2850795 - DNA, 25 bp, Homo sapien
caaaatcttcccctgtgatgtgggt

SEQ ID NO: 2850796 - DNA, 25 bp, Homo sapien
tcagcaagaagatgcggttccctgg

SEQ ID NO: 2850797 - DNA, 25 bp, Homo sapien
cctggtacttcttagaattgagtgt

SEQ ID NO: 2850798 - DNA, 25 bp, Homo sapien
aattgagtgtattcagagcagtgtg

SEQ ID NO: 2850799 - DNA, 25 bp, Homo sapien
gacataaacggtagatgcagcccag

SEQ ID NO: 2850800 - DNA, 25 bp, Homo sapien
tgcttatttcatgcctaaggcccga

SEQ ID NO: 2850801 - DNA, 25 bp, Homo sapien
taagacatggatagggcaggacaca

SEQ ID NO: 2850802 - DNA, 25 bp, Homo sapien
ggcccgaaggccagctacattttca

SEQ ID NO: 2850803 - DNA, 25 bp, Homo sapien
ctaaaatggtaggactgtttttcag

SEQ ID NO: 2850804 - DNA, 25 bp, Homo sapien
agtgacattagctacataacacatt

SEQ ID NO: 2850805 - DNA, 25 bp, Homo sapien
cattatgaacttcttggcactatga

SEQ ID NO: 2850806 - DNA, 25 bp, Homo sapien
ggcactatgattagttatacgatga

SEQ ID NO: 2850807 - DNA, 25 bp, Homo sapien
tataaaggccaagttcagactaggg

SEQ ID NO: 2850808 - DNA, 25 bp, Homo sapien
gaacattagggtttgctatcctgag

SEQ ID NO: 2850809 - DNA, 25 bp, Homo sapien
taagcaggtatcaggaggtaagccc

SEQ ID NO: 2850810 - DNA, 25 bp, Homo sapien
taagactagcggtttcaatggcatt

SEQ ID NO: 2850811 - DNA, 25 bp, Homo sapien
aatgagatgctctgcaactgagaag

SEQ ID NO: 2850812 - DNA, 25 bp, Homo sapien
gaaatcaacaagtgttaggtctagg

SEQ ID NO: 2850813 - DNA, 25 bp, Homo sapien
tccctgtaacgtcacttggttcttg

SEQ ID NO: 2850814 - DNA, 25 bp, Homo sapien
gggtaatgccaaactcacctcttga

SEQ ID NO: 2850815 - DNA, 25 bp, Homo sapien
catgttactcttggttttgtcagtt

SEQ ID NO: 2850816 - DNA, 25 bp, Homo sapien
ttcatgttactcttggttttgtcag

SEQ ID NO: 2850817 - DNA, 25 bp, Homo sapien
tcatgttactcttggttttgtcagt

SEQ ID NO: 2850818 - DNA, 25 bp, Homo sapien
tgttactcttggttttgtcagtttg

SEQ ID NO: 2850819 - DNA, 25 bp, Homo sapien
tccaatcaaatgtgtagtcatattg

SEQ ID NO: 2850820 - DNA, 25 bp, Homo sapien
gtccaatcaaatgtgtagtcatatt

SEQ ID NO: 2850821 - DNA, 25 bp, Homo sapien
tctgggttgtgcctaaggaacccta

SEQ ID NO: 2850822 - DNA, 25 bp, Homo sapien
taccctagtttaggactgctaccac

SEQ ID NO: 2850823 - DNA, 25 bp, Homo sapien
tgctaccacttgatcagactccatg

SEQ ID NO: 2850824 - DNA, 25 bp, Homo sapien
tacctgggcggattacctcaattct

SEQ ID NO: 2850825 - DNA, 25 bp, Homo sapien
tagcccacgacaatagtttaagtac

SEQ ID NO: 2850826 - DNA, 25 bp, Homo sapien
agcgtagcccacgacaatagtttaa

SEQ ID NO: 2850827 - DNA, 25 bp, Homo sapien
cgtagcccacgacaatagtttaagt

SEQ ID NO: 2850828 - DNA, 25 bp, Homo sapien
aaagcgtagcccacgacaatagttt

SEQ ID NO: 2850829 - DNA, 25 bp, Homo sapien
cctctcctagagtaaatgccaatgt

SEQ ID NO: 2850830 - DNA, 25 bp, Homo sapien
ttgggtgaccacttgaaacatatac

SEQ ID NO: 2850831 - DNA, 25 bp, Homo sapien
tatcagtcaccaaaaggatttcccc

SEQ ID NO: 2850832 - DNA, 25 bp, Homo sapien
tttcaaggctctaggtatcagtcac

SEQ ID NO: 2850833 - DNA, 25 bp, Homo sapien
catttatctattaaggtagaaatgg

SEQ ID NO: 2850834 - DNA, 25 bp, Homo sapien
gcccagccggatcatttatctatta

SEQ ID NO: 2850835 - DNA, 25 bp, Homo sapien
tgtgcccagccggatcatttatcta

SEQ ID NO: 2850836 - DNA, 25 bp, Homo sapien
gccggatcatttatctattaaggta

SEQ ID NO: 2850837 - DNA, 25 bp, Homo sapien
acttcaacaggcgtggacatcttct

SEQ ID NO: 2850838 - DNA, 25 bp, Homo sapien
caggcgtggacatcttcttttcact

SEQ ID NO: 2850839 - DNA, 25 bp, Homo sapien
tcaacaggcgtggacatcttctttt

SEQ ID NO: 2850840 - DNA, 25 bp, Homo sapien
taaaacttcaacaggcgtggacatc

SEQ ID NO: 2850841 - DNA, 25 bp, Homo sapien
ccaaactgttaacttctgatgtaag

SEQ ID NO: 2850842 - DNA, 25 bp, Homo sapien
cagtgctactgagaagaaccatggt

SEQ ID NO: 2850843 - DNA, 25 bp, Homo sapien
taaaaaagatatactcagtgctact

SEQ ID NO: 2850844 - DNA, 25 bp, Homo sapien
gaaccatggtagtttaacgcactag

SEQ ID NO: 2850845 - DNA, 25 bp, Homo sapien
ttagataaagctacccacccaagga

SEQ ID NO: 2850846 - DNA, 25 bp, Homo sapien
tggctcgattatagctcgctgtagc

SEQ ID NO: 2850847 - DNA, 25 bp, Homo sapien
catgttcaacacaagggcaaaggca

SEQ ID NO: 2850848 - DNA, 25 bp, Homo sapien
caaggactgagcactacaactagct

SEQ ID NO: 2850849 - DNA, 25 bp, Homo sapien
aacacagtgaggcactgtctctaca

SEQ ID NO: 2850850 - DNA, 25 bp, Homo sapien
gcaacacagtgaggcactgtctcta

SEQ ID NO: 2850851 - DNA, 25 bp, Homo sapien
tgggcaacacagtgaggcactgtct

SEQ ID NO: 2850852 - DNA, 25 bp, Homo sapien
ggcaacacagtgaggcactgtctct

SEQ ID NO: 2850853 - DNA, 25 bp, Homo sapien
atatcctaatgattccatgtcatct

SEQ ID NO: 2850854 - DNA, 25 bp, Homo sapien
catggcaggctggttctattaaaat

SEQ ID NO: 2850855 - DNA, 25 bp, Homo sapien
aatacatcaaaacatatcctaatga

SEQ ID NO: 2850856 - DNA, 25 bp, Homo sapien
ctttagcccttgccatggcaggctg

SEQ ID NO: 2850857 - DNA, 25 bp, Homo sapien
gaacagaaacgatttggctaaacaa

SEQ ID NO: 2850858 - DNA, 25 bp, Homo sapien
tacagtttaacctagatcattcaga

SEQ ID NO: 2850859 - DNA, 25 bp, Homo sapien
gcttaatgaaccaagcaggatgaca

SEQ ID NO: 2850860 - DNA, 25 bp, Homo sapien
tgccttggcgtacagaaaaagtgac

SEQ ID NO: 2850861 - DNA, 25 bp, Homo sapien
gccaagaaacatccttagacattgt

SEQ ID NO: 2850862 - DNA, 25 bp, Homo sapien
agcatccttcaaatcctcagccaag

SEQ ID NO: 2850863 - DNA, 25 bp, Homo sapien
gatggcttctgctatggctatgata

SEQ ID NO: 2850864 - DNA, 25 bp, Homo sapien
tctctacactggttaaagcagcagg

SEQ ID NO: 2850865 - DNA, 25 bp, Homo sapien
caataccaagatgtgcattgatgct

SEQ ID NO: 2850866 - DNA, 25 bp, Homo sapien
gctcaataccaagatgtgcattgat

SEQ ID NO: 2850867 - DNA, 25 bp, Homo sapien
tcaataccaagatgtgcattgatgc

SEQ ID NO: 2850868 - DNA, 25 bp, Homo sapien
tgctcaataccaagatgtgcattga

SEQ ID NO: 2850869 - DNA, 25 bp, Homo sapien
ggcccatttcattacatactcagga

SEQ ID NO: 2850870 - DNA, 25 bp, Homo sapien
tacatgcttgacagcagaagcaaca

SEQ ID NO: 2850871 - DNA, 25 bp, Homo sapien
caagtgtgctatctgtcataatgac

SEQ ID NO: 2850872 - DNA, 25 bp, Homo sapien
tgacacctgatagtctgtacacctg

SEQ ID NO: 2850873 - DNA, 25 bp, Homo sapien
atgtgccaacagaatacttgttatc

SEQ ID NO: 2850874 - DNA, 25 bp, Homo sapien
tatctaccctaaaagtctgacattg

SEQ ID NO: 2850875 - DNA, 25 bp, Homo sapien
agatataaactatctgaactcttcc

SEQ ID NO: 2850876 - DNA, 25 bp, Homo sapien
aaggccattcttaaatgtgccaaca

SEQ ID NO: 2850877 - DNA, 25 bp, Homo sapien
tcctggaataaagctgggcagtatg

SEQ ID NO: 2850878 - DNA, 25 bp, Homo sapien
tttaatagctggaggtggttcctgg

SEQ ID NO: 2850879 - DNA, 25 bp, Homo sapien
tagggtgtttatccagcctgccaaa

SEQ ID NO: 2850880 - DNA, 25 bp, Homo sapien
gctcaggagcatgaacatttatgaa

SEQ ID NO: 2850881 - DNA, 25 bp, Homo sapien
ctggtttaatcctgagaaagatggg

SEQ ID NO: 2850882 - DNA, 25 bp, Homo sapien
tcctgagaagtactaacagtcatgc

SEQ ID NO: 2850883 - DNA, 25 bp, Homo sapien
ggtttaatcctgagaaagatgggtc

SEQ ID NO: 2850884 - DNA, 25 bp, Homo sapien
gggtcctgagaagtactaacagtca

SEQ ID NO: 2850885 - DNA, 25 bp, Homo sapien
gcacatattcaattctactgatcat

SEQ ID NO: 2850886 - DNA, 25 bp, Homo sapien
ttaatgtctctgtgtataaaattct

SEQ ID NO: 2850887 - DNA, 25 bp, Homo sapien
agtgacgcccaatacccattaggaa

SEQ ID NO: 2850888 - DNA, 25 bp, Homo sapien
gaagttatctggtttaatgtctctg

SEQ ID NO: 2850889 - DNA, 25 bp, Homo sapien
taatgccattaatagacatgtatct

SEQ ID NO: 2850890 - DNA, 25 bp, Homo sapien
tatttctatgggcttcaaatcccat

SEQ ID NO: 2850891 - DNA, 25 bp, Homo sapien
ggtagagatgttatgtcttccccaa

SEQ ID NO: 2850892 - DNA, 25 bp, Homo sapien
taatggctacaaatattctgtggta

SEQ ID NO: 2850893 - DNA, 25 bp, Homo sapien
catgcccggcctcgatttagaagta

SEQ ID NO: 2850894 - DNA, 25 bp, Homo sapien
taggagttctcgtcataaaacaaac

SEQ ID NO: 2850895 - DNA, 25 bp, Homo sapien
gctggaactacggacatgcgcgtta

SEQ ID NO: 2850896 - DNA, 25 bp, Homo sapien
cgcctggcccttctatgaggattta

SEQ ID NO: 2850897 - DNA, 25 bp, Homo sapien
tctggcttgaacaacttacacctgt

SEQ ID NO: 2850898 - DNA, 25 bp, Homo sapien
gattacatatccaaagactgccaac

SEQ ID NO: 2850899 - DNA, 25 bp, Homo sapien
tgttacctgtcaaccacagagcaag

SEQ ID NO: 2850900 - DNA, 25 bp, Homo sapien
catatgttcttgctctacccagtag

SEQ ID NO: 2850901 - DNA, 25 bp, Homo sapien
ttccacctcaaataccatgtctgtt

SEQ ID NO: 2850902 - DNA, 25 bp, Homo sapien
atgctttgggtaatacataaataat

SEQ ID NO: 2850903 - DNA, 25 bp, Homo sapien
taggcaaatctggactagagagctg

SEQ ID NO: 2850904 - DNA, 25 bp, Homo sapien
taaacgataagctattgttaactat

SEQ ID NO: 2850905 - DNA, 25 bp, Homo sapien
gaaattgaagaggtcttcgaggcta

SEQ ID NO: 2850906 - DNA, 25 bp, Homo sapien
gaagatccatgactagtacattgta

SEQ ID NO: 2850907 - DNA, 25 bp, Homo sapien
gtagtctttttcctgaccataccac

SEQ ID NO: 2850908 - DNA, 25 bp, Homo sapien
tcgaggctaggtcccagaagatcca

SEQ ID NO: 2850909 - DNA, 25 bp, Homo sapien
caaaagggaaggcataaatcaactc

SEQ ID NO: 2850910 - DNA, 25 bp, Homo sapien
taggcaaatctggactagagatctg

SEQ ID NO: 2850911 - DNA, 25 bp, Homo sapien
caagtctcagctctagacaggtttc

SEQ ID NO: 2850912 - DNA, 25 bp, Homo sapien
gagatctgtcacgaacctaccatta

SEQ ID NO: 2850913 - DNA, 25 bp, Homo sapien
tctatggactggtactataactcct

SEQ ID NO: 2850914 - DNA, 25 bp, Homo sapien
ggcattttaccttgtggagcaacca

SEQ ID NO: 2850915 - DNA, 25 bp, Homo sapien
gagacaggagtttacatctttcaca

SEQ ID NO: 2850916 - DNA, 25 bp, Homo sapien
gtaagcctctaacaaaatcacctgc

SEQ ID NO: 2850917 - DNA, 25 bp, Homo sapien
caaccttaaaacccagatgccaaag

SEQ ID NO: 2850918 - DNA, 25 bp, Homo sapien
tcctatttcctagaattcccaaagc

SEQ ID NO: 2850919 - DNA, 25 bp, Homo sapien
catgcttcccacgtctattctgaga

SEQ ID NO: 2850920 - DNA, 25 bp, Homo sapien
tagtttctaccttcacctccatgct

SEQ ID NO: 2850921 - DNA, 25 bp, Homo sapien
tgagtcatgaacaagcactaacccg

SEQ ID NO: 2850922 - DNA, 25 bp, Homo sapien
taggccttcaaactagaaacacagg

SEQ ID NO: 2850923 - DNA, 25 bp, Homo sapien
caagacgtgttgctactaagtgtac

SEQ ID NO: 2850924 - DNA, 25 bp, Homo sapien
tacctggtaggatagagcttacagc

SEQ ID NO: 2850925 - DNA, 25 bp, Homo sapien
cagtgcaaggcttatgagctttaca

SEQ ID NO: 2850926 - DNA, 25 bp, Homo sapien
attgaagctgcagtataggttcttc

SEQ ID NO: 2850927 - DNA, 25 bp, Homo sapien
caaggtggcagatagattgaagctg

SEQ ID NO: 2850928 - DNA, 25 bp, Homo sapien
taggttcttcagtgcaaggcttatg

SEQ ID NO: 2850929 - DNA, 25 bp, Homo sapien
tgtattcccagcatacacaagagat

SEQ ID NO: 2850930 - DNA, 25 bp, Homo sapien
ggaagcatctatttatccctagttc

SEQ ID NO: 2850931 - DNA, 25 bp, Homo sapien
ctgtaacagtgtagggagtgcttga

SEQ ID NO: 2850932 - DNA, 25 bp, Homo sapien
ccaatctttcggttattaatgtcag

SEQ ID NO: 2850933 - DNA, 25 bp, Homo sapien
actgtctctcaaacttagtctcttg

SEQ ID NO: 2850934 - DNA, 25 bp, Homo sapien
tctctcaaacttagtctcttgccag

SEQ ID NO: 2850935 - DNA, 25 bp, Homo sapien
tctcaaacttagtctcttgccagcc

SEQ ID NO: 2850936 - DNA, 25 bp, Homo sapien
caaacttagtctcttgccagcccat

SEQ ID NO: 2850937 - DNA, 25 bp, Homo sapien
cattatccaacctttatgctccttt

SEQ ID NO: 2850938 - DNA, 25 bp, Homo sapien
caattatagcgaaattgaactagca

SEQ ID NO: 2850939 - DNA, 25 bp, Homo sapien
tctccccatacatctcttctcagaa

SEQ ID NO: 2850940 - DNA, 25 bp, Homo sapien
tttgccattcattatacacagatgt

SEQ ID NO: 2850941 - DNA, 25 bp, Homo sapien
ttgtatatgccattcttaacagcta

SEQ ID NO: 2850942 - DNA, 25 bp, Homo sapien
tttgaccttcagacacagagggcaa

SEQ ID NO: 2850943 - DNA, 25 bp, Homo sapien
gaagacatatccaatgcagcgtcat

SEQ ID NO: 2850944 - DNA, 25 bp, Homo sapien
gagaggtggtattcatctgcagtcc

SEQ ID NO: 2850945 - DNA, 25 bp, Homo sapien
catttctcgtgatctgtgacgtacg

SEQ ID NO: 2850946 - DNA, 25 bp, Homo sapien
ggcaagtcaatcgagttcgcagctg

SEQ ID NO: 2850947 - DNA, 25 bp, Homo sapien
gccccataaagacggcagcccaggg

SEQ ID NO: 2850948 - DNA, 25 bp, Homo sapien
aatcgagttcgcagctgacaccctt

SEQ ID NO: 2850949 - DNA, 25 bp, Homo sapien
gacagagatacctactccgaagcct

SEQ ID NO: 2850950 - DNA, 25 bp, Homo sapien
ctagcctcagcaagtgcactcattg

SEQ ID NO: 2850951 - DNA, 25 bp, Homo sapien
ctgctagcctcagcaagtgcactca

SEQ ID NO: 2850952 - DNA, 25 bp, Homo sapien
ggccctgctagcctcagcaagtgca

SEQ ID NO: 2850953 - DNA, 25 bp, Homo sapien
ccctgctagcctcagcaagtgcact

SEQ ID NO: 2850954 - DNA, 25 bp, Homo sapien
atgttcctcaggaacctggagccca

SEQ ID NO: 2850955 - DNA, 25 bp, Homo sapien
tgttcctcaggaacctggagcccac

SEQ ID NO: 2850956 - DNA, 25 bp, Homo sapien
gtaccttaagccgcggctctccaag

SEQ ID NO: 2850957 - DNA, 25 bp, Homo sapien
atgtctgtaccttaagccgcggctc

SEQ ID NO: 2850958 - DNA, 25 bp, Homo sapien
ttggccatgtctgtaccttaagccg

SEQ ID NO: 2850959 - DNA, 25 bp, Homo sapien
gtctgtaccttaagccgcggctctc

SEQ ID NO: 2850960 - DNA, 25 bp, Homo sapien
gaagccacactctattcttggatgc

SEQ ID NO: 2850961 - DNA, 25 bp, Homo sapien
tactgtacttgggtttagcactgaa

SEQ ID NO: 2850962 - DNA, 25 bp, Homo sapien
gattcagcaggtcatctacgcaggc

SEQ ID NO: 2850963 - DNA, 25 bp, Homo sapien
ggttaatctgtttagcctcacccac

SEQ ID NO: 2850964 - DNA, 25 bp, Homo sapien
acaatttcgtgtcacatctgctgca

SEQ ID NO: 2850965 - DNA, 25 bp, Homo sapien
gaactacgaaggattttacatagtg

SEQ ID NO: 2850966 - DNA, 25 bp, Homo sapien
gctgcagagatcacaaacactgtca

SEQ ID NO: 2850967 - DNA, 25 bp, Homo sapien
caaaggtttaatccactcggggctg

SEQ ID NO: 2850968 - DNA, 25 bp, Homo sapien
gatcaaagatgacctgcacgcataa

SEQ ID NO: 2850969 - DNA, 25 bp, Homo sapien
caacccttccgcgtagggatcaaag

SEQ ID NO: 2850970 - DNA, 25 bp, Homo sapien
gaagtgccgccgtaaaaaaggcagc

SEQ ID NO: 2850971 - DNA, 25 bp, Homo sapien
taagtacatcagaagtgccgccgta

SEQ ID NO: 2850972 - DNA, 25 bp, Homo sapien
gaagcgaaatggagcagtgtaatac

SEQ ID NO: 2850973 - DNA, 25 bp, Homo sapien
caaatgaaagcctcgggaagagtga

SEQ ID NO: 2850974 - DNA, 25 bp, Homo sapien
tcagtaattgagatgactgacttac

SEQ ID NO: 2850975 - DNA, 25 bp, Homo sapien
aagagtgagaatgacggaagcgaaa

SEQ ID NO: 2850976 - DNA, 25 bp, Homo sapien
gtgcttccctcagcggatcgcctat

SEQ ID NO: 2850977 - DNA, 25 bp, Homo sapien
caagacccggattcagctggtctca

SEQ ID NO: 2850978 - DNA, 25 bp, Homo sapien
gatcgcctatatgcaccgggttctt

SEQ ID NO: 2850979 - DNA, 25 bp, Homo sapien
taaaacaccaagacccggattcagc

SEQ ID NO: 2850980 - DNA, 25 bp, Homo sapien
cgtatgtgggggatgccaaccccac

SEQ ID NO: 2850981 - DNA, 25 bp, Homo sapien
ttatagagcttgctctcgtacagca

SEQ ID NO: 2850982 - DNA, 25 bp, Homo sapien
tatagagcttgctctcgtacagcaa

SEQ ID NO: 2850983 - DNA, 25 bp, Homo sapien
cttatagagcttgctctcgtacagc

SEQ ID NO: 2850984 - DNA, 25 bp, Homo sapien
atagagcttgctctcgtacagcaac

SEQ ID NO: 2850985 - DNA, 25 bp, Homo sapien
aatccgtacgtcctctaaagtgcag

SEQ ID NO: 2850986 - DNA, 25 bp, Homo sapien
ccaagtcgcgactacaagaagaagt

SEQ ID NO: 2850987 - DNA, 25 bp, Homo sapien
gacattagcaaaactccaagtcgcg

SEQ ID NO: 2850988 - DNA, 25 bp, Homo sapien
taattataaaacgaggcaaccagcc

SEQ ID NO: 2850989 - DNA, 25 bp, Homo sapien
tttccctccgacaatgaattcagcc

SEQ ID NO: 2850990 - DNA, 25 bp, Homo sapien
atagatgtccccgaaggagccagac

SEQ ID NO: 2850991 - DNA, 25 bp, Homo sapien
cgttggtgatgttgatcgccaaata

SEQ ID NO: 2850992 - DNA, 25 bp, Homo sapien
gatgttgatcgccaaatagatgtcc

SEQ ID NO: 2850993 - DNA, 25 bp, Homo sapien
gggccaagccccgacacctctggga

SEQ ID NO: 2850994 - DNA, 25 bp, Homo sapien
aagccccgacacctctgggaagagg

SEQ ID NO: 2850995 - DNA, 25 bp, Homo sapien
caagccccgacacctctgggaagag

SEQ ID NO: 2850996 - DNA, 25 bp, Homo sapien
gccaagccccgacacctctgggaag

SEQ ID NO: 2850997 - DNA, 25 bp, Homo sapien
tacactaggcaaggctacggaggag

SEQ ID NO: 2850998 - DNA, 25 bp, Homo sapien
agctagggcggcgataccgctgcca

SEQ ID NO: 2850999 - DNA, 25 bp, Homo sapien
tgggccacttgtttctcggcggccg

SEQ ID NO: 2851000 - DNA, 25 bp, Homo sapien
tgatcaccgccgctcagtcaggttt

SEQ ID NO: 2851001 - DNA, 25 bp, Homo sapien
gcagatgaaagcttaaggcctcctt

SEQ ID NO: 2851002 - DNA, 25 bp, Homo sapien
gatattgggaggagtcaccttcatg

SEQ ID NO: 2851003 - DNA, 25 bp, Homo sapien
gcctccttaggagttgggtattgac

SEQ ID NO: 2851004 - DNA, 25 bp, Homo sapien
caccttcatgtttcgtggcagatga

SEQ ID NO: 2851005 - DNA, 25 bp, Homo sapien
tcatccccctccccccttggctcat

SEQ ID NO: 2851006 - DNA, 25 bp, Homo sapien
catccccctccccccttggctcatt

SEQ ID NO: 2851007 - DNA, 25 bp, Homo sapien
atcatccccctccccccttggctca

SEQ ID NO: 2851008 - DNA, 25 bp, Homo sapien
tcatctgcagctcaataaatctcaa

SEQ ID NO: 2851009 - DNA, 25 bp, Homo sapien
ttctgccgcttggtgttccatcagg

SEQ ID NO: 2851010 - DNA, 25 bp, Homo sapien
taaatctcaattctgccgcttggtg

SEQ ID NO: 2851011 - DNA, 25 bp, Homo sapien
cacagttttgagagtcagcacccat

SEQ ID NO: 2851012 - DNA, 25 bp, Homo sapien
tgttttctggatgacgagcccgcgg

SEQ ID NO: 2851013 - DNA, 25 bp, Homo sapien
ctacagtttggtgattcgggcagga

SEQ ID NO: 2851014 - DNA, 25 bp, Homo sapien
gcaatccttcgggttggctgccagc

SEQ ID NO: 2851015 - DNA, 25 bp, Homo sapien
tcgggcaggagcaaaggtatccagt

SEQ ID NO: 2851016 - DNA, 25 bp, Homo sapien
ccaagaagaaccaagagttgtgtat

SEQ ID NO: 2851017 - DNA, 25 bp, Homo sapien
agaaccaagagttgtgtatgaccat

SEQ ID NO: 2851018 - DNA, 25 bp, Homo sapien
gcttccaagaagaaccaagagttgt

SEQ ID NO: 2851019 - DNA, 25 bp, Homo sapien
ctgaactcaaactttttggtggctt

SEQ ID NO: 2851020 - DNA, 25 bp, Homo sapien
tatttattctgccagtgtttgccca

SEQ ID NO: 2851021 - DNA, 25 bp, Homo sapien
tgatatttattctgccagtgtttgc

SEQ ID NO: 2851022 - DNA, 25 bp, Homo sapien
gcaacaatgtcattgacaatttgat

SEQ ID NO: 2851023 - DNA, 25 bp, Homo sapien
cagtctaactccagttgcaacaatg

SEQ ID NO: 2851024 - DNA, 25 bp, Homo sapien
cgtatatgatgctaaaattgagcac

SEQ ID NO: 2851025 - DNA, 25 bp, Homo sapien
gcgtatatgatgctaaaattgagca

SEQ ID NO: 2851026 - DNA, 25 bp, Homo sapien
actttagcgtatatgatgctaaaat

SEQ ID NO: 2851027 - DNA, 25 bp, Homo sapien
ttagcgtatatgatgctaaaattga

SEQ ID NO: 2851028 - DNA, 25 bp, Homo sapien
caacagggctatatggagagaactc

SEQ ID NO: 2851029 - DNA, 25 bp, Homo sapien
gctgagcatataagacaaggcccct

SEQ ID NO: 2851030 - DNA, 25 bp, Homo sapien
cactcttgtgggtcaaagtctggct

SEQ ID NO: 2851031 - DNA, 25 bp, Homo sapien
gaggcattcgttgcagggtctacca

SEQ ID NO: 2851032 - DNA, 25 bp, Homo sapien
caggactctccataggttatggcca

SEQ ID NO: 2851033 - DNA, 25 bp, Homo sapien
ggtcacaatgcacttggacagcagg

SEQ ID NO: 2851034 - DNA, 25 bp, Homo sapien
gtcacacgggataatgttacctgcg

SEQ ID NO: 2851035 - DNA, 25 bp, Homo sapien
tatggccagtcttagctgtgcctgc

SEQ ID NO: 2851036 - DNA, 25 bp, Homo sapien
tcagcagcgaattcacttgagagga

SEQ ID NO: 2851037 - DNA, 25 bp, Homo sapien
ccatagtgcctaagcagtgagctct

SEQ ID NO: 2851038 - DNA, 25 bp, Homo sapien
aatgaaataggaaacccactcgtgg

SEQ ID NO: 2851039 - DNA, 25 bp, Homo sapien
tcctctgggcctgttaaagcatgaa

SEQ ID NO: 2851040 - DNA, 25 bp, Homo sapien
tgcctccttgcatattctgcctgaa

SEQ ID NO: 2851041 - DNA, 25 bp, Homo sapien
tctgcctgaatgtgggttgagtgtt

SEQ ID NO: 2851042 - DNA, 25 bp, Homo sapien
tagtccacaacagtttgcctccttg

SEQ ID NO: 2851043 - DNA, 25 bp, Homo sapien
cttccatgtggagatcgcgtagtcc

SEQ ID NO: 2851044 - DNA, 25 bp, Homo sapien
gagatgctgacataaaccacttagc

SEQ ID NO: 2851045 - DNA, 25 bp, Homo sapien
tctatgtgggatgctgatgaggcca

SEQ ID NO: 2851046 - DNA, 25 bp, Homo sapien
ttatagggacttccgaggagatgcg

SEQ ID NO: 2851047 - DNA, 25 bp, Homo sapien
tcctatgtagaagaaggccccttgt

SEQ ID NO: 2851048 - DNA, 25 bp, Homo sapien
agcacctgagggtttccccgcctct

SEQ ID NO: 2851049 - DNA, 25 bp, Homo sapien
gctggggcagtgctcgtaggcacaa

SEQ ID NO: 2851050 - DNA, 25 bp, Homo sapien
gcagtgctcgtaggcacaagcacct

SEQ ID NO: 2851051 - DNA, 25 bp, Homo sapien
cagctgtagggtgttctggcatcca

SEQ ID NO: 2851052 - DNA, 25 bp, Homo sapien
gcacaaggacaagccgggcaggtaa

SEQ ID NO: 2851053 - DNA, 25 bp, Homo sapien
cagttcctgtggttataggctcagg

SEQ ID NO: 2851054 - DNA, 25 bp, Homo sapien
ccgggcaggtaaccaggcaataagc

SEQ ID NO: 2851055 - DNA, 25 bp, Homo sapien
gttataggctcagggcgctttgcag

SEQ ID NO: 2851056 - DNA, 25 bp, Homo sapien
ctaggggacgcagcagctttggggc

SEQ ID NO: 2851057 - DNA, 25 bp, Homo sapien
agcagctttggggcccaagagtctg

SEQ ID NO: 2851058 - DNA, 25 bp, Homo sapien
agctttggggcccaagagtctgctg

SEQ ID NO: 2851059 - DNA, 25 bp, Homo sapien
gagtctgctggaggcttcagtagaa

SEQ ID NO: 2851060 - DNA, 25 bp, Homo sapien
atctctgacagtggccggtctcctc

SEQ ID NO: 2851061 - DNA, 25 bp, Homo sapien
tctagggtctggatatcctcagggc

SEQ ID NO: 2851062 - DNA, 25 bp, Homo sapien
aactgagttgtaagcagcggctgcc

SEQ ID NO: 2851063 - DNA, 25 bp, Homo sapien
gagcagctcctatctccagaggtgg

SEQ ID NO: 2851064 - DNA, 25 bp, Homo sapien
ctggtgacaccagatcctagacact

SEQ ID NO: 2851065 - DNA, 25 bp, Homo sapien
cgtcccatcaaacaggcctggctgt

SEQ ID NO: 2851066 - DNA, 25 bp, Homo sapien
tgtgtaacctactccccagaatgaa

SEQ ID NO: 2851067 - DNA, 25 bp, Homo sapien
tagacactaggatcttccccgcatc

SEQ ID NO: 2851068 - DNA, 25 bp, Homo sapien
tctgctttctgactggacagcaaaa

SEQ ID NO: 2851069 - DNA, 25 bp, Homo sapien
actggacagcaaaataccactcaga

SEQ ID NO: 2851070 - DNA, 25 bp, Homo sapien
cagcaaaataccactcagaagccag

SEQ ID NO: 2851071 - DNA, 25 bp, Homo sapien
tctgactggacagcaaaataccact

SEQ ID NO: 2851072 - DNA, 25 bp, Homo sapien
caattttctagccatgatgcctcag

SEQ ID NO: 2851073 - DNA, 25 bp, Homo sapien
catgctccagtatcagtggctgtgg

SEQ ID NO: 2851074 - DNA, 25 bp, Homo sapien
gaaatccaagggcactgtgtcagtg

SEQ ID NO: 2851075 - DNA, 25 bp, Homo sapien
gaagaactgagctggtcatgctcca

SEQ ID NO: 2851076 - DNA, 25 bp, Homo sapien
ttccaagtgttgcaggcagcgaccc

SEQ ID NO: 2851077 - DNA, 25 bp, Homo sapien
gatacatcacgggagactttggcac

SEQ ID NO: 2851078 - DNA, 25 bp, Homo sapien
tgtggccgccttcaaacaagttgct

SEQ ID NO: 2851079 - DNA, 25 bp, Homo sapien
acagatccagctagaagagggccga

SEQ ID NO: 2851080 - DNA, 25 bp, Homo sapien
ccatagttcagtgacccaggctcag

SEQ ID NO: 2851081 - DNA, 25 bp, Homo sapien
ttctgtagtttgtttacaggcacca

SEQ ID NO: 2851082 - DNA, 25 bp, Homo sapien
caggcaccaatagacttcccttttg

SEQ ID NO: 2851083 - DNA, 25 bp, Homo sapien
caacaggcccctctgatagtgttca

SEQ ID NO: 2851084 - DNA, 25 bp, Homo sapien
caggatttcagccagcacgacctgc

SEQ ID NO: 2851085 - DNA, 25 bp, Homo sapien
tggcagactctcatgtaggctgtgg

SEQ ID NO: 2851086 - DNA, 25 bp, Homo sapien
tgccctaggtcacgcggctcgtgtg

SEQ ID NO: 2851087 - DNA, 25 bp, Homo sapien
taacaataacaaccactcattgtgc

SEQ ID NO: 2851088 - DNA, 25 bp, Homo sapien
caggccttctgcctatgggaagaag

SEQ ID NO: 2851089 - DNA, 25 bp, Homo sapien
tattggttcttccattattcaggcc

SEQ ID NO: 2851090 - DNA, 25 bp, Homo sapien
tgtctacccatatgtattaagtgcc

SEQ ID NO: 2851091 - DNA, 25 bp, Homo sapien
caggcagtcagggacaatgacttaa

SEQ ID NO: 2851092 - DNA, 25 bp, Homo sapien
ttggggaaatttggcttcttgagca

SEQ ID NO: 2851093 - DNA, 25 bp, Homo sapien
gggaaatttggcttcttgagcagga

SEQ ID NO: 2851094 - DNA, 25 bp, Homo sapien
tcagttggggaaatttggcttcttg

SEQ ID NO: 2851095 - DNA, 25 bp, Homo sapien
aatttggcttcttgagcaggaagaa

SEQ ID NO: 2851096 - DNA, 25 bp, Homo sapien
aggctggcaccggagcaagccaaga

SEQ ID NO: 2851097 - DNA, 25 bp, Homo sapien
tgcatattcagagcttatatttctt

SEQ ID NO: 2851098 - DNA, 25 bp, Homo sapien
ccaagaggttaatcagatgaagttg

SEQ ID NO: 2851099 - DNA, 25 bp, Homo sapien
tcttgctaccctgggcatgtattgc

SEQ ID NO: 2851100 - DNA, 25 bp, Homo sapien
ggcaaggtcaatcttaatgcagaaa

SEQ ID NO: 2851101 - DNA, 25 bp, Homo sapien
ttagaagacaattaacacctctcca

SEQ ID NO: 2851102 - DNA, 25 bp, Homo sapien
tagaagacaattaacacctctccaa

SEQ ID NO: 2851103 - DNA, 25 bp, Homo sapien
aaggcaaggtcaatcttaatgcaga

SEQ ID NO: 2851104 - DNA, 25 bp, Homo sapien
ctaaatggagaggcaacatttatta

SEQ ID NO: 2851105 - DNA, 25 bp, Homo sapien
aatggagaggcaacatttattaagt

SEQ ID NO: 2851106 - DNA, 25 bp, Homo sapien
tggagaggcaacatttattaagtca

SEQ ID NO: 2851107 - DNA, 25 bp, Homo sapien
ggagaggcaacatttattaagtcat

SEQ ID NO: 2851108 - DNA, 25 bp, Homo sapien
aatggcaagcggcagctgcaacaaa

SEQ ID NO: 2851109 - DNA, 25 bp, Homo sapien
agaatgcccgcctcctccgtttggt

SEQ ID NO: 2851110 - DNA, 25 bp, Homo sapien
actaagaccgcgtcgtctccttact

SEQ ID NO: 2851111 - DNA, 25 bp, Homo sapien
aaacaacactatgagctggctgcat

SEQ ID NO: 2851112 - DNA, 25 bp, Homo sapien
ggggaacctgatggagattgagaag

SEQ ID NO: 2851113 - DNA, 25 bp, Homo sapien
tgggggaacctgatggagattgaga

SEQ ID NO: 2851114 - DNA, 25 bp, Homo sapien
gggggaacctgatggagattgagaa

SEQ ID NO: 2851115 - DNA, 25 bp, Homo sapien
ggagggacattgatgttcatctgcc

SEQ ID NO: 2851116 - DNA, 25 bp, Homo sapien
gggacattgatgttcatctgcccat

SEQ ID NO: 2851117 - DNA, 25 bp, Homo sapien
cccactggtgtggccgtcactggag

SEQ ID NO: 2851118 - DNA, 25 bp, Homo sapien
tggccgtcactggagggacattgat

SEQ ID NO: 2851119 - DNA, 25 bp, Homo sapien
cctgggactcgttttctgagccttt

SEQ ID NO: 2851120 - DNA, 25 bp, Homo sapien
ggactaagagtttggagcttttctc

SEQ ID NO: 2851121 - DNA, 25 bp, Homo sapien
ttctcctgggactcgttttctgagc

SEQ ID NO: 2851122 - DNA, 25 bp, Homo sapien
atgtgggactaagagtttggagctt

SEQ ID NO: 2851123 - DNA, 25 bp, Homo sapien
aatagctgagctcgaagtaggtgtg

SEQ ID NO: 2851124 - DNA, 25 bp, Homo sapien
attcagttattcatcctattctcca

SEQ ID NO: 2851125 - DNA, 25 bp, Homo sapien
tacttccgtctatctgttcaccttc

SEQ ID NO: 2851126 - DNA, 25 bp, Homo sapien
ggactcaaactacctgaaatagctg

SEQ ID NO: 2851127 - DNA, 25 bp, Homo sapien
gactagaagagctagggttgagaga

SEQ ID NO: 2851128 - DNA, 25 bp, Homo sapien
tggactagaagagctagggttgaga

SEQ ID NO: 2851129 - DNA, 25 bp, Homo sapien
aagtggactagaagagctagggttg

SEQ ID NO: 2851130 - DNA, 25 bp, Homo sapien
ttgttttggtgcatggggtagaaaa

SEQ ID NO: 2851131 - DNA, 25 bp, Homo sapien
tcccttttgctagagtccagagaac

SEQ ID NO: 2851132 - DNA, 25 bp, Homo sapien
tgacccttgggatcctctgggaaga

SEQ ID NO: 2851133 - DNA, 25 bp, Homo sapien
ccagagaacgatcattgtccaggag

SEQ ID NO: 2851134 - DNA, 25 bp, Homo sapien
catttcaaaggacactcactaggtt

SEQ ID NO: 2851135 - DNA, 25 bp, Homo sapien
tcttggtcaatctaactgaagttct

SEQ ID NO: 2851136 - DNA, 25 bp, Homo sapien
gatgttgtgagaatcgtattagtcc

SEQ ID NO: 2851137 - DNA, 25 bp, Homo sapien
gccattcagttgttcatagtttctc

SEQ ID NO: 2851138 - DNA, 25 bp, Homo sapien
cagtggagatatctgggtctggtct

SEQ ID NO: 2851139 - DNA, 25 bp, Homo sapien
tataaactgccataacatccgggct

SEQ ID NO: 2851140 - DNA, 25 bp, Homo sapien
catccgggctgcaggactctgtaga

SEQ ID NO: 2851141 - DNA, 25 bp, Homo sapien
taaactcaggcgttgggcacatgct

SEQ ID NO: 2851142 - DNA, 25 bp, Homo sapien
acatcatgatttaccctacggaggg

SEQ ID NO: 2851143 - DNA, 25 bp, Homo sapien
ttcttcctcaactatctcgctgaca

SEQ ID NO: 2851144 - DNA, 25 bp, Homo sapien
tcggcgttgactccgccgcacgctg

SEQ ID NO: 2851145 - DNA, 25 bp, Homo sapien
cgctgacacgcaggtacggccggct

SEQ ID NO: 2851146 - DNA, 25 bp, Homo sapien
actgcggcgcgctgctggacgaaga

SEQ ID NO: 2851147 - DNA, 25 bp, Homo sapien
ggagtcccctagtcctccaggctgt

SEQ ID NO: 2851148 - DNA, 25 bp, Homo sapien
gccagttgccggctaaaggcataag

SEQ ID NO: 2851149 - DNA, 25 bp, Homo sapien
cgcagcgcggagtttcctgccagtt

SEQ ID NO: 2851150 - DNA, 25 bp, Homo sapien
ggctgtagtccccagagtgctgttg

SEQ ID NO: 2851151 - DNA, 25 bp, Homo sapien
aagctgactccttgcggtgaaacgc

SEQ ID NO: 2851152 - DNA, 25 bp, Homo sapien
gagacgttcagctccgggcagcgac

SEQ ID NO: 2851153 - DNA, 25 bp, Homo sapien
tctgcctgtctttgggcggcagcag

SEQ ID NO: 2851154 - DNA, 25 bp, Homo sapien
tgaaacgcgacttggaagggacgcc

SEQ ID NO: 2851155 - DNA, 25 bp, Homo sapien
actgcggtggagctcccgccgtcgt

SEQ ID NO: 2851156 - DNA, 25 bp, Homo sapien
ctttacctctgacgaaactgcggtg

SEQ ID NO: 2851157 - DNA, 25 bp, Homo sapien
tacctctgacgaaactgcggtggag

SEQ ID NO: 2851158 - DNA, 25 bp, Homo sapien
tctgacgaaactgcggtggagctcc

SEQ ID NO: 2851159 - DNA, 25 bp, Homo sapien
agagccgacagcttggggctagcgg

SEQ ID NO: 2851160 - DNA, 25 bp, Homo sapien
cccagagccgacagcttggggctag

SEQ ID NO: 2851161 - DNA, 25 bp, Homo sapien
ccagagccgacagcttggggctagc

SEQ ID NO: 2851162 - DNA, 25 bp, Homo sapien
agccgacagcttggggctagcgggc

SEQ ID NO: 2851163 - DNA, 25 bp, Homo sapien
tcatgttcaccagagacctgggctc

SEQ ID NO: 2851164 - DNA, 25 bp, Homo sapien
tggctggtgctaatgatcaggatgc

SEQ ID NO: 2851165 - DNA, 25 bp, Homo sapien
gatcaggatgcctgtgaaacccagg

SEQ ID NO: 2851166 - DNA, 25 bp, Homo sapien
ttcattgggattccctggctggtgc

SEQ ID NO: 2851167 - DNA, 25 bp, Homo sapien
tagtgtgcgtgatgtgctggctgtc

SEQ ID NO: 2851168 - DNA, 25 bp, Homo sapien
gctgtctcgggatgcggtgtttgtg

SEQ ID NO: 2851169 - DNA, 25 bp, Homo sapien
ctgccgggagggtgttgggtagaca

SEQ ID NO: 2851170 - DNA, 25 bp, Homo sapien
ttgacgattgtgacatgctgccggg

SEQ ID NO: 2851171 - DNA, 25 bp, Homo sapien
ggtgatgcagccagtctcctgtcat

SEQ ID NO: 2851172 - DNA, 25 bp, Homo sapien
caaatcattgtggtaggtggaacac

SEQ ID NO: 2851173 - DNA, 25 bp, Homo sapien
aaatcattgtggtaggtggaacacc

SEQ ID NO: 2851174 - DNA, 25 bp, Homo sapien
tcaaatcattgtggtaggtggaaca

SEQ ID NO: 2851175 - DNA, 25 bp, Homo sapien
ggatcttgagagcatgtgtaggtgg

SEQ ID NO: 2851176 - DNA, 25 bp, Homo sapien
tgtggttggcattcgttgaactagg

SEQ ID NO: 2851177 - DNA, 25 bp, Homo sapien
tactgctgtggttggcattcgttga

SEQ ID NO: 2851178 - DNA, 25 bp, Homo sapien
taggtggttgctggtttgatgagag

SEQ ID NO: 2851179 - DNA, 25 bp, Homo sapien
ctgctcgtatccatggagcagcatc

SEQ ID NO: 2851180 - DNA, 25 bp, Homo sapien
ctggctgctcgtatccatggagcag

SEQ ID NO: 2851181 - DNA, 25 bp, Homo sapien
ggctgctcgtatccatggagcagca

SEQ ID NO: 2851182 - DNA, 25 bp, Homo sapien
gctcgtatccatggagcagcatcag

SEQ ID NO: 2851183 - DNA, 25 bp, Homo sapien
gccagtgggtccaagcttgcaaagt

SEQ ID NO: 2851184 - DNA, 25 bp, Homo sapien
atcacagggccgctgctctagggtc

SEQ ID NO: 2851185 - DNA, 25 bp, Homo sapien
actcctgggtcctggtattgatgtc

SEQ ID NO: 2851186 - DNA, 25 bp, Homo sapien
aaagtagataggaatgcagggtgct

SEQ ID NO: 2851187 - DNA, 25 bp, Homo sapien
gatggtctgttattcctgttgttct

SEQ ID NO: 2851188 - DNA, 25 bp, Homo sapien
cccctctttacattgagaggttcaa

SEQ ID NO: 2851189 - DNA, 25 bp, Homo sapien
gtcgctaaggcccttattgatttga

SEQ ID NO: 2851190 - DNA, 25 bp, Homo sapien
tcaagatgagtgtcgctaaggccct

SEQ ID NO: 2851191 - DNA, 25 bp, Homo sapien
ggtctggtggactttccctcacaca

SEQ ID NO: 2851192 - DNA, 25 bp, Homo sapien
gcagctgctgttgcttgctccttcc

SEQ ID NO: 2851193 - DNA, 25 bp, Homo sapien
gaggagcacctgactcataggagat

SEQ ID NO: 2851194 - DNA, 25 bp, Homo sapien
ctgcttcatccaggcggaggagagg

SEQ ID NO: 2851195 - DNA, 25 bp, Homo sapien
cagacttgtaggaggaagatgtgta

SEQ ID NO: 2851196 - DNA, 25 bp, Homo sapien
gaggggaatggaacttcttgaagac

SEQ ID NO: 2851197 - DNA, 25 bp, Homo sapien
ggaggaagatgtgtaagctgagacc

SEQ ID NO: 2851198 - DNA, 25 bp, Homo sapien
tgtctgaccagtccactgccgatca

SEQ ID NO: 2851199 - DNA, 25 bp, Homo sapien
gcatgttgggtgtttcaggagtgac

SEQ ID NO: 2851200 - DNA, 25 bp, Homo sapien
agctgagtcccaacaggtggggcca

SEQ ID NO: 2851201 - DNA, 25 bp, Homo sapien
gaagagggccaaccgattgatctga

SEQ ID NO: 2851202 - DNA, 25 bp, Homo sapien
cacctggtaaacagcctccgctgtt

SEQ ID NO: 2851203 - DNA, 25 bp, Homo sapien
gacaaaacacctccttgttctgtca

SEQ ID NO: 2851204 - DNA, 25 bp, Homo sapien
tatggcaggggcttcatttgacaaa

SEQ ID NO: 2851205 - DNA, 25 bp, Homo sapien
catttgacaaaacacctccttgttc

SEQ ID NO: 2851206 - DNA, 25 bp, Homo sapien
gcgtatggcaggggcttcatttgac

SEQ ID NO: 2851207 - DNA, 25 bp, Homo sapien
ctgctggggccaaagagaacctctt

SEQ ID NO: 2851208 - DNA, 25 bp, Homo sapien
gctggggccaaagagaacctctttc

SEQ ID NO: 2851209 - DNA, 25 bp, Homo sapien
agcctgtgggtctgcgtttctcatc

SEQ ID NO: 2851210 - DNA, 25 bp, Homo sapien
cctgtgggtctgcgtttctcatcat

SEQ ID NO: 2851211 - DNA, 25 bp, Homo sapien
gttcataaaccccaggagccggcca

SEQ ID NO: 2851212 - DNA, 25 bp, Homo sapien
catgacagcaaggcggcagtcagct

SEQ ID NO: 2851213 - DNA, 25 bp, Homo sapien
gagggtcccctgtctgttcataaac

SEQ ID NO: 2851214 - DNA, 25 bp, Homo sapien
gcatatcctgggtgtgtgagtgctg

SEQ ID NO: 2851215 - DNA, 25 bp, Homo sapien
cagcctggtctgtgaaatcgagagt

SEQ ID NO: 2851216 - DNA, 25 bp, Homo sapien
tcctggctatttgtgggcttacgtc

SEQ ID NO: 2851217 - DNA, 25 bp, Homo sapien
tcgagagtgtcccaaacatcctggc

SEQ ID NO: 2851218 - DNA, 25 bp, Homo sapien
agaaagaaaacccactcctggctat

SEQ ID NO: 2851219 - DNA, 25 bp, Homo sapien
gacaaggccggaagagacaggcttt

SEQ ID NO: 2851220 - DNA, 25 bp, Homo sapien
tccactgagtggtgagcatactccc

SEQ ID NO: 2851221 - DNA, 25 bp, Homo sapien
cttatgccaagcctagactgttgag

SEQ ID NO: 2851222 - DNA, 25 bp, Homo sapien
tccctgagcctggatgtgctataag

SEQ ID NO: 2851223 - DNA, 25 bp, Homo sapien
tgtccgtttctgtgccgtgctggtg

SEQ ID NO: 2851224 - DNA, 25 bp, Homo sapien
cagggcaggtcgtactgtccgtttc

SEQ ID NO: 2851225 - DNA, 25 bp, Homo sapien
tgtagactgtgtcgatagccgcccg

SEQ ID NO: 2851226 - DNA, 25 bp, Homo sapien
aaatgtctgatccaaccactaagtg

SEQ ID NO: 2851227 - DNA, 25 bp, Homo sapien
gggaccctgtcatccttaccaatgg

SEQ ID NO: 2851228 - DNA, 25 bp, Homo sapien
catggtttccctggccaaagaagag

SEQ ID NO: 2851229 - DNA, 25 bp, Homo sapien
tatgtcaaagttagtcccctagtcc

SEQ ID NO: 2851230 - DNA, 25 bp, Homo sapien
acttcagcctgggtccgtgtttcta

SEQ ID NO: 2851231 - DNA, 25 bp, Homo sapien
aggtggtccctatggtcctttccag

SEQ ID NO: 2851232 - DNA, 25 bp, Homo sapien
cctttccagcatttccaaatcttgg

SEQ ID NO: 2851233 - DNA, 25 bp, Homo sapien
tagagaattctgagcaataggagcc

SEQ ID NO: 2851234 - DNA, 25 bp, Homo sapien
cagccttaatcaactgggcaaggtg

SEQ ID NO: 2851235 - DNA, 25 bp, Homo sapien
cactgctaatgattgagaatcaagt

SEQ ID NO: 2851236 - DNA, 25 bp, Homo sapien
ctttatccgtaagaggcaaggagga

SEQ ID NO: 2851237 - DNA, 25 bp, Homo sapien
gcttttacatattgtggttgtcatc

SEQ ID NO: 2851238 - DNA, 25 bp, Homo sapien
tgtcatcgtccctattttatttctg

SEQ ID NO: 2851239 - DNA, 25 bp, Homo sapien
ccttcagagcacttttcacagttca

SEQ ID NO: 2851240 - DNA, 25 bp, Homo sapien
ctccctccttcagagcacttttcac

SEQ ID NO: 2851241 - DNA, 25 bp, Homo sapien
ttcagagcacttttcacagttcata

SEQ ID NO: 2851242 - DNA, 25 bp, Homo sapien
acttttcacagttcataatatccat

SEQ ID NO: 2851243 - DNA, 25 bp, Homo sapien
tggcagatgcagagcctcaagacct

SEQ ID NO: 2851244 - DNA, 25 bp, Homo sapien
ttgtaagcttcaggagaacaggcct

SEQ ID NO: 2851245 - DNA, 25 bp, Homo sapien
tattgtgtgaattgggcagaccacc

SEQ ID NO: 2851246 - DNA, 25 bp, Homo sapien
gattgagggctcagtacctgttgcc

SEQ ID NO: 2851247 - DNA, 25 bp, Homo sapien
gaatgtgttacatgcggccacaaag

SEQ ID NO: 2851248 - DNA, 25 bp, Homo sapien
tcagaaacttaaccatggctatgtg

SEQ ID NO: 2851249 - DNA, 25 bp, Homo sapien
taatgtccatttattagaatgagac

SEQ ID NO: 2851250 - DNA, 25 bp, Homo sapien
ttaaccatggctatgtgaggtgatg

SEQ ID NO: 2851251 - DNA, 25 bp, Homo sapien
tggatcagattcaggcaagccaacc

SEQ ID NO: 2851252 - DNA, 25 bp, Homo sapien
ggatcagtcattgggtgtaggccac

SEQ ID NO: 2851253 - DNA, 25 bp, Homo sapien
tgatcaggccagtgcattccgctag

SEQ ID NO: 2851254 - DNA, 25 bp, Homo sapien
tcacagctgggtattaggcaggcat

SEQ ID NO: 2851255 - DNA, 25 bp, Homo sapien
ttccccccggctgatttcctgcggc

SEQ ID NO: 2851256 - DNA, 25 bp, Homo sapien
cagcaggacttggatgtagttgcac

SEQ ID NO: 2851257 - DNA, 25 bp, Homo sapien
caggacttggatgtagttgcacccc

SEQ ID NO: 2851258 - DNA, 25 bp, Homo sapien
gatgtagttgcaccccctgggctgg

SEQ ID NO: 2851259 - DNA, 25 bp, Homo sapien
gaaaaagaacacaccaggtgacaag

SEQ ID NO: 2851260 - DNA, 25 bp, Homo sapien
tgaaggccacaaatttgcactgatt

SEQ ID NO: 2851261 - DNA, 25 bp, Homo sapien
aaaatgttggtactgattctctagc

SEQ ID NO: 2851262 - DNA, 25 bp, Homo sapien
cactgatttactacttgcccaaaag

SEQ ID NO: 2851263 - DNA, 25 bp, Homo sapien
tgcccaaaagacaatttgtacaaat

SEQ ID NO: 2851264 - DNA, 25 bp, Homo sapien
ccttgcgattgttggtgatcccgtc

SEQ ID NO: 2851265 - DNA, 25 bp, Homo sapien
gcgccttccactccttgcgattgtt

SEQ ID NO: 2851266 - DNA, 25 bp, Homo sapien
tctcctcgtggaaacgggagaattc

SEQ ID NO: 2851267 - DNA, 25 bp, Homo sapien
tggcatcgtactcatcagcaagcgc

SEQ ID NO: 2851268 - DNA, 25 bp, Homo sapien
ctccccgagaggctgagaacctgga

SEQ ID NO: 2851269 - DNA, 25 bp, Homo sapien
gacattggcagcctcattccctggg

SEQ ID NO: 2851270 - DNA, 25 bp, Homo sapien
aaggtctgggacacaaggatactca

SEQ ID NO: 2851271 - DNA, 25 bp, Homo sapien
gccctggcctagcacaaggtctggg

SEQ ID NO: 2851272 - DNA, 25 bp, Homo sapien
gcttagggagttcatctgctttgtt

SEQ ID NO: 2851273 - DNA, 25 bp, Homo sapien
tgtagacgaaggtgcaaacaaagtc

SEQ ID NO: 2851274 - DNA, 25 bp, Homo sapien
caatgaagccgacttgaagcttagg

SEQ ID NO: 2851275 - DNA, 25 bp, Homo sapien
tgcaaacaaagtcaatgaagccgac

SEQ ID NO: 2851276 - DNA, 25 bp, Homo sapien
tcatggcgaggtcatatctaggtca

SEQ ID NO: 2851277 - DNA, 25 bp, Homo sapien
tcagggaaacttcgggctgctcttc

SEQ ID NO: 2851278 - DNA, 25 bp, Homo sapien
gagagtgagaacgacaaagcccatg

SEQ ID NO: 2851279 - DNA, 25 bp, Homo sapien
cactggacagtaagagaaacctacc

SEQ ID NO: 2851280 - DNA, 25 bp, Homo sapien
tctgttgcagcaccgtgcgctccag

SEQ ID NO: 2851281 - DNA, 25 bp, Homo sapien
ttctgttgcagcaccgtgcgctcca

SEQ ID NO: 2851282 - DNA, 25 bp, Homo sapien
gcccaatcccctacccctgctccca

SEQ ID NO: 2851283 - DNA, 25 bp, Homo sapien
ccagcccaatcccctacccctgctc

SEQ ID NO: 2851284 - DNA, 25 bp, Homo sapien
cagcccaatcccctacccctgctcc

SEQ ID NO: 2851285 - DNA, 25 bp, Homo sapien
tgcacctcccagggtttggtgatgg

SEQ ID NO: 2851286 - DNA, 25 bp, Homo sapien
ctgagagatcacaggcggtcatcat

SEQ ID NO: 2851287 - DNA, 25 bp, Homo sapien
ggctgagagatcacaggcggtcatc

SEQ ID NO: 2851288 - DNA, 25 bp, Homo sapien
ggtttggtgatggctgagagatcac

SEQ ID NO: 2851289 - DNA, 25 bp, Homo sapien
tgatcacataagatgcttttgtaaa

SEQ ID NO: 2851290 - DNA, 25 bp, Homo sapien
atgatcacataagatgcttttgtaa

SEQ ID NO: 2851291 - DNA, 25 bp, Homo sapien
tctttgaccataagcctctaagtgt

SEQ ID NO: 2851292 - DNA, 25 bp, Homo sapien
tacactacatatatgcttgaaagtc

SEQ ID NO: 2851293 - DNA, 25 bp, Homo sapien
tgtagtggcaccgtcagggctcgct

SEQ ID NO: 2851294 - DNA, 25 bp, Homo sapien
tctttacccacaataaaagcacatg

SEQ ID NO: 2851295 - DNA, 25 bp, Homo sapien
cctagtgtcatggtccctggacagt

SEQ ID NO: 2851296 - DNA, 25 bp, Homo sapien
tctgttgagagactattgaccaaat

SEQ ID NO: 2851297 - DNA, 25 bp, Homo sapien
cagttgctaccatcttcagtacgta

SEQ ID NO: 2851298 - DNA, 25 bp, Homo sapien
ggtagactagacagacagatgatga

SEQ ID NO: 2851299 - DNA, 25 bp, Homo sapien
cactgtcttgcatttttagtgctaa

SEQ ID NO: 2851300 - DNA, 25 bp, Homo sapien
catgtggcttgtgcaattggaattt

SEQ ID NO: 2851301 - DNA, 25 bp, Homo sapien
caattggaatttggcataacttcat

SEQ ID NO: 2851302 - DNA, 25 bp, Homo sapien
aaagattaaacatgtggcttgtgca

SEQ ID NO: 2851303 - DNA, 25 bp, Homo sapien
tcccaaggcttgttgagggcagcaa

SEQ ID NO: 2851304 - DNA, 25 bp, Homo sapien
tgtcagtgcatctcgcctcatgatc

SEQ ID NO: 2851305 - DNA, 25 bp, Homo sapien
tatgttgaaggcctccaaaatgaaa

SEQ ID NO: 2851306 - DNA, 25 bp, Homo sapien
agcaagagctgtcagtgcatctcgc

SEQ ID NO: 2851307 - DNA, 25 bp, Homo sapien
ctgtgtccactcctgttcactctca

SEQ ID NO: 2851308 - DNA, 25 bp, Homo sapien
tttccttccgtgtctgctccagcat

SEQ ID NO: 2851309 - DNA, 25 bp, Homo sapien
gctccagcatcatgtactgtgtcca

SEQ ID NO: 2851310 - DNA, 25 bp, Homo sapien
ataacgatttccttccgtgtctgct

SEQ ID NO: 2851311 - DNA, 25 bp, Homo sapien
tagactgatccacgatcttttggaa

SEQ ID NO: 2851312 - DNA, 25 bp, Homo sapien
gatcttttggaacatcgtcctcttc

SEQ ID NO: 2851313 - DNA, 25 bp, Homo sapien
cttagactgatccacgatcttttgg

SEQ ID NO: 2851314 - DNA, 25 bp, Homo sapien
tccacgatcttttggaacatcgtcc

SEQ ID NO: 2851315 - DNA, 25 bp, Homo sapien
ctgtggcaatgattgcaatgtccat

SEQ ID NO: 2851316 - DNA, 25 bp, Homo sapien
tcgacgattgaggttttgaaagata

SEQ ID NO: 2851317 - DNA, 25 bp, Homo sapien
tgtggatggcatgctcatgctgtcg

SEQ ID NO: 2851318 - DNA, 25 bp, Homo sapien
tggcaatgattgcaatgtccatcat

SEQ ID NO: 2851319 - DNA, 25 bp, Homo sapien
gagaattgatgctggcagtaaagtc

SEQ ID NO: 2851320 - DNA, 25 bp, Homo sapien
aagcgagatgggagagaattgatgc

SEQ ID NO: 2851321 - DNA, 25 bp, Homo sapien
aaagagaagcgagatgggagagaat

SEQ ID NO: 2851322 - DNA, 25 bp, Homo sapien
gtaaagtcacccacctaccaatggc

SEQ ID NO: 2851323 - DNA, 25 bp, Homo sapien
gtgttttgccaaactccaagtggtg

SEQ ID NO: 2851324 - DNA, 25 bp, Homo sapien
caagatagaggacccatggagcttg

SEQ ID NO: 2851325 - DNA, 25 bp, Homo sapien
ctgagcagtgttttgccaaactcca

SEQ ID NO: 2851326 - DNA, 25 bp, Homo sapien
gatagaggacccatggagcttggcc

SEQ ID NO: 2851327 - DNA, 25 bp, Homo sapien
cagtcccttttgtatgtaaggcaac

SEQ ID NO: 2851328 - DNA, 25 bp, Homo sapien
acagagctggataatgaatccggag

SEQ ID NO: 2851329 - DNA, 25 bp, Homo sapien
gcctgctacaggaggagacccggat

SEQ ID NO: 2851330 - DNA, 25 bp, Homo sapien
tggaccacaagacttccctgttggc

SEQ ID NO: 2851331 - DNA, 25 bp, Homo sapien
cctctaggtccgtgaagtagcgctt

SEQ ID NO: 2851332 - DNA, 25 bp, Homo sapien
tgaagtagcgcttcagctttcccgt

SEQ ID NO: 2851333 - DNA, 25 bp, Homo sapien
tctggtagaggttattggtgcctct

SEQ ID NO: 2851334 - DNA, 25 bp, Homo sapien
taggtccgtgaagtagcgcttcagc

SEQ ID NO: 2851335 - DNA, 25 bp, Homo sapien
gctgaaaaggcgggtgtaaggagga

SEQ ID NO: 2851336 - DNA, 25 bp, Homo sapien
ctgaaaaggcgggtgtaaggaggag

SEQ ID NO: 2851337 - DNA, 25 bp, Homo sapien
tccttttgtgtaggggctggaagca

SEQ ID NO: 2851338 - DNA, 25 bp, Homo sapien
gggcaatcagagtgcaaatcattcc

SEQ ID NO: 2851339 - DNA, 25 bp, Homo sapien
tacctggtgttagtcccaactgcac

SEQ ID NO: 2851340 - DNA, 25 bp, Homo sapien
caccattttgtaagctccccattat

SEQ ID NO: 2851341 - DNA, 25 bp, Homo sapien
tgtggtctcggctacctggtgttag

SEQ ID NO: 2851342 - DNA, 25 bp, Homo sapien
tgtaagctccccattattttgcaga

SEQ ID NO: 2851343 - DNA, 25 bp, Homo sapien
gatcttgcggtagcccttactcagg

SEQ ID NO: 2851344 - DNA, 25 bp, Homo sapien
ggtaggtgatcttgcggtagccctt

SEQ ID NO: 2851345 - DNA, 25 bp, Homo sapien
gggagtacatgaaccgcaccagggc

SEQ ID NO: 2851346 - DNA, 25 bp, Homo sapien
cccttactcagggagtacatgaacc

SEQ ID NO: 2851347 - DNA, 25 bp, Homo sapien
ttctttaaatcctaaatactgagag

SEQ ID NO: 2851348 - DNA, 25 bp, Homo sapien
tttaaggtagtttacagattgagtc

SEQ ID NO: 2851349 - DNA, 25 bp, Homo sapien
tcatctgtgcaacatgactaattct

SEQ ID NO: 2851350 - DNA, 25 bp, Homo sapien
taaggtagtttacagattgagtctt

SEQ ID NO: 2851351 - DNA, 25 bp, Homo sapien
tttatctgcatctggcagctccgct

SEQ ID NO: 2851352 - DNA, 25 bp, Homo sapien
ttgtggaatgtgaaatttatccacc

SEQ ID NO: 2851353 - DNA, 25 bp, Homo sapien
gagctcataatacatctgtattcca

SEQ ID NO: 2851354 - DNA, 25 bp, Homo sapien
tccagttctgttaggggtaagtcac

SEQ ID NO: 2851355 - DNA, 25 bp, Homo sapien
tgaagtgtttctgggtgcccacctc

SEQ ID NO: 2851356 - DNA, 25 bp, Homo sapien
aagtgtttctgggtgcccacctcct

SEQ ID NO: 2851357 - DNA, 25 bp, Homo sapien
aggaatagagtcaggtgattaggaa

SEQ ID NO: 2851358 - DNA, 25 bp, Homo sapien
gtgtttctgggtgcccacctcctgt

SEQ ID NO: 2851359 - DNA, 25 bp, Homo sapien
tggctccttcccatacacctctctg

SEQ ID NO: 2851360 - DNA, 25 bp, Homo sapien
tcccatggctccttcccatacacct

SEQ ID NO: 2851361 - DNA, 25 bp, Homo sapien
acactcccatggctccttcccatac

SEQ ID NO: 2851362 - DNA, 25 bp, Homo sapien
ccttcccatacacctctctggtttt

SEQ ID NO: 2851363 - DNA, 25 bp, Homo sapien
ttttactatgtcctggaaaatatcc

SEQ ID NO: 2851364 - DNA, 25 bp, Homo sapien
tgatattttactatgtcctggaaaa

SEQ ID NO: 2851365 - DNA, 25 bp, Homo sapien
tcaggatttaagacagaccagccca

SEQ ID NO: 2851366 - DNA, 25 bp, Homo sapien
tcattgtcacacttcacatgatatt

SEQ ID NO: 2851367 - DNA, 25 bp, Homo sapien
aaatgtggccactccaacaatttct

SEQ ID NO: 2851368 - DNA, 25 bp, Homo sapien
gggcttcccatctttacgattgtaa

SEQ ID NO: 2851369 - DNA, 25 bp, Homo sapien
tttaatcatccatccagactcatcc

SEQ ID NO: 2851370 - DNA, 25 bp, Homo sapien
tcacaatcggcattgaaagcacatt

SEQ ID NO: 2851371 - DNA, 25 bp, Homo sapien
tccgcaggcgcattcatgatgttgc

SEQ ID NO: 2851372 - DNA, 25 bp, Homo sapien
caggcgcattcatgatgttgcaaat

SEQ ID NO: 2851373 - DNA, 25 bp, Homo sapien
aagtcctccgcaggcgcattcatga

SEQ ID NO: 2851374 - DNA, 25 bp, Homo sapien
cctccgcaggcgcattcatgatgtt

SEQ ID NO: 2851375 - DNA, 25 bp, Homo sapien
ccagtgaagcactgtataccatttt

SEQ ID NO: 2851376 - DNA, 25 bp, Homo sapien
tcatcaggtagacatagtcgagaca

SEQ ID NO: 2851377 - DNA, 25 bp, Homo sapien
taatgaaggtgtgattaggcctgag

SEQ ID NO: 2851378 - DNA, 25 bp, Homo sapien
gttcttgtccaaggcattcacattc

SEQ ID NO: 2851379 - DNA, 25 bp, Homo sapien
tgaaaattgactatgtgaatctcct

SEQ ID NO: 2851380 - DNA, 25 bp, Homo sapien
tatgccctgccagagttatctttct

SEQ ID NO: 2851381 - DNA, 25 bp, Homo sapien
tgtagattaaaatcccaccttttga

SEQ ID NO: 2851382 - DNA, 25 bp, Homo sapien
tgtctacctgtcacctgtagattaa

SEQ ID NO: 2851383 - DNA, 25 bp, Homo sapien
attctgggcaacataagctgggaga

SEQ ID NO: 2851384 - DNA, 25 bp, Homo sapien
cataagctgggagaccgcttactaa

SEQ ID NO: 2851385 - DNA, 25 bp, Homo sapien
gagaccgcttactaaagcccaatgg

SEQ ID NO: 2851386 - DNA, 25 bp, Homo sapien
agcccaatggtcaggaggtggattc

SEQ ID NO: 2851387 - DNA, 25 bp, Homo sapien
caggatgtagtcaatgaccttgtaa

SEQ ID NO: 2851388 - DNA, 25 bp, Homo sapien
catgcaggatgtagtcaatgacctt

SEQ ID NO: 2851389 - DNA, 25 bp, Homo sapien
gccatgcaggatgtagtcaatgacc

SEQ ID NO: 2851390 - DNA, 25 bp, Homo sapien
tagtcaatgaccttgtaaaagttaa

SEQ ID NO: 2851391 - DNA, 25 bp, Homo sapien
tcaaaactgagtcatcaagagtacc

SEQ ID NO: 2851392 - DNA, 25 bp, Homo sapien
catgtacaaattcaccagcctctgg

SEQ ID NO: 2851393 - DNA, 25 bp, Homo sapien
gaaagagccacagatacccatggaa

SEQ ID NO: 2851394 - DNA, 25 bp, Homo sapien
gacactgtgaggctttcgacctaag

SEQ ID NO: 2851395 - DNA, 25 bp, Homo sapien
tcttccatccggagtcctgggacca

SEQ ID NO: 2851396 - DNA, 25 bp, Homo sapien
tcctgggaccagagtaaggtggaac

SEQ ID NO: 2851397 - DNA, 25 bp, Homo sapien
cagagtaaggtggaacttcacccat

SEQ ID NO: 2851398 - DNA, 25 bp, Homo sapien
catcagaaccggccacacatcaaaa

SEQ ID NO: 2851399 - DNA, 25 bp, Homo sapien
tgtggaactgtcgttcgatgtccgt

SEQ ID NO: 2851400 - DNA, 25 bp, Homo sapien
gaaagcacggactgtgtacagggct

SEQ ID NO: 2851401 - DNA, 25 bp, Homo sapien
tctaagagacccacagagtatctgt

SEQ ID NO: 2851402 - DNA, 25 bp, Homo sapien
tctgtcacagttgaggaaagcacgg

SEQ ID NO: 2851403 - DNA, 25 bp, Homo sapien
tacagtgtttgagaaacacgacaaa

SEQ ID NO: 2851404 - DNA, 25 bp, Homo sapien
ttacagtgtttgagaaacacgacaa

SEQ ID NO: 2851405 - DNA, 25 bp, Homo sapien
cttacagtgtttgagaaacacgaca

SEQ ID NO: 2851406 - DNA, 25 bp, Homo sapien
gcttacagtgtttgagaaacacgac

SEQ ID NO: 2851407 - DNA, 25 bp, Homo sapien
ctgttgagataatatttttgagagc

SEQ ID NO: 2851408 - DNA, 25 bp, Homo sapien
ttgagataatatttttgagagctga

SEQ ID NO: 2851409 - DNA, 25 bp, Homo sapien
ccagctgttgagataatatttttga

SEQ ID NO: 2851410 - DNA, 25 bp, Homo sapien
gataatatttttgagagctgatgtt

SEQ ID NO: 2851411 - DNA, 25 bp, Homo sapien
caaaaccagagccagctattaagca

SEQ ID NO: 2851412 - DNA, 25 bp, Homo sapien
ctctagcggcaaaaccagagccagc

SEQ ID NO: 2851413 - DNA, 25 bp, Homo sapien
aaaaccagagccagctattaagcag

SEQ ID NO: 2851414 - DNA, 25 bp, Homo sapien
tagcggcaaaaccagagccagctat

SEQ ID NO: 2851415 - DNA, 25 bp, Homo sapien
cgtccggaagttgtagacgtctatt

SEQ ID NO: 2851416 - DNA, 25 bp, Homo sapien
tcctcgtccggaagttgtagacgtc

SEQ ID NO: 2851417 - DNA, 25 bp, Homo sapien
ctttgttctcctcgtccggaagttg

SEQ ID NO: 2851418 - DNA, 25 bp, Homo sapien
tttagcacgttctttgttctcctcg

SEQ ID NO: 2851419 - DNA, 25 bp, Homo sapien
ttttagtcggccaactgcacggatt

SEQ ID NO: 2851420 - DNA, 25 bp, Homo sapien
agtcggccaactgcacggatttctt

SEQ ID NO: 2851421 - DNA, 25 bp, Homo sapien
ttagtcggccaactgcacggatttc

SEQ ID NO: 2851422 - DNA, 25 bp, Homo sapien
tgttccttcaattgttgtatctgta

SEQ ID NO: 2851423 - DNA, 25 bp, Homo sapien
agtgcgaggagtttaaagggagttg

SEQ ID NO: 2851424 - DNA, 25 bp, Homo sapien
gtgcgaggagtttaaagggagttga

SEQ ID NO: 2851425 - DNA, 25 bp, Homo sapien
cctctctggaacttgcattattatc

SEQ ID NO: 2851426 - DNA, 25 bp, Homo sapien
gaacttgcattattatcacgctagc

SEQ ID NO: 2851427 - DNA, 25 bp, Homo sapien
tctggaacttgcattattatcacgc

SEQ ID NO: 2851428 - DNA, 25 bp, Homo sapien
gcattattatcacgctagcatttgg

SEQ ID NO: 2851429 - DNA, 25 bp, Homo sapien
cctcattcgctgactaatgccttca

SEQ ID NO: 2851430 - DNA, 25 bp, Homo sapien
gactaatgccttcagtatattccat

SEQ ID NO: 2851431 - DNA, 25 bp, Homo sapien
ttcgtacgaattcgactaatttctg

SEQ ID NO: 2851432 - DNA, 25 bp, Homo sapien
gggagaaggaaatgctgccccactc

SEQ ID NO: 2851433 - DNA, 25 bp, Homo sapien
gagaaggaaatgctgccccactcac

SEQ ID NO: 2851434 - DNA, 25 bp, Homo sapien
tacgaattcgactaatttctgccat

SEQ ID NO: 2851435 - DNA, 25 bp, Homo sapien
gctgtttggcactgtcggcttctgt

SEQ ID NO: 2851436 - DNA, 25 bp, Homo sapien
tgctgtttggcactgtcggcttctg

SEQ ID NO: 2851437 - DNA, 25 bp, Homo sapien
gtttggcactgtcggcttctgtgct

SEQ ID NO: 2851438 - DNA, 25 bp, Homo sapien
cttgctgtttggcactgtcggcttc

SEQ ID NO: 2851439 - DNA, 25 bp, Homo sapien
ctcagaggcagttggccgagagcac

SEQ ID NO: 2851440 - DNA, 25 bp, Homo sapien
tctcagaggcagttggccgagagca

SEQ ID NO: 2851441 - DNA, 25 bp, Homo sapien
cagaggcagttggccgagagcacgg

SEQ ID NO: 2851442 - DNA, 25 bp, Homo sapien
ctctcagaggcagttggccgagagc

SEQ ID NO: 2851443 - DNA, 25 bp, Homo sapien
ctggccacgtcgagtttcacagttg

SEQ ID NO: 2851444 - DNA, 25 bp, Homo sapien
gtttcacagttgtgcaggtaactca

SEQ ID NO: 2851445 - DNA, 25 bp, Homo sapien
gatttgcaaaattgaggtacttgag

SEQ ID NO: 2851446 - DNA, 25 bp, Homo sapien
tcacagttgtgcaggtaactcaggt

SEQ ID NO: 2851447 - DNA, 25 bp, Homo sapien
tggtgaagtgggatccatccacttt

SEQ ID NO: 2851448 - DNA, 25 bp, Homo sapien
ttcttggtcttgtactctgtgagga

SEQ ID NO: 2851449 - DNA, 25 bp, Homo sapien
ttcattatgggggaagccaagatgt

SEQ ID NO: 2851450 - DNA, 25 bp, Homo sapien
ttcacagccatgattatggccacca

SEQ ID NO: 2851451 - DNA, 25 bp, Homo sapien
tagttataaacacctgtgtacttga

SEQ ID NO: 2851452 - DNA, 25 bp, Homo sapien
ttagttataaacacctgtgtacttg

SEQ ID NO: 2851453 - DNA, 25 bp, Homo sapien
agttataaacacctgtgtacttgaa

SEQ ID NO: 2851454 - DNA, 25 bp, Homo sapien
gaaaacaaagacagactgaggaaca

SEQ ID NO: 2851455 - DNA, 25 bp, Homo sapien
gactcaaaagacagcgctacatcgg

SEQ ID NO: 2851456 - DNA, 25 bp, Homo sapien
agaaatatcagacaagcccaaatga

SEQ ID NO: 2851457 - DNA, 25 bp, Homo sapien
ccagccgattggatggtagctttcc

SEQ ID NO: 2851458 - DNA, 25 bp, Homo sapien
gtggtcccttactcctgggaagtca

SEQ ID NO: 2851459 - DNA, 25 bp, Homo sapien
atgagagtttgacctgttccctttc

SEQ ID NO: 2851460 - DNA, 25 bp, Homo sapien
ccatattgatgctgaccacaggtgt

SEQ ID NO: 2851461 - DNA, 25 bp, Homo sapien
tactaaccagcatgagagtttgacc

SEQ ID NO: 2851462 - DNA, 25 bp, Homo sapien
cctccatgagaaatacctgggtatt

SEQ ID NO: 2851463 - DNA, 25 bp, Homo sapien
gtctgcaactttctcccaaatgggt

SEQ ID NO: 2851464 - DNA, 25 bp, Homo sapien
gaactccatgtaataatgccccatg

SEQ ID NO: 2851465 - DNA, 25 bp, Homo sapien
tccatgtaataatgccccatgccct

SEQ ID NO: 2851466 - DNA, 25 bp, Homo sapien
cagccttgtcttggtggccaatgcc

SEQ ID NO: 2851467 - DNA, 25 bp, Homo sapien
gacgatctcttggtcgggcatcacc

SEQ ID NO: 2851468 - DNA, 25 bp, Homo sapien
ttgcgggtccggtacatgaacaggc

SEQ ID NO: 2851469 - DNA, 25 bp, Homo sapien
gcaaagccaatattcgagtccagga

SEQ ID NO: 2851470 - DNA, 25 bp, Homo sapien
ttcttagagtgtgcgacatggccca

SEQ ID NO: 2851471 - DNA, 25 bp, Homo sapien
actggctactctgtagaaggactgg

SEQ ID NO: 2851472 - DNA, 25 bp, Homo sapien
tgggacggaggccttccaatggcag

SEQ ID NO: 2851473 - DNA, 25 bp, Homo sapien
gaatcccactggctactctgtagaa

SEQ ID NO: 2851474 - DNA, 25 bp, Homo sapien
cagtctgcaacaagtccagtctgga

SEQ ID NO: 2851475 - DNA, 25 bp, Homo sapien
tactggataaagaggtggccgatcg

SEQ ID NO: 2851476 - DNA, 25 bp, Homo sapien
tgagcacttcaaaactctgggcaga

SEQ ID NO: 2851477 - DNA, 25 bp, Homo sapien
caaggttcggctatactgcccaggt

SEQ ID NO: 2851478 - DNA, 25 bp, Homo sapien
gcagcggcggaacctctctaagaat

SEQ ID NO: 2851479 - DNA, 25 bp, Homo sapien
gaagtacgtgcacaatggtgtgtaa

SEQ ID NO: 2851480 - DNA, 25 bp, Homo sapien
ggtgtgtaaccattactactattta

SEQ ID NO: 2851481 - DNA, 25 bp, Homo sapien
cagtggcatgaagtacgtgcacaat

SEQ ID NO: 2851482 - DNA, 25 bp, Homo sapien
gaacttgaggactgattagtttgca

SEQ ID NO: 2851483 - DNA, 25 bp, Homo sapien
caacttgagcaagtacagtgaccct

SEQ ID NO: 2851484 - DNA, 25 bp, Homo sapien
gaatcaacttggcatgttccagcaa

SEQ ID NO: 2851485 - DNA, 25 bp, Homo sapien
tattctaggcaaagacaacttgagc

SEQ ID NO: 2851486 - DNA, 25 bp, Homo sapien
gacccaaaggatgagaacatacctg

SEQ ID NO: 2851487 - DNA, 25 bp, Homo sapien
aagttagccaatccagctggagaag

SEQ ID NO: 2851488 - DNA, 25 bp, Homo sapien
agaaaagttagccaatccagctgga

SEQ ID NO: 2851489 - DNA, 25 bp, Homo sapien
gaaggcttgttgacacttgaggaca

SEQ ID NO: 2851490 - DNA, 25 bp, Homo sapien
aggcttgttgacacttgaggacatt

SEQ ID NO: 2851491 - DNA, 25 bp, Homo sapien
ggtttgtacttgtcccatccatcca

SEQ ID NO: 2851492 - DNA, 25 bp, Homo sapien
ctgcttttggtagccatctgtagaa

SEQ ID NO: 2851493 - DNA, 25 bp, Homo sapien
cagttctggaacgttatgcatgcag

SEQ ID NO: 2851494 - DNA, 25 bp, Homo sapien
tctacttgggttgaggttgcctata

SEQ ID NO: 2851495 - DNA, 25 bp, Homo sapien
taagaacatgttagggttagccctg

SEQ ID NO: 2851496 - DNA, 25 bp, Homo sapien
tagccctgatctgaatataaaagtg

SEQ ID NO: 2851497 - DNA, 25 bp, Homo sapien
aaaagggctacagtgcatttcttgg

SEQ ID NO: 2851498 - DNA, 25 bp, Homo sapien
tgttacagatgagccatacgtttct

SEQ ID NO: 2851499 - DNA, 25 bp, Homo sapien
aaatagaaagctgttaggctcctaa

SEQ ID NO: 2851500 - DNA, 25 bp, Homo sapien
gaatgcaatcattaacttggttgct

SEQ ID NO: 2851501 - DNA, 25 bp, Homo sapien
gaagtttcactagcagggaagtttc

SEQ ID NO: 2851502 - DNA, 25 bp, Homo sapien
aacagtttagataatcctgaatgca

SEQ ID NO: 2851503 - DNA, 25 bp, Homo sapien
tacatgggatcaaatagcccttgcc

SEQ ID NO: 2851504 - DNA, 25 bp, Homo sapien
tattgcagcctactggaaaggaggg

SEQ ID NO: 2851505 - DNA, 25 bp, Homo sapien
ttatggtttgagtcctgttgctgcc

SEQ ID NO: 2851506 - DNA, 25 bp, Homo sapien
ccaagacaatatcagggtgacaggt

SEQ ID NO: 2851507 - DNA, 25 bp, Homo sapien
tgtgacccgtcaccaaagattgtga

SEQ ID NO: 2851508 - DNA, 25 bp, Homo sapien
tgtaagctaaatttggaagcccctg

SEQ ID NO: 2851509 - DNA, 25 bp, Homo sapien
aacatttcgtaaggccagcatggca

SEQ ID NO: 2851510 - DNA, 25 bp, Homo sapien
caaaactaccaatgcctgtgacccg

SEQ ID NO: 2851511 - DNA, 25 bp, Homo sapien
tatctaaagaaatctttattcttgt

SEQ ID NO: 2851512 - DNA, 25 bp, Homo sapien
gaaatctttattcttgtaaactaca

SEQ ID NO: 2851513 - DNA, 25 bp, Homo sapien
acattttctgaaataaattcctgca

SEQ ID NO: 2851514 - DNA, 25 bp, Homo sapien
ttattcttgtaaactacattttctg

SEQ ID NO: 2851515 - DNA, 25 bp, Homo sapien
cagtacagttggagggcagataccc

SEQ ID NO: 2851516 - DNA, 25 bp, Homo sapien
tatgagcaagaggatccggcgttcc

SEQ ID NO: 2851517 - DNA, 25 bp, Homo sapien
cactggttggctcggtaatcacaag

SEQ ID NO: 2851518 - DNA, 25 bp, Homo sapien
caaaagagtgctgtcaaccgctgct

SEQ ID NO: 2851519 - DNA, 25 bp, Homo sapien
ggccacaactaacaggactgtctgg

SEQ ID NO: 2851520 - DNA, 25 bp, Homo sapien
ctcctcgcggcttgctttgccccaa

SEQ ID NO: 2851521 - DNA, 25 bp, Homo sapien
ctggccacaactaacaggactgtct

SEQ ID NO: 2851522 - DNA, 25 bp, Homo sapien
ccacaactaacaggactgtctggtt

SEQ ID NO: 2851523 - DNA, 25 bp, Homo sapien
cttggtcaagctaagacgtctgaat

SEQ ID NO: 2851524 - DNA, 25 bp, Homo sapien
ggtcaagctaagacgtctgaatttt

SEQ ID NO: 2851525 - DNA, 25 bp, Homo sapien
ttggtcaagctaagacgtctgaatt

SEQ ID NO: 2851526 - DNA, 25 bp, Homo sapien
caagctaagacgtctgaattttatt

SEQ ID NO: 2851527 - DNA, 25 bp, Homo sapien
gatttacggaagctctccatacggt

SEQ ID NO: 2851528 - DNA, 25 bp, Homo sapien
tcactggagtgatgaaggcgctact

SEQ ID NO: 2851529 - DNA, 25 bp, Homo sapien
tgatgcggcactacgtatgaacccg

SEQ ID NO: 2851530 - DNA, 25 bp, Homo sapien
gagaactacatcagtccaggcagga

SEQ ID NO: 2851531 - DNA, 25 bp, Homo sapien
tgaggtcaggccttgaacgtcgtgc

SEQ ID NO: 2851532 - DNA, 25 bp, Homo sapien
tggtattgtaggcttcccagcgccc

SEQ ID NO: 2851533 - DNA, 25 bp, Homo sapien
cgcccgacgtggctctgaaaggtga

SEQ ID NO: 2851534 - DNA, 25 bp, Homo sapien
caggccttgaacgtcgtgctgagga

SEQ ID NO: 2851535 - DNA, 25 bp, Homo sapien
cctttgagcagttcgtgtgggtccg

SEQ ID NO: 2851536 - DNA, 25 bp, Homo sapien
gaagcagtccgttcgccttactaga

SEQ ID NO: 2851537 - DNA, 25 bp, Homo sapien
tctccctggcgatccgtggtgtgcc

SEQ ID NO: 2851538 - DNA, 25 bp, Homo sapien
ttgctgctgtcacgactggagccgc

SEQ ID NO: 2851539 - DNA, 25 bp, Homo sapien
ttttttaagctttcgcaacattgtc

SEQ ID NO: 2851540 - DNA, 25 bp, Homo sapien
taagctttcgcaacattgtcaaaag

SEQ ID NO: 2851541 - DNA, 25 bp, Homo sapien
tataggtgaaatacagtgtgtctgc

SEQ ID NO: 2851542 - DNA, 25 bp, Homo sapien
tcttgcctccaaaagactaggagcc

SEQ ID NO: 2851543 - DNA, 25 bp, Homo sapien
aatttgtgttgtactgacagctatc

SEQ ID NO: 2851544 - DNA, 25 bp, Homo sapien
gacagctatcagttataatcaggaa

SEQ ID NO: 2851545 - DNA, 25 bp, Homo sapien
acttactggttgaatgaagtcctgg

SEQ ID NO: 2851546 - DNA, 25 bp, Homo sapien
catatcttagcatagtagtacttac

SEQ ID NO: 2851547 - DNA, 25 bp, Homo sapien
ctttttggcctaaatgttgtggtca

SEQ ID NO: 2851548 - DNA, 25 bp, Homo sapien
agatatggagatacaggagaatgta

SEQ ID NO: 2851549 - DNA, 25 bp, Homo sapien
aaagggggacagatatggagataca

SEQ ID NO: 2851550 - DNA, 25 bp, Homo sapien
ccttcgctatcttcctgatggagat

SEQ ID NO: 2851551 - DNA, 25 bp, Homo sapien
tgaaccagcaggacttcaaaggtga

SEQ ID NO: 2851552 - DNA, 25 bp, Homo sapien
aaccagcaggacttcaaaggtgagc

SEQ ID NO: 2851553 - DNA, 25 bp, Homo sapien
ccagcaggacttcaaaggtgagcag

SEQ ID NO: 2851554 - DNA, 25 bp, Homo sapien
tgtgaaccagcaggacttcaaaggt

SEQ ID NO: 2851555 - DNA, 25 bp, Homo sapien
gtcgttatccagctgatggccatgg

SEQ ID NO: 2851556 - DNA, 25 bp, Homo sapien
agtcgttatccagctgatggccatg

SEQ ID NO: 2851557 - DNA, 25 bp, Homo sapien
gaactgatcctttcactgagattct

SEQ ID NO: 2851558 - DNA, 25 bp, Homo sapien
tcgaactgatcctttcactgagatt

SEQ ID NO: 2851559 - DNA, 25 bp, Homo sapien
gattttatgttgcagctcgttagag

SEQ ID NO: 2851560 - DNA, 25 bp, Homo sapien
cattcgaactgatcctttcactgag

SEQ ID NO: 2851561 - DNA, 25 bp, Homo sapien
tctgtgatccagtctaggatcagat

SEQ ID NO: 2851562 - DNA, 25 bp, Homo sapien
cagtctaggatcagatattaacgtt

SEQ ID NO: 2851563 - DNA, 25 bp, Homo sapien
gatattaacgtttagttgtcatgtc

SEQ ID NO: 2851564 - DNA, 25 bp, Homo sapien
cagatattaacgtttagttgtcatg

SEQ ID NO: 2851565 - DNA, 25 bp, Homo sapien
taatgtgctgacgttataatgaggt

SEQ ID NO: 2851566 - DNA, 25 bp, Homo sapien
gtcatacttgtgagctataaaagga

SEQ ID NO: 2851567 - DNA, 25 bp, Homo sapien
gaataccagattgtcatacttgtga

SEQ ID NO: 2851568 - DNA, 25 bp, Homo sapien
catgtgcatgaataccagattgtca

SEQ ID NO: 2851569 - DNA, 25 bp, Homo sapien
tcatgacataacctagcagcagtag

SEQ ID NO: 2851570 - DNA, 25 bp, Homo sapien
gaatttgcaggtactcatgtggcac

SEQ ID NO: 2851571 - DNA, 25 bp, Homo sapien
caagctttgaggaagagcatcccct

SEQ ID NO: 2851572 - DNA, 25 bp, Homo sapien
gtcaattccgtgcacatcgtatggg

SEQ ID NO: 2851573 - DNA, 25 bp, Homo sapien
tctgtctagccccaaagagcctggt

SEQ ID NO: 2851574 - DNA, 25 bp, Homo sapien
tatagggcagagactaagaggtcct

SEQ ID NO: 2851575 - DNA, 25 bp, Homo sapien
cccacggcgtgactgttagttagga

SEQ ID NO: 2851576 - DNA, 25 bp, Homo sapien
cagaatgacgggactgggcagaaca

SEQ ID NO: 2851577 - DNA, 25 bp, Homo sapien
tgcagcaagggctgggcgatatccc

SEQ ID NO: 2851578 - DNA, 25 bp, Homo sapien
gctgggcgatatccccttgctcgca

SEQ ID NO: 2851579 - DNA, 25 bp, Homo sapien
ccttgctcgcagcaggtcaggtgct

SEQ ID NO: 2851580 - DNA, 25 bp, Homo sapien
aggtgctcactagagctctcctcct

SEQ ID NO: 2851581 - DNA, 25 bp, Homo sapien
tctgctgctgctcggcagattggta

SEQ ID NO: 2851582 - DNA, 25 bp, Homo sapien
tgctgctcggcagattggtatagtc

SEQ ID NO: 2851583 - DNA, 25 bp, Homo sapien
gctgctgctcggcagattggtatag

SEQ ID NO: 2851584 - DNA, 25 bp, Homo sapien
tgctgctgctcggcagattggtata

SEQ ID NO: 2851585 - DNA, 25 bp, Homo sapien
gaaggaaggagcagatctgctggaa

SEQ ID NO: 2851586 - DNA, 25 bp, Homo sapien
ctgctggaaggtgggtctgtgggtg

SEQ ID NO: 2851587 - DNA, 25 bp, Homo sapien
ccagcaggcctgcatgatgctgtat

SEQ ID NO: 2851588 - DNA, 25 bp, Homo sapien
tcttgggcctgctcctgaaggaagg

SEQ ID NO: 2851589 - DNA, 25 bp, Homo sapien
tcagggtaactgtaataacgatctc

SEQ ID NO: 2851590 - DNA, 25 bp, Homo sapien
ctagagagacctacccagcagaggt

SEQ ID NO: 2851591 - DNA, 25 bp, Homo sapien
cattaacacacacccctagagagac

SEQ ID NO: 2851592 - DNA, 25 bp, Homo sapien
ccttgcagaagggtactctcatcac

SEQ ID NO: 2851593 - DNA, 25 bp, Homo sapien
caccagtttatagaacttgctgttc

SEQ ID NO: 2851594 - DNA, 25 bp, Homo sapien
caccaggatgccagggtagggattc

SEQ ID NO: 2851595 - DNA, 25 bp, Homo sapien
ggctgggccatttggtatccatcct

SEQ ID NO: 2851596 - DNA, 25 bp, Homo sapien
tattctttggggcaaatgcaggctg

SEQ ID NO: 2851597 - DNA, 25 bp, Homo sapien
taggaccagacgtcgctctgaaccg

SEQ ID NO: 2851598 - DNA, 25 bp, Homo sapien
gaaccgtgtagacacagtcaaagat

SEQ ID NO: 2851599 - DNA, 25 bp, Homo sapien
gacgtcgctctgaaccgtgtagaca

SEQ ID NO: 2851600 - DNA, 25 bp, Homo sapien
tcgctctgaaccgtgtagacacagt

SEQ ID NO: 2851601 - DNA, 25 bp, Homo sapien
tgcccttgacaatgtagttggagtc

SEQ ID NO: 2851602 - DNA, 25 bp, Homo sapien
gcccttgacaatgtagttggagtca

SEQ ID NO: 2851603 - DNA, 25 bp, Homo sapien
ttggagtcattcatgatgtccctag

SEQ ID NO: 2851604 - DNA, 25 bp, Homo sapien
ttcatgatgtccctagccagcccga

SEQ ID NO: 2851605 - DNA, 25 bp, Homo sapien
ggccacatgaccattggtcaacagc

SEQ ID NO: 2851606 - DNA, 25 bp, Homo sapien
ccacatgaccattggtcaacagcac

SEQ ID NO: 2851607 - DNA, 25 bp, Homo sapien
tggccacatgaccattggtcaacag

SEQ ID NO: 2851608 - DNA, 25 bp, Homo sapien
gcgctgccacgtcccggtggatgca

SEQ ID NO: 2851609 - DNA, 25 bp, Homo sapien
acgcgctgccacgtcccggtggatg

SEQ ID NO: 2851610 - DNA, 25 bp, Homo sapien
tacgcgctgccacgtcccggtggat

SEQ ID NO: 2851611 - DNA, 25 bp, Homo sapien
gttacgcgctgccacgtcccggtgg

SEQ ID NO: 2851612 - DNA, 25 bp, Homo sapien
ccatgccctgggctacttggctgga

SEQ ID NO: 2851613 - DNA, 25 bp, Homo sapien
aggggccgtccatcctccttgtcca

SEQ ID NO: 2851614 - DNA, 25 bp, Homo sapien
ccctgggctacttggctggagaagt

SEQ ID NO: 2851615 - DNA, 25 bp, Homo sapien
tgccctgggctacttggctggagaa

SEQ ID NO: 2851616 - DNA, 25 bp, Homo sapien
tgctcagagaaggagtcatttgaag

SEQ ID NO: 2851617 - DNA, 25 bp, Homo sapien
catttgaagaagtggagacaggcct

SEQ ID NO: 2851618 - DNA, 25 bp, Homo sapien
gagacaggcctcatctccacatagg

SEQ ID NO: 2851619 - DNA, 25 bp, Homo sapien
gacaggcctcatctccacataggtg

SEQ ID NO: 2851620 - DNA, 25 bp, Homo sapien
tgggcctgaggtggtgcacttccaa

SEQ ID NO: 2851621 - DNA, 25 bp, Homo sapien
acttccaacagtcctcaagagatgc

SEQ ID NO: 2851622 - DNA, 25 bp, Homo sapien
cagattttgaatcagcaggcctggg

SEQ ID NO: 2851623 - DNA, 25 bp, Homo sapien
cccgggaatctctgcaatgcagatt

SEQ ID NO: 2851624 - DNA, 25 bp, Homo sapien
gatgttcttatagtcgacgcctccc

SEQ ID NO: 2851625 - DNA, 25 bp, Homo sapien
gtcgccatagcaacagtactccgtg

SEQ ID NO: 2851626 - DNA, 25 bp, Homo sapien
cagaaagttgagcaggtcgccatag

SEQ ID NO: 2851627 - DNA, 25 bp, Homo sapien
tactccgtgatgaccagtacagggc

SEQ ID NO: 2851628 - DNA, 25 bp, Homo sapien
ctccatgggtacaggctcccagaag

SEQ ID NO: 2851629 - DNA, 25 bp, Homo sapien
ccagaaggttgacgatgttctcgtg

SEQ ID NO: 2851630 - DNA, 25 bp, Homo sapien
ctcccagaaggttgacgatgttctc

SEQ ID NO: 2851631 - DNA, 25 bp, Homo sapien
catgggtacaggctcccagaaggtt

SEQ ID NO: 2851632 - DNA, 25 bp, Homo sapien
gcccaggtggctcatgatcttcagc

SEQ ID NO: 2851633 - DNA, 25 bp, Homo sapien
atgagggcctccttctcatcagcat

SEQ ID NO: 2851634 - DNA, 25 bp, Homo sapien
tccttctcatcagcatgggccgtgg

SEQ ID NO: 2851635 - DNA, 25 bp, Homo sapien
tgagggcctccttctcatcagcatg

SEQ ID NO: 2851636 - DNA, 25 bp, Homo sapien
gcctccttctcatcagcatgggccg

SEQ ID NO: 2851637 - DNA, 25 bp, Homo sapien
atcttcacagccaccttcaggacag

SEQ ID NO: 2851638 - DNA, 25 bp, Homo sapien
ttcaggacagcatcctccttgccca

SEQ ID NO: 2851639 - DNA, 25 bp, Homo sapien
tcccaaaggctccagctccgagggt

SEQ ID NO: 2851640 - DNA, 25 bp, Homo sapien
ttgcccagaccaaaggccgtggcct

SEQ ID NO: 2851641 - DNA, 25 bp, Homo sapien
tgccacgcacacaggtcccttaagt

SEQ ID NO: 2851642 - DNA, 25 bp, Homo sapien
ctgccacgcacacaggtcccttaag

SEQ ID NO: 2851643 - DNA, 25 bp, Homo sapien
tgtggagtgatgagctgccatctca

SEQ ID NO: 2851644 - DNA, 25 bp, Homo sapien
ctgtggagtgatgagctgccatctc

SEQ ID NO: 2851645 - DNA, 25 bp, Homo sapien
gtggagtgatgagctgccatctcac

SEQ ID NO: 2851646 - DNA, 25 bp, Homo sapien
gaaagtataactgttgccctcatag

SEQ ID NO: 2851647 - DNA, 25 bp, Homo sapien
gaactcccacttctcgttgtaaggc

SEQ ID NO: 2851648 - DNA, 25 bp, Homo sapien
tccagcggacctggtacttgggctt

SEQ ID NO: 2851649 - DNA, 25 bp, Homo sapien
tctcgatgatcttccagcggacctg

SEQ ID NO: 2851650 - DNA, 25 bp, Homo sapien
tgcgttatagcttgggagagagtct

SEQ ID NO: 2851651 - DNA, 25 bp, Homo sapien
gagagtctgaaacgggacccaggga

SEQ ID NO: 2851652 - DNA, 25 bp, Homo sapien
ctctgcgttatagcttgggagagag

SEQ ID NO: 2851653 - DNA, 25 bp, Homo sapien
tatagcttgggagagagtctgaaac

SEQ ID NO: 2851654 - DNA, 25 bp, Homo sapien
taatttctggaagcggaccaagctg

SEQ ID NO: 2851655 - DNA, 25 bp, Homo sapien
tggccacttccatctctaggagcct

SEQ ID NO: 2851656 - DNA, 25 bp, Homo sapien
tgggcatgtaaacctcccagggcac

SEQ ID NO: 2851657 - DNA, 25 bp, Homo sapien
cctctgtggctaagactgttttttc

SEQ ID NO: 2851658 - DNA, 25 bp, Homo sapien
agcctgaaaagtccgtccacctctg

SEQ ID NO: 2851659 - DNA, 25 bp, Homo sapien
gcaaggccatgatggacatgcaggc

SEQ ID NO: 2851660 - DNA, 25 bp, Homo sapien
caaggccatgatggacatgcaggcg

SEQ ID NO: 2851661 - DNA, 25 bp, Homo sapien
aggccatgatggacatgcaggcgac

SEQ ID NO: 2851662 - DNA, 25 bp, Homo sapien
agcaaggccatgatggacatgcagg

SEQ ID NO: 2851663 - DNA, 25 bp, Homo sapien
ctggtgtgaagaggaactcatccgg

SEQ ID NO: 2851664 - DNA, 25 bp, Homo sapien
aagaggaactcatccgggggatgcg

SEQ ID NO: 2851665 - DNA, 25 bp, Homo sapien
tgaagaggaactcatccgggggatg

SEQ ID NO: 2851666 - DNA, 25 bp, Homo sapien
cactggtgtgaagaggaactcatcc

SEQ ID NO: 2851667 - DNA, 25 bp, Homo sapien
tgccagagcctggttgtcaaaagcc

SEQ ID NO: 2851668 - DNA, 25 bp, Homo sapien
gagaatcacagaactagctggtaag

SEQ ID NO: 2851669 - DNA, 25 bp, Homo sapien
gctggaccctggtagcagttgctcc

SEQ ID NO: 2851670 - DNA, 25 bp, Homo sapien
caacctcaaatggatagactgtgtc

SEQ ID NO: 2851671 - DNA, 25 bp, Homo sapien
cagagatgggtatgaaggcccagga

SEQ ID NO: 2851672 - DNA, 25 bp, Homo sapien
ctgcagagatgggtatgaaggccca

SEQ ID NO: 2851673 - DNA, 25 bp, Homo sapien
tgcagagatgggtatgaaggcccag

SEQ ID NO: 2851674 - DNA, 25 bp, Homo sapien
agatgggtatgaaggcccaggagcc

SEQ ID NO: 2851675 - DNA, 25 bp, Homo sapien
tgggccctgcactcgtaggtttggt

SEQ ID NO: 2851676 - DNA, 25 bp, Homo sapien
gctctaaggtctcaacagtcagcag

SEQ ID NO: 2851677 - DNA, 25 bp, Homo sapien
gtttggttgtgctctaaggtctcaa

SEQ ID NO: 2851678 - DNA, 25 bp, Homo sapien
cctgcactcgtaggtttggttgtgc

SEQ ID NO: 2851679 - DNA, 25 bp, Homo sapien
ctgcagcacttgggcctcatcacac

SEQ ID NO: 2851680 - DNA, 25 bp, Homo sapien
caggacctcagggtatgggtcatcc

SEQ ID NO: 2851681 - DNA, 25 bp, Homo sapien
ctcagggtatgggtcatcccagacc

SEQ ID NO: 2851682 - DNA, 25 bp, Homo sapien
ggtatgggtcatcccagacctgcag

SEQ ID NO: 2851683 - DNA, 25 bp, Homo sapien
ctgcactgcagccatgtcacgttgg

SEQ ID NO: 2851684 - DNA, 25 bp, Homo sapien
tgcactgcagccatgtcacgttggg

SEQ ID NO: 2851685 - DNA, 25 bp, Homo sapien
ccactgcactgcagccatgtcacgt

SEQ ID NO: 2851686 - DNA, 25 bp, Homo sapien
ctatcagtgtggccactgcactgca

SEQ ID NO: 2851687 - DNA, 25 bp, Homo sapien
gcacacaaaagggtgccagagccgt

SEQ ID NO: 2851688 - DNA, 25 bp, Homo sapien
atgtccatatgacgcttacctctgg

SEQ ID NO: 2851689 - DNA, 25 bp, Homo sapien
tgaatgtccatatgacgcttacctc

SEQ ID NO: 2851690 - DNA, 25 bp, Homo sapien
gccagagccgttgatgaatgtccat

SEQ ID NO: 2851691 - DNA, 25 bp, Homo sapien
caggaaggagtagcggccagcctca

SEQ ID NO: 2851692 - DNA, 25 bp, Homo sapien
atcgaagggtgagctcaaacgtcag

SEQ ID NO: 2851693 - DNA, 25 bp, Homo sapien
ggtgagctcaaacgtcagagctctc

SEQ ID NO: 2851694 - DNA, 25 bp, Homo sapien
tcctgggtttctggccaggaaggag

SEQ ID NO: 2851695 - DNA, 25 bp, Homo sapien
cttcaggcggggcagagagagggtg

SEQ ID NO: 2851696 - DNA, 25 bp, Homo sapien
cggggcagagagagggtgaaggtgt

SEQ ID NO: 2851697 - DNA, 25 bp, Homo sapien
gggcagagagagggtgaaggtgtgc

SEQ ID NO: 2851698 - DNA, 25 bp, Homo sapien
tcaggcggggcagagagagggtgaa

SEQ ID NO: 2851699 - DNA, 25 bp, Homo sapien
ccatctggttgtcgggctgtgtaga

SEQ ID NO: 2851700 - DNA, 25 bp, Homo sapien
ctgtgtagacgggagctgataagtg

SEQ ID NO: 2851701 - DNA, 25 bp, Homo sapien
tgtagacgggagctgataagtggta

SEQ ID NO: 2851702 - DNA, 25 bp, Homo sapien
gtagacgggagctgataagtggtac

SEQ ID NO: 2851703 - DNA, 25 bp, Homo sapien
gtggtagcattagcaagcttgggct

SEQ ID NO: 2851704 - DNA, 25 bp, Homo sapien
cttgggctcaggctggtggtcagaa

SEQ ID NO: 2851705 - DNA, 25 bp, Homo sapien
tagcattagcaagcttgggctcagg

SEQ ID NO: 2851706 - DNA, 25 bp, Homo sapien
taggtccagttaaaaccttgcaggc

SEQ ID NO: 2851707 - DNA, 25 bp, Homo sapien
gtaatacagctgctcttgttgaatc

SEQ ID NO: 2851708 - DNA, 25 bp, Homo sapien
gctactaactagtttctcctaatga

SEQ ID NO: 2851709 - DNA, 25 bp, Homo sapien
gaatctcaggcaagggaattgtggc

SEQ ID NO: 2851710 - DNA, 25 bp, Homo sapien
cgtgcctgtcatggtagcccctgac

SEQ ID NO: 2851711 - DNA, 25 bp, Homo sapien
cattattcagcgtggcgttcaaggc

SEQ ID NO: 2851712 - DNA, 25 bp, Homo sapien
tcaaggctctcaatcaaatcaggtc

SEQ ID NO: 2851713 - DNA, 25 bp, Homo sapien
tcaaaagccctctatggagtcccat

SEQ ID NO: 2851714 - DNA, 25 bp, Homo sapien
catgagggagtctctactcagtgct

SEQ ID NO: 2851715 - DNA, 25 bp, Homo sapien
ttggtaacggttattatgaaagtca

SEQ ID NO: 2851716 - DNA, 25 bp, Homo sapien
gccacgcaggagtagttgccggcat

SEQ ID NO: 2851717 - DNA, 25 bp, Homo sapien
aaagtcagattgttgagggattgcg

SEQ ID NO: 2851718 - DNA, 25 bp, Homo sapien
tctacttgatcgaggttgagggtca

SEQ ID NO: 2851719 - DNA, 25 bp, Homo sapien
tcaaagttaacatcaacgctgctgg

SEQ ID NO: 2851720 - DNA, 25 bp, Homo sapien
agttaacatcaacgctgctggctga

SEQ ID NO: 2851721 - DNA, 25 bp, Homo sapien
tggctgagcacacgatctgggcagc

SEQ ID NO: 2851722 - DNA, 25 bp, Homo sapien
ctggctgagcacacgatctgggcag

SEQ ID NO: 2851723 - DNA, 25 bp, Homo sapien
ggcaccagtgtcaaggctgggggcc

SEQ ID NO: 2851724 - DNA, 25 bp, Homo sapien
caggcaccagtgtcaaggctggggg

SEQ ID NO: 2851725 - DNA, 25 bp, Homo sapien
ctgcaggcaccagtgtcaaggctgg

SEQ ID NO: 2851726 - DNA, 25 bp, Homo sapien
tgcaggcaccagtgtcaaggctggg

SEQ ID NO: 2851727 - DNA, 25 bp, Homo sapien
gaacttggccctgtggatggtgaag

SEQ ID NO: 2851728 - DNA, 25 bp, Homo sapien
ctttctgcactttcagccggatgct

SEQ ID NO: 2851729 - DNA, 25 bp, Homo sapien
tctgcactttcagccggatgctgat

SEQ ID NO: 2851730 - DNA, 25 bp, Homo sapien
gcactgcattgatagtcctggctct

SEQ ID NO: 2851731 - DNA, 25 bp, Homo sapien
agtagtgcgtcctggtcctcgaaca

SEQ ID NO: 2851732 - DNA, 25 bp, Homo sapien
tcgaacacgaccacctcctgtgcta

SEQ ID NO: 2851733 - DNA, 25 bp, Homo sapien
ctgcttccagcaccgggtctgtgag

SEQ ID NO: 2851734 - DNA, 25 bp, Homo sapien
cctgtgctagcacgttccagggccg

SEQ ID NO: 2851735 - DNA, 25 bp, Homo sapien
ggtcaccgttgctcctggcttcacg

SEQ ID NO: 2851736 - DNA, 25 bp, Homo sapien
gggacactgggctctatcactggga

SEQ ID NO: 2851737 - DNA, 25 bp, Homo sapien
gccatcagagtacagggtccagtga

SEQ ID NO: 2851738 - DNA, 25 bp, Homo sapien
gcagcgataggtccccgtgttttgg

SEQ ID NO: 2851739 - DNA, 25 bp, Homo sapien
ccaagctgtggccaccagcaggagc

SEQ ID NO: 2851740 - DNA, 25 bp, Homo sapien
catgccaagctgtggccaccagcag

SEQ ID NO: 2851741 - DNA, 25 bp, Homo sapien
aagctgtggccaccagcaggagcag

SEQ ID NO: 2851742 - DNA, 25 bp, Homo sapien
tgccaagctgtggccaccagcagga

SEQ ID NO: 2851743 - DNA, 25 bp, Homo sapien
cactggctgtttgtcttgttttcct

SEQ ID NO: 2851744 - DNA, 25 bp, Homo sapien
tcagctactagctccgcagggatcg

SEQ ID NO: 2851745 - DNA, 25 bp, Homo sapien
acagagctctcagctactagctccg

SEQ ID NO: 2851746 - DNA, 25 bp, Homo sapien
agggatcgggacactggacacacgt

SEQ ID NO: 2851747 - DNA, 25 bp, Homo sapien
tgagcttggggggagctagctaagt

SEQ ID NO: 2851748 - DNA, 25 bp, Homo sapien
gctagctaagtttggggcccttcta

SEQ ID NO: 2851749 - DNA, 25 bp, Homo sapien
caagagggaggggtcgcagtctggg

SEQ ID NO: 2851750 - DNA, 25 bp, Homo sapien
gcttggggggagctagctaagtttg

SEQ ID NO: 2851751 - DNA, 25 bp, Homo sapien
gaccagatcaacaggcttattagaa

SEQ ID NO: 2851752 - DNA, 25 bp, Homo sapien
gagatctatactgttggaaaacgct

SEQ ID NO: 2851753 - DNA, 25 bp, Homo sapien
taaatgaactaatctacaagcgtgg

SEQ ID NO: 2851754 - DNA, 25 bp, Homo sapien
ggtaccccaatctgaagtcagtaaa

SEQ ID NO: 2851755 - DNA, 25 bp, Homo sapien
atagaagtgggatcgccgggtcaaa

SEQ ID NO: 2851756 - DNA, 25 bp, Homo sapien
tgcaaacaatgctcagtggacatcc

SEQ ID NO: 2851757 - DNA, 25 bp, Homo sapien
tgttcccctaagaaggccgtgagga

SEQ ID NO: 2851758 - DNA, 25 bp, Homo sapien
ggacatccttgcacatgaatcgttg

SEQ ID NO: 2851759 - DNA, 25 bp, Homo sapien
tctctcgtggctccctgagtttcct

SEQ ID NO: 2851760 - DNA, 25 bp, Homo sapien
agtctctcgtggctccctgagtttc

SEQ ID NO: 2851761 - DNA, 25 bp, Homo sapien
ctcgtggctccctgagtttcctggc

SEQ ID NO: 2851762 - DNA, 25 bp, Homo sapien
ttatagtctctcgtggctccctgag

SEQ ID NO: 2851763 - DNA, 25 bp, Homo sapien
cagaatccatgaggttcacgtgaag

SEQ ID NO: 2851764 - DNA, 25 bp, Homo sapien
tgctaattacatagaagccacttgc

SEQ ID NO: 2851765 - DNA, 25 bp, Homo sapien
gctgtgagaccctcatcagctgcag

SEQ ID NO: 2851766 - DNA, 25 bp, Homo sapien
gagacggtgccctgattcaaagaag

SEQ ID NO: 2851767 - DNA, 25 bp, Homo sapien
gtggcggaagaattgtgcagtccaa

SEQ ID NO: 2851768 - DNA, 25 bp, Homo sapien
gaaaatcccagctcacccgtcttcc

SEQ ID NO: 2851769 - DNA, 25 bp, Homo sapien
cggaagaattgtgcagtccaagtgg

SEQ ID NO: 2851770 - DNA, 25 bp, Homo sapien
aagaattgtgcagtccaagtggctc

SEQ ID NO: 2851771 - DNA, 25 bp, Homo sapien
tcacttcgtgctctcacgcttttgg

SEQ ID NO: 2851772 - DNA, 25 bp, Homo sapien
cttcgtgctctcacgcttttggaca

SEQ ID NO: 2851773 - DNA, 25 bp, Homo sapien
ctggccgcagttccctccgcttcct

SEQ ID NO: 2851774 - DNA, 25 bp, Homo sapien
gtgctctcacgcttttggacactct

SEQ ID NO: 2851775 - DNA, 25 bp, Homo sapien
ggacctggaatctgggctctagcag

SEQ ID NO: 2851776 - DNA, 25 bp, Homo sapien
tgtcacagagcacgccggcctcaat

SEQ ID NO: 2851777 - DNA, 25 bp, Homo sapien
gcctgtcacagagcacgccggcctc

SEQ ID NO: 2851778 - DNA, 25 bp, Homo sapien
tgggctctagcagctgcctgtcaca

SEQ ID NO: 2851779 - DNA, 25 bp, Homo sapien
cacagatagaaaaactcaacagcat

SEQ ID NO: 2851780 - DNA, 25 bp, Homo sapien
tggtaccgtattgagaacccactct

SEQ ID NO: 2851781 - DNA, 25 bp, Homo sapien
aaatgtgagttaacgtgagtcctaa

SEQ ID NO: 2851782 - DNA, 25 bp, Homo sapien
gattatatctttggtaccgtattga

SEQ ID NO: 2851783 - DNA, 25 bp, Homo sapien
gatcccagggaagtaaggtgccaac

SEQ ID NO: 2851784 - DNA, 25 bp, Homo sapien
tggggatcccagggaagtaaggtgc

SEQ ID NO: 2851785 - DNA, 25 bp, Homo sapien
ctggggatcccagggaagtaaggtg

SEQ ID NO: 2851786 - DNA, 25 bp, Homo sapien
gggatcccagggaagtaaggtgcca

SEQ ID NO: 2851787 - DNA, 25 bp, Homo sapien
cccagaggggttgagcttcctgcac

SEQ ID NO: 2851788 - DNA, 25 bp, Homo sapien
gcgtcttggctacaaccctgactcc

SEQ ID NO: 2851789 - DNA, 25 bp, Homo sapien
ttggctacaaccctgactcccctgg

SEQ ID NO: 2851790 - DNA, 25 bp, Homo sapien
tcccctggcacctccaatgcccact

SEQ ID NO: 2851791 - DNA, 25 bp, Homo sapien
tgagatgtcactgctaggtctgggc

SEQ ID NO: 2851792 - DNA, 25 bp, Homo sapien
tcactctaagtcaaggcctgtgcag

SEQ ID NO: 2851793 - DNA, 25 bp, Homo sapien
tgtgatctggaatctcccaggagcc

SEQ ID NO: 2851794 - DNA, 25 bp, Homo sapien
tagtgaaagaggtcccgtggtcttc

SEQ ID NO: 2851795 - DNA, 25 bp, Homo sapien
cagccagggagagaatcctagattc

SEQ ID NO: 2851796 - DNA, 25 bp, Homo sapien
gaggcaacactgctcaaggctaggc

SEQ ID NO: 2851797 - DNA, 25 bp, Homo sapien
tatggctgcgtgtgctccaagtgcc

SEQ ID NO: 2851798 - DNA, 25 bp, Homo sapien
gacacaggcacttgctatggctgcg

SEQ ID NO: 2851799 - DNA, 25 bp, Homo sapien
cgaatccggcaactgttccagctct

SEQ ID NO: 2851800 - DNA, 25 bp, Homo sapien
ctgcttccgcccgaggcgcagggca

SEQ ID NO: 2851801 - DNA, 25 bp, Homo sapien
tgcttccgcccgaggcgcagggcac

SEQ ID NO: 2851802 - DNA, 25 bp, Homo sapien
gcagggcaccccgaatccggcaact

SEQ ID NO: 2851803 - DNA, 25 bp, Homo sapien
ggctgtcacaggagatggttgagga

SEQ ID NO: 2851804 - DNA, 25 bp, Homo sapien
tggttgaggaggtgttgacttcatt

SEQ ID NO: 2851805 - DNA, 25 bp, Homo sapien
tctggctctggttcgtcctggggct

SEQ ID NO: 2851806 - DNA, 25 bp, Homo sapien
tgtcacaggagatggttgaggaggt

SEQ ID NO: 2851807 - DNA, 25 bp, Homo sapien
agtgggccctcgtcagcaacctcgg

SEQ ID NO: 2851808 - DNA, 25 bp, Homo sapien
ggatgatatagtcgttgtcaccctc

SEQ ID NO: 2851809 - DNA, 25 bp, Homo sapien
cattgggctgcacggcagtatagag

SEQ ID NO: 2851810 - DNA, 25 bp, Homo sapien
cctcgtcagcaacctcgggtttggg

SEQ ID NO: 2851811 - DNA, 25 bp, Homo sapien
tggctgggtggtcactcctcagaaa

SEQ ID NO: 2851812 - DNA, 25 bp, Homo sapien
gggtggtcactcctcagaaactcct

SEQ ID NO: 2851813 - DNA, 25 bp, Homo sapien
aggatggctgggtggtcactcctca

SEQ ID NO: 2851814 - DNA, 25 bp, Homo sapien
gaaggatggctgggtggtcactcct

SEQ ID NO: 2851815 - DNA, 25 bp, Homo sapien
cttcgcccaacagtctctcgagaag

SEQ ID NO: 2851816 - DNA, 25 bp, Homo sapien
acagtctctcgagaagcagcaccag

SEQ ID NO: 2851817 - DNA, 25 bp, Homo sapien
gcccaacagtctctcgagaagcagc

SEQ ID NO: 2851818 - DNA, 25 bp, Homo sapien
tttgtaaccttcgcccaacagtctc

SEQ ID NO: 2851819 - DNA, 25 bp, Homo sapien
taaccccgtttgatggcattgtaga

SEQ ID NO: 2851820 - DNA, 25 bp, Homo sapien
actgctcgttcatgggcagctctgg

SEQ ID NO: 2851821 - DNA, 25 bp, Homo sapien
tctcgtcggaggcatgggcaggctg

SEQ ID NO: 2851822 - DNA, 25 bp, Homo sapien
aggctgggccatgcggtaaccccgt

SEQ ID NO: 2851823 - DNA, 25 bp, Homo sapien
gaaggaccacacgtcgctcagggtg

SEQ ID NO: 2851824 - DNA, 25 bp, Homo sapien
tgaagatgctctccggagccatcca

SEQ ID NO: 2851825 - DNA, 25 bp, Homo sapien
cacacgtcgctcagggtggtgtaga

SEQ ID NO: 2851826 - DNA, 25 bp, Homo sapien
ttgaagatgctctccggagccatcc

SEQ ID NO: 2851827 - DNA, 25 bp, Homo sapien
tggtcaggagggaatctgttcctgc

SEQ ID NO: 2851828 - DNA, 25 bp, Homo sapien
aggagggaatctgttcctgcggtca

SEQ ID NO: 2851829 - DNA, 25 bp, Homo sapien
tcaggagggaatctgttcctgcggt

SEQ ID NO: 2851830 - DNA, 25 bp, Homo sapien
ggtcaggagggaatctgttcctgcg

SEQ ID NO: 2851831 - DNA, 25 bp, Homo sapien
ttcacagatgagcacgttcctagcc

SEQ ID NO: 2851832 - DNA, 25 bp, Homo sapien
cctttggagatgtaattcgagtccc

SEQ ID NO: 2851833 - DNA, 25 bp, Homo sapien
agtcccgcatgatgtctcgagccag

SEQ ID NO: 2851834 - DNA, 25 bp, Homo sapien
atgagcacgttcctagccgccaggt

SEQ ID NO: 2851835 - DNA, 25 bp, Homo sapien
ccacagcccccactctgccccacca

SEQ ID NO: 2851836 - DNA, 25 bp, Homo sapien
ctctgccccaccaacaccacacgta

SEQ ID NO: 2851837 - DNA, 25 bp, Homo sapien
cagcccccactctgccccaccaaca

SEQ ID NO: 2851838 - DNA, 25 bp, Homo sapien
tctgccccaccaacaccacacgtac

SEQ ID NO: 2851839 - DNA, 25 bp, Homo sapien
gatcaaagttgctcggcaggtcctc

SEQ ID NO: 2851840 - DNA, 25 bp, Homo sapien
gaggccagaaactccatgccattgg

SEQ ID NO: 2851841 - DNA, 25 bp, Homo sapien
tgaagcccacgaggtccatgtagct

SEQ ID NO: 2851842 - DNA, 25 bp, Homo sapien
catgtagcttagcactggagactcg

SEQ ID NO: 2851843 - DNA, 25 bp, Homo sapien
tgggcacatagtccaccgactcgtc

SEQ ID NO: 2851844 - DNA, 25 bp, Homo sapien
gctctccccggtcaaggacacatgg

SEQ ID NO: 2851845 - DNA, 25 bp, Homo sapien
tcatgtccatgtagccaccgtcgct

SEQ ID NO: 2851846 - DNA, 25 bp, Homo sapien
tagttggaggactcgatgtctgcat

SEQ ID NO: 2851847 - DNA, 25 bp, Homo sapien
tgggggtaaaggagcatcacaggag

SEQ ID NO: 2851848 - DNA, 25 bp, Homo sapien
ggggtaaaggagcatcacaggagag

SEQ ID NO: 2851849 - DNA, 25 bp, Homo sapien
ctgggggtaaaggagcatcacagga

SEQ ID NO: 2851850 - DNA, 25 bp, Homo sapien
gggtaaaggagcatcacaggagagc

SEQ ID NO: 2851851 - DNA, 25 bp, Homo sapien
gtctatcccagtaggaaagcctgtg

SEQ ID NO: 2851852 - DNA, 25 bp, Homo sapien
agtctatcccagtaggaaagcctgt

SEQ ID NO: 2851853 - DNA, 25 bp, Homo sapien
tctatcccagtaggaaagcctgtgg

SEQ ID NO: 2851854 - DNA, 25 bp, Homo sapien
tctccgtagcggcagtactcagtga

SEQ ID NO: 2851855 - DNA, 25 bp, Homo sapien
tttgttgcggtgcaggtagtccacc

SEQ ID NO: 2851856 - DNA, 25 bp, Homo sapien
gcccaacgggcagagcattgctgta

SEQ ID NO: 2851857 - DNA, 25 bp, Homo sapien
cattgctgtagagctccgcgctggg

SEQ ID NO: 2851858 - DNA, 25 bp, Homo sapien
tggccttggtggtgggcactttccc

SEQ ID NO: 2851859 - DNA, 25 bp, Homo sapien
tgtgctgttgtgcaaggcctgaggg

SEQ ID NO: 2851860 - DNA, 25 bp, Homo sapien
ggcctggccttggtggtgggcactt

SEQ ID NO: 2851861 - DNA, 25 bp, Homo sapien
gagtgtgctgttgtgcaaggcctga

SEQ ID NO: 2851862 - DNA, 25 bp, Homo sapien
agctccgacataagggcttgcttct

SEQ ID NO: 2851863 - DNA, 25 bp, Homo sapien
aacaggttgaccacgttcaggtggg

SEQ ID NO: 2851864 - DNA, 25 bp, Homo sapien
gcccaaggtgactcatgatcttcag

SEQ ID NO: 2851865 - DNA, 25 bp, Homo sapien
tcttcagctccgacataagggcttg

SEQ ID NO: 2851866 - DNA, 25 bp, Homo sapien
cccaggccaggcccagtcatggagg

SEQ ID NO: 2851867 - DNA, 25 bp, Homo sapien
gggccccaggccaggcccagtcatg

SEQ ID NO: 2851868 - DNA, 25 bp, Homo sapien
tgaggaaaatgggggccccaggcca

SEQ ID NO: 2851869 - DNA, 25 bp, Homo sapien
ggccccaggccaggcccagtcatgg

SEQ ID NO: 2851870 - DNA, 25 bp, Homo sapien
gtgtgatggcccctctagtgcctgc

SEQ ID NO: 2851871 - DNA, 25 bp, Homo sapien
gaggaacgctctttcccaaaccaga

SEQ ID NO: 2851872 - DNA, 25 bp, Homo sapien
caccacaggagcctattctgactct

SEQ ID NO: 2851873 - DNA, 25 bp, Homo sapien
gggtgagcacccacactctgaggag

SEQ ID NO: 2851874 - DNA, 25 bp, Homo sapien
cactttcatcgtggcctgagaatgg

SEQ ID NO: 2851875 - DNA, 25 bp, Homo sapien
tgagaatggctcaggccatgagccg

SEQ ID NO: 2851876 - DNA, 25 bp, Homo sapien
tggctcaggccatgagccgtggcct

SEQ ID NO: 2851877 - DNA, 25 bp, Homo sapien
catcttgacggccactttcatcgtg

SEQ ID NO: 2851878 - DNA, 25 bp, Homo sapien
ctgcccaaaggccccagagccgagg

SEQ ID NO: 2851879 - DNA, 25 bp, Homo sapien
cccaaaggccccagagccgagggtg

SEQ ID NO: 2851880 - DNA, 25 bp, Homo sapien
ccaaaggccccagagccgagggtgc

SEQ ID NO: 2851881 - DNA, 25 bp, Homo sapien
aaaggccccagagccgagggtgcgt

SEQ ID NO: 2851882 - DNA, 25 bp, Homo sapien
tcatggccgtcagagctcacagact

SEQ ID NO: 2851883 - DNA, 25 bp, Homo sapien
ccacgtggagtcatagggcagctgc

SEQ ID NO: 2851884 - DNA, 25 bp, Homo sapien
tccacgtagatgtactcatggccgt

SEQ ID NO: 2851885 - DNA, 25 bp, Homo sapien
ttccatcggatctcgtaacgtggct

SEQ ID NO: 2851886 - DNA, 25 bp, Homo sapien
tctgccaaagcatgatgaggatgat

SEQ ID NO: 2851887 - DNA, 25 bp, Homo sapien
ccgagtggccggtggactgagtgag

SEQ ID NO: 2851888 - DNA, 25 bp, Homo sapien
acagctcggtcagactccaagctcc

SEQ ID NO: 2851889 - DNA, 25 bp, Homo sapien
gggctgccacagctcggtcagactc

SEQ ID NO: 2851890 - DNA, 25 bp, Homo sapien
ctctgagtccacacccttgctgggg

SEQ ID NO: 2851891 - DNA, 25 bp, Homo sapien
ggtaggcattgttcatacgcacaga

SEQ ID NO: 2851892 - DNA, 25 bp, Homo sapien
caaaagcatcaagacactggtaggc

SEQ ID NO: 2851893 - DNA, 25 bp, Homo sapien
cataaggacgggcagctagatacac

SEQ ID NO: 2851894 - DNA, 25 bp, Homo sapien
tacaggaattgtgtacccaccggta

SEQ ID NO: 2851895 - DNA, 25 bp, Homo sapien
tgctgcagacgcagtgtgctcacca

SEQ ID NO: 2851896 - DNA, 25 bp, Homo sapien
tcttcggaactgttccccagcagcg

SEQ ID NO: 2851897 - DNA, 25 bp, Homo sapien
tacgtcacgttagtctccagctggc

SEQ ID NO: 2851898 - DNA, 25 bp, Homo sapien
cagtggccgatccacgtgctgcaga

SEQ ID NO: 2851899 - DNA, 25 bp, Homo sapien
cactgtcagggtggctctcacttag

SEQ ID NO: 2851900 - DNA, 25 bp, Homo sapien
ccggccacgacagcggactgtctgt

SEQ ID NO: 2851901 - DNA, 25 bp, Homo sapien
cttagctccagcactcggacaggga

SEQ ID NO: 2851902 - DNA, 25 bp, Homo sapien
acgacagcggactgtctgttcccca

SEQ ID NO: 2851903 - DNA, 25 bp, Homo sapien
gatctgtagctggaaggagagctgg

SEQ ID NO: 2851904 - DNA, 25 bp, Homo sapien
cattgatctgtagctggaaggagag

SEQ ID NO: 2851905 - DNA, 25 bp, Homo sapien
tctgtagctggaaggagagctggac

SEQ ID NO: 2851906 - DNA, 25 bp, Homo sapien
ttgatctgtagctggaaggagagct

SEQ ID NO: 2851907 - DNA, 25 bp, Homo sapien
ttcacgcgaaccagtgtcagctctg

SEQ ID NO: 2851908 - DNA, 25 bp, Homo sapien
accttcacgcgaaccagtgtcagct

SEQ ID NO: 2851909 - DNA, 25 bp, Homo sapien
tcagcatcctcatggaaggcccgca

SEQ ID NO: 2851910 - DNA, 25 bp, Homo sapien
cgcatggtgtagtggccagcctctg

SEQ ID NO: 2851911 - DNA, 25 bp, Homo sapien
agaatgggatgggagagcgagctgc

SEQ ID NO: 2851912 - DNA, 25 bp, Homo sapien
gaatgggatgggagagcgagctgct

SEQ ID NO: 2851913 - DNA, 25 bp, Homo sapien
aatgggatgggagagcgagctgctc

SEQ ID NO: 2851914 - DNA, 25 bp, Homo sapien
tgggatgggagagcgagctgctcac

SEQ ID NO: 2851915 - DNA, 25 bp, Homo sapien
tttgaaccacaggacagtgggcggt

SEQ ID NO: 2851916 - DNA, 25 bp, Homo sapien
tggacagggcgatttcgccagcgct

SEQ ID NO: 2851917 - DNA, 25 bp, Homo sapien
tctccgacacgttgcgcgtggacag

SEQ ID NO: 2851918 - DNA, 25 bp, Homo sapien
gtgggtaggcctcgaacactacctg

SEQ ID NO: 2851919 - DNA, 25 bp, Homo sapien
ctcccaggagccgcacgtagccgct

SEQ ID NO: 2851920 - DNA, 25 bp, Homo sapien
ctctcccaggagccgcacgtagccg

SEQ ID NO: 2851921 - DNA, 25 bp, Homo sapien
ctcagcaaattgtagtgtgcccacc

SEQ ID NO: 2851922 - DNA, 25 bp, Homo sapien
cccaggagccgcacgtagccgctct

SEQ ID NO: 2851923 - DNA, 25 bp, Homo sapien
tgccagccatggagtttccggagct

SEQ ID NO: 2851924 - DNA, 25 bp, Homo sapien
cagccatggagtttccggagctgag

SEQ ID NO: 2851925 - DNA, 25 bp, Homo sapien
cgtgccagccatggagtttccggag

SEQ ID NO: 2851926 - DNA, 25 bp, Homo sapien
agggcaccaactgaatcccaaagga

SEQ ID NO: 2851927 - DNA, 25 bp, Homo sapien
tgtaggtccccgagtcttctaactc

SEQ ID NO: 2851928 - DNA, 25 bp, Homo sapien
ttcacactctccgtcacattgcagg

SEQ ID NO: 2851929 - DNA, 25 bp, Homo sapien
agaggaagtcagtcaccggctccac

SEQ ID NO: 2851930 - DNA, 25 bp, Homo sapien
gagcggatgtggtaaggcatatcca

SEQ ID NO: 2851931 - DNA, 25 bp, Homo sapien
gatatccacccgttcctggcccctc

SEQ ID NO: 2851932 - DNA, 25 bp, Homo sapien
gcaagccagatatccacccgttcct

SEQ ID NO: 2851933 - DNA, 25 bp, Homo sapien
aagccagatatccacccgttcctgg

SEQ ID NO: 2851934 - DNA, 25 bp, Homo sapien
ctgcagcaacaggttgggcaggccc

SEQ ID NO: 2851935 - DNA, 25 bp, Homo sapien
gaagttgaccacctcattcccgatc

SEQ ID NO: 2851936 - DNA, 25 bp, Homo sapien
ggtatgtccactcgaagttgaccac

SEQ ID NO: 2851937 - DNA, 25 bp, Homo sapien
atgttctcaccctggcggaccacag

SEQ ID NO: 2851938 - DNA, 25 bp, Homo sapien
agtctgcactgcgttcacagagacg

SEQ ID NO: 2851939 - DNA, 25 bp, Homo sapien
gccaagtactattctggacactgga

SEQ ID NO: 2851940 - DNA, 25 bp, Homo sapien
taggcagccattgttatccccacgt

SEQ ID NO: 2851941 - DNA, 25 bp, Homo sapien
gtctggaaatcaaagtaccctctgg

SEQ ID NO: 2851942 - DNA, 25 bp, Homo sapien
taccctctggagatctatgtacagg

SEQ ID NO: 2851943 - DNA, 25 bp, Homo sapien
tcttctcgtgcagtgtcaccaccag

SEQ ID NO: 2851944 - DNA, 25 bp, Homo sapien
tactcggcatggaatggtgatctca

SEQ ID NO: 2851945 - DNA, 25 bp, Homo sapien
tgagaaagatgaatagttcctcggc

SEQ ID NO: 2851946 - DNA, 25 bp, Homo sapien
catcattagggaggaagcccacggt

SEQ ID NO: 2851947 - DNA, 25 bp, Homo sapien
cacaaagatgtagagccgtttccgc

SEQ ID NO: 2851948 - DNA, 25 bp, Homo sapien
tctagcccagtgaggttggtcagtg

SEQ ID NO: 2851949 - DNA, 25 bp, Homo sapien
aagtattctcccgtgtctagcccag

SEQ ID NO: 2851950 - DNA, 25 bp, Homo sapien
tgaacccgagcaggtcagaacgaag

SEQ ID NO: 2851951 - DNA, 25 bp, Homo sapien
agctggcatcgcacccggaagccgc

SEQ ID NO: 2851952 - DNA, 25 bp, Homo sapien
gagctggcatcgcacccggaagccg

SEQ ID NO: 2851953 - DNA, 25 bp, Homo sapien
ctggcatcgcacccggaagccgcat

SEQ ID NO: 2851954 - DNA, 25 bp, Homo sapien
cagagctggcatcgcacccggaagc

SEQ ID NO: 2851955 - DNA, 25 bp, Homo sapien
agccaagtatgccaagagtctgcct

SEQ ID NO: 2851956 - DNA, 25 bp, Homo sapien
ccaccaggagccaagtatgccaaga

SEQ ID NO: 2851957 - DNA, 25 bp, Homo sapien
gagaccaccaggagccaagtatgcc

SEQ ID NO: 2851958 - DNA, 25 bp, Homo sapien
ccaggagccaagtatgccaagagtc

SEQ ID NO: 2851959 - DNA, 25 bp, Homo sapien
cattttctgagatgagaatgaggtc

SEQ ID NO: 2851960 - DNA, 25 bp, Homo sapien
ttaggatagggagggtctgtgggca

SEQ ID NO: 2851961 - DNA, 25 bp, Homo sapien
gtgctgaggggacgatgccattttc

SEQ ID NO: 2851962 - DNA, 25 bp, Homo sapien
ctgaggggacgatgccattttctga

SEQ ID NO: 2851963 - DNA, 25 bp, Homo sapien
cttcaatgctctgggccaggagggg

SEQ ID NO: 2851964 - DNA, 25 bp, Homo sapien
ggaggggccagggcttctgtgacat

SEQ ID NO: 2851965 - DNA, 25 bp, Homo sapien
gccaggaggggccagggcttctgtg

SEQ ID NO: 2851966 - DNA, 25 bp, Homo sapien
caggaggggccagggcttctgtgac

SEQ ID NO: 2851967 - DNA, 25 bp, Homo sapien
cctttagcctagaaggcagctggtc

SEQ ID NO: 2851968 - DNA, 25 bp, Homo sapien
tgttctgagccaatgcccagagcac

SEQ ID NO: 2851969 - DNA, 25 bp, Homo sapien
tggacacggatctttggaacataca

SEQ ID NO: 2851970 - DNA, 25 bp, Homo sapien
tcctaacgctctgggtcagaagaca

SEQ ID NO: 2851971 - DNA, 25 bp, Homo sapien
ggttctagtctcacacttgggagca

SEQ ID NO: 2851972 - DNA, 25 bp, Homo sapien
ttaactcaccgtatggccctgggaa

SEQ ID NO: 2851973 - DNA, 25 bp, Homo sapien
gaacttgtcactagaggcctctgtg

SEQ ID NO: 2851974 - DNA, 25 bp, Homo sapien
ggagtagccacacgatgtcctggaa

SEQ ID NO: 2851975 - DNA, 25 bp, Homo sapien
atgcaggttagggcaaagggacagg

SEQ ID NO: 2851976 - DNA, 25 bp, Homo sapien
agatgcaggttagggcaaagggaca

SEQ ID NO: 2851977 - DNA, 25 bp, Homo sapien
gctggggttcccactttttccagca

SEQ ID NO: 2851978 - DNA, 25 bp, Homo sapien
gagatgcaggttagggcaaagggac

SEQ ID NO: 2851979 - DNA, 25 bp, Homo sapien
tcaggagctcacaccactatgggct

SEQ ID NO: 2851980 - DNA, 25 bp, Homo sapien
ccaagcatccttcgggaggagcaga

SEQ ID NO: 2851981 - DNA, 25 bp, Homo sapien
taacagctgagtagaaggacaggca

SEQ ID NO: 2851982 - DNA, 25 bp, Homo sapien
gttgctcacagagcgatcctgggtc

SEQ ID NO: 2851983 - DNA, 25 bp, Homo sapien
gtggggacacttgcgagaggcggga

SEQ ID NO: 2851984 - DNA, 25 bp, Homo sapien
ggccagggctgaaacccaagaagat

SEQ ID NO: 2851985 - DNA, 25 bp, Homo sapien
tgatggtctttcagagacccgccat

SEQ ID NO: 2851986 - DNA, 25 bp, Homo sapien
tggtctttcagagacccgccatgcc

SEQ ID NO: 2851987 - DNA, 25 bp, Homo sapien
ggggtgcacctggaggagggttgga

SEQ ID NO: 2851988 - DNA, 25 bp, Homo sapien
cgcaaggtagggcacgagggcgggg

SEQ ID NO: 2851989 - DNA, 25 bp, Homo sapien
ctccgcaaggtagggcacgagggcg

SEQ ID NO: 2851990 - DNA, 25 bp, Homo sapien
tccgcaaggtagggcacgagggcgg

SEQ ID NO: 2851991 - DNA, 25 bp, Homo sapien
caggggcttgaccaagacagggaca

SEQ ID NO: 2851992 - DNA, 25 bp, Homo sapien
gggcttgaccaagacagggacacac

SEQ ID NO: 2851993 - DNA, 25 bp, Homo sapien
ggcttgaccaagacagggacacaca

SEQ ID NO: 2851994 - DNA, 25 bp, Homo sapien
ggggcttgaccaagacagggacaca

SEQ ID NO: 2851995 - DNA, 25 bp, Homo sapien
tcagaccttgctcggtaattacagc

SEQ ID NO: 2851996 - DNA, 25 bp, Homo sapien
tgaaaagcagttgacaggcaccgac

SEQ ID NO: 2851997 - DNA, 25 bp, Homo sapien
gacgtttgctccttcatcggctgga

SEQ ID NO: 2851998 - DNA, 25 bp, Homo sapien
taggcttcacatagccagacgtttg

SEQ ID NO: 2851999 - DNA, 25 bp, Homo sapien
gtgatggaccagcttggaaaccagg

SEQ ID NO: 2852000 - DNA, 25 bp, Homo sapien
ccagtgatggaccagcttggaaacc

SEQ ID NO: 2852001 - DNA, 25 bp, Homo sapien
gatggaccagcttggaaaccaggag

SEQ ID NO: 2852002 - DNA, 25 bp, Homo sapien
cagtgatggaccagcttggaaacca

SEQ ID NO: 2852003 - DNA, 25 bp, Homo sapien
ttcggtagagaagaccccagtttgc

SEQ ID NO: 2852004 - DNA, 25 bp, Homo sapien
cctctctgagatacgacaaagctgg

SEQ ID NO: 2852005 - DNA, 25 bp, Homo sapien
caccttgggaccgaaatggcagaga

SEQ ID NO: 2852006 - DNA, 25 bp, Homo sapien
ggcagcaacataattccgagtcgga

SEQ ID NO: 2852007 - DNA, 25 bp, Homo sapien
tgtaggcgatgcaggctgactcgtc

SEQ ID NO: 2852008 - DNA, 25 bp, Homo sapien
ctgtggaagtggacgatctgccatt

SEQ ID NO: 2852009 - DNA, 25 bp, Homo sapien
tgggatgccgccagcgtccaggtac

SEQ ID NO: 2852010 - DNA, 25 bp, Homo sapien
agacacgggtctcctccgactgggc

SEQ ID NO: 2852011 - DNA, 25 bp, Homo sapien
gaagcacgctacacccaggctttga

SEQ ID NO: 2852012 - DNA, 25 bp, Homo sapien
gccaagccaggtttgtgagccactt

SEQ ID NO: 2852013 - DNA, 25 bp, Homo sapien
gagaagcaatctgactcgtcccaag

SEQ ID NO: 2852014 - DNA, 25 bp, Homo sapien
ggctctataagcgtccctgacagca

SEQ ID NO: 2852015 - DNA, 25 bp, Homo sapien
agtccacacgggagcttcctcttcg

SEQ ID NO: 2852016 - DNA, 25 bp, Homo sapien
caaccccagtccacacgggagcttc

SEQ ID NO: 2852017 - DNA, 25 bp, Homo sapien
ggagcttcctcttcgctggctcctg

SEQ ID NO: 2852018 - DNA, 25 bp, Homo sapien
cacgggagcttcctcttcgctggct

SEQ ID NO: 2852019 - DNA, 25 bp, Homo sapien
agcaggacatggaacgagagcagac

SEQ ID NO: 2852020 - DNA, 25 bp, Homo sapien
agagcagacaacaggcaccacagag

SEQ ID NO: 2852021 - DNA, 25 bp, Homo sapien
atccagcaggacatggaacgagagc

SEQ ID NO: 2852022 - DNA, 25 bp, Homo sapien
ccagcaggacatggaacgagagcag

SEQ ID NO: 2852023 - DNA, 25 bp, Homo sapien
cagggcctcaggttcgaaggctgtc

SEQ ID NO: 2852024 - DNA, 25 bp, Homo sapien
gcctcaggttcgaaggctgtcatgc

SEQ ID NO: 2852025 - DNA, 25 bp, Homo sapien
aaatagaatcgatggaagtccaggc

SEQ ID NO: 2852026 - DNA, 25 bp, Homo sapien
ggttttcaaaatagaatcgatggaa

SEQ ID NO: 2852027 - DNA, 25 bp, Homo sapien
cctcacaggatcattgaagttagta

SEQ ID NO: 2852028 - DNA, 25 bp, Homo sapien
tcattgaagttagtagatgggaagg

SEQ ID NO: 2852029 - DNA, 25 bp, Homo sapien
gcctgtgaaataggaatgattgcac

SEQ ID NO: 2852030 - DNA, 25 bp, Homo sapien
ggcggcttctcattggacccttgga

SEQ ID NO: 2852031 - DNA, 25 bp, Homo sapien
aacatggacccctgtgacaatagca

SEQ ID NO: 2852032 - DNA, 25 bp, Homo sapien
caacccagggtagaattggagacac

SEQ ID NO: 2852033 - DNA, 25 bp, Homo sapien
caaaggtgccctattgttaacagca

SEQ ID NO: 2852034 - DNA, 25 bp, Homo sapien
tcttctcggagatcctgacagccag

SEQ ID NO: 2852035 - DNA, 25 bp, Homo sapien
ttagccattggtaccccctgaacaa

SEQ ID NO: 2852036 - DNA, 25 bp, Homo sapien
catgcaaagtgagtggatgaggatc

SEQ ID NO: 2852037 - DNA, 25 bp, Homo sapien
tgagttcagcccgattcacagcaca

SEQ ID NO: 2852038 - DNA, 25 bp, Homo sapien
tgaacaacaatccaggcaggacatg

SEQ ID NO: 2852039 - DNA, 25 bp, Homo sapien
ctccattgcttatggcttcaatcag

SEQ ID NO: 2852040 - DNA, 25 bp, Homo sapien
aaatctccattgcttatggcttcaa

SEQ ID NO: 2852041 - DNA, 25 bp, Homo sapien
tcaaaatctccattgcttatggctt

SEQ ID NO: 2852042 - DNA, 25 bp, Homo sapien
tccattgcttatggcttcaatcagc

SEQ ID NO: 2852043 - DNA, 25 bp, Homo sapien
tgaatcccatttgctgagacctggc

SEQ ID NO: 2852044 - DNA, 25 bp, Homo sapien
gggtatacgcatcccttgagcctag

SEQ ID NO: 2852045 - DNA, 25 bp, Homo sapien
tgtaaatccaggtcttggctcccaa

SEQ ID NO: 2852046 - DNA, 25 bp, Homo sapien
ccgataggaattaggcacagagctg

SEQ ID NO: 2852047 - DNA, 25 bp, Homo sapien
tggaaagtccactctgattctgggc

SEQ ID NO: 2852048 - DNA, 25 bp, Homo sapien
tccgggaatgctcccctacagatgg

SEQ ID NO: 2852049 - DNA, 25 bp, Homo sapien
tacagcatgctaagactgaaacggg

SEQ ID NO: 2852050 - DNA, 25 bp, Homo sapien
tgttcacccagacaatccgggaatg

SEQ ID NO: 2852051 - DNA, 25 bp, Homo sapien
catgggctatagtgacactccagga

SEQ ID NO: 2852052 - DNA, 25 bp, Homo sapien
ctacttcatgggctatagtgacact

SEQ ID NO: 2852053 - DNA, 25 bp, Homo sapien
aggaagtcagtccagataaggtgct

SEQ ID NO: 2852054 - DNA, 25 bp, Homo sapien
agtccagataaggtgctgagaccgg

SEQ ID NO: 2852055 - DNA, 25 bp, Homo sapien
cccagtttataaggcaccagagcga

SEQ ID NO: 2852056 - DNA, 25 bp, Homo sapien
gggaatgatgcctcccagtgtgccc

SEQ ID NO: 2852057 - DNA, 25 bp, Homo sapien
ttataaggcaccagagcgaagctct

SEQ ID NO: 2852058 - DNA, 25 bp, Homo sapien
tcccagtgtgcccagtttataaggc

SEQ ID NO: 2852059 - DNA, 25 bp, Homo sapien
tcctcgatggtggtgttggtgctct

SEQ ID NO: 2852060 - DNA, 25 bp, Homo sapien
ctttggtgtcttcatcctcgatggt

SEQ ID NO: 2852061 - DNA, 25 bp, Homo sapien
catcctcgatggtggtgttggtgct

SEQ ID NO: 2852062 - DNA, 25 bp, Homo sapien
tggtgttggtgctctctgaggattc

SEQ ID NO: 2852063 - DNA, 25 bp, Homo sapien
tccccgccccaggttcccagtgcag

SEQ ID NO: 2852064 - DNA, 25 bp, Homo sapien
ctctccccgccccaggttcccagtg

SEQ ID NO: 2852065 - DNA, 25 bp, Homo sapien
caagcacgccctgagcaccctctcc

SEQ ID NO: 2852066 - DNA, 25 bp, Homo sapien
ccccgccccaggttcccagtgcagc

SEQ ID NO: 2852067 - DNA, 25 bp, Homo sapien
taactgaacgctggaactggacttt

SEQ ID NO: 2852068 - DNA, 25 bp, Homo sapien
ccatcgctcttcttgtttcccccac

SEQ ID NO: 2852069 - DNA, 25 bp, Homo sapien
atcgctcttcttgtttcccccactc

SEQ ID NO: 2852070 - DNA, 25 bp, Homo sapien
tcgctcttcttgtttcccccactct

SEQ ID NO: 2852071 - DNA, 25 bp, Homo sapien
catcgctcttcttgtttcccccact

SEQ ID NO: 2852072 - DNA, 25 bp, Homo sapien
agggcgaggacgagcagcatccaca

SEQ ID NO: 2852073 - DNA, 25 bp, Homo sapien
tgagggaggtgtccaacatgtccca

SEQ ID NO: 2852074 - DNA, 25 bp, Homo sapien
agtagagggttaacaacgccaggca

SEQ ID NO: 2852075 - DNA, 25 bp, Homo sapien
aagcgtaaccctctggcttcatggg

SEQ ID NO: 2852076 - DNA, 25 bp, Homo sapien
ccagcatcgtggtgagaatggctcc

SEQ ID NO: 2852077 - DNA, 25 bp, Homo sapien
cggagaagttcctggtggccagcat

SEQ ID NO: 2852078 - DNA, 25 bp, Homo sapien
gttcctggtggccagcatcgtggtg

SEQ ID NO: 2852079 - DNA, 25 bp, Homo sapien
gaagttcctggtggccagcatcgtg

SEQ ID NO: 2852080 - DNA, 25 bp, Homo sapien
ggcagtccacggtctcctgtctgtg

SEQ ID NO: 2852081 - DNA, 25 bp, Homo sapien
aggcagtccacggtctcctgtctgt

SEQ ID NO: 2852082 - DNA, 25 bp, Homo sapien
gtgacagtgtcccattccggcgatg

SEQ ID NO: 2852083 - DNA, 25 bp, Homo sapien
ctgtgatgcgtttggatgggttaat

SEQ ID NO: 2852084 - DNA, 25 bp, Homo sapien
attgatcagatccttggcttccggg

SEQ ID NO: 2852085 - DNA, 25 bp, Homo sapien
atgcgtttggatgggttaatggtca

SEQ ID NO: 2852086 - DNA, 25 bp, Homo sapien
cagagaggccaggtttgcccagcct

SEQ ID NO: 2852087 - DNA, 25 bp, Homo sapien
gaaggggcagagaggccaggtttgc

SEQ ID NO: 2852088 - DNA, 25 bp, Homo sapien
gagaggccaggtttgcccagcctgc

SEQ ID NO: 2852089 - DNA, 25 bp, Homo sapien
ggcagagaggccaggtttgcccagc

SEQ ID NO: 2852090 - DNA, 25 bp, Homo sapien
ctgtgccagaactagagagtggctt

SEQ ID NO: 2852091 - DNA, 25 bp, Homo sapien
cagaactagagagtggcttggcgct

SEQ ID NO: 2852092 - DNA, 25 bp, Homo sapien
cttggcgctggctttcactggaagg

SEQ ID NO: 2852093 - DNA, 25 bp, Homo sapien
gcttggcgctggctttcactggaag

SEQ ID NO: 2852094 - DNA, 25 bp, Homo sapien
cataggcgccggctttgatctgctg

SEQ ID NO: 2852095 - DNA, 25 bp, Homo sapien
atcataggcgccggctttgatctgc

SEQ ID NO: 2852096 - DNA, 25 bp, Homo sapien
gatctgctggtacaggcggtgctgg

SEQ ID NO: 2852097 - DNA, 25 bp, Homo sapien
cggggggtacccaaccagcaggatg

SEQ ID NO: 2852098 - DNA, 25 bp, Homo sapien
ccacaggtccacaggcttcccgtac

SEQ ID NO: 2852099 - DNA, 25 bp, Homo sapien
ttcccgtacgggtccttccgcagca

SEQ ID NO: 2852100 - DNA, 25 bp, Homo sapien
caggtccacaggcttcccgtacggg

SEQ ID NO: 2852101 - DNA, 25 bp, Homo sapien
cacaagcccacaggtccacaggctt

SEQ ID NO: 2852102 - DNA, 25 bp, Homo sapien
tggggagagatatccaggagtccct

SEQ ID NO: 2852103 - DNA, 25 bp, Homo sapien
ctggggagagatatccaggagtccc

SEQ ID NO: 2852104 - DNA, 25 bp, Homo sapien
gacacatacacagaggttgtctcgt

SEQ ID NO: 2852105 - DNA, 25 bp, Homo sapien
acacagaggttgtctcgtaagtaac

SEQ ID NO: 2852106 - DNA, 25 bp, Homo sapien
catacacagaggttgtctcgtaagt

SEQ ID NO: 2852107 - DNA, 25 bp, Homo sapien
cacatacacagaggttgtctcgtaa

SEQ ID NO: 2852108 - DNA, 25 bp, Homo sapien
ctccccctccacctctatggccagg

SEQ ID NO: 2852109 - DNA, 25 bp, Homo sapien
ggcacccttgagcttggaggccagc

SEQ ID NO: 2852110 - DNA, 25 bp, Homo sapien
actgcggcacccttgagcttggagg

SEQ ID NO: 2852111 - DNA, 25 bp, Homo sapien
agcttcactgcggcacccttgagct

SEQ ID NO: 2852112 - DNA, 25 bp, Homo sapien
caggtcccggtgcaccacccccatc

SEQ ID NO: 2852113 - DNA, 25 bp, Homo sapien
acccccatctggtggcagtgcagca

SEQ ID NO: 2852114 - DNA, 25 bp, Homo sapien
tcccggtgcaccacccccatctggt

SEQ ID NO: 2852115 - DNA, 25 bp, Homo sapien
gcaccacccccatctggtggcagtg

SEQ ID NO: 2852116 - DNA, 25 bp, Homo sapien
ctggcatccgcctcactgtaatact

SEQ ID NO: 2852117 - DNA, 25 bp, Homo sapien
gccacgatatcttcaaacagttccc

SEQ ID NO: 2852118 - DNA, 25 bp, Homo sapien
tcactgtaatactcccgggccacga

SEQ ID NO: 2852119 - DNA, 25 bp, Homo sapien
aatactcccgggccacgatatcttc

SEQ ID NO: 2852120 - DNA, 25 bp, Homo sapien
aggtcgaagatcaggtagtggtgtc

SEQ ID NO: 2852121 - DNA, 25 bp, Homo sapien
gaagatcaggtagtggtgtccctcc

SEQ ID NO: 2852122 - DNA, 25 bp, Homo sapien
tcgaagatcaggtagtggtgtccct

SEQ ID NO: 2852123 - DNA, 25 bp, Homo sapien
gtcgaagatcaggtagtggtgtccc

SEQ ID NO: 2852124 - DNA, 25 bp, Homo sapien
gcggcagatgcgggcttcacgctcc

SEQ ID NO: 2852125 - DNA, 25 bp, Homo sapien
cagatgcgggcttcacgctccagct

SEQ ID NO: 2852126 - DNA, 25 bp, Homo sapien
gatgcgggcttcacgctccagcttc

SEQ ID NO: 2852127 - DNA, 25 bp, Homo sapien
ggcagatgcgggcttcacgctccag

SEQ ID NO: 2852128 - DNA, 25 bp, Homo sapien
taaaacatcaattaaatcctgtccc

SEQ ID NO: 2852129 - DNA, 25 bp, Homo sapien
tcctcactgggtccggcctcacctt

SEQ ID NO: 2852130 - DNA, 25 bp, Homo sapien
tgcccggacccaccaaggagctctt

SEQ ID NO: 2852131 - DNA, 25 bp, Homo sapien
cagcttcccaatatacttagagcac

SEQ ID NO: 2852132 - DNA, 25 bp, Homo sapien
gatcttggcagcatactcctggcca

SEQ ID NO: 2852133 - DNA, 25 bp, Homo sapien
tggctgacagcttctttgtgttgat

SEQ ID NO: 2852134 - DNA, 25 bp, Homo sapien
acacaccttcgcaccaccgagaagg

SEQ ID NO: 2852135 - DNA, 25 bp, Homo sapien
ttggcagcatactcctggccagcca

SEQ ID NO: 2852136 - DNA, 25 bp, Homo sapien
cccactcttggttaagatacttaag

SEQ ID NO: 2852137 - DNA, 25 bp, Homo sapien
atgagctgggggtatttcagaaagt

SEQ ID NO: 2852138 - DNA, 25 bp, Homo sapien
ggtcaaatgcagatagatctgttac

SEQ ID NO: 2852139 - DNA, 25 bp, Homo sapien
aagatacttaagcatttcacttctc

SEQ ID NO: 2852140 - DNA, 25 bp, Homo sapien
gacgtggaacccagaatagagaggt

SEQ ID NO: 2852141 - DNA, 25 bp, Homo sapien
tcagtaacacatagcccaagctggc

SEQ ID NO: 2852142 - DNA, 25 bp, Homo sapien
gagaatctgcatccaaaaccccttg

SEQ ID NO: 2852143 - DNA, 25 bp, Homo sapien
ccaagctggctgatttgatcaccca

SEQ ID NO: 2852144 - DNA, 25 bp, Homo sapien
acacatatgcagacaccagcatgag

SEQ ID NO: 2852145 - DNA, 25 bp, Homo sapien
agacaccagcatgagctcacacatg

SEQ ID NO: 2852146 - DNA, 25 bp, Homo sapien
catatgcagacaccagcatgagctc

SEQ ID NO: 2852147 - DNA, 25 bp, Homo sapien
tgcagacaccagcatgagctcacac

SEQ ID NO: 2852148 - DNA, 25 bp, Homo sapien
gaagagctggtactcttccgtgaag

SEQ ID NO: 2852149 - DNA, 25 bp, Homo sapien
ctcgaagagctggtactcttccgtg

SEQ ID NO: 2852150 - DNA, 25 bp, Homo sapien
cgaagagctggtactcttccgtgaa

SEQ ID NO: 2852151 - DNA, 25 bp, Homo sapien
aagagctggtactcttccgtgaagc

SEQ ID NO: 2852152 - DNA, 25 bp, Homo sapien
cctggcgctgggcaggcaggtgagg

SEQ ID NO: 2852153 - DNA, 25 bp, Homo sapien
gactgggggaccaggactgaggcgc

SEQ ID NO: 2852154 - DNA, 25 bp, Homo sapien
gggactgggggaccaggactgaggc

SEQ ID NO: 2852155 - DNA, 25 bp, Homo sapien
gaccaggactgaggcgctgctgctc

SEQ ID NO: 2852156 - DNA, 25 bp, Homo sapien
gggaccaggactgaggcgctgctgc

SEQ ID NO: 2852157 - DNA, 25 bp, Homo sapien
ctgccgagtgcaaacagagaaccgg

SEQ ID NO: 2852158 - DNA, 25 bp, Homo sapien
agaaccggtttgactgacgagcccg

SEQ ID NO: 2852159 - DNA, 25 bp, Homo sapien
ccgagtgcaaacagagaaccggttt

SEQ ID NO: 2852160 - DNA, 25 bp, Homo sapien
gcaaacagagaaccggtttgactga

SEQ ID NO: 2852161 - DNA, 25 bp, Homo sapien
tcgcgagccttcgtcagcatccagg

SEQ ID NO: 2852162 - DNA, 25 bp, Homo sapien
agcctcgcgagccttcgtcagcatc

SEQ ID NO: 2852163 - DNA, 25 bp, Homo sapien
gcgagccttcgtcagcatccaggtc

SEQ ID NO: 2852164 - DNA, 25 bp, Homo sapien
tcacagcctcgcgagccttcgtcag

SEQ ID NO: 2852165 - DNA, 25 bp, Homo sapien
catagcatggcttacccgggctagg

SEQ ID NO: 2852166 - DNA, 25 bp, Homo sapien
ttggcgcagaagtgcagaggacacc

SEQ ID NO: 2852167 - DNA, 25 bp, Homo sapien
cagagacttgccatgaaatcttcaa

SEQ ID NO: 2852168 - DNA, 25 bp, Homo sapien
ccccaacgggaccatggaaatctgg

SEQ ID NO: 2852169 - DNA, 25 bp, Homo sapien
tcttggtttaggttggtcacaggca

SEQ ID NO: 2852170 - DNA, 25 bp, Homo sapien
gatttgagactggaccaagacctgg

SEQ ID NO: 2852171 - DNA, 25 bp, Homo sapien
cagaaagggccattcacggtcctgc

SEQ ID NO: 2852172 - DNA, 25 bp, Homo sapien
tacaactcgtgcaagcccggagtgg

SEQ ID NO: 2852173 - DNA, 25 bp, Homo sapien
gaagaggaattttgcaccacggtgc

SEQ ID NO: 2852174 - DNA, 25 bp, Homo sapien
tggcctaggccatgtgaagacccaa

SEQ ID NO: 2852175 - DNA, 25 bp, Homo sapien
tgcagcagttaatggcccagccagt

SEQ ID NO: 2852176 - DNA, 25 bp, Homo sapien
cctgtagagagcagccagattgcca

SEQ ID NO: 2852177 - DNA, 25 bp, Homo sapien
cagatccgttgggacattagcctgg

SEQ ID NO: 2852178 - DNA, 25 bp, Homo sapien
tgggacattagcctggtgttgagtt

SEQ ID NO: 2852179 - DNA, 25 bp, Homo sapien
gacattagcctggtgttgagtttac

SEQ ID NO: 2852180 - DNA, 25 bp, Homo sapien
tccgttgggacattagcctggtgtt

SEQ ID NO: 2852181 - DNA, 25 bp, Homo sapien
taaagcatagtggagtactggccgc

SEQ ID NO: 2852182 - DNA, 25 bp, Homo sapien
ccattaaagtcaggatgagcccggg

SEQ ID NO: 2852183 - DNA, 25 bp, Homo sapien
cattgcccatggtgcggtagcggta

SEQ ID NO: 2852184 - DNA, 25 bp, Homo sapien
tgatgttgaagagccacacggcctg

SEQ ID NO: 2852185 - DNA, 25 bp, Homo sapien
tcccaggacaggtagccgaagctga

SEQ ID NO: 2852186 - DNA, 25 bp, Homo sapien
cgtcggccacgaagctcggcttggc

SEQ ID NO: 2852187 - DNA, 25 bp, Homo sapien
cacgtcgtggtagccttggtcgtcc

SEQ ID NO: 2852188 - DNA, 25 bp, Homo sapien
tgaaccatggtagcccacgtcgtgg

SEQ ID NO: 2852189 - DNA, 25 bp, Homo sapien
tgaccagggagaagccagtgagggt

SEQ ID NO: 2852190 - DNA, 25 bp, Homo sapien
ccagggagaagccagtgagggtgtg

SEQ ID NO: 2852191 - DNA, 25 bp, Homo sapien
ctgaccagggagaagccagtgaggg

SEQ ID NO: 2852192 - DNA, 25 bp, Homo sapien
gggagaagccagtgagggtgtgcat

SEQ ID NO: 2852193 - DNA, 25 bp, Homo sapien
cgtcccggcgcgccgggctcctggg

SEQ ID NO: 2852194 - DNA, 25 bp, Homo sapien
cgccaagccggcccgcgcgtcccgg

SEQ ID NO: 2852195 - DNA, 25 bp, Homo sapien
cccgcgcgtcccggcgcgccgggct

SEQ ID NO: 2852196 - DNA, 25 bp, Homo sapien
ggcgcgccgggctcctggggcctca

SEQ ID NO: 2852197 - DNA, 25 bp, Homo sapien
actggctgccggacggctgggccgg

SEQ ID NO: 2852198 - DNA, 25 bp, Homo sapien
tccgggactggctgccggacggctg

SEQ ID NO: 2852199 - DNA, 25 bp, Homo sapien
atgctgcgagggagttcagcgcccc

SEQ ID NO: 2852200 - DNA, 25 bp, Homo sapien
ggcccgccggctcggatgctgcgag

SEQ ID NO: 2852201 - DNA, 25 bp, Homo sapien
gctgcctaagcgcaggccctgcgcc

SEQ ID NO: 2852202 - DNA, 25 bp, Homo sapien
ggaggcacaagttgggcgggtcgag

SEQ ID NO: 2852203 - DNA, 25 bp, Homo sapien
ctcctctgctttcccggcctctcgc

SEQ ID NO: 2852204 - DNA, 25 bp, Homo sapien
cctgagacgcggcgtggcagcttcc

SEQ ID NO: 2852205 - DNA, 25 bp, Homo sapien
cggctcccttcggtgagccggtaga

SEQ ID NO: 2852206 - DNA, 25 bp, Homo sapien
gaagcttggttgtagccttgccagc

SEQ ID NO: 2852207 - DNA, 25 bp, Homo sapien
gccggtagagaaagcgatggagaat

SEQ ID NO: 2852208 - DNA, 25 bp, Homo sapien
gatggagaatggcaagcactttggc

SEQ ID NO: 2852209 - DNA, 25 bp, Homo sapien
ccaaaatagcagcccgtgtgaatct

SEQ ID NO: 2852210 - DNA, 25 bp, Homo sapien
taaaaccactgcgtgtggggaaaga

SEQ ID NO: 2852211 - DNA, 25 bp, Homo sapien
tgcattttgaaatgagggctgcgtg

SEQ ID NO: 2852212 - DNA, 25 bp, Homo sapien
tcccatttgctcaaagccccatatt

SEQ ID NO: 2852213 - DNA, 25 bp, Homo sapien
gcccagcctgctcatacgattattt

SEQ ID NO: 2852214 - DNA, 25 bp, Homo sapien
gaggcacccattctgagacagattg

SEQ ID NO: 2852215 - DNA, 25 bp, Homo sapien
gaccatgaaattagtacagcttaag

SEQ ID NO: 2852216 - DNA, 25 bp, Homo sapien
tcatacgattattttaagataggga

SEQ ID NO: 2852217 - DNA, 25 bp, Homo sapien
ctcctgtttatggttaaagcctttg

SEQ ID NO: 2852218 - DNA, 25 bp, Homo sapien
cgatttctcctgtttatggttaaag

SEQ ID NO: 2852219 - DNA, 25 bp, Homo sapien
tttatggttaaagcctttgctgagc

SEQ ID NO: 2852220 - DNA, 25 bp, Homo sapien
tggttaaagcctttgctgagcagag

SEQ ID NO: 2852221 - DNA, 25 bp, Homo sapien
ctccttccccaagtccactaccttg

SEQ ID NO: 2852222 - DNA, 25 bp, Homo sapien
ccatttccccaaagtgcccttgact

SEQ ID NO: 2852223 - DNA, 25 bp, Homo sapien
atttccccaaagtgcccttgactct

SEQ ID NO: 2852224 - DNA, 25 bp, Homo sapien
ctttactgttgcctccttccccaag

SEQ ID NO: 2852225 - DNA, 25 bp, Homo sapien
ctcaggtgcagcctcgcatttcttt

SEQ ID NO: 2852226 - DNA, 25 bp, Homo sapien
tcaggtgcagcctcgcatttctttc

SEQ ID NO: 2852227 - DNA, 25 bp, Homo sapien
caggtgcagcctcgcatttctttcc

SEQ ID NO: 2852228 - DNA, 25 bp, Homo sapien
atggtccccattgagactctccaag

SEQ ID NO: 2852229 - DNA, 25 bp, Homo sapien
gagactctccaagactcccatggaa

SEQ ID NO: 2852230 - DNA, 25 bp, Homo sapien
agactcccatggaatgaggccctac

SEQ ID NO: 2852231 - DNA, 25 bp, Homo sapien
gaatgaggccctactctgtttacag

SEQ ID NO: 2852232 - DNA, 25 bp, Homo sapien
ctgtgtatgctgtgcccaggattga

SEQ ID NO: 2852233 - DNA, 25 bp, Homo sapien
ctcagaggtgatggggtagccccct

SEQ ID NO: 2852234 - DNA, 25 bp, Homo sapien
tgttcctgtgtatgctgtgcccagg

SEQ ID NO: 2852235 - DNA, 25 bp, Homo sapien
ccaggattgaactgctcagaggtga

SEQ ID NO: 2852236 - DNA, 25 bp, Homo sapien
ttggtccttgcctgaatctaaaagc

SEQ ID NO: 2852237 - DNA, 25 bp, Homo sapien
tctgagacccagttcattgctcttt

SEQ ID NO: 2852238 - DNA, 25 bp, Homo sapien
gcgatgtgaccagcattcagcaagg

SEQ ID NO: 2852239 - DNA, 25 bp, Homo sapien
tctttgggccatatcagtctggttt

SEQ ID NO: 2852240 - DNA, 25 bp, Homo sapien
ctgagcacatggaagccgtagaagt

SEQ ID NO: 2852241 - DNA, 25 bp, Homo sapien
agcacatggaagccgtagaagtggc

SEQ ID NO: 2852242 - DNA, 25 bp, Homo sapien
tgagcacatggaagccgtagaagtg

SEQ ID NO: 2852243 - DNA, 25 bp, Homo sapien
cctgagcacatggaagccgtagaag

SEQ ID NO: 2852244 - DNA, 25 bp, Homo sapien
ctgaacaacagctgtcctcacggcg

SEQ ID NO: 2852245 - DNA, 25 bp, Homo sapien
cagatgaagttctcaccttggccag

SEQ ID NO: 2852246 - DNA, 25 bp, Homo sapien
cagggcctcagctgtatttaggaga

SEQ ID NO: 2852247 - DNA, 25 bp, Homo sapien
aaaggaaacgttgcctgggctgcgt

SEQ ID NO: 2852248 - DNA, 25 bp, Homo sapien
cctgttgccagagtaagtcatgtaa

SEQ ID NO: 2852249 - DNA, 25 bp, Homo sapien
gcagtgaagtgcctgagtgccgaat

SEQ ID NO: 2852250 - DNA, 25 bp, Homo sapien
gactgtctcgccgacactcgggatt

SEQ ID NO: 2852251 - DNA, 25 bp, Homo sapien
taaaggatggaactaaaggatggtc

SEQ ID NO: 2852252 - DNA, 25 bp, Homo sapien
gagttgcccctcaaatcgagctcac

SEQ ID NO: 2852253 - DNA, 25 bp, Homo sapien
gaaaatcggaagtgagttgcccctc

SEQ ID NO: 2852254 - DNA, 25 bp, Homo sapien
tggaggtgcctggtgaacagctgtg

SEQ ID NO: 2852255 - DNA, 25 bp, Homo sapien
caggcacagcaggtctaggaaaatc

SEQ ID NO: 2852256 - DNA, 25 bp, Homo sapien
gatgaacatgaaagacaggatgatg

SEQ ID NO: 2852257 - DNA, 25 bp, Homo sapien
gtgagggcaagaagtggatgaacat

SEQ ID NO: 2852258 - DNA, 25 bp, Homo sapien
agggcaagaagtggatgaacatgaa

SEQ ID NO: 2852259 - DNA, 25 bp, Homo sapien
tgaaagacaggatgatgtcttgggt

SEQ ID NO: 2852260 - DNA, 25 bp, Homo sapien
gcttgtgcttaaactaggcaagagc

SEQ ID NO: 2852261 - DNA, 25 bp, Homo sapien
catctctgtgggttacttgggctgc

SEQ ID NO: 2852262 - DNA, 25 bp, Homo sapien
actggatctcaacagaagagccagg

SEQ ID NO: 2852263 - DNA, 25 bp, Homo sapien
tggatttagcgtctttagttacctc

SEQ ID NO: 2852264 - DNA, 25 bp, Homo sapien
actaggggtcggcagaaaggattat

SEQ ID NO: 2852265 - DNA, 25 bp, Homo sapien
ggctcagcctgcaggtaaataggct

SEQ ID NO: 2852266 - DNA, 25 bp, Homo sapien
agcctgcaggtaaataggctagaaa

SEQ ID NO: 2852267 - DNA, 25 bp, Homo sapien
gctcagcctgcaggtaaataggcta

SEQ ID NO: 2852268 - DNA, 25 bp, Homo sapien
tcagcctgcaggtaaataggctaga

SEQ ID NO: 2852269 - DNA, 25 bp, Homo sapien
tctgggtgtagggttatcccttctc

SEQ ID NO: 2852270 - DNA, 25 bp, Homo sapien
gggatctgtctagcttttggccact

SEQ ID NO: 2852271 - DNA, 25 bp, Homo sapien
tcccatctcgtccatgagcctaggt

SEQ ID NO: 2852272 - DNA, 25 bp, Homo sapien
gagcctaggtcttggagccttgtgt

SEQ ID NO: 2852273 - DNA, 25 bp, Homo sapien
tgttgacagatggagattgggcagc

SEQ ID NO: 2852274 - DNA, 25 bp, Homo sapien
tgtccaagggtgacgaaagagccag

SEQ ID NO: 2852275 - DNA, 25 bp, Homo sapien
cgacttggtttgtcttgtccaaggg

SEQ ID NO: 2852276 - DNA, 25 bp, Homo sapien
tgttatctgctgttccgacttggtt

SEQ ID NO: 2852277 - DNA, 25 bp, Homo sapien
caggatgttgaagaccgcctctgct

SEQ ID NO: 2852278 - DNA, 25 bp, Homo sapien
ggatgttgaagaccgcctctgctgc

SEQ ID NO: 2852279 - DNA, 25 bp, Homo sapien
aggatgttgaagaccgcctctgctg

SEQ ID NO: 2852280 - DNA, 25 bp, Homo sapien
caggtccaataatgaccatcatgga

SEQ ID NO: 2852281 - DNA, 25 bp, Homo sapien
cagagcagttaaggactgtccaccc

SEQ ID NO: 2852282 - DNA, 25 bp, Homo sapien
caggttgaggttggggtcacccatt

SEQ ID NO: 2852283 - DNA, 25 bp, Homo sapien
atcatggatttgtgtaactccccac

SEQ ID NO: 2852284 - DNA, 25 bp, Homo sapien
cccaggaatgttggagagtggccca

SEQ ID NO: 2852285 - DNA, 25 bp, Homo sapien
aatggacatcccaggaatgttggag

SEQ ID NO: 2852286 - DNA, 25 bp, Homo sapien
tgaaatggacatcccaggaatgttg

SEQ ID NO: 2852287 - DNA, 25 bp, Homo sapien
tggacatcccaggaatgttggagag

SEQ ID NO: 2852288 - DNA, 25 bp, Homo sapien
gcccagaagacgggtcctccagttc

SEQ ID NO: 2852289 - DNA, 25 bp, Homo sapien
aaaggagcagcaagtccgtttgtca

SEQ ID NO: 2852290 - DNA, 25 bp, Homo sapien
agtgcagcctacctgacccaagatg

SEQ ID NO: 2852291 - DNA, 25 bp, Homo sapien
tgtcctggtcccatgtgcttcagag

SEQ ID NO: 2852292 - DNA, 25 bp, Homo sapien
taaagggctggacgcatgactacgt

SEQ ID NO: 2852293 - DNA, 25 bp, Homo sapien
tgctcccatagcactggagtggcag

SEQ ID NO: 2852294 - DNA, 25 bp, Homo sapien
agttgccgttctcgtcgcacttggg

SEQ ID NO: 2852295 - DNA, 25 bp, Homo sapien
cactgcagttatggtgcccgcggct

SEQ ID NO: 2852296 - DNA, 25 bp, Homo sapien
tgcagttatggtgcccgcggcttct

SEQ ID NO: 2852297 - DNA, 25 bp, Homo sapien
ctgaatgaacccgggtggacagcag

SEQ ID NO: 2852298 - DNA, 25 bp, Homo sapien
gggatgtggctgacctcttcctggc

SEQ ID NO: 2852299 - DNA, 25 bp, Homo sapien
atgtggctgacctcttcctggcact

SEQ ID NO: 2852300 - DNA, 25 bp, Homo sapien
cagggatgtggctgacctcttcctg

SEQ ID NO: 2852301 - DNA, 25 bp, Homo sapien
cacacaccactgctgtgggcttaat

SEQ ID NO: 2852302 - DNA, 25 bp, Homo sapien
cagcaccgggatagaaacagcactc

SEQ ID NO: 2852303 - DNA, 25 bp, Homo sapien
aagtctaagcttcctgttactggga

SEQ ID NO: 2852304 - DNA, 25 bp, Homo sapien
tgaccttctacttcaggaccctgaa

SEQ ID NO: 2852305 - DNA, 25 bp, Homo sapien
gggtctaaaaacatcctagtctgca

SEQ ID NO: 2852306 - DNA, 25 bp, Homo sapien
caggagagccccgagggtccagaag

SEQ ID NO: 2852307 - DNA, 25 bp, Homo sapien
cttaggaacccttagacaagatggg

SEQ ID NO: 2852308 - DNA, 25 bp, Homo sapien
ctgagaggatgggagattccgcggt

SEQ ID NO: 2852309 - DNA, 25 bp, Homo sapien
tcacctgtaccctgtggtgacaggc

SEQ ID NO: 2852310 - DNA, 25 bp, Homo sapien
tggagcgtcagtgggcttttgctcc

SEQ ID NO: 2852311 - DNA, 25 bp, Homo sapien
gccaatggtgcatccagctctcaaa

SEQ ID NO: 2852312 - DNA, 25 bp, Homo sapien
ttgctccaaggagtgcctgctcatt

SEQ ID NO: 2852313 - DNA, 25 bp, Homo sapien
caaacaggagccaatggtgcatcca

SEQ ID NO: 2852314 - DNA, 25 bp, Homo sapien
ctaatacggatagaggtggaggtca

SEQ ID NO: 2852315 - DNA, 25 bp, Homo sapien
gaggtcaggttcgatggccaccacc

SEQ ID NO: 2852316 - DNA, 25 bp, Homo sapien
gacagaaacatgcagggccaaatag

SEQ ID NO: 2852317 - DNA, 25 bp, Homo sapien
gaagtgctggtaaaccccttcagct

SEQ ID NO: 2852318 - DNA, 25 bp, Homo sapien
taaggtgtctcaggttctccgggaa

SEQ ID NO: 2852319 - DNA, 25 bp, Homo sapien
tctccatggtgttcttaaggtgtct

SEQ ID NO: 2852320 - DNA, 25 bp, Homo sapien
ttccagtctatggtctccatggtgt

SEQ ID NO: 2852321 - DNA, 25 bp, Homo sapien
ggaagctccccttcagtggcgggta

SEQ ID NO: 2852322 - DNA, 25 bp, Homo sapien
cacagtgctggcataggacagacac

SEQ ID NO: 2852323 - DNA, 25 bp, Homo sapien
gacagacacgcagtacaaatttggg

SEQ ID NO: 2852324 - DNA, 25 bp, Homo sapien
tgcgagtcgagttccagattccagg

SEQ ID NO: 2852325 - DNA, 25 bp, Homo sapien
tcagctacgagactgcagcgttgcg

SEQ ID NO: 2852326 - DNA, 25 bp, Homo sapien
cacccttgtattcagtaatccagag

SEQ ID NO: 2852327 - DNA, 25 bp, Homo sapien
gcagaggccagactacatataacat

SEQ ID NO: 2852328 - DNA, 25 bp, Homo sapien
acatataacatttaagggtcaccct

SEQ ID NO: 2852329 - DNA, 25 bp, Homo sapien
acccagccgagcctgtttatctcaa

SEQ ID NO: 2852330 - DNA, 25 bp, Homo sapien
tcatgttgccatacttggtggcatt

SEQ ID NO: 2852331 - DNA, 25 bp, Homo sapien
agcaggtgcatcacatggtcctctg

SEQ ID NO: 2852332 - DNA, 25 bp, Homo sapien
cctctgtcatgttgccatacttggt

SEQ ID NO: 2852333 - DNA, 25 bp, Homo sapien
gagcaggtgcatcacatggtcctct

SEQ ID NO: 2852334 - DNA, 25 bp, Homo sapien
atccaggcgggataaccttgcccct

SEQ ID NO: 2852335 - DNA, 25 bp, Homo sapien
ccagggttttgtccacagcacagta

SEQ ID NO: 2852336 - DNA, 25 bp, Homo sapien
gaatcgcaggcacttggtcaatggt

SEQ ID NO: 2852337 - DNA, 25 bp, Homo sapien
caatgtcctcattggtcaaactggc

SEQ ID NO: 2852338 - DNA, 25 bp, Homo sapien
ggtggccatgcgcatcttgctcaca

SEQ ID NO: 2852339 - DNA, 25 bp, Homo sapien
gctcccatgggcagcgcctgcatca

SEQ ID NO: 2852340 - DNA, 25 bp, Homo sapien
gccatgcgcatcttgctcacaggct

SEQ ID NO: 2852341 - DNA, 25 bp, Homo sapien
cggggtggccatgcgcatcttgctc

SEQ ID NO: 2852342 - DNA, 25 bp, Homo sapien
ggacaggaacgagggtaagtgtggc

SEQ ID NO: 2852343 - DNA, 25 bp, Homo sapien
gctggaattccaaaccggagggaga

SEQ ID NO: 2852344 - DNA, 25 bp, Homo sapien
cccagggaggagggtatcagaccca

SEQ ID NO: 2852345 - DNA, 25 bp, Homo sapien
ggagggtatcagacccagatgagga

SEQ ID NO: 2852346 - DNA, 25 bp, Homo sapien
tgtcagtttgtccagccggccctgc

SEQ ID NO: 2852347 - DNA, 25 bp, Homo sapien
tgctgctggtacaggaagtaggcgg

SEQ ID NO: 2852348 - DNA, 25 bp, Homo sapien
tgactgtcagtttgtccagccggcc

SEQ ID NO: 2852349 - DNA, 25 bp, Homo sapien
ggaggtgactgtcagtttgtccagc

SEQ ID NO: 2852350 - DNA, 25 bp, Homo sapien
cgaggagcagagtcaccaggatgga

SEQ ID NO: 2852351 - DNA, 25 bp, Homo sapien
gagcagagtcaccaggatggaaaag

SEQ ID NO: 2852352 - DNA, 25 bp, Homo sapien
aggagcagagtcaccaggatggaaa

SEQ ID NO: 2852353 - DNA, 25 bp, Homo sapien
cagagtcaccaggatggaaaagcct

SEQ ID NO: 2852354 - DNA, 25 bp, Homo sapien
tgtctttgagcatgtccctgccaat

SEQ ID NO: 2852355 - DNA, 25 bp, Homo sapien
gacaatgtcaggctgaagcagggcc

SEQ ID NO: 2852356 - DNA, 25 bp, Homo sapien
cactgcaagcgccaaagtatttcaa

SEQ ID NO: 2852357 - DNA, 25 bp, Homo sapien
tttctgctggcaggatcaaccaggt

SEQ ID NO: 2852358 - DNA, 25 bp, Homo sapien
cattgggaactgcaaggatgaggct

SEQ ID NO: 2852359 - DNA, 25 bp, Homo sapien
agtcccttgtgcctggtaactcatg

SEQ ID NO: 2852360 - DNA, 25 bp, Homo sapien
ccagcaaggatggtttaggacgctc

SEQ ID NO: 2852361 - DNA, 25 bp, Homo sapien
cagcccaagggagagttattcggga

SEQ ID NO: 2852362 - DNA, 25 bp, Homo sapien
catagccagctttagaagcagtaac

SEQ ID NO: 2852363 - DNA, 25 bp, Homo sapien
gtcaggagccaaccagagctagcag

SEQ ID NO: 2852364 - DNA, 25 bp, Homo sapien
gctccagtctggaatggcctaagca

SEQ ID NO: 2852365 - DNA, 25 bp, Homo sapien
aatcgtgacacagatgttgccaggc

SEQ ID NO: 2852366 - DNA, 25 bp, Homo sapien
tggtaattaggagggaactcctctg

SEQ ID NO: 2852367 - DNA, 25 bp, Homo sapien
gaaatttaaccagagcctgtccctc

SEQ ID NO: 2852368 - DNA, 25 bp, Homo sapien
cattcccttgatccgtggtaattag

SEQ ID NO: 2852369 - DNA, 25 bp, Homo sapien
ctcctgtgatggcagatgtctccat

SEQ ID NO: 2852370 - DNA, 25 bp, Homo sapien
gaaactctagggagagaacccatgc

SEQ ID NO: 2852371 - DNA, 25 bp, Homo sapien
tcaaagcccctgcatagcatgtgaa

SEQ ID NO: 2852372 - DNA, 25 bp, Homo sapien
tgcagtccaggatcggtgtgccctt

SEQ ID NO: 2852373 - DNA, 25 bp, Homo sapien
tcatttgacaagagagggagccgga

SEQ ID NO: 2852374 - DNA, 25 bp, Homo sapien
ggcagttgctcattgttggagataa

SEQ ID NO: 2852375 - DNA, 25 bp, Homo sapien
ttggagataaggtcgcgctggtcat

SEQ ID NO: 2852376 - DNA, 25 bp, Homo sapien
gggcgccggcccagcatgggcagtt

SEQ ID NO: 2852377 - DNA, 25 bp, Homo sapien
tggagataaggtcgcgctggtcatc

SEQ ID NO: 2852378 - DNA, 25 bp, Homo sapien
tggcttctgatcttcccgacagctc

SEQ ID NO: 2852379 - DNA, 25 bp, Homo sapien
ttctgatcttcccgacagctcctgc

SEQ ID NO: 2852380 - DNA, 25 bp, Homo sapien
gactggcttctgatcttcccgacag

SEQ ID NO: 2852381 - DNA, 25 bp, Homo sapien
tctgatcttcccgacagctcctgct

SEQ ID NO: 2852382 - DNA, 25 bp, Homo sapien
tctgattcgtccacagaaggccact

SEQ ID NO: 2852383 - DNA, 25 bp, Homo sapien
gaatctgattcgtccacagaaggcc

SEQ ID NO: 2852384 - DNA, 25 bp, Homo sapien
ggagaggaatctgattcgtccacag

SEQ ID NO: 2852385 - DNA, 25 bp, Homo sapien
gattcgtccacagaaggccactccg

SEQ ID NO: 2852386 - DNA, 25 bp, Homo sapien
cccaggcaggtagaaaggccagcac

SEQ ID NO: 2852387 - DNA, 25 bp, Homo sapien
aggctggaaataccccactttggtg

SEQ ID NO: 2852388 - DNA, 25 bp, Homo sapien
aataccccactttggtgaagctgcc

SEQ ID NO: 2852389 - DNA, 25 bp, Homo sapien
aaggccagcacgatcccattggctg

SEQ ID NO: 2852390 - DNA, 25 bp, Homo sapien
tacctttgtgggttatcaacgtgcc

SEQ ID NO: 2852391 - DNA, 25 bp, Homo sapien
ccagtgacgggccaaagtagtttag

SEQ ID NO: 2852392 - DNA, 25 bp, Homo sapien
taaagagagaaacgaacatgtacct

SEQ ID NO: 2852393 - DNA, 25 bp, Homo sapien
tgaaaattatgcgtagcacacagat

SEQ ID NO: 2852394 - DNA, 25 bp, Homo sapien
tgggcatttagttttcacgcctcct

SEQ ID NO: 2852395 - DNA, 25 bp, Homo sapien
tccaggataccacaatgggcattta

SEQ ID NO: 2852396 - DNA, 25 bp, Homo sapien
taatctcctgtccttgactttcatg

SEQ ID NO: 2852397 - DNA, 25 bp, Homo sapien
tactaataccctattctggttccag

SEQ ID NO: 2852398 - DNA, 25 bp, Homo sapien
caagacgcagtggagtgagctccca

SEQ ID NO: 2852399 - DNA, 25 bp, Homo sapien
tgggtactcagagccgcatgcaagc

SEQ ID NO: 2852400 - DNA, 25 bp, Homo sapien
tgtggtaatcccttgcaaaacgctg

SEQ ID NO: 2852401 - DNA, 25 bp, Homo sapien
caaaacgctgagtaccatctggtgt

SEQ ID NO: 2852402 - DNA, 25 bp, Homo sapien
tgaaggcaatttattaacagaaaat

SEQ ID NO: 2852403 - DNA, 25 bp, Homo sapien
gaaggcaatttattaacagaaaata

SEQ ID NO: 2852404 - DNA, 25 bp, Homo sapien
taacagaaaatattttgaggaatct

SEQ ID NO: 2852405 - DNA, 25 bp, Homo sapien
cagaaaatattttgaggaatcttgt

SEQ ID NO: 2852406 - DNA, 25 bp, Homo sapien
ctgcgagtgctgtcagaggggatgg

SEQ ID NO: 2852407 - DNA, 25 bp, Homo sapien
cggcgaccccccttcctgcgagtgc

SEQ ID NO: 2852408 - DNA, 25 bp, Homo sapien
tgtcagaggggatgggggtgacatc

SEQ ID NO: 2852409 - DNA, 25 bp, Homo sapien
ccacggcgaccccccttcctgcgag

SEQ ID NO: 2852410 - DNA, 25 bp, Homo sapien
gctgctccccaaatgactccccagt

SEQ ID NO: 2852411 - DNA, 25 bp, Homo sapien
gaagagaaagcgtcattgcctggag

SEQ ID NO: 2852412 - DNA, 25 bp, Homo sapien
gaccaatggcctaaccaatcagcaa

SEQ ID NO: 2852413 - DNA, 25 bp, Homo sapien
tcagcaacagatcctgctgctcccc

SEQ ID NO: 2852414 - DNA, 25 bp, Homo sapien
tgccagttcctcgaatttcctgacg

SEQ ID NO: 2852415 - DNA, 25 bp, Homo sapien
tgtgaacatgaagtggccccatctg

SEQ ID NO: 2852416 - DNA, 25 bp, Homo sapien
aaatccaggttctgacatctagccc

SEQ ID NO: 2852417 - DNA, 25 bp, Homo sapien
aggctgagctgtgcgcaagatgtca

SEQ ID NO: 2852418 - DNA, 25 bp, Homo sapien
gcccacgaggcgaaatttacagtga

SEQ ID NO: 2852419 - DNA, 25 bp, Homo sapien
tgtatgtcgctactaactgcacaga

SEQ ID NO: 2852420 - DNA, 25 bp, Homo sapien
tgtcagttttacctgcaccaggcag

SEQ ID NO: 2852421 - DNA, 25 bp, Homo sapien
tagtaggcggaaaccaaaaatgctg

SEQ ID NO: 2852422 - DNA, 25 bp, Homo sapien
caatccgcccgatcttcatacccga

SEQ ID NO: 2852423 - DNA, 25 bp, Homo sapien
tccgcccgatcttcatacccgagcg

SEQ ID NO: 2852424 - DNA, 25 bp, Homo sapien
cgcccgatcttcatacccgagcggg

SEQ ID NO: 2852425 - DNA, 25 bp, Homo sapien
gctctgagggccgactgggccccag

SEQ ID NO: 2852426 - DNA, 25 bp, Homo sapien
gaagatctcctttctaagatcccaa

SEQ ID NO: 2852427 - DNA, 25 bp, Homo sapien
taagttaagaagagcctttggccaa

SEQ ID NO: 2852428 - DNA, 25 bp, Homo sapien
ggcgtggtggcactactactagcag

SEQ ID NO: 2852429 - DNA, 25 bp, Homo sapien
accccgctagttcagaggtctgcaa

SEQ ID NO: 2852430 - DNA, 25 bp, Homo sapien
tagggcggtgatacccagctccttg

SEQ ID NO: 2852431 - DNA, 25 bp, Homo sapien
catagcagcatatggtgaggattca

SEQ ID NO: 2852432 - DNA, 25 bp, Homo sapien
tcctgggcagccaacatagcagcat

SEQ ID NO: 2852433 - DNA, 25 bp, Homo sapien
ggcccggagtttgatgtgtagggcg

SEQ ID NO: 2852434 - DNA, 25 bp, Homo sapien
tacgatatcctaatgagtgaagagc

SEQ ID NO: 2852435 - DNA, 25 bp, Homo sapien
caatgaccatcacgctgtaaggacg

SEQ ID NO: 2852436 - DNA, 25 bp, Homo sapien
cctcgtccaacaaggagtgcttacg

SEQ ID NO: 2852437 - DNA, 25 bp, Homo sapien
gaagagcaacacagctcagtcatgg

SEQ ID NO: 2852438 - DNA, 25 bp, Homo sapien
gccttttgccagctggatgcctctc

SEQ ID NO: 2852439 - DNA, 25 bp, Homo sapien
agagagaatcccctgaactgctagc

SEQ ID NO: 2852440 - DNA, 25 bp, Homo sapien
aactgctagcccgtcccagccattg

SEQ ID NO: 2852441 - DNA, 25 bp, Homo sapien
tcctcagccttttgccagctggatg

SEQ ID NO: 2852442 - DNA, 25 bp, Homo sapien
gatgcaaagatatggcagacaccaa

SEQ ID NO: 2852443 - DNA, 25 bp, Homo sapien
ttgaaggatgcaaagatatggcaga

SEQ ID NO: 2852444 - DNA, 25 bp, Homo sapien
cgaggctgatgacctgttcttcctt

SEQ ID NO: 2852445 - DNA, 25 bp, Homo sapien
cttcagccacctgaggtccgaggct

SEQ ID NO: 2852446 - DNA, 25 bp, Homo sapien
catcaggagtatataaacgcagggc

SEQ ID NO: 2852447 - DNA, 25 bp, Homo sapien
gaatgatcactacaaacccatggga

SEQ ID NO: 2852448 - DNA, 25 bp, Homo sapien
ccctaaagtaacgagcagagtggtc

SEQ ID NO: 2852449 - DNA, 25 bp, Homo sapien
taactattgtaaggaacgcgccaca

SEQ ID NO: 2852450 - DNA, 25 bp, Homo sapien
tctcttgcccggcacctagctcggt

SEQ ID NO: 2852451 - DNA, 25 bp, Homo sapien
cttctgagaccaggaacgaactcaa

SEQ ID NO: 2852452 - DNA, 25 bp, Homo sapien
cacctagctcggttcccacggaaag

SEQ ID NO: 2852453 - DNA, 25 bp, Homo sapien
ccgagttggccaggatccaggtggg

SEQ ID NO: 2852454 - DNA, 25 bp, Homo sapien
gtcacttccgtgtcccggaagtata

SEQ ID NO: 2852455 - DNA, 25 bp, Homo sapien
tcacttccgtgtcccggaagtatac

SEQ ID NO: 2852456 - DNA, 25 bp, Homo sapien
ctgaggtcacggggcgaggtcgggt

SEQ ID NO: 2852457 - DNA, 25 bp, Homo sapien
ctctgaggtcacggggcgaggtcgg

SEQ ID NO: 2852458 - DNA, 25 bp, Homo sapien
tctgaggtcacggggcgaggtcggg

SEQ ID NO: 2852459 - DNA, 25 bp, Homo sapien
taagactcgtcataaggaaagacgg

SEQ ID NO: 2852460 - DNA, 25 bp, Homo sapien
ctcgtcataaggaaagacggtttat

SEQ ID NO: 2852461 - DNA, 25 bp, Homo sapien
tcccaaagagtttaagactcgtcat

SEQ ID NO: 2852462 - DNA, 25 bp, Homo sapien
gagtttaagactcgtcataaggaaa

SEQ ID NO: 2852463 - DNA, 25 bp, Homo sapien
tgatggcggtggtcgtggctagaca

SEQ ID NO: 2852464 - DNA, 25 bp, Homo sapien
ggcggtggtcgtggctagacagact

SEQ ID NO: 2852465 - DNA, 25 bp, Homo sapien
gggcctgtattccatgatggcggtg

SEQ ID NO: 2852466 - DNA, 25 bp, Homo sapien
ccatgatggcggtggtcgtggctag

SEQ ID NO: 2852467 - DNA, 25 bp, Homo sapien
tgcctgtggccaagtacccattccc

SEQ ID NO: 2852468 - DNA, 25 bp, Homo sapien
tgtggccaagtacccattccccaga

SEQ ID NO: 2852469 - DNA, 25 bp, Homo sapien
tgctgcctgtggccaagtacccatt

SEQ ID NO: 2852470 - DNA, 25 bp, Homo sapien
cctgtggccaagtacccattcccca

SEQ ID NO: 2852471 - DNA, 25 bp, Homo sapien
ggtgactggcccctacatcctggtc

SEQ ID NO: 2852472 - DNA, 25 bp, Homo sapien
gtgactggcccctacatcctggtct

SEQ ID NO: 2852473 - DNA, 25 bp, Homo sapien
tccatctgggtgactggcccctaca

SEQ ID NO: 2852474 - DNA, 25 bp, Homo sapien
atctgggtgactggcccctacatcc

SEQ ID NO: 2852475 - DNA, 25 bp, Homo sapien
gatcccacagcttggctcttttgca

SEQ ID NO: 2852476 - DNA, 25 bp, Homo sapien
tctccgctgtgtctacctctcaggg

SEQ ID NO: 2852477 - DNA, 25 bp, Homo sapien
tctcttctgtacaatgcgggtgaaa

SEQ ID NO: 2852478 - DNA, 25 bp, Homo sapien
cttagtcaagctaaatggtccaggg

SEQ ID NO: 2852479 - DNA, 25 bp, Homo sapien
tgtgaagtgtatacaggaagcctgg

SEQ ID NO: 2852480 - DNA, 25 bp, Homo sapien
gctgacaggtaactacgagggtgat

SEQ ID NO: 2852481 - DNA, 25 bp, Homo sapien
cacagcgagagcctgacacatttaa

SEQ ID NO: 2852482 - DNA, 25 bp, Homo sapien
tatgtgctggttgcctacaatgtgc

SEQ ID NO: 2852483 - DNA, 25 bp, Homo sapien
ttgagctttgttcctacaattggat

SEQ ID NO: 2852484 - DNA, 25 bp, Homo sapien
tttgagctttgttcctacaattgga

SEQ ID NO: 2852485 - DNA, 25 bp, Homo sapien
tgagctttgttcctacaattggata

SEQ ID NO: 2852486 - DNA, 25 bp, Homo sapien
ctgggaacaacttgttgggaaagat

SEQ ID NO: 2852487 - DNA, 25 bp, Homo sapien
tgctgggaacaacttgttgggaaag

SEQ ID NO: 2852488 - DNA, 25 bp, Homo sapien
ctgctgggaacaacttgttgggaaa

SEQ ID NO: 2852489 - DNA, 25 bp, Homo sapien
tctgctgggaacaacttgttgggaa

SEQ ID NO: 2852490 - DNA, 25 bp, Homo sapien
cggcacccacgcggcatcacgggat

SEQ ID NO: 2852491 - DNA, 25 bp, Homo sapien
ggccggcacccacgcggcatcacgg

SEQ ID NO: 2852492 - DNA, 25 bp, Homo sapien
cacccacgcggcatcacgggatcga

SEQ ID NO: 2852493 - DNA, 25 bp, Homo sapien
ctggccggcacccacgcggcatcac

SEQ ID NO: 2852494 - DNA, 25 bp, Homo sapien
aggccgggtcctggcttcgcgaagg

SEQ ID NO: 2852495 - DNA, 25 bp, Homo sapien
cagctgtaggtcacggataatgtca

SEQ ID NO: 2852496 - DNA, 25 bp, Homo sapien
cggaccggttttctgcgggctctga

SEQ ID NO: 2852497 - DNA, 25 bp, Homo sapien
taatgtcactcacgaggaatgcccc

SEQ ID NO: 2852498 - DNA, 25 bp, Homo sapien
tctcgggagcaagaagttctccctt

SEQ ID NO: 2852499 - DNA, 25 bp, Homo sapien
tcagggtctcgggagcaagaagttc

SEQ ID NO: 2852500 - DNA, 25 bp, Homo sapien
tccctttgcacgcagctctttaacg

SEQ ID NO: 2852501 - DNA, 25 bp, Homo sapien
tcctccctcagggtctcgggagcaa

SEQ ID NO: 2852502 - DNA, 25 bp, Homo sapien
cagattcgagcagcccggtgtgccc

SEQ ID NO: 2852503 - DNA, 25 bp, Homo sapien
tgggctctaggaccggccgggaatc

SEQ ID NO: 2852504 - DNA, 25 bp, Homo sapien
cacttggctttttgcagattcgagc

SEQ ID NO: 2852505 - DNA, 25 bp, Homo sapien
ggccacttggctttttgcagattcg

SEQ ID NO: 2852506 - DNA, 25 bp, Homo sapien
tcagaatggcctgcgggcagttttg

SEQ ID NO: 2852507 - DNA, 25 bp, Homo sapien
ggtatttgctagaatgaggatgaga

SEQ ID NO: 2852508 - DNA, 25 bp, Homo sapien
ggtgtcatgcttatattcaacaagt

SEQ ID NO: 2852509 - DNA, 25 bp, Homo sapien
ggtctcttcagagcgacctggctgt

SEQ ID NO: 2852510 - DNA, 25 bp, Homo sapien
gaaattatggggacatctgtcctct

SEQ ID NO: 2852511 - DNA, 25 bp, Homo sapien
tgaaattatggggacatctgtcctc

SEQ ID NO: 2852512 - DNA, 25 bp, Homo sapien
aaattatggggacatctgtcctctt

SEQ ID NO: 2852513 - DNA, 25 bp, Homo sapien
ttgaaattatggggacatctgtcct

SEQ ID NO: 2852514 - DNA, 25 bp, Homo sapien
tgccctggctcttgttagcatgggc

SEQ ID NO: 2852515 - DNA, 25 bp, Homo sapien
gaactccgtaatggtccaagtgctg

SEQ ID NO: 2852516 - DNA, 25 bp, Homo sapien
ctccgtaatggtccaagtgctgttg

SEQ ID NO: 2852517 - DNA, 25 bp, Homo sapien
aactccgtaatggtccaagtgctgt

SEQ ID NO: 2852518 - DNA, 25 bp, Homo sapien
actccgtaatggtccaagtgctgtt

SEQ ID NO: 2852519 - DNA, 25 bp, Homo sapien
ctatggcagtgcggatggtgcaggg

SEQ ID NO: 2852520 - DNA, 25 bp, Homo sapien
tggcagtgcggatggtgcagggaga

SEQ ID NO: 2852521 - DNA, 25 bp, Homo sapien
tatggcagtgcggatggtgcaggga

SEQ ID NO: 2852522 - DNA, 25 bp, Homo sapien
atggcagtgcggatggtgcagggag

SEQ ID NO: 2852523 - DNA, 25 bp, Homo sapien
tcttttgaccaaagatgggagcaag

SEQ ID NO: 2852524 - DNA, 25 bp, Homo sapien
ttgaccaaagatgggagcaagactg

SEQ ID NO: 2852525 - DNA, 25 bp, Homo sapien
gggtcttttgaccaaagatgggagc

SEQ ID NO: 2852526 - DNA, 25 bp, Homo sapien
ccaaagatgggagcaagactggcag

SEQ ID NO: 2852527 - DNA, 25 bp, Homo sapien
gtccttgccgtttggaatacactca

SEQ ID NO: 2852528 - DNA, 25 bp, Homo sapien
ggagttccatatggcctggcctgca

SEQ ID NO: 2852529 - DNA, 25 bp, Homo sapien
tgggagagtccttgccgtttggaat

SEQ ID NO: 2852530 - DNA, 25 bp, Homo sapien
cagctgactgtcaaggggccccttg

SEQ ID NO: 2852531 - DNA, 25 bp, Homo sapien
ctttacatgtgtagaacctgttacc

SEQ ID NO: 2852532 - DNA, 25 bp, Homo sapien
ctccctcctttacatgtgtagaacc

SEQ ID NO: 2852533 - DNA, 25 bp, Homo sapien
tagaacctgttacctggacctctca

SEQ ID NO: 2852534 - DNA, 25 bp, Homo sapien
tccatgtagccatccctaattctcc

SEQ ID NO: 2852535 - DNA, 25 bp, Homo sapien
tgtgatggagtttcacttttgttgc

SEQ ID NO: 2852536 - DNA, 25 bp, Homo sapien
tttactagagacagcattttgccat

SEQ ID NO: 2852537 - DNA, 25 bp, Homo sapien
ttttgccatattggccaggctggtc

SEQ ID NO: 2852538 - DNA, 25 bp, Homo sapien
actgcacccggcctaataattttat

SEQ ID NO: 2852539 - DNA, 25 bp, Homo sapien
acctttgtgtccctcgaagcatgga

SEQ ID NO: 2852540 - DNA, 25 bp, Homo sapien
tcgaagcatggaagcattggagcat

SEQ ID NO: 2852541 - DNA, 25 bp, Homo sapien
tgtccctcgaagcatggaagcattg

SEQ ID NO: 2852542 - DNA, 25 bp, Homo sapien
tgaatcacctttgtgtccctcgaag

SEQ ID NO: 2852543 - DNA, 25 bp, Homo sapien
ccagtaggagcataacaagtgcttc

SEQ ID NO: 2852544 - DNA, 25 bp, Homo sapien
ttccccagtaggagcataacaagtg

SEQ ID NO: 2852545 - DNA, 25 bp, Homo sapien
gcttaggctcaggacggtttcccca

SEQ ID NO: 2852546 - DNA, 25 bp, Homo sapien
gctcaggacggtttccccagtagga

SEQ ID NO: 2852547 - DNA, 25 bp, Homo sapien
ggttccatttgctagaggcctctgg

SEQ ID NO: 2852548 - DNA, 25 bp, Homo sapien
ccccaagataagctctgcctgcgta

SEQ ID NO: 2852549 - DNA, 25 bp, Homo sapien
gataacagtccctgaaagggcgggc

SEQ ID NO: 2852550 - DNA, 25 bp, Homo sapien
gccactgacccaggcggcttcttaa

SEQ ID NO: 2852551 - DNA, 25 bp, Homo sapien
tatgacgacctagttagagcctgga

SEQ ID NO: 2852552 - DNA, 25 bp, Homo sapien
caccccggaggcatgaaaccggttg

SEQ ID NO: 2852553 - DNA, 25 bp, Homo sapien
ggcagatcatctagctgggacaatc

SEQ ID NO: 2852554 - DNA, 25 bp, Homo sapien
caatcatctgattgtctatgacgac

SEQ ID NO: 2852555 - DNA, 25 bp, Homo sapien
gccctgcgactctgagccagacctc

SEQ ID NO: 2852556 - DNA, 25 bp, Homo sapien
tctctgtggccctgcgactctgagc

SEQ ID NO: 2852557 - DNA, 25 bp, Homo sapien
gctctctgtggccctgcgactctga

SEQ ID NO: 2852558 - DNA, 25 bp, Homo sapien
ctgtgctctctgtggccctgcgact

SEQ ID NO: 2852559 - DNA, 25 bp, Homo sapien
aagatagggctacttttcagacatg

SEQ ID NO: 2852560 - DNA, 25 bp, Homo sapien
gggccacagcctccaaagatagggc

SEQ ID NO: 2852561 - DNA, 25 bp, Homo sapien
tggcttctatccaggcagccagcca

SEQ ID NO: 2852562 - DNA, 25 bp, Homo sapien
agccagctcccagtaagggccacag

SEQ ID NO: 2852563 - DNA, 25 bp, Homo sapien
ctgtgggtacgtaccccgaggatga

SEQ ID NO: 2852564 - DNA, 25 bp, Homo sapien
taccccgaggatgagagatacctgg

SEQ ID NO: 2852565 - DNA, 25 bp, Homo sapien
tggttgcattatgggcaaatatgac

SEQ ID NO: 2852566 - DNA, 25 bp, Homo sapien
cgaggatgagagatacctggttgca

SEQ ID NO: 2852567 - DNA, 25 bp, Homo sapien
tggagagcctctactcgcaactggg

SEQ ID NO: 2852568 - DNA, 25 bp, Homo sapien
caagggcgtcgcttcctaagtctct

SEQ ID NO: 2852569 - DNA, 25 bp, Homo sapien
aaggagcgtgaccagcctgtggact

SEQ ID NO: 2852570 - DNA, 25 bp, Homo sapien
tacctatatggctggaagcgaggcc

SEQ ID NO: 2852571 - DNA, 25 bp, Homo sapien
gagtgatcttggctccagtggtgcg

SEQ ID NO: 2852572 - DNA, 25 bp, Homo sapien
gtgatcttggctccagtggtgcgat

SEQ ID NO: 2852573 - DNA, 25 bp, Homo sapien
ccaccacgccgtccttgacattctt

SEQ ID NO: 2852574 - DNA, 25 bp, Homo sapien
tgagccaccacgccgtccttgacat

SEQ ID NO: 2852575 - DNA, 25 bp, Homo sapien
catatatgaacaacatttgagtttt

SEQ ID NO: 2852576 - DNA, 25 bp, Homo sapien
tgagttttctaggtctcgctttcct

SEQ ID NO: 2852577 - DNA, 25 bp, Homo sapien
gttggcatttttatgcatgttccct

SEQ ID NO: 2852578 - DNA, 25 bp, Homo sapien
tttatgcatgttcccttcagtcttt

SEQ ID NO: 2852579 - DNA, 25 bp, Homo sapien
gggtacacctcacacgtgtgtgaac

SEQ ID NO: 2852580 - DNA, 25 bp, Homo sapien
caaggttcgaggtgggtacacctca

SEQ ID NO: 2852581 - DNA, 25 bp, Homo sapien
acccaatcatcacgtgcatggactg

SEQ ID NO: 2852582 - DNA, 25 bp, Homo sapien
aatcatcacgtgcatggactgcaaa

SEQ ID NO: 2852583 - DNA, 25 bp, Homo sapien
ctgcaacatccgccttccagtttga

SEQ ID NO: 2852584 - DNA, 25 bp, Homo sapien
caacatccgccttccagtttgaagt

SEQ ID NO: 2852585 - DNA, 25 bp, Homo sapien
acatccgccttccagtttgaagtga

SEQ ID NO: 2852586 - DNA, 25 bp, Homo sapien
gcaacatccgccttccagtttgaag

SEQ ID NO: 2852587 - DNA, 25 bp, Homo sapien
cctgcagaggttggtggtcccagca

SEQ ID NO: 2852588 - DNA, 25 bp, Homo sapien
gccagcgaggccagtcttcaatgtc

SEQ ID NO: 2852589 - DNA, 25 bp, Homo sapien
aggtggctccatcgtctattctgtg

SEQ ID NO: 2852590 - DNA, 25 bp, Homo sapien
tgggcccagctaaggaagccatctg

SEQ ID NO: 2852591 - DNA, 25 bp, Homo sapien
gcccagtatcacagccaagacgaga

SEQ ID NO: 2852592 - DNA, 25 bp, Homo sapien
gcattgtcctacacattggcccagt

SEQ ID NO: 2852593 - DNA, 25 bp, Homo sapien
tcagcctgcatctcctaagagttag

SEQ ID NO: 2852594 - DNA, 25 bp, Homo sapien
tgtctcccaggtaacttatgtgtct

SEQ ID NO: 2852595 - DNA, 25 bp, Homo sapien
gcttccctaagggactggcataggg

SEQ ID NO: 2852596 - DNA, 25 bp, Homo sapien
cagcctctgctctagttgatgtgag

SEQ ID NO: 2852597 - DNA, 25 bp, Homo sapien
ggcaacactgggttcctggcttgac

SEQ ID NO: 2852598 - DNA, 25 bp, Homo sapien
tgcccaggccgttgaggcaacactg

SEQ ID NO: 2852599 - DNA, 25 bp, Homo sapien
taatgtacaatctcgaactaactgc

SEQ ID NO: 2852600 - DNA, 25 bp, Homo sapien
ggtgctatccagttcgcctgatgag

SEQ ID NO: 2852601 - DNA, 25 bp, Homo sapien
tgtgttaaaggtgagaccttcctcc

SEQ ID NO: 2852602 - DNA, 25 bp, Homo sapien
ctcgaaccagccgttttgggttgtg

SEQ ID NO: 2852603 - DNA, 25 bp, Homo sapien
gcatggacaagagcagatccagagg

SEQ ID NO: 2852604 - DNA, 25 bp, Homo sapien
cagcaagaacacagctggaggctgc

SEQ ID NO: 2852605 - DNA, 25 bp, Homo sapien
gctgcatggacaagagcagatccag

SEQ ID NO: 2852606 - DNA, 25 bp, Homo sapien
gaggctgcatggacaagagcagatc

SEQ ID NO: 2852607 - DNA, 25 bp, Homo sapien
taggtgatgagcttctcaagggttc

SEQ ID NO: 2852608 - DNA, 25 bp, Homo sapien
ccagctgcctggcaatgactatacc

SEQ ID NO: 2852609 - DNA, 25 bp, Homo sapien
caagcatagggtggcaccagctgcc

SEQ ID NO: 2852610 - DNA, 25 bp, Homo sapien
ggccccaagcatagggtggcaccag

SEQ ID NO: 2852611 - DNA, 25 bp, Homo sapien
ttcaggccctttacaaggacacagg

SEQ ID NO: 2852612 - DNA, 25 bp, Homo sapien
ggtctgctttgcatccccactaatg

SEQ ID NO: 2852613 - DNA, 25 bp, Homo sapien
aaggtggcccatacggaaacagaca

SEQ ID NO: 2852614 - DNA, 25 bp, Homo sapien
tggttctaacgaggatttcaggccc

SEQ ID NO: 2852615 - DNA, 25 bp, Homo sapien
caacccaggagcttgatgtctcaca

SEQ ID NO: 2852616 - DNA, 25 bp, Homo sapien
tagcctagtgtgtaggaagaatcca

SEQ ID NO: 2852617 - DNA, 25 bp, Homo sapien
tatatttcctttcgaggcactcgct

SEQ ID NO: 2852618 - DNA, 25 bp, Homo sapien
ggcactcgctgtggtatagcctagt

SEQ ID NO: 2852619 - DNA, 25 bp, Homo sapien
gcctctcctcccatggtttctttag

SEQ ID NO: 2852620 - DNA, 25 bp, Homo sapien
ccatggtttctttaggctggttagg

SEQ ID NO: 2852621 - DNA, 25 bp, Homo sapien
aggagagggtaagagcctctcctcc

SEQ ID NO: 2852622 - DNA, 25 bp, Homo sapien
ccgggcccacatctgcaaaggagag

SEQ ID NO: 2852623 - DNA, 25 bp, Homo sapien
cttgccatacaactgcaggtaaatc

SEQ ID NO: 2852624 - DNA, 25 bp, Homo sapien
ggacagcgtgttctgtggactctat

SEQ ID NO: 2852625 - DNA, 25 bp, Homo sapien
gacagcgtgttctgtggactctatc

SEQ ID NO: 2852626 - DNA, 25 bp, Homo sapien
ctggcttgccatacaactgcaggta

SEQ ID NO: 2852627 - DNA, 25 bp, Homo sapien
gaaccttgaattggagtgctcctgc

SEQ ID NO: 2852628 - DNA, 25 bp, Homo sapien
ttggcagcgtgaagacaacgccggc

SEQ ID NO: 2852629 - DNA, 25 bp, Homo sapien
gtttcctcctgtatagactgcactg

SEQ ID NO: 2852630 - DNA, 25 bp, Homo sapien
tgctattattgtttcgggtcccgac

SEQ ID NO: 2852631 - DNA, 25 bp, Homo sapien
gggcactgcagatacctttgtttgg

SEQ ID NO: 2852632 - DNA, 25 bp, Homo sapien
ggtcagtgggtaccagtgccatttc

SEQ ID NO: 2852633 - DNA, 25 bp, Homo sapien
cctgtgggcaggctagagggataga

SEQ ID NO: 2852634 - DNA, 25 bp, Homo sapien
tttctccaaggcctgagtaccagct

SEQ ID NO: 2852635 - DNA, 25 bp, Homo sapien
agctgctgccaatttgggaaaatag

SEQ ID NO: 2852636 - DNA, 25 bp, Homo sapien
aggtgccagggaactccgtccatgg

SEQ ID NO: 2852637 - DNA, 25 bp, Homo sapien
tatgggcgtattccggaaggtgcca

SEQ ID NO: 2852638 - DNA, 25 bp, Homo sapien
tattccggaaggtgccagggaactc

SEQ ID NO: 2852639 - DNA, 25 bp, Homo sapien
agttatgggcgtattccggaaggtg

SEQ ID NO: 2852640 - DNA, 25 bp, Homo sapien
agctcccaggcttctagacatgagc

SEQ ID NO: 2852641 - DNA, 25 bp, Homo sapien
ggcttctagacatgagctcatcgga

SEQ ID NO: 2852642 - DNA, 25 bp, Homo sapien
ctagacatgagctcatcggagctgc

SEQ ID NO: 2852643 - DNA, 25 bp, Homo sapien
ttttccttcaaggcagctcccaggc

SEQ ID NO: 2852644 - DNA, 25 bp, Homo sapien
gcttgtcaccaagaacatggggcta

SEQ ID NO: 2852645 - DNA, 25 bp, Homo sapien
tggcttgtcaccaagaacatggggc

SEQ ID NO: 2852646 - DNA, 25 bp, Homo sapien
catggggctagcaggaggggctgac

SEQ ID NO: 2852647 - DNA, 25 bp, Homo sapien
tggggctagcaggaggggctgacac

SEQ ID NO: 2852648 - DNA, 25 bp, Homo sapien
ctgcctggtaattggtgaatggcag

SEQ ID NO: 2852649 - DNA, 25 bp, Homo sapien
cctggtaattggtgaatggcagcag

SEQ ID NO: 2852650 - DNA, 25 bp, Homo sapien
ctggtaattggtgaatggcagcaga

SEQ ID NO: 2852651 - DNA, 25 bp, Homo sapien
gcctggtaattggtgaatggcagca

SEQ ID NO: 2852652 - DNA, 25 bp, Homo sapien
cggcctcagagagacgccccttggg

SEQ ID NO: 2852653 - DNA, 25 bp, Homo sapien
ccccagtttgccagacaggagcccc

SEQ ID NO: 2852654 - DNA, 25 bp, Homo sapien
ccacctacactgagaccttgtccac

SEQ ID NO: 2852655 - DNA, 25 bp, Homo sapien
ggccacagagacacataatgtcccg

SEQ ID NO: 2852656 - DNA, 25 bp, Homo sapien
tgagccctccttacggcggtgacat

SEQ ID NO: 2852657 - DNA, 25 bp, Homo sapien
tctgcttcaagtaacgaaccccacg

SEQ ID NO: 2852658 - DNA, 25 bp, Homo sapien
tgccggtcaagttcccctccttgag

SEQ ID NO: 2852659 - DNA, 25 bp, Homo sapien
tctctacccggaacgccgggatcga

SEQ ID NO: 2852660 - DNA, 25 bp, Homo sapien
gcccatgtctccctcgtggagcgag

SEQ ID NO: 2852661 - DNA, 25 bp, Homo sapien
cagctgcaggcgcttctggcgcgaa

SEQ ID NO: 2852662 - DNA, 25 bp, Homo sapien
agcctagacggctgggtgagcccgg

SEQ ID NO: 2852663 - DNA, 25 bp, Homo sapien
tggcgcgaaacatcatcaatgcggc

SEQ ID NO: 2852664 - DNA, 25 bp, Homo sapien
taccttcagggttccatactcgtcc

SEQ ID NO: 2852665 - DNA, 25 bp, Homo sapien
ctgtgtcgcatgtccaggcactggc

SEQ ID NO: 2852666 - DNA, 25 bp, Homo sapien
ggcagtgtgtatatggacccctgga

SEQ ID NO: 2852667 - DNA, 25 bp, Homo sapien
cagaaggtcctaggcctgtgtcgca

SEQ ID NO: 2852668 - DNA, 25 bp, Homo sapien
tgtcatgctactttctccatcccag

SEQ ID NO: 2852669 - DNA, 25 bp, Homo sapien
gagaagagatacagagctaccatgt

SEQ ID NO: 2852670 - DNA, 25 bp, Homo sapien
caggttctgggctcaaagctgaact

SEQ ID NO: 2852671 - DNA, 25 bp, Homo sapien
gactgtccaggacatcttatctgca

SEQ ID NO: 2852672 - DNA, 25 bp, Homo sapien
cagtgtcagacctcagtcccagtgt

SEQ ID NO: 2852673 - DNA, 25 bp, Homo sapien
cagtgtccatatcgtgcccagaaaa

SEQ ID NO: 2852674 - DNA, 25 bp, Homo sapien
ggacaggattggctcagatgacccc

SEQ ID NO: 2852675 - DNA, 25 bp, Homo sapien
tacgggaaatatgaaaagcatggcc

SEQ ID NO: 2852676 - DNA, 25 bp, Homo sapien
gaaagagtgaccttagagggctcct

SEQ ID NO: 2852677 - DNA, 25 bp, Homo sapien
tgagaaggtgctcttactcagttaa

SEQ ID NO: 2852678 - DNA, 25 bp, Homo sapien
taatgatgagtgactatatttacca

SEQ ID NO: 2852679 - DNA, 25 bp, Homo sapien
gtgactatatttaccaaagccccta

SEQ ID NO: 2852680 - DNA, 25 bp, Homo sapien
tctcctctaacccactagagattgc

SEQ ID NO: 2852681 - DNA, 25 bp, Homo sapien
aacccactagagattgcctgtgtcc

SEQ ID NO: 2852682 - DNA, 25 bp, Homo sapien
agccttgagaaaccggcagttccca

SEQ ID NO: 2852683 - DNA, 25 bp, Homo sapien
cagccttgagaaaccggcagttccc

SEQ ID NO: 2852684 - DNA, 25 bp, Homo sapien
tgcctcttgtagaatgcagctctgg

SEQ ID NO: 2852685 - DNA, 25 bp, Homo sapien
tcttgtagaatgcagctctggccct

SEQ ID NO: 2852686 - DNA, 25 bp, Homo sapien
ttgcctcttgtagaatgcagctctg

SEQ ID NO: 2852687 - DNA, 25 bp, Homo sapien
ctcttgcctcttgtagaatgcagct

SEQ ID NO: 2852688 - DNA, 25 bp, Homo sapien
ttttagagatggactaggcaggccg

SEQ ID NO: 2852689 - DNA, 25 bp, Homo sapien
cgcacaaaggatagggatgggtctc

SEQ ID NO: 2852690 - DNA, 25 bp, Homo sapien
gaatttggctggtaggaaacgcaca

SEQ ID NO: 2852691 - DNA, 25 bp, Homo sapien
tcactgtaaatgttggaggccccag

SEQ ID NO: 2852692 - DNA, 25 bp, Homo sapien
tgtcactacgcaacaacagagggtc

SEQ ID NO: 2852693 - DNA, 25 bp, Homo sapien
taaagtcaaacggtaagccaggctg

SEQ ID NO: 2852694 - DNA, 25 bp, Homo sapien
tcactttcgagttagcagccagcca

SEQ ID NO: 2852695 - DNA, 25 bp, Homo sapien
tgtgcccaggttgccaatgccaatg

SEQ ID NO: 2852696 - DNA, 25 bp, Homo sapien
cttttagaattgcttgcaattggtg

SEQ ID NO: 2852697 - DNA, 25 bp, Homo sapien
gacaagaggactccagttgcctcag

SEQ ID NO: 2852698 - DNA, 25 bp, Homo sapien
gaaagtaactgcagccaccaggtat

SEQ ID NO: 2852699 - DNA, 25 bp, Homo sapien
ggagaccactgcacccaaaacaaat

SEQ ID NO: 2852700 - DNA, 25 bp, Homo sapien
taccaaaggataaagaggaatctag

SEQ ID NO: 2852701 - DNA, 25 bp, Homo sapien
taaataacttccactgacctcgagt

SEQ ID NO: 2852702 - DNA, 25 bp, Homo sapien
tgacctcgagttcagctaccaaagg

SEQ ID NO: 2852703 - DNA, 25 bp, Homo sapien
gttcagctaccaaaggataaagagg

SEQ ID NO: 2852704 - DNA, 25 bp, Homo sapien
gacaatgagacactgaagacacacg

SEQ ID NO: 2852705 - DNA, 25 bp, Homo sapien
tcatctttcggagggtgtgacttca

SEQ ID NO: 2852706 - DNA, 25 bp, Homo sapien
cacacgaaggtgaatgctgaagacc

SEQ ID NO: 2852707 - DNA, 25 bp, Homo sapien
ggtttcttcgatggtacacagctcc

SEQ ID NO: 2852708 - DNA, 25 bp, Homo sapien
tatttattccaagatttactgggag

SEQ ID NO: 2852709 - DNA, 25 bp, Homo sapien
caagatttactgggagttttaagtg

SEQ ID NO: 2852710 - DNA, 25 bp, Homo sapien
taagtgccctttcttccacagagcc

SEQ ID NO: 2852711 - DNA, 25 bp, Homo sapien
cacagagccccagagtggtgacaag

SEQ ID NO: 2852712 - DNA, 25 bp, Homo sapien
tcccattgggtggaacatgtgtggc

SEQ ID NO: 2852713 - DNA, 25 bp, Homo sapien
gagaaggatagtggattggtcctgg

SEQ ID NO: 2852714 - DNA, 25 bp, Homo sapien
ggatagtggattggtcctggagccc

SEQ ID NO: 2852715 - DNA, 25 bp, Homo sapien
cccattgggtggaacatgtgtggcc

SEQ ID NO: 2852716 - DNA, 25 bp, Homo sapien
tgggggcaagttgaagtagttggca

SEQ ID NO: 2852717 - DNA, 25 bp, Homo sapien
acttgggggcaagttgaagtagttg

SEQ ID NO: 2852718 - DNA, 25 bp, Homo sapien
ggggcaagttgaagtagttggcaga

SEQ ID NO: 2852719 - DNA, 25 bp, Homo sapien
ggcaagttgaagtagttggcagagg

SEQ ID NO: 2852720 - DNA, 25 bp, Homo sapien
cggcaacatgaaccagacctgggtc

SEQ ID NO: 2852721 - DNA, 25 bp, Homo sapien
gcaacgctgtttctaccacctttac

SEQ ID NO: 2852722 - DNA, 25 bp, Homo sapien
gggagaacaattgtgcaacgctgtt

SEQ ID NO: 2852723 - DNA, 25 bp, Homo sapien
tcctactgggagagtagagcggcaa

SEQ ID NO: 2852724 - DNA, 25 bp, Homo sapien
agtctgtagttccatctttctcttt

SEQ ID NO: 2852725 - DNA, 25 bp, Homo sapien
cagagtctgtagttccatctttctc

SEQ ID NO: 2852726 - DNA, 25 bp, Homo sapien
gagtctgtagttccatctttctctt

SEQ ID NO: 2852727 - DNA, 25 bp, Homo sapien
ccagagtctgtagttccatctttct

SEQ ID NO: 2852728 - DNA, 25 bp, Homo sapien
gcctctaagggcagaatctaggtct

SEQ ID NO: 2852729 - DNA, 25 bp, Homo sapien
gacctgggttcaaaagctgctagaa

SEQ ID NO: 2852730 - DNA, 25 bp, Homo sapien
gttccaagttggagacatgttcccc

SEQ ID NO: 2852731 - DNA, 25 bp, Homo sapien
tgcttaccacatagggagcgctcca

SEQ ID NO: 2852732 - DNA, 25 bp, Homo sapien
cacattcagtctgcggccatttaca

SEQ ID NO: 2852733 - DNA, 25 bp, Homo sapien
cacaacagtgatcgtccggatctct

SEQ ID NO: 2852734 - DNA, 25 bp, Homo sapien
gtccggatctctccgaactggtaga

SEQ ID NO: 2852735 - DNA, 25 bp, Homo sapien
ccgtgtggcaaactggatgaaagca

SEQ ID NO: 2852736 - DNA, 25 bp, Homo sapien
tttcactgacacaccactaggcagg

SEQ ID NO: 2852737 - DNA, 25 bp, Homo sapien
gttggcaaaccatagctctcaaggc

SEQ ID NO: 2852738 - DNA, 25 bp, Homo sapien
ttaatggagacaggctaccaagggc

SEQ ID NO: 2852739 - DNA, 25 bp, Homo sapien
caagaatacgtgacagagactgcat

SEQ ID NO: 2852740 - DNA, 25 bp, Homo sapien
ttactgtggcaccataaaggacaat

SEQ ID NO: 2852741 - DNA, 25 bp, Homo sapien
ttgtacagaatgatcattcttgcag

SEQ ID NO: 2852742 - DNA, 25 bp, Homo sapien
gcatgatactaacaatagagagact

SEQ ID NO: 2852743 - DNA, 25 bp, Homo sapien
tgcccagccacataagcacattatt

SEQ ID NO: 2852744 - DNA, 25 bp, Homo sapien
gaggcattgttgaagcccgctttag

SEQ ID NO: 2852745 - DNA, 25 bp, Homo sapien
ctgtctcagtaatggtatcacctag

SEQ ID NO: 2852746 - DNA, 25 bp, Homo sapien
gtcagctacaggatcattgattccg

SEQ ID NO: 2852747 - DNA, 25 bp, Homo sapien
ccgctttagaagcttgtcagctaca

SEQ ID NO: 2852748 - DNA, 25 bp, Homo sapien
aagggggtcatctggatctgtaggc

SEQ ID NO: 2852749 - DNA, 25 bp, Homo sapien
tgatcagcaagggggtcatctggat

SEQ ID NO: 2852750 - DNA, 25 bp, Homo sapien
ggtcatctggatctgtaggcttctc

SEQ ID NO: 2852751 - DNA, 25 bp, Homo sapien
ctgatcagcaagggggtcatctgga

SEQ ID NO: 2852752 - DNA, 25 bp, Homo sapien
aagccattaggccatctaggatgcc

SEQ ID NO: 2852753 - DNA, 25 bp, Homo sapien
ggacacatgattacccctctctagg

SEQ ID NO: 2852754 - DNA, 25 bp, Homo sapien
tatcacggaaggaattactagcctc

SEQ ID NO: 2852755 - DNA, 25 bp, Homo sapien
ggcatagcaatttagtttccaaggc

SEQ ID NO: 2852756 - DNA, 25 bp, Homo sapien
tatggacattcctctcctctcttac

SEQ ID NO: 2852757 - DNA, 25 bp, Homo sapien
ctgtatggacattcctctcctctct

SEQ ID NO: 2852758 - DNA, 25 bp, Homo sapien
tgtatggacattcctctcctctctt

SEQ ID NO: 2852759 - DNA, 25 bp, Homo sapien
gtatggacattcctctcctctctta

SEQ ID NO: 2852760 - DNA, 25 bp, Homo sapien
tccccagcatgccaactggccgtgt

SEQ ID NO: 2852761 - DNA, 25 bp, Homo sapien
aatgtggggtcgattccttttgtag

SEQ ID NO: 2852762 - DNA, 25 bp, Homo sapien
ttgagcagcatgtcactggtagatg

SEQ ID NO: 2852763 - DNA, 25 bp, Homo sapien
tgccaactggccgtgttccatcaga

SEQ ID NO: 2852764 - DNA, 25 bp, Homo sapien
tggggatgacaaattcaaaagataa

SEQ ID NO: 2852765 - DNA, 25 bp, Homo sapien
agtggggatgacaaattcaaaagat

SEQ ID NO: 2852766 - DNA, 25 bp, Homo sapien
gggatgacaaattcaaaagataaat

SEQ ID NO: 2852767 - DNA, 25 bp, Homo sapien
ctaagtggggatgacaaattcaaaa

SEQ ID NO: 2852768 - DNA, 25 bp, Homo sapien
tcaattcattaggatttttatccaa

SEQ ID NO: 2852769 - DNA, 25 bp, Homo sapien
tgtgtcaattcattaggatttttat

SEQ ID NO: 2852770 - DNA, 25 bp, Homo sapien
tgtcaattcattaggatttttatcc

SEQ ID NO: 2852771 - DNA, 25 bp, Homo sapien
ttttatccaaaaagtggcagcatac

SEQ ID NO: 2852772 - DNA, 25 bp, Homo sapien
tcctgcgtcacgaacctggatgggc

SEQ ID NO: 2852773 - DNA, 25 bp, Homo sapien
ctttggcatgtcatctttaaaagac

SEQ ID NO: 2852774 - DNA, 25 bp, Homo sapien
atagtactctttgttgacatctgac

SEQ ID NO: 2852775 - DNA, 25 bp, Homo sapien
tttaaaagacaatcctgcgtcacga

SEQ ID NO: 2852776 - DNA, 25 bp, Homo sapien
ttcagatttattggacaggtcaaac

SEQ ID NO: 2852777 - DNA, 25 bp, Homo sapien
gatttattggacaggtcaaacatac

SEQ ID NO: 2852778 - DNA, 25 bp, Homo sapien
tttcagatttattggacaggtcaaa

SEQ ID NO: 2852779 - DNA, 25 bp, Homo sapien
cagatttattggacaggtcaaacat

SEQ ID NO: 2852780 - DNA, 25 bp, Homo sapien
acgcatgcggactccagggcaccag

SEQ ID NO: 2852781 - DNA, 25 bp, Homo sapien
cttgaaacgcatgcggactccaggg

SEQ ID NO: 2852782 - DNA, 25 bp, Homo sapien
cagtcttcttgaaacgcatgcggac

SEQ ID NO: 2852783 - DNA, 25 bp, Homo sapien
cttcttgaaacgcatgcggactcca

SEQ ID NO: 2852784 - DNA, 25 bp, Homo sapien
tttgcattccttcccatacttttct

SEQ ID NO: 2852785 - DNA, 25 bp, Homo sapien
cattccttcccatacttttctttgg

SEQ ID NO: 2852786 - DNA, 25 bp, Homo sapien
tgcattccttcccatacttttcttt

SEQ ID NO: 2852787 - DNA, 25 bp, Homo sapien
gcattccttcccatacttttctttg

SEQ ID NO: 2852788 - DNA, 25 bp, Homo sapien
cattcggatatatgggttttctcca

SEQ ID NO: 2852789 - DNA, 25 bp, Homo sapien
tatatgggttttctccaagacatgt

SEQ ID NO: 2852790 - DNA, 25 bp, Homo sapien
cggatatatgggttttctccaagac

SEQ ID NO: 2852791 - DNA, 25 bp, Homo sapien
atatgggttttctccaagacatgtc

SEQ ID NO: 2852792 - DNA, 25 bp, Homo sapien
aaatctggttgaggaccaccctccg

SEQ ID NO: 2852793 - DNA, 25 bp, Homo sapien
cctccgaagaccctgacacctcagt

SEQ ID NO: 2852794 - DNA, 25 bp, Homo sapien
tgggaaatctggttgaggaccaccc

SEQ ID NO: 2852795 - DNA, 25 bp, Homo sapien
ctggttgaggaccaccctccgaaga

SEQ ID NO: 2852796 - DNA, 25 bp, Homo sapien
tgctggtcccgggaccctggctaag

SEQ ID NO: 2852797 - DNA, 25 bp, Homo sapien
tgtcctgccagcttgcaaggtgcgc

SEQ ID NO: 2852798 - DNA, 25 bp, Homo sapien
gaaaaccagctctaataggctggag

SEQ ID NO: 2852799 - DNA, 25 bp, Homo sapien
actaggcacggcaggaacccgaagt

SEQ ID NO: 2852800 - DNA, 25 bp, Homo sapien
cccagttctgcctgttgtaggtgtt

SEQ ID NO: 2852801 - DNA, 25 bp, Homo sapien
agttctgcctgttgtaggtgttgga

SEQ ID NO: 2852802 - DNA, 25 bp, Homo sapien
cagttctgcctgttgtaggtgttgg

SEQ ID NO: 2852803 - DNA, 25 bp, Homo sapien
cctcccagttctgcctgttgtaggt

SEQ ID NO: 2852804 - DNA, 25 bp, Homo sapien
tatttacgcgtctagggcttcttcc

SEQ ID NO: 2852805 - DNA, 25 bp, Homo sapien
gcgccggtcggcgtcttatttacgc

SEQ ID NO: 2852806 - DNA, 25 bp, Homo sapien
agcgtccggaggtagctgtagcttc

SEQ ID NO: 2852807 - DNA, 25 bp, Homo sapien
ttccgaattgggagagaggaccgcc

SEQ ID NO: 2852808 - DNA, 25 bp, Homo sapien
gccttcctagtaacgtgagacctga

SEQ ID NO: 2852809 - DNA, 25 bp, Homo sapien
cagcactcagagtcttggacacaca

SEQ ID NO: 2852810 - DNA, 25 bp, Homo sapien
taaaccatcctagcgacaagaaacc

SEQ ID NO: 2852811 - DNA, 25 bp, Homo sapien
tcaaggcactccacaggtcaatcaa

SEQ ID NO: 2852812 - DNA, 25 bp, Homo sapien
gattcactgaaaattaactagcaaa

SEQ ID NO: 2852813 - DNA, 25 bp, Homo sapien
taagattcactgaaaattaactagc

SEQ ID NO: 2852814 - DNA, 25 bp, Homo sapien
ttttaacattgtaggggccaacaga

SEQ ID NO: 2852815 - DNA, 25 bp, Homo sapien
gctgtgactatagaagcaggccacg

SEQ ID NO: 2852816 - DNA, 25 bp, Homo sapien
tacacaaaagcaaggcggaagttag

SEQ ID NO: 2852817 - DNA, 25 bp, Homo sapien
ggattggacaaaaagcgtactgatt

SEQ ID NO: 2852818 - DNA, 25 bp, Homo sapien
actgatttagcgctaatagactgag

SEQ ID NO: 2852819 - DNA, 25 bp, Homo sapien
ttctgggtatgtacaggaccgtctt

SEQ ID NO: 2852820 - DNA, 25 bp, Homo sapien
acaccacacccgactaattttatat

SEQ ID NO: 2852821 - DNA, 25 bp, Homo sapien
tttgcttttgttgcctacactggag

SEQ ID NO: 2852822 - DNA, 25 bp, Homo sapien
gcaatagtgcgatcttggctcacca

SEQ ID NO: 2852823 - DNA, 25 bp, Homo sapien
gcaacaccacacccgactaatttta

SEQ ID NO: 2852824 - DNA, 25 bp, Homo sapien
cacagatcatgcttaagacccgaac

SEQ ID NO: 2852825 - DNA, 25 bp, Homo sapien
cacagtggtgactaactttctaggc

SEQ ID NO: 2852826 - DNA, 25 bp, Homo sapien
tgtcctgcctacctgcacagtggtg

SEQ ID NO: 2852827 - DNA, 25 bp, Homo sapien
gacctaaaaaggtgggacatctcaa

SEQ ID NO: 2852828 - DNA, 25 bp, Homo sapien
tctttagaagcaatgacccaggata

SEQ ID NO: 2852829 - DNA, 25 bp, Homo sapien
gggagctgccgatgctatctgtgaa

SEQ ID NO: 2852830 - DNA, 25 bp, Homo sapien
gatcatgcccagtcagagttagagg

SEQ ID NO: 2852831 - DNA, 25 bp, Homo sapien
tatggtgaactaacctgctaagaga

SEQ ID NO: 2852832 - DNA, 25 bp, Homo sapien
cacagtaggctctagcaggtagtga

SEQ ID NO: 2852833 - DNA, 25 bp, Homo sapien
ggaagcttacaaggactatgtccca

SEQ ID NO: 2852834 - DNA, 25 bp, Homo sapien
cattcataaagatcaaggagtacct

SEQ ID NO: 2852835 - DNA, 25 bp, Homo sapien
caattcctaattcaccagctgcagg

SEQ ID NO: 2852836 - DNA, 25 bp, Homo sapien
tgctgttaggccagaactgtgggct

SEQ ID NO: 2852837 - DNA, 25 bp, Homo sapien
taaacaaggcctaatgaagcagcag

SEQ ID NO: 2852838 - DNA, 25 bp, Homo sapien
cttttacagaaaacacggtgcagct

SEQ ID NO: 2852839 - DNA, 25 bp, Homo sapien
gaaaacgaatggaatctgctacccc

SEQ ID NO: 2852840 - DNA, 25 bp, Homo sapien
ggcccaagctaagttccacatgctg

SEQ ID NO: 2852841 - DNA, 25 bp, Homo sapien
ttccacatgctgggtgagccagatg

SEQ ID NO: 2852842 - DNA, 25 bp, Homo sapien
gtgggcccaagctaagttccacatg

SEQ ID NO: 2852843 - DNA, 25 bp, Homo sapien
agaagtgggcccaagctaagttcca

SEQ ID NO: 2852844 - DNA, 25 bp, Homo sapien
aactttgatgaaaatacccactttg

SEQ ID NO: 2852845 - DNA, 25 bp, Homo sapien
cactttgttggcctttctgaaggct

SEQ ID NO: 2852846 - DNA, 25 bp, Homo sapien
ttaaaatcatgcttcatcttgaagc

SEQ ID NO: 2852847 - DNA, 25 bp, Homo sapien
accctcctcacgctgtggtgtaact

SEQ ID NO: 2852848 - DNA, 25 bp, Homo sapien
taagtgggcattctattatcagcca

SEQ ID NO: 2852849 - DNA, 25 bp, Homo sapien
tagaatgatcccaatgaggtgagaa

SEQ ID NO: 2852850 - DNA, 25 bp, Homo sapien
tctctagggacagagtattgtatcc

SEQ ID NO: 2852851 - DNA, 25 bp, Homo sapien
caaacccgatgatcaatctctaggg

SEQ ID NO: 2852852 - DNA, 25 bp, Homo sapien
cttgccagctaaaacgagctctttg

SEQ ID NO: 2852853 - DNA, 25 bp, Homo sapien
tgccaactcatcgtactctgctgct

SEQ ID NO: 2852854 - DNA, 25 bp, Homo sapien
caggatcgtcctgaaagtcttgagg

SEQ ID NO: 2852855 - DNA, 25 bp, Homo sapien
tgcatccttgccagctaaaacgagc

SEQ ID NO: 2852856 - DNA, 25 bp, Homo sapien
gagtcacatgggtgaggttctcaac

SEQ ID NO: 2852857 - DNA, 25 bp, Homo sapien
catgggtgaggttctcaactggatt

SEQ ID NO: 2852858 - DNA, 25 bp, Homo sapien
ctcctcacactcgaagagagtcaca

SEQ ID NO: 2852859 - DNA, 25 bp, Homo sapien
cactcgaagagagtcacatgggtga

SEQ ID NO: 2852860 - DNA, 25 bp, Homo sapien
cttcatgtagcgaaggttgggaatt

SEQ ID NO: 2852861 - DNA, 25 bp, Homo sapien
ggttgggaattgacatgattctcac

SEQ ID NO: 2852862 - DNA, 25 bp, Homo sapien
tgggaattgacatgattctcacttc

SEQ ID NO: 2852863 - DNA, 25 bp, Homo sapien
agcgaaggttgggaattgacatgat

SEQ ID NO: 2852864 - DNA, 25 bp, Homo sapien
cagagcatctgtattaagatagcca

SEQ ID NO: 2852865 - DNA, 25 bp, Homo sapien
gcatctgtattaagatagccaggca

SEQ ID NO: 2852866 - DNA, 25 bp, Homo sapien
tgtattaagatagccaggcaattct

SEQ ID NO: 2852867 - DNA, 25 bp, Homo sapien
ttaagatagccaggcaattctaaaa

SEQ ID NO: 2852868 - DNA, 25 bp, Homo sapien
tccagtcaacgaagtgttataacac

SEQ ID NO: 2852869 - DNA, 25 bp, Homo sapien
taattaggaccattcagatagcctg

SEQ ID NO: 2852870 - DNA, 25 bp, Homo sapien
tcacaagtcccagagagttaacact

SEQ ID NO: 2852871 - DNA, 25 bp, Homo sapien
aaagaagggctctcttactccaaag

SEQ ID NO: 2852872 - DNA, 25 bp, Homo sapien
caacataccttgttgctccagatca

SEQ ID NO: 2852873 - DNA, 25 bp, Homo sapien
caagagtaaacacacttcatactgg

SEQ ID NO: 2852874 - DNA, 25 bp, Homo sapien
gatcatactgggacactgtgtccct

SEQ ID NO: 2852875 - DNA, 25 bp, Homo sapien
tgatgactagtgactttccaccaaa

SEQ ID NO: 2852876 - DNA, 25 bp, Homo sapien
ggattttgaatttgattgacgttgg

SEQ ID NO: 2852877 - DNA, 25 bp, Homo sapien
acagcgaccagctggattttgaatt

SEQ ID NO: 2852878 - DNA, 25 bp, Homo sapien
attttgaatttgattgacgttgggt

SEQ ID NO: 2852879 - DNA, 25 bp, Homo sapien
agcgaccagctggattttgaatttg

SEQ ID NO: 2852880 - DNA, 25 bp, Homo sapien
tgatatgtgcaaccccactatccaa

SEQ ID NO: 2852881 - DNA, 25 bp, Homo sapien
gaataatgtatagcagccaaagttt

SEQ ID NO: 2852882 - DNA, 25 bp, Homo sapien
aaagatgttcgcacttcctgatatg

SEQ ID NO: 2852883 - DNA, 25 bp, Homo sapien
caacacactttgttgatccatagag

SEQ ID NO: 2852884 - DNA, 25 bp, Homo sapien
taagtaacattagccactagcgaca

SEQ ID NO: 2852885 - DNA, 25 bp, Homo sapien
aaagttctgttggatagtactcctc

SEQ ID NO: 2852886 - DNA, 25 bp, Homo sapien
tagattaccagagcctggattttgc

SEQ ID NO: 2852887 - DNA, 25 bp, Homo sapien
tatcatgcgggactgtacagacaca

SEQ ID NO: 2852888 - DNA, 25 bp, Homo sapien
ctggaagtcaggctgtaacagacgc

SEQ ID NO: 2852889 - DNA, 25 bp, Homo sapien
aacagacgctgctgaagggttgtta

SEQ ID NO: 2852890 - DNA, 25 bp, Homo sapien
gcagcgcagggaccgtttgatcaga

SEQ ID NO: 2852891 - DNA, 25 bp, Homo sapien
tcagaagatgtttgtggcgaggata

SEQ ID NO: 2852892 - DNA, 25 bp, Homo sapien
tagaaacaaagtagaaaaacacaga

SEQ ID NO: 2852893 - DNA, 25 bp, Homo sapien
ctagaaacaaagtagaaaaacacag

SEQ ID NO: 2852894 - DNA, 25 bp, Homo sapien
aatttactggtcttgtataatagtc

SEQ ID NO: 2852895 - DNA, 25 bp, Homo sapien
ctgttaaatttactggtcttgtata

SEQ ID NO: 2852896 - DNA, 25 bp, Homo sapien
tgtataatagtcttcaggtagaggt

SEQ ID NO: 2852897 - DNA, 25 bp, Homo sapien
caatctttatctctttctgatcctc

SEQ ID NO: 2852898 - DNA, 25 bp, Homo sapien
ctgtatagcgtaggtcttttctaag

SEQ ID NO: 2852899 - DNA, 25 bp, Homo sapien
tatcctcagtctatgatatcaataa

SEQ ID NO: 2852900 - DNA, 25 bp, Homo sapien
tattcctctgtcatagaatatctgt

SEQ ID NO: 2852901 - DNA, 25 bp, Homo sapien
gagtaatttctcacggatccacctg

SEQ ID NO: 2852902 - DNA, 25 bp, Homo sapien
tgatggatgcaccagctcgtggtcg

SEQ ID NO: 2852903 - DNA, 25 bp, Homo sapien
ggcaagggtactgatggatgcacca

SEQ ID NO: 2852904 - DNA, 25 bp, Homo sapien
aaagtccggcaagggtactgatgga

SEQ ID NO: 2852905 - DNA, 25 bp, Homo sapien
gctcgtggtcgctgaagcctggttc

SEQ ID NO: 2852906 - DNA, 25 bp, Homo sapien
gcatatagtttctacgtcgtgccag

SEQ ID NO: 2852907 - DNA, 25 bp, Homo sapien
tgcgatctcgctcaaccttctcttt

SEQ ID NO: 2852908 - DNA, 25 bp, Homo sapien
aaagccagaggcatatagtttctac

SEQ ID NO: 2852909 - DNA, 25 bp, Homo sapien
cgtgccagtttcttgcgatctcgct

SEQ ID NO: 2852910 - DNA, 25 bp, Homo sapien
gcagatttcttggcgaaaccctaca

SEQ ID NO: 2852911 - DNA, 25 bp, Homo sapien
atttcttggcgaaaccctacaagct

SEQ ID NO: 2852912 - DNA, 25 bp, Homo sapien
tcaggttcctgccaaccgccactag

SEQ ID NO: 2852913 - DNA, 25 bp, Homo sapien
ttcaggttcctgccaaccgccacta

SEQ ID NO: 2852914 - DNA, 25 bp, Homo sapien
tctgccatgcccacatctctagacg

SEQ ID NO: 2852915 - DNA, 25 bp, Homo sapien
acatgccaggtaataggctttcttc

SEQ ID NO: 2852916 - DNA, 25 bp, Homo sapien
tggagatgctcgtggcccgagtaga

SEQ ID NO: 2852917 - DNA, 25 bp, Homo sapien
tctctagacgtccagcgacaaaatc

SEQ ID NO: 2852918 - DNA, 25 bp, Homo sapien
ctaaacaactgggacaataatggga

SEQ ID NO: 2852919 - DNA, 25 bp, Homo sapien
cttttttagtttggcttcagccgat

SEQ ID NO: 2852920 - DNA, 25 bp, Homo sapien
aactgggacaataatgggagtccac

SEQ ID NO: 2852921 - DNA, 25 bp, Homo sapien
tagtttggcttcagccgatggcata

SEQ ID NO: 2852922 - DNA, 25 bp, Homo sapien
gcgaacactctgtatctgtttcttt

SEQ ID NO: 2852923 - DNA, 25 bp, Homo sapien
gaacactctgtatctgtttctttac

SEQ ID NO: 2852924 - DNA, 25 bp, Homo sapien
cgaacactctgtatctgtttcttta

SEQ ID NO: 2852925 - DNA, 25 bp, Homo sapien
agcgaacactctgtatctgtttctt

SEQ ID NO: 2852926 - DNA, 25 bp, Homo sapien
aacaagatgtgccaagcgctgcaga

SEQ ID NO: 2852927 - DNA, 25 bp, Homo sapien
gcagtctgacgagggcccagtttct

SEQ ID NO: 2852928 - DNA, 25 bp, Homo sapien
gaactatgaatgagaacgcctgcgc

SEQ ID NO: 2852929 - DNA, 25 bp, Homo sapien
ttaagtggcctgaactaagcacccc

SEQ ID NO: 2852930 - DNA, 25 bp, Homo sapien
tagaaccagaagatccgctcagtcc

SEQ ID NO: 2852931 - DNA, 25 bp, Homo sapien
aagccccatcgcagacagacacggt

SEQ ID NO: 2852932 - DNA, 25 bp, Homo sapien
cagacacggtccctaagtcaagttt

SEQ ID NO: 2852933 - DNA, 25 bp, Homo sapien
tcaagtttgtccaatcagaggccgc

SEQ ID NO: 2852934 - DNA, 25 bp, Homo sapien
tcgtgagacacacattccagcgacc

SEQ ID NO: 2852935 - DNA, 25 bp, Homo sapien
tccctggactagatagagaacccgg

SEQ ID NO: 2852936 - DNA, 25 bp, Homo sapien
gcagttcgctacaatagcggcagaa

SEQ ID NO: 2852937 - DNA, 25 bp, Homo sapien
caatagcggcagaagtagagttgcg

SEQ ID NO: 2852938 - DNA, 25 bp, Homo sapien
gagggaggaggcgatgacgctcccg

SEQ ID NO: 2852939 - DNA, 25 bp, Homo sapien
ggcgcatcacgtgacccgagagcca

SEQ ID NO: 2852940 - DNA, 25 bp, Homo sapien
aggcgatgacgctcccggcgcatca

SEQ ID NO: 2852941 - DNA, 25 bp, Homo sapien
ccgagagccagcgtcttcctcgctg

SEQ ID NO: 2852942 - DNA, 25 bp, Homo sapien
ttccagtttagagttcagtggccag

SEQ ID NO: 2852943 - DNA, 25 bp, Homo sapien
cagggctcgaggcagtaaccagccc

SEQ ID NO: 2852944 - DNA, 25 bp, Homo sapien
gccatcacatcgcagagcagactca

SEQ ID NO: 2852945 - DNA, 25 bp, Homo sapien
gcagctcagggctcgaggcagtaac

SEQ ID NO: 2852946 - DNA, 25 bp, Homo sapien
taaagctaccacagatataagggtg

SEQ ID NO: 2852947 - DNA, 25 bp, Homo sapien
catagggatgtgagaaccacctgac

SEQ ID NO: 2852948 - DNA, 25 bp, Homo sapien
gaatctctgcccctgtgtaatctga

SEQ ID NO: 2852949 - DNA, 25 bp, Homo sapien
gagaacctgattgctgatgatggcc

SEQ ID NO: 2852950 - DNA, 25 bp, Homo sapien
ggcagatgcctgccgcaacttgcaa

SEQ ID NO: 2852951 - DNA, 25 bp, Homo sapien
cgcaacttgcaagaattgtaccttt

SEQ ID NO: 2852952 - DNA, 25 bp, Homo sapien
ggccttgaggcttggcagatgcctg

SEQ ID NO: 2852953 - DNA, 25 bp, Homo sapien
gcctgccgcaacttgcaagaattgt

SEQ ID NO: 2852954 - DNA, 25 bp, Homo sapien
catggacagtcagtaccctgcactg

SEQ ID NO: 2852955 - DNA, 25 bp, Homo sapien
cgtgctcagcgggtacagtttagaa

SEQ ID NO: 2852956 - DNA, 25 bp, Homo sapien
cgtgtcgtacccaagcagagtgtgc

SEQ ID NO: 2852957 - DNA, 25 bp, Homo sapien
tatattagtagaccccgtgctcagc

SEQ ID NO: 2852958 - DNA, 25 bp, Homo sapien
gcagcctgtcaaaggcctcatgatc

SEQ ID NO: 2852959 - DNA, 25 bp, Homo sapien
cctgtcaaaggcctcatgatcctca

SEQ ID NO: 2852960 - DNA, 25 bp, Homo sapien
tgtcaaaggcctcatgatcctcagg

SEQ ID NO: 2852961 - DNA, 25 bp, Homo sapien
cagcctgtcaaaggcctcatgatcc

SEQ ID NO: 2852962 - DNA, 25 bp, Homo sapien
tgccaaacaagaatactgtacctgg

SEQ ID NO: 2852963 - DNA, 25 bp, Homo sapien
aaaagaagcatataacagataagga

SEQ ID NO: 2852964 - DNA, 25 bp, Homo sapien
gcatataacagataaggagttccaa

SEQ ID NO: 2852965 - DNA, 25 bp, Homo sapien
gctgaacgtgaaaatttgccaaaca

SEQ ID NO: 2852966 - DNA, 25 bp, Homo sapien
tgagccatgatctcagtctgggaag

SEQ ID NO: 2852967 - DNA, 25 bp, Homo sapien
gccatgatctcagtctgggaagtcg

SEQ ID NO: 2852968 - DNA, 25 bp, Homo sapien
ctgtgagccatgatctcagtctggg

SEQ ID NO: 2852969 - DNA, 25 bp, Homo sapien
ccatgatctcagtctgggaagtcga

SEQ ID NO: 2852970 - DNA, 25 bp, Homo sapien
cacctgtgaatccatgaagtcctag

SEQ ID NO: 2852971 - DNA, 25 bp, Homo sapien
tcaatcttgggagcatgtatacgtc

SEQ ID NO: 2852972 - DNA, 25 bp, Homo sapien
cagcttttcattgtacatacagtag

SEQ ID NO: 2852973 - DNA, 25 bp, Homo sapien
tgatggttattcttattcctatggg

SEQ ID NO: 2852974 - DNA, 25 bp, Homo sapien
cttcttaaggtagaaactgattcat

SEQ ID NO: 2852975 - DNA, 25 bp, Homo sapien
agaactactttacggacatttcaca

SEQ ID NO: 2852976 - DNA, 25 bp, Homo sapien
tgtcttggtaaatgcttcacatgga

SEQ ID NO: 2852977 - DNA, 25 bp, Homo sapien
gaatcacatgagaatgagtcacctt

SEQ ID NO: 2852978 - DNA, 25 bp, Homo sapien
catttggataactgagccagaggca

SEQ ID NO: 2852979 - DNA, 25 bp, Homo sapien
taccattgatctacatgattactcg

SEQ ID NO: 2852980 - DNA, 25 bp, Homo sapien
tgattactcgtgtaacaccacattg

SEQ ID NO: 2852981 - DNA, 25 bp, Homo sapien
gtgtcttagctactcttgccttggg

SEQ ID NO: 2852982 - DNA, 25 bp, Homo sapien
gaagcttagttccacacaactgtag

SEQ ID NO: 2852983 - DNA, 25 bp, Homo sapien
tagaggagccccatgttttcacaac

SEQ ID NO: 2852984 - DNA, 25 bp, Homo sapien
caacagacagtttagccaagcagga

SEQ ID NO: 2852985 - DNA, 25 bp, Homo sapien
tatagccatgtgctagctacccaaa

SEQ ID NO: 2852986 - DNA, 25 bp, Homo sapien
caagctcagacgtggtttttacaca

SEQ ID NO: 2852987 - DNA, 25 bp, Homo sapien
gcttaacttgctgtgctgatcactg

SEQ ID NO: 2852988 - DNA, 25 bp, Homo sapien
ggatgttgtccccaagcttatcaaa

SEQ ID NO: 2852989 - DNA, 25 bp, Homo sapien
gctggaaaagttaggcatcaccaaa

SEQ ID NO: 2852990 - DNA, 25 bp, Homo sapien
aatgaggtgggacttctcacagaag

SEQ ID NO: 2852991 - DNA, 25 bp, Homo sapien
gtgacttgcgggagaatgtctttcc

SEQ ID NO: 2852992 - DNA, 25 bp, Homo sapien
tgaattcgctggtgtcccggaaggt

SEQ ID NO: 2852993 - DNA, 25 bp, Homo sapien
ggccttcccacatatagcacattga

SEQ ID NO: 2852994 - DNA, 25 bp, Homo sapien
ctgatgtacaacaagatgaaacttc

SEQ ID NO: 2852995 - DNA, 25 bp, Homo sapien
tgatgtacaacaagatgaaacttct

SEQ ID NO: 2852996 - DNA, 25 bp, Homo sapien
atgtacaacaagatgaaacttctca

SEQ ID NO: 2852997 - DNA, 25 bp, Homo sapien
gatgtacaacaagatgaaacttctc

SEQ ID NO: 2852998 - DNA, 25 bp, Homo sapien
tccacattctgatattgaataaggg

SEQ ID NO: 2852999 - DNA, 25 bp, Homo sapien
tctaaaaacgtttccacactgatta

SEQ ID NO: 2853000 - DNA, 25 bp, Homo sapien
cattctgatattgaataagggattg

SEQ ID NO: 2853001 - DNA, 25 bp, Homo sapien
cactgattatcatcaaaaggtatta

SEQ ID NO: 2853002 - DNA, 25 bp, Homo sapien
ttctcaagattagaattgggctcac

SEQ ID NO: 2853003 - DNA, 25 bp, Homo sapien
aagattagaattgggctcactctgg

SEQ ID NO: 2853004 - DNA, 25 bp, Homo sapien
ctcactctggctagatgattttcca

SEQ ID NO: 2853005 - DNA, 25 bp, Homo sapien
tttccacctccaaaactctgatcag

SEQ ID NO: 2853006 - DNA, 25 bp, Homo sapien
gctgttaacaaatgtgacctgcctg

SEQ ID NO: 2853007 - DNA, 25 bp, Homo sapien
tatctgtttctatgcactcttgaaa

SEQ ID NO: 2853008 - DNA, 25 bp, Homo sapien
gtcttgattctctagaaatctctgc

SEQ ID NO: 2853009 - DNA, 25 bp, Homo sapien
tatttatgccctgatgcctcagtca

SEQ ID NO: 2853010 - DNA, 25 bp, Homo sapien
aactgtccccaaaatacatgactgg

SEQ ID NO: 2853011 - DNA, 25 bp, Homo sapien
ctcctttcagtatcttatgatggaa

SEQ ID NO: 2853012 - DNA, 25 bp, Homo sapien
agacttttaaaatggagcacaatga

SEQ ID NO: 2853013 - DNA, 25 bp, Homo sapien
atcttatgatggaaggaaactgtcc

SEQ ID NO: 2853014 - DNA, 25 bp, Homo sapien
tcaggtgaatagacagacaagaatg

SEQ ID NO: 2853015 - DNA, 25 bp, Homo sapien
tcatcacaagagtcaattaagaggg

SEQ ID NO: 2853016 - DNA, 25 bp, Homo sapien
tacacacaagagacaggatcaacaa

SEQ ID NO: 2853017 - DNA, 25 bp, Homo sapien
tatcctgctacagattcagtatcag

SEQ ID NO: 2853018 - DNA, 25 bp, Homo sapien
attcatctggatagatccaatttga

SEQ ID NO: 2853019 - DNA, 25 bp, Homo sapien
acatctggtttggaaactggatacc

SEQ ID NO: 2853020 - DNA, 25 bp, Homo sapien
tccctttatgatccatggctcttct

SEQ ID NO: 2853021 - DNA, 25 bp, Homo sapien
tagatccaatttgatatgtctccct

SEQ ID NO: 2853022 - DNA, 25 bp, Homo sapien
ctattaaacagaaatcacagagaat

SEQ ID NO: 2853023 - DNA, 25 bp, Homo sapien
gaaatcacagagaattgagattgac

SEQ ID NO: 2853024 - DNA, 25 bp, Homo sapien
taaacagaaatcacagagaattgag

SEQ ID NO: 2853025 - DNA, 25 bp, Homo sapien
tcacagagaattgagattgactgca

SEQ ID NO: 2853026 - DNA, 25 bp, Homo sapien
ctctgagaagggtcaagttgctgcc

SEQ ID NO: 2853027 - DNA, 25 bp, Homo sapien
ccacatccttgaatgatactaaccc

SEQ ID NO: 2853028 - DNA, 25 bp, Homo sapien
cagggtcctctgagaagggtcaagt

SEQ ID NO: 2853029 - DNA, 25 bp, Homo sapien
agaagggtcaagttgctgccactcc

SEQ ID NO: 2853030 - DNA, 25 bp, Homo sapien
ctgtaatagtaaattcctgttcaat

SEQ ID NO: 2853031 - DNA, 25 bp, Homo sapien
tgctataatgtgcacaactacatcc

SEQ ID NO: 2853032 - DNA, 25 bp, Homo sapien
gtgcacaactacatccacacctagt

SEQ ID NO: 2853033 - DNA, 25 bp, Homo sapien
ctataatgtgcacaactacatccac

SEQ ID NO: 2853034 - DNA, 25 bp, Homo sapien
atgtgcacaactacatccacaccta

SEQ ID NO: 2853035 - DNA, 25 bp, Homo sapien
tgcagatatacctagccatatgagg

SEQ ID NO: 2853036 - DNA, 25 bp, Homo sapien
ggtactttgtcacagcaatcctagc

SEQ ID NO: 2853037 - DNA, 25 bp, Homo sapien
taaaggcagcatccaaataactggg

SEQ ID NO: 2853038 - DNA, 25 bp, Homo sapien
gattatagagcagaaatgccctttg

SEQ ID NO: 2853039 - DNA, 25 bp, Homo sapien
tttttgctcttccaaaaggccagat

SEQ ID NO: 2853040 - DNA, 25 bp, Homo sapien
ttttgctcttccaaaaggccagatg

SEQ ID NO: 2853041 - DNA, 25 bp, Homo sapien
tttgctcttccaaaaggccagatga

SEQ ID NO: 2853042 - DNA, 25 bp, Homo sapien
tgtttttcatagtccaaacccagac

SEQ ID NO: 2853043 - DNA, 25 bp, Homo sapien
cctgtgggataaggttgtttgagcc

SEQ ID NO: 2853044 - DNA, 25 bp, Homo sapien
taactaatgggctaccctgtgggat

SEQ ID NO: 2853045 - DNA, 25 bp, Homo sapien
tgtttgagccttacagaagtctcag

SEQ ID NO: 2853046 - DNA, 25 bp, Homo sapien
tcatgaggcaataatcatggatagc

SEQ ID NO: 2853047 - DNA, 25 bp, Homo sapien
aaggatataagtgaagatggagctc

SEQ ID NO: 2853048 - DNA, 25 bp, Homo sapien
gatagatgtgaagatatgtttccag

SEQ ID NO: 2853049 - DNA, 25 bp, Homo sapien
tatgatcacatagaagttgaccaag

SEQ ID NO: 2853050 - DNA, 25 bp, Homo sapien
aagtcatgcagacagagctgaacta

SEQ ID NO: 2853051 - DNA, 25 bp, Homo sapien
gctgaactatttcagaggacgtggg

SEQ ID NO: 2853052 - DNA, 25 bp, Homo sapien
tgacagacagattattttatatggg

SEQ ID NO: 2853053 - DNA, 25 bp, Homo sapien
agagctgaactatttcagaggacgt

SEQ ID NO: 2853054 - DNA, 25 bp, Homo sapien
tctgactcccagctcgattatcagg

SEQ ID NO: 2853055 - DNA, 25 bp, Homo sapien
atccctattggcaaactctcctgct

SEQ ID NO: 2853056 - DNA, 25 bp, Homo sapien
taatgggaaccgctgtcacatccct

SEQ ID NO: 2853057 - DNA, 25 bp, Homo sapien
cgattatcaggtcccaaaaccacca

SEQ ID NO: 2853058 - DNA, 25 bp, Homo sapien
ctcccgaggctgcgccgttccgtac

SEQ ID NO: 2853059 - DNA, 25 bp, Homo sapien
gctcccgaggctgcgccgttccgta

SEQ ID NO: 2853060 - DNA, 25 bp, Homo sapien
cgggctcccgaggctgcgccgttcc

SEQ ID NO: 2853061 - DNA, 25 bp, Homo sapien
ggctcccgaggctgcgccgttccgt

SEQ ID NO: 2853062 - DNA, 25 bp, Homo sapien
tgcccgttccgcatcttcagaggct

SEQ ID NO: 2853063 - DNA, 25 bp, Homo sapien
gcggttttgcccgttccgcatcttc

SEQ ID NO: 2853064 - DNA, 25 bp, Homo sapien
tcttgagagcccggtcgtcttcgta

SEQ ID NO: 2853065 - DNA, 25 bp, Homo sapien
cctggagctgtttccgcatggggcc

SEQ ID NO: 2853066 - DNA, 25 bp, Homo sapien
taaaagagtgataaaagtatacaac

SEQ ID NO: 2853067 - DNA, 25 bp, Homo sapien
cataaatcccagtcattaaaagagt

SEQ ID NO: 2853068 - DNA, 25 bp, Homo sapien
gggagaagacgcaaataaccattat

SEQ ID NO: 2853069 - DNA, 25 bp, Homo sapien
cagtactaaaagtgtgaatatcacc

SEQ ID NO: 2853070 - DNA, 25 bp, Homo sapien
tgatggaaccgatctgtaacttggc

SEQ ID NO: 2853071 - DNA, 25 bp, Homo sapien
tatggcgggagagctaatcacatcc

SEQ ID NO: 2853072 - DNA, 25 bp, Homo sapien
tatgaaagggctatatgagggatcc

SEQ ID NO: 2853073 - DNA, 25 bp, Homo sapien
aacttggctagcaatatcaggatcc

SEQ ID NO: 2853074 - DNA, 25 bp, Homo sapien
ggttgttgcactatctattaaggct

SEQ ID NO: 2853075 - DNA, 25 bp, Homo sapien
ttttatcaacaaagatgtagtcccc

SEQ ID NO: 2853076 - DNA, 25 bp, Homo sapien
tatgccatagtgaaaatgtccatca

SEQ ID NO: 2853077 - DNA, 25 bp, Homo sapien
tattaaggcttgaactgaccctgaa

SEQ ID NO: 2853078 - DNA, 25 bp, Homo sapien
acagtacatcgatcaggtttctctc

SEQ ID NO: 2853079 - DNA, 25 bp, Homo sapien
gatttcattagtgtatgaattctct

SEQ ID NO: 2853080 - DNA, 25 bp, Homo sapien
ccacatacagtacatcgatcaggtt

SEQ ID NO: 2853081 - DNA, 25 bp, Homo sapien
catacagtacatcgatcaggtttct

SEQ ID NO: 2853082 - DNA, 25 bp, Homo sapien
ttccacattcagcacatatgtaagg

SEQ ID NO: 2853083 - DNA, 25 bp, Homo sapien
tccacattcagcacatatgtaaggt

SEQ ID NO: 2853084 - DNA, 25 bp, Homo sapien
ttcagcacatatgtaaggtttctct

SEQ ID NO: 2853085 - DNA, 25 bp, Homo sapien
acattcagcacatatgtaaggtttc

SEQ ID NO: 2853086 - DNA, 25 bp, Homo sapien
gagttgtgacttgcgagagaatgtt

SEQ ID NO: 2853087 - DNA, 25 bp, Homo sapien
tgtgacttgcgagagaatgttttcc

SEQ ID NO: 2853088 - DNA, 25 bp, Homo sapien
gtgactgctgacagaaggattttcc

SEQ ID NO: 2853089 - DNA, 25 bp, Homo sapien
gagatgtgactgctgacagaaggat

SEQ ID NO: 2853090 - DNA, 25 bp, Homo sapien
aggcttcctcacattgagcacattt

SEQ ID NO: 2853091 - DNA, 25 bp, Homo sapien
tgctgaaggcttcctcacattgagc

SEQ ID NO: 2853092 - DNA, 25 bp, Homo sapien
gctgaaggcttcctcacattgagca

SEQ ID NO: 2853093 - DNA, 25 bp, Homo sapien
tgaaggcttcctcacattgagcaca

SEQ ID NO: 2853094 - DNA, 25 bp, Homo sapien
tctttaatgtataaaacagaatgct

SEQ ID NO: 2853095 - DNA, 25 bp, Homo sapien
taatgtataaaacagaatgctttcc

SEQ ID NO: 2853096 - DNA, 25 bp, Homo sapien
ctctttaatgtataaaacagaatgc

SEQ ID NO: 2853097 - DNA, 25 bp, Homo sapien
tgtataaaacagaatgctttcccac

SEQ ID NO: 2853098 - DNA, 25 bp, Homo sapien
tccagtatgagctctgtgatgtata

SEQ ID NO: 2853099 - DNA, 25 bp, Homo sapien
tatgagctctgtgatgtataatcag

SEQ ID NO: 2853100 - DNA, 25 bp, Homo sapien
agtatgagctctgtgatgtataatc

SEQ ID NO: 2853101 - DNA, 25 bp, Homo sapien
ccagtatgagctctgtgatgtataa

SEQ ID NO: 2853102 - DNA, 25 bp, Homo sapien
taagaatctttccacaatgagtagc

SEQ ID NO: 2853103 - DNA, 25 bp, Homo sapien
tttcatgcttagaatagcaagaact

SEQ ID NO: 2853104 - DNA, 25 bp, Homo sapien
cacttacacagtctttgttttgaag

SEQ ID NO: 2853105 - DNA, 25 bp, Homo sapien
caagaactgtagctaggtgttttcc

SEQ ID NO: 2853106 - DNA, 25 bp, Homo sapien
catgaaatatttttccaaatatatt

SEQ ID NO: 2853107 - DNA, 25 bp, Homo sapien
ctgtgcagtcatgaaatatttttcc

SEQ ID NO: 2853108 - DNA, 25 bp, Homo sapien
tatttttccaaatatattatatgga

SEQ ID NO: 2853109 - DNA, 25 bp, Homo sapien
tttccaaatatattatatggatgac

SEQ ID NO: 2853110 - DNA, 25 bp, Homo sapien
agatattcttttgttgttgatgact

SEQ ID NO: 2853111 - DNA, 25 bp, Homo sapien
attcttttgttgttgatgactacaa

SEQ ID NO: 2853112 - DNA, 25 bp, Homo sapien
tattcttttgttgttgatgactaca

SEQ ID NO: 2853113 - DNA, 25 bp, Homo sapien
ctgactcttcagatattcttttgtt

SEQ ID NO: 2853114 - DNA, 25 bp, Homo sapien
cttgcctgacaaatttgtctcagtt

SEQ ID NO: 2853115 - DNA, 25 bp, Homo sapien
tgcctgacaaatttgtctcagtttt

SEQ ID NO: 2853116 - DNA, 25 bp, Homo sapien
ctcagttttcctgatctctctccag

SEQ ID NO: 2853117 - DNA, 25 bp, Homo sapien
tgatctctctccagctggtcatcac

SEQ ID NO: 2853118 - DNA, 25 bp, Homo sapien
aaaatggagtacaatgaatgacccc

SEQ ID NO: 2853119 - DNA, 25 bp, Homo sapien
gagtacaatgaatgaccccttgtaa

SEQ ID NO: 2853120 - DNA, 25 bp, Homo sapien
aaaacatctctaaatatatccagtt

SEQ ID NO: 2853121 - DNA, 25 bp, Homo sapien
ttgaggggtgtcaagtctactctct

SEQ ID NO: 2853122 - DNA, 25 bp, Homo sapien
ggacaaaggagtacaggagggtcga

SEQ ID NO: 2853123 - DNA, 25 bp, Homo sapien
agggaatggagctatgctagtgcaa

SEQ ID NO: 2853124 - DNA, 25 bp, Homo sapien
tgacaaatatatgtgaccacaaagg

SEQ ID NO: 2853125 - DNA, 25 bp, Homo sapien
acttgaagtaggttgtaagaggcca

SEQ ID NO: 2853126 - DNA, 25 bp, Homo sapien
ggttagctaaataatgccagtctgc

SEQ ID NO: 2853127 - DNA, 25 bp, Homo sapien
tgtcatccagtatgctcacagagag

SEQ ID NO: 2853128 - DNA, 25 bp, Homo sapien
tcacctaggtatagaaaacatgctc

SEQ ID NO: 2853129 - DNA, 25 bp, Homo sapien
gactggaaatgtcgacactgctgcc

SEQ ID NO: 2853130 - DNA, 25 bp, Homo sapien
tatcatccatactgtgtatccaagc

SEQ ID NO: 2853131 - DNA, 25 bp, Homo sapien
tcagggtaatatagctggaatctct

SEQ ID NO: 2853132 - DNA, 25 bp, Homo sapien
tgactgaagtcaagtaagcctagcg

SEQ ID NO: 2853133 - DNA, 25 bp, Homo sapien
gggatccctcatgaagggcctaatg

SEQ ID NO: 2853134 - DNA, 25 bp, Homo sapien
atagatccaatttggtatgtgtctc

SEQ ID NO: 2853135 - DNA, 25 bp, Homo sapien
tagatccaatttggtatgtgtctct

SEQ ID NO: 2853136 - DNA, 25 bp, Homo sapien
agatccaatttggtatgtgtctctt

SEQ ID NO: 2853137 - DNA, 25 bp, Homo sapien
gtcctctgagcatagtccagttgct

SEQ ID NO: 2853138 - DNA, 25 bp, Homo sapien
ccattgagaccaggtggctatagat

SEQ ID NO: 2853139 - DNA, 25 bp, Homo sapien
ttgagaccaggtggctatagatctc

SEQ ID NO: 2853140 - DNA, 25 bp, Homo sapien
gggtcctctgagcatagtccagttg

SEQ ID NO: 2853141 - DNA, 25 bp, Homo sapien
taggagtttaggtaaggatagcacc

SEQ ID NO: 2853142 - DNA, 25 bp, Homo sapien
actcgaagcctttgccagtgaatca

SEQ ID NO: 2853143 - DNA, 25 bp, Homo sapien
caattatacataacttgagccagga

SEQ ID NO: 2853144 - DNA, 25 bp, Homo sapien
aaagctatggagaatctgagacttc

SEQ ID NO: 2853145 - DNA, 25 bp, Homo sapien
tctgcttcccttccgatagggcaga

SEQ ID NO: 2853146 - DNA, 25 bp, Homo sapien
tgcttcccttccgatagggcagagg

SEQ ID NO: 2853147 - DNA, 25 bp, Homo sapien
ttctgcttcccttccgatagggcag

SEQ ID NO: 2853148 - DNA, 25 bp, Homo sapien
cttcccttccgatagggcagaggtc

SEQ ID NO: 2853149 - DNA, 25 bp, Homo sapien
tactgacaggttggaacaataaacg

SEQ ID NO: 2853150 - DNA, 25 bp, Homo sapien
gatcatgcagacagagctgaactca

SEQ ID NO: 2853151 - DNA, 25 bp, Homo sapien
attgtttcatttgtgccatcccagg

SEQ ID NO: 2853152 - DNA, 25 bp, Homo sapien
caaaacaggaagagtgctatcagca

SEQ ID NO: 2853153 - DNA, 25 bp, Homo sapien
tgttaatgtctgaacacccagccct

SEQ ID NO: 2853154 - DNA, 25 bp, Homo sapien
cagtaaacttacgaataagcaagac

SEQ ID NO: 2853155 - DNA, 25 bp, Homo sapien
taagcaagactgaaactacaccttt

SEQ ID NO: 2853156 - DNA, 25 bp, Homo sapien
cagccctccatagagtaaatagcag

SEQ ID NO: 2853157 - DNA, 25 bp, Homo sapien
taatgatcccattcctttaatattt

SEQ ID NO: 2853158 - DNA, 25 bp, Homo sapien
gaaggttttcaacttgagagtagtc

SEQ ID NO: 2853159 - DNA, 25 bp, Homo sapien
cttctgtgaaggcacgagttatgga

SEQ ID NO: 2853160 - DNA, 25 bp, Homo sapien
tttcaacttgagagtagtctgtgac

SEQ ID NO: 2853161 - DNA, 25 bp, Homo sapien
gatcacacaggcctccctgctaatg

SEQ ID NO: 2853162 - DNA, 25 bp, Homo sapien
tacaggtccataagtcactggccac

SEQ ID NO: 2853163 - DNA, 25 bp, Homo sapien
gaatcgccaggtccagaaatcacaa

SEQ ID NO: 2853164 - DNA, 25 bp, Homo sapien
tcatagcaccagtcatacaggtcca

SEQ ID NO: 2853165 - DNA, 25 bp, Homo sapien
agcttgattatcaggtcccaaaaat

SEQ ID NO: 2853166 - DNA, 25 bp, Homo sapien
tagcttgattatcaggtcccaaaaa

SEQ ID NO: 2853167 - DNA, 25 bp, Homo sapien
gtctcagtacaagcggaggactcgc

SEQ ID NO: 2853168 - DNA, 25 bp, Homo sapien
gccattttgagatcccaggcgtctc

SEQ ID NO: 2853169 - DNA, 25 bp, Homo sapien
ttcgtgttcgcgagccaggtaacgg

SEQ ID NO: 2853170 - DNA, 25 bp, Homo sapien
cccgaggctgcgctgttccgtatgg

SEQ ID NO: 2853171 - DNA, 25 bp, Homo sapien
tatctcattagacaatgaaacatct

SEQ ID NO: 2853172 - DNA, 25 bp, Homo sapien
ggttcttctggcatattatttcaat

SEQ ID NO: 2853173 - DNA, 25 bp, Homo sapien
ttctggttcttctggcatattattt

SEQ ID NO: 2853174 - DNA, 25 bp, Homo sapien
cattatctcattagacaatgaaaca

SEQ ID NO: 2853175 - DNA, 25 bp, Homo sapien
tctccatgcttcagtatgacagtcg

SEQ ID NO: 2853176 - DNA, 25 bp, Homo sapien
gacagtcgtgtttgctttggtagat

SEQ ID NO: 2853177 - DNA, 25 bp, Homo sapien
taatagtccaaaccttgaggttctc

SEQ ID NO: 2853178 - DNA, 25 bp, Homo sapien
tcattaatagtccaaaccttgaggt

SEQ ID NO: 2853179 - DNA, 25 bp, Homo sapien
atgacaatggcgtctgagtaacatt

SEQ ID NO: 2853180 - DNA, 25 bp, Homo sapien
gaagacttaagcatgatacacatgg

SEQ ID NO: 2853181 - DNA, 25 bp, Homo sapien
taaagaatgacaatggcgtctgagt

SEQ ID NO: 2853182 - DNA, 25 bp, Homo sapien
tgaagacttaagcatgatacacatg

SEQ ID NO: 2853183 - DNA, 25 bp, Homo sapien
tttgcccagtaagacaggataggga

SEQ ID NO: 2853184 - DNA, 25 bp, Homo sapien
cccatgatagggtggtttgaccctt

SEQ ID NO: 2853185 - DNA, 25 bp, Homo sapien
cggcaggatatcaataagatgtacc

SEQ ID NO: 2853186 - DNA, 25 bp, Homo sapien
agaagtctggatagtgtggcttgct

SEQ ID NO: 2853187 - DNA, 25 bp, Homo sapien
caaagagggagtctactcaggatct

SEQ ID NO: 2853188 - DNA, 25 bp, Homo sapien
cgttggacgtgatgttctgcaatgg

SEQ ID NO: 2853189 - DNA, 25 bp, Homo sapien
ccattaattggagacggcgttggac

SEQ ID NO: 2853190 - DNA, 25 bp, Homo sapien
ccttgccggagccacccagaaaggg

SEQ ID NO: 2853191 - DNA, 25 bp, Homo sapien
gaatacgaacagacaagccttgctg

SEQ ID NO: 2853192 - DNA, 25 bp, Homo sapien
tctacaggcatgtcagctgtgatcc

SEQ ID NO: 2853193 - DNA, 25 bp, Homo sapien
cttctaagccaggtggtttggccac

SEQ ID NO: 2853194 - DNA, 25 bp, Homo sapien
ccatggtcttcatagaatctaagcc

SEQ ID NO: 2853195 - DNA, 25 bp, Homo sapien
ccagcctggcacaaatggatgcata

SEQ ID NO: 2853196 - DNA, 25 bp, Homo sapien
catacagttctgtgtactgccaggc

SEQ ID NO: 2853197 - DNA, 25 bp, Homo sapien
gaagtaactgaaggccgtctcatcc

SEQ ID NO: 2853198 - DNA, 25 bp, Homo sapien
tgttcaggaagaaatccgtgtctcc

SEQ ID NO: 2853199 - DNA, 25 bp, Homo sapien
tagtaactatgactgacgtccccag

SEQ ID NO: 2853200 - DNA, 25 bp, Homo sapien
ttagtgcattcaggctaaggcccct

SEQ ID NO: 2853201 - DNA, 25 bp, Homo sapien
ggaatgtgtaccatctgtgtgcctg

SEQ ID NO: 2853202 - DNA, 25 bp, Homo sapien
gtgctggacagtgacaaccctttct

SEQ ID NO: 2853203 - DNA, 25 bp, Homo sapien
ctgctccttcggaggacgtgccctc

SEQ ID NO: 2853204 - DNA, 25 bp, Homo sapien
cttcggaggacgtgccctcacccct

SEQ ID NO: 2853205 - DNA, 25 bp, Homo sapien
tccttcggaggacgtgccctcaccc

SEQ ID NO: 2853206 - DNA, 25 bp, Homo sapien
gctccttcggaggacgtgccctcac

SEQ ID NO: 2853207 - DNA, 25 bp, Homo sapien
ccactggcttgagactcaccccgtc

SEQ ID NO: 2853208 - DNA, 25 bp, Homo sapien
tccactggcttgagactcaccccgt

SEQ ID NO: 2853209 - DNA, 25 bp, Homo sapien
gtccactggcttgagactcaccccg

SEQ ID NO: 2853210 - DNA, 25 bp, Homo sapien
tatggcaaaatccaaggctacctcc

SEQ ID NO: 2853211 - DNA, 25 bp, Homo sapien
acctgatagttagctgcagtggcgc

SEQ ID NO: 2853212 - DNA, 25 bp, Homo sapien
caaggcagactgcaagggccatgta

SEQ ID NO: 2853213 - DNA, 25 bp, Homo sapien
aattctccctgagatcagccaaggc

SEQ ID NO: 2853214 - DNA, 25 bp, Homo sapien
caacttggatttatgtccatgattc

SEQ ID NO: 2853215 - DNA, 25 bp, Homo sapien
ttatgtccatgattcgtgcaaatag

SEQ ID NO: 2853216 - DNA, 25 bp, Homo sapien
gatttatgtccatgattcgtgcaaa

SEQ ID NO: 2853217 - DNA, 25 bp, Homo sapien
ttggatttatgtccatgattcgtgc

SEQ ID NO: 2853218 - DNA, 25 bp, Homo sapien
gacagccaccctaatctgggcttct

SEQ ID NO: 2853219 - DNA, 25 bp, Homo sapien
ggacagccaccctaatctgggcttc

SEQ ID NO: 2853220 - DNA, 25 bp, Homo sapien
tggacagccaccctaatctgggctt

SEQ ID NO: 2853221 - DNA, 25 bp, Homo sapien
atggacagccaccctaatctgggct

SEQ ID NO: 2853222 - DNA, 25 bp, Homo sapien
gggccccagagccagaatatccatc

SEQ ID NO: 2853223 - DNA, 25 bp, Homo sapien
cacagctcctcacagaggggtaggg

SEQ ID NO: 2853224 - DNA, 25 bp, Homo sapien
tgttctggagacaaacccacacttc

SEQ ID NO: 2853225 - DNA, 25 bp, Homo sapien
gagccagaatatccatcattctctt

SEQ ID NO: 2853226 - DNA, 25 bp, Homo sapien
caaattggtcatggcaactagaggg

SEQ ID NO: 2853227 - DNA, 25 bp, Homo sapien
ggtcaaagccggatgaggcctctct

SEQ ID NO: 2853228 - DNA, 25 bp, Homo sapien
tcagggactggtgtacaagctggcc

SEQ ID NO: 2853229 - DNA, 25 bp, Homo sapien
tctgcaacggatggtgggtcaaagc

SEQ ID NO: 2853230 - DNA, 25 bp, Homo sapien
tggagccaaatgacacaatctggtc

SEQ ID NO: 2853231 - DNA, 25 bp, Homo sapien
tccaaggggctccactgaacttgta

SEQ ID NO: 2853232 - DNA, 25 bp, Homo sapien
caaggggctccactgaacttgtagg

SEQ ID NO: 2853233 - DNA, 25 bp, Homo sapien
gcctccaaggggctccactgaactt

SEQ ID NO: 2853234 - DNA, 25 bp, Homo sapien
ctcatcaaagcagcctccaaggggc

SEQ ID NO: 2853235 - DNA, 25 bp, Homo sapien
cccagggaggaccaagactcagtat

SEQ ID NO: 2853236 - DNA, 25 bp, Homo sapien
caatgctggcagataagatattatc

SEQ ID NO: 2853237 - DNA, 25 bp, Homo sapien
caatgcctggcattagataatgcac

SEQ ID NO: 2853238 - DNA, 25 bp, Homo sapien
gagcagaaactaacgacatcacccc

SEQ ID NO: 2853239 - DNA, 25 bp, Homo sapien
ggctgtgggagggtccatcacttgg

SEQ ID NO: 2853240 - DNA, 25 bp, Homo sapien
ctgatttggatttcgaacccctcca

SEQ ID NO: 2853241 - DNA, 25 bp, Homo sapien
gtgggagggtccatcacttgggagc

SEQ ID NO: 2853242 - DNA, 25 bp, Homo sapien
cagggtagacgccaggtgtattccg

SEQ ID NO: 2853243 - DNA, 25 bp, Homo sapien
tgaatctttataacaacccaggctg

SEQ ID NO: 2853244 - DNA, 25 bp, Homo sapien
aaaatgggacaagtgacagcagatc

SEQ ID NO: 2853245 - DNA, 25 bp, Homo sapien
ccaggtctttgtaaatccagagcca

SEQ ID NO: 2853246 - DNA, 25 bp, Homo sapien
ccaggaggtttctgtaatggtccag

SEQ ID NO: 2853247 - DNA, 25 bp, Homo sapien
taggcgtaggggtaggccccgcaga

SEQ ID NO: 2853248 - DNA, 25 bp, Homo sapien
tggaagaggcgcgagttggggagtg

SEQ ID NO: 2853249 - DNA, 25 bp, Homo sapien
tggggctccacatggtaacgctctc

SEQ ID NO: 2853250 - DNA, 25 bp, Homo sapien
gggggtagcggatctgggaccagtc

SEQ ID NO: 2853251 - DNA, 25 bp, Homo sapien
ctgcaagaaaggctgacgtctggct

SEQ ID NO: 2853252 - DNA, 25 bp, Homo sapien
agaaaggctgacgtctggctttggc

SEQ ID NO: 2853253 - DNA, 25 bp, Homo sapien
tgcaagaaaggctgacgtctggctt

SEQ ID NO: 2853254 - DNA, 25 bp, Homo sapien
caagaaaggctgacgtctggctttg

SEQ ID NO: 2853255 - DNA, 25 bp, Homo sapien
tggatacatgggcacggaaggctca

SEQ ID NO: 2853256 - DNA, 25 bp, Homo sapien
tacatggacacggaaggctggtaca

SEQ ID NO: 2853257 - DNA, 25 bp, Homo sapien
tcatacacggccaaagaaggctagt

SEQ ID NO: 2853258 - DNA, 25 bp, Homo sapien
cacatgggcacggaaggttgctacc

SEQ ID NO: 2853259 - DNA, 25 bp, Homo sapien
tcttctgctgtctgagggcttctct

SEQ ID NO: 2853260 - DNA, 25 bp, Homo sapien
ctttcctcttctgctgtctgagggc

SEQ ID NO: 2853261 - DNA, 25 bp, Homo sapien
tctgctgtctgagggcttctcttgc

SEQ ID NO: 2853262 - DNA, 25 bp, Homo sapien
cctcttctgctgtctgagggcttct

SEQ ID NO: 2853263 - DNA, 25 bp, Homo sapien
cttctcctcatctttgaatgctttt

SEQ ID NO: 2853264 - DNA, 25 bp, Homo sapien
tctcctcatctttgaatgcttttag

SEQ ID NO: 2853265 - DNA, 25 bp, Homo sapien
ttctcctcatctttgaatgctttta

SEQ ID NO: 2853266 - DNA, 25 bp, Homo sapien
tcattcatgcgctcacgatcactgc

SEQ ID NO: 2853267 - DNA, 25 bp, Homo sapien
acgatcactgcgctccctctggaag

SEQ ID NO: 2853268 - DNA, 25 bp, Homo sapien
ttcatgcgctcacgatcactgcgct

SEQ ID NO: 2853269 - DNA, 25 bp, Homo sapien
cgatcactgcgctccctctggaagt

SEQ ID NO: 2853270 - DNA, 25 bp, Homo sapien
tgtttccttaggagggcccctgctc

SEQ ID NO: 2853271 - DNA, 25 bp, Homo sapien
gaccagctcctgtttccttaggagg

SEQ ID NO: 2853272 - DNA, 25 bp, Homo sapien
tttcagcaactcattctgcgtgacc

SEQ ID NO: 2853273 - DNA, 25 bp, Homo sapien
aactcattctgcgtgaccagctcct

SEQ ID NO: 2853274 - DNA, 25 bp, Homo sapien
acttgaccttttggcgcagctcctt

SEQ ID NO: 2853275 - DNA, 25 bp, Homo sapien
ggctcagctgatcctgcaggtactt

SEQ ID NO: 2853276 - DNA, 25 bp, Homo sapien
gaccttttggcgcagctccttggcc

SEQ ID NO: 2853277 - DNA, 25 bp, Homo sapien
tcctggtactcacgctgtcgggtga

SEQ ID NO: 2853278 - DNA, 25 bp, Homo sapien
tctggctgcgagtcaccaggtatga

SEQ ID NO: 2853279 - DNA, 25 bp, Homo sapien
caggtatgactgtgcactcataagg

SEQ ID NO: 2853280 - DNA, 25 bp, Homo sapien
gactgctcaaataaggcccctggtg

SEQ ID NO: 2853281 - DNA, 25 bp, Homo sapien
taaggaaagacagaagtgttctccc

SEQ ID NO: 2853282 - DNA, 25 bp, Homo sapien
agacaaggtgtggctatgtcactga

SEQ ID NO: 2853283 - DNA, 25 bp, Homo sapien
acaaggtgtggctatgtcactgagg

SEQ ID NO: 2853284 - DNA, 25 bp, Homo sapien
gacaaggtgtggctatgtcactgag

SEQ ID NO: 2853285 - DNA, 25 bp, Homo sapien
tgcctgctgccacacctggctaagt

SEQ ID NO: 2853286 - DNA, 25 bp, Homo sapien
ggaattacaggtgcctgctgccaca

SEQ ID NO: 2853287 - DNA, 25 bp, Homo sapien
agatgggatttcatcatgttggcca

SEQ ID NO: 2853288 - DNA, 25 bp, Homo sapien
agagatgggatttcatcatgttggc

SEQ ID NO: 2853289 - DNA, 25 bp, Homo sapien
tgcttctgcaaatcagccagcttct

SEQ ID NO: 2853290 - DNA, 25 bp, Homo sapien
acctgcttctgcaaatcagccagct

SEQ ID NO: 2853291 - DNA, 25 bp, Homo sapien
caggaggagcttgcggtcaaagtca

SEQ ID NO: 2853292 - DNA, 25 bp, Homo sapien
aggaggagcttgcggtcaaagtcac

SEQ ID NO: 2853293 - DNA, 25 bp, Homo sapien
cttcatggaccggaaatgctggtcc

SEQ ID NO: 2853294 - DNA, 25 bp, Homo sapien
gcttcatggaccggaaatgctggtc

SEQ ID NO: 2853295 - DNA, 25 bp, Homo sapien
tgcttcatggaccggaaatgctggt

SEQ ID NO: 2853296 - DNA, 25 bp, Homo sapien
gctgcttcatggaccggaaatgctg

SEQ ID NO: 2853297 - DNA, 25 bp, Homo sapien
ttcttctcggctgcgcccaaggcca

SEQ ID NO: 2853298 - DNA, 25 bp, Homo sapien
tctcggctgcgcccaaggccaccac

SEQ ID NO: 2853299 - DNA, 25 bp, Homo sapien
ttctcggctgcgcccaaggccacca

SEQ ID NO: 2853300 - DNA, 25 bp, Homo sapien
accttcttctcggctgcgcccaagg

SEQ ID NO: 2853301 - DNA, 25 bp, Homo sapien
ctgggaccttacctgccgtcacact

SEQ ID NO: 2853302 - DNA, 25 bp, Homo sapien
gggaccttacctgccgtcacactag

SEQ ID NO: 2853303 - DNA, 25 bp, Homo sapien
tgggaccttacctgccgtcacacta

SEQ ID NO: 2853304 - DNA, 25 bp, Homo sapien
ggaccttacctgccgtcacactagc

SEQ ID NO: 2853305 - DNA, 25 bp, Homo sapien
tggccgcccagacgcaccctctttg

SEQ ID NO: 2853306 - DNA, 25 bp, Homo sapien
acaacttcttgagctccaaattttc

SEQ ID NO: 2853307 - DNA, 25 bp, Homo sapien
cagacgcaccctctttgttgccatt

SEQ ID NO: 2853308 - DNA, 25 bp, Homo sapien
catcaacaacttcttgagctccaaa

SEQ ID NO: 2853309 - DNA, 25 bp, Homo sapien
gagcctcgttctccttccgaagctg

SEQ ID NO: 2853310 - DNA, 25 bp, Homo sapien
ctgttccaggcccttatccaacttg

SEQ ID NO: 2853311 - DNA, 25 bp, Homo sapien
ggcccttatccaacttggccttcag

SEQ ID NO: 2853312 - DNA, 25 bp, Homo sapien
tgatcccgctgttccaggcccttat

SEQ ID NO: 2853313 - DNA, 25 bp, Homo sapien
cctgtgccaggtacattgctcggtg

SEQ ID NO: 2853314 - DNA, 25 bp, Homo sapien
catcagtcacttgcttatgtgcggg

SEQ ID NO: 2853315 - DNA, 25 bp, Homo sapien
tgcctcctctatagggctgctgaga

SEQ ID NO: 2853316 - DNA, 25 bp, Homo sapien
gctagcatacagtgtcagcacagag

SEQ ID NO: 2853317 - DNA, 25 bp, Homo sapien
acacactcagcgtggtctccaggcg

SEQ ID NO: 2853318 - DNA, 25 bp, Homo sapien
caggtgcagcatcaggttgccgtcc

SEQ ID NO: 2853319 - DNA, 25 bp, Homo sapien
ggatgccagtcggttgaactccagg

SEQ ID NO: 2853320 - DNA, 25 bp, Homo sapien
tgcagaatggaggtgcgctgctcat

SEQ ID NO: 2853321 - DNA, 25 bp, Homo sapien
taaagttatcggtccaaagtcagag

SEQ ID NO: 2853322 - DNA, 25 bp, Homo sapien
tgagcaggggatcttgcctccatgg

SEQ ID NO: 2853323 - DNA, 25 bp, Homo sapien
agagtgaaacactttctgagcaggg

SEQ ID NO: 2853324 - DNA, 25 bp, Homo sapien
tacgtcagttaaagttatcggtcca

SEQ ID NO: 2853325 - DNA, 25 bp, Homo sapien
ccacttcaaattcagaggaggtgcc

SEQ ID NO: 2853326 - DNA, 25 bp, Homo sapien
gctgctgctctctggtgaattctgc

SEQ ID NO: 2853327 - DNA, 25 bp, Homo sapien
catcgcattggcatggctgctgctc

SEQ ID NO: 2853328 - DNA, 25 bp, Homo sapien
gaattctgctcctcaggagtgacca

SEQ ID NO: 2853329 - DNA, 25 bp, Homo sapien
gcgcccagcctgtagaagatagttt

SEQ ID NO: 2853330 - DNA, 25 bp, Homo sapien
cagagagtttgcgatggacttgccc

SEQ ID NO: 2853331 - DNA, 25 bp, Homo sapien
gcacactcagtgatacttaacagta

SEQ ID NO: 2853332 - DNA, 25 bp, Homo sapien
gaagaattccttgtacataccaggg

SEQ ID NO: 2853333 - DNA, 25 bp, Homo sapien
tgctggcttgtcactggggcatgca

SEQ ID NO: 2853334 - DNA, 25 bp, Homo sapien
ggatggaggcttctggactggtgct

SEQ ID NO: 2853335 - DNA, 25 bp, Homo sapien
ggctgtgggagatgctgtgacattt

SEQ ID NO: 2853336 - DNA, 25 bp, Homo sapien
gagatgctgtgacatttgagtcctt

SEQ ID NO: 2853337 - DNA, 25 bp, Homo sapien
taaacgagagaatgtgggttttggc

SEQ ID NO: 2853338 - DNA, 25 bp, Homo sapien
cctgtgacctaaggataaacgagag

SEQ ID NO: 2853339 - DNA, 25 bp, Homo sapien
ggttttggcataagaagggagttca

SEQ ID NO: 2853340 - DNA, 25 bp, Homo sapien
gatgtggcagccaaaacatgaatgg

SEQ ID NO: 2853341 - DNA, 25 bp, Homo sapien
gtgagctcagccagggggtcgaagg

SEQ ID NO: 2853342 - DNA, 25 bp, Homo sapien
tggtgggagcagctcgttgtccttc

SEQ ID NO: 2853343 - DNA, 25 bp, Homo sapien
gtgggagcagctcgttgtccttcac

SEQ ID NO: 2853344 - DNA, 25 bp, Homo sapien
gctcagccagggggtcgaaggagcc

SEQ ID NO: 2853345 - DNA, 25 bp, Homo sapien
ttctgccggagcctggtcgcttcca

SEQ ID NO: 2853346 - DNA, 25 bp, Homo sapien
cttctgccggagcctggtcgcttcc

SEQ ID NO: 2853347 - DNA, 25 bp, Homo sapien
tctgccggagcctggtcgcttccat

SEQ ID NO: 2853348 - DNA, 25 bp, Homo sapien
attttccttctcctacaagtggaga

SEQ ID NO: 2853349 - DNA, 25 bp, Homo sapien
cctacaagtggagatggggaaacca

SEQ ID NO: 2853350 - DNA, 25 bp, Homo sapien
agggcggagaccttggataattcca

SEQ ID NO: 2853351 - DNA, 25 bp, Homo sapien
accctacgggctacccacagcctga

SEQ ID NO: 2853352 - DNA, 25 bp, Homo sapien
tcgtagatccggtacggtcctctcc

SEQ ID NO: 2853353 - DNA, 25 bp, Homo sapien
gatgcctctcctgagggcacgctgc

SEQ ID NO: 2853354 - DNA, 25 bp, Homo sapien
tccttcagccgggaattctccttca

SEQ ID NO: 2853355 - DNA, 25 bp, Homo sapien
ttcactaggcgctcaaaagctgcgg

SEQ ID NO: 2853356 - DNA, 25 bp, Homo sapien
agggtagctcagcccctgccgtggt

SEQ ID NO: 2853357 - DNA, 25 bp, Homo sapien
ggtagctcagcccctgccgtggtgc

SEQ ID NO: 2853358 - DNA, 25 bp, Homo sapien
gagggtagctcagcccctgccgtgg

SEQ ID NO: 2853359 - DNA, 25 bp, Homo sapien
agctcagcccctgccgtggtgcccg

SEQ ID NO: 2853360 - DNA, 25 bp, Homo sapien
caggagcgtactttgcacatctttg

SEQ ID NO: 2853361 - DNA, 25 bp, Homo sapien
catgtgtctgactggtgcgggcatt

SEQ ID NO: 2853362 - DNA, 25 bp, Homo sapien
acctggtacagcatgtgtctgactg

SEQ ID NO: 2853363 - DNA, 25 bp, Homo sapien
tgaggcaggagcgtactttgcacat

SEQ ID NO: 2853364 - DNA, 25 bp, Homo sapien
gtgccttcctgtggcaactctctgg

SEQ ID NO: 2853365 - DNA, 25 bp, Homo sapien
ttgggagctgtgctcccccacaaaa

SEQ ID NO: 2853366 - DNA, 25 bp, Homo sapien
caagaacttcccacaatggtcatgg

SEQ ID NO: 2853367 - DNA, 25 bp, Homo sapien
tgggagctgtgctcccccacaaaac

SEQ ID NO: 2853368 - DNA, 25 bp, Homo sapien
aggtcacactcatagcacatctccc

SEQ ID NO: 2853369 - DNA, 25 bp, Homo sapien
actcatagcacatctccccatttga

SEQ ID NO: 2853370 - DNA, 25 bp, Homo sapien
tttgaccaaaagttcctggaaggca

SEQ ID NO: 2853371 - DNA, 25 bp, Homo sapien
tgaccaaaagttcctggaaggcaaa

SEQ ID NO: 2853372 - DNA, 25 bp, Homo sapien
aggctgggagacaaacgtggttaca

SEQ ID NO: 2853373 - DNA, 25 bp, Homo sapien
gcgtgtagaacactgcacactccca

SEQ ID NO: 2853374 - DNA, 25 bp, Homo sapien
gatcacattattttcccgggacaca

SEQ ID NO: 2853375 - DNA, 25 bp, Homo sapien
gatcacgtgcttccatgaagtgcca

SEQ ID NO: 2853376 - DNA, 25 bp, Homo sapien
gacctcaagctccaagtacctcggt

SEQ ID NO: 2853377 - DNA, 25 bp, Homo sapien
tagtatagtaggaactctggagcca

SEQ ID NO: 2853378 - DNA, 25 bp, Homo sapien
tgactttgcaactcacagctgtgtg

SEQ ID NO: 2853379 - DNA, 25 bp, Homo sapien
tctgctcctgtacgcacaatgaatg

SEQ ID NO: 2853380 - DNA, 25 bp, Homo sapien
acagcgccccgcttgctgcgtccag

SEQ ID NO: 2853381 - DNA, 25 bp, Homo sapien
gaggacggggagcttggggacacag

SEQ ID NO: 2853382 - DNA, 25 bp, Homo sapien
cagccccgaatccagggacggggca

SEQ ID NO: 2853383 - DNA, 25 bp, Homo sapien
gccccccgtagcactcctagggctc

SEQ ID NO: 2853384 - DNA, 25 bp, Homo sapien
gacgaggaagtgccgggggcctggc

SEQ ID NO: 2853385 - DNA, 25 bp, Homo sapien
aggacgaggaagtgccgggggcctg

SEQ ID NO: 2853386 - DNA, 25 bp, Homo sapien
gcggtgtctctcgtcccttcggcgg

SEQ ID NO: 2853387 - DNA, 25 bp, Homo sapien
tctaggagcgacttccctggggcca

SEQ ID NO: 2853388 - DNA, 25 bp, Homo sapien
cgagcgaggtaaacaccggctgcct

SEQ ID NO: 2853389 - DNA, 25 bp, Homo sapien
ttcggcggccttcccctctaggagc

SEQ ID NO: 2853390 - DNA, 25 bp, Homo sapien
tgtgcctgtacttcccaattctctt

SEQ ID NO: 2853391 - DNA, 25 bp, Homo sapien
caatgacatgaaggctgtaactgtg

SEQ ID NO: 2853392 - DNA, 25 bp, Homo sapien
ggcctcagtgaaaggtagcgatgat

SEQ ID NO: 2853393 - DNA, 25 bp, Homo sapien
taactgtgcccaattcagagggtgg

SEQ ID NO: 2853394 - DNA, 25 bp, Homo sapien
gcagcttgccctagacatcagactg

SEQ ID NO: 2853395 - DNA, 25 bp, Homo sapien
ttcttctatggcccctccccgctct

SEQ ID NO: 2853396 - DNA, 25 bp, Homo sapien
cctcttcttctatggcccctccccg

SEQ ID NO: 2853397 - DNA, 25 bp, Homo sapien
tcttcttctatggcccctccccgct

SEQ ID NO: 2853398 - DNA, 25 bp, Homo sapien
ctcttcttctatggcccctccccgc

SEQ ID NO: 2853399 - DNA, 25 bp, Homo sapien
caggagaatacgagggtgtgtgcac

SEQ ID NO: 2853400 - DNA, 25 bp, Homo sapien
accaggggcggctgtccctatgaag

SEQ ID NO: 2853401 - DNA, 25 bp, Homo sapien
tgtgcaccaggggcggctgtcccta

SEQ ID NO: 2853402 - DNA, 25 bp, Homo sapien
gggcaggagaatacgagggtgtgtg

SEQ ID NO: 2853403 - DNA, 25 bp, Homo sapien
caggaaggagggctgggctgagctg

SEQ ID NO: 2853404 - DNA, 25 bp, Homo sapien
ctgcaggaaggagggctgggctgag

SEQ ID NO: 2853405 - DNA, 25 bp, Homo sapien
aggaaggagggctgggctgagctga

SEQ ID NO: 2853406 - DNA, 25 bp, Homo sapien
tgcaggaaggagggctgggctgagc

SEQ ID NO: 2853407 - DNA, 25 bp, Homo sapien
tcccgtgctgtgaattccagggagt

SEQ ID NO: 2853408 - DNA, 25 bp, Homo sapien
ctgtcccgtgctgtgaattccaggg

SEQ ID NO: 2853409 - DNA, 25 bp, Homo sapien
tcccagactggctgtcccgtgctgt

SEQ ID NO: 2853410 - DNA, 25 bp, Homo sapien
ttcccagactggctgtcccgtgctg

SEQ ID NO: 2853411 - DNA, 25 bp, Homo sapien
cgttttggagtataagccccatgtg

SEQ ID NO: 2853412 - DNA, 25 bp, Homo sapien
tgaaatgctagaaccccatcgaggg

SEQ ID NO: 2853413 - DNA, 25 bp, Homo sapien
tagcaaacagcaggcaatccatgaa

SEQ ID NO: 2853414 - DNA, 25 bp, Homo sapien
tgtgtacagtgtccccgacgttggg

SEQ ID NO: 2853415 - DNA, 25 bp, Homo sapien
gctgtgtgcacaaaagggcatccat

SEQ ID NO: 2853416 - DNA, 25 bp, Homo sapien
gatgcaaagttgtgaccactgacct

SEQ ID NO: 2853417 - DNA, 25 bp, Homo sapien
gatctttctaaacacgcggaccctc

SEQ ID NO: 2853418 - DNA, 25 bp, Homo sapien
ccccaggtgattttgagatgcaaag

SEQ ID NO: 2853419 - DNA, 25 bp, Homo sapien
atgtagagagaatccctctttcggg

SEQ ID NO: 2853420 - DNA, 25 bp, Homo sapien
tatgtatgatgggtgtgaaaggaaa

SEQ ID NO: 2853421 - DNA, 25 bp, Homo sapien
gatagggacaacaaatttcagaatg

SEQ ID NO: 2853422 - DNA, 25 bp, Homo sapien
ggaaggtgacttctcaataccagga

SEQ ID NO: 2853423 - DNA, 25 bp, Homo sapien
ggtgaggtctcacgtctatgcaaat

SEQ ID NO: 2853424 - DNA, 25 bp, Homo sapien
tacagggtggcatgttgcaagattc

SEQ ID NO: 2853425 - DNA, 25 bp, Homo sapien
gagttcaaattgcaatccaggcttc

SEQ ID NO: 2853426 - DNA, 25 bp, Homo sapien
cagatgttgcaacactgtgctgcca

SEQ ID NO: 2853427 - DNA, 25 bp, Homo sapien
aggcagcaggaaggtagtgaccctg

SEQ ID NO: 2853428 - DNA, 25 bp, Homo sapien
caggaaggtagtgaccctgactcac

SEQ ID NO: 2853429 - DNA, 25 bp, Homo sapien
tttatcctgggaacggccaaaggca

SEQ ID NO: 2853430 - DNA, 25 bp, Homo sapien
ttatcctgggaacggccaaaggcag

SEQ ID NO: 2853431 - DNA, 25 bp, Homo sapien
atcccagcactctggtttttcaaag

SEQ ID NO: 2853432 - DNA, 25 bp, Homo sapien
cccagcactctggtttttcaaagcc

SEQ ID NO: 2853433 - DNA, 25 bp, Homo sapien
tcccagcactctggtttttcaaagc

SEQ ID NO: 2853434 - DNA, 25 bp, Homo sapien
tgtctcccagaataggatgccaagt

SEQ ID NO: 2853435 - DNA, 25 bp, Homo sapien
cacacagcctggttggttgtcctcc

SEQ ID NO: 2853436 - DNA, 25 bp, Homo sapien
tgttgggctcgaagtctgccctcca

SEQ ID NO: 2853437 - DNA, 25 bp, Homo sapien
gatgccaagtaggatcagagttcaa

SEQ ID NO: 2853438 - DNA, 25 bp, Homo sapien
catggccttcaagacggccagggag

SEQ ID NO: 2853439 - DNA, 25 bp, Homo sapien
gtccatggccttcaagacggccagg

SEQ ID NO: 2853440 - DNA, 25 bp, Homo sapien
aaggtccatggccttcaagacggcc

SEQ ID NO: 2853441 - DNA, 25 bp, Homo sapien
aggtcaaggtccatggccttcaaga

SEQ ID NO: 2853442 - DNA, 25 bp, Homo sapien
ttccctgttttctcgctccccagtg

SEQ ID NO: 2853443 - DNA, 25 bp, Homo sapien
ccccgacacctagggaccccagctg

SEQ ID NO: 2853444 - DNA, 25 bp, Homo sapien
cgctccccagtgtccttctcttttc

SEQ ID NO: 2853445 - DNA, 25 bp, Homo sapien
tgtgtcctcatccccccgacaccta

SEQ ID NO: 2853446 - DNA, 25 bp, Homo sapien
tactcttcagcctggactcagtgac

SEQ ID NO: 2853447 - DNA, 25 bp, Homo sapien
taattcatcgcttctgcactcagtg

SEQ ID NO: 2853448 - DNA, 25 bp, Homo sapien
tcaagtgtcccgttctccaaggagc

SEQ ID NO: 2853449 - DNA, 25 bp, Homo sapien
tgtaagagcttctctaaccatctgc

SEQ ID NO: 2853450 - DNA, 25 bp, Homo sapien
caaaaagctcttagctggccctcaa

SEQ ID NO: 2853451 - DNA, 25 bp, Homo sapien
atgaaaacaaacacatgcgccgcgc

SEQ ID NO: 2853452 - DNA, 25 bp, Homo sapien
tataaagttggagtaactgaggccc

SEQ ID NO: 2853453 - DNA, 25 bp, Homo sapien
ttcccacaaggctacaggataggtg

SEQ ID NO: 2853454 - DNA, 25 bp, Homo sapien
ctgcatgaaggaaactttccatgca

SEQ ID NO: 2853455 - DNA, 25 bp, Homo sapien
tgcatgaaggaaactttccatgcac

SEQ ID NO: 2853456 - DNA, 25 bp, Homo sapien
tggacagactttacaacctcaagct

SEQ ID NO: 2853457 - DNA, 25 bp, Homo sapien
gcgcttcccgggaaacaccttgcaa

SEQ ID NO: 2853458 - DNA, 25 bp, Homo sapien
gatcacatcgggcacccttgcatag

SEQ ID NO: 2853459 - DNA, 25 bp, Homo sapien
taaagacgtaactcgctcctggaca

SEQ ID NO: 2853460 - DNA, 25 bp, Homo sapien
gaatcggaggcatactttaggaagt

SEQ ID NO: 2853461 - DNA, 25 bp, Homo sapien
ttcctggtccagtactctagcgcgg

SEQ ID NO: 2853462 - DNA, 25 bp, Homo sapien
ggctggcctaaggtcagaaacaagt

SEQ ID NO: 2853463 - DNA, 25 bp, Homo sapien
gaagttaatgttagaagggaagcca

SEQ ID NO: 2853464 - DNA, 25 bp, Homo sapien
ttttcagccgctcagccgtgctggg

SEQ ID NO: 2853465 - DNA, 25 bp, Homo sapien
ccctcattcaaagtacagacactac

SEQ ID NO: 2853466 - DNA, 25 bp, Homo sapien
gtggacaggatctatggctacggtt

SEQ ID NO: 2853467 - DNA, 25 bp, Homo sapien
gagcgtttcctaagctccactgaag

SEQ ID NO: 2853468 - DNA, 25 bp, Homo sapien
accatttcttggcagaagtgcccgc

SEQ ID NO: 2853469 - DNA, 25 bp, Homo sapien
ccatggcggctggtgctgataacca

SEQ ID NO: 2853470 - DNA, 25 bp, Homo sapien
agaagtgcccgccaaagctgtggcc

SEQ ID NO: 2853471 - DNA, 25 bp, Homo sapien
ccttagtctctggagctggaacaat

SEQ ID NO: 2853472 - DNA, 25 bp, Homo sapien
gccttcaggaagtctccggaggtgt

SEQ ID NO: 2853473 - DNA, 25 bp, Homo sapien
ttcaggaagtctccggaggtgtcac

SEQ ID NO: 2853474 - DNA, 25 bp, Homo sapien
cttcaggaagtctccggaggtgtca

SEQ ID NO: 2853475 - DNA, 25 bp, Homo sapien
tcaggaagtctccggaggtgtcacc

SEQ ID NO: 2853476 - DNA, 25 bp, Homo sapien
tgttctaagcggtaacccactggaa

SEQ ID NO: 2853477 - DNA, 25 bp, Homo sapien
gaattgatttcggtataaacaatgc

SEQ ID NO: 2853478 - DNA, 25 bp, Homo sapien
tattagggatctgacactcacccgc

SEQ ID NO: 2853479 - DNA, 25 bp, Homo sapien
gtataaacaatgcaatacagacccc

SEQ ID NO: 2853480 - DNA, 25 bp, Homo sapien
tggagagacttgtcatatttctcaa

SEQ ID NO: 2853481 - DNA, 25 bp, Homo sapien
ggtggagagacttgtcatatttctc

SEQ ID NO: 2853482 - DNA, 25 bp, Homo sapien
ctcaatggcttggtggagagacttg

SEQ ID NO: 2853483 - DNA, 25 bp, Homo sapien
tggcttggtggagagacttgtcata

SEQ ID NO: 2853484 - DNA, 25 bp, Homo sapien
gtcaatctcactgcgggataccatg

SEQ ID NO: 2853485 - DNA, 25 bp, Homo sapien
atctcactgcgggataccatgatcc

SEQ ID NO: 2853486 - DNA, 25 bp, Homo sapien
tcactgcgggataccatgatcctgg

SEQ ID NO: 2853487 - DNA, 25 bp, Homo sapien
aggtcaatctcactgcgggatacca

SEQ ID NO: 2853488 - DNA, 25 bp, Homo sapien
caaaaacagggcggatgttccacct

SEQ ID NO: 2853489 - DNA, 25 bp, Homo sapien
ggccagactgacacgcaaaaaagat

SEQ ID NO: 2853490 - DNA, 25 bp, Homo sapien
tagagcccagtcaggcaagaaacag

SEQ ID NO: 2853491 - DNA, 25 bp, Homo sapien
cagtcctgaccaaaatccctctgtg

SEQ ID NO: 2853492 - DNA, 25 bp, Homo sapien
gaatgtgttacaccagccctaggaa

SEQ ID NO: 2853493 - DNA, 25 bp, Homo sapien
gcgacaagcaccagcctaggagtca

SEQ ID NO: 2853494 - DNA, 25 bp, Homo sapien
gagtcagagctaggttcgagtccca

SEQ ID NO: 2853495 - DNA, 25 bp, Homo sapien
ggcacaggcttgacacatcgtgagt

SEQ ID NO: 2853496 - DNA, 25 bp, Homo sapien
gatttgtaaagtttgtcggcaaaga

SEQ ID NO: 2853497 - DNA, 25 bp, Homo sapien
tggatttgtaaagtttgtcggcaaa

SEQ ID NO: 2853498 - DNA, 25 bp, Homo sapien
tcatggatttgtaaagtttgtcggc

SEQ ID NO: 2853499 - DNA, 25 bp, Homo sapien
catggatttgtaaagtttgtcggca

SEQ ID NO: 2853500 - DNA, 25 bp, Homo sapien
gcagagagatgcggggaacgtggtc

SEQ ID NO: 2853501 - DNA, 25 bp, Homo sapien
agatgcggggaacgtggtcagaggc

SEQ ID NO: 2853502 - DNA, 25 bp, Homo sapien
tgcggggaacgtggtcagaggctgt

SEQ ID NO: 2853503 - DNA, 25 bp, Homo sapien
ccagactctggaccggcctccccca

SEQ ID NO: 2853504 - DNA, 25 bp, Homo sapien
gaatgtaactaaacctgcgtgcaac

SEQ ID NO: 2853505 - DNA, 25 bp, Homo sapien
cagtgagtattacatgccaagaggc

SEQ ID NO: 2853506 - DNA, 25 bp, Homo sapien
caaaatccaccctatgggctgggca

SEQ ID NO: 2853507 - DNA, 25 bp, Homo sapien
gcaactaactttgcgcagggcttgg

SEQ ID NO: 2853508 - DNA, 25 bp, Homo sapien
agcccttcccttagtccctgccagt

SEQ ID NO: 2853509 - DNA, 25 bp, Homo sapien
ccagcccttcccttagtccctgcca

SEQ ID NO: 2853510 - DNA, 25 bp, Homo sapien
tcaagttcccagtgcccccagccct

SEQ ID NO: 2853511 - DNA, 25 bp, Homo sapien
ccagtgcccccagcccttcccttag

SEQ ID NO: 2853512 - DNA, 25 bp, Homo sapien
gtgtgctccacgtcatagttggtca

SEQ ID NO: 2853513 - DNA, 25 bp, Homo sapien
atggtgtgctccacgtcatagttgg

SEQ ID NO: 2853514 - DNA, 25 bp, Homo sapien
acaaatgcatccctgacatccccag

SEQ ID NO: 2853515 - DNA, 25 bp, Homo sapien
ggccacaaatgcatccctgacatcc

SEQ ID NO: 2853516 - DNA, 25 bp, Homo sapien
caggatcgtcatgaaacgtgtctcc

SEQ ID NO: 2853517 - DNA, 25 bp, Homo sapien
ccaaggaagttttgtctccactagg

SEQ ID NO: 2853518 - DNA, 25 bp, Homo sapien
ctctccggaggtgcggatagctccg

SEQ ID NO: 2853519 - DNA, 25 bp, Homo sapien
gatagctccgggtacacaggatcgt

SEQ ID NO: 2853520 - DNA, 25 bp, Homo sapien
tcagaggccgttaaaacccaaatga

SEQ ID NO: 2853521 - DNA, 25 bp, Homo sapien
ctcagaggccgttaaaacccaaatg

SEQ ID NO: 2853522 - DNA, 25 bp, Homo sapien
gggactatgagggaaagctttcgca

SEQ ID NO: 2853523 - DNA, 25 bp, Homo sapien
taaaaacaacctatgccaggcacag

SEQ ID NO: 2853524 - DNA, 25 bp, Homo sapien
aactgtcgagacacctttgaggaga

SEQ ID NO: 2853525 - DNA, 25 bp, Homo sapien
ccatcctgagattgacttgttaaac

SEQ ID NO: 2853526 - DNA, 25 bp, Homo sapien
gcataagctggacctacatctcagg

SEQ ID NO: 2853527 - DNA, 25 bp, Homo sapien
ggcccggcgtagacacgcataagct

SEQ ID NO: 2853528 - DNA, 25 bp, Homo sapien
gctattcacctaggaaatgccagta

SEQ ID NO: 2853529 - DNA, 25 bp, Homo sapien
ccactgtaacatgagggctttgacc

SEQ ID NO: 2853530 - DNA, 25 bp, Homo sapien
tcccgtgcctggtccaggttttctc

SEQ ID NO: 2853531 - DNA, 25 bp, Homo sapien
ggatcctcctgaagtggccagatgt

SEQ ID NO: 2853532 - DNA, 25 bp, Homo sapien
gatgggcacacccaagaggcttatc

SEQ ID NO: 2853533 - DNA, 25 bp, Homo sapien
tgggcacacccaagaggcttatcaa

SEQ ID NO: 2853534 - DNA, 25 bp, Homo sapien
gggatgggcacacccaagaggctta

SEQ ID NO: 2853535 - DNA, 25 bp, Homo sapien
aagaggcttatcaaatcctcaagga

SEQ ID NO: 2853536 - DNA, 25 bp, Homo sapien
taggcctcattgatggcccggattt

SEQ ID NO: 2853537 - DNA, 25 bp, Homo sapien
tttcagcattggtccgagtggccag

SEQ ID NO: 2853538 - DNA, 25 bp, Homo sapien
tggccaggatttcaataagagcctt

SEQ ID NO: 2853539 - DNA, 25 bp, Homo sapien
tccttataggcctcattgatggccc

SEQ ID NO: 2853540 - DNA, 25 bp, Homo sapien
atgtcaaggcaaagatgatctcagc

SEQ ID NO: 2853541 - DNA, 25 bp, Homo sapien
ctggaatgtcaaggcaaagatgatc

SEQ ID NO: 2853542 - DNA, 25 bp, Homo sapien
gaatgtcaaggcaaagatgatctca

SEQ ID NO: 2853543 - DNA, 25 bp, Homo sapien
tgtcaaggcaaagatgatctcagcc

SEQ ID NO: 2853544 - DNA, 25 bp, Homo sapien
tacttgtaagtattggaagagaaca

SEQ ID NO: 2853545 - DNA, 25 bp, Homo sapien
tataggcgtgtgtgtataacaccac

SEQ ID NO: 2853546 - DNA, 25 bp, Homo sapien
ggcccaagaccttggcacaaccaag

SEQ ID NO: 2853547 - DNA, 25 bp, Homo sapien
gctgactatgccagcctctcaagat

SEQ ID NO: 2853548 - DNA, 25 bp, Homo sapien
caggtcttcggagttaacaatgccc

SEQ ID NO: 2853549 - DNA, 25 bp, Homo sapien
caagcctgttgttggagctcctagg

SEQ ID NO: 2853550 - DNA, 25 bp, Homo sapien
taaggaatggcccagtcacactgtg

SEQ ID NO: 2853551 - DNA, 25 bp, Homo sapien
gagtacagactccaactgctggtgc

SEQ ID NO: 2853552 - DNA, 25 bp, Homo sapien
ctagaccccctggtgccacactgta

SEQ ID NO: 2853553 - DNA, 25 bp, Homo sapien
ctattggcacccgcagacactagac

SEQ ID NO: 2853554 - DNA, 25 bp, Homo sapien
tattggcacccgcagacactagacc

SEQ ID NO: 2853555 - DNA, 25 bp, Homo sapien
acactagaccccctggtgccacact

SEQ ID NO: 2853556 - DNA, 25 bp, Homo sapien
aactgcttggcatcgtaatgggccg

SEQ ID NO: 2853557 - DNA, 25 bp, Homo sapien
tgccaggtctccagagatctcagac

SEQ ID NO: 2853558 - DNA, 25 bp, Homo sapien
cagaatcagccttgccaggtctcca

SEQ ID NO: 2853559 - DNA, 25 bp, Homo sapien
taatgggccggtggcatcatgagcc

SEQ ID NO: 2853560 - DNA, 25 bp, Homo sapien
tcgatgattgtgtcttcgtcagtcc

SEQ ID NO: 2853561 - DNA, 25 bp, Homo sapien
tgccgctggacattgctgcggtgcg

SEQ ID NO: 2853562 - DNA, 25 bp, Homo sapien
tgatatcgatgattgtgtcttcgtc

SEQ ID NO: 2853563 - DNA, 25 bp, Homo sapien
tgctgcggtgcgtgatgatatcgat

SEQ ID NO: 2853564 - DNA, 25 bp, Homo sapien
aaggcctgtggctctcggctttccc

SEQ ID NO: 2853565 - DNA, 25 bp, Homo sapien
tgagtcaccaaagccacatgcctca

SEQ ID NO: 2853566 - DNA, 25 bp, Homo sapien
agaagaaggcctgtggctctcggct

SEQ ID NO: 2853567 - DNA, 25 bp, Homo sapien
agtcaccaaagccacatgcctcaga

SEQ ID NO: 2853568 - DNA, 25 bp, Homo sapien
tcactccatcccctgccagcccacg

SEQ ID NO: 2853569 - DNA, 25 bp, Homo sapien
catcccctgccagcccacggccaaa

SEQ ID NO: 2853570 - DNA, 25 bp, Homo sapien
cctgccagcccacggccaaacccac

SEQ ID NO: 2853571 - DNA, 25 bp, Homo sapien
cagcccacggccaaacccaccacac

SEQ ID NO: 2853572 - DNA, 25 bp, Homo sapien
ccctggagaccaaccctgctccctt

SEQ ID NO: 2853573 - DNA, 25 bp, Homo sapien
tttccgcagcgctttggcatctgcg

SEQ ID NO: 2853574 - DNA, 25 bp, Homo sapien
gtcattggctgggcgcacagttccc

SEQ ID NO: 2853575 - DNA, 25 bp, Homo sapien
cagcgctttggcatctgcgtcaggg

SEQ ID NO: 2853576 - DNA, 25 bp, Homo sapien
ccttcatggctttccgcagcgcttt

SEQ ID NO: 2853577 - DNA, 25 bp, Homo sapien
gcaaggaattgtatccgttttatcc

SEQ ID NO: 2853578 - DNA, 25 bp, Homo sapien
catatcccaggtgcctacaacagtg

SEQ ID NO: 2853579 - DNA, 25 bp, Homo sapien
gaaataccagaacagagtttcccaa

SEQ ID NO: 2853580 - DNA, 25 bp, Homo sapien
cgttttatcctgttacatatcccag

SEQ ID NO: 2853581 - DNA, 25 bp, Homo sapien
caagcaggaggaggggaaggtctga

SEQ ID NO: 2853582 - DNA, 25 bp, Homo sapien
aagcaggaggaggggaaggtctgac

SEQ ID NO: 2853583 - DNA, 25 bp, Homo sapien
tcaagcaggaggaggggaaggtctg

SEQ ID NO: 2853584 - DNA, 25 bp, Homo sapien
cactgcactaagttcccacatctga

SEQ ID NO: 2853585 - DNA, 25 bp, Homo sapien
tcgggccactgcactaagttcccac

SEQ ID NO: 2853586 - DNA, 25 bp, Homo sapien
gcactaagttcccacatctgatagg

SEQ ID NO: 2853587 - DNA, 25 bp, Homo sapien
gggccactgcactaagttcccacat

SEQ ID NO: 2853588 - DNA, 25 bp, Homo sapien
aggaaattcttgcatcccttctgta

SEQ ID NO: 2853589 - DNA, 25 bp, Homo sapien
tcacaggaaattcttgcatcccttc

SEQ ID NO: 2853590 - DNA, 25 bp, Homo sapien
attcttgcatcccttctgtaattgg

SEQ ID NO: 2853591 - DNA, 25 bp, Homo sapien
caggaaattcttgcatcccttctgt

SEQ ID NO: 2853592 - DNA, 25 bp, Homo sapien
tcttccccttcctccttgggtctca

SEQ ID NO: 2853593 - DNA, 25 bp, Homo sapien
ctggctcttccccttcctccttggg

SEQ ID NO: 2853594 - DNA, 25 bp, Homo sapien
ctggtctatacccttctgcgctgtg

SEQ ID NO: 2853595 - DNA, 25 bp, Homo sapien
aagagtctccccttggtctgggcta

SEQ ID NO: 2853596 - DNA, 25 bp, Homo sapien
tctgggctagggcatctctgtgtgc

SEQ ID NO: 2853597 - DNA, 25 bp, Homo sapien
ggtctatacccttctgcgctgtggc

SEQ ID NO: 2853598 - DNA, 25 bp, Homo sapien
tcttgtactcgccagaggtgtcatt

SEQ ID NO: 2853599 - DNA, 25 bp, Homo sapien
agtcttcttgtactcgccagaggtg

SEQ ID NO: 2853600 - DNA, 25 bp, Homo sapien
tcttcttgtactcgccagaggtgtc

SEQ ID NO: 2853601 - DNA, 25 bp, Homo sapien
tcatctcccccagacagcttcagca

SEQ ID NO: 2853602 - DNA, 25 bp, Homo sapien
aaggttctgcacagcctgaaagagg

SEQ ID NO: 2853603 - DNA, 25 bp, Homo sapien
ggggaaggctgaatgaacacttatt

SEQ ID NO: 2853604 - DNA, 25 bp, Homo sapien
tgggctcctctcagacaaggaggtg

SEQ ID NO: 2853605 - DNA, 25 bp, Homo sapien
aaaggttacctctcacccagccctg

SEQ ID NO: 2853606 - DNA, 25 bp, Homo sapien
ccgaatgtcgagcatgtccaactca

SEQ ID NO: 2853607 - DNA, 25 bp, Homo sapien
tacttggtccggaagatctcccgaa

SEQ ID NO: 2853608 - DNA, 25 bp, Homo sapien
tccggaagatctcccgaatgtcgag

SEQ ID NO: 2853609 - DNA, 25 bp, Homo sapien
gaagatctcccgaatgtcgagcatg

SEQ ID NO: 2853610 - DNA, 25 bp, Homo sapien
tacgggagaccatgatgcggatcag

SEQ ID NO: 2853611 - DNA, 25 bp, Homo sapien
accatgatgcggatcagggtgttgt

SEQ ID NO: 2853612 - DNA, 25 bp, Homo sapien
ctacgggagaccatgatgcggatca

SEQ ID NO: 2853613 - DNA, 25 bp, Homo sapien
atgatgcggatcagggtgttgtccc

SEQ ID NO: 2853614 - DNA, 25 bp, Homo sapien
tcctttcggaatggccaaccagggc

SEQ ID NO: 2853615 - DNA, 25 bp, Homo sapien
cagagaatggccgacagtctacttt

SEQ ID NO: 2853616 - DNA, 25 bp, Homo sapien
gcgtgatcacatagcactgcgttca

SEQ ID NO: 2853617 - DNA, 25 bp, Homo sapien
gctgagctgcccaacctcattatgg

SEQ ID NO: 2853618 - DNA, 25 bp, Homo sapien
tatgcaggtggcaggacatgtgacc

SEQ ID NO: 2853619 - DNA, 25 bp, Homo sapien
gctgccaccctaagttcatctgttg

SEQ ID NO: 2853620 - DNA, 25 bp, Homo sapien
catgacgtcaggcaggtatgcaggt

SEQ ID NO: 2853621 - DNA, 25 bp, Homo sapien
catctgttgactcatgacgtcaggc

SEQ ID NO: 2853622 - DNA, 25 bp, Homo sapien
ggacttgtcaaagactcccaatagt

SEQ ID NO: 2853623 - DNA, 25 bp, Homo sapien
ttgtcaaagactcccaatagtcctc

SEQ ID NO: 2853624 - DNA, 25 bp, Homo sapien
ctctttggccactggatcccaagga

SEQ ID NO: 2853625 - DNA, 25 bp, Homo sapien
cactggatcccaaggacttgtcaaa

SEQ ID NO: 2853626 - DNA, 25 bp, Homo sapien
ttcagcaaaatattccggggtgctc

SEQ ID NO: 2853627 - DNA, 25 bp, Homo sapien
aatattccggggtgctccggataca

SEQ ID NO: 2853628 - DNA, 25 bp, Homo sapien
ttccggggtgctccggatacacttc

SEQ ID NO: 2853629 - DNA, 25 bp, Homo sapien
cagcaaaatattccggggtgctccg

SEQ ID NO: 2853630 - DNA, 25 bp, Homo sapien
ggatggcctgactccctctttgttt

SEQ ID NO: 2853631 - DNA, 25 bp, Homo sapien
gggatggcctgactccctctttgtt

SEQ ID NO: 2853632 - DNA, 25 bp, Homo sapien
cagaagggggatgggatggcctgac

SEQ ID NO: 2853633 - DNA, 25 bp, Homo sapien
gtagagttattctggctgcctcaga

SEQ ID NO: 2853634 - DNA, 25 bp, Homo sapien
gcttcaatcggcttccctgtggtct

SEQ ID NO: 2853635 - DNA, 25 bp, Homo sapien
tgtggtcttcagatactcatcgaac

SEQ ID NO: 2853636 - DNA, 25 bp, Homo sapien
tcggatgctggcttcaatcggcttc

SEQ ID NO: 2853637 - DNA, 25 bp, Homo sapien
tccccagacagctcccctcggatgc

SEQ ID NO: 2853638 - DNA, 25 bp, Homo sapien
ccaaccgaagatgctgcttgctgcg

SEQ ID NO: 2853639 - DNA, 25 bp, Homo sapien
gatgctgcttgctgcgatttcccaa

SEQ ID NO: 2853640 - DNA, 25 bp, Homo sapien
gcttgctgcgatttcccaagatgta

SEQ ID NO: 2853641 - DNA, 25 bp, Homo sapien
ccaagatgtaaatgaactgggcttc

SEQ ID NO: 2853642 - DNA, 25 bp, Homo sapien
tgttgtaccaggtcctcgctcacta

SEQ ID NO: 2853643 - DNA, 25 bp, Homo sapien
tgtaccaggtcctcgctcactacgt

SEQ ID NO: 2853644 - DNA, 25 bp, Homo sapien
ggtcctcgctcactacgtcatcctc

SEQ ID NO: 2853645 - DNA, 25 bp, Homo sapien
ctggacatcctgttgtaccaggtcc

SEQ ID NO: 2853646 - DNA, 25 bp, Homo sapien
agacaaagaacatgtgtttcaaaca

SEQ ID NO: 2853647 - DNA, 25 bp, Homo sapien
gaaagacaaagaacatgtgtttcaa

SEQ ID NO: 2853648 - DNA, 25 bp, Homo sapien
agaaagacaaagaacatgtgtttca

SEQ ID NO: 2853649 - DNA, 25 bp, Homo sapien
ctgggcagaaagacaaagaacatgt

SEQ ID NO: 2853650 - DNA, 25 bp, Homo sapien
ccctggattgtgcattccaggatct

SEQ ID NO: 2853651 - DNA, 25 bp, Homo sapien
tcttccccctggattgtgcattcca

SEQ ID NO: 2853652 - DNA, 25 bp, Homo sapien
ggagaggtctatggccatcccctct

SEQ ID NO: 2853653 - DNA, 25 bp, Homo sapien
ccccctggattgtgcattccaggat

SEQ ID NO: 2853654 - DNA, 25 bp, Homo sapien
caagatacagggataggacactcct

SEQ ID NO: 2853655 - DNA, 25 bp, Homo sapien
aacgcttgactccaagatacaggga

SEQ ID NO: 2853656 - DNA, 25 bp, Homo sapien
accttgaggatacaaaacgcttgac

SEQ ID NO: 2853657 - DNA, 25 bp, Homo sapien
gctgcttggtgtcaaaccttgagga

SEQ ID NO: 2853658 - DNA, 25 bp, Homo sapien
gtgtcgccgatgatgtcagcctcca

SEQ ID NO: 2853659 - DNA, 25 bp, Homo sapien
agaggtgtcgccgatgatgtcagcc

SEQ ID NO: 2853660 - DNA, 25 bp, Homo sapien
tggccagaggtgtcgccgatgatgt

SEQ ID NO: 2853661 - DNA, 25 bp, Homo sapien
tctggaagtggccagaggtgtcgcc

SEQ ID NO: 2853662 - DNA, 25 bp, Homo sapien
gagacctcagggatctaggataaag

SEQ ID NO: 2853663 - DNA, 25 bp, Homo sapien
aaggaacgcaagctctagtctcatc

SEQ ID NO: 2853664 - DNA, 25 bp, Homo sapien
tgcagaaaggaacgcaagctctagt

SEQ ID NO: 2853665 - DNA, 25 bp, Homo sapien
atctaggataaagggccctgctgcc

SEQ ID NO: 2853666 - DNA, 25 bp, Homo sapien
ctacacgtccatcatggcaagaccc

SEQ ID NO: 2853667 - DNA, 25 bp, Homo sapien
atcatggcaagacccagggtatatt

SEQ ID NO: 2853668 - DNA, 25 bp, Homo sapien
tacacgtccatcatggcaagaccca

SEQ ID NO: 2853669 - DNA, 25 bp, Homo sapien
gcaagacccagggtatattttcaca

SEQ ID NO: 2853670 - DNA, 25 bp, Homo sapien
catgatatgatgaaatggaatctgt

SEQ ID NO: 2853671 - DNA, 25 bp, Homo sapien
aatctgttcattctctctagcccac

SEQ ID NO: 2853672 - DNA, 25 bp, Homo sapien
tggaatctgttcattctctctagcc

SEQ ID NO: 2853673 - DNA, 25 bp, Homo sapien
ctgaccatgatatgatgaaatggaa

SEQ ID NO: 2853674 - DNA, 25 bp, Homo sapien
catctttgtatgctgccaccagctg

SEQ ID NO: 2853675 - DNA, 25 bp, Homo sapien
tctgctcattggtccgggaagccaa

SEQ ID NO: 2853676 - DNA, 25 bp, Homo sapien
cgggaagccaagatctcaatgaggc

SEQ ID NO: 2853677 - DNA, 25 bp, Homo sapien
ctggtgcatctgctcattggtccgg

SEQ ID NO: 2853678 - DNA, 25 bp, Homo sapien
atttctttggcatcacaataggcag

SEQ ID NO: 2853679 - DNA, 25 bp, Homo sapien
aatttctttggcatcacaataggca

SEQ ID NO: 2853680 - DNA, 25 bp, Homo sapien
acttgcccgtcaattcatactttaa

SEQ ID NO: 2853681 - DNA, 25 bp, Homo sapien
tcaggcccacaatcaaccgttcaaa

SEQ ID NO: 2853682 - DNA, 25 bp, Homo sapien
gaaataacctgaacgagcacacagg

SEQ ID NO: 2853683 - DNA, 25 bp, Homo sapien
tgggccctccggttgctgtggttac

SEQ ID NO: 2853684 - DNA, 25 bp, Homo sapien
ctgaacgagcacacaggtgaatgaa

SEQ ID NO: 2853685 - DNA, 25 bp, Homo sapien
gagtgccatatccaggaaataacct

SEQ ID NO: 2853686 - DNA, 25 bp, Homo sapien
ctctgcctgttgctccgtgaggtga

SEQ ID NO: 2853687 - DNA, 25 bp, Homo sapien
tatgtccagtatggcctccttgtca

SEQ ID NO: 2853688 - DNA, 25 bp, Homo sapien
tgctccgtgaggtgattatgtccag

SEQ ID NO: 2853689 - DNA, 25 bp, Homo sapien
tgtagctctggcagacctcctgcct

SEQ ID NO: 2853690 - DNA, 25 bp, Homo sapien
agctcccatgaagcctggcacccac

SEQ ID NO: 2853691 - DNA, 25 bp, Homo sapien
tgggggatacccctcaagctcccat

SEQ ID NO: 2853692 - DNA, 25 bp, Homo sapien
gggggatacccctcaagctcccatg

SEQ ID NO: 2853693 - DNA, 25 bp, Homo sapien
ggctgtgtctacttttgggggatac

SEQ ID NO: 2853694 - DNA, 25 bp, Homo sapien
ggcatcctggttggggtcaaagcct

SEQ ID NO: 2853695 - DNA, 25 bp, Homo sapien
gtacagagcctcggcatcctggttg

SEQ ID NO: 2853696 - DNA, 25 bp, Homo sapien
gtcatggatggagccccggtacttg

SEQ ID NO: 2853697 - DNA, 25 bp, Homo sapien
acagagcctcggcatcctggttggg

SEQ ID NO: 2853698 - DNA, 25 bp, Homo sapien
caacccgcccaaaggacagtgccat

SEQ ID NO: 2853699 - DNA, 25 bp, Homo sapien
ggagcggtgtggatgactttcccat

SEQ ID NO: 2853700 - DNA, 25 bp, Homo sapien
tgctgcaacccgcccaaaggacagt

SEQ ID NO: 2853701 - DNA, 25 bp, Homo sapien
gtggatgactttcccataccacctg

SEQ ID NO: 2853702 - DNA, 25 bp, Homo sapien
gctgagtataggagatgaaaatgat

SEQ ID NO: 2853703 - DNA, 25 bp, Homo sapien
ctggctgagtataggagatgaaaat

SEQ ID NO: 2853704 - DNA, 25 bp, Homo sapien
tgagtataggagatgaaaatgatcc

SEQ ID NO: 2853705 - DNA, 25 bp, Homo sapien
cctggctgagtataggagatgaaaa

SEQ ID NO: 2853706 - DNA, 25 bp, Homo sapien
cctctccccgtctccgtgcctccca

SEQ ID NO: 2853707 - DNA, 25 bp, Homo sapien
gtctgcactgcaggaccccggccag

SEQ ID NO: 2853708 - DNA, 25 bp, Homo sapien
cgtctccgtgcctcccaacgtctgc

SEQ ID NO: 2853709 - DNA, 25 bp, Homo sapien
gcagagtgagtcctggaccgcctcc

SEQ ID NO: 2853710 - DNA, 25 bp, Homo sapien
caccccggtgggcagtttgatccag

SEQ ID NO: 2853711 - DNA, 25 bp, Homo sapien
ggccggagcttgagaaattcctgct

SEQ ID NO: 2853712 - DNA, 25 bp, Homo sapien
gtttgatccagaaacctctgagagc

SEQ ID NO: 2853713 - DNA, 25 bp, Homo sapien
tctgagagcagataccagatccatc

SEQ ID NO: 2853714 - DNA, 25 bp, Homo sapien
gtagtgagctcagatcgcatcactg

SEQ ID NO: 2853715 - DNA, 25 bp, Homo sapien
aggttgtagtgagctcagatcgcat

SEQ ID NO: 2853716 - DNA, 25 bp, Homo sapien
cattccagcctgggcgacagaatga

SEQ ID NO: 2853717 - DNA, 25 bp, Homo sapien
ttgtagtgagctcagatcgcatcac

SEQ ID NO: 2853718 - DNA, 25 bp, Homo sapien
gcccaaagtcgctaaagtcatggga

SEQ ID NO: 2853719 - DNA, 25 bp, Homo sapien
ccaaagtcgctaaagtcatgggatt

SEQ ID NO: 2853720 - DNA, 25 bp, Homo sapien
gtcgctaaagtcatgggattgtaag

SEQ ID NO: 2853721 - DNA, 25 bp, Homo sapien
aagtcgctaaagtcatgggattgta

SEQ ID NO: 2853722 - DNA, 25 bp, Homo sapien
tgactgcctgtcacacctccggcag

SEQ ID NO: 2853723 - DNA, 25 bp, Homo sapien
gctgcgggaacccaggatcaaggca

SEQ ID NO: 2853724 - DNA, 25 bp, Homo sapien
agcagagaagggactttccaccctg

SEQ ID NO: 2853725 - DNA, 25 bp, Homo sapien
tccggcagacaggttcccggctgcg

SEQ ID NO: 2853726 - DNA, 25 bp, Homo sapien
tcagagaggccacttgtacacacag

SEQ ID NO: 2853727 - DNA, 25 bp, Homo sapien
ggtactgatcctataacatcctgtg

SEQ ID NO: 2853728 - DNA, 25 bp, Homo sapien
gccacagctaggacttctctgaggg

SEQ ID NO: 2853729 - DNA, 25 bp, Homo sapien
cagtatactcctcagtggctgtgag

SEQ ID NO: 2853730 - DNA, 25 bp, Homo sapien
ggtctccggttcgcagcagaatcca

SEQ ID NO: 2853731 - DNA, 25 bp, Homo sapien
cctctgggcttgttgctggcaattt

SEQ ID NO: 2853732 - DNA, 25 bp, Homo sapien
tcctctgggcttgttgctggcaatt

SEQ ID NO: 2853733 - DNA, 25 bp, Homo sapien
atgagacagacaaggctcctggccc

SEQ ID NO: 2853734 - DNA, 25 bp, Homo sapien
aagatcatcttcagtgcgtcctggg

SEQ ID NO: 2853735 - DNA, 25 bp, Homo sapien
gggtatatccatcccacttagaagg

SEQ ID NO: 2853736 - DNA, 25 bp, Homo sapien
tccaggagccttgattctgatgaag

SEQ ID NO: 2853737 - DNA, 25 bp, Homo sapien
taacagcgtctaacatagcaaggct

SEQ ID NO: 2853738 - DNA, 25 bp, Homo sapien
gcctggcaaatttaagggttcgaga

SEQ ID NO: 2853739 - DNA, 25 bp, Homo sapien
taagggctggagtttccatgtctgc

SEQ ID NO: 2853740 - DNA, 25 bp, Homo sapien
caagtctagagcttagaagaggacc

SEQ ID NO: 2853741 - DNA, 25 bp, Homo sapien
tgtcgccacccaggaagtatatcgg

SEQ ID NO: 2853742 - DNA, 25 bp, Homo sapien
ttatttaaggaccaccaggacatgg

SEQ ID NO: 2853743 - DNA, 25 bp, Homo sapien
gcatgcatgctcaggaatcacggta

SEQ ID NO: 2853744 - DNA, 25 bp, Homo sapien
cattttgcagataggcaggacatcc

SEQ ID NO: 2853745 - DNA, 25 bp, Homo sapien
cgctggatcggagcccgttagccca

SEQ ID NO: 2853746 - DNA, 25 bp, Homo sapien
actcgaggacgcagcgctcgctgga

SEQ ID NO: 2853747 - DNA, 25 bp, Homo sapien
ggaggcctcgggtcgcagacggacg

SEQ ID NO: 2853748 - DNA, 25 bp, Homo sapien
gcggaccgggaggacagccgtgggc

SEQ ID NO: 2853749 - DNA, 25 bp, Homo sapien
cacaaatagtgggttgcggaggcaa

SEQ ID NO: 2853750 - DNA, 25 bp, Homo sapien
caacagcctcattaggtcggtgaca

SEQ ID NO: 2853751 - DNA, 25 bp, Homo sapien
gaggcaagcttcttcgtgctctggg

SEQ ID NO: 2853752 - DNA, 25 bp, Homo sapien
gggcactttatctgcctgatcagat

SEQ ID NO: 2853753 - DNA, 25 bp, Homo sapien
taatgttgcctggaccgtgtgtgcc

SEQ ID NO: 2853754 - DNA, 25 bp, Homo sapien
ggtcccagcttttggagagctcaga

SEQ ID NO: 2853755 - DNA, 25 bp, Homo sapien
tgtctctgctattgaaaccagcctg

SEQ ID NO: 2853756 - DNA, 25 bp, Homo sapien
aacagttcacagtctagacccagga

SEQ ID NO: 2853757 - DNA, 25 bp, Homo sapien
tagctcacaggctatgcgaaagcag

SEQ ID NO: 2853758 - DNA, 25 bp, Homo sapien
aaagcagacaaccagccagattcgg

SEQ ID NO: 2853759 - DNA, 25 bp, Homo sapien
gctttaaggccagtttaagcctcac

SEQ ID NO: 2853760 - DNA, 25 bp, Homo sapien
cagattcggcccacggctttaaggc

SEQ ID NO: 2853761 - DNA, 25 bp, Homo sapien
ggctgcaggactgttttttcctgag

SEQ ID NO: 2853762 - DNA, 25 bp, Homo sapien
tgaccttcctgtgaccttcaatggc

SEQ ID NO: 2853763 - DNA, 25 bp, Homo sapien
tcctgtgaccttcaatggcccctcc

SEQ ID NO: 2853764 - DNA, 25 bp, Homo sapien
ctgagcaggtctctaaatagctcca

SEQ ID NO: 2853765 - DNA, 25 bp, Homo sapien
gtcatgagaagccaggactcaccac

SEQ ID NO: 2853766 - DNA, 25 bp, Homo sapien
ttggagtcatgagaagccaggactc

SEQ ID NO: 2853767 - DNA, 25 bp, Homo sapien
catgagaagccaggactcaccactt

SEQ ID NO: 2853768 - DNA, 25 bp, Homo sapien
gagtcatgagaagccaggactcacc

SEQ ID NO: 2853769 - DNA, 25 bp, Homo sapien
caggcaccttcatggtaagaaagta

SEQ ID NO: 2853770 - DNA, 25 bp, Homo sapien
caccttcatggtaagaaagtagcag

SEQ ID NO: 2853771 - DNA, 25 bp, Homo sapien
gcagtttatcaaagggctgatggtt

SEQ ID NO: 2853772 - DNA, 25 bp, Homo sapien
cagtttatcaaagggctgatggttg

SEQ ID NO: 2853773 - DNA, 25 bp, Homo sapien
tgtaaaaattgacagaactctgagg

SEQ ID NO: 2853774 - DNA, 25 bp, Homo sapien
gaactctgaggttccactgaggtga

SEQ ID NO: 2853775 - DNA, 25 bp, Homo sapien
cactgaggtgaatgaaggctggtga

SEQ ID NO: 2853776 - DNA, 25 bp, Homo sapien
gaatgaaggctggtgatcccagacc

SEQ ID NO: 2853777 - DNA, 25 bp, Homo sapien
tctgcaggtgaaatcccggagcatg

SEQ ID NO: 2853778 - DNA, 25 bp, Homo sapien
gcaggtgaaatcccggagcatggca

SEQ ID NO: 2853779 - DNA, 25 bp, Homo sapien
tctctgcaggtgaaatcccggagca

SEQ ID NO: 2853780 - DNA, 25 bp, Homo sapien
tgcaggtgaaatcccggagcatggc

SEQ ID NO: 2853781 - DNA, 25 bp, Homo sapien
gaggctatagcctctgcaaccccaa

SEQ ID NO: 2853782 - DNA, 25 bp, Homo sapien
aagcagacgggagccagaagcccat

SEQ ID NO: 2853783 - DNA, 25 bp, Homo sapien
agaagcccatgcagatgaagacccc

SEQ ID NO: 2853784 - DNA, 25 bp, Homo sapien
aaacccaaagcagacgggagccaga

SEQ ID NO: 2853785 - DNA, 25 bp, Homo sapien
tgacccaggtgtagggaaggcccga

SEQ ID NO: 2853786 - DNA, 25 bp, Homo sapien
gggactctttgagcccctggaacag

SEQ ID NO: 2853787 - DNA, 25 bp, Homo sapien
tgagcccctggaacagcactgcagg

SEQ ID NO: 2853788 - DNA, 25 bp, Homo sapien
tggtccactggagggtgcctgtata

SEQ ID NO: 2853789 - DNA, 25 bp, Homo sapien
ctggaggaggaggggcgaaggacgc

SEQ ID NO: 2853790 - DNA, 25 bp, Homo sapien
cactgggcatcctgttatgtacaac

SEQ ID NO: 2853791 - DNA, 25 bp, Homo sapien
ccgcgagccccatcagatgcatagt

SEQ ID NO: 2853792 - DNA, 25 bp, Homo sapien
gcacagtgacaacagtttacaggga

SEQ ID NO: 2853793 - DNA, 25 bp, Homo sapien
agaaacagtaagatgggcccgcgag

SEQ ID NO: 2853794 - DNA, 25 bp, Homo sapien
ctggtgaactcctctggcgcagaca

SEQ ID NO: 2853795 - DNA, 25 bp, Homo sapien
tcagaatcaagcacttcagccagtg

SEQ ID NO: 2853796 - DNA, 25 bp, Homo sapien
caccggggaatatagctgttgggct

SEQ ID NO: 2853797 - DNA, 25 bp, Homo sapien
tccgcactgtcaggacggcgcatgc

SEQ ID NO: 2853798 - DNA, 25 bp, Homo sapien
ctaccagagaaagactttcatcttc

SEQ ID NO: 2853799 - DNA, 25 bp, Homo sapien
gaaagactttcatcttcttcacagg

SEQ ID NO: 2853800 - DNA, 25 bp, Homo sapien
gactttcatcttcttcacaggtgcc

SEQ ID NO: 2853801 - DNA, 25 bp, Homo sapien
aagactttcatcttcttcacaggtg

SEQ ID NO: 2853802 - DNA, 25 bp, Homo sapien
gctcctgggtggtaatagagccact

SEQ ID NO: 2853803 - DNA, 25 bp, Homo sapien
caggaccccttccttatgagacagg

SEQ ID NO: 2853804 - DNA, 25 bp, Homo sapien
gagccactgggaagcaacaaatctt

SEQ ID NO: 2853805 - DNA, 25 bp, Homo sapien
ggtggtacagctgcgcactcatcat

SEQ ID NO: 2853806 - DNA, 25 bp, Homo sapien
catgcatgaatcctccatcagtcaa

SEQ ID NO: 2853807 - DNA, 25 bp, Homo sapien
gtagtcagccgttttgtccagccag

SEQ ID NO: 2853808 - DNA, 25 bp, Homo sapien
tccagccagccgatcagccatggaa

SEQ ID NO: 2853809 - DNA, 25 bp, Homo sapien
gccatggaaccagctgataccagct

SEQ ID NO: 2853810 - DNA, 25 bp, Homo sapien
accatggcagacccatcttcctccc

SEQ ID NO: 2853811 - DNA, 25 bp, Homo sapien
aaccatggcagacccatcttcctcc

SEQ ID NO: 2853812 - DNA, 25 bp, Homo sapien
gttctgggccgagccagagattgct

SEQ ID NO: 2853813 - DNA, 25 bp, Homo sapien
tctgggccgagccagagattgctgt

SEQ ID NO: 2853814 - DNA, 25 bp, Homo sapien
acctgcatggttctgggccgagcca

SEQ ID NO: 2853815 - DNA, 25 bp, Homo sapien
atcagtataactaggagaaaacttc

SEQ ID NO: 2853816 - DNA, 25 bp, Homo sapien
tggagaacggctgtgctaaaaggta

SEQ ID NO: 2853817 - DNA, 25 bp, Homo sapien
aacatctggagaacggctgtgctaa

SEQ ID NO: 2853818 - DNA, 25 bp, Homo sapien
acatctggagaacggctgtgctaaa

SEQ ID NO: 2853819 - DNA, 25 bp, Homo sapien
tctggagaacggctgtgctaaaagg

SEQ ID NO: 2853820 - DNA, 25 bp, Homo sapien
aggcatttgtaagaggacttcctgg

SEQ ID NO: 2853821 - DNA, 25 bp, Homo sapien
ggcatttgtaagaggacttcctgga

SEQ ID NO: 2853822 - DNA, 25 bp, Homo sapien
gaggcatttgtaagaggacttcctg

SEQ ID NO: 2853823 - DNA, 25 bp, Homo sapien
gggaagatccagacctgtggtacta

SEQ ID NO: 2853824 - DNA, 25 bp, Homo sapien
cagagactcatctgtcccaccactg

SEQ ID NO: 2853825 - DNA, 25 bp, Homo sapien
atgtcacacccacatgagacccaga

SEQ ID NO: 2853826 - DNA, 25 bp, Homo sapien
aagaataagggcgaacatgtcacac

SEQ ID NO: 2853827 - DNA, 25 bp, Homo sapien
tacacaggtacatgtaacagactca

SEQ ID NO: 2853828 - DNA, 25 bp, Homo sapien
caggtacatgtaacagactcagtgg

SEQ ID NO: 2853829 - DNA, 25 bp, Homo sapien
agactcagtggtcggagtctaccca

SEQ ID NO: 2853830 - DNA, 25 bp, Homo sapien
ggagtctacccaatttcactttgct

SEQ ID NO: 2853831 - DNA, 25 bp, Homo sapien
gactcgaggtcctcgtgtctcctct

SEQ ID NO: 2853832 - DNA, 25 bp, Homo sapien
atgtccacgtgactcgaggtcctcg

SEQ ID NO: 2853833 - DNA, 25 bp, Homo sapien
tccacgtgactcgaggtcctcgtgt

SEQ ID NO: 2853834 - DNA, 25 bp, Homo sapien
actggtttggccaccacccatgtcc

SEQ ID NO: 2853835 - DNA, 25 bp, Homo sapien
agtgtttctgatgccaaagaggggt

SEQ ID NO: 2853836 - DNA, 25 bp, Homo sapien
cagtgtttctgatgccaaagagggg

SEQ ID NO: 2853837 - DNA, 25 bp, Homo sapien
gtgtttctgatgccaaagaggggtc

SEQ ID NO: 2853838 - DNA, 25 bp, Homo sapien
tgtgcctggactaaaacaatgcttt

SEQ ID NO: 2853839 - DNA, 25 bp, Homo sapien
tacatcgtctgtcccagagtgagga

SEQ ID NO: 2853840 - DNA, 25 bp, Homo sapien
actgatctgtttaggtgtccccaaa

SEQ ID NO: 2853841 - DNA, 25 bp, Homo sapien
taaagcgcattctgcagcctgatgt

SEQ ID NO: 2853842 - DNA, 25 bp, Homo sapien
tggagaatcagcacagcactcccct

SEQ ID NO: 2853843 - DNA, 25 bp, Homo sapien
ctggagaatcagcacagcactcccc

SEQ ID NO: 2853844 - DNA, 25 bp, Homo sapien
ctgtggaaatggagaaacacagtca

SEQ ID NO: 2853845 - DNA, 25 bp, Homo sapien
acacagtcacctctgaacttctaaa

SEQ ID NO: 2853846 - DNA, 25 bp, Homo sapien
tggctgtggaaatggagaaacacag

SEQ ID NO: 2853847 - DNA, 25 bp, Homo sapien
cacagtcacctctgaacttctaaac

SEQ ID NO: 2853848 - DNA, 25 bp, Homo sapien
taagacccggatgacagatgagatc

SEQ ID NO: 2853849 - DNA, 25 bp, Homo sapien
cacagactatcaggactggacggcc

SEQ ID NO: 2853850 - DNA, 25 bp, Homo sapien
tgccaatgaggaataggaacctgct

SEQ ID NO: 2853851 - DNA, 25 bp, Homo sapien
actgttctgacgctggcttagggcc

SEQ ID NO: 2853852 - DNA, 25 bp, Homo sapien
tggagtggaaacacctagaggaagt

SEQ ID NO: 2853853 - DNA, 25 bp, Homo sapien
gaaacacctagaggaagttgataag

SEQ ID NO: 2853854 - DNA, 25 bp, Homo sapien
gtggaaacacctagaggaagttgat

SEQ ID NO: 2853855 - DNA, 25 bp, Homo sapien
gagtggaaacacctagaggaagttg

SEQ ID NO: 2853856 - DNA, 25 bp, Homo sapien
aacttctcggattgggacagagtgc

SEQ ID NO: 2853857 - DNA, 25 bp, Homo sapien
tcctttatgtcaaatggccagcgtg

SEQ ID NO: 2853858 - DNA, 25 bp, Homo sapien
gattccatgtaactcaaggccccag

SEQ ID NO: 2853859 - DNA, 25 bp, Homo sapien
cctgggaaagcctcggaacttctcg

SEQ ID NO: 2853860 - DNA, 25 bp, Homo sapien
aaggagctgtgacttcaggcgtcgt

SEQ ID NO: 2853861 - DNA, 25 bp, Homo sapien
atctcgctcccaccctcgttccttc

SEQ ID NO: 2853862 - DNA, 25 bp, Homo sapien
ccttcctggaaaagaactgagaggc

SEQ ID NO: 2853863 - DNA, 25 bp, Homo sapien
tccagaaaaaccttggaaggagctg

SEQ ID NO: 2853864 - DNA, 25 bp, Homo sapien
cctcacgcgtgagaagcaggtcttc

SEQ ID NO: 2853865 - DNA, 25 bp, Homo sapien
gcattggccccaaggacccggtaca

SEQ ID NO: 2853866 - DNA, 25 bp, Homo sapien
gggaaggcaggcgaggcattggccc

SEQ ID NO: 2853867 - DNA, 25 bp, Homo sapien
acccggtacaacagctcctccttct

SEQ ID NO: 2853868 - DNA, 25 bp, Homo sapien
tcttgaataagttattcattcttct

SEQ ID NO: 2853869 - DNA, 25 bp, Homo sapien
gctatataatcttgaataagttatt

SEQ ID NO: 2853870 - DNA, 25 bp, Homo sapien
atctctgctctaccacttagctata

SEQ ID NO: 2853871 - DNA, 25 bp, Homo sapien
caaatctctgctctaccacttagct

SEQ ID NO: 2853872 - DNA, 25 bp, Homo sapien
ttcaataaattatgtctgacacatg

SEQ ID NO: 2853873 - DNA, 25 bp, Homo sapien
tactaagccctaagaactgattcat

SEQ ID NO: 2853874 - DNA, 25 bp, Homo sapien
gatactagctcttatttactaagcc

SEQ ID NO: 2853875 - DNA, 25 bp, Homo sapien
ccacttaggcctggtgcactataaa

SEQ ID NO: 2853876 - DNA, 25 bp, Homo sapien
agtccattcctcaggcccctctaag

SEQ ID NO: 2853877 - DNA, 25 bp, Homo sapien
cacattccctaaataggccctgggc

SEQ ID NO: 2853878 - DNA, 25 bp, Homo sapien
agccacattccctaaataggccctg

SEQ ID NO: 2853879 - DNA, 25 bp, Homo sapien
ggcccctctaagactctcccagctg

SEQ ID NO: 2853880 - DNA, 25 bp, Homo sapien
gaccacctggttgcggcttcggaca

SEQ ID NO: 2853881 - DNA, 25 bp, Homo sapien
acctggttgcggcttcggacatgga

SEQ ID NO: 2853882 - DNA, 25 bp, Homo sapien
ccacctggttgcggcttcggacatg

SEQ ID NO: 2853883 - DNA, 25 bp, Homo sapien
aggaccacctggttgcggcttcgga

SEQ ID NO: 2853884 - DNA, 25 bp, Homo sapien
tcgtaattttttcctccaatatcag

SEQ ID NO: 2853885 - DNA, 25 bp, Homo sapien
tgcagggtcgtaattttttcctcca

SEQ ID NO: 2853886 - DNA, 25 bp, Homo sapien
aattttttcctccaatatcagattt

SEQ ID NO: 2853887 - DNA, 25 bp, Homo sapien
gtaattttttcctccaatatcagat

SEQ ID NO: 2853888 - DNA, 25 bp, Homo sapien
caaactcacgctgcacgatgtgtgc

SEQ ID NO: 2853889 - DNA, 25 bp, Homo sapien
tcctgagaaaagaacggatggtgac

SEQ ID NO: 2853890 - DNA, 25 bp, Homo sapien
catgagatggtagtgcctgtaagac

SEQ ID NO: 2853891 - DNA, 25 bp, Homo sapien
tctctgcttagattcaaccctaggg

SEQ ID NO: 2853892 - DNA, 25 bp, Homo sapien
tcagatgataaggagccactgcttg

SEQ ID NO: 2853893 - DNA, 25 bp, Homo sapien
gataaggagccactgcttgacccag

SEQ ID NO: 2853894 - DNA, 25 bp, Homo sapien
ggactcagatgataaggagccactg

SEQ ID NO: 2853895 - DNA, 25 bp, Homo sapien
atgataaggagccactgcttgaccc

SEQ ID NO: 2853896 - DNA, 25 bp, Homo sapien
gaaacacccagaaagcgggagcctg

SEQ ID NO: 2853897 - DNA, 25 bp, Homo sapien
agcgggagcctgaggctgcatcccc

SEQ ID NO: 2853898 - DNA, 25 bp, Homo sapien
tcccctctgcatgctttacaaagga

SEQ ID NO: 2853899 - DNA, 25 bp, Homo sapien
ctcccctctgcatgctttacaaagg

SEQ ID NO: 2853900 - DNA, 25 bp, Homo sapien
cactgtttccatgaggatcagccgc

SEQ ID NO: 2853901 - DNA, 25 bp, Homo sapien
tcatctcgatgacaaagtgtaagct

SEQ ID NO: 2853902 - DNA, 25 bp, Homo sapien
cagctcatgaatacgctcattcttc

SEQ ID NO: 2853903 - DNA, 25 bp, Homo sapien
ctcattcttcatctcgatgacaaag

SEQ ID NO: 2853904 - DNA, 25 bp, Homo sapien
gacaaagtgtaagctctccagctcc

SEQ ID NO: 2853905 - DNA, 25 bp, Homo sapien
tggatatgtttcttatagtttcggc

SEQ ID NO: 2853906 - DNA, 25 bp, Homo sapien
tatgtttcttatagtttcggctcag

SEQ ID NO: 2853907 - DNA, 25 bp, Homo sapien
tttcggctcagaatggactcctcca

SEQ ID NO: 2853908 - DNA, 25 bp, Homo sapien
tatagtttcggctcagaatggactc

SEQ ID NO: 2853909 - DNA, 25 bp, Homo sapien
tccagctgtgaggtcagtctgtcta

SEQ ID NO: 2853910 - DNA, 25 bp, Homo sapien
gtgaggtcagtctgtctatggtctc

SEQ ID NO: 2853911 - DNA, 25 bp, Homo sapien
cctggaaagcctccagctgtgaggt

SEQ ID NO: 2853912 - DNA, 25 bp, Homo sapien
ggcctggaaagcctccagctgtgag

SEQ ID NO: 2853913 - DNA, 25 bp, Homo sapien
ccttatccaagactgacacgaccca

SEQ ID NO: 2853914 - DNA, 25 bp, Homo sapien
agactgacacgacccagcccctctc

SEQ ID NO: 2853915 - DNA, 25 bp, Homo sapien
caagactgacacgacccagcccctc

SEQ ID NO: 2853916 - DNA, 25 bp, Homo sapien
ttatccaagactgacacgacccagc

SEQ ID NO: 2853917 - DNA, 25 bp, Homo sapien
cggaaagagtgggtaagcgcttctt

SEQ ID NO: 2853918 - DNA, 25 bp, Homo sapien
tcctgttcatatgaggcccggagga

SEQ ID NO: 2853919 - DNA, 25 bp, Homo sapien
ttctcctgttcatatgaggcccgga

SEQ ID NO: 2853920 - DNA, 25 bp, Homo sapien
ctgctgggtagaactggcctcccgg

SEQ ID NO: 2853921 - DNA, 25 bp, Homo sapien
cacccaaggtgaagtatataacctg

SEQ ID NO: 2853922 - DNA, 25 bp, Homo sapien
gggcaagctttatcctgatactaaa

SEQ ID NO: 2853923 - DNA, 25 bp, Homo sapien
aatatgctgaacaatcctatgcacc

SEQ ID NO: 2853924 - DNA, 25 bp, Homo sapien
ctttgaaagacatgcccaagcacag

SEQ ID NO: 2853925 - DNA, 25 bp, Homo sapien
caccttggccagtggaacatctcta

SEQ ID NO: 2853926 - DNA, 25 bp, Homo sapien
ccttggccagtggaacatctctacc

SEQ ID NO: 2853927 - DNA, 25 bp, Homo sapien
tgcttgtggatcagacagacaggga

SEQ ID NO: 2853928 - DNA, 25 bp, Homo sapien
caccaccttggccagtggaacatct

SEQ ID NO: 2853929 - DNA, 25 bp, Homo sapien
tccagtctgtctcgaagctctagct

SEQ ID NO: 2853930 - DNA, 25 bp, Homo sapien
tctgtctcgaagctctagctccctt

SEQ ID NO: 2853931 - DNA, 25 bp, Homo sapien
cagtctgtctcgaagctctagctcc

SEQ ID NO: 2853932 - DNA, 25 bp, Homo sapien
ctcatccagtctgtctcgaagctct

SEQ ID NO: 2853933 - DNA, 25 bp, Homo sapien
tggcccagatctatcttaaagcagt

SEQ ID NO: 2853934 - DNA, 25 bp, Homo sapien
cctggcccagatctatcttaaagca

SEQ ID NO: 2853935 - DNA, 25 bp, Homo sapien
ctggcccagatctatcttaaagcag

SEQ ID NO: 2853936 - DNA, 25 bp, Homo sapien
ggcccagatctatcttaaagcagtg

SEQ ID NO: 2853937 - DNA, 25 bp, Homo sapien
attctggttatatccttctggtgcc

SEQ ID NO: 2853938 - DNA, 25 bp, Homo sapien
catgttgctggagaattctggttat

SEQ ID NO: 2853939 - DNA, 25 bp, Homo sapien
tgctggagaattctggttatatcct

SEQ ID NO: 2853940 - DNA, 25 bp, Homo sapien
ttatatccttctggtgccgctcagc

SEQ ID NO: 2853941 - DNA, 25 bp, Homo sapien
ccccattgaggggacctaattcatg

SEQ ID NO: 2853942 - DNA, 25 bp, Homo sapien
tgaggggacctaattcatggggctc

SEQ ID NO: 2853943 - DNA, 25 bp, Homo sapien
taattcatggggctctggtctgggt

SEQ ID NO: 2853944 - DNA, 25 bp, Homo sapien
gggacctaattcatggggctctggt

SEQ ID NO: 2853945 - DNA, 25 bp, Homo sapien
gagggtgggaggtcaatgcgaggac

SEQ ID NO: 2853946 - DNA, 25 bp, Homo sapien
atgagacaacagcaaggcgtgggta

SEQ ID NO: 2853947 - DNA, 25 bp, Homo sapien
acagcaaggcgtgggtagagggtgg

SEQ ID NO: 2853948 - DNA, 25 bp, Homo sapien
gtagagggtgggaggtcaatgcgag

SEQ ID NO: 2853949 - DNA, 25 bp, Homo sapien
caccgtgacgcgtggttaggtctac

SEQ ID NO: 2853950 - DNA, 25 bp, Homo sapien
gaaatctgtattggacttgccccag

SEQ ID NO: 2853951 - DNA, 25 bp, Homo sapien
tgcttaacacgaatgtccaggctgc

SEQ ID NO: 2853952 - DNA, 25 bp, Homo sapien
tagtgctacctattacatgcctgcc

SEQ ID NO: 2853953 - DNA, 25 bp, Homo sapien
aaggcttacgggaacccagagcagg

SEQ ID NO: 2853954 - DNA, 25 bp, Homo sapien
ccagggtcagctttatctgagtagc

SEQ ID NO: 2853955 - DNA, 25 bp, Homo sapien
agacttgagctagccctctttggga

SEQ ID NO: 2853956 - DNA, 25 bp, Homo sapien
gataacttgtcagaagctgcaaagc

SEQ ID NO: 2853957 - DNA, 25 bp, Homo sapien
tcagagcctattggccgagggtaga

SEQ ID NO: 2853958 - DNA, 25 bp, Homo sapien
tagtgctgggatctaagtaaccaca

SEQ ID NO: 2853959 - DNA, 25 bp, Homo sapien
aatatcagagctgcctttccggtgt

SEQ ID NO: 2853960 - DNA, 25 bp, Homo sapien
ccagcaccactagtgctgggatcta

SEQ ID NO: 2853961 - DNA, 25 bp, Homo sapien
ggtgagaacctggagccctccacac

SEQ ID NO: 2853962 - DNA, 25 bp, Homo sapien
ggaggcctgggtgagaacctggagc

SEQ ID NO: 2853963 - DNA, 25 bp, Homo sapien
ctgggtgagaacctggagccctcca

SEQ ID NO: 2853964 - DNA, 25 bp, Homo sapien
gaggcctgggtgagaacctggagcc

SEQ ID NO: 2853965 - DNA, 25 bp, Homo sapien
cagacagtgtaagggtggttgtaaa

SEQ ID NO: 2853966 - DNA, 25 bp, Homo sapien
gttcttcagcagacagtgtaagggt

SEQ ID NO: 2853967 - DNA, 25 bp, Homo sapien
tcttcagcagacagtgtaagggtgg

SEQ ID NO: 2853968 - DNA, 25 bp, Homo sapien
ttcagcagacagtgtaagggtggtt

SEQ ID NO: 2853969 - DNA, 25 bp, Homo sapien
acgcagcatgctcctaattctacag

SEQ ID NO: 2853970 - DNA, 25 bp, Homo sapien
tcagccatctcccaagttgcacgca

SEQ ID NO: 2853971 - DNA, 25 bp, Homo sapien
agccatctcccaagttgcacgcagc

SEQ ID NO: 2853972 - DNA, 25 bp, Homo sapien
atctcccaagttgcacgcagcatgc

SEQ ID NO: 2853973 - DNA, 25 bp, Homo sapien
agatgggttccaaagggaggcactg

SEQ ID NO: 2853974 - DNA, 25 bp, Homo sapien
aagatgggttccaaagggaggcact

SEQ ID NO: 2853975 - DNA, 25 bp, Homo sapien
ccaagatgggttccaaagggaggca

SEQ ID NO: 2853976 - DNA, 25 bp, Homo sapien
caagatgggttccaaagggaggcac

SEQ ID NO: 2853977 - DNA, 25 bp, Homo sapien
agtgggggctcccagtctggccctc

SEQ ID NO: 2853978 - DNA, 25 bp, Homo sapien
gcttgtcttcaggtaatggatgggt

SEQ ID NO: 2853979 - DNA, 25 bp, Homo sapien
taggatggcttgtcttcaggtaatg

SEQ ID NO: 2853980 - DNA, 25 bp, Homo sapien
atggatgggtttagatctgctaaag

SEQ ID NO: 2853981 - DNA, 25 bp, Homo sapien
cactggctgatctatgcaccctgag

SEQ ID NO: 2853982 - DNA, 25 bp, Homo sapien
acggaagcccaagtacaccctgagg

SEQ ID NO: 2853983 - DNA, 25 bp, Homo sapien
gaatttcatactgagaccccttaga

SEQ ID NO: 2853984 - DNA, 25 bp, Homo sapien
tgggagggtacttacactcttcgag

SEQ ID NO: 2853985 - DNA, 25 bp, Homo sapien
aaccgagctagaagatcagatttgc

SEQ ID NO: 2853986 - DNA, 25 bp, Homo sapien
cgagctagaagatcagatttgccca

SEQ ID NO: 2853987 - DNA, 25 bp, Homo sapien
caaccgagctagaagatcagatttg

SEQ ID NO: 2853988 - DNA, 25 bp, Homo sapien
accgagctagaagatcagatttgcc

SEQ ID NO: 2853989 - DNA, 25 bp, Homo sapien
tatggcacaggagctaataccaagc

SEQ ID NO: 2853990 - DNA, 25 bp, Homo sapien
tgtttgccaagttagccatgccctt

SEQ ID NO: 2853991 - DNA, 25 bp, Homo sapien
gataggaactcactaccctttgagg

SEQ ID NO: 2853992 - DNA, 25 bp, Homo sapien
aaggcatccttcttgctagtcaggg

SEQ ID NO: 2853993 - DNA, 25 bp, Homo sapien
ctactggttgatttcagaattaccc

SEQ ID NO: 2853994 - DNA, 25 bp, Homo sapien
tactggttgatttcagaattaccca

SEQ ID NO: 2853995 - DNA, 25 bp, Homo sapien
ggcttgctacatggatgtgctcatg

SEQ ID NO: 2853996 - DNA, 25 bp, Homo sapien
gctgaatgactgacccaccaagtac

SEQ ID NO: 2853997 - DNA, 25 bp, Homo sapien
tgactgacccaccaagtacctgtca

SEQ ID NO: 2853998 - DNA, 25 bp, Homo sapien
catggatgtgctcatgaagggctgc

SEQ ID NO: 2853999 - DNA, 25 bp, Homo sapien
gctatagccacagccttcgggaatg

SEQ ID NO: 2854000 - DNA, 25 bp, Homo sapien
tgcttggaactatggagctatagcc

SEQ ID NO: 2854001 - DNA, 25 bp, Homo sapien
tctcagaggtcctgcttggaactat

SEQ ID NO: 2854002 - DNA, 25 bp, Homo sapien
ccttcgggaatggagagttcagaca

SEQ ID NO: 2854003 - DNA, 25 bp, Homo sapien
agaaacctgagaattgtcccctggg

SEQ ID NO: 2854004 - DNA, 25 bp, Homo sapien
cttctgggctcgtcagaccccaagg

SEQ ID NO: 2854005 - DNA, 25 bp, Homo sapien
ctgggctcgtcagaccccaaggggc

SEQ ID NO: 2854006 - DNA, 25 bp, Homo sapien
acctgagaattgtcccctgggccct

SEQ ID NO: 2854007 - DNA, 25 bp, Homo sapien
tgctcagcctgctgtgtctgcagcc

SEQ ID NO: 2854008 - DNA, 25 bp, Homo sapien
ttcgggggtttgcagctgctcagcc

SEQ ID NO: 2854009 - DNA, 25 bp, Homo sapien
ctttttcgggggtttgcagctgctc

SEQ ID NO: 2854010 - DNA, 25 bp, Homo sapien
tcagcctgctgtgtctgcagcccat

SEQ ID NO: 2854011 - DNA, 25 bp, Homo sapien
gctcccggacgccgcttcccaactc

SEQ ID NO: 2854012 - DNA, 25 bp, Homo sapien
gagcctgcgatccgggccccgctgc

SEQ ID NO: 2854013 - DNA, 25 bp, Homo sapien
ctgccggcgagaccctgaaactgaa

SEQ ID NO: 2854014 - DNA, 25 bp, Homo sapien
gggctgccggcgagaccctgaaact

SEQ ID NO: 2854015 - DNA, 25 bp, Homo sapien
gaaactgaacctggaagcgctgtct

SEQ ID NO: 2854016 - DNA, 25 bp, Homo sapien
ggcctcagtgtagcccgcagggcca

SEQ ID NO: 2854017 - DNA, 25 bp, Homo sapien
atctcatcaagggaccatctgcacc

SEQ ID NO: 2854018 - DNA, 25 bp, Homo sapien
ccactgacatcatgctctcaattct

SEQ ID NO: 2854019 - DNA, 25 bp, Homo sapien
ttcagtggatcctcatttccagcag

SEQ ID NO: 2854020 - DNA, 25 bp, Homo sapien
agacacattaactgtatagccttgt

SEQ ID NO: 2854021 - DNA, 25 bp, Homo sapien
caaggagcagagctacatgagcatc

SEQ ID NO: 2854022 - DNA, 25 bp, Homo sapien
ccaccaaggaccagagccacgtggg

SEQ ID NO: 2854023 - DNA, 25 bp, Homo sapien
agcagagctacatgagcatctctca

SEQ ID NO: 2854024 - DNA, 25 bp, Homo sapien
cacgtgggcatctctcatctacaca

SEQ ID NO: 2854025 - DNA, 25 bp, Homo sapien
tgccagggttcgtgactggtgcctt

SEQ ID NO: 2854026 - DNA, 25 bp, Homo sapien
cgtgactggtgcctttgcgttgaca

SEQ ID NO: 2854027 - DNA, 25 bp, Homo sapien
gagcagaggcaatcaattctccagt

SEQ ID NO: 2854028 - DNA, 25 bp, Homo sapien
gcagaggcaatcaattctccagtgc

SEQ ID NO: 2854029 - DNA, 25 bp, Homo sapien
gatttgcccaattaatactagggtg

SEQ ID NO: 2854030 - DNA, 25 bp, Homo sapien
tactagggtgcagtgtatcctggag

SEQ ID NO: 2854031 - DNA, 25 bp, Homo sapien
taagaaccgtgagaaacatgttgct

SEQ ID NO: 2854032 - DNA, 25 bp, Homo sapien
tgtttacaaactcaggtacccgcag

SEQ ID NO: 2854033 - DNA, 25 bp, Homo sapien
tgtgcagtgtgatgtgtcccaaacg

SEQ ID NO: 2854034 - DNA, 25 bp, Homo sapien
caaacggactggctcatgggtggcc

SEQ ID NO: 2854035 - DNA, 25 bp, Homo sapien
aagccatagtgtccggtcccaagga

SEQ ID NO: 2854036 - DNA, 25 bp, Homo sapien
ggtggcctcgacatcaaactgcctg

SEQ ID NO: 2854037 - DNA, 25 bp, Homo sapien
gaaaaatccaccgtggtacattcag

SEQ ID NO: 2854038 - DNA, 25 bp, Homo sapien
tgtacatctccggaatgccatgctg

SEQ ID NO: 2854039 - DNA, 25 bp, Homo sapien
accgaggtgccccatggcagtcttc

SEQ ID NO: 2854040 - DNA, 25 bp, Homo sapien
tacattcagtcctctcaccgaggtg

SEQ ID NO: 2854041 - DNA, 25 bp, Homo sapien
gtgccaaggccgtgaacaataagga

SEQ ID NO: 2854042 - DNA, 25 bp, Homo sapien
tgtgagataccgatttagatgttgg

SEQ ID NO: 2854043 - DNA, 25 bp, Homo sapien
actggccagtacgttttgaaagtgc

SEQ ID NO: 2854044 - DNA, 25 bp, Homo sapien
tatgataactaactgcattgtgaga

SEQ ID NO: 2854045 - DNA, 25 bp, Homo sapien
cttttggttcacccatgtctccctg

SEQ ID NO: 2854046 - DNA, 25 bp, Homo sapien
tcttttggttcacccatgtctccct

SEQ ID NO: 2854047 - DNA, 25 bp, Homo sapien
tctcttggaaagataaagacgccac

SEQ ID NO: 2854048 - DNA, 25 bp, Homo sapien
aatctgatgctttaagggcagctac

SEQ ID NO: 2854049 - DNA, 25 bp, Homo sapien
taaaaccaaaagaggtgtagcctga

SEQ ID NO: 2854050 - DNA, 25 bp, Homo sapien
gaatatcagagttgacagagtcctt

SEQ ID NO: 2854051 - DNA, 25 bp, Homo sapien
ctcatagagggcttggtatgtccca

SEQ ID NO: 2854052 - DNA, 25 bp, Homo sapien
tgtggagttggccatggaatggctg

SEQ ID NO: 2854053 - DNA, 25 bp, Homo sapien
tggagttggccatggaatggctgat

SEQ ID NO: 2854054 - DNA, 25 bp, Homo sapien
gggcaactcatagagggcttggtat

SEQ ID NO: 2854055 - DNA, 25 bp, Homo sapien
aaaagatgacgatctccaggagggc

SEQ ID NO: 2854056 - DNA, 25 bp, Homo sapien
ccctaaaaggcccacgatgctaatc

SEQ ID NO: 2854057 - DNA, 25 bp, Homo sapien
catgatgtccttggcaatggtgaca

SEQ ID NO: 2854058 - DNA, 25 bp, Homo sapien
cctcagagtaaaagatgacgatctc

SEQ ID NO: 2854059 - DNA, 25 bp, Homo sapien
gaagatgccgatagagtacatcagc

SEQ ID NO: 2854060 - DNA, 25 bp, Homo sapien
gatggcaaacgggatgatgatctca

SEQ ID NO: 2854061 - DNA, 25 bp, Homo sapien
gacagacaggtctacaaacagtgcc

SEQ ID NO: 2854062 - DNA, 25 bp, Homo sapien
aggttagacagaccaaggctgagcg

SEQ ID NO: 2854063 - DNA, 25 bp, Homo sapien
gctcatgaatgcttaccacgtgcta

SEQ ID NO: 2854064 - DNA, 25 bp, Homo sapien
gctgtgctctctgctatgacaacca

SEQ ID NO: 2854065 - DNA, 25 bp, Homo sapien
cacggtcactgcatcaggtagcaca

SEQ ID NO: 2854066 - DNA, 25 bp, Homo sapien
cattatcataacacagcaaggtggg

SEQ ID NO: 2854067 - DNA, 25 bp, Homo sapien
gatgacaatggacatccccaagtac

SEQ ID NO: 2854068 - DNA, 25 bp, Homo sapien
ccagtaagatatagaggatgatgac

SEQ ID NO: 2854069 - DNA, 25 bp, Homo sapien
ccccagtaagatatagaggatgatg

SEQ ID NO: 2854070 - DNA, 25 bp, Homo sapien
catccccaagtacagaacaaaagaa

SEQ ID NO: 2854071 - DNA, 25 bp, Homo sapien
taccaaagaacagcaagaaggtctt

SEQ ID NO: 2854072 - DNA, 25 bp, Homo sapien
gacgccttcaaatgtgaagatggct

SEQ ID NO: 2854073 - DNA, 25 bp, Homo sapien
cataccgacgccttcaaatgtgaag

SEQ ID NO: 2854074 - DNA, 25 bp, Homo sapien
tgtgaagatggctgtaccaaagaac

SEQ ID NO: 2854075 - DNA, 25 bp, Homo sapien
ccaatgtcgagaagacggacagcac

SEQ ID NO: 2854076 - DNA, 25 bp, Homo sapien
gatgttggccaatgtcgagaagacg

SEQ ID NO: 2854077 - DNA, 25 bp, Homo sapien
aaagatcagagccatgctcccaagg

SEQ ID NO: 2854078 - DNA, 25 bp, Homo sapien
ttggccaatgtcgagaagacggaca

SEQ ID NO: 2854079 - DNA, 25 bp, Homo sapien
ggcaggattatcagcatgtagaaac

SEQ ID NO: 2854080 - DNA, 25 bp, Homo sapien
tgggggtcagcgtcagaatctccct

SEQ ID NO: 2854081 - DNA, 25 bp, Homo sapien
catgtagaaacgaatgtccaggatg

SEQ ID NO: 2854082 - DNA, 25 bp, Homo sapien
gataaacaccaacaggatcaggaag

SEQ ID NO: 2854083 - DNA, 25 bp, Homo sapien
ctgacataaagcacaatgacaggca

SEQ ID NO: 2854084 - DNA, 25 bp, Homo sapien
ttgtaaattgtctgccataaacata

SEQ ID NO: 2854085 - DNA, 25 bp, Homo sapien
gcaggtttcaaggccgtacatcgtg

SEQ ID NO: 2854086 - DNA, 25 bp, Homo sapien
ttccccacactgcatgggccctcag

SEQ ID NO: 2854087 - DNA, 25 bp, Homo sapien
cagccaggtgttcgggcaggtttca

SEQ ID NO: 2854088 - DNA, 25 bp, Homo sapien
ggccgtacatcgtggcctctccata

SEQ ID NO: 2854089 - DNA, 25 bp, Homo sapien
gcacggcataaattgcaggactgag

SEQ ID NO: 2854090 - DNA, 25 bp, Homo sapien
gaagcacggcataaattgcaggact

SEQ ID NO: 2854091 - DNA, 25 bp, Homo sapien
tcctggaagcacggcataaattgca

SEQ ID NO: 2854092 - DNA, 25 bp, Homo sapien
acggcataaattgcaggactgaggg

SEQ ID NO: 2854093 - DNA, 25 bp, Homo sapien
taaatcccaacatgaccctcaggta

SEQ ID NO: 2854094 - DNA, 25 bp, Homo sapien
cagacatgtagagccagtctcttga

SEQ ID NO: 2854095 - DNA, 25 bp, Homo sapien
tgaccctcaggtagccagacatgta

SEQ ID NO: 2854096 - DNA, 25 bp, Homo sapien
gtctcttgagatctctgggccccag

SEQ ID NO: 2854097 - DNA, 25 bp, Homo sapien
tcagacaggtactggtgatctggtg

SEQ ID NO: 2854098 - DNA, 25 bp, Homo sapien
gaagtcaccttgcatagaactggca

SEQ ID NO: 2854099 - DNA, 25 bp, Homo sapien
cgtgataggcattttcaatacaaat

SEQ ID NO: 2854100 - DNA, 25 bp, Homo sapien
cagaagctatgggatcagacaggta

SEQ ID NO: 2854101 - DNA, 25 bp, Homo sapien
ttcaacaggatgaccatgcagtgca

SEQ ID NO: 2854102 - DNA, 25 bp, Homo sapien
tgcagtgcacggtgaggaccccgat

SEQ ID NO: 2854103 - DNA, 25 bp, Homo sapien
ggaccccgatggccagaaggctgac

SEQ ID NO: 2854104 - DNA, 25 bp, Homo sapien
tgaccatgcagtgcacggtgaggac

SEQ ID NO: 2854105 - DNA, 25 bp, Homo sapien
tttcaacaagtggatcaaagtttgc

SEQ ID NO: 2854106 - DNA, 25 bp, Homo sapien
ctgtgccaatgttgcatttcaacaa

SEQ ID NO: 2854107 - DNA, 25 bp, Homo sapien
caacaagtggatcaaagtttgcatc

SEQ ID NO: 2854108 - DNA, 25 bp, Homo sapien
caacaagccggcattctttatggcc

SEQ ID NO: 2854109 - DNA, 25 bp, Homo sapien
tatatatgaaatgagctgcatgtga

SEQ ID NO: 2854110 - DNA, 25 bp, Homo sapien
tatcgacattatgcactgggtaaaa

SEQ ID NO: 2854111 - DNA, 25 bp, Homo sapien
tatgatggtcccagcagggtgctag

SEQ ID NO: 2854112 - DNA, 25 bp, Homo sapien
gcaattgttactgtgcatatagagt

SEQ ID NO: 2854113 - DNA, 25 bp, Homo sapien
tgctagggcctagggttctaaatat

SEQ ID NO: 2854114 - DNA, 25 bp, Homo sapien
tgggaaaggtgggaacaggatcatg

SEQ ID NO: 2854115 - DNA, 25 bp, Homo sapien
ggaaaggtgggaacaggatcatgag

SEQ ID NO: 2854116 - DNA, 25 bp, Homo sapien
gtgggaacaggatcatgagaacaga

SEQ ID NO: 2854117 - DNA, 25 bp, Homo sapien
aacaggatcatgagaacagaatcaa

SEQ ID NO: 2854118 - DNA, 25 bp, Homo sapien
tggtttaagcaagtagaagtgcccc

SEQ ID NO: 2854119 - DNA, 25 bp, Homo sapien
gatacagacgaagtctcaggctaag

SEQ ID NO: 2854120 - DNA, 25 bp, Homo sapien
tgaagatgccattgggagatacaga

SEQ ID NO: 2854121 - DNA, 25 bp, Homo sapien
tcaggctaagacagagaatgccctc

SEQ ID NO: 2854122 - DNA, 25 bp, Homo sapien
gctgctctagctgggttcttcgtaa

SEQ ID NO: 2854123 - DNA, 25 bp, Homo sapien
gccacagggattgacctccttagat

SEQ ID NO: 2854124 - DNA, 25 bp, Homo sapien
tcatcttttatccacgcatatcgtg

SEQ ID NO: 2854125 - DNA, 25 bp, Homo sapien
ggcagacagcctgagataggaaact

SEQ ID NO: 2854126 - DNA, 25 bp, Homo sapien
tgctctctgagggtgactgaggtcc

SEQ ID NO: 2854127 - DNA, 25 bp, Homo sapien
gtccaaggagttcagctcactgttg

SEQ ID NO: 2854128 - DNA, 25 bp, Homo sapien
gaagtaatgctactgctgctctctg

SEQ ID NO: 2854129 - DNA, 25 bp, Homo sapien
ccagcaggatggacattctctgaag

SEQ ID NO: 2854130 - DNA, 25 bp, Homo sapien
ggatggtcctcagtttcactcgcaa

SEQ ID NO: 2854131 - DNA, 25 bp, Homo sapien
ggctgaagcctgaagtgcatgaatc

SEQ ID NO: 2854132 - DNA, 25 bp, Homo sapien
taaccccaaggatgcgtgctgctgg

SEQ ID NO: 2854133 - DNA, 25 bp, Homo sapien
tatgaaagacccatctcagtcagga

SEQ ID NO: 2854134 - DNA, 25 bp, Homo sapien
tgattctattgttaaaagactctga

SEQ ID NO: 2854135 - DNA, 25 bp, Homo sapien
tcctttatacttgatctttgagagt

SEQ ID NO: 2854136 - DNA, 25 bp, Homo sapien
gtggtctctgactattttcaaacag

SEQ ID NO: 2854137 - DNA, 25 bp, Homo sapien
tcttgtttaggttaaatctgcgtgg

SEQ ID NO: 2854138 - DNA, 25 bp, Homo sapien
tggtggtctcaactccatagagcag

SEQ ID NO: 2854139 - DNA, 25 bp, Homo sapien
catggtctctgatcctccggtaggc

SEQ ID NO: 2854140 - DNA, 25 bp, Homo sapien
tccggtaggctagcccaggatgctt

SEQ ID NO: 2854141 - DNA, 25 bp, Homo sapien
actggagccgtgcacaactttctgg

SEQ ID NO: 2854142 - DNA, 25 bp, Homo sapien
ttagctggctgcatctcctttggcc

SEQ ID NO: 2854143 - DNA, 25 bp, Homo sapien
tggctgcttcttgcatagctccacg

SEQ ID NO: 2854144 - DNA, 25 bp, Homo sapien
ccacttggggccctctggtggctgc

SEQ ID NO: 2854145 - DNA, 25 bp, Homo sapien
ctgcatctcctttggccagttgctg

SEQ ID NO: 2854146 - DNA, 25 bp, Homo sapien
ttgtgtgaattatcataagcttgga

SEQ ID NO: 2854147 - DNA, 25 bp, Homo sapien
tgaattatcataagcttggatagag

SEQ ID NO: 2854148 - DNA, 25 bp, Homo sapien
tatcataagcttggatagagtccag

SEQ ID NO: 2854149 - DNA, 25 bp, Homo sapien
cataagcttggatagagtccagagc

SEQ ID NO: 2854150 - DNA, 25 bp, Homo sapien
gtttcaccatgacttggcccagaga

SEQ ID NO: 2854151 - DNA, 25 bp, Homo sapien
ggcgtgctggactatgcctctaatc

SEQ ID NO: 2854152 - DNA, 25 bp, Homo sapien
attaaaagtcgggtgctggtaggca

SEQ ID NO: 2854153 - DNA, 25 bp, Homo sapien
ccaagggaaagctcacaatgtagtg

SEQ ID NO: 2854154 - DNA, 25 bp, Homo sapien
ggaaaaggggtgagagtcttctgac

SEQ ID NO: 2854155 - DNA, 25 bp, Homo sapien
ttggaaaaggggtgagagtcttctg

SEQ ID NO: 2854156 - DNA, 25 bp, Homo sapien
tggagttggaaaaggggtgagagtc

SEQ ID NO: 2854157 - DNA, 25 bp, Homo sapien
tggtggagttggaaaaggggtgaga

SEQ ID NO: 2854158 - DNA, 25 bp, Homo sapien
caggagcggtgggatgatgagggcc

SEQ ID NO: 2854159 - DNA, 25 bp, Homo sapien
tgacctccaggagcggtgggatgat

SEQ ID NO: 2854160 - DNA, 25 bp, Homo sapien
ctccaggagcggtgggatgatgagg

SEQ ID NO: 2854161 - DNA, 25 bp, Homo sapien
gtggtgacctccaggagcggtggga

SEQ ID NO: 2854162 - DNA, 25 bp, Homo sapien
tgaaaaatgttcctggtcaccaata

SEQ ID NO: 2854163 - DNA, 25 bp, Homo sapien
ccttgagcaggcctcctttggagga

SEQ ID NO: 2854164 - DNA, 25 bp, Homo sapien
accaataaatcccaggagccttgag

SEQ ID NO: 2854165 - DNA, 25 bp, Homo sapien
tgtggtagaacagaacaggtctgga

SEQ ID NO: 2854166 - DNA, 25 bp, Homo sapien
ggctgaacaccaacaaatctgtcta

SEQ ID NO: 2854167 - DNA, 25 bp, Homo sapien
ccagagtgcgcagcaagttcttaca

SEQ ID NO: 2854168 - DNA, 25 bp, Homo sapien
tgtttgataagctgtgtcaatccct

SEQ ID NO: 2854169 - DNA, 25 bp, Homo sapien
tagatgagtgaatacttgtaaagct

SEQ ID NO: 2854170 - DNA, 25 bp, Homo sapien
tgccggcaatgtagagaagcttgac

SEQ ID NO: 2854171 - DNA, 25 bp, Homo sapien
cataggtgcacaggatgccggcaat

SEQ ID NO: 2854172 - DNA, 25 bp, Homo sapien
gacgaggcgaatggacagatccaga

SEQ ID NO: 2854173 - DNA, 25 bp, Homo sapien
ccagcgtgttgacacccgggagatg

SEQ ID NO: 2854174 - DNA, 25 bp, Homo sapien
tggaacattaacctctgaccttggg

SEQ ID NO: 2854175 - DNA, 25 bp, Homo sapien
actggcctccttggaacattaacct

SEQ ID NO: 2854176 - DNA, 25 bp, Homo sapien
cattaacctctgaccttgggacaat

SEQ ID NO: 2854177 - DNA, 25 bp, Homo sapien
ggcctccttggaacattaacctctg

SEQ ID NO: 2854178 - DNA, 25 bp, Homo sapien
gcaaattaggtctccaagggactgt

SEQ ID NO: 2854179 - DNA, 25 bp, Homo sapien
gcatctgcttataattggcatgcag

SEQ ID NO: 2854180 - DNA, 25 bp, Homo sapien
gactgtgactgtccgcttgagaaga

SEQ ID NO: 2854181 - DNA, 25 bp, Homo sapien
tgagtggcattatcatgttgggaaa

SEQ ID NO: 2854182 - DNA, 25 bp, Homo sapien
ggaggaagtgacctatacgtttcca

SEQ ID NO: 2854183 - DNA, 25 bp, Homo sapien
gtgacctatacgtttccacccattc

SEQ ID NO: 2854184 - DNA, 25 bp, Homo sapien
tctgtgggaggctctctagacctca

SEQ ID NO: 2854185 - DNA, 25 bp, Homo sapien
tcttctgtgggaggctctctagacc

SEQ ID NO: 2854186 - DNA, 25 bp, Homo sapien
tatagggaagtgacgatggacattc

SEQ ID NO: 2854187 - DNA, 25 bp, Homo sapien
gccgccatgccaatgtatagggaag

SEQ ID NO: 2854188 - DNA, 25 bp, Homo sapien
cagcagttaggcaggttaaggctta

SEQ ID NO: 2854189 - DNA, 25 bp, Homo sapien
tgatgtcatctccaaaccgcaggta

SEQ ID NO: 2854190 - DNA, 25 bp, Homo sapien
taactctatgaagtcggtacctcca

SEQ ID NO: 2854191 - DNA, 25 bp, Homo sapien
tacaggcgagagacatcacatgtgg

SEQ ID NO: 2854192 - DNA, 25 bp, Homo sapien
ccataatggcacagttaagggctta

SEQ ID NO: 2854193 - DNA, 25 bp, Homo sapien
taactgatcccaagttgcagaacca

SEQ ID NO: 2854194 - DNA, 25 bp, Homo sapien
caatacaacataaaggcggaagggc

SEQ ID NO: 2854195 - DNA, 25 bp, Homo sapien
gcggaagggccctatgtaattgtaa

SEQ ID NO: 2854196 - DNA, 25 bp, Homo sapien
cactagtagacctgctttaaaagaa

SEQ ID NO: 2854197 - DNA, 25 bp, Homo sapien
tcaagaaatctcgtagagggcaaac

SEQ ID NO: 2854198 - DNA, 25 bp, Homo sapien
gcatcacagttcactatcaagaaag

SEQ ID NO: 2854199 - DNA, 25 bp, Homo sapien
ggtcatgcaactataatccccacta

SEQ ID NO: 2854200 - DNA, 25 bp, Homo sapien
gcacaaccagaaagatagaggataa

SEQ ID NO: 2854201 - DNA, 25 bp, Homo sapien
gacatgaccctagattttgcaatag

SEQ ID NO: 2854202 - DNA, 25 bp, Homo sapien
tagaaggtcactcacaagcactagg

SEQ ID NO: 2854203 - DNA, 25 bp, Homo sapien
cagtggacgctctgcaatagaaagc

SEQ ID NO: 2854204 - DNA, 25 bp, Homo sapien
caactgtcccaagtaaggccagagg

SEQ ID NO: 2854205 - DNA, 25 bp, Homo sapien
gataagctgtggtactgcccagaca

SEQ ID NO: 2854206 - DNA, 25 bp, Homo sapien
ggctgttccgaagaagagagggtag

SEQ ID NO: 2854207 - DNA, 25 bp, Homo sapien
agcttgctaccagtggcaaccggct

SEQ ID NO: 2854208 - DNA, 25 bp, Homo sapien
agggtaggtcttccagcttgctacc

SEQ ID NO: 2854209 - DNA, 25 bp, Homo sapien
cttgctaccagtggcaaccggctgg

SEQ ID NO: 2854210 - DNA, 25 bp, Homo sapien
cagattagcactgacccaacgagcc

SEQ ID NO: 2854211 - DNA, 25 bp, Homo sapien
cctttgaatggacagtggtcatggg

SEQ ID NO: 2854212 - DNA, 25 bp, Homo sapien
ttggaaattcctgtgactgcagtca

SEQ ID NO: 2854213 - DNA, 25 bp, Homo sapien
aacgagcccacgaacacctttgaat

SEQ ID NO: 2854214 - DNA, 25 bp, Homo sapien
tggctccaggtatctaaagctcagt

SEQ ID NO: 2854215 - DNA, 25 bp, Homo sapien
ggtctacagttcaccaaccaagatg

SEQ ID NO: 2854216 - DNA, 25 bp, Homo sapien
tacaagaatctgttttcgcctgcct

SEQ ID NO: 2854217 - DNA, 25 bp, Homo sapien
agaagaatgggactgcacggagaca

SEQ ID NO: 2854218 - DNA, 25 bp, Homo sapien
tgtactgtatgatgatgaccaagct

SEQ ID NO: 2854219 - DNA, 25 bp, Homo sapien
gtaatgtactgtatgatgatgacca

SEQ ID NO: 2854220 - DNA, 25 bp, Homo sapien
ctgggtaatgtactgtatgatgatg

SEQ ID NO: 2854221 - DNA, 25 bp, Homo sapien
ctgtatgatgatgaccaagctgacc

SEQ ID NO: 2854222 - DNA, 25 bp, Homo sapien
tctcattggaatagcagttgttggt

SEQ ID NO: 2854223 - DNA, 25 bp, Homo sapien
agttgttggttgtgctattaacagc

SEQ ID NO: 2854224 - DNA, 25 bp, Homo sapien
atcaccgtctcattggaatagcagt

SEQ ID NO: 2854225 - DNA, 25 bp, Homo sapien
gcagttgttggttgtgctattaaca

SEQ ID NO: 2854226 - DNA, 25 bp, Homo sapien
gaaatacagcataggtttaagaact

SEQ ID NO: 2854227 - DNA, 25 bp, Homo sapien
ctggtgtcagaaggcctgggttttt

SEQ ID NO: 2854228 - DNA, 25 bp, Homo sapien
ttaagaacttgagcactggtgtcag

SEQ ID NO: 2854229 - DNA, 25 bp, Homo sapien
aatgggaataaccacagtacctgct

SEQ ID NO: 2854230 - DNA, 25 bp, Homo sapien
gaagccaagttgggtgataataagg

SEQ ID NO: 2854231 - DNA, 25 bp, Homo sapien
gccaagttgggtgataataaggaag

SEQ ID NO: 2854232 - DNA, 25 bp, Homo sapien
caagttgggtgataataaggaagaa

SEQ ID NO: 2854233 - DNA, 25 bp, Homo sapien
agttgggtgataataaggaagaagc

SEQ ID NO: 2854234 - DNA, 25 bp, Homo sapien
ttactcttgtgagtatgggctttga

SEQ ID NO: 2854235 - DNA, 25 bp, Homo sapien
agtatgggctttgagcgaagggtgg

SEQ ID NO: 2854236 - DNA, 25 bp, Homo sapien
tgggctttgagcgaagggtggttcc

SEQ ID NO: 2854237 - DNA, 25 bp, Homo sapien
gctttgagcgaagggtggttccagg

SEQ ID NO: 2854238 - DNA, 25 bp, Homo sapien
cccagtgagcgtgattctggagcca

SEQ ID NO: 2854239 - DNA, 25 bp, Homo sapien
tgtccccatagtccataaagggctt

SEQ ID NO: 2854240 - DNA, 25 bp, Homo sapien
catagtccataaagggcttgttaag

SEQ ID NO: 2854241 - DNA, 25 bp, Homo sapien
ttctagtccatgcatcaccgtgtcc

SEQ ID NO: 2854242 - DNA, 25 bp, Homo sapien
agacacagaacaaggcaggacacag

SEQ ID NO: 2854243 - DNA, 25 bp, Homo sapien
ggagacacagaacaaggcaggacac

SEQ ID NO: 2854244 - DNA, 25 bp, Homo sapien
atggtcaaaagtcaggagacacaga

SEQ ID NO: 2854245 - DNA, 25 bp, Homo sapien
tcaaaagtcaggagacacagaacaa

SEQ ID NO: 2854246 - DNA, 25 bp, Homo sapien
tagtttatgcccaatttccagagga

SEQ ID NO: 2854247 - DNA, 25 bp, Homo sapien
ccagaggagccaaccagataagcac

SEQ ID NO: 2854248 - DNA, 25 bp, Homo sapien
tggattctcgtgaccattctctgca

SEQ ID NO: 2854249 - DNA, 25 bp, Homo sapien
gggacggtagttttcatatccatga

SEQ ID NO: 2854250 - DNA, 25 bp, Homo sapien
tgagctccctgcccctgaatgctct

SEQ ID NO: 2854251 - DNA, 25 bp, Homo sapien
catgcagaagagcctcacctgagct

SEQ ID NO: 2854252 - DNA, 25 bp, Homo sapien
gagctccctgcccctgaatgctctt

SEQ ID NO: 2854253 - DNA, 25 bp, Homo sapien
agaagagcctcacctgagctccctg

SEQ ID NO: 2854254 - DNA, 25 bp, Homo sapien
agaagcgctgggcacacttgaccag

SEQ ID NO: 2854255 - DNA, 25 bp, Homo sapien
cttgaccaggatgtgcatacagtgg

SEQ ID NO: 2854256 - DNA, 25 bp, Homo sapien
acttgaccaggatgtgcatacagtg

SEQ ID NO: 2854257 - DNA, 25 bp, Homo sapien
cacttgaccaggatgtgcatacagt

SEQ ID NO: 2854258 - DNA, 25 bp, Homo sapien
caggatgcccgcgttcttcacagcg

SEQ ID NO: 2854259 - DNA, 25 bp, Homo sapien
agcgaggggtagtcccaggatccct

SEQ ID NO: 2854260 - DNA, 25 bp, Homo sapien
cacagcgaggggtagtcccaggatc

SEQ ID NO: 2854261 - DNA, 25 bp, Homo sapien
gatgcccgcgttcttcacagcgagg

SEQ ID NO: 2854262 - DNA, 25 bp, Homo sapien
acagtgggttgagggtcagacacac

SEQ ID NO: 2854263 - DNA, 25 bp, Homo sapien
ctcatctgcacagtgggttgagggt

SEQ ID NO: 2854264 - DNA, 25 bp, Homo sapien
catctgcacagtgggttgagggtca

SEQ ID NO: 2854265 - DNA, 25 bp, Homo sapien
tgggttgagggtcagacacacccac

SEQ ID NO: 2854266 - DNA, 25 bp, Homo sapien
ctcagggtttttgccaatgcaagct

SEQ ID NO: 2854267 - DNA, 25 bp, Homo sapien
gggtttttgccaatgcaagcttcag

SEQ ID NO: 2854268 - DNA, 25 bp, Homo sapien
cagggtttttgccaatgcaagcttc

SEQ ID NO: 2854269 - DNA, 25 bp, Homo sapien
ggtttttgccaatgcaagcttcagg

SEQ ID NO: 2854270 - DNA, 25 bp, Homo sapien
gttatgcccttggtcttcttcaagc

SEQ ID NO: 2854271 - DNA, 25 bp, Homo sapien
tatgcccttggtcttcttcaagcct

SEQ ID NO: 2854272 - DNA, 25 bp, Homo sapien
gcccttggtcttcttcaagcctgct

SEQ ID NO: 2854273 - DNA, 25 bp, Homo sapien
tgcccttggtcttcttcaagcctgc

SEQ ID NO: 2854274 - DNA, 25 bp, Homo sapien
ccaatttgatggcaacggctccctg

SEQ ID NO: 2854275 - DNA, 25 bp, Homo sapien
ttggcactttcaggaggcgacataa

SEQ ID NO: 2854276 - DNA, 25 bp, Homo sapien
caatttgatggcaacggctccctgg

SEQ ID NO: 2854277 - DNA, 25 bp, Homo sapien
caggaggcgacataaggtccaattt

SEQ ID NO: 2854278 - DNA, 25 bp, Homo sapien
cagtggtgtgtgcccgggctggctc

SEQ ID NO: 2854279 - DNA, 25 bp, Homo sapien
agctcggggtgacaaagaggtctgc

SEQ ID NO: 2854280 - DNA, 25 bp, Homo sapien
gaagcaggaaggtgtctagtgtaga

SEQ ID NO: 2854281 - DNA, 25 bp, Homo sapien
gtgtagatgtacaccccagcacagt

SEQ ID NO: 2854282 - DNA, 25 bp, Homo sapien
ctccctggagggcacctcttcctgc

SEQ ID NO: 2854283 - DNA, 25 bp, Homo sapien
tggagaagccagtggacgaggactc

SEQ ID NO: 2854284 - DNA, 25 bp, Homo sapien
ggagagtgaattgcggatgaggagc

SEQ ID NO: 2854285 - DNA, 25 bp, Homo sapien
gaattgcggatgaggagcggtcagt

SEQ ID NO: 2854286 - DNA, 25 bp, Homo sapien
gtaggtataggctctgacacatttt

SEQ ID NO: 2854287 - DNA, 25 bp, Homo sapien
catattcatgtgtgtaggtataggc

SEQ ID NO: 2854288 - DNA, 25 bp, Homo sapien
ctacgagagagagatgaggcgtata

SEQ ID NO: 2854289 - DNA, 25 bp, Homo sapien
gatgaggcgtatatctgttactcac

SEQ ID NO: 2854290 - DNA, 25 bp, Homo sapien
cgagagagagatgaggcgtatatct

SEQ ID NO: 2854291 - DNA, 25 bp, Homo sapien
gagagatgaggcgtatatctgttac

SEQ ID NO: 2854292 - DNA, 25 bp, Homo sapien
tatagtaggtctctggtggctgaat

SEQ ID NO: 2854293 - DNA, 25 bp, Homo sapien
ggctgtcatctttgtgttccctttc

SEQ ID NO: 2854294 - DNA, 25 bp, Homo sapien
ggcatatagtaggtctctggtggct

SEQ ID NO: 2854295 - DNA, 25 bp, Homo sapien
gaactacgtgtgttgggcatatagt

SEQ ID NO: 2854296 - DNA, 25 bp, Homo sapien
cctcttctaggccatagttctctgc

SEQ ID NO: 2854297 - DNA, 25 bp, Homo sapien
aagaacatgctacacaactgggggc

SEQ ID NO: 2854298 - DNA, 25 bp, Homo sapien
tcaaatttaacttcagacctaacat

SEQ ID NO: 2854299 - DNA, 25 bp, Homo sapien
tctgggcattcagttgtggtcagcc

SEQ ID NO: 2854300 - DNA, 25 bp, Homo sapien
ggcactaaaaggagcactagccagt

SEQ ID NO: 2854301 - DNA, 25 bp, Homo sapien
agccacaggcccacatagctaaggg

SEQ ID NO: 2854302 - DNA, 25 bp, Homo sapien
tggttcttctgtcaagggagagatg

SEQ ID NO: 2854303 - DNA, 25 bp, Homo sapien
agaaaggtggttggctgccagtatc

SEQ ID NO: 2854304 - DNA, 25 bp, Homo sapien
tgcccagtaattgcaaacacatcaa

SEQ ID NO: 2854305 - DNA, 25 bp, Homo sapien
taaggtgcccagtaattgcaaacac

SEQ ID NO: 2854306 - DNA, 25 bp, Homo sapien
ctggttaaggtgcccagtaattgca

SEQ ID NO: 2854307 - DNA, 25 bp, Homo sapien
ggttaaggtgcccagtaattgcaaa

SEQ ID NO: 2854308 - DNA, 25 bp, Homo sapien
cacaattggccccaccaatcagcag

SEQ ID NO: 2854309 - DNA, 25 bp, Homo sapien
acaaagtcacaattggccccaccaa

SEQ ID NO: 2854310 - DNA, 25 bp, Homo sapien
cagcagggaaaccaaactcttggta

SEQ ID NO: 2854311 - DNA, 25 bp, Homo sapien
agtcacaattggccccaccaatcag

SEQ ID NO: 2854312 - DNA, 25 bp, Homo sapien
atgtcagtttaggaagtgaagcggg

SEQ ID NO: 2854313 - DNA, 25 bp, Homo sapien
tgttgagttgaaaattggtcactgt

SEQ ID NO: 2854314 - DNA, 25 bp, Homo sapien
actgtttcaaggtgccagtggagtt

SEQ ID NO: 2854315 - DNA, 25 bp, Homo sapien
cagtttaggaagtgaagcgggaaat

SEQ ID NO: 2854316 - DNA, 25 bp, Homo sapien
gatcagggcgtccttggtgatgatg

SEQ ID NO: 2854317 - DNA, 25 bp, Homo sapien
gatgatgagggagctcatgcactct

SEQ ID NO: 2854318 - DNA, 25 bp, Homo sapien
gtagtaggtagtcatctccaggagg

SEQ ID NO: 2854319 - DNA, 25 bp, Homo sapien
ccaagctcatctgggtaaggaccat

SEQ ID NO: 2854320 - DNA, 25 bp, Homo sapien
cagatgggggatgaggatggccagg

SEQ ID NO: 2854321 - DNA, 25 bp, Homo sapien
gcccagatgggggatgaggatggcc

SEQ ID NO: 2854322 - DNA, 25 bp, Homo sapien
gatgggggatgaggatggccaggga

SEQ ID NO: 2854323 - DNA, 25 bp, Homo sapien
tgggggatgaggatggccagggaac

SEQ ID NO: 2854324 - DNA, 25 bp, Homo sapien
tagggtcaccttgagtcgtgggaaa

SEQ ID NO: 2854325 - DNA, 25 bp, Homo sapien
taaagctgttcaaattagggtcacc

SEQ ID NO: 2854326 - DNA, 25 bp, Homo sapien
tcatgagactgtacaaaccacttgc

SEQ ID NO: 2854327 - DNA, 25 bp, Homo sapien
cagctatatctgtcttaaggcagcg

SEQ ID NO: 2854328 - DNA, 25 bp, Homo sapien
ctgagggccagaaggggagggccat

SEQ ID NO: 2854329 - DNA, 25 bp, Homo sapien
ggcctgagggccagaaggggagggc

SEQ ID NO: 2854330 - DNA, 25 bp, Homo sapien
ctgggcctgagggccagaaggggag

SEQ ID NO: 2854331 - DNA, 25 bp, Homo sapien
cctgagggccagaaggggagggcca

SEQ ID NO: 2854332 - DNA, 25 bp, Homo sapien
cagtcccactgacttcagtctcagg

SEQ ID NO: 2854333 - DNA, 25 bp, Homo sapien
tgcccggtccctgtctttctcaatg

SEQ ID NO: 2854334 - DNA, 25 bp, Homo sapien
cacagtcccactgacttcagtctca

SEQ ID NO: 2854335 - DNA, 25 bp, Homo sapien
ggcacagtcccactgacttcagtct

SEQ ID NO: 2854336 - DNA, 25 bp, Homo sapien
gatgccacccaagtagaggagctca

SEQ ID NO: 2854337 - DNA, 25 bp, Homo sapien
aaggcagatgccacccaagtagagg

SEQ ID NO: 2854338 - DNA, 25 bp, Homo sapien
ttggcagagacatagaactgcaggg

SEQ ID NO: 2854339 - DNA, 25 bp, Homo sapien
tgatcttggcagagacatagaactg

SEQ ID NO: 2854340 - DNA, 25 bp, Homo sapien
gatcaggaaagatccacgcacagac

SEQ ID NO: 2854341 - DNA, 25 bp, Homo sapien
gggatcaggaaagatccacgcacag

SEQ ID NO: 2854342 - DNA, 25 bp, Homo sapien
tcaggaaagatccacgcacagacac

SEQ ID NO: 2854343 - DNA, 25 bp, Homo sapien
aggaaagatccacgcacagacacca

SEQ ID NO: 2854344 - DNA, 25 bp, Homo sapien
cttcaagacataatggtagatgggc

SEQ ID NO: 2854345 - DNA, 25 bp, Homo sapien
gtcttcaagacataatggtagatgg

SEQ ID NO: 2854346 - DNA, 25 bp, Homo sapien
caagacataatggtagatgggctgt

SEQ ID NO: 2854347 - DNA, 25 bp, Homo sapien
cataatggtagatgggctgtgataa

SEQ ID NO: 2854348 - DNA, 25 bp, Homo sapien
gaggttatctgccagaagcatcagg

SEQ ID NO: 2854349 - DNA, 25 bp, Homo sapien
tttgaggttatctgccagaagcatc

SEQ ID NO: 2854350 - DNA, 25 bp, Homo sapien
aggttatctgccagaagcatcagga

SEQ ID NO: 2854351 - DNA, 25 bp, Homo sapien
ttgtttgaggttatctgccagaagc

SEQ ID NO: 2854352 - DNA, 25 bp, Homo sapien
tgttgccttttactatgtagatcag

SEQ ID NO: 2854353 - DNA, 25 bp, Homo sapien
ctcaggagctgcaagtcaatgttgc

SEQ ID NO: 2854354 - DNA, 25 bp, Homo sapien
ggagctgcaagtcaatgttgccttt

SEQ ID NO: 2854355 - DNA, 25 bp, Homo sapien
gctgcaagtcaatgttgccttttac

SEQ ID NO: 2854356 - DNA, 25 bp, Homo sapien
tctttgttctcttggcaccgttgcc

SEQ ID NO: 2854357 - DNA, 25 bp, Homo sapien
gcagaagtgagctctaggtgtcaca

SEQ ID NO: 2854358 - DNA, 25 bp, Homo sapien
gtgtcacagtggctctctcagatgc

SEQ ID NO: 2854359 - DNA, 25 bp, Homo sapien
cattgcatccaaggttccagaacag

SEQ ID NO: 2854360 - DNA, 25 bp, Homo sapien
agggtattctttgggctgcatcatc

SEQ ID NO: 2854361 - DNA, 25 bp, Homo sapien
tcactgtttagctccacgtattggg

SEQ ID NO: 2854362 - DNA, 25 bp, Homo sapien
tttgggctgcatcatccagggactg

SEQ ID NO: 2854363 - DNA, 25 bp, Homo sapien
ggaggagttgctgaaccctccctcg

SEQ ID NO: 2854364 - DNA, 25 bp, Homo sapien
ggccgctcaagggagcacgtgacct

SEQ ID NO: 2854365 - DNA, 25 bp, Homo sapien
gcagctgcggtacgacgctgacacc

SEQ ID NO: 2854366 - DNA, 25 bp, Homo sapien
gaacccgagcagtgagttcctccac

SEQ ID NO: 2854367 - DNA, 25 bp, Homo sapien
agtgagaaaaaaggcgcggccgctc

SEQ ID NO: 2854368 - DNA, 25 bp, Homo sapien
gataacccaaaggaccatctagggc

SEQ ID NO: 2854369 - DNA, 25 bp, Homo sapien
agcaaatgtcttgcccgctgcggga

SEQ ID NO: 2854370 - DNA, 25 bp, Homo sapien
caggtctccccgtttccagcaaatg

SEQ ID NO: 2854371 - DNA, 25 bp, Homo sapien
gtctttcacgcttcgcacaggtctc

SEQ ID NO: 2854372 - DNA, 25 bp, Homo sapien
ggagcagatgtccacttattactag

SEQ ID NO: 2854373 - DNA, 25 bp, Homo sapien
gcttactagcacgtagagtggacgg

SEQ ID NO: 2854374 - DNA, 25 bp, Homo sapien
atggacggaactggtgtccacttaa

SEQ ID NO: 2854375 - DNA, 25 bp, Homo sapien
ccgcttactagcacgtagagtggac

SEQ ID NO: 2854376 - DNA, 25 bp, Homo sapien
caggtgaaattgagcacattcagaa

SEQ ID NO: 2854377 - DNA, 25 bp, Homo sapien
gtgaaattgagcacattcagaatgg

SEQ ID NO: 2854378 - DNA, 25 bp, Homo sapien
aagatcaggtgaaattgagcacatt

SEQ ID NO: 2854379 - DNA, 25 bp, Homo sapien
gatcaggtgaaattgagcacattca

SEQ ID NO: 2854380 - DNA, 25 bp, Homo sapien
ccctggccgtgagaacgtggtatgt

SEQ ID NO: 2854381 - DNA, 25 bp, Homo sapien
tagatgccaactggagggccagacc

SEQ ID NO: 2854382 - DNA, 25 bp, Homo sapien
tacactgacagactgattgcgtggc

SEQ ID NO: 2854383 - DNA, 25 bp, Homo sapien
tcccagcggtgctaagagtggtctc

SEQ ID NO: 2854384 - DNA, 25 bp, Homo sapien
agagtccaagtggcaggacttgagg

SEQ ID NO: 2854385 - DNA, 25 bp, Homo sapien
gctgcttcctcgaagagaagacaca

SEQ ID NO: 2854386 - DNA, 25 bp, Homo sapien
cagcaaggggttctgtatcagtgga

SEQ ID NO: 2854387 - DNA, 25 bp, Homo sapien
cctgctgggtgcacaatgctgcttc

SEQ ID NO: 2854388 - DNA, 25 bp, Homo sapien
agatgaaatctactcccactctgcc

SEQ ID NO: 2854389 - DNA, 25 bp, Homo sapien
tgctcggccactttccccagattgt

SEQ ID NO: 2854390 - DNA, 25 bp, Homo sapien
ccttctgtagtgaatagtgccctgg

SEQ ID NO: 2854391 - DNA, 25 bp, Homo sapien
tgagggcactgatcaatcagatgaa

SEQ ID NO: 2854392 - DNA, 25 bp, Homo sapien
tcagtgaaacagctggtgcccctct

SEQ ID NO: 2854393 - DNA, 25 bp, Homo sapien
cactttggattcattgaggaatttt

SEQ ID NO: 2854394 - DNA, 25 bp, Homo sapien
cagtgaaacagctggtgcccctctt

SEQ ID NO: 2854395 - DNA, 25 bp, Homo sapien
gttggacactttggattcattgagg

SEQ ID NO: 2854396 - DNA, 25 bp, Homo sapien
cagaggctgcccgagggtttccaaa

SEQ ID NO: 2854397 - DNA, 25 bp, Homo sapien
gaggctgcccgagggtttccaaagc

SEQ ID NO: 2854398 - DNA, 25 bp, Homo sapien
ctagaagcagtcagaggctgcccga

SEQ ID NO: 2854399 - DNA, 25 bp, Homo sapien
agtcagaggctgcccgagggtttcc

SEQ ID NO: 2854400 - DNA, 25 bp, Homo sapien
cttttttgccctctagctcttttag

SEQ ID NO: 2854401 - DNA, 25 bp, Homo sapien
ttttgagggttctagcccagtcctc

SEQ ID NO: 2854402 - DNA, 25 bp, Homo sapien
tcttcagtccaacagatgtcgtttt

SEQ ID NO: 2854403 - DNA, 25 bp, Homo sapien
tttgcttatccccagatgctcactt

SEQ ID NO: 2854404 - DNA, 25 bp, Homo sapien
cctccccgcaggcccagtaaactgg

SEQ ID NO: 2854405 - DNA, 25 bp, Homo sapien
gagccctctggtggctaatctgtga

SEQ ID NO: 2854406 - DNA, 25 bp, Homo sapien
gcaggcccagtaaactggtccttga

SEQ ID NO: 2854407 - DNA, 25 bp, Homo sapien
tccccgcaggcccagtaaactggtc

SEQ ID NO: 2854408 - DNA, 25 bp, Homo sapien
tggtgtctcccacgggtgtgccttc

SEQ ID NO: 2854409 - DNA, 25 bp, Homo sapien
catcatggttgcctggtgaagtcac

SEQ ID NO: 2854410 - DNA, 25 bp, Homo sapien
gagccactgcctgcgtggtgtctcc

SEQ ID NO: 2854411 - DNA, 25 bp, Homo sapien
tctttgcccagctggattgggaact

SEQ ID NO: 2854412 - DNA, 25 bp, Homo sapien
tatgtatctgtcactcacactcaca

SEQ ID NO: 2854413 - DNA, 25 bp, Homo sapien
actatgtatctgtcactcacactca

SEQ ID NO: 2854414 - DNA, 25 bp, Homo sapien
atgtatctgtcactcacactcacag

SEQ ID NO: 2854415 - DNA, 25 bp, Homo sapien
ctatgtatctgtcactcacactcac

SEQ ID NO: 2854416 - DNA, 25 bp, Homo sapien
acacatctccctctcgcatgaagca

SEQ ID NO: 2854417 - DNA, 25 bp, Homo sapien
atctccctctcgcatgaagcagcag

SEQ ID NO: 2854418 - DNA, 25 bp, Homo sapien
aacaacacatatgaaaaggcagtgg

SEQ ID NO: 2854419 - DNA, 25 bp, Homo sapien
acaaattggctctcgcccacacatc

SEQ ID NO: 2854420 - DNA, 25 bp, Homo sapien
accactcctggctacatacactcta

SEQ ID NO: 2854421 - DNA, 25 bp, Homo sapien
gagggagtggtgaggtcaccaaagg

SEQ ID NO: 2854422 - DNA, 25 bp, Homo sapien
ggctacatacactctacacatgtgt

SEQ ID NO: 2854423 - DNA, 25 bp, Homo sapien
tcctggctacatacactctacacat

SEQ ID NO: 2854424 - DNA, 25 bp, Homo sapien
ttgagtcgccgcaggtaatacttga

SEQ ID NO: 2854425 - DNA, 25 bp, Homo sapien
cctccatgcatagggttgagtcgcc

SEQ ID NO: 2854426 - DNA, 25 bp, Homo sapien
cacattgaccctccatgcatagggt

SEQ ID NO: 2854427 - DNA, 25 bp, Homo sapien
ccacatgtgtagacatgtgcccaca

SEQ ID NO: 2854428 - DNA, 25 bp, Homo sapien
aataggagttcagacttccttgtgt

SEQ ID NO: 2854429 - DNA, 25 bp, Homo sapien
caaccggccctaaataggagttcag

SEQ ID NO: 2854430 - DNA, 25 bp, Homo sapien
tgcttccaaccggccctaaatagga

SEQ ID NO: 2854431 - DNA, 25 bp, Homo sapien
gccctaaataggagttcagacttcc

SEQ ID NO: 2854432 - DNA, 25 bp, Homo sapien
tcttggtgaagttgagccagcacag

SEQ ID NO: 2854433 - DNA, 25 bp, Homo sapien
cagacagcaaggtcaaaaagtgcct

SEQ ID NO: 2854434 - DNA, 25 bp, Homo sapien
tttcaagggacaacagcctgggctg

SEQ ID NO: 2854435 - DNA, 25 bp, Homo sapien
aaagcacagtgcctgacgtggagca

SEQ ID NO: 2854436 - DNA, 25 bp, Homo sapien
agacagcataagagggcccagctcg

SEQ ID NO: 2854437 - DNA, 25 bp, Homo sapien
gatggccgtgtactcattgagacag

SEQ ID NO: 2854438 - DNA, 25 bp, Homo sapien
ccatagaggccattaggctctggca

SEQ ID NO: 2854439 - DNA, 25 bp, Homo sapien
tccctgccggaactgcgagtggtag

SEQ ID NO: 2854440 - DNA, 25 bp, Homo sapien
ctgaaagggaacagcaagatagggt

SEQ ID NO: 2854441 - DNA, 25 bp, Homo sapien
ttctccccggaaggtttcagctggc

SEQ ID NO: 2854442 - DNA, 25 bp, Homo sapien
tcagctggctctatagcaactatat

SEQ ID NO: 2854443 - DNA, 25 bp, Homo sapien
gaacagcaagatagggtgagctcat

SEQ ID NO: 2854444 - DNA, 25 bp, Homo sapien
gtgggtgggcataggcccatctgtg

SEQ ID NO: 2854445 - DNA, 25 bp, Homo sapien
gagtgggtgggcataggcccatctg

SEQ ID NO: 2854446 - DNA, 25 bp, Homo sapien
tgggtgggcataggcccatctgtgc

SEQ ID NO: 2854447 - DNA, 25 bp, Homo sapien
ggagtgggtgggcataggcccatct

SEQ ID NO: 2854448 - DNA, 25 bp, Homo sapien
caagggaaggatttggatgtctcca

SEQ ID NO: 2854449 - DNA, 25 bp, Homo sapien
gcaaatccctgccactaatctgagg

SEQ ID NO: 2854450 - DNA, 25 bp, Homo sapien
tagaggtttgacctaaggccagccc

SEQ ID NO: 2854451 - DNA, 25 bp, Homo sapien
tccaatgggacaagctcaaggctag

SEQ ID NO: 2854452 - DNA, 25 bp, Homo sapien
tgcctgtgcctcagataacggagtg

SEQ ID NO: 2854453 - DNA, 25 bp, Homo sapien
gggcaaccagaagcttagaccactt

SEQ ID NO: 2854454 - DNA, 25 bp, Homo sapien
gcatccgtgccctgtaatcttgaac

SEQ ID NO: 2854455 - DNA, 25 bp, Homo sapien
tggatgcgtggtagctaaaaatgcc

SEQ ID NO: 2854456 - DNA, 25 bp, Homo sapien
ttccatcaatcccagaggctaagcg

SEQ ID NO: 2854457 - DNA, 25 bp, Homo sapien
caatcccagaggctaagcgtctctg

SEQ ID NO: 2854458 - DNA, 25 bp, Homo sapien
gctaagcgtctctggctatactgac

SEQ ID NO: 2854459 - DNA, 25 bp, Homo sapien
cagaggctaagcgtctctggctata

SEQ ID NO: 2854460 - DNA, 25 bp, Homo sapien
caggcatggcttgggtgtcaacacc

SEQ ID NO: 2854461 - DNA, 25 bp, Homo sapien
gcttgtgagacttgcaacggcggca

SEQ ID NO: 2854462 - DNA, 25 bp, Homo sapien
tctcgggagtgactaggcagtgtcc

SEQ ID NO: 2854463 - DNA, 25 bp, Homo sapien
ttatgataatgaacgccacggccac

SEQ ID NO: 2854464 - DNA, 25 bp, Homo sapien
caggcagggtgcaaaagtacagttc

SEQ ID NO: 2854465 - DNA, 25 bp, Homo sapien
ggtgcaaaagtacagttctcccttc

SEQ ID NO: 2854466 - DNA, 25 bp, Homo sapien
cagggtgcaaaagtacagttctccc

SEQ ID NO: 2854467 - DNA, 25 bp, Homo sapien
ggcagggtgcaaaagtacagttctc

SEQ ID NO: 2854468 - DNA, 25 bp, Homo sapien
gcaagcctgccaccgtcttgccagg

SEQ ID NO: 2854469 - DNA, 25 bp, Homo sapien
ccaccattgaggcatgtgttctggc

SEQ ID NO: 2854470 - DNA, 25 bp, Homo sapien
gggccagcagatctagagcctcttc

SEQ ID NO: 2854471 - DNA, 25 bp, Homo sapien
agcagatctagagcctcttcgttga

SEQ ID NO: 2854472 - DNA, 25 bp, Homo sapien
ccatcaggcgaatggaagcgtccat

SEQ ID NO: 2854473 - DNA, 25 bp, Homo sapien
gttgcccatgctgtcaaccatcagg

SEQ ID NO: 2854474 - DNA, 25 bp, Homo sapien
caagaggtgcctttcgggcctcaga

SEQ ID NO: 2854475 - DNA, 25 bp, Homo sapien
gaccacaagggaggtgttgcccatg

SEQ ID NO: 2854476 - DNA, 25 bp, Homo sapien
gtggcccaacagtcacacccagaat

SEQ ID NO: 2854477 - DNA, 25 bp, Homo sapien
agtaagcagccccacttgtgaccgt

SEQ ID NO: 2854478 - DNA, 25 bp, Homo sapien
tgaccgtccttggacgtatatctcc

SEQ ID NO: 2854479 - DNA, 25 bp, Homo sapien
aatcatgtggcccaacagtcacacc

SEQ ID NO: 2854480 - DNA, 25 bp, Homo sapien
gaaatgggcttcctgacattcctca

SEQ ID NO: 2854481 - DNA, 25 bp, Homo sapien
tggcagaaatgggcttcctgacatt

SEQ ID NO: 2854482 - DNA, 25 bp, Homo sapien
ctttggcagaaatgggcttcctgac

SEQ ID NO: 2854483 - DNA, 25 bp, Homo sapien
cagaaatgggcttcctgacattcct

SEQ ID NO: 2854484 - DNA, 25 bp, Homo sapien
aatggatgtgccagttccgagccgc

SEQ ID NO: 2854485 - DNA, 25 bp, Homo sapien
ggccctgtaccgcacatagctctga

SEQ ID NO: 2854486 - DNA, 25 bp, Homo sapien
ttcagggagacggacgctgtttcat

SEQ ID NO: 2854487 - DNA, 25 bp, Homo sapien
cctgtggctggagtgttttcagata

SEQ ID NO: 2854488 - DNA, 25 bp, Homo sapien
gagaaatgatatcccgaatgccagg

SEQ ID NO: 2854489 - DNA, 25 bp, Homo sapien
gagtggtccctggacaaagtccaca

SEQ ID NO: 2854490 - DNA, 25 bp, Homo sapien
ctaaatcgagtggtccctggacaaa

SEQ ID NO: 2854491 - DNA, 25 bp, Homo sapien
ttctgagaaatgatatcccgaatgc

SEQ ID NO: 2854492 - DNA, 25 bp, Homo sapien
tgggcatagctgaccgcatctgaac

SEQ ID NO: 2854493 - DNA, 25 bp, Homo sapien
tgtgacatggacacggacagacgtc

SEQ ID NO: 2854494 - DNA, 25 bp, Homo sapien
gaatgttagcccgtttgatgtccag

SEQ ID NO: 2854495 - DNA, 25 bp, Homo sapien
tctgccaggctataggtcagcgtgt

SEQ ID NO: 2854496 - DNA, 25 bp, Homo sapien
cagagccgttgttccccttggtgat

SEQ ID NO: 2854497 - DNA, 25 bp, Homo sapien
catccggggtcactcggaaggcaga

SEQ ID NO: 2854498 - DNA, 25 bp, Homo sapien
ctttgctgccaatgggggagttctc

SEQ ID NO: 2854499 - DNA, 25 bp, Homo sapien
ccttggtgattcgaaacgagtaggg

SEQ ID NO: 2854500 - DNA, 25 bp, Homo sapien
ggagcttcagggaataactagaggc

SEQ ID NO: 2854501 - DNA, 25 bp, Homo sapien
tgacatcagccacttggatagcgat

SEQ ID NO: 2854502 - DNA, 25 bp, Homo sapien
ttggatagcgatgtctgtgtcctca

SEQ ID NO: 2854503 - DNA, 25 bp, Homo sapien
tagttgagctggaagaatctcggtg

SEQ ID NO: 2854504 - DNA, 25 bp, Homo sapien
agctggttccctcctatgaggctat

SEQ ID NO: 2854505 - DNA, 25 bp, Homo sapien
tgtcactatttaggggtccatcttc

SEQ ID NO: 2854506 - DNA, 25 bp, Homo sapien
gggtgaatggtgaagtgcccaagct

SEQ ID NO: 2854507 - DNA, 25 bp, Homo sapien
cctatgaggctataggtaatgtcac

SEQ ID NO: 2854508 - DNA, 25 bp, Homo sapien
cactcaatggacaggaagtacttgg

SEQ ID NO: 2854509 - DNA, 25 bp, Homo sapien
gactgtggtcacgtcactgagggaa

SEQ ID NO: 2854510 - DNA, 25 bp, Homo sapien
caggcttgcgttgacatacaggatc

SEQ ID NO: 2854511 - DNA, 25 bp, Homo sapien
gaagaggagctcttccggctgcact

SEQ ID NO: 2854512 - DNA, 25 bp, Homo sapien
agaaaccctgtacgcgatgctttgg

SEQ ID NO: 2854513 - DNA, 25 bp, Homo sapien
gcagccttgtccagggttgcttaag

SEQ ID NO: 2854514 - DNA, 25 bp, Homo sapien
catgaagccgctaactgtgtgggag

SEQ ID NO: 2854515 - DNA, 25 bp, Homo sapien
aagggaggctcccacataagctggc

SEQ ID NO: 2854516 - DNA, 25 bp, Homo sapien
gaaaagtggccttcggctgaatccg

SEQ ID NO: 2854517 - DNA, 25 bp, Homo sapien
tgaatccggcagagagtaaaccacc

SEQ ID NO: 2854518 - DNA, 25 bp, Homo sapien
ggaacacgggcaggtagtcttctag

SEQ ID NO: 2854519 - DNA, 25 bp, Homo sapien
cggaccgtgagctccagtggtgcct

SEQ ID NO: 2854520 - DNA, 25 bp, Homo sapien
cgggatcccgggcaaatactacagc

SEQ ID NO: 2854521 - DNA, 25 bp, Homo sapien
ccttggcaacaaggttgaacacatc

SEQ ID NO: 2854522 - DNA, 25 bp, Homo sapien
tcactgtggtgttgtcgaagacagc

SEQ ID NO: 2854523 - DNA, 25 bp, Homo sapien
cctttctcggtctagggcagtgagt

SEQ ID NO: 2854524 - DNA, 25 bp, Homo sapien
ggtcggagaaatgacaaaagttgag

SEQ ID NO: 2854525 - DNA, 25 bp, Homo sapien
ctggtcggagaaatgacaaaagttg

SEQ ID NO: 2854526 - DNA, 25 bp, Homo sapien
agaaatgacaaaagttgagctttct

SEQ ID NO: 2854527 - DNA, 25 bp, Homo sapien
ggagaaatgacaaaagttgagcttt

SEQ ID NO: 2854528 - DNA, 25 bp, Homo sapien
tacccaagcatgtgccctctatata

SEQ ID NO: 2854529 - DNA, 25 bp, Homo sapien
ggaaatattacccaagcatgtgccc

SEQ ID NO: 2854530 - DNA, 25 bp, Homo sapien
tggggaaatattacccaagcatgtg

SEQ ID NO: 2854531 - DNA, 25 bp, Homo sapien
aatattacccaagcatgtgccctct

SEQ ID NO: 2854532 - DNA, 25 bp, Homo sapien
ccaagtctgtggcagaaaccttcaa

SEQ ID NO: 2854533 - DNA, 25 bp, Homo sapien
catgaaccttgccagtatagagaag

SEQ ID NO: 2854534 - DNA, 25 bp, Homo sapien
gatctgagcattggtatcagtgtcc

SEQ ID NO: 2854535 - DNA, 25 bp, Homo sapien
cagcttgaattcatgcgccccaggg

SEQ ID NO: 2854536 - DNA, 25 bp, Homo sapien
ccacccctcactcttatcttccttg

SEQ ID NO: 2854537 - DNA, 25 bp, Homo sapien
cccacccctcactcttatcttcctt

SEQ ID NO: 2854538 - DNA, 25 bp, Homo sapien
acccctcactcttatcttccttgcc

SEQ ID NO: 2854539 - DNA, 25 bp, Homo sapien
cacccctcactcttatcttccttgc

SEQ ID NO: 2854540 - DNA, 25 bp, Homo sapien
gaccgaagcctggaacttgccatca

SEQ ID NO: 2854541 - DNA, 25 bp, Homo sapien
attgacgtccaggacaaagatctcc

SEQ ID NO: 2854542 - DNA, 25 bp, Homo sapien
tccagggtcttccttgaggaaatcc

SEQ ID NO: 2854543 - DNA, 25 bp, Homo sapien
tacttggctgtatgctcgcggtcca

SEQ ID NO: 2854544 - DNA, 25 bp, Homo sapien
aatttcaggctcatgggcttttcac

SEQ ID NO: 2854545 - DNA, 25 bp, Homo sapien
cctgaagcaagcacaagagtgtgac

SEQ ID NO: 2854546 - DNA, 25 bp, Homo sapien
ggttttaatcccagccctgaagcaa

SEQ ID NO: 2854547 - DNA, 25 bp, Homo sapien
acagctgtgatagcagaaggagcca

SEQ ID NO: 2854548 - DNA, 25 bp, Homo sapien
gatacctgaaagaggacatcccctg

SEQ ID NO: 2854549 - DNA, 25 bp, Homo sapien
taggccaacacctggataaccggag

SEQ ID NO: 2854550 - DNA, 25 bp, Homo sapien
caatgttgtagatgagccggagtcc

SEQ ID NO: 2854551 - DNA, 25 bp, Homo sapien
tgataagagacgtcacggttccgcc

SEQ ID NO: 2854552 - DNA, 25 bp, Homo sapien
acccatatctcaaggctcctgagca

SEQ ID NO: 2854553 - DNA, 25 bp, Homo sapien
ggttatatagaacacccatatctca

SEQ ID NO: 2854554 - DNA, 25 bp, Homo sapien
tagctttggttatatagaacaccca

SEQ ID NO: 2854555 - DNA, 25 bp, Homo sapien
tatagaacacccatatctcaaggct

SEQ ID NO: 2854556 - DNA, 25 bp, Homo sapien
gaacattaggtcttgtgagggcaga

SEQ ID NO: 2854557 - DNA, 25 bp, Homo sapien
tcaatgatagtaatagcccctggca

SEQ ID NO: 2854558 - DNA, 25 bp, Homo sapien
tggatactggatattatcgcttttg

SEQ ID NO: 2854559 - DNA, 25 bp, Homo sapien
cttggtttctcatagcaactagctc

SEQ ID NO: 2854560 - DNA, 25 bp, Homo sapien
ggaacacttgcctcataatggagct

SEQ ID NO: 2854561 - DNA, 25 bp, Homo sapien
ggtttccatcctccacatgaatggt

SEQ ID NO: 2854562 - DNA, 25 bp, Homo sapien
gaatggtcacccacacgaagttcct

SEQ ID NO: 2854563 - DNA, 25 bp, Homo sapien
ctttcaggagggagtagtggacctc

SEQ ID NO: 2854564 - DNA, 25 bp, Homo sapien
tgctgggagggccccgagccgaggt

SEQ ID NO: 2854565 - DNA, 25 bp, Homo sapien
tgggagggccccgagccgaggtcca

SEQ ID NO: 2854566 - DNA, 25 bp, Homo sapien
catgactgtcagtgtgtgctgggag

SEQ ID NO: 2854567 - DNA, 25 bp, Homo sapien
tgtgctgggagggccccgagccgag

SEQ ID NO: 2854568 - DNA, 25 bp, Homo sapien
tctacccctggcacggtgtcctggg

SEQ ID NO: 2854569 - DNA, 25 bp, Homo sapien
ccttgtcttgatctatggcctggac

SEQ ID NO: 2854570 - DNA, 25 bp, Homo sapien
tggactcgcaggagctctacccctg

SEQ ID NO: 2854571 - DNA, 25 bp, Homo sapien
tcataacgagtttccagaaactggg

SEQ ID NO: 2854572 - DNA, 25 bp, Homo sapien
gtcaaagtccatgtccttatcccca

SEQ ID NO: 2854573 - DNA, 25 bp, Homo sapien
tgtggcaatggtgcgggacccatct

SEQ ID NO: 2854574 - DNA, 25 bp, Homo sapien
tctcctggtatcaagaggcctggca

SEQ ID NO: 2854575 - DNA, 25 bp, Homo sapien
aagttatagttcgaccttctcctgg

SEQ ID NO: 2854576 - DNA, 25 bp, Homo sapien
tgttgggccctaggccttgcctcac

SEQ ID NO: 2854577 - DNA, 25 bp, Homo sapien
ccttgttgggccctaggccttgcct

SEQ ID NO: 2854578 - DNA, 25 bp, Homo sapien
ttgttgggccctaggccttgcctca

SEQ ID NO: 2854579 - DNA, 25 bp, Homo sapien
gcccttgttgggccctaggccttgc

SEQ ID NO: 2854580 - DNA, 25 bp, Homo sapien
tccatgaccgtaaagctgtagtagg

SEQ ID NO: 2854581 - DNA, 25 bp, Homo sapien
agaagagtccgggtctgccctctac

SEQ ID NO: 2854582 - DNA, 25 bp, Homo sapien
gatccactcaatgtgtagccggaca

SEQ ID NO: 2854583 - DNA, 25 bp, Homo sapien
taggtctcatcaaaggccagaggga

SEQ ID NO: 2854584 - DNA, 25 bp, Homo sapien
ggtgaacaaaacgtataacctgtgc

SEQ ID NO: 2854585 - DNA, 25 bp, Homo sapien
taacctgtgctcaagaacctcatgg

SEQ ID NO: 2854586 - DNA, 25 bp, Homo sapien
catctgatgcatacttgaaggcttg

SEQ ID NO: 2854587 - DNA, 25 bp, Homo sapien
gctgtaaacaggcaccctgccagtt

SEQ ID NO: 2854588 - DNA, 25 bp, Homo sapien
tgtgaccaggtcgatactgaaggcc

SEQ ID NO: 2854589 - DNA, 25 bp, Homo sapien
tctgccattaagaccctcatccagg

SEQ ID NO: 2854590 - DNA, 25 bp, Homo sapien
gcctctctggaaggcggacattgaa

SEQ ID NO: 2854591 - DNA, 25 bp, Homo sapien
tcgctgtcctcgatactgtaggtga

SEQ ID NO: 2854592 - DNA, 25 bp, Homo sapien
ggtggacttcagtgagggttcccca

SEQ ID NO: 2854593 - DNA, 25 bp, Homo sapien
gaggtggacttcagtgagggttccc

SEQ ID NO: 2854594 - DNA, 25 bp, Homo sapien
gtggacttcagtgagggttccccat

SEQ ID NO: 2854595 - DNA, 25 bp, Homo sapien
ctgggagcagaattgagcatgagca

SEQ ID NO: 2854596 - DNA, 25 bp, Homo sapien
tgggagcagaattgagcatgagcac

SEQ ID NO: 2854597 - DNA, 25 bp, Homo sapien
atccttgttctctctgtccagctgc

SEQ ID NO: 2854598 - DNA, 25 bp, Homo sapien
ctccaggatgtgttcatccttgttc

SEQ ID NO: 2854599 - DNA, 25 bp, Homo sapien
tgtccagctgctgggctgtagatag

SEQ ID NO: 2854600 - DNA, 25 bp, Homo sapien
agctgctgggctgtagataggagac

SEQ ID NO: 2854601 - DNA, 25 bp, Homo sapien
gaggtggcgctcagtggacttcact

SEQ ID NO: 2854602 - DNA, 25 bp, Homo sapien
tcactaaggtgcatagaaaacccct

SEQ ID NO: 2854603 - DNA, 25 bp, Homo sapien
cagaaccacctccatagggctgtgt

SEQ ID NO: 2854604 - DNA, 25 bp, Homo sapien
gattccacctgtgatagattcctga

SEQ ID NO: 2854605 - DNA, 25 bp, Homo sapien
tccgtaacctcgatgtagacttcag

SEQ ID NO: 2854606 - DNA, 25 bp, Homo sapien
taagatgcaaattctcggtccaggg

SEQ ID NO: 2854607 - DNA, 25 bp, Homo sapien
cacgggagcatcctcctggatggag

SEQ ID NO: 2854608 - DNA, 25 bp, Homo sapien
taccgtcaaccagtagtaagatgca

SEQ ID NO: 2854609 - DNA, 25 bp, Homo sapien
tctggccctggcaccccaccctacc

SEQ ID NO: 2854610 - DNA, 25 bp, Homo sapien
ctctggccctggcaccccaccctac

SEQ ID NO: 2854611 - DNA, 25 bp, Homo sapien
ctgaaggctgcgagtccagtgccag

SEQ ID NO: 2854612 - DNA, 25 bp, Homo sapien
agtgccagcacgcaggaagtactgg

SEQ ID NO: 2854613 - DNA, 25 bp, Homo sapien
caggaagtactggagctccccatcc

SEQ ID NO: 2854614 - DNA, 25 bp, Homo sapien
gttgatgctgaaggctgcgagtcca

SEQ ID NO: 2854615 - DNA, 25 bp, Homo sapien
taacaaccagttccccagtgagagg

SEQ ID NO: 2854616 - DNA, 25 bp, Homo sapien
tcttggcggatagaccctgtacagt

SEQ ID NO: 2854617 - DNA, 25 bp, Homo sapien
tatgtaccgaggctctgattcgcgg

SEQ ID NO: 2854618 - DNA, 25 bp, Homo sapien
gaacatatcgcacttcacctgcggg

SEQ ID NO: 2854619 - DNA, 25 bp, Homo sapien
cggcgaaaaggggatccccagtctg

SEQ ID NO: 2854620 - DNA, 25 bp, Homo sapien
tggacacttccttctcccggcgaaa

SEQ ID NO: 2854621 - DNA, 25 bp, Homo sapien
aaatggacacttccttctcccggcg

SEQ ID NO: 2854622 - DNA, 25 bp, Homo sapien
gggatccccagtctgatgctcttac

SEQ ID NO: 2854623 - DNA, 25 bp, Homo sapien
gatggctttagaacatactgcaggt

SEQ ID NO: 2854624 - DNA, 25 bp, Homo sapien
tgtggtggtgatcaacccagttcga

SEQ ID NO: 2854625 - DNA, 25 bp, Homo sapien
tgggctctgtcgtggaagtccatga

SEQ ID NO: 2854626 - DNA, 25 bp, Homo sapien
tcacagccaaaacactggtgcctgg

SEQ ID NO: 2854627 - DNA, 25 bp, Homo sapien
tcgaatttgagggaagacagtttgg

SEQ ID NO: 2854628 - DNA, 25 bp, Homo sapien
cagtttggaaggtggtaggtgaaag

SEQ ID NO: 2854629 - DNA, 25 bp, Homo sapien
aagacagtttggaaggtggtaggtg

SEQ ID NO: 2854630 - DNA, 25 bp, Homo sapien
ctcgaatttgagggaagacagtttg

SEQ ID NO: 2854631 - DNA, 25 bp, Homo sapien
aaactgaactcattgctccgggcat

SEQ ID NO: 2854632 - DNA, 25 bp, Homo sapien
gctccgcgaggtagatgcccatttt

SEQ ID NO: 2854633 - DNA, 25 bp, Homo sapien
gagctatttgcatcgaccagtacag

SEQ ID NO: 2854634 - DNA, 25 bp, Homo sapien
tacagtggcataggtggtaccatca

SEQ ID NO: 2854635 - DNA, 25 bp, Homo sapien
catagatggtggcattgtaatggga

SEQ ID NO: 2854636 - DNA, 25 bp, Homo sapien
tgtgaagtgccaagcagaggaggag

SEQ ID NO: 2854637 - DNA, 25 bp, Homo sapien
ttctagaggcttctcacaggtcgca

SEQ ID NO: 2854638 - DNA, 25 bp, Homo sapien
cgcacaatggagcaagaatatggca

SEQ ID NO: 2854639 - DNA, 25 bp, Homo sapien
caggaggagcggggcagggtttggc

SEQ ID NO: 2854640 - DNA, 25 bp, Homo sapien
gcggggcagggtttggcagggccat

SEQ ID NO: 2854641 - DNA, 25 bp, Homo sapien
ggagcggggcagggtttggcagggc

SEQ ID NO: 2854642 - DNA, 25 bp, Homo sapien
ggcaggaggagcggggcagggtttg

SEQ ID NO: 2854643 - DNA, 25 bp, Homo sapien
aaaactcaacagagtggctgggtct

SEQ ID NO: 2854644 - DNA, 25 bp, Homo sapien
tgttctcatccgcaaagctggccgg

SEQ ID NO: 2854645 - DNA, 25 bp, Homo sapien
cgacttttcttagccaaggtaactg

SEQ ID NO: 2854646 - DNA, 25 bp, Homo sapien
gattgaactggtgattcccaccatt

SEQ ID NO: 2854647 - DNA, 25 bp, Homo sapien
ttgtgcccaggccaactgctgcggg

SEQ ID NO: 2854648 - DNA, 25 bp, Homo sapien
gtttggcaccattgagccttgcatt

SEQ ID NO: 2854649 - DNA, 25 bp, Homo sapien
ctctgacactggacacgtgagcaca

SEQ ID NO: 2854650 - DNA, 25 bp, Homo sapien
tgctgacgttactgtaccactggcg

SEQ ID NO: 2854651 - DNA, 25 bp, Homo sapien
ctctcacgagggccaggctgacagg

SEQ ID NO: 2854652 - DNA, 25 bp, Homo sapien
aagttggagtaggtgtgtcccagcc

SEQ ID NO: 2854653 - DNA, 25 bp, Homo sapien
ggaggtgcagagactcggagcagga

SEQ ID NO: 2854654 - DNA, 25 bp, Homo sapien
aaagttggagtaggtgtgtcccagc

SEQ ID NO: 2854655 - DNA, 25 bp, Homo sapien
aacagatccgtttcccctgccgtgt

SEQ ID NO: 2854656 - DNA, 25 bp, Homo sapien
gtcacaactgtgctgggaccactca

SEQ ID NO: 2854657 - DNA, 25 bp, Homo sapien
tattattagctatgtatcccaaggc

SEQ ID NO: 2854658 - DNA, 25 bp, Homo sapien
tgaggcctggttctatggctaggac

SEQ ID NO: 2854659 - DNA, 25 bp, Homo sapien
gagggattccccaccagtaggattc

SEQ ID NO: 2854660 - DNA, 25 bp, Homo sapien
caggctgctatggtgtgttgctcaa

SEQ ID NO: 2854661 - DNA, 25 bp, Homo sapien
ttgctcaagatgtccagagggattc

SEQ ID NO: 2854662 - DNA, 25 bp, Homo sapien
ggacctactgtgatcgactcccagg

SEQ ID NO: 2854663 - DNA, 25 bp, Homo sapien
cccacgggccctttgattagtcacg

SEQ ID NO: 2854664 - DNA, 25 bp, Homo sapien
gattagtcacgtgcagagtagcagg

SEQ ID NO: 2854665 - DNA, 25 bp, Homo sapien
tagcaggcgactgtcttccctcggg

SEQ ID NO: 2854666 - DNA, 25 bp, Homo sapien
ggtccgattaggcattaaccagagg

SEQ ID NO: 2854667 - DNA, 25 bp, Homo sapien
gacggagcagaggaccctctgacca

SEQ ID NO: 2854668 - DNA, 25 bp, Homo sapien
gcagatttcagggtgcccataaagt

SEQ ID NO: 2854669 - DNA, 25 bp, Homo sapien
ccaggcagcagatttcagggtgccc

SEQ ID NO: 2854670 - DNA, 25 bp, Homo sapien
ccctctgaccaggcagcagatttca

SEQ ID NO: 2854671 - DNA, 25 bp, Homo sapien
ggagcagaaggtggaaggtaggtgg

SEQ ID NO: 2854672 - DNA, 25 bp, Homo sapien
ggctgctgccgaaaaggaggagcag

SEQ ID NO: 2854673 - DNA, 25 bp, Homo sapien
gggctgctgccgaaaaggaggagca

SEQ ID NO: 2854674 - DNA, 25 bp, Homo sapien
cagaaggtggaaggtaggtgggccg

SEQ ID NO: 2854675 - DNA, 25 bp, Homo sapien
gggacgccactctgaagacttgaaa

SEQ ID NO: 2854676 - DNA, 25 bp, Homo sapien
gttaggtctccccagtgggacgcca

SEQ ID NO: 2854677 - DNA, 25 bp, Homo sapien
cagtagaagcgtccggccttgttgg

SEQ ID NO: 2854678 - DNA, 25 bp, Homo sapien
aggtctgtgggcatgagctcatctg

SEQ ID NO: 2854679 - DNA, 25 bp, Homo sapien
gcctgaattcctgaggcagctctga

SEQ ID NO: 2854680 - DNA, 25 bp, Homo sapien
gggagagaccctgcggagccccaac

SEQ ID NO: 2854681 - DNA, 25 bp, Homo sapien
gctgtactggccctgtctccctggg

SEQ ID NO: 2854682 - DNA, 25 bp, Homo sapien
gggcagccacattccagacattctg

SEQ ID NO: 2854683 - DNA, 25 bp, Homo sapien
ttcttttagcactctcagggccact

SEQ ID NO: 2854684 - DNA, 25 bp, Homo sapien
tttagcactctcagggccactcctt

SEQ ID NO: 2854685 - DNA, 25 bp, Homo sapien
tccatcccttgacagcccctgctca

SEQ ID NO: 2854686 - DNA, 25 bp, Homo sapien
tccttccatcccttgacagcccctg

SEQ ID NO: 2854687 - DNA, 25 bp, Homo sapien
cctgactggtttgacttggtgaggc

SEQ ID NO: 2854688 - DNA, 25 bp, Homo sapien
gcttcctgtggctcttgatggggcc

SEQ ID NO: 2854689 - DNA, 25 bp, Homo sapien
ggcctgactggtttgacttggtgag

SEQ ID NO: 2854690 - DNA, 25 bp, Homo sapien
ggctctctctgccacccggaaactg

SEQ ID NO: 2854691 - DNA, 25 bp, Homo sapien
aactggtagatagcttgacaatatt

SEQ ID NO: 2854692 - DNA, 25 bp, Homo sapien
ggtagatagcttgacaatatttatc

SEQ ID NO: 2854693 - DNA, 25 bp, Homo sapien
caaactggtagatagcttgacaata

SEQ ID NO: 2854694 - DNA, 25 bp, Homo sapien
ctggtagatagcttgacaatattta

SEQ ID NO: 2854695 - DNA, 25 bp, Homo sapien
gtcccagctctgtttattaagaaga

SEQ ID NO: 2854696 - DNA, 25 bp, Homo sapien
gctcaaggttgcaaagatttacccc

SEQ ID NO: 2854697 - DNA, 25 bp, Homo sapien
gtctcaattgtatcccagtgaccca

SEQ ID NO: 2854698 - DNA, 25 bp, Homo sapien
taacaagagtattgcctagctcaag

SEQ ID NO: 2854699 - DNA, 25 bp, Homo sapien
gcccagaagatgaaaggctactagg

SEQ ID NO: 2854700 - DNA, 25 bp, Homo sapien
ggtgacagccggatgcaccaaccac

SEQ ID NO: 2854701 - DNA, 25 bp, Homo sapien
acaccttgacctgctgtgacagctt

SEQ ID NO: 2854702 - DNA, 25 bp, Homo sapien
gcaggtgacaccatagacacggtga

SEQ ID NO: 2854703 - DNA, 25 bp, Homo sapien
tctgtcactcaagcaaaagtcccag

SEQ ID NO: 2854704 - DNA, 25 bp, Homo sapien
gagcaaacagcgttgtcaagagatc

SEQ ID NO: 2854705 - DNA, 25 bp, Homo sapien
tctccgaggctattgttcagctgag

SEQ ID NO: 2854706 - DNA, 25 bp, Homo sapien
ttgtctgtgattgggacacaagccc

SEQ ID NO: 2854707 - DNA, 25 bp, Homo sapien
ctaaccccagcaagctgagcaaatc

SEQ ID NO: 2854708 - DNA, 25 bp, Homo sapien
taaccccagcaagctgagcaaatcc

SEQ ID NO: 2854709 - DNA, 25 bp, Homo sapien
aatttaatatgaagccccagtgcct

SEQ ID NO: 2854710 - DNA, 25 bp, Homo sapien
gaatttaatatgaagccccagtgcc

SEQ ID NO: 2854711 - DNA, 25 bp, Homo sapien
ctcatcagccccgaaacagggcgaa

SEQ ID NO: 2854712 - DNA, 25 bp, Homo sapien
tttctcatcagccccgaaacagggc

SEQ ID NO: 2854713 - DNA, 25 bp, Homo sapien
gggagactagttgggcacccataag

SEQ ID NO: 2854714 - DNA, 25 bp, Homo sapien
ttgagcaagtcccatgggtgtgttt

SEQ ID NO: 2854715 - DNA, 25 bp, Homo sapien
agtcccatgggtgtgtttgccagga

SEQ ID NO: 2854716 - DNA, 25 bp, Homo sapien
caggacatcaaaggtgctgcaggca

SEQ ID NO: 2854717 - DNA, 25 bp, Homo sapien
ggaccatcatgtcagctgattgccc

SEQ ID NO: 2854718 - DNA, 25 bp, Homo sapien
tgtcagctgattgcccagtttctgg

SEQ ID NO: 2854719 - DNA, 25 bp, Homo sapien
ggcagggaccatcatgtcagctgat

SEQ ID NO: 2854720 - DNA, 25 bp, Homo sapien
tcaataggatagaggggaaaggctg

SEQ ID NO: 2854721 - DNA, 25 bp, Homo sapien
tggtctggggtcgacggatcggaaa

SEQ ID NO: 2854722 - DNA, 25 bp, Homo sapien
ggatcggaaagagggctgtggcccg

SEQ ID NO: 2854723 - DNA, 25 bp, Homo sapien
tggaaaggcaggtttgagccaggtt

SEQ ID NO: 2854724 - DNA, 25 bp, Homo sapien
gtcgacggatcggaaagagggctgt

SEQ ID NO: 2854725 - DNA, 25 bp, Homo sapien
ggcggcgtgtggaagggcgggcacc

SEQ ID NO: 2854726 - DNA, 25 bp, Homo sapien
tctgccctgtgctcgctggcggcgt

SEQ ID NO: 2854727 - DNA, 25 bp, Homo sapien
ctcgctggcggcgtgtggaagggcg

SEQ ID NO: 2854728 - DNA, 25 bp, Homo sapien
ttctgccctgtgctcgctggcggcg

SEQ ID NO: 2854729 - DNA, 25 bp, Homo sapien
ggatcagggcgagatgtgggaggct

SEQ ID NO: 2854730 - DNA, 25 bp, Homo sapien
ctcaggatcagggcgagatgtggga

SEQ ID NO: 2854731 - DNA, 25 bp, Homo sapien
atcagggcgagatgtgggaggctgt

SEQ ID NO: 2854732 - DNA, 25 bp, Homo sapien
ctgccgggctctcctgaagagctgc

SEQ ID NO: 2854733 - DNA, 25 bp, Homo sapien
attccccagagcaccctcagcagca

SEQ ID NO: 2854734 - DNA, 25 bp, Homo sapien
tgccttagctctgggttaaagtccc

SEQ ID NO: 2854735 - DNA, 25 bp, Homo sapien
ttgccaggaagtgccttagctctgg

SEQ ID NO: 2854736 - DNA, 25 bp, Homo sapien
ggaagtgccttagctctgggttaaa

SEQ ID NO: 2854737 - DNA, 25 bp, Homo sapien
tgcgaaaacggagagcaggacacct

SEQ ID NO: 2854738 - DNA, 25 bp, Homo sapien
gctatttgctgaaagctcgaaaggg

SEQ ID NO: 2854739 - DNA, 25 bp, Homo sapien
cccagagcagaattcgctatttgct

SEQ ID NO: 2854740 - DNA, 25 bp, Homo sapien
aagatcacaataaagccctccaggg

SEQ ID NO: 2854741 - DNA, 25 bp, Homo sapien
ttcctcccattttggcaccagtgat

SEQ ID NO: 2854742 - DNA, 25 bp, Homo sapien
tgcaggtatgtaacctgggctgggc

SEQ ID NO: 2854743 - DNA, 25 bp, Homo sapien
tgaggggcccatcatcgcattgtct

SEQ ID NO: 2854744 - DNA, 25 bp, Homo sapien
tcttggaatattgccactgcggggc

SEQ ID NO: 2854745 - DNA, 25 bp, Homo sapien
cttctgagaatacacttgttgctct

SEQ ID NO: 2854746 - DNA, 25 bp, Homo sapien
ctgagaatacacttgttgctctgtg

SEQ ID NO: 2854747 - DNA, 25 bp, Homo sapien
tctgagaatacacttgttgctctgt

SEQ ID NO: 2854748 - DNA, 25 bp, Homo sapien
ttctgagaatacacttgttgctctg

SEQ ID NO: 2854749 - DNA, 25 bp, Homo sapien
caaggcaccacaccgaaagttaaca

SEQ ID NO: 2854750 - DNA, 25 bp, Homo sapien
ggctgggctcttgtggtacataacc

SEQ ID NO: 2854751 - DNA, 25 bp, Homo sapien
ggcaccacaccgaaagttaacaaga

SEQ ID NO: 2854752 - DNA, 25 bp, Homo sapien
ggtacataaccaggggcaatcaccc

SEQ ID NO: 2854753 - DNA, 25 bp, Homo sapien
tataacaaacaccaccatcgcctgg

SEQ ID NO: 2854754 - DNA, 25 bp, Homo sapien
gaaacaacctcttctaaggcatgag

SEQ ID NO: 2854755 - DNA, 25 bp, Homo sapien
tctaaggcatgagatgttgctaaag

SEQ ID NO: 2854756 - DNA, 25 bp, Homo sapien
atggcttattggagaaacaacctct

SEQ ID NO: 2854757 - DNA, 25 bp, Homo sapien
tgagaaccttttagctgatgctgct

SEQ ID NO: 2854758 - DNA, 25 bp, Homo sapien
ctctggggggccgtctggaaaccag

SEQ ID NO: 2854759 - DNA, 25 bp, Homo sapien
gctctggggggccgtctggaaacca

SEQ ID NO: 2854760 - DNA, 25 bp, Homo sapien
gcagccgggtcccgctggctctggg

SEQ ID NO: 2854761 - DNA, 25 bp, Homo sapien
agccgggtcccgctggctctggggg

SEQ ID NO: 2854762 - DNA, 25 bp, Homo sapien
tcaccctgtccaggactcctttgca

SEQ ID NO: 2854763 - DNA, 25 bp, Homo sapien
ccctgtccaggactcctttgcatct

SEQ ID NO: 2854764 - DNA, 25 bp, Homo sapien
aggactcctttgcatctttagagta

SEQ ID NO: 2854765 - DNA, 25 bp, Homo sapien
ggactcctttgcatctttagagtac

SEQ ID NO: 2854766 - DNA, 25 bp, Homo sapien
gctggaagtgtttaaccattgcagt

SEQ ID NO: 2854767 - DNA, 25 bp, Homo sapien
gagcctaacaggagtgagacagccc

SEQ ID NO: 2854768 - DNA, 25 bp, Homo sapien
aaccagcccagtagagcctaacagg

SEQ ID NO: 2854769 - DNA, 25 bp, Homo sapien
tgtttaaccattgcagtcctgtagc

SEQ ID NO: 2854770 - DNA, 25 bp, Homo sapien
gggaccctgttaactcagctgatga

SEQ ID NO: 2854771 - DNA, 25 bp, Homo sapien
gagctccctatagtgaaacatccag

SEQ ID NO: 2854772 - DNA, 25 bp, Homo sapien
tattccatgtatgatctgccctggg

SEQ ID NO: 2854773 - DNA, 25 bp, Homo sapien
cctgaacgtcagtaagttggtggca

SEQ ID NO: 2854774 - DNA, 25 bp, Homo sapien
tcaaatggccagcaccaaatgggcc

SEQ ID NO: 2854775 - DNA, 25 bp, Homo sapien
caggtacctgatgaatgtcgccgaa

SEQ ID NO: 2854776 - DNA, 25 bp, Homo sapien
tcgccgaatgactgaatgagccaat

SEQ ID NO: 2854777 - DNA, 25 bp, Homo sapien
taagatcccctaacacattgcaggt

SEQ ID NO: 2854778 - DNA, 25 bp, Homo sapien
gacctggtgcagagtaaatacatca

SEQ ID NO: 2854779 - DNA, 25 bp, Homo sapien
tagggtaaccactaatcatgcatgg

SEQ ID NO: 2854780 - DNA, 25 bp, Homo sapien
tagtggctgccgtacggaacagtac

SEQ ID NO: 2854781 - DNA, 25 bp, Homo sapien
gatatagctgctcagtctggtgctg

SEQ ID NO: 2854782 - DNA, 25 bp, Homo sapien
gataataaggtgactaagactaaga

SEQ ID NO: 2854783 - DNA, 25 bp, Homo sapien
taaggtgactaagactaagacacat

SEQ ID NO: 2854784 - DNA, 25 bp, Homo sapien
agactaagacacatgcaaatcaccc

SEQ ID NO: 2854785 - DNA, 25 bp, Homo sapien
gactaagactaagacacatgcaaat

SEQ ID NO: 2854786 - DNA, 25 bp, Homo sapien
ggaggtgaacgagttctcagcctgt

SEQ ID NO: 2854787 - DNA, 25 bp, Homo sapien
tgaggaaagaacaaccgattcacca

SEQ ID NO: 2854788 - DNA, 25 bp, Homo sapien
tccgaccatcccattaactttgaag

SEQ ID NO: 2854789 - DNA, 25 bp, Homo sapien
cacatcatggtgagagtttgtatga

SEQ ID NO: 2854790 - DNA, 25 bp, Homo sapien
tcccagagaactgacagtccgtgct

SEQ ID NO: 2854791 - DNA, 25 bp, Homo sapien
gatgcgctgaccacttcccagagaa

SEQ ID NO: 2854792 - DNA, 25 bp, Homo sapien
gctcccaaaagtttgaaccaacagc

SEQ ID NO: 2854793 - DNA, 25 bp, Homo sapien
gccctggttctccaaaagacagagg

SEQ ID NO: 2854794 - DNA, 25 bp, Homo sapien
cagcctcaggcaaaccacgttctgg

SEQ ID NO: 2854795 - DNA, 25 bp, Homo sapien
tgatgaactgggcttatgtgagaat

SEQ ID NO: 2854796 - DNA, 25 bp, Homo sapien
taaaggaggaaatggtgatgaactg

SEQ ID NO: 2854797 - DNA, 25 bp, Homo sapien
actgagcctctagtcccaaaaccat

SEQ ID NO: 2854798 - DNA, 25 bp, Homo sapien
ctgactcggtaagtattagtttcaa

SEQ ID NO: 2854799 - DNA, 25 bp, Homo sapien
aacacaaagtctgactcggtaagta

SEQ ID NO: 2854800 - DNA, 25 bp, Homo sapien
gtattagtttcaaacagaacactaa

SEQ ID NO: 2854801 - DNA, 25 bp, Homo sapien
caaagtctgactcggtaagtattag

SEQ ID NO: 2854802 - DNA, 25 bp, Homo sapien
ttaaagagagaatccggtactgtgg

SEQ ID NO: 2854803 - DNA, 25 bp, Homo sapien
tatgttagcaccttgtctccaggca

SEQ ID NO: 2854804 - DNA, 25 bp, Homo sapien
ctattaatgcgtgtggaaaaggcct

SEQ ID NO: 2854805 - DNA, 25 bp, Homo sapien
ccatgtgccaataagacaatgggca

SEQ ID NO: 2854806 - DNA, 25 bp, Homo sapien
atcacaagatccttgtcgatatcct

SEQ ID NO: 2854807 - DNA, 25 bp, Homo sapien
agatcacaagatccttgtcgatatc

SEQ ID NO: 2854808 - DNA, 25 bp, Homo sapien
gatcacaagatccttgtcgatatcc

SEQ ID NO: 2854809 - DNA, 25 bp, Homo sapien
tctaggtggccatgcaaggtcaccc

SEQ ID NO: 2854810 - DNA, 25 bp, Homo sapien
gatgataacgcacttcccaaggagt

SEQ ID NO: 2854811 - DNA, 25 bp, Homo sapien
caaggagtcagtggactcccaccca

SEQ ID NO: 2854812 - DNA, 25 bp, Homo sapien
gacggaggaatctcgctctctctgt

SEQ ID NO: 2854813 - DNA, 25 bp, Homo sapien
aaaagcgggtggtgcaatgctccat

SEQ ID NO: 2854814 - DNA, 25 bp, Homo sapien
caggtcacaggtctcgaaaaagcgg

SEQ ID NO: 2854815 - DNA, 25 bp, Homo sapien
ctgcttgatgccgaagcagccggcc

SEQ ID NO: 2854816 - DNA, 25 bp, Homo sapien
ttgatgccgaagcagccggcccact

SEQ ID NO: 2854817 - DNA, 25 bp, Homo sapien
tctcacttcatcaccacaagagaag

SEQ ID NO: 2854818 - DNA, 25 bp, Homo sapien
caagagaagttcagaaggtagtgac

SEQ ID NO: 2854819 - DNA, 25 bp, Homo sapien
gtgcaggtgtagcttgctccatctg

SEQ ID NO: 2854820 - DNA, 25 bp, Homo sapien
aggttatgaacagagtataagtcca

SEQ ID NO: 2854821 - DNA, 25 bp, Homo sapien
ttcactctagggtctggggtcttac

SEQ ID NO: 2854822 - DNA, 25 bp, Homo sapien
cgaactgccagtgtacagggaagat

SEQ ID NO: 2854823 - DNA, 25 bp, Homo sapien
gcgcttctcattctcatggatcttc

SEQ ID NO: 2854824 - DNA, 25 bp, Homo sapien
ccgtcaatggggtgctggtccagct

SEQ ID NO: 2854825 - DNA, 25 bp, Homo sapien
tatagttcttctcgaagtcccgggc

SEQ ID NO: 2854826 - DNA, 25 bp, Homo sapien
tagaagcctgggatgacctcaaaga

SEQ ID NO: 2854827 - DNA, 25 bp, Homo sapien
atcaaaatcacctggcgaaggccgg

SEQ ID NO: 2854828 - DNA, 25 bp, Homo sapien
gagattgtctggaccagtcgggccc

SEQ ID NO: 2854829 - DNA, 25 bp, Homo sapien
gagactagccagaccaaagctcaca

SEQ ID NO: 2854830 - DNA, 25 bp, Homo sapien
catccctctcatacagggtgaccag

SEQ ID NO: 2854831 - DNA, 25 bp, Homo sapien
tcttgagccagtcccgcatgcgcag

SEQ ID NO: 2854832 - DNA, 25 bp, Homo sapien
gggaattcggtcagctcagagtcca

SEQ ID NO: 2854833 - DNA, 25 bp, Homo sapien
cagggtgaccaggacgttcttgagc

SEQ ID NO: 2854834 - DNA, 25 bp, Homo sapien
cgcgcctgacccaggttcacacttt

SEQ ID NO: 2854835 - DNA, 25 bp, Homo sapien
ggccacaatgtcagagcctcatcca

SEQ ID NO: 2854836 - DNA, 25 bp, Homo sapien
tggacttattagaggtcagcatgga

SEQ ID NO: 2854837 - DNA, 25 bp, Homo sapien
tgctcaaggccacaatgtcagagcc

SEQ ID NO: 2854838 - DNA, 25 bp, Homo sapien
catcattgaaccagggaaagtcccc

SEQ ID NO: 2854839 - DNA, 25 bp, Homo sapien
cttccctcatcattgaaccagggaa

SEQ ID NO: 2854840 - DNA, 25 bp, Homo sapien
gaggctaccttcatcatcagctggg

SEQ ID NO: 2854841 - DNA, 25 bp, Homo sapien
ggcttaggggtctgttcttccctca

SEQ ID NO: 2854842 - DNA, 25 bp, Homo sapien
cagtaccaagtaacagggcccaaag

SEQ ID NO: 2854843 - DNA, 25 bp, Homo sapien
gtaggcccaggtcaaacatcatttt

SEQ ID NO: 2854844 - DNA, 25 bp, Homo sapien
cattgccatcgggtgccagaataca

SEQ ID NO: 2854845 - DNA, 25 bp, Homo sapien
tagggaggatactgaacaaggcact

SEQ ID NO: 2854846 - DNA, 25 bp, Homo sapien
ccagggtgcactttgtggcaaagaa

SEQ ID NO: 2854847 - DNA, 25 bp, Homo sapien
ggaagagtcgaaggtcttgttgtca

SEQ ID NO: 2854848 - DNA, 25 bp, Homo sapien
aggtcttgttgtcattgctgcacac

SEQ ID NO: 2854849 - DNA, 25 bp, Homo sapien
tttgcaaggcccgatgtagtccagg

SEQ ID NO: 2854850 - DNA, 25 bp, Homo sapien
tctcaaactcgccaatgggggctgg

SEQ ID NO: 2854851 - DNA, 25 bp, Homo sapien
caaactcgccaatgggggctgggca

SEQ ID NO: 2854852 - DNA, 25 bp, Homo sapien
cgcacatgggggtgttgttctcatc

SEQ ID NO: 2854853 - DNA, 25 bp, Homo sapien
ctggtggggtcctggcacacgcaca

SEQ ID NO: 2854854 - DNA, 25 bp, Homo sapien
cttgccgtgtttgcagtggtggttc

SEQ ID NO: 2854855 - DNA, 25 bp, Homo sapien
ttagcatcacctggactagcacatc

SEQ ID NO: 2854856 - DNA, 25 bp, Homo sapien
agcatcacctggactagcacatcca

SEQ ID NO: 2854857 - DNA, 25 bp, Homo sapien
ccccatcctacctggacagatctca

SEQ ID NO: 2854858 - DNA, 25 bp, Homo sapien
ccatcctacctggacagatctcagg

SEQ ID NO: 2854859 - DNA, 25 bp, Homo sapien
caatgggagatttcggtgaccagat

SEQ ID NO: 2854860 - DNA, 25 bp, Homo sapien
cagcgacctccgtgggactgggaaa

SEQ ID NO: 2854861 - DNA, 25 bp, Homo sapien
gggcacgggctgatacagaagcaat

SEQ ID NO: 2854862 - DNA, 25 bp, Homo sapien
ccagatgtgatcagcgacctccgtg

SEQ ID NO: 2854863 - DNA, 25 bp, Homo sapien
ctggacaggattagctcccacagat

SEQ ID NO: 2854864 - DNA, 25 bp, Homo sapien
gcaccatcatcaaattctcctactt

SEQ ID NO: 2854865 - DNA, 25 bp, Homo sapien
ttccacctggacaggattagctccc

SEQ ID NO: 2854866 - DNA, 25 bp, Homo sapien
tctgcaccatcatcaaattctccta

SEQ ID NO: 2854867 - DNA, 25 bp, Homo sapien
ttccaccacctctgtctcatcaggc

SEQ ID NO: 2854868 - DNA, 25 bp, Homo sapien
tcagtcacctctgccacagtttctt

SEQ ID NO: 2854869 - DNA, 25 bp, Homo sapien
ctctgtctcatcaggcagggcttct

SEQ ID NO: 2854870 - DNA, 25 bp, Homo sapien
accacctctgtctcatcaggcaggg

SEQ ID NO: 2854871 - DNA, 25 bp, Homo sapien
aagagaaagtagcgttcagaggggt

SEQ ID NO: 2854872 - DNA, 25 bp, Homo sapien
gggtcaggaataaggccagcttcac

SEQ ID NO: 2854873 - DNA, 25 bp, Homo sapien
gagaaagtagcgttcagaggggtca

SEQ ID NO: 2854874 - DNA, 25 bp, Homo sapien
ggtcaggaataaggccagcttcacc

SEQ ID NO: 2854875 - DNA, 25 bp, Homo sapien
gggctgccaaggccctcccggccag

SEQ ID NO: 2854876 - DNA, 25 bp, Homo sapien
tcccggccaggcaaaggagaaagaa

SEQ ID NO: 2854877 - DNA, 25 bp, Homo sapien
ggggctgccaaggccctcccggcca

SEQ ID NO: 2854878 - DNA, 25 bp, Homo sapien
ggagaaagaagatccaggccctcat

SEQ ID NO: 2854879 - DNA, 25 bp, Homo sapien
agaataagcctccagctcagagctt

SEQ ID NO: 2854880 - DNA, 25 bp, Homo sapien
gagaataagcctccagctcagagct

SEQ ID NO: 2854881 - DNA, 25 bp, Homo sapien
acttgtgactacacccagcgaattt

SEQ ID NO: 2854882 - DNA, 25 bp, Homo sapien
agatcacaggcacttgtgactacac

SEQ ID NO: 2854883 - DNA, 25 bp, Homo sapien
tgagatcacaggcacttgtgactac

SEQ ID NO: 2854884 - DNA, 25 bp, Homo sapien
caggcacttgtgactacacccagcg

SEQ ID NO: 2854885 - DNA, 25 bp, Homo sapien
tagcataaaggtaagctcataggct

SEQ ID NO: 2854886 - DNA, 25 bp, Homo sapien
tggagccagaatatacaggttcaaa

SEQ ID NO: 2854887 - DNA, 25 bp, Homo sapien
gggcctcaatttgttccccaatgtg

SEQ ID NO: 2854888 - DNA, 25 bp, Homo sapien
ccaatctttaaaggctcatgggtga

SEQ ID NO: 2854889 - DNA, 25 bp, Homo sapien
tctccacttgccccttgactccctg

SEQ ID NO: 2854890 - DNA, 25 bp, Homo sapien
ctctctccacttgccccttgactcc

SEQ ID NO: 2854891 - DNA, 25 bp, Homo sapien
tctctccacttgccccttgactccc

SEQ ID NO: 2854892 - DNA, 25 bp, Homo sapien
ctctccacttgccccttgactccct

SEQ ID NO: 2854893 - DNA, 25 bp, Homo sapien
ccaacgggagagacaaagtgctgct

SEQ ID NO: 2854894 - DNA, 25 bp, Homo sapien
tgtgctgtagaaacaaggtcctcag

SEQ ID NO: 2854895 - DNA, 25 bp, Homo sapien
gatgatttcctgtctaagctgccag

SEQ ID NO: 2854896 - DNA, 25 bp, Homo sapien
tttgggcctaatgacaaagccacgt

SEQ ID NO: 2854897 - DNA, 25 bp, Homo sapien
tacatagagggcacaacagtcttgg

SEQ ID NO: 2854898 - DNA, 25 bp, Homo sapien
ttatgagggaatgccacaattcgca

SEQ ID NO: 2854899 - DNA, 25 bp, Homo sapien
cacccttgcaaggagattatcatgg

SEQ ID NO: 2854900 - DNA, 25 bp, Homo sapien
tattagttcaaggtcaaatggtacc

SEQ ID NO: 2854901 - DNA, 25 bp, Homo sapien
tcgcattcctcggagagtgagtcag

SEQ ID NO: 2854902 - DNA, 25 bp, Homo sapien
ggcaactcgcattcctcggagagtg

SEQ ID NO: 2854903 - DNA, 25 bp, Homo sapien
ttcctcggagagtgagtcaggcaga

SEQ ID NO: 2854904 - DNA, 25 bp, Homo sapien
caactcgcattcctcggagagtgag

SEQ ID NO: 2854905 - DNA, 25 bp, Homo sapien
ccttttgggcagactgggaatcctg

SEQ ID NO: 2854906 - DNA, 25 bp, Homo sapien
tgtttaccatcccaaggaactcagg

SEQ ID NO: 2854907 - DNA, 25 bp, Homo sapien
tagataaactaagggctactgcctg

SEQ ID NO: 2854908 - DNA, 25 bp, Homo sapien
ttgacagccagttcacggagccagt

SEQ ID NO: 2854909 - DNA, 25 bp, Homo sapien
ggaaaggctgggcgggggtcacaca

SEQ ID NO: 2854910 - DNA, 25 bp, Homo sapien
aaaggctgggcgggggtcacacata

SEQ ID NO: 2854911 - DNA, 25 bp, Homo sapien
gaaaggctgggcgggggtcacacat

SEQ ID NO: 2854912 - DNA, 25 bp, Homo sapien
aaggctgggcgggggtcacacatac

SEQ ID NO: 2854913 - DNA, 25 bp, Homo sapien
ggcaggcagagcgcgctctccgggc

SEQ ID NO: 2854914 - DNA, 25 bp, Homo sapien
tctgggctgggtctatctcccctcc

SEQ ID NO: 2854915 - DNA, 25 bp, Homo sapien
tgaaggaccgcgggaatgtggaggg

SEQ ID NO: 2854916 - DNA, 25 bp, Homo sapien
gacaggcaacaggaaaccactcaga

SEQ ID NO: 2854917 - DNA, 25 bp, Homo sapien
tttagagacaggcaacaggaaacca

SEQ ID NO: 2854918 - DNA, 25 bp, Homo sapien
cctggagactgcaaggaattaccca

SEQ ID NO: 2854919 - DNA, 25 bp, Homo sapien
ctgcaaggaattacccaatggcccc

SEQ ID NO: 2854920 - DNA, 25 bp, Homo sapien
gagactgcaaggaattacccaatgg

SEQ ID NO: 2854921 - DNA, 25 bp, Homo sapien
ggcctggagactgcaaggaattacc

SEQ ID NO: 2854922 - DNA, 25 bp, Homo sapien
gctactagtggtatcatccttgatg

SEQ ID NO: 2854923 - DNA, 25 bp, Homo sapien
gacaagctgctactagtggtatcat

SEQ ID NO: 2854924 - DNA, 25 bp, Homo sapien
cagacaagacaagctgctactagtg

SEQ ID NO: 2854925 - DNA, 25 bp, Homo sapien
gctgctactagtggtatcatccttg

SEQ ID NO: 2854926 - DNA, 25 bp, Homo sapien
aaaagtacaaggaattcaatctgtg

SEQ ID NO: 2854927 - DNA, 25 bp, Homo sapien
gacgagttaagtgcagaactgagaa

SEQ ID NO: 2854928 - DNA, 25 bp, Homo sapien
tagacgagttaagtgcagaactgag

SEQ ID NO: 2854929 - DNA, 25 bp, Homo sapien
actgtgaacaatcaatcgagataac

SEQ ID NO: 2854930 - DNA, 25 bp, Homo sapien
ggttcaaaagccaagtgcttttggc

SEQ ID NO: 2854931 - DNA, 25 bp, Homo sapien
tggtggactctccacatatctgttt

SEQ ID NO: 2854932 - DNA, 25 bp, Homo sapien
cctggttcaaaagccaagtgctttt

SEQ ID NO: 2854933 - DNA, 25 bp, Homo sapien
gactctccacatatctgttttgcca

SEQ ID NO: 2854934 - DNA, 25 bp, Homo sapien
gttaatcaactcgtaagggcagagc

SEQ ID NO: 2854935 - DNA, 25 bp, Homo sapien
actctcctgggtacaaagtcagtgt

SEQ ID NO: 2854936 - DNA, 25 bp, Homo sapien
caaccatagcatcacccgaggagaa

SEQ ID NO: 2854937 - DNA, 25 bp, Homo sapien
tcttcccttagtaggacctgtgccc

SEQ ID NO: 2854938 - DNA, 25 bp, Homo sapien
aaataatccctgaaagtatagtctt

SEQ ID NO: 2854939 - DNA, 25 bp, Homo sapien
caaataatccctgaaagtatagtct

SEQ ID NO: 2854940 - DNA, 25 bp, Homo sapien
tctctagtaacgaactatacaaata

SEQ ID NO: 2854941 - DNA, 25 bp, Homo sapien
tagtaacgaactatacaaataatcc

SEQ ID NO: 2854942 - DNA, 25 bp, Homo sapien
tggtcatcctctcagacctagcact

SEQ ID NO: 2854943 - DNA, 25 bp, Homo sapien
cactcagcttcagggggacgtgcat

SEQ ID NO: 2854944 - DNA, 25 bp, Homo sapien
aggtgacacatatcgtagccagatc

SEQ ID NO: 2854945 - DNA, 25 bp, Homo sapien
gacacatatcgtagccagatcgtcc

SEQ ID NO: 2854946 - DNA, 25 bp, Homo sapien
ggcccttggagatcactgtggccaa

SEQ ID NO: 2854947 - DNA, 25 bp, Homo sapien
gactgttctgaccagcatgcggctg

SEQ ID NO: 2854948 - DNA, 25 bp, Homo sapien
ccaagggtgatgctgagtctcgaga

SEQ ID NO: 2854949 - DNA, 25 bp, Homo sapien
catgcggctgcacctaactcaattt

SEQ ID NO: 2854950 - DNA, 25 bp, Homo sapien
atggggtttggccatattggctagg

SEQ ID NO: 2854951 - DNA, 25 bp, Homo sapien
gtcctcaagtgatccatccccctcg

SEQ ID NO: 2854952 - DNA, 25 bp, Homo sapien
taggctggtctcaaactcctgtcct

SEQ ID NO: 2854953 - DNA, 25 bp, Homo sapien
agatggggtttggccatattggcta

SEQ ID NO: 2854954 - DNA, 25 bp, Homo sapien
cacagaatttgccagtttacagaac

SEQ ID NO: 2854955 - DNA, 25 bp, Homo sapien
tgaggcacctcccaacaataatagc

SEQ ID NO: 2854956 - DNA, 25 bp, Homo sapien
tctgctgtctaaaagcgtgaggcac

SEQ ID NO: 2854957 - DNA, 25 bp, Homo sapien
gcacaacactggaaagacacgaaaa

SEQ ID NO: 2854958 - DNA, 25 bp, Homo sapien
cattctcagcctacatgtatgactt

SEQ ID NO: 2854959 - DNA, 25 bp, Homo sapien
tggactaggctgacaacatctgaat

SEQ ID NO: 2854960 - DNA, 25 bp, Homo sapien
gggtgcaacaataatcatcaatgtc

SEQ ID NO: 2854961 - DNA, 25 bp, Homo sapien
tgtctgctaaaaccatgagttgaag

SEQ ID NO: 2854962 - DNA, 25 bp, Homo sapien
ggtaggactgtgatggcaaccccaa

SEQ ID NO: 2854963 - DNA, 25 bp, Homo sapien
ccgggggtgtcatcgcatattggta

SEQ ID NO: 2854964 - DNA, 25 bp, Homo sapien
ggtgtcatcgcatattggtaggact

SEQ ID NO: 2854965 - DNA, 25 bp, Homo sapien
attggtaggactgtgatggcaaccc

SEQ ID NO: 2854966 - DNA, 25 bp, Homo sapien
ctctccattcagggtctgtgacttc

SEQ ID NO: 2854967 - DNA, 25 bp, Homo sapien
ccgcaacaatggacagacaattttc

SEQ ID NO: 2854968 - DNA, 25 bp, Homo sapien
cccgcaacaatggacagacaatttt

SEQ ID NO: 2854969 - DNA, 25 bp, Homo sapien
gcaacaatggacagacaattttctt

SEQ ID NO: 2854970 - DNA, 25 bp, Homo sapien
tcttcgttgccattctccaactcag

SEQ ID NO: 2854971 - DNA, 25 bp, Homo sapien
tctaggctatgtgggccaaatggtc

SEQ ID NO: 2854972 - DNA, 25 bp, Homo sapien
tgtgggccaaatggtcttcgttgcc

SEQ ID NO: 2854973 - DNA, 25 bp, Homo sapien
tagtaaacagtctaggctatgtggg

SEQ ID NO: 2854974 - DNA, 25 bp, Homo sapien
gtcagggtggtctcagatgatccgc

SEQ ID NO: 2854975 - DNA, 25 bp, Homo sapien
tgagttggtcctcttcacctgaaaa

SEQ ID NO: 2854976 - DNA, 25 bp, Homo sapien
catgaattaatggaaggagcacccc

SEQ ID NO: 2854977 - DNA, 25 bp, Homo sapien
tatgtgaactcagacaagtacctgc

SEQ ID NO: 2854978 - DNA, 25 bp, Homo sapien
ggagcttgaactctatcccaggcag

SEQ ID NO: 2854979 - DNA, 25 bp, Homo sapien
gaatctacagggtgtctgactccca

SEQ ID NO: 2854980 - DNA, 25 bp, Homo sapien
gggtcaatgcctccactttataggt

SEQ ID NO: 2854981 - DNA, 25 bp, Homo sapien
gtaagcataaccacctacatgtgag

SEQ ID NO: 2854982 - DNA, 25 bp, Homo sapien
ggaataggacaactgagggtctccg

SEQ ID NO: 2854983 - DNA, 25 bp, Homo sapien
aataggacaactgagggtctccgca

SEQ ID NO: 2854984 - DNA, 25 bp, Homo sapien
gaataggacaactgagggtctccgc

SEQ ID NO: 2854985 - DNA, 25 bp, Homo sapien
aaggaataggacaactgagggtctc

SEQ ID NO: 2854986 - DNA, 25 bp, Homo sapien
cacccggcatgactgccaagtccca

SEQ ID NO: 2854987 - DNA, 25 bp, Homo sapien
atcacccggcatgactgccaagtcc

SEQ ID NO: 2854988 - DNA, 25 bp, Homo sapien
tcacccggcatgactgccaagtccc

SEQ ID NO: 2854989 - DNA, 25 bp, Homo sapien
aaaaaagttcgtatgcccaggcctg

SEQ ID NO: 2854990 - DNA, 25 bp, Homo sapien
tacgggaagcccaatatgacacagg

SEQ ID NO: 2854991 - DNA, 25 bp, Homo sapien
ttttctcagtcacgtcagggcacca

SEQ ID NO: 2854992 - DNA, 25 bp, Homo sapien
tcaagtagagagagcggcacagtct

SEQ ID NO: 2854993 - DNA, 25 bp, Homo sapien
ctgccccctttggtccatcctgtgg

SEQ ID NO: 2854994 - DNA, 25 bp, Homo sapien
cccctttggtccatcctgtgggctg

SEQ ID NO: 2854995 - DNA, 25 bp, Homo sapien
gtgggctgtggggaccaggcccctg

SEQ ID NO: 2854996 - DNA, 25 bp, Homo sapien
tgccccctttggtccatcctgtggg

SEQ ID NO: 2854997 - DNA, 25 bp, Homo sapien
atgcagaccttcttgttgggcaggt

SEQ ID NO: 2854998 - DNA, 25 bp, Homo sapien
gggttgcaagcagagtgtccatgct

SEQ ID NO: 2854999 - DNA, 25 bp, Homo sapien
cctgttttcttcagggttgcaagca

SEQ ID NO: 2855000 - DNA, 25 bp, Homo sapien
gaccttcttgttgggcaggtcaatg

SEQ ID NO: 2855001 - DNA, 25 bp, Homo sapien
gttcaggctctaaattactactcac

SEQ ID NO: 2855002 - DNA, 25 bp, Homo sapien
gcacagaccctcccagttacagcaa

SEQ ID NO: 2855003 - DNA, 25 bp, Homo sapien
caagcttattgaggacccgagagac

SEQ ID NO: 2855004 - DNA, 25 bp, Homo sapien
ctccaagcttattgaggacccgaga

SEQ ID NO: 2855005 - DNA, 25 bp, Homo sapien
tattgaggacccgagagacagcttc

SEQ ID NO: 2855006 - DNA, 25 bp, Homo sapien
gcttattgaggacccgagagacagc

SEQ ID NO: 2855007 - DNA, 25 bp, Homo sapien
gacccccacacagtgccagcagaca

SEQ ID NO: 2855008 - DNA, 25 bp, Homo sapien
gccctgtagagtgacccccacacag

SEQ ID NO: 2855009 - DNA, 25 bp, Homo sapien
ccctgtagagtgacccccacacagt

SEQ ID NO: 2855010 - DNA, 25 bp, Homo sapien
taagagtttctacctcacaagttgt

SEQ ID NO: 2855011 - DNA, 25 bp, Homo sapien
tgagcccgtctcttcaactatagag

SEQ ID NO: 2855012 - DNA, 25 bp, Homo sapien
tgctttttcccagtcctaccttcaa

SEQ ID NO: 2855013 - DNA, 25 bp, Homo sapien
tataaatcctttagcagtgtctggc

SEQ ID NO: 2855014 - DNA, 25 bp, Homo sapien
ttcatccaagggccgcattctcaga

SEQ ID NO: 2855015 - DNA, 25 bp, Homo sapien
atccaagggccgcattctcagaggc

SEQ ID NO: 2855016 - DNA, 25 bp, Homo sapien
tccaagggccgcattctcagaggca

SEQ ID NO: 2855017 - DNA, 25 bp, Homo sapien
ctttcatccaagggccgcattctca

SEQ ID NO: 2855018 - DNA, 25 bp, Homo sapien
taagtacggttagccagcatccaag

SEQ ID NO: 2855019 - DNA, 25 bp, Homo sapien
tatggcttcagataccagctctggc

SEQ ID NO: 2855020 - DNA, 25 bp, Homo sapien
catgtctcgggttggtctgtgtgtc

SEQ ID NO: 2855021 - DNA, 25 bp, Homo sapien
cttgcactagaggaagtcagctact

SEQ ID NO: 2855022 - DNA, 25 bp, Homo sapien
ccctcgagctaacaagcatgtgagt

SEQ ID NO: 2855023 - DNA, 25 bp, Homo sapien
ctggagccactaggccaagctgttc

SEQ ID NO: 2855024 - DNA, 25 bp, Homo sapien
gagacatgttggaagtggattctcc

SEQ ID NO: 2855025 - DNA, 25 bp, Homo sapien
agctttatgagagcctctgagctgg

SEQ ID NO: 2855026 - DNA, 25 bp, Homo sapien
ttacagttcagtgctctcctcctcc

SEQ ID NO: 2855027 - DNA, 25 bp, Homo sapien
agttcagtgctctcctcctccacct

SEQ ID NO: 2855028 - DNA, 25 bp, Homo sapien
tacagttcagtgctctcctcctcca

SEQ ID NO: 2855029 - DNA, 25 bp, Homo sapien
acagttcagtgctctcctcctccac

SEQ ID NO: 2855030 - DNA, 25 bp, Homo sapien
catggcaactgtgggatacctctgg

SEQ ID NO: 2855031 - DNA, 25 bp, Homo sapien
tacacaggagctaccatttcttggg

SEQ ID NO: 2855032 - DNA, 25 bp, Homo sapien
tgaccctaaccaagatgcaactgag

SEQ ID NO: 2855033 - DNA, 25 bp, Homo sapien
agagcatcttcccaagccggtgtga

SEQ ID NO: 2855034 - DNA, 25 bp, Homo sapien
tccattcagtgtcgcccagagttga

SEQ ID NO: 2855035 - DNA, 25 bp, Homo sapien
tcagtgtcgcccagagttgatctga

SEQ ID NO: 2855036 - DNA, 25 bp, Homo sapien
tgtcgcccagagttgatctgaaaag

SEQ ID NO: 2855037 - DNA, 25 bp, Homo sapien
ccagagttgatctgaaaagtaggcc

SEQ ID NO: 2855038 - DNA, 25 bp, Homo sapien
accgggtccactcccttgtccagag

SEQ ID NO: 2855039 - DNA, 25 bp, Homo sapien
gggactaggcgtctcagttcccgct

SEQ ID NO: 2855040 - DNA, 25 bp, Homo sapien
cagggactaggcgtctcagttcccg

SEQ ID NO: 2855041 - DNA, 25 bp, Homo sapien
gactaggcgtctcagttcccgctgg

SEQ ID NO: 2855042 - DNA, 25 bp, Homo sapien
tcagggactaggcgtctcagttccc

SEQ ID NO: 2855043 - DNA, 25 bp, Homo sapien
cagctccgacgttttgaagcctggc

SEQ ID NO: 2855044 - DNA, 25 bp, Homo sapien
gctcccagattaaactcccttcgga

SEQ ID NO: 2855045 - DNA, 25 bp, Homo sapien
tttctgaagggtcgcaaaagctggg

SEQ ID NO: 2855046 - DNA, 25 bp, Homo sapien
tcaagatcagcatccggtcaagcgg

SEQ ID NO: 2855047 - DNA, 25 bp, Homo sapien
gccgagaagcaacccgggactgcaa

SEQ ID NO: 2855048 - DNA, 25 bp, Homo sapien
gaagcaacccgggactgcaagtctg

SEQ ID NO: 2855049 - DNA, 25 bp, Homo sapien
acccgggactgcaagtctgcgtggc

SEQ ID NO: 2855050 - DNA, 25 bp, Homo sapien
ctgtgcagccgagaagcaacccggg

SEQ ID NO: 2855051 - DNA, 25 bp, Homo sapien
gtgtggcggcggtgtcagcagcgcc

SEQ ID NO: 2855052 - DNA, 25 bp, Homo sapien
tcggctgcgcttccgagagtgcgca

SEQ ID NO: 2855053 - DNA, 25 bp, Homo sapien
tctggattcggagggcgggttcggc

SEQ ID NO: 2855054 - DNA, 25 bp, Homo sapien
agtgcgcactagaggcctggtcccg

SEQ ID NO: 2855055 - DNA, 25 bp, Homo sapien
gactgtcggcctttttcagaacgcc

SEQ ID NO: 2855056 - DNA, 25 bp, Homo sapien
tcagaacgcctacttcgggtcaagc

SEQ ID NO: 2855057 - DNA, 25 bp, Homo sapien
aatttttattaagcgccagccaacg

SEQ ID NO: 2855058 - DNA, 25 bp, Homo sapien
gggcaccgccttgaacaggacatca

SEQ ID NO: 2855059 - DNA, 25 bp, Homo sapien
tttttattgaacacattataaaaca

SEQ ID NO: 2855060 - DNA, 25 bp, Homo sapien
tattgaacacattataaaacaggtt

SEQ ID NO: 2855061 - DNA, 25 bp, Homo sapien
aaagtcagctttttattgaacacat

SEQ ID NO: 2855062 - DNA, 25 bp, Homo sapien
tttattgaacacattataaaacagg

SEQ ID NO: 2855063 - DNA, 25 bp, Homo sapien
cttccaatgttgacgttggccaggg

SEQ ID NO: 2855064 - DNA, 25 bp, Homo sapien
tcttctcctcagctgaagcagcagc

SEQ ID NO: 2855065 - DNA, 25 bp, Homo sapien
caatggagggggcaggacctcctgc

SEQ ID NO: 2855066 - DNA, 25 bp, Homo sapien
cagatgaggcttccaatgttgacgt

SEQ ID NO: 2855067 - DNA, 25 bp, Homo sapien
ctttccaaacaagccaggccaaaag

SEQ ID NO: 2855068 - DNA, 25 bp, Homo sapien
caaacaagccaggccaaaaggttca

SEQ ID NO: 2855069 - DNA, 25 bp, Homo sapien
agccaggccaaaaggttcaacattt

SEQ ID NO: 2855070 - DNA, 25 bp, Homo sapien
acaagccaggccaaaaggttcaaca

SEQ ID NO: 2855071 - DNA, 25 bp, Homo sapien
ctttaatgagggtattgatattaac

SEQ ID NO: 2855072 - DNA, 25 bp, Homo sapien
ggctgctttaatgagggtattgata

SEQ ID NO: 2855073 - DNA, 25 bp, Homo sapien
actggctgctttaatgagggtattg

SEQ ID NO: 2855074 - DNA, 25 bp, Homo sapien
ctgctttaatgagggtattgatatt

SEQ ID NO: 2855075 - DNA, 25 bp, Homo sapien
caagtagacacaggcaagctcggag

SEQ ID NO: 2855076 - DNA, 25 bp, Homo sapien
gccaagtagacacaggcaagctcgg

SEQ ID NO: 2855077 - DNA, 25 bp, Homo sapien
agacacaggcaagctcggagatgga

SEQ ID NO: 2855078 - DNA, 25 bp, Homo sapien
agtagacacaggcaagctcggagat

SEQ ID NO: 2855079 - DNA, 25 bp, Homo sapien
tcggaaggaccaagcaccttggtgg

SEQ ID NO: 2855080 - DNA, 25 bp, Homo sapien
aagtgatggcctcaccccaatgtgg

SEQ ID NO: 2855081 - DNA, 25 bp, Homo sapien
cactggatgaagtgatggcctcacc

SEQ ID NO: 2855082 - DNA, 25 bp, Homo sapien
acattgccagaggtggtgctagtca

SEQ ID NO: 2855083 - DNA, 25 bp, Homo sapien
cttagtgtttcaattcggagagtca

SEQ ID NO: 2855084 - DNA, 25 bp, Homo sapien
gaaatgccaatctcttagtccacct

SEQ ID NO: 2855085 - DNA, 25 bp, Homo sapien
aattagcagatcctggtggcgcgcg

SEQ ID NO: 2855086 - DNA, 25 bp, Homo sapien
gacataggcgctccacatgcttcat

SEQ ID NO: 2855087 - DNA, 25 bp, Homo sapien
taaaggcgtagcgacgagaataagc

SEQ ID NO: 2855088 - DNA, 25 bp, Homo sapien
gaacaatagtggtgcagctcgggac

SEQ ID NO: 2855089 - DNA, 25 bp, Homo sapien
cccgcggcaattcgaggctgaacaa

SEQ ID NO: 2855090 - DNA, 25 bp, Homo sapien
gccagtgcctgaaacgccaggagga

SEQ ID NO: 2855091 - DNA, 25 bp, Homo sapien
ctcggaggccggacccaaccagtca

SEQ ID NO: 2855092 - DNA, 25 bp, Homo sapien
gtacaggcctcggaggccggaccca

SEQ ID NO: 2855093 - DNA, 25 bp, Homo sapien
ctatgcggaaaaggcggggtacagg

SEQ ID NO: 2855094 - DNA, 25 bp, Homo sapien
gaggccggacccaaccagtcaggga

SEQ ID NO: 2855095 - DNA, 25 bp, Homo sapien
gagtcaaagccaatcaagagccacg

SEQ ID NO: 2855096 - DNA, 25 bp, Homo sapien
tgagtggcagttatatagaccggcg

SEQ ID NO: 2855097 - DNA, 25 bp, Homo sapien
gacctggccgcaacaagttagggtg

SEQ ID NO: 2855098 - DNA, 25 bp, Homo sapien
tactagggaaacgagatcctcacag

SEQ ID NO: 2855099 - DNA, 25 bp, Homo sapien
tctgattggagtcttgcggtccgcg

SEQ ID NO: 2855100 - DNA, 25 bp, Homo sapien
caagggatccagtcggttcggacca

SEQ ID NO: 2855101 - DNA, 25 bp, Homo sapien
cagaaggaggctttcgtttagggtg

SEQ ID NO: 2855102 - DNA, 25 bp, Homo sapien
gggcagcactaaagtctgattggag

SEQ ID NO: 2855103 - DNA, 25 bp, Homo sapien
gaatttgtgagacagtattacacac

SEQ ID NO: 2855104 - DNA, 25 bp, Homo sapien
tcgggcgggaatttgtgagacagta

SEQ ID NO: 2855105 - DNA, 25 bp, Homo sapien
ccctgctggtcgggcgggaatttgt

SEQ ID NO: 2855106 - DNA, 25 bp, Homo sapien
ctggtcgggcgggaatttgtgagac

SEQ ID NO: 2855107 - DNA, 25 bp, Homo sapien
ccttgaccagcttgcatattggata

SEQ ID NO: 2855108 - DNA, 25 bp, Homo sapien
gcatattggataccacatgattatc

SEQ ID NO: 2855109 - DNA, 25 bp, Homo sapien
aatgtcgctttatacaaaactgtct

SEQ ID NO: 2855110 - DNA, 25 bp, Homo sapien
ctgtctatttatgtggacttgttag

SEQ ID NO: 2855111 - DNA, 25 bp, Homo sapien
tctttactgaaaggtagggcattgt

SEQ ID NO: 2855112 - DNA, 25 bp, Homo sapien
tctgacaatggaatatatctcgtgt

SEQ ID NO: 2855113 - DNA, 25 bp, Homo sapien
gagagagagttaagtctcagctgtc

SEQ ID NO: 2855114 - DNA, 25 bp, Homo sapien
tgggactgaggtgcaatccaccacg

SEQ ID NO: 2855115 - DNA, 25 bp, Homo sapien
ctttctaccccatagaataaaactg

SEQ ID NO: 2855116 - DNA, 25 bp, Homo sapien
taatttctttctaccccatagaata

SEQ ID NO: 2855117 - DNA, 25 bp, Homo sapien
aaatcttaatagtggttatccctgg

SEQ ID NO: 2855118 - DNA, 25 bp, Homo sapien
ggtggccatcttgacatgaaactac

SEQ ID NO: 2855119 - DNA, 25 bp, Homo sapien
tctaaaaccacttgcatgaactagg

SEQ ID NO: 2855120 - DNA, 25 bp, Homo sapien
gggaaccgctcacgcttattctcag

SEQ ID NO: 2855121 - DNA, 25 bp, Homo sapien
aaagaactcttcttatgtccatggg

SEQ ID NO: 2855122 - DNA, 25 bp, Homo sapien
tggaaagaactcttcttatgtccat

SEQ ID NO: 2855123 - DNA, 25 bp, Homo sapien
tgtccatgggggattggattcaaat

SEQ ID NO: 2855124 - DNA, 25 bp, Homo sapien
tccatgggggattggattcaaatgg

SEQ ID NO: 2855125 - DNA, 25 bp, Homo sapien
taatcatagcccgtaagaaggaatg

SEQ ID NO: 2855126 - DNA, 25 bp, Homo sapien
cattactaattgaagggcaaccagg

SEQ ID NO: 2855127 - DNA, 25 bp, Homo sapien
ctttgctcatgtgctcgtgtccgca

SEQ ID NO: 2855128 - DNA, 25 bp, Homo sapien
accttctggtgtggagaaattgcca

SEQ ID NO: 2855129 - DNA, 25 bp, Homo sapien
gagcttagaactcttgacccatgag

SEQ ID NO: 2855130 - DNA, 25 bp, Homo sapien
taagatttgtttggttcagtgggtc

SEQ ID NO: 2855131 - DNA, 25 bp, Homo sapien
gaactcttgacccatgagatttttt

SEQ ID NO: 2855132 - DNA, 25 bp, Homo sapien
catgagtattttagttagataagat

SEQ ID NO: 2855133 - DNA, 25 bp, Homo sapien
gcgttctcaactttgtcagatattg

SEQ ID NO: 2855134 - DNA, 25 bp, Homo sapien
gtgtattccagcgttctcaactttg

SEQ ID NO: 2855135 - DNA, 25 bp, Homo sapien
ttactttgtgtattccagcgttctc

SEQ ID NO: 2855136 - DNA, 25 bp, Homo sapien
attccagcgttctcaactttgtcag

SEQ ID NO: 2855137 - DNA, 25 bp, Homo sapien
gattcactgtaggaagggcagccct

SEQ ID NO: 2855138 - DNA, 25 bp, Homo sapien
gacattaacttgtgctcccctcagg

SEQ ID NO: 2855139 - DNA, 25 bp, Homo sapien
tgatcaagtaatggccgtgtggcac

SEQ ID NO: 2855140 - DNA, 25 bp, Homo sapien
cactggccagtttgaggtgcttcca

SEQ ID NO: 2855141 - DNA, 25 bp, Homo sapien
cacgctgcttaaggtggtagccaga

SEQ ID NO: 2855142 - DNA, 25 bp, Homo sapien
tactttggctagctgtcagagttgc

SEQ ID NO: 2855143 - DNA, 25 bp, Homo sapien
caaggttgagtgtccagtaagaagt

SEQ ID NO: 2855144 - DNA, 25 bp, Homo sapien
tcagagttgccgctatgtgagcttg

SEQ ID NO: 2855145 - DNA, 25 bp, Homo sapien
tatccccaggttagttagctgctac

SEQ ID NO: 2855146 - DNA, 25 bp, Homo sapien
gaatataatttccatcactgggctc

SEQ ID NO: 2855147 - DNA, 25 bp, Homo sapien
tagctggttaatggccttacgtaga

SEQ ID NO: 2855148 - DNA, 25 bp, Homo sapien
caggagctgctatgtccattctagt

SEQ ID NO: 2855149 - DNA, 25 bp, Homo sapien
ccatctgaggttaaatagtgccaca

SEQ ID NO: 2855150 - DNA, 25 bp, Homo sapien
tcagattcctgtgctattcccacgt

SEQ ID NO: 2855151 - DNA, 25 bp, Homo sapien
cagagagagttgtgtaagtgtgccc

SEQ ID NO: 2855152 - DNA, 25 bp, Homo sapien
tatgatatgggacatacaccagagc

SEQ ID NO: 2855153 - DNA, 25 bp, Homo sapien
tgttactgttgttggcgcccttgac

SEQ ID NO: 2855154 - DNA, 25 bp, Homo sapien
tggttgtggacgtcctctctacgga

SEQ ID NO: 2855155 - DNA, 25 bp, Homo sapien
gatattttgtcgatcttcttggccc

SEQ ID NO: 2855156 - DNA, 25 bp, Homo sapien
gaagagttttcgcatctcctctggg

SEQ ID NO: 2855157 - DNA, 25 bp, Homo sapien
agagaagttaaagcggccttctcca

SEQ ID NO: 2855158 - DNA, 25 bp, Homo sapien
gcagagaagttaaagcggccttctc

SEQ ID NO: 2855159 - DNA, 25 bp, Homo sapien
agaagttaaagcggccttctccagc

SEQ ID NO: 2855160 - DNA, 25 bp, Homo sapien
gaagttaaagcggccttctccagct

SEQ ID NO: 2855161 - DNA, 25 bp, Homo sapien
tgagaacacaaagagcaggcaaact

SEQ ID NO: 2855162 - DNA, 25 bp, Homo sapien
tccgcttcctcctgaatcggagcag

SEQ ID NO: 2855163 - DNA, 25 bp, Homo sapien
taacggcagcatattctaatagggc

SEQ ID NO: 2855164 - DNA, 25 bp, Homo sapien
tgttgccgagacacaaagttaacgg

SEQ ID NO: 2855165 - DNA, 25 bp, Homo sapien
tatgtctggatcgatggtactggag

SEQ ID NO: 2855166 - DNA, 25 bp, Homo sapien
agaaggatggcgctgcaagacccag

SEQ ID NO: 2855167 - DNA, 25 bp, Homo sapien
gaaagtccaggccatgtatgtctgg

SEQ ID NO: 2855168 - DNA, 25 bp, Homo sapien
gatggcgctgcaagacccagactct

SEQ ID NO: 2855169 - DNA, 25 bp, Homo sapien
tgcccagtgggaatttcaaaccgga

SEQ ID NO: 2855170 - DNA, 25 bp, Homo sapien
gaaagcctgcagtgaccaatttgag

SEQ ID NO: 2855171 - DNA, 25 bp, Homo sapien
taatggacatggtgagcaaccagca

SEQ ID NO: 2855172 - DNA, 25 bp, Homo sapien
tttggcatggagcaggaatataccc

SEQ ID NO: 2855173 - DNA, 25 bp, Homo sapien
gtacactgaggaggccatcgagaaa

SEQ ID NO: 2855174 - DNA, 25 bp, Homo sapien
gccatgtgggaggagaatggtctga

SEQ ID NO: 2855175 - DNA, 25 bp, Homo sapien
ctgaagtacactgaggaggccatcg

SEQ ID NO: 2855176 - DNA, 25 bp, Homo sapien
aaggccatgtgggaggagaatggtc

SEQ ID NO: 2855177 - DNA, 25 bp, Homo sapien
gaacataatgttgagtctggtggaa

SEQ ID NO: 2855178 - DNA, 25 bp, Homo sapien
tggatcagaaaagtgtagaacctgc

SEQ ID NO: 2855179 - DNA, 25 bp, Homo sapien
gtggtgtctggcaactcgtattgaa

SEQ ID NO: 2855180 - DNA, 25 bp, Homo sapien
taaatgaagcagaatgtgtgtctgg

SEQ ID NO: 2855181 - DNA, 25 bp, Homo sapien
catgagaggatgacaatgagcaggc

SEQ ID NO: 2855182 - DNA, 25 bp, Homo sapien
tggaaccgggcctcaatgcaggtga

SEQ ID NO: 2855183 - DNA, 25 bp, Homo sapien
tgatccagaaggagatccatgagag

SEQ ID NO: 2855184 - DNA, 25 bp, Homo sapien
cagagatgctcgagagccggagctc

SEQ ID NO: 2855185 - DNA, 25 bp, Homo sapien
tggtgcagtatctcaagtccttctc

SEQ ID NO: 2855186 - DNA, 25 bp, Homo sapien
cctgttcctgccactcaaagatgag

SEQ ID NO: 2855187 - DNA, 25 bp, Homo sapien
cagagttagtccatctgctacctgc

SEQ ID NO: 2855188 - DNA, 25 bp, Homo sapien
atgaggtcattcatcgtatatccaa

SEQ ID NO: 2855189 - DNA, 25 bp, Homo sapien
ttgcatgatacatgtctggacatcc

SEQ ID NO: 2855190 - DNA, 25 bp, Homo sapien
tgtctggacatccatggggaaattc

SEQ ID NO: 2855191 - DNA, 25 bp, Homo sapien
cagttgcatgatacatgtctggaca

SEQ ID NO: 2855192 - DNA, 25 bp, Homo sapien
tccagttgcatgatacatgtctgga

SEQ ID NO: 2855193 - DNA, 25 bp, Homo sapien
ggggcaggccagtgtcagggtgatt

SEQ ID NO: 2855194 - DNA, 25 bp, Homo sapien
cctggatggccatttcctaagcctg

SEQ ID NO: 2855195 - DNA, 25 bp, Homo sapien
ttccagtctggatgtttacttgagg

SEQ ID NO: 2855196 - DNA, 25 bp, Homo sapien
tgatgatgaggttcctaagctccct

SEQ ID NO: 2855197 - DNA, 25 bp, Homo sapien
taagcctgtcactcttccagtctgg

SEQ ID NO: 2855198 - DNA, 25 bp, Homo sapien
tccaggtccagagagtcgtcagggt

SEQ ID NO: 2855199 - DNA, 25 bp, Homo sapien
tggtgatctcatggaagtgggcccc

SEQ ID NO: 2855200 - DNA, 25 bp, Homo sapien
tgtagaggacattcccattccggga

SEQ ID NO: 2855201 - DNA, 25 bp, Homo sapien
tcagggtattcattataggccaggc

SEQ ID NO: 2855202 - DNA, 25 bp, Homo sapien
tctgattcaacagtgttcagcatca

SEQ ID NO: 2855203 - DNA, 25 bp, Homo sapien
ctgattcaacagtgttcagcatcaa

SEQ ID NO: 2855204 - DNA, 25 bp, Homo sapien
tgattcaacagtgttcagcatcaac

SEQ ID NO: 2855205 - DNA, 25 bp, Homo sapien
tagcttcagagattagacgagattg

SEQ ID NO: 2855206 - DNA, 25 bp, Homo sapien
ttagcttcagagattagacgagatt

SEQ ID NO: 2855207 - DNA, 25 bp, Homo sapien
ttcagagattagacgagattgggtg

SEQ ID NO: 2855208 - DNA, 25 bp, Homo sapien
gcttcagagattagacgagattggg

SEQ ID NO: 2855209 - DNA, 25 bp, Homo sapien
tcttttcacagtagagctttttgaa

SEQ ID NO: 2855210 - DNA, 25 bp, Homo sapien
gctttttgaaaggtttatcttcatg

SEQ ID NO: 2855211 - DNA, 25 bp, Homo sapien
tatcttcatgctgtctttgtttcaa

SEQ ID NO: 2855212 - DNA, 25 bp, Homo sapien
attcttttcacagtagagctttttg

SEQ ID NO: 2855213 - DNA, 25 bp, Homo sapien
tttgtagaataccagaggggctgct

SEQ ID NO: 2855214 - DNA, 25 bp, Homo sapien
tagatcaggattccctttcctcttt

SEQ ID NO: 2855215 - DNA, 25 bp, Homo sapien
cagaggggctgctctagatcaggat

SEQ ID NO: 2855216 - DNA, 25 bp, Homo sapien
gggctgctctagatcaggattccct

SEQ ID NO: 2855217 - DNA, 25 bp, Homo sapien
tagctccggtgaataaagccaggtc

SEQ ID NO: 2855218 - DNA, 25 bp, Homo sapien
ctcaggtctgttagctccggtgaat

SEQ ID NO: 2855219 - DNA, 25 bp, Homo sapien
gactggatagagacccctgttgctt

SEQ ID NO: 2855220 - DNA, 25 bp, Homo sapien
ctgttagctccggtgaataaagcca

SEQ ID NO: 2855221 - DNA, 25 bp, Homo sapien
tgtgtctaattactctgctacaccg

SEQ ID NO: 2855222 - DNA, 25 bp, Homo sapien
ctctgctacaccgtttctgtagaaa

SEQ ID NO: 2855223 - DNA, 25 bp, Homo sapien
agactgtgtctaattactctgctac

SEQ ID NO: 2855224 - DNA, 25 bp, Homo sapien
taattactctgctacaccgtttctg

SEQ ID NO: 2855225 - DNA, 25 bp, Homo sapien
tccagcaggaactaacagcttgtgt

SEQ ID NO: 2855226 - DNA, 25 bp, Homo sapien
aatgttgcagctcacgttcactggg

SEQ ID NO: 2855227 - DNA, 25 bp, Homo sapien
tctcagcaatggaaccaaagctgtt

SEQ ID NO: 2855228 - DNA, 25 bp, Homo sapien
agcaatggaaccaaagctgttgatg

SEQ ID NO: 2855229 - DNA, 25 bp, Homo sapien
gaaaatgttgcagctcacgttcact

SEQ ID NO: 2855230 - DNA, 25 bp, Homo sapien
gttaacaatgctggaagctatggcc

SEQ ID NO: 2855231 - DNA, 25 bp, Homo sapien
gagtgaaggagcctcaaggtaaatg

SEQ ID NO: 2855232 - DNA, 25 bp, Homo sapien
agtgggcccaaacagagacctgggt

SEQ ID NO: 2855233 - DNA, 25 bp, Homo sapien
agagacctgggtgcatctctcagaa

SEQ ID NO: 2855234 - DNA, 25 bp, Homo sapien
aaatccgagggtgacataggcttgg

SEQ ID NO: 2855235 - DNA, 25 bp, Homo sapien
ggttctccccattagcttatccagg

SEQ ID NO: 2855236 - DNA, 25 bp, Homo sapien
gtgcggagcgagcagcttcagcctc

SEQ ID NO: 2855237 - DNA, 25 bp, Homo sapien
cctggcatcatatccggaggttctc

SEQ ID NO: 2855238 - DNA, 25 bp, Homo sapien
ggcaggcagccaagtgtctgattga

SEQ ID NO: 2855239 - DNA, 25 bp, Homo sapien
gaaccacaagagtgttcttagctgg

SEQ ID NO: 2855240 - DNA, 25 bp, Homo sapien
cagcccaaatatcagccggcatggg

SEQ ID NO: 2855241 - DNA, 25 bp, Homo sapien
ttttgagtaatcacacttggcagct

SEQ ID NO: 2855242 - DNA, 25 bp, Homo sapien
gtgctgatgtagttatctgtgtttg

SEQ ID NO: 2855243 - DNA, 25 bp, Homo sapien
gctgatgtagttatctgtgtttgtg

SEQ ID NO: 2855244 - DNA, 25 bp, Homo sapien
caggtgctgatgtagttatctgtgt

SEQ ID NO: 2855245 - DNA, 25 bp, Homo sapien
tcaccaggtgctgatgtagttatct

SEQ ID NO: 2855246 - DNA, 25 bp, Homo sapien
gccactgtccattcagcactggact

SEQ ID NO: 2855247 - DNA, 25 bp, Homo sapien
actgtccattcagcactggactcat

SEQ ID NO: 2855248 - DNA, 25 bp, Homo sapien
tggcccacagttggggccactgtcc

SEQ ID NO: 2855249 - DNA, 25 bp, Homo sapien
ccatggcccacagttggggccactg

SEQ ID NO: 2855250 - DNA, 25 bp, Homo sapien
atgaaattgtagacattggaacgtg

SEQ ID NO: 2855251 - DNA, 25 bp, Homo sapien
ccatgaaattgtagacattggaacg

SEQ ID NO: 2855252 - DNA, 25 bp, Homo sapien
catgaaattgtagacattggaacgt

SEQ ID NO: 2855253 - DNA, 25 bp, Homo sapien
gtcatggtgagatacagcagtgctt

SEQ ID NO: 2855254 - DNA, 25 bp, Homo sapien
agcagaaagtggtcatggtgagata

SEQ ID NO: 2855255 - DNA, 25 bp, Homo sapien
tacagcagtgctttagggttggttg

SEQ ID NO: 2855256 - DNA, 25 bp, Homo sapien
gaaagtggtcatggtgagatacagc

SEQ ID NO: 2855257 - DNA, 25 bp, Homo sapien
ctttaaagggagcagtgtctcccct

SEQ ID NO: 2855258 - DNA, 25 bp, Homo sapien
tttagactggacacataagcacatg

SEQ ID NO: 2855259 - DNA, 25 bp, Homo sapien
tcccctttctgcaatgacagggact

SEQ ID NO: 2855260 - DNA, 25 bp, Homo sapien
atgacagggactctggcatctgtgc

SEQ ID NO: 2855261 - DNA, 25 bp, Homo sapien
tagagtcgaagagtattgaagctgt

SEQ ID NO: 2855262 - DNA, 25 bp, Homo sapien
atacaatggtctcccaaaggtagag

SEQ ID NO: 2855263 - DNA, 25 bp, Homo sapien
gtcgaagagtattgaagctgtacat

SEQ ID NO: 2855264 - DNA, 25 bp, Homo sapien
tcccaaaggtagagtcgaagagtat

SEQ ID NO: 2855265 - DNA, 25 bp, Homo sapien
tttcaggagcgcgaagagtattgct

SEQ ID NO: 2855266 - DNA, 25 bp, Homo sapien
ggtcgtagataccacggacagcggc

SEQ ID NO: 2855267 - DNA, 25 bp, Homo sapien
taaactccagcgtgtctgttggctc

SEQ ID NO: 2855268 - DNA, 25 bp, Homo sapien
gaccgttggattgggcgagcatctt

SEQ ID NO: 2855269 - DNA, 25 bp, Homo sapien
tcagttaaatctcggagagtgtgcc

SEQ ID NO: 2855270 - DNA, 25 bp, Homo sapien
ggcgcatcgcaatccagtctcggaa

SEQ ID NO: 2855271 - DNA, 25 bp, Homo sapien
tctgtgcgggtctgctgtcgccttg

SEQ ID NO: 2855272 - DNA, 25 bp, Homo sapien
cggtccccgccgaataagttgtgat

SEQ ID NO: 2855273 - DNA, 25 bp, Homo sapien
tcagatgcatctcggttttctgagc

SEQ ID NO: 2855274 - DNA, 25 bp, Homo sapien
gggccgcaggcgtcagagagcccag

SEQ ID NO: 2855275 - DNA, 25 bp, Homo sapien
cggggctctgaagcccaatgtctca

SEQ ID NO: 2855276 - DNA, 25 bp, Homo sapien
ccagggcaagtttcaggggctaccg

SEQ ID NO: 2855277 - DNA, 25 bp, Homo sapien
taaaagcctgagtctaacattgggt

SEQ ID NO: 2855278 - DNA, 25 bp, Homo sapien
tccccaaaggctgacagtagttgct

SEQ ID NO: 2855279 - DNA, 25 bp, Homo sapien
cttctgggatcctggttgctggcac

SEQ ID NO: 2855280 - DNA, 25 bp, Homo sapien
gactgtgagactagctatctgagcc

SEQ ID NO: 2855281 - DNA, 25 bp, Homo sapien
ttgaggctatcctgtttccatttcc

SEQ ID NO: 2855282 - DNA, 25 bp, Homo sapien
ggctatcctgtttccatttccatac

SEQ ID NO: 2855283 - DNA, 25 bp, Homo sapien
gaggctatcctgtttccatttccat

SEQ ID NO: 2855284 - DNA, 25 bp, Homo sapien
cattgaggctatcctgtttccattt

SEQ ID NO: 2855285 - DNA, 25 bp, Homo sapien
tgtgaggagctagaataggacaatc

SEQ ID NO: 2855286 - DNA, 25 bp, Homo sapien
taggacaatcaggttcagcattgag

SEQ ID NO: 2855287 - DNA, 25 bp, Homo sapien
gagtgttcttgatttggagtcagag

SEQ ID NO: 2855288 - DNA, 25 bp, Homo sapien
taaaatcgtcggtggtcctggagaa

SEQ ID NO: 2855289 - DNA, 25 bp, Homo sapien
tccctttgtggttaagagactctca

SEQ ID NO: 2855290 - DNA, 25 bp, Homo sapien
cctttgtggttaagagactctcaga

SEQ ID NO: 2855291 - DNA, 25 bp, Homo sapien
tcaaggagtgggaaggagtgatcag

SEQ ID NO: 2855292 - DNA, 25 bp, Homo sapien
ttagctcttcaaggagtgggaagga

SEQ ID NO: 2855293 - DNA, 25 bp, Homo sapien
cctttagatcaggctttattactgc

SEQ ID NO: 2855294 - DNA, 25 bp, Homo sapien
ttgtttgactctttgagaagaatag

SEQ ID NO: 2855295 - DNA, 25 bp, Homo sapien
gcccagtgcattgttctgtccccag

SEQ ID NO: 2855296 - DNA, 25 bp, Homo sapien
cttgcccagtgcattgttctgtccc

SEQ ID NO: 2855297 - DNA, 25 bp, Homo sapien
gggtattggcaatgcttgatgtcca

SEQ ID NO: 2855298 - DNA, 25 bp, Homo sapien
ggggttagatgtttttctgcccagc

SEQ ID NO: 2855299 - DNA, 25 bp, Homo sapien
tccaagacaacccagtcttccaagt

SEQ ID NO: 2855300 - DNA, 25 bp, Homo sapien
tgcttgatgtccaagacaacccagt

SEQ ID NO: 2855301 - DNA, 25 bp, Homo sapien
atgtgtgacttttgcaaagtttcca

SEQ ID NO: 2855302 - DNA, 25 bp, Homo sapien
gatgtgtgacttttgcaaagtttcc

SEQ ID NO: 2855303 - DNA, 25 bp, Homo sapien
tgatgtgtgacttttgcaaagtttc

SEQ ID NO: 2855304 - DNA, 25 bp, Homo sapien
caattacgtgaccaagagcaaaaga

SEQ ID NO: 2855305 - DNA, 25 bp, Homo sapien
cattctttgcaattacgtgaccaag

SEQ ID NO: 2855306 - DNA, 25 bp, Homo sapien
agagcaaaagaaacaggcatgggaa

SEQ ID NO: 2855307 - DNA, 25 bp, Homo sapien
gttggcaatatagagttgacatttt

SEQ ID NO: 2855308 - DNA, 25 bp, Homo sapien
cctgctctgacccaatatacttcaa

SEQ ID NO: 2855309 - DNA, 25 bp, Homo sapien
gcaaagcaggtggacggacatgcat

SEQ ID NO: 2855310 - DNA, 25 bp, Homo sapien
ggcaaagcaggtggacggacatgca

SEQ ID NO: 2855311 - DNA, 25 bp, Homo sapien
aaggatgaggagacaaaagctggcc

SEQ ID NO: 2855312 - DNA, 25 bp, Homo sapien
catgaggctgtctgtgaatgcctga

SEQ ID NO: 2855313 - DNA, 25 bp, Homo sapien
taggattttcagtcccctgcttctg

SEQ ID NO: 2855314 - DNA, 25 bp, Homo sapien
tggtgccttcccagtgtccaatttc

SEQ ID NO: 2855315 - DNA, 25 bp, Homo sapien
tccccatctctgagtgtcaggcacg

SEQ ID NO: 2855316 - DNA, 25 bp, Homo sapien
cagtcatctgcccacaagttgtagg

SEQ ID NO: 2855317 - DNA, 25 bp, Homo sapien
gaggatctatcgtacaacctttgga

SEQ ID NO: 2855318 - DNA, 25 bp, Homo sapien
acaagttgtaggagccatccccatc

SEQ ID NO: 2855319 - DNA, 25 bp, Homo sapien
atgcctggtatactgttttacttac

SEQ ID NO: 2855320 - DNA, 25 bp, Homo sapien
gaagtatgcctggtatactgtttta

SEQ ID NO: 2855321 - DNA, 25 bp, Homo sapien
ttagaagtatgcctggtatactgtt

SEQ ID NO: 2855322 - DNA, 25 bp, Homo sapien
agtatgcctggtatactgttttact

SEQ ID NO: 2855323 - DNA, 25 bp, Homo sapien
tggctgcaggccatcacgttgctgg

SEQ ID NO: 2855324 - DNA, 25 bp, Homo sapien
tgtacaagcccttgccttcaacata

SEQ ID NO: 2855325 - DNA, 25 bp, Homo sapien
gggcctttcgggcatcgagtgtaca

SEQ ID NO: 2855326 - DNA, 25 bp, Homo sapien
catcacgttgctggctgggcctttc

SEQ ID NO: 2855327 - DNA, 25 bp, Homo sapien
tatgccaagaatccccacacataag

SEQ ID NO: 2855328 - DNA, 25 bp, Homo sapien
tggcccacgtccctctgtatgccaa

SEQ ID NO: 2855329 - DNA, 25 bp, Homo sapien
cacgtccctctgtatgccaagaatc

SEQ ID NO: 2855330 - DNA, 25 bp, Homo sapien
cacacataagggaacaggggagccg

SEQ ID NO: 2855331 - DNA, 25 bp, Homo sapien
tcttccctcttctgttctttcaaag

SEQ ID NO: 2855332 - DNA, 25 bp, Homo sapien
tttcttccctcttctgttctttcaa

SEQ ID NO: 2855333 - DNA, 25 bp, Homo sapien
ttccctcttctgttctttcaaagat

SEQ ID NO: 2855334 - DNA, 25 bp, Homo sapien
gtttcttccctcttctgttctttca

SEQ ID NO: 2855335 - DNA, 25 bp, Homo sapien
caaggagcctagtgttgcttgcagc

SEQ ID NO: 2855336 - DNA, 25 bp, Homo sapien
tgcttgcagccacgtcagaatgaag

SEQ ID NO: 2855337 - DNA, 25 bp, Homo sapien
ctagatggagtgttgttcccgtgca

SEQ ID NO: 2855338 - DNA, 25 bp, Homo sapien
aagctgggccgtcacagtctgctgg

SEQ ID NO: 2855339 - DNA, 25 bp, Homo sapien
tgtgggcgaaaaaaagctgaggata

SEQ ID NO: 2855340 - DNA, 25 bp, Homo sapien
ggtgtgggcgaaaaaaagctgagga

SEQ ID NO: 2855341 - DNA, 25 bp, Homo sapien
ctggtgtgggcgaaaaaaagctgag

SEQ ID NO: 2855342 - DNA, 25 bp, Homo sapien
tggtgtgggcgaaaaaaagctgagg

SEQ ID NO: 2855343 - DNA, 25 bp, Homo sapien
gggaaagaaaggaggcaagtggctg

SEQ ID NO: 2855344 - DNA, 25 bp, Homo sapien
ctgcttgaatgcaggaggggaaaga

SEQ ID NO: 2855345 - DNA, 25 bp, Homo sapien
aaagaaaggaggcaagtggctgctt

SEQ ID NO: 2855346 - DNA, 25 bp, Homo sapien
gtggctgcttgaatgcaggagggga

SEQ ID NO: 2855347 - DNA, 25 bp, Homo sapien
ttgcagttgctttcgatgatgtggg

SEQ ID NO: 2855348 - DNA, 25 bp, Homo sapien
tgcttcttgcagttgctttcgatga

SEQ ID NO: 2855349 - DNA, 25 bp, Homo sapien
gtcagttttatgtcatgtgtgtggc

SEQ ID NO: 2855350 - DNA, 25 bp, Homo sapien
gggtcagttttatgtcatgtgtgtg

SEQ ID NO: 2855351 - DNA, 25 bp, Homo sapien
ctgagggatgctatctggtcctacg

SEQ ID NO: 2855352 - DNA, 25 bp, Homo sapien
tctctaggccccgtgtgcttacaac

SEQ ID NO: 2855353 - DNA, 25 bp, Homo sapien
tatctggtcctacggtgtctctgga

SEQ ID NO: 2855354 - DNA, 25 bp, Homo sapien
cctacggtgtctctggacagtggga

SEQ ID NO: 2855355 - DNA, 25 bp, Homo sapien
ggacgtggtcactgtaagactgtga

SEQ ID NO: 2855356 - DNA, 25 bp, Homo sapien
acgtggtcactgtaagactgtgagg

SEQ ID NO: 2855357 - DNA, 25 bp, Homo sapien
gaggacgtggtcactgtaagactgt

SEQ ID NO: 2855358 - DNA, 25 bp, Homo sapien
ctgaggacgtggtcactgtaagact

SEQ ID NO: 2855359 - DNA, 25 bp, Homo sapien
tgcctgcagctttctgtattacagt

SEQ ID NO: 2855360 - DNA, 25 bp, Homo sapien
ttctgcagtagccagacacatgtct

SEQ ID NO: 2855361 - DNA, 25 bp, Homo sapien
aattatggggagttctttgttcagc

SEQ ID NO: 2855362 - DNA, 25 bp, Homo sapien
cagacacatgtctgaagtgtgaaga

SEQ ID NO: 2855363 - DNA, 25 bp, Homo sapien
cagctgtggagtcatggtaagaaag

SEQ ID NO: 2855364 - DNA, 25 bp, Homo sapien
gctgaatctggcaaagatatctgcc

SEQ ID NO: 2855365 - DNA, 25 bp, Homo sapien
gtccacagagtcatagcaccagcag

SEQ ID NO: 2855366 - DNA, 25 bp, Homo sapien
taccaacctgggttgtccacagagt

SEQ ID NO: 2855367 - DNA, 25 bp, Homo sapien
cagggacgccataaatcgctgggcc

SEQ ID NO: 2855368 - DNA, 25 bp, Homo sapien
gctgcagcagtagccttgcacaggc

SEQ ID NO: 2855369 - DNA, 25 bp, Homo sapien
aaagccactgggatagtcaccttct

SEQ ID NO: 2855370 - DNA, 25 bp, Homo sapien
gctgcgatgtgatcagaaagccaac

SEQ ID NO: 2855371 - DNA, 25 bp, Homo sapien
tttcaacccagaatttcatatccag

SEQ ID NO: 2855372 - DNA, 25 bp, Homo sapien
attcaacattcttaaagaaaagaat

SEQ ID NO: 2855373 - DNA, 25 bp, Homo sapien
gccagaagagagtgggggccaatat

SEQ ID NO: 2855374 - DNA, 25 bp, Homo sapien
ggatttcttggcagaaaccctataa

SEQ ID NO: 2855375 - DNA, 25 bp, Homo sapien
aatattagagccagttttctcaaac

SEQ ID NO: 2855376 - DNA, 25 bp, Homo sapien
tctgtggttggcctttttagcctca

SEQ ID NO: 2855377 - DNA, 25 bp, Homo sapien
tactcatgtagttaccgtttctggc

SEQ ID NO: 2855378 - DNA, 25 bp, Homo sapien
tctgttttctgtagcacgtgatgct

SEQ ID NO: 2855379 - DNA, 25 bp, Homo sapien
cgaccatcagagcacaacccaggat

SEQ ID NO: 2855380 - DNA, 25 bp, Homo sapien
ccaggatctttagctgaaagggcga

SEQ ID NO: 2855381 - DNA, 25 bp, Homo sapien
tctttagctgaaagggcgagtctaa

SEQ ID NO: 2855382 - DNA, 25 bp, Homo sapien
acaacccaggatctttagctgaaag

SEQ ID NO: 2855383 - DNA, 25 bp, Homo sapien
cacataaaggatagttcccggtaag

SEQ ID NO: 2855384 - DNA, 25 bp, Homo sapien
gtgtttgacaccacataaaggatag

SEQ ID NO: 2855385 - DNA, 25 bp, Homo sapien
gtaagtttaatgcagataaaagacc

SEQ ID NO: 2855386 - DNA, 25 bp, Homo sapien
ccagccatgtgatgtgtttgacacc

SEQ ID NO: 2855387 - DNA, 25 bp, Homo sapien
ctcaattacctgtgccttgttattt

SEQ ID NO: 2855388 - DNA, 25 bp, Homo sapien
caactcaattacctgtgccttgtta

SEQ ID NO: 2855389 - DNA, 25 bp, Homo sapien
ctggttacagactgcaactcaatta

SEQ ID NO: 2855390 - DNA, 25 bp, Homo sapien
ctgcaactcaattacctgtgccttg

SEQ ID NO: 2855391 - DNA, 25 bp, Homo sapien
caaggactcgaaaaggcagtctgag

SEQ ID NO: 2855392 - DNA, 25 bp, Homo sapien
ggcagtctgaggtttgatatcatca

SEQ ID NO: 2855393 - DNA, 25 bp, Homo sapien
actcgaaaaggcagtctgaggtttg

SEQ ID NO: 2855394 - DNA, 25 bp, Homo sapien
ctgccaaggactcgaaaaggcagtc

SEQ ID NO: 2855395 - DNA, 25 bp, Homo sapien
cttcacagcctgaaaccacgggcat

SEQ ID NO: 2855396 - DNA, 25 bp, Homo sapien
ttatatatgcctttcctttcattgc

SEQ ID NO: 2855397 - DNA, 25 bp, Homo sapien
ggagaggctgataaagaaactggct

SEQ ID NO: 2855398 - DNA, 25 bp, Homo sapien
cattgctgatatgcttgtcccttgt

SEQ ID NO: 2855399 - DNA, 25 bp, Homo sapien
tgctggtgtaccatgtgactaggtt

SEQ ID NO: 2855400 - DNA, 25 bp, Homo sapien
tgcgcacaccagtgctggtgtacca

SEQ ID NO: 2855401 - DNA, 25 bp, Homo sapien
tgactaggttccagtccttgctcca

SEQ ID NO: 2855402 - DNA, 25 bp, Homo sapien
taccatgtgactaggttccagtcct

SEQ ID NO: 2855403 - DNA, 25 bp, Homo sapien
ttacataattgctgatgcatgtgcc

SEQ ID NO: 2855404 - DNA, 25 bp, Homo sapien
cataattgctgatgcatgtgcccca

SEQ ID NO: 2855405 - DNA, 25 bp, Homo sapien
atgtgccccatggagaacttggagc

SEQ ID NO: 2855406 - DNA, 25 bp, Homo sapien
tgccccatggagaacttggagccat

SEQ ID NO: 2855407 - DNA, 25 bp, Homo sapien
tcctttgcctgaaggccgccttgaa

SEQ ID NO: 2855408 - DNA, 25 bp, Homo sapien
cctgtatctagggctggccatttct

SEQ ID NO: 2855409 - DNA, 25 bp, Homo sapien
ccctgtattctgagatgtagatctt

SEQ ID NO: 2855410 - DNA, 25 bp, Homo sapien
gccttgaaatagatgtgtccctgta

SEQ ID NO: 2855411 - DNA, 25 bp, Homo sapien
acactcaagattgtggattgcgagc

SEQ ID NO: 2855412 - DNA, 25 bp, Homo sapien
gattgcgagcttgtttcaaaggtac

SEQ ID NO: 2855413 - DNA, 25 bp, Homo sapien
tcacagtaaatcaccgtgcaccagg

SEQ ID NO: 2855414 - DNA, 25 bp, Homo sapien
caaaggtaccattgggtatccacac

SEQ ID NO: 2855415 - DNA, 25 bp, Homo sapien
tcctgttttcatggaaacgggttgc

SEQ ID NO: 2855416 - DNA, 25 bp, Homo sapien
ccatgctctcctctaaagcttgatg

SEQ ID NO: 2855417 - DNA, 25 bp, Homo sapien
atgctctcctctaaagcttgatgca

SEQ ID NO: 2855418 - DNA, 25 bp, Homo sapien
catgctctcctctaaagcttgatgc

SEQ ID NO: 2855419 - DNA, 25 bp, Homo sapien
tgctctcctctaaagcttgatgcat

SEQ ID NO: 2855420 - DNA, 25 bp, Homo sapien
cttgctgtagtcaggttgaaaagca

SEQ ID NO: 2855421 - DNA, 25 bp, Homo sapien
tgctgtagtcaggttgaaaagcaag

SEQ ID NO: 2855422 - DNA, 25 bp, Homo sapien
tgtagtcaggttgaaaagcaagaag

SEQ ID NO: 2855423 - DNA, 25 bp, Homo sapien
gctgtagtcaggttgaaaagcaaga

SEQ ID NO: 2855424 - DNA, 25 bp, Homo sapien
tgtgccctagaccaggtttctggtc

SEQ ID NO: 2855425 - DNA, 25 bp, Homo sapien
ccctagaccaggtttctggtctgtt

SEQ ID NO: 2855426 - DNA, 25 bp, Homo sapien
ctgtgccctagaccaggtttctggt

SEQ ID NO: 2855427 - DNA, 25 bp, Homo sapien
tgccctagaccaggtttctggtctg

SEQ ID NO: 2855428 - DNA, 25 bp, Homo sapien
agagtggaattagcctcaggaaaga

SEQ ID NO: 2855429 - DNA, 25 bp, Homo sapien
aagggggagagtggaattagcctca

SEQ ID NO: 2855430 - DNA, 25 bp, Homo sapien
tcaggaaagaaggacgtatacagac

SEQ ID NO: 2855431 - DNA, 25 bp, Homo sapien
gggagagtggaattagcctcaggaa

SEQ ID NO: 2855432 - DNA, 25 bp, Homo sapien
gggaaatcataatcagatctggtga

SEQ ID NO: 2855433 - DNA, 25 bp, Homo sapien
gagattttggagacacggccatggt

SEQ ID NO: 2855434 - DNA, 25 bp, Homo sapien
ggtcagtgaggaccgggaaatcata

SEQ ID NO: 2855435 - DNA, 25 bp, Homo sapien
ccatggtccacaaggtcagtgagga

SEQ ID NO: 2855436 - DNA, 25 bp, Homo sapien
tccagtgaaatggtgaggcagagcc

SEQ ID NO: 2855437 - DNA, 25 bp, Homo sapien
cagtgaaatggtgaggcagagccat

SEQ ID NO: 2855438 - DNA, 25 bp, Homo sapien
ccagtgaaatggtgaggcagagcca

SEQ ID NO: 2855439 - DNA, 25 bp, Homo sapien
cttccagtgaaatggtgaggcagag

SEQ ID NO: 2855440 - DNA, 25 bp, Homo sapien
tattattatcagcaggcagtactta

SEQ ID NO: 2855441 - DNA, 25 bp, Homo sapien
attattattatcagcaggcagtact

SEQ ID NO: 2855442 - DNA, 25 bp, Homo sapien
cattattattatcagcaggcagtac

SEQ ID NO: 2855443 - DNA, 25 bp, Homo sapien
attattatcagcaggcagtacttac

SEQ ID NO: 2855444 - DNA, 25 bp, Homo sapien
ctcttcagttgattgtgacaacggc

SEQ ID NO: 2855445 - DNA, 25 bp, Homo sapien
ggagagactttagtctgtctctgaa

SEQ ID NO: 2855446 - DNA, 25 bp, Homo sapien
gacaacggctgactgagttgttgag

SEQ ID NO: 2855447 - DNA, 25 bp, Homo sapien
ttggagagactttagtctgtctctg

SEQ ID NO: 2855448 - DNA, 25 bp, Homo sapien
ctctgggttcctagaacatcctgtg

SEQ ID NO: 2855449 - DNA, 25 bp, Homo sapien
ctgggttcctagaacatcctgtgta

SEQ ID NO: 2855450 - DNA, 25 bp, Homo sapien
tattgtgtgctaagtatttttctga

SEQ ID NO: 2855451 - DNA, 25 bp, Homo sapien
ccaacatacagttgccaagatctgc

SEQ ID NO: 2855452 - DNA, 25 bp, Homo sapien
tgaggttaggttctccccagaggct

SEQ ID NO: 2855453 - DNA, 25 bp, Homo sapien
caagtgtgtctgtctggtgaggtta

SEQ ID NO: 2855454 - DNA, 25 bp, Homo sapien
cctccagaattcctcagtttgatag

SEQ ID NO: 2855455 - DNA, 25 bp, Homo sapien
cagaattcctcagtttgatagcatc

SEQ ID NO: 2855456 - DNA, 25 bp, Homo sapien
attggcactcatccaataaacataa

SEQ ID NO: 2855457 - DNA, 25 bp, Homo sapien
cactcatccaataaacataatggag

SEQ ID NO: 2855458 - DNA, 25 bp, Homo sapien
ggcactcatccaataaacataatgg

SEQ ID NO: 2855459 - DNA, 25 bp, Homo sapien
catccaataaacataatggagttgg

SEQ ID NO: 2855460 - DNA, 25 bp, Homo sapien
tttcctcatcaaagaaataaggctt

SEQ ID NO: 2855461 - DNA, 25 bp, Homo sapien
ttaaaaatggaatcaggttgtggac

SEQ ID NO: 2855462 - DNA, 25 bp, Homo sapien
tatttttcctcatcaaagaaataag

SEQ ID NO: 2855463 - DNA, 25 bp, Homo sapien
tcctcatcaaagaaataaggcttta

SEQ ID NO: 2855464 - DNA, 25 bp, Homo sapien
caaatttacattctggcaaagcaag

SEQ ID NO: 2855465 - DNA, 25 bp, Homo sapien
gatatattgccattgttccaacaac

SEQ ID NO: 2855466 - DNA, 25 bp, Homo sapien
tgaataccagatacatcatgtcttt

SEQ ID NO: 2855467 - DNA, 25 bp, Homo sapien
tattgccattgttccaacaacagaa

SEQ ID NO: 2855468 - DNA, 25 bp, Homo sapien
tgcctgtagactgctgccaagggac

SEQ ID NO: 2855469 - DNA, 25 bp, Homo sapien
gatgactcaggacgaaccatttcca

SEQ ID NO: 2855470 - DNA, 25 bp, Homo sapien
tgagcacatgcctttgggaagaaag

SEQ ID NO: 2855471 - DNA, 25 bp, Homo sapien
cctgactcggaacgtagatgactca

SEQ ID NO: 2855472 - DNA, 25 bp, Homo sapien
tgttcttgacatctgttcactagag

SEQ ID NO: 2855473 - DNA, 25 bp, Homo sapien
aagtggaagctttgatagtttgttc

SEQ ID NO: 2855474 - DNA, 25 bp, Homo sapien
catctgttcactagagagggctgct

SEQ ID NO: 2855475 - DNA, 25 bp, Homo sapien
gatagtttgttcttgacatctgttc

SEQ ID NO: 2855476 - DNA, 25 bp, Homo sapien
tctgtcaggaagatgttccgctggg

SEQ ID NO: 2855477 - DNA, 25 bp, Homo sapien
gcggcgagacagtaggttatagata

SEQ ID NO: 2855478 - DNA, 25 bp, Homo sapien
ttctggaatgctgcctggaagcggc

SEQ ID NO: 2855479 - DNA, 25 bp, Homo sapien
tatatcttcggtcagctccacaaag

SEQ ID NO: 2855480 - DNA, 25 bp, Homo sapien
tggtgtgaaggcagccacgttctcc

SEQ ID NO: 2855481 - DNA, 25 bp, Homo sapien
gatcactcagaatagcaatggtgaa

SEQ ID NO: 2855482 - DNA, 25 bp, Homo sapien
tatggtatcctcaacaagcagagtt

SEQ ID NO: 2855483 - DNA, 25 bp, Homo sapien
tgacttactgacctttccaccatgg

SEQ ID NO: 2855484 - DNA, 25 bp, Homo sapien
gaacggggcccaacagatagcaaac

SEQ ID NO: 2855485 - DNA, 25 bp, Homo sapien
cacatggacgaggttgaacacagca

SEQ ID NO: 2855486 - DNA, 25 bp, Homo sapien
aagaagagtcggtcaatgtggaacg

SEQ ID NO: 2855487 - DNA, 25 bp, Homo sapien
acagcagccagggattcactccact

SEQ ID NO: 2855488 - DNA, 25 bp, Homo sapien
ttgttgactgattttctgcagggtc

SEQ ID NO: 2855489 - DNA, 25 bp, Homo sapien
tccccaattctaagtttttctctga

SEQ ID NO: 2855490 - DNA, 25 bp, Homo sapien
catctgagctcattctattttccct

SEQ ID NO: 2855491 - DNA, 25 bp, Homo sapien
gaggcaagtccttttaagtctcaat

SEQ ID NO: 2855492 - DNA, 25 bp, Homo sapien
gtctcaatttcccatctgagctcat

SEQ ID NO: 2855493 - DNA, 25 bp, Homo sapien
agaaagggtagttgcgccacatctc

SEQ ID NO: 2855494 - DNA, 25 bp, Homo sapien
gatccacatgggcttgatgaccgta

SEQ ID NO: 2855495 - DNA, 25 bp, Homo sapien
gatgaccgtacaggtggccgaacct

SEQ ID NO: 2855496 - DNA, 25 bp, Homo sapien
gaaggccagatactcctcggtgctg

SEQ ID NO: 2855497 - DNA, 25 bp, Homo sapien
tgtttcaagctgagccaggaaaaaa

SEQ ID NO: 2855498 - DNA, 25 bp, Homo sapien
tcccctggtacgaggctctgtttca

SEQ ID NO: 2855499 - DNA, 25 bp, Homo sapien
gaaagcagtcacgaaagtcacaggc

SEQ ID NO: 2855500 - DNA, 25 bp, Homo sapien
tcacaggcttcgtaaggaaggctgg

SEQ ID NO: 2855501 - DNA, 25 bp, Homo sapien
atcttctgcaagtggagaagtgata

SEQ ID NO: 2855502 - DNA, 25 bp, Homo sapien
gatttccaggttagcaaatacatag

SEQ ID NO: 2855503 - DNA, 25 bp, Homo sapien
tgtaggctgtactccaagtatcaca

SEQ ID NO: 2855504 - DNA, 25 bp, Homo sapien
catagctcagttccttgaagggctg

SEQ ID NO: 2855505 - DNA, 25 bp, Homo sapien
tataattagcctgtttttcatgaac

SEQ ID NO: 2855506 - DNA, 25 bp, Homo sapien
aagatgaacagtatcagtgctcaga

SEQ ID NO: 2855507 - DNA, 25 bp, Homo sapien
aagctgacagcaggacctgttactc

SEQ ID NO: 2855508 - DNA, 25 bp, Homo sapien
gccttgagaagatgaacagtatcag

SEQ ID NO: 2855509 - DNA, 25 bp, Homo sapien
ctgaagccttgagaagatgaacagt

SEQ ID NO: 2855510 - DNA, 25 bp, Homo sapien
tctttcaaatccattagcatagggc

SEQ ID NO: 2855511 - DNA, 25 bp, Homo sapien
ttcttagtctttcaaatccattagc

SEQ ID NO: 2855512 - DNA, 25 bp, Homo sapien
tttcaaatccattagcatagggcat

SEQ ID NO: 2855513 - DNA, 25 bp, Homo sapien
ttagtctttcaaatccattagcata

SEQ ID NO: 2855514 - DNA, 25 bp, Homo sapien
tttggtctgtcatctttaaggtccc

SEQ ID NO: 2855515 - DNA, 25 bp, Homo sapien
tttcagtagattcaccttctgtgtc

SEQ ID NO: 2855516 - DNA, 25 bp, Homo sapien
ctcttttcagtagattcaccttctg

SEQ ID NO: 2855517 - DNA, 25 bp, Homo sapien
ttggtctgtcatctttaaggtccct

SEQ ID NO: 2855518 - DNA, 25 bp, Homo sapien
gaaataaggtggctgtccatacgat

SEQ ID NO: 2855519 - DNA, 25 bp, Homo sapien
aaatgtccagcaacagttgaaagga

SEQ ID NO: 2855520 - DNA, 25 bp, Homo sapien
catacgatgctttacatacaaatct

SEQ ID NO: 2855521 - DNA, 25 bp, Homo sapien
gtggtacatccatatagtaaatact

SEQ ID NO: 2855522 - DNA, 25 bp, Homo sapien
ttgccaggtgtttctattatgtagc

SEQ ID NO: 2855523 - DNA, 25 bp, Homo sapien
aattcaatggtgatgagcgagcccc

SEQ ID NO: 2855524 - DNA, 25 bp, Homo sapien
atgagcgagccccagaacttgccag

SEQ ID NO: 2855525 - DNA, 25 bp, Homo sapien
tctggctttcaattcaatggtgatg

SEQ ID NO: 2855526 - DNA, 25 bp, Homo sapien
aatagatcagatgaacttggacaat

SEQ ID NO: 2855527 - DNA, 25 bp, Homo sapien
tttgatactgggacaatggagtgag

SEQ ID NO: 2855528 - DNA, 25 bp, Homo sapien
gacaatggagtgagtgcccatcttc

SEQ ID NO: 2855529 - DNA, 25 bp, Homo sapien
gaacttggacaatctgcggcgtcat

SEQ ID NO: 2855530 - DNA, 25 bp, Homo sapien
gagtttaggaacagtgcttgcaagc

SEQ ID NO: 2855531 - DNA, 25 bp, Homo sapien
gggtctgggtatcacccagaccaca

SEQ ID NO: 2855532 - DNA, 25 bp, Homo sapien
gaccttatgcagcttcactggaggg

SEQ ID NO: 2855533 - DNA, 25 bp, Homo sapien
caggtggttgtcaggacacacttca

SEQ ID NO: 2855534 - DNA, 25 bp, Homo sapien
tatgcaatagcatgattatctccag

SEQ ID NO: 2855535 - DNA, 25 bp, Homo sapien
cttcttgaataagcccattatgcaa

SEQ ID NO: 2855536 - DNA, 25 bp, Homo sapien
gaataagcccattatgcaatagcat

SEQ ID NO: 2855537 - DNA, 25 bp, Homo sapien
caatagcatgattatctccagagaa

SEQ ID NO: 2855538 - DNA, 25 bp, Homo sapien
tgcatttcttaatagtcagcattct

SEQ ID NO: 2855539 - DNA, 25 bp, Homo sapien
ttgggctcaacacatttaagcctca

SEQ ID NO: 2855540 - DNA, 25 bp, Homo sapien
tcttgcatttcttaatagtcagcat

SEQ ID NO: 2855541 - DNA, 25 bp, Homo sapien
tttgggctcaacacatttaagcctc

SEQ ID NO: 2855542 - DNA, 25 bp, Homo sapien
cctgactttctgttaggtggaatgt

SEQ ID NO: 2855543 - DNA, 25 bp, Homo sapien
gctctaatatcacactgaaactgcc

SEQ ID NO: 2855544 - DNA, 25 bp, Homo sapien
tgactttctgttaggtggaatgtgg

SEQ ID NO: 2855545 - DNA, 25 bp, Homo sapien
tgctctaatatcacactgaaactgc

SEQ ID NO: 2855546 - DNA, 25 bp, Homo sapien
gaattgcatgctatttccagaatct

SEQ ID NO: 2855547 - DNA, 25 bp, Homo sapien
ctctgacagcagtcatctgtacctt

SEQ ID NO: 2855548 - DNA, 25 bp, Homo sapien
agcagtcatctgtaccttgggaaga

SEQ ID NO: 2855549 - DNA, 25 bp, Homo sapien
ctagatgtcaaggaattgcatgcta

SEQ ID NO: 2855550 - DNA, 25 bp, Homo sapien
aaatggctcccttcagatacagcca

SEQ ID NO: 2855551 - DNA, 25 bp, Homo sapien
ttcacaggatgcaaacttcttaatg

SEQ ID NO: 2855552 - DNA, 25 bp, Homo sapien
tagagatatgaaaaatggctccctt

SEQ ID NO: 2855553 - DNA, 25 bp, Homo sapien
caggatgcaaacttcttaatgtatt

SEQ ID NO: 2855554 - DNA, 25 bp, Homo sapien
tccaatgcagcattgagctttctgt

SEQ ID NO: 2855555 - DNA, 25 bp, Homo sapien
ccaagatcaagggtaagaggtccca

SEQ ID NO: 2855556 - DNA, 25 bp, Homo sapien
aacacctccttagctgcagtgccag

SEQ ID NO: 2855557 - DNA, 25 bp, Homo sapien
gttgcttgcttcgtggatccctcca

SEQ ID NO: 2855558 - DNA, 25 bp, Homo sapien
gcatcctcatgtgctcccaaaagag

SEQ ID NO: 2855559 - DNA, 25 bp, Homo sapien
cccaaaagagctagtacaacatcta

SEQ ID NO: 2855560 - DNA, 25 bp, Homo sapien
gagctagtacaacatctaaatgtgc

SEQ ID NO: 2855561 - DNA, 25 bp, Homo sapien
cagtatggggatggtaggcatcctc

SEQ ID NO: 2855562 - DNA, 25 bp, Homo sapien
ctcttgtgaccacgagggggcactg

SEQ ID NO: 2855563 - DNA, 25 bp, Homo sapien
cttgtgaccacgagggggcactgca

SEQ ID NO: 2855564 - DNA, 25 bp, Homo sapien
ggcctcttgtgaccacgagggggca

SEQ ID NO: 2855565 - DNA, 25 bp, Homo sapien
ttgtgaccacgagggggcactgcat

SEQ ID NO: 2855566 - DNA, 25 bp, Homo sapien
ctattggaggatttaccaggttctt

SEQ ID NO: 2855567 - DNA, 25 bp, Homo sapien
caaaggcagctattggaggatttac

SEQ ID NO: 2855568 - DNA, 25 bp, Homo sapien
ttagattgaatcaaaggcagctatt

SEQ ID NO: 2855569 - DNA, 25 bp, Homo sapien
ggcagctattggaggatttaccagg

SEQ ID NO: 2855570 - DNA, 25 bp, Homo sapien
tcacatacagctcatcctgacaggt

SEQ ID NO: 2855571 - DNA, 25 bp, Homo sapien
gggacatctcagtcttagggcaaaa

SEQ ID NO: 2855572 - DNA, 25 bp, Homo sapien
gacaggttgacttacagggacatct

SEQ ID NO: 2855573 - DNA, 25 bp, Homo sapien
gatgatgatggtgatagcttgaacc

SEQ ID NO: 2855574 - DNA, 25 bp, Homo sapien
gctgcctgaagggaatggatttttc

SEQ ID NO: 2855575 - DNA, 25 bp, Homo sapien
ccctggctgcctgaagggaatggat

SEQ ID NO: 2855576 - DNA, 25 bp, Homo sapien
cctgaagggaatggatttttctctg

SEQ ID NO: 2855577 - DNA, 25 bp, Homo sapien
tgaagggaatggatttttctctgtg

SEQ ID NO: 2855578 - DNA, 25 bp, Homo sapien
actgaagcatctgtgaagcctttct

SEQ ID NO: 2855579 - DNA, 25 bp, Homo sapien
agctgtaatgctctcctgattagca

SEQ ID NO: 2855580 - DNA, 25 bp, Homo sapien
tcttttagctgtaatgctctcctga

SEQ ID NO: 2855581 - DNA, 25 bp, Homo sapien
taatgctctcctgattagcaaagcc

SEQ ID NO: 2855582 - DNA, 25 bp, Homo sapien
tgctctcctgattagcaaagcccat

SEQ ID NO: 2855583 - DNA, 25 bp, Homo sapien
tattatgacgtaagcagagcagttt

SEQ ID NO: 2855584 - DNA, 25 bp, Homo sapien
caaggtgctccatattatgacgtaa

SEQ ID NO: 2855585 - DNA, 25 bp, Homo sapien
cctcaaggatgtgatactcaaggtg

SEQ ID NO: 2855586 - DNA, 25 bp, Homo sapien
gatactcaaggtgctccatattatg

SEQ ID NO: 2855587 - DNA, 25 bp, Homo sapien
gttatacaagctgatccctgggaca

SEQ ID NO: 2855588 - DNA, 25 bp, Homo sapien
ggaaactctaaatccatcctgggaa

SEQ ID NO: 2855589 - DNA, 25 bp, Homo sapien
ggaatactcctcagctacatcaagg

SEQ ID NO: 2855590 - DNA, 25 bp, Homo sapien
cagagaagtaggtaatggagcatcc

SEQ ID NO: 2855591 - DNA, 25 bp, Homo sapien
taattaattacaaccctggagagag

SEQ ID NO: 2855592 - DNA, 25 bp, Homo sapien
tgggcctcaggcatgatgtctaaaa

SEQ ID NO: 2855593 - DNA, 25 bp, Homo sapien
catggaaagaggactacaccttggg

SEQ ID NO: 2855594 - DNA, 25 bp, Homo sapien
gatccaccatctattgggccaaagg

SEQ ID NO: 2855595 - DNA, 25 bp, Homo sapien
catcacatttcttctcgacattttc

SEQ ID NO: 2855596 - DNA, 25 bp, Homo sapien
gtgacagcaaggcaaactgtgtgct

SEQ ID NO: 2855597 - DNA, 25 bp, Homo sapien
gatggttagtaggtaaacaacattc

SEQ ID NO: 2855598 - DNA, 25 bp, Homo sapien
cgacattttcaaatagagttgtgac

SEQ ID NO: 2855599 - DNA, 25 bp, Homo sapien
tgatgggccataggcactctgcttg

SEQ ID NO: 2855600 - DNA, 25 bp, Homo sapien
ctgtatcaattattagctctaggac

SEQ ID NO: 2855601 - DNA, 25 bp, Homo sapien
tgctagagacaaaacaactcaggtc

SEQ ID NO: 2855602 - DNA, 25 bp, Homo sapien
ggatatggcccttcacttctctaag

SEQ ID NO: 2855603 - DNA, 25 bp, Homo sapien
ctaccctgaaggccatcaacatgag

SEQ ID NO: 2855604 - DNA, 25 bp, Homo sapien
gttgcccaggaaaagatttcaaaca

SEQ ID NO: 2855605 - DNA, 25 bp, Homo sapien
gatctaccctgaaggccatcaacat

SEQ ID NO: 2855606 - DNA, 25 bp, Homo sapien
atctaccctgaaggccatcaacatg

SEQ ID NO: 2855607 - DNA, 25 bp, Homo sapien
tgtgttgtccatctcaagtgtgatg

SEQ ID NO: 2855608 - DNA, 25 bp, Homo sapien
gttgtccatctcaagtgtgatgaag

SEQ ID NO: 2855609 - DNA, 25 bp, Homo sapien
gtgtgtgttgtccatctcaagtgtg

SEQ ID NO: 2855610 - DNA, 25 bp, Homo sapien
tgtgtgttgtccatctcaagtgtga

SEQ ID NO: 2855611 - DNA, 25 bp, Homo sapien
gatgcattcgtgtttattcatttct

SEQ ID NO: 2855612 - DNA, 25 bp, Homo sapien
ttccagattccaagatgcctcattc

SEQ ID NO: 2855613 - DNA, 25 bp, Homo sapien
ttctccagatgcattcgtgtttatt

SEQ ID NO: 2855614 - DNA, 25 bp, Homo sapien
attccaagatgcctcattctccaga

SEQ ID NO: 2855615 - DNA, 25 bp, Homo sapien
gcgactaaaaacctgtgcatcatgg

SEQ ID NO: 2855616 - DNA, 25 bp, Homo sapien
tgctgatggtgtgtgaggataaccc

SEQ ID NO: 2855617 - DNA, 25 bp, Homo sapien
ggcatttgcgtctactttggcttca

SEQ ID NO: 2855618 - DNA, 25 bp, Homo sapien
catcatggtgatgcttttcctggca

SEQ ID NO: 2855619 - DNA, 25 bp, Homo sapien
aaatcttattgggagctgctcagtc

SEQ ID NO: 2855620 - DNA, 25 bp, Homo sapien
gggagctgctcagtcccttgaggca

SEQ ID NO: 2855621 - DNA, 25 bp, Homo sapien
gctgctcagtcccttgaggcagaaa

SEQ ID NO: 2855622 - DNA, 25 bp, Homo sapien
agtctcaccagtcgtgtcactccca

SEQ ID NO: 2855623 - DNA, 25 bp, Homo sapien
cagaacattacccagggcatacttt

SEQ ID NO: 2855624 - DNA, 25 bp, Homo sapien
tgggccactgcaggaacttttgaat

SEQ ID NO: 2855625 - DNA, 25 bp, Homo sapien
ttaaatccatgaatgcaaagagtct

SEQ ID NO: 2855626 - DNA, 25 bp, Homo sapien
ctgcagaacattacccagggcatac

SEQ ID NO: 2855627 - DNA, 25 bp, Homo sapien
ctaaatacgtggttctatgttctga

SEQ ID NO: 2855628 - DNA, 25 bp, Homo sapien
cgtggttctatgttctgagtgtttc

SEQ ID NO: 2855629 - DNA, 25 bp, Homo sapien
aatacgtggttctatgttctgagtg

SEQ ID NO: 2855630 - DNA, 25 bp, Homo sapien
ggttctatgttctgagtgtttccag

SEQ ID NO: 2855631 - DNA, 25 bp, Homo sapien
cactgctgtgaagtgctcggatcac

SEQ ID NO: 2855632 - DNA, 25 bp, Homo sapien
caattaaaccttaagtgtcaccagg

SEQ ID NO: 2855633 - DNA, 25 bp, Homo sapien
aaccatccttcacccataaaggctg

SEQ ID NO: 2855634 - DNA, 25 bp, Homo sapien
aaggctgaccccttaaagcacagca

SEQ ID NO: 2855635 - DNA, 25 bp, Homo sapien
tcatatggactcacagcaaggtctt

SEQ ID NO: 2855636 - DNA, 25 bp, Homo sapien
cagtatctctgacgatgaggcgctg

SEQ ID NO: 2855637 - DNA, 25 bp, Homo sapien
acgatgaggcgctgacaccactcac

SEQ ID NO: 2855638 - DNA, 25 bp, Homo sapien
ggcccaaatgcttcttgtcggcagt

SEQ ID NO: 2855639 - DNA, 25 bp, Homo sapien
gcttcttgtcggcagtatctctgac

SEQ ID NO: 2855640 - DNA, 25 bp, Homo sapien
cctcttcgaagccaaccatatttca

SEQ ID NO: 2855641 - DNA, 25 bp, Homo sapien
ctcctcttcgaagccaaccatattt

SEQ ID NO: 2855642 - DNA, 25 bp, Homo sapien
tcctcttcgaagccaaccatatttc

SEQ ID NO: 2855643 - DNA, 25 bp, Homo sapien
ctccttccaggtggtgtatcaggaa

SEQ ID NO: 2855644 - DNA, 25 bp, Homo sapien
gtgtatcaggaatgtcacaggagat

SEQ ID NO: 2855645 - DNA, 25 bp, Homo sapien
tctctccttccaggtggtgtatcag

SEQ ID NO: 2855646 - DNA, 25 bp, Homo sapien
ccaggtggtgtatcaggaatgtcac

SEQ ID NO: 2855647 - DNA, 25 bp, Homo sapien
caagaagaaatccactcgccagcac

SEQ ID NO: 2855648 - DNA, 25 bp, Homo sapien
actcgccagcacttgttaatatgct

SEQ ID NO: 2855649 - DNA, 25 bp, Homo sapien
cgccagcacttgttaatatgctctt

SEQ ID NO: 2855650 - DNA, 25 bp, Homo sapien
ccactcgccagcacttgttaatatg

SEQ ID NO: 2855651 - DNA, 25 bp, Homo sapien
cttcagtttcgaccattgccttttc

SEQ ID NO: 2855652 - DNA, 25 bp, Homo sapien
tcttcagtttcgaccattgcctttt

SEQ ID NO: 2855653 - DNA, 25 bp, Homo sapien
caatttaacagctcataggatggca

SEQ ID NO: 2855654 - DNA, 25 bp, Homo sapien
cagggacacactggtgagatagaaa

SEQ ID NO: 2855655 - DNA, 25 bp, Homo sapien
tccatggtaacgagtttatcaccca

SEQ ID NO: 2855656 - DNA, 25 bp, Homo sapien
tttctcaagaagcagatgtaccctc

SEQ ID NO: 2855657 - DNA, 25 bp, Homo sapien
tccaaggtgctctcactcttaggat

SEQ ID NO: 2855658 - DNA, 25 bp, Homo sapien
gctctcactcttaggattccacaca

SEQ ID NO: 2855659 - DNA, 25 bp, Homo sapien
taatcaatgcattccaaggtgctct

SEQ ID NO: 2855660 - DNA, 25 bp, Homo sapien
cactcttaggattccacacagaagc

SEQ ID NO: 2855661 - DNA, 25 bp, Homo sapien
tgctgctgacctctcatgctttcct

SEQ ID NO: 2855662 - DNA, 25 bp, Homo sapien
cttatccagacctgaggatccagcc

SEQ ID NO: 2855663 - DNA, 25 bp, Homo sapien
aatgccttatccagacctgaggatc

SEQ ID NO: 2855664 - DNA, 25 bp, Homo sapien
tatccagacctgaggatccagccat

SEQ ID NO: 2855665 - DNA, 25 bp, Homo sapien
gccttatccagacctgaggatccag

SEQ ID NO: 2855666 - DNA, 25 bp, Homo sapien
tatctctttcgactaaatctataaa

SEQ ID NO: 2855667 - DNA, 25 bp, Homo sapien
agatttttgttgatgcttaccacaa

SEQ ID NO: 2855668 - DNA, 25 bp, Homo sapien
gatttttgttgatgcttaccacaaa

SEQ ID NO: 2855669 - DNA, 25 bp, Homo sapien
tcgactaaatctataaatggctaga

SEQ ID NO: 2855670 - DNA, 25 bp, Homo sapien
gagttgcaaaagcttacaaggtaaa

SEQ ID NO: 2855671 - DNA, 25 bp, Homo sapien
caaaaatgcacttattcagactcca

SEQ ID NO: 2855672 - DNA, 25 bp, Homo sapien
tcgaagtagcaccacggagttgcaa

SEQ ID NO: 2855673 - DNA, 25 bp, Homo sapien
cagaagatgaggctgtcgaagtagc

SEQ ID NO: 2855674 - DNA, 25 bp, Homo sapien
gactctgcgcttgggggaatggctt

SEQ ID NO: 2855675 - DNA, 25 bp, Homo sapien
caaatggaaggtctgactctgcgct

SEQ ID NO: 2855676 - DNA, 25 bp, Homo sapien
tgactctgcgcttgggggaatggct

SEQ ID NO: 2855677 - DNA, 25 bp, Homo sapien
atggaaggtctgactctgcgcttgg

SEQ ID NO: 2855678 - DNA, 25 bp, Homo sapien
tctgagaggcttcatcacctgtccc

SEQ ID NO: 2855679 - DNA, 25 bp, Homo sapien
caaatttcattgatggtctgagagg

SEQ ID NO: 2855680 - DNA, 25 bp, Homo sapien
ggccaacttttgttcctgcagttaa

SEQ ID NO: 2855681 - DNA, 25 bp, Homo sapien
tgtaaccttaccatgaattgtcctt

SEQ ID NO: 2855682 - DNA, 25 bp, Homo sapien
cttcttacactgagatttctttgat

SEQ ID NO: 2855683 - DNA, 25 bp, Homo sapien
ttcttacactgagatttctttgatc

SEQ ID NO: 2855684 - DNA, 25 bp, Homo sapien
cagattaggaggcaaacgaggatgt

SEQ ID NO: 2855685 - DNA, 25 bp, Homo sapien
gaatttctgagggagcgaagaacat

SEQ ID NO: 2855686 - DNA, 25 bp, Homo sapien
cgaagaacatgcacacgataaatgc

SEQ ID NO: 2855687 - DNA, 25 bp, Homo sapien
tgctttgttgggatggtgacagaat

SEQ ID NO: 2855688 - DNA, 25 bp, Homo sapien
ggtgagaagcactaggatcagcagt

SEQ ID NO: 2855689 - DNA, 25 bp, Homo sapien
tgagaagcactaggatcagcagtga

SEQ ID NO: 2855690 - DNA, 25 bp, Homo sapien
ggatcagcagtgagtaggaaagagc

SEQ ID NO: 2855691 - DNA, 25 bp, Homo sapien
ctatggtgagaagcactaggatcag

SEQ ID NO: 2855692 - DNA, 25 bp, Homo sapien
ctgccagaggtaagttaaatttgtg

SEQ ID NO: 2855693 - DNA, 25 bp, Homo sapien
agaggtaagttaaatttgtgctcac

SEQ ID NO: 2855694 - DNA, 25 bp, Homo sapien
cagaggtaagttaaatttgtgctca

SEQ ID NO: 2855695 - DNA, 25 bp, Homo sapien
gaataaatttctcagtttgtcctca

SEQ ID NO: 2855696 - DNA, 25 bp, Homo sapien
atctgctcatacaaggcaacactca

SEQ ID NO: 2855697 - DNA, 25 bp, Homo sapien
cccagtcttatgagggaaggtagag

SEQ ID NO: 2855698 - DNA, 25 bp, Homo sapien
agaggtgaataaatttctcagtttg

SEQ ID NO: 2855699 - DNA, 25 bp, Homo sapien
ccctaactctggcgacctctttgac

SEQ ID NO: 2855700 - DNA, 25 bp, Homo sapien
cctaactctggcgacctctttgacc

SEQ ID NO: 2855701 - DNA, 25 bp, Homo sapien
cgacctctttgacccagccatcatc

SEQ ID NO: 2855702 - DNA, 25 bp, Homo sapien
tccctaactctggcgacctctttga

SEQ ID NO: 2855703 - DNA, 25 bp, Homo sapien
gctatgattacaagagctttgctaa

SEQ ID NO: 2855704 - DNA, 25 bp, Homo sapien
tcttaatgcaggaaggattgctttg

SEQ ID NO: 2855705 - DNA, 25 bp, Homo sapien
gcaaattgagaaagcaagatcttgg

SEQ ID NO: 2855706 - DNA, 25 bp, Homo sapien
gcttgccagaaagtcactcgagtga

SEQ ID NO: 2855707 - DNA, 25 bp, Homo sapien
ctcctccataagtacttccctgatt

SEQ ID NO: 2855708 - DNA, 25 bp, Homo sapien
ctctggtattcattcgttcatctct

SEQ ID NO: 2855709 - DNA, 25 bp, Homo sapien
gtattcattcgttcatctctcccca

SEQ ID NO: 2855710 - DNA, 25 bp, Homo sapien
cctccataagtacttccctgattgc

SEQ ID NO: 2855711 - DNA, 25 bp, Homo sapien
gagtctctggacagggcagtctcat

SEQ ID NO: 2855712 - DNA, 25 bp, Homo sapien
tgttcattaaacagtcatttctcag

SEQ ID NO: 2855713 - DNA, 25 bp, Homo sapien
ctccttctttatttgggagtctctg

SEQ ID NO: 2855714 - DNA, 25 bp, Homo sapien
ctctctttgttcattaaacagtcat

SEQ ID NO: 2855715 - DNA, 25 bp, Homo sapien
tttacaggagcagtactcttcacac

SEQ ID NO: 2855716 - DNA, 25 bp, Homo sapien
aatttacaggagcagtactcttcac

SEQ ID NO: 2855717 - DNA, 25 bp, Homo sapien
atttacaggagcagtactcttcaca

SEQ ID NO: 2855718 - DNA, 25 bp, Homo sapien
ttacaggagcagtactcttcacacc

SEQ ID NO: 2855719 - DNA, 25 bp, Homo sapien
tctacagttgctccattcaagccag

SEQ ID NO: 2855720 - DNA, 25 bp, Homo sapien
ccagtcatatttagcttaagggata

SEQ ID NO: 2855721 - DNA, 25 bp, Homo sapien
aactgacttgttccactcacttggg

SEQ ID NO: 2855722 - DNA, 25 bp, Homo sapien
tgaatatgcccattgagctgtctgt

SEQ ID NO: 2855723 - DNA, 25 bp, Homo sapien
gcacttcttacattgcagcagcaag

SEQ ID NO: 2855724 - DNA, 25 bp, Homo sapien
aggcacttcttacattgcagcagca

SEQ ID NO: 2855725 - DNA, 25 bp, Homo sapien
ggcacttcttacattgcagcagcaa

SEQ ID NO: 2855726 - DNA, 25 bp, Homo sapien
cacttcttacattgcagcagcaaga

SEQ ID NO: 2855727 - DNA, 25 bp, Homo sapien
ggattagttctctcacgtgaaagtc

SEQ ID NO: 2855728 - DNA, 25 bp, Homo sapien
gaaagtccctttaggacctgatgaa

SEQ ID NO: 2855729 - DNA, 25 bp, Homo sapien
cctagaggtaagaagtacccttgca

SEQ ID NO: 2855730 - DNA, 25 bp, Homo sapien
tacccttgcaccatcactgagtttg

SEQ ID NO: 2855731 - DNA, 25 bp, Homo sapien
cattcagtgttaatatagtaataag

SEQ ID NO: 2855732 - DNA, 25 bp, Homo sapien
tcattcagtgttaatatagtaataa

SEQ ID NO: 2855733 - DNA, 25 bp, Homo sapien
tcagtgttaatatagtaataagctg

SEQ ID NO: 2855734 - DNA, 25 bp, Homo sapien
gtgttaatatagtaataagctgtca

SEQ ID NO: 2855735 - DNA, 25 bp, Homo sapien
tcatcaccgaatgcctccttggaac

SEQ ID NO: 2855736 - DNA, 25 bp, Homo sapien
aactgaagacatttgcccacgctac

SEQ ID NO: 2855737 - DNA, 25 bp, Homo sapien
cactcattgtctgtatcatatgcct

SEQ ID NO: 2855738 - DNA, 25 bp, Homo sapien
ttcttcatcaccgaatgcctccttg

SEQ ID NO: 2855739 - DNA, 25 bp, Homo sapien
tgtttatgcctcagacactggtgcc

SEQ ID NO: 2855740 - DNA, 25 bp, Homo sapien
catatatgcaagctggacccggcaa

SEQ ID NO: 2855741 - DNA, 25 bp, Homo sapien
tagtgcacaccatggtctctggagc

SEQ ID NO: 2855742 - DNA, 25 bp, Homo sapien
agaaactgatctcctagctgcacca

SEQ ID NO: 2855743 - DNA, 25 bp, Homo sapien
tcatctgaaatctcatgcaggtaaa

SEQ ID NO: 2855744 - DNA, 25 bp, Homo sapien
atccactgtgttcgcctgttgtgca

SEQ ID NO: 2855745 - DNA, 25 bp, Homo sapien
caacttttccatgctaggcatccac

SEQ ID NO: 2855746 - DNA, 25 bp, Homo sapien
tattagagatgacaggtggatgact

SEQ ID NO: 2855747 - DNA, 25 bp, Homo sapien
tgactcttgtattagagatgacagg

SEQ ID NO: 2855748 - DNA, 25 bp, Homo sapien
gggaaaaccatgaaatcactcagac

SEQ ID NO: 2855749 - DNA, 25 bp, Homo sapien
aatcaccgtgtgatccagaaggtgg

SEQ ID NO: 2855750 - DNA, 25 bp, Homo sapien
ggaaaagcaacagcacgtgctccca

SEQ ID NO: 2855751 - DNA, 25 bp, Homo sapien
gtagctttacaggaaccaagcctag

SEQ ID NO: 2855752 - DNA, 25 bp, Homo sapien
tccaaggattctttggcaccaacac

SEQ ID NO: 2855753 - DNA, 25 bp, Homo sapien
gattccaaggattctttggcaccaa

SEQ ID NO: 2855754 - DNA, 25 bp, Homo sapien
agattccaaggattctttggcacca

SEQ ID NO: 2855755 - DNA, 25 bp, Homo sapien
ctaagattccaaggattctttggca

SEQ ID NO: 2855756 - DNA, 25 bp, Homo sapien
tgcctgtgcctttgccctttaaact

SEQ ID NO: 2855757 - DNA, 25 bp, Homo sapien
ccactgcctgtgcctttgcccttta

SEQ ID NO: 2855758 - DNA, 25 bp, Homo sapien
ctcccactgcctgtgcctttgccct

SEQ ID NO: 2855759 - DNA, 25 bp, Homo sapien
actgcctgtgcctttgccctttaaa

SEQ ID NO: 2855760 - DNA, 25 bp, Homo sapien
agcttggaggcactttgtgttttca

SEQ ID NO: 2855761 - DNA, 25 bp, Homo sapien
ctctttctgcatcattaatcaatgg

SEQ ID NO: 2855762 - DNA, 25 bp, Homo sapien
ctttctgcatcattaatcaatggtg

SEQ ID NO: 2855763 - DNA, 25 bp, Homo sapien
tctgcatcattaatcaatggtggtt

SEQ ID NO: 2855764 - DNA, 25 bp, Homo sapien
ccctctttctgcatcattaatcaat

SEQ ID NO: 2855765 - DNA, 25 bp, Homo sapien
tcctctcatcatcaccataaaccat

SEQ ID NO: 2855766 - DNA, 25 bp, Homo sapien
cctttcaccttcactttcctctcat

SEQ ID NO: 2855767 - DNA, 25 bp, Homo sapien
tttcaccttcactttcctctcatca

SEQ ID NO: 2855768 - DNA, 25 bp, Homo sapien
ttcctttcaccttcactttcctctc

SEQ ID NO: 2855769 - DNA, 25 bp, Homo sapien
cttgctggagcttccaaacaaactc

SEQ ID NO: 2855770 - DNA, 25 bp, Homo sapien
catggctgatactggtaactgccac

SEQ ID NO: 2855771 - DNA, 25 bp, Homo sapien
ccacagttgtacctgctgcatggct

SEQ ID NO: 2855772 - DNA, 25 bp, Homo sapien
tggctgatactggtaactgccaccc

SEQ ID NO: 2855773 - DNA, 25 bp, Homo sapien
tgcatggctgatactggtaactgcc

SEQ ID NO: 2855774 - DNA, 25 bp, Homo sapien
tgtccacatgaagggtaccatcccc

SEQ ID NO: 2855775 - DNA, 25 bp, Homo sapien
ggatgtccacatgaagggtaccatc

SEQ ID NO: 2855776 - DNA, 25 bp, Homo sapien
gatgtccacatgaagggtaccatcc

SEQ ID NO: 2855777 - DNA, 25 bp, Homo sapien
aggatgtccacatgaagggtaccat

SEQ ID NO: 2855778 - DNA, 25 bp, Homo sapien
tgagatgccataaaaaccatccagc

SEQ ID NO: 2855779 - DNA, 25 bp, Homo sapien
tgccataaaaaccatccagctcaac

SEQ ID NO: 2855780 - DNA, 25 bp, Homo sapien
ttttctttagctgagatgccataaa

SEQ ID NO: 2855781 - DNA, 25 bp, Homo sapien
tttagctgagatgccataaaaacca

SEQ ID NO: 2855782 - DNA, 25 bp, Homo sapien
aatcgctaattgtctcctgtgctca

SEQ ID NO: 2855783 - DNA, 25 bp, Homo sapien
tcttcttatccccatagggagacct

SEQ ID NO: 2855784 - DNA, 25 bp, Homo sapien
ccatagggagacctttgcctgcagc

SEQ ID NO: 2855785 - DNA, 25 bp, Homo sapien
cagccacagcagtgaatcgctaatt

SEQ ID NO: 2855786 - DNA, 25 bp, Homo sapien
caggactatcaccatcagccagact

SEQ ID NO: 2855787 - DNA, 25 bp, Homo sapien
actttgatttgcatggcctttggct

SEQ ID NO: 2855788 - DNA, 25 bp, Homo sapien
gctcctccagaactttgatttgcat

SEQ ID NO: 2855789 - DNA, 25 bp, Homo sapien
gcctgagctgttagctccaggacta

SEQ ID NO: 2855790 - DNA, 25 bp, Homo sapien
ttgatttgatttgcctgggataagg

SEQ ID NO: 2855791 - DNA, 25 bp, Homo sapien
gatttgcctgggataaggtgttgac

SEQ ID NO: 2855792 - DNA, 25 bp, Homo sapien
tgggataaggtgttgacttctggtc

SEQ ID NO: 2855793 - DNA, 25 bp, Homo sapien
ttgcctgggataaggtgttgacttc

SEQ ID NO: 2855794 - DNA, 25 bp, Homo sapien
tacctggtgctgtttaggtaactcc

SEQ ID NO: 2855795 - DNA, 25 bp, Homo sapien
ccaaggtgaagtcagtcccatgtag

SEQ ID NO: 2855796 - DNA, 25 bp, Homo sapien
agtcccatgtagtacctggtgctgt

SEQ ID NO: 2855797 - DNA, 25 bp, Homo sapien
tgctgtttaggtaactcctctccct

SEQ ID NO: 2855798 - DNA, 25 bp, Homo sapien
cagcatgagaggaagaatctacgcc

SEQ ID NO: 2855799 - DNA, 25 bp, Homo sapien
caggaaacagtatgacttggcagca

SEQ ID NO: 2855800 - DNA, 25 bp, Homo sapien
gaggaagaatctacgccctgaatca

SEQ ID NO: 2855801 - DNA, 25 bp, Homo sapien
catatcctaaggatgttcggaccag

SEQ ID NO: 2855802 - DNA, 25 bp, Homo sapien
ggaggcaaaggctcatactgcggca

SEQ ID NO: 2855803 - DNA, 25 bp, Homo sapien
aggaggcaaaggctcatactgcggc

SEQ ID NO: 2855804 - DNA, 25 bp, Homo sapien
gaggcaaaggctcatactgcggcat

SEQ ID NO: 2855805 - DNA, 25 bp, Homo sapien
tcttaccccttgcataatagaggca

SEQ ID NO: 2855806 - DNA, 25 bp, Homo sapien
tctactactgatctgcttggcactg

SEQ ID NO: 2855807 - DNA, 25 bp, Homo sapien
ttcatttgacaacactaggagcttg

SEQ ID NO: 2855808 - DNA, 25 bp, Homo sapien
cttggcactggttggaaaatagact

SEQ ID NO: 2855809 - DNA, 25 bp, Homo sapien
caattttttgccctacgtggaagtg

SEQ ID NO: 2855810 - DNA, 25 bp, Homo sapien
ttctgttacttatcaatgtttctga

SEQ ID NO: 2855811 - DNA, 25 bp, Homo sapien
ggaagtgatcacataacagattttc

SEQ ID NO: 2855812 - DNA, 25 bp, Homo sapien
caagtccagggatccttttcttgtc

SEQ ID NO: 2855813 - DNA, 25 bp, Homo sapien
tcccggacagttggcattcgtatgc

SEQ ID NO: 2855814 - DNA, 25 bp, Homo sapien
catggacagcatcccggacagttgg

SEQ ID NO: 2855815 - DNA, 25 bp, Homo sapien
gacagcatcccggacagttggcatt

SEQ ID NO: 2855816 - DNA, 25 bp, Homo sapien
aggaccatggacagcatcccggaca

SEQ ID NO: 2855817 - DNA, 25 bp, Homo sapien
aaaacaagaggcatgatccatagtc

SEQ ID NO: 2855818 - DNA, 25 bp, Homo sapien
catagtctcaaggagcttatggtat

SEQ ID NO: 2855819 - DNA, 25 bp, Homo sapien
atgatccatagtctcaaggagctta

SEQ ID NO: 2855820 - DNA, 25 bp, Homo sapien
gagcttatggtattgtttctgagac

SEQ ID NO: 2855821 - DNA, 25 bp, Homo sapien
atgtgtccaggaggtaatagcaaac

SEQ ID NO: 2855822 - DNA, 25 bp, Homo sapien
gtattagcttatctggcaaccccaa

SEQ ID NO: 2855823 - DNA, 25 bp, Homo sapien
ccaggtttactccatgtctgaacaa

SEQ ID NO: 2855824 - DNA, 25 bp, Homo sapien
ggaattcgctttttctactcactga

SEQ ID NO: 2855825 - DNA, 25 bp, Homo sapien
tcccagagccaaaagctgttatagg

SEQ ID NO: 2855826 - DNA, 25 bp, Homo sapien
tcaacccgcacccagagagattttt

SEQ ID NO: 2855827 - DNA, 25 bp, Homo sapien
cagtagattgcaagcttcccagagc

SEQ ID NO: 2855828 - DNA, 25 bp, Homo sapien
ggttgtgaacaatagcctccctggc

SEQ ID NO: 2855829 - DNA, 25 bp, Homo sapien
gagagacttctctggccccatttcc

SEQ ID NO: 2855830 - DNA, 25 bp, Homo sapien
tgtagatgtccatgcccaagtgctg

SEQ ID NO: 2855831 - DNA, 25 bp, Homo sapien
catgccatcagttacattccagata

SEQ ID NO: 2855832 - DNA, 25 bp, Homo sapien
tcttactcatgtactgtccaaagtg

SEQ ID NO: 2855833 - DNA, 25 bp, Homo sapien
tctgataggtactactgtgggccac

SEQ ID NO: 2855834 - DNA, 25 bp, Homo sapien
cgcttaacatcatgacattggcaca

SEQ ID NO: 2855835 - DNA, 25 bp, Homo sapien
ggaagtcattgcaaagtctgatagg

SEQ ID NO: 2855836 - DNA, 25 bp, Homo sapien
tcaatctatcaagcaaagcctacgc

SEQ ID NO: 2855837 - DNA, 25 bp, Homo sapien
tccctgtgttctggatcaccagaag

SEQ ID NO: 2855838 - DNA, 25 bp, Homo sapien
tgtgttctggatcaccagaaggtgg

SEQ ID NO: 2855839 - DNA, 25 bp, Homo sapien
agggccatctgctcatgcacaagga

SEQ ID NO: 2855840 - DNA, 25 bp, Homo sapien
gaaggaggtgtaggcagttccctgt

SEQ ID NO: 2855841 - DNA, 25 bp, Homo sapien
tcagatctgtcttgagtttgtcagc

SEQ ID NO: 2855842 - DNA, 25 bp, Homo sapien
tgtcttgagtttgtcagctgggaga

SEQ ID NO: 2855843 - DNA, 25 bp, Homo sapien
ggagaggggcccaaattgaagcaca

SEQ ID NO: 2855844 - DNA, 25 bp, Homo sapien
ggcccaaattgaagcacagcagttg

SEQ ID NO: 2855845 - DNA, 25 bp, Homo sapien
ggcagggacggtctcatttatcttt

SEQ ID NO: 2855846 - DNA, 25 bp, Homo sapien
tccgaaagttctttgtaggcaggga

SEQ ID NO: 2855847 - DNA, 25 bp, Homo sapien
cttccctgctggtccgaaagttctt

SEQ ID NO: 2855848 - DNA, 25 bp, Homo sapien
ttgtaggcagggacggtctcattta

SEQ ID NO: 2855849 - DNA, 25 bp, Homo sapien
caccaggagaatagctgattggcag

SEQ ID NO: 2855850 - DNA, 25 bp, Homo sapien
gtgtaagttggcagaaatgcaagcc

SEQ ID NO: 2855851 - DNA, 25 bp, Homo sapien
gcagtttgcaagtagcttgtagggt

SEQ ID NO: 2855852 - DNA, 25 bp, Homo sapien
caatgtatacagacgtcctgctgga

SEQ ID NO: 2855853 - DNA, 25 bp, Homo sapien
cgcttgctcatggaagagtgtgaca

SEQ ID NO: 2855854 - DNA, 25 bp, Homo sapien
tcaattttcacatcagtgtagggct

SEQ ID NO: 2855855 - DNA, 25 bp, Homo sapien
ctcttagcgcttgctcatggaagag

SEQ ID NO: 2855856 - DNA, 25 bp, Homo sapien
ttttcacatcagtgtagggcttggg

SEQ ID NO: 2855857 - DNA, 25 bp, Homo sapien
gctttgttagggctcctggaaaatg

SEQ ID NO: 2855858 - DNA, 25 bp, Homo sapien
tgaggagatatgatgcaacacaagg

SEQ ID NO: 2855859 - DNA, 25 bp, Homo sapien
agagaaggataaatggtctttcccg

SEQ ID NO: 2855860 - DNA, 25 bp, Homo sapien
gatatgatgcaacacaaggctgtgt

SEQ ID NO: 2855861 - DNA, 25 bp, Homo sapien
ttcccgtgtcatccctcatgaggag

SEQ ID NO: 2855862 - DNA, 25 bp, Homo sapien
aaaacttctcatctccacattggtg

SEQ ID NO: 2855863 - DNA, 25 bp, Homo sapien
aaacttctcatctccacattggtgc

SEQ ID NO: 2855864 - DNA, 25 bp, Homo sapien
gctcttgctttaagagcctgtttct

SEQ ID NO: 2855865 - DNA, 25 bp, Homo sapien
agatgtctgatctcacaggctcttg

SEQ ID NO: 2855866 - DNA, 25 bp, Homo sapien
caggctcttgctttaagagcctgtt

SEQ ID NO: 2855867 - DNA, 25 bp, Homo sapien
ctctcaattcccacttctcccagat

SEQ ID NO: 2855868 - DNA, 25 bp, Homo sapien
tctctagcgccaccaaactttgcag

SEQ ID NO: 2855869 - DNA, 25 bp, Homo sapien
caacaggctctgtggtttcatgaga

SEQ ID NO: 2855870 - DNA, 25 bp, Homo sapien
tgcctttggaaacatagcccacggg

SEQ ID NO: 2855871 - DNA, 25 bp, Homo sapien
tttgcagacttcacttccggtgggt

SEQ ID NO: 2855872 - DNA, 25 bp, Homo sapien
taaatcaaggccagtggtgatattt

SEQ ID NO: 2855873 - DNA, 25 bp, Homo sapien
aaatcaaggccagtggtgatattta

SEQ ID NO: 2855874 - DNA, 25 bp, Homo sapien
ctaaatcaaggccagtggtgatatt

SEQ ID NO: 2855875 - DNA, 25 bp, Homo sapien
cctgctttcacccatagatgtcatc

SEQ ID NO: 2855876 - DNA, 25 bp, Homo sapien
tgctttcacccatagatgtcatcat

SEQ ID NO: 2855877 - DNA, 25 bp, Homo sapien
ttcctgctttcacccatagatgtca

SEQ ID NO: 2855878 - DNA, 25 bp, Homo sapien
ctttcctgctttcacccatagatgt

SEQ ID NO: 2855879 - DNA, 25 bp, Homo sapien
tcagtaaggacagactttatagtca

SEQ ID NO: 2855880 - DNA, 25 bp, Homo sapien
ctcagtaaggacagactttatagtc

SEQ ID NO: 2855881 - DNA, 25 bp, Homo sapien
gatcccctcagtaaggacagacttt

SEQ ID NO: 2855882 - DNA, 25 bp, Homo sapien
cccctcagtaaggacagactttata

SEQ ID NO: 2855883 - DNA, 25 bp, Homo sapien
ttagatgatacatgctgcttgagct

SEQ ID NO: 2855884 - DNA, 25 bp, Homo sapien
caagtttggctggtgagtcacttag

SEQ ID NO: 2855885 - DNA, 25 bp, Homo sapien
gctggtgagtcacttagatgataca

SEQ ID NO: 2855886 - DNA, 25 bp, Homo sapien
tctgctcaagtttggctggtgagtc

SEQ ID NO: 2855887 - DNA, 25 bp, Homo sapien
cttgttctgcatggatgaaggtgct

SEQ ID NO: 2855888 - DNA, 25 bp, Homo sapien
tgttctgcatggatgaaggtgcttg

SEQ ID NO: 2855889 - DNA, 25 bp, Homo sapien
gcttgttctgcatggatgaaggtgc

SEQ ID NO: 2855890 - DNA, 25 bp, Homo sapien
ttctgcatggatgaaggtgcttgtt

SEQ ID NO: 2855891 - DNA, 25 bp, Homo sapien
ttccatctccagtttgggatggagt

SEQ ID NO: 2855892 - DNA, 25 bp, Homo sapien
tcacatttgctgaagacgtctggct

SEQ ID NO: 2855893 - DNA, 25 bp, Homo sapien
agatgcttgatagtactttgccaaa

SEQ ID NO: 2855894 - DNA, 25 bp, Homo sapien
gacgtctggcttgtgtttcaatggc

SEQ ID NO: 2855895 - DNA, 25 bp, Homo sapien
gaactggtgcctcagcgttcccatg

SEQ ID NO: 2855896 - DNA, 25 bp, Homo sapien
gctgatggatcctccctgaactggt

SEQ ID NO: 2855897 - DNA, 25 bp, Homo sapien
atcaaagcacttgggcagcatgggg

SEQ ID NO: 2855898 - DNA, 25 bp, Homo sapien
tctcccttcacgaggaagaaatgtg

SEQ ID NO: 2855899 - DNA, 25 bp, Homo sapien
cttccttgaagaattttgaatagct

SEQ ID NO: 2855900 - DNA, 25 bp, Homo sapien
tccttgaagaattttgaatagcttc

SEQ ID NO: 2855901 - DNA, 25 bp, Homo sapien
ctggacagaaccatcctcggtggtg

SEQ ID NO: 2855902 - DNA, 25 bp, Homo sapien
gaaccatcctcggtggtgagcttcc

SEQ ID NO: 2855903 - DNA, 25 bp, Homo sapien
tatgcagtttaccacttcctccaag

SEQ ID NO: 2855904 - DNA, 25 bp, Homo sapien
tatccctcattatgcagtttaccac

SEQ ID NO: 2855905 - DNA, 25 bp, Homo sapien
cttcattcttattgtataatctccc

SEQ ID NO: 2855906 - DNA, 25 bp, Homo sapien
aattttatatccctcattatgcagt

SEQ ID NO: 2855907 - DNA, 25 bp, Homo sapien
gggtaaagacgtgtacacacagctg

SEQ ID NO: 2855908 - DNA, 25 bp, Homo sapien
agggagtcgagtccactgtggggta

SEQ ID NO: 2855909 - DNA, 25 bp, Homo sapien
gtaaagacgtgtacacacagctgtc

SEQ ID NO: 2855910 - DNA, 25 bp, Homo sapien
ccactgtggggtaaagacgtgtaca

SEQ ID NO: 2855911 - DNA, 25 bp, Homo sapien
tacagccaatcactatgctttcata

SEQ ID NO: 2855912 - DNA, 25 bp, Homo sapien
tgtagtacattcttgtctcatgaag

SEQ ID NO: 2855913 - DNA, 25 bp, Homo sapien
ccaggagtagtctttgcattattca

SEQ ID NO: 2855914 - DNA, 25 bp, Homo sapien
gcattattcatagcccttttgctgt

SEQ ID NO: 2855915 - DNA, 25 bp, Homo sapien
gctgcttcctctggtttgtgttggg

SEQ ID NO: 2855916 - DNA, 25 bp, Homo sapien
cttcctctggtttgtgttgggttct

SEQ ID NO: 2855917 - DNA, 25 bp, Homo sapien
caagtggagcatcaaactgagaggc

SEQ ID NO: 2855918 - DNA, 25 bp, Homo sapien
tctttaagctctgtggtctggcttt

SEQ ID NO: 2855919 - DNA, 25 bp, Homo sapien
tacgtgaggctttctatggagctgc

SEQ ID NO: 2855920 - DNA, 25 bp, Homo sapien
aggccctccaaggaagcatcattca

SEQ ID NO: 2855921 - DNA, 25 bp, Homo sapien
gattcagacactaatctcaggccct

SEQ ID NO: 2855922 - DNA, 25 bp, Homo sapien
tagacaacgccatgcaagcttctgc

SEQ ID NO: 2855923 - DNA, 25 bp, Homo sapien
taacggatgatttacctggtgttcc

SEQ ID NO: 2855924 - DNA, 25 bp, Homo sapien
taagacagccaaaggaagagtctgc

SEQ ID NO: 2855925 - DNA, 25 bp, Homo sapien
ccttgcggtagtggttcattcgtga

SEQ ID NO: 2855926 - DNA, 25 bp, Homo sapien
tcgtgaaccagcagaaggtattttg

SEQ ID NO: 2855927 - DNA, 25 bp, Homo sapien
tacacttaagtcagatgttcctgtt

SEQ ID NO: 2855928 - DNA, 25 bp, Homo sapien
tgtctgtcgtgccattacacttaag

SEQ ID NO: 2855929 - DNA, 25 bp, Homo sapien
tgagcatcccatgtctgtcgtgcca

SEQ ID NO: 2855930 - DNA, 25 bp, Homo sapien
gtgccattacacttaagtcagatgt

SEQ ID NO: 2855931 - DNA, 25 bp, Homo sapien
cagatggatctgggctcacatttca

SEQ ID NO: 2855932 - DNA, 25 bp, Homo sapien
caactgaggctaggtaattcctaaa

SEQ ID NO: 2855933 - DNA, 25 bp, Homo sapien
tggatctgggctcacatttcaaccc

SEQ ID NO: 2855934 - DNA, 25 bp, Homo sapien
aaattatttattcactctgaatctg

SEQ ID NO: 2855935 - DNA, 25 bp, Homo sapien
tgctataaaggcttacccctggctg

SEQ ID NO: 2855936 - DNA, 25 bp, Homo sapien
catgagatgggattcattatctccc

SEQ ID NO: 2855937 - DNA, 25 bp, Homo sapien
gagagtcctattccatttgtgttgc

SEQ ID NO: 2855938 - DNA, 25 bp, Homo sapien
tcacaagtcatgagatgggattcat

SEQ ID NO: 2855939 - DNA, 25 bp, Homo sapien
tagccagggatgcttgttgtcatgg

SEQ ID NO: 2855940 - DNA, 25 bp, Homo sapien
caggtcgggcctgatcagagacaaa

SEQ ID NO: 2855941 - DNA, 25 bp, Homo sapien
gtccttgcctcctgatgggtagcca

SEQ ID NO: 2855942 - DNA, 25 bp, Homo sapien
catggtaaccctatgaactctgtga

SEQ ID NO: 2855943 - DNA, 25 bp, Homo sapien
cctcctgctgatacacaaattgcat

SEQ ID NO: 2855944 - DNA, 25 bp, Homo sapien
tgctcctcctgctgatacacaaatt

SEQ ID NO: 2855945 - DNA, 25 bp, Homo sapien
tgtgatttgcccactgaagcactgc

SEQ ID NO: 2855946 - DNA, 25 bp, Homo sapien
gatttgcccactgaagcactgctcc

SEQ ID NO: 2855947 - DNA, 25 bp, Homo sapien
aactggcacatgatgctgtgatggg

SEQ ID NO: 2855948 - DNA, 25 bp, Homo sapien
tgggataatatcgtgcaagagagtg

SEQ ID NO: 2855949 - DNA, 25 bp, Homo sapien
gagagtgatgtccatgacccacaga

SEQ ID NO: 2855950 - DNA, 25 bp, Homo sapien
gggaaaacctgagcatgaacacaga

SEQ ID NO: 2855951 - DNA, 25 bp, Homo sapien
ggcctttggcgataaatattgccat

SEQ ID NO: 2855952 - DNA, 25 bp, Homo sapien
tgaggcctttggcgataaatattgc

SEQ ID NO: 2855953 - DNA, 25 bp, Homo sapien
gaggcctttggcgataaatattgcc

SEQ ID NO: 2855954 - DNA, 25 bp, Homo sapien
tgtgaggcctttggcgataaatatt

SEQ ID NO: 2855955 - DNA, 25 bp, Homo sapien
tggctgtggaaaggggttggctgtc

SEQ ID NO: 2855956 - DNA, 25 bp, Homo sapien
agttggtccccatccaaaagttcag

SEQ ID NO: 2855957 - DNA, 25 bp, Homo sapien
tgtggaaaggggttggctgtctggg

SEQ ID NO: 2855958 - DNA, 25 bp, Homo sapien
cattttccatgctaaagcccagcag

SEQ ID NO: 2855959 - DNA, 25 bp, Homo sapien
cctgaaaggctaaaagggcagaagg

SEQ ID NO: 2855960 - DNA, 25 bp, Homo sapien
agcccctgaaaggctaaaagggcag

SEQ ID NO: 2855961 - DNA, 25 bp, Homo sapien
ttgtgcaccacaggagaaacagttt

SEQ ID NO: 2855962 - DNA, 25 bp, Homo sapien
tgaaaggctaaaagggcagaaggga

SEQ ID NO: 2855963 - DNA, 25 bp, Homo sapien
ttaatcagctatggcaagggaagca

SEQ ID NO: 2855964 - DNA, 25 bp, Homo sapien
agggaagcaggatccgacagtatgg

SEQ ID NO: 2855965 - DNA, 25 bp, Homo sapien
atccgacagtatgggagtggctgct

SEQ ID NO: 2855966 - DNA, 25 bp, Homo sapien
gttagctcatccgacataaagagac

SEQ ID NO: 2855967 - DNA, 25 bp, Homo sapien
ggccaggtcctcctcctccctctcc

SEQ ID NO: 2855968 - DNA, 25 bp, Homo sapien
ccaggtcctcctcctccctctccat

SEQ ID NO: 2855969 - DNA, 25 bp, Homo sapien
ctggccaggtcctcctcctccctct

SEQ ID NO: 2855970 - DNA, 25 bp, Homo sapien
atagtgaaggtcctggccaggtcct

SEQ ID NO: 2855971 - DNA, 25 bp, Homo sapien
tgttgcaaatagaaggccactcgtg

SEQ ID NO: 2855972 - DNA, 25 bp, Homo sapien
ccagccaaggaaggatgcatgttct

SEQ ID NO: 2855973 - DNA, 25 bp, Homo sapien
aaagtccctcatgcctgataagaag

SEQ ID NO: 2855974 - DNA, 25 bp, Homo sapien
caaagtaaccatgggagcttccccg

SEQ ID NO: 2855975 - DNA, 25 bp, Homo sapien
tcaggattctgctcccttgctgggc

SEQ ID NO: 2855976 - DNA, 25 bp, Homo sapien
tgggctcctgccctttgtgtccagg

SEQ ID NO: 2855977 - DNA, 25 bp, Homo sapien
tcttgggccagcaggactgagtcca

SEQ ID NO: 2855978 - DNA, 25 bp, Homo sapien
agcccctgcccgctcaggattctgc

SEQ ID NO: 2855979 - DNA, 25 bp, Homo sapien
ttccaaatctaccaccggatggctc

SEQ ID NO: 2855980 - DNA, 25 bp, Homo sapien
aatctaccaccggatggctctaggg

SEQ ID NO: 2855981 - DNA, 25 bp, Homo sapien
tcccaacctggaagattgtgaggta

SEQ ID NO: 2855982 - DNA, 25 bp, Homo sapien
gaggtaacagcaccagcttagcaaa

SEQ ID NO: 2855983 - DNA, 25 bp, Homo sapien
tagatccatggataggtgccaaaac

SEQ ID NO: 2855984 - DNA, 25 bp, Homo sapien
cagtagatccatggataggtgccaa

SEQ ID NO: 2855985 - DNA, 25 bp, Homo sapien
ctttcagtagatccatggataggtg

SEQ ID NO: 2855986 - DNA, 25 bp, Homo sapien
gatccatggataggtgccaaaacca

SEQ ID NO: 2855987 - DNA, 25 bp, Homo sapien
tcaagctctgagaatctcagcagct

SEQ ID NO: 2855988 - DNA, 25 bp, Homo sapien
ctgtgggctccaccactctcaacca

SEQ ID NO: 2855989 - DNA, 25 bp, Homo sapien
tgctgtgggctccaccactctcaac

SEQ ID NO: 2855990 - DNA, 25 bp, Homo sapien
agctgctgtgggctccaccactctc

SEQ ID NO: 2855991 - DNA, 25 bp, Homo sapien
cagggtctagcaccttgtaggtgct

SEQ ID NO: 2855992 - DNA, 25 bp, Homo sapien
aagagtaggttctgattccctcagg

SEQ ID NO: 2855993 - DNA, 25 bp, Homo sapien
aaacagatcccagtccaagagtagg

SEQ ID NO: 2855994 - DNA, 25 bp, Homo sapien
tccgtggttgcatcctccctttgtc

SEQ ID NO: 2855995 - DNA, 25 bp, Homo sapien
aaaggaactaattttgagaagtgat

SEQ ID NO: 2855996 - DNA, 25 bp, Homo sapien
taaaaacaccgagcaattgtgggca

SEQ ID NO: 2855997 - DNA, 25 bp, Homo sapien
ggttcagatagtgctttctcaaaga

SEQ ID NO: 2855998 - DNA, 25 bp, Homo sapien
acttcgttatctaatgggttcagat

SEQ ID NO: 2855999 - DNA, 25 bp, Homo sapien
caaaccaaccactgggagttggcgg

SEQ ID NO: 2856000 - DNA, 25 bp, Homo sapien
cagagagtttgttccaagaagattg

SEQ ID NO: 2856001 - DNA, 25 bp, Homo sapien
ttggctgaggaatagagtcatctcc

SEQ ID NO: 2856002 - DNA, 25 bp, Homo sapien
aaccactgggagttggcggctttgt

SEQ ID NO: 2856003 - DNA, 25 bp, Homo sapien
ataactctgttgctgtcctattcca

SEQ ID NO: 2856004 - DNA, 25 bp, Homo sapien
ggataactctgttgctgtcctattc

SEQ ID NO: 2856005 - DNA, 25 bp, Homo sapien
ttaggataactctgttgctgtccta

SEQ ID NO: 2856006 - DNA, 25 bp, Homo sapien
taggataactctgttgctgtcctat

SEQ ID NO: 2856007 - DNA, 25 bp, Homo sapien
cactggatggcaggcaatgctgcaa

SEQ ID NO: 2856008 - DNA, 25 bp, Homo sapien
agcctcaaaattctcaggtcacact

SEQ ID NO: 2856009 - DNA, 25 bp, Homo sapien
tgctgctgtccgtctcactgccttt

SEQ ID NO: 2856010 - DNA, 25 bp, Homo sapien
gctgctgtccgtctcactgcctttg

SEQ ID NO: 2856011 - DNA, 25 bp, Homo sapien
cagctgctatcagatactttccaga

SEQ ID NO: 2856012 - DNA, 25 bp, Homo sapien
gcgtgataaaggtagaaggagggag

SEQ ID NO: 2856013 - DNA, 25 bp, Homo sapien
aaacagctgctatcagatactttcc

SEQ ID NO: 2856014 - DNA, 25 bp, Homo sapien
agagagcgtgataaaggtagaagga

SEQ ID NO: 2856015 - DNA, 25 bp, Homo sapien
caagacatccatacgggctggtggc

SEQ ID NO: 2856016 - DNA, 25 bp, Homo sapien
taggatcagcccgacctgggcagcg

SEQ ID NO: 2856017 - DNA, 25 bp, Homo sapien
ctgggcagcgcagtcactccagcaa

SEQ ID NO: 2856018 - DNA, 25 bp, Homo sapien
ggctggtggctatgaccaataagcc

SEQ ID NO: 2856019 - DNA, 25 bp, Homo sapien
tgactgttctgacccagtaggggtc

SEQ ID NO: 2856020 - DNA, 25 bp, Homo sapien
ctcctgactgttctgacccagtagg

SEQ ID NO: 2856021 - DNA, 25 bp, Homo sapien
actgttctgacccagtaggggtcca

SEQ ID NO: 2856022 - DNA, 25 bp, Homo sapien
tcctgactgttctgacccagtaggg

SEQ ID NO: 2856023 - DNA, 25 bp, Homo sapien
tccgcggcgtcttcttgtaatcatc

SEQ ID NO: 2856024 - DNA, 25 bp, Homo sapien
cctcacggaggttactctgcagctt

SEQ ID NO: 2856025 - DNA, 25 bp, Homo sapien
tcacggaggttactctgcagcttcc

SEQ ID NO: 2856026 - DNA, 25 bp, Homo sapien
ttctctttccgcggcgtcttcttgt

SEQ ID NO: 2856027 - DNA, 25 bp, Homo sapien
cagatttctggcaactctggagata

SEQ ID NO: 2856028 - DNA, 25 bp, Homo sapien
acattttctgtagatcctaatccag

SEQ ID NO: 2856029 - DNA, 25 bp, Homo sapien
gagatagtttcctgctgataagccc

SEQ ID NO: 2856030 - DNA, 25 bp, Homo sapien
tgtagatcctaatccagatttctgg

SEQ ID NO: 2856031 - DNA, 25 bp, Homo sapien
aggaaatatctttactgtctgctga

SEQ ID NO: 2856032 - DNA, 25 bp, Homo sapien
aaacgagggtttcatccactgtgtg

SEQ ID NO: 2856033 - DNA, 25 bp, Homo sapien
tgctgagaagttattgcctggtcca

SEQ ID NO: 2856034 - DNA, 25 bp, Homo sapien
ggtttcatccactgtgtgagattcc

SEQ ID NO: 2856035 - DNA, 25 bp, Homo sapien
catcagcaagaactggccagaagct

SEQ ID NO: 2856036 - DNA, 25 bp, Homo sapien
tcagcaagaactggccagaagctgg

SEQ ID NO: 2856037 - DNA, 25 bp, Homo sapien
ttgcctgcatcagcaagaactggcc

SEQ ID NO: 2856038 - DNA, 25 bp, Homo sapien
cctgcatcagcaagaactggccaga

SEQ ID NO: 2856039 - DNA, 25 bp, Homo sapien
cactgggtactggaaatatgagtga

SEQ ID NO: 2856040 - DNA, 25 bp, Homo sapien
ggtactggaaatatgagtgactgca

SEQ ID NO: 2856041 - DNA, 25 bp, Homo sapien
gaatgcactgggtactggaaatatg

SEQ ID NO: 2856042 - DNA, 25 bp, Homo sapien
tactggaaatatgagtgactgcatc

SEQ ID NO: 2856043 - DNA, 25 bp, Homo sapien
tgctttttgagaggagccagtctga

SEQ ID NO: 2856044 - DNA, 25 bp, Homo sapien
agaggagccagtctgagccacactt

SEQ ID NO: 2856045 - DNA, 25 bp, Homo sapien
agtctgagccacacttgccaccatt

SEQ ID NO: 2856046 - DNA, 25 bp, Homo sapien
accattcctgcttccgggtgctcat

SEQ ID NO: 2856047 - DNA, 25 bp, Homo sapien
cctagtggctgtagatactctgtcc

SEQ ID NO: 2856048 - DNA, 25 bp, Homo sapien
tgtcctttctatgccaactcctagt

SEQ ID NO: 2856049 - DNA, 25 bp, Homo sapien
gtagatactctgtccagatgctccc

SEQ ID NO: 2856050 - DNA, 25 bp, Homo sapien
ggcaagcatgacttgtcaccacact

SEQ ID NO: 2856051 - DNA, 25 bp, Homo sapien
tcaaatggagatatcaatagcaact

SEQ ID NO: 2856052 - DNA, 25 bp, Homo sapien
ataaaatagctctccctcaaaaagg

SEQ ID NO: 2856053 - DNA, 25 bp, Homo sapien
gcagtaggaacccacaagatcttgt

SEQ ID NO: 2856054 - DNA, 25 bp, Homo sapien
tgtacacctagcactgatttcagat

SEQ ID NO: 2856055 - DNA, 25 bp, Homo sapien
gggcctttcatcatttcactagtgg

SEQ ID NO: 2856056 - DNA, 25 bp, Homo sapien
tctatgtctactggatcaaggaatc

SEQ ID NO: 2856057 - DNA, 25 bp, Homo sapien
taaggatttaaagctgccaaactgc

SEQ ID NO: 2856058 - DNA, 25 bp, Homo sapien
caaactgccattgtacaagaggctg

SEQ ID NO: 2856059 - DNA, 25 bp, Homo sapien
ttccttgcttactaactgactcctg

SEQ ID NO: 2856060 - DNA, 25 bp, Homo sapien
tgccccaaagaagattacgtagaaa

SEQ ID NO: 2856061 - DNA, 25 bp, Homo sapien
gatattagggctcgtgtttacaaaa

SEQ ID NO: 2856062 - DNA, 25 bp, Homo sapien
aacattgtagtgctgttggtatacc

SEQ ID NO: 2856063 - DNA, 25 bp, Homo sapien
aaacagcttcaacattcctttggag

SEQ ID NO: 2856064 - DNA, 25 bp, Homo sapien
gcttttaggaagacgacagcttaat

SEQ ID NO: 2856065 - DNA, 25 bp, Homo sapien
tatcctgcatatatggtagacacga

SEQ ID NO: 2856066 - DNA, 25 bp, Homo sapien
catttctaaaggactatggcccact

SEQ ID NO: 2856067 - DNA, 25 bp, Homo sapien
tagagtagggttcagctatgacatg

SEQ ID NO: 2856068 - DNA, 25 bp, Homo sapien
gaatccagtagagtagggttcagct

SEQ ID NO: 2856069 - DNA, 25 bp, Homo sapien
tggccttgaatccagtagagtaggg

SEQ ID NO: 2856070 - DNA, 25 bp, Homo sapien
cagctatgacatgaagtgtgtcatc

SEQ ID NO: 2856071 - DNA, 25 bp, Homo sapien
gataaagggtaatcatcacagagtt

SEQ ID NO: 2856072 - DNA, 25 bp, Homo sapien
agtctacaagtttctcctcaatgcc

SEQ ID NO: 2856073 - DNA, 25 bp, Homo sapien
tcatgtgataaagggtaatcatcac

SEQ ID NO: 2856074 - DNA, 25 bp, Homo sapien
tcacatggctataatagtctacaag

SEQ ID NO: 2856075 - DNA, 25 bp, Homo sapien
ttcaatcaaacactgaaggcaacaa

SEQ ID NO: 2856076 - DNA, 25 bp, Homo sapien
ttttgcctgagtgtcccactaatct

SEQ ID NO: 2856077 - DNA, 25 bp, Homo sapien
tttatgaattacaacaactggaaag

SEQ ID NO: 2856078 - DNA, 25 bp, Homo sapien
caaccagttatatccatgggctgca

SEQ ID NO: 2856079 - DNA, 25 bp, Homo sapien
ttccttggccgtcacaagtcccagg

SEQ ID NO: 2856080 - DNA, 25 bp, Homo sapien
aggtggcattccttggccgtcacaa

SEQ ID NO: 2856081 - DNA, 25 bp, Homo sapien
tcccaggtcaaaacgtctccattct

SEQ ID NO: 2856082 - DNA, 25 bp, Homo sapien
agtcccaggtcaaaacgtctccatt

SEQ ID NO: 2856083 - DNA, 25 bp, Homo sapien
ttctaacaaaggtttctggccctgc

SEQ ID NO: 2856084 - DNA, 25 bp, Homo sapien
tcaatgttctaacaaaggtttctgg

SEQ ID NO: 2856085 - DNA, 25 bp, Homo sapien
caatgttctaacaaaggtttctggc

SEQ ID NO: 2856086 - DNA, 25 bp, Homo sapien
aatcttgttctcaatgagagagatc

SEQ ID NO: 2856087 - DNA, 25 bp, Homo sapien
gattcaatcttgttctcaatgagag

SEQ ID NO: 2856088 - DNA, 25 bp, Homo sapien
tctgtgtgattcaatcttgttctca

SEQ ID NO: 2856089 - DNA, 25 bp, Homo sapien
tcatgtctgtgtgattcaatcttgt

SEQ ID NO: 2856090 - DNA, 25 bp, Homo sapien
agtagctgaaaggcgtcctggatgt

SEQ ID NO: 2856091 - DNA, 25 bp, Homo sapien
tagctgaaaggcgtcctggatgtag

SEQ ID NO: 2856092 - DNA, 25 bp, Homo sapien
gtagctgaaaggcgtcctggatgta

SEQ ID NO: 2856093 - DNA, 25 bp, Homo sapien
gctgaaaggcgtcctggatgtagga

SEQ ID NO: 2856094 - DNA, 25 bp, Homo sapien
agtactaagtaatgacaatctactg

SEQ ID NO: 2856095 - DNA, 25 bp, Homo sapien
aagctgtcaaggattagtactaagt

SEQ ID NO: 2856096 - DNA, 25 bp, Homo sapien
tttcagcccttcatgtttaccagct

SEQ ID NO: 2856097 - DNA, 25 bp, Homo sapien
ttcattactgtgaaccgtccattaa

SEQ ID NO: 2856098 - DNA, 25 bp, Homo sapien
tgcagtgattaatgggttaaggaca

SEQ ID NO: 2856099 - DNA, 25 bp, Homo sapien
tactgcagtgattaatgggttaagg

SEQ ID NO: 2856100 - DNA, 25 bp, Homo sapien
ctgcagtgattaatgggttaaggac

SEQ ID NO: 2856101 - DNA, 25 bp, Homo sapien
atactgcagtgattaatgggttaag

SEQ ID NO: 2856102 - DNA, 25 bp, Homo sapien
tgtgctatccatattgacagtgtat

SEQ ID NO: 2856103 - DNA, 25 bp, Homo sapien
taacagtaagtggagtacgatcaca

SEQ ID NO: 2856104 - DNA, 25 bp, Homo sapien
gtgagcagagtaggttaaataacag

SEQ ID NO: 2856105 - DNA, 25 bp, Homo sapien
cacagaagtctggactgagagcaaa

SEQ ID NO: 2856106 - DNA, 25 bp, Homo sapien
cccagcagttgttaggcaggtagtg

SEQ ID NO: 2856107 - DNA, 25 bp, Homo sapien
cagttgttaggcaggtagtgaactc

SEQ ID NO: 2856108 - DNA, 25 bp, Homo sapien
taggcaggtagtgaactctttagac

SEQ ID NO: 2856109 - DNA, 25 bp, Homo sapien
gaactctttagacagagaggacaac

SEQ ID NO: 2856110 - DNA, 25 bp, Homo sapien
gcatatccacagaacccactcatta

SEQ ID NO: 2856111 - DNA, 25 bp, Homo sapien
tcaagggagtaaatacagtatcccc

SEQ ID NO: 2856112 - DNA, 25 bp, Homo sapien
tgtcagaagagaacaaatcacttct

SEQ ID NO: 2856113 - DNA, 25 bp, Homo sapien
tcagactgactgttgtgttatcaca

SEQ ID NO: 2856114 - DNA, 25 bp, Homo sapien
tgccatgcagaaccaatgcagctgt

SEQ ID NO: 2856115 - DNA, 25 bp, Homo sapien
gccaggctccggattgcaaacgcat

SEQ ID NO: 2856116 - DNA, 25 bp, Homo sapien
aatagttcaattgagcaggcagtca

SEQ ID NO: 2856117 - DNA, 25 bp, Homo sapien
tccggattgcaaacgcatggatatc

SEQ ID NO: 2856118 - DNA, 25 bp, Homo sapien
agagacttcctgatccattcgtggg

SEQ ID NO: 2856119 - DNA, 25 bp, Homo sapien
tgatccattcgtgggcggtatttct

SEQ ID NO: 2856120 - DNA, 25 bp, Homo sapien
gctaatggcttggtcagagacttcc

SEQ ID NO: 2856121 - DNA, 25 bp, Homo sapien
gctcagtattttctgcttccgactg

SEQ ID NO: 2856122 - DNA, 25 bp, Homo sapien
ggcaagtttctctggtttggaggaa

SEQ ID NO: 2856123 - DNA, 25 bp, Homo sapien
ctgttatgtccttggtaaaatcttc

SEQ ID NO: 2856124 - DNA, 25 bp, Homo sapien
gggaaaacagctctgttatgtcctt

SEQ ID NO: 2856125 - DNA, 25 bp, Homo sapien
tttggaggaaacgtgcagctgggaa

SEQ ID NO: 2856126 - DNA, 25 bp, Homo sapien
aacccatagtgggatgcatataccc

SEQ ID NO: 2856127 - DNA, 25 bp, Homo sapien
gatacaagggatgaatctgaaccca

SEQ ID NO: 2856128 - DNA, 25 bp, Homo sapien
tgtctgaatgtgaaacactgcttag

SEQ ID NO: 2856129 - DNA, 25 bp, Homo sapien
gcatatacccaaagaggttcacaaa

SEQ ID NO: 2856130 - DNA, 25 bp, Homo sapien
ttcaagggcaatgcactgcatacaa

SEQ ID NO: 2856131 - DNA, 25 bp, Homo sapien
catacaaacacactgcatcctctcc

SEQ ID NO: 2856132 - DNA, 25 bp, Homo sapien
tctccactcagatactaaattttca

SEQ ID NO: 2856133 - DNA, 25 bp, Homo sapien
tttcaagggcaatgcactgcataca

SEQ ID NO: 2856134 - DNA, 25 bp, Homo sapien
aacttttagagtctctaattcttct

SEQ ID NO: 2856135 - DNA, 25 bp, Homo sapien
acttttagagtctctaattcttctc

SEQ ID NO: 2856136 - DNA, 25 bp, Homo sapien
tcagagaattaaggatagatttcac

SEQ ID NO: 2856137 - DNA, 25 bp, Homo sapien
caacttttagagtctctaattcttc

SEQ ID NO: 2856138 - DNA, 25 bp, Homo sapien
tcatcagccagcacaagttattcct

SEQ ID NO: 2856139 - DNA, 25 bp, Homo sapien
taagaaccttaacacaagaggctgg

SEQ ID NO: 2856140 - DNA, 25 bp, Homo sapien
ggtagggagactctgtgcttctaaa

SEQ ID NO: 2856141 - DNA, 25 bp, Homo sapien
agtcaaaattatgagctcatcagcc

SEQ ID NO: 2856142 - DNA, 25 bp, Homo sapien
tctccagagcttctagatgtgaaag

SEQ ID NO: 2856143 - DNA, 25 bp, Homo sapien
cttgtctgtttccacggtaacctca

SEQ ID NO: 2856144 - DNA, 25 bp, Homo sapien
tatttcactttcttgggaaagcatc

SEQ ID NO: 2856145 - DNA, 25 bp, Homo sapien
cctcattggaggtccgtatctcttc

SEQ ID NO: 2856146 - DNA, 25 bp, Homo sapien
taaaaagagatggaggcattacact

SEQ ID NO: 2856147 - DNA, 25 bp, Homo sapien
aaaaagagatggaggcattacactg

SEQ ID NO: 2856148 - DNA, 25 bp, Homo sapien
ctaaaaagagatggaggcattacac

SEQ ID NO: 2856149 - DNA, 25 bp, Homo sapien
aatccaggatccccttctgctatca

SEQ ID NO: 2856150 - DNA, 25 bp, Homo sapien
tttcggttcatcagacccttggttc

SEQ ID NO: 2856151 - DNA, 25 bp, Homo sapien
aatgaattctaaggcatccaaaccc

SEQ ID NO: 2856152 - DNA, 25 bp, Homo sapien
ctgagatagtgtagcatttcggttc

SEQ ID NO: 2856153 - DNA, 25 bp, Homo sapien
cctatgatggtggaagtcaggatta

SEQ ID NO: 2856154 - DNA, 25 bp, Homo sapien
tcctcatgtagcaaagatatttagc

SEQ ID NO: 2856155 - DNA, 25 bp, Homo sapien
caatgctcaccaactgtggaatgaa

SEQ ID NO: 2856156 - DNA, 25 bp, Homo sapien
tgcaggcaaaattaacctatgatgg

SEQ ID NO: 2856157 - DNA, 25 bp, Homo sapien
tagagaatacaccaaatgccccagc

SEQ ID NO: 2856158 - DNA, 25 bp, Homo sapien
ctgaacagcagtagagatggtagag

SEQ ID NO: 2856159 - DNA, 25 bp, Homo sapien
gatggtagagaatacaccaaatgcc

SEQ ID NO: 2856160 - DNA, 25 bp, Homo sapien
ctctgaacagcagtagagatggtag

SEQ ID NO: 2856161 - DNA, 25 bp, Homo sapien
gggaggagttttcattctctttggc

SEQ ID NO: 2856162 - DNA, 25 bp, Homo sapien
ctggggaggagttttcattctcttt

SEQ ID NO: 2856163 - DNA, 25 bp, Homo sapien
aggagttttcattctctttggcatt

SEQ ID NO: 2856164 - DNA, 25 bp, Homo sapien
gagttttcattctctttggcatttg

SEQ ID NO: 2856165 - DNA, 25 bp, Homo sapien
gctacatacttgacttcagttgaaa

SEQ ID NO: 2856166 - DNA, 25 bp, Homo sapien
tacatacttgacttcagttgaaatt

SEQ ID NO: 2856167 - DNA, 25 bp, Homo sapien
ctacatacttgacttcagttgaaat

SEQ ID NO: 2856168 - DNA, 25 bp, Homo sapien
tctctgccttctcgatgacatttga

SEQ ID NO: 2856169 - DNA, 25 bp, Homo sapien
tccaagggaagtctctgccttctcg

SEQ ID NO: 2856170 - DNA, 25 bp, Homo sapien
tcgatgacatttgaaatgccttgtc

SEQ ID NO: 2856171 - DNA, 25 bp, Homo sapien
ggaagtctctgccttctcgatgaca

SEQ ID NO: 2856172 - DNA, 25 bp, Homo sapien
tgaggagagtatggacttgccccag

SEQ ID NO: 2856173 - DNA, 25 bp, Homo sapien
tagctactgtagccgaggctgagga

SEQ ID NO: 2856174 - DNA, 25 bp, Homo sapien
tgtagctactgtagccgaggctgag

SEQ ID NO: 2856175 - DNA, 25 bp, Homo sapien
gctgaggagagtatggacttgcccc

SEQ ID NO: 2856176 - DNA, 25 bp, Homo sapien
ctggggtacatctttggaaacatta

SEQ ID NO: 2856177 - DNA, 25 bp, Homo sapien
tggggtacatctttggaaacattat

SEQ ID NO: 2856178 - DNA, 25 bp, Homo sapien
ggggtacatctttggaaacattatc

SEQ ID NO: 2856179 - DNA, 25 bp, Homo sapien
tagggagaacttttgaagtctcaag

SEQ ID NO: 2856180 - DNA, 25 bp, Homo sapien
aatagggagaacttttgaagtctca

SEQ ID NO: 2856181 - DNA, 25 bp, Homo sapien
tgaatagggagaacttttgaagtct

SEQ ID NO: 2856182 - DNA, 25 bp, Homo sapien
agggagaacttttgaagtctcaagg

SEQ ID NO: 2856183 - DNA, 25 bp, Homo sapien
ttccgagtggaaactacaggttctg

SEQ ID NO: 2856184 - DNA, 25 bp, Homo sapien
gactcagaattcttggctggctcac

SEQ ID NO: 2856185 - DNA, 25 bp, Homo sapien
tgatttactctctggtttggcacct

SEQ ID NO: 2856186 - DNA, 25 bp, Homo sapien
tggcaccttggtcaacagactcaga

SEQ ID NO: 2856187 - DNA, 25 bp, Homo sapien
cagattggctttatgtcagatcaac

SEQ ID NO: 2856188 - DNA, 25 bp, Homo sapien
attccttccagatgtagagctcttt

SEQ ID NO: 2856189 - DNA, 25 bp, Homo sapien
gcaattaaagccaagatactattgg

SEQ ID NO: 2856190 - DNA, 25 bp, Homo sapien
caacttttgaataccagtgttactc

SEQ ID NO: 2856191 - DNA, 25 bp, Homo sapien
gaatttaagtgccaaatccagccta

SEQ ID NO: 2856192 - DNA, 25 bp, Homo sapien
tacagtagggagtagttaccatggc

SEQ ID NO: 2856193 - DNA, 25 bp, Homo sapien
ttaaaagatctagcaacaccgggcc

SEQ ID NO: 2856194 - DNA, 25 bp, Homo sapien
taactagcttgtgctaaatagccgc

SEQ ID NO: 2856195 - DNA, 25 bp, Homo sapien
gaagagcagtacagcttagtagcta

SEQ ID NO: 2856196 - DNA, 25 bp, Homo sapien
cttcctgtcctgcagcgattgtggg

SEQ ID NO: 2856197 - DNA, 25 bp, Homo sapien
aaatgaagagcagtacagcttagta

SEQ ID NO: 2856198 - DNA, 25 bp, Homo sapien
cagtacagcttagtagctaagagca

SEQ ID NO: 2856199 - DNA, 25 bp, Homo sapien
tcctcatctgtcaaatggagttctg

SEQ ID NO: 2856200 - DNA, 25 bp, Homo sapien
ctgtctgcctctccgtttcctcatc

SEQ ID NO: 2856201 - DNA, 25 bp, Homo sapien
atctgtcaaatggagttctgggtcc

SEQ ID NO: 2856202 - DNA, 25 bp, Homo sapien
ctcatctgtcaaatggagttctggg

SEQ ID NO: 2856203 - DNA, 25 bp, Homo sapien
ggcgctgacaacgacaagaattcct

SEQ ID NO: 2856204 - DNA, 25 bp, Homo sapien
ttaacagctgctatcacttggtggg

SEQ ID NO: 2856205 - DNA, 25 bp, Homo sapien
gaattcctcacacaaacgtagcgct

SEQ ID NO: 2856206 - DNA, 25 bp, Homo sapien
ggcttggaacagtgaccggcacgta

SEQ ID NO: 2856207 - DNA, 25 bp, Homo sapien
agccacggcagccgactcggcgttc

SEQ ID NO: 2856208 - DNA, 25 bp, Homo sapien
gccacggcagccgactcggcgttcc

SEQ ID NO: 2856209 - DNA, 25 bp, Homo sapien
ccacggcagccgactcggcgttcct

SEQ ID NO: 2856210 - DNA, 25 bp, Homo sapien
acagccacggcagccgactcggcgt

SEQ ID NO: 2856211 - DNA, 25 bp, Homo sapien
acaagcgtagtttaggctttcagcc

SEQ ID NO: 2856212 - DNA, 25 bp, Homo sapien
gatagtgtggtatacccaggtgaga

SEQ ID NO: 2856213 - DNA, 25 bp, Homo sapien
caattatcgtacatagaggcacctc

SEQ ID NO: 2856214 - DNA, 25 bp, Homo sapien
tttaagcttatctcatgggcagtga

SEQ ID NO: 2856215 - DNA, 25 bp, Homo sapien
agtgctatgagctacactgagatgg

SEQ ID NO: 2856216 - DNA, 25 bp, Homo sapien
cctccctgggcccaaatacagcagt

SEQ ID NO: 2856217 - DNA, 25 bp, Homo sapien
gggtatcctgcccacaacgggcctg

SEQ ID NO: 2856218 - DNA, 25 bp, Homo sapien
aatacagcagtttactcttctgaag

SEQ ID NO: 2856219 - DNA, 25 bp, Homo sapien
tatattgcagctccaaatgtagcct

SEQ ID NO: 2856220 - DNA, 25 bp, Homo sapien
tccatagcattcttccttggtggca

SEQ ID NO: 2856221 - DNA, 25 bp, Homo sapien
tatgtgagcagagaatgggcaatgc

SEQ ID NO: 2856222 - DNA, 25 bp, Homo sapien
gattctgtatcttagggcacctttc

SEQ ID NO: 2856223 - DNA, 25 bp, Homo sapien
atgtacctctttacttgatgaagat

SEQ ID NO: 2856224 - DNA, 25 bp, Homo sapien
tcaatgtacctctttacttgatgaa

SEQ ID NO: 2856225 - DNA, 25 bp, Homo sapien
aatgtacctctttacttgatgaaga

SEQ ID NO: 2856226 - DNA, 25 bp, Homo sapien
caatgtacctctttacttgatgaag

SEQ ID NO: 2856227 - DNA, 25 bp, Homo sapien
ttaatggaatctgtcaggctgtgcc

SEQ ID NO: 2856228 - DNA, 25 bp, Homo sapien
tggcaacaaaggagcggttgtgttt

SEQ ID NO: 2856229 - DNA, 25 bp, Homo sapien
aagaggtagggagtacatctgagca

SEQ ID NO: 2856230 - DNA, 25 bp, Homo sapien
agtacatctgagcatcaaggctggc

SEQ ID NO: 2856231 - DNA, 25 bp, Homo sapien
tacatcactacaagcatggtcaggt

SEQ ID NO: 2856232 - DNA, 25 bp, Homo sapien
cgggttgttccaggcagtaaacagc

SEQ ID NO: 2856233 - DNA, 25 bp, Homo sapien
tgcagacatgtacatcactacaagc

SEQ ID NO: 2856234 - DNA, 25 bp, Homo sapien
caagcatggtcaggttgagtgcccg

SEQ ID NO: 2856235 - DNA, 25 bp, Homo sapien
tgatggccacaagaggccgctgttg

SEQ ID NO: 2856236 - DNA, 25 bp, Homo sapien
ggccgctgttgtgtcgtggaatgga

SEQ ID NO: 2856237 - DNA, 25 bp, Homo sapien
cacaagaggccgctgttgtgtcgtg

SEQ ID NO: 2856238 - DNA, 25 bp, Homo sapien
ccgctgttgtgtcgtggaatggaca

SEQ ID NO: 2856239 - DNA, 25 bp, Homo sapien
gcagagttttgagtgggaacagcag

SEQ ID NO: 2856240 - DNA, 25 bp, Homo sapien
cttggagctctcttttaatccatct

SEQ ID NO: 2856241 - DNA, 25 bp, Homo sapien
gagctctcttttaatccatctctcc

SEQ ID NO: 2856242 - DNA, 25 bp, Homo sapien
gctctcttttaatccatctctcctt

SEQ ID NO: 2856243 - DNA, 25 bp, Homo sapien
tggagctctcttttaatccatctct

SEQ ID NO: 2856244 - DNA, 25 bp, Homo sapien
aatgctgtctaggtaaatggtaata

SEQ ID NO: 2856245 - DNA, 25 bp, Homo sapien
tggtgccagatgtaatgggtttctt

SEQ ID NO: 2856246 - DNA, 25 bp, Homo sapien
tgatggtggtgccagatgtaatggg

SEQ ID NO: 2856247 - DNA, 25 bp, Homo sapien
tttcttacaatgctgtctaggtaaa

SEQ ID NO: 2856248 - DNA, 25 bp, Homo sapien
tgctttctctctcttgccattccca

SEQ ID NO: 2856249 - DNA, 25 bp, Homo sapien
ctctcttgccattcccattgagcat

SEQ ID NO: 2856250 - DNA, 25 bp, Homo sapien
tttctctctcttgccattcccattg

SEQ ID NO: 2856251 - DNA, 25 bp, Homo sapien
tctctctcttgccattcccattgag

SEQ ID NO: 2856252 - DNA, 25 bp, Homo sapien
ctatttctttacatggttggcccca

SEQ ID NO: 2856253 - DNA, 25 bp, Homo sapien
cataattctggactgatagcaccga

SEQ ID NO: 2856254 - DNA, 25 bp, Homo sapien
gcctatgtgttccaccctcttcaaa

SEQ ID NO: 2856255 - DNA, 25 bp, Homo sapien
gtaagatgaattgcaggacagctgg

SEQ ID NO: 2856256 - DNA, 25 bp, Homo sapien
attcaggcaatgagctacacatgtc

SEQ ID NO: 2856257 - DNA, 25 bp, Homo sapien
gcaatgagctacacatgtccatccc

SEQ ID NO: 2856258 - DNA, 25 bp, Homo sapien
caggcaatgagctacacatgtccat

SEQ ID NO: 2856259 - DNA, 25 bp, Homo sapien
ttcaggcaatgagctacacatgtcc

SEQ ID NO: 2856260 - DNA, 25 bp, Homo sapien
aaagaaccacatgaattgtcagaag

SEQ ID NO: 2856261 - DNA, 25 bp, Homo sapien
aagaaccacatgaattgtcagaagc

SEQ ID NO: 2856262 - DNA, 25 bp, Homo sapien
tgctcccctggcgatttccataaga

SEQ ID NO: 2856263 - DNA, 25 bp, Homo sapien
ggacagtacagcctttgagctgagc

SEQ ID NO: 2856264 - DNA, 25 bp, Homo sapien
gcaccttggacagcatacaaatgat

SEQ ID NO: 2856265 - DNA, 25 bp, Homo sapien
cataagagtaccacttatcagcacc

SEQ ID NO: 2856266 - DNA, 25 bp, Homo sapien
cttgcaggtgcatgaattgctgcag

SEQ ID NO: 2856267 - DNA, 25 bp, Homo sapien
ccaggggccggatttagagcttgca

SEQ ID NO: 2856268 - DNA, 25 bp, Homo sapien
gagcttgcaggtgcatgaattgctg

SEQ ID NO: 2856269 - DNA, 25 bp, Homo sapien
ccccaggggccggatttagagcttg

SEQ ID NO: 2856270 - DNA, 25 bp, Homo sapien
cattggcagtgtctgcaagtgaaag

SEQ ID NO: 2856271 - DNA, 25 bp, Homo sapien
gcagtgtctgcaagtgaaagcccac

SEQ ID NO: 2856272 - DNA, 25 bp, Homo sapien
catcattggcagtgtctgcaagtga

SEQ ID NO: 2856273 - DNA, 25 bp, Homo sapien
gcccatcattggcagtgtctgcaag

SEQ ID NO: 2856274 - DNA, 25 bp, Homo sapien
ttgctctaggcacccagctggctct

SEQ ID NO: 2856275 - DNA, 25 bp, Homo sapien
taaatgagttagcaatggcacttcc

SEQ ID NO: 2856276 - DNA, 25 bp, Homo sapien
actgctgtggatcaggcagcgtctg

SEQ ID NO: 2856277 - DNA, 25 bp, Homo sapien
ggcacttccctgaatcattgcatca

SEQ ID NO: 2856278 - DNA, 25 bp, Homo sapien
taaatgtgcctaccctgccaatagt

SEQ ID NO: 2856279 - DNA, 25 bp, Homo sapien
cacgccactggttggtgacagcaca

SEQ ID NO: 2856280 - DNA, 25 bp, Homo sapien
tctccccggatagaaccatgtgcat

SEQ ID NO: 2856281 - DNA, 25 bp, Homo sapien
tgaggaatttcaatcaggccagagg

SEQ ID NO: 2856282 - DNA, 25 bp, Homo sapien
cattcaactccttggctgttgccat

SEQ ID NO: 2856283 - DNA, 25 bp, Homo sapien
ctggtttgcagaagcatgagtagga

SEQ ID NO: 2856284 - DNA, 25 bp, Homo sapien
ggaggaacagaaccaagaggcaaac

SEQ ID NO: 2856285 - DNA, 25 bp, Homo sapien
gctccctgagcccatcagcagcttc

SEQ ID NO: 2856286 - DNA, 25 bp, Homo sapien
tgcttccctgctggtttgcagaagc

SEQ ID NO: 2856287 - DNA, 25 bp, Homo sapien
ctgtatggctgacatctaacttaaa

SEQ ID NO: 2856288 - DNA, 25 bp, Homo sapien
cgctgtatggctgacatctaactta

SEQ ID NO: 2856289 - DNA, 25 bp, Homo sapien
gtcgctgtatggctgacatctaact

SEQ ID NO: 2856290 - DNA, 25 bp, Homo sapien
atgtcgctgtatggctgacatctaa

SEQ ID NO: 2856291 - DNA, 25 bp, Homo sapien
gaattgtacgtattagctccttaga

SEQ ID NO: 2856292 - DNA, 25 bp, Homo sapien
tccttagagacacccagaggactta

SEQ ID NO: 2856293 - DNA, 25 bp, Homo sapien
cccagaggacttagttcaatagact

SEQ ID NO: 2856294 - DNA, 25 bp, Homo sapien
gctttcttgtagataagccttctga

SEQ ID NO: 2856295 - DNA, 25 bp, Homo sapien
ggctgctcaagttcttgacagagac

SEQ ID NO: 2856296 - DNA, 25 bp, Homo sapien
ccatttgtctcccgcccagagggtc

SEQ ID NO: 2856297 - DNA, 25 bp, Homo sapien
tcctgacaggggagtttccagggac

SEQ ID NO: 2856298 - DNA, 25 bp, Homo sapien
tttgtctcccgcccagagggtcctg

SEQ ID NO: 2856299 - DNA, 25 bp, Homo sapien
ttccttgcagttagacctagaagcg

SEQ ID NO: 2856300 - DNA, 25 bp, Homo sapien
caagccctgcttcatgaattcattc

SEQ ID NO: 2856301 - DNA, 25 bp, Homo sapien
tagaagcgacttctctggacccact

SEQ ID NO: 2856302 - DNA, 25 bp, Homo sapien
agtgcagacccctcgttggcagcaa

SEQ ID NO: 2856303 - DNA, 25 bp, Homo sapien
cggagtccggctccacggccctccg

SEQ ID NO: 2856304 - DNA, 25 bp, Homo sapien
gtcggagtccggctccacggccctc

SEQ ID NO: 2856305 - DNA, 25 bp, Homo sapien
agtccggctccacggccctccgcat

SEQ ID NO: 2856306 - DNA, 25 bp, Homo sapien
cgtcggagtccggctccacggccct

SEQ ID NO: 2856307 - DNA, 25 bp, Homo sapien
ctggatgagaacagcttaggtcccc

SEQ ID NO: 2856308 - DNA, 25 bp, Homo sapien
tagccactcatgtctctgagagtag

SEQ ID NO: 2856309 - DNA, 25 bp, Homo sapien
aagagagaacctggatgagaacagc

SEQ ID NO: 2856310 - DNA, 25 bp, Homo sapien
caggcacccaggaggtttctagaaa

SEQ ID NO: 2856311 - DNA, 25 bp, Homo sapien
tattggactgccaggacttgggtac

SEQ ID NO: 2856312 - DNA, 25 bp, Homo sapien
cagtgcgacttgaggcctgtctgcc

SEQ ID NO: 2856313 - DNA, 25 bp, Homo sapien
tgacaccgcgcttacagtagcagct

SEQ ID NO: 2856314 - DNA, 25 bp, Homo sapien
gctttcagaccaacttgaggccttg

SEQ ID NO: 2856315 - DNA, 25 bp, Homo sapien
acatcagatcccacaaaaccagacc

SEQ ID NO: 2856316 - DNA, 25 bp, Homo sapien
ccaaagcatcaacatcagatcccac

SEQ ID NO: 2856317 - DNA, 25 bp, Homo sapien
ctgccaaagcatcaacatcagatcc

SEQ ID NO: 2856318 - DNA, 25 bp, Homo sapien
agatcccacaaaaccagacctgccc

SEQ ID NO: 2856319 - DNA, 25 bp, Homo sapien
gaggaatcaggatgtaatttatggc

SEQ ID NO: 2856320 - DNA, 25 bp, Homo sapien
ttatggcgtccacttcttgctgcca

SEQ ID NO: 2856321 - DNA, 25 bp, Homo sapien
tgattctcataacagaaacagggtc

SEQ ID NO: 2856322 - DNA, 25 bp, Homo sapien
tatttatgatcttgcggttggagca

SEQ ID NO: 2856323 - DNA, 25 bp, Homo sapien
aattcctccatggtcctaaactggt

SEQ ID NO: 2856324 - DNA, 25 bp, Homo sapien
gattggcaaagatagagctaggatt

SEQ ID NO: 2856325 - DNA, 25 bp, Homo sapien
gctaggatttggcaggaattcctcc

SEQ ID NO: 2856326 - DNA, 25 bp, Homo sapien
cttcacagccgtgagattggcaaag

SEQ ID NO: 2856327 - DNA, 25 bp, Homo sapien
agtgttatttctccccacgtgcatc

SEQ ID NO: 2856328 - DNA, 25 bp, Homo sapien
gttatttctccccacgtgcatcttc

SEQ ID NO: 2856329 - DNA, 25 bp, Homo sapien
ttaagtgttatttctccccacgtgc

SEQ ID NO: 2856330 - DNA, 25 bp, Homo sapien
tttctccccacgtgcatcttctcct

SEQ ID NO: 2856331 - DNA, 25 bp, Homo sapien
tgtgattattaaacgctgattgagc

SEQ ID NO: 2856332 - DNA, 25 bp, Homo sapien
tgattgagcactggaagtgtctgcg

SEQ ID NO: 2856333 - DNA, 25 bp, Homo sapien
tctgcggtgcttcgaagaactccag

SEQ ID NO: 2856334 - DNA, 25 bp, Homo sapien
ggtcattattaggattattgctgtg

SEQ ID NO: 2856335 - DNA, 25 bp, Homo sapien
tgggaaagcgaaattggcctcataa

SEQ ID NO: 2856336 - DNA, 25 bp, Homo sapien
agcgaaattggcctcataaatagtc

SEQ ID NO: 2856337 - DNA, 25 bp, Homo sapien
gggaaagcgaaattggcctcataaa

SEQ ID NO: 2856338 - DNA, 25 bp, Homo sapien
gaaagcgaaattggcctcataaata

SEQ ID NO: 2856339 - DNA, 25 bp, Homo sapien
catacatcaggcacaggactaggtc

SEQ ID NO: 2856340 - DNA, 25 bp, Homo sapien
cattgctatccttatgggcctgcca

SEQ ID NO: 2856341 - DNA, 25 bp, Homo sapien
gcacaggactaggtcattgctatcc

SEQ ID NO: 2856342 - DNA, 25 bp, Homo sapien
taggtcattgctatccttatgggcc

SEQ ID NO: 2856343 - DNA, 25 bp, Homo sapien
tctggcttaggccactgagggaatg

SEQ ID NO: 2856344 - DNA, 25 bp, Homo sapien
ctatggtctgagtattgcctttggg

SEQ ID NO: 2856345 - DNA, 25 bp, Homo sapien
tctctcttgctaccccacagatcac

SEQ ID NO: 2856346 - DNA, 25 bp, Homo sapien
ctaggcagcagaagcctatggtctg

SEQ ID NO: 2856347 - DNA, 25 bp, Homo sapien
gaagcctatggtctgagtattgcct

SEQ ID NO: 2856348 - DNA, 25 bp, Homo sapien
gcttcaacagatgtctccccaaatt

SEQ ID NO: 2856349 - DNA, 25 bp, Homo sapien
tcccctgaagatccataagatgaat

SEQ ID NO: 2856350 - DNA, 25 bp, Homo sapien
cactgtcacagtgtttgggtgagat

SEQ ID NO: 2856351 - DNA, 25 bp, Homo sapien
tgtgttcttcaatattaggagtagg

SEQ ID NO: 2856352 - DNA, 25 bp, Homo sapien
tgctcctggcttgaacactggccgg

SEQ ID NO: 2856353 - DNA, 25 bp, Homo sapien
tggccggcactgagaacctgattct

SEQ ID NO: 2856354 - DNA, 25 bp, Homo sapien
tcacagatatagaggtgtggcccct

SEQ ID NO: 2856355 - DNA, 25 bp, Homo sapien
gcccagttacttgctgagcatgcag

SEQ ID NO: 2856356 - DNA, 25 bp, Homo sapien
agacttttgcaagttataaaaggag

SEQ ID NO: 2856357 - DNA, 25 bp, Homo sapien
cagacttttgcaagttataaaagga

SEQ ID NO: 2856358 - DNA, 25 bp, Homo sapien
tcagacttttgcaagttataaaagg

SEQ ID NO: 2856359 - DNA, 25 bp, Homo sapien
tactcatgtggtactcattatcaac

SEQ ID NO: 2856360 - DNA, 25 bp, Homo sapien
ggtcccagtagcagtttttgaaatg

SEQ ID NO: 2856361 - DNA, 25 bp, Homo sapien
atgaaaggatctccaatctgtcctg

SEQ ID NO: 2856362 - DNA, 25 bp, Homo sapien
tggtactcattatcaacacccagcc

SEQ ID NO: 2856363 - DNA, 25 bp, Homo sapien
catgtgtaaattaggagagcgctca

SEQ ID NO: 2856364 - DNA, 25 bp, Homo sapien
tcatctgaaagtacctttgggcagg

SEQ ID NO: 2856365 - DNA, 25 bp, Homo sapien
gagcgctcaggctatactgtttgtg

SEQ ID NO: 2856366 - DNA, 25 bp, Homo sapien
ttttccaccctactgaaggcccaga

SEQ ID NO: 2856367 - DNA, 25 bp, Homo sapien
gccatcagttcagcaatccagtgtt

SEQ ID NO: 2856368 - DNA, 25 bp, Homo sapien
aaggttgcctaacccttgctactca

SEQ ID NO: 2856369 - DNA, 25 bp, Homo sapien
caagcttgtagaggaaatagtatcc

SEQ ID NO: 2856370 - DNA, 25 bp, Homo sapien
cttttttggcccagcagcgtcagca

SEQ ID NO: 2856371 - DNA, 25 bp, Homo sapien
aaggaagtcttctcgaatggtgatg

SEQ ID NO: 2856372 - DNA, 25 bp, Homo sapien
tgtcggagaccctgagaactaggag

SEQ ID NO: 2856373 - DNA, 25 bp, Homo sapien
aataatgtggccttggtgatgctga

SEQ ID NO: 2856374 - DNA, 25 bp, Homo sapien
gagtttggctcgaggagtagaaaac

SEQ ID NO: 2856375 - DNA, 25 bp, Homo sapien
tcatgattcatgtggtagagcaagc

SEQ ID NO: 2856376 - DNA, 25 bp, Homo sapien
aatgaatgacgggagtctgcacccg

SEQ ID NO: 2856377 - DNA, 25 bp, Homo sapien
tcaggttatggcgagagcggtaccc

SEQ ID NO: 2856378 - DNA, 25 bp, Homo sapien
gattagtgccccagagatactcaga

SEQ ID NO: 2856379 - DNA, 25 bp, Homo sapien
cccctgcatatctgtttagaaatgt

SEQ ID NO: 2856380 - DNA, 25 bp, Homo sapien
catgaagtgactgccatttttatcc

SEQ ID NO: 2856381 - DNA, 25 bp, Homo sapien
tctttagcagcatcaacatataggc

SEQ ID NO: 2856382 - DNA, 25 bp, Homo sapien
aatgcctggacgttgcactgtgcac

SEQ ID NO: 2856383 - DNA, 25 bp, Homo sapien
gcctcttgggctggatgaaacacta

SEQ ID NO: 2856384 - DNA, 25 bp, Homo sapien
tgaaacactaggtatctcttgcttt

SEQ ID NO: 2856385 - DNA, 25 bp, Homo sapien
tcagcctcttgggctggatgaaaca

SEQ ID NO: 2856386 - DNA, 25 bp, Homo sapien
aacactaggtatctcttgctttgac

SEQ ID NO: 2856387 - DNA, 25 bp, Homo sapien
ccatcttctccacggtggcataggt

SEQ ID NO: 2856388 - DNA, 25 bp, Homo sapien
tccttaccacacaatctctgaccat

SEQ ID NO: 2856389 - DNA, 25 bp, Homo sapien
tctccacggtggcataggtggcaaa

SEQ ID NO: 2856390 - DNA, 25 bp, Homo sapien
tgcatccatcttctccacggtggca

SEQ ID NO: 2856391 - DNA, 25 bp, Homo sapien
cacagaaaattctgtcggacagccc

SEQ ID NO: 2856392 - DNA, 25 bp, Homo sapien
gccctactctagagacaagtgtgga

SEQ ID NO: 2856393 - DNA, 25 bp, Homo sapien
tgtggaacacatgacacagccgtga

SEQ ID NO: 2856394 - DNA, 25 bp, Homo sapien
cgtgaacatttagtccctggctgct

SEQ ID NO: 2856395 - DNA, 25 bp, Homo sapien
ggctcagcgtgctccacaatttctt

SEQ ID NO: 2856396 - DNA, 25 bp, Homo sapien
tcttcatgggaagggtttagggatg

SEQ ID NO: 2856397 - DNA, 25 bp, Homo sapien
catgggaagggtttagggatgacaa

SEQ ID NO: 2856398 - DNA, 25 bp, Homo sapien
ccaaggctcagcgtgctccacaatt

SEQ ID NO: 2856399 - DNA, 25 bp, Homo sapien
tcaccactgccagtaatgacggtgc

SEQ ID NO: 2856400 - DNA, 25 bp, Homo sapien
accactgccagtaatgacggtgctc

SEQ ID NO: 2856401 - DNA, 25 bp, Homo sapien
cactgccagtaatgacggtgctccc

SEQ ID NO: 2856402 - DNA, 25 bp, Homo sapien
ctgccagtaatgacggtgctcccac

SEQ ID NO: 2856403 - DNA, 25 bp, Homo sapien
taactggctccttgctctagaagac

SEQ ID NO: 2856404 - DNA, 25 bp, Homo sapien
tccaagtaagtgtgtccctggccag

SEQ ID NO: 2856405 - DNA, 25 bp, Homo sapien
ccagagctggcatttacgaaggacc

SEQ ID NO: 2856406 - DNA, 25 bp, Homo sapien
tattggaagtatctcatccgggagg

SEQ ID NO: 2856407 - DNA, 25 bp, Homo sapien
gggctgattccagaccggattctct

SEQ ID NO: 2856408 - DNA, 25 bp, Homo sapien
ggctgattccagaccggattctcta

SEQ ID NO: 2856409 - DNA, 25 bp, Homo sapien
agggctgattccagaccggattctc

SEQ ID NO: 2856410 - DNA, 25 bp, Homo sapien
ctgattccagaccggattctctatc

SEQ ID NO: 2856411 - DNA, 25 bp, Homo sapien
gtagatgtctaccttacccagccag

SEQ ID NO: 2856412 - DNA, 25 bp, Homo sapien
ccaactatgagatacgggagacaga

SEQ ID NO: 2856413 - DNA, 25 bp, Homo sapien
gacttaggaggccatctttggacaa

SEQ ID NO: 2856414 - DNA, 25 bp, Homo sapien
gcaaagttctcacgtggaagtcaga

SEQ ID NO: 2856415 - DNA, 25 bp, Homo sapien
gcaacatcgaacttgttcatcataa

SEQ ID NO: 2856416 - DNA, 25 bp, Homo sapien
cgtctctttctacctaatgtgtgtc

SEQ ID NO: 2856417 - DNA, 25 bp, Homo sapien
tgtgtgtctgcaacatcgaacttgt

SEQ ID NO: 2856418 - DNA, 25 bp, Homo sapien
tgccatgaacccttcatccctagtg

SEQ ID NO: 2856419 - DNA, 25 bp, Homo sapien
tggctgccaggaacctggtcctcat

SEQ ID NO: 2856420 - DNA, 25 bp, Homo sapien
ctcggacagctgcagcatggctgcc

SEQ ID NO: 2856421 - DNA, 25 bp, Homo sapien
agcaccctctgcctcggacagctgc

SEQ ID NO: 2856422 - DNA, 25 bp, Homo sapien
ctctgcctcggacagctgcagcatg

SEQ ID NO: 2856423 - DNA, 25 bp, Homo sapien
ggaaatatgctctgatacatgcagc

SEQ ID NO: 2856424 - DNA, 25 bp, Homo sapien
gcccagcctttgcaagagccgtctg

SEQ ID NO: 2856425 - DNA, 25 bp, Homo sapien
atacatgcagcattttcgtcctggg

SEQ ID NO: 2856426 - DNA, 25 bp, Homo sapien
ccctgtgttatccaaggatgatgga

SEQ ID NO: 2856427 - DNA, 25 bp, Homo sapien
gagacgctgtcaccattccagtacg

SEQ ID NO: 2856428 - DNA, 25 bp, Homo sapien
ggtggctcccaaggtgtgaaccctg

SEQ ID NO: 2856429 - DNA, 25 bp, Homo sapien
ggcccaaggttgaaaatcgcagctg

SEQ ID NO: 2856430 - DNA, 25 bp, Homo sapien
tgaaccctggacgagcagcattagc

SEQ ID NO: 2856431 - DNA, 25 bp, Homo sapien
ctttggtccacccttggcagttcgt

SEQ ID NO: 2856432 - DNA, 25 bp, Homo sapien
tgtatctttggtccacccttggcag

SEQ ID NO: 2856433 - DNA, 25 bp, Homo sapien
aggctctgtatctttggtccaccct

SEQ ID NO: 2856434 - DNA, 25 bp, Homo sapien
cacccttggcagttcgtttctgttc

SEQ ID NO: 2856435 - DNA, 25 bp, Homo sapien
tgatgatggtttctcggtgtaaaca

SEQ ID NO: 2856436 - DNA, 25 bp, Homo sapien
aaattcagcaataacaagcgatgaa

SEQ ID NO: 2856437 - DNA, 25 bp, Homo sapien
caaggaactggagtgcaaattcagc

SEQ ID NO: 2856438 - DNA, 25 bp, Homo sapien
tgctgttaggacatagatgattctc

SEQ ID NO: 2856439 - DNA, 25 bp, Homo sapien
acttgaaccatttcctagtgccttg

SEQ ID NO: 2856440 - DNA, 25 bp, Homo sapien
tgccttgctagacaaacataaaggg

SEQ ID NO: 2856441 - DNA, 25 bp, Homo sapien
cgtttttggtggtgtgtgcagttcc

SEQ ID NO: 2856442 - DNA, 25 bp, Homo sapien
gcaaatatagagcaaatccctaaac

SEQ ID NO: 2856443 - DNA, 25 bp, Homo sapien
ggagtcggacctacataccaagtga

SEQ ID NO: 2856444 - DNA, 25 bp, Homo sapien
aaacttgatcttgagccaaggccca

SEQ ID NO: 2856445 - DNA, 25 bp, Homo sapien
gaaagtatcgtgaccatgtggccca

SEQ ID NO: 2856446 - DNA, 25 bp, Homo sapien
gcacgtgtgtgaaaagccatcccat

SEQ ID NO: 2856447 - DNA, 25 bp, Homo sapien
tttaccatgtacaattgtgattgtg

SEQ ID NO: 2856448 - DNA, 25 bp, Homo sapien
ttccaggccaaaagctcaagaccac

SEQ ID NO: 2856449 - DNA, 25 bp, Homo sapien
aaaataagcctttgtgaaagactga

SEQ ID NO: 2856450 - DNA, 25 bp, Homo sapien
gaattccaggccaaaagctcaagac

SEQ ID NO: 2856451 - DNA, 25 bp, Homo sapien
taccagtagctgtcaagtgccatac

SEQ ID NO: 2856452 - DNA, 25 bp, Homo sapien
taggcttaagaacatcccatggagg

SEQ ID NO: 2856453 - DNA, 25 bp, Homo sapien
cacaattggctgataggcagtacca

SEQ ID NO: 2856454 - DNA, 25 bp, Homo sapien
caggagtgtgaaccccactgggaac

SEQ ID NO: 2856455 - DNA, 25 bp, Homo sapien
ttctatgcattggaactacaggaac

SEQ ID NO: 2856456 - DNA, 25 bp, Homo sapien
ttgagtcatagtccctatcctaggg

SEQ ID NO: 2856457 - DNA, 25 bp, Homo sapien
gagtccctactctattagccaccag

SEQ ID NO: 2856458 - DNA, 25 bp, Homo sapien
cattggatagagaatagtggtggtc

SEQ ID NO: 2856459 - DNA, 25 bp, Homo sapien
tggaggcttatgcacttcaggcaaa

SEQ ID NO: 2856460 - DNA, 25 bp, Homo sapien
gcaccactacaatctgggctgggca

SEQ ID NO: 2856461 - DNA, 25 bp, Homo sapien
taagagagctcatgcattgtgggac

SEQ ID NO: 2856462 - DNA, 25 bp, Homo sapien
tctggtttgtgtagagctcactggg

SEQ ID NO: 2856463 - DNA, 25 bp, Homo sapien
ttctcgctggggtaactctttcctc

SEQ ID NO: 2856464 - DNA, 25 bp, Homo sapien
ggagagtctgcagcccggttcccgg

SEQ ID NO: 2856465 - DNA, 25 bp, Homo sapien
cggagagtctgcagcccggttcccg

SEQ ID NO: 2856466 - DNA, 25 bp, Homo sapien
gaagaaactcaagctggacatcgac

SEQ ID NO: 2856467 - DNA, 25 bp, Homo sapien
agagctgctgcctcatcgaggacgg

SEQ ID NO: 2856468 - DNA, 25 bp, Homo sapien
ggagatgaacggcttcagcacggag

SEQ ID NO: 2856469 - DNA, 25 bp, Homo sapien
gcgggcaacgcctccttcagcaaga

SEQ ID NO: 2856470 - DNA, 25 bp, Homo sapien
tccgtgtaggttgttagaagctgct

SEQ ID NO: 2856471 - DNA, 25 bp, Homo sapien
cacgttgaggtgaaatgcttatggc

SEQ ID NO: 2856472 - DNA, 25 bp, Homo sapien
gaaacactgcctaccttccgtgtag

SEQ ID NO: 2856473 - DNA, 25 bp, Homo sapien
tgatccctccttaggtcacacgttg

SEQ ID NO: 2856474 - DNA, 25 bp, Homo sapien
catccagagtgtccgaaataaaagg

SEQ ID NO: 2856475 - DNA, 25 bp, Homo sapien
gacaagtgacgatggcggagattct

SEQ ID NO: 2856476 - DNA, 25 bp, Homo sapien
gtaaggcacctatatatctgtgatt

SEQ ID NO: 2856477 - DNA, 25 bp, Homo sapien
ccgagcacgacactgacattcctga

SEQ ID NO: 2856478 - DNA, 25 bp, Homo sapien
tacgacgttataaacgacactacaa

SEQ ID NO: 2856479 - DNA, 25 bp, Homo sapien
ttataaacgacactacaagttgcag

SEQ ID NO: 2856480 - DNA, 25 bp, Homo sapien
acaagttgcagaccagaccaggctt

SEQ ID NO: 2856481 - DNA, 25 bp, Homo sapien
ctgcaggtgaacaccctacgacgtt

SEQ ID NO: 2856482 - DNA, 25 bp, Homo sapien
catagactgtgagtcgacacttcag

SEQ ID NO: 2856483 - DNA, 25 bp, Homo sapien
gactgtgagtcgacacttcaggaac

SEQ ID NO: 2856484 - DNA, 25 bp, Homo sapien
tgagtcgacacttcaggaacatacc

SEQ ID NO: 2856485 - DNA, 25 bp, Homo sapien
gtcgacacttcaggaacatacctgt

SEQ ID NO: 2856486 - DNA, 25 bp, Homo sapien
cagcttgagtgaggatgaagcacat

SEQ ID NO: 2856487 - DNA, 25 bp, Homo sapien
taatgcttgatgcacaggtgatatc

SEQ ID NO: 2856488 - DNA, 25 bp, Homo sapien
actggaccagaaatcggagggtggc

SEQ ID NO: 2856489 - DNA, 25 bp, Homo sapien
ggtggcaagcagcttgagtgaggat

SEQ ID NO: 2856490 - DNA, 25 bp, Homo sapien
tgcccgctggcgacatagatatccc

SEQ ID NO: 2856491 - DNA, 25 bp, Homo sapien
ttatccaccaggctgccacgtgtga

SEQ ID NO: 2856492 - DNA, 25 bp, Homo sapien
gaatagcagcaaggtgcaattggcc

SEQ ID NO: 2856493 - DNA, 25 bp, Homo sapien
tatcagcagatcagtttgacactgg

SEQ ID NO: 2856494 - DNA, 25 bp, Homo sapien
ctctccctgcttacagctgaaggat

SEQ ID NO: 2856495 - DNA, 25 bp, Homo sapien
tacagctgaaggatgttgatacagg

SEQ ID NO: 2856496 - DNA, 25 bp, Homo sapien
ctgaaggatgttgatacaggcatca

SEQ ID NO: 2856497 - DNA, 25 bp, Homo sapien
tctctccctgcttacagctgaagga

SEQ ID NO: 2856498 - DNA, 25 bp, Homo sapien
caagaatatatgatggtaggatcca

SEQ ID NO: 2856499 - DNA, 25 bp, Homo sapien
agaatatatgatggtaggatccatc

SEQ ID NO: 2856500 - DNA, 25 bp, Homo sapien
aatatatgatggtaggatccatctg

SEQ ID NO: 2856501 - DNA, 25 bp, Homo sapien
cacaagaatatatgatggtaggatc

SEQ ID NO: 2856502 - DNA, 25 bp, Homo sapien
tgtctttcctctaaggagaggtgct

SEQ ID NO: 2856503 - DNA, 25 bp, Homo sapien
tgtgtgtgtacttgggtcccttgtc

SEQ ID NO: 2856504 - DNA, 25 bp, Homo sapien
gtcccttgtctttcctctaaggaga

SEQ ID NO: 2856505 - DNA, 25 bp, Homo sapien
tgtgtacttgggtcccttgtctttc

SEQ ID NO: 2856506 - DNA, 25 bp, Homo sapien
aagacaaagctatttgaacctatgt

SEQ ID NO: 2856507 - DNA, 25 bp, Homo sapien
gcaagggactcctgcctgtgagaag

SEQ ID NO: 2856508 - DNA, 25 bp, Homo sapien
tctggtggctctatctgtgggcaag

SEQ ID NO: 2856509 - DNA, 25 bp, Homo sapien
actcgccttagcctcttctgcagtt

SEQ ID NO: 2856510 - DNA, 25 bp, Homo sapien
tggctgctccatttttataccatcc

SEQ ID NO: 2856511 - DNA, 25 bp, Homo sapien
tcatcttggctgctccatttttata

SEQ ID NO: 2856512 - DNA, 25 bp, Homo sapien
tcttggctgctccatttttatacca

SEQ ID NO: 2856513 - DNA, 25 bp, Homo sapien
ggctgctccatttttataccatcca

SEQ ID NO: 2856514 - DNA, 25 bp, Homo sapien
tcttcttaaagagtatggttcctgc

SEQ ID NO: 2856515 - DNA, 25 bp, Homo sapien
cctgtgacgtagcagcattgccttc

SEQ ID NO: 2856516 - DNA, 25 bp, Homo sapien
ccagaactggcgttgtcttcttaaa

SEQ ID NO: 2856517 - DNA, 25 bp, Homo sapien
tctctccacctgtgacgtagcagca

SEQ ID NO: 2856518 - DNA, 25 bp, Homo sapien
ggaaacatcagtatcctgccattca

SEQ ID NO: 2856519 - DNA, 25 bp, Homo sapien
ggttctcacatggaaacatcagtat

SEQ ID NO: 2856520 - DNA, 25 bp, Homo sapien
ctgaaggttctcacatggaaacatc

SEQ ID NO: 2856521 - DNA, 25 bp, Homo sapien
cacatggaaacatcagtatcctgcc

SEQ ID NO: 2856522 - DNA, 25 bp, Homo sapien
aaaccaatggacaaacttcttgctt

SEQ ID NO: 2856523 - DNA, 25 bp, Homo sapien
caagaccggtgttgtaaaatgaaga

SEQ ID NO: 2856524 - DNA, 25 bp, Homo sapien
gaacaaactcttaggttggcaacag

SEQ ID NO: 2856525 - DNA, 25 bp, Homo sapien
gattcaagaccggtgttgtaaaatg

SEQ ID NO: 2856526 - DNA, 25 bp, Homo sapien
cagctgccaagtttttagatgttcc

SEQ ID NO: 2856527 - DNA, 25 bp, Homo sapien
gctgccaagtttttagatgttcctg

SEQ ID NO: 2856528 - DNA, 25 bp, Homo sapien
ttagatgttcctgtcatagctaaat

SEQ ID NO: 2856529 - DNA, 25 bp, Homo sapien
caagtttttagatgttcctgtcata

SEQ ID NO: 2856530 - DNA, 25 bp, Homo sapien
ttgccccacaaaaacggatgctcac

SEQ ID NO: 2856531 - DNA, 25 bp, Homo sapien
ctgtgcttgccccacaaaaacggat

SEQ ID NO: 2856532 - DNA, 25 bp, Homo sapien
tgcttgccccacaaaaacggatgct

SEQ ID NO: 2856533 - DNA, 25 bp, Homo sapien
ctcagacagatgaggactcagttct

SEQ ID NO: 2856534 - DNA, 25 bp, Homo sapien
gaggatttataacttcgttgctttg

SEQ ID NO: 2856535 - DNA, 25 bp, Homo sapien
tataacttcgttgctttgcatgaag

SEQ ID NO: 2856536 - DNA, 25 bp, Homo sapien
tttataacttcgttgctttgcatga

SEQ ID NO: 2856537 - DNA, 25 bp, Homo sapien
ggatttataacttcgttgctttgca

SEQ ID NO: 2856538 - DNA, 25 bp, Homo sapien
ccaggcctcctcatattgtacttgt

SEQ ID NO: 2856539 - DNA, 25 bp, Homo sapien
tctgtactgttgaaaggctctcaat

SEQ ID NO: 2856540 - DNA, 25 bp, Homo sapien
taacttcgtaatctatggctctgta

SEQ ID NO: 2856541 - DNA, 25 bp, Homo sapien
caatatcacacgatgggatggcccg

SEQ ID NO: 2856542 - DNA, 25 bp, Homo sapien
agtggcagagtctgagcaaacagag

SEQ ID NO: 2856543 - DNA, 25 bp, Homo sapien
tattataactatgttacgttcagca

SEQ ID NO: 2856544 - DNA, 25 bp, Homo sapien
gagtggctgacactgttgtcattca

SEQ ID NO: 2856545 - DNA, 25 bp, Homo sapien
aactatgttacgttcagcatcaaac

SEQ ID NO: 2856546 - DNA, 25 bp, Homo sapien
cccaggaggtgtaaaggcacctgca

SEQ ID NO: 2856547 - DNA, 25 bp, Homo sapien
taacaagcccaggaggtgtaaaggc

SEQ ID NO: 2856548 - DNA, 25 bp, Homo sapien
agagattaacaagcccaggaggtgt

SEQ ID NO: 2856549 - DNA, 25 bp, Homo sapien
cagagctgaacagagattaacaagc

SEQ ID NO: 2856550 - DNA, 25 bp, Homo sapien
catagacactgctttggcgaaggga

SEQ ID NO: 2856551 - DNA, 25 bp, Homo sapien
gagcatagacactgctttggcgaag

SEQ ID NO: 2856552 - DNA, 25 bp, Homo sapien
tgttttattaatcaagagcatagac

SEQ ID NO: 2856553 - DNA, 25 bp, Homo sapien
caagagcatagacactgctttggcg

SEQ ID NO: 2856554 - DNA, 25 bp, Homo sapien
cgattcgaagaacaaagggcagcct

SEQ ID NO: 2856555 - DNA, 25 bp, Homo sapien
tcaaaggacattgcacgtgcgatcc

SEQ ID NO: 2856556 - DNA, 25 bp, Homo sapien
ttcttgcatgttgccgccaagggcc

SEQ ID NO: 2856557 - DNA, 25 bp, Homo sapien
tgagcccttgggttcgacagtccct

SEQ ID NO: 2856558 - DNA, 25 bp, Homo sapien
cactggtttaactccagcgcccaga

SEQ ID NO: 2856559 - DNA, 25 bp, Homo sapien
gcaggaggaaaaccttcgtgctgct

SEQ ID NO: 2856560 - DNA, 25 bp, Homo sapien
ctcttctcgactgggcccagggcag

SEQ ID NO: 2856561 - DNA, 25 bp, Homo sapien
gccagccggtgcgtcctttaatcct

SEQ ID NO: 2856562 - DNA, 25 bp, Homo sapien
tctggtgaaactgacgcgcgttgat

SEQ ID NO: 2856563 - DNA, 25 bp, Homo sapien
aatttttctgctccgatcgcccggc

SEQ ID NO: 2856564 - DNA, 25 bp, Homo sapien
cctttatgcgcggagttcctgggac

SEQ ID NO: 2856565 - DNA, 25 bp, Homo sapien
taaggaaaatgttctgcgtctggtg

SEQ ID NO: 2856566 - DNA, 25 bp, Homo sapien
cgcgaatgcgctgttaatgctctca

SEQ ID NO: 2856567 - DNA, 25 bp, Homo sapien
tcttgggtcctgagcctttccgccg

SEQ ID NO: 2856568 - DNA, 25 bp, Homo sapien
gatcgccagactgtgcatccttggc

SEQ ID NO: 2856569 - DNA, 25 bp, Homo sapien
gatgcactcgcgcaactccgcgaat

SEQ ID NO: 2856570 - DNA, 25 bp, Homo sapien
cagccagctctggaagtagggcctt

SEQ ID NO: 2856571 - DNA, 25 bp, Homo sapien
tggcgtcaggaccataggcggtggc

SEQ ID NO: 2856572 - DNA, 25 bp, Homo sapien
cgaagaggaagggttcgtggagcat

SEQ ID NO: 2856573 - DNA, 25 bp, Homo sapien
gtgtgcgtagctgcccacgaggttc

SEQ ID NO: 2856574 - DNA, 25 bp, Homo sapien
agagtccgggcaaggctgaaaatga

SEQ ID NO: 2856575 - DNA, 25 bp, Homo sapien
ggagccactactgggcgccggcttt

SEQ ID NO: 2856576 - DNA, 25 bp, Homo sapien
ttggagcggctactggcctgcgccg

SEQ ID NO: 2856577 - DNA, 25 bp, Homo sapien
aatgagacgcgcagcccactgtctt

SEQ ID NO: 2856578 - DNA, 25 bp, Homo sapien
ggactacgtacttgaggcacaggac

SEQ ID NO: 2856579 - DNA, 25 bp, Homo sapien
gactcccctgcggatctggcttata

SEQ ID NO: 2856580 - DNA, 25 bp, Homo sapien
tcgccgaagcccaaagacctgttta

SEQ ID NO: 2856581 - DNA, 25 bp, Homo sapien
taagaccgcggctttgatgtcaacc

SEQ ID NO: 2856582 - DNA, 25 bp, Homo sapien
cagcattcggcgttagacacacgca

SEQ ID NO: 2856583 - DNA, 25 bp, Homo sapien
tcccggagtggtgacgcttcaagct

SEQ ID NO: 2856584 - DNA, 25 bp, Homo sapien
ggttcctttcttggccgatgtccac

SEQ ID NO: 2856585 - DNA, 25 bp, Homo sapien
gctcgcgttggaatctgggaatccc

SEQ ID NO: 2856586 - DNA, 25 bp, Homo sapien
cgccccctccctcggtgtggtagag

SEQ ID NO: 2856587 - DNA, 25 bp, Homo sapien
gctcaacgccccctccctcggtgtg

SEQ ID NO: 2856588 - DNA, 25 bp, Homo sapien
cctccctcggtgtggtagagggagt

SEQ ID NO: 2856589 - DNA, 25 bp, Homo sapien
tttctcagctcaacgccccctccct

SEQ ID NO: 2856590 - DNA, 25 bp, Homo sapien
tcataagacgcccaaaagtatgtgt

SEQ ID NO: 2856591 - DNA, 25 bp, Homo sapien
cacggtacacacagcattcatgcat

SEQ ID NO: 2856592 - DNA, 25 bp, Homo sapien
tattctcacagtaatacgcacagcc

SEQ ID NO: 2856593 - DNA, 25 bp, Homo sapien
cacaaaagcccgtatcttcataaga

SEQ ID NO: 2856594 - DNA, 25 bp, Homo sapien
tcccgccgcagtcccgtgaccttga

SEQ ID NO: 2856595 - DNA, 25 bp, Homo sapien
ccgcagtcccgtgaccttgacgcca

SEQ ID NO: 2856596 - DNA, 25 bp, Homo sapien
ccgtgaccttgacgccacgggcaat

SEQ ID NO: 2856597 - DNA, 25 bp, Homo sapien
gccacgggcaatccccgcaccggac

SEQ ID NO: 2856598 - DNA, 25 bp, Homo sapien
ctaaatagggcagtaaatcaaggac

SEQ ID NO: 2856599 - DNA, 25 bp, Homo sapien
tctcccatccctcgcagtggttagt

SEQ ID NO: 2856600 - DNA, 25 bp, Homo sapien
cgaagcagctcggtcaggttctcca

SEQ ID NO: 2856601 - DNA, 25 bp, Homo sapien
ctccagaacaccaggagtcctgtct

SEQ ID NO: 2856602 - DNA, 25 bp, Homo sapien
ccctcgcagtggttagttgcacact

SEQ ID NO: 2856603 - DNA, 25 bp, Homo sapien
caccaggctgttttcggcatattgg

SEQ ID NO: 2856604 - DNA, 25 bp, Homo sapien
tgtagccaatccctagaccactgat

SEQ ID NO: 2856605 - DNA, 25 bp, Homo sapien
aacgaagttttgctgtgcaccaggc

SEQ ID NO: 2856606 - DNA, 25 bp, Homo sapien
tagtttcctggtgctcggttgctcc

SEQ ID NO: 2856607 - DNA, 25 bp, Homo sapien
ttctccaaaagagcatgcaggagcc

SEQ ID NO: 2856608 - DNA, 25 bp, Homo sapien
caagaggttccgaagtctgccggag

SEQ ID NO: 2856609 - DNA, 25 bp, Homo sapien
tctgccggagcataagtgttatagc

SEQ ID NO: 2856610 - DNA, 25 bp, Homo sapien
gctttcagaaagagtccgtatgcac

SEQ ID NO: 2856611 - DNA, 25 bp, Homo sapien
cctttgggagagaagttaagtgctc

SEQ ID NO: 2856612 - DNA, 25 bp, Homo sapien
gagccttggcatcagaaaggagacg

SEQ ID NO: 2856613 - DNA, 25 bp, Homo sapien
gacactgggaaaatgcttagctctg

SEQ ID NO: 2856614 - DNA, 25 bp, Homo sapien
tgaatttctaaatccctcaggagtc

SEQ ID NO: 2856615 - DNA, 25 bp, Homo sapien
ctatttccacgctgcagctgagttt

SEQ ID NO: 2856616 - DNA, 25 bp, Homo sapien
gcctctttctgccttactatttcca

SEQ ID NO: 2856617 - DNA, 25 bp, Homo sapien
tttctgccttactatttccacgctg

SEQ ID NO: 2856618 - DNA, 25 bp, Homo sapien
cttactatttccacgctgcagctga

SEQ ID NO: 2856619 - DNA, 25 bp, Homo sapien
agcctcaaactcaaaccaactgttg

SEQ ID NO: 2856620 - DNA, 25 bp, Homo sapien
ccagagcacggctcaaagaacaaga

SEQ ID NO: 2856621 - DNA, 25 bp, Homo sapien
gcctcaaactcaaaccaactgttgg

SEQ ID NO: 2856622 - DNA, 25 bp, Homo sapien
agcacggctcaaagaacaagaagtc

SEQ ID NO: 2856623 - DNA, 25 bp, Homo sapien
tcccctgccataaattccgcagagg

SEQ ID NO: 2856624 - DNA, 25 bp, Homo sapien
gcatgtgtataaaaacctatcagtc

SEQ ID NO: 2856625 - DNA, 25 bp, Homo sapien
tcgccaaaacccattatgtctcaaa

SEQ ID NO: 2856626 - DNA, 25 bp, Homo sapien
tcagtctatggagctcgccaaaacc

SEQ ID NO: 2856627 - DNA, 25 bp, Homo sapien
taaagttgagccttctccctgctag

SEQ ID NO: 2856628 - DNA, 25 bp, Homo sapien
ccagcttgcactttttgcaggtaag

SEQ ID NO: 2856629 - DNA, 25 bp, Homo sapien
gatctctgattctctagcttcggag

SEQ ID NO: 2856630 - DNA, 25 bp, Homo sapien
taagttatgaagcctgtcagggagg

SEQ ID NO: 2856631 - DNA, 25 bp, Homo sapien
cttggaacatatttcagccaatgac

SEQ ID NO: 2856632 - DNA, 25 bp, Homo sapien
atggcttggaacatatttcagccaa

SEQ ID NO: 2856633 - DNA, 25 bp, Homo sapien
catggcaaggactgtcccgtgctct

SEQ ID NO: 2856634 - DNA, 25 bp, Homo sapien
gcctgcttccgcattgttaggggca

SEQ ID NO: 2856635 - DNA, 25 bp, Homo sapien
ctgaatccttgacaagcgctctttc

SEQ ID NO: 2856636 - DNA, 25 bp, Homo sapien
gctctttccgcaaggaaaccagttc

SEQ ID NO: 2856637 - DNA, 25 bp, Homo sapien
acttccccagcattgcccacccagt

SEQ ID NO: 2856638 - DNA, 25 bp, Homo sapien
gacaagcgctctttccgcaaggaaa

SEQ ID NO: 2856639 - DNA, 25 bp, Homo sapien
gggtgacccagcatcctgacttgga

SEQ ID NO: 2856640 - DNA, 25 bp, Homo sapien
gccatggagtggtcatcgcagataa

SEQ ID NO: 2856641 - DNA, 25 bp, Homo sapien
tctgtcccatgtgcgctaataattc

SEQ ID NO: 2856642 - DNA, 25 bp, Homo sapien
cctgacttggagaagatcctatggg

SEQ ID NO: 2856643 - DNA, 25 bp, Homo sapien
cattcccgtggcttagaggcttgct

SEQ ID NO: 2856644 - DNA, 25 bp, Homo sapien
gaagattacaggtttccaagacgca

SEQ ID NO: 2856645 - DNA, 25 bp, Homo sapien
tgtaagccccattgccaggagtttt

SEQ ID NO: 2856646 - DNA, 25 bp, Homo sapien
gatcaagcggtacaccaatacggca

SEQ ID NO: 2856647 - DNA, 25 bp, Homo sapien
agtggaggtgggcacgctggctgag

SEQ ID NO: 2856648 - DNA, 25 bp, Homo sapien
gcagcaagtcctctgccagtgtgga

SEQ ID NO: 2856649 - DNA, 25 bp, Homo sapien
gtggccatgctgttgctaccaagca

SEQ ID NO: 2856650 - DNA, 25 bp, Homo sapien
ccctgggtggccatgctgttgctac

SEQ ID NO: 2856651 - DNA, 25 bp, Homo sapien
ttcatcataaactgacagatcctta

SEQ ID NO: 2856652 - DNA, 25 bp, Homo sapien
gaatggatgttctatcaaaaccaca

SEQ ID NO: 2856653 - DNA, 25 bp, Homo sapien
taagctccgcttgaatggatgttct

SEQ ID NO: 2856654 - DNA, 25 bp, Homo sapien
caaacagtgccgctataatatttaa

SEQ ID NO: 2856655 - DNA, 25 bp, Homo sapien
cgatggcggaatttgaggaaatgct

SEQ ID NO: 2856656 - DNA, 25 bp, Homo sapien
ggatgtttatttgggctgaaggcac

SEQ ID NO: 2856657 - DNA, 25 bp, Homo sapien
gaaggcacagacctgcttactctgg

SEQ ID NO: 2856658 - DNA, 25 bp, Homo sapien
ctggttccctctctgcgatggcgga

SEQ ID NO: 2856659 - DNA, 25 bp, Homo sapien
ctgggccttgggctgcacagagttc

SEQ ID NO: 2856660 - DNA, 25 bp, Homo sapien
gacttggtcgacagccctgggcctt

SEQ ID NO: 2856661 - DNA, 25 bp, Homo sapien
gtgacttggtcgacagccctgggcc

SEQ ID NO: 2856662 - DNA, 25 bp, Homo sapien
gggccttgggctgcacagagttcct

SEQ ID NO: 2856663 - DNA, 25 bp, Homo sapien
cttttctttttcttctccagtcgat

SEQ ID NO: 2856664 - DNA, 25 bp, Homo sapien
tcttttctttttcttctccagtcga

SEQ ID NO: 2856665 - DNA, 25 bp, Homo sapien
ctgtttttgtttagctgctagtgac

SEQ ID NO: 2856666 - DNA, 25 bp, Homo sapien
ttttgtttagctgctagtgacttta

SEQ ID NO: 2856667 - DNA, 25 bp, Homo sapien
gtttagctgctagtgactttaaaca

SEQ ID NO: 2856668 - DNA, 25 bp, Homo sapien
tagctgctagtgactttaaacattc

SEQ ID NO: 2856669 - DNA, 25 bp, Homo sapien
tccccagtacatttcggttcagtgc

SEQ ID NO: 2856670 - DNA, 25 bp, Homo sapien
tcggttcagtgcaaacccactgttt

SEQ ID NO: 2856671 - DNA, 25 bp, Homo sapien
tcatcttcgctattagctccaaggg

SEQ ID NO: 2856672 - DNA, 25 bp, Homo sapien
ctgtttctcatcttcgctattagct

SEQ ID NO: 2856673 - DNA, 25 bp, Homo sapien
aaagaccaagcaaaggacgttcttg

SEQ ID NO: 2856674 - DNA, 25 bp, Homo sapien
ccaagcaaaggacgttcttgatctg

SEQ ID NO: 2856675 - DNA, 25 bp, Homo sapien
gcaaaggacgttcttgatctgtgtt

SEQ ID NO: 2856676 - DNA, 25 bp, Homo sapien
gaccaagcaaaggacgttcttgatc

SEQ ID NO: 2856677 - DNA, 25 bp, Homo sapien
gggcttcatacatgaaattaaggcc

SEQ ID NO: 2856678 - DNA, 25 bp, Homo sapien
ggcttcatacatgaaattaaggcca

SEQ ID NO: 2856679 - DNA, 25 bp, Homo sapien
ggggcttcatacatgaaattaaggc

SEQ ID NO: 2856680 - DNA, 25 bp, Homo sapien
catgaagttggtgaaggatttcccc

SEQ ID NO: 2856681 - DNA, 25 bp, Homo sapien
atgaaaatccttcttgcacatgaag

SEQ ID NO: 2856682 - DNA, 25 bp, Homo sapien
ggatttggaggcaagatgaaaatcc

SEQ ID NO: 2856683 - DNA, 25 bp, Homo sapien
tttttgatattggatttggaggcaa

SEQ ID NO: 2856684 - DNA, 25 bp, Homo sapien
gttagttcactaaggctcgtggatt

SEQ ID NO: 2856685 - DNA, 25 bp, Homo sapien
gactcctgtctaaactgtgccacga

SEQ ID NO: 2856686 - DNA, 25 bp, Homo sapien
tccctgacctgatcgaaaccacagg

SEQ ID NO: 2856687 - DNA, 25 bp, Homo sapien
tgtgccacgatcgattatcaaatcc

SEQ ID NO: 2856688 - DNA, 25 bp, Homo sapien
tgtggccactttggaaacattgttt

SEQ ID NO: 2856689 - DNA, 25 bp, Homo sapien
gctgccttgatctccttccatgttg

SEQ ID NO: 2856690 - DNA, 25 bp, Homo sapien
gttgacaaggcttcctttcagcatg

SEQ ID NO: 2856691 - DNA, 25 bp, Homo sapien
gccttgatctccttccatgttgaca

SEQ ID NO: 2856692 - DNA, 25 bp, Homo sapien
gcatgtgctgaacaccaggacccat

SEQ ID NO: 2856693 - DNA, 25 bp, Homo sapien
aggtcagtctccgtttccctcggct

SEQ ID NO: 2856694 - DNA, 25 bp, Homo sapien
tatagagaccaactgtggcgtcctc

SEQ ID NO: 2856695 - DNA, 25 bp, Homo sapien
taaaagagtcctgtatcctgtgaca

SEQ ID NO: 2856696 - DNA, 25 bp, Homo sapien
ccagaaatgattggtaaggtgcctg

SEQ ID NO: 2856697 - DNA, 25 bp, Homo sapien
cataaattcctgcatatctatctgg

SEQ ID NO: 2856698 - DNA, 25 bp, Homo sapien
tatctggtatgtgaaatcctcccaa

SEQ ID NO: 2856699 - DNA, 25 bp, Homo sapien
taaagtactccagtccgtacagcca

SEQ ID NO: 2856700 - DNA, 25 bp, Homo sapien
tccagtccgtacagccataaattcc

SEQ ID NO: 2856701 - DNA, 25 bp, Homo sapien
ctcaacatccctatgagagacagtg

SEQ ID NO: 2856702 - DNA, 25 bp, Homo sapien
cagtgggagagattaggtacgcgag

SEQ ID NO: 2856703 - DNA, 25 bp, Homo sapien
tggctggtaagaccccgaatgaccc

SEQ ID NO: 2856704 - DNA, 25 bp, Homo sapien
aacatccctatgagagacagtggga

SEQ ID NO: 2856705 - DNA, 25 bp, Homo sapien
cttcaaggtcagtgtgtgccccgtc

SEQ ID NO: 2856706 - DNA, 25 bp, Homo sapien
aggtcagtgtgtgccccgtcatcag

SEQ ID NO: 2856707 - DNA, 25 bp, Homo sapien
agtgtgtgccccgtcatcagcacct

SEQ ID NO: 2856708 - DNA, 25 bp, Homo sapien
gctcccttcaaggtcagtgtgtgcc

SEQ ID NO: 2856709 - DNA, 25 bp, Homo sapien
gacttctccgaatggtttcctggcc

SEQ ID NO: 2856710 - DNA, 25 bp, Homo sapien
cagacttctccgaatggtttcctgg

SEQ ID NO: 2856711 - DNA, 25 bp, Homo sapien
tcactgcagacttctccgaatggtt

SEQ ID NO: 2856712 - DNA, 25 bp, Homo sapien
agacttctccgaatggtttcctggc

SEQ ID NO: 2856713 - DNA, 25 bp, Homo sapien
ggcctggcatccgggcagcatgacc

SEQ ID NO: 2856714 - DNA, 25 bp, Homo sapien
cccacatgctcacagtatgtcagct

SEQ ID NO: 2856715 - DNA, 25 bp, Homo sapien
cagcagcagtacagctgagggagca

SEQ ID NO: 2856716 - DNA, 25 bp, Homo sapien
agctgatcgatgaacacctggccct

SEQ ID NO: 2856717 - DNA, 25 bp, Homo sapien
tgtccaaggagactccttggccctt

SEQ ID NO: 2856718 - DNA, 25 bp, Homo sapien
tctacctgtccaaggagactccttg

SEQ ID NO: 2856719 - DNA, 25 bp, Homo sapien
tcagggccgtggcttcccctgcctc

SEQ ID NO: 2856720 - DNA, 25 bp, Homo sapien
ctgggcttctacctgtccaaggaga

SEQ ID NO: 2856721 - DNA, 25 bp, Homo sapien
tccagtgggagaatgtcgcaccctg

SEQ ID NO: 2856722 - DNA, 25 bp, Homo sapien
taaatcccttctgtgagggacggga

SEQ ID NO: 2856723 - DNA, 25 bp, Homo sapien
ctgtcactgggcgagtggaccctga

SEQ ID NO: 2856724 - DNA, 25 bp, Homo sapien
cattagcatggtttggaggcttcca

SEQ ID NO: 2856725 - DNA, 25 bp, Homo sapien
agcaggtgctccgatccccgtttca

SEQ ID NO: 2856726 - DNA, 25 bp, Homo sapien
agagcaggtgctccgatccccgttt

SEQ ID NO: 2856727 - DNA, 25 bp, Homo sapien
gcagagcaggtgctccgatccccgt

SEQ ID NO: 2856728 - DNA, 25 bp, Homo sapien
gcaggtgctccgatccccgtttcac

SEQ ID NO: 2856729 - DNA, 25 bp, Homo sapien
aggacagagcctggactgcgtgccc

SEQ ID NO: 2856730 - DNA, 25 bp, Homo sapien
acagagcctggactgcgtgccccat

SEQ ID NO: 2856731 - DNA, 25 bp, Homo sapien
gacagagcctggactgcgtgcccca

SEQ ID NO: 2856732 - DNA, 25 bp, Homo sapien
ggacagagcctggactgcgtgcccc

SEQ ID NO: 2856733 - DNA, 25 bp, Homo sapien
cccagccggtgtgtttgagacatca

SEQ ID NO: 2856734 - DNA, 25 bp, Homo sapien
ggtggaagtcagtatctcccctgtc

SEQ ID NO: 2856735 - DNA, 25 bp, Homo sapien
ttcccggcgcctggagtctgggcat

SEQ ID NO: 2856736 - DNA, 25 bp, Homo sapien
tatggagtgctcagccatgcttggt

SEQ ID NO: 2856737 - DNA, 25 bp, Homo sapien
tctccttggccagcctggcatggtg

SEQ ID NO: 2856738 - DNA, 25 bp, Homo sapien
aaaagattctccttggccagcctgg

SEQ ID NO: 2856739 - DNA, 25 bp, Homo sapien
aaaaaagattctccttggccagcct

SEQ ID NO: 2856740 - DNA, 25 bp, Homo sapien
ggcaacaaagtgaaaatccacttct

SEQ ID NO: 2856741 - DNA, 25 bp, Homo sapien
tgtcattacacccagtttatttttg

SEQ ID NO: 2856742 - DNA, 25 bp, Homo sapien
gcctgtcattacacccagtttattt

SEQ ID NO: 2856743 - DNA, 25 bp, Homo sapien
gtgcctgtcattacacccagtttat

SEQ ID NO: 2856744 - DNA, 25 bp, Homo sapien
ggtgcctgtcattacacccagttta

SEQ ID NO: 2856745 - DNA, 25 bp, Homo sapien
ctccacctgagggcaacgtgttctc

SEQ ID NO: 2856746 - DNA, 25 bp, Homo sapien
tgtggctttactcctgaactgggtc

SEQ ID NO: 2856747 - DNA, 25 bp, Homo sapien
agacgagtggtctggtggcttttct

SEQ ID NO: 2856748 - DNA, 25 bp, Homo sapien
tcactgatggcttggatgcctggtc

SEQ ID NO: 2856749 - DNA, 25 bp, Homo sapien
tcaacttcagcctgttacccaattc

SEQ ID NO: 2856750 - DNA, 25 bp, Homo sapien
caggagtcagatggcctttccacta

SEQ ID NO: 2856751 - DNA, 25 bp, Homo sapien
gacagaatgttaagccacgcctgga

SEQ ID NO: 2856752 - DNA, 25 bp, Homo sapien
tcccatgattcagggcgagctggct

SEQ ID NO: 2856753 - DNA, 25 bp, Homo sapien
gatggaagggtctttcctccaggac

SEQ ID NO: 2856754 - DNA, 25 bp, Homo sapien
tgcagtaaaggaacagtccagagga

SEQ ID NO: 2856755 - DNA, 25 bp, Homo sapien
tagtgggagtgttggacctcttgtg

SEQ ID NO: 2856756 - DNA, 25 bp, Homo sapien
gagactttcccaagtggcagacaca

SEQ ID NO: 2856757 - DNA, 25 bp, Homo sapien
tgtgagcaccaccatctgtctgtct

SEQ ID NO: 2856758 - DNA, 25 bp, Homo sapien
tgggtttggacatgccaagagccct

SEQ ID NO: 2856759 - DNA, 25 bp, Homo sapien
tgagctgctacagtggcagggtccc

SEQ ID NO: 2856760 - DNA, 25 bp, Homo sapien
cagcatggacgccctgctgaggcct

SEQ ID NO: 2856761 - DNA, 25 bp, Homo sapien
cctgggtttggacatgccaagagcc

SEQ ID NO: 2856762 - DNA, 25 bp, Homo sapien
cagcaggttcggggcacttctcctc

SEQ ID NO: 2856763 - DNA, 25 bp, Homo sapien
tcagcaggttcggggcacttctcct

SEQ ID NO: 2856764 - DNA, 25 bp, Homo sapien
agagaagggccatgagagaaactga

SEQ ID NO: 2856765 - DNA, 25 bp, Homo sapien
tccaacgcttgagagggcggaagat

SEQ ID NO: 2856766 - DNA, 25 bp, Homo sapien
ccagaagaggccgtgattacccatt

SEQ ID NO: 2856767 - DNA, 25 bp, Homo sapien
gaagaggccgtgattacccattctg

SEQ ID NO: 2856768 - DNA, 25 bp, Homo sapien
caagtcgtacactttgtatttttgc

SEQ ID NO: 2856769 - DNA, 25 bp, Homo sapien
aaatctattgtatggcggggcactg

SEQ ID NO: 2856770 - DNA, 25 bp, Homo sapien
ggtaaacagcgtgatatttcaatac

SEQ ID NO: 2856771 - DNA, 25 bp, Homo sapien
agcctttagcaagtcgtacactttg

SEQ ID NO: 2856772 - DNA, 25 bp, Homo sapien
cagtgctagcatcgtcacctcaatt

SEQ ID NO: 2856773 - DNA, 25 bp, Homo sapien
aactgtgaccaaggcgagtgtgcag

SEQ ID NO: 2856774 - DNA, 25 bp, Homo sapien
ggcgcagatggaagcagtaaataaa

SEQ ID NO: 2856775 - DNA, 25 bp, Homo sapien
aataaaataatgagcgggccacgta

SEQ ID NO: 2856776 - DNA, 25 bp, Homo sapien
accagaggcataggccattgtgccc

SEQ ID NO: 2856777 - DNA, 25 bp, Homo sapien
gacacctgattagcatattgtgcta

SEQ ID NO: 2856778 - DNA, 25 bp, Homo sapien
tcagcatgggagcactggagttttg

SEQ ID NO: 2856779 - DNA, 25 bp, Homo sapien
tacagacacctgattagcatattgt

SEQ ID NO: 2856780 - DNA, 25 bp, Homo sapien
gagcctgaacgaaagccaacatctg

SEQ ID NO: 2856781 - DNA, 25 bp, Homo sapien
aaggtcatacagtgagttgaggtag

SEQ ID NO: 2856782 - DNA, 25 bp, Homo sapien
ttgaggtagagcctgaacgaaagcc

SEQ ID NO: 2856783 - DNA, 25 bp, Homo sapien
tctgcttcagacaaaaaagtaaagt

SEQ ID NO: 2856784 - DNA, 25 bp, Homo sapien
ttgtctctaaaaatgccaagcccgc

SEQ ID NO: 2856785 - DNA, 25 bp, Homo sapien
tctctaaaaatgccaagcccgccct

SEQ ID NO: 2856786 - DNA, 25 bp, Homo sapien
taaaaatgccaagcccgccctggtc

SEQ ID NO: 2856787 - DNA, 25 bp, Homo sapien
tctaaaaatgccaagcccgccctgg

SEQ ID NO: 2856788 - DNA, 25 bp, Homo sapien
tggctgtgcatggatcatcctggaa

SEQ ID NO: 2856789 - DNA, 25 bp, Homo sapien
gggcactgggatcaagtgagctggg

SEQ ID NO: 2856790 - DNA, 25 bp, Homo sapien
cctggaaatctgacagcatggtccc

SEQ ID NO: 2856791 - DNA, 25 bp, Homo sapien
caggggcactgggatcaagtgagct

SEQ ID NO: 2856792 - DNA, 25 bp, Homo sapien
gactggtatggcattagtttgtgca

SEQ ID NO: 2856793 - DNA, 25 bp, Homo sapien
ctggtatggcattagtttgtgcagg

SEQ ID NO: 2856794 - DNA, 25 bp, Homo sapien
ggtatggcattagtttgtgcaggta

SEQ ID NO: 2856795 - DNA, 25 bp, Homo sapien
gtatggcattagtttgtgcaggtat

SEQ ID NO: 2856796 - DNA, 25 bp, Homo sapien
ttgactgagcgacggttcttttggc

SEQ ID NO: 2856797 - DNA, 25 bp, Homo sapien
tgtgtttgactgagcgacggttctt

SEQ ID NO: 2856798 - DNA, 25 bp, Homo sapien
tctgtcttggagcttggctcctgtg

SEQ ID NO: 2856799 - DNA, 25 bp, Homo sapien
cgacggttcttttggccagtctcac

SEQ ID NO: 2856800 - DNA, 25 bp, Homo sapien
ccttttgccccaattttgccttctg

SEQ ID NO: 2856801 - DNA, 25 bp, Homo sapien
tgaatttggatgtttcttgaccatg

SEQ ID NO: 2856802 - DNA, 25 bp, Homo sapien
cgtgtgactagttatggtcatgttg

SEQ ID NO: 2856803 - DNA, 25 bp, Homo sapien
gtgactagttatggtcatgttgcca

SEQ ID NO: 2856804 - DNA, 25 bp, Homo sapien
taaagagattcaggtatgagaccta

SEQ ID NO: 2856805 - DNA, 25 bp, Homo sapien
ttcaggcatgcactgggataaggga

SEQ ID NO: 2856806 - DNA, 25 bp, Homo sapien
aaataccatagttggttaggaatca

SEQ ID NO: 2856807 - DNA, 25 bp, Homo sapien
tatgagacctagctctgtctggctc

SEQ ID NO: 2856808 - DNA, 25 bp, Homo sapien
gatgaactggttgagctcatgcttg

SEQ ID NO: 2856809 - DNA, 25 bp, Homo sapien
ggctgggtgggaacaacaagaggcc

SEQ ID NO: 2856810 - DNA, 25 bp, Homo sapien
atgaactggttgagctcatgcttgc

SEQ ID NO: 2856811 - DNA, 25 bp, Homo sapien
ctgatgaactggttgagctcatgct

SEQ ID NO: 2856812 - DNA, 25 bp, Homo sapien
agcccagtttcctagttgtcagcac

SEQ ID NO: 2856813 - DNA, 25 bp, Homo sapien
ccagcccagtttcctagttgtcagc

SEQ ID NO: 2856814 - DNA, 25 bp, Homo sapien
gcccagtttcctagttgtcagcact

SEQ ID NO: 2856815 - DNA, 25 bp, Homo sapien
cagcccagtttcctagttgtcagca

SEQ ID NO: 2856816 - DNA, 25 bp, Homo sapien
catgactggaagtttagtccgccca

SEQ ID NO: 2856817 - DNA, 25 bp, Homo sapien
tgcgataaagaacaaggaaggctcc

SEQ ID NO: 2856818 - DNA, 25 bp, Homo sapien
catgggttacaaactatggctaggg

SEQ ID NO: 2856819 - DNA, 25 bp, Homo sapien
tgtggctgtgaaggcacatacccag

SEQ ID NO: 2856820 - DNA, 25 bp, Homo sapien
gatggatccagggaagccagccttt

SEQ ID NO: 2856821 - DNA, 25 bp, Homo sapien
cactaggccactttgtgacaagaac

SEQ ID NO: 2856822 - DNA, 25 bp, Homo sapien
tgagcagctgacttgggttagccct

SEQ ID NO: 2856823 - DNA, 25 bp, Homo sapien
gacaagaacgtcatgcaggtttgag

SEQ ID NO: 2856824 - DNA, 25 bp, Homo sapien
gagctctagattgggagacaagaac

SEQ ID NO: 2856825 - DNA, 25 bp, Homo sapien
ggatgccctaagattggaaggacaa

SEQ ID NO: 2856826 - DNA, 25 bp, Homo sapien
gctctacagcaaatcactggtgact

SEQ ID NO: 2856827 - DNA, 25 bp, Homo sapien
cctgtgagtggatatagttgggcac

SEQ ID NO: 2856828 - DNA, 25 bp, Homo sapien
gagagacgctgcttttaccaggaaa

SEQ ID NO: 2856829 - DNA, 25 bp, Homo sapien
cctgcccgaggctagtaggctgcaa

SEQ ID NO: 2856830 - DNA, 25 bp, Homo sapien
ttgtggagcgggaatctgaaatacc

SEQ ID NO: 2856831 - DNA, 25 bp, Homo sapien
gaatcagagccgtgcccaagatatc

SEQ ID NO: 2856832 - DNA, 25 bp, Homo sapien
taggagttaatgttgcaaagagtag

SEQ ID NO: 2856833 - DNA, 25 bp, Homo sapien
taacatgttaggagttaatgttgca

SEQ ID NO: 2856834 - DNA, 25 bp, Homo sapien
catgttaggagttaatgttgcaaag

SEQ ID NO: 2856835 - DNA, 25 bp, Homo sapien
tttggtaacatgttaggagttaatg

SEQ ID NO: 2856836 - DNA, 25 bp, Homo sapien
gaatggaaccccagagtacctcctg

SEQ ID NO: 2856837 - DNA, 25 bp, Homo sapien
ggagcaaaggcactaccagtagaga

SEQ ID NO: 2856838 - DNA, 25 bp, Homo sapien
tagaggtgctgagcccctgtgtcaa

SEQ ID NO: 2856839 - DNA, 25 bp, Homo sapien
gaacttggagcccatttctcactgg

SEQ ID NO: 2856840 - DNA, 25 bp, Homo sapien
aatgtgcacatgaaacctcggcagg

SEQ ID NO: 2856841 - DNA, 25 bp, Homo sapien
gccaggatttcagcgcacttgtcag

SEQ ID NO: 2856842 - DNA, 25 bp, Homo sapien
tgccattgggcttcgaggagtctgc

SEQ ID NO: 2856843 - DNA, 25 bp, Homo sapien
ggaggaatgatccagcaccatgtgg

SEQ ID NO: 2856844 - DNA, 25 bp, Homo sapien
ggccttatttacgtgttcatctgac

SEQ ID NO: 2856845 - DNA, 25 bp, Homo sapien
gatggaacaaagagtcccccattcc

SEQ ID NO: 2856846 - DNA, 25 bp, Homo sapien
aaaatggggcatggccttatttacg

SEQ ID NO: 2856847 - DNA, 25 bp, Homo sapien
gagggatggaacaaagagtccccca

SEQ ID NO: 2856848 - DNA, 25 bp, Homo sapien
ggcaggtacttcagtaccaccagtg

SEQ ID NO: 2856849 - DNA, 25 bp, Homo sapien
ggttggcaggtacttcagtaccacc

SEQ ID NO: 2856850 - DNA, 25 bp, Homo sapien
caggtacttcagtaccaccagtgac

SEQ ID NO: 2856851 - DNA, 25 bp, Homo sapien
ttggcaggtacttcagtaccaccag

SEQ ID NO: 2856852 - DNA, 25 bp, Homo sapien
aagtttaggagatagtgtccagggc

SEQ ID NO: 2856853 - DNA, 25 bp, Homo sapien
tatcgttaggaatgctcacagcagc

SEQ ID NO: 2856854 - DNA, 25 bp, Homo sapien
ggctgatgcagacggattggtactt

SEQ ID NO: 2856855 - DNA, 25 bp, Homo sapien
cagcctgagcttccaaatgctatgt

SEQ ID NO: 2856856 - DNA, 25 bp, Homo sapien
tacagtacctcaaaatctaaaggcc

SEQ ID NO: 2856857 - DNA, 25 bp, Homo sapien
gaagagggaatgaaagccttttgtc

SEQ ID NO: 2856858 - DNA, 25 bp, Homo sapien
cagaaaaggatagggctgggccctt

SEQ ID NO: 2856859 - DNA, 25 bp, Homo sapien
gactgataacctgcctgccaaaagg

SEQ ID NO: 2856860 - DNA, 25 bp, Homo sapien
cagacaggcgagactgtggaaggcc

SEQ ID NO: 2856861 - DNA, 25 bp, Homo sapien
tgcctggtaagtgctcagctggcct

SEQ ID NO: 2856862 - DNA, 25 bp, Homo sapien
gagggagccaggtccaccaaggcca

SEQ ID NO: 2856863 - DNA, 25 bp, Homo sapien
ggaactgtattcaagctgagggcaa

SEQ ID NO: 2856864 - DNA, 25 bp, Homo sapien
tggaaaaggcacaagtatatataag

SEQ ID NO: 2856865 - DNA, 25 bp, Homo sapien
gacttggacctagctgatactaagg

SEQ ID NO: 2856866 - DNA, 25 bp, Homo sapien
aagaaggagtccattttgatagtcc

SEQ ID NO: 2856867 - DNA, 25 bp, Homo sapien
aatggtggtctttcaaatcaaagag

SEQ ID NO: 2856868 - DNA, 25 bp, Homo sapien
taaagtttggtctgcacctcgttgg

SEQ ID NO: 2856869 - DNA, 25 bp, Homo sapien
tgaagtggcgactggcatctggtat

SEQ ID NO: 2856870 - DNA, 25 bp, Homo sapien
tggttttaatccagggaggagctcc

SEQ ID NO: 2856871 - DNA, 25 bp, Homo sapien
gcctgagtcgggtatgtgaaagcct

SEQ ID NO: 2856872 - DNA, 25 bp, Homo sapien
ctggccgtcccaccctctggtccca

SEQ ID NO: 2856873 - DNA, 25 bp, Homo sapien
cctttcagccttgtcattctctgca

SEQ ID NO: 2856874 - DNA, 25 bp, Homo sapien
cctcctttcagccttgtcattctct

SEQ ID NO: 2856875 - DNA, 25 bp, Homo sapien
tcctttcagccttgtcattctctgc

SEQ ID NO: 2856876 - DNA, 25 bp, Homo sapien
tttcagccttgtcattctctgcatc

SEQ ID NO: 2856877 - DNA, 25 bp, Homo sapien
aggccacaaaggagttatctggggc

SEQ ID NO: 2856878 - DNA, 25 bp, Homo sapien
ctgcccaggccacaaaggagttatc

SEQ ID NO: 2856879 - DNA, 25 bp, Homo sapien
ccaggccacaaaggagttatctggg

SEQ ID NO: 2856880 - DNA, 25 bp, Homo sapien
gcccaggccacaaaggagttatctg

SEQ ID NO: 2856881 - DNA, 25 bp, Homo sapien
tgatcccattgagggacatcaaggg

SEQ ID NO: 2856882 - DNA, 25 bp, Homo sapien
tgtggccgaaggaggcaaattgtta

SEQ ID NO: 2856883 - DNA, 25 bp, Homo sapien
ggcagtagtttgaagaaagcctcat

SEQ ID NO: 2856884 - DNA, 25 bp, Homo sapien
tgttaggtgcaatcaggaagccgtg

SEQ ID NO: 2856885 - DNA, 25 bp, Homo sapien
ctctcagagagcggggtgaagccca

SEQ ID NO: 2856886 - DNA, 25 bp, Homo sapien
gggatgctctcagagagcggggtga

SEQ ID NO: 2856887 - DNA, 25 bp, Homo sapien
gatgctctcagagagcggggtgaag

SEQ ID NO: 2856888 - DNA, 25 bp, Homo sapien
atgctctcagagagcggggtgaagc

SEQ ID NO: 2856889 - DNA, 25 bp, Homo sapien
cacccagcaccccatagcactggtt

SEQ ID NO: 2856890 - DNA, 25 bp, Homo sapien
tcgtaggccttggtctgcttgaaca

SEQ ID NO: 2856891 - DNA, 25 bp, Homo sapien
cagcaccccatagcactggttgaac

SEQ ID NO: 2856892 - DNA, 25 bp, Homo sapien
ctcgtaggccttggtctgcttgaac

SEQ ID NO: 2856893 - DNA, 25 bp, Homo sapien
tggaggcttccgtgcagatcccatt

SEQ ID NO: 2856894 - DNA, 25 bp, Homo sapien
ggcttccgtgcagatcccatttcat

SEQ ID NO: 2856895 - DNA, 25 bp, Homo sapien
tgctggaggcttccgtgcagatccc

SEQ ID NO: 2856896 - DNA, 25 bp, Homo sapien
catgctggaggcttccgtgcagatc

SEQ ID NO: 2856897 - DNA, 25 bp, Homo sapien
tgcaatttgccgtatctggagtcct

SEQ ID NO: 2856898 - DNA, 25 bp, Homo sapien
gaaaagagtaaggtcatcccagtgt

SEQ ID NO: 2856899 - DNA, 25 bp, Homo sapien
aaagcttgctgtgtgattgatgccc

SEQ ID NO: 2856900 - DNA, 25 bp, Homo sapien
tccagagcttattcaaagggcccag

SEQ ID NO: 2856901 - DNA, 25 bp, Homo sapien
aagtgggagcccattactaatgggc

SEQ ID NO: 2856902 - DNA, 25 bp, Homo sapien
ctatcaccggtagcatgttggagac

SEQ ID NO: 2856903 - DNA, 25 bp, Homo sapien
ggaaaaccacatggtgatggaggac

SEQ ID NO: 2856904 - DNA, 25 bp, Homo sapien
tagtcgtggaattcaggcgaaggca

SEQ ID NO: 2856905 - DNA, 25 bp, Homo sapien
tatacacttagtcccaaggtggtac

SEQ ID NO: 2856906 - DNA, 25 bp, Homo sapien
ttagttgggtatacacttagtccca

SEQ ID NO: 2856907 - DNA, 25 bp, Homo sapien
tgaagggacttagttgggtatacac

SEQ ID NO: 2856908 - DNA, 25 bp, Homo sapien
cttagtcccaaggtggtaccagagg

SEQ ID NO: 2856909 - DNA, 25 bp, Homo sapien
tgtccactcatggtgtttcttgtgg

SEQ ID NO: 2856910 - DNA, 25 bp, Homo sapien
ttcttgtagaatgttgggtggtgaa

SEQ ID NO: 2856911 - DNA, 25 bp, Homo sapien
tgcatgctctatagggtgggcatag

SEQ ID NO: 2856912 - DNA, 25 bp, Homo sapien
gatcacgccaatgggagctgtccac

SEQ ID NO: 2856913 - DNA, 25 bp, Homo sapien
gatcagtgagccctagacaggatga

SEQ ID NO: 2856914 - DNA, 25 bp, Homo sapien
atcagtgagccctagacaggatgag

SEQ ID NO: 2856915 - DNA, 25 bp, Homo sapien
tgatcagtgagccctagacaggatg

SEQ ID NO: 2856916 - DNA, 25 bp, Homo sapien
gatagactggcgcagtttcacagga

SEQ ID NO: 2856917 - DNA, 25 bp, Homo sapien
gaaaagaactgtgcggatagactgg

SEQ ID NO: 2856918 - DNA, 25 bp, Homo sapien
tgaatagtagaacaagacttcctcg

SEQ ID NO: 2856919 - DNA, 25 bp, Homo sapien
ctcgatcagcgtgaagatggccagc

SEQ ID NO: 2856920 - DNA, 25 bp, Homo sapien
tggaaacgttgcagaataaggccct

SEQ ID NO: 2856921 - DNA, 25 bp, Homo sapien
tgtttacttccatcccattgcgagg

SEQ ID NO: 2856922 - DNA, 25 bp, Homo sapien
ttacaggtaacttgggtagcctcca

SEQ ID NO: 2856923 - DNA, 25 bp, Homo sapien
tttctgccccaaagcgcgacaggtt

SEQ ID NO: 2856924 - DNA, 25 bp, Homo sapien
ccacgtttgtaataatctagagagg

SEQ ID NO: 2856925 - DNA, 25 bp, Homo sapien
ccatttcctggatgtagtacatgga

SEQ ID NO: 2856926 - DNA, 25 bp, Homo sapien
caaggagagttcacctgtggtgtca

SEQ ID NO: 2856927 - DNA, 25 bp, Homo sapien
tggtcactgcccaatgtggtgtgca

SEQ ID NO: 2856928 - DNA, 25 bp, Homo sapien
gatgaagtgttctcaaggaccaagc

SEQ ID NO: 2856929 - DNA, 25 bp, Homo sapien
cattcaggcagtgggagagtaaaca

SEQ ID NO: 2856930 - DNA, 25 bp, Homo sapien
cacaaggttgtacagacggcaggta

SEQ ID NO: 2856931 - DNA, 25 bp, Homo sapien
cacagggtttgacactttaggctct

SEQ ID NO: 2856932 - DNA, 25 bp, Homo sapien
aggttcattcttgccgacctgaatt

SEQ ID NO: 2856933 - DNA, 25 bp, Homo sapien
tgtgtcaaccaccaatagaagccca

SEQ ID NO: 2856934 - DNA, 25 bp, Homo sapien
tgtcaaccaccaatagaagcccatt

SEQ ID NO: 2856935 - DNA, 25 bp, Homo sapien
cctgaattcggtagcgagagatgaa

SEQ ID NO: 2856936 - DNA, 25 bp, Homo sapien
gaagagacaaggcacttggatggca

SEQ ID NO: 2856937 - DNA, 25 bp, Homo sapien
gaagaagagacaaggcacttggatg

SEQ ID NO: 2856938 - DNA, 25 bp, Homo sapien
aagaagagacaaggcacttggatgg

SEQ ID NO: 2856939 - DNA, 25 bp, Homo sapien
aagagacaaggcacttggatggcac

SEQ ID NO: 2856940 - DNA, 25 bp, Homo sapien
aggctgatggttacccagtgggcca

SEQ ID NO: 2856941 - DNA, 25 bp, Homo sapien
aaggctgatggttacccagtgggcc

SEQ ID NO: 2856942 - DNA, 25 bp, Homo sapien
gaaaagcacaccgtaagacgatctt

SEQ ID NO: 2856943 - DNA, 25 bp, Homo sapien
gatcttaaacttcttctagctctaa

SEQ ID NO: 2856944 - DNA, 25 bp, Homo sapien
tttttagattgcaggttcaagctaa

SEQ ID NO: 2856945 - DNA, 25 bp, Homo sapien
ggcttatcaccaaggtaataggtaa

SEQ ID NO: 2856946 - DNA, 25 bp, Homo sapien
ctgagttcaagcgatgcttgtgcct

SEQ ID NO: 2856947 - DNA, 25 bp, Homo sapien
cttgtgcctcagcctcctgagtagc

SEQ ID NO: 2856948 - DNA, 25 bp, Homo sapien
tgagttcaagcgatgcttgtgcctc

SEQ ID NO: 2856949 - DNA, 25 bp, Homo sapien
gagacaggtttcactatgttggcca

SEQ ID NO: 2856950 - DNA, 25 bp, Homo sapien
cactccttcccttcaaatgtagtca

SEQ ID NO: 2856951 - DNA, 25 bp, Homo sapien
ttcccttcaaatgtagtcagcagcc

SEQ ID NO: 2856952 - DNA, 25 bp, Homo sapien
ttgccaaaagtagccagaagcaccc

SEQ ID NO: 2856953 - DNA, 25 bp, Homo sapien
ctgggcttgccaaaagtagccagaa

SEQ ID NO: 2856954 - DNA, 25 bp, Homo sapien
gatgaaagctgtcctcctcatagag

SEQ ID NO: 2856955 - DNA, 25 bp, Homo sapien
gtcctcctcatagagccccagatgt

SEQ ID NO: 2856956 - DNA, 25 bp, Homo sapien
tgaaagctgtcctcctcatagagcc

SEQ ID NO: 2856957 - DNA, 25 bp, Homo sapien
tcatagagccccagatgtgtccctc

SEQ ID NO: 2856958 - DNA, 25 bp, Homo sapien
gaggcacagcgggagtgctgtagga

SEQ ID NO: 2856959 - DNA, 25 bp, Homo sapien
ggatcagcatctcaaccaaccagga

SEQ ID NO: 2856960 - DNA, 25 bp, Homo sapien
tctgcgttttccagctggccttttc

SEQ ID NO: 2856961 - DNA, 25 bp, Homo sapien
caggaaggcacatctgcgttttcca

SEQ ID NO: 2856962 - DNA, 25 bp, Homo sapien
gagccaatgttattctctgtcaccc

SEQ ID NO: 2856963 - DNA, 25 bp, Homo sapien
gttggtccaaaactcttggcctcat

SEQ ID NO: 2856964 - DNA, 25 bp, Homo sapien
tgtcacccaggttggtccaaaactc

SEQ ID NO: 2856965 - DNA, 25 bp, Homo sapien
catgtgatcttccagccttagtctc

SEQ ID NO: 2856966 - DNA, 25 bp, Homo sapien
caaaggtcgccctgtgtttgctaga

SEQ ID NO: 2856967 - DNA, 25 bp, Homo sapien
tcttctgagtttgatcaaaccaaat

SEQ ID NO: 2856968 - DNA, 25 bp, Homo sapien
cacatacaggattagatatttgttc

SEQ ID NO: 2856969 - DNA, 25 bp, Homo sapien
ttgttcttttacatgggccattcaa

SEQ ID NO: 2856970 - DNA, 25 bp, Homo sapien
agtttgggggcaaggtgctggcatt

SEQ ID NO: 2856971 - DNA, 25 bp, Homo sapien
cagtttgggggcaaggtgctggcat

SEQ ID NO: 2856972 - DNA, 25 bp, Homo sapien
acttttcattgtgtagcatatgtcc

SEQ ID NO: 2856973 - DNA, 25 bp, Homo sapien
ttttcattgtgtagcatatgtccag

SEQ ID NO: 2856974 - DNA, 25 bp, Homo sapien
cttttcattgtgtagcatatgtcca

SEQ ID NO: 2856975 - DNA, 25 bp, Homo sapien
aaagcacaggcgagccggggagtta

SEQ ID NO: 2856976 - DNA, 25 bp, Homo sapien
tgagaaagcacaggcgagccgggga

SEQ ID NO: 2856977 - DNA, 25 bp, Homo sapien
cacaggcgagccggggagttatttt

SEQ ID NO: 2856978 - DNA, 25 bp, Homo sapien
gcgagccggggagttattttcataa

SEQ ID NO: 2856979 - DNA, 25 bp, Homo sapien
agatttttctgaaaccaatcaacag

SEQ ID NO: 2856980 - DNA, 25 bp, Homo sapien
aacatggaccaagatttttctgaaa

SEQ ID NO: 2856981 - DNA, 25 bp, Homo sapien
ctggtttgttctttagtattacttg

SEQ ID NO: 2856982 - DNA, 25 bp, Homo sapien
aaaaacatggaccaagatttttctg

SEQ ID NO: 2856983 - DNA, 25 bp, Homo sapien
gtgttgaaattacacccatgaaccc

SEQ ID NO: 2856984 - DNA, 25 bp, Homo sapien
tgttgaaattacacccatgaaccct

SEQ ID NO: 2856985 - DNA, 25 bp, Homo sapien
agtgttgaaattacacccatgaacc

SEQ ID NO: 2856986 - DNA, 25 bp, Homo sapien
gacactctagaacagggccctgtcc

SEQ ID NO: 2856987 - DNA, 25 bp, Homo sapien
ggaatgggtttcagacactctagaa

SEQ ID NO: 2856988 - DNA, 25 bp, Homo sapien
cattgcttgactgacagcaagggaa

SEQ ID NO: 2856989 - DNA, 25 bp, Homo sapien
gcttgtaagtgtgcagtttgtgcct

SEQ ID NO: 2856990 - DNA, 25 bp, Homo sapien
tatcaaagtactgggctagaggtct

SEQ ID NO: 2856991 - DNA, 25 bp, Homo sapien
gacaggtaggagatctggtacacca

SEQ ID NO: 2856992 - DNA, 25 bp, Homo sapien
catgctcttggatacatggtctcca

SEQ ID NO: 2856993 - DNA, 25 bp, Homo sapien
tctatgccagagctaagaaactact

SEQ ID NO: 2856994 - DNA, 25 bp, Homo sapien
caatgctagacatgggatagaaaga

SEQ ID NO: 2856995 - DNA, 25 bp, Homo sapien
tgtgtgttaataccaaaggacacgt

SEQ ID NO: 2856996 - DNA, 25 bp, Homo sapien
cctggacacatattagtggcagaac

SEQ ID NO: 2856997 - DNA, 25 bp, Homo sapien
cacaaaagcatgagattggcctata

SEQ ID NO: 2856998 - DNA, 25 bp, Homo sapien
tgccgagactgaagtacaatggctc

SEQ ID NO: 2856999 - DNA, 25 bp, Homo sapien
gcctcaatcttctatgctcaggtga

SEQ ID NO: 2857000 - DNA, 25 bp, Homo sapien
tagtgtgaaccaaggattttattta

SEQ ID NO: 2857001 - DNA, 25 bp, Homo sapien
ggcttaagtgatcttggtctcccaa

SEQ ID NO: 2857002 - DNA, 25 bp, Homo sapien
ctatccagagactttaaaactgttg

SEQ ID NO: 2857003 - DNA, 25 bp, Homo sapien
tctagctcatagcccacacatctat

SEQ ID NO: 2857004 - DNA, 25 bp, Homo sapien
gcccccgctttggtggctgttgctg

SEQ ID NO: 2857005 - DNA, 25 bp, Homo sapien
tttttgctcgggtgggaggctggcc

SEQ ID NO: 2857006 - DNA, 25 bp, Homo sapien
ctgtgtccaagctgctgaggtcctt

SEQ ID NO: 2857007 - DNA, 25 bp, Homo sapien
tgcacaggtcaaatctaagttctct

SEQ ID NO: 2857008 - DNA, 25 bp, Homo sapien
tgggaatcccgtttgaaattgccgc

SEQ ID NO: 2857009 - DNA, 25 bp, Homo sapien
ccgtttgaaattgccgctcaaggcc

SEQ ID NO: 2857010 - DNA, 25 bp, Homo sapien
ttgaaattgccgctcaaggccagct

SEQ ID NO: 2857011 - DNA, 25 bp, Homo sapien
aattgccgctcaaggccagctcggc

SEQ ID NO: 2857012 - DNA, 25 bp, Homo sapien
gagcgtaagatgaaagagtgtgaga

SEQ ID NO: 2857013 - DNA, 25 bp, Homo sapien
gaggagcgtaagatgaaagagtgtg

SEQ ID NO: 2857014 - DNA, 25 bp, Homo sapien
gtaagatgaaagagtgtgagagacc

SEQ ID NO: 2857015 - DNA, 25 bp, Homo sapien
cggaaagaggagcgtaagatgaaag

SEQ ID NO: 2857016 - DNA, 25 bp, Homo sapien
tcagtaattcataggtgtgagtgtg

SEQ ID NO: 2857017 - DNA, 25 bp, Homo sapien
ttcagtaattcataggtgtgagtgt

SEQ ID NO: 2857018 - DNA, 25 bp, Homo sapien
agagcagggacttcagtaattcata

SEQ ID NO: 2857019 - DNA, 25 bp, Homo sapien
agttgtgatgcgctgtgagatgctt

SEQ ID NO: 2857020 - DNA, 25 bp, Homo sapien
gaagacaaacccctatcttaggctc

SEQ ID NO: 2857021 - DNA, 25 bp, Homo sapien
gagatgcttgccctgaggaggctta

SEQ ID NO: 2857022 - DNA, 25 bp, Homo sapien
tttgaaagccatagagttgtgatgc

SEQ ID NO: 2857023 - DNA, 25 bp, Homo sapien
ctggctgttgcttcacgtgggttac

SEQ ID NO: 2857024 - DNA, 25 bp, Homo sapien
tacaagtagctcaaacaattacact

SEQ ID NO: 2857025 - DNA, 25 bp, Homo sapien
gaaccattagcaggaatagactact

SEQ ID NO: 2857026 - DNA, 25 bp, Homo sapien
tcatggaagcattagggaaaaagaa

SEQ ID NO: 2857027 - DNA, 25 bp, Homo sapien
agcctctgggtcttttgctcatggg

SEQ ID NO: 2857028 - DNA, 25 bp, Homo sapien
tcagcctctgggtcttttgctcatg

SEQ ID NO: 2857029 - DNA, 25 bp, Homo sapien
ctgggtcttttgctcatgggccttg

SEQ ID NO: 2857030 - DNA, 25 bp, Homo sapien
cctctgggtcttttgctcatgggcc

SEQ ID NO: 2857031 - DNA, 25 bp, Homo sapien
ggatcccctgagactcactggccat

SEQ ID NO: 2857032 - DNA, 25 bp, Homo sapien
gcagagctgcttatgacatcaggag

SEQ ID NO: 2857033 - DNA, 25 bp, Homo sapien
cctagtgactgttctgttcagcagc

SEQ ID NO: 2857034 - DNA, 25 bp, Homo sapien
ttttagagaggacatgtactcccag

SEQ ID NO: 2857035 - DNA, 25 bp, Homo sapien
tcataggtcagtcctagggaatgtg

SEQ ID NO: 2857036 - DNA, 25 bp, Homo sapien
ccattgtgccattcaggtttgctgt

SEQ ID NO: 2857037 - DNA, 25 bp, Homo sapien
tactctgattctcagctgagctgtg

SEQ ID NO: 2857038 - DNA, 25 bp, Homo sapien
tgtacctaccatctgcattgagcag

SEQ ID NO: 2857039 - DNA, 25 bp, Homo sapien
tttggagtaatatcccacaactggg

SEQ ID NO: 2857040 - DNA, 25 bp, Homo sapien
taaccagttcagaagtccgaagcct

SEQ ID NO: 2857041 - DNA, 25 bp, Homo sapien
ggaaatagactatgccctgtgttgg

SEQ ID NO: 2857042 - DNA, 25 bp, Homo sapien
tagacaatccctatggagtagcaga

SEQ ID NO: 2857043 - DNA, 25 bp, Homo sapien
tctgcactatgacggtttgggaacg

SEQ ID NO: 2857044 - DNA, 25 bp, Homo sapien
aaaaggatcctatgatccaagaaag

SEQ ID NO: 2857045 - DNA, 25 bp, Homo sapien
tagtatttagggtcccaatagtcag

SEQ ID NO: 2857046 - DNA, 25 bp, Homo sapien
catctatgcaaaattaggaatatgc

SEQ ID NO: 2857047 - DNA, 25 bp, Homo sapien
tagtcagagtccaataatccaaagg

SEQ ID NO: 2857048 - DNA, 25 bp, Homo sapien
tctttgggtgaaacctgcctaaggc

SEQ ID NO: 2857049 - DNA, 25 bp, Homo sapien
catctagggaccagagtgaatgtct

SEQ ID NO: 2857050 - DNA, 25 bp, Homo sapien
tttgggtgacgacagaagtttctcc

SEQ ID NO: 2857051 - DNA, 25 bp, Homo sapien
tagagatgaccaacactctgcaggt

SEQ ID NO: 2857052 - DNA, 25 bp, Homo sapien
tctgtaagttttcgtgttgccgtat

SEQ ID NO: 2857053 - DNA, 25 bp, Homo sapien
cttctgtaagttttcgtgttgccgt

SEQ ID NO: 2857054 - DNA, 25 bp, Homo sapien
aagttttcgtgttgccgtatttctg

SEQ ID NO: 2857055 - DNA, 25 bp, Homo sapien
ttcgtgttgccgtatttctgaagga

SEQ ID NO: 2857056 - DNA, 25 bp, Homo sapien
gcaggacgaggcagcactccagcac

SEQ ID NO: 2857057 - DNA, 25 bp, Homo sapien
ctgatgagaagcaggacgaggcagc

SEQ ID NO: 2857058 - DNA, 25 bp, Homo sapien
atgagaagcaggacgaggcagcact

SEQ ID NO: 2857059 - DNA, 25 bp, Homo sapien
agaagcaggacgaggcagcactcca

SEQ ID NO: 2857060 - DNA, 25 bp, Homo sapien
agcatttgcagaagagccacaaaca

SEQ ID NO: 2857061 - DNA, 25 bp, Homo sapien
gcatttgcagaagagccacaaacac

SEQ ID NO: 2857062 - DNA, 25 bp, Homo sapien
ctctgatttgcctcggtaagccttt

SEQ ID NO: 2857063 - DNA, 25 bp, Homo sapien
ggaaatttcgccattctctgatttg

SEQ ID NO: 2857064 - DNA, 25 bp, Homo sapien
ttaatgctctcaggaaatttcgcca

SEQ ID NO: 2857065 - DNA, 25 bp, Homo sapien
tttggttaactcaggcagagaaagt

SEQ ID NO: 2857066 - DNA, 25 bp, Homo sapien
actgttcctagccagcagggtcatt

SEQ ID NO: 2857067 - DNA, 25 bp, Homo sapien
ctgttcctagccagcagggtcattt

SEQ ID NO: 2857068 - DNA, 25 bp, Homo sapien
tcatttttcattccgtcttgtactt

SEQ ID NO: 2857069 - DNA, 25 bp, Homo sapien
cattccgtcttgtacttgcctcagt

SEQ ID NO: 2857070 - DNA, 25 bp, Homo sapien
gcattcgctcaccttcttctgtgag

SEQ ID NO: 2857071 - DNA, 25 bp, Homo sapien
tacttccggttcattcttatcagga

SEQ ID NO: 2857072 - DNA, 25 bp, Homo sapien
caaggtctcttggacttcagcaaca

SEQ ID NO: 2857073 - DNA, 25 bp, Homo sapien
tgttgtcggatcatttctgccaagg

SEQ ID NO: 2857074 - DNA, 25 bp, Homo sapien
agggtccgtttcttcagtgctggca

SEQ ID NO: 2857075 - DNA, 25 bp, Homo sapien
agtgtctaactgctggcttggctca

SEQ ID NO: 2857076 - DNA, 25 bp, Homo sapien
gcttggctcaacagagagtgttctg

SEQ ID NO: 2857077 - DNA, 25 bp, Homo sapien
gctgagaagtttcagggtccgtttc

SEQ ID NO: 2857078 - DNA, 25 bp, Homo sapien
gatggtcccccaacttgtctcttag

SEQ ID NO: 2857079 - DNA, 25 bp, Homo sapien
agaccaccagaattcatacagacgc

SEQ ID NO: 2857080 - DNA, 25 bp, Homo sapien
gcaaggtctggagagagaccaccag

SEQ ID NO: 2857081 - DNA, 25 bp, Homo sapien
gaattcatacagacgcccataaaga

SEQ ID NO: 2857082 - DNA, 25 bp, Homo sapien
cagggtcaagtcatggcaaatgtga

SEQ ID NO: 2857083 - DNA, 25 bp, Homo sapien
aagctccctgagtcatagctccgga

SEQ ID NO: 2857084 - DNA, 25 bp, Homo sapien
tcctgcatgatggtgaagctccctg

SEQ ID NO: 2857085 - DNA, 25 bp, Homo sapien
caggaggccatctgttggctcagca

SEQ ID NO: 2857086 - DNA, 25 bp, Homo sapien
tgtcaaggctgaagatgctcttcca

SEQ ID NO: 2857087 - DNA, 25 bp, Homo sapien
gaaaggcttcctgatactgctcagg

SEQ ID NO: 2857088 - DNA, 25 bp, Homo sapien
tttggcaggtgtgttatttgtagca

SEQ ID NO: 2857089 - DNA, 25 bp, Homo sapien
cagatgggtacttgatgttctgcag

SEQ ID NO: 2857090 - DNA, 25 bp, Homo sapien
gctcccacccagttgttggccagaa

SEQ ID NO: 2857091 - DNA, 25 bp, Homo sapien
tcttgggcacatctgagagccaggg

SEQ ID NO: 2857092 - DNA, 25 bp, Homo sapien
cagccgttctaagtgatgccgcatc

SEQ ID NO: 2857093 - DNA, 25 bp, Homo sapien
gacaactcatcctctcctacgatgg

SEQ ID NO: 2857094 - DNA, 25 bp, Homo sapien
tggccatctctttctaggacggttc

SEQ ID NO: 2857095 - DNA, 25 bp, Homo sapien
tgaggtacaagtccttcaggactgg

SEQ ID NO: 2857096 - DNA, 25 bp, Homo sapien
catttggcagctacagcatagtggc

SEQ ID NO: 2857097 - DNA, 25 bp, Homo sapien
ctttctaggacggttccccagctga

SEQ ID NO: 2857098 - DNA, 25 bp, Homo sapien
ggctgtaagacaggacaaactgtcc

SEQ ID NO: 2857099 - DNA, 25 bp, Homo sapien
gaatggttgtctctaggtaacacct

SEQ ID NO: 2857100 - DNA, 25 bp, Homo sapien
cagtgattgggaaacctggcatcta

SEQ ID NO: 2857101 - DNA, 25 bp, Homo sapien
aaggcggtggctcttacagtggaaa

SEQ ID NO: 2857102 - DNA, 25 bp, Homo sapien
cactttgtggatggaaagtaggtga

SEQ ID NO: 2857103 - DNA, 25 bp, Homo sapien
tgagaagcagccttgacatactgat

SEQ ID NO: 2857104 - DNA, 25 bp, Homo sapien
gtaaaaatggtttgacttgagcagc

SEQ ID NO: 2857105 - DNA, 25 bp, Homo sapien
ttgagcagctccaccgcttcataca

SEQ ID NO: 2857106 - DNA, 25 bp, Homo sapien
tcctttccaaagcataagctggtga

SEQ ID NO: 2857107 - DNA, 25 bp, Homo sapien
tgcagtctggagaacacctttgaga

SEQ ID NO: 2857108 - DNA, 25 bp, Homo sapien
gaacacctttgagatctcctttcca

SEQ ID NO: 2857109 - DNA, 25 bp, Homo sapien
ggtgaaataactcagggtggccatt

SEQ ID NO: 2857110 - DNA, 25 bp, Homo sapien
cagggtagccctgtctgtgaaaagc

SEQ ID NO: 2857111 - DNA, 25 bp, Homo sapien
gatgaaatctttcctcaacatcagc

SEQ ID NO: 2857112 - DNA, 25 bp, Homo sapien
ccctgtctgtgaaaagccccagatg

SEQ ID NO: 2857113 - DNA, 25 bp, Homo sapien
tatcaatcattctatacagggtagc

SEQ ID NO: 2857114 - DNA, 25 bp, Homo sapien
tcatgctgagatacttaggccaaca

SEQ ID NO: 2857115 - DNA, 25 bp, Homo sapien
gatttagaataaaagcagagcgcta

SEQ ID NO: 2857116 - DNA, 25 bp, Homo sapien
ccttatataccagtcccggaagact

SEQ ID NO: 2857117 - DNA, 25 bp, Homo sapien
gctacatttcaaagccatggcagtg

SEQ ID NO: 2857118 - DNA, 25 bp, Homo sapien
ccaggcttgtactcaggggaagcaa

SEQ ID NO: 2857119 - DNA, 25 bp, Homo sapien
tgcagttgctagtaccaaacagtcc

SEQ ID NO: 2857120 - DNA, 25 bp, Homo sapien
gtgctttgcagttgctagtaccaaa

SEQ ID NO: 2857121 - DNA, 25 bp, Homo sapien
cagttgctagtaccaaacagtcctg

SEQ ID NO: 2857122 - DNA, 25 bp, Homo sapien
aacataaaacggaatgcctattgtg

SEQ ID NO: 2857123 - DNA, 25 bp, Homo sapien
tactatctgaaggagaactgatcag

SEQ ID NO: 2857124 - DNA, 25 bp, Homo sapien
gctcctcctcctaataaagaggctt

SEQ ID NO: 2857125 - DNA, 25 bp, Homo sapien
tgtgaatgtaacctactggcaggac

SEQ ID NO: 2857126 - DNA, 25 bp, Homo sapien
aaatgactttgttattaatggtgac

SEQ ID NO: 2857127 - DNA, 25 bp, Homo sapien
tggtggctcctttttcagtaaaatg

SEQ ID NO: 2857128 - DNA, 25 bp, Homo sapien
tgacttttcaaagcctgaggaaact

SEQ ID NO: 2857129 - DNA, 25 bp, Homo sapien
aaactggagtgcagataactggttc

SEQ ID NO: 2857130 - DNA, 25 bp, Homo sapien
tttggttagagataagatataactg

SEQ ID NO: 2857131 - DNA, 25 bp, Homo sapien
tataggcacaagccattatcttggt

SEQ ID NO: 2857132 - DNA, 25 bp, Homo sapien
gttagagataagatataactgttgc

SEQ ID NO: 2857133 - DNA, 25 bp, Homo sapien
ggcacaagccattatcttggtaatt

SEQ ID NO: 2857134 - DNA, 25 bp, Homo sapien
caaggccacagggtaattccggctc

SEQ ID NO: 2857135 - DNA, 25 bp, Homo sapien
tcaatcgattccagctttacaggag

SEQ ID NO: 2857136 - DNA, 25 bp, Homo sapien
tttgccttaggttgagagagccgtt

SEQ ID NO: 2857137 - DNA, 25 bp, Homo sapien
tttacaggagttctcaaggtgggct

SEQ ID NO: 2857138 - DNA, 25 bp, Homo sapien
gaaattaacacgattcactactgcc

SEQ ID NO: 2857139 - DNA, 25 bp, Homo sapien
taaaagcactctaggtggtaaactc

SEQ ID NO: 2857140 - DNA, 25 bp, Homo sapien
gacgtcaccatagtacaaccatgga

SEQ ID NO: 2857141 - DNA, 25 bp, Homo sapien
tgaacaggacatgctccgacgtcac

SEQ ID NO: 2857142 - DNA, 25 bp, Homo sapien
tctggatccaaaggagaccatgcca

SEQ ID NO: 2857143 - DNA, 25 bp, Homo sapien
gaatgatcttgcatggaagtgagcc

SEQ ID NO: 2857144 - DNA, 25 bp, Homo sapien
caaaagtcatctgcccctgaataga

SEQ ID NO: 2857145 - DNA, 25 bp, Homo sapien
tcgatgtcctcggaaattgcacagg

SEQ ID NO: 2857146 - DNA, 25 bp, Homo sapien
tcttggccgtatgccctgagagggt

SEQ ID NO: 2857147 - DNA, 25 bp, Homo sapien
tccggtagggctctgtaatggtcac

SEQ ID NO: 2857148 - DNA, 25 bp, Homo sapien
cataggaagcagataccagccttcc

SEQ ID NO: 2857149 - DNA, 25 bp, Homo sapien
tgggctccacgccacactggtaatc

SEQ ID NO: 2857150 - DNA, 25 bp, Homo sapien
ggcatgcacctctaacccggcaaat

SEQ ID NO: 2857151 - DNA, 25 bp, Homo sapien
aaataatcttctcgttgtggcctcc

SEQ ID NO: 2857152 - DNA, 25 bp, Homo sapien
tatatagcaagccaataacactggt

SEQ ID NO: 2857153 - DNA, 25 bp, Homo sapien
gctgaacaaacgatatcatccccag

SEQ ID NO: 2857154 - DNA, 25 bp, Homo sapien
gaggccatcagatagctcaattctg

SEQ ID NO: 2857155 - DNA, 25 bp, Homo sapien
aaatgactgcattgttggagccaga

SEQ ID NO: 2857156 - DNA, 25 bp, Homo sapien
gctggctgccatgctcatgatgcca

SEQ ID NO: 2857157 - DNA, 25 bp, Homo sapien
tatgacagtcttcaggttgtgcacg

SEQ ID NO: 2857158 - DNA, 25 bp, Homo sapien
ttggatagtacagatcagtttcagg

SEQ ID NO: 2857159 - DNA, 25 bp, Homo sapien
tgttggatagtacagatcagtttca

SEQ ID NO: 2857160 - DNA, 25 bp, Homo sapien
gttggatagtacagatcagtttcag

SEQ ID NO: 2857161 - DNA, 25 bp, Homo sapien
ctgttggatagtacagatcagtttc

SEQ ID NO: 2857162 - DNA, 25 bp, Homo sapien
tcattccgtcagtcaaggaaagatg

SEQ ID NO: 2857163 - DNA, 25 bp, Homo sapien
caagttacaatgcaaatagtagctc

SEQ ID NO: 2857164 - DNA, 25 bp, Homo sapien
aatagtagctccctcattccgtcag

SEQ ID NO: 2857165 - DNA, 25 bp, Homo sapien
gatggatgatcaaattacaagttac

SEQ ID NO: 2857166 - DNA, 25 bp, Homo sapien
catcttcattgccaagagccatgat

SEQ ID NO: 2857167 - DNA, 25 bp, Homo sapien
tctctgtgtgtacaggcaatttgta

SEQ ID NO: 2857168 - DNA, 25 bp, Homo sapien
gccatctgctttccaacttatctct

SEQ ID NO: 2857169 - DNA, 25 bp, Homo sapien
catgattttgccatctgctttccaa

SEQ ID NO: 2857170 - DNA, 25 bp, Homo sapien
cactaagcttccagggattatgctg

SEQ ID NO: 2857171 - DNA, 25 bp, Homo sapien
tgtcaaaggcttctccactaagctt

SEQ ID NO: 2857172 - DNA, 25 bp, Homo sapien
tttgattgaattggtgtccctgatg

SEQ ID NO: 2857173 - DNA, 25 bp, Homo sapien
ccctgatgagtttgttgatgtcaaa

SEQ ID NO: 2857174 - DNA, 25 bp, Homo sapien
atatgtgctagaaatctgtggaggc

SEQ ID NO: 2857175 - DNA, 25 bp, Homo sapien
ccaggctaaagtatatacagtcttc

SEQ ID NO: 2857176 - DNA, 25 bp, Homo sapien
tatacagtcttcttatgatatgtgc

SEQ ID NO: 2857177 - DNA, 25 bp, Homo sapien
tcttatgatatgtgctagaaatctg

SEQ ID NO: 2857178 - DNA, 25 bp, Homo sapien
catcatcagttccaaaagctaagca

SEQ ID NO: 2857179 - DNA, 25 bp, Homo sapien
ccttccttggttgggtgccagcaca

SEQ ID NO: 2857180 - DNA, 25 bp, Homo sapien
ttggagtaggtgtcatacaatccca

SEQ ID NO: 2857181 - DNA, 25 bp, Homo sapien
ggtgtcatacaatcccacttttcca

SEQ ID NO: 2857182 - DNA, 25 bp, Homo sapien
tgttctttatggagagtgtattcca

SEQ ID NO: 2857183 - DNA, 25 bp, Homo sapien
tgtattccatacacggatcatgcca

SEQ ID NO: 2857184 - DNA, 25 bp, Homo sapien
tggacttcacgccttgccaaaaatt

SEQ ID NO: 2857185 - DNA, 25 bp, Homo sapien
atccccaacacctatggccaaagag

SEQ ID NO: 2857186 - DNA, 25 bp, Homo sapien
tatgtccacagaagagaaagccagg

SEQ ID NO: 2857187 - DNA, 25 bp, Homo sapien
ctatgtccacagaagagaaagccag

SEQ ID NO: 2857188 - DNA, 25 bp, Homo sapien
agctgcactccaaggtggctatgtc

SEQ ID NO: 2857189 - DNA, 25 bp, Homo sapien
tgtatgcaaacccaccaagggaagg

SEQ ID NO: 2857190 - DNA, 25 bp, Homo sapien
ctccaaggtggctatgtcccaacat

SEQ ID NO: 2857191 - DNA, 25 bp, Homo sapien
tatgcaaacccaccaagggaaggaa

SEQ ID NO: 2857192 - DNA, 25 bp, Homo sapien
agaaagtaatagctgtttgtcatcc

SEQ ID NO: 2857193 - DNA, 25 bp, Homo sapien
gagatcccattgcaacagttcacct

SEQ ID NO: 2857194 - DNA, 25 bp, Homo sapien
gaagagggtgtatttccgtctccaa

SEQ ID NO: 2857195 - DNA, 25 bp, Homo sapien
tctccaagattgagtgagatcccat

SEQ ID NO: 2857196 - DNA, 25 bp, Homo sapien
ccaaaacagctagataccagctgtg

SEQ ID NO: 2857197 - DNA, 25 bp, Homo sapien
caatggagtgtcaaccaaaggcgct

SEQ ID NO: 2857198 - DNA, 25 bp, Homo sapien
caaaggcgctctttaacagttgggt

SEQ ID NO: 2857199 - DNA, 25 bp, Homo sapien
ctgtgttggttgattgctgggccaa

SEQ ID NO: 2857200 - DNA, 25 bp, Homo sapien
tgcttccagtggctaagtagcaacc

SEQ ID NO: 2857201 - DNA, 25 bp, Homo sapien
ctcggcctctagaacagctccagat

SEQ ID NO: 2857202 - DNA, 25 bp, Homo sapien
cagcattcccgttggtaatttcagc

SEQ ID NO: 2857203 - DNA, 25 bp, Homo sapien
tactggagcttgtgctacagcattc

SEQ ID NO: 2857204 - DNA, 25 bp, Homo sapien
aattatcaccactatgccatccttg

SEQ ID NO: 2857205 - DNA, 25 bp, Homo sapien
ggacaccaggctatggagtggattt

SEQ ID NO: 2857206 - DNA, 25 bp, Homo sapien
ccaggctatggagtggatttcatca

SEQ ID NO: 2857207 - DNA, 25 bp, Homo sapien
actgatgtcaattatcaccactatg

SEQ ID NO: 2857208 - DNA, 25 bp, Homo sapien
tactatgtatgttgcctggtacaaa

SEQ ID NO: 2857209 - DNA, 25 bp, Homo sapien
aggtaatactatgtatgttgcctgg

SEQ ID NO: 2857210 - DNA, 25 bp, Homo sapien
tgattttgttctaagggaattttca

SEQ ID NO: 2857211 - DNA, 25 bp, Homo sapien
tgttgcctggtacaaaactcacagt

SEQ ID NO: 2857212 - DNA, 25 bp, Homo sapien
aagttgcagaattctacactctaga

SEQ ID NO: 2857213 - DNA, 25 bp, Homo sapien
agttgcagaattctacactctagac

SEQ ID NO: 2857214 - DNA, 25 bp, Homo sapien
gttgcagaattctacactctagacc

SEQ ID NO: 2857215 - DNA, 25 bp, Homo sapien
tgcagaattctacactctagacctg

SEQ ID NO: 2857216 - DNA, 25 bp, Homo sapien
taagtcctttactcgaggagaccaa

SEQ ID NO: 2857217 - DNA, 25 bp, Homo sapien
gatactattaagtcctttactcgag

SEQ ID NO: 2857218 - DNA, 25 bp, Homo sapien
tcatccccagatactattaagtcct

SEQ ID NO: 2857219 - DNA, 25 bp, Homo sapien
cctttactcgaggagaccaatgtaa

SEQ ID NO: 2857220 - DNA, 25 bp, Homo sapien
cagaggttgtactgaccagggtgat

SEQ ID NO: 2857221 - DNA, 25 bp, Homo sapien
gatggagtgcatgttctgtcacaac

SEQ ID NO: 2857222 - DNA, 25 bp, Homo sapien
catattttcacagtcccatcgtcgg

SEQ ID NO: 2857223 - DNA, 25 bp, Homo sapien
tgtgaagccagagaccctttcggtg

SEQ ID NO: 2857224 - DNA, 25 bp, Homo sapien
ggtccgcgcggcgaagccaaagagg

SEQ ID NO: 2857225 - DNA, 25 bp, Homo sapien
gaagacggaggtccgcgcggcgaag

SEQ ID NO: 2857226 - DNA, 25 bp, Homo sapien
cgggcccacgcggacaaggaagacg

SEQ ID NO: 2857227 - DNA, 25 bp, Homo sapien
ggtgtccctggactctcgcctgcgc

SEQ ID NO: 2857228 - DNA, 25 bp, Homo sapien
gggagggcggcagcgtccgcggctc

SEQ ID NO: 2857229 - DNA, 25 bp, Homo sapien
ttgggggagggcggcagcgtccgcg

SEQ ID NO: 2857230 - DNA, 25 bp, Homo sapien
cagttgggggagggcggcagcgtcc

SEQ ID NO: 2857231 - DNA, 25 bp, Homo sapien
gggggagggcggcagcgtccgcggc

SEQ ID NO: 2857232 - DNA, 25 bp, Homo sapien
acagccgaccgctcgtagcctcacg

SEQ ID NO: 2857233 - DNA, 25 bp, Homo sapien
aactacaagccgtcagagacaagag

SEQ ID NO: 2857234 - DNA, 25 bp, Homo sapien
gctgccacagccgaccgctcgtagc

SEQ ID NO: 2857235 - DNA, 25 bp, Homo sapien
acaagccgtcagagacaagagaagc

SEQ ID NO: 2857236 - DNA, 25 bp, Homo sapien
ctcgggcagtcgctacggtgcgcgt

SEQ ID NO: 2857237 - DNA, 25 bp, Homo sapien
gagcggggcggggtgaactccgagc

SEQ ID NO: 2857238 - DNA, 25 bp, Homo sapien
agcaccgcgcgttgcgttcccgcta

SEQ ID NO: 2857239 - DNA, 25 bp, Homo sapien
tacggtgcgcgtcgaggcccagcca

SEQ ID NO: 2857240 - DNA, 25 bp, Homo sapien
ctggctagggtcaggtgctgcctga

SEQ ID NO: 2857241 - DNA, 25 bp, Homo sapien
ggctagggtcaggtgctgcctgagc

SEQ ID NO: 2857242 - DNA, 25 bp, Homo sapien
tggctagggtcaggtgctgcctgag

SEQ ID NO: 2857243 - DNA, 25 bp, Homo sapien
tccaggtgaattttcggaagcccac

SEQ ID NO: 2857244 - DNA, 25 bp, Homo sapien
ttctgaatccaggtgaattttcgga

SEQ ID NO: 2857245 - DNA, 25 bp, Homo sapien
gaatccaggtgaattttcggaagcc

SEQ ID NO: 2857246 - DNA, 25 bp, Homo sapien
tgaatccaggtgaattttcggaagc

SEQ ID NO: 2857247 - DNA, 25 bp, Homo sapien
aatccagagtattgcgcatgcgtgc

SEQ ID NO: 2857248 - DNA, 25 bp, Homo sapien
tgcttgcgatcttcgtgacggcacc

SEQ ID NO: 2857249 - DNA, 25 bp, Homo sapien
aaggcgcttgaactcggcggcttcc

SEQ ID NO: 2857250 - DNA, 25 bp, Homo sapien
catgcgtgctgtccagaaggcgctt

SEQ ID NO: 2857251 - DNA, 25 bp, Homo sapien
ggccttggggtgagtctctcgcttc

SEQ ID NO: 2857252 - DNA, 25 bp, Homo sapien
tctcgcttcggagtttcggaagggc

SEQ ID NO: 2857253 - DNA, 25 bp, Homo sapien
gggtgagtctctcgcttcggagttt

SEQ ID NO: 2857254 - DNA, 25 bp, Homo sapien
gagtctctcgcttcggagtttcgga

SEQ ID NO: 2857255 - DNA, 25 bp, Homo sapien
tcattgctgtatggctggcaagaac

SEQ ID NO: 2857256 - DNA, 25 bp, Homo sapien
gcgagaatcatgatcagataaggga

SEQ ID NO: 2857257 - DNA, 25 bp, Homo sapien
acaaagtattaagacaacgcgagaa

SEQ ID NO: 2857258 - DNA, 25 bp, Homo sapien
tagtacagtggtctaagtcattgct

SEQ ID NO: 2857259 - DNA, 25 bp, Homo sapien
ctctgcatagatgatatatgtcgtt

SEQ ID NO: 2857260 - DNA, 25 bp, Homo sapien
tgcatagatgatatatgtcgttgcc

SEQ ID NO: 2857261 - DNA, 25 bp, Homo sapien
tagatgatatatgtcgttgccccat

SEQ ID NO: 2857262 - DNA, 25 bp, Homo sapien
catagatgatatatgtcgttgcccc

SEQ ID NO: 2857263 - DNA, 25 bp, Homo sapien
ggaaatctaccactgtcgaagacaa

SEQ ID NO: 2857264 - DNA, 25 bp, Homo sapien
tattgtcattttgtggtaaacctgc

SEQ ID NO: 2857265 - DNA, 25 bp, Homo sapien
ctcccgtagtaatcttttaacatag

SEQ ID NO: 2857266 - DNA, 25 bp, Homo sapien
gtgttgacacaaaccagccattgta

SEQ ID NO: 2857267 - DNA, 25 bp, Homo sapien
acccaagtttgatgagcagctgtgc

SEQ ID NO: 2857268 - DNA, 25 bp, Homo sapien
tatacccaagtttgatgagcagctg

SEQ ID NO: 2857269 - DNA, 25 bp, Homo sapien
tacccaagtttgatgagcagctgtg

SEQ ID NO: 2857270 - DNA, 25 bp, Homo sapien
ctctatacccaagtttgatgagcag

SEQ ID NO: 2857271 - DNA, 25 bp, Homo sapien
tgcccacgggcttattcacatcagt

SEQ ID NO: 2857272 - DNA, 25 bp, Homo sapien
gctgaggaccttagggacttacttg

SEQ ID NO: 2857273 - DNA, 25 bp, Homo sapien
tttccctggcggttctggttgccca

SEQ ID NO: 2857274 - DNA, 25 bp, Homo sapien
tttaaacaagtgatgccgtgctcta

SEQ ID NO: 2857275 - DNA, 25 bp, Homo sapien
gtggtctgtccttgatacacttaca

SEQ ID NO: 2857276 - DNA, 25 bp, Homo sapien
gatacacttacagtatgagggaaca

SEQ ID NO: 2857277 - DNA, 25 bp, Homo sapien
gctgcccagattgtggtctgtcctt

SEQ ID NO: 2857278 - DNA, 25 bp, Homo sapien
acagctgcccagattgtggtctgtc

SEQ ID NO: 2857279 - DNA, 25 bp, Homo sapien
cctttcagctcctggacatagttcc

SEQ ID NO: 2857280 - DNA, 25 bp, Homo sapien
tccctgtctcttcattagaacccat

SEQ ID NO: 2857281 - DNA, 25 bp, Homo sapien
tcctggacatagttcctccctgtct

SEQ ID NO: 2857282 - DNA, 25 bp, Homo sapien
ttcagctcctggacatagttcctcc

SEQ ID NO: 2857283 - DNA, 25 bp, Homo sapien
tcaatcttagttgccaccattaggt

SEQ ID NO: 2857284 - DNA, 25 bp, Homo sapien
gcacctcttgaattatctctgaact

SEQ ID NO: 2857285 - DNA, 25 bp, Homo sapien
agtttctgggcacgtctgatttaca

SEQ ID NO: 2857286 - DNA, 25 bp, Homo sapien
tggcctctggactaagcacctcttg

SEQ ID NO: 2857287 - DNA, 25 bp, Homo sapien
ccccaggctctacagccttgaagcc

SEQ ID NO: 2857288 - DNA, 25 bp, Homo sapien
ctccccaggctctacagccttgaag

SEQ ID NO: 2857289 - DNA, 25 bp, Homo sapien
tgccttcgccttttagaatcctgtt

SEQ ID NO: 2857290 - DNA, 25 bp, Homo sapien
tcttgctggaatgccttcgcctttt

SEQ ID NO: 2857291 - DNA, 25 bp, Homo sapien
agcatgaggctctttcttggacaat

SEQ ID NO: 2857292 - DNA, 25 bp, Homo sapien
gaagctgagctatagagggtgacac

SEQ ID NO: 2857293 - DNA, 25 bp, Homo sapien
gctatagagggtgacactgctctct

SEQ ID NO: 2857294 - DNA, 25 bp, Homo sapien
ttcttggacaattgacatttcccac

SEQ ID NO: 2857295 - DNA, 25 bp, Homo sapien
attgcctaagttgcagagagctgtc

SEQ ID NO: 2857296 - DNA, 25 bp, Homo sapien
tgctgcagtgcaggacattgtacgt

SEQ ID NO: 2857297 - DNA, 25 bp, Homo sapien
agcagtatgcactgctgcagtgcag

SEQ ID NO: 2857298 - DNA, 25 bp, Homo sapien
tacgtctgcactgttcagactctcc

SEQ ID NO: 2857299 - DNA, 25 bp, Homo sapien
caggcttatgacctgggaagtgccg

SEQ ID NO: 2857300 - DNA, 25 bp, Homo sapien
cagtagtgacgtgaagagtaaggac

SEQ ID NO: 2857301 - DNA, 25 bp, Homo sapien
gctggcgaaagtgaacaggcttatg

SEQ ID NO: 2857302 - DNA, 25 bp, Homo sapien
ggaagtgccgtctttcacaaatgct

SEQ ID NO: 2857303 - DNA, 25 bp, Homo sapien
gagtgggctttgagacttgttcagt

SEQ ID NO: 2857304 - DNA, 25 bp, Homo sapien
aggaggcagccactcactcaggcgc

SEQ ID NO: 2857305 - DNA, 25 bp, Homo sapien
gggtctttctggtgagctggccaca

SEQ ID NO: 2857306 - DNA, 25 bp, Homo sapien
gataaacccatgggtctttctggtg

SEQ ID NO: 2857307 - DNA, 25 bp, Homo sapien
catttataatcttgatgtaattcag

SEQ ID NO: 2857308 - DNA, 25 bp, Homo sapien
tttataatcttgatgtaattcagca

SEQ ID NO: 2857309 - DNA, 25 bp, Homo sapien
ttataatcttgatgtaattcagcat

SEQ ID NO: 2857310 - DNA, 25 bp, Homo sapien
acatttataatcttgatgtaattca

SEQ ID NO: 2857311 - DNA, 25 bp, Homo sapien
ctgaatttcttctagcctacaaaac

SEQ ID NO: 2857312 - DNA, 25 bp, Homo sapien
tcttctagcctacaaaacaggatgt

SEQ ID NO: 2857313 - DNA, 25 bp, Homo sapien
catttcgaaagtactaagaaagctg

SEQ ID NO: 2857314 - DNA, 25 bp, Homo sapien
ggatgttctgccatttcgaaagtac

SEQ ID NO: 2857315 - DNA, 25 bp, Homo sapien
gggctattagttggagcctgccttt

SEQ ID NO: 2857316 - DNA, 25 bp, Homo sapien
taaggggctattagttggagcctgc

SEQ ID NO: 2857317 - DNA, 25 bp, Homo sapien
ctattagttggagcctgccttttct

SEQ ID NO: 2857318 - DNA, 25 bp, Homo sapien
tgtcttttttgggagctcttggcct

SEQ ID NO: 2857319 - DNA, 25 bp, Homo sapien
ttgtgcctagaattgggctgaatgc

SEQ ID NO: 2857320 - DNA, 25 bp, Homo sapien
ttttggatttcaggtatgtaggctc

SEQ ID NO: 2857321 - DNA, 25 bp, Homo sapien
ggtatgtaggctcctactttgtgcc

SEQ ID NO: 2857322 - DNA, 25 bp, Homo sapien
gctcaggtaataattcaggtgtggg

SEQ ID NO: 2857323 - DNA, 25 bp, Homo sapien
accaggatgaaacctaggctctggg

SEQ ID NO: 2857324 - DNA, 25 bp, Homo sapien
ctacaaaattacagggccatctctg

SEQ ID NO: 2857325 - DNA, 25 bp, Homo sapien
cctggactcttaggtaagcatctga

SEQ ID NO: 2857326 - DNA, 25 bp, Homo sapien
catttgaatttggtgtctctcctcc

SEQ ID NO: 2857327 - DNA, 25 bp, Homo sapien
agattcggaggtcttcccacaatag

SEQ ID NO: 2857328 - DNA, 25 bp, Homo sapien
gaagattcggaggtcttcccacaat

SEQ ID NO: 2857329 - DNA, 25 bp, Homo sapien
ttgaagattcggaggtcttcccaca

SEQ ID NO: 2857330 - DNA, 25 bp, Homo sapien
gattcggaggtcttcccacaatagc

SEQ ID NO: 2857331 - DNA, 25 bp, Homo sapien
tttttagacacatctccggtagatg

SEQ ID NO: 2857332 - DNA, 25 bp, Homo sapien
ccggtagatgatagctaggcatctt

SEQ ID NO: 2857333 - DNA, 25 bp, Homo sapien
gacacatctccggtagatgatagct

SEQ ID NO: 2857334 - DNA, 25 bp, Homo sapien
catctccggtagatgatagctaggc

SEQ ID NO: 2857335 - DNA, 25 bp, Homo sapien
caatcttggatttagccgctgaata

SEQ ID NO: 2857336 - DNA, 25 bp, Homo sapien
aatcttggatttagccgctgaatac

SEQ ID NO: 2857337 - DNA, 25 bp, Homo sapien
tcaatcttggatttagccgctgaat

SEQ ID NO: 2857338 - DNA, 25 bp, Homo sapien
aacacatagcaggtcgggaatatct

SEQ ID NO: 2857339 - DNA, 25 bp, Homo sapien
cacatagcaggtcgggaatatctgc

SEQ ID NO: 2857340 - DNA, 25 bp, Homo sapien
atagcaggtcgggaatatctgccaa

SEQ ID NO: 2857341 - DNA, 25 bp, Homo sapien
ggaacacatagcaggtcgggaatat

SEQ ID NO: 2857342 - DNA, 25 bp, Homo sapien
cagtggggcttccctttcttgggct

SEQ ID NO: 2857343 - DNA, 25 bp, Homo sapien
gcagtggggcttccctttcttgggc

SEQ ID NO: 2857344 - DNA, 25 bp, Homo sapien
ctttcttgggctttttagctttgag

SEQ ID NO: 2857345 - DNA, 25 bp, Homo sapien
gctgcagtggggcttccctttcttg

SEQ ID NO: 2857346 - DNA, 25 bp, Homo sapien
ggattcaggtttcttctccctagta

SEQ ID NO: 2857347 - DNA, 25 bp, Homo sapien
tcttggattcaggtttcttctccct

SEQ ID NO: 2857348 - DNA, 25 bp, Homo sapien
ttcttggattcaggtttcttctccc

SEQ ID NO: 2857349 - DNA, 25 bp, Homo sapien
ttggattcaggtttcttctccctag

SEQ ID NO: 2857350 - DNA, 25 bp, Homo sapien
cttttcaggtaaggcatccatttta

SEQ ID NO: 2857351 - DNA, 25 bp, Homo sapien
caggtaaggcatccattttattatt

SEQ ID NO: 2857352 - DNA, 25 bp, Homo sapien
ttcaggtaaggcatccattttatta

SEQ ID NO: 2857353 - DNA, 25 bp, Homo sapien
ggtaaggcatccattttattattat

SEQ ID NO: 2857354 - DNA, 25 bp, Homo sapien
cccacatgttgtcagacatcaattc

SEQ ID NO: 2857355 - DNA, 25 bp, Homo sapien
agggcacataagcacccacatgttg

SEQ ID NO: 2857356 - DNA, 25 bp, Homo sapien
ctcagggcacataagcacccacatg

SEQ ID NO: 2857357 - DNA, 25 bp, Homo sapien
ggcacataagcacccacatgttgtc

SEQ ID NO: 2857358 - DNA, 25 bp, Homo sapien
tcaaacacaaccgaattcctaaaga

SEQ ID NO: 2857359 - DNA, 25 bp, Homo sapien
aagatcaaccacaagcaaccttgaa

SEQ ID NO: 2857360 - DNA, 25 bp, Homo sapien
tcccaaggtaggaaaagatcaacca

SEQ ID NO: 2857361 - DNA, 25 bp, Homo sapien
tgaagtagtaggtagaaggtttgat

SEQ ID NO: 2857362 - DNA, 25 bp, Homo sapien
gaaagtcagaagcaatgtggtccat

SEQ ID NO: 2857363 - DNA, 25 bp, Homo sapien
agaaagtcagaagcaatgtggtcca

SEQ ID NO: 2857364 - DNA, 25 bp, Homo sapien
gggacaatctagtgttattgaaatg

SEQ ID NO: 2857365 - DNA, 25 bp, Homo sapien
catgccttggtttagggaaccctca

SEQ ID NO: 2857366 - DNA, 25 bp, Homo sapien
gatagcatcgagcagggcaatggcc

SEQ ID NO: 2857367 - DNA, 25 bp, Homo sapien
gaaaggtgcaatagaaaactgaaat

SEQ ID NO: 2857368 - DNA, 25 bp, Homo sapien
aagatacgttgaactcttctcttgg

SEQ ID NO: 2857369 - DNA, 25 bp, Homo sapien
ttgagaaagatacgttgaactcttc

SEQ ID NO: 2857370 - DNA, 25 bp, Homo sapien
aaaagatgaataggatgtagactca

SEQ ID NO: 2857371 - DNA, 25 bp, Homo sapien
tggtaattcacaggcaaaagatgaa

SEQ ID NO: 2857372 - DNA, 25 bp, Homo sapien
tctttctgaggcaggaacattgcgt

SEQ ID NO: 2857373 - DNA, 25 bp, Homo sapien
tatgggtccagaggaaacttccaaa

SEQ ID NO: 2857374 - DNA, 25 bp, Homo sapien
cattgcgtgtgatggaacgaaactc

SEQ ID NO: 2857375 - DNA, 25 bp, Homo sapien
caggatgcttgtcattatgggtcca

SEQ ID NO: 2857376 - DNA, 25 bp, Homo sapien
cagtgccaactgatgcttgtctcca

SEQ ID NO: 2857377 - DNA, 25 bp, Homo sapien
ttgctgaatctctacagttttaggt

SEQ ID NO: 2857378 - DNA, 25 bp, Homo sapien
caggatcggttgacacttccagtgc

SEQ ID NO: 2857379 - DNA, 25 bp, Homo sapien
tgagtcagcagcagtagtagggtac

SEQ ID NO: 2857380 - DNA, 25 bp, Homo sapien
ttttcagtggaattcatctcatcat

SEQ ID NO: 2857381 - DNA, 25 bp, Homo sapien
attttcagtggaattcatctcatca

SEQ ID NO: 2857382 - DNA, 25 bp, Homo sapien
tggatatatggtgccatcagctctg

SEQ ID NO: 2857383 - DNA, 25 bp, Homo sapien
tcagctctgcctcagagactttcag

SEQ ID NO: 2857384 - DNA, 25 bp, Homo sapien
ctgtgatctgggcttacatgtaaca

SEQ ID NO: 2857385 - DNA, 25 bp, Homo sapien
tttgaatcctgtttgcatccgagct

SEQ ID NO: 2857386 - DNA, 25 bp, Homo sapien
gagtcctctaggtagggaaaggcaa

SEQ ID NO: 2857387 - DNA, 25 bp, Homo sapien
gggcctgacatttagagtcctctag

SEQ ID NO: 2857388 - DNA, 25 bp, Homo sapien
cctgggagagccaatagcaagaaca

SEQ ID NO: 2857389 - DNA, 25 bp, Homo sapien
catagaggaagagaacccgaaagag

SEQ ID NO: 2857390 - DNA, 25 bp, Homo sapien
tgttccatgaagctaacccatagaa

SEQ ID NO: 2857391 - DNA, 25 bp, Homo sapien
ctgttccatgaagctaacccataga

SEQ ID NO: 2857392 - DNA, 25 bp, Homo sapien
tccctccacacatcactttaacagc

SEQ ID NO: 2857393 - DNA, 25 bp, Homo sapien
ccagcaaattgcttagtccatgaat

SEQ ID NO: 2857394 - DNA, 25 bp, Homo sapien
agcaaattgcttagtccatgaattc

SEQ ID NO: 2857395 - DNA, 25 bp, Homo sapien
cacatcactttaacagccactccag

SEQ ID NO: 2857396 - DNA, 25 bp, Homo sapien
tctgtgctcagggatttgaggataa

SEQ ID NO: 2857397 - DNA, 25 bp, Homo sapien
cacaatgggtaattaacttatggag

SEQ ID NO: 2857398 - DNA, 25 bp, Homo sapien
ctgggagagctgatcgacagtgaca

SEQ ID NO: 2857399 - DNA, 25 bp, Homo sapien
gctcttcccctgtttggctcaggga

SEQ ID NO: 2857400 - DNA, 25 bp, Homo sapien
taagttccaacaattggaccagatc

SEQ ID NO: 2857401 - DNA, 25 bp, Homo sapien
cctataattgcattatttgacggtg

SEQ ID NO: 2857402 - DNA, 25 bp, Homo sapien
tttgacggtgtgctgtctagcccac

SEQ ID NO: 2857403 - DNA, 25 bp, Homo sapien
caacaattggaccagatctctttgt

SEQ ID NO: 2857404 - DNA, 25 bp, Homo sapien
tctgggttctatttttggagttggc

SEQ ID NO: 2857405 - DNA, 25 bp, Homo sapien
tttctgtcccaaggatgccgccagc

SEQ ID NO: 2857406 - DNA, 25 bp, Homo sapien
tggagttggctttgtagcagatggt

SEQ ID NO: 2857407 - DNA, 25 bp, Homo sapien
ccgccagctccaaagcaggtgataa

SEQ ID NO: 2857408 - DNA, 25 bp, Homo sapien
tggtttgcagaatctttaagaaact

SEQ ID NO: 2857409 - DNA, 25 bp, Homo sapien
tctttaagaaacttaactatcctca

SEQ ID NO: 2857410 - DNA, 25 bp, Homo sapien
cagtctggtttgcagaatctttaag

SEQ ID NO: 2857411 - DNA, 25 bp, Homo sapien
ctacctcagggccagtctggtttgc

SEQ ID NO: 2857412 - DNA, 25 bp, Homo sapien
ccccattacatttgatcgagtatca

SEQ ID NO: 2857413 - DNA, 25 bp, Homo sapien
ttttccccattacatttgatcgagt

SEQ ID NO: 2857414 - DNA, 25 bp, Homo sapien
cattacatttgatcgagtatcatag

SEQ ID NO: 2857415 - DNA, 25 bp, Homo sapien
catttgatcgagtatcatagtcttc

SEQ ID NO: 2857416 - DNA, 25 bp, Homo sapien
tacagcaatagacatgtactgtctt

SEQ ID NO: 2857417 - DNA, 25 bp, Homo sapien
cagcaatagacatgtactgtcttca

SEQ ID NO: 2857418 - DNA, 25 bp, Homo sapien
gcaatagacatgtactgtcttcagg

SEQ ID NO: 2857419 - DNA, 25 bp, Homo sapien
atacagcaatagacatgtactgtct

SEQ ID NO: 2857420 - DNA, 25 bp, Homo sapien
ctaggaatcgcttttgaattgttcc

SEQ ID NO: 2857421 - DNA, 25 bp, Homo sapien
cgcttttgaattgttcctgatcttc

SEQ ID NO: 2857422 - DNA, 25 bp, Homo sapien
tttgaattgttcctgatcttccctt

SEQ ID NO: 2857423 - DNA, 25 bp, Homo sapien
gaatcgcttttgaattgttcctgat

SEQ ID NO: 2857424 - DNA, 25 bp, Homo sapien
ctgctaggaatccttgcttgattaa

SEQ ID NO: 2857425 - DNA, 25 bp, Homo sapien
tgctaggaatccttgcttgattaaa

SEQ ID NO: 2857426 - DNA, 25 bp, Homo sapien
gctaggaatccttgcttgattaaaa

SEQ ID NO: 2857427 - DNA, 25 bp, Homo sapien
gctgctaggaatccttgcttgatta

SEQ ID NO: 2857428 - DNA, 25 bp, Homo sapien
atcttcctgatcacacactgcttgt

SEQ ID NO: 2857429 - DNA, 25 bp, Homo sapien
tgatcacacactgcttgttcctctt

SEQ ID NO: 2857430 - DNA, 25 bp, Homo sapien
tcctgatcacacactgcttgttcct

SEQ ID NO: 2857431 - DNA, 25 bp, Homo sapien
ttgaacttgtagcagaaatggcttt

SEQ ID NO: 2857432 - DNA, 25 bp, Homo sapien
agggcgagaggaaacttcaaaggca

SEQ ID NO: 2857433 - DNA, 25 bp, Homo sapien
caagggcgagaggaaacttcaaagg

SEQ ID NO: 2857434 - DNA, 25 bp, Homo sapien
gggcgagaggaaacttcaaaggcac

SEQ ID NO: 2857435 - DNA, 25 bp, Homo sapien
gcaagggcgagaggaaacttcaaag

SEQ ID NO: 2857436 - DNA, 25 bp, Homo sapien
tgaagcgggcaggaagagtgatttt

SEQ ID NO: 2857437 - DNA, 25 bp, Homo sapien
aggcacaggggcctttccctgtttg

SEQ ID NO: 2857438 - DNA, 25 bp, Homo sapien
caggcaaagttttggcaggcacagg

SEQ ID NO: 2857439 - DNA, 25 bp, Homo sapien
cctgtttgttttgctgaagcgggca

SEQ ID NO: 2857440 - DNA, 25 bp, Homo sapien
attggcgtcacattctgtactgcag

SEQ ID NO: 2857441 - DNA, 25 bp, Homo sapien
tcacattctgtactgcagagccatg

SEQ ID NO: 2857442 - DNA, 25 bp, Homo sapien
attctgtactgcagagccatgccac

SEQ ID NO: 2857443 - DNA, 25 bp, Homo sapien
cattctgtactgcagagccatgcca

SEQ ID NO: 2857444 - DNA, 25 bp, Homo sapien
taacatgtggaactggctgtccctg

SEQ ID NO: 2857445 - DNA, 25 bp, Homo sapien
gctttagcatcattgactcttgagt

SEQ ID NO: 2857446 - DNA, 25 bp, Homo sapien
ggctgtccctgttttgcaactgctt

SEQ ID NO: 2857447 - DNA, 25 bp, Homo sapien
tattaataacatgtggaactggctg

SEQ ID NO: 2857448 - DNA, 25 bp, Homo sapien
cagaagtgccttaggagttctttgc

SEQ ID NO: 2857449 - DNA, 25 bp, Homo sapien
ttctgcttgtagctcgagccttgcc

SEQ ID NO: 2857450 - DNA, 25 bp, Homo sapien
catctgcctcttcgtcggggattgg

SEQ ID NO: 2857451 - DNA, 25 bp, Homo sapien
gaacagaagcttatggaaggtgtct

SEQ ID NO: 2857452 - DNA, 25 bp, Homo sapien
gcagcccggattcccattgaactgt

SEQ ID NO: 2857453 - DNA, 25 bp, Homo sapien
ttcccttggatgaatggtgtggccc

SEQ ID NO: 2857454 - DNA, 25 bp, Homo sapien
gacttatgcaacatggcagcccgga

SEQ ID NO: 2857455 - DNA, 25 bp, Homo sapien
tgtgggcccttttgcgttaaaagca

SEQ ID NO: 2857456 - DNA, 25 bp, Homo sapien
cacttttattgtcctcaccccatgg

SEQ ID NO: 2857457 - DNA, 25 bp, Homo sapien
gttttcccaactagacttctcaaga

SEQ ID NO: 2857458 - DNA, 25 bp, Homo sapien
caccccatggcattgcagtgtctct

SEQ ID NO: 2857459 - DNA, 25 bp, Homo sapien
agtgtctctctttatagggcctgtt

SEQ ID NO: 2857460 - DNA, 25 bp, Homo sapien
ttaactttccaatgcctttgagaat

SEQ ID NO: 2857461 - DNA, 25 bp, Homo sapien
tgtgtataatcaagctcttatcagt

SEQ ID NO: 2857462 - DNA, 25 bp, Homo sapien
cggcatgaatgaactcatcaaacca

SEQ ID NO: 2857463 - DNA, 25 bp, Homo sapien
tatcagtaattaaagccacggcatg

SEQ ID NO: 2857464 - DNA, 25 bp, Homo sapien
aaggagagagttaacacatgtcggg

SEQ ID NO: 2857465 - DNA, 25 bp, Homo sapien
gagagagttaacacatgtcgggttt

SEQ ID NO: 2857466 - DNA, 25 bp, Homo sapien
acaaggagagagttaacacatgtcg

SEQ ID NO: 2857467 - DNA, 25 bp, Homo sapien
gaggtgataagtgggtgggttggaa

SEQ ID NO: 2857468 - DNA, 25 bp, Homo sapien
cctgcattttgtggtaggccatatg

SEQ ID NO: 2857469 - DNA, 25 bp, Homo sapien
ctgactacagagttgaagccaccaa

SEQ ID NO: 2857470 - DNA, 25 bp, Homo sapien
gccatatggtattggtatctgacta

SEQ ID NO: 2857471 - DNA, 25 bp, Homo sapien
gactagtaggaaatacaagcctctg

SEQ ID NO: 2857472 - DNA, 25 bp, Homo sapien
ggctgacagctgcttacaactcctg

SEQ ID NO: 2857473 - DNA, 25 bp, Homo sapien
gacaagtgaagggaatatggctgac

SEQ ID NO: 2857474 - DNA, 25 bp, Homo sapien
caactcctgtatgtggaaaagtcac

SEQ ID NO: 2857475 - DNA, 25 bp, Homo sapien
ttatcttgacacgagaggaccagga

SEQ ID NO: 2857476 - DNA, 25 bp, Homo sapien
gacattcatcagatagatggtgtct

SEQ ID NO: 2857477 - DNA, 25 bp, Homo sapien
aattattatggaaaagacattcatc

SEQ ID NO: 2857478 - DNA, 25 bp, Homo sapien
attattatggaaaagacattcatca

SEQ ID NO: 2857479 - DNA, 25 bp, Homo sapien
aagacattcatcagatagatggtgt

SEQ ID NO: 2857480 - DNA, 25 bp, Homo sapien
gaagcactacccttccacgtgtctg

SEQ ID NO: 2857481 - DNA, 25 bp, Homo sapien
ggccaggagatgctgcgaagtgcag

SEQ ID NO: 2857482 - DNA, 25 bp, Homo sapien
tccacgtgtctgcatgaagctccct

SEQ ID NO: 2857483 - DNA, 25 bp, Homo sapien
cagcagctggacaccgaagcactac

SEQ ID NO: 2857484 - DNA, 25 bp, Homo sapien
tcacaggagcgccttaggtcatggc

SEQ ID NO: 2857485 - DNA, 25 bp, Homo sapien
acaggagcgccttaggtcatggcca

SEQ ID NO: 2857486 - DNA, 25 bp, Homo sapien
caggagcgccttaggtcatggccac

SEQ ID NO: 2857487 - DNA, 25 bp, Homo sapien
gagcgccttaggtcatggccacttg

SEQ ID NO: 2857488 - DNA, 25 bp, Homo sapien
cctctttcaatgactgtccaggcgc

SEQ ID NO: 2857489 - DNA, 25 bp, Homo sapien
ctcaagtccctctatagctgtttcc

SEQ ID NO: 2857490 - DNA, 25 bp, Homo sapien
gatatttatcagagtgtctaatggg

SEQ ID NO: 2857491 - DNA, 25 bp, Homo sapien
tatcagagtgtctaatgggtaattc

SEQ ID NO: 2857492 - DNA, 25 bp, Homo sapien
ggatgggcaccagtccactttgctt

SEQ ID NO: 2857493 - DNA, 25 bp, Homo sapien
gatgggcaccagtccactttgcttt

SEQ ID NO: 2857494 - DNA, 25 bp, Homo sapien
atgggcaccagtccactttgctttg

SEQ ID NO: 2857495 - DNA, 25 bp, Homo sapien
ggagggtgtcggaagtgagtccaga

SEQ ID NO: 2857496 - DNA, 25 bp, Homo sapien
cccatcttgtgggagaatctctctc

SEQ ID NO: 2857497 - DNA, 25 bp, Homo sapien
tgaatcgatcctgaacctcttggag

SEQ ID NO: 2857498 - DNA, 25 bp, Homo sapien
agtgagtccagaaatgaaggcttcc

SEQ ID NO: 2857499 - DNA, 25 bp, Homo sapien
ttagttttgggatacgagttgggca

SEQ ID NO: 2857500 - DNA, 25 bp, Homo sapien
cagacacgctgttgccgtgactggc

SEQ ID NO: 2857501 - DNA, 25 bp, Homo sapien
taaaggctttggatcacatgacagc

SEQ ID NO: 2857502 - DNA, 25 bp, Homo sapien
tgactggctctacccgcagtactgg

SEQ ID NO: 2857503 - DNA, 25 bp, Homo sapien
tcatgtctaacctcttctttttccc

SEQ ID NO: 2857504 - DNA, 25 bp, Homo sapien
tttcatgtctaacctcttctttttc

SEQ ID NO: 2857505 - DNA, 25 bp, Homo sapien
cttttttcatgtctaacctcttctt

SEQ ID NO: 2857506 - DNA, 25 bp, Homo sapien
ttcatgtctaacctcttctttttcc

SEQ ID NO: 2857507 - DNA, 25 bp, Homo sapien
caagtggaaagtacacctcttggtt

SEQ ID NO: 2857508 - DNA, 25 bp, Homo sapien
ggtttctatgctcagctctataatt

SEQ ID NO: 2857509 - DNA, 25 bp, Homo sapien
ttggtttctatgctcagctctataa

SEQ ID NO: 2857510 - DNA, 25 bp, Homo sapien
tccaagtggaaagtacacctcttgg

SEQ ID NO: 2857511 - DNA, 25 bp, Homo sapien
ggctatctgctaagagatctcccat

SEQ ID NO: 2857512 - DNA, 25 bp, Homo sapien
tgtttcctatgccatggctatctgc

SEQ ID NO: 2857513 - DNA, 25 bp, Homo sapien
tatgccctgcgctagtaaagaagca

SEQ ID NO: 2857514 - DNA, 25 bp, Homo sapien
agaagcagacttccaagcgtcagaa

SEQ ID NO: 2857515 - DNA, 25 bp, Homo sapien
gcttctggagacagaaatggcctgc

SEQ ID NO: 2857516 - DNA, 25 bp, Homo sapien
ctggagacagaaatggcctgcatac

SEQ ID NO: 2857517 - DNA, 25 bp, Homo sapien
cattaccatcagcttctggagacag

SEQ ID NO: 2857518 - DNA, 25 bp, Homo sapien
ttctggagacagaaatggcctgcat

SEQ ID NO: 2857519 - DNA, 25 bp, Homo sapien
tccctggaagcacagagcattgacc

SEQ ID NO: 2857520 - DNA, 25 bp, Homo sapien
tcctctccctggaagcacagagcat

SEQ ID NO: 2857521 - DNA, 25 bp, Homo sapien
ctctccctggaagcacagagcattg

SEQ ID NO: 2857522 - DNA, 25 bp, Homo sapien
tctccctggaagcacagagcattga

SEQ ID NO: 2857523 - DNA, 25 bp, Homo sapien
ccaagttgctaatgaaagaggcccc

SEQ ID NO: 2857524 - DNA, 25 bp, Homo sapien
gacttgctgggcttaattgctttgt

SEQ ID NO: 2857525 - DNA, 25 bp, Homo sapien
gctttgtctctataacagacagaca

SEQ ID NO: 2857526 - DNA, 25 bp, Homo sapien
gatccccattgttgcgacttgctgg

SEQ ID NO: 2857527 - DNA, 25 bp, Homo sapien
gatggggaaatggcttagattcttt

SEQ ID NO: 2857528 - DNA, 25 bp, Homo sapien
cattgctttttgtacggtgaatcct

SEQ ID NO: 2857529 - DNA, 25 bp, Homo sapien
ttgtagacttccctcaagaggaagt

SEQ ID NO: 2857530 - DNA, 25 bp, Homo sapien
taacgttcaataagcgaacatgtga

SEQ ID NO: 2857531 - DNA, 25 bp, Homo sapien
cattgtgacagaggacataatgaca

SEQ ID NO: 2857532 - DNA, 25 bp, Homo sapien
tgtcagtcaccaggaaagctacctg

SEQ ID NO: 2857533 - DNA, 25 bp, Homo sapien
gaatgcatgtctcacttgcccttag

SEQ ID NO: 2857534 - DNA, 25 bp, Homo sapien
ttgcccttaggcagtaacaccttcc

SEQ ID NO: 2857535 - DNA, 25 bp, Homo sapien
actggactctcaaggccccagcacc

SEQ ID NO: 2857536 - DNA, 25 bp, Homo sapien
taaccctcgtaagagagggcaggca

SEQ ID NO: 2857537 - DNA, 25 bp, Homo sapien
ccaggagaggtagtgaatgatcagc

SEQ ID NO: 2857538 - DNA, 25 bp, Homo sapien
tgaattgttcaagcgtgcagactgt

SEQ ID NO: 2857539 - DNA, 25 bp, Homo sapien
gggccatcaatcaccatgagccatg

SEQ ID NO: 2857540 - DNA, 25 bp, Homo sapien
caaagattagaatagtactctggtc

SEQ ID NO: 2857541 - DNA, 25 bp, Homo sapien
tagtactctggtcttgtataaaggc

SEQ ID NO: 2857542 - DNA, 25 bp, Homo sapien
tttttggtgagcccttgatatttct

SEQ ID NO: 2857543 - DNA, 25 bp, Homo sapien
tgtccacttactggatctggtctct

SEQ ID NO: 2857544 - DNA, 25 bp, Homo sapien
tgaatttctcggacagaccgtagag

SEQ ID NO: 2857545 - DNA, 25 bp, Homo sapien
ctttgatgaatttctcggacagacc

SEQ ID NO: 2857546 - DNA, 25 bp, Homo sapien
gacagaccgtagagatttataaaac

SEQ ID NO: 2857547 - DNA, 25 bp, Homo sapien
gactagtctttgatgaatttctcgg

SEQ ID NO: 2857548 - DNA, 25 bp, Homo sapien
tccggcctatgatgtgacagatgac

SEQ ID NO: 2857549 - DNA, 25 bp, Homo sapien
tagggtgacacatccggcctatgat

SEQ ID NO: 2857550 - DNA, 25 bp, Homo sapien
ttaaatagggtgacacatccggcct

SEQ ID NO: 2857551 - DNA, 25 bp, Homo sapien
gacacatccggcctatgatgtgaca

SEQ ID NO: 2857552 - DNA, 25 bp, Homo sapien
gacacgtgactgaactccttaagca

SEQ ID NO: 2857553 - DNA, 25 bp, Homo sapien
agtcaatgccatgttgaagtcggct

SEQ ID NO: 2857554 - DNA, 25 bp, Homo sapien
agtgtccacaactgccatcggcagc

SEQ ID NO: 2857555 - DNA, 25 bp, Homo sapien
gaagtcggctgtcatctccaatgag

SEQ ID NO: 2857556 - DNA, 25 bp, Homo sapien
gagacagggagtcaagccacattcc

SEQ ID NO: 2857557 - DNA, 25 bp, Homo sapien
ttcctgtagaggagtccaaattctt

SEQ ID NO: 2857558 - DNA, 25 bp, Homo sapien
gggagtcaagccacattcctgtaga

SEQ ID NO: 2857559 - DNA, 25 bp, Homo sapien
caagccacattcctgtagaggagtc

SEQ ID NO: 2857560 - DNA, 25 bp, Homo sapien
ccctggcgttcatcaaagactcctt

SEQ ID NO: 2857561 - DNA, 25 bp, Homo sapien
cctggcgttcatcaaagactccttt

SEQ ID NO: 2857562 - DNA, 25 bp, Homo sapien
ctggcgttcatcaaagactcctttc

SEQ ID NO: 2857563 - DNA, 25 bp, Homo sapien
tgtgtgtaaggtgaagagatagaaa

SEQ ID NO: 2857564 - DNA, 25 bp, Homo sapien
gtgtgtgtaaggtgaagagatagaa

SEQ ID NO: 2857565 - DNA, 25 bp, Homo sapien
caaaggcattgactagcattggtca

SEQ ID NO: 2857566 - DNA, 25 bp, Homo sapien
gaataataccctctactcaggagca

SEQ ID NO: 2857567 - DNA, 25 bp, Homo sapien
gaactacaacctccttctgttagag

SEQ ID NO: 2857568 - DNA, 25 bp, Homo sapien
tgaagtcatgaagccacgcaaaacc

SEQ ID NO: 2857569 - DNA, 25 bp, Homo sapien
tggccatgccatagaaatcacactg

SEQ ID NO: 2857570 - DNA, 25 bp, Homo sapien
catgccatagaaatcacactgaggg

SEQ ID NO: 2857571 - DNA, 25 bp, Homo sapien
gcagtacgaacttaaatttagaagc

SEQ ID NO: 2857572 - DNA, 25 bp, Homo sapien
ctgtggccatgccatagaaatcaca

SEQ ID NO: 2857573 - DNA, 25 bp, Homo sapien
ttaagctaaacatacttctcgactg

SEQ ID NO: 2857574 - DNA, 25 bp, Homo sapien
agctaaacatacttctcgactgaga

SEQ ID NO: 2857575 - DNA, 25 bp, Homo sapien
cgactgagaatatccatcttggttt

SEQ ID NO: 2857576 - DNA, 25 bp, Homo sapien
gaaaggatccctgaattaagctaaa

SEQ ID NO: 2857577 - DNA, 25 bp, Homo sapien
cctcatccacatgtttcagtacacc

SEQ ID NO: 2857578 - DNA, 25 bp, Homo sapien
tcatccacatgtttcagtacaccca

SEQ ID NO: 2857579 - DNA, 25 bp, Homo sapien
tgcctcatccacatgtttcagtaca

SEQ ID NO: 2857580 - DNA, 25 bp, Homo sapien
catccacatgtttcagtacacccat

SEQ ID NO: 2857581 - DNA, 25 bp, Homo sapien
tgatgtgtgccccaaaacacgtgag

SEQ ID NO: 2857582 - DNA, 25 bp, Homo sapien
ttatggtttaaggtgctgacttcag

SEQ ID NO: 2857583 - DNA, 25 bp, Homo sapien
aactcagagccattacattgtaaga

SEQ ID NO: 2857584 - DNA, 25 bp, Homo sapien
ttgtcaatggccaacagaaggaagg

SEQ ID NO: 2857585 - DNA, 25 bp, Homo sapien
agtcctcctatagctgatgcaatgg

SEQ ID NO: 2857586 - DNA, 25 bp, Homo sapien
gaaaatcttagagcacaaccccagt

SEQ ID NO: 2857587 - DNA, 25 bp, Homo sapien
gcttcataccagagacgacttttag

SEQ ID NO: 2857588 - DNA, 25 bp, Homo sapien
gaaaagatccctcctatacctgaaa

SEQ ID NO: 2857589 - DNA, 25 bp, Homo sapien
gagatgccgagagctcaaaggatga

SEQ ID NO: 2857590 - DNA, 25 bp, Homo sapien
acttagtgagactcctgcacattgg

SEQ ID NO: 2857591 - DNA, 25 bp, Homo sapien
cctgcacattggaggcaagagatgc

SEQ ID NO: 2857592 - DNA, 25 bp, Homo sapien
tatcaagtggtgaaagatggatcaa

SEQ ID NO: 2857593 - DNA, 25 bp, Homo sapien
aggtgcaaatgcaaacgtagccaag

SEQ ID NO: 2857594 - DNA, 25 bp, Homo sapien
caaggttcaactaccctgattttgc

SEQ ID NO: 2857595 - DNA, 25 bp, Homo sapien
ccagctgctgtaaagccagagaggg

SEQ ID NO: 2857596 - DNA, 25 bp, Homo sapien
caaagaagtctgcttcttgctgctt

SEQ ID NO: 2857597 - DNA, 25 bp, Homo sapien
tcattaaagacacctgcttggcttc

SEQ ID NO: 2857598 - DNA, 25 bp, Homo sapien
attcatttttatgggcggaggcagc

SEQ ID NO: 2857599 - DNA, 25 bp, Homo sapien
ggcttcatttcgcttcacagtgtgt

SEQ ID NO: 2857600 - DNA, 25 bp, Homo sapien
catctttggcccgtgtgtctgaaat

SEQ ID NO: 2857601 - DNA, 25 bp, Homo sapien
cattattaatgtgcaaccagttgac

SEQ ID NO: 2857602 - DNA, 25 bp, Homo sapien
gtaggctttgctcaggccttggttg

SEQ ID NO: 2857603 - DNA, 25 bp, Homo sapien
tctgctttcctgtcgaagtcccaaa

SEQ ID NO: 2857604 - DNA, 25 bp, Homo sapien
aaagtgtcgaggtcttcttggtcaa

SEQ ID NO: 2857605 - DNA, 25 bp, Homo sapien
cactctgcgtctgaataagccgctg

SEQ ID NO: 2857606 - DNA, 25 bp, Homo sapien
tgcactctgcgtctgaataagccgc

SEQ ID NO: 2857607 - DNA, 25 bp, Homo sapien
cctgcactctgcgtctgaataagcc

SEQ ID NO: 2857608 - DNA, 25 bp, Homo sapien
gcactctgcgtctgaataagccgct

SEQ ID NO: 2857609 - DNA, 25 bp, Homo sapien
tcaggagagggtgatggaagcttct

SEQ ID NO: 2857610 - DNA, 25 bp, Homo sapien
tcctcttcaggagagggtgatggaa

SEQ ID NO: 2857611 - DNA, 25 bp, Homo sapien
gagggtgatggaagcttctgaccat

SEQ ID NO: 2857612 - DNA, 25 bp, Homo sapien
ttcctcttcaggagagggtgatgga

SEQ ID NO: 2857613 - DNA, 25 bp, Homo sapien
caccacgcagattttgagtaagaac

SEQ ID NO: 2857614 - DNA, 25 bp, Homo sapien
acaaaatcaccacgcagattttgag

SEQ ID NO: 2857615 - DNA, 25 bp, Homo sapien
aagttcagagttgaagcagattctg

SEQ ID NO: 2857616 - DNA, 25 bp, Homo sapien
aagaactctacttgttgtaaaacag

SEQ ID NO: 2857617 - DNA, 25 bp, Homo sapien
ttagcctgcggagtcaattggattg

SEQ ID NO: 2857618 - DNA, 25 bp, Homo sapien
cctgcggagtcaattggattgtaat

SEQ ID NO: 2857619 - DNA, 25 bp, Homo sapien
tctcagttctcagctcaggagtgga

SEQ ID NO: 2857620 - DNA, 25 bp, Homo sapien
ggagtcaattggattgtaattcttc

SEQ ID NO: 2857621 - DNA, 25 bp, Homo sapien
gggcatgttggcaggtgcctctgag

SEQ ID NO: 2857622 - DNA, 25 bp, Homo sapien
ctggaggggcatgttggcaggtgcc

SEQ ID NO: 2857623 - DNA, 25 bp, Homo sapien
gcatgttggcaggtgcctctgagat

SEQ ID NO: 2857624 - DNA, 25 bp, Homo sapien
ggaggggcatgttggcaggtgcctc

SEQ ID NO: 2857625 - DNA, 25 bp, Homo sapien
ttgctgtggcttcattggtccctgt

SEQ ID NO: 2857626 - DNA, 25 bp, Homo sapien
ggcttcattggtccctgtagatgtg

SEQ ID NO: 2857627 - DNA, 25 bp, Homo sapien
cattggtccctgtagatgtgttttt

SEQ ID NO: 2857628 - DNA, 25 bp, Homo sapien
gtccctgtagatgtgttttttcctc

SEQ ID NO: 2857629 - DNA, 25 bp, Homo sapien
cactagcattcgcagagacattggg

SEQ ID NO: 2857630 - DNA, 25 bp, Homo sapien
ggagtcactgctcctgccactagca

SEQ ID NO: 2857631 - DNA, 25 bp, Homo sapien
ggaatatttagtatgtggatggcag

SEQ ID NO: 2857632 - DNA, 25 bp, Homo sapien
cctctcatgcgtcttctccactgtg

SEQ ID NO: 2857633 - DNA, 25 bp, Homo sapien
cttcttgtagaggtcctgaagtttg

SEQ ID NO: 2857634 - DNA, 25 bp, Homo sapien
ttcttgtagaggtcctgaagtttgc

SEQ ID NO: 2857635 - DNA, 25 bp, Homo sapien
gggtgtttaagtcttcctgcagtgc

SEQ ID NO: 2857636 - DNA, 25 bp, Homo sapien
tgttgaagggcataagccagggggt

SEQ ID NO: 2857637 - DNA, 25 bp, Homo sapien
taggatcagacatatgacagcaggt

SEQ ID NO: 2857638 - DNA, 25 bp, Homo sapien
ttttgatcccgaaatggcaacagac

SEQ ID NO: 2857639 - DNA, 25 bp, Homo sapien
ctggtgcctgtttaggatcagacat

SEQ ID NO: 2857640 - DNA, 25 bp, Homo sapien
tgacagcaggtggaagtgtgccttt

SEQ ID NO: 2857641 - DNA, 25 bp, Homo sapien
cagagtaacttcactgccataattc

SEQ ID NO: 2857642 - DNA, 25 bp, Homo sapien
tccattgtgtatagctggagaggag

SEQ ID NO: 2857643 - DNA, 25 bp, Homo sapien
tcctgagcaagcctataattagctg

SEQ ID NO: 2857644 - DNA, 25 bp, Homo sapien
catgagtagaatcagaatgctctcc

SEQ ID NO: 2857645 - DNA, 25 bp, Homo sapien
catcttccaagctgtcccaaggagc

SEQ ID NO: 2857646 - DNA, 25 bp, Homo sapien
tgtcccaaggagcaggtcatagacc

SEQ ID NO: 2857647 - DNA, 25 bp, Homo sapien
tggaaagggtaactgatcccaggat

SEQ ID NO: 2857648 - DNA, 25 bp, Homo sapien
tagacctgagctaggaagttccctt

SEQ ID NO: 2857649 - DNA, 25 bp, Homo sapien
tgttcgttgcctgcacaatatccat

SEQ ID NO: 2857650 - DNA, 25 bp, Homo sapien
taagcccatcctaggtttctcatca

SEQ ID NO: 2857651 - DNA, 25 bp, Homo sapien
tgcacctagggcagactgttcgttg

SEQ ID NO: 2857652 - DNA, 25 bp, Homo sapien
tgttagagtggaaattacatgcacc

SEQ ID NO: 2857653 - DNA, 25 bp, Homo sapien
ctccagcattttcacgatacacaat

SEQ ID NO: 2857654 - DNA, 25 bp, Homo sapien
ataacctgctacaaggactgtaagg

SEQ ID NO: 2857655 - DNA, 25 bp, Homo sapien
gctacaaggactgtaaggccctgat

SEQ ID NO: 2857656 - DNA, 25 bp, Homo sapien
cagcattttcacgatacacaatggg

SEQ ID NO: 2857657 - DNA, 25 bp, Homo sapien
gcacaccgggactccggcacgtggg

SEQ ID NO: 2857658 - DNA, 25 bp, Homo sapien
actccggcacgtgggcgcgcgggag

SEQ ID NO: 2857659 - DNA, 25 bp, Homo sapien
atcgccctccatgctgcgggagctg

SEQ ID NO: 2857660 - DNA, 25 bp, Homo sapien
ggagccggcgagatcgccctccatg

SEQ ID NO: 2857661 - DNA, 25 bp, Homo sapien
gcgccctctgccaactcgccaccca

SEQ ID NO: 2857662 - DNA, 25 bp, Homo sapien
cgccctctgccaactcgccacccat

SEQ ID NO: 2857663 - DNA, 25 bp, Homo sapien
ggcgcgccctctgccaactcgccac

SEQ ID NO: 2857664 - DNA, 25 bp, Homo sapien
cgcgccctctgccaactcgccaccc

SEQ ID NO: 2857665 - DNA, 25 bp, Homo sapien
aaatgcctcctgtcggaaaacagcg

SEQ ID NO: 2857666 - DNA, 25 bp, Homo sapien
aaaacagcggcctcattgtgtgccc

SEQ ID NO: 2857667 - DNA, 25 bp, Homo sapien
ttgagattcatacacaagggcaggt

SEQ ID NO: 2857668 - DNA, 25 bp, Homo sapien
tgggcggcgagccaaaactcatagt

SEQ ID NO: 2857669 - DNA, 25 bp, Homo sapien
cttgacgtttgaaagggagccagga

SEQ ID NO: 2857670 - DNA, 25 bp, Homo sapien
tatctaagtagagtgatttcccaga

SEQ ID NO: 2857671 - DNA, 25 bp, Homo sapien
tgatttcccagatgtgtagcacaca

SEQ ID NO: 2857672 - DNA, 25 bp, Homo sapien
cacacactgggtgatttagcatggg

SEQ ID NO: 2857673 - DNA, 25 bp, Homo sapien
acaagtgtaggaagtttagattctt

SEQ ID NO: 2857674 - DNA, 25 bp, Homo sapien
caagtgtaggaagtttagattcttg

SEQ ID NO: 2857675 - DNA, 25 bp, Homo sapien
attggagatgacacaagtgtaggaa

SEQ ID NO: 2857676 - DNA, 25 bp, Homo sapien
cccattggagatgacacaagtgtag

SEQ ID NO: 2857677 - DNA, 25 bp, Homo sapien
tcttgtccagcaaactgttttgtca

SEQ ID NO: 2857678 - DNA, 25 bp, Homo sapien
catcttgtccagcaaactgttttgt

SEQ ID NO: 2857679 - DNA, 25 bp, Homo sapien
gacatcttgtccagcaaactgtttt

SEQ ID NO: 2857680 - DNA, 25 bp, Homo sapien
agacatcttgtccagcaaactgttt

SEQ ID NO: 2857681 - DNA, 25 bp, Homo sapien
tttttaattcaattgtatgcacttt

SEQ ID NO: 2857682 - DNA, 25 bp, Homo sapien
atttttaattcaattgtatgcactt

SEQ ID NO: 2857683 - DNA, 25 bp, Homo sapien
cacacaatgaaattaccaataatca

SEQ ID NO: 2857684 - DNA, 25 bp, Homo sapien
ttccacacaatgaaattaccaataa

SEQ ID NO: 2857685 - DNA, 25 bp, Homo sapien
agaactgaaagggacatgccccggg

SEQ ID NO: 2857686 - DNA, 25 bp, Homo sapien
catgccccgggttgtacaggatgtt

SEQ ID NO: 2857687 - DNA, 25 bp, Homo sapien
ttattgtggttgaggctaagaactg

SEQ ID NO: 2857688 - DNA, 25 bp, Homo sapien
tcctcttcaggatcagagttccttc

SEQ ID NO: 2857689 - DNA, 25 bp, Homo sapien
tcagggaccaccatcgcttctctta

SEQ ID NO: 2857690 - DNA, 25 bp, Homo sapien
cagggaccaccatcgcttctcttac

SEQ ID NO: 2857691 - DNA, 25 bp, Homo sapien
gatatccgcttttaacgtcagccat

SEQ ID NO: 2857692 - DNA, 25 bp, Homo sapien
aagatatccgcttttaacgtcagcc

SEQ ID NO: 2857693 - DNA, 25 bp, Homo sapien
caaccaaagatatccgcttttaacg

SEQ ID NO: 2857694 - DNA, 25 bp, Homo sapien
caaagatatccgcttttaacgtcag

SEQ ID NO: 2857695 - DNA, 25 bp, Homo sapien
tgatgagtaatacacacttacttag

SEQ ID NO: 2857696 - DNA, 25 bp, Homo sapien
ttattgacttagtgaccttacaagg

SEQ ID NO: 2857697 - DNA, 25 bp, Homo sapien
agcatcttctgccacatctagtttc

SEQ ID NO: 2857698 - DNA, 25 bp, Homo sapien
gaatttctgttactaagaaagagag

SEQ ID NO: 2857699 - DNA, 25 bp, Homo sapien
tgttctgttcacatgcacaagcccc

SEQ ID NO: 2857700 - DNA, 25 bp, Homo sapien
gggcaccataaagcatttctgtaaa

SEQ ID NO: 2857701 - DNA, 25 bp, Homo sapien
taagtcatggcatccagtagccctc

SEQ ID NO: 2857702 - DNA, 25 bp, Homo sapien
ccagatttacacaaagagggacata

SEQ ID NO: 2857703 - DNA, 25 bp, Homo sapien
caggacagaatgctatctgaattat

SEQ ID NO: 2857704 - DNA, 25 bp, Homo sapien
ggacagaatgctatctgaattatgc

SEQ ID NO: 2857705 - DNA, 25 bp, Homo sapien
cagaatgctatctgaattatgctgt

SEQ ID NO: 2857706 - DNA, 25 bp, Homo sapien
aatgctatctgaattatgctgtctc

SEQ ID NO: 2857707 - DNA, 25 bp, Homo sapien
agggcccttactgggctggtgatac

SEQ ID NO: 2857708 - DNA, 25 bp, Homo sapien
actgctgaaacctgcctagcctcaa

SEQ ID NO: 2857709 - DNA, 25 bp, Homo sapien
tagcctcaaaaaatgctcagagagg

SEQ ID NO: 2857710 - DNA, 25 bp, Homo sapien
ctcttttatccaagggcccttactg

SEQ ID NO: 2857711 - DNA, 25 bp, Homo sapien
aaatctgacatgaatatggcgacat

SEQ ID NO: 2857712 - DNA, 25 bp, Homo sapien
cacatcagttgaaggatctgagctg

SEQ ID NO: 2857713 - DNA, 25 bp, Homo sapien
tcaagatccacatcagttgaaggat

SEQ ID NO: 2857714 - DNA, 25 bp, Homo sapien
gcagtgtgttcttcgggattcatct

SEQ ID NO: 2857715 - DNA, 25 bp, Homo sapien
ttcccctgtgtttgggtatgcttac

SEQ ID NO: 2857716 - DNA, 25 bp, Homo sapien
tgagatgcgtgcttcgtgggaatca

SEQ ID NO: 2857717 - DNA, 25 bp, Homo sapien
aagagattcacttaagattttcaac

SEQ ID NO: 2857718 - DNA, 25 bp, Homo sapien
cttacttgcaggctctcaagagatt

SEQ ID NO: 2857719 - DNA, 25 bp, Homo sapien
ttcaggtttaactggaagatgctgc

SEQ ID NO: 2857720 - DNA, 25 bp, Homo sapien
cttcaggtttaactggaagatgctg

SEQ ID NO: 2857721 - DNA, 25 bp, Homo sapien
caggtttaactggaagatgctgcat

SEQ ID NO: 2857722 - DNA, 25 bp, Homo sapien
tcaggtttaactggaagatgctgca

SEQ ID NO: 2857723 - DNA, 25 bp, Homo sapien
tgactgtgccgcatctcatggccat

SEQ ID NO: 2857724 - DNA, 25 bp, Homo sapien
tatcacagaccgtatttggggcaac

SEQ ID NO: 2857725 - DNA, 25 bp, Homo sapien
tttggacctcttgtgggcacccgcc

SEQ ID NO: 2857726 - DNA, 25 bp, Homo sapien
ttgatgtggtccatgtgactgtgcc

SEQ ID NO: 2857727 - DNA, 25 bp, Homo sapien
gagaggtccggagtattcccagtga

SEQ ID NO: 2857728 - DNA, 25 bp, Homo sapien
aggagaggtccggagtattcccagt

SEQ ID NO: 2857729 - DNA, 25 bp, Homo sapien
ggtccggagtattcccagtgaagtg

SEQ ID NO: 2857730 - DNA, 25 bp, Homo sapien
aactatcagagaggagaggtccgga

SEQ ID NO: 2857731 - DNA, 25 bp, Homo sapien
ccagagatggtcttcgatcttaaag

SEQ ID NO: 2857732 - DNA, 25 bp, Homo sapien
gagatggtcttcgatcttaaagagc

SEQ ID NO: 2857733 - DNA, 25 bp, Homo sapien
catctattttaatcaggcactgaat

SEQ ID NO: 2857734 - DNA, 25 bp, Homo sapien
gatggtcttcgatcttaaagagcat

SEQ ID NO: 2857735 - DNA, 25 bp, Homo sapien
gatatagcatggattgggatccttt

SEQ ID NO: 2857736 - DNA, 25 bp, Homo sapien
ggatatagcatggattgggatcctt

SEQ ID NO: 2857737 - DNA, 25 bp, Homo sapien
tgatacatttgggttagggtctgac

SEQ ID NO: 2857738 - DNA, 25 bp, Homo sapien
acatttgggttagggtctgacctgc

SEQ ID NO: 2857739 - DNA, 25 bp, Homo sapien
tactttagctgccagaggttctttc

SEQ ID NO: 2857740 - DNA, 25 bp, Homo sapien
cagaggttctttcacaggatgaaag

SEQ ID NO: 2857741 - DNA, 25 bp, Homo sapien
aggatgaaagggcttatctaacatc

SEQ ID NO: 2857742 - DNA, 25 bp, Homo sapien
tgaaagggcttatctaacatcctaa

SEQ ID NO: 2857743 - DNA, 25 bp, Homo sapien
ggtcttgctggtccaaaagacgtac

SEQ ID NO: 2857744 - DNA, 25 bp, Homo sapien
tatttcacttctgtttgcatcctgg

SEQ ID NO: 2857745 - DNA, 25 bp, Homo sapien
gctgtgatgctgaaaacagtcatgg

SEQ ID NO: 2857746 - DNA, 25 bp, Homo sapien
atgaaatatcatgtcgagttcccat

SEQ ID NO: 2857747 - DNA, 25 bp, Homo sapien
tcctggcgctgtaatgaaatatcat

SEQ ID NO: 2857748 - DNA, 25 bp, Homo sapien
ttccaagaaaatccctgtcattatg

SEQ ID NO: 2857749 - DNA, 25 bp, Homo sapien
tgataagccaccgtcagcccctaaa

SEQ ID NO: 2857750 - DNA, 25 bp, Homo sapien
agcccctaaagatagctctgcctgt

SEQ ID NO: 2857751 - DNA, 25 bp, Homo sapien
gttatgcacttcctttcaaacctag

SEQ ID NO: 2857752 - DNA, 25 bp, Homo sapien
ttgggtagataatgtaggcgctggc

SEQ ID NO: 2857753 - DNA, 25 bp, Homo sapien
agcttgggtagataatgtaggcgct

SEQ ID NO: 2857754 - DNA, 25 bp, Homo sapien
ttgagcttgggtagataatgtaggc

SEQ ID NO: 2857755 - DNA, 25 bp, Homo sapien
gggtagataatgtaggcgctggcat

SEQ ID NO: 2857756 - DNA, 25 bp, Homo sapien
ctctattagtctcatagggctgcca

SEQ ID NO: 2857757 - DNA, 25 bp, Homo sapien
ccagaaatcgaaagtcaaggcgtca

SEQ ID NO: 2857758 - DNA, 25 bp, Homo sapien
ggttttagagaatccatccttggct

SEQ ID NO: 2857759 - DNA, 25 bp, Homo sapien
gctctttcagcttgtggtggcacca

SEQ ID NO: 2857760 - DNA, 25 bp, Homo sapien
tgcaagagctcttcttaggcaattc

SEQ ID NO: 2857761 - DNA, 25 bp, Homo sapien
gacttccacagatccagacagcatg

SEQ ID NO: 2857762 - DNA, 25 bp, Homo sapien
tggtctcagggtgacttccacagat

SEQ ID NO: 2857763 - DNA, 25 bp, Homo sapien
cttcttaggcaattcagtgacgtcc

SEQ ID NO: 2857764 - DNA, 25 bp, Homo sapien
ttggcagacaattgatgtatgattt

SEQ ID NO: 2857765 - DNA, 25 bp, Homo sapien
tgatgtatgatttgttgcaaatcca

SEQ ID NO: 2857766 - DNA, 25 bp, Homo sapien
cataagattggcagacaattgatgt

SEQ ID NO: 2857767 - DNA, 25 bp, Homo sapien
taagattggcagacaattgatgtat

SEQ ID NO: 2857768 - DNA, 25 bp, Homo sapien
caatccacagggtatccaatgatgt

SEQ ID NO: 2857769 - DNA, 25 bp, Homo sapien
tgagccaactagatgtccaggaagg

SEQ ID NO: 2857770 - DNA, 25 bp, Homo sapien
gaccatgtagtcagcgatgtctggg

SEQ ID NO: 2857771 - DNA, 25 bp, Homo sapien
gaagggtattcccacaggtcacaat

SEQ ID NO: 2857772 - DNA, 25 bp, Homo sapien
ctctgggactggaaattgactcctc

SEQ ID NO: 2857773 - DNA, 25 bp, Homo sapien
gactggaaattgactcctccttccc

SEQ ID NO: 2857774 - DNA, 25 bp, Homo sapien
attttctgtgcccaaaagcatccat

SEQ ID NO: 2857775 - DNA, 25 bp, Homo sapien
aaattgactcctccttcccatagtt

SEQ ID NO: 2857776 - DNA, 25 bp, Homo sapien
tgcccacatctctccaagcctgcaa

SEQ ID NO: 2857777 - DNA, 25 bp, Homo sapien
atcaatgatgaaatcctcctgaacc

SEQ ID NO: 2857778 - DNA, 25 bp, Homo sapien
cactgtgttaccatctgagttacca

SEQ ID NO: 2857779 - DNA, 25 bp, Homo sapien
ctccaagcctgcaaccactgtgtta

SEQ ID NO: 2857780 - DNA, 25 bp, Homo sapien
tggtctccacagtgcagcagatgga

SEQ ID NO: 2857781 - DNA, 25 bp, Homo sapien
gatggaggagggcggatccagctgg

SEQ ID NO: 2857782 - DNA, 25 bp, Homo sapien
ggcggatccagctggaaaggctcca

SEQ ID NO: 2857783 - DNA, 25 bp, Homo sapien
aaggctccagcccactgagatgagg

SEQ ID NO: 2857784 - DNA, 25 bp, Homo sapien
agcccatttgtcagtatcatttgca

SEQ ID NO: 2857785 - DNA, 25 bp, Homo sapien
ttcttcactgacttgttccagccca

SEQ ID NO: 2857786 - DNA, 25 bp, Homo sapien
cttgttccagcccatttgtcagtat

SEQ ID NO: 2857787 - DNA, 25 bp, Homo sapien
gttccagcccatttgtcagtatcat

SEQ ID NO: 2857788 - DNA, 25 bp, Homo sapien
caatctctccttgtttgaagacctt

SEQ ID NO: 2857789 - DNA, 25 bp, Homo sapien
gaccttgttggcttaatcataacca

SEQ ID NO: 2857790 - DNA, 25 bp, Homo sapien
tctctccttgtttgaagaccttgtt

SEQ ID NO: 2857791 - DNA, 25 bp, Homo sapien
tctccttgtttgaagaccttgttgg

SEQ ID NO: 2857792 - DNA, 25 bp, Homo sapien
gaggataactccattcccctgcttt

SEQ ID NO: 2857793 - DNA, 25 bp, Homo sapien
tccaaatctttaacaaggtaagatc

SEQ ID NO: 2857794 - DNA, 25 bp, Homo sapien
tctgtctcctttctcggaaggcagt

SEQ ID NO: 2857795 - DNA, 25 bp, Homo sapien
cctttctcggaaggcagtttgagtt

SEQ ID NO: 2857796 - DNA, 25 bp, Homo sapien
tggaatccagtgtcgagcatccctg

SEQ ID NO: 2857797 - DNA, 25 bp, Homo sapien
ttgacgcttctcaagagaggtttag

SEQ ID NO: 2857798 - DNA, 25 bp, Homo sapien
gaaaggctcttaggacaggtcacca

SEQ ID NO: 2857799 - DNA, 25 bp, Homo sapien
agcatccctgtcagaaaggctctta

SEQ ID NO: 2857800 - DNA, 25 bp, Homo sapien
cacccacagctgaaagatatgcagg

SEQ ID NO: 2857801 - DNA, 25 bp, Homo sapien
cagatccaagggatttgctctgaat

SEQ ID NO: 2857802 - DNA, 25 bp, Homo sapien
gagctgcatttaggatccagatcca

SEQ ID NO: 2857803 - DNA, 25 bp, Homo sapien
aattagtgcgagtctagatttggac

SEQ ID NO: 2857804 - DNA, 25 bp, Homo sapien
tgcagggtatccaatgaagctcctt

SEQ ID NO: 2857805 - DNA, 25 bp, Homo sapien
gctccttttactacggagagagtag

SEQ ID NO: 2857806 - DNA, 25 bp, Homo sapien
ttcagcttttataccttgcagggta

SEQ ID NO: 2857807 - DNA, 25 bp, Homo sapien
tgaagctccttttactacggagaga

SEQ ID NO: 2857808 - DNA, 25 bp, Homo sapien
ataacccattatttgaaagtcccat

SEQ ID NO: 2857809 - DNA, 25 bp, Homo sapien
cccattatttgaaagtcccatatgt

SEQ ID NO: 2857810 - DNA, 25 bp, Homo sapien
tcataacccattatttgaaagtccc

SEQ ID NO: 2857811 - DNA, 25 bp, Homo sapien
tagccacaggggttttcttcataac

SEQ ID NO: 2857812 - DNA, 25 bp, Homo sapien
gaagcaaggcttgacaggtctgaaa

SEQ ID NO: 2857813 - DNA, 25 bp, Homo sapien
gtactaggtcgagaatctccttctt

SEQ ID NO: 2857814 - DNA, 25 bp, Homo sapien
tcttctcctctccaatagtcttgaa

SEQ ID NO: 2857815 - DNA, 25 bp, Homo sapien
ctaggtcgagaatctccttcttctc

SEQ ID NO: 2857816 - DNA, 25 bp, Homo sapien
tctccaatagtcttgaaatcttcat

SEQ ID NO: 2857817 - DNA, 25 bp, Homo sapien
tcaggcatgttcagtgtggggtggc

SEQ ID NO: 2857818 - DNA, 25 bp, Homo sapien
ttagctcccgaaatcataagagatc

SEQ ID NO: 2857819 - DNA, 25 bp, Homo sapien
agctcccgaaatcataagagatcag

SEQ ID NO: 2857820 - DNA, 25 bp, Homo sapien
tgcttagctcccgaaatcataagag

SEQ ID NO: 2857821 - DNA, 25 bp, Homo sapien
gggagaggcggtactgtggtcatag

SEQ ID NO: 2857822 - DNA, 25 bp, Homo sapien
aggcggtactgtggtcataggcggg

SEQ ID NO: 2857823 - DNA, 25 bp, Homo sapien
tactgtggtcataggcggggctgct

SEQ ID NO: 2857824 - DNA, 25 bp, Homo sapien
ttgagacattggccagggggagagg

SEQ ID NO: 2857825 - DNA, 25 bp, Homo sapien
atagacaacagtgagtgtggtaaga

SEQ ID NO: 2857826 - DNA, 25 bp, Homo sapien
tagacaacagtgagtgtggtaagaa

SEQ ID NO: 2857827 - DNA, 25 bp, Homo sapien
acatttctcttctactggaaacatt

SEQ ID NO: 2857828 - DNA, 25 bp, Homo sapien
ctcttctactggaaacattcttttt

SEQ ID NO: 2857829 - DNA, 25 bp, Homo sapien
cttcttgtgaagtaacatttctctt

SEQ ID NO: 2857830 - DNA, 25 bp, Homo sapien
ttctcttctactggaaacattcttt

SEQ ID NO: 2857831 - DNA, 25 bp, Homo sapien
cctggttttgccttctcgggatgcc

SEQ ID NO: 2857832 - DNA, 25 bp, Homo sapien
tctgtgaaacccgtgtctgtgtgtg

SEQ ID NO: 2857833 - DNA, 25 bp, Homo sapien
cttggtgccagggtatctgtgaaac

SEQ ID NO: 2857834 - DNA, 25 bp, Homo sapien
gtgctttatgctcacaggaatcatt

SEQ ID NO: 2857835 - DNA, 25 bp, Homo sapien
tccactctctcttagatcttcaagc

SEQ ID NO: 2857836 - DNA, 25 bp, Homo sapien
ttccactctctcttagatcttcaag

SEQ ID NO: 2857837 - DNA, 25 bp, Homo sapien
ccactctctcttagatcttcaagcc

SEQ ID NO: 2857838 - DNA, 25 bp, Homo sapien
ctgatagagccaagtagccctccgt

SEQ ID NO: 2857839 - DNA, 25 bp, Homo sapien
tgtcgaaagactgacttgtgctcct

SEQ ID NO: 2857840 - DNA, 25 bp, Homo sapien
tcagtgggcttcctgccaaggctag

SEQ ID NO: 2857841 - DNA, 25 bp, Homo sapien
cacaagatggagcttgtcgaaagac

SEQ ID NO: 2857842 - DNA, 25 bp, Homo sapien
gaagctgtttactgttccctcatgt

SEQ ID NO: 2857843 - DNA, 25 bp, Homo sapien
atgggaagctgtttactgttccctc

SEQ ID NO: 2857844 - DNA, 25 bp, Homo sapien
tactgttccctcatgttcctctaga

SEQ ID NO: 2857845 - DNA, 25 bp, Homo sapien
gctgtttactgttccctcatgttcc

SEQ ID NO: 2857846 - DNA, 25 bp, Homo sapien
tcaagttttgaggaaccctgtcaga

SEQ ID NO: 2857847 - DNA, 25 bp, Homo sapien
tgcaaatggaggagtgagacatgta

SEQ ID NO: 2857848 - DNA, 25 bp, Homo sapien
catgtaggagtgagagtcaagtttt

SEQ ID NO: 2857849 - DNA, 25 bp, Homo sapien
tgtttccgtaggagcccatcagagc

SEQ ID NO: 2857850 - DNA, 25 bp, Homo sapien
aagggtccaattgtaatgatagcga

SEQ ID NO: 2857851 - DNA, 25 bp, Homo sapien
attgtaatgatagcgagggctgcag

SEQ ID NO: 2857852 - DNA, 25 bp, Homo sapien
caggagttccggagggaagggctct

SEQ ID NO: 2857853 - DNA, 25 bp, Homo sapien
tgaagccatacttctgcaagttgca

SEQ ID NO: 2857854 - DNA, 25 bp, Homo sapien
taacatattgaggttgtgactggtg

SEQ ID NO: 2857855 - DNA, 25 bp, Homo sapien
gtcctttgaagataccgccaaatca

SEQ ID NO: 2857856 - DNA, 25 bp, Homo sapien
gttgttgccatatggtctgttgtcc

SEQ ID NO: 2857857 - DNA, 25 bp, Homo sapien
tatctgctatgatactgttgttgcc

SEQ ID NO: 2857858 - DNA, 25 bp, Homo sapien
cacagccacagattccaggataaca

SEQ ID NO: 2857859 - DNA, 25 bp, Homo sapien
gactctaacaccaggcttattgcag

SEQ ID NO: 2857860 - DNA, 25 bp, Homo sapien
ggataacacccatgagcaaagcctg

SEQ ID NO: 2857861 - DNA, 25 bp, Homo sapien
ggcttccatagctctagtcatcagg

SEQ ID NO: 2857862 - DNA, 25 bp, Homo sapien
ggcaaagctgttttttagaaatgaa

SEQ ID NO: 2857863 - DNA, 25 bp, Homo sapien
ctggcaaagctgttttttagaaatg

SEQ ID NO: 2857864 - DNA, 25 bp, Homo sapien
cctggcaaagctgttttttagaaat

SEQ ID NO: 2857865 - DNA, 25 bp, Homo sapien
caaagctgttttttagaaatgaagg

SEQ ID NO: 2857866 - DNA, 25 bp, Homo sapien
tatctagacctcagttgactcagtg

SEQ ID NO: 2857867 - DNA, 25 bp, Homo sapien
cattcaaagttttagccccgtattg

SEQ ID NO: 2857868 - DNA, 25 bp, Homo sapien
ggaaatagttaataatctcatctgc

SEQ ID NO: 2857869 - DNA, 25 bp, Homo sapien
ctatctagacctcagttgactcagt

SEQ ID NO: 2857870 - DNA, 25 bp, Homo sapien
ctaaccaacatcaagagggcaccct

SEQ ID NO: 2857871 - DNA, 25 bp, Homo sapien
agggcacccttgtaggcggactgcc

SEQ ID NO: 2857872 - DNA, 25 bp, Homo sapien
catgcagggtgccagaattgaggaa

SEQ ID NO: 2857873 - DNA, 25 bp, Homo sapien
aagctgtggagggtgttgcaggctg

SEQ ID NO: 2857874 - DNA, 25 bp, Homo sapien
cagagacgtggctgggtaaggaata

SEQ ID NO: 2857875 - DNA, 25 bp, Homo sapien
ctacagagacgtggctgggtaagga

SEQ ID NO: 2857876 - DNA, 25 bp, Homo sapien
agagacgtggctgggtaaggaatac

SEQ ID NO: 2857877 - DNA, 25 bp, Homo sapien
acagagacgtggctgggtaaggaat

SEQ ID NO: 2857878 - DNA, 25 bp, Homo sapien
gagggtggtgcatgagaagatgcca

SEQ ID NO: 2857879 - DNA, 25 bp, Homo sapien
gggtgactggccacgtctgagggtg

SEQ ID NO: 2857880 - DNA, 25 bp, Homo sapien
aacttgaccacggagaggactgtgt

SEQ ID NO: 2857881 - DNA, 25 bp, Homo sapien
ggtggtcatgcaggttgcctttgat

SEQ ID NO: 2857882 - DNA, 25 bp, Homo sapien
aattgacataattgcctttaaattg

SEQ ID NO: 2857883 - DNA, 25 bp, Homo sapien
ttcctatcgccgtataacttcccat

SEQ ID NO: 2857884 - DNA, 25 bp, Homo sapien
tatagaaggcttcctatcgccgtat

SEQ ID NO: 2857885 - DNA, 25 bp, Homo sapien
attgtctatagaaggcttcctatcg

SEQ ID NO: 2857886 - DNA, 25 bp, Homo sapien
tgaggcaaagctccaatttccctcc

SEQ ID NO: 2857887 - DNA, 25 bp, Homo sapien
agagcaccctgcactgtgatactac

SEQ ID NO: 2857888 - DNA, 25 bp, Homo sapien
caccctgcactgtgatactacatgt

SEQ ID NO: 2857889 - DNA, 25 bp, Homo sapien
gtttttcggaaaccagcctgaggca

SEQ ID NO: 2857890 - DNA, 25 bp, Homo sapien
cagggacagcaactgatacacactt

SEQ ID NO: 2857891 - DNA, 25 bp, Homo sapien
tgcagggacagcaactgatacacac

SEQ ID NO: 2857892 - DNA, 25 bp, Homo sapien
gcagggacagcaactgatacacact

SEQ ID NO: 2857893 - DNA, 25 bp, Homo sapien
ctgcagggacagcaactgatacaca

SEQ ID NO: 2857894 - DNA, 25 bp, Homo sapien
ggccaatcatgtcacgctggaatac

SEQ ID NO: 2857895 - DNA, 25 bp, Homo sapien
tctgggccaatcatgtcacgctgga

SEQ ID NO: 2857896 - DNA, 25 bp, Homo sapien
tgggccaatcatgtcacgctggaat

SEQ ID NO: 2857897 - DNA, 25 bp, Homo sapien
agtctgggccaatcatgtcacgctg

SEQ ID NO: 2857898 - DNA, 25 bp, Homo sapien
gtggggataatactgtagattttcc

SEQ ID NO: 2857899 - DNA, 25 bp, Homo sapien
gccactgaagctccatttgcatccc

SEQ ID NO: 2857900 - DNA, 25 bp, Homo sapien
gctgtactgacctctgtgtggggat

SEQ ID NO: 2857901 - DNA, 25 bp, Homo sapien
gtactgacctctgtgtggggataat

SEQ ID NO: 2857902 - DNA, 25 bp, Homo sapien
aataagatgttgcattgaccaatat

SEQ ID NO: 2857903 - DNA, 25 bp, Homo sapien
ccaatatgtgccaatttcaacagta

SEQ ID NO: 2857904 - DNA, 25 bp, Homo sapien
ggatgcattgtctagtctttccctt

SEQ ID NO: 2857905 - DNA, 25 bp, Homo sapien
tatggatgcattgtctagtctttcc

SEQ ID NO: 2857906 - DNA, 25 bp, Homo sapien
ctttactgatatacttagaaaaagg

SEQ ID NO: 2857907 - DNA, 25 bp, Homo sapien
ctgatatacttagaaaaaggtaatc

SEQ ID NO: 2857908 - DNA, 25 bp, Homo sapien
taccacatagggattctaaaaccca

SEQ ID NO: 2857909 - DNA, 25 bp, Homo sapien
aaaaggtaatccttagctaccacat

SEQ ID NO: 2857910 - DNA, 25 bp, Homo sapien
cagtgcttgaatgaactcttcgtac

SEQ ID NO: 2857911 - DNA, 25 bp, Homo sapien
tggctaagactcctttattcagtgc

SEQ ID NO: 2857912 - DNA, 25 bp, Homo sapien
taaatatgaggagagttcattggct

SEQ ID NO: 2857913 - DNA, 25 bp, Homo sapien
aatgaactcttcgtacttttttatg

SEQ ID NO: 2857914 - DNA, 25 bp, Homo sapien
atctttaagagatggttcatgaaca

SEQ ID NO: 2857915 - DNA, 25 bp, Homo sapien
tctttaagagatggttcatgaacat

SEQ ID NO: 2857916 - DNA, 25 bp, Homo sapien
gcaggatatctttaagagatggttc

SEQ ID NO: 2857917 - DNA, 25 bp, Homo sapien
ccaagtgttgtacttggaggaggga

SEQ ID NO: 2857918 - DNA, 25 bp, Homo sapien
ctgcctctcagacaggtctgtagga

SEQ ID NO: 2857919 - DNA, 25 bp, Homo sapien
tctttgttcaactatagccttttcc

SEQ ID NO: 2857920 - DNA, 25 bp, Homo sapien
tgcaatgccgtcaagtctttgttca

SEQ ID NO: 2857921 - DNA, 25 bp, Homo sapien
catcaaggaccaggctagttttata

SEQ ID NO: 2857922 - DNA, 25 bp, Homo sapien
aattcttgcaatgccgtcaagtctt

SEQ ID NO: 2857923 - DNA, 25 bp, Homo sapien
aggtcagtccttccatggtagacag

SEQ ID NO: 2857924 - DNA, 25 bp, Homo sapien
gaacctgcaggtcagtccttccatg

SEQ ID NO: 2857925 - DNA, 25 bp, Homo sapien
actgagaacctgcaggtcagtcctt

SEQ ID NO: 2857926 - DNA, 25 bp, Homo sapien
gtcagtccttccatggtagacaggg

SEQ ID NO: 2857927 - DNA, 25 bp, Homo sapien
aactggaaagatgagcgttttctct

SEQ ID NO: 2857928 - DNA, 25 bp, Homo sapien
atcttctgacctgtatttgtaccct

SEQ ID NO: 2857929 - DNA, 25 bp, Homo sapien
tctgacctgtatttgtaccctggat

SEQ ID NO: 2857930 - DNA, 25 bp, Homo sapien
ctggaaagatgagcgttttctcttc

SEQ ID NO: 2857931 - DNA, 25 bp, Homo sapien
tcatgtctgcgatttctcagcttct

SEQ ID NO: 2857932 - DNA, 25 bp, Homo sapien
agtcatgtctgcgatttctcagctt

SEQ ID NO: 2857933 - DNA, 25 bp, Homo sapien
atgtctgcgatttctcagcttctct

SEQ ID NO: 2857934 - DNA, 25 bp, Homo sapien
tcagtcatgtctgcgatttctcagc

SEQ ID NO: 2857935 - DNA, 25 bp, Homo sapien
ttacaacgtgtgacttattgacctc

SEQ ID NO: 2857936 - DNA, 25 bp, Homo sapien
gcatggtagggtagtttacaacgtg

SEQ ID NO: 2857937 - DNA, 25 bp, Homo sapien
taatatgttttgagtgttccgcggt

SEQ ID NO: 2857938 - DNA, 25 bp, Homo sapien
tgacctctggacagtattgttgaag

SEQ ID NO: 2857939 - DNA, 25 bp, Homo sapien
ttctcattaactgcaggagaagctc

SEQ ID NO: 2857940 - DNA, 25 bp, Homo sapien
cttctcattaactgcaggagaagct

SEQ ID NO: 2857941 - DNA, 25 bp, Homo sapien
ggcttctcattaactgcaggagaag

SEQ ID NO: 2857942 - DNA, 25 bp, Homo sapien
tggcttctcattaactgcaggagaa

SEQ ID NO: 2857943 - DNA, 25 bp, Homo sapien
tgcagaaattagctcatgagtcatt

SEQ ID NO: 2857944 - DNA, 25 bp, Homo sapien
ggcctctgcacagaacctttttctt

SEQ ID NO: 2857945 - DNA, 25 bp, Homo sapien
tctgcacagaacctttttcttcaag

SEQ ID NO: 2857946 - DNA, 25 bp, Homo sapien
cacagaacctttttcttcaagatgt

SEQ ID NO: 2857947 - DNA, 25 bp, Homo sapien
agcattgctgtagccttgagtttcc

SEQ ID NO: 2857948 - DNA, 25 bp, Homo sapien
acagcattgctgtagccttgagttt

SEQ ID NO: 2857949 - DNA, 25 bp, Homo sapien
ttgctgtagccttgagtttcctcat

SEQ ID NO: 2857950 - DNA, 25 bp, Homo sapien
cattgctgtagccttgagtttcctc

SEQ ID NO: 2857951 - DNA, 25 bp, Homo sapien
ttcttctgaacagggatacagcact

SEQ ID NO: 2857952 - DNA, 25 bp, Homo sapien
gctgctcttcatggatcagcctaag

SEQ ID NO: 2857953 - DNA, 25 bp, Homo sapien
tgaacagggatacagcactgccact

SEQ ID NO: 2857954 - DNA, 25 bp, Homo sapien
tctgataaagttgttcccctagttg

SEQ ID NO: 2857955 - DNA, 25 bp, Homo sapien
ccagtagccagggttgatagttcat

SEQ ID NO: 2857956 - DNA, 25 bp, Homo sapien
cagctcagagtgttttatcagcact

SEQ ID NO: 2857957 - DNA, 25 bp, Homo sapien
ccaatgaaggtcagaaagttaaact

SEQ ID NO: 2857958 - DNA, 25 bp, Homo sapien
gcactttactaatgtgatttccaat

SEQ ID NO: 2857959 - DNA, 25 bp, Homo sapien
ctttttcttgactttagatagccca

SEQ ID NO: 2857960 - DNA, 25 bp, Homo sapien
tgactttagatagcccagtgactat

SEQ ID NO: 2857961 - DNA, 25 bp, Homo sapien
tctttatctgattggtttagttcaa

SEQ ID NO: 2857962 - DNA, 25 bp, Homo sapien
tgaatttcccaagagtctttgagct

SEQ ID NO: 2857963 - DNA, 25 bp, Homo sapien
gcaaacccggccagcgatgctgata

SEQ ID NO: 2857964 - DNA, 25 bp, Homo sapien
tgcaccggtgagcagtaatgaagtt

SEQ ID NO: 2857965 - DNA, 25 bp, Homo sapien
catctggcactgtcaggcagggtag

SEQ ID NO: 2857966 - DNA, 25 bp, Homo sapien
gattggtcacaaacatgcaccggtg

SEQ ID NO: 2857967 - DNA, 25 bp, Homo sapien
tcttgatagcagacacaggttttgg

SEQ ID NO: 2857968 - DNA, 25 bp, Homo sapien
ttttgccaacatgaatagcaacagc

SEQ ID NO: 2857969 - DNA, 25 bp, Homo sapien
aggaatcctcagagtgtgtctctct

SEQ ID NO: 2857970 - DNA, 25 bp, Homo sapien
catgtgattctgcagcgtttccacc

SEQ ID NO: 2857971 - DNA, 25 bp, Homo sapien
ctcttggcagttgcctgttccaggg

SEQ ID NO: 2857972 - DNA, 25 bp, Homo sapien
cctcttggcagttgcctgttccagg

SEQ ID NO: 2857973 - DNA, 25 bp, Homo sapien
ctttggataatgcaagctgcagctc

SEQ ID NO: 2857974 - DNA, 25 bp, Homo sapien
ttggataatgcaagctgcagctctc

SEQ ID NO: 2857975 - DNA, 25 bp, Homo sapien
tttggataatgcaagctgcagctct

SEQ ID NO: 2857976 - DNA, 25 bp, Homo sapien
caggagagttgagtgtggacttgaa

SEQ ID NO: 2857977 - DNA, 25 bp, Homo sapien
gaatgaaggctctgatttgaggtca

SEQ ID NO: 2857978 - DNA, 25 bp, Homo sapien
tggcaagagtggtgatgatcctggc

SEQ ID NO: 2857979 - DNA, 25 bp, Homo sapien
aggagtgctggagcttgtgatgtgc

SEQ ID NO: 2857980 - DNA, 25 bp, Homo sapien
caaaggttgtaatgttgctgaggaa

SEQ ID NO: 2857981 - DNA, 25 bp, Homo sapien
ctctggacatgtggctgggtcagaa

SEQ ID NO: 2857982 - DNA, 25 bp, Homo sapien
gctgggtcagaactccactggaagt

SEQ ID NO: 2857983 - DNA, 25 bp, Homo sapien
tcctcatacctgcaatgctgataca

SEQ ID NO: 2857984 - DNA, 25 bp, Homo sapien
agacccctgcccagtaatatctgac

SEQ ID NO: 2857985 - DNA, 25 bp, Homo sapien
tcaagacccctgcccagtaatatct

SEQ ID NO: 2857986 - DNA, 25 bp, Homo sapien
aagacccctgcccagtaatatctga

SEQ ID NO: 2857987 - DNA, 25 bp, Homo sapien
gacccctgcccagtaatatctgacc

SEQ ID NO: 2857988 - DNA, 25 bp, Homo sapien
ttctgatatgtttgcttttaccaaa

SEQ ID NO: 2857989 - DNA, 25 bp, Homo sapien
tagacaccaatctgagggtcaaacc

SEQ ID NO: 2857990 - DNA, 25 bp, Homo sapien
atgtagtagacaccaatctgagggt

SEQ ID NO: 2857991 - DNA, 25 bp, Homo sapien
tgatgtgatcgatgtagtagacacc

SEQ ID NO: 2857992 - DNA, 25 bp, Homo sapien
tgttgatgtgatcgatgtagtagac

SEQ ID NO: 2857993 - DNA, 25 bp, Homo sapien
cctgtaggtagcttgtactgactcc

SEQ ID NO: 2857994 - DNA, 25 bp, Homo sapien
tgaacatgggccactccaagcttgc

SEQ ID NO: 2857995 - DNA, 25 bp, Homo sapien
tgctgacgctcctttcctgtaggta

SEQ ID NO: 2857996 - DNA, 25 bp, Homo sapien
gcttgccgacagctctctttagtga

SEQ ID NO: 2857997 - DNA, 25 bp, Homo sapien
aacccatttgcaactgtccctgctc

SEQ ID NO: 2857998 - DNA, 25 bp, Homo sapien
tatgtcattaggtgcaaaatgcagc

SEQ ID NO: 2857999 - DNA, 25 bp, Homo sapien
tgcacttggcctctattaaggagac

SEQ ID NO: 2858000 - DNA, 25 bp, Homo sapien
ctcatgagctgttgccttgatggca

SEQ ID NO: 2858001 - DNA, 25 bp, Homo sapien
gaatctctggatcaaactgtcgtca

SEQ ID NO: 2858002 - DNA, 25 bp, Homo sapien
gtctttcacctgagagccaaatcgg

SEQ ID NO: 2858003 - DNA, 25 bp, Homo sapien
tagtcctttctggtaattcagccag

SEQ ID NO: 2858004 - DNA, 25 bp, Homo sapien
cctactacctcttagtcctttctgg

SEQ ID NO: 2858005 - DNA, 25 bp, Homo sapien
caaatcggcccactctcatgtttta

SEQ ID NO: 2858006 - DNA, 25 bp, Homo sapien
cagcctctcaaattcagtggatctt

SEQ ID NO: 2858007 - DNA, 25 bp, Homo sapien
tagagcttcatctccagtctggtat

SEQ ID NO: 2858008 - DNA, 25 bp, Homo sapien
gcctatcatggtcaaatgcacgcat

SEQ ID NO: 2858009 - DNA, 25 bp, Homo sapien
tactgtccccattatactgtcctgt

SEQ ID NO: 2858010 - DNA, 25 bp, Homo sapien
actactggcctgattctggccacct

SEQ ID NO: 2858011 - DNA, 25 bp, Homo sapien
tacactactggcctgattctggcca

SEQ ID NO: 2858012 - DNA, 25 bp, Homo sapien
cctctacactactggcctgattctg

SEQ ID NO: 2858013 - DNA, 25 bp, Homo sapien
cctctccctctacactactggcctg

SEQ ID NO: 2858014 - DNA, 25 bp, Homo sapien
tttctcaaagagggggatgtgtcag

SEQ ID NO: 2858015 - DNA, 25 bp, Homo sapien
ctcaaagagggggatgtgtcagggt

SEQ ID NO: 2858016 - DNA, 25 bp, Homo sapien
tgtttctcaaagagggggatgtgtc

SEQ ID NO: 2858017 - DNA, 25 bp, Homo sapien
gtgtttctcaaagagggggatgtgt

SEQ ID NO: 2858018 - DNA, 25 bp, Homo sapien
acccaaaaaccttgatgagccctgg

SEQ ID NO: 2858019 - DNA, 25 bp, Homo sapien
tcaagacaaggtaagcaatgctggc

SEQ ID NO: 2858020 - DNA, 25 bp, Homo sapien
aaacagggttgagggctttagcttg

SEQ ID NO: 2858021 - DNA, 25 bp, Homo sapien
aatgctggccttgcggttcacgaac

SEQ ID NO: 2858022 - DNA, 25 bp, Homo sapien
tgttctgacttgacaggtaggaggc

SEQ ID NO: 2858023 - DNA, 25 bp, Homo sapien
tgggatttcgtgtttgttggcaatt

SEQ ID NO: 2858024 - DNA, 25 bp, Homo sapien
ttggcaattggttgaggtcatcagg

SEQ ID NO: 2858025 - DNA, 25 bp, Homo sapien
gaaagaccccaccatccaaattgag

SEQ ID NO: 2858026 - DNA, 25 bp, Homo sapien
ctctttgccttggtattcagcattc

SEQ ID NO: 2858027 - DNA, 25 bp, Homo sapien
tattcagcattcactgacagttcct

SEQ ID NO: 2858028 - DNA, 25 bp, Homo sapien
aacttcttgggcattgacattcaaa

SEQ ID NO: 2858029 - DNA, 25 bp, Homo sapien
agttgaggtgagcttgttggattct

SEQ ID NO: 2858030 - DNA, 25 bp, Homo sapien
agagcaagaggtggagccccacaaa

SEQ ID NO: 2858031 - DNA, 25 bp, Homo sapien
tattatgtacctagcttgtgccagg

SEQ ID NO: 2858032 - DNA, 25 bp, Homo sapien
tattaatgccttccagagagcaaga

SEQ ID NO: 2858033 - DNA, 25 bp, Homo sapien
cagtgtgtaatgttgtggtacccta

SEQ ID NO: 2858034 - DNA, 25 bp, Homo sapien
gaaacgtactccatcagttctctct

SEQ ID NO: 2858035 - DNA, 25 bp, Homo sapien
ttaagaccccacactacatccattt

SEQ ID NO: 2858036 - DNA, 25 bp, Homo sapien
tctttgatcatgatcagtgtgtagc

SEQ ID NO: 2858037 - DNA, 25 bp, Homo sapien
tactcagaggcacactgaaacgtac

SEQ ID NO: 2858038 - DNA, 25 bp, Homo sapien
tgttaggcagatgaaacctctcagg

SEQ ID NO: 2858039 - DNA, 25 bp, Homo sapien
tagatccagataagaggtcctcaga

SEQ ID NO: 2858040 - DNA, 25 bp, Homo sapien
gcaaatctcccgaacaaaagggcag

SEQ ID NO: 2858041 - DNA, 25 bp, Homo sapien
agttttgtgatctgcagcccctcag

SEQ ID NO: 2858042 - DNA, 25 bp, Homo sapien
gctttggcttgctcattatgttggc

SEQ ID NO: 2858043 - DNA, 25 bp, Homo sapien
gagtgactaatccatgccgccattt

SEQ ID NO: 2858044 - DNA, 25 bp, Homo sapien
ttacacttgcacaattagggcttgc

SEQ ID NO: 2858045 - DNA, 25 bp, Homo sapien
gcaaatggtctttttcggtcagctt

SEQ ID NO: 2858046 - DNA, 25 bp, Homo sapien
atttacttggagctgctatgagttt

SEQ ID NO: 2858047 - DNA, 25 bp, Homo sapien
gcatttacttggagctgctatgagt

SEQ ID NO: 2858048 - DNA, 25 bp, Homo sapien
tgcatttacttggagctgctatgag

SEQ ID NO: 2858049 - DNA, 25 bp, Homo sapien
tgtgcatttacttggagctgctatg

SEQ ID NO: 2858050 - DNA, 25 bp, Homo sapien
cctgcatcccactgaactgtcacct

SEQ ID NO: 2858051 - DNA, 25 bp, Homo sapien
catcccactgaactgtcacctccat

SEQ ID NO: 2858052 - DNA, 25 bp, Homo sapien
tgcatcccactgaactgtcacctcc

SEQ ID NO: 2858053 - DNA, 25 bp, Homo sapien
gcatcccactgaactgtcacctcca

SEQ ID NO: 2858054 - DNA, 25 bp, Homo sapien
tcatcctgaattagagcacagaaag

SEQ ID NO: 2858055 - DNA, 25 bp, Homo sapien
tagagcacagaaagccataggataa

SEQ ID NO: 2858056 - DNA, 25 bp, Homo sapien
aagccataggataaacttgacacat

SEQ ID NO: 2858057 - DNA, 25 bp, Homo sapien
gaattagagcacagaaagccatagg

SEQ ID NO: 2858058 - DNA, 25 bp, Homo sapien
caaagccacggcattgggatgtcag

SEQ ID NO: 2858059 - DNA, 25 bp, Homo sapien
tctcaaggcaggtttgaatggcaaa

SEQ ID NO: 2858060 - DNA, 25 bp, Homo sapien
gctttcttcataagggagtccctga

SEQ ID NO: 2858061 - DNA, 25 bp, Homo sapien
tctgaatttctcatgcacaaagcca

SEQ ID NO: 2858062 - DNA, 25 bp, Homo sapien
catcacccattttgagatatgcagg

SEQ ID NO: 2858063 - DNA, 25 bp, Homo sapien
taatcgagaagcatgtttactgtct

SEQ ID NO: 2858064 - DNA, 25 bp, Homo sapien
aacagccactgtaatcgagaagcat

SEQ ID NO: 2858065 - DNA, 25 bp, Homo sapien
gatatgcaggtggaatagaacaaag

SEQ ID NO: 2858066 - DNA, 25 bp, Homo sapien
ataggactaaccttaccagagccag

SEQ ID NO: 2858067 - DNA, 25 bp, Homo sapien
tctctggaagagatgcaagattcta

SEQ ID NO: 2858068 - DNA, 25 bp, Homo sapien
cagagccagaaatctagctctctgg

SEQ ID NO: 2858069 - DNA, 25 bp, Homo sapien
gaatagataccattaaagggtctca

SEQ ID NO: 2858070 - DNA, 25 bp, Homo sapien
gaaagagccttagtaagtaatataa

SEQ ID NO: 2858071 - DNA, 25 bp, Homo sapien
tgctcaggagaaagagccttagtaa

SEQ ID NO: 2858072 - DNA, 25 bp, Homo sapien
tgctcctggaaggatacagaatttc

SEQ ID NO: 2858073 - DNA, 25 bp, Homo sapien
gtaatataaaacctggctctggaca

SEQ ID NO: 2858074 - DNA, 25 bp, Homo sapien
tacttctggggctaccttggagact

SEQ ID NO: 2858075 - DNA, 25 bp, Homo sapien
acttaaagggctccaattatgattg

SEQ ID NO: 2858076 - DNA, 25 bp, Homo sapien
gacaggagcatgagctttgtacttc

SEQ ID NO: 2858077 - DNA, 25 bp, Homo sapien
cctcccctgttaccagatgacagga

SEQ ID NO: 2858078 - DNA, 25 bp, Homo sapien
gatattttaaacaagtgcacagcag

SEQ ID NO: 2858079 - DNA, 25 bp, Homo sapien
gctgccgaccttagcttaagattgc

SEQ ID NO: 2858080 - DNA, 25 bp, Homo sapien
tgataacaggattcagaagggtcag

SEQ ID NO: 2858081 - DNA, 25 bp, Homo sapien
tcagaaacgagtgtaagaaaataga

SEQ ID NO: 2858082 - DNA, 25 bp, Homo sapien
agccaaatgaaatcctgataaaggg

SEQ ID NO: 2858083 - DNA, 25 bp, Homo sapien
aaatgaaatcctgataaagggtcat

SEQ ID NO: 2858084 - DNA, 25 bp, Homo sapien
ccaaatgaaatcctgataaagggtc

SEQ ID NO: 2858085 - DNA, 25 bp, Homo sapien
acaaagggaagccaaatgaaatcct

SEQ ID NO: 2858086 - DNA, 25 bp, Homo sapien
cacagaactgttgctttggatctat

SEQ ID NO: 2858087 - DNA, 25 bp, Homo sapien
ggttctcactggcaacacagaactg

SEQ ID NO: 2858088 - DNA, 25 bp, Homo sapien
tagcgaagggcaatgctcagatctg

SEQ ID NO: 2858089 - DNA, 25 bp, Homo sapien
gttgatgctgtatactccccacttc

SEQ ID NO: 2858090 - DNA, 25 bp, Homo sapien
ccaggacacagggcaaaaactggca

SEQ ID NO: 2858091 - DNA, 25 bp, Homo sapien
caggacacagggcaaaaactggcat

SEQ ID NO: 2858092 - DNA, 25 bp, Homo sapien
ctgcttcattatggccactaggtgg

SEQ ID NO: 2858093 - DNA, 25 bp, Homo sapien
ttgaagtcacatccaatgtttcctc

SEQ ID NO: 2858094 - DNA, 25 bp, Homo sapien
tggatatctacaacttgaagtcaca

SEQ ID NO: 2858095 - DNA, 25 bp, Homo sapien
catccaatgtttcctccagttcttc

SEQ ID NO: 2858096 - DNA, 25 bp, Homo sapien
tcttggcgacctatcatccagcaga

SEQ ID NO: 2858097 - DNA, 25 bp, Homo sapien
tgatgaagatgcgtgtagggacacc

SEQ ID NO: 2858098 - DNA, 25 bp, Homo sapien
ttggagccaaagtaccggattcagg

SEQ ID NO: 2858099 - DNA, 25 bp, Homo sapien
gcgccagacatcctagccaagaaat

SEQ ID NO: 2858100 - DNA, 25 bp, Homo sapien
gcagccaagctgtgcgctttttgca

SEQ ID NO: 2858101 - DNA, 25 bp, Homo sapien
tgctgctaggagagcagcagagcag

SEQ ID NO: 2858102 - DNA, 25 bp, Homo sapien
caagctgtgcgctttttgcattctg

SEQ ID NO: 2858103 - DNA, 25 bp, Homo sapien
cagagcagccaagctgtgcgctttt

SEQ ID NO: 2858104 - DNA, 25 bp, Homo sapien
gctcttcatgagttagttcaacaca

SEQ ID NO: 2858105 - DNA, 25 bp, Homo sapien
ccatttaaatgtgtcccacctggct

SEQ ID NO: 2858106 - DNA, 25 bp, Homo sapien
agggagcccacttctcaacttcctg

SEQ ID NO: 2858107 - DNA, 25 bp, Homo sapien
ttcattaagcctgctgacagctggc

SEQ ID NO: 2858108 - DNA, 25 bp, Homo sapien
tgttttagcccacagccatgttttg

SEQ ID NO: 2858109 - DNA, 25 bp, Homo sapien
taagtgtgctgcttctaggtaggtc

SEQ ID NO: 2858110 - DNA, 25 bp, Homo sapien
gacatacactccgatttatcatggg

SEQ ID NO: 2858111 - DNA, 25 bp, Homo sapien
gacccatacctgtattgaaagaggg

SEQ ID NO: 2858112 - DNA, 25 bp, Homo sapien
ttcagatgcccaagtcataccctgg

SEQ ID NO: 2858113 - DNA, 25 bp, Homo sapien
tcttagtcggtacaaggagtttcag

SEQ ID NO: 2858114 - DNA, 25 bp, Homo sapien
tatcaagtaccagtgacacggaggc

SEQ ID NO: 2858115 - DNA, 25 bp, Homo sapien
tctcttaaagggtaggactcaggaa

SEQ ID NO: 2858116 - DNA, 25 bp, Homo sapien
ttccccaagcaagaactaggatgtg

SEQ ID NO: 2858117 - DNA, 25 bp, Homo sapien
ccatggctcctcgtgttagcagtta

SEQ ID NO: 2858118 - DNA, 25 bp, Homo sapien
gattgccttgctttcacatccacgc

SEQ ID NO: 2858119 - DNA, 25 bp, Homo sapien
cacgcactgcccctggttgaatatt

SEQ ID NO: 2858120 - DNA, 25 bp, Homo sapien
ttctgataggcataaggagctcaac

SEQ ID NO: 2858121 - DNA, 25 bp, Homo sapien
tatgggcagatgtcatccggagaca

SEQ ID NO: 2858122 - DNA, 25 bp, Homo sapien
gagattgaatggactcccttgcgtg

SEQ ID NO: 2858123 - DNA, 25 bp, Homo sapien
ggagctcaactatgacctatgggca

SEQ ID NO: 2858124 - DNA, 25 bp, Homo sapien
gcacgtcattgaggacatttttact

SEQ ID NO: 2858125 - DNA, 25 bp, Homo sapien
tttactatctccaatgtagtctagc

SEQ ID NO: 2858126 - DNA, 25 bp, Homo sapien
tcccttccatgctgcacgtcattga

SEQ ID NO: 2858127 - DNA, 25 bp, Homo sapien
cattgaggacatttttactatctcc

SEQ ID NO: 2858128 - DNA, 25 bp, Homo sapien
gtgtttctgcgaacaataggtttcc

SEQ ID NO: 2858129 - DNA, 25 bp, Homo sapien
tgtttctgcgaacaataggtttcca

SEQ ID NO: 2858130 - DNA, 25 bp, Homo sapien
gtgtgtttctgcgaacaataggttt

SEQ ID NO: 2858131 - DNA, 25 bp, Homo sapien
ttgtgtgtttctgcgaacaataggt

SEQ ID NO: 2858132 - DNA, 25 bp, Homo sapien
ctgggatgggaacaatggcagaact

SEQ ID NO: 2858133 - DNA, 25 bp, Homo sapien
ctgttacttccctggctgggatggg

SEQ ID NO: 2858134 - DNA, 25 bp, Homo sapien
tgggaacaatggcagaactgagcct

SEQ ID NO: 2858135 - DNA, 25 bp, Homo sapien
cctggctgggatgggaacaatggca

SEQ ID NO: 2858136 - DNA, 25 bp, Homo sapien
aaggaagtggagacaactccagatc

SEQ ID NO: 2858137 - DNA, 25 bp, Homo sapien
aagtggagacaactccagatcctcc

SEQ ID NO: 2858138 - DNA, 25 bp, Homo sapien
ggaagtggagacaactccagatcct

SEQ ID NO: 2858139 - DNA, 25 bp, Homo sapien
gtggagacaactccagatcctcctg

SEQ ID NO: 2858140 - DNA, 25 bp, Homo sapien
caggagaaacgccacaaacaatgcg

SEQ ID NO: 2858141 - DNA, 25 bp, Homo sapien
gaaacgccacaaacaatgcgaagag

SEQ ID NO: 2858142 - DNA, 25 bp, Homo sapien
ggcgatgatcatcagtagttgggag

SEQ ID NO: 2858143 - DNA, 25 bp, Homo sapien
caaacaatgcgaagagcacaaatcc

SEQ ID NO: 2858144 - DNA, 25 bp, Homo sapien
tctgctcaggaactgctgtatcaga

SEQ ID NO: 2858145 - DNA, 25 bp, Homo sapien
ttctgctcaggaactgctgtatcag

SEQ ID NO: 2858146 - DNA, 25 bp, Homo sapien
ttttgttctgctcaggaactgctgt

SEQ ID NO: 2858147 - DNA, 25 bp, Homo sapien
tgttctgctcaggaactgctgtatc

SEQ ID NO: 2858148 - DNA, 25 bp, Homo sapien
atcagtcaggcgttccttagttcca

SEQ ID NO: 2858149 - DNA, 25 bp, Homo sapien
cagtcaggcgttccttagttccaag

SEQ ID NO: 2858150 - DNA, 25 bp, Homo sapien
aaagaaatggtgagatactgtcaca

SEQ ID NO: 2858151 - DNA, 25 bp, Homo sapien
gagatactgtcacatttcacgcaga

SEQ ID NO: 2858152 - DNA, 25 bp, Homo sapien
tactgccctcatctcacagtgggaa

SEQ ID NO: 2858153 - DNA, 25 bp, Homo sapien
gatctgcatttgacctaaaacactc

SEQ ID NO: 2858154 - DNA, 25 bp, Homo sapien
gaaaatgctcgtcagtagttcccat

SEQ ID NO: 2858155 - DNA, 25 bp, Homo sapien
ctcaagttgcatagtaggaagggac

SEQ ID NO: 2858156 - DNA, 25 bp, Homo sapien
gagaatggcaattcctcctacaact

SEQ ID NO: 2858157 - DNA, 25 bp, Homo sapien
tgagtacaaatgtggtttccttcat

SEQ ID NO: 2858158 - DNA, 25 bp, Homo sapien
caatggcattggtgagtacaaatgt

SEQ ID NO: 2858159 - DNA, 25 bp, Homo sapien
tgctgaacttgcactgagaatggca

SEQ ID NO: 2858160 - DNA, 25 bp, Homo sapien
tgttgatgggagatcccaaactttg

SEQ ID NO: 2858161 - DNA, 25 bp, Homo sapien
gaagacacagaatcactcgttttcc

SEQ ID NO: 2858162 - DNA, 25 bp, Homo sapien
cacattgacacgtgggatgttgatg

SEQ ID NO: 2858163 - DNA, 25 bp, Homo sapien
gatgggagatcccaaactttggact

SEQ ID NO: 2858164 - DNA, 25 bp, Homo sapien
agtgtcagcagaagtagactcaaca

SEQ ID NO: 2858165 - DNA, 25 bp, Homo sapien
ctcaacactactccaggaatcactg

SEQ ID NO: 2858166 - DNA, 25 bp, Homo sapien
cagtgtcagcagaagtagactcaac

SEQ ID NO: 2858167 - DNA, 25 bp, Homo sapien
gtagactcaacactactccaggaat

SEQ ID NO: 2858168 - DNA, 25 bp, Homo sapien
attggagaacccaaaatgctgactt

SEQ ID NO: 2858169 - DNA, 25 bp, Homo sapien
tcaattggagaacccaaaatgctga

SEQ ID NO: 2858170 - DNA, 25 bp, Homo sapien
caattggagaacccaaaatgctgac

SEQ ID NO: 2858171 - DNA, 25 bp, Homo sapien
aattggagaacccaaaatgctgact

SEQ ID NO: 2858172 - DNA, 25 bp, Homo sapien
gaggatgggcccttccttagaaggc

SEQ ID NO: 2858173 - DNA, 25 bp, Homo sapien
tagaaggctcgggagtcagaagacc

SEQ ID NO: 2858174 - DNA, 25 bp, Homo sapien
gaagacggcaatggttgtcatctgg

SEQ ID NO: 2858175 - DNA, 25 bp, Homo sapien
ctgtggcttcctccggaagggtgct

SEQ ID NO: 2858176 - DNA, 25 bp, Homo sapien
tttacatcgttgaaccagccaggca

SEQ ID NO: 2858177 - DNA, 25 bp, Homo sapien
caggcgcacgtttatctttacatcg

SEQ ID NO: 2858178 - DNA, 25 bp, Homo sapien
gccaggcacttctatgcggcagcag

SEQ ID NO: 2858179 - DNA, 25 bp, Homo sapien
ctctctgtagattcaggcgcacgtt

SEQ ID NO: 2858180 - DNA, 25 bp, Homo sapien
gagcgcctccttgcaaccggagtag

SEQ ID NO: 2858181 - DNA, 25 bp, Homo sapien
cattccatcagtgcggatgagcgcc

SEQ ID NO: 2858182 - DNA, 25 bp, Homo sapien
tcccctgaagtctatattttgctga

SEQ ID NO: 2858183 - DNA, 25 bp, Homo sapien
aaggagacatcacctctcgggatag

SEQ ID NO: 2858184 - DNA, 25 bp, Homo sapien
gagaccaggatgagtacagacaggg

SEQ ID NO: 2858185 - DNA, 25 bp, Homo sapien
tgacccaaaacctccgtcacaacag

SEQ ID NO: 2858186 - DNA, 25 bp, Homo sapien
agaccaggatgagtacagacagggc

SEQ ID NO: 2858187 - DNA, 25 bp, Homo sapien
acctccgtcacaacagtctctgaag

SEQ ID NO: 2858188 - DNA, 25 bp, Homo sapien
ccagagaatgagaggttctttggac

SEQ ID NO: 2858189 - DNA, 25 bp, Homo sapien
cagagaatgagaggttctttggaca

SEQ ID NO: 2858190 - DNA, 25 bp, Homo sapien
actcaatcatcagccagagaatgag

SEQ ID NO: 2858191 - DNA, 25 bp, Homo sapien
caccaaaactcaatcatcagccaga

SEQ ID NO: 2858192 - DNA, 25 bp, Homo sapien
tgacggttgaccggacccaggagtc

SEQ ID NO: 2858193 - DNA, 25 bp, Homo sapien
tcagactgaatcttctccaacacat

SEQ ID NO: 2858194 - DNA, 25 bp, Homo sapien
agactgaatcttctccaacacatct

SEQ ID NO: 2858195 - DNA, 25 bp, Homo sapien
atcttcttcagtgcaagttcccact

SEQ ID NO: 2858196 - DNA, 25 bp, Homo sapien
cttcttcagtgcaagttcccacttg

SEQ ID NO: 2858197 - DNA, 25 bp, Homo sapien
ctatgcaccaggtccaatttcttcc

SEQ ID NO: 2858198 - DNA, 25 bp, Homo sapien
tatgcaccaggtccaatttcttccc

SEQ ID NO: 2858199 - DNA, 25 bp, Homo sapien
ttactgtcgggagggcaccaaagcc

SEQ ID NO: 2858200 - DNA, 25 bp, Homo sapien
acactcattactgtcgggagggcac

SEQ ID NO: 2858201 - DNA, 25 bp, Homo sapien
gtacgagcatagcacgagcatctgc

SEQ ID NO: 2858202 - DNA, 25 bp, Homo sapien
tgctctgacatgaactaagagtgag

SEQ ID NO: 2858203 - DNA, 25 bp, Homo sapien
taaagccatcagtgaacaattagtt

SEQ ID NO: 2858204 - DNA, 25 bp, Homo sapien
tcccaagactgattggaggtaatgg

SEQ ID NO: 2858205 - DNA, 25 bp, Homo sapien
acaaccacgaagagtccctcacagt

SEQ ID NO: 2858206 - DNA, 25 bp, Homo sapien
tataccactgttctaatgtcccaag

SEQ ID NO: 2858207 - DNA, 25 bp, Homo sapien
taagcaaagctaaccagattcctgg

SEQ ID NO: 2858208 - DNA, 25 bp, Homo sapien
cataaagttaaaagccccacaggtg

SEQ ID NO: 2858209 - DNA, 25 bp, Homo sapien
taaaatttttgaccagatcgggctg

SEQ ID NO: 2858210 - DNA, 25 bp, Homo sapien
gatccagagaatagggcagttgcca

SEQ ID NO: 2858211 - DNA, 25 bp, Homo sapien
actgactaaagatatccttacaata

SEQ ID NO: 2858212 - DNA, 25 bp, Homo sapien
gatatccttacaataagcctaattg

SEQ ID NO: 2858213 - DNA, 25 bp, Homo sapien
acaataagcctaattgaattgtaaa

SEQ ID NO: 2858214 - DNA, 25 bp, Homo sapien
actaaagatatccttacaataagcc

SEQ ID NO: 2858215 - DNA, 25 bp, Homo sapien
gagaaagacactttgcctttccaaa

SEQ ID NO: 2858216 - DNA, 25 bp, Homo sapien
atgagaaagacactttgcctttcca

SEQ ID NO: 2858217 - DNA, 25 bp, Homo sapien
ttgattagatatgagaaagacactt

SEQ ID NO: 2858218 - DNA, 25 bp, Homo sapien
tagatatgagaaagacactttgcct

SEQ ID NO: 2858219 - DNA, 25 bp, Homo sapien
tgtaacttataaggcagaaaaggca

SEQ ID NO: 2858220 - DNA, 25 bp, Homo sapien
tagaatttgggtcaaaactagtgag

SEQ ID NO: 2858221 - DNA, 25 bp, Homo sapien
taaatgcttagcaccatgacacacg

SEQ ID NO: 2858222 - DNA, 25 bp, Homo sapien
aagtggtttggaggcgatttagaat

SEQ ID NO: 2858223 - DNA, 25 bp, Homo sapien
tcagagatccagtacttaatgcatc

SEQ ID NO: 2858224 - DNA, 25 bp, Homo sapien
gctgtgatggccaagatagaagttc

SEQ ID NO: 2858225 - DNA, 25 bp, Homo sapien
gcatcacatttccagagttatgaga

SEQ ID NO: 2858226 - DNA, 25 bp, Homo sapien
cagctaaacctgtgagttagactca

SEQ ID NO: 2858227 - DNA, 25 bp, Homo sapien
tatcactgacatgttggaatgccag

SEQ ID NO: 2858228 - DNA, 25 bp, Homo sapien
caatgatcagaaggattgagccagt

SEQ ID NO: 2858229 - DNA, 25 bp, Homo sapien
gagagagttactctacccagtatca

SEQ ID NO: 2858230 - DNA, 25 bp, Homo sapien
tcatgggcgtaaactctcaaagagc

SEQ ID NO: 2858231 - DNA, 25 bp, Homo sapien
ttagtccgtggcataaagactattc

SEQ ID NO: 2858232 - DNA, 25 bp, Homo sapien
attgtcttctgcttggacttccttt

SEQ ID NO: 2858233 - DNA, 25 bp, Homo sapien
gactattctcaatgtagatattgtc

SEQ ID NO: 2858234 - DNA, 25 bp, Homo sapien
ctgcattttgcaaagctttaatttg

SEQ ID NO: 2858235 - DNA, 25 bp, Homo sapien
cacatataagctgcacttttgttta

SEQ ID NO: 2858236 - DNA, 25 bp, Homo sapien
gcaatatcaggtattcgagactcca

SEQ ID NO: 2858237 - DNA, 25 bp, Homo sapien
tattcgagactccaggagccccgtt

SEQ ID NO: 2858238 - DNA, 25 bp, Homo sapien
tgtttatgatcaggcaatatcaggt

SEQ ID NO: 2858239 - DNA, 25 bp, Homo sapien
ctaatatagatcagtggagcaggct

SEQ ID NO: 2858240 - DNA, 25 bp, Homo sapien
tcaagtgcctgcaaggctagacagc

SEQ ID NO: 2858241 - DNA, 25 bp, Homo sapien
agttgtctcctaccactacaggcag

SEQ ID NO: 2858242 - DNA, 25 bp, Homo sapien
taactaggcagcagggtagactgaa

SEQ ID NO: 2858243 - DNA, 25 bp, Homo sapien
tcagtagactatgttctaggaacag

SEQ ID NO: 2858244 - DNA, 25 bp, Homo sapien
gccgtcagtagactatgttctagga

SEQ ID NO: 2858245 - DNA, 25 bp, Homo sapien
tggtattggccgtcagtagactatg

SEQ ID NO: 2858246 - DNA, 25 bp, Homo sapien
gattcctttagtggtattggccgtc

SEQ ID NO: 2858247 - DNA, 25 bp, Homo sapien
catttacctgtattggtgcttgggg

SEQ ID NO: 2858248 - DNA, 25 bp, Homo sapien
atttacctgtattggtgcttgggga

SEQ ID NO: 2858249 - DNA, 25 bp, Homo sapien
ttacctgtattggtgcttggggact

SEQ ID NO: 2858250 - DNA, 25 bp, Homo sapien
tttacctgtattggtgcttggggac

SEQ ID NO: 2858251 - DNA, 25 bp, Homo sapien
ctcagtttataaccatacggtgaaa

SEQ ID NO: 2858252 - DNA, 25 bp, Homo sapien
agggtaagaccaaatgatctcagtt

SEQ ID NO: 2858253 - DNA, 25 bp, Homo sapien
cagtttataaccatacggtgaaaat

SEQ ID NO: 2858254 - DNA, 25 bp, Homo sapien
ggtaagaccaaatgatctcagttta

SEQ ID NO: 2858255 - DNA, 25 bp, Homo sapien
ggaggtagaagactttgatgagcat

SEQ ID NO: 2858256 - DNA, 25 bp, Homo sapien
tggaggtagaagactttgatgagca

SEQ ID NO: 2858257 - DNA, 25 bp, Homo sapien
atggaggtagaagactttgatgagc

SEQ ID NO: 2858258 - DNA, 25 bp, Homo sapien
gattgttattccaaaggccatctga

SEQ ID NO: 2858259 - DNA, 25 bp, Homo sapien
ttgattgttattccaaaggccatct

SEQ ID NO: 2858260 - DNA, 25 bp, Homo sapien
tgattgttattccaaaggccatctg

SEQ ID NO: 2858261 - DNA, 25 bp, Homo sapien
atgataatatgaccaaattctgcag

SEQ ID NO: 2858262 - DNA, 25 bp, Homo sapien
gataatatgaccaaattctgcaggc

SEQ ID NO: 2858263 - DNA, 25 bp, Homo sapien
tctggcgatgaaaagttgaatgata

SEQ ID NO: 2858264 - DNA, 25 bp, Homo sapien
cttctggcgatgaaaagttgaatga

SEQ ID NO: 2858265 - DNA, 25 bp, Homo sapien
tactttgaccaggtttcactgacat

SEQ ID NO: 2858266 - DNA, 25 bp, Homo sapien
cagtaagaacttggcccaagagcct

SEQ ID NO: 2858267 - DNA, 25 bp, Homo sapien
gccttggatccacggccaaaatggc

SEQ ID NO: 2858268 - DNA, 25 bp, Homo sapien
ctctactttgaccaggtttcactga

SEQ ID NO: 2858269 - DNA, 25 bp, Homo sapien
ccttattgctccctgcagtgtcgta

SEQ ID NO: 2858270 - DNA, 25 bp, Homo sapien
ggttctctccttattgctccctgca

SEQ ID NO: 2858271 - DNA, 25 bp, Homo sapien
tattgctccctgcagtgtcgtaggg

SEQ ID NO: 2858272 - DNA, 25 bp, Homo sapien
gctggtgggttctctccttattgct

SEQ ID NO: 2858273 - DNA, 25 bp, Homo sapien
tcgttggaacagtcgtcattggaac

SEQ ID NO: 2858274 - DNA, 25 bp, Homo sapien
gaaacagtcattgtcgtcagaacag

SEQ ID NO: 2858275 - DNA, 25 bp, Homo sapien
tcgaacagtcgtgacggttggaaca

SEQ ID NO: 2858276 - DNA, 25 bp, Homo sapien
acagtcgttgtcgttggaatgctca

SEQ ID NO: 2858277 - DNA, 25 bp, Homo sapien
tagcaagaaatatcaaagaaaaact

SEQ ID NO: 2858278 - DNA, 25 bp, Homo sapien
ctagcaagaaatatcaaagaaaaac

SEQ ID NO: 2858279 - DNA, 25 bp, Homo sapien
agcaagaaatatcaaagaaaaactt

SEQ ID NO: 2858280 - DNA, 25 bp, Homo sapien
gcaagaaatatcaaagaaaaactta

SEQ ID NO: 2858281 - DNA, 25 bp, Homo sapien
ggcacaatctccaatgatacggtga

SEQ ID NO: 2858282 - DNA, 25 bp, Homo sapien
caatgatacggtgattttcatgtca

SEQ ID NO: 2858283 - DNA, 25 bp, Homo sapien
tcatgtcattgaaccacccacggtg

SEQ ID NO: 2858284 - DNA, 25 bp, Homo sapien
cacggtgctcaacacggcaacaata

SEQ ID NO: 2858285 - DNA, 25 bp, Homo sapien
cttccgataggtgacgtgggttcca

SEQ ID NO: 2858286 - DNA, 25 bp, Homo sapien
tctatggtcaaagagacatcccttc

SEQ ID NO: 2858287 - DNA, 25 bp, Homo sapien
caatagcttatagcgtgtgtccttc

SEQ ID NO: 2858288 - DNA, 25 bp, Homo sapien
tagtgtgacagatggacctgcctct

SEQ ID NO: 2858289 - DNA, 25 bp, Homo sapien
gatgaggcttaagatgaccacttga

SEQ ID NO: 2858290 - DNA, 25 bp, Homo sapien
ctgccagatgtaggatgaggcttaa

SEQ ID NO: 2858291 - DNA, 25 bp, Homo sapien
tgtaggatgaggcttaagatgacca

SEQ ID NO: 2858292 - DNA, 25 bp, Homo sapien
ttaagatgaccacttgaggatgcat

SEQ ID NO: 2858293 - DNA, 25 bp, Homo sapien
cccagttggttgattcatatgagcc

SEQ ID NO: 2858294 - DNA, 25 bp, Homo sapien
gcagacaggctggttggtaccctcc

SEQ ID NO: 2858295 - DNA, 25 bp, Homo sapien
cataaccgccaaactgactcctggt

SEQ ID NO: 2858296 - DNA, 25 bp, Homo sapien
tgagagaagaccacatataacggct

SEQ ID NO: 2858297 - DNA, 25 bp, Homo sapien
gagcttttcctactcagtggccaca

SEQ ID NO: 2858298 - DNA, 25 bp, Homo sapien
gagagcaaatgccagccttccagtg

SEQ ID NO: 2858299 - DNA, 25 bp, Homo sapien
tcagactacacctccttaccaaggg

SEQ ID NO: 2858300 - DNA, 25 bp, Homo sapien
gagaaccagcgtggctcaatggcag

SEQ ID NO: 2858301 - DNA, 25 bp, Homo sapien
tctgtcactcacaatgctgggtaac

SEQ ID NO: 2858302 - DNA, 25 bp, Homo sapien
ctctgtcactcacaatgctgggtaa

SEQ ID NO: 2858303 - DNA, 25 bp, Homo sapien
taaaatagcactaaaaatgcttcct

SEQ ID NO: 2858304 - DNA, 25 bp, Homo sapien
aaaatagcactaaaaatgcttcctc

SEQ ID NO: 2858305 - DNA, 25 bp, Homo sapien
agccttgcttatgcagcaaaagaca

SEQ ID NO: 2858306 - DNA, 25 bp, Homo sapien
cgtgggagtttcttagtgggatcta

SEQ ID NO: 2858307 - DNA, 25 bp, Homo sapien
tgctagaaaagccttgcttatgcag

SEQ ID NO: 2858308 - DNA, 25 bp, Homo sapien
gggagtttcttagtgggatctagta

SEQ ID NO: 2858309 - DNA, 25 bp, Homo sapien
gaacttaactacgtagcattctctg

SEQ ID NO: 2858310 - DNA, 25 bp, Homo sapien
ctttgatgaggagggcagacagaaa

SEQ ID NO: 2858311 - DNA, 25 bp, Homo sapien
taatgtaagctccagacagcaagga

SEQ ID NO: 2858312 - DNA, 25 bp, Homo sapien
tgatgtaaagggagattccaccttg

SEQ ID NO: 2858313 - DNA, 25 bp, Homo sapien
caccattgcaatgatcagccttgta

SEQ ID NO: 2858314 - DNA, 25 bp, Homo sapien
actaggagttgaatggaatggagcc

SEQ ID NO: 2858315 - DNA, 25 bp, Homo sapien
tgggcacgataacccaacgcctgta

SEQ ID NO: 2858316 - DNA, 25 bp, Homo sapien
cattaagacacttatgggctgggca

SEQ ID NO: 2858317 - DNA, 25 bp, Homo sapien
tctgtcaaaggatccagcgctggta

SEQ ID NO: 2858318 - DNA, 25 bp, Homo sapien
ggcaacagaatttgtgtccccgtca

SEQ ID NO: 2858319 - DNA, 25 bp, Homo sapien
cagtttggtccacgaatacagaagt

SEQ ID NO: 2858320 - DNA, 25 bp, Homo sapien
tgtgtcagaattgtgctaggcgcag

SEQ ID NO: 2858321 - DNA, 25 bp, Homo sapien
ggcaggcagtgctcaaataagccta

SEQ ID NO: 2858322 - DNA, 25 bp, Homo sapien
gcctaaatctcaacattccaaggga

SEQ ID NO: 2858323 - DNA, 25 bp, Homo sapien
tcttcaagatcaaggtagacctggt

SEQ ID NO: 2858324 - DNA, 25 bp, Homo sapien
caaaagaagggctatgcactggcac

SEQ ID NO: 2858325 - DNA, 25 bp, Homo sapien
tgctccatagcagtggacagaacct

SEQ ID NO: 2858326 - DNA, 25 bp, Homo sapien
tatgatgtgcccgaatttcctggag

SEQ ID NO: 2858327 - DNA, 25 bp, Homo sapien
gagaccccacgtcaagaattcctag

SEQ ID NO: 2858328 - DNA, 25 bp, Homo sapien
taaaagcccgtttgagctctaacat

SEQ ID NO: 2858329 - DNA, 25 bp, Homo sapien
ggttgtgagggttgctgcctgctgc

SEQ ID NO: 2858330 - DNA, 25 bp, Homo sapien
ctatggcattgcaaagcgacaaccc

SEQ ID NO: 2858331 - DNA, 25 bp, Homo sapien
gcattgcaaagcgacaacccaaagg

SEQ ID NO: 2858332 - DNA, 25 bp, Homo sapien
aaagcgacaacccaaaggttgtgag

SEQ ID NO: 2858333 - DNA, 25 bp, Homo sapien
cattgggctcctccacttcatatac

SEQ ID NO: 2858334 - DNA, 25 bp, Homo sapien
tcattgggctcctccacttcatata

SEQ ID NO: 2858335 - DNA, 25 bp, Homo sapien
actcattgggctcctccacttcata

SEQ ID NO: 2858336 - DNA, 25 bp, Homo sapien
tactcattgggctcctccacttcat

SEQ ID NO: 2858337 - DNA, 25 bp, Homo sapien
ctcttcaatggtatagatgttttct

SEQ ID NO: 2858338 - DNA, 25 bp, Homo sapien
tctcttcaatggtatagatgttttc

SEQ ID NO: 2858339 - DNA, 25 bp, Homo sapien
gagggaggttggccaaagagatgag

SEQ ID NO: 2858340 - DNA, 25 bp, Homo sapien
gagggagggaggttggccaaagaga

SEQ ID NO: 2858341 - DNA, 25 bp, Homo sapien
agggaggttggccaaagagatgagg

SEQ ID NO: 2858342 - DNA, 25 bp, Homo sapien
gggagggaggttggccaaagagatg

SEQ ID NO: 2858343 - DNA, 25 bp, Homo sapien
gggttggccctgcattagtacactt

SEQ ID NO: 2858344 - DNA, 25 bp, Homo sapien
cctggagagcttttagaacaatttc

SEQ ID NO: 2858345 - DNA, 25 bp, Homo sapien
gatactgggtttcttgctcacttct

SEQ ID NO: 2858346 - DNA, 25 bp, Homo sapien
taagtgcagcccagaccctggatat

SEQ ID NO: 2858347 - DNA, 25 bp, Homo sapien
tgtatcttctctttgctatgagaat

SEQ ID NO: 2858348 - DNA, 25 bp, Homo sapien
tatcttctctttgctatgagaatac

SEQ ID NO: 2858349 - DNA, 25 bp, Homo sapien
tctgtatcttctctttgctatgaga

SEQ ID NO: 2858350 - DNA, 25 bp, Homo sapien
atcttctctttgctatgagaatacc

SEQ ID NO: 2858351 - DNA, 25 bp, Homo sapien
catatctgattgcaactttgaactc

SEQ ID NO: 2858352 - DNA, 25 bp, Homo sapien
caggtatgctggcacatgcccgtgg

SEQ ID NO: 2858353 - DNA, 25 bp, Homo sapien
tttaatgtttttgggctggatgcag

SEQ ID NO: 2858354 - DNA, 25 bp, Homo sapien
gaatgcagtagtaagatcatatctg

SEQ ID NO: 2858355 - DNA, 25 bp, Homo sapien
tccctgctccgatgtagatgcctat

SEQ ID NO: 2858356 - DNA, 25 bp, Homo sapien
cgccgaagataagagccagagccag

SEQ ID NO: 2858357 - DNA, 25 bp, Homo sapien
gcacagatccctgctccgatgtaga

SEQ ID NO: 2858358 - DNA, 25 bp, Homo sapien
tttgaaaattaaagcgccgaagata

SEQ ID NO: 2858359 - DNA, 25 bp, Homo sapien
ttgctccagagtcccgtaagtcatt

SEQ ID NO: 2858360 - DNA, 25 bp, Homo sapien
gccaatctagagtcccgtaactcat

SEQ ID NO: 2858361 - DNA, 25 bp, Homo sapien
taagtcattggccaatctagagtcc

SEQ ID NO: 2858362 - DNA, 25 bp, Homo sapien
gtcccgtaagtcattggccaatcta

SEQ ID NO: 2858363 - DNA, 25 bp, Homo sapien
gttagatttatatcagggaggctcc

SEQ ID NO: 2858364 - DNA, 25 bp, Homo sapien
tgttagatttatatcagggaggctc

SEQ ID NO: 2858365 - DNA, 25 bp, Homo sapien
gggaggctccccagtgtctgtgtct

SEQ ID NO: 2858366 - DNA, 25 bp, Homo sapien
tcagggaggctccccagtgtctgtg

SEQ ID NO: 2858367 - DNA, 25 bp, Homo sapien
ccttactccttcaggtagaagacaa

SEQ ID NO: 2858368 - DNA, 25 bp, Homo sapien
agttgcatttgttctgtgttcaaat

SEQ ID NO: 2858369 - DNA, 25 bp, Homo sapien
ttgcatttgttctgtgttcaaattc

SEQ ID NO: 2858370 - DNA, 25 bp, Homo sapien
tccttactccttcaggtagaagaca

SEQ ID NO: 2858371 - DNA, 25 bp, Homo sapien
ccctggtggtaagcatccttggaaa

SEQ ID NO: 2858372 - DNA, 25 bp, Homo sapien
tggtggtaagcatccttggaaaggc

SEQ ID NO: 2858373 - DNA, 25 bp, Homo sapien
tgaagtctctctgccgagtcggtgc

SEQ ID NO: 2858374 - DNA, 25 bp, Homo sapien
gtgaagtctctctgccgagtcggtg

SEQ ID NO: 2858375 - DNA, 25 bp, Homo sapien
ctaatgtcagaaacaacataaggat

SEQ ID NO: 2858376 - DNA, 25 bp, Homo sapien
cagaaacaacataaggatgaaaatt

SEQ ID NO: 2858377 - DNA, 25 bp, Homo sapien
gaaacaacataaggatgaaaattat

SEQ ID NO: 2858378 - DNA, 25 bp, Homo sapien
atgtcagaaacaacataaggatgaa

SEQ ID NO: 2858379 - DNA, 25 bp, Homo sapien
agcatcaccaatggggcctgttaaa

SEQ ID NO: 2858380 - DNA, 25 bp, Homo sapien
aggtgttaaatatcactgagcatca

SEQ ID NO: 2858381 - DNA, 25 bp, Homo sapien
gagcatcaccaatggggcctgttaa

SEQ ID NO: 2858382 - DNA, 25 bp, Homo sapien
tgttaaatatcactgagcatcacca

SEQ ID NO: 2858383 - DNA, 25 bp, Homo sapien
tataattagggaagtcagagatgag

SEQ ID NO: 2858384 - DNA, 25 bp, Homo sapien
ctataattagggaagtcagagatga

SEQ ID NO: 2858385 - DNA, 25 bp, Homo sapien
tattcataaagatggcatgcaaatg

SEQ ID NO: 2858386 - DNA, 25 bp, Homo sapien
tcataaagatggcatgcaaatgtcc

SEQ ID NO: 2858387 - DNA, 25 bp, Homo sapien
ttattcataaagatggcatgcaaat

SEQ ID NO: 2858388 - DNA, 25 bp, Homo sapien
taaagatggcatgcaaatgtccact

SEQ ID NO: 2858389 - DNA, 25 bp, Homo sapien
gatccggcagcagtagatcccactg

SEQ ID NO: 2858390 - DNA, 25 bp, Homo sapien
agataggcattctgaccgacctccg

SEQ ID NO: 2858391 - DNA, 25 bp, Homo sapien
cacattctctatggtcagggacaca

SEQ ID NO: 2858392 - DNA, 25 bp, Homo sapien
tgcggaaatccccatttagccagta

SEQ ID NO: 2858393 - DNA, 25 bp, Homo sapien
tcaggaaaactgcaagccatgtctt

SEQ ID NO: 2858394 - DNA, 25 bp, Homo sapien
gattcgctgtgacaatgcttctcag

SEQ ID NO: 2858395 - DNA, 25 bp, Homo sapien
tcactgggaagccttgcgaaaacac

SEQ ID NO: 2858396 - DNA, 25 bp, Homo sapien
tgccctaggagagaattgtggccca

SEQ ID NO: 2858397 - DNA, 25 bp, Homo sapien
gcagcaggacacagtcaaagggaag

SEQ ID NO: 2858398 - DNA, 25 bp, Homo sapien
agtagccgcccccactgagtgctag

SEQ ID NO: 2858399 - DNA, 25 bp, Homo sapien
gagtgctagctcagcacacccgggt

SEQ ID NO: 2858400 - DNA, 25 bp, Homo sapien
tttaactctccaaatggactgggta

SEQ ID NO: 2858401 - DNA, 25 bp, Homo sapien
ttcttccaactgtctactccacaat

SEQ ID NO: 2858402 - DNA, 25 bp, Homo sapien
ttaataggcttaggcctgggtcacc

SEQ ID NO: 2858403 - DNA, 25 bp, Homo sapien
gaaaaatccaggttcaggcaaggct

SEQ ID NO: 2858404 - DNA, 25 bp, Homo sapien
tgttaacattcagttgcctccaggg

SEQ ID NO: 2858405 - DNA, 25 bp, Homo sapien
gcaaggcttgattcagtggctctca

SEQ ID NO: 2858406 - DNA, 25 bp, Homo sapien
tcacaaccctgaagagatgataaag

SEQ ID NO: 2858407 - DNA, 25 bp, Homo sapien
cactcaagtgagtgcaaggccagct

SEQ ID NO: 2858408 - DNA, 25 bp, Homo sapien
gaaggacaagtcagcattctgagct

SEQ ID NO: 2858409 - DNA, 25 bp, Homo sapien
aatactggcagtgtcatggagcaag

SEQ ID NO: 2858410 - DNA, 25 bp, Homo sapien
ttggtagagccaatacccaaagaag

SEQ ID NO: 2858411 - DNA, 25 bp, Homo sapien
aggaataataccttatcactagaga

SEQ ID NO: 2858412 - DNA, 25 bp, Homo sapien
gcttttggacaaagatttttgctca

SEQ ID NO: 2858413 - DNA, 25 bp, Homo sapien
aacaaggcccaactataggctgcct

SEQ ID NO: 2858414 - DNA, 25 bp, Homo sapien
gatatttgcacctgccgttcccagt

SEQ ID NO: 2858415 - DNA, 25 bp, Homo sapien
catattgcagccatagtagcctttc

SEQ ID NO: 2858416 - DNA, 25 bp, Homo sapien
gctcagtgcatgagttgaagctgcc

SEQ ID NO: 2858417 - DNA, 25 bp, Homo sapien
ggctggaacccgtcatgtgccatca

SEQ ID NO: 2858418 - DNA, 25 bp, Homo sapien
taaattgtaagagagagaaggtctc

SEQ ID NO: 2858419 - DNA, 25 bp, Homo sapien
gttgcccccattggtctcaaattcc

SEQ ID NO: 2858420 - DNA, 25 bp, Homo sapien
ctatgttgcccccattggtctcaaa

SEQ ID NO: 2858421 - DNA, 25 bp, Homo sapien
ctcacatcaacctcccaaagcacta

SEQ ID NO: 2858422 - DNA, 25 bp, Homo sapien
gctagtaccccagtccaaaaaatga

SEQ ID NO: 2858423 - DNA, 25 bp, Homo sapien
gaaatcagaatctccgcagtgtggg

SEQ ID NO: 2858424 - DNA, 25 bp, Homo sapien
gtaacagagcactgattaatgcaac

SEQ ID NO: 2858425 - DNA, 25 bp, Homo sapien
gattaatgcaacattctgtaaccac

SEQ ID NO: 2858426 - DNA, 25 bp, Homo sapien
tgcacatttcatagagaactgacct

SEQ ID NO: 2858427 - DNA, 25 bp, Homo sapien
tgaggcccaaaggtctataccaaac

SEQ ID NO: 2858428 - DNA, 25 bp, Homo sapien
ggataacttacagtccctggatctg

SEQ ID NO: 2858429 - DNA, 25 bp, Homo sapien
tgctagctctaggaccaatgaaagt

SEQ ID NO: 2858430 - DNA, 25 bp, Homo sapien
aaatgtccctggctggattgccaca

SEQ ID NO: 2858431 - DNA, 25 bp, Homo sapien
tagtcctcacggtcattcaaagaac

SEQ ID NO: 2858432 - DNA, 25 bp, Homo sapien
gcagagatcctcagacacaaggtca

SEQ ID NO: 2858433 - DNA, 25 bp, Homo sapien
ttaagaaaacggcaggcagagatcc

SEQ ID NO: 2858434 - DNA, 25 bp, Homo sapien
tagttttacatgtagagagcttaat

SEQ ID NO: 2858435 - DNA, 25 bp, Homo sapien
ttacatgtagagagcttaatatcca

SEQ ID NO: 2858436 - DNA, 25 bp, Homo sapien
catgtagagagcttaatatccattt

SEQ ID NO: 2858437 - DNA, 25 bp, Homo sapien
gaataagtctaaagatttcatagtt

SEQ ID NO: 2858438 - DNA, 25 bp, Homo sapien
tgttatacagcgaaattactgccta

SEQ ID NO: 2858439 - DNA, 25 bp, Homo sapien
tgcagggacactcatttgtctatgc

SEQ ID NO: 2858440 - DNA, 25 bp, Homo sapien
gaatgtcccatacaacagcagctaa

SEQ ID NO: 2858441 - DNA, 25 bp, Homo sapien
aagtgattcttcttagtgcagggac

SEQ ID NO: 2858442 - DNA, 25 bp, Homo sapien
catctcatcaattaggacacacaag

SEQ ID NO: 2858443 - DNA, 25 bp, Homo sapien
ttctctataatctgatctctcctat

SEQ ID NO: 2858444 - DNA, 25 bp, Homo sapien
aattaggacacacaaggcagcatct

SEQ ID NO: 2858445 - DNA, 25 bp, Homo sapien
tcatcaattaggacacacaaggcag

SEQ ID NO: 2858446 - DNA, 25 bp, Homo sapien
gatgaagccgttcgatgccctgact

SEQ ID NO: 2858447 - DNA, 25 bp, Homo sapien
gatcaaactgcataggatgaagccg

SEQ ID NO: 2858448 - DNA, 25 bp, Homo sapien
tccaaagggcggatgataagatcat

SEQ ID NO: 2858449 - DNA, 25 bp, Homo sapien
tctcgttttatactcccagggctcc

SEQ ID NO: 2858450 - DNA, 25 bp, Homo sapien
gagagaccgcactctcggagagact

SEQ ID NO: 2858451 - DNA, 25 bp, Homo sapien
caaagagccggagagggcaaatgac

SEQ ID NO: 2858452 - DNA, 25 bp, Homo sapien
agagaaagacgaaagaccgcctttg

SEQ ID NO: 2858453 - DNA, 25 bp, Homo sapien
cagggagggctactctcatgttaca

SEQ ID NO: 2858454 - DNA, 25 bp, Homo sapien
ccttgattggctgtaagagctgtcc

SEQ ID NO: 2858455 - DNA, 25 bp, Homo sapien
taacgaaattctagctccgcctcag

SEQ ID NO: 2858456 - DNA, 25 bp, Homo sapien
gaagaagccaccgactctgtccttg

SEQ ID NO: 2858457 - DNA, 25 bp, Homo sapien
tctgcagccgaaaccaacttccggt

SEQ ID NO: 2858458 - DNA, 25 bp, Homo sapien
catcacatggacatttctaatggga

SEQ ID NO: 2858459 - DNA, 25 bp, Homo sapien
gccatcacatggacatttctaatgg

SEQ ID NO: 2858460 - DNA, 25 bp, Homo sapien
tggacatttctaatgggaacatgtc

SEQ ID NO: 2858461 - DNA, 25 bp, Homo sapien
cacatggacatttctaatgggaaca

SEQ ID NO: 2858462 - DNA, 25 bp, Homo sapien
tctgcataggctaagaactggactg

SEQ ID NO: 2858463 - DNA, 25 bp, Homo sapien
gatttggacctcagaacatgatttg

SEQ ID NO: 2858464 - DNA, 25 bp, Homo sapien
tctaattgcctacaaatactgctgt

SEQ ID NO: 2858465 - DNA, 25 bp, Homo sapien
tgaacactcacgttggctctgctgg

SEQ ID NO: 2858466 - DNA, 25 bp, Homo sapien
cagtaaagaaagctgggatgggctc

SEQ ID NO: 2858467 - DNA, 25 bp, Homo sapien
agatccctgggcggttgtagccctg

SEQ ID NO: 2858468 - DNA, 25 bp, Homo sapien
tggagttgtacgatttcctttatta

SEQ ID NO: 2858469 - DNA, 25 bp, Homo sapien
ggctcctctagggatacttccagat

SEQ ID NO: 2858470 - DNA, 25 bp, Homo sapien
tggtttcaaagacgatcatctccgt

SEQ ID NO: 2858471 - DNA, 25 bp, Homo sapien
tgtcgcttgccccttacgttgctgt

SEQ ID NO: 2858472 - DNA, 25 bp, Homo sapien
cgtcttctcggatgtcatagtgcca

SEQ ID NO: 2858473 - DNA, 25 bp, Homo sapien
tcgtgtttttatggccagatgcgga

SEQ ID NO: 2858474 - DNA, 25 bp, Homo sapien
tgcacacttgctggtcgtaatactg

SEQ ID NO: 2858475 - DNA, 25 bp, Homo sapien
ttcattccagacttcagcactgggc

SEQ ID NO: 2858476 - DNA, 25 bp, Homo sapien
ggtgactttcacctgccttgcggtg

SEQ ID NO: 2858477 - DNA, 25 bp, Homo sapien
tagccttcgctttgcaaggtggaga

SEQ ID NO: 2858478 - DNA, 25 bp, Homo sapien
ctcgtggatggagaagccgcactag

SEQ ID NO: 2858479 - DNA, 25 bp, Homo sapien
gatttttgatagctgctcccgccag

SEQ ID NO: 2858480 - DNA, 25 bp, Homo sapien
gaggtggctgcagatacatcacaag

SEQ ID NO: 2858481 - DNA, 25 bp, Homo sapien
gcactagccgttccgtgggaggcat

SEQ ID NO: 2858482 - DNA, 25 bp, Homo sapien
cagtgtggtaagtcccctagtagtg

SEQ ID NO: 2858483 - DNA, 25 bp, Homo sapien
gaaattcagccttatgggacacaca

SEQ ID NO: 2858484 - DNA, 25 bp, Homo sapien
tcaaccctgggtgtgagaccagagt

SEQ ID NO: 2858485 - DNA, 25 bp, Homo sapien
cagagtagctgatacctaaggtctc

SEQ ID NO: 2858486 - DNA, 25 bp, Homo sapien
ttggtcctgagcccttgcacatgca

SEQ ID NO: 2858487 - DNA, 25 bp, Homo sapien
atttggtcctgagcccttgcacatg

SEQ ID NO: 2858488 - DNA, 25 bp, Homo sapien
ggtcctgagcccttgcacatgcaat

SEQ ID NO: 2858489 - DNA, 25 bp, Homo sapien
tcatttggtcctgagcccttgcaca

SEQ ID NO: 2858490 - DNA, 25 bp, Homo sapien
aggtgggcctcagaaggcaccaaag

SEQ ID NO: 2858491 - DNA, 25 bp, Homo sapien
gccccatgttctcgagcctttgaga

SEQ ID NO: 2858492 - DNA, 25 bp, Homo sapien
ccatgttctcgagcctttgagaggc

SEQ ID NO: 2858493 - DNA, 25 bp, Homo sapien
gttctcgagcctttgagaggcttac

SEQ ID NO: 2858494 - DNA, 25 bp, Homo sapien
cactaggcttttgttgtcttcgggt

SEQ ID NO: 2858495 - DNA, 25 bp, Homo sapien
tgcagtaactctctactggtggcct

SEQ ID NO: 2858496 - DNA, 25 bp, Homo sapien
ccagatagaagtgttggggtactgc

SEQ ID NO: 2858497 - DNA, 25 bp, Homo sapien
ttcgggtggtgcgtccccagataga

SEQ ID NO: 2858498 - DNA, 25 bp, Homo sapien
caagggaagcagtctcgtgagctct

SEQ ID NO: 2858499 - DNA, 25 bp, Homo sapien
tgtacaattgtcgttgcaggtcccc

SEQ ID NO: 2858500 - DNA, 25 bp, Homo sapien
tctagagtcttgacgggcctgcgac

SEQ ID NO: 2858501 - DNA, 25 bp, Homo sapien
cagataaaaagtacggccagtggcg

SEQ ID NO: 2858502 - DNA, 25 bp, Homo sapien
tgtgtaataaggtaaacaagattca

SEQ ID NO: 2858503 - DNA, 25 bp, Homo sapien
ctcattgaagagtagctgtgggctg

SEQ ID NO: 2858504 - DNA, 25 bp, Homo sapien
taaggtaaacaagattcattgctca

SEQ ID NO: 2858505 - DNA, 25 bp, Homo sapien
ggaggttttgaacgcactcattgaa

SEQ ID NO: 2858506 - DNA, 25 bp, Homo sapien
acggagagaaggtaactgcccatct

SEQ ID NO: 2858507 - DNA, 25 bp, Homo sapien
cacaaatagagtccccgagagagag

SEQ ID NO: 2858508 - DNA, 25 bp, Homo sapien
ctgcccatctccctacaggacttct

SEQ ID NO: 2858509 - DNA, 25 bp, Homo sapien
tcttcgtttaagacagctccaccag

SEQ ID NO: 2858510 - DNA, 25 bp, Homo sapien
tacagaaggatacaaggtaaaaaga

SEQ ID NO: 2858511 - DNA, 25 bp, Homo sapien
aaagagtacagaaggatacaaggta

SEQ ID NO: 2858512 - DNA, 25 bp, Homo sapien
aagagtacagaaggatacaaggtaa

SEQ ID NO: 2858513 - DNA, 25 bp, Homo sapien
gagtacagaaggatacaaggtaaaa

SEQ ID NO: 2858514 - DNA, 25 bp, Homo sapien
aacccacagtgcgaaatgctgaggt

SEQ ID NO: 2858515 - DNA, 25 bp, Homo sapien
ggtccagggagccttgaaattaatg

SEQ ID NO: 2858516 - DNA, 25 bp, Homo sapien
ccagagctttagaatagagggaggt

SEQ ID NO: 2858517 - DNA, 25 bp, Homo sapien
ctgaggtggagaaagccagccaacg

SEQ ID NO: 2858518 - DNA, 25 bp, Homo sapien
gcatgagccattgctactagcattt

SEQ ID NO: 2858519 - DNA, 25 bp, Homo sapien
gagccattgctactagcatttgcta

SEQ ID NO: 2858520 - DNA, 25 bp, Homo sapien
gcatttgctagtaggtttatgtaat

SEQ ID NO: 2858521 - DNA, 25 bp, Homo sapien
tctcttaattaacttaatgattcag

SEQ ID NO: 2858522 - DNA, 25 bp, Homo sapien
gatagtcttctgtggaaagtcccag

SEQ ID NO: 2858523 - DNA, 25 bp, Homo sapien
gaaacaaagctctgcgagtccatgg

SEQ ID NO: 2858524 - DNA, 25 bp, Homo sapien
catagagtggagcttgtacgctgct

SEQ ID NO: 2858525 - DNA, 25 bp, Homo sapien
tctacgtattaagagggttggcctc

SEQ ID NO: 2858526 - DNA, 25 bp, Homo sapien
ggcaggtacactcaatgtaacttta

SEQ ID NO: 2858527 - DNA, 25 bp, Homo sapien
atcttctgttaatccctctggagtg

SEQ ID NO: 2858528 - DNA, 25 bp, Homo sapien
catcatagaagggtcatgtcataaa

SEQ ID NO: 2858529 - DNA, 25 bp, Homo sapien
ggtcttgctatctcaaggctaatag

SEQ ID NO: 2858530 - DNA, 25 bp, Homo sapien
aacaatgtggcatcttcaacagtgt

SEQ ID NO: 2858531 - DNA, 25 bp, Homo sapien
tgaaaggcagacctttagtggcaag

SEQ ID NO: 2858532 - DNA, 25 bp, Homo sapien
caatggaactgatccagaaagagtt

SEQ ID NO: 2858533 - DNA, 25 bp, Homo sapien
tcagggacaaaacatcaatggaact

SEQ ID NO: 2858534 - DNA, 25 bp, Homo sapien
catctgataacttgtctgctatctc

SEQ ID NO: 2858535 - DNA, 25 bp, Homo sapien
ccccagaatagggtactttcatcca

SEQ ID NO: 2858536 - DNA, 25 bp, Homo sapien
gaatagggtactttcatccaaatta

SEQ ID NO: 2858537 - DNA, 25 bp, Homo sapien
tgattttgttaatggcatctgataa

SEQ ID NO: 2858538 - DNA, 25 bp, Homo sapien
aattgcttctttaaagagcccgaca

SEQ ID NO: 2858539 - DNA, 25 bp, Homo sapien
tgagccaccgctgggcagataattg

SEQ ID NO: 2858540 - DNA, 25 bp, Homo sapien
gacacggcagataagccttgaagag

SEQ ID NO: 2858541 - DNA, 25 bp, Homo sapien
ccaccgctgggcagataattgcttc

SEQ ID NO: 2858542 - DNA, 25 bp, Homo sapien
cctatttgtccgttaggcaattctt

SEQ ID NO: 2858543 - DNA, 25 bp, Homo sapien
tgccacctatttgtccgttaggcaa

SEQ ID NO: 2858544 - DNA, 25 bp, Homo sapien
ctcagtgcttcctgccacctatttg

SEQ ID NO: 2858545 - DNA, 25 bp, Homo sapien
ttgtccgttaggcaattcttccaga

SEQ ID NO: 2858546 - DNA, 25 bp, Homo sapien
tggcacggtacttggaacaggatag

SEQ ID NO: 2858547 - DNA, 25 bp, Homo sapien
caagctcaattggtggaaggcccct

SEQ ID NO: 2858548 - DNA, 25 bp, Homo sapien
tattcttaagcgaaggagccctatc

SEQ ID NO: 2858549 - DNA, 25 bp, Homo sapien
gcactttgggctgtaactggacgtt

SEQ ID NO: 2858550 - DNA, 25 bp, Homo sapien
tctcgtcctcgggttgctgcaggtg

SEQ ID NO: 2858551 - DNA, 25 bp, Homo sapien
cggccgaagctctcgtcctcgggtt

SEQ ID NO: 2858552 - DNA, 25 bp, Homo sapien
cggtcctccgaaaccgagaggcagg

SEQ ID NO: 2858553 - DNA, 25 bp, Homo sapien
aataagatccgaacgcggccgaagc

SEQ ID NO: 2858554 - DNA, 25 bp, Homo sapien
tccaggtactgcagagcgctggccc

SEQ ID NO: 2858555 - DNA, 25 bp, Homo sapien
cggtgctaatctcagggaccggaga

SEQ ID NO: 2858556 - DNA, 25 bp, Homo sapien
ggcagcggcgacatcctcgagtcca

SEQ ID NO: 2858557 - DNA, 25 bp, Homo sapien
taatctcagggaccggagacacctg

SEQ ID NO: 2858558 - DNA, 25 bp, Homo sapien
cagcatttgaggtggttcacagaca

SEQ ID NO: 2858559 - DNA, 25 bp, Homo sapien
tcactggcaggcaatagaagctaag

SEQ ID NO: 2858560 - DNA, 25 bp, Homo sapien
caaacgacctactgtgtggaaagct

SEQ ID NO: 2858561 - DNA, 25 bp, Homo sapien
tttaggctacatgatgcgggcgctc

SEQ ID NO: 2858562 - DNA, 25 bp, Homo sapien
ggagccagcggactcttatccaggg

SEQ ID NO: 2858563 - DNA, 25 bp, Homo sapien
aatatggtaatagtcctccaggcag

SEQ ID NO: 2858564 - DNA, 25 bp, Homo sapien
cacggagctgatcgttcgaggcacc

SEQ ID NO: 2858565 - DNA, 25 bp, Homo sapien
tgtggccagccctgtaagaccatcg

SEQ ID NO: 2858566 - DNA, 25 bp, Homo sapien
taactattcatttgcccggcccttc

SEQ ID NO: 2858567 - DNA, 25 bp, Homo sapien
ttccaagaagagccatctatatgtc

SEQ ID NO: 2858568 - DNA, 25 bp, Homo sapien
caagaagagccatctatatgtctta

SEQ ID NO: 2858569 - DNA, 25 bp, Homo sapien
aactattcatttgcccggcccttct

SEQ ID NO: 2858570 - DNA, 25 bp, Homo sapien
tggttagagctctgccctccgaggt

SEQ ID NO: 2858571 - DNA, 25 bp, Homo sapien
ctgatgcttgcagcgtgtctggtta

SEQ ID NO: 2858572 - DNA, 25 bp, Homo sapien
tgctctgggctttccgtgttgtttc

SEQ ID NO: 2858573 - DNA, 25 bp, Homo sapien
cctccgaggtgcagtagattaaagc

SEQ ID NO: 2858574 - DNA, 25 bp, Homo sapien
caggggaatcttggtccctgtgaca

SEQ ID NO: 2858575 - DNA, 25 bp, Homo sapien
tgacaccaccaccaacagcacctcc

SEQ ID NO: 2858576 - DNA, 25 bp, Homo sapien
gaatcttggtccctgtgacaccacc

SEQ ID NO: 2858577 - DNA, 25 bp, Homo sapien
caccaccccacccttctgtctgcat

SEQ ID NO: 2858578 - DNA, 25 bp, Homo sapien
gaccacttgtatttgctctgcctca

SEQ ID NO: 2858579 - DNA, 25 bp, Homo sapien
tgcctcatggctgactcagagactg

SEQ ID NO: 2858580 - DNA, 25 bp, Homo sapien
gcagtaagaactaaaccattggtag

SEQ ID NO: 2858581 - DNA, 25 bp, Homo sapien
taccctgcaggatagtttcaaggcc

SEQ ID NO: 2858582 - DNA, 25 bp, Homo sapien
caggtttccaatattgatcccagtc

SEQ ID NO: 2858583 - DNA, 25 bp, Homo sapien
gaactaaagcacaggtttccaatat

SEQ ID NO: 2858584 - DNA, 25 bp, Homo sapien
tttccaatattgatcccagtccttg

SEQ ID NO: 2858585 - DNA, 25 bp, Homo sapien
aagcacaggtttccaatattgatcc

SEQ ID NO: 2858586 - DNA, 25 bp, Homo sapien
gactgtctgaccctgaggactgatt

SEQ ID NO: 2858587 - DNA, 25 bp, Homo sapien
gcagattgataacctcagttgccag

SEQ ID NO: 2858588 - DNA, 25 bp, Homo sapien
tcaaggcccttttcattggctgtag

SEQ ID NO: 2858589 - DNA, 25 bp, Homo sapien
tgagcgtctcccctgtaccagacat

SEQ ID NO: 2858590 - DNA, 25 bp, Homo sapien
gacatctagtctgtctagccagctg

SEQ ID NO: 2858591 - DNA, 25 bp, Homo sapien
gccagctgcttattagatatgcagt

SEQ ID NO: 2858592 - DNA, 25 bp, Homo sapien
ttactttgcagatagctttcaggac

SEQ ID NO: 2858593 - DNA, 25 bp, Homo sapien
tatgcagtagccagaacccagatga

SEQ ID NO: 2858594 - DNA, 25 bp, Homo sapien
gaagatcctgcagacccttatctgg

SEQ ID NO: 2858595 - DNA, 25 bp, Homo sapien
caactggacaacgtgtgggatggac

SEQ ID NO: 2858596 - DNA, 25 bp, Homo sapien
ttggccaccacttgctaagcagaag

SEQ ID NO: 2858597 - DNA, 25 bp, Homo sapien
catgaagtccgtggagacagacagt

SEQ ID NO: 2858598 - DNA, 25 bp, Homo sapien
cccagggaagtaagatggttagcaa

SEQ ID NO: 2858599 - DNA, 25 bp, Homo sapien
ttagactttcgggtgtggcttctct

SEQ ID NO: 2858600 - DNA, 25 bp, Homo sapien
tctgtggccctgagattttaagaac

SEQ ID NO: 2858601 - DNA, 25 bp, Homo sapien
tgtcattgtcaaaggaaatctgtgg

SEQ ID NO: 2858602 - DNA, 25 bp, Homo sapien
cctgtctgaggatggtagctggctc

SEQ ID NO: 2858603 - DNA, 25 bp, Homo sapien
aaagagacacattatcccagatggc

SEQ ID NO: 2858604 - DNA, 25 bp, Homo sapien
gaccacgacttcatggagatttgaa

SEQ ID NO: 2858605 - DNA, 25 bp, Homo sapien
accatagatgtgttccagaggcaaa

SEQ ID NO: 2858606 - DNA, 25 bp, Homo sapien
tagaaggccatattaaaactaatta

SEQ ID NO: 2858607 - DNA, 25 bp, Homo sapien
caaactagtaaaaccagcaacttgg

SEQ ID NO: 2858608 - DNA, 25 bp, Homo sapien
tcctcattgacctgtagaaggccat

SEQ ID NO: 2858609 - DNA, 25 bp, Homo sapien
tgattcctggttctattctaatcct

SEQ ID NO: 2858610 - DNA, 25 bp, Homo sapien
ccctcagaatcatggcaggaggcaa

SEQ ID NO: 2858611 - DNA, 25 bp, Homo sapien
gccctcagaatcatggcaggaggca

SEQ ID NO: 2858612 - DNA, 25 bp, Homo sapien
agaccagtggggagaagatcaattt

SEQ ID NO: 2858613 - DNA, 25 bp, Homo sapien
gaccagtggggagaagatcaatttc

SEQ ID NO: 2858614 - DNA, 25 bp, Homo sapien
ctgagaccagtggggagaagatcaa

SEQ ID NO: 2858615 - DNA, 25 bp, Homo sapien
gagaccagtggggagaagatcaatt

SEQ ID NO: 2858616 - DNA, 25 bp, Homo sapien
catagcctgggtttggtgccagtac

SEQ ID NO: 2858617 - DNA, 25 bp, Homo sapien
tccatgagagcaggtaacttgtcta

SEQ ID NO: 2858618 - DNA, 25 bp, Homo sapien
cacagcacacttagaaagtaggtac

SEQ ID NO: 2858619 - DNA, 25 bp, Homo sapien
tgctccttgtacgatgctatactgc

SEQ ID NO: 2858620 - DNA, 25 bp, Homo sapien
tcacaaggctcaagaatggtggagg

SEQ ID NO: 2858621 - DNA, 25 bp, Homo sapien
gcaggcctccggtaccatgtatact

SEQ ID NO: 2858622 - DNA, 25 bp, Homo sapien
gcaggcgctctcaaacagcaggcct

SEQ ID NO: 2858623 - DNA, 25 bp, Homo sapien
ggtggaggcaggatataaactcacg

SEQ ID NO: 2858624 - DNA, 25 bp, Homo sapien
ttatcgatgccagtggatcccatcg

SEQ ID NO: 2858625 - DNA, 25 bp, Homo sapien
cagcaaagctatttatgaggacagc

SEQ ID NO: 2858626 - DNA, 25 bp, Homo sapien
catggtgctcttcttagaaccagag

SEQ ID NO: 2858627 - DNA, 25 bp, Homo sapien
gatcccatcgttaggcatggtgctc

SEQ ID NO: 2858628 - DNA, 25 bp, Homo sapien
agctgcggctgggtcaccagtcgct

SEQ ID NO: 2858629 - DNA, 25 bp, Homo sapien
aaagagctgcggctgggtcaccagt

SEQ ID NO: 2858630 - DNA, 25 bp, Homo sapien
tcaccagtcgctggctggctaaggg

SEQ ID NO: 2858631 - DNA, 25 bp, Homo sapien
ctgggtcaccagtcgctggctggct

SEQ ID NO: 2858632 - DNA, 25 bp, Homo sapien
cccctagcacggggcggtgactcca

SEQ ID NO: 2858633 - DNA, 25 bp, Homo sapien
ctcttgcccctagcacggggcggtg

SEQ ID NO: 2858634 - DNA, 25 bp, Homo sapien
ttgcccctagcacggggcggtgact

SEQ ID NO: 2858635 - DNA, 25 bp, Homo sapien
ccctagcacggggcggtgactccag

SEQ ID NO: 2858636 - DNA, 25 bp, Homo sapien
gaaggaataacacgtgcaaaggctc

SEQ ID NO: 2858637 - DNA, 25 bp, Homo sapien
gaagtacagaggctgagtgcaattg

SEQ ID NO: 2858638 - DNA, 25 bp, Homo sapien
aggttttaggaaggcgagtgacaca

SEQ ID NO: 2858639 - DNA, 25 bp, Homo sapien
ctagattatgaggagacagcaaggt

SEQ ID NO: 2858640 - DNA, 25 bp, Homo sapien
cctaaggagtcggtcactgagacat

SEQ ID NO: 2858641 - DNA, 25 bp, Homo sapien
ctacttacatcctaaggagtcggtc

SEQ ID NO: 2858642 - DNA, 25 bp, Homo sapien
tacatcctaaggagtcggtcactga

SEQ ID NO: 2858643 - DNA, 25 bp, Homo sapien
ggagtcggtcactgagacataaagg

SEQ ID NO: 2858644 - DNA, 25 bp, Homo sapien
gatcattcaggcctttaataagcag

SEQ ID NO: 2858645 - DNA, 25 bp, Homo sapien
gcagtagtgtaggatgagaaaaaac

SEQ ID NO: 2858646 - DNA, 25 bp, Homo sapien
gaaaaaacatatcgaagaatctcag

SEQ ID NO: 2858647 - DNA, 25 bp, Homo sapien
cttctatatgcagtagtgtaggatg

SEQ ID NO: 2858648 - DNA, 25 bp, Homo sapien
ctgcgtccaggtgtaaagacaaaca

SEQ ID NO: 2858649 - DNA, 25 bp, Homo sapien
cgtccaggtgtaaagacaaacagcc

SEQ ID NO: 2858650 - DNA, 25 bp, Homo sapien
tgcgtccaggtgtaaagacaaacag

SEQ ID NO: 2858651 - DNA, 25 bp, Homo sapien
tccaggtgtaaagacaaacagcccc

SEQ ID NO: 2858652 - DNA, 25 bp, Homo sapien
tattgtaaacaattaataggtggac

SEQ ID NO: 2858653 - DNA, 25 bp, Homo sapien
tctgttttccgtgaacaatctccca

SEQ ID NO: 2858654 - DNA, 25 bp, Homo sapien
tgttttccgtgaacaatctcccaaa

SEQ ID NO: 2858655 - DNA, 25 bp, Homo sapien
atattgtaaacaattaataggtgga

SEQ ID NO: 2858656 - DNA, 25 bp, Homo sapien
tgactttggaaatgtgggcttggat

SEQ ID NO: 2858657 - DNA, 25 bp, Homo sapien
gacctttccagttggcgttcccatg

SEQ ID NO: 2858658 - DNA, 25 bp, Homo sapien
agtggacggtgtgagaggacgcgtt

SEQ ID NO: 2858659 - DNA, 25 bp, Homo sapien
ttctacagaacctctccttcgcagg

SEQ ID NO: 2858660 - DNA, 25 bp, Homo sapien
tggtccccagttttcaaattgcaag

SEQ ID NO: 2858661 - DNA, 25 bp, Homo sapien
ttactgactttggaactggtcccca

SEQ ID NO: 2858662 - DNA, 25 bp, Homo sapien
ttcaaattgcaagtcttccataccc

SEQ ID NO: 2858663 - DNA, 25 bp, Homo sapien
tatacacgtggttaacacaattact

SEQ ID NO: 2858664 - DNA, 25 bp, Homo sapien
tcatgcagtcactatggctgtggcg

SEQ ID NO: 2858665 - DNA, 25 bp, Homo sapien
gaaaggaatctatggctagcaggca

SEQ ID NO: 2858666 - DNA, 25 bp, Homo sapien
gttacaagattgagccaggtgccca

SEQ ID NO: 2858667 - DNA, 25 bp, Homo sapien
aaaaggctgggcacaacgtcattcc

SEQ ID NO: 2858668 - DNA, 25 bp, Homo sapien
ttgaggcagagggtagcacatttaa

SEQ ID NO: 2858669 - DNA, 25 bp, Homo sapien
gggaacctgtatcacagccaccctg

SEQ ID NO: 2858670 - DNA, 25 bp, Homo sapien
gcaaggatgacccacggcaaggaca

SEQ ID NO: 2858671 - DNA, 25 bp, Homo sapien
tgagatctttctaaacccaacccag

SEQ ID NO: 2858672 - DNA, 25 bp, Homo sapien
caacctttggcatcacggctcagag

SEQ ID NO: 2858673 - DNA, 25 bp, Homo sapien
tgtaggtcacaagcacctggtcacc

SEQ ID NO: 2858674 - DNA, 25 bp, Homo sapien
tgtgcagagaactataaggaggccc

SEQ ID NO: 2858675 - DNA, 25 bp, Homo sapien
gactgctgagggtttgctcaccaaa

SEQ ID NO: 2858676 - DNA, 25 bp, Homo sapien
tgagtcagagtgacccgtgtgaata

SEQ ID NO: 2858677 - DNA, 25 bp, Homo sapien
ttgtcacatgcagccatacagccag

SEQ ID NO: 2858678 - DNA, 25 bp, Homo sapien
ggcttgtcacatgcagccatacagc

SEQ ID NO: 2858679 - DNA, 25 bp, Homo sapien
tgacccgtgtgaatacagggatgca

SEQ ID NO: 2858680 - DNA, 25 bp, Homo sapien
cagtggctggcttgacccttcctta

SEQ ID NO: 2858681 - DNA, 25 bp, Homo sapien
agtggctggcttgacccttccttaa

SEQ ID NO: 2858682 - DNA, 25 bp, Homo sapien
gtggctggcttgacccttccttaat

SEQ ID NO: 2858683 - DNA, 25 bp, Homo sapien
ggctggcttgacccttccttaatcc

SEQ ID NO: 2858684 - DNA, 25 bp, Homo sapien
caatgggaagctctcttgcgtgccc

SEQ ID NO: 2858685 - DNA, 25 bp, Homo sapien
cctgcaccccaggagtgaatggatg

SEQ ID NO: 2858686 - DNA, 25 bp, Homo sapien
gcttctgcaagcgaagtgctggcct

SEQ ID NO: 2858687 - DNA, 25 bp, Homo sapien
tgggtaagtaccagcctccatccag

SEQ ID NO: 2858688 - DNA, 25 bp, Homo sapien
ttttcgagctaatcatccctccagc

SEQ ID NO: 2858689 - DNA, 25 bp, Homo sapien
gattttcgagctaatcatccctcca

SEQ ID NO: 2858690 - DNA, 25 bp, Homo sapien
agccctctgtgatctgtattctgga

SEQ ID NO: 2858691 - DNA, 25 bp, Homo sapien
ctagattttcgagctaatcatccct

SEQ ID NO: 2858692 - DNA, 25 bp, Homo sapien
aatgcctcgtgggaatacagcatgg

SEQ ID NO: 2858693 - DNA, 25 bp, Homo sapien
gcagcacagtccatagttttctcaa

SEQ ID NO: 2858694 - DNA, 25 bp, Homo sapien
ttctgacctgactgccaagactggc

SEQ ID NO: 2858695 - DNA, 25 bp, Homo sapien
tttctgacctgactgccaagactgg

SEQ ID NO: 2858696 - DNA, 25 bp, Homo sapien
gccaccacagctcaggattctaaga

SEQ ID NO: 2858697 - DNA, 25 bp, Homo sapien
aggccaggtggcttctactaatgca

SEQ ID NO: 2858698 - DNA, 25 bp, Homo sapien
gtcagccacacagaagaagtacgag

SEQ ID NO: 2858699 - DNA, 25 bp, Homo sapien
gaaacagactcaagagggacttgct

SEQ ID NO: 2858700 - DNA, 25 bp, Homo sapien
tcaagcgggcaccaagaaacatgaa

SEQ ID NO: 2858701 - DNA, 25 bp, Homo sapien
gcgggcaccaagaaacatgaatgtt

SEQ ID NO: 2858702 - DNA, 25 bp, Homo sapien
ccacaagaagcatgaattgctttgt

SEQ ID NO: 2858703 - DNA, 25 bp, Homo sapien
agaccacaagaagcatgaattgctt

SEQ ID NO: 2858704 - DNA, 25 bp, Homo sapien
cctggagccctctggtaccagcttt

SEQ ID NO: 2858705 - DNA, 25 bp, Homo sapien
ggagccctctggtaccagctttcac

SEQ ID NO: 2858706 - DNA, 25 bp, Homo sapien
tggagccctctggtaccagctttca

SEQ ID NO: 2858707 - DNA, 25 bp, Homo sapien
cccctggagccctctggtaccagct

SEQ ID NO: 2858708 - DNA, 25 bp, Homo sapien
aggccgggactgctgagggccagca

SEQ ID NO: 2858709 - DNA, 25 bp, Homo sapien
tgggtttgccgggagtgccttctgg

SEQ ID NO: 2858710 - DNA, 25 bp, Homo sapien
ggagtgccttctggggcggccgagg

SEQ ID NO: 2858711 - DNA, 25 bp, Homo sapien
cactgggtttgccgggagtgccttc

SEQ ID NO: 2858712 - DNA, 25 bp, Homo sapien
ggctttgccctgactaccttattta

SEQ ID NO: 2858713 - DNA, 25 bp, Homo sapien
catgtacgtgtattgcctgttaaga

SEQ ID NO: 2858714 - DNA, 25 bp, Homo sapien
tctccattcccctctagagtggaag

SEQ ID NO: 2858715 - DNA, 25 bp, Homo sapien
tttggttcactgatacatctttggc

SEQ ID NO: 2858716 - DNA, 25 bp, Homo sapien
tgggcagcttcctgcacccgggact

SEQ ID NO: 2858717 - DNA, 25 bp, Homo sapien
ggctgtgttttggggtgcctgccac

SEQ ID NO: 2858718 - DNA, 25 bp, Homo sapien
tgttttggggtgcctgccactggct

SEQ ID NO: 2858719 - DNA, 25 bp, Homo sapien
gctgggcagcttcctgcacccggga

SEQ ID NO: 2858720 - DNA, 25 bp, Homo sapien
ggacccaccacgcagataatctgga

SEQ ID NO: 2858721 - DNA, 25 bp, Homo sapien
ctgggagggcttccgcaggatttcc

SEQ ID NO: 2858722 - DNA, 25 bp, Homo sapien
ctctctatttgagacccgggccctg

SEQ ID NO: 2858723 - DNA, 25 bp, Homo sapien
ctgggaaacgatgcaatttggtgcg

SEQ ID NO: 2858724 - DNA, 25 bp, Homo sapien
ggttggcatgaccagtcccgctgtt

SEQ ID NO: 2858725 - DNA, 25 bp, Homo sapien
cagcttgaaagttgggttggcatga

SEQ ID NO: 2858726 - DNA, 25 bp, Homo sapien
gcgtctgcagcttgaaagttgggtt

SEQ ID NO: 2858727 - DNA, 25 bp, Homo sapien
ctttcgcttgccctggggcgtctgc

SEQ ID NO: 2858728 - DNA, 25 bp, Homo sapien
gaactcaggagtgatgaccagaatc

SEQ ID NO: 2858729 - DNA, 25 bp, Homo sapien
gaccagaatcagtagagtacttaca

SEQ ID NO: 2858730 - DNA, 25 bp, Homo sapien
gagacctttgtgacccataaattga

SEQ ID NO: 2858731 - DNA, 25 bp, Homo sapien
gatcaactagtaatgcctgtcacag

SEQ ID NO: 2858732 - DNA, 25 bp, Homo sapien
gcagtagtacatcagcatgaggacc

SEQ ID NO: 2858733 - DNA, 25 bp, Homo sapien
cctagtttgttgttctgtctgcagc

SEQ ID NO: 2858734 - DNA, 25 bp, Homo sapien
ctgaactgttgcctcagcttggaag

SEQ ID NO: 2858735 - DNA, 25 bp, Homo sapien
atgaggaccgccagcaccaagatgg

SEQ ID NO: 2858736 - DNA, 25 bp, Homo sapien
cttccagaaacagaacccaagtggg

SEQ ID NO: 2858737 - DNA, 25 bp, Homo sapien
agtgggagatttagaagctgtctcg

SEQ ID NO: 2858738 - DNA, 25 bp, Homo sapien
ccagaaacagaacccaagtgggaga

SEQ ID NO: 2858739 - DNA, 25 bp, Homo sapien
gaacccaagtgggagatttagaagc

SEQ ID NO: 2858740 - DNA, 25 bp, Homo sapien
ataggtattcgtgcttcttcttcag

SEQ ID NO: 2858741 - DNA, 25 bp, Homo sapien
caaaataggtattcgtgcttcttct

SEQ ID NO: 2858742 - DNA, 25 bp, Homo sapien
aataggtattcgtgcttcttcttca

SEQ ID NO: 2858743 - DNA, 25 bp, Homo sapien
ttcaaaataggtattcgtgcttctt

SEQ ID NO: 2858744 - DNA, 25 bp, Homo sapien
ctgcccctgatgcccgctcttctca

SEQ ID NO: 2858745 - DNA, 25 bp, Homo sapien
agtggccccagcaggctggcactca

SEQ ID NO: 2858746 - DNA, 25 bp, Homo sapien
ggcagtggccccagcaggctggcac

SEQ ID NO: 2858747 - DNA, 25 bp, Homo sapien
gtggccccagcaggctggcactcac

SEQ ID NO: 2858748 - DNA, 25 bp, Homo sapien
aaaagcgggcagtggccccagcagg

SEQ ID NO: 2858749 - DNA, 25 bp, Homo sapien
gcataggcccactgtcgatactgcc

SEQ ID NO: 2858750 - DNA, 25 bp, Homo sapien
tctcagggggcataggcccactgtc

SEQ ID NO: 2858751 - DNA, 25 bp, Homo sapien
cagtggcagttctggttgttgttac

SEQ ID NO: 2858752 - DNA, 25 bp, Homo sapien
tgcccccgtggcccggtgtgttgca

SEQ ID NO: 2858753 - DNA, 25 bp, Homo sapien
ttcccacagccttcagtttcaaaga

SEQ ID NO: 2858754 - DNA, 25 bp, Homo sapien
tcctgcactgcccctcaaagcaaat

SEQ ID NO: 2858755 - DNA, 25 bp, Homo sapien
atggccattgcacttcttcccacag

SEQ ID NO: 2858756 - DNA, 25 bp, Homo sapien
ttcaaagaaggaggtgttcctgcac

SEQ ID NO: 2858757 - DNA, 25 bp, Homo sapien
tgggtgccccggcactggatctgcc

SEQ ID NO: 2858758 - DNA, 25 bp, Homo sapien
atggttgtagccacacttggttcca

SEQ ID NO: 2858759 - DNA, 25 bp, Homo sapien
gcctcccattcatgatgatagtggt

SEQ ID NO: 2858760 - DNA, 25 bp, Homo sapien
cctcctcaggacctcggtagacgtg

SEQ ID NO: 2858761 - DNA, 25 bp, Homo sapien
tcatgttgcacttcctgtgttcacc

SEQ ID NO: 2858762 - DNA, 25 bp, Homo sapien
ctcatgttgcacttcctgtgttcac

SEQ ID NO: 2858763 - DNA, 25 bp, Homo sapien
ttcaccttctcgaagcagaggtcag

SEQ ID NO: 2858764 - DNA, 25 bp, Homo sapien
caccttctcgaagcagaggtcaggg

SEQ ID NO: 2858765 - DNA, 25 bp, Homo sapien
gggctggagtcctagagtggagtgg

SEQ ID NO: 2858766 - DNA, 25 bp, Homo sapien
tgctgttctacaccttgcatttttc

SEQ ID NO: 2858767 - DNA, 25 bp, Homo sapien
tcctggtaggtgaggcacatgccgt

SEQ ID NO: 2858768 - DNA, 25 bp, Homo sapien
ggtaccatccatctggtagaagttg

SEQ ID NO: 2858769 - DNA, 25 bp, Homo sapien
gacttgcccgtacagaactccggga

SEQ ID NO: 2858770 - DNA, 25 bp, Homo sapien
ccgttgtagcagtaggcctggccgc

SEQ ID NO: 2858771 - DNA, 25 bp, Homo sapien
gcggcacagggtcccaggagccaac

SEQ ID NO: 2858772 - DNA, 25 bp, Homo sapien
ctgctcgcggcacagggtcccagga

SEQ ID NO: 2858773 - DNA, 25 bp, Homo sapien
ggcacagggtcccaggagccaacag

SEQ ID NO: 2858774 - DNA, 25 bp, Homo sapien
tcgcggcacagggtcccaggagcca

SEQ ID NO: 2858775 - DNA, 25 bp, Homo sapien
gagccaaggaatgagaggaaaacac

SEQ ID NO: 2858776 - DNA, 25 bp, Homo sapien
gaggaaaacacagtcaatctcctcc

SEQ ID NO: 2858777 - DNA, 25 bp, Homo sapien
ggaaaacacagtcaatctcctcccc

SEQ ID NO: 2858778 - DNA, 25 bp, Homo sapien
ctgagccaaggaatgagaggaaaac

SEQ ID NO: 2858779 - DNA, 25 bp, Homo sapien
ccaggatggaggcaaatccccagcc

SEQ ID NO: 2858780 - DNA, 25 bp, Homo sapien
ctgtggtcccactgtcaggccaggg

SEQ ID NO: 2858781 - DNA, 25 bp, Homo sapien
tcagtgaggcccagtataggaatag

SEQ ID NO: 2858782 - DNA, 25 bp, Homo sapien
tattcaaggcaccttttccgctctg

SEQ ID NO: 2858783 - DNA, 25 bp, Homo sapien
gcagcaggagccgtgagcacactcc

SEQ ID NO: 2858784 - DNA, 25 bp, Homo sapien
tacaattagaggcattgcagcaggg

SEQ ID NO: 2858785 - DNA, 25 bp, Homo sapien
cccggcctcagggtacaattagagg

SEQ ID NO: 2858786 - DNA, 25 bp, Homo sapien
agcaggagccgtgagcacactccgc

SEQ ID NO: 2858787 - DNA, 25 bp, Homo sapien
tgttaaaaatgaccgggctctgccg

SEQ ID NO: 2858788 - DNA, 25 bp, Homo sapien
agcccttttgggacttgacagcact

SEQ ID NO: 2858789 - DNA, 25 bp, Homo sapien
tctgcagaaaccacatgcatttgtt

SEQ ID NO: 2858790 - DNA, 25 bp, Homo sapien
tagagacgaaacaatccagttctgc

SEQ ID NO: 2858791 - DNA, 25 bp, Homo sapien
agagacacattccaccacctgactg

SEQ ID NO: 2858792 - DNA, 25 bp, Homo sapien
ccggcctccatacaacatcctggtg

SEQ ID NO: 2858793 - DNA, 25 bp, Homo sapien
gttgcatccattgaacactttggga

SEQ ID NO: 2858794 - DNA, 25 bp, Homo sapien
tgactgcagatacctgtccagctcc

SEQ ID NO: 2858795 - DNA, 25 bp, Homo sapien
ctgcagaatcatgggtcatgccaaa

SEQ ID NO: 2858796 - DNA, 25 bp, Homo sapien
cgccaatggcattctcggagtggtc

SEQ ID NO: 2858797 - DNA, 25 bp, Homo sapien
cgcactggccgagcagcaatctgca

SEQ ID NO: 2858798 - DNA, 25 bp, Homo sapien
aaagttgtggcccatctcgtgggcc

SEQ ID NO: 2858799 - DNA, 25 bp, Homo sapien
gccgatggtggtgccgtggaaggac

SEQ ID NO: 2858800 - DNA, 25 bp, Homo sapien
gactcctccagactggtacacagag

SEQ ID NO: 2858801 - DNA, 25 bp, Homo sapien
ggtggtgccgtggaaggacatgccc

SEQ ID NO: 2858802 - DNA, 25 bp, Homo sapien
catgttgactcctccagactggtac

SEQ ID NO: 2858803 - DNA, 25 bp, Homo sapien
aagcccacgagagcaatccggatgt

SEQ ID NO: 2858804 - DNA, 25 bp, Homo sapien
gcagcttgcgcctccaactgagaaa

SEQ ID NO: 2858805 - DNA, 25 bp, Homo sapien
tgtcatggtacttctgggcaagcag

SEQ ID NO: 2858806 - DNA, 25 bp, Homo sapien
aaacttcacacatgttcccgtgggt

SEQ ID NO: 2858807 - DNA, 25 bp, Homo sapien
gacataatgagcaggagataccatc

SEQ ID NO: 2858808 - DNA, 25 bp, Homo sapien
tgggtccaccctacaaatactgagc

SEQ ID NO: 2858809 - DNA, 25 bp, Homo sapien
ctttttacgtactaggcactgaggc

SEQ ID NO: 2858810 - DNA, 25 bp, Homo sapien
ttggtaggtactgccccagctgaaa

SEQ ID NO: 2858811 - DNA, 25 bp, Homo sapien
ccagctcccacttagagcagtctgt

SEQ ID NO: 2858812 - DNA, 25 bp, Homo sapien
tacttgcctaagggtacgtagttca

SEQ ID NO: 2858813 - DNA, 25 bp, Homo sapien
cacattgatttacgacagcctttct

SEQ ID NO: 2858814 - DNA, 25 bp, Homo sapien
cagcctttctatttataagctgaaa

SEQ ID NO: 2858815 - DNA, 25 bp, Homo sapien
cttgtgtttggtggcgtcctggtct

SEQ ID NO: 2858816 - DNA, 25 bp, Homo sapien
tggcgtcctggtctcgtcgattctt

SEQ ID NO: 2858817 - DNA, 25 bp, Homo sapien
cttatcaacatagttggcgatctct

SEQ ID NO: 2858818 - DNA, 25 bp, Homo sapien
tatcaacatagttggcgatctctat

SEQ ID NO: 2858819 - DNA, 25 bp, Homo sapien
cttcatggagtttaaatcttccctt

SEQ ID NO: 2858820 - DNA, 25 bp, Homo sapien
gaggttgctgctcaccgtaatcagt

SEQ ID NO: 2858821 - DNA, 25 bp, Homo sapien
ggcttggagtgctcgaacccacagt

SEQ ID NO: 2858822 - DNA, 25 bp, Homo sapien
tctgttgtgtaaactgaagagccca

SEQ ID NO: 2858823 - DNA, 25 bp, Homo sapien
cagatctgtaaataaggtgttggcc

SEQ ID NO: 2858824 - DNA, 25 bp, Homo sapien
aagacgccaagccaagttcccactg

SEQ ID NO: 2858825 - DNA, 25 bp, Homo sapien
actgctgctggaatgatttacaaga

SEQ ID NO: 2858826 - DNA, 25 bp, Homo sapien
tttacaagacgccaagccaagttcc

SEQ ID NO: 2858827 - DNA, 25 bp, Homo sapien
gaatgatttacaagacgccaagcca

SEQ ID NO: 2858828 - DNA, 25 bp, Homo sapien
ctcggcaagtgctgagcgtgacgct

SEQ ID NO: 2858829 - DNA, 25 bp, Homo sapien
ctaattcctcggcaagtgctgagcg

SEQ ID NO: 2858830 - DNA, 25 bp, Homo sapien
caagtgctgagcgtgacgctggaca

SEQ ID NO: 2858831 - DNA, 25 bp, Homo sapien
agcgtgacgctggacagttctgtct

SEQ ID NO: 2858832 - DNA, 25 bp, Homo sapien
ctgtgcccgtgaggtctgctgctgc

SEQ ID NO: 2858833 - DNA, 25 bp, Homo sapien
tgctgctctccagccactgtgtctc

SEQ ID NO: 2858834 - DNA, 25 bp, Homo sapien
gcccgtgaggtctgctgctgctctc

SEQ ID NO: 2858835 - DNA, 25 bp, Homo sapien
ctgctctccagccactgtgtctcat

SEQ ID NO: 2858836 - DNA, 25 bp, Homo sapien
gatccaaactcagaggagagtgttt

SEQ ID NO: 2858837 - DNA, 25 bp, Homo sapien
catggcaaattcgtggactgagacc

SEQ ID NO: 2858838 - DNA, 25 bp, Homo sapien
tcatagcaggaagcgtgagctcatg

SEQ ID NO: 2858839 - DNA, 25 bp, Homo sapien
gactgagacccattcttgagctgtg

SEQ ID NO: 2858840 - DNA, 25 bp, Homo sapien
aatttgcatcaattgtaattagatg

SEQ ID NO: 2858841 - DNA, 25 bp, Homo sapien
tatttcacagtaatttgcatcaatt

SEQ ID NO: 2858842 - DNA, 25 bp, Homo sapien
acagtaatttgcatcaattgtaatt

SEQ ID NO: 2858843 - DNA, 25 bp, Homo sapien
tttgttaacatgtgggtaattaaca

SEQ ID NO: 2858844 - DNA, 25 bp, Homo sapien
gagcacctatgaacatcaaatacat

SEQ ID NO: 2858845 - DNA, 25 bp, Homo sapien
ttctcgtttgctcccttggtcttcg

SEQ ID NO: 2858846 - DNA, 25 bp, Homo sapien
tggtcttcgcttgggggaaacactc

SEQ ID NO: 2858847 - DNA, 25 bp, Homo sapien
gttttgcttctcgtttgctcccttg

SEQ ID NO: 2858848 - DNA, 25 bp, Homo sapien
tagacatttgttgacctgaactcac

SEQ ID NO: 2858849 - DNA, 25 bp, Homo sapien
ctcctgaggtcctaggagtagggct

SEQ ID NO: 2858850 - DNA, 25 bp, Homo sapien
gggagaggacagctgctggatagac

SEQ ID NO: 2858851 - DNA, 25 bp, Homo sapien
catctcctgaggtcctaggagtagg

SEQ ID NO: 2858852 - DNA, 25 bp, Homo sapien
tttgagggttaccacttgaagtata

SEQ ID NO: 2858853 - DNA, 25 bp, Homo sapien
ccacttgaagtataatgggtttctg

SEQ ID NO: 2858854 - DNA, 25 bp, Homo sapien
gtttctgtgtaggaaggagcaaaaa

SEQ ID NO: 2858855 - DNA, 25 bp, Homo sapien
tccaatttccgtgtggtggtttgag

SEQ ID NO: 2858856 - DNA, 25 bp, Homo sapien
ttaagaatcccctcaccaaaggcca

SEQ ID NO: 2858857 - DNA, 25 bp, Homo sapien
taagagtcaaatggatgtttcaact

SEQ ID NO: 2858858 - DNA, 25 bp, Homo sapien
gtacaggttaagaatcccctcacca

SEQ ID NO: 2858859 - DNA, 25 bp, Homo sapien
ataagagtcaaatggatgtttcaac

SEQ ID NO: 2858860 - DNA, 25 bp, Homo sapien
tgcattaggattttcaggaaacgac

SEQ ID NO: 2858861 - DNA, 25 bp, Homo sapien
aggaaacgacttgtgagtgatgtgc

SEQ ID NO: 2858862 - DNA, 25 bp, Homo sapien
cattggattgcattaggattttcag

SEQ ID NO: 2858863 - DNA, 25 bp, Homo sapien
taggattttcaggaaacgacttgtg

SEQ ID NO: 2858864 - DNA, 25 bp, Homo sapien
tctgcagacgagctcagcataggcg

SEQ ID NO: 2858865 - DNA, 25 bp, Homo sapien
cagacgagctcagcataggcgagca

SEQ ID NO: 2858866 - DNA, 25 bp, Homo sapien
accctctgcagacgagctcagcata

SEQ ID NO: 2858867 - DNA, 25 bp, Homo sapien
aaacaccctctgcagacgagctcag

SEQ ID NO: 2858868 - DNA, 25 bp, Homo sapien
ccatctagtagaaaagataacccca

SEQ ID NO: 2858869 - DNA, 25 bp, Homo sapien
cagccaagccttagactctcagagg

SEQ ID NO: 2858870 - DNA, 25 bp, Homo sapien
tctctggactttatgggaagagtgt

SEQ ID NO: 2858871 - DNA, 25 bp, Homo sapien
agaggcctgtctacggttctctgga

SEQ ID NO: 2858872 - DNA, 25 bp, Homo sapien
tcagattagccgataccacagaaaa

SEQ ID NO: 2858873 - DNA, 25 bp, Homo sapien
cagattagccgataccacagaaaac

SEQ ID NO: 2858874 - DNA, 25 bp, Homo sapien
tctacacagttatggagaagggatg

SEQ ID NO: 2858875 - DNA, 25 bp, Homo sapien
aatgctgacaccatgcagagggcag

SEQ ID NO: 2858876 - DNA, 25 bp, Homo sapien
agaagggatgtatatgtgcacgcac

SEQ ID NO: 2858877 - DNA, 25 bp, Homo sapien
gcaaaccagtgtggtaaccaatttc

SEQ ID NO: 2858878 - DNA, 25 bp, Homo sapien
gaagaatgaaatcggtattattggg

SEQ ID NO: 2858879 - DNA, 25 bp, Homo sapien
atcggtattattgggccaaaatcaa

SEQ ID NO: 2858880 - DNA, 25 bp, Homo sapien
tcagaagaatgaaatcggtattatt

SEQ ID NO: 2858881 - DNA, 25 bp, Homo sapien
tgaaatcggtattattgggccaaaa

SEQ ID NO: 2858882 - DNA, 25 bp, Homo sapien
gaacctgcgggttctgacctagaag

SEQ ID NO: 2858883 - DNA, 25 bp, Homo sapien
tggatgcctgcagctaactaaggag

SEQ ID NO: 2858884 - DNA, 25 bp, Homo sapien
tctggttgagcaattcagtgtgccc

SEQ ID NO: 2858885 - DNA, 25 bp, Homo sapien
gtaatgcggcccagtgagcatccag

SEQ ID NO: 2858886 - DNA, 25 bp, Homo sapien
ggaaattttagcaacacatttagca

SEQ ID NO: 2858887 - DNA, 25 bp, Homo sapien
gcagtccagcaatctcacatcgagt

SEQ ID NO: 2858888 - DNA, 25 bp, Homo sapien
aggctgtggaaaggctctggctttg

SEQ ID NO: 2858889 - DNA, 25 bp, Homo sapien
cacatcgagtcaagaggctgtggaa

SEQ ID NO: 2858890 - DNA, 25 bp, Homo sapien
ccaggtccaggatcagttctcgccc

SEQ ID NO: 2858891 - DNA, 25 bp, Homo sapien
tccaggtccaggatcagttctcgcc

SEQ ID NO: 2858892 - DNA, 25 bp, Homo sapien
aggtccaggatcagttctcgcccct

SEQ ID NO: 2858893 - DNA, 25 bp, Homo sapien
ctccaggtccaggatcagttctcgc

SEQ ID NO: 2858894 - DNA, 25 bp, Homo sapien
aaactgacggcaactctctgaaaga

SEQ ID NO: 2858895 - DNA, 25 bp, Homo sapien
tatgcactgagagtttaaaaatgtt

SEQ ID NO: 2858896 - DNA, 25 bp, Homo sapien
aaatgtttagactcggccgggcaca

SEQ ID NO: 2858897 - DNA, 25 bp, Homo sapien
aaagataacatgacagtatgcactg

SEQ ID NO: 2858898 - DNA, 25 bp, Homo sapien
gaaataagcctaaccattaccatag

SEQ ID NO: 2858899 - DNA, 25 bp, Homo sapien
ctattttgggactaaggaactgaca

SEQ ID NO: 2858900 - DNA, 25 bp, Homo sapien
taatgaaatgtaacctaactgtcct

SEQ ID NO: 2858901 - DNA, 25 bp, Homo sapien
tatttaaatacacttcgcaaaggga

SEQ ID NO: 2858902 - DNA, 25 bp, Homo sapien
gccccgccaggagtagtaatcttta

SEQ ID NO: 2858903 - DNA, 25 bp, Homo sapien
gaacaaatagttacggtgccaggca

SEQ ID NO: 2858904 - DNA, 25 bp, Homo sapien
tctattctggaaggtgctcaggcac

SEQ ID NO: 2858905 - DNA, 25 bp, Homo sapien
tgtattaagaagaggcaccatcagc

SEQ ID NO: 2858906 - DNA, 25 bp, Homo sapien
cctcagggggtatgaataggttgca

SEQ ID NO: 2858907 - DNA, 25 bp, Homo sapien
caaagaagcctctataaaaagtagc

SEQ ID NO: 2858908 - DNA, 25 bp, Homo sapien
gcaatacccaagatcttaattgtta

SEQ ID NO: 2858909 - DNA, 25 bp, Homo sapien
gtatgaataggttgcaatacccaag

SEQ ID NO: 2858910 - DNA, 25 bp, Homo sapien
agccatcgcacttggtctgtcctaa

SEQ ID NO: 2858911 - DNA, 25 bp, Homo sapien
ccttggtaaatccaagttggagcct

SEQ ID NO: 2858912 - DNA, 25 bp, Homo sapien
attatcctggccagagtttcaagga

SEQ ID NO: 2858913 - DNA, 25 bp, Homo sapien
cagagtttcaaggatcctggacatt

SEQ ID NO: 2858914 - DNA, 25 bp, Homo sapien
ctgaggtatgataagttcatgctgc

SEQ ID NO: 2858915 - DNA, 25 bp, Homo sapien
tatgataagttcatgctgcagcttg

SEQ ID NO: 2858916 - DNA, 25 bp, Homo sapien
ccactgaggtatgataagttcatgc

SEQ ID NO: 2858917 - DNA, 25 bp, Homo sapien
ggtatgataagttcatgctgcagct

SEQ ID NO: 2858918 - DNA, 25 bp, Homo sapien
ctgccaatacaagatgcaaaaccat

SEQ ID NO: 2858919 - DNA, 25 bp, Homo sapien
ggaccaagccttccgcgaaatctgc

SEQ ID NO: 2858920 - DNA, 25 bp, Homo sapien
cagcccgtctgcagcggtggagcca

SEQ ID NO: 2858921 - DNA, 25 bp, Homo sapien
gggctaagccttctccggtcataat

SEQ ID NO: 2858922 - DNA, 25 bp, Homo sapien
cggtcataatgagagaacccgggca

SEQ ID NO: 2858923 - DNA, 25 bp, Homo sapien
tgtccatccaggctcccgcgccgcc

SEQ ID NO: 2858924 - DNA, 25 bp, Homo sapien
aaacgccagcaagcagagccgggcg

SEQ ID NO: 2858925 - DNA, 25 bp, Homo sapien
ggctgcagggcaaacgccagcaagc

SEQ ID NO: 2858926 - DNA, 25 bp, Homo sapien
ggcaaacgccagcaagcagagccgg

SEQ ID NO: 2858927 - DNA, 25 bp, Homo sapien
ggcggcggcccttagcgctcggcgc

SEQ ID NO: 2858928 - DNA, 25 bp, Homo sapien
tggcggcggcccttagcgctcggcg

SEQ ID NO: 2858929 - DNA, 25 bp, Homo sapien
gtggcggcggcccttagcgctcggc

SEQ ID NO: 2858930 - DNA, 25 bp, Homo sapien
ggtggcggcggcccttagcgctcgg

SEQ ID NO: 2858931 - DNA, 25 bp, Homo sapien
gttcaaagacggagaggtgtttcca

SEQ ID NO: 2858932 - DNA, 25 bp, Homo sapien
tcatgctgagtgttcaaagacggag

SEQ ID NO: 2858933 - DNA, 25 bp, Homo sapien
agtgttcaaagacggagaggtgttt

SEQ ID NO: 2858934 - DNA, 25 bp, Homo sapien
atgctgagtgttcaaagacggagag

SEQ ID NO: 2858935 - DNA, 25 bp, Homo sapien
ggtttgatgtctggtgaactgtctc

SEQ ID NO: 2858936 - DNA, 25 bp, Homo sapien
tttgatgtctggtgaactgtctcat

SEQ ID NO: 2858937 - DNA, 25 bp, Homo sapien
aggtttgatgtctggtgaactgtct

SEQ ID NO: 2858938 - DNA, 25 bp, Homo sapien
cataggtttgatgtctggtgaactg

SEQ ID NO: 2858939 - DNA, 25 bp, Homo sapien
tcagactaccaggtgcaattttggt

SEQ ID NO: 2858940 - DNA, 25 bp, Homo sapien
cagactaccaggtgcaattttggtt

SEQ ID NO: 2858941 - DNA, 25 bp, Homo sapien
tctctttaatggtatagatatcaaa

SEQ ID NO: 2858942 - DNA, 25 bp, Homo sapien
caaatgtgtagacaatcaaatgtta

SEQ ID NO: 2858943 - DNA, 25 bp, Homo sapien
gctttctatcacgaagaaattaaag

SEQ ID NO: 2858944 - DNA, 25 bp, Homo sapien
tgaggtgacatatgtttgctttcta

SEQ ID NO: 2858945 - DNA, 25 bp, Homo sapien
caggtgccattaaaacacatttgga

SEQ ID NO: 2858946 - DNA, 25 bp, Homo sapien
tagctgaagaatcacccaggtgcca

SEQ ID NO: 2858947 - DNA, 25 bp, Homo sapien
gttttaactcctcaaatcacgactg

SEQ ID NO: 2858948 - DNA, 25 bp, Homo sapien
tattcctacaatgaaacatccagac

SEQ ID NO: 2858949 - DNA, 25 bp, Homo sapien
ttttctgtgcatatttgttttaaaa

SEQ ID NO: 2858950 - DNA, 25 bp, Homo sapien
ttattttctgtgcatatttgtttta

SEQ ID NO: 2858951 - DNA, 25 bp, Homo sapien
atgtttattttctgtgcatatttgt

SEQ ID NO: 2858952 - DNA, 25 bp, Homo sapien
tgtttattttctgtgcatatttgtt

SEQ ID NO: 2858953 - DNA, 25 bp, Homo sapien
ccccactgtggctatgactgttata

SEQ ID NO: 2858954 - DNA, 25 bp, Homo sapien
caatgtccagctgaggcacagggtt

SEQ ID NO: 2858955 - DNA, 25 bp, Homo sapien
gaagacattctccaaggttccaatg

SEQ ID NO: 2858956 - DNA, 25 bp, Homo sapien
gacttgctggatgctagaaggagtt

SEQ ID NO: 2858957 - DNA, 25 bp, Homo sapien
catagccaaagggaggccgactgta

SEQ ID NO: 2858958 - DNA, 25 bp, Homo sapien
tgaaaagataccctcatgttttggg

SEQ ID NO: 2858959 - DNA, 25 bp, Homo sapien
gcattctggcattgaactcggaaaa

SEQ ID NO: 2858960 - DNA, 25 bp, Homo sapien
tttgggtacctgtcttcataataac

SEQ ID NO: 2858961 - DNA, 25 bp, Homo sapien
caaacaaggaattagatcttgccca

SEQ ID NO: 2858962 - DNA, 25 bp, Homo sapien
cacaaacaaggaattagatcttgcc

SEQ ID NO: 2858963 - DNA, 25 bp, Homo sapien
aaacaaggaattagatcttgcccac

SEQ ID NO: 2858964 - DNA, 25 bp, Homo sapien
acacaaacaaggaattagatcttgc

SEQ ID NO: 2858965 - DNA, 25 bp, Homo sapien
tgatgaaaagagaatcttggtggtg

SEQ ID NO: 2858966 - DNA, 25 bp, Homo sapien
atgggaagtagtgaggtccgggtag

SEQ ID NO: 2858967 - DNA, 25 bp, Homo sapien
tcttggtggtgtcccgaacagtgtg

SEQ ID NO: 2858968 - DNA, 25 bp, Homo sapien
tccgggtaggaagtaagggtgatga

SEQ ID NO: 2858969 - DNA, 25 bp, Homo sapien
ctccctaggaggttggatggtcgaa

SEQ ID NO: 2858970 - DNA, 25 bp, Homo sapien
gacaaggggaaacgctggaatactc

SEQ ID NO: 2858971 - DNA, 25 bp, Homo sapien
tcgaagttgcaaatctggcatgggc

SEQ ID NO: 2858972 - DNA, 25 bp, Homo sapien
gattggagcacttctgggacaaggg

SEQ ID NO: 2858973 - DNA, 25 bp, Homo sapien
gacaggtagacttggatcctggaca

SEQ ID NO: 2858974 - DNA, 25 bp, Homo sapien
tgcactacttgaaatcctgttggcg

SEQ ID NO: 2858975 - DNA, 25 bp, Homo sapien
tggcttcagaatgcagctgatgagt

SEQ ID NO: 2858976 - DNA, 25 bp, Homo sapien
agacaggagtgggttgcttcacagt

SEQ ID NO: 2858977 - DNA, 25 bp, Homo sapien
cctggacgaggctgataaacccaac

SEQ ID NO: 2858978 - DNA, 25 bp, Homo sapien
ccacagagtacgtaggtgagcggta

SEQ ID NO: 2858979 - DNA, 25 bp, Homo sapien
cattggaaacacttagagggaatcg

SEQ ID NO: 2858980 - DNA, 25 bp, Homo sapien
gaatcgttttcgcttccctggacga

SEQ ID NO: 2858981 - DNA, 25 bp, Homo sapien
tatgagttggtgaatatgaaatcag

SEQ ID NO: 2858982 - DNA, 25 bp, Homo sapien
aaccacaataaaactgcgtgtcctc

SEQ ID NO: 2858983 - DNA, 25 bp, Homo sapien
gtcctctgatttgtatgagttggtg

SEQ ID NO: 2858984 - DNA, 25 bp, Homo sapien
ccacaataaaactgcgtgtcctctg

SEQ ID NO: 2858985 - DNA, 25 bp, Homo sapien
gtttgttccactctaacccaagctg

SEQ ID NO: 2858986 - DNA, 25 bp, Homo sapien
gctggtcggtggatccttgcccaaa

SEQ ID NO: 2858987 - DNA, 25 bp, Homo sapien
ccttactgaagggagtatctggtat

SEQ ID NO: 2858988 - DNA, 25 bp, Homo sapien
tgtgcttcatcgtaatagggtttct

SEQ ID NO: 2858989 - DNA, 25 bp, Homo sapien
ggtagaggttctctaaacattcaca

SEQ ID NO: 2858990 - DNA, 25 bp, Homo sapien
tcgtgactataatcttagctaggta

SEQ ID NO: 2858991 - DNA, 25 bp, Homo sapien
tagctaggtagaggttctctaaaca

SEQ ID NO: 2858992 - DNA, 25 bp, Homo sapien
taatcttagctaggtagaggttctc

SEQ ID NO: 2858993 - DNA, 25 bp, Homo sapien
tatgggcaacacagacgcagttttg

SEQ ID NO: 2858994 - DNA, 25 bp, Homo sapien
aacagctatgggcaacacagacgca

SEQ ID NO: 2858995 - DNA, 25 bp, Homo sapien
tgacaaaacagctatgggcaacaca

SEQ ID NO: 2858996 - DNA, 25 bp, Homo sapien
gctgacaaaacagctatgggcaaca

SEQ ID NO: 2858997 - DNA, 25 bp, Homo sapien
gcaacacggtgagcgggacatcttt

SEQ ID NO: 2858998 - DNA, 25 bp, Homo sapien
tggaggctctaggaccggtttcgac

SEQ ID NO: 2858999 - DNA, 25 bp, Homo sapien
ccgtgtggagcgtcaaagggatcct

SEQ ID NO: 2859000 - DNA, 25 bp, Homo sapien
tgcatcgagtctctcatgacctcct

SEQ ID NO: 2859001 - DNA, 25 bp, Homo sapien
ggtggcgccgtctgacgctgtcggc

SEQ ID NO: 2859002 - DNA, 25 bp, Homo sapien
ccgggtgcaactcgggcctggaggt

SEQ ID NO: 2859003 - DNA, 25 bp, Homo sapien
ccgtctgacgctgtcggcggctgca

SEQ ID NO: 2859004 - DNA, 25 bp, Homo sapien
tgcaccgggtgcaactcgggcctgg

SEQ ID NO: 2859005 - DNA, 25 bp, Homo sapien
ggctgtaagccggacgccactgcct

SEQ ID NO: 2859006 - DNA, 25 bp, Homo sapien
tgccgcgctcagtgtgggagacgac

SEQ ID NO: 2859007 - DNA, 25 bp, Homo sapien
acgacgaggccaaggtcgcactggc

SEQ ID NO: 2859008 - DNA, 25 bp, Homo sapien
acgaggcagcggcttcctcgttctg

SEQ ID NO: 2859009 - DNA, 25 bp, Homo sapien
aaaggaggtgccctcgaccggcagc

SEQ ID NO: 2859010 - DNA, 25 bp, Homo sapien
gccaggattgtgagctcagccgttt

SEQ ID NO: 2859011 - DNA, 25 bp, Homo sapien
tacgcggttcaaaacgcagctgtct

SEQ ID NO: 2859012 - DNA, 25 bp, Homo sapien
caatcacaacgaccgatacccgtgg

SEQ ID NO: 2859013 - DNA, 25 bp, Homo sapien
tttcggttaagagccttgcaaggcc

SEQ ID NO: 2859014 - DNA, 25 bp, Homo sapien
tacagccgttgtctttagtcatccc

SEQ ID NO: 2859015 - DNA, 25 bp, Homo sapien
tgtggagttctcttacagccgttgt

SEQ ID NO: 2859016 - DNA, 25 bp, Homo sapien
tgttgcacattttcgttctgactct

SEQ ID NO: 2859017 - DNA, 25 bp, Homo sapien
tcgttctgactctcttgtggagttc

SEQ ID NO: 2859018 - DNA, 25 bp, Homo sapien
gcagataaagcctccagatagtagg

SEQ ID NO: 2859019 - DNA, 25 bp, Homo sapien
tcagagaatatcagacctaaaaagt

SEQ ID NO: 2859020 - DNA, 25 bp, Homo sapien
caactcaaatcagggcttccagatc

SEQ ID NO: 2859021 - DNA, 25 bp, Homo sapien
tattctgtcagtctgaaagtcgctg

SEQ ID NO: 2859022 - DNA, 25 bp, Homo sapien
gctgtaaagtgtccccttctattct

SEQ ID NO: 2859023 - DNA, 25 bp, Homo sapien
atgagctgtaaagtgtccccttcta

SEQ ID NO: 2859024 - DNA, 25 bp, Homo sapien
aatagagttcccaataaaaccatgg

SEQ ID NO: 2859025 - DNA, 25 bp, Homo sapien
tgaaaagatttccattggattggta

SEQ ID NO: 2859026 - DNA, 25 bp, Homo sapien
tggatgcacagtagactttgttcct

SEQ ID NO: 2859027 - DNA, 25 bp, Homo sapien
ggatgcacagtagactttgttcctt

SEQ ID NO: 2859028 - DNA, 25 bp, Homo sapien
tgctggatgcacagtagactttgtt

SEQ ID NO: 2859029 - DNA, 25 bp, Homo sapien
gctggatgcacagtagactttgttc

SEQ ID NO: 2859030 - DNA, 25 bp, Homo sapien
cccaagaccgcctgaagaaatcaca

SEQ ID NO: 2859031 - DNA, 25 bp, Homo sapien
gggagtcccaagaccgcctgaagaa

SEQ ID NO: 2859032 - DNA, 25 bp, Homo sapien
tcttgctttggatagggaagttaaa

SEQ ID NO: 2859033 - DNA, 25 bp, Homo sapien
tctattccaggtcggaggctaggga

SEQ ID NO: 2859034 - DNA, 25 bp, Homo sapien
agtcataaagcaaagtccggaagca

SEQ ID NO: 2859035 - DNA, 25 bp, Homo sapien
ccggaagcaagtctttctggtccat

SEQ ID NO: 2859036 - DNA, 25 bp, Homo sapien
aaacctaaccagaccggcatctaga

SEQ ID NO: 2859037 - DNA, 25 bp, Homo sapien
tcttcaaacctaaccagaccggcat

SEQ ID NO: 2859038 - DNA, 25 bp, Homo sapien
ttaacgagagcgaggcaccacttat

SEQ ID NO: 2859039 - DNA, 25 bp, Homo sapien
gcttcttcgcctgctcggtgtcaag

SEQ ID NO: 2859040 - DNA, 25 bp, Homo sapien
tagccaagggtcttccggaaagaca

SEQ ID NO: 2859041 - DNA, 25 bp, Homo sapien
cacgtcgaagcggaaaaggtctgct

SEQ ID NO: 2859042 - DNA, 25 bp, Homo sapien
aatattaccgcgtccgtggccgccg

SEQ ID NO: 2859043 - DNA, 25 bp, Homo sapien
gtcttcacagcaacgcgccgggtct

SEQ ID NO: 2859044 - DNA, 25 bp, Homo sapien
tggccgccggactctgcacgcatgt

SEQ ID NO: 2859045 - DNA, 25 bp, Homo sapien
cgggtctcaccacggcggatgccga

SEQ ID NO: 2859046 - DNA, 25 bp, Homo sapien
tcagaagtgatacctgtgcaggcta

SEQ ID NO: 2859047 - DNA, 25 bp, Homo sapien
tactgctatatgtacaagtcgatca

SEQ ID NO: 2859048 - DNA, 25 bp, Homo sapien
gtgcaggctaccctgaaaagaatca

SEQ ID NO: 2859049 - DNA, 25 bp, Homo sapien
gggaactgctgatataccctatggg

SEQ ID NO: 2859050 - DNA, 25 bp, Homo sapien
cttatcagctctgaaggcggagctt

SEQ ID NO: 2859051 - DNA, 25 bp, Homo sapien
tcctgaaactggatccgggccccag

SEQ ID NO: 2859052 - DNA, 25 bp, Homo sapien
gagtccagagggatcctgaggtctt

SEQ ID NO: 2859053 - DNA, 25 bp, Homo sapien
ctgaggtcttgctggtgcggcccaa

SEQ ID NO: 2859054 - DNA, 25 bp, Homo sapien
gcgccgagcctgcagtcctcgagga

SEQ ID NO: 2859055 - DNA, 25 bp, Homo sapien
tcgggttcctccgttttgatcacac

SEQ ID NO: 2859056 - DNA, 25 bp, Homo sapien
tgcagtcctcgaggagtctctcggg

SEQ ID NO: 2859057 - DNA, 25 bp, Homo sapien
tcgaggagtctctcgggttcctccg

SEQ ID NO: 2859058 - DNA, 25 bp, Homo sapien
tcaccgatgcgtccaggcaagcccc

SEQ ID NO: 2859059 - DNA, 25 bp, Homo sapien
ccgatgcgtccaggcaagcccctag

SEQ ID NO: 2859060 - DNA, 25 bp, Homo sapien
accgatgcgtccaggcaagccccta

SEQ ID NO: 2859061 - DNA, 25 bp, Homo sapien
ctcaccgatgcgtccaggcaagccc

SEQ ID NO: 2859062 - DNA, 25 bp, Homo sapien
cttggccttgacgtgcagcgcccgg

SEQ ID NO: 2859063 - DNA, 25 bp, Homo sapien
ttcttggccttgacgtgcagcgccc

SEQ ID NO: 2859064 - DNA, 25 bp, Homo sapien
ccttgacgtgcagcgcccggggctg

SEQ ID NO: 2859065 - DNA, 25 bp, Homo sapien
ggccttgacgtgcagcgcccggggc

SEQ ID NO: 2859066 - DNA, 25 bp, Homo sapien
gcaggagccgcaggtcgggcctgaa

SEQ ID NO: 2859067 - DNA, 25 bp, Homo sapien
ggagccgcaggtcgggcctgaactg

SEQ ID NO: 2859068 - DNA, 25 bp, Homo sapien
caggagccgcaggtcgggcctgaac

SEQ ID NO: 2859069 - DNA, 25 bp, Homo sapien
aggagccgcaggtcgggcctgaact

SEQ ID NO: 2859070 - DNA, 25 bp, Homo sapien
gctgctgcgccgcacacggcaccaa

SEQ ID NO: 2859071 - DNA, 25 bp, Homo sapien
ggccgcgcacagcatgggcggcgac

SEQ ID NO: 2859072 - DNA, 25 bp, Homo sapien
caccaaaccctccctacacgaggag

SEQ ID NO: 2859073 - DNA, 25 bp, Homo sapien
cacgaggaggccacggtcgcaatgg

SEQ ID NO: 2859074 - DNA, 25 bp, Homo sapien
aaaggaggtgccctcgaccggcagc

SEQ ID NO: 2859075 - DNA, 25 bp, Homo sapien
tattgattgcttccttcgtgtcagg

SEQ ID NO: 2859076 - DNA, 25 bp, Homo sapien
gaattgagacttccaacaaaccagt

SEQ ID NO: 2859077 - DNA, 25 bp, Homo sapien
tcatcctagcaaagggccagactgt

SEQ ID NO: 2859078 - DNA, 25 bp, Homo sapien
caattctaatgggaagagagcctgt

SEQ ID NO: 2859079 - DNA, 25 bp, Homo sapien
tcttatacaagcaaaatgttgtggc

SEQ ID NO: 2859080 - DNA, 25 bp, Homo sapien
ggaaacttcatggactatccccagc

SEQ ID NO: 2859081 - DNA, 25 bp, Homo sapien
aaatgattctcagttggcccagaca

SEQ ID NO: 2859082 - DNA, 25 bp, Homo sapien
tatagaaattcacactactcagggt

SEQ ID NO: 2859083 - DNA, 25 bp, Homo sapien
ccacatcctctgacttctggaaccc

SEQ ID NO: 2859084 - DNA, 25 bp, Homo sapien
caaggctggtatgaatctcctgaac

SEQ ID NO: 2859085 - DNA, 25 bp, Homo sapien
actacgggcatgggctactaagcct

SEQ ID NO: 2859086 - DNA, 25 bp, Homo sapien
atgggctactaagcctggataattt

SEQ ID NO: 2859087 - DNA, 25 bp, Homo sapien
tgccaaggctggtatgaatctcctg

SEQ ID NO: 2859088 - DNA, 25 bp, Homo sapien
ctttgatgggaaagacggagaaaca

SEQ ID NO: 2859089 - DNA, 25 bp, Homo sapien
gtgcattccctgtgtaaacctacat

SEQ ID NO: 2859090 - DNA, 25 bp, Homo sapien
gatactggcaaatgctcaagctgag

SEQ ID NO: 2859091 - DNA, 25 bp, Homo sapien
taggcgaataattccaatcttgtgc

SEQ ID NO: 2859092 - DNA, 25 bp, Homo sapien
gggcgaccatggcaaaaagcaagtt

SEQ ID NO: 2859093 - DNA, 25 bp, Homo sapien
catcactctgagacggtacctgaga

SEQ ID NO: 2859094 - DNA, 25 bp, Homo sapien
tagagtagccgcgaagagaacactt

SEQ ID NO: 2859095 - DNA, 25 bp, Homo sapien
agagagactatgactgccctacggc

SEQ ID NO: 2859096 - DNA, 25 bp, Homo sapien
gctgtaacagttactaatacaatgc

SEQ ID NO: 2859097 - DNA, 25 bp, Homo sapien
caatgcctggtacattatgtttgct

SEQ ID NO: 2859098 - DNA, 25 bp, Homo sapien
cagttactaatacaatgcctggtac

SEQ ID NO: 2859099 - DNA, 25 bp, Homo sapien
tgtgcccagctgtaacagttactaa

SEQ ID NO: 2859100 - DNA, 25 bp, Homo sapien
taatcgacaggtagcaggtgtcaga

SEQ ID NO: 2859101 - DNA, 25 bp, Homo sapien
gatcatcacatgcagccaaacttgg

SEQ ID NO: 2859102 - DNA, 25 bp, Homo sapien
acatcctctgctaatcgacaggtag

SEQ ID NO: 2859103 - DNA, 25 bp, Homo sapien
attaatagcgccaccttctgttggg

SEQ ID NO: 2859104 - DNA, 25 bp, Homo sapien
ccaagaccagcacgtccaacatggc

SEQ ID NO: 2859105 - DNA, 25 bp, Homo sapien
ggtggcgtgtgcctgcaataccagc

SEQ ID NO: 2859106 - DNA, 25 bp, Homo sapien
tggcaaaacccagtctgtactaaaa

SEQ ID NO: 2859107 - DNA, 25 bp, Homo sapien
cagaaggctgaagcaggataattgc

SEQ ID NO: 2859108 - DNA, 25 bp, Homo sapien
gcagcttcggcagcaaggccctcgg

SEQ ID NO: 2859109 - DNA, 25 bp, Homo sapien
aaggccctcggtatactgtgatagg

SEQ ID NO: 2859110 - DNA, 25 bp, Homo sapien
cagcaaggccctcggtatactgtga

SEQ ID NO: 2859111 - DNA, 25 bp, Homo sapien
cttcggcagcaaggccctcggtata

SEQ ID NO: 2859112 - DNA, 25 bp, Homo sapien
ccctctggcggcttcgttccttctt

SEQ ID NO: 2859113 - DNA, 25 bp, Homo sapien
ggtggaacgaggacaggtgctgccc

SEQ ID NO: 2859114 - DNA, 25 bp, Homo sapien
ccgcggccgcttcggcgcagtgcaa

SEQ ID NO: 2859115 - DNA, 25 bp, Homo sapien
ttcccatcggcctcggcttgcgggc

SEQ ID NO: 2859116 - DNA, 25 bp, Homo sapien
gggccctcgggcaggactcgtcgcc

SEQ ID NO: 2859117 - DNA, 25 bp, Homo sapien
ctcgggcaggactcgtcgccgcccg

SEQ ID NO: 2859118 - DNA, 25 bp, Homo sapien
gccctcgggcaggactcgtcgccgc

SEQ ID NO: 2859119 - DNA, 25 bp, Homo sapien
ccgagcgcatccagcgcctccgccg

SEQ ID NO: 2859120 - DNA, 25 bp, Homo sapien
tctgcacgtattgcgggagcgcctt

SEQ ID NO: 2859121 - DNA, 25 bp, Homo sapien
gaaggcgccacgcaacgtgctcacg

SEQ ID NO: 2859122 - DNA, 25 bp, Homo sapien
ggatctgcttgagtaatgtgggtaa

SEQ ID NO: 2859123 - DNA, 25 bp, Homo sapien
cgaatgccctgtgagtccgcgggcc

SEQ ID NO: 2859124 - DNA, 25 bp, Homo sapien
tattgcatgtctaaaagctagtgcc

SEQ ID NO: 2859125 - DNA, 25 bp, Homo sapien
ccaagagtagtggtgtaaattgcct

SEQ ID NO: 2859126 - DNA, 25 bp, Homo sapien
gagtactcatgaattcgattccaag

SEQ ID NO: 2859127 - DNA, 25 bp, Homo sapien
gatttacttcagaccctgaaaccaa

SEQ ID NO: 2859128 - DNA, 25 bp, Homo sapien
aagcgacactttactcacagcctgg

SEQ ID NO: 2859129 - DNA, 25 bp, Homo sapien
gcagggccagcatgtgtagaatatc

SEQ ID NO: 2859130 - DNA, 25 bp, Homo sapien
ggtaatacacatcacacggctgaga

SEQ ID NO: 2859131 - DNA, 25 bp, Homo sapien
tacagtgggtagtgtctaaagcgac

SEQ ID NO: 2859132 - DNA, 25 bp, Homo sapien
tgccacattgattacttggatctct

SEQ ID NO: 2859133 - DNA, 25 bp, Homo sapien
gtttagctgtcccagatttgccaca

SEQ ID NO: 2859134 - DNA, 25 bp, Homo sapien
tgttttaccacatttggcaaatcaa

SEQ ID NO: 2859135 - DNA, 25 bp, Homo sapien
ttctgctccctctgagtgttttacc

SEQ ID NO: 2859136 - DNA, 25 bp, Homo sapien
tggcactggtcactaggatggctca

SEQ ID NO: 2859137 - DNA, 25 bp, Homo sapien
ggcactggtcactaggatggctcag

SEQ ID NO: 2859138 - DNA, 25 bp, Homo sapien
gtggcactggtcactaggatggctc

SEQ ID NO: 2859139 - DNA, 25 bp, Homo sapien
cactggtcactaggatggctcagtg

SEQ ID NO: 2859140 - DNA, 25 bp, Homo sapien
gatgttgactgcacaacacctctgt

SEQ ID NO: 2859141 - DNA, 25 bp, Homo sapien
gtgataaagcacaaacatgcaaagc

SEQ ID NO: 2859142 - DNA, 25 bp, Homo sapien
tccttcagtcataagccagttcacg

SEQ ID NO: 2859143 - DNA, 25 bp, Homo sapien
aacatggtgcttcttacacgtccta

SEQ ID NO: 2859144 - DNA, 25 bp, Homo sapien
tgatattgatgccttgcctcttggg

SEQ ID NO: 2859145 - DNA, 25 bp, Homo sapien
acgggacggcccaaatggcgagtca

SEQ ID NO: 2859146 - DNA, 25 bp, Homo sapien
gcagctggaacctctgggacggtta

SEQ ID NO: 2859147 - DNA, 25 bp, Homo sapien
caaggtcccttgagggtggccaaat

SEQ ID NO: 2859148 - DNA, 25 bp, Homo sapien
tagctaaagcattggcaagttctgt

SEQ ID NO: 2859149 - DNA, 25 bp, Homo sapien
gatagctaaagcattggcaagttct

SEQ ID NO: 2859150 - DNA, 25 bp, Homo sapien
ccctgatagctaaagcattggcaag

SEQ ID NO: 2859151 - DNA, 25 bp, Homo sapien
taaagcattggcaagttctgttgat

SEQ ID NO: 2859152 - DNA, 25 bp, Homo sapien
cccaaatggtctcaaatgtctaaca

SEQ ID NO: 2859153 - DNA, 25 bp, Homo sapien
tagctgaagtacatgaatttctgcc

SEQ ID NO: 2859154 - DNA, 25 bp, Homo sapien
gattgctctgaagtaacaacacttg

SEQ ID NO: 2859155 - DNA, 25 bp, Homo sapien
catattctactatgcggccaccaga

SEQ ID NO: 2859156 - DNA, 25 bp, Homo sapien
ttcaacataacatggggaggtaata

SEQ ID NO: 2859157 - DNA, 25 bp, Homo sapien
tcaacataacatggggaggtaataa

SEQ ID NO: 2859158 - DNA, 25 bp, Homo sapien
caattatgacaaggcgatccaggga

SEQ ID NO: 2859159 - DNA, 25 bp, Homo sapien
tggctacagggataaacacggaagg

SEQ ID NO: 2859160 - DNA, 25 bp, Homo sapien
cacttgtggtctatcctcactggaa

SEQ ID NO: 2859161 - DNA, 25 bp, Homo sapien
gcctggccctctgaaatactggata

SEQ ID NO: 2859162 - DNA, 25 bp, Homo sapien
aagggtagttgattagcattttcca

SEQ ID NO: 2859163 - DNA, 25 bp, Homo sapien
gaaagggtagttgattagcattttc

SEQ ID NO: 2859164 - DNA, 25 bp, Homo sapien
tccatcccaacatcacctatctgca

SEQ ID NO: 2859165 - DNA, 25 bp, Homo sapien
ctatctgcacagctaaaaattcttc

SEQ ID NO: 2859166 - DNA, 25 bp, Homo sapien
caggaagcatgttcgatggagaact

SEQ ID NO: 2859167 - DNA, 25 bp, Homo sapien
tcatcatcggagtatttccaagagg

SEQ ID NO: 2859168 - DNA, 25 bp, Homo sapien
gtcatggctatgttgggcatgccca

SEQ ID NO: 2859169 - DNA, 25 bp, Homo sapien
gaggttcacagctccaaaactttga

SEQ ID NO: 2859170 - DNA, 25 bp, Homo sapien
tctggttccccagagatgtagaaac

SEQ ID NO: 2859171 - DNA, 25 bp, Homo sapien
caagttgtcaagagctagtgtgtat

SEQ ID NO: 2859172 - DNA, 25 bp, Homo sapien
gaaacagtatagagagaatgatccc

SEQ ID NO: 2859173 - DNA, 25 bp, Homo sapien
taattagcaagggaaatcatacact

SEQ ID NO: 2859174 - DNA, 25 bp, Homo sapien
ggaggaatacccagtaaatattatg

SEQ ID NO: 2859175 - DNA, 25 bp, Homo sapien
caagtacacaaagaagtgggacgtc

SEQ ID NO: 2859176 - DNA, 25 bp, Homo sapien
tagtgatcaggtccttaaaactctc

SEQ ID NO: 2859177 - DNA, 25 bp, Homo sapien
ggcattaaggcaaaagactgcaagt

SEQ ID NO: 2859178 - DNA, 25 bp, Homo sapien
gggtttggaaggctgcataccaggt

SEQ ID NO: 2859179 - DNA, 25 bp, Homo sapien
gatgtttacactggggtcagaccaa

SEQ ID NO: 2859180 - DNA, 25 bp, Homo sapien
gctgaatcattgtattcagtgatgg

SEQ ID NO: 2859181 - DNA, 25 bp, Homo sapien
gtcagaccaagtagagggcaaggtt

SEQ ID NO: 2859182 - DNA, 25 bp, Homo sapien
tatagagaggattaggcttctgcag

SEQ ID NO: 2859183 - DNA, 25 bp, Homo sapien
ctgattatagagaggattaggcttc

SEQ ID NO: 2859184 - DNA, 25 bp, Homo sapien
ttatagagaggattaggcttctgca

SEQ ID NO: 2859185 - DNA, 25 bp, Homo sapien
gattatagagaggattaggcttctg

SEQ ID NO: 2859186 - DNA, 25 bp, Homo sapien
ttagcttcccaaagaggttcctctg

SEQ ID NO: 2859187 - DNA, 25 bp, Homo sapien
tatgctaatgtcttcaataccctga

SEQ ID NO: 2859188 - DNA, 25 bp, Homo sapien
tcactcaaagtctagaagccaccat

SEQ ID NO: 2859189 - DNA, 25 bp, Homo sapien
cctctgaagtcccaatcaggtttga

SEQ ID NO: 2859190 - DNA, 25 bp, Homo sapien
ttccttcatcctaataccccaaaga

SEQ ID NO: 2859191 - DNA, 25 bp, Homo sapien
ttcatcctaataccccaaagacgag

SEQ ID NO: 2859192 - DNA, 25 bp, Homo sapien
ccttcatcctaataccccaaagacg

SEQ ID NO: 2859193 - DNA, 25 bp, Homo sapien
atcctaataccccaaagacgagaat

SEQ ID NO: 2859194 - DNA, 25 bp, Homo sapien
ctaagctagtactaggtaattcgga

SEQ ID NO: 2859195 - DNA, 25 bp, Homo sapien
agacacatattttccaagcctgcac

SEQ ID NO: 2859196 - DNA, 25 bp, Homo sapien
taaaatagtgaattaagaagctccc

SEQ ID NO: 2859197 - DNA, 25 bp, Homo sapien
caaaaatagcaagttcctggtacca

SEQ ID NO: 2859198 - DNA, 25 bp, Homo sapien
tactaagtggatacttgccgtaagt

SEQ ID NO: 2859199 - DNA, 25 bp, Homo sapien
ctaagtggatacttgccgtaagtga

SEQ ID NO: 2859200 - DNA, 25 bp, Homo sapien
tttactaagtggatacttgccgtaa

SEQ ID NO: 2859201 - DNA, 25 bp, Homo sapien
aagtggatacttgccgtaagtgaaa

SEQ ID NO: 2859202 - DNA, 25 bp, Homo sapien
gaaggtcttgccttccagaatgcaa

SEQ ID NO: 2859203 - DNA, 25 bp, Homo sapien
ggctttacagtgactacaagatggg

SEQ ID NO: 2859204 - DNA, 25 bp, Homo sapien
gagtatgaggtaaatgaaatgtgca

SEQ ID NO: 2859205 - DNA, 25 bp, Homo sapien
tctgtgcaaaggcaccatgcttggc

SEQ ID NO: 2859206 - DNA, 25 bp, Homo sapien
agaactcgccactggaagcaacagg

SEQ ID NO: 2859207 - DNA, 25 bp, Homo sapien
ggcttggttgaaggcactccagtca

SEQ ID NO: 2859208 - DNA, 25 bp, Homo sapien
taggcaaaccaagtcccacagtgtt

SEQ ID NO: 2859209 - DNA, 25 bp, Homo sapien
taacaagttctaccgctggctgtga

SEQ ID NO: 2859210 - DNA, 25 bp, Homo sapien
ctctaagggtaagaaacttcatgga

SEQ ID NO: 2859211 - DNA, 25 bp, Homo sapien
actctaagggtaagaaacttcatgg

SEQ ID NO: 2859212 - DNA, 25 bp, Homo sapien
aactctaagggtaagaaacttcatg

SEQ ID NO: 2859213 - DNA, 25 bp, Homo sapien
taatgcagaatatgaatggaaactg

SEQ ID NO: 2859214 - DNA, 25 bp, Homo sapien
cccctgcgtaaggtggtcaggttat

SEQ ID NO: 2859215 - DNA, 25 bp, Homo sapien
tctgaaatgattaatcgtgggagga

SEQ ID NO: 2859216 - DNA, 25 bp, Homo sapien
gaagagatgtatcacttaggcaaca

SEQ ID NO: 2859217 - DNA, 25 bp, Homo sapien
tgacaagcaacaccgttcccagttt

SEQ ID NO: 2859218 - DNA, 25 bp, Homo sapien
caagagtcacctatgaatatgggca

SEQ ID NO: 2859219 - DNA, 25 bp, Homo sapien
ttagtaagatagttggcctgatccc

SEQ ID NO: 2859220 - DNA, 25 bp, Homo sapien
tttagaaagttgaaggctcgaaggc

SEQ ID NO: 2859221 - DNA, 25 bp, Homo sapien
ctgagtagtctgtaaccaaaataat

SEQ ID NO: 2859222 - DNA, 25 bp, Homo sapien
gaataaattctttaggaattatgaa

SEQ ID NO: 2859223 - DNA, 25 bp, Homo sapien
taattcatttggcacatttaaggca

SEQ ID NO: 2859224 - DNA, 25 bp, Homo sapien
catctgcccaataaaataccttgtg

SEQ ID NO: 2859225 - DNA, 25 bp, Homo sapien
gaaaaatgacagaaagaagctgact

SEQ ID NO: 2859226 - DNA, 25 bp, Homo sapien
agaaaaatgacagaaagaagctgac

SEQ ID NO: 2859227 - DNA, 25 bp, Homo sapien
aaaatgacagaaagaagctgacttg

SEQ ID NO: 2859228 - DNA, 25 bp, Homo sapien
aatgacagaaagaagctgacttggg

SEQ ID NO: 2859229 - DNA, 25 bp, Homo sapien
aatcctccgaataaatcagctgatc

SEQ ID NO: 2859230 - DNA, 25 bp, Homo sapien
agtcagcaaatcctccgaataaatc

SEQ ID NO: 2859231 - DNA, 25 bp, Homo sapien
gcaaatcctccgaataaatcagctg

SEQ ID NO: 2859232 - DNA, 25 bp, Homo sapien
tcagcaaatcctccgaataaatcag

SEQ ID NO: 2859233 - DNA, 25 bp, Homo sapien
gcaggatccttgattggaccccgga

SEQ ID NO: 2859234 - DNA, 25 bp, Homo sapien
tacctaatattagaggcccagatgc

SEQ ID NO: 2859235 - DNA, 25 bp, Homo sapien
agattgctgcgctccagattgggca

SEQ ID NO: 2859236 - DNA, 25 bp, Homo sapien
tctggaggccattttagtgccacac

SEQ ID NO: 2859237 - DNA, 25 bp, Homo sapien
tactgtagtcaactagcagcaggca

SEQ ID NO: 2859238 - DNA, 25 bp, Homo sapien
taggccgcagtgcttagaaactagc

SEQ ID NO: 2859239 - DNA, 25 bp, Homo sapien
catctgctacactcaactgggttaa

SEQ ID NO: 2859240 - DNA, 25 bp, Homo sapien
gctgaaagacattctgccccatctg

SEQ ID NO: 2859241 - DNA, 25 bp, Homo sapien
gctgctgcttaatattcgtaagttt

SEQ ID NO: 2859242 - DNA, 25 bp, Homo sapien
tgggtaacagaatgatagttaatca

SEQ ID NO: 2859243 - DNA, 25 bp, Homo sapien
cattggtcaagtatactgttgggta

SEQ ID NO: 2859244 - DNA, 25 bp, Homo sapien
tagcaaacaagttaggagttaggga

SEQ ID NO: 2859245 - DNA, 25 bp, Homo sapien
tagacagtacttaaacgacaaatgg

SEQ ID NO: 2859246 - DNA, 25 bp, Homo sapien
cagcagggaggttatttagtcacca

SEQ ID NO: 2859247 - DNA, 25 bp, Homo sapien
caagtgctatccttcaagattccca

SEQ ID NO: 2859248 - DNA, 25 bp, Homo sapien
gctgcatgtggaagactgctaattt

SEQ ID NO: 2859249 - DNA, 25 bp, Homo sapien
aaatgcgcagagcagtaccttttgc

SEQ ID NO: 2859250 - DNA, 25 bp, Homo sapien
tccacttgaccttcgcatgaggaca

SEQ ID NO: 2859251 - DNA, 25 bp, Homo sapien
taaatgatctctaggcatgcccaag

SEQ ID NO: 2859252 - DNA, 25 bp, Homo sapien
gttttttacaagcacccagatcagt

SEQ ID NO: 2859253 - DNA, 25 bp, Homo sapien
caaggtcaccagatgacttgctgct

SEQ ID NO: 2859254 - DNA, 25 bp, Homo sapien
tcaaacagatcaacaaggtcaccag

SEQ ID NO: 2859255 - DNA, 25 bp, Homo sapien
tgttgactggctggtgccatcaaac

SEQ ID NO: 2859256 - DNA, 25 bp, Homo sapien
gatgacttgctgctaggcactgaag

SEQ ID NO: 2859257 - DNA, 25 bp, Homo sapien
tgtcccctgtgtaatgtgctgctgc

SEQ ID NO: 2859258 - DNA, 25 bp, Homo sapien
gaatatgctttgtcgtcacagtctc

SEQ ID NO: 2859259 - DNA, 25 bp, Homo sapien
tcacctttgggagatctgcctcttc

SEQ ID NO: 2859260 - DNA, 25 bp, Homo sapien
gctgctgctccaagatcaatggttt

SEQ ID NO: 2859261 - DNA, 25 bp, Homo sapien
gaaaagcactcttgtttttatccca

SEQ ID NO: 2859262 - DNA, 25 bp, Homo sapien
gctcacctaatttatcactgaatgg

SEQ ID NO: 2859263 - DNA, 25 bp, Homo sapien
tttcctccggaacttgctgatggtg

SEQ ID NO: 2859264 - DNA, 25 bp, Homo sapien
ttgggctcaggatcatatctttcac

SEQ ID NO: 2859265 - DNA, 25 bp, Homo sapien
tatttataccttgatccttaccatg

SEQ ID NO: 2859266 - DNA, 25 bp, Homo sapien
cctgggcaaattcaaccaattcctt

SEQ ID NO: 2859267 - DNA, 25 bp, Homo sapien
tctttcgctcttcacgaagcctgtc

SEQ ID NO: 2859268 - DNA, 25 bp, Homo sapien
aacactgtctgaggaaaccccaaca

SEQ ID NO: 2859269 - DNA, 25 bp, Homo sapien
taattttccagggatcgtaaatcat

SEQ ID NO: 2859270 - DNA, 25 bp, Homo sapien
tctggcacttgtaacaacacgctct

SEQ ID NO: 2859271 - DNA, 25 bp, Homo sapien
ccagggatcgtaaatcataaatgtg

SEQ ID NO: 2859272 - DNA, 25 bp, Homo sapien
tctctggcacttgtaacaacacgct

SEQ ID NO: 2859273 - DNA, 25 bp, Homo sapien
tgtcttttaacattcgtgaccaaag

SEQ ID NO: 2859274 - DNA, 25 bp, Homo sapien
gttctggaaattgttcatacataaa

SEQ ID NO: 2859275 - DNA, 25 bp, Homo sapien
tcgtgaccaaagcatgttcataagt

SEQ ID NO: 2859276 - DNA, 25 bp, Homo sapien
caaagcatgttcataagttctggaa

SEQ ID NO: 2859277 - DNA, 25 bp, Homo sapien
ggatcatcgttcgttgcctctcgaa

SEQ ID NO: 2859278 - DNA, 25 bp, Homo sapien
tctcccatgagttgcccagaaggtc

SEQ ID NO: 2859279 - DNA, 25 bp, Homo sapien
gaaccttagactcgatctctgaata

SEQ ID NO: 2859280 - DNA, 25 bp, Homo sapien
gaaggtccccaaggatcatcgttcg

SEQ ID NO: 2859281 - DNA, 25 bp, Homo sapien
cactactgggtgtcctaatgagcta

SEQ ID NO: 2859282 - DNA, 25 bp, Homo sapien
ccagatctggtttacatgcaatgca

SEQ ID NO: 2859283 - DNA, 25 bp, Homo sapien
ttttgtgcacaagctaccccaagga

SEQ ID NO: 2859284 - DNA, 25 bp, Homo sapien
gcaatgatcaagaacgtgggcctca

SEQ ID NO: 2859285 - DNA, 25 bp, Homo sapien
tattcatttgacatcgaaagctcca

SEQ ID NO: 2859286 - DNA, 25 bp, Homo sapien
aatcagattaagacatgagatggca

SEQ ID NO: 2859287 - DNA, 25 bp, Homo sapien
gaattcacttcggaaaaaatcagat

SEQ ID NO: 2859288 - DNA, 25 bp, Homo sapien
cagaacactgttctactatggaaga

SEQ ID NO: 2859289 - DNA, 25 bp, Homo sapien
ccaactgcgagaagttaccatcctc

SEQ ID NO: 2859290 - DNA, 25 bp, Homo sapien
ttaccatcctcaagttttgcacaca

SEQ ID NO: 2859291 - DNA, 25 bp, Homo sapien
agatctttagtgccaactgcgagaa

SEQ ID NO: 2859292 - DNA, 25 bp, Homo sapien
taccatcctcaagttttgcacacat

SEQ ID NO: 2859293 - DNA, 25 bp, Homo sapien
gccattcttgtttttggtatctgtt

SEQ ID NO: 2859294 - DNA, 25 bp, Homo sapien
tcttgtttttggtatctgttatttc

SEQ ID NO: 2859295 - DNA, 25 bp, Homo sapien
tagtttatactttcatcttgccatt

SEQ ID NO: 2859296 - DNA, 25 bp, Homo sapien
tttttagtttatactttcatcttgc

SEQ ID NO: 2859297 - DNA, 25 bp, Homo sapien
tatcagtggacagtaccatccaagg

SEQ ID NO: 2859298 - DNA, 25 bp, Homo sapien
tatggcttgagcaacacttgagaga

SEQ ID NO: 2859299 - DNA, 25 bp, Homo sapien
ggctgcaagctgtcactgggatatt

SEQ ID NO: 2859300 - DNA, 25 bp, Homo sapien
tgttggccatgttagtgcaccacaa

SEQ ID NO: 2859301 - DNA, 25 bp, Homo sapien
gactagggccaaagagagctcttga

SEQ ID NO: 2859302 - DNA, 25 bp, Homo sapien
gagctcttgatgaaatacaaatcct

SEQ ID NO: 2859303 - DNA, 25 bp, Homo sapien
tccttactaattgaaactgagctcc

SEQ ID NO: 2859304 - DNA, 25 bp, Homo sapien
gactcatcttctaccagactagggc

SEQ ID NO: 2859305 - DNA, 25 bp, Homo sapien
aaaggtccttcatatgagataccag

SEQ ID NO: 2859306 - DNA, 25 bp, Homo sapien
gagtctgtgtacacgctcttcatag

SEQ ID NO: 2859307 - DNA, 25 bp, Homo sapien
tctctcctgaagaataggccttttg

SEQ ID NO: 2859308 - DNA, 25 bp, Homo sapien
caggtcttatagcttgaatgccact

SEQ ID NO: 2859309 - DNA, 25 bp, Homo sapien
ccgtctccccctctggattccatac

SEQ ID NO: 2859310 - DNA, 25 bp, Homo sapien
cgtctccccctctggattccataca

SEQ ID NO: 2859311 - DNA, 25 bp, Homo sapien
gtctccccctctggattccatacac

SEQ ID NO: 2859312 - DNA, 25 bp, Homo sapien
tattcacggtgctttcatgttcatg

SEQ ID NO: 2859313 - DNA, 25 bp, Homo sapien
agcacacattcccatccgaggtcaa

SEQ ID NO: 2859314 - DNA, 25 bp, Homo sapien
caaaaaacgtgagttgtccagagca

SEQ ID NO: 2859315 - DNA, 25 bp, Homo sapien
ttcatgaacattagcagaggagcaa

SEQ ID NO: 2859316 - DNA, 25 bp, Homo sapien
cagaacagagaaagtgagggacagt

SEQ ID NO: 2859317 - DNA, 25 bp, Homo sapien
taatacaggaggtccactgaacaga

SEQ ID NO: 2859318 - DNA, 25 bp, Homo sapien
cagatgacagggctaaacattttac

SEQ ID NO: 2859319 - DNA, 25 bp, Homo sapien
gccactggagaattctgaacccatt

SEQ ID NO: 2859320 - DNA, 25 bp, Homo sapien
gctgagcttgaacaaataagtagca

SEQ ID NO: 2859321 - DNA, 25 bp, Homo sapien
gaaggattcgctgagcttgaacaaa

SEQ ID NO: 2859322 - DNA, 25 bp, Homo sapien
tgtcaccttcattacattcctcaaa

SEQ ID NO: 2859323 - DNA, 25 bp, Homo sapien
gcagttttgatctaccactaccatg

SEQ ID NO: 2859324 - DNA, 25 bp, Homo sapien
cctagttggtgggaatggtgccact

SEQ ID NO: 2859325 - DNA, 25 bp, Homo sapien
gccacatcgccttttatgcaacttg

SEQ ID NO: 2859326 - DNA, 25 bp, Homo sapien
tgcaacttgacgagtgggaagatac

SEQ ID NO: 2859327 - DNA, 25 bp, Homo sapien
aggcctatggctttatctgcttccc

SEQ ID NO: 2859328 - DNA, 25 bp, Homo sapien
tggggccaagacagtcctccggcca

SEQ ID NO: 2859329 - DNA, 25 bp, Homo sapien
cttatgaccaaagcgtcggcaccca

SEQ ID NO: 2859330 - DNA, 25 bp, Homo sapien
agcgccaaacaacccgccccttatg

SEQ ID NO: 2859331 - DNA, 25 bp, Homo sapien
aagcccacggcctggggccaagaca

SEQ ID NO: 2859332 - DNA, 25 bp, Homo sapien
cccagcctcgccagcggggatgagg

SEQ ID NO: 2859333 - DNA, 25 bp, Homo sapien
ccagcctcgccagcggggatgaggc

SEQ ID NO: 2859334 - DNA, 25 bp, Homo sapien
gcctcgccagcggggatgaggcccg

SEQ ID NO: 2859335 - DNA, 25 bp, Homo sapien
cagcctcgccagcggggatgaggcc

SEQ ID NO: 2859336 - DNA, 25 bp, Homo sapien
cacttccgtaccggggcagttccag

SEQ ID NO: 2859337 - DNA, 25 bp, Homo sapien
tctcctgctccccacggaccccgga

SEQ ID NO: 2859338 - DNA, 25 bp, Homo sapien
gacacgtcgagacgcggcagcacag

SEQ ID NO: 2859339 - DNA, 25 bp, Homo sapien
ggcgccgccggtgacacgtcgagac

SEQ ID NO: 2859340 - DNA, 25 bp, Homo sapien
ccgccggtgacacgtcgagacgcgg

SEQ ID NO: 2859341 - DNA, 25 bp, Homo sapien
ccggtgacacgtcgagacgcggcag

SEQ ID NO: 2859342 - DNA, 25 bp, Homo sapien
ggaagtgtccgactttccgccgctg

SEQ ID NO: 2859343 - DNA, 25 bp, Homo sapien
ctgcgtggagcggaagtgtccgact

SEQ ID NO: 2859344 - DNA, 25 bp, Homo sapien
gagctcggccggttgagttgggaga

SEQ ID NO: 2859345 - DNA, 25 bp, Homo sapien
ctgagtgccgagctcggccggttga

SEQ ID NO: 2859346 - DNA, 25 bp, Homo sapien
tgcaagttcgagagcagtttccata

SEQ ID NO: 2859347 - DNA, 25 bp, Homo sapien
gtttccatagtaacttctttgtggc

SEQ ID NO: 2859348 - DNA, 25 bp, Homo sapien
ttatcttgcaagttcgagagcagtt

SEQ ID NO: 2859349 - DNA, 25 bp, Homo sapien
agtaacttctttgtggcaattcaaa

SEQ ID NO: 2859350 - DNA, 25 bp, Homo sapien
tacggctcagacctgtcaaaactgc

SEQ ID NO: 2859351 - DNA, 25 bp, Homo sapien
ggagtcattcccatcgcttgttttt

SEQ ID NO: 2859352 - DNA, 25 bp, Homo sapien
ttgtagaaacgccttttaacatctc

SEQ ID NO: 2859353 - DNA, 25 bp, Homo sapien
tttcttcttggtcagtacggctcag

SEQ ID NO: 2859354 - DNA, 25 bp, Homo sapien
tccttctgcgtctgaggccctggtg

SEQ ID NO: 2859355 - DNA, 25 bp, Homo sapien
gagcaagttgccacctgctgcactg

SEQ ID NO: 2859356 - DNA, 25 bp, Homo sapien
ctggtttttcctgctaaggcaacgc

SEQ ID NO: 2859357 - DNA, 25 bp, Homo sapien
gctaaggcaacgcagtccttctgcg

SEQ ID NO: 2859358 - DNA, 25 bp, Homo sapien
aggagctggtcctgccagcaagaat

SEQ ID NO: 2859359 - DNA, 25 bp, Homo sapien
ggagctggtcctgccagcaagaatt

SEQ ID NO: 2859360 - DNA, 25 bp, Homo sapien
caggagctggtcctgccagcaagaa

SEQ ID NO: 2859361 - DNA, 25 bp, Homo sapien
atcccatgtcatcgttttactcttc

SEQ ID NO: 2859362 - DNA, 25 bp, Homo sapien
ctggggcagcagagacggccacagc

SEQ ID NO: 2859363 - DNA, 25 bp, Homo sapien
cggccacagccccaccagcaggtac

SEQ ID NO: 2859364 - DNA, 25 bp, Homo sapien
ggggcagcagagacggccacagccc

SEQ ID NO: 2859365 - DNA, 25 bp, Homo sapien
gacggccacagccccaccagcaggt

SEQ ID NO: 2859366 - DNA, 25 bp, Homo sapien
gtcattgtccgtctcgatgcccacg

SEQ ID NO: 2859367 - DNA, 25 bp, Homo sapien
cttgttgagccggtcattgtccgtc

SEQ ID NO: 2859368 - DNA, 25 bp, Homo sapien
cggtcattgtccgtctcgatgccca

SEQ ID NO: 2859369 - DNA, 25 bp, Homo sapien
gagccggtcattgtccgtctcgatg

SEQ ID NO: 2859370 - DNA, 25 bp, Homo sapien
ggttacccccgagggcagccagcaa

SEQ ID NO: 2859371 - DNA, 25 bp, Homo sapien
gggttacccccgagggcagccagca

SEQ ID NO: 2859372 - DNA, 25 bp, Homo sapien
ctctcattttccagtccaaataact

SEQ ID NO: 2859373 - DNA, 25 bp, Homo sapien
ttgtctctcattttccagtccaaat

SEQ ID NO: 2859374 - DNA, 25 bp, Homo sapien
tccagtccaaataactttatatcat

SEQ ID NO: 2859375 - DNA, 25 bp, Homo sapien
gtccaaataactttatatcatccat

SEQ ID NO: 2859376 - DNA, 25 bp, Homo sapien
gcaaaggcatttacaccttccaggg

SEQ ID NO: 2859377 - DNA, 25 bp, Homo sapien
ctctgcgaggtgctgtagaaaaggc

SEQ ID NO: 2859378 - DNA, 25 bp, Homo sapien
tgtagaaaaggcaatccttgccgga

SEQ ID NO: 2859379 - DNA, 25 bp, Homo sapien
caatccttgccggaggcaaaggcat

SEQ ID NO: 2859380 - DNA, 25 bp, Homo sapien
tctgagttttttctttttgcctgat

SEQ ID NO: 2859381 - DNA, 25 bp, Homo sapien
ctctgagttttttctttttgcctga

SEQ ID NO: 2859382 - DNA, 25 bp, Homo sapien
agagaactagaaattaggttatttg

SEQ ID NO: 2859383 - DNA, 25 bp, Homo sapien
ttttggtctgtagaagaatttcagc

SEQ ID NO: 2859384 - DNA, 25 bp, Homo sapien
gcaatctcttcggtgattttactgt

SEQ ID NO: 2859385 - DNA, 25 bp, Homo sapien
tttggtctgtagaagaatttcagca

SEQ ID NO: 2859386 - DNA, 25 bp, Homo sapien
ttcagcaatctcttcggtgatttta

SEQ ID NO: 2859387 - DNA, 25 bp, Homo sapien
cttggtctgatgcaatcaattcagg

SEQ ID NO: 2859388 - DNA, 25 bp, Homo sapien
ttgagttgtaactggtggccccaaa

SEQ ID NO: 2859389 - DNA, 25 bp, Homo sapien
cagaatagaaactcccagaacttgg

SEQ ID NO: 2859390 - DNA, 25 bp, Homo sapien
tatggtagggaagattgagttgtaa

SEQ ID NO: 2859391 - DNA, 25 bp, Homo sapien
tcagtcagccttttatacaccacca

SEQ ID NO: 2859392 - DNA, 25 bp, Homo sapien
agcactttcgttcattcttggagca

SEQ ID NO: 2859393 - DNA, 25 bp, Homo sapien
tgtacatgactgagcaaacggcgga

SEQ ID NO: 2859394 - DNA, 25 bp, Homo sapien
caaacagtccggagattttaagcac

SEQ ID NO: 2859395 - DNA, 25 bp, Homo sapien
gacgtatctccactaaaggcctgac

SEQ ID NO: 2859396 - DNA, 25 bp, Homo sapien
tgttcctagactgttttgcccaaat

SEQ ID NO: 2859397 - DNA, 25 bp, Homo sapien
actctggaacaacatagctacttgc

SEQ ID NO: 2859398 - DNA, 25 bp, Homo sapien
gagcagccagctgaatatgacccta

SEQ ID NO: 2859399 - DNA, 25 bp, Homo sapien
tattgcccttggatagaggacatat

SEQ ID NO: 2859400 - DNA, 25 bp, Homo sapien
gcaataccaagtcagtgtgtggagt

SEQ ID NO: 2859401 - DNA, 25 bp, Homo sapien
tggagcaagctcctactctatctcc

SEQ ID NO: 2859402 - DNA, 25 bp, Homo sapien
gatcttagccaaaatatctagaagc

SEQ ID NO: 2859403 - DNA, 25 bp, Homo sapien
taggaccaggggacaaggaatgctt

SEQ ID NO: 2859404 - DNA, 25 bp, Homo sapien
gttctcttgggagtcattaatatca

SEQ ID NO: 2859405 - DNA, 25 bp, Homo sapien
ctctgggtaggaccaggggacaagg

SEQ ID NO: 2859406 - DNA, 25 bp, Homo sapien
tgttctcttgggagtcattaatatc

SEQ ID NO: 2859407 - DNA, 25 bp, Homo sapien
gctcgccctggcagctgtttgtgtt

SEQ ID NO: 2859408 - DNA, 25 bp, Homo sapien
tcccatgttatctcattgggctcca

SEQ ID NO: 2859409 - DNA, 25 bp, Homo sapien
tgttgagcaccttgccaaattccca

SEQ ID NO: 2859410 - DNA, 25 bp, Homo sapien
agctcgccctggcagctgtttgtgt

SEQ ID NO: 2859411 - DNA, 25 bp, Homo sapien
ctgcaagcaggtggcgatggcagct

SEQ ID NO: 2859412 - DNA, 25 bp, Homo sapien
cccggccaagcagcacaagtggagg

SEQ ID NO: 2859413 - DNA, 25 bp, Homo sapien
tgaagccccttgattcaaagcagag

SEQ ID NO: 2859414 - DNA, 25 bp, Homo sapien
ggtggaccagctggcaacctctgcc

SEQ ID NO: 2859415 - DNA, 25 bp, Homo sapien
tcacacgccgacatccttctcattg

SEQ ID NO: 2859416 - DNA, 25 bp, Homo sapien
cgccgacatccttctcattgcccgt

SEQ ID NO: 2859417 - DNA, 25 bp, Homo sapien
acacgccgacatccttctcattgcc

SEQ ID NO: 2859418 - DNA, 25 bp, Homo sapien
acgccgacatccttctcattgcccg

SEQ ID NO: 2859419 - DNA, 25 bp, Homo sapien
cttggcctggctggccttagagttg

SEQ ID NO: 2859420 - DNA, 25 bp, Homo sapien
gcctggctggccttagagttgggga

SEQ ID NO: 2859421 - DNA, 25 bp, Homo sapien
ggacccagaggccagagtcaaagca

SEQ ID NO: 2859422 - DNA, 25 bp, Homo sapien
cccagaggccagagtcaaagcagcg

SEQ ID NO: 2859423 - DNA, 25 bp, Homo sapien
tgtggtacttcgcgttggtggggtc

SEQ ID NO: 2859424 - DNA, 25 bp, Homo sapien
gcatgtggtacttcgcgttggtggg

SEQ ID NO: 2859425 - DNA, 25 bp, Homo sapien
catgtggtacttcgcgttggtgggg

SEQ ID NO: 2859426 - DNA, 25 bp, Homo sapien
tgcatgtggtacttcgcgttggtgg

SEQ ID NO: 2859427 - DNA, 25 bp, Homo sapien
gcatctgcacgtctttcacatggaa

SEQ ID NO: 2859428 - DNA, 25 bp, Homo sapien
cagcatctgcacgtctttcacatgg

SEQ ID NO: 2859429 - DNA, 25 bp, Homo sapien
cttgcagcatctgcacgtctttcac

SEQ ID NO: 2859430 - DNA, 25 bp, Homo sapien
atctgcacgtctttcacatggaagc

SEQ ID NO: 2859431 - DNA, 25 bp, Homo sapien
tcagtgaagaactgccggaagcagg

SEQ ID NO: 2859432 - DNA, 25 bp, Homo sapien
tgaagccctccacgtactggcgatc

SEQ ID NO: 2859433 - DNA, 25 bp, Homo sapien
gatcggctgtcctaatctcagtgaa

SEQ ID NO: 2859434 - DNA, 25 bp, Homo sapien
cttgatgggcagcttggcacggccc

SEQ ID NO: 2859435 - DNA, 25 bp, Homo sapien
tcctcgcacaccaggtggacgttgt

SEQ ID NO: 2859436 - DNA, 25 bp, Homo sapien
cctcgcacaccaggtggacgttgtc

SEQ ID NO: 2859437 - DNA, 25 bp, Homo sapien
gtaattggctgtctcctcgcacacc

SEQ ID NO: 2859438 - DNA, 25 bp, Homo sapien
atgccaaagtgcttggtctgtttct

SEQ ID NO: 2859439 - DNA, 25 bp, Homo sapien
cccagtggcgagcatgccaaagtgc

SEQ ID NO: 2859440 - DNA, 25 bp, Homo sapien
tgtcatcccagtggcgagcatgcca

SEQ ID NO: 2859441 - DNA, 25 bp, Homo sapien
aaagtgcttggtctgtttctcgcac

SEQ ID NO: 2859442 - DNA, 25 bp, Homo sapien
tccgtcttctccggcttggtgttga

SEQ ID NO: 2859443 - DNA, 25 bp, Homo sapien
ccgtcttctccggcttggtgttgac

SEQ ID NO: 2859444 - DNA, 25 bp, Homo sapien
catgctcttgctgaagccatctttg

SEQ ID NO: 2859445 - DNA, 25 bp, Homo sapien
catctttgctaagcgtgtccacgtt

SEQ ID NO: 2859446 - DNA, 25 bp, Homo sapien
gctcccagctccgatcctcgcgcag

SEQ ID NO: 2859447 - DNA, 25 bp, Homo sapien
agctccgatcctcgcgcagctgctg

SEQ ID NO: 2859448 - DNA, 25 bp, Homo sapien
cttgtggcagcccctgtccagttcc

SEQ ID NO: 2859449 - DNA, 25 bp, Homo sapien
ttgtggcagcccctgtccagttcct

SEQ ID NO: 2859450 - DNA, 25 bp, Homo sapien
cagcccctgtccagttcctcttctc

SEQ ID NO: 2859451 - DNA, 25 bp, Homo sapien
tggcagcccctgtccagttcctctt

SEQ ID NO: 2859452 - DNA, 25 bp, Homo sapien
tgctccatgcgctccccctgggcct

SEQ ID NO: 2859453 - DNA, 25 bp, Homo sapien
catgcgtctcgtcttcatcatcaga

SEQ ID NO: 2859454 - DNA, 25 bp, Homo sapien
cctctatgtggttccacatgctgta

SEQ ID NO: 2859455 - DNA, 25 bp, Homo sapien
gccgtgtcgatgttggcatgcgtct

SEQ ID NO: 2859456 - DNA, 25 bp, Homo sapien
catcatcagacacctctatgtggtt

SEQ ID NO: 2859457 - DNA, 25 bp, Homo sapien
gcagcagcgctggagactcccaagg

SEQ ID NO: 2859458 - DNA, 25 bp, Homo sapien
ggcagcagcgctggagactcccaag

SEQ ID NO: 2859459 - DNA, 25 bp, Homo sapien
gctgactcctgagatccatggtggg

SEQ ID NO: 2859460 - DNA, 25 bp, Homo sapien
ggcagcaaaagggataaccggaaga

SEQ ID NO: 2859461 - DNA, 25 bp, Homo sapien
gcagcaaaagggataaccggaagat

SEQ ID NO: 2859462 - DNA, 25 bp, Homo sapien
cagcaaaagggataaccggaagata

SEQ ID NO: 2859463 - DNA, 25 bp, Homo sapien
agcgaatttgttgccgatgccaaag

SEQ ID NO: 2859464 - DNA, 25 bp, Homo sapien
cttgttgacgaaagcgaatttgttg

SEQ ID NO: 2859465 - DNA, 25 bp, Homo sapien
aaagcgaatttgttgccgatgccaa

SEQ ID NO: 2859466 - DNA, 25 bp, Homo sapien
gacgaaagcgaatttgttgccgatg

SEQ ID NO: 2859467 - DNA, 25 bp, Homo sapien
tgggcttgaaggcagagtgccccat

SEQ ID NO: 2859468 - DNA, 25 bp, Homo sapien
ctgggcttgaaggcagagtgcccca

SEQ ID NO: 2859469 - DNA, 25 bp, Homo sapien
tgctgggcttgaaggcagagtgccc

SEQ ID NO: 2859470 - DNA, 25 bp, Homo sapien
gctgggcttgaaggcagagtgcccc

SEQ ID NO: 2859471 - DNA, 25 bp, Homo sapien
gtgccttttgagagccagttctgaa

SEQ ID NO: 2859472 - DNA, 25 bp, Homo sapien
tgccctgacctctggtggaatcggc

SEQ ID NO: 2859473 - DNA, 25 bp, Homo sapien
tcctggtgttttcagggaccgctgg

SEQ ID NO: 2859474 - DNA, 25 bp, Homo sapien
cagggccgttccatgtcgtgctctg

SEQ ID NO: 2859475 - DNA, 25 bp, Homo sapien
gactgaccttataagctttttgcga

SEQ ID NO: 2859476 - DNA, 25 bp, Homo sapien
tctggttggtgagcactgagtgctt

SEQ ID NO: 2859477 - DNA, 25 bp, Homo sapien
ccttataagctttttgcgaaaatct

SEQ ID NO: 2859478 - DNA, 25 bp, Homo sapien
agccatcactgactgaccttataag

SEQ ID NO: 2859479 - DNA, 25 bp, Homo sapien
aatctcaaaagaactggttggggca

SEQ ID NO: 2859480 - DNA, 25 bp, Homo sapien
tctcaaaagaactggttggggcagc

SEQ ID NO: 2859481 - DNA, 25 bp, Homo sapien
ctcaaaagaactggttggggcagcc

SEQ ID NO: 2859482 - DNA, 25 bp, Homo sapien
taatctcaaaagaactggttggggc

SEQ ID NO: 2859483 - DNA, 25 bp, Homo sapien
agctgaattctgcacggtcccatag

SEQ ID NO: 2859484 - DNA, 25 bp, Homo sapien
tcttgctgccagagggtgtcgctgg

SEQ ID NO: 2859485 - DNA, 25 bp, Homo sapien
gaaatccctatgctgtctcggctgt

SEQ ID NO: 2859486 - DNA, 25 bp, Homo sapien
ggtcccataggctcgttcatctgag

SEQ ID NO: 2859487 - DNA, 25 bp, Homo sapien
ctccttgagttcaggtgcacagcca

SEQ ID NO: 2859488 - DNA, 25 bp, Homo sapien
tccttgagttcaggtgcacagccac

SEQ ID NO: 2859489 - DNA, 25 bp, Homo sapien
agacatcagatttgatcctctcctt

SEQ ID NO: 2859490 - DNA, 25 bp, Homo sapien
catcagatttgatcctctccttgag

SEQ ID NO: 2859491 - DNA, 25 bp, Homo sapien
agctgcattgaggaacacagtgtca

SEQ ID NO: 2859492 - DNA, 25 bp, Homo sapien
ggctttcaagctgattgtcattatt

SEQ ID NO: 2859493 - DNA, 25 bp, Homo sapien
ttcaagctgattgtcattattgtgt

SEQ ID NO: 2859494 - DNA, 25 bp, Homo sapien
gctttcaagctgattgtcattattg

SEQ ID NO: 2859495 - DNA, 25 bp, Homo sapien
ctttcaagctgattgtcattattgt

SEQ ID NO: 2859496 - DNA, 25 bp, Homo sapien
gggaaattcatctaggcaaaatccg

SEQ ID NO: 2859497 - DNA, 25 bp, Homo sapien
gagccaatatcatctgtcatgggaa

SEQ ID NO: 2859498 - DNA, 25 bp, Homo sapien
gaaaaatactggcactccatcatga

SEQ ID NO: 2859499 - DNA, 25 bp, Homo sapien
aaaatccgattgcaccattagccct

SEQ ID NO: 2859500 - DNA, 25 bp, Homo sapien
aataccataccatagcttctttagt

SEQ ID NO: 2859501 - DNA, 25 bp, Homo sapien
aatgagagagggattgtgctacaga

SEQ ID NO: 2859502 - DNA, 25 bp, Homo sapien
caagatcatggtggtagtgacagga

SEQ ID NO: 2859503 - DNA, 25 bp, Homo sapien
tcttcatagggattagtacatttct

SEQ ID NO: 2859504 - DNA, 25 bp, Homo sapien
ctccattcagctgcttgtaactggg

SEQ ID NO: 2859505 - DNA, 25 bp, Homo sapien
ttcagctgcttgtaactgggcattt

SEQ ID NO: 2859506 - DNA, 25 bp, Homo sapien
ccattcagctgcttgtaactgggca

SEQ ID NO: 2859507 - DNA, 25 bp, Homo sapien
cattcagctgcttgtaactgggcat

SEQ ID NO: 2859508 - DNA, 25 bp, Homo sapien
actggtgtatgcagggggccactct

SEQ ID NO: 2859509 - DNA, 25 bp, Homo sapien
gggtaaccacaaagcacacttgctc

SEQ ID NO: 2859510 - DNA, 25 bp, Homo sapien
ttattcagtttctgtggcaaaattg

SEQ ID NO: 2859511 - DNA, 25 bp, Homo sapien
tttcagtcaaaccatctggaactgg

SEQ ID NO: 2859512 - DNA, 25 bp, Homo sapien
cataggttggttgttgaggctgttc

SEQ ID NO: 2859513 - DNA, 25 bp, Homo sapien
gctacataggttggttgttgaggct

SEQ ID NO: 2859514 - DNA, 25 bp, Homo sapien
ctgggctacataggttggttgttga

SEQ ID NO: 2859515 - DNA, 25 bp, Homo sapien
ttcctgggctacataggttggttgt

SEQ ID NO: 2859516 - DNA, 25 bp, Homo sapien
caagtaagtgggtttttatgtccag

SEQ ID NO: 2859517 - DNA, 25 bp, Homo sapien
gcagaggtaccagattaaccaattc

SEQ ID NO: 2859518 - DNA, 25 bp, Homo sapien
attcatacctattagtaacatctag

SEQ ID NO: 2859519 - DNA, 25 bp, Homo sapien
tacctattagtaacatctagtgtct

SEQ ID NO: 2859520 - DNA, 25 bp, Homo sapien
ctattagtaacatctagtgtctcag

SEQ ID NO: 2859521 - DNA, 25 bp, Homo sapien
ctttgtcatctggctcctccagctt

SEQ ID NO: 2859522 - DNA, 25 bp, Homo sapien
tcctccagcttcagcagttcagcat

SEQ ID NO: 2859523 - DNA, 25 bp, Homo sapien
tctggaaaacacctctcagataaag

SEQ ID NO: 2859524 - DNA, 25 bp, Homo sapien
gcagttcagcatcaaccttcagctt

SEQ ID NO: 2859525 - DNA, 25 bp, Homo sapien
ctgtgcctgtaactggtcctgaaca

SEQ ID NO: 2859526 - DNA, 25 bp, Homo sapien
ctggcactggtgttcgggctcgttt

SEQ ID NO: 2859527 - DNA, 25 bp, Homo sapien
gtgttcgggctcgttttgcatgtgc

SEQ ID NO: 2859528 - DNA, 25 bp, Homo sapien
gcccaggttacccatctggacttgc

SEQ ID NO: 2859529 - DNA, 25 bp, Homo sapien
tctgggcaaagcgataatagatttt

SEQ ID NO: 2859530 - DNA, 25 bp, Homo sapien
ctgcagaatatctgggcaaagcgat

SEQ ID NO: 2859531 - DNA, 25 bp, Homo sapien
gaatatctgggcaaagcgataatag

SEQ ID NO: 2859532 - DNA, 25 bp, Homo sapien
gcaaagcgataatagattttggaga

SEQ ID NO: 2859533 - DNA, 25 bp, Homo sapien
agctggtgtttgaagcggctgtcaa

SEQ ID NO: 2859534 - DNA, 25 bp, Homo sapien
tcttttgggttgaaaggcatcaggg

SEQ ID NO: 2859535 - DNA, 25 bp, Homo sapien
tgtttgaagcggctgtcaactcttt

SEQ ID NO: 2859536 - DNA, 25 bp, Homo sapien
tttgggttgaaaggcatcagggaaa

SEQ ID NO: 2859537 - DNA, 25 bp, Homo sapien
tggagggggagtccaggtggcaaac

SEQ ID NO: 2859538 - DNA, 25 bp, Homo sapien
cattttgagatacagctttccccat

SEQ ID NO: 2859539 - DNA, 25 bp, Homo sapien
actcagccctttgacattttgagat

SEQ ID NO: 2859540 - DNA, 25 bp, Homo sapien
ggtggcaaactcagccctttgacat

SEQ ID NO: 2859541 - DNA, 25 bp, Homo sapien
gacaccttacatctattggcttcta

SEQ ID NO: 2859542 - DNA, 25 bp, Homo sapien
gagtgcagcgaagctctggttcttt

SEQ ID NO: 2859543 - DNA, 25 bp, Homo sapien
tctctggaacagctgacaacgggcc

SEQ ID NO: 2859544 - DNA, 25 bp, Homo sapien
tctatcttccttgagtgcagcgaag

SEQ ID NO: 2859545 - DNA, 25 bp, Homo sapien
tttgtgcgaaccctctgcctgtttc

SEQ ID NO: 2859546 - DNA, 25 bp, Homo sapien
taatgccgatgaaattgaacgttgt

SEQ ID NO: 2859547 - DNA, 25 bp, Homo sapien
tgaacgttgtttgactgggtaatgg

SEQ ID NO: 2859548 - DNA, 25 bp, Homo sapien
cctgtttccttgaagcggtaatgcc

SEQ ID NO: 2859549 - DNA, 25 bp, Homo sapien
tggacttgagtttttgatcagatgt

SEQ ID NO: 2859550 - DNA, 25 bp, Homo sapien
gatttctggtacagtatcttgtccc

SEQ ID NO: 2859551 - DNA, 25 bp, Homo sapien
tgtgttgttttctttatctgggctc

SEQ ID NO: 2859552 - DNA, 25 bp, Homo sapien
tccatttctccttcacatgtgatgt

SEQ ID NO: 2859553 - DNA, 25 bp, Homo sapien
cctggagaaagtgtatacagagtcc

SEQ ID NO: 2859554 - DNA, 25 bp, Homo sapien
gattttagagtgctgtttccggtcc

SEQ ID NO: 2859555 - DNA, 25 bp, Homo sapien
aagttttggcgttacagtcgctgga

SEQ ID NO: 2859556 - DNA, 25 bp, Homo sapien
tgagaagcaccaccttaaacaaagg

SEQ ID NO: 2859557 - DNA, 25 bp, Homo sapien
ttaggactctttgggagtccctgca

SEQ ID NO: 2859558 - DNA, 25 bp, Homo sapien
tgctggttcttggggtttaggactc

SEQ ID NO: 2859559 - DNA, 25 bp, Homo sapien
aagtgtccccattggttcatagagg

SEQ ID NO: 2859560 - DNA, 25 bp, Homo sapien
agggatttcccaagattctagactt

SEQ ID NO: 2859561 - DNA, 25 bp, Homo sapien
tctttcctgatcactctcttattac

SEQ ID NO: 2859562 - DNA, 25 bp, Homo sapien
aaactttcctctttcctgatcactc

SEQ ID NO: 2859563 - DNA, 25 bp, Homo sapien
cctctttcctgatcactctcttatt

SEQ ID NO: 2859564 - DNA, 25 bp, Homo sapien
ttcctctttcctgatcactctctta

SEQ ID NO: 2859565 - DNA, 25 bp, Homo sapien
cctgctccaatctcttcaaagtgct

SEQ ID NO: 2859566 - DNA, 25 bp, Homo sapien
gacttaagcagcttgtgctttctat

SEQ ID NO: 2859567 - DNA, 25 bp, Homo sapien
gctgaggctttacaaaagttggaaa

SEQ ID NO: 2859568 - DNA, 25 bp, Homo sapien
gaaccattgacttaagcagcttgtg

SEQ ID NO: 2859569 - DNA, 25 bp, Homo sapien
cccttctcctgatgaatgtggactg

SEQ ID NO: 2859570 - DNA, 25 bp, Homo sapien
tttgggcctctgatgcttgccatgg

SEQ ID NO: 2859571 - DNA, 25 bp, Homo sapien
acttggcagtttgtctttgggcctc

SEQ ID NO: 2859572 - DNA, 25 bp, Homo sapien
tgtttttcaacacctgagagcccag

SEQ ID NO: 2859573 - DNA, 25 bp, Homo sapien
gggaggctccagatcccctggatac

SEQ ID NO: 2859574 - DNA, 25 bp, Homo sapien
tatcttctagtctatggtcccagga

SEQ ID NO: 2859575 - DNA, 25 bp, Homo sapien
cccgagaatgggtcaggatagtaag

SEQ ID NO: 2859576 - DNA, 25 bp, Homo sapien
caaacggacaatggatgacgggctt

SEQ ID NO: 2859577 - DNA, 25 bp, Homo sapien
ttctcttaatgaggcggtggaagat

SEQ ID NO: 2859578 - DNA, 25 bp, Homo sapien
tttctcttaatgaggcggtggaaga

SEQ ID NO: 2859579 - DNA, 25 bp, Homo sapien
atttagggtcacagagccatcagag

SEQ ID NO: 2859580 - DNA, 25 bp, Homo sapien
aggcatttagggtcacagagccatc

SEQ ID NO: 2859581 - DNA, 25 bp, Homo sapien
gcatttagggtcacagagccatcag

SEQ ID NO: 2859582 - DNA, 25 bp, Homo sapien
tgccgagcgagaggcatttagggtc

SEQ ID NO: 2859583 - DNA, 25 bp, Homo sapien
tagttgttatcgataagaggagcaa

SEQ ID NO: 2859584 - DNA, 25 bp, Homo sapien
tcgataagaggagcaacatccacaa

SEQ ID NO: 2859585 - DNA, 25 bp, Homo sapien
caacatccacaatggccttattcat

SEQ ID NO: 2859586 - DNA, 25 bp, Homo sapien
tgacaatagttgttatcgataagag

SEQ ID NO: 2859587 - DNA, 25 bp, Homo sapien
atctggaatgagcattataaaattg

SEQ ID NO: 2859588 - DNA, 25 bp, Homo sapien
cacacctggaatctggaatgagcat

SEQ ID NO: 2859589 - DNA, 25 bp, Homo sapien
cctggaatctggaatgagcattata

SEQ ID NO: 2859590 - DNA, 25 bp, Homo sapien
tggaatgagcattataaaattggca

SEQ ID NO: 2859591 - DNA, 25 bp, Homo sapien
taggctgttcagttgtggcacatgg

SEQ ID NO: 2859592 - DNA, 25 bp, Homo sapien
cctgcttcgtttgtggttctcataa

SEQ ID NO: 2859593 - DNA, 25 bp, Homo sapien
taaagacggtaagcaattaggctgt

SEQ ID NO: 2859594 - DNA, 25 bp, Homo sapien
gaatttaggattttaatgagttcag

SEQ ID NO: 2859595 - DNA, 25 bp, Homo sapien
taaagttgaccttgtgcctacttcc

SEQ ID NO: 2859596 - DNA, 25 bp, Homo sapien
ctggcaatcagttatcttccgggtg

SEQ ID NO: 2859597 - DNA, 25 bp, Homo sapien
tagaaagatgtaatccgtggaacca

SEQ ID NO: 2859598 - DNA, 25 bp, Homo sapien
tgctgttaccattcatggtttctgc

SEQ ID NO: 2859599 - DNA, 25 bp, Homo sapien
ggagccagatggtttcatcccagtt

SEQ ID NO: 2859600 - DNA, 25 bp, Homo sapien
ctgtctacacgggttacaaatgaat

SEQ ID NO: 2859601 - DNA, 25 bp, Homo sapien
gaaaaaggccatttcagccattgtg

SEQ ID NO: 2859602 - DNA, 25 bp, Homo sapien
taaccttcgtgtaatgaccatgaat

SEQ ID NO: 2859603 - DNA, 25 bp, Homo sapien
tagaaaccaggtacctctccttggc

SEQ ID NO: 2859604 - DNA, 25 bp, Homo sapien
ctcagtttcttccaagggagacact

SEQ ID NO: 2859605 - DNA, 25 bp, Homo sapien
gggagacacttacagtccttctagg

SEQ ID NO: 2859606 - DNA, 25 bp, Homo sapien
caatgaggtactgctgttagaaacc

SEQ ID NO: 2859607 - DNA, 25 bp, Homo sapien
agcactcagcgtgtcctgtgcttcc

SEQ ID NO: 2859608 - DNA, 25 bp, Homo sapien
gagcactcagcgtgtcctgtgcttc

SEQ ID NO: 2859609 - DNA, 25 bp, Homo sapien
acataaaagtggcaggcatctctgc

SEQ ID NO: 2859610 - DNA, 25 bp, Homo sapien
gcaccagacataaaagtggcaggca

SEQ ID NO: 2859611 - DNA, 25 bp, Homo sapien
cagctttggaaagttggcaccagac

SEQ ID NO: 2859612 - DNA, 25 bp, Homo sapien
ggaaagttggcaccagacataaaag

SEQ ID NO: 2859613 - DNA, 25 bp, Homo sapien
cgtagcccaggggttgcagagcaat

SEQ ID NO: 2859614 - DNA, 25 bp, Homo sapien
gcccaggggttgcagagcaatcgta

SEQ ID NO: 2859615 - DNA, 25 bp, Homo sapien
ggtggatgggctggacgtagcccag

SEQ ID NO: 2859616 - DNA, 25 bp, Homo sapien
ccaggggttgcagagcaatcgtaag

SEQ ID NO: 2859617 - DNA, 25 bp, Homo sapien
tgtgaacatctttcactgggttcat

SEQ ID NO: 2859618 - DNA, 25 bp, Homo sapien
cactgggttcatgaacaatgtagca

SEQ ID NO: 2859619 - DNA, 25 bp, Homo sapien
acatctttcactgggttcatgaaca

SEQ ID NO: 2859620 - DNA, 25 bp, Homo sapien
tgggttcatgaacaatgtagcagaa

SEQ ID NO: 2859621 - DNA, 25 bp, Homo sapien
actggactcctagtgattgcattga

SEQ ID NO: 2859622 - DNA, 25 bp, Homo sapien
cactggactcctagtgattgcattg

SEQ ID NO: 2859623 - DNA, 25 bp, Homo sapien
cctcactggactcctagtgattgca

SEQ ID NO: 2859624 - DNA, 25 bp, Homo sapien
tcactggactcctagtgattgcatt

SEQ ID NO: 2859625 - DNA, 25 bp, Homo sapien
aaccaggcattgagagcacagagca

SEQ ID NO: 2859626 - DNA, 25 bp, Homo sapien
caaaccaggcattgagagcacagag

SEQ ID NO: 2859627 - DNA, 25 bp, Homo sapien
gcaaaccaggcattgagagcacaga

SEQ ID NO: 2859628 - DNA, 25 bp, Homo sapien
ctgcaaaccaggcattgagagcaca

SEQ ID NO: 2859629 - DNA, 25 bp, Homo sapien
gtttcttcattgtctcgtctccctg

SEQ ID NO: 2859630 - DNA, 25 bp, Homo sapien
tggacttctattgccatggaccaca

SEQ ID NO: 2859631 - DNA, 25 bp, Homo sapien
tctctcctcttttattacatggact

SEQ ID NO: 2859632 - DNA, 25 bp, Homo sapien
ctggtgacatgaagtggcaagccac

SEQ ID NO: 2859633 - DNA, 25 bp, Homo sapien
gttgcctgtactgcagggacggcag

SEQ ID NO: 2859634 - DNA, 25 bp, Homo sapien
gcctgtactgcagggacggcagaag

SEQ ID NO: 2859635 - DNA, 25 bp, Homo sapien
ctttctgttgcctgtactgcaggga

SEQ ID NO: 2859636 - DNA, 25 bp, Homo sapien
actttctgttgcctgtactgcaggg

SEQ ID NO: 2859637 - DNA, 25 bp, Homo sapien
atctcaggcaacttcatgctctcaa

SEQ ID NO: 2859638 - DNA, 25 bp, Homo sapien
cgtatctcaggcaacttcatgctct

SEQ ID NO: 2859639 - DNA, 25 bp, Homo sapien
tatctcaggcaacttcatgctctca

SEQ ID NO: 2859640 - DNA, 25 bp, Homo sapien
gtatctcaggcaacttcatgctctc

SEQ ID NO: 2859641 - DNA, 25 bp, Homo sapien
gtgtcaccccctcaacaagagagac

SEQ ID NO: 2859642 - DNA, 25 bp, Homo sapien
aagtgtcaccccctcaacaagagag

SEQ ID NO: 2859643 - DNA, 25 bp, Homo sapien
gcctctctcaagtgtcaccccctca

SEQ ID NO: 2859644 - DNA, 25 bp, Homo sapien
tctcaagtgtcaccccctcaacaag

SEQ ID NO: 2859645 - DNA, 25 bp, Homo sapien
ttcgtttgggcttcctgtttggcag

SEQ ID NO: 2859646 - DNA, 25 bp, Homo sapien
cagcgtcccctgacgtggttggagc

SEQ ID NO: 2859647 - DNA, 25 bp, Homo sapien
cgtcccctgacgtggttggagcgtt

SEQ ID NO: 2859648 - DNA, 25 bp, Homo sapien
aatcagcgtcccctgacgtggttgg

SEQ ID NO: 2859649 - DNA, 25 bp, Homo sapien
cccctgacgtggttggagcgttcat

SEQ ID NO: 2859650 - DNA, 25 bp, Homo sapien
ttcgggtgttttagccactgggaga

SEQ ID NO: 2859651 - DNA, 25 bp, Homo sapien
tgagactgcccttcatttcgggtgt

SEQ ID NO: 2859652 - DNA, 25 bp, Homo sapien
tcatttcgggtgttttagccactgg

SEQ ID NO: 2859653 - DNA, 25 bp, Homo sapien
agtcaacatagagtgtgagactgcc

SEQ ID NO: 2859654 - DNA, 25 bp, Homo sapien
tgtggatattcatggtccaagccct

SEQ ID NO: 2859655 - DNA, 25 bp, Homo sapien
tggatattcatggtccaagccctca

SEQ ID NO: 2859656 - DNA, 25 bp, Homo sapien
ggatattcatggtccaagccctcat

SEQ ID NO: 2859657 - DNA, 25 bp, Homo sapien
gatattcatggtccaagccctcatc

SEQ ID NO: 2859658 - DNA, 25 bp, Homo sapien
tgcctagtgatccaagcaacagtgg

SEQ ID NO: 2859659 - DNA, 25 bp, Homo sapien
agttgaccaccaactccaaccagga

SEQ ID NO: 2859660 - DNA, 25 bp, Homo sapien
ggaccttcaacgtttagcttcgctc

SEQ ID NO: 2859661 - DNA, 25 bp, Homo sapien
gggaatctcgcatgggcaatacaag

SEQ ID NO: 2859662 - DNA, 25 bp, Homo sapien
gagtggcggcatccacatgttagta

SEQ ID NO: 2859663 - DNA, 25 bp, Homo sapien
catgttagtagctcgccctggtctg

SEQ ID NO: 2859664 - DNA, 25 bp, Homo sapien
ggagctgccctcttgttggctggca

SEQ ID NO: 2859665 - DNA, 25 bp, Homo sapien
tttgcaatgcagctgtgcggagctg

SEQ ID NO: 2859666 - DNA, 25 bp, Homo sapien
tttggacagaggggcatgcctgctc

SEQ ID NO: 2859667 - DNA, 25 bp, Homo sapien
ctgtttggacagaggggcatgcctg

SEQ ID NO: 2859668 - DNA, 25 bp, Homo sapien
ggacagaggggcatgcctgctccat

SEQ ID NO: 2859669 - DNA, 25 bp, Homo sapien
tggacagaggggcatgcctgctcca

SEQ ID NO: 2859670 - DNA, 25 bp, Homo sapien
agctccttccggtcagtaggcttct

SEQ ID NO: 2859671 - DNA, 25 bp, Homo sapien
ctacatccaaagaaaccactatacg

SEQ ID NO: 2859672 - DNA, 25 bp, Homo sapien
ggaatgagacgtttgcagtacatgg

SEQ ID NO: 2859673 - DNA, 25 bp, Homo sapien
tgagacgtttgcagtacatggtgcc

SEQ ID NO: 2859674 - DNA, 25 bp, Homo sapien
ggaggaatgagacgtttgcagtaca

SEQ ID NO: 2859675 - DNA, 25 bp, Homo sapien
agacgtttgcagtacatggtgccgc

SEQ ID NO: 2859676 - DNA, 25 bp, Homo sapien
atgtttctctggacacagattaact

SEQ ID NO: 2859677 - DNA, 25 bp, Homo sapien
ttctctggacacagattaactgctc

SEQ ID NO: 2859678 - DNA, 25 bp, Homo sapien
ctctggacacagattaactgctctg

SEQ ID NO: 2859679 - DNA, 25 bp, Homo sapien
gggctggctaccacatgcccactat

SEQ ID NO: 2859680 - DNA, 25 bp, Homo sapien
ggacttggcccatacaacacaggtg

SEQ ID NO: 2859681 - DNA, 25 bp, Homo sapien
gccacagtgctatatttaacttctg

SEQ ID NO: 2859682 - DNA, 25 bp, Homo sapien
acaggtgcacccacagccgttgttt

SEQ ID NO: 2859683 - DNA, 25 bp, Homo sapien
acagctgaggacttggcccatacaa

SEQ ID NO: 2859684 - DNA, 25 bp, Homo sapien
aaactgcagcatctcgtgttcttgg

SEQ ID NO: 2859685 - DNA, 25 bp, Homo sapien
gcagcatctcgtgttcttggttcat

SEQ ID NO: 2859686 - DNA, 25 bp, Homo sapien
gcaaactgcagcatctcgtgttctt

SEQ ID NO: 2859687 - DNA, 25 bp, Homo sapien
ctgcagcatctcgtgttcttggttc

SEQ ID NO: 2859688 - DNA, 25 bp, Homo sapien
ccaaagttgtgaggtgctggtgccc

SEQ ID NO: 2859689 - DNA, 25 bp, Homo sapien
tatgtggcgtgagatgcaattgccc

SEQ ID NO: 2859690 - DNA, 25 bp, Homo sapien
ttggagagcccacgctttgagagcc

SEQ ID NO: 2859691 - DNA, 25 bp, Homo sapien
tgtagcagcagagcaaaaaggccag

SEQ ID NO: 2859692 - DNA, 25 bp, Homo sapien
gtgctggtttagagcgataggcccc

SEQ ID NO: 2859693 - DNA, 25 bp, Homo sapien
ctccagcctgatttggcgtggtact

SEQ ID NO: 2859694 - DNA, 25 bp, Homo sapien
tacttctcggcatgccctgtctgtc

SEQ ID NO: 2859695 - DNA, 25 bp, Homo sapien
ttctggcaatgggatgaagagcccg

SEQ ID NO: 2859696 - DNA, 25 bp, Homo sapien
actgcgtgcgacgacgacaatgaca

SEQ ID NO: 2859697 - DNA, 25 bp, Homo sapien
cgacgacaatgacaggttggtttaa

SEQ ID NO: 2859698 - DNA, 25 bp, Homo sapien
caatgacaggttggtttaatgcagc

SEQ ID NO: 2859699 - DNA, 25 bp, Homo sapien
gtgagctgccactgcgtgcgacgac

SEQ ID NO: 2859700 - DNA, 25 bp, Homo sapien
tctgggacccaaatagtccaactgg

SEQ ID NO: 2859701 - DNA, 25 bp, Homo sapien
ttagttttacgtgccgttgttgaca

SEQ ID NO: 2859702 - DNA, 25 bp, Homo sapien
acacctgaccccatagcctaagtag

SEQ ID NO: 2859703 - DNA, 25 bp, Homo sapien
atagcctaagtaggcttctgggacc

SEQ ID NO: 2859704 - DNA, 25 bp, Homo sapien
tataacactgttccagtgtcatcta

SEQ ID NO: 2859705 - DNA, 25 bp, Homo sapien
ccagtgtcatctatatgatagtaat

SEQ ID NO: 2859706 - DNA, 25 bp, Homo sapien
ttcatataacactgttccagtgtca

SEQ ID NO: 2859707 - DNA, 25 bp, Homo sapien
gtgtcatctatatgatagtaattca

SEQ ID NO: 2859708 - DNA, 25 bp, Homo sapien
aaaggacaatttggcggagatgatg

SEQ ID NO: 2859709 - DNA, 25 bp, Homo sapien
gaccttcctgtccatgcatcatgag

SEQ ID NO: 2859710 - DNA, 25 bp, Homo sapien
tgtccatgcatcatgaggactcatc

SEQ ID NO: 2859711 - DNA, 25 bp, Homo sapien
tgaagaccttcctgtccatgcatca

SEQ ID NO: 2859712 - DNA, 25 bp, Homo sapien
taaatggtcctgaggcaagactttg

SEQ ID NO: 2859713 - DNA, 25 bp, Homo sapien
tcattgacttgtgtgtccgatggct

SEQ ID NO: 2859714 - DNA, 25 bp, Homo sapien
tgtgtccgatggctccatagccagc

SEQ ID NO: 2859715 - DNA, 25 bp, Homo sapien
ctttgggcttcaaaatcagcccttc

SEQ ID NO: 2859716 - DNA, 25 bp, Homo sapien
ccactctggtacctgtctgggtttt

SEQ ID NO: 2859717 - DNA, 25 bp, Homo sapien
tgtcttcttgcgttagctattaaag

SEQ ID NO: 2859718 - DNA, 25 bp, Homo sapien
taaagatgtaagccaaagcaggtaa

SEQ ID NO: 2859719 - DNA, 25 bp, Homo sapien
taaagactgagaggagttaaagatg

SEQ ID NO: 2859720 - DNA, 25 bp, Homo sapien
tcttgcgttagctattaaagactga

SEQ ID NO: 2859721 - DNA, 25 bp, Homo sapien
gaactagccctgtcaatactttgat

SEQ ID NO: 2859722 - DNA, 25 bp, Homo sapien
aactagccctgtcaatactttgatt

SEQ ID NO: 2859723 - DNA, 25 bp, Homo sapien
agccctgtcaatactttgattttat

SEQ ID NO: 2859724 - DNA, 25 bp, Homo sapien
ctagccctgtcaatactttgatttt

SEQ ID NO: 2859725 - DNA, 25 bp, Homo sapien
gtgttgtgaggaatacaccggggtc

SEQ ID NO: 2859726 - DNA, 25 bp, Homo sapien
ggctcagggtatcagatagctgata

SEQ ID NO: 2859727 - DNA, 25 bp, Homo sapien
tcagggtatcagatagctgataagt

SEQ ID NO: 2859728 - DNA, 25 bp, Homo sapien
tgttgtgaggaatacaccggggtct

SEQ ID NO: 2859729 - DNA, 25 bp, Homo sapien
cacttgccttgtgtagccctcagct

SEQ ID NO: 2859730 - DNA, 25 bp, Homo sapien
ttgagtacaatttggaaacacttgc

SEQ ID NO: 2859731 - DNA, 25 bp, Homo sapien
gaatcttgttccgttggcctatggg

SEQ ID NO: 2859732 - DNA, 25 bp, Homo sapien
tctcctgggtgcaacttagaggtta

SEQ ID NO: 2859733 - DNA, 25 bp, Homo sapien
atcatggcggaaggcaagaaggagc

SEQ ID NO: 2859734 - DNA, 25 bp, Homo sapien
tggcggaaggcaagaaggagcaagt

SEQ ID NO: 2859735 - DNA, 25 bp, Homo sapien
cggaaggcaagaaggagcaagtcac

SEQ ID NO: 2859736 - DNA, 25 bp, Homo sapien
gaaggcaagaaggagcaagtcacat

SEQ ID NO: 2859737 - DNA, 25 bp, Homo sapien
gacagaggttacatgccttggctaa

SEQ ID NO: 2859738 - DNA, 25 bp, Homo sapien
tgcagaggacacatatagattggcc

SEQ ID NO: 2859739 - DNA, 25 bp, Homo sapien
gcttgtgtgaagactgattgagacc

SEQ ID NO: 2859740 - DNA, 25 bp, Homo sapien
gtcacatagcttggtgtctggttca

SEQ ID NO: 2859741 - DNA, 25 bp, Homo sapien
cccagaggctttgacacctgcttct

SEQ ID NO: 2859742 - DNA, 25 bp, Homo sapien
taaaataaatgcgatggtcagttcc

SEQ ID NO: 2859743 - DNA, 25 bp, Homo sapien
taaatgcgatggtcagttccccaga

SEQ ID NO: 2859744 - DNA, 25 bp, Homo sapien
cagttccccagaggctttgacacct

SEQ ID NO: 2859745 - DNA, 25 bp, Homo sapien
aacataacgaagtgccccagaaggc

SEQ ID NO: 2859746 - DNA, 25 bp, Homo sapien
tccctgtggtcctcaacataacgaa

SEQ ID NO: 2859747 - DNA, 25 bp, Homo sapien
tgtggtcctcaacataacgaagtgc

SEQ ID NO: 2859748 - DNA, 25 bp, Homo sapien
tcctcaacataacgaagtgccccag

SEQ ID NO: 2859749 - DNA, 25 bp, Homo sapien
ttgactattatcttgcccacatctt

SEQ ID NO: 2859750 - DNA, 25 bp, Homo sapien
ctgttgactattatcttgcccacat

SEQ ID NO: 2859751 - DNA, 25 bp, Homo sapien
catcttttgttctctttaggaagtt

SEQ ID NO: 2859752 - DNA, 25 bp, Homo sapien
cccacatcttttgttctctttagga

SEQ ID NO: 2859753 - DNA, 25 bp, Homo sapien
atgggtggatggctttacaactgcc

SEQ ID NO: 2859754 - DNA, 25 bp, Homo sapien
tacaactgccaaggcttcattttgc

SEQ ID NO: 2859755 - DNA, 25 bp, Homo sapien
gcacaggcactagaggaaccctaag

SEQ ID NO: 2859756 - DNA, 25 bp, Homo sapien
ggtcttcttgacatgctggcacagg

SEQ ID NO: 2859757 - DNA, 25 bp, Homo sapien
ctgcatacaacgaaccactgccaca

SEQ ID NO: 2859758 - DNA, 25 bp, Homo sapien
gcatacaacgaaccactgccacaat

SEQ ID NO: 2859759 - DNA, 25 bp, Homo sapien
tgcatacaacgaaccactgccacaa

SEQ ID NO: 2859760 - DNA, 25 bp, Homo sapien
cagagtttctaatgctgagtgggga

SEQ ID NO: 2859761 - DNA, 25 bp, Homo sapien
gaaagagaaacttcttgtaggctaa

SEQ ID NO: 2859762 - DNA, 25 bp, Homo sapien
gaaggagatttactgtccacagctc

SEQ ID NO: 2859763 - DNA, 25 bp, Homo sapien
aaacttcttgtaggctaagagcttc

SEQ ID NO: 2859764 - DNA, 25 bp, Homo sapien
aactttagagatgggaattatacac

SEQ ID NO: 2859765 - DNA, 25 bp, Homo sapien
taactttagagatgggaattataca

SEQ ID NO: 2859766 - DNA, 25 bp, Homo sapien
cgagtcacctcaaacagacaagcac

SEQ ID NO: 2859767 - DNA, 25 bp, Homo sapien
tcctcgagtcacctcaaacagacaa

SEQ ID NO: 2859768 - DNA, 25 bp, Homo sapien
tccaagatccctcttcaccagacct

SEQ ID NO: 2859769 - DNA, 25 bp, Homo sapien
attctccaagatccctcttcaccag

SEQ ID NO: 2859770 - DNA, 25 bp, Homo sapien
tacataaactttctcgagaggaggg

SEQ ID NO: 2859771 - DNA, 25 bp, Homo sapien
caatggctacataaactttctcgag

SEQ ID NO: 2859772 - DNA, 25 bp, Homo sapien
tggctacataaactttctcgagagg

SEQ ID NO: 2859773 - DNA, 25 bp, Homo sapien
aagcaatggctacataaactttctc

SEQ ID NO: 2859774 - DNA, 25 bp, Homo sapien
gcccagcactgctctcgattttaga

SEQ ID NO: 2859775 - DNA, 25 bp, Homo sapien
ccagcactgctctcgattttagata

SEQ ID NO: 2859776 - DNA, 25 bp, Homo sapien
cagcactgctctcgattttagatac

SEQ ID NO: 2859777 - DNA, 25 bp, Homo sapien
cccagcactgctctcgattttagat

SEQ ID NO: 2859778 - DNA, 25 bp, Homo sapien
tttccttggctgatgtagatgcatt

SEQ ID NO: 2859779 - DNA, 25 bp, Homo sapien
caggcatatgcttttgccttgtcta

SEQ ID NO: 2859780 - DNA, 25 bp, Homo sapien
atatgcttttgccttgtctagccat

SEQ ID NO: 2859781 - DNA, 25 bp, Homo sapien
gcttctctccgcccagggccactgt

SEQ ID NO: 2859782 - DNA, 25 bp, Homo sapien
cctgtgggtcctttaaatgaagcca

SEQ ID NO: 2859783 - DNA, 25 bp, Homo sapien
gctgctaatgtctggacgcttttaa

SEQ ID NO: 2859784 - DNA, 25 bp, Homo sapien
tgtgttttggtctgacctgtgggtc

SEQ ID NO: 2859785 - DNA, 25 bp, Homo sapien
ggcatataaagctccgttgtgtttt

SEQ ID NO: 2859786 - DNA, 25 bp, Homo sapien
agagaacacatcagccacagcaagg

SEQ ID NO: 2859787 - DNA, 25 bp, Homo sapien
ccccagtgtgaaccaaggcctgaag

SEQ ID NO: 2859788 - DNA, 25 bp, Homo sapien
cagtgtgaaccaaggcctgaaggta

SEQ ID NO: 2859789 - DNA, 25 bp, Homo sapien
gaaccaaggcctgaaggtagagaac

SEQ ID NO: 2859790 - DNA, 25 bp, Homo sapien
gttcatgtcattgtcaaatggaaac

SEQ ID NO: 2859791 - DNA, 25 bp, Homo sapien
tcaacgtcaggttaaataatgaacc

SEQ ID NO: 2859792 - DNA, 25 bp, Homo sapien
taatgaacctcttgcaatggagtaa

SEQ ID NO: 2859793 - DNA, 25 bp, Homo sapien
taacttccactttatgttcatgtca

SEQ ID NO: 2859794 - DNA, 25 bp, Homo sapien
cagacatcttcatgaatgtgaactg

SEQ ID NO: 2859795 - DNA, 25 bp, Homo sapien
ggtcactgaatgtggtaacaaggga

SEQ ID NO: 2859796 - DNA, 25 bp, Homo sapien
gagtcacctccaacttgtgccgtct

SEQ ID NO: 2859797 - DNA, 25 bp, Homo sapien
caacttgtgccgtctgggtcactga

SEQ ID NO: 2859798 - DNA, 25 bp, Homo sapien
ttcaacctcagctgtctgactcagg

SEQ ID NO: 2859799 - DNA, 25 bp, Homo sapien
acctcagctgtctgactcaggcaga

SEQ ID NO: 2859800 - DNA, 25 bp, Homo sapien
tcagctgtctgactcaggcagagat

SEQ ID NO: 2859801 - DNA, 25 bp, Homo sapien
gctgtctgactcaggcagagattga

SEQ ID NO: 2859802 - DNA, 25 bp, Homo sapien
ctgcaaacaccagaaacataaacat

SEQ ID NO: 2859803 - DNA, 25 bp, Homo sapien
ctctgctcaaacctgtattctttgg

SEQ ID NO: 2859804 - DNA, 25 bp, Homo sapien
ttgctagcaagatggtaagtgattc

SEQ ID NO: 2859805 - DNA, 25 bp, Homo sapien
caagatggtaagtgattctgtcttc

SEQ ID NO: 2859806 - DNA, 25 bp, Homo sapien
tctttttggtatccagatcctctgc

SEQ ID NO: 2859807 - DNA, 25 bp, Homo sapien
ctgacggcggtgcaattctcctggg

SEQ ID NO: 2859808 - DNA, 25 bp, Homo sapien
gattttcagctgacggcggtgcaat

SEQ ID NO: 2859809 - DNA, 25 bp, Homo sapien
ggattttcagctgacggcggtgcaa

SEQ ID NO: 2859810 - DNA, 25 bp, Homo sapien
cagctgacggcggtgcaattctcct

SEQ ID NO: 2859811 - DNA, 25 bp, Homo sapien
atcatcctggtaagggatggatccc

SEQ ID NO: 2859812 - DNA, 25 bp, Homo sapien
tgtctgatttgagatctggtgatcc

SEQ ID NO: 2859813 - DNA, 25 bp, Homo sapien
gaaagggtatcagtgctgttgatca

SEQ ID NO: 2859814 - DNA, 25 bp, Homo sapien
gatccagacttggagaagtgcacag

SEQ ID NO: 2859815 - DNA, 25 bp, Homo sapien
tgacatggactgcaattaaccccat

SEQ ID NO: 2859816 - DNA, 25 bp, Homo sapien
tcctcctgctcttaaatatcacact

SEQ ID NO: 2859817 - DNA, 25 bp, Homo sapien
aatatcacacttctgaagtcatctc

SEQ ID NO: 2859818 - DNA, 25 bp, Homo sapien
atatagtcatatgctgatcggtggt

SEQ ID NO: 2859819 - DNA, 25 bp, Homo sapien
aaatatagtcatatgctgatcggtg

SEQ ID NO: 2859820 - DNA, 25 bp, Homo sapien
caaaatatagtcatatgctgatcgg

SEQ ID NO: 2859821 - DNA, 25 bp, Homo sapien
aatatagtcatatgctgatcggtgg

SEQ ID NO: 2859822 - DNA, 25 bp, Homo sapien
tcagggccgacctttgaggaaccag

SEQ ID NO: 2859823 - DNA, 25 bp, Homo sapien
tcgactccatattcagcctgcaggg

SEQ ID NO: 2859824 - DNA, 25 bp, Homo sapien
gaaagacacagctatccgtggcgtg

SEQ ID NO: 2859825 - DNA, 25 bp, Homo sapien
ttttctaggaaatgcccgtgggctc

SEQ ID NO: 2859826 - DNA, 25 bp, Homo sapien
ttggtattgcatgaggtgggcttta

SEQ ID NO: 2859827 - DNA, 25 bp, Homo sapien
tgggctttaggggataattatcgac

SEQ ID NO: 2859828 - DNA, 25 bp, Homo sapien
tcatttttggtattgcatgaggtgg

SEQ ID NO: 2859829 - DNA, 25 bp, Homo sapien
ttatcgacaatcacttctttcttga

SEQ ID NO: 2859830 - DNA, 25 bp, Homo sapien
ttggctctttgctatcagctggtgg

SEQ ID NO: 2859831 - DNA, 25 bp, Homo sapien
tcagctggtggccacttttgaggct

SEQ ID NO: 2859832 - DNA, 25 bp, Homo sapien
aatgtaaaaagtatctgcagaaacc

SEQ ID NO: 2859833 - DNA, 25 bp, Homo sapien
tccataccatatgggtgttccaaca

SEQ ID NO: 2859834 - DNA, 25 bp, Homo sapien
tatagtatagcgcaagtcctttagg

SEQ ID NO: 2859835 - DNA, 25 bp, Homo sapien
tccaaattgcctgattccgtgaagc

SEQ ID NO: 2859836 - DNA, 25 bp, Homo sapien
gaaaggtgataggatatggacccct

SEQ ID NO: 2859837 - DNA, 25 bp, Homo sapien
gcctggtgacaaaaagcatctcttc

SEQ ID NO: 2859838 - DNA, 25 bp, Homo sapien
ccttgaaacccattgaggaagccat

SEQ ID NO: 2859839 - DNA, 25 bp, Homo sapien
catgagaggttatctcgacgattcc

SEQ ID NO: 2859840 - DNA, 25 bp, Homo sapien
ctgcagttgcggctgttctccttga

SEQ ID NO: 2859841 - DNA, 25 bp, Homo sapien
cctcaaatcttcgtctgtgccgcaa

SEQ ID NO: 2859842 - DNA, 25 bp, Homo sapien
gatatcaaaacgtcccaaaatgcct

SEQ ID NO: 2859843 - DNA, 25 bp, Homo sapien
ggaaatagtatttaatcggagaaca

SEQ ID NO: 2859844 - DNA, 25 bp, Homo sapien
tgtagcagtacattgaacacagata

SEQ ID NO: 2859845 - DNA, 25 bp, Homo sapien
agtatttaatcggagaacaattcat

SEQ ID NO: 2859846 - DNA, 25 bp, Homo sapien
gcataccagcttagtgacgattgaa

SEQ ID NO: 2859847 - DNA, 25 bp, Homo sapien
tacctgtggttgcagtacaaaaaca

SEQ ID NO: 2859848 - DNA, 25 bp, Homo sapien
tggttaccctcagagtgtcatgggc

SEQ ID NO: 2859849 - DNA, 25 bp, Homo sapien
tctgtcagctattgccaacacttgt

SEQ ID NO: 2859850 - DNA, 25 bp, Homo sapien
aaggatccaaactgggctattgaga

SEQ ID NO: 2859851 - DNA, 25 bp, Homo sapien
ccaaactgggctattgagatgattg

SEQ ID NO: 2859852 - DNA, 25 bp, Homo sapien
ctgggctattgagatgattgatatg

SEQ ID NO: 2859853 - DNA, 25 bp, Homo sapien
ctattgagatgattgatatgaggac

SEQ ID NO: 2859854 - DNA, 25 bp, Homo sapien
tatccaagacaaaggtgccagaaga

SEQ ID NO: 2859855 - DNA, 25 bp, Homo sapien
gctgtccatccatggggtctcctca

SEQ ID NO: 2859856 - DNA, 25 bp, Homo sapien
atggggtctcctcatggtggcatcc

SEQ ID NO: 2859857 - DNA, 25 bp, Homo sapien
ccaggatatccaagacaaaggtgcc

SEQ ID NO: 2859858 - DNA, 25 bp, Homo sapien
ctggcttcctttggttgcatgagga

SEQ ID NO: 2859859 - DNA, 25 bp, Homo sapien
catgaggatattgatataccccggg

SEQ ID NO: 2859860 - DNA, 25 bp, Homo sapien
ctcggaagctcctgtatgaggtaac

SEQ ID NO: 2859861 - DNA, 25 bp, Homo sapien
gctggccgatgaatgcaacacacat

SEQ ID NO: 2859862 - DNA, 25 bp, Homo sapien
cacttttgctattggattatccttc

SEQ ID NO: 2859863 - DNA, 25 bp, Homo sapien
tacgtgccaagtaaatccatccatt

SEQ ID NO: 2859864 - DNA, 25 bp, Homo sapien
atcacccctcacttttgctattgga

SEQ ID NO: 2859865 - DNA, 25 bp, Homo sapien
agactgtcccctgctacgtgccaag

SEQ ID NO: 2859866 - DNA, 25 bp, Homo sapien
atttgcattttggatccttgcttct

SEQ ID NO: 2859867 - DNA, 25 bp, Homo sapien
cttcctccatcactttttcttactc

SEQ ID NO: 2859868 - DNA, 25 bp, Homo sapien
tgcattttggatccttgcttctttt

SEQ ID NO: 2859869 - DNA, 25 bp, Homo sapien
ttcctccatcactttttcttactct

SEQ ID NO: 2859870 - DNA, 25 bp, Homo sapien
ccattttggtcctgagtttggctca

SEQ ID NO: 2859871 - DNA, 25 bp, Homo sapien
tagccacttccccattttggtcctg

SEQ ID NO: 2859872 - DNA, 25 bp, Homo sapien
ctgttgtttagccacttccccattt

SEQ ID NO: 2859873 - DNA, 25 bp, Homo sapien
cttccccattttggtcctgagtttg

SEQ ID NO: 2859874 - DNA, 25 bp, Homo sapien
tgccaggccaataagagctggattt

SEQ ID NO: 2859875 - DNA, 25 bp, Homo sapien
tcagcactgccaggccaataagagc

SEQ ID NO: 2859876 - DNA, 25 bp, Homo sapien
tatggacaaaccaggtcagcactgc

SEQ ID NO: 2859877 - DNA, 25 bp, Homo sapien
ttatggacaaaccaggtcagcactg

SEQ ID NO: 2859878 - DNA, 25 bp, Homo sapien
tatttgccaatcttggcccagttcc

SEQ ID NO: 2859879 - DNA, 25 bp, Homo sapien
gacatatttgccaatcttggcccag

SEQ ID NO: 2859880 - DNA, 25 bp, Homo sapien
tttgccaatcttggcccagttccga

SEQ ID NO: 2859881 - DNA, 25 bp, Homo sapien
tcagtgacatatttgccaatcttgg

SEQ ID NO: 2859882 - DNA, 25 bp, Homo sapien
gatgaggatgcaggatacacatgac

SEQ ID NO: 2859883 - DNA, 25 bp, Homo sapien
agccggctaagctttcagggaagtc

SEQ ID NO: 2859884 - DNA, 25 bp, Homo sapien
tcgatttgcagagagccggctaagc

SEQ ID NO: 2859885 - DNA, 25 bp, Homo sapien
tgcaatcggcaatggttgatgagga

SEQ ID NO: 2859886 - DNA, 25 bp, Homo sapien
cttcatctccctgaatccaaccagt

SEQ ID NO: 2859887 - DNA, 25 bp, Homo sapien
aagtccgttcagttcagccttagca

SEQ ID NO: 2859888 - DNA, 25 bp, Homo sapien
caaagtccgttcagttcagccttag

SEQ ID NO: 2859889 - DNA, 25 bp, Homo sapien
aaagtccgttcagttcagccttagc

SEQ ID NO: 2859890 - DNA, 25 bp, Homo sapien
ccctttctgttatcttcagggtcct

SEQ ID NO: 2859891 - DNA, 25 bp, Homo sapien
cctttctgttatcttcagggtcctg

SEQ ID NO: 2859892 - DNA, 25 bp, Homo sapien
aacagcaggtcatagatttctgcca

SEQ ID NO: 2859893 - DNA, 25 bp, Homo sapien
tttgctgcttgtgagtccgtgaacg

SEQ ID NO: 2859894 - DNA, 25 bp, Homo sapien
gctggagtgggtccaaccccacttc

SEQ ID NO: 2859895 - DNA, 25 bp, Homo sapien
cttgtgagtccgtgaacgctcaggg

SEQ ID NO: 2859896 - DNA, 25 bp, Homo sapien
cgtgaacgctcaggggattccattt

SEQ ID NO: 2859897 - DNA, 25 bp, Homo sapien
catgaattgagttatgtgtttcttg

SEQ ID NO: 2859898 - DNA, 25 bp, Homo sapien
tcttgaggaagtctggactgttttt

SEQ ID NO: 2859899 - DNA, 25 bp, Homo sapien
taattattcttaagtaaccctgaga

SEQ ID NO: 2859900 - DNA, 25 bp, Homo sapien
gtttttctagcacacatggacaact

SEQ ID NO: 2859901 - DNA, 25 bp, Homo sapien
gagctagacccagcatgcctacatc

SEQ ID NO: 2859902 - DNA, 25 bp, Homo sapien
tagaaagcttgcagagagctagacc

SEQ ID NO: 2859903 - DNA, 25 bp, Homo sapien
tgctgcctccttgccttagaaagct

SEQ ID NO: 2859904 - DNA, 25 bp, Homo sapien
tgtcctttcatgtgctctcgttcca

SEQ ID NO: 2859905 - DNA, 25 bp, Homo sapien
cctttccaactctgatgcaattgga

SEQ ID NO: 2859906 - DNA, 25 bp, Homo sapien
gatgcaattggatactccctggttg

SEQ ID NO: 2859907 - DNA, 25 bp, Homo sapien
ctttccaactctgatgcaattggat

SEQ ID NO: 2859908 - DNA, 25 bp, Homo sapien
tgatgcaattggatactccctggtt

SEQ ID NO: 2859909 - DNA, 25 bp, Homo sapien
ctgagcttggtttcagtcccacttc

SEQ ID NO: 2859910 - DNA, 25 bp, Homo sapien
ctgagtcctgtcatggaaaatgtaa

SEQ ID NO: 2859911 - DNA, 25 bp, Homo sapien
ggaacttctgcctgtagtaataaag

SEQ ID NO: 2859912 - DNA, 25 bp, Homo sapien
cctgacagtgatggttgaaggcagc

SEQ ID NO: 2859913 - DNA, 25 bp, Homo sapien
caaggctatgatgttgcctgacagt

SEQ ID NO: 2859914 - DNA, 25 bp, Homo sapien
gggagccaacatagatccatataga

SEQ ID NO: 2859915 - DNA, 25 bp, Homo sapien
taagcacttgctggttgacacagcc

SEQ ID NO: 2859916 - DNA, 25 bp, Homo sapien
caagctcgtctgtgagaggccttcg

SEQ ID NO: 2859917 - DNA, 25 bp, Homo sapien
tgacacagcctttcagtaggtggaa

SEQ ID NO: 2859918 - DNA, 25 bp, Homo sapien
tatccttttctactaatatcagctc

SEQ ID NO: 2859919 - DNA, 25 bp, Homo sapien
ctatccttttctactaatatcagct

SEQ ID NO: 2859920 - DNA, 25 bp, Homo sapien
gcatagatccctgttttgcatgttt

SEQ ID NO: 2859921 - DNA, 25 bp, Homo sapien
ttttagctgctgaggaggacttcat

SEQ ID NO: 2859922 - DNA, 25 bp, Homo sapien
tcatcgtctgcatagatccctgttt

SEQ ID NO: 2859923 - DNA, 25 bp, Homo sapien
ggaggacttcataatcttgtcatcg

SEQ ID NO: 2859924 - DNA, 25 bp, Homo sapien
ggagcactgcagaaatgagattctc

SEQ ID NO: 2859925 - DNA, 25 bp, Homo sapien
gaacagactctttcccggcattgcc

SEQ ID NO: 2859926 - DNA, 25 bp, Homo sapien
tgattgagcgagagtcaccaggcag

SEQ ID NO: 2859927 - DNA, 25 bp, Homo sapien
tgaaagggccgcttagcgggagcac

SEQ ID NO: 2859928 - DNA, 25 bp, Homo sapien
gcttcaaaggtgtgtcgggctacac

SEQ ID NO: 2859929 - DNA, 25 bp, Homo sapien
tgatgacagcttcaaaggtgtgtcg

SEQ ID NO: 2859930 - DNA, 25 bp, Homo sapien
tgtgtcgggctacacttgtgcgtgc

SEQ ID NO: 2859931 - DNA, 25 bp, Homo sapien
tcagaatgcggacatgatgacagct

SEQ ID NO: 2859932 - DNA, 25 bp, Homo sapien
taagcaagtgctgccagttacagag

SEQ ID NO: 2859933 - DNA, 25 bp, Homo sapien
caccgaagttcatgaaaaagccaac

SEQ ID NO: 2859934 - DNA, 25 bp, Homo sapien
ctgtttctcacaccgaagttcatga

SEQ ID NO: 2859935 - DNA, 25 bp, Homo sapien
caaccccataaggagccaatcttag

SEQ ID NO: 2859936 - DNA, 25 bp, Homo sapien
acacacaggacttggctcggttgca

SEQ ID NO: 2859937 - DNA, 25 bp, Homo sapien
gacttggctcggttgcactttcatg

SEQ ID NO: 2859938 - DNA, 25 bp, Homo sapien
cacaggacttggctcggttgcactt

SEQ ID NO: 2859939 - DNA, 25 bp, Homo sapien
ttggctcggttgcactttcatggaa

SEQ ID NO: 2859940 - DNA, 25 bp, Homo sapien
actttggcactgtgaaaagtaagga

SEQ ID NO: 2859941 - DNA, 25 bp, Homo sapien
ccaagagttactaatggagttgata

SEQ ID NO: 2859942 - DNA, 25 bp, Homo sapien
tacatgctgtccaagagttactaat

SEQ ID NO: 2859943 - DNA, 25 bp, Homo sapien
atgcagttcttgctgcagccgactt

SEQ ID NO: 2859944 - DNA, 25 bp, Homo sapien
gccagttggctctattgtcttccaa

SEQ ID NO: 2859945 - DNA, 25 bp, Homo sapien
caacaatggaatggtcattgatcac

SEQ ID NO: 2859946 - DNA, 25 bp, Homo sapien
tgcaattcatctggaggctttaagc

SEQ ID NO: 2859947 - DNA, 25 bp, Homo sapien
tctttgcaattcatctggaggcttt

SEQ ID NO: 2859948 - DNA, 25 bp, Homo sapien
gagaaatgtcttatgcatgtcctta

SEQ ID NO: 2859949 - DNA, 25 bp, Homo sapien
gatgtgcatagcagtttcagctgtc

SEQ ID NO: 2859950 - DNA, 25 bp, Homo sapien
gccttttgttcaggatacttatacc

SEQ ID NO: 2859951 - DNA, 25 bp, Homo sapien
ataccatttgcagataatgatgtgc

SEQ ID NO: 2859952 - DNA, 25 bp, Homo sapien
tggcctggcatctcccggtggagtc

SEQ ID NO: 2859953 - DNA, 25 bp, Homo sapien
tgcagggccatagggatgtgtgtgt

SEQ ID NO: 2859954 - DNA, 25 bp, Homo sapien
tactggtgttcacagaatgcaaagg

SEQ ID NO: 2859955 - DNA, 25 bp, Homo sapien
tgtgtgtgtgaatactggtgttcac

SEQ ID NO: 2859956 - DNA, 25 bp, Homo sapien
ccgctctgtcatttattccaggtct

SEQ ID NO: 2859957 - DNA, 25 bp, Homo sapien
gcacagcaggtaccctctgccgctc

SEQ ID NO: 2859958 - DNA, 25 bp, Homo sapien
cacagcaggtaccctctgccgctct

SEQ ID NO: 2859959 - DNA, 25 bp, Homo sapien
gatacattcgaaatcactcaagaaa

SEQ ID NO: 2859960 - DNA, 25 bp, Homo sapien
caacattctccagtgataagccaag

SEQ ID NO: 2859961 - DNA, 25 bp, Homo sapien
cctgtctggtcttctaagtatgtga

SEQ ID NO: 2859962 - DNA, 25 bp, Homo sapien
aatgggtctggagaaatctgatgga

SEQ ID NO: 2859963 - DNA, 25 bp, Homo sapien
cccatttccacggatgttcgctagg

SEQ ID NO: 2859964 - DNA, 25 bp, Homo sapien
caatgatgcaagctgttttggcaga

SEQ ID NO: 2859965 - DNA, 25 bp, Homo sapien
ttggcagattcaggaagggttatgt

SEQ ID NO: 2859966 - DNA, 25 bp, Homo sapien
aagggttatgtggtgcagaggcagc

SEQ ID NO: 2859967 - DNA, 25 bp, Homo sapien
tcttgcctgggtgtagggctcttct

SEQ ID NO: 2859968 - DNA, 25 bp, Homo sapien
tgttcgttgctgttacgaaagggcc

SEQ ID NO: 2859969 - DNA, 25 bp, Homo sapien
acgcccttctgcacgattcttcttg

SEQ ID NO: 2859970 - DNA, 25 bp, Homo sapien
cttctttggagcagatgttcgttgc

SEQ ID NO: 2859971 - DNA, 25 bp, Homo sapien
cctgggtcttagaaaaactgtgatt

SEQ ID NO: 2859972 - DNA, 25 bp, Homo sapien
tgaggagccaccagaatcttcttgg

SEQ ID NO: 2859973 - DNA, 25 bp, Homo sapien
tgtgatttctgaggagccaccagaa

SEQ ID NO: 2859974 - DNA, 25 bp, Homo sapien
ctgtatcctgggtcttagaaaaact

SEQ ID NO: 2859975 - DNA, 25 bp, Homo sapien
atggttggcttccaaatatgaagaa

SEQ ID NO: 2859976 - DNA, 25 bp, Homo sapien
aatctgtgcattgggccacaggctc

SEQ ID NO: 2859977 - DNA, 25 bp, Homo sapien
aaacaacccttaatgctgaagcctc

SEQ ID NO: 2859978 - DNA, 25 bp, Homo sapien
tgaagcctccttcccgatatggttg

SEQ ID NO: 2859979 - DNA, 25 bp, Homo sapien
ggaaagatcatcgatgtttagaatg

SEQ ID NO: 2859980 - DNA, 25 bp, Homo sapien
aagatcatcgatgtttagaatgaac

SEQ ID NO: 2859981 - DNA, 25 bp, Homo sapien
cctgtggactggaaagatcatcgat

SEQ ID NO: 2859982 - DNA, 25 bp, Homo sapien
gactggaaagatcatcgatgtttag

SEQ ID NO: 2859983 - DNA, 25 bp, Homo sapien
tcttggctttccaactttgatcttt

SEQ ID NO: 2859984 - DNA, 25 bp, Homo sapien
cctcttggctttccaactttgatct

SEQ ID NO: 2859985 - DNA, 25 bp, Homo sapien
ccctcttggctttccaactttgatc

SEQ ID NO: 2859986 - DNA, 25 bp, Homo sapien
accctcttggctttccaactttgat

SEQ ID NO: 2859987 - DNA, 25 bp, Homo sapien
aactcagcaacaccactgtgggcgg

SEQ ID NO: 2859988 - DNA, 25 bp, Homo sapien
gtctggcttgcctcgtgctcaaatc

SEQ ID NO: 2859989 - DNA, 25 bp, Homo sapien
gttgagaggaggtgtttccagccac

SEQ ID NO: 2859990 - DNA, 25 bp, Homo sapien
cactgcatcagtgtaagagttggca

SEQ ID NO: 2859991 - DNA, 25 bp, Homo sapien
tcgttagaggaacagcagccgttct

SEQ ID NO: 2859992 - DNA, 25 bp, Homo sapien
taagtgtgtgactgtcgttagagga

SEQ ID NO: 2859993 - DNA, 25 bp, Homo sapien
agcattaagtgtgtgactgtcgtta

SEQ ID NO: 2859994 - DNA, 25 bp, Homo sapien
gccgttctttgtggtaaaatgctgt

SEQ ID NO: 2859995 - DNA, 25 bp, Homo sapien
tgcagccagaacgatgatgctgtag

SEQ ID NO: 2859996 - DNA, 25 bp, Homo sapien
tctgtggtgattagaccagcatcca

SEQ ID NO: 2859997 - DNA, 25 bp, Homo sapien
tcaaggtggcggcttcatccccatg

SEQ ID NO: 2859998 - DNA, 25 bp, Homo sapien
tccccatgcagccagaacgatgatg

SEQ ID NO: 2859999 - DNA, 25 bp, Homo sapien
aatcattcccatatgtctccagtgg

SEQ ID NO: 2860000 - DNA, 25 bp, Homo sapien
tgcccagccttcaacagcactaggg

SEQ ID NO: 2860001 - DNA, 25 bp, Homo sapien
tgcgtggaggtgatttcctttggaa

SEQ ID NO: 2860002 - DNA, 25 bp, Homo sapien
agctgctaatctctgtttgcgtgga

SEQ ID NO: 2860003 - DNA, 25 bp, Homo sapien
tttctccttcaagatgcctgctcag

SEQ ID NO: 2860004 - DNA, 25 bp, Homo sapien
cagctgaagagctgggaagacttaa

SEQ ID NO: 2860005 - DNA, 25 bp, Homo sapien
caagatgcctgctcagctgttccac

SEQ ID NO: 2860006 - DNA, 25 bp, Homo sapien
gctgggaagacttaaattacattct

SEQ ID NO: 2860007 - DNA, 25 bp, Homo sapien
ttgacattcatggtaaatagacaag

SEQ ID NO: 2860008 - DNA, 25 bp, Homo sapien
tttatgaatgtcagtctcttgacat

SEQ ID NO: 2860009 - DNA, 25 bp, Homo sapien
gtcagtctcttgacattcatggtaa

SEQ ID NO: 2860010 - DNA, 25 bp, Homo sapien
cattcatggtaaatagacaagttct

SEQ ID NO: 2860011 - DNA, 25 bp, Homo sapien
gtatgttgcaaacactttatcccag

SEQ ID NO: 2860012 - DNA, 25 bp, Homo sapien
tctgggtggcaacaagtggattaat

SEQ ID NO: 2860013 - DNA, 25 bp, Homo sapien
aatgctgcccatgagccagatgttt

SEQ ID NO: 2860014 - DNA, 25 bp, Homo sapien
tcataaaccctaatgccttgcttac

SEQ ID NO: 2860015 - DNA, 25 bp, Homo sapien
gagaccagactcattgcgcattagc

SEQ ID NO: 2860016 - DNA, 25 bp, Homo sapien
ccagacctccaagttacagagtgtg

SEQ ID NO: 2860017 - DNA, 25 bp, Homo sapien
tgaaaccaatcagtaggaaatgact

SEQ ID NO: 2860018 - DNA, 25 bp, Homo sapien
tcatatgagggaatctgggaccact

SEQ ID NO: 2860019 - DNA, 25 bp, Homo sapien
tgtggcctggcgatccttagttgga

SEQ ID NO: 2860020 - DNA, 25 bp, Homo sapien
aacctttcctgagccggatgtggcc

SEQ ID NO: 2860021 - DNA, 25 bp, Homo sapien
tccacgctggctactgctgagagat

SEQ ID NO: 2860022 - DNA, 25 bp, Homo sapien
tctgcttctgtaccacctgagggca

SEQ ID NO: 2860023 - DNA, 25 bp, Homo sapien
tagcgggcttcatggaaaggtaaag

SEQ ID NO: 2860024 - DNA, 25 bp, Homo sapien
ccatagcgggcttcatggaaaggta

SEQ ID NO: 2860025 - DNA, 25 bp, Homo sapien
gggcttcatggaaaggtaaaggtga

SEQ ID NO: 2860026 - DNA, 25 bp, Homo sapien
ggcttcatggaaaggtaaaggtgaa

SEQ ID NO: 2860027 - DNA, 25 bp, Homo sapien
gaggaggtaaacaactctgctgtgt

SEQ ID NO: 2860028 - DNA, 25 bp, Homo sapien
ccaagtgccctcgatatttgtcaac

SEQ ID NO: 2860029 - DNA, 25 bp, Homo sapien
gctgtgtttcagtccagaggcattc

SEQ ID NO: 2860030 - DNA, 25 bp, Homo sapien
tttgagaactactatccaagtgccc

SEQ ID NO: 2860031 - DNA, 25 bp, Homo sapien
gcgcgtgttcaatttgcatcccaga

SEQ ID NO: 2860032 - DNA, 25 bp, Homo sapien
cagcagtacgctgcgcgtgttcaat

SEQ ID NO: 2860033 - DNA, 25 bp, Homo sapien
cagagggcagcagtacgctgcgcgt

SEQ ID NO: 2860034 - DNA, 25 bp, Homo sapien
ttgcatcccagattagcaaatcccc

SEQ ID NO: 2860035 - DNA, 25 bp, Homo sapien
tctgagtaccgagaagcaatgcgtc

SEQ ID NO: 2860036 - DNA, 25 bp, Homo sapien
tgcaatccagtcatccagaagctgt

SEQ ID NO: 2860037 - DNA, 25 bp, Homo sapien
gatcagagggccagaatgtcttttc

SEQ ID NO: 2860038 - DNA, 25 bp, Homo sapien
tctgttgtcaaggtctaagccggac

SEQ ID NO: 2860039 - DNA, 25 bp, Homo sapien
taacaatctgtctagaggcactgga

SEQ ID NO: 2860040 - DNA, 25 bp, Homo sapien
tgctttaaggcgcaaaagccgaccc

SEQ ID NO: 2860041 - DNA, 25 bp, Homo sapien
gaaaatgcactgtctgagctaacta

SEQ ID NO: 2860042 - DNA, 25 bp, Homo sapien
gcacaaaatgcgtcactccaaaggg

SEQ ID NO: 2860043 - DNA, 25 bp, Homo sapien
gtacaactttaaccaacaccctgca

SEQ ID NO: 2860044 - DNA, 25 bp, Homo sapien
tgtcccttgtatagagctttacggt

SEQ ID NO: 2860045 - DNA, 25 bp, Homo sapien
cagtatttgcaaggtcggtgatttt

SEQ ID NO: 2860046 - DNA, 25 bp, Homo sapien
catggagtcttatttatagtgtccc

SEQ ID NO: 2860047 - DNA, 25 bp, Homo sapien
tcacataggaggaacaatcatgcca

SEQ ID NO: 2860048 - DNA, 25 bp, Homo sapien
cacataggaggaacaatcatgccag

SEQ ID NO: 2860049 - DNA, 25 bp, Homo sapien
gaaagaaaagacagaagtcaatggt

SEQ ID NO: 2860050 - DNA, 25 bp, Homo sapien
aaaagacagaagtcaatggtttctt

SEQ ID NO: 2860051 - DNA, 25 bp, Homo sapien
aaagaaaagacagaagtcaatggtt

SEQ ID NO: 2860052 - DNA, 25 bp, Homo sapien
agaaaagacagaagtcaatggtttc

SEQ ID NO: 2860053 - DNA, 25 bp, Homo sapien
gaccaggatttatcaattacttcac

SEQ ID NO: 2860054 - DNA, 25 bp, Homo sapien
tctgggaccaggatttatcaattac

SEQ ID NO: 2860055 - DNA, 25 bp, Homo sapien
taggtagtctgggaccaggatttat

SEQ ID NO: 2860056 - DNA, 25 bp, Homo sapien
tagtctgggaccaggatttatcaat

SEQ ID NO: 2860057 - DNA, 25 bp, Homo sapien
tttctgctgaaagtgccccttgccc

SEQ ID NO: 2860058 - DNA, 25 bp, Homo sapien
gcctttcccagacagatcttcctta

SEQ ID NO: 2860059 - DNA, 25 bp, Homo sapien
ttatttactttggtgtcatgtctcc

SEQ ID NO: 2860060 - DNA, 25 bp, Homo sapien
ctccttgagcctgttctgaattctc

SEQ ID NO: 2860061 - DNA, 25 bp, Homo sapien
aacttttgtggctcaagcaagagtg

SEQ ID NO: 2860062 - DNA, 25 bp, Homo sapien
ttttgtggctcaagcaagagtgccc

SEQ ID NO: 2860063 - DNA, 25 bp, Homo sapien
aaaaactggtgcccacctaaggctg

SEQ ID NO: 2860064 - DNA, 25 bp, Homo sapien
ctttgccctgctggagattgtgtgc

SEQ ID NO: 2860065 - DNA, 25 bp, Homo sapien
ctctgtacttttgggatctgtaatt

SEQ ID NO: 2860066 - DNA, 25 bp, Homo sapien
cactgtggccctgtgttaggaaagg

SEQ ID NO: 2860067 - DNA, 25 bp, Homo sapien
cttttgggatctgtaattgggtaag

SEQ ID NO: 2860068 - DNA, 25 bp, Homo sapien
gccctgtgttaggaaaggtgacaga

SEQ ID NO: 2860069 - DNA, 25 bp, Homo sapien
catcatgacttaaacaggcacatac

SEQ ID NO: 2860070 - DNA, 25 bp, Homo sapien
aatgcacaaactttgtatatatccc

SEQ ID NO: 2860071 - DNA, 25 bp, Homo sapien
atttcatcatgacttaaacaggcac

SEQ ID NO: 2860072 - DNA, 25 bp, Homo sapien
aactttgtatatatccctgtcctga

SEQ ID NO: 2860073 - DNA, 25 bp, Homo sapien
cctcatccagatcctggctttcagt

SEQ ID NO: 2860074 - DNA, 25 bp, Homo sapien
tcctggctttcagttgataaccaga

SEQ ID NO: 2860075 - DNA, 25 bp, Homo sapien
tggctttcagttgataaccagatct

SEQ ID NO: 2860076 - DNA, 25 bp, Homo sapien
ggctttcagttgataaccagatctc

SEQ ID NO: 2860077 - DNA, 25 bp, Homo sapien
gttggcctatgatagagccactgac

SEQ ID NO: 2860078 - DNA, 25 bp, Homo sapien
ggcatgagaagacatcgggcctcct

SEQ ID NO: 2860079 - DNA, 25 bp, Homo sapien
tgaaacccaggaagtcataagatct

SEQ ID NO: 2860080 - DNA, 25 bp, Homo sapien
gtcactgttggcctatgatagagcc

SEQ ID NO: 2860081 - DNA, 25 bp, Homo sapien
tgctgattataaaccccatcatatc

SEQ ID NO: 2860082 - DNA, 25 bp, Homo sapien
aactgctgattataaaccccatcat

SEQ ID NO: 2860083 - DNA, 25 bp, Homo sapien
gattataaaccccatcatatcttgt

SEQ ID NO: 2860084 - DNA, 25 bp, Homo sapien
tataaaccccatcatatcttgtttc

SEQ ID NO: 2860085 - DNA, 25 bp, Homo sapien
tcatcacagtgtaaagcatccagca

SEQ ID NO: 2860086 - DNA, 25 bp, Homo sapien
caacgtgatcgggtgctcaggctct

SEQ ID NO: 2860087 - DNA, 25 bp, Homo sapien
tgggactagtgctgacatcatacgg

SEQ ID NO: 2860088 - DNA, 25 bp, Homo sapien
tattttgaagagtcctcctggaggc

SEQ ID NO: 2860089 - DNA, 25 bp, Homo sapien
gccagccaccaagggaagacactgt

SEQ ID NO: 2860090 - DNA, 25 bp, Homo sapien
tgcacaatgaagaccataatggccc

SEQ ID NO: 2860091 - DNA, 25 bp, Homo sapien
ctttgtatggctgggcttaagggca

SEQ ID NO: 2860092 - DNA, 25 bp, Homo sapien
cagctgccttaggaaccctggctat

SEQ ID NO: 2860093 - DNA, 25 bp, Homo sapien
cagtcccgggagagaccctgcactg

SEQ ID NO: 2860094 - DNA, 25 bp, Homo sapien
gcactggagaacttgctagagtcca

SEQ ID NO: 2860095 - DNA, 25 bp, Homo sapien
aggagaaggccagtcccgggagaga

SEQ ID NO: 2860096 - DNA, 25 bp, Homo sapien
ttgctagagtccacaaaagactgat

SEQ ID NO: 2860097 - DNA, 25 bp, Homo sapien
gactggtgcgaaagcactcttctgt

SEQ ID NO: 2860098 - DNA, 25 bp, Homo sapien
gacgactggtgcgaaagcactcttc

SEQ ID NO: 2860099 - DNA, 25 bp, Homo sapien
ttctgtttcacggctgagaccatgt

SEQ ID NO: 2860100 - DNA, 25 bp, Homo sapien
ggtctgacgactggtgcgaaagcac

SEQ ID NO: 2860101 - DNA, 25 bp, Homo sapien
gaaggagaagatgcccgaggagctg

SEQ ID NO: 2860102 - DNA, 25 bp, Homo sapien
aaggagaagatgcccgaggagctgc

SEQ ID NO: 2860103 - DNA, 25 bp, Homo sapien
tagtgtagcagctagcccaagggcc

SEQ ID NO: 2860104 - DNA, 25 bp, Homo sapien
tctgctaagctaccctgcaaaggaa

SEQ ID NO: 2860105 - DNA, 25 bp, Homo sapien
aattgcaaaactcctgcactggagg

SEQ ID NO: 2860106 - DNA, 25 bp, Homo sapien
ccatagctagaatgcgctgaagcaa

SEQ ID NO: 2860107 - DNA, 25 bp, Homo sapien
ggacaagctcactgtatgcgctatc

SEQ ID NO: 2860108 - DNA, 25 bp, Homo sapien
tctatgtctcacaacactggatggg

SEQ ID NO: 2860109 - DNA, 25 bp, Homo sapien
aaatgtgcctctatccatgtgtccg

SEQ ID NO: 2860110 - DNA, 25 bp, Homo sapien
catgtgtccggcatcaggacaagct

SEQ ID NO: 2860111 - DNA, 25 bp, Homo sapien
gctgctttggatggtagcaacattc

SEQ ID NO: 2860112 - DNA, 25 bp, Homo sapien
caacattctgactgttagggagact

SEQ ID NO: 2860113 - DNA, 25 bp, Homo sapien
cagagcatgggttcctgaagcgact

SEQ ID NO: 2860114 - DNA, 25 bp, Homo sapien
cctgaagcgacttcatacagctgct

SEQ ID NO: 2860115 - DNA, 25 bp, Homo sapien
gatggtgcctttagcaccatcaccc

SEQ ID NO: 2860116 - DNA, 25 bp, Homo sapien
tggtgcctttagcaccatcacccag

SEQ ID NO: 2860117 - DNA, 25 bp, Homo sapien
gtgcctttagcaccatcacccaggg

SEQ ID NO: 2860118 - DNA, 25 bp, Homo sapien
acgatggtgcctttagcaccatcac

SEQ ID NO: 2860119 - DNA, 25 bp, Homo sapien
ggaacgcaggatatgcatctctact

SEQ ID NO: 2860120 - DNA, 25 bp, Homo sapien
ggccacatggcatgatgccaagttc

SEQ ID NO: 2860121 - DNA, 25 bp, Homo sapien
tctagcgaaacgtgcaggaacgcag

SEQ ID NO: 2860122 - DNA, 25 bp, Homo sapien
caagttcttctagcgaaacgtgcag

SEQ ID NO: 2860123 - DNA, 25 bp, Homo sapien
ccgtatccgttcatgctcgtggtga

SEQ ID NO: 2860124 - DNA, 25 bp, Homo sapien
tacccgtgtggtgatacgctgcttg

SEQ ID NO: 2860125 - DNA, 25 bp, Homo sapien
ggagccgcccaaattggacattgcg

SEQ ID NO: 2860126 - DNA, 25 bp, Homo sapien
gacattgcggcagagccgtatccgt

SEQ ID NO: 2860127 - DNA, 25 bp, Homo sapien
tgtcggccgctctcttcagaatgat

SEQ ID NO: 2860128 - DNA, 25 bp, Homo sapien
tgtacagggcctcggcaatgtcggc

SEQ ID NO: 2860129 - DNA, 25 bp, Homo sapien
tgatgcctcggagacattcacggcc

SEQ ID NO: 2860130 - DNA, 25 bp, Homo sapien
catccctgcgtggaccgaggtgtta

SEQ ID NO: 2860131 - DNA, 25 bp, Homo sapien
aaagtcaaaggaatatccccttcag

SEQ ID NO: 2860132 - DNA, 25 bp, Homo sapien
ctgaaaagtcaaaggaatatcccct

SEQ ID NO: 2860133 - DNA, 25 bp, Homo sapien
taccagatccgcagcccttttgagt

SEQ ID NO: 2860134 - DNA, 25 bp, Homo sapien
tacagtgcttctaccagatccgcag

SEQ ID NO: 2860135 - DNA, 25 bp, Homo sapien
tgtgtggcatcccatacagtgcttc

SEQ ID NO: 2860136 - DNA, 25 bp, Homo sapien
ctggttgttgtgtggcatcccatac

SEQ ID NO: 2860137 - DNA, 25 bp, Homo sapien
tttgatccatgatgctgccttcttt

SEQ ID NO: 2860138 - DNA, 25 bp, Homo sapien
gtggatcttgtttcctaaaggagca

SEQ ID NO: 2860139 - DNA, 25 bp, Homo sapien
ttgatccatgatgctgccttctttg

SEQ ID NO: 2860140 - DNA, 25 bp, Homo sapien
cttgtttcctaaaggagcatccttc

SEQ ID NO: 2860141 - DNA, 25 bp, Homo sapien
tagttatttgcagggaggcataaaa

SEQ ID NO: 2860142 - DNA, 25 bp, Homo sapien
cattctcattatagctaaggaccac

SEQ ID NO: 2860143 - DNA, 25 bp, Homo sapien
taaggaccactttagagtaaattga

SEQ ID NO: 2860144 - DNA, 25 bp, Homo sapien
taaatgaggtataggtagcaagtag

SEQ ID NO: 2860145 - DNA, 25 bp, Homo sapien
ggtgattttaggtctcgtctctcca

SEQ ID NO: 2860146 - DNA, 25 bp, Homo sapien
tgttccaaatgaaagtgcagtcact

SEQ ID NO: 2860147 - DNA, 25 bp, Homo sapien
gtgcacaactgagccactaaatggc

SEQ ID NO: 2860148 - DNA, 25 bp, Homo sapien
caaaaacagtgcctgtgactggagt

SEQ ID NO: 2860149 - DNA, 25 bp, Homo sapien
tcagaatttctgatcgaccatgttc

SEQ ID NO: 2860150 - DNA, 25 bp, Homo sapien
aagttggtcacatgttcctcccctt

SEQ ID NO: 2860151 - DNA, 25 bp, Homo sapien
tataagaaaagtcaaccttgacctc

SEQ ID NO: 2860152 - DNA, 25 bp, Homo sapien
aatttctgatcgaccatgttcccca

SEQ ID NO: 2860153 - DNA, 25 bp, Homo sapien
atctccctaacaatggacagcagga

SEQ ID NO: 2860154 - DNA, 25 bp, Homo sapien
tatctccctaacaatggacagcagg

SEQ ID NO: 2860155 - DNA, 25 bp, Homo sapien
ttatctccctaacaatggacagcag

SEQ ID NO: 2860156 - DNA, 25 bp, Homo sapien
cttgtgctggctccatccgccactt

SEQ ID NO: 2860157 - DNA, 25 bp, Homo sapien
gtgctggctccatccgccacttcct

SEQ ID NO: 2860158 - DNA, 25 bp, Homo sapien
ttgtgctggctccatccgccacttc

SEQ ID NO: 2860159 - DNA, 25 bp, Homo sapien
ctggctccatccgccacttcctgac

SEQ ID NO: 2860160 - DNA, 25 bp, Homo sapien
ggccagcccttgcacgatcaagtgg

SEQ ID NO: 2860161 - DNA, 25 bp, Homo sapien
cttgaactctcgctccactttaaca

SEQ ID NO: 2860162 - DNA, 25 bp, Homo sapien
cggccagcccttgcacgatcaagtg

SEQ ID NO: 2860163 - DNA, 25 bp, Homo sapien
cgctccactttaacattcaaagcca

SEQ ID NO: 2860164 - DNA, 25 bp, Homo sapien
agcagttagcgctcctcctctccat

SEQ ID NO: 2860165 - DNA, 25 bp, Homo sapien
ttcctctccggagcagttagcgctc

SEQ ID NO: 2860166 - DNA, 25 bp, Homo sapien
ccggagcagttagcgctcctcctct

SEQ ID NO: 2860167 - DNA, 25 bp, Homo sapien
tctccggagcagttagcgctcctcc

SEQ ID NO: 2860168 - DNA, 25 bp, Homo sapien
cagacagggccagttctgacaggtg

SEQ ID NO: 2860169 - DNA, 25 bp, Homo sapien
gatttgatgacgaactgatactcca

SEQ ID NO: 2860170 - DNA, 25 bp, Homo sapien
gcagccagcacacgggtaggatttg

SEQ ID NO: 2860171 - DNA, 25 bp, Homo sapien
tgatactccaaggaggttcaccaag

SEQ ID NO: 2860172 - DNA, 25 bp, Homo sapien
caccagggtgccgaggaatgacctt

SEQ ID NO: 2860173 - DNA, 25 bp, Homo sapien
ccataatcgatggtgggttcgttga

SEQ ID NO: 2860174 - DNA, 25 bp, Homo sapien
gaccttctgtaacctctggaaacca

SEQ ID NO: 2860175 - DNA, 25 bp, Homo sapien
cagggtgccgaggaatgaccttctg

SEQ ID NO: 2860176 - DNA, 25 bp, Homo sapien
aacagcggagatggaaaacacggca

SEQ ID NO: 2860177 - DNA, 25 bp, Homo sapien
ggagatggaaaacacggcagctcca

SEQ ID NO: 2860178 - DNA, 25 bp, Homo sapien
agatggaaaacacggcagctccagc

SEQ ID NO: 2860179 - DNA, 25 bp, Homo sapien
gcggagatggaaaacacggcagctc

SEQ ID NO: 2860180 - DNA, 25 bp, Homo sapien
acttgtcaacttgtaaatctaaaag

SEQ ID NO: 2860181 - DNA, 25 bp, Homo sapien
aatagaactctttaacttgtcaact

SEQ ID NO: 2860182 - DNA, 25 bp, Homo sapien
gaactctttaacttgtcaacttgta

SEQ ID NO: 2860183 - DNA, 25 bp, Homo sapien
gtaaatctaaaaggctatcaatcat

SEQ ID NO: 2860184 - DNA, 25 bp, Homo sapien
tctgttgtatgcaccaggatgccat

SEQ ID NO: 2860185 - DNA, 25 bp, Homo sapien
gaatggatattggtgggatgtatct

SEQ ID NO: 2860186 - DNA, 25 bp, Homo sapien
ccacagctatgatgtgatactgggg

SEQ ID NO: 2860187 - DNA, 25 bp, Homo sapien
ctatgatgtgatactggggaatgga

SEQ ID NO: 2860188 - DNA, 25 bp, Homo sapien
tatctgacgagctgatcccttttca

SEQ ID NO: 2860189 - DNA, 25 bp, Homo sapien
tagcttttatctgacgagctgatcc

SEQ ID NO: 2860190 - DNA, 25 bp, Homo sapien
tactctggcttgtagcttttatctg

SEQ ID NO: 2860191 - DNA, 25 bp, Homo sapien
tctgagcacgcatttttcctgtact

SEQ ID NO: 2860192 - DNA, 25 bp, Homo sapien
tattttagataaatactgtcagaca

SEQ ID NO: 2860193 - DNA, 25 bp, Homo sapien
attttagataaatactgtcagacat

SEQ ID NO: 2860194 - DNA, 25 bp, Homo sapien
ggtccccagcgtcttacaatcaata

SEQ ID NO: 2860195 - DNA, 25 bp, Homo sapien
caatagatgtttagttaagcagttc

SEQ ID NO: 2860196 - DNA, 25 bp, Homo sapien
caatgggtatgtggccacttccgca

SEQ ID NO: 2860197 - DNA, 25 bp, Homo sapien
cctttggatgttggtggtcttaata

SEQ ID NO: 2860198 - DNA, 25 bp, Homo sapien
ctatgattctgaacgaaatagtgta

SEQ ID NO: 2860199 - DNA, 25 bp, Homo sapien
tgaacgaaatagtgtagataaagac

SEQ ID NO: 2860200 - DNA, 25 bp, Homo sapien
cgaaatagtgtagataaagacatct

SEQ ID NO: 2860201 - DNA, 25 bp, Homo sapien
gattctgaacgaaatagtgtagata

SEQ ID NO: 2860202 - DNA, 25 bp, Homo sapien
cttgctgaatgtgttgggctgttga

SEQ ID NO: 2860203 - DNA, 25 bp, Homo sapien
gctaacttgctgaatgtgttgggct

SEQ ID NO: 2860204 - DNA, 25 bp, Homo sapien
tgaggtgagttctactggagtcttg

SEQ ID NO: 2860205 - DNA, 25 bp, Homo sapien
gagtcttggttgagccccccagatt

SEQ ID NO: 2860206 - DNA, 25 bp, Homo sapien
cctcttgaagtataaacgtaatggt

SEQ ID NO: 2860207 - DNA, 25 bp, Homo sapien
gacctgtgatcacaggaaaaggcag

SEQ ID NO: 2860208 - DNA, 25 bp, Homo sapien
ttacttgaatccattcctgattaaa

SEQ ID NO: 2860209 - DNA, 25 bp, Homo sapien
gcgtgtttcccagggtaatcagtca

SEQ ID NO: 2860210 - DNA, 25 bp, Homo sapien
tccggtacactaaataagatgcagt

SEQ ID NO: 2860211 - DNA, 25 bp, Homo sapien
caaccttttttatccgcttctccat

SEQ ID NO: 2860212 - DNA, 25 bp, Homo sapien
gaattccggtacactaaataagatg

SEQ ID NO: 2860213 - DNA, 25 bp, Homo sapien
ttccggtacactaaataagatgcag

SEQ ID NO: 2860214 - DNA, 25 bp, Homo sapien
acattaacttcataataagcactgt

SEQ ID NO: 2860215 - DNA, 25 bp, Homo sapien
ttttcactatatccatctgagaatg

SEQ ID NO: 2860216 - DNA, 25 bp, Homo sapien
atttttcactatatccatctgagaa

SEQ ID NO: 2860217 - DNA, 25 bp, Homo sapien
atgaggcagaatcatagtctttcat

SEQ ID NO: 2860218 - DNA, 25 bp, Homo sapien
gatcctgttatactggctactcaag

SEQ ID NO: 2860219 - DNA, 25 bp, Homo sapien
aaataatatgcttccttcagatcag

SEQ ID NO: 2860220 - DNA, 25 bp, Homo sapien
ggttgtatataaggcctcgtggcca

SEQ ID NO: 2860221 - DNA, 25 bp, Homo sapien
tgattacactccactccaaatagga

SEQ ID NO: 2860222 - DNA, 25 bp, Homo sapien
tcattatgacaccaacagtatttaa

SEQ ID NO: 2860223 - DNA, 25 bp, Homo sapien
attatgacaccaacagtatttaact

SEQ ID NO: 2860224 - DNA, 25 bp, Homo sapien
agcagattcagaatcactgatcaca

SEQ ID NO: 2860225 - DNA, 25 bp, Homo sapien
cagattcagaatcactgatcacatc

SEQ ID NO: 2860226 - DNA, 25 bp, Homo sapien
tcacgattcgaaaagatccaagcca

SEQ ID NO: 2860227 - DNA, 25 bp, Homo sapien
tccaagccacttaaagatgtaacac

SEQ ID NO: 2860228 - DNA, 25 bp, Homo sapien
gattcgaaaagatccaagccactta

SEQ ID NO: 2860229 - DNA, 25 bp, Homo sapien
atccaagccacttaaagatgtaaca

SEQ ID NO: 2860230 - DNA, 25 bp, Homo sapien
gggtgttacttttcagctcaataat

SEQ ID NO: 2860231 - DNA, 25 bp, Homo sapien
aaacagcaataaggccttagtttgg

SEQ ID NO: 2860232 - DNA, 25 bp, Homo sapien
gatatttcactaacaaataagaggg

SEQ ID NO: 2860233 - DNA, 25 bp, Homo sapien
cttttagagacatttacatctacaa

SEQ ID NO: 2860234 - DNA, 25 bp, Homo sapien
caagcctcacatcttgaaatactat

SEQ ID NO: 2860235 - DNA, 25 bp, Homo sapien
cctcacatcttgaaatactatggat

SEQ ID NO: 2860236 - DNA, 25 bp, Homo sapien
agcctcacatcttgaaatactatgg

SEQ ID NO: 2860237 - DNA, 25 bp, Homo sapien
gcctcacatcttgaaatactatgga

SEQ ID NO: 2860238 - DNA, 25 bp, Homo sapien
tatacccttactattaagtggtgac

SEQ ID NO: 2860239 - DNA, 25 bp, Homo sapien
gaacagagaggttttatgagccatc

SEQ ID NO: 2860240 - DNA, 25 bp, Homo sapien
gaacaagcaacgcatggtagaggca

SEQ ID NO: 2860241 - DNA, 25 bp, Homo sapien
gggccgtacatttgcaatgatctga

SEQ ID NO: 2860242 - DNA, 25 bp, Homo sapien
ttaatgggcagggacgttgtcacca

SEQ ID NO: 2860243 - DNA, 25 bp, Homo sapien
tctaacttttatggccaggtggctc

SEQ ID NO: 2860244 - DNA, 25 bp, Homo sapien
taaatgagacctgaccacaaaatgg

SEQ ID NO: 2860245 - DNA, 25 bp, Homo sapien
gaaaccatgcctgattgcctcctgt

SEQ ID NO: 2860246 - DNA, 25 bp, Homo sapien
cagtatcagaagtttcaattggtcc

SEQ ID NO: 2860247 - DNA, 25 bp, Homo sapien
aatgttacagtatcagaagtttcaa

SEQ ID NO: 2860248 - DNA, 25 bp, Homo sapien
gggaatgttacagtatcagaagttt

SEQ ID NO: 2860249 - DNA, 25 bp, Homo sapien
tatcagaagtttcaattggtccttt

SEQ ID NO: 2860250 - DNA, 25 bp, Homo sapien
aaatgaatggcaagaaatcctagct

SEQ ID NO: 2860251 - DNA, 25 bp, Homo sapien
aaaacttacgctgaaccaatgagcc

SEQ ID NO: 2860252 - DNA, 25 bp, Homo sapien
gaactcagtgtgaaaccttagctaa

SEQ ID NO: 2860253 - DNA, 25 bp, Homo sapien
tgcagccccataatgagacttgtaa

SEQ ID NO: 2860254 - DNA, 25 bp, Homo sapien
tccacaacaccagggatgtgccgag

SEQ ID NO: 2860255 - DNA, 25 bp, Homo sapien
caacaccagggatgtgccgaggagg

SEQ ID NO: 2860256 - DNA, 25 bp, Homo sapien
ttccacaacaccagggatgtgccga

SEQ ID NO: 2860257 - DNA, 25 bp, Homo sapien
cacaacaccagggatgtgccgagga

SEQ ID NO: 2860258 - DNA, 25 bp, Homo sapien
tgtctatgtttaaatccaatcttga

SEQ ID NO: 2860259 - DNA, 25 bp, Homo sapien
tgcgtgaaagacactgacaacaata

SEQ ID NO: 2860260 - DNA, 25 bp, Homo sapien
taaatccaatcttgatggaacctgc

SEQ ID NO: 2860261 - DNA, 25 bp, Homo sapien
gacaacaatatttacaaatgctctg

SEQ ID NO: 2860262 - DNA, 25 bp, Homo sapien
tcatagcaagtcagagcaaaaggca

SEQ ID NO: 2860263 - DNA, 25 bp, Homo sapien
cacgtacttgggatatagagtacca

SEQ ID NO: 2860264 - DNA, 25 bp, Homo sapien
aaggcaacactgatgcagttcaaaa

SEQ ID NO: 2860265 - DNA, 25 bp, Homo sapien
gcaactttacccttgtcatagcaag

SEQ ID NO: 2860266 - DNA, 25 bp, Homo sapien
gacgtaagacttgcaaagtgtctga

SEQ ID NO: 2860267 - DNA, 25 bp, Homo sapien
gagacaataatcataagacgtaaga

SEQ ID NO: 2860268 - DNA, 25 bp, Homo sapien
tacaagccaaacaatttgggctaga

SEQ ID NO: 2860269 - DNA, 25 bp, Homo sapien
tctgaaactctgtagcatctgccac

SEQ ID NO: 2860270 - DNA, 25 bp, Homo sapien
cctttgaaagcatggattgtatctg

SEQ ID NO: 2860271 - DNA, 25 bp, Homo sapien
ctctgcctttgaaagcatggattgt

SEQ ID NO: 2860272 - DNA, 25 bp, Homo sapien
tgaaagcatggattgtatctgcagc

SEQ ID NO: 2860273 - DNA, 25 bp, Homo sapien
gaaagcatggattgtatctgcagct

SEQ ID NO: 2860274 - DNA, 25 bp, Homo sapien
tttggggcagtatcaaattctctcc

SEQ ID NO: 2860275 - DNA, 25 bp, Homo sapien
atttctttatttggggcagtatcaa

SEQ ID NO: 2860276 - DNA, 25 bp, Homo sapien
tggatttctttatttggggcagtat

SEQ ID NO: 2860277 - DNA, 25 bp, Homo sapien
tatttggggcagtatcaaattctct

SEQ ID NO: 2860278 - DNA, 25 bp, Homo sapien
tactggcagtaagcagtatacacag

SEQ ID NO: 2860279 - DNA, 25 bp, Homo sapien
tacacagaaggcttacaaagaacag

SEQ ID NO: 2860280 - DNA, 25 bp, Homo sapien
ttacaaagaacagcgtctgttctgg

SEQ ID NO: 2860281 - DNA, 25 bp, Homo sapien
catacccaagtatcacagtcttaac

SEQ ID NO: 2860282 - DNA, 25 bp, Homo sapien
tccagaccagcatggtaccgaatat

SEQ ID NO: 2860283 - DNA, 25 bp, Homo sapien
cgtcgtccatccttcactcgggctg

SEQ ID NO: 2860284 - DNA, 25 bp, Homo sapien
gctgatggctttgatacagggagta

SEQ ID NO: 2860285 - DNA, 25 bp, Homo sapien
tgacctgtaacccatcaaagaaatt

SEQ ID NO: 2860286 - DNA, 25 bp, Homo sapien
ctctacactcagcaccatccaccat

SEQ ID NO: 2860287 - DNA, 25 bp, Homo sapien
aatttgcttcttgaacaatggtcat

SEQ ID NO: 2860288 - DNA, 25 bp, Homo sapien
ttccaatttgcttcttgaacaatgg

SEQ ID NO: 2860289 - DNA, 25 bp, Homo sapien
cagatttccaatttgcttcttgaac

SEQ ID NO: 2860290 - DNA, 25 bp, Homo sapien
ccaatttgcttcttgaacaatggtc

SEQ ID NO: 2860291 - DNA, 25 bp, Homo sapien
gctggagtcgtatttttaacaggcc

SEQ ID NO: 2860292 - DNA, 25 bp, Homo sapien
tctgtgacgctaatcttggctggag

SEQ ID NO: 2860293 - DNA, 25 bp, Homo sapien
taacaggccttgaatgtgtgtgccg

SEQ ID NO: 2860294 - DNA, 25 bp, Homo sapien
tgtgtgccggattatccagatggcc

SEQ ID NO: 2860295 - DNA, 25 bp, Homo sapien
tagagtgtattcacaggcatttgca

SEQ ID NO: 2860296 - DNA, 25 bp, Homo sapien
ctagagtgtattcacaggcatttgc

SEQ ID NO: 2860297 - DNA, 25 bp, Homo sapien
taataaagtgttagcgcatgcaagc

SEQ ID NO: 2860298 - DNA, 25 bp, Homo sapien
tcagaatgatgagcacgggcacttt

SEQ ID NO: 2860299 - DNA, 25 bp, Homo sapien
gccttgttgcatattagatcattag

SEQ ID NO: 2860300 - DNA, 25 bp, Homo sapien
tgttgtgagggcaccgcattttgcc

SEQ ID NO: 2860301 - DNA, 25 bp, Homo sapien
tgaacatgtctaccctttctttcca

SEQ ID NO: 2860302 - DNA, 25 bp, Homo sapien
aatttgaacatgtctaccctttctt

SEQ ID NO: 2860303 - DNA, 25 bp, Homo sapien
tatgctattgtcattactaagaatt

SEQ ID NO: 2860304 - DNA, 25 bp, Homo sapien
tttctatgctattgtcattactaag

SEQ ID NO: 2860305 - DNA, 25 bp, Homo sapien
taaggcttcggtgaaggcaaagccc

SEQ ID NO: 2860306 - DNA, 25 bp, Homo sapien
gaagtgaaataaggcttcggtgaag

SEQ ID NO: 2860307 - DNA, 25 bp, Homo sapien
gaaataaggcttcggtgaaggcaaa

SEQ ID NO: 2860308 - DNA, 25 bp, Homo sapien
ctggagagaagtgaaataaggcttc

SEQ ID NO: 2860309 - DNA, 25 bp, Homo sapien
caaccaatgaaaatgattcgcctac

SEQ ID NO: 2860310 - DNA, 25 bp, Homo sapien
ccaaccaatgaaaatgattcgccta

SEQ ID NO: 2860311 - DNA, 25 bp, Homo sapien
gagccctccgcccatgcttggaatt

SEQ ID NO: 2860312 - DNA, 25 bp, Homo sapien
caaacatgttatcagagactgccag

SEQ ID NO: 2860313 - DNA, 25 bp, Homo sapien
tattatggacaaacatgttatcaga

SEQ ID NO: 2860314 - DNA, 25 bp, Homo sapien
cattgactgtcgtagacaccacgac

SEQ ID NO: 2860315 - DNA, 25 bp, Homo sapien
aatgaggcgagcctccagagcgaag

SEQ ID NO: 2860316 - DNA, 25 bp, Homo sapien
gaggaagccttttctccaagttggc

SEQ ID NO: 2860317 - DNA, 25 bp, Homo sapien
accgctttacaagggttggcacaga

SEQ ID NO: 2860318 - DNA, 25 bp, Homo sapien
gcctctgaagaggtgaaccgcttta

SEQ ID NO: 2860319 - DNA, 25 bp, Homo sapien
ttggacacaacaacactttccttct

SEQ ID NO: 2860320 - DNA, 25 bp, Homo sapien
tggacacaacaacactttccttctt

SEQ ID NO: 2860321 - DNA, 25 bp, Homo sapien
gcccagctctgcagaaagtgattaa

SEQ ID NO: 2860322 - DNA, 25 bp, Homo sapien
gaggagacacgctcctgcgttgcta

SEQ ID NO: 2860323 - DNA, 25 bp, Homo sapien
cagaccctgcttagtaggcaagaga

SEQ ID NO: 2860324 - DNA, 25 bp, Homo sapien
cttaaagtatgaacacagcccagct

SEQ ID NO: 2860325 - DNA, 25 bp, Homo sapien
tactcatgccccatctaggtgagga

SEQ ID NO: 2860326 - DNA, 25 bp, Homo sapien
tcttgccttggagaattgaccaaac

SEQ ID NO: 2860327 - DNA, 25 bp, Homo sapien
taatcctccctgtcttggttcggtc

SEQ ID NO: 2860328 - DNA, 25 bp, Homo sapien
tgtttttctaaagtccctgcaagta

SEQ ID NO: 2860329 - DNA, 25 bp, Homo sapien
tgatgaactttgattgtgtgtcaat

SEQ ID NO: 2860330 - DNA, 25 bp, Homo sapien
gatgaactttgattgtgtgtcaatg

SEQ ID NO: 2860331 - DNA, 25 bp, Homo sapien
actttgattgtgtgtcaatgttctt

SEQ ID NO: 2860332 - DNA, 25 bp, Homo sapien
gaactttgattgtgtgtcaatgttc

SEQ ID NO: 2860333 - DNA, 25 bp, Homo sapien
tgaaccaagacagagaacctaagaa

SEQ ID NO: 2860334 - DNA, 25 bp, Homo sapien
gactgcttggattataccactgcct

SEQ ID NO: 2860335 - DNA, 25 bp, Homo sapien
cagcagacatctggacagttagatc

SEQ ID NO: 2860336 - DNA, 25 bp, Homo sapien
cagttagatctaaacctgggtgtca

SEQ ID NO: 2860337 - DNA, 25 bp, Homo sapien
tctatggtggccaaggtagctgccc

SEQ ID NO: 2860338 - DNA, 25 bp, Homo sapien
tgttctctactagcatctggagggt

SEQ ID NO: 2860339 - DNA, 25 bp, Homo sapien
tgtcaccagtaagagcttgtcagcg

SEQ ID NO: 2860340 - DNA, 25 bp, Homo sapien
taataaaggaagacacggctcatcc

SEQ ID NO: 2860341 - DNA, 25 bp, Homo sapien
gacatacactgtttcacgcccagct

SEQ ID NO: 2860342 - DNA, 25 bp, Homo sapien
gccctaagaggtacagcagagttaa

SEQ ID NO: 2860343 - DNA, 25 bp, Homo sapien
cctggaagttctacacggatgctct

SEQ ID NO: 2860344 - DNA, 25 bp, Homo sapien
cagcctcatgttgcaagaccctaag

SEQ ID NO: 2860345 - DNA, 25 bp, Homo sapien
aagtcagatgaccggaggaaacatt

SEQ ID NO: 2860346 - DNA, 25 bp, Homo sapien
gaccggaggaaacattttgcaagaa

SEQ ID NO: 2860347 - DNA, 25 bp, Homo sapien
tgaccggaggaaacattttgcaaga

SEQ ID NO: 2860348 - DNA, 25 bp, Homo sapien
gaagtcagatgaccggaggaaacat

SEQ ID NO: 2860349 - DNA, 25 bp, Homo sapien
tcttggagactaagagatattgaca

SEQ ID NO: 2860350 - DNA, 25 bp, Homo sapien
taagagcatactttaaacaccatgc

SEQ ID NO: 2860351 - DNA, 25 bp, Homo sapien
gctgtttccttgatggaccatatga

SEQ ID NO: 2860352 - DNA, 25 bp, Homo sapien
cagagaatgaaggtgcagctaaaat

SEQ ID NO: 2860353 - DNA, 25 bp, Homo sapien
taacttagccattcggtggagagca

SEQ ID NO: 2860354 - DNA, 25 bp, Homo sapien
gcagcacaagggtctaaaactttgc

SEQ ID NO: 2860355 - DNA, 25 bp, Homo sapien
ttttaagtcagagaagcaccacgtc

SEQ ID NO: 2860356 - DNA, 25 bp, Homo sapien
caactcaaagtgtgggcggtggcct

SEQ ID NO: 2860357 - DNA, 25 bp, Homo sapien
gcagttttaccagttgtactcttta

SEQ ID NO: 2860358 - DNA, 25 bp, Homo sapien
tcaggcagccaaaactagactcaaa

SEQ ID NO: 2860359 - DNA, 25 bp, Homo sapien
cattgtttccaccagtgagcacagg

SEQ ID NO: 2860360 - DNA, 25 bp, Homo sapien
gagcacaggtggtacagttcccact

SEQ ID NO: 2860361 - DNA, 25 bp, Homo sapien
gattcaagaaagataagtcagaccc

SEQ ID NO: 2860362 - DNA, 25 bp, Homo sapien
ctggaatctccgcatgtcacgtggg

SEQ ID NO: 2860363 - DNA, 25 bp, Homo sapien
ccgcatgtcacgtgggtttcccgca

SEQ ID NO: 2860364 - DNA, 25 bp, Homo sapien
tctccgcatgtcacgtgggtttccc

SEQ ID NO: 2860365 - DNA, 25 bp, Homo sapien
gaatctccgcatgtcacgtgggttt

SEQ ID NO: 2860366 - DNA, 25 bp, Homo sapien
caaatcatcatggttagcatttcgg

SEQ ID NO: 2860367 - DNA, 25 bp, Homo sapien
aaatcatcatggttagcatttcggt

SEQ ID NO: 2860368 - DNA, 25 bp, Homo sapien
atcatcatggttagcatttcggttt

SEQ ID NO: 2860369 - DNA, 25 bp, Homo sapien
acaaatcatcatggttagcatttcg

SEQ ID NO: 2860370 - DNA, 25 bp, Homo sapien
tctttagagacaaacaatggccttt

SEQ ID NO: 2860371 - DNA, 25 bp, Homo sapien
ccatcaatgaaagcaggcctctaaa

SEQ ID NO: 2860372 - DNA, 25 bp, Homo sapien
tgagagaagtcccagatgaatccct

SEQ ID NO: 2860373 - DNA, 25 bp, Homo sapien
cagcactgcacgaagacatacagag

SEQ ID NO: 2860374 - DNA, 25 bp, Homo sapien
ccttgcacaggacaatcagccagtc

SEQ ID NO: 2860375 - DNA, 25 bp, Homo sapien
actgtccttgcacaggacaatcagc

SEQ ID NO: 2860376 - DNA, 25 bp, Homo sapien
tccttgcacaggacaatcagccagt

SEQ ID NO: 2860377 - DNA, 25 bp, Homo sapien
tgtccttgcacaggacaatcagcca

SEQ ID NO: 2860378 - DNA, 25 bp, Homo sapien
gagctgactgttgtgatccttgaat

SEQ ID NO: 2860379 - DNA, 25 bp, Homo sapien
gaaaccatttaatacagtggagctg

SEQ ID NO: 2860380 - DNA, 25 bp, Homo sapien
ggagtggcccaaatcctaagtgcct

SEQ ID NO: 2860381 - DNA, 25 bp, Homo sapien
aaggcaagtgctgggtagccctgct

SEQ ID NO: 2860382 - DNA, 25 bp, Homo sapien
ggtaacgagaaactcgacatctttc

SEQ ID NO: 2860383 - DNA, 25 bp, Homo sapien
taaattaggtgcaccaggaattatc

SEQ ID NO: 2860384 - DNA, 25 bp, Homo sapien
tctcaagccaatcctgtaagagctg

SEQ ID NO: 2860385 - DNA, 25 bp, Homo sapien
gaccgaaaggactagtcatggtatg

SEQ ID NO: 2860386 - DNA, 25 bp, Homo sapien
tgccttaaatcgtggagaactccag

SEQ ID NO: 2860387 - DNA, 25 bp, Homo sapien
tcattgaatgacctacaaaaagaaa

SEQ ID NO: 2860388 - DNA, 25 bp, Homo sapien
tacccaaaggctaagacacataaag

SEQ ID NO: 2860389 - DNA, 25 bp, Homo sapien
tgactacagcagctttacccaaagg

SEQ ID NO: 2860390 - DNA, 25 bp, Homo sapien
tgccaggggctttatccgaaggtca

SEQ ID NO: 2860391 - DNA, 25 bp, Homo sapien
tttatccgaaggtcatcactacctc

SEQ ID NO: 2860392 - DNA, 25 bp, Homo sapien
gggctttatccgaaggtcatcacta

SEQ ID NO: 2860393 - DNA, 25 bp, Homo sapien
gaaggtcatcactacctcctggtag

SEQ ID NO: 2860394 - DNA, 25 bp, Homo sapien
gatcttgggcatttctggaaagtgt

SEQ ID NO: 2860395 - DNA, 25 bp, Homo sapien
ggccaaggtcctttagatcttgggc

SEQ ID NO: 2860396 - DNA, 25 bp, Homo sapien
tggccaaggtcctttagatcttggg

SEQ ID NO: 2860397 - DNA, 25 bp, Homo sapien
actctgttacagcacttgtcacact

SEQ ID NO: 2860398 - DNA, 25 bp, Homo sapien
gacaccacggacttctgatagtgcc

SEQ ID NO: 2860399 - DNA, 25 bp, Homo sapien
cctgcagttgcttgtataatggtct

SEQ ID NO: 2860400 - DNA, 25 bp, Homo sapien
aatggtctgcccctgcaagacacca

SEQ ID NO: 2860401 - DNA, 25 bp, Homo sapien
aacacacgcacttgttcttcaatgt

SEQ ID NO: 2860402 - DNA, 25 bp, Homo sapien
tccaaacacacgcacttgttcttca

SEQ ID NO: 2860403 - DNA, 25 bp, Homo sapien
tgctccaaacacacgcacttgttct

SEQ ID NO: 2860404 - DNA, 25 bp, Homo sapien
caaacacacgcacttgttcttcaat

SEQ ID NO: 2860405 - DNA, 25 bp, Homo sapien
taagtgtaagtgctttcgtgcctca

SEQ ID NO: 2860406 - DNA, 25 bp, Homo sapien
cattggactagaatcctgcactggg

SEQ ID NO: 2860407 - DNA, 25 bp, Homo sapien
tcgtgcctcaagtaagacagtccat

SEQ ID NO: 2860408 - DNA, 25 bp, Homo sapien
cagtccattcaccaagagtttcatg

SEQ ID NO: 2860409 - DNA, 25 bp, Homo sapien
cataaggtctgtcatagttcacaca

SEQ ID NO: 2860410 - DNA, 25 bp, Homo sapien
gaattagcagccgtgacggtgtcat

SEQ ID NO: 2860411 - DNA, 25 bp, Homo sapien
cacacaatgcctttgaattagcagc

SEQ ID NO: 2860412 - DNA, 25 bp, Homo sapien
tgtcatagttcacacaatgcctttg

SEQ ID NO: 2860413 - DNA, 25 bp, Homo sapien
gggtataagtgaccccactcagagt

SEQ ID NO: 2860414 - DNA, 25 bp, Homo sapien
gagtgtagagacaagccaccaccat

SEQ ID NO: 2860415 - DNA, 25 bp, Homo sapien
ctggcttctgacataagaatgcaga

SEQ ID NO: 2860416 - DNA, 25 bp, Homo sapien
cttctgacataagaatgcagatctg

SEQ ID NO: 2860417 - DNA, 25 bp, Homo sapien
atttccactgagataggacttggct

SEQ ID NO: 2860418 - DNA, 25 bp, Homo sapien
ccactgagataggacttggctgcca

SEQ ID NO: 2860419 - DNA, 25 bp, Homo sapien
ttccactgagataggacttggctgc

SEQ ID NO: 2860420 - DNA, 25 bp, Homo sapien
tccactgagataggacttggctgcc

SEQ ID NO: 2860421 - DNA, 25 bp, Homo sapien
agatatatttgttgtgccgtgttgt

SEQ ID NO: 2860422 - DNA, 25 bp, Homo sapien
aatggtgataatgggatcacaatca

SEQ ID NO: 2860423 - DNA, 25 bp, Homo sapien
ataatggtgataatgggatcacaat

SEQ ID NO: 2860424 - DNA, 25 bp, Homo sapien
taagatatatttgttgtgccgtgtt

SEQ ID NO: 2860425 - DNA, 25 bp, Homo sapien
agtccctctggacagggcctcttga

SEQ ID NO: 2860426 - DNA, 25 bp, Homo sapien
gagacaggagaaagtcaggtttccc

SEQ ID NO: 2860427 - DNA, 25 bp, Homo sapien
tcttgatctccttcaaagccttctt

SEQ ID NO: 2860428 - DNA, 25 bp, Homo sapien
agaaatgtcctctgagacaggagaa

SEQ ID NO: 2860429 - DNA, 25 bp, Homo sapien
aaccctaactcatctgaactgagag

SEQ ID NO: 2860430 - DNA, 25 bp, Homo sapien
ttgtaaccctaactcatctgaactg

SEQ ID NO: 2860431 - DNA, 25 bp, Homo sapien
ggtttgtaaccctaactcatctgaa

SEQ ID NO: 2860432 - DNA, 25 bp, Homo sapien
cctaactcatctgaactgagagatc

SEQ ID NO: 2860433 - DNA, 25 bp, Homo sapien
gagagtctattctctgtgctctagg

SEQ ID NO: 2860434 - DNA, 25 bp, Homo sapien
tagggaggctgttgaagaaagccaa

SEQ ID NO: 2860435 - DNA, 25 bp, Homo sapien
agtgacttggaatcatgcatgacat

SEQ ID NO: 2860436 - DNA, 25 bp, Homo sapien
tgtgtatcaacaagcagtgcacttc

SEQ ID NO: 2860437 - DNA, 25 bp, Homo sapien
tgtccctgggtgtagaccagaaatc

SEQ ID NO: 2860438 - DNA, 25 bp, Homo sapien
actgtccctgggtgtagaccagaaa

SEQ ID NO: 2860439 - DNA, 25 bp, Homo sapien
aatgggtatgtgctaagctgttaca

SEQ ID NO: 2860440 - DNA, 25 bp, Homo sapien
tcaaaagccatacctttgtccaggg

SEQ ID NO: 2860441 - DNA, 25 bp, Homo sapien
tcaattagaaaagccgactgaccag

SEQ ID NO: 2860442 - DNA, 25 bp, Homo sapien
tgaattgcccaaaagtgcacgtctt

SEQ ID NO: 2860443 - DNA, 25 bp, Homo sapien
gactgaccagaaccctagttagtgg

SEQ ID NO: 2860444 - DNA, 25 bp, Homo sapien
cttactatagtggaaatgggactcc

SEQ ID NO: 2860445 - DNA, 25 bp, Homo sapien
taatgcaaagtaacaggcctcagag

SEQ ID NO: 2860446 - DNA, 25 bp, Homo sapien
gaaggctaaaacagctctcagaatg

SEQ ID NO: 2860447 - DNA, 25 bp, Homo sapien
tagaaccatgcacaactagcatgaa

SEQ ID NO: 2860448 - DNA, 25 bp, Homo sapien
tgagactatgtgaacagtacaacct

SEQ ID NO: 2860449 - DNA, 25 bp, Homo sapien
catgactagttgaaacactacggcc

SEQ ID NO: 2860450 - DNA, 25 bp, Homo sapien
ggcactgtactttgcaggcactgtc

SEQ ID NO: 2860451 - DNA, 25 bp, Homo sapien
taggactctaggatcttagcacagg

SEQ ID NO: 2860452 - DNA, 25 bp, Homo sapien
tttctgtaaccaaaggatgtgcaca

SEQ ID NO: 2860453 - DNA, 25 bp, Homo sapien
gaggtcttttttacattcgtgcact

SEQ ID NO: 2860454 - DNA, 25 bp, Homo sapien
ttagaggtcttttttacattcgtgc

SEQ ID NO: 2860455 - DNA, 25 bp, Homo sapien
agaggtcttttttacattcgtgcac

SEQ ID NO: 2860456 - DNA, 25 bp, Homo sapien
ggtcttttttacattcgtgcactaa

SEQ ID NO: 2860457 - DNA, 25 bp, Homo sapien
acaaatagaagtaagctgtttgctg

SEQ ID NO: 2860458 - DNA, 25 bp, Homo sapien
tttcttttaggtgctccaaaatatg

SEQ ID NO: 2860459 - DNA, 25 bp, Homo sapien
taggtgctccaaaatatgcatgact

SEQ ID NO: 2860460 - DNA, 25 bp, Homo sapien
caaatagaagtaagctgtttgctgt

SEQ ID NO: 2860461 - DNA, 25 bp, Homo sapien
attgtaaaagtgtaaagaactgagc

SEQ ID NO: 2860462 - DNA, 25 bp, Homo sapien
gaactggcttttggcatgtattttc

SEQ ID NO: 2860463 - DNA, 25 bp, Homo sapien
cccacagttccaagcccaactctga

SEQ ID NO: 2860464 - DNA, 25 bp, Homo sapien
ttttcctactgcacccagattcact

SEQ ID NO: 2860465 - DNA, 25 bp, Homo sapien
cttttccttatttcgacagccatgt

SEQ ID NO: 2860466 - DNA, 25 bp, Homo sapien
tcttttccttatttcgacagccatg

SEQ ID NO: 2860467 - DNA, 25 bp, Homo sapien
ttccttatttcgacagccatgttta

SEQ ID NO: 2860468 - DNA, 25 bp, Homo sapien
ttttccttatttcgacagccatgtt

SEQ ID NO: 2860469 - DNA, 25 bp, Homo sapien
gggtgattcacaagcacggacatcc

SEQ ID NO: 2860470 - DNA, 25 bp, Homo sapien
taacctgagaaaccgcagctttaga

SEQ ID NO: 2860471 - DNA, 25 bp, Homo sapien
taaataagggtcagttggaaatgcg

SEQ ID NO: 2860472 - DNA, 25 bp, Homo sapien
taaaatagctaaccggccaacagat

SEQ ID NO: 2860473 - DNA, 25 bp, Homo sapien
catcgagcacctcgcactgcaggtg

SEQ ID NO: 2860474 - DNA, 25 bp, Homo sapien
tttatctgtgggtaaagacacaggc

SEQ ID NO: 2860475 - DNA, 25 bp, Homo sapien
gcagagccccgctgttcatgtgtga

SEQ ID NO: 2860476 - DNA, 25 bp, Homo sapien
caggtgcaccccaagacggtgcaga

SEQ ID NO: 2860477 - DNA, 25 bp, Homo sapien
attatctacaaggatacagctattg

SEQ ID NO: 2860478 - DNA, 25 bp, Homo sapien
ttatctacaaggatacagctattgt

SEQ ID NO: 2860479 - DNA, 25 bp, Homo sapien
gattatctacaaggatacagctatt

SEQ ID NO: 2860480 - DNA, 25 bp, Homo sapien
accatctccatctattaacctaggg

SEQ ID NO: 2860481 - DNA, 25 bp, Homo sapien
ttcccaccagattttcctcctgcta

SEQ ID NO: 2860482 - DNA, 25 bp, Homo sapien
catctattaacctagggttctcttc

SEQ ID NO: 2860483 - DNA, 25 bp, Homo sapien
tctccatctattaacctagggttct

SEQ ID NO: 2860484 - DNA, 25 bp, Homo sapien
gaactcagggatcaagcaatcttcc

SEQ ID NO: 2860485 - DNA, 25 bp, Homo sapien
ctgcaatgcagttgcagtggtgcaa

SEQ ID NO: 2860486 - DNA, 25 bp, Homo sapien
gcagccttgaactcagggatcaagc

SEQ ID NO: 2860487 - DNA, 25 bp, Homo sapien
ggctgcaatgcagttgcagtggtgc

SEQ ID NO: 2860488 - DNA, 25 bp, Homo sapien
tgctgaccgcaaaggcaattcctga

SEQ ID NO: 2860489 - DNA, 25 bp, Homo sapien
taagcaattatcctgtaccgctggg

SEQ ID NO: 2860490 - DNA, 25 bp, Homo sapien
tcaacatttccagaggatgcctgcc

SEQ ID NO: 2860491 - DNA, 25 bp, Homo sapien
taccgctgggtcacattatgcaact

SEQ ID NO: 2860492 - DNA, 25 bp, Homo sapien
tttctgagaattttccatcagtgtt

SEQ ID NO: 2860493 - DNA, 25 bp, Homo sapien
taacacacgtcagtgggcttgaatg

SEQ ID NO: 2860494 - DNA, 25 bp, Homo sapien
cagtgggcttgaatgatttctgaga

SEQ ID NO: 2860495 - DNA, 25 bp, Homo sapien
tttctcgatcctagtgattccagca

SEQ ID NO: 2860496 - DNA, 25 bp, Homo sapien
aagatgtgctctggccccggtgttt

SEQ ID NO: 2860497 - DNA, 25 bp, Homo sapien
tgaacaaattaagcacgttctggtt

SEQ ID NO: 2860498 - DNA, 25 bp, Homo sapien
aaaagatgtgctctggccccggtgt

SEQ ID NO: 2860499 - DNA, 25 bp, Homo sapien
tgttgaacaaattaagcacgttctg

SEQ ID NO: 2860500 - DNA, 25 bp, Homo sapien
tggtaatgcatcacagaagtaggac

SEQ ID NO: 2860501 - DNA, 25 bp, Homo sapien
tgttgccttttcacggagggagaca

SEQ ID NO: 2860502 - DNA, 25 bp, Homo sapien
ggaattccgtggagacacacaagca

SEQ ID NO: 2860503 - DNA, 25 bp, Homo sapien
tattaagaaccttcacgtgtgggag

SEQ ID NO: 2860504 - DNA, 25 bp, Homo sapien
actgctagaattgtctgcgtgcatt

SEQ ID NO: 2860505 - DNA, 25 bp, Homo sapien
tctgcgtgcattgtccaagccagct

SEQ ID NO: 2860506 - DNA, 25 bp, Homo sapien
tcagcgggtatacatttggagccat

SEQ ID NO: 2860507 - DNA, 25 bp, Homo sapien
ccaagccagctcagcgggtatacat

SEQ ID NO: 2860508 - DNA, 25 bp, Homo sapien
tccccggagagggttatctcataga

SEQ ID NO: 2860509 - DNA, 25 bp, Homo sapien
taagtagccagaggagaaaatcccc

SEQ ID NO: 2860510 - DNA, 25 bp, Homo sapien
gacatattccaacaacggtgctcat

SEQ ID NO: 2860511 - DNA, 25 bp, Homo sapien
tgggtaacatgtggtctaagtagcc

SEQ ID NO: 2860512 - DNA, 25 bp, Homo sapien
tcagcagatagtcctgccaaaggtc

SEQ ID NO: 2860513 - DNA, 25 bp, Homo sapien
ccaaaggtcatccttcaggttcaca

SEQ ID NO: 2860514 - DNA, 25 bp, Homo sapien
cacctaatgcaatctgtgactcgca

SEQ ID NO: 2860515 - DNA, 25 bp, Homo sapien
gctcctatggttccaagtcaaggtt

SEQ ID NO: 2860516 - DNA, 25 bp, Homo sapien
cccaataattggcacagcaaagtta

SEQ ID NO: 2860517 - DNA, 25 bp, Homo sapien
tcaacaccgcaagcccaataattgg

SEQ ID NO: 2860518 - DNA, 25 bp, Homo sapien
ggtctgagatcttcaacaccgcaag

SEQ ID NO: 2860519 - DNA, 25 bp, Homo sapien
cacttccaaccctggtctgagatct

SEQ ID NO: 2860520 - DNA, 25 bp, Homo sapien
gcgatttgaacgcagaaagcccctc

SEQ ID NO: 2860521 - DNA, 25 bp, Homo sapien
tgcaaagcacgaagcaaccacagtt

SEQ ID NO: 2860522 - DNA, 25 bp, Homo sapien
tgcagtaacagaggtcacagtcttc

SEQ ID NO: 2860523 - DNA, 25 bp, Homo sapien
tctgtccaggtggaatgagacacac

SEQ ID NO: 2860524 - DNA, 25 bp, Homo sapien
tgataagtaacacccttccaatggg

SEQ ID NO: 2860525 - DNA, 25 bp, Homo sapien
gctgagcttctgcaatatcgggcaa

SEQ ID NO: 2860526 - DNA, 25 bp, Homo sapien
gcctcttcatcaaagcaaagctaga

SEQ ID NO: 2860527 - DNA, 25 bp, Homo sapien
gccttattatggagggtgggtctca

SEQ ID NO: 2860528 - DNA, 25 bp, Homo sapien
gccattctgggtacttcccagaaaa

SEQ ID NO: 2860529 - DNA, 25 bp, Homo sapien
ccagaggccgtctgcacccaataga

SEQ ID NO: 2860530 - DNA, 25 bp, Homo sapien
aggccgtctgcacccaatagataag

SEQ ID NO: 2860531 - DNA, 25 bp, Homo sapien
caatagataagatgaggcaaagaaa

SEQ ID NO: 2860532 - DNA, 25 bp, Homo sapien
taccctggtagcataggctgtgcca

SEQ ID NO: 2860533 - DNA, 25 bp, Homo sapien
ttagtaattaacagaccccgccaga

SEQ ID NO: 2860534 - DNA, 25 bp, Homo sapien
tctacagtgtttctatggcagcctg

SEQ ID NO: 2860535 - DNA, 25 bp, Homo sapien
ggttctgcgcctctgatcacactga

SEQ ID NO: 2860536 - DNA, 25 bp, Homo sapien
gaaatgttgacacatcctcctagaa

SEQ ID NO: 2860537 - DNA, 25 bp, Homo sapien
tagcactcagcaccagtatggatac

SEQ ID NO: 2860538 - DNA, 25 bp, Homo sapien
taaactagttagctgcagaggtacc

SEQ ID NO: 2860539 - DNA, 25 bp, Homo sapien
gctcagaagttctaacaaggtggta

SEQ ID NO: 2860540 - DNA, 25 bp, Homo sapien
aatgacttatgggagccgaatctca

SEQ ID NO: 2860541 - DNA, 25 bp, Homo sapien
aaaaacgaaacttgccctcattcag

SEQ ID NO: 2860542 - DNA, 25 bp, Homo sapien
ggagccacaggcagatttcaccatg

SEQ ID NO: 2860543 - DNA, 25 bp, Homo sapien
tccacaaaggacagtctgcgttgat

SEQ ID NO: 2860544 - DNA, 25 bp, Homo sapien
actgaacaacttggagattgtgtgc

SEQ ID NO: 2860545 - DNA, 25 bp, Homo sapien
tgggtgtgatggatcctgcaaactg

SEQ ID NO: 2860546 - DNA, 25 bp, Homo sapien
acaaagcaactagccaaggagctgg

SEQ ID NO: 2860547 - DNA, 25 bp, Homo sapien
gctgcagcctttgctagtaagagaa

SEQ ID NO: 2860548 - DNA, 25 bp, Homo sapien
ggcatcccggtttttggcattttca

SEQ ID NO: 2860549 - DNA, 25 bp, Homo sapien
acttctgtatgtttcgggaagttct

SEQ ID NO: 2860550 - DNA, 25 bp, Homo sapien
agaagaggcatcccggtttttggca

SEQ ID NO: 2860551 - DNA, 25 bp, Homo sapien
ttctgtatgtttcgggaagttctcg

SEQ ID NO: 2860552 - DNA, 25 bp, Homo sapien
atttacctcctgtgtagaaatggag

SEQ ID NO: 2860553 - DNA, 25 bp, Homo sapien
gagaacaggagaaatgtggagcccc

SEQ ID NO: 2860554 - DNA, 25 bp, Homo sapien
aaggttttctctaatctatgccatg

SEQ ID NO: 2860555 - DNA, 25 bp, Homo sapien
cagccaacagaaatcgtaaaggaga

SEQ ID NO: 2860556 - DNA, 25 bp, Homo sapien
cttcagaaatctggacgtggacacc

SEQ ID NO: 2860557 - DNA, 25 bp, Homo sapien
ttcagaaatctggacgtggacacca

SEQ ID NO: 2860558 - DNA, 25 bp, Homo sapien
atgtggcattctcgtcttcatggac

SEQ ID NO: 2860559 - DNA, 25 bp, Homo sapien
cgatggttatcgacattagaaaatg

SEQ ID NO: 2860560 - DNA, 25 bp, Homo sapien
ccgagctctcgatggttatcgacat

SEQ ID NO: 2860561 - DNA, 25 bp, Homo sapien
tcatggacagagaagccgagctctc

SEQ ID NO: 2860562 - DNA, 25 bp, Homo sapien
gatgcagcctaatggtctctgaatg

SEQ ID NO: 2860563 - DNA, 25 bp, Homo sapien
atgcagcctaatggtctctgaatgt

SEQ ID NO: 2860564 - DNA, 25 bp, Homo sapien
ttcagatcaagttctatgctgcagt

SEQ ID NO: 2860565 - DNA, 25 bp, Homo sapien
cttttcagatcaagttctatgctgc

SEQ ID NO: 2860566 - DNA, 25 bp, Homo sapien
tgagactgacatctgacagagctcg

SEQ ID NO: 2860567 - DNA, 25 bp, Homo sapien
agagctcggtggtgtcctaacttga

SEQ ID NO: 2860568 - DNA, 25 bp, Homo sapien
tgtgtttcccggcaaagaggttaga

SEQ ID NO: 2860569 - DNA, 25 bp, Homo sapien
tatcttttacacgaggcttagaggg

SEQ ID NO: 2860570 - DNA, 25 bp, Homo sapien
acaggccgatcaaccatctttccat

SEQ ID NO: 2860571 - DNA, 25 bp, Homo sapien
taccaattgtcacaggtttggactg

SEQ ID NO: 2860572 - DNA, 25 bp, Homo sapien
tccatacaaacgctgaaggttacca

SEQ ID NO: 2860573 - DNA, 25 bp, Homo sapien
cttgcatctgtgccgatgcacaggc

SEQ ID NO: 2860574 - DNA, 25 bp, Homo sapien
caccctggaaaagtgccgaggacct

SEQ ID NO: 2860575 - DNA, 25 bp, Homo sapien
catcctgttagtggaactgacccag

SEQ ID NO: 2860576 - DNA, 25 bp, Homo sapien
tgggaaggtgctcatcctgacaggc

SEQ ID NO: 2860577 - DNA, 25 bp, Homo sapien
tccgtgctgattgtccatgaagggc

SEQ ID NO: 2860578 - DNA, 25 bp, Homo sapien
cacggggcccaagaaatggccccag

SEQ ID NO: 2860579 - DNA, 25 bp, Homo sapien
gatggcttccgatctcactcagagt

SEQ ID NO: 2860580 - DNA, 25 bp, Homo sapien
gcagcgccacctgctactttcttgc

SEQ ID NO: 2860581 - DNA, 25 bp, Homo sapien
tgtcctccactttcgatggcttccg

SEQ ID NO: 2860582 - DNA, 25 bp, Homo sapien
tgttcacagcctcaaggaaggtagc

SEQ ID NO: 2860583 - DNA, 25 bp, Homo sapien
cattggaaacatacacggcttcgag

SEQ ID NO: 2860584 - DNA, 25 bp, Homo sapien
caagtagttgccctattcagactga

SEQ ID NO: 2860585 - DNA, 25 bp, Homo sapien
tgatttctagccctccatgattgga

SEQ ID NO: 2860586 - DNA, 25 bp, Homo sapien
caaactggtcttaaatggacagcga

SEQ ID NO: 2860587 - DNA, 25 bp, Homo sapien
ccagtaagaagctcttgttgggaaa

SEQ ID NO: 2860588 - DNA, 25 bp, Homo sapien
gacagcgactatcatggaaccagag

SEQ ID NO: 2860589 - DNA, 25 bp, Homo sapien
ctacacccaaatgaactcctcctgc

SEQ ID NO: 2860590 - DNA, 25 bp, Homo sapien
atgcggccgctgtgaggctggaaac

SEQ ID NO: 2860591 - DNA, 25 bp, Homo sapien
gacatgcggccgctgtgaggctgga

SEQ ID NO: 2860592 - DNA, 25 bp, Homo sapien
cccgacatgcggccgctgtgaggct

SEQ ID NO: 2860593 - DNA, 25 bp, Homo sapien
ggtgcgccctgacccccgacatgcg

SEQ ID NO: 2860594 - DNA, 25 bp, Homo sapien
taagtctaaaaacatatgagggcaa

SEQ ID NO: 2860595 - DNA, 25 bp, Homo sapien
taggagaatcactcagtttccaagc

SEQ ID NO: 2860596 - DNA, 25 bp, Homo sapien
aatatgcatcctttctttgagagac

SEQ ID NO: 2860597 - DNA, 25 bp, Homo sapien
ccattcggtgtagaagaaaaatcaa

SEQ ID NO: 2860598 - DNA, 25 bp, Homo sapien
aagtgataggtttttgcgatggtaa

SEQ ID NO: 2860599 - DNA, 25 bp, Homo sapien
tgtaatattaatgagccaggatgga

SEQ ID NO: 2860600 - DNA, 25 bp, Homo sapien
gtattgatttttcccggcactaatg

SEQ ID NO: 2860601 - DNA, 25 bp, Homo sapien
gcttattgtaagacaccacaggcaa

SEQ ID NO: 2860602 - DNA, 25 bp, Homo sapien
gacaaggatactgggaaattcaact

SEQ ID NO: 2860603 - DNA, 25 bp, Homo sapien
catttgtactttaggttggtgccca

SEQ ID NO: 2860604 - DNA, 25 bp, Homo sapien
gagaaggcagtaataacgctaatca

SEQ ID NO: 2860605 - DNA, 25 bp, Homo sapien
tgcaaaggtcattctctggcccctt

SEQ ID NO: 2860606 - DNA, 25 bp, Homo sapien
tagagatgttcagccatagagagaa

SEQ ID NO: 2860607 - DNA, 25 bp, Homo sapien
agtagagatgttcagccatagagag

SEQ ID NO: 2860608 - DNA, 25 bp, Homo sapien
gtagagatgttcagccatagagaga

SEQ ID NO: 2860609 - DNA, 25 bp, Homo sapien
ctccaaacctgggtcagcgtctgac

SEQ ID NO: 2860610 - DNA, 25 bp, Homo sapien
ctctctccaaacctgggtcagcgtc

SEQ ID NO: 2860611 - DNA, 25 bp, Homo sapien
aaacctgggtcagcgtctgactcac

SEQ ID NO: 2860612 - DNA, 25 bp, Homo sapien
tcctctctccaaacctgggtcagcg

SEQ ID NO: 2860613 - DNA, 25 bp, Homo sapien
aatgggccatattcagcaagggtag

SEQ ID NO: 2860614 - DNA, 25 bp, Homo sapien
cagtaaggctcaatcaaaggtgcag

SEQ ID NO: 2860615 - DNA, 25 bp, Homo sapien
cacaagctcctaacaaaatggcgca

SEQ ID NO: 2860616 - DNA, 25 bp, Homo sapien
tctccatggcgtgaacaggaattgg

SEQ ID NO: 2860617 - DNA, 25 bp, Homo sapien
aggcaacgaggatataaagattaac

SEQ ID NO: 2860618 - DNA, 25 bp, Homo sapien
gattaacaagattaaattacctgag

SEQ ID NO: 2860619 - DNA, 25 bp, Homo sapien
caacgaggatataaagattaacaag

SEQ ID NO: 2860620 - DNA, 25 bp, Homo sapien
gattaaattacctgagggccataac

SEQ ID NO: 2860621 - DNA, 25 bp, Homo sapien
tgttgacaaggcattcacagtctaa

SEQ ID NO: 2860622 - DNA, 25 bp, Homo sapien
tgttacctcatagggcaaagctgtc

SEQ ID NO: 2860623 - DNA, 25 bp, Homo sapien
cactttacctaagaggccctggata

SEQ ID NO: 2860624 - DNA, 25 bp, Homo sapien
tggtctgctcccctatgaggaactg

SEQ ID NO: 2860625 - DNA, 25 bp, Homo sapien
tataagggttctctttgtcaggaac

SEQ ID NO: 2860626 - DNA, 25 bp, Homo sapien
tcaaattactgtgatggcccagaag

SEQ ID NO: 2860627 - DNA, 25 bp, Homo sapien
tgtcaggaaccttgaaaaagctgta

SEQ ID NO: 2860628 - DNA, 25 bp, Homo sapien
tctagtaggtctcttgtcagaaaaa

SEQ ID NO: 2860629 - DNA, 25 bp, Homo sapien
cttgatatttcccatacgactaatt

SEQ ID NO: 2860630 - DNA, 25 bp, Homo sapien
tcccatacgactaatttacaacaca

SEQ ID NO: 2860631 - DNA, 25 bp, Homo sapien
tatttcccatacgactaatttacaa

SEQ ID NO: 2860632 - DNA, 25 bp, Homo sapien
ccatacgactaatttacaacacaat

SEQ ID NO: 2860633 - DNA, 25 bp, Homo sapien
tgataaatgctgagccacaagccat

SEQ ID NO: 2860634 - DNA, 25 bp, Homo sapien
ttggctctcctgtccggcacaggcc

SEQ ID NO: 2860635 - DNA, 25 bp, Homo sapien
tcctgtccggcacaggccccgggtg

SEQ ID NO: 2860636 - DNA, 25 bp, Homo sapien
ggagttgtgtgataaatgctgagcc

SEQ ID NO: 2860637 - DNA, 25 bp, Homo sapien
ctatacgctgactcttgagaagagt

SEQ ID NO: 2860638 - DNA, 25 bp, Homo sapien
tacgctgactcttgagaagagtggg

SEQ ID NO: 2860639 - DNA, 25 bp, Homo sapien
tatacgctgactcttgagaagagtg

SEQ ID NO: 2860640 - DNA, 25 bp, Homo sapien
cgctgactcttgagaagagtgggac

SEQ ID NO: 2860641 - DNA, 25 bp, Homo sapien
ggaacatcgttgacgtgtccttcag

SEQ ID NO: 2860642 - DNA, 25 bp, Homo sapien
catcgttgacgtgtccttcagtgtc

SEQ ID NO: 2860643 - DNA, 25 bp, Homo sapien
gccccagaggaacatcgttgacgtg

SEQ ID NO: 2860644 - DNA, 25 bp, Homo sapien
tgacgtgtccttcagtgtcatgcat

SEQ ID NO: 2860645 - DNA, 25 bp, Homo sapien
tccaacacctaattgagcgacaacc

SEQ ID NO: 2860646 - DNA, 25 bp, Homo sapien
cagctggacagcgacagtctgtacc

SEQ ID NO: 2860647 - DNA, 25 bp, Homo sapien
ggctgtctgatacccagcaaatcct

SEQ ID NO: 2860648 - DNA, 25 bp, Homo sapien
tgagcgacaaccctccatatcacag

SEQ ID NO: 2860649 - DNA, 25 bp, Homo sapien
tactgaatcgatggattatcaaggg

SEQ ID NO: 2860650 - DNA, 25 bp, Homo sapien
gaggtctctggttggtatctggcac

SEQ ID NO: 2860651 - DNA, 25 bp, Homo sapien
taaaaattctactcacaggcatagc

SEQ ID NO: 2860652 - DNA, 25 bp, Homo sapien
ggattgagtgtgacctacaaagagg

SEQ ID NO: 2860653 - DNA, 25 bp, Homo sapien
gggtcccaagaacgctgagcaacat

SEQ ID NO: 2860654 - DNA, 25 bp, Homo sapien
tcaagactcagggtgcacacatgag

SEQ ID NO: 2860655 - DNA, 25 bp, Homo sapien
gccttgaaagtgaactcagggcctt

SEQ ID NO: 2860656 - DNA, 25 bp, Homo sapien
aaaagccctttgtctactcctcaag

SEQ ID NO: 2860657 - DNA, 25 bp, Homo sapien
ggtgcttgtccttacgccatgcaaa

SEQ ID NO: 2860658 - DNA, 25 bp, Homo sapien
aaaggaagaagtccaagcctcccag

SEQ ID NO: 2860659 - DNA, 25 bp, Homo sapien
tttgctagctctacagcaggctctc

SEQ ID NO: 2860660 - DNA, 25 bp, Homo sapien
gaatttaccagatacccactatgtg

SEQ ID NO: 2860661 - DNA, 25 bp, Homo sapien
gaaaaaggcaatatgccgttagcct

SEQ ID NO: 2860662 - DNA, 25 bp, Homo sapien
aatatgccgttagcctgacatatac

SEQ ID NO: 2860663 - DNA, 25 bp, Homo sapien
ggcaatatgccgttagcctgacata

SEQ ID NO: 2860664 - DNA, 25 bp, Homo sapien
aaaaggcaatatgccgttagcctga

SEQ ID NO: 2860665 - DNA, 25 bp, Homo sapien
gcttttccgctcattgtcaacacag

SEQ ID NO: 2860666 - DNA, 25 bp, Homo sapien
ctcgcttttccgctcattgtcaaca

SEQ ID NO: 2860667 - DNA, 25 bp, Homo sapien
aatgtgagacgattgtcagcttttc

SEQ ID NO: 2860668 - DNA, 25 bp, Homo sapien
tgatggtgtagttcattaatgtgag

SEQ ID NO: 2860669 - DNA, 25 bp, Homo sapien
tataggcacctaaaattgtacttga

SEQ ID NO: 2860670 - DNA, 25 bp, Homo sapien
aatctccacccttttcaagccagag

SEQ ID NO: 2860671 - DNA, 25 bp, Homo sapien
tcaaaggatgaagccatataggcac

SEQ ID NO: 2860672 - DNA, 25 bp, Homo sapien
tagtttgagttcaaggctgacatag

SEQ ID NO: 2860673 - DNA, 25 bp, Homo sapien
tttgaataccactagaaggcacagg

SEQ ID NO: 2860674 - DNA, 25 bp, Homo sapien
ttattctgaagatgtgctaaatttc

SEQ ID NO: 2860675 - DNA, 25 bp, Homo sapien
cttgggtggtaatgtgctaatgaca

SEQ ID NO: 2860676 - DNA, 25 bp, Homo sapien
tcttgagttgaattgtgaagtattt

SEQ ID NO: 2860677 - DNA, 25 bp, Homo sapien
agccagccagcaatatatctgccca

SEQ ID NO: 2860678 - DNA, 25 bp, Homo sapien
gccagccagcaatatatctgcccat

SEQ ID NO: 2860679 - DNA, 25 bp, Homo sapien
ttttagactcaaggaatgtaagatg

SEQ ID NO: 2860680 - DNA, 25 bp, Homo sapien
ctcttttagactcaaggaatgtaag

SEQ ID NO: 2860681 - DNA, 25 bp, Homo sapien
gctggaagtaggaggtgattttgac

SEQ ID NO: 2860682 - DNA, 25 bp, Homo sapien
gtaatattagcaaagggacacttta

SEQ ID NO: 2860683 - DNA, 25 bp, Homo sapien
aggcaatcctcccaacttggcaacc

SEQ ID NO: 2860684 - DNA, 25 bp, Homo sapien
tcccaacttggcaacccaaagtgct

SEQ ID NO: 2860685 - DNA, 25 bp, Homo sapien
acaggcaagccactatgctctgcta

SEQ ID NO: 2860686 - DNA, 25 bp, Homo sapien
ggcaagccactatgctctgctaatt

SEQ ID NO: 2860687 - DNA, 25 bp, Homo sapien
ttcagtgggttttctccccatccca

SEQ ID NO: 2860688 - DNA, 25 bp, Homo sapien
tcagtgggttttctccccatcccac

SEQ ID NO: 2860689 - DNA, 25 bp, Homo sapien
cttgtacacatttaaacgagttcca

SEQ ID NO: 2860690 - DNA, 25 bp, Homo sapien
gacagtggctatacggtccgcatct

SEQ ID NO: 2860691 - DNA, 25 bp, Homo sapien
tagccacaaagtcgggtcctagact

SEQ ID NO: 2860692 - DNA, 25 bp, Homo sapien
aaccacctggagttgtgctctaaga

SEQ ID NO: 2860693 - DNA, 25 bp, Homo sapien
tcagaaggataattgcatgcacagt

SEQ ID NO: 2860694 - DNA, 25 bp, Homo sapien
taacagcgctaagagttgaacccag

SEQ ID NO: 2860695 - DNA, 25 bp, Homo sapien
tgtactgggccctgaaccaaatgct

SEQ ID NO: 2860696 - DNA, 25 bp, Homo sapien
tttgccccaaatcacgtagctagta

SEQ ID NO: 2860697 - DNA, 25 bp, Homo sapien
cctagactttctgtgtatacctgca

SEQ ID NO: 2860698 - DNA, 25 bp, Homo sapien
tcttgtggatataaatgtcgggctc

SEQ ID NO: 2860699 - DNA, 25 bp, Homo sapien
tgtcgggctcatataactaagtgtg

SEQ ID NO: 2860700 - DNA, 25 bp, Homo sapien
gaaagccctttagtaagccaccaca

SEQ ID NO: 2860701 - DNA, 25 bp, Homo sapien
ttgatagagtttctttcacgccagt

SEQ ID NO: 2860702 - DNA, 25 bp, Homo sapien
gagtttctttcacgccagtggctcc

SEQ ID NO: 2860703 - DNA, 25 bp, Homo sapien
gcgatttgcattaaaactggatttg

SEQ ID NO: 2860704 - DNA, 25 bp, Homo sapien
tgccaacagcgatttgcattaaaac

SEQ ID NO: 2860705 - DNA, 25 bp, Homo sapien
tgctccgattgttctcggtgcatct

SEQ ID NO: 2860706 - DNA, 25 bp, Homo sapien
aggatacgttaacataggtcagttt

SEQ ID NO: 2860707 - DNA, 25 bp, Homo sapien
ctgataaggatacgttaacataggt

SEQ ID NO: 2860708 - DNA, 25 bp, Homo sapien
taaggatacgttaacataggtcagt

SEQ ID NO: 2860709 - DNA, 25 bp, Homo sapien
gataaggatacgttaacataggtca

SEQ ID NO: 2860710 - DNA, 25 bp, Homo sapien
acaggcaatcccgtgtgtgagcaca

SEQ ID NO: 2860711 - DNA, 25 bp, Homo sapien
gaagttctgggaatctcccgccaaa

SEQ ID NO: 2860712 - DNA, 25 bp, Homo sapien
ttaataatgctaccaaccttggagg

SEQ ID NO: 2860713 - DNA, 25 bp, Homo sapien
tcttgcacccctgacaatactggag

SEQ ID NO: 2860714 - DNA, 25 bp, Homo sapien
ccccactgtgttccacggtctgaaa

SEQ ID NO: 2860715 - DNA, 25 bp, Homo sapien
ttgtccctgtgcctcatactgatag

SEQ ID NO: 2860716 - DNA, 25 bp, Homo sapien
gtgaagcccttggaacagaggcacc

SEQ ID NO: 2860717 - DNA, 25 bp, Homo sapien
tactgatagacttgaccccactgtg

SEQ ID NO: 2860718 - DNA, 25 bp, Homo sapien
tacatcccagcataagcaaaggagc

SEQ ID NO: 2860719 - DNA, 25 bp, Homo sapien
gatcatgaatgaagcactagagaga

SEQ ID NO: 2860720 - DNA, 25 bp, Homo sapien
cagaggcgagcctttgtgtggatcc

SEQ ID NO: 2860721 - DNA, 25 bp, Homo sapien
gcaggacagattccctccagaggag

SEQ ID NO: 2860722 - DNA, 25 bp, Homo sapien
ggagcaagaaattggcgatgagcaa

SEQ ID NO: 2860723 - DNA, 25 bp, Homo sapien
agggacaacaggatccgatctgagc

SEQ ID NO: 2860724 - DNA, 25 bp, Homo sapien
ggcgatgagcaagtactgaatgtgt

SEQ ID NO: 2860725 - DNA, 25 bp, Homo sapien
caacaggatccgatctgagcggagg

SEQ ID NO: 2860726 - DNA, 25 bp, Homo sapien
tcgcagaagcatggacactcctgag

SEQ ID NO: 2860727 - DNA, 25 bp, Homo sapien
agagggttccaatgaatgtgagcca

SEQ ID NO: 2860728 - DNA, 25 bp, Homo sapien
ggctgaaaaggtgaatttaagccca

SEQ ID NO: 2860729 - DNA, 25 bp, Homo sapien
agaaagaagtctgggtcgcagaagc

SEQ ID NO: 2860730 - DNA, 25 bp, Homo sapien
tcggaatttataaaagaggatcacc

SEQ ID NO: 2860731 - DNA, 25 bp, Homo sapien
gatcaccaactagaaagggatcctg

SEQ ID NO: 2860732 - DNA, 25 bp, Homo sapien
tatgcacctccaacaacgaaagcct

SEQ ID NO: 2860733 - DNA, 25 bp, Homo sapien
gggcctaaacaacatttggagctgt

SEQ ID NO: 2860734 - DNA, 25 bp, Homo sapien
caaatgtttcctgtgctatataaag

SEQ ID NO: 2860735 - DNA, 25 bp, Homo sapien
tttactagcagtcccaaatgtttcc

SEQ ID NO: 2860736 - DNA, 25 bp, Homo sapien
acgtatttactagcagtcccaaatg

SEQ ID NO: 2860737 - DNA, 25 bp, Homo sapien
gtgctatataaagtctacatttgac

SEQ ID NO: 2860738 - DNA, 25 bp, Homo sapien
ccaaatcgaaaggtcgcaaactcac

SEQ ID NO: 2860739 - DNA, 25 bp, Homo sapien
tgtggcacagtcactagcacatctc

SEQ ID NO: 2860740 - DNA, 25 bp, Homo sapien
catgcattcagtctgaagcccaaat

SEQ ID NO: 2860741 - DNA, 25 bp, Homo sapien
tcactagcacatctccagttttaaa

SEQ ID NO: 2860742 - DNA, 25 bp, Homo sapien
aatacatggaaaccacaacacagca

SEQ ID NO: 2860743 - DNA, 25 bp, Homo sapien
gcaatgcgtggaatgtaaaaataca

SEQ ID NO: 2860744 - DNA, 25 bp, Homo sapien
tagagcttgctcctatacacagttc

SEQ ID NO: 2860745 - DNA, 25 bp, Homo sapien
tgctcctatacacagttcagcaatg

SEQ ID NO: 2860746 - DNA, 25 bp, Homo sapien
gggtgcagttgcaaatcagccacac

SEQ ID NO: 2860747 - DNA, 25 bp, Homo sapien
tccagtcaatatcaacaggtgtaac

SEQ ID NO: 2860748 - DNA, 25 bp, Homo sapien
ctctggtatgtgtaggttgttttca

SEQ ID NO: 2860749 - DNA, 25 bp, Homo sapien
tcagtttagcatctccaccaagaag

SEQ ID NO: 2860750 - DNA, 25 bp, Homo sapien
tttgtgccagaatcatctcctgtaa

SEQ ID NO: 2860751 - DNA, 25 bp, Homo sapien
ttgtgccagaatcatctcctgtaat

SEQ ID NO: 2860752 - DNA, 25 bp, Homo sapien
atttgtgccagaatcatctcctgta

SEQ ID NO: 2860753 - DNA, 25 bp, Homo sapien
aatttgtgccagaatcatctcctgt

SEQ ID NO: 2860754 - DNA, 25 bp, Homo sapien
ttagaaatcaagacacgccactggc

SEQ ID NO: 2860755 - DNA, 25 bp, Homo sapien
gccttatggcagattccgggttaca

SEQ ID NO: 2860756 - DNA, 25 bp, Homo sapien
tattgcataggaagggatttccctc

SEQ ID NO: 2860757 - DNA, 25 bp, Homo sapien
catctgatttcaaagactaggccct

SEQ ID NO: 2860758 - DNA, 25 bp, Homo sapien
tcgtaagattagatcctggatacag

SEQ ID NO: 2860759 - DNA, 25 bp, Homo sapien
ttccactccgcagcacaggaaaggc

SEQ ID NO: 2860760 - DNA, 25 bp, Homo sapien
gcttttcctaccattaatcgtaaga

SEQ ID NO: 2860761 - DNA, 25 bp, Homo sapien
tctgagcataactccagagccccag

SEQ ID NO: 2860762 - DNA, 25 bp, Homo sapien
attatggaaattgggccagagcgcc

SEQ ID NO: 2860763 - DNA, 25 bp, Homo sapien
aaaggcagtgagcaattatggaaat

SEQ ID NO: 2860764 - DNA, 25 bp, Homo sapien
accttgacagcaaatcgattagtgc

SEQ ID NO: 2860765 - DNA, 25 bp, Homo sapien
tagtgctccagtgaagcggctcagt

SEQ ID NO: 2860766 - DNA, 25 bp, Homo sapien
gctacaagctacttcattgtcgttg

SEQ ID NO: 2860767 - DNA, 25 bp, Homo sapien
gctacttcattgtcgttgttttcca

SEQ ID NO: 2860768 - DNA, 25 bp, Homo sapien
atcgctttacacacattaggcagca

SEQ ID NO: 2860769 - DNA, 25 bp, Homo sapien
cacattaggcagcaagctacaagct

SEQ ID NO: 2860770 - DNA, 25 bp, Homo sapien
cttgtccaaccaggacaatgcccta

SEQ ID NO: 2860771 - DNA, 25 bp, Homo sapien
ggacaatgccctatccccatttttc

SEQ ID NO: 2860772 - DNA, 25 bp, Homo sapien
caaccaggacaatgccctatcccca

SEQ ID NO: 2860773 - DNA, 25 bp, Homo sapien
tgtccaaccaggacaatgccctatc

SEQ ID NO: 2860774 - DNA, 25 bp, Homo sapien
aatatcgaatgagtacagaccacca

SEQ ID NO: 2860775 - DNA, 25 bp, Homo sapien
gatatacacagctaggtttaaaata

SEQ ID NO: 2860776 - DNA, 25 bp, Homo sapien
gtccccagacccttgatatacacag

SEQ ID NO: 2860777 - DNA, 25 bp, Homo sapien
cagaccaccatttctaataatgagg

SEQ ID NO: 2860778 - DNA, 25 bp, Homo sapien
caaaaacagggtgagggccgttcag

SEQ ID NO: 2860779 - DNA, 25 bp, Homo sapien
ccagcatgctagcaggtatttatca

SEQ ID NO: 2860780 - DNA, 25 bp, Homo sapien
tgttttcagtggaagcagtacacag

SEQ ID NO: 2860781 - DNA, 25 bp, Homo sapien
ttcaggatccacaagagactctttc

SEQ ID NO: 2860782 - DNA, 25 bp, Homo sapien
gccaattttcctaagtggtgagtca

SEQ ID NO: 2860783 - DNA, 25 bp, Homo sapien
caattttctgcttgtgaaatgtaac

SEQ ID NO: 2860784 - DNA, 25 bp, Homo sapien
gcctttgacacataattggtagcca

SEQ ID NO: 2860785 - DNA, 25 bp, Homo sapien
tgtgaaatgtaactttaccctggtg

SEQ ID NO: 2860786 - DNA, 25 bp, Homo sapien
ctcgctacgtgtcgctaacaacaac

SEQ ID NO: 2860787 - DNA, 25 bp, Homo sapien
ggaactcgctacgtgtcgctaacaa

SEQ ID NO: 2860788 - DNA, 25 bp, Homo sapien
ttaggaggaactcgctacgtgtcgc

SEQ ID NO: 2860789 - DNA, 25 bp, Homo sapien
tacgtgtcgctaacaacaacacaaa

SEQ ID NO: 2860790 - DNA, 25 bp, Homo sapien
tgtatgtcagtaccttccagagaaa

SEQ ID NO: 2860791 - DNA, 25 bp, Homo sapien
ccagagaaagataatagtcagagac

SEQ ID NO: 2860792 - DNA, 25 bp, Homo sapien
tttgaaaattgccaacgtcaatatt

SEQ ID NO: 2860793 - DNA, 25 bp, Homo sapien
ttgccaacgtcaatatttatgtatg

SEQ ID NO: 2860794 - DNA, 25 bp, Homo sapien
gcgcctgacggactgttataatttc

SEQ ID NO: 2860795 - DNA, 25 bp, Homo sapien
ttccctaaggctgattgcacacaag

SEQ ID NO: 2860796 - DNA, 25 bp, Homo sapien
caatgctaggccttgttagagatac

SEQ ID NO: 2860797 - DNA, 25 bp, Homo sapien
aacaatttaacttgtgctccgtgca

SEQ ID NO: 2860798 - DNA, 25 bp, Homo sapien
gggaccaggctgatatgaaactaaa

SEQ ID NO: 2860799 - DNA, 25 bp, Homo sapien
gaagctgtctgctagaaaatctgga

SEQ ID NO: 2860800 - DNA, 25 bp, Homo sapien
tagacctgagatctttccggaaacc

SEQ ID NO: 2860801 - DNA, 25 bp, Homo sapien
taggtggcaactgtagcccaacggg

SEQ ID NO: 2860802 - DNA, 25 bp, Homo sapien
gaggcagcaacgagaatttgattgt

SEQ ID NO: 2860803 - DNA, 25 bp, Homo sapien
tgtatccccaagtgctaaagaaaat

SEQ ID NO: 2860804 - DNA, 25 bp, Homo sapien
ctatgactgcacactttcacagagg

SEQ ID NO: 2860805 - DNA, 25 bp, Homo sapien
aaataagggctctgtggaaccagct

SEQ ID NO: 2860806 - DNA, 25 bp, Homo sapien
tgtcctaaggacagaaggcaagctc

SEQ ID NO: 2860807 - DNA, 25 bp, Homo sapien
gcaggtcagagagactagcaggcca

SEQ ID NO: 2860808 - DNA, 25 bp, Homo sapien
gggagaacttccttcctcgagtaga

SEQ ID NO: 2860809 - DNA, 25 bp, Homo sapien
tagccgcggaggaatctaactggac

SEQ ID NO: 2860810 - DNA, 25 bp, Homo sapien
ggatggctgaatttttgccctgcaa

SEQ ID NO: 2860811 - DNA, 25 bp, Homo sapien
gggtctttctaacactgatttcgcg

SEQ ID NO: 2860812 - DNA, 25 bp, Homo sapien
caatgctatacctgcctgaaagaaa

SEQ ID NO: 2860813 - DNA, 25 bp, Homo sapien
gatttcgcgtttgacataatagagg

SEQ ID NO: 2860814 - DNA, 25 bp, Homo sapien
ccacccggcaaaggcggagaattca

SEQ ID NO: 2860815 - DNA, 25 bp, Homo sapien
tcagccaatagtgcacccaagagtg

SEQ ID NO: 2860816 - DNA, 25 bp, Homo sapien
tgtgtgtagctaaacctgatgcagg

SEQ ID NO: 2860817 - DNA, 25 bp, Homo sapien
gcagagtctaagtcgcgtgcaccac

SEQ ID NO: 2860818 - DNA, 25 bp, Homo sapien
tattgagaggaatcaaaaggcccac

SEQ ID NO: 2860819 - DNA, 25 bp, Homo sapien
tgtagcatatggcaaaggcacgaac

SEQ ID NO: 2860820 - DNA, 25 bp, Homo sapien
aaaggcccaccgagtgagaggctgc

SEQ ID NO: 2860821 - DNA, 25 bp, Homo sapien
gctgctactgagagacagagcccaa

SEQ ID NO: 2860822 - DNA, 25 bp, Homo sapien
tcctggatagtatgtagttacgcgg

SEQ ID NO: 2860823 - DNA, 25 bp, Homo sapien
tacgcaggaaccactaaatggagtt

SEQ ID NO: 2860824 - DNA, 25 bp, Homo sapien
cacctttcaaggcagggagcaatga

SEQ ID NO: 2860825 - DNA, 25 bp, Homo sapien
cacactttagcaggattagggcaat

SEQ ID NO: 2860826 - DNA, 25 bp, Homo sapien
gacacacagaggacttcgtactgct

SEQ ID NO: 2860827 - DNA, 25 bp, Homo sapien
tgatacccgggccatgctacacata

SEQ ID NO: 2860828 - DNA, 25 bp, Homo sapien
catttcttggaagttgctgccatta

SEQ ID NO: 2860829 - DNA, 25 bp, Homo sapien
taaaaacctacaccacgggctgata

SEQ ID NO: 2860830 - DNA, 25 bp, Homo sapien
gttgacaagcttttaacatccaagt

SEQ ID NO: 2860831 - DNA, 25 bp, Homo sapien
caaactcaaaattcttacaggtaca

SEQ ID NO: 2860832 - DNA, 25 bp, Homo sapien
catcccatagccatacacatagata

SEQ ID NO: 2860833 - DNA, 25 bp, Homo sapien
ggaaaaaggcatggtaattctgtta

SEQ ID NO: 2860834 - DNA, 25 bp, Homo sapien
cagataaggattcattgcacaagga

SEQ ID NO: 2860835 - DNA, 25 bp, Homo sapien
gaatggtcatcctaaccagatatgg

SEQ ID NO: 2860836 - DNA, 25 bp, Homo sapien
tgtgtgaaaagaagcctccagcata

SEQ ID NO: 2860837 - DNA, 25 bp, Homo sapien
ggttcccaattcagactaccctatg

SEQ ID NO: 2860838 - DNA, 25 bp, Homo sapien
cacagaaatagcttgccctgcacga

SEQ ID NO: 2860839 - DNA, 25 bp, Homo sapien
tgcacgattgcactatgaccagaaa

SEQ ID NO: 2860840 - DNA, 25 bp, Homo sapien
caaatatctggatcactgagtgcag

SEQ ID NO: 2860841 - DNA, 25 bp, Homo sapien
taacgcaaggatggcctgtaccctc

SEQ ID NO: 2860842 - DNA, 25 bp, Homo sapien
tgggctggtcctttgatccgtacac

SEQ ID NO: 2860843 - DNA, 25 bp, Homo sapien
gccgggctaattacagtgctgctga

SEQ ID NO: 2860844 - DNA, 25 bp, Homo sapien
gaatgggagtttcacatatcagcac

SEQ ID NO: 2860845 - DNA, 25 bp, Homo sapien
ttcttatgccatcgcaacccacagg

SEQ ID NO: 2860846 - DNA, 25 bp, Homo sapien
tcctcaatgagggatcggtcagtct

SEQ ID NO: 2860847 - DNA, 25 bp, Homo sapien
ggtctcatactgcaatcaaatccgg

SEQ ID NO: 2860848 - DNA, 25 bp, Homo sapien
cacagcatgaggattgagccacaga

SEQ ID NO: 2860849 - DNA, 25 bp, Homo sapien
cagcgtaagtcatgaccaacaggca

SEQ ID NO: 2860850 - DNA, 25 bp, Homo sapien
aattatcactggatctgagggagtc

SEQ ID NO: 2860851 - DNA, 25 bp, Homo sapien
ctgtcaattatcactggatctgagg

SEQ ID NO: 2860852 - DNA, 25 bp, Homo sapien
tcaattatcactggatctgagggag

SEQ ID NO: 2860853 - DNA, 25 bp, Homo sapien
tatcactggatctgagggagtctca

SEQ ID NO: 2860854 - DNA, 25 bp, Homo sapien
ggatttagtacaaccattacaatgt

SEQ ID NO: 2860855 - DNA, 25 bp, Homo sapien
ccacaaagccatacctggcaatcaa

SEQ ID NO: 2860856 - DNA, 25 bp, Homo sapien
caaatgctagaattaccacaaagcc

SEQ ID NO: 2860857 - DNA, 25 bp, Homo sapien
tgctgggttgcaaatgctagaatta

SEQ ID NO: 2860858 - DNA, 25 bp, Homo sapien
acagcaagtaggcaatgcaagctgc

SEQ ID NO: 2860859 - DNA, 25 bp, Homo sapien
atcgacagagcccacgtctccttta

SEQ ID NO: 2860860 - DNA, 25 bp, Homo sapien
aaaagcagcccatcgacagagccca

SEQ ID NO: 2860861 - DNA, 25 bp, Homo sapien
tcctttacccatggaggaaaactgc

SEQ ID NO: 2860862 - DNA, 25 bp, Homo sapien
acactacggaccgaaatcagcagcc

SEQ ID NO: 2860863 - DNA, 25 bp, Homo sapien
tctcaggcgttggtagccagcacct

SEQ ID NO: 2860864 - DNA, 25 bp, Homo sapien
ccccagtgacatgagaacaatgtgg

SEQ ID NO: 2860865 - DNA, 25 bp, Homo sapien
cagcacctggtgtggtacctacact

SEQ ID NO: 2860866 - DNA, 25 bp, Homo sapien
ctccctggttaattctttccttcag

SEQ ID NO: 2860867 - DNA, 25 bp, Homo sapien
ttccttcagtttgcaaacattatca

SEQ ID NO: 2860868 - DNA, 25 bp, Homo sapien
accagccccaccaaggactcctctt

SEQ ID NO: 2860869 - DNA, 25 bp, Homo sapien
aggactcctcttctgttttgcattt

SEQ ID NO: 2860870 - DNA, 25 bp, Homo sapien
agggccctcactatttcatgtctgc

SEQ ID NO: 2860871 - DNA, 25 bp, Homo sapien
gccgttagctttgatagaaagcact

SEQ ID NO: 2860872 - DNA, 25 bp, Homo sapien
tgcacccctggtgcaaattcagcac

SEQ ID NO: 2860873 - DNA, 25 bp, Homo sapien
ggtgcatagcaattagccagcctga

SEQ ID NO: 2860874 - DNA, 25 bp, Homo sapien
tgaatacggcttttccctcttagcc

SEQ ID NO: 2860875 - DNA, 25 bp, Homo sapien
cgtaatctgtaacattagcaggatg

SEQ ID NO: 2860876 - DNA, 25 bp, Homo sapien
gcagccaggaaaacccgtaatctgt

SEQ ID NO: 2860877 - DNA, 25 bp, Homo sapien
ctcttagccacgcagtacaaacatc

SEQ ID NO: 2860878 - DNA, 25 bp, Homo sapien
gctgaagccctaaacggattggtca

SEQ ID NO: 2860879 - DNA, 25 bp, Homo sapien
ctttgctaattaacgggagagacca

SEQ ID NO: 2860880 - DNA, 25 bp, Homo sapien
gtcagtaatagtcagcagccaggcc

SEQ ID NO: 2860881 - DNA, 25 bp, Homo sapien
catgtggaaagcctggctgaggcca

SEQ ID NO: 2860882 - DNA, 25 bp, Homo sapien
caagactcggcacatttctgggttc

SEQ ID NO: 2860883 - DNA, 25 bp, Homo sapien
catgtgtgagcaagactcggcacat

SEQ ID NO: 2860884 - DNA, 25 bp, Homo sapien
tgtcttggccttcatacactatggc

SEQ ID NO: 2860885 - DNA, 25 bp, Homo sapien
gtgagcaagactcggcacatttctg

SEQ ID NO: 2860886 - DNA, 25 bp, Homo sapien
aaagcacagttttagctaagaatgg

SEQ ID NO: 2860887 - DNA, 25 bp, Homo sapien
aagcacagttttagctaagaatgga

SEQ ID NO: 2860888 - DNA, 25 bp, Homo sapien
aaaagcacagttttagctaagaatg

SEQ ID NO: 2860889 - DNA, 25 bp, Homo sapien
agcacagttttagctaagaatggaa

SEQ ID NO: 2860890 - DNA, 25 bp, Homo sapien
taaatatccccgaacaaatggctgt

SEQ ID NO: 2860891 - DNA, 25 bp, Homo sapien
gagggagcagttggcccgccagact

SEQ ID NO: 2860892 - DNA, 25 bp, Homo sapien
tactaggccatctggctccggcaat

SEQ ID NO: 2860893 - DNA, 25 bp, Homo sapien
aaatggctgtatattatccaggagg

SEQ ID NO: 2860894 - DNA, 25 bp, Homo sapien
gagcaactagcttcttgactgccct

SEQ ID NO: 2860895 - DNA, 25 bp, Homo sapien
ttcttgactgccctgaattttgtga

SEQ ID NO: 2860896 - DNA, 25 bp, Homo sapien
tcttgactgccctgaattttgtgac

SEQ ID NO: 2860897 - DNA, 25 bp, Homo sapien
ggtggagcaactagcttcttgactg

SEQ ID NO: 2860898 - DNA, 25 bp, Homo sapien
tggagtcaatgaggcgcacgtagaa

SEQ ID NO: 2860899 - DNA, 25 bp, Homo sapien
ttgtcatggagtcaatgaggcgcac

SEQ ID NO: 2860900 - DNA, 25 bp, Homo sapien
tagaaatcctgctccgtccttatcc

SEQ ID NO: 2860901 - DNA, 25 bp, Homo sapien
ggcgcacgtagaaatcctgctccgt

SEQ ID NO: 2860902 - DNA, 25 bp, Homo sapien
ggaaaatacagccacgatctccctt

SEQ ID NO: 2860903 - DNA, 25 bp, Homo sapien
gggctccaaggctgattggaactcc

SEQ ID NO: 2860904 - DNA, 25 bp, Homo sapien
ggctgattggaactcccactgtcct

SEQ ID NO: 2860905 - DNA, 25 bp, Homo sapien
tccaaggctgattggaactcccact

SEQ ID NO: 2860906 - DNA, 25 bp, Homo sapien
caggtaaacgcgagaccgataaggc

SEQ ID NO: 2860907 - DNA, 25 bp, Homo sapien
gaccgataaggctcttgggccacta

SEQ ID NO: 2860908 - DNA, 25 bp, Homo sapien
gccactaggagcctcctcaggtgaa

SEQ ID NO: 2860909 - DNA, 25 bp, Homo sapien
ctggccccaggtaaacgcgagaccg

SEQ ID NO: 2860910 - DNA, 25 bp, Homo sapien
gaccttcgctggaggatttcgtcca

SEQ ID NO: 2860911 - DNA, 25 bp, Homo sapien
aataaagcggatgactgaccttcgc

SEQ ID NO: 2860912 - DNA, 25 bp, Homo sapien
tcaaataaagcggatgactgacctt

SEQ ID NO: 2860913 - DNA, 25 bp, Homo sapien
cggatgactgaccttcgctggagga

SEQ ID NO: 2860914 - DNA, 25 bp, Homo sapien
gtgaggccatagacccgacccgggc

SEQ ID NO: 2860915 - DNA, 25 bp, Homo sapien
agggtgaggccatagacccgacccg

SEQ ID NO: 2860916 - DNA, 25 bp, Homo sapien
tgaattccgttattggtcttttcgc

SEQ ID NO: 2860917 - DNA, 25 bp, Homo sapien
agagaagctgaagccggtagtgaat

SEQ ID NO: 2860918 - DNA, 25 bp, Homo sapien
gctgaagccggtagtgaattccgtt

SEQ ID NO: 2860919 - DNA, 25 bp, Homo sapien
tattggtcttttcgctgttggcttc

SEQ ID NO: 2860920 - DNA, 25 bp, Homo sapien
tgtggccaattgtgatccctcctcc

SEQ ID NO: 2860921 - DNA, 25 bp, Homo sapien
tctgcgtgagcgagtggaccaactt

SEQ ID NO: 2860922 - DNA, 25 bp, Homo sapien
caaagacacaagagatgcaggagag

SEQ ID NO: 2860923 - DNA, 25 bp, Homo sapien
cagccacggtagcagcagaaattgt

SEQ ID NO: 2860924 - DNA, 25 bp, Homo sapien
agaaaattccgtcgggcgcacacag

SEQ ID NO: 2860925 - DNA, 25 bp, Homo sapien
gtcgggcgcacacaggctatcctct

SEQ ID NO: 2860926 - DNA, 25 bp, Homo sapien
aagaaaattccgtcgggcgcacaca

SEQ ID NO: 2860927 - DNA, 25 bp, Homo sapien
acacaggctatcctctttccagggc

SEQ ID NO: 2860928 - DNA, 25 bp, Homo sapien
tgtcctctcgatctccacgggctgg

SEQ ID NO: 2860929 - DNA, 25 bp, Homo sapien
tggccctgtctgtcgtagagggcca

SEQ ID NO: 2860930 - DNA, 25 bp, Homo sapien
cttctccacgaaccccacaaacgct

SEQ ID NO: 2860931 - DNA, 25 bp, Homo sapien
gttggatttccgcagattggaaggc

SEQ ID NO: 2860932 - DNA, 25 bp, Homo sapien
ctcacgtctcagctagcagggcagg

SEQ ID NO: 2860933 - DNA, 25 bp, Homo sapien
gttatattccggcacccctcgaatc

SEQ ID NO: 2860934 - DNA, 25 bp, Homo sapien
gtagaacccacagttatattccggc

SEQ ID NO: 2860935 - DNA, 25 bp, Homo sapien
gatggaaaacatgctcggcgtctcg

SEQ ID NO: 2860936 - DNA, 25 bp, Homo sapien
gctgttccgcagaaatcctcacact

SEQ ID NO: 2860937 - DNA, 25 bp, Homo sapien
gctgctggctcagtgcgccggccgg

SEQ ID NO: 2860938 - DNA, 25 bp, Homo sapien
acaaagtttcgctgttccgcagaaa

SEQ ID NO: 2860939 - DNA, 25 bp, Homo sapien
gcgatgggaggctggagcgcctggg

SEQ ID NO: 2860940 - DNA, 25 bp, Homo sapien
gccgcggtccccgcgcagtacccac

SEQ ID NO: 2860941 - DNA, 25 bp, Homo sapien
ctcggccgcggtccccgcgcagtac

SEQ ID NO: 2860942 - DNA, 25 bp, Homo sapien
tcggccgcggtccccgcgcagtacc

SEQ ID NO: 2860943 - DNA, 25 bp, Homo sapien
ggccgcggtccccgcgcagtaccca

SEQ ID NO: 2860944 - DNA, 25 bp, Homo sapien
gcatccacgtccgcaccgcgttcat

SEQ ID NO: 2860945 - DNA, 25 bp, Homo sapien
tgcatccacgtccgcaccgcgttca

SEQ ID NO: 2860946 - DNA, 25 bp, Homo sapien
gcaccccggcgccctgcatccacgt

SEQ ID NO: 2860947 - DNA, 25 bp, Homo sapien
tccagcaccccggcgccctgcatcc

SEQ ID NO: 2860948 - DNA, 25 bp, Homo sapien
gccgctgcccagcggctcttccttc

SEQ ID NO: 2860949 - DNA, 25 bp, Homo sapien
ccgctgcccagcggctcttccttca

SEQ ID NO: 2860950 - DNA, 25 bp, Homo sapien
cgctgcccagcggctcttccttcat

SEQ ID NO: 2860951 - DNA, 25 bp, Homo sapien
gcttccactccgttggatgctttcc

SEQ ID NO: 2860952 - DNA, 25 bp, Homo sapien
cttccactccgttggatgctttcct

SEQ ID NO: 2860953 - DNA, 25 bp, Homo sapien
tgcttccactccgttggatgctttc

SEQ ID NO: 2860954 - DNA, 25 bp, Homo sapien
tgtggaaaatctcctcccccttgaa

SEQ ID NO: 2860955 - DNA, 25 bp, Homo sapien
caaggcgggctggaaagcaaatttt

SEQ ID NO: 2860956 - DNA, 25 bp, Homo sapien
tttttctcagacgatgaactcgcac

SEQ ID NO: 2860957 - DNA, 25 bp, Homo sapien
ataaaattagagatgtatgcttggc

SEQ ID NO: 2860958 - DNA, 25 bp, Homo sapien
cagaggagtcgaccagcagcctgga

SEQ ID NO: 2860959 - DNA, 25 bp, Homo sapien
ccggtggacgagaataggagtgggt

SEQ ID NO: 2860960 - DNA, 25 bp, Homo sapien
ggccacggcgttgcccggtggacga

SEQ ID NO: 2860961 - DNA, 25 bp, Homo sapien
cgctccagaggagtcgaccagcagc

SEQ ID NO: 2860962 - DNA, 25 bp, Homo sapien
cgattccctacgctccagagaaggc

SEQ ID NO: 2860963 - DNA, 25 bp, Homo sapien
tgctggcccagtatgaccgacactt

SEQ ID NO: 2860964 - DNA, 25 bp, Homo sapien
aagatggcgcgagtggccgaacacc

SEQ ID NO: 2860965 - DNA, 25 bp, Homo sapien
ctcggtgatctccatgcgcagtcct

SEQ ID NO: 2860966 - DNA, 25 bp, Homo sapien
cttcctcgcctacggtctctgatta

SEQ ID NO: 2860967 - DNA, 25 bp, Homo sapien
gactgagctgggaacggtccctgct

SEQ ID NO: 2860968 - DNA, 25 bp, Homo sapien
tgattattgatgcttgccgtgtgtc

SEQ ID NO: 2860969 - DNA, 25 bp, Homo sapien
cctgctggacagttccgtgctctta

SEQ ID NO: 2860970 - DNA, 25 bp, Homo sapien
ttctccatccggtgaagcactgctc

SEQ ID NO: 2860971 - DNA, 25 bp, Homo sapien
catccaaggtagcattgcagagcct

SEQ ID NO: 2860972 - DNA, 25 bp, Homo sapien
gcagtcattcgtgcctttccctggt

SEQ ID NO: 2860973 - DNA, 25 bp, Homo sapien
tccaagtcagcctgtcggatgccag

SEQ ID NO: 2860974 - DNA, 25 bp, Homo sapien
gacttaattgattcagcgcatttat

SEQ ID NO: 2860975 - DNA, 25 bp, Homo sapien
gactatgctcctcttctagaagttc

SEQ ID NO: 2860976 - DNA, 25 bp, Homo sapien
catctgacttaattgattcagcgca

SEQ ID NO: 2860977 - DNA, 25 bp, Homo sapien
tcctcttctagaagttcggtgcagt

SEQ ID NO: 2860978 - DNA, 25 bp, Homo sapien
tgtgcgtccctgttaaatccctgga

SEQ ID NO: 2860979 - DNA, 25 bp, Homo sapien
ggttgaactaccaccacagaactgg

SEQ ID NO: 2860980 - DNA, 25 bp, Homo sapien
gcctctcgtcaacacaggatatgtg

SEQ ID NO: 2860981 - DNA, 25 bp, Homo sapien
tagggccataatctcagactagcag

SEQ ID NO: 2860982 - DNA, 25 bp, Homo sapien
ataaaacaatagagtgaacattggg

SEQ ID NO: 2860983 - DNA, 25 bp, Homo sapien
cagtggtattcagaaagccacggaa

SEQ ID NO: 2860984 - DNA, 25 bp, Homo sapien
gggactctgccagaacaccatcgtc

SEQ ID NO: 2860985 - DNA, 25 bp, Homo sapien
tggtattcagaaagccacggaaggg

SEQ ID NO: 2860986 - DNA, 25 bp, Homo sapien
tacatggcctttccgatatcagtcc

SEQ ID NO: 2860987 - DNA, 25 bp, Homo sapien
aacacatacagaggtcaccatctcg

SEQ ID NO: 2860988 - DNA, 25 bp, Homo sapien
tcgtttgagttgcacaatgtagctc

SEQ ID NO: 2860989 - DNA, 25 bp, Homo sapien
catctcgcaagtttattcgtttgag

SEQ ID NO: 2860990 - DNA, 25 bp, Homo sapien
gattacatgaatgcacccgcaaggc

SEQ ID NO: 2860991 - DNA, 25 bp, Homo sapien
tagtttacttcacacagccagcgaa

SEQ ID NO: 2860992 - DNA, 25 bp, Homo sapien
cacaggattgaaaagtacacccagg

SEQ ID NO: 2860993 - DNA, 25 bp, Homo sapien
ccacattaggaataccgaggtctga

SEQ ID NO: 2860994 - DNA, 25 bp, Homo sapien
gtccccactgagagtacttcctgga

SEQ ID NO: 2860995 - DNA, 25 bp, Homo sapien
atacattttgattagcatacattgc

SEQ ID NO: 2860996 - DNA, 25 bp, Homo sapien
tgagagtacttcctggattagatcc

SEQ ID NO: 2860997 - DNA, 25 bp, Homo sapien
tttctcccacaatgtcaggggatga

SEQ ID NO: 2860998 - DNA, 25 bp, Homo sapien
gtatcaaagcatcattcctgctgct

SEQ ID NO: 2860999 - DNA, 25 bp, Homo sapien
tcaaagcatcattcctgctgcttct

SEQ ID NO: 2861000 - DNA, 25 bp, Homo sapien
agagtatcaaagcatcattcctgct

SEQ ID NO: 2861001 - DNA, 25 bp, Homo sapien
gagtatcaaagcatcattcctgctg

SEQ ID NO: 2861002 - DNA, 25 bp, Homo sapien
tatctggtcgtctggcaatgtactc

SEQ ID NO: 2861003 - DNA, 25 bp, Homo sapien
gcaatgtactcattattgtccctgg

SEQ ID NO: 2861004 - DNA, 25 bp, Homo sapien
tgtactcattattgtccctggaacc

SEQ ID NO: 2861005 - DNA, 25 bp, Homo sapien
ttcctggttatctggtcgtctggca

SEQ ID NO: 2861006 - DNA, 25 bp, Homo sapien
cagcatgaggctgtagaactggctc

SEQ ID NO: 2861007 - DNA, 25 bp, Homo sapien
gctccagcatgaggctgtagaactg

SEQ ID NO: 2861008 - DNA, 25 bp, Homo sapien
catgaggctgtagaactggctcagt

SEQ ID NO: 2861009 - DNA, 25 bp, Homo sapien
gaggctgtagaactggctcagttcc

SEQ ID NO: 2861010 - DNA, 25 bp, Homo sapien
cagtggcacagagggcaggtctcct

SEQ ID NO: 2861011 - DNA, 25 bp, Homo sapien
ctgggaggagtttttcagatggcag

SEQ ID NO: 2861012 - DNA, 25 bp, Homo sapien
ggtctcctggacatacagccatttc

SEQ ID NO: 2861013 - DNA, 25 bp, Homo sapien
tggacatacagccatttcttaagac

SEQ ID NO: 2861014 - DNA, 25 bp, Homo sapien
ggaaaaaatgactgcaaggcgtgat

SEQ ID NO: 2861015 - DNA, 25 bp, Homo sapien
gaaaaaatgactgcaaggcgtgatc

SEQ ID NO: 2861016 - DNA, 25 bp, Homo sapien
aaaaatgactgcaaggcgtgatcac

SEQ ID NO: 2861017 - DNA, 25 bp, Homo sapien
aaatgactgcaaggcgtgatcacag

SEQ ID NO: 2861018 - DNA, 25 bp, Homo sapien
caagcaggtgtggatatcccagaaa

SEQ ID NO: 2861019 - DNA, 25 bp, Homo sapien
ggactcttgaatccccgagatggaa

SEQ ID NO: 2861020 - DNA, 25 bp, Homo sapien
tgcaaaaccgcctggagaacattgt

SEQ ID NO: 2861021 - DNA, 25 bp, Homo sapien
aagtggcactctctcattacggaca

SEQ ID NO: 2861022 - DNA, 25 bp, Homo sapien
tcggatacttagcaacccacaggtg

SEQ ID NO: 2861023 - DNA, 25 bp, Homo sapien
gaattttggcacaccacttttcagg

SEQ ID NO: 2861024 - DNA, 25 bp, Homo sapien
caggagttgctgacccctcatggat

SEQ ID NO: 2861025 - DNA, 25 bp, Homo sapien
gctaaagactataggtaggccaact

SEQ ID NO: 2861026 - DNA, 25 bp, Homo sapien
aacacattcttattgaaggagttac

SEQ ID NO: 2861027 - DNA, 25 bp, Homo sapien
aaacacattcttattgaaggagtta

SEQ ID NO: 2861028 - DNA, 25 bp, Homo sapien
ccaaacacattcttattgaaggagt

SEQ ID NO: 2861029 - DNA, 25 bp, Homo sapien
caaacacattcttattgaaggagtt

SEQ ID NO: 2861030 - DNA, 25 bp, Homo sapien
tttctcaagctgctctttcgtagca

SEQ ID NO: 2861031 - DNA, 25 bp, Homo sapien
caaatatcattgtgtttctcaagct

SEQ ID NO: 2861032 - DNA, 25 bp, Homo sapien
tgggtaacgatttaatcttattcac

SEQ ID NO: 2861033 - DNA, 25 bp, Homo sapien
tgctctttcgtagcaatgggtaacg

SEQ ID NO: 2861034 - DNA, 25 bp, Homo sapien
tccaaagatggtctctgagacgcca

SEQ ID NO: 2861035 - DNA, 25 bp, Homo sapien
agacgccataggccaccacacagag

SEQ ID NO: 2861036 - DNA, 25 bp, Homo sapien
cacagagggccacaagaaactccag

SEQ ID NO: 2861037 - DNA, 25 bp, Homo sapien
gaaactccagcaggcggtaagtgcc

SEQ ID NO: 2861038 - DNA, 25 bp, Homo sapien
tctgaattcctcaaccataaataag

SEQ ID NO: 2861039 - DNA, 25 bp, Homo sapien
gacataaataaaaagtgttcccaga

SEQ ID NO: 2861040 - DNA, 25 bp, Homo sapien
tgaattcctcaaccataaataagac

SEQ ID NO: 2861041 - DNA, 25 bp, Homo sapien
ttttctgaattcctcaaccataaat

SEQ ID NO: 2861042 - DNA, 25 bp, Homo sapien
ggtaagaatgctgctggaaataatg

SEQ ID NO: 2861043 - DNA, 25 bp, Homo sapien
taagaatgctgctggaaataatgat

SEQ ID NO: 2861044 - DNA, 25 bp, Homo sapien
gaggtaagaatgctgctggaaataa

SEQ ID NO: 2861045 - DNA, 25 bp, Homo sapien
aagaatgctgctggaaataatgata

SEQ ID NO: 2861046 - DNA, 25 bp, Homo sapien
acaaaggcttacagcacggaagtgt

SEQ ID NO: 2861047 - DNA, 25 bp, Homo sapien
ataaacaaaggcttacagcacggaa

SEQ ID NO: 2861048 - DNA, 25 bp, Homo sapien
aacaaaggcttacagcacggaagtg

SEQ ID NO: 2861049 - DNA, 25 bp, Homo sapien
tgccacctagtagcacaaccactca

SEQ ID NO: 2861050 - DNA, 25 bp, Homo sapien
tattctttttaagtgcctgccacct

SEQ ID NO: 2861051 - DNA, 25 bp, Homo sapien
cagcagctaacatctctggtgccat

SEQ ID NO: 2861052 - DNA, 25 bp, Homo sapien
ttaagacagggagggagtattagaa

SEQ ID NO: 2861053 - DNA, 25 bp, Homo sapien
tcactgtactagagttcagaccaag

SEQ ID NO: 2861054 - DNA, 25 bp, Homo sapien
tggcatgtcaaagccaccacactca

SEQ ID NO: 2861055 - DNA, 25 bp, Homo sapien
tttgttcctcaatagtttgctttca

SEQ ID NO: 2861056 - DNA, 25 bp, Homo sapien
caaggtcaaatgctatacagtgtgg

SEQ ID NO: 2861057 - DNA, 25 bp, Homo sapien
tacagtgtggtcctattataatcag

SEQ ID NO: 2861058 - DNA, 25 bp, Homo sapien
gtaaaagttaccacacacaaggtca

SEQ ID NO: 2861059 - DNA, 25 bp, Homo sapien
taaagctgcatactttggaaagtgt

SEQ ID NO: 2861060 - DNA, 25 bp, Homo sapien
caatccttgattgacgatgtactgt

SEQ ID NO: 2861061 - DNA, 25 bp, Homo sapien
ggcaggcctgcctatatataccatg

SEQ ID NO: 2861062 - DNA, 25 bp, Homo sapien
actatcttgaatcctgtgtgcttca

SEQ ID NO: 2861063 - DNA, 25 bp, Homo sapien
tgaaggcctggagaataaaccacat

SEQ ID NO: 2861064 - DNA, 25 bp, Homo sapien
ttacttttttacctcgtgctgctat

SEQ ID NO: 2861065 - DNA, 25 bp, Homo sapien
acttttttacctcgtgctgctatga

SEQ ID NO: 2861066 - DNA, 25 bp, Homo sapien
ttacctcgtgctgctatgatcattc

SEQ ID NO: 2861067 - DNA, 25 bp, Homo sapien
tttacctcgtgctgctatgatcatt

SEQ ID NO: 2861068 - DNA, 25 bp, Homo sapien
tttttagttcttgagtcagttgtgg

SEQ ID NO: 2861069 - DNA, 25 bp, Homo sapien
gaatttggtagaacttgcctgtaat

SEQ ID NO: 2861070 - DNA, 25 bp, Homo sapien
aaacatactggcatgtagctgatgg

SEQ ID NO: 2861071 - DNA, 25 bp, Homo sapien
gctgatggttagtctcttattactg

SEQ ID NO: 2861072 - DNA, 25 bp, Homo sapien
cactgccaggattaacagcgttact

SEQ ID NO: 2861073 - DNA, 25 bp, Homo sapien
taacatagactgtaggatagaagct

SEQ ID NO: 2861074 - DNA, 25 bp, Homo sapien
ggatctgcaatttctaacatagact

SEQ ID NO: 2861075 - DNA, 25 bp, Homo sapien
cctgcagttctatcagcccagtctg

SEQ ID NO: 2861076 - DNA, 25 bp, Homo sapien
aacccaaaagagagtaaggagtgct

SEQ ID NO: 2861077 - DNA, 25 bp, Homo sapien
acccaaaagagagtaaggagtgctg

SEQ ID NO: 2861078 - DNA, 25 bp, Homo sapien
gctcgataaccctgcaagtaaaact

SEQ ID NO: 2861079 - DNA, 25 bp, Homo sapien
tgaaagctcgataaccctgcaagta

SEQ ID NO: 2861080 - DNA, 25 bp, Homo sapien
ggcaatctatcctggcgaggcatag

SEQ ID NO: 2861081 - DNA, 25 bp, Homo sapien
aattgttaagcctactgcactatgc

SEQ ID NO: 2861082 - DNA, 25 bp, Homo sapien
gtttaaagcaccaccaattcagtct

SEQ ID NO: 2861083 - DNA, 25 bp, Homo sapien
tatacctcatcttactgtgctttgc

SEQ ID NO: 2861084 - DNA, 25 bp, Homo sapien
gaacgataaaagtaatctgcaaaac

SEQ ID NO: 2861085 - DNA, 25 bp, Homo sapien
gcaaaacttactattcctagatcaa

SEQ ID NO: 2861086 - DNA, 25 bp, Homo sapien
taacaaaatacgaagttgtgtaaca

SEQ ID NO: 2861087 - DNA, 25 bp, Homo sapien
ccagtgaatgaaaatcctatcttaa

SEQ ID NO: 2861088 - DNA, 25 bp, Homo sapien
tgatctcgagtactgaaataggagt

SEQ ID NO: 2861089 - DNA, 25 bp, Homo sapien
ggctgatctcgagtactgaaatagg

SEQ ID NO: 2861090 - DNA, 25 bp, Homo sapien
ggaaaagaagcctctcacgtgatgc

SEQ ID NO: 2861091 - DNA, 25 bp, Homo sapien
tctcgagtactgaaataggagtaaa

SEQ ID NO: 2861092 - DNA, 25 bp, Homo sapien
catgaaaagaacagggactaccagt

SEQ ID NO: 2861093 - DNA, 25 bp, Homo sapien
gaaaagaacagggactaccagttga

SEQ ID NO: 2861094 - DNA, 25 bp, Homo sapien
gaacagggactaccagttgattcca

SEQ ID NO: 2861095 - DNA, 25 bp, Homo sapien
aaagaacagggactaccagttgatt

SEQ ID NO: 2861096 - DNA, 25 bp, Homo sapien
ggaaaacttcttgcatcaccatcaa

SEQ ID NO: 2861097 - DNA, 25 bp, Homo sapien
taaacactttaaacacttgagtcaa

SEQ ID NO: 2861098 - DNA, 25 bp, Homo sapien
gcatcaccatcaataaacactttaa

SEQ ID NO: 2861099 - DNA, 25 bp, Homo sapien
taagataggaaaacttcttgcatca

SEQ ID NO: 2861100 - DNA, 25 bp, Homo sapien
tagagaacttccaatccagtaaaaa

SEQ ID NO: 2861101 - DNA, 25 bp, Homo sapien
catagcaaatttattgatgataaca

SEQ ID NO: 2861102 - DNA, 25 bp, Homo sapien
gcagatttagcaaggttataaggta

SEQ ID NO: 2861103 - DNA, 25 bp, Homo sapien
ttctctgtatgcagatttagcaagg

SEQ ID NO: 2861104 - DNA, 25 bp, Homo sapien
caggagcataaagtacacaccacca

SEQ ID NO: 2861105 - DNA, 25 bp, Homo sapien
cacaggagcataaagtacacaccac

SEQ ID NO: 2861106 - DNA, 25 bp, Homo sapien
tgaaaacagccaaatctgctttgtt

SEQ ID NO: 2861107 - DNA, 25 bp, Homo sapien
ttttcatgacacaggagcataaagt

SEQ ID NO: 2861108 - DNA, 25 bp, Homo sapien
tgttaacaccttctacatgggtgag

SEQ ID NO: 2861109 - DNA, 25 bp, Homo sapien
gaatcctctagtgtaaagggctggg

SEQ ID NO: 2861110 - DNA, 25 bp, Homo sapien
cattttggcatggtacactctggta

SEQ ID NO: 2861111 - DNA, 25 bp, Homo sapien
taggccttagccaacacttctattt

SEQ ID NO: 2861112 - DNA, 25 bp, Homo sapien
ccgattcatagagagaggttctaaa

SEQ ID NO: 2861113 - DNA, 25 bp, Homo sapien
tattaaggctgtggtaaaccgattc

SEQ ID NO: 2861114 - DNA, 25 bp, Homo sapien
tggtaaaccgattcatagagagagg

SEQ ID NO: 2861115 - DNA, 25 bp, Homo sapien
gagaggttctaaatacattggtccc

SEQ ID NO: 2861116 - DNA, 25 bp, Homo sapien
caatatttacacacggtcaatgaac

SEQ ID NO: 2861117 - DNA, 25 bp, Homo sapien
ttataagtgctgattctccttctca

SEQ ID NO: 2861118 - DNA, 25 bp, Homo sapien
taaactatgccttgatataactaga

SEQ ID NO: 2861119 - DNA, 25 bp, Homo sapien
ctggatatagccagttttttaagta

SEQ ID NO: 2861120 - DNA, 25 bp, Homo sapien
tcctgacctctctagaaatgcctgg

SEQ ID NO: 2861121 - DNA, 25 bp, Homo sapien
cacaagggtggtcagaaaaaatcct

SEQ ID NO: 2861122 - DNA, 25 bp, Homo sapien
actgcaattggagtaaacatgtaca

SEQ ID NO: 2861123 - DNA, 25 bp, Homo sapien
tcagccctccatattcactgggttc

SEQ ID NO: 2861124 - DNA, 25 bp, Homo sapien
tattccaacccactacttcatagtg

SEQ ID NO: 2861125 - DNA, 25 bp, Homo sapien
tcaactaccccaaaatctgtttcag

SEQ ID NO: 2861126 - DNA, 25 bp, Homo sapien
catagtgtaacttttggtccaccta

SEQ ID NO: 2861127 - DNA, 25 bp, Homo sapien
tatgcaaggtcactcctcttagaat

SEQ ID NO: 2861128 - DNA, 25 bp, Homo sapien
gataaagctgaaccagatgctgcct

SEQ ID NO: 2861129 - DNA, 25 bp, Homo sapien
aatttgatgtccagcatagaggagc

SEQ ID NO: 2861130 - DNA, 25 bp, Homo sapien
gatgtccagcatagaggagcagagc

SEQ ID NO: 2861131 - DNA, 25 bp, Homo sapien
ctggaaatttgatgtccagcataga

SEQ ID NO: 2861132 - DNA, 25 bp, Homo sapien
tcctgctctaaaagttatgaacctg

SEQ ID NO: 2861133 - DNA, 25 bp, Homo sapien
tctttattaaggcacaggtactcct

SEQ ID NO: 2861134 - DNA, 25 bp, Homo sapien
catgagcatgcttgggactaaagaa

SEQ ID NO: 2861135 - DNA, 25 bp, Homo sapien
aaggacagtccatcaaaagccagag

SEQ ID NO: 2861136 - DNA, 25 bp, Homo sapien
taagcttgacttggatctctaaagg

SEQ ID NO: 2861137 - DNA, 25 bp, Homo sapien
tgaatggttctttaccaggctaaga

SEQ ID NO: 2861138 - DNA, 25 bp, Homo sapien
gacccacttgcattcctagacatgg

SEQ ID NO: 2861139 - DNA, 25 bp, Homo sapien
cagcggccaaatcttctagatcaaa

SEQ ID NO: 2861140 - DNA, 25 bp, Homo sapien
tgacctacgggaacagactctgaga

SEQ ID NO: 2861141 - DNA, 25 bp, Homo sapien
tagttgtagggtaaacagcaggacc

SEQ ID NO: 2861142 - DNA, 25 bp, Homo sapien
agctgccagtcagccatgagataca

SEQ ID NO: 2861143 - DNA, 25 bp, Homo sapien
caggaccagaggtaagatgagagcc

SEQ ID NO: 2861144 - DNA, 25 bp, Homo sapien
tactccagcagctaagggttacttg

SEQ ID NO: 2861145 - DNA, 25 bp, Homo sapien
tcattcattattgggcaccagctag

SEQ ID NO: 2861146 - DNA, 25 bp, Homo sapien
ggagctcacaatctattaacagttg

SEQ ID NO: 2861147 - DNA, 25 bp, Homo sapien
tctgcagcccaaactacgttcggtc

SEQ ID NO: 2861148 - DNA, 25 bp, Homo sapien
gacagcgtgttaatagttcacaaac

SEQ ID NO: 2861149 - DNA, 25 bp, Homo sapien
cagtaaaatataatctaaaccctca

SEQ ID NO: 2861150 - DNA, 25 bp, Homo sapien
tcaacaaataagacagcgtgttaat

SEQ ID NO: 2861151 - DNA, 25 bp, Homo sapien
tgaagggactaaccctgttagacag

SEQ ID NO: 2861152 - DNA, 25 bp, Homo sapien
ggattgtaggaactctcaaccacgg

SEQ ID NO: 2861153 - DNA, 25 bp, Homo sapien
catagttccacagggtcacttgagg

SEQ ID NO: 2861154 - DNA, 25 bp, Homo sapien
cacttgagggacctgagtatgcgca

SEQ ID NO: 2861155 - DNA, 25 bp, Homo sapien
gagggccaaccttctgcatacatag

SEQ ID NO: 2861156 - DNA, 25 bp, Homo sapien
ttattactaaggctacttctttgga

SEQ ID NO: 2861157 - DNA, 25 bp, Homo sapien
catcccatctgtacaggacatccaa

SEQ ID NO: 2861158 - DNA, 25 bp, Homo sapien
ggacatccaacagcatgatgcttgg

SEQ ID NO: 2861159 - DNA, 25 bp, Homo sapien
taatgcatattaagagccaaatact

SEQ ID NO: 2861160 - DNA, 25 bp, Homo sapien
caacacaaatcgcttttagataccc

SEQ ID NO: 2861161 - DNA, 25 bp, Homo sapien
aaaggccactaactccaaatctagg

SEQ ID NO: 2861162 - DNA, 25 bp, Homo sapien
cgaatctaataggttgtcacacact

SEQ ID NO: 2861163 - DNA, 25 bp, Homo sapien
gaacgtatactacttctcagccaca

SEQ ID NO: 2861164 - DNA, 25 bp, Homo sapien
tcagtacaatacttctacaccttcc

SEQ ID NO: 2861165 - DNA, 25 bp, Homo sapien
cagtacaatacttctacaccttccc

SEQ ID NO: 2861166 - DNA, 25 bp, Homo sapien
atctccacataaactactagcaatt

SEQ ID NO: 2861167 - DNA, 25 bp, Homo sapien
ctgatctccacataaactactagca

SEQ ID NO: 2861168 - DNA, 25 bp, Homo sapien
tgatctccacataaactactagcaa

SEQ ID NO: 2861169 - DNA, 25 bp, Homo sapien
actactagcaattctgtggtttctc

SEQ ID NO: 2861170 - DNA, 25 bp, Homo sapien
cccaaaccgcaaagacagggagtct

SEQ ID NO: 2861171 - DNA, 25 bp, Homo sapien
ctcccaaaccgcaaagacagggagt

SEQ ID NO: 2861172 - DNA, 25 bp, Homo sapien
tcccaaaccgcaaagacagggagtc

SEQ ID NO: 2861173 - DNA, 25 bp, Homo sapien
tttactgcagactgcgacgcaaggc

SEQ ID NO: 2861174 - DNA, 25 bp, Homo sapien
gatgcgtttgaactacagtaacccc

SEQ ID NO: 2861175 - DNA, 25 bp, Homo sapien
gacgcaaggccatccactaatcttt

SEQ ID NO: 2861176 - DNA, 25 bp, Homo sapien
agcaccgacagctcattcttttggg

SEQ ID NO: 2861177 - DNA, 25 bp, Homo sapien
gccaagggtgctgactctgtcgcgc

SEQ ID NO: 2861178 - DNA, 25 bp, Homo sapien
ctatctcgccaagggtgctgactct

SEQ ID NO: 2861179 - DNA, 25 bp, Homo sapien
tctcgccaagggtgctgactctgtc

SEQ ID NO: 2861180 - DNA, 25 bp, Homo sapien
agggtgctgactctgtcgcgccacg

SEQ ID NO: 2861181 - DNA, 25 bp, Homo sapien
gaagttcagcatccccgaacagaaa

SEQ ID NO: 2861182 - DNA, 25 bp, Homo sapien
caaaaggctcgcgaagaaaaacgcg

SEQ ID NO: 2861183 - DNA, 25 bp, Homo sapien
ctcattccagaaagggggttcacgg

SEQ ID NO: 2861184 - DNA, 25 bp, Homo sapien
aaaacgcgggcgaagttcagcatcc

SEQ ID NO: 2861185 - DNA, 25 bp, Homo sapien
ctcgaaaaatggactggcaggccct

SEQ ID NO: 2861186 - DNA, 25 bp, Homo sapien
actgacggacgggatgcagagcaat

SEQ ID NO: 2861187 - DNA, 25 bp, Homo sapien
aagggatgaggagccctcttactat

SEQ ID NO: 2861188 - DNA, 25 bp, Homo sapien
tcttactataaaagggactgacgga

SEQ ID NO: 2861189 - DNA, 25 bp, Homo sapien
gcgggggccggtacggcacggctca

SEQ ID NO: 2861190 - DNA, 25 bp, Homo sapien
ctcttctgcgccgagcctcggatgt

SEQ ID NO: 2861191 - DNA, 25 bp, Homo sapien
ctgcgccgagcctcggatgttgctt

SEQ ID NO: 2861192 - DNA, 25 bp, Homo sapien
cttctgcgccgagcctcggatgttg

SEQ ID NO: 2861193 - DNA, 25 bp, Homo sapien
ggctcttctgcgccgagcctcggat

SEQ ID NO: 2861194 - DNA, 25 bp, Homo sapien
gctcgcgggccgagccccttagcag

SEQ ID NO: 2861195 - DNA, 25 bp, Homo sapien
ctcctgcgtttgctcctcccgcccc

SEQ ID NO: 2861196 - DNA, 25 bp, Homo sapien
atcgtccgcggcagcaggcgctcgc

SEQ ID NO: 2861197 - DNA, 25 bp, Homo sapien
cggcccgtacggtcaccatcgtccg

SEQ ID NO: 2861198 - DNA, 25 bp, Homo sapien
tcgttttaacctcgtcactgactgg

SEQ ID NO: 2861199 - DNA, 25 bp, Homo sapien
cactgactggactagactgtaaact

SEQ ID NO: 2861200 - DNA, 25 bp, Homo sapien
tccttggcgtctgggatggctcagc

SEQ ID NO: 2861201 - DNA, 25 bp, Homo sapien
tcccggtgcattcgcagtagcaatg

SEQ ID NO: 2861202 - DNA, 25 bp, Homo sapien
ggagtaagtgactggatgaatgaat

SEQ ID NO: 2861203 - DNA, 25 bp, Homo sapien
ctgtggagtaagtgactggatgaat

SEQ ID NO: 2861204 - DNA, 25 bp, Homo sapien
agtaagtgactggatgaatgaatgc

SEQ ID NO: 2861205 - DNA, 25 bp, Homo sapien
taagtgactggatgaatgaatgcat

SEQ ID NO: 2861206 - DNA, 25 bp, Homo sapien
cagaccattcaggattcgaaaggtt

SEQ ID NO: 2861207 - DNA, 25 bp, Homo sapien
attcgaaaggttatcttccttcctg

SEQ ID NO: 2861208 - DNA, 25 bp, Homo sapien
tgactgcccaatggcagaccattca

SEQ ID NO: 2861209 - DNA, 25 bp, Homo sapien
agaagtggtatgtttatgactgccc

SEQ ID NO: 2861210 - DNA, 25 bp, Homo sapien
cagcaacctgcactgccttagctgg

SEQ ID NO: 2861211 - DNA, 25 bp, Homo sapien
gccttagctggcttctgcccaggtg

SEQ ID NO: 2861212 - DNA, 25 bp, Homo sapien
atgcagacaacctgaagaccaccag

SEQ ID NO: 2861213 - DNA, 25 bp, Homo sapien
tgcccaggtggggtctgatgcagct

SEQ ID NO: 2861214 - DNA, 25 bp, Homo sapien
cttcgtcagcaccctgttgttcttg

SEQ ID NO: 2861215 - DNA, 25 bp, Homo sapien
ttcgtcagcaccctgttgttcttgc

SEQ ID NO: 2861216 - DNA, 25 bp, Homo sapien
tcgtcagcaccctgttgttcttgct

SEQ ID NO: 2861217 - DNA, 25 bp, Homo sapien
ggcatttccagcctactcatagtag

SEQ ID NO: 2861218 - DNA, 25 bp, Homo sapien
cactgtaagatctggcatacaaaga

SEQ ID NO: 2861219 - DNA, 25 bp, Homo sapien
gcaaagtattggtgaagggtatatc

SEQ ID NO: 2861220 - DNA, 25 bp, Homo sapien
ctcttcaaggatgtaaatgctccct

SEQ ID NO: 2861221 - DNA, 25 bp, Homo sapien
aaatccaagagtcctaaagccaaag

SEQ ID NO: 2861222 - DNA, 25 bp, Homo sapien
caaactgctagtgtaaatccaagag

SEQ ID NO: 2861223 - DNA, 25 bp, Homo sapien
cagagatcccctcggcaaactgcta

SEQ ID NO: 2861224 - DNA, 25 bp, Homo sapien
aagccagtagtggatcagcccgaga

SEQ ID NO: 2861225 - DNA, 25 bp, Homo sapien
tacagcggccatttgattagcaccc

SEQ ID NO: 2861226 - DNA, 25 bp, Homo sapien
cagcggttacagtctcggaaaggcc

SEQ ID NO: 2861227 - DNA, 25 bp, Homo sapien
tgaaattattagtgttggcagcccc

SEQ ID NO: 2861228 - DNA, 25 bp, Homo sapien
tgtatggtaacctcgatcgcagctc

SEQ ID NO: 2861229 - DNA, 25 bp, Homo sapien
cggtcgctttcggtctctcagcggc

SEQ ID NO: 2861230 - DNA, 25 bp, Homo sapien
cgcgctgcccttggagacgctgttg

SEQ ID NO: 2861231 - DNA, 25 bp, Homo sapien
aggttccaccgcgctccaggtgagg

SEQ ID NO: 2861232 - DNA, 25 bp, Homo sapien
tctcagcggccggtttctgcgtccg

SEQ ID NO: 2861233 - DNA, 25 bp, Homo sapien
ctccaaactctgcactactacgcat

SEQ ID NO: 2861234 - DNA, 25 bp, Homo sapien
ggaactcagatgatttcactccaaa

SEQ ID NO: 2861235 - DNA, 25 bp, Homo sapien
cagaatttgggttagactctagtga

SEQ ID NO: 2861236 - DNA, 25 bp, Homo sapien
tcttagaattagacattgccagagc

SEQ ID NO: 2861237 - DNA, 25 bp, Homo sapien
gaaaattcctagacggcaagtacag

SEQ ID NO: 2861238 - DNA, 25 bp, Homo sapien
taggtcagtgacaatcttagcatgc

SEQ ID NO: 2861239 - DNA, 25 bp, Homo sapien
caactagaatgataggaggcgggaa

SEQ ID NO: 2861240 - DNA, 25 bp, Homo sapien
taactcagtacctcaaggagatagc

SEQ ID NO: 2861241 - DNA, 25 bp, Homo sapien
ggattcaagtgcaataagaaagctg

SEQ ID NO: 2861242 - DNA, 25 bp, Homo sapien
tttatgaaagcgcacctaaatcgtg

SEQ ID NO: 2861243 - DNA, 25 bp, Homo sapien
tctccagcgttggttactgaccacc

SEQ ID NO: 2861244 - DNA, 25 bp, Homo sapien
aaaaaatgcttgtcccctatatgaa

SEQ ID NO: 2861245 - DNA, 25 bp, Homo sapien
taagcctgcagatacgtaatgtgac

SEQ ID NO: 2861246 - DNA, 25 bp, Homo sapien
tgagcggtctcagttaggcctgtat

SEQ ID NO: 2861247 - DNA, 25 bp, Homo sapien
gcagtctgcaaagcagcttgatcca

SEQ ID NO: 2861248 - DNA, 25 bp, Homo sapien
ctaagtctgtacagtttgttccaaa

SEQ ID NO: 2861249 - DNA, 25 bp, Homo sapien
agcttggtcctccaggtttgtggac

SEQ ID NO: 2861250 - DNA, 25 bp, Homo sapien
tgatccatgcttggacagccatccc

SEQ ID NO: 2861251 - DNA, 25 bp, Homo sapien
aaagttgaggatggtgccaaggaca

SEQ ID NO: 2861252 - DNA, 25 bp, Homo sapien
ctgtatccaaaaagttgaggatggt

SEQ ID NO: 2861253 - DNA, 25 bp, Homo sapien
cagagacggtaccagggactccaaa

SEQ ID NO: 2861254 - DNA, 25 bp, Homo sapien
ccaaggacagagacggtaccaggga

SEQ ID NO: 2861255 - DNA, 25 bp, Homo sapien
gagtactccgtgtcttcaccaggcc

SEQ ID NO: 2861256 - DNA, 25 bp, Homo sapien
tgatgtctctggaaatcgagtactc

SEQ ID NO: 2861257 - DNA, 25 bp, Homo sapien
tctggaaatcgagtactccgtgtct

SEQ ID NO: 2861258 - DNA, 25 bp, Homo sapien
aggggcagaaccaggttttctgaca

SEQ ID NO: 2861259 - DNA, 25 bp, Homo sapien
ggactgccatggaagctaaagctga

SEQ ID NO: 2861260 - DNA, 25 bp, Homo sapien
tttaaatagcatgaaggcccatggc

SEQ ID NO: 2861261 - DNA, 25 bp, Homo sapien
gatggcactggtatcagaacactgc

SEQ ID NO: 2861262 - DNA, 25 bp, Homo sapien
ttttgccttccagacacttacggtg

SEQ ID NO: 2861263 - DNA, 25 bp, Homo sapien
ctatagtagcggtcctgggcccgca

SEQ ID NO: 2861264 - DNA, 25 bp, Homo sapien
tgggcccgcacgctaatgctggcat

SEQ ID NO: 2861265 - DNA, 25 bp, Homo sapien
catttttgcggcagatgaccgtggc

SEQ ID NO: 2861266 - DNA, 25 bp, Homo sapien
gatgcccattcgctccaagatgagc

SEQ ID NO: 2861267 - DNA, 25 bp, Homo sapien
ggaatatactgcacctgaatcactt

SEQ ID NO: 2861268 - DNA, 25 bp, Homo sapien
aatatactgcacctgaatcacttct

SEQ ID NO: 2861269 - DNA, 25 bp, Homo sapien
caaggaatatactgcacctgaatca

SEQ ID NO: 2861270 - DNA, 25 bp, Homo sapien
atactgcacctgaatcacttcttac

SEQ ID NO: 2861271 - DNA, 25 bp, Homo sapien
tcttgctcttgccctggacctgaac

SEQ ID NO: 2861272 - DNA, 25 bp, Homo sapien
ttttctctcttgctcttgccctgga

SEQ ID NO: 2861273 - DNA, 25 bp, Homo sapien
tctcttgctcttgccctggacctga

SEQ ID NO: 2861274 - DNA, 25 bp, Homo sapien
ttctctcttgctcttgccctggacc

SEQ ID NO: 2861275 - DNA, 25 bp, Homo sapien
tccacctgccgagaattctttaatg

SEQ ID NO: 2861276 - DNA, 25 bp, Homo sapien
cctccacctgccgagaattctttaa

SEQ ID NO: 2861277 - DNA, 25 bp, Homo sapien
ccacctgccgagaattctttaatgg

SEQ ID NO: 2861278 - DNA, 25 bp, Homo sapien
agggtactcccagctgacctccacc

SEQ ID NO: 2861279 - DNA, 25 bp, Homo sapien
acttgagcttgtgaacggcatccac

SEQ ID NO: 2861280 - DNA, 25 bp, Homo sapien
tggcactccactgagtactcatact

SEQ ID NO: 2861281 - DNA, 25 bp, Homo sapien
gctggtgtagttttcatacttgagc

SEQ ID NO: 2861282 - DNA, 25 bp, Homo sapien
gcatccaccatgacctcaatgggca

SEQ ID NO: 2861283 - DNA, 25 bp, Homo sapien
cagagagtgtagcagctccgcacgt

SEQ ID NO: 2861284 - DNA, 25 bp, Homo sapien
agagagtgtagcagctccgcacgtc

SEQ ID NO: 2861285 - DNA, 25 bp, Homo sapien
gagagtgtagcagctccgcacgtca

SEQ ID NO: 2861286 - DNA, 25 bp, Homo sapien
gagtgtagcagctccgcacgtcacc

SEQ ID NO: 2861287 - DNA, 25 bp, Homo sapien
ggaaagtccaggtgcattggaccaa

SEQ ID NO: 2861288 - DNA, 25 bp, Homo sapien
ttagtggtgtcagcagaagtaaaag

SEQ ID NO: 2861289 - DNA, 25 bp, Homo sapien
cagcgaacttcagattagtggtgtc

SEQ ID NO: 2861290 - DNA, 25 bp, Homo sapien
gcattggaccaacagcgaacttcag

SEQ ID NO: 2861291 - DNA, 25 bp, Homo sapien
caccagcaggtgaaacgtccagaat

SEQ ID NO: 2861292 - DNA, 25 bp, Homo sapien
tactgattgtcgtcagccaccagca

SEQ ID NO: 2861293 - DNA, 25 bp, Homo sapien
ctctgctgcttttgacactgaatgt

SEQ ID NO: 2861294 - DNA, 25 bp, Homo sapien
tcttggcctcgcatcttagaaaggt

SEQ ID NO: 2861295 - DNA, 25 bp, Homo sapien
ctttctggtcctttaaaatatcagt

SEQ ID NO: 2861296 - DNA, 25 bp, Homo sapien
tttctggtcctttaaaatatcagtg

SEQ ID NO: 2861297 - DNA, 25 bp, Homo sapien
tctggtcctttaaaatatcagtgga

SEQ ID NO: 2861298 - DNA, 25 bp, Homo sapien
ttctggtcctttaaaatatcagtgg

SEQ ID NO: 2861299 - DNA, 25 bp, Homo sapien
gacttggatggtcagggttttgcca

SEQ ID NO: 2861300 - DNA, 25 bp, Homo sapien
tttgccagagcctaagacctcactg

SEQ ID NO: 2861301 - DNA, 25 bp, Homo sapien
cagcaggagcgaatggcttagaacc

SEQ ID NO: 2861302 - DNA, 25 bp, Homo sapien
tagaacctcgcctcctttgtgacag

SEQ ID NO: 2861303 - DNA, 25 bp, Homo sapien
ttcagttcccatatggccacgaggg

SEQ ID NO: 2861304 - DNA, 25 bp, Homo sapien
gggaaaaccaagagatgaccaactg

SEQ ID NO: 2861305 - DNA, 25 bp, Homo sapien
atctttcttcagttcccatatggcc

SEQ ID NO: 2861306 - DNA, 25 bp, Homo sapien
cacgaggggagatgccagaaaaacc

SEQ ID NO: 2861307 - DNA, 25 bp, Homo sapien
agcacactaacggtttctacacctg

SEQ ID NO: 2861308 - DNA, 25 bp, Homo sapien
gggtagcacactaacggtttctaca

SEQ ID NO: 2861309 - DNA, 25 bp, Homo sapien
gctgctggggtagcacactaacggt

SEQ ID NO: 2861310 - DNA, 25 bp, Homo sapien
actaacggtttctacacctggacag

SEQ ID NO: 2861311 - DNA, 25 bp, Homo sapien
ctgcaggcccacagggaggggaggg

SEQ ID NO: 2861312 - DNA, 25 bp, Homo sapien
gaggtaggggcttgggaagtgctta

SEQ ID NO: 2861313 - DNA, 25 bp, Homo sapien
tgcaggcccacagggaggggaggga

SEQ ID NO: 2861314 - DNA, 25 bp, Homo sapien
gctggtactggaacttatatactct

SEQ ID NO: 2861315 - DNA, 25 bp, Homo sapien
agtccaatggccctgaaacagatgt

SEQ ID NO: 2861316 - DNA, 25 bp, Homo sapien
ctgctgttgctggtactggaactta

SEQ ID NO: 2861317 - DNA, 25 bp, Homo sapien
gggcaggacggagagtccaatggcc

SEQ ID NO: 2861318 - DNA, 25 bp, Homo sapien
aactagaaactgacttgttgcaaca

SEQ ID NO: 2861319 - DNA, 25 bp, Homo sapien
gttgcaacattgaaaacaactctca

SEQ ID NO: 2861320 - DNA, 25 bp, Homo sapien
tgcaacattgaaaacaactctcaaa

SEQ ID NO: 2861321 - DNA, 25 bp, Homo sapien
acttaaactagaaactgacttgttg

SEQ ID NO: 2861322 - DNA, 25 bp, Homo sapien
ttccccgagtgggaacacacgcgtg

SEQ ID NO: 2861323 - DNA, 25 bp, Homo sapien
cattccccgagtgggaacacacgcg

SEQ ID NO: 2861324 - DNA, 25 bp, Homo sapien
cccacattccccgagtgggaacaca

SEQ ID NO: 2861325 - DNA, 25 bp, Homo sapien
ccgagtgggaacacacgcgtgcaca

SEQ ID NO: 2861326 - DNA, 25 bp, Homo sapien
agtccacccgcgcaggtccacttct

SEQ ID NO: 2861327 - DNA, 25 bp, Homo sapien
acagaggtcgctgcgagacggtacc

SEQ ID NO: 2861328 - DNA, 25 bp, Homo sapien
tacacgcagacagatgcgggccatc

SEQ ID NO: 2861329 - DNA, 25 bp, Homo sapien
tgcacgtataccaggtacacgcaga

SEQ ID NO: 2861330 - DNA, 25 bp, Homo sapien
gagaccttacatccagctcagagcg

SEQ ID NO: 2861331 - DNA, 25 bp, Homo sapien
cctccagccgtttgtctcggcaggg

SEQ ID NO: 2861332 - DNA, 25 bp, Homo sapien
ttatccgaccttgtgctctggccgt

SEQ ID NO: 2861333 - DNA, 25 bp, Homo sapien
ctctggccgtgggtggagaccttac

SEQ ID NO: 2861334 - DNA, 25 bp, Homo sapien
tctttatggataagatgactttctt

SEQ ID NO: 2861335 - DNA, 25 bp, Homo sapien
taggaggtagtgttagtgtccttct

SEQ ID NO: 2861336 - DNA, 25 bp, Homo sapien
agcatattcttggatcattaaaaaa

SEQ ID NO: 2861337 - DNA, 25 bp, Homo sapien
tttttcaagatagtggataggaggt

SEQ ID NO: 2861338 - DNA, 25 bp, Homo sapien
taaacctggtgctgttagcgggaca

SEQ ID NO: 2861339 - DNA, 25 bp, Homo sapien
ggtgggacctactgctgtcagctaa

SEQ ID NO: 2861340 - DNA, 25 bp, Homo sapien
cagactgcctggatctaaacctggt

SEQ ID NO: 2861341 - DNA, 25 bp, Homo sapien
gaacattatcctggtggcctgggaa

SEQ ID NO: 2861342 - DNA, 25 bp, Homo sapien
gttgttgaggcagctggagaggtga

SEQ ID NO: 2861343 - DNA, 25 bp, Homo sapien
tagaaattaggttgttgaggcagct

SEQ ID NO: 2861344 - DNA, 25 bp, Homo sapien
ctagaaattaggttgttgaggcagc

SEQ ID NO: 2861345 - DNA, 25 bp, Homo sapien
gttgaggcagctggagaggtgaatc

SEQ ID NO: 2861346 - DNA, 25 bp, Homo sapien
tacttaaggaaccatagaggtggct

SEQ ID NO: 2861347 - DNA, 25 bp, Homo sapien
tccaaagtcacaggggccagtctca

SEQ ID NO: 2861348 - DNA, 25 bp, Homo sapien
gcatagagagagcactggacatgag

SEQ ID NO: 2861349 - DNA, 25 bp, Homo sapien
attgtacttaaggaaccatagaggt

SEQ ID NO: 2861350 - DNA, 25 bp, Homo sapien
atggccacttgggattaccaggctc

SEQ ID NO: 2861351 - DNA, 25 bp, Homo sapien
aaaacatggataataccatggccac

SEQ ID NO: 2861352 - DNA, 25 bp, Homo sapien
cttgggattaccaggctctctgatg

SEQ ID NO: 2861353 - DNA, 25 bp, Homo sapien
atggataataccatggccacttggg

SEQ ID NO: 2861354 - DNA, 25 bp, Homo sapien
ttggttttctaggatgcaagggtcc

SEQ ID NO: 2861355 - DNA, 25 bp, Homo sapien
ttcagcaaactgtctccggttgact

SEQ ID NO: 2861356 - DNA, 25 bp, Homo sapien
gctagaacttggacaaatacagatt

SEQ ID NO: 2861357 - DNA, 25 bp, Homo sapien
cactgggctgtccagtacagggaca

SEQ ID NO: 2861358 - DNA, 25 bp, Homo sapien
gcagcatgaattggcggggggtcac

SEQ ID NO: 2861359 - DNA, 25 bp, Homo sapien
ggtcacgacaatgggctgtgatgcc

SEQ ID NO: 2861360 - DNA, 25 bp, Homo sapien
ctggcagcatgaattggcggggggt

SEQ ID NO: 2861361 - DNA, 25 bp, Homo sapien
tggcggggggtcacgacaatgggct

SEQ ID NO: 2861362 - DNA, 25 bp, Homo sapien
tgcttctctcagtcacgccagttac

SEQ ID NO: 2861363 - DNA, 25 bp, Homo sapien
agtcacgccagttacaccaacaggg

SEQ ID NO: 2861364 - DNA, 25 bp, Homo sapien
tttggaaaatagtcaagagagggtg

SEQ ID NO: 2861365 - DNA, 25 bp, Homo sapien
tggaaaatagtcaagagagggtgaa

SEQ ID NO: 2861366 - DNA, 25 bp, Homo sapien
tcatggctataaacaatcagtatgc

SEQ ID NO: 2861367 - DNA, 25 bp, Homo sapien
tcaaaccacattgaagctgggtgca

SEQ ID NO: 2861368 - DNA, 25 bp, Homo sapien
tcaattgaggttagagtttctctcc

SEQ ID NO: 2861369 - DNA, 25 bp, Homo sapien
tcgataatccctttgtgtctctgct

SEQ ID NO: 2861370 - DNA, 25 bp, Homo sapien
agcccagaccaaaccctgagcttcc

SEQ ID NO: 2861371 - DNA, 25 bp, Homo sapien
gttaaacaagaagcctttatcttca

SEQ ID NO: 2861372 - DNA, 25 bp, Homo sapien
acttgctctgcaagcccagaccaaa

SEQ ID NO: 2861373 - DNA, 25 bp, Homo sapien
aacaagaagcctttatcttcatctc

SEQ ID NO: 2861374 - DNA, 25 bp, Homo sapien
ccccgaggagctctgaattcacagt

SEQ ID NO: 2861375 - DNA, 25 bp, Homo sapien
ggctgacagtcccgtgggtttgttc

SEQ ID NO: 2861376 - DNA, 25 bp, Homo sapien
gctctaggtgtccacccccgaggag

SEQ ID NO: 2861377 - DNA, 25 bp, Homo sapien
gtgtcgcatgaagggacagcaccct

SEQ ID NO: 2861378 - DNA, 25 bp, Homo sapien
catgtatggcatagctgtgtgtgta

SEQ ID NO: 2861379 - DNA, 25 bp, Homo sapien
ggtgtcacccgaattgccctcatgt

SEQ ID NO: 2861380 - DNA, 25 bp, Homo sapien
aatcagagagtctagggtgtcaccc

SEQ ID NO: 2861381 - DNA, 25 bp, Homo sapien
gcaaactgggagttgtaaaatcaga

SEQ ID NO: 2861382 - DNA, 25 bp, Homo sapien
ggctctacaggagggcaaacacctc

SEQ ID NO: 2861383 - DNA, 25 bp, Homo sapien
tttgagtcccccagtagctaagctt

SEQ ID NO: 2861384 - DNA, 25 bp, Homo sapien
tgccgcctgagcagggctctacagg

SEQ ID NO: 2861385 - DNA, 25 bp, Homo sapien
gtagctaagcttgctccatggggag

SEQ ID NO: 2861386 - DNA, 25 bp, Homo sapien
tctagtttgagtcacatgccctgca

SEQ ID NO: 2861387 - DNA, 25 bp, Homo sapien
gccagagatggctggtgtcagccat

SEQ ID NO: 2861388 - DNA, 25 bp, Homo sapien
ccagagatggctggtgtcagccata

SEQ ID NO: 2861389 - DNA, 25 bp, Homo sapien
tagtttgagtcacatgccctgcagc

SEQ ID NO: 2861390 - DNA, 25 bp, Homo sapien
ctagcagccaagatgccagcagaga

SEQ ID NO: 2861391 - DNA, 25 bp, Homo sapien
ctataaaaggagtctctttgagatg

SEQ ID NO: 2861392 - DNA, 25 bp, Homo sapien
gagtctctttgagatgtcggagcat

SEQ ID NO: 2861393 - DNA, 25 bp, Homo sapien
aaaggagtctctttgagatgtcgga

SEQ ID NO: 2861394 - DNA, 25 bp, Homo sapien
taaaaggagtctctttgagatgtcg

SEQ ID NO: 2861395 - DNA, 25 bp, Homo sapien
catgtggtggcataagagagatgcc

SEQ ID NO: 2861396 - DNA, 25 bp, Homo sapien
gtggcataagagagatgccgagtga

SEQ ID NO: 2861397 - DNA, 25 bp, Homo sapien
gagatgccgagtgactcccaggtga

SEQ ID NO: 2861398 - DNA, 25 bp, Homo sapien
agatgccgagtgactcccaggtgac

SEQ ID NO: 2861399 - DNA, 25 bp, Homo sapien
ggcaaattatgctgcccagcgcaac

SEQ ID NO: 2861400 - DNA, 25 bp, Homo sapien
gtgcttggtccaccaggcaaattat

SEQ ID NO: 2861401 - DNA, 25 bp, Homo sapien
tggtccaccaggcaaattatgctgc

SEQ ID NO: 2861402 - DNA, 25 bp, Homo sapien
cttggctgatcagagctgtggctct

SEQ ID NO: 2861403 - DNA, 25 bp, Homo sapien
gctgggggttgactgagtagctaca

SEQ ID NO: 2861404 - DNA, 25 bp, Homo sapien
gttgactgagtagctacagtaatcc

SEQ ID NO: 2861405 - DNA, 25 bp, Homo sapien
tgactgagtagctacagtaatccaa

SEQ ID NO: 2861406 - DNA, 25 bp, Homo sapien
gggttgactgagtagctacagtaat

SEQ ID NO: 2861407 - DNA, 25 bp, Homo sapien
gccaaaatcctgattacgagtaagt

SEQ ID NO: 2861408 - DNA, 25 bp, Homo sapien
tggccatggttgttcatctcccgct

SEQ ID NO: 2861409 - DNA, 25 bp, Homo sapien
tttttgcctctacagctggaagcag

SEQ ID NO: 2861410 - DNA, 25 bp, Homo sapien
cctctacatccctggccttagaatt

SEQ ID NO: 2861411 - DNA, 25 bp, Homo sapien
gagggcaatatcggccaagagaaag

SEQ ID NO: 2861412 - DNA, 25 bp, Homo sapien
agagggcaatatcggccaagagaaa

SEQ ID NO: 2861413 - DNA, 25 bp, Homo sapien
tagagggcaatatcggccaagagaa

SEQ ID NO: 2861414 - DNA, 25 bp, Homo sapien
tgcggcttctcggaggatcccaggg

SEQ ID NO: 2861415 - DNA, 25 bp, Homo sapien
ttctcggaggatcccagggccagca

SEQ ID NO: 2861416 - DNA, 25 bp, Homo sapien
gcttctcggaggatcccagggccag

SEQ ID NO: 2861417 - DNA, 25 bp, Homo sapien
cggcttctcggaggatcccagggcc

SEQ ID NO: 2861418 - DNA, 25 bp, Homo sapien
ccagaggtttgcacatcaatatgcc

SEQ ID NO: 2861419 - DNA, 25 bp, Homo sapien
ggtttgcacatcaatatgcccctga

SEQ ID NO: 2861420 - DNA, 25 bp, Homo sapien
gaggtttgcacatcaatatgcccct

SEQ ID NO: 2861421 - DNA, 25 bp, Homo sapien
cagaggtttgcacatcaatatgccc

SEQ ID NO: 2861422 - DNA, 25 bp, Homo sapien
aggagtccagatcctgacccttcat

SEQ ID NO: 2861423 - DNA, 25 bp, Homo sapien
cagggctggtggaatcaacacagga

SEQ ID NO: 2861424 - DNA, 25 bp, Homo sapien
acacaggagtccagatcctgaccct

SEQ ID NO: 2861425 - DNA, 25 bp, Homo sapien
caggagtccagatcctgacccttca

SEQ ID NO: 2861426 - DNA, 25 bp, Homo sapien
cagagcaaagtatcaccgactgggt

SEQ ID NO: 2861427 - DNA, 25 bp, Homo sapien
tgggcttccctctgttcgtgtctgt

SEQ ID NO: 2861428 - DNA, 25 bp, Homo sapien
gagtcttacacagagcggcgatgct

SEQ ID NO: 2861429 - DNA, 25 bp, Homo sapien
tcagcctgtaatggatgcatagtca

SEQ ID NO: 2861430 - DNA, 25 bp, Homo sapien
tttgcctatgcttaagctcttgaag

SEQ ID NO: 2861431 - DNA, 25 bp, Homo sapien
tgaagctcaaggttaatcattaact

SEQ ID NO: 2861432 - DNA, 25 bp, Homo sapien
aaatatgttgtatgtgcacgaagcc

SEQ ID NO: 2861433 - DNA, 25 bp, Homo sapien
cacgaagccttcctatttgcctatg

SEQ ID NO: 2861434 - DNA, 25 bp, Homo sapien
gacatcccacaatgctcatgtaggg

SEQ ID NO: 2861435 - DNA, 25 bp, Homo sapien
tcatctcattaactctgagtgtttc

SEQ ID NO: 2861436 - DNA, 25 bp, Homo sapien
ttcagtcagctgtggtcggtgggca

SEQ ID NO: 2861437 - DNA, 25 bp, Homo sapien
tgtgtgggttgggcagacatcccac

SEQ ID NO: 2861438 - DNA, 25 bp, Homo sapien
tgccggcatgggtgacgagaacaca

SEQ ID NO: 2861439 - DNA, 25 bp, Homo sapien
gatgaagtaccagcaacccctttcc

SEQ ID NO: 2861440 - DNA, 25 bp, Homo sapien
tacgtgtaaggtactgtgccggcat

SEQ ID NO: 2861441 - DNA, 25 bp, Homo sapien
tgtgggtgggaaagccccatactta

SEQ ID NO: 2861442 - DNA, 25 bp, Homo sapien
caagtcaggagggtataacaagtct

SEQ ID NO: 2861443 - DNA, 25 bp, Homo sapien
ggagaacaagtcaggagggtataac

SEQ ID NO: 2861444 - DNA, 25 bp, Homo sapien
caggagggtataacaagtctgggaa

SEQ ID NO: 2861445 - DNA, 25 bp, Homo sapien
gacaggtgttacctgcctggaacag

SEQ ID NO: 2861446 - DNA, 25 bp, Homo sapien
tcaatgcaacactccagggaattgc

SEQ ID NO: 2861447 - DNA, 25 bp, Homo sapien
gatctgccactttatctaaaacaca

SEQ ID NO: 2861448 - DNA, 25 bp, Homo sapien
tgctatcaacaaatcagatctgcca

SEQ ID NO: 2861449 - DNA, 25 bp, Homo sapien
tcacagatagtagaccaaggcctca

SEQ ID NO: 2861450 - DNA, 25 bp, Homo sapien
gctgcagttctaggtactccagaca

SEQ ID NO: 2861451 - DNA, 25 bp, Homo sapien
gcagttctaggtactccagacagat

SEQ ID NO: 2861452 - DNA, 25 bp, Homo sapien
ctctctcatgtatctccttttagtc

SEQ ID NO: 2861453 - DNA, 25 bp, Homo sapien
tgcagttctaggtactccagacaga

SEQ ID NO: 2861454 - DNA, 25 bp, Homo sapien
taaaatgtcaaaggatgatcaatca

SEQ ID NO: 2861455 - DNA, 25 bp, Homo sapien
ctgctcatggtataataaaatgtca

SEQ ID NO: 2861456 - DNA, 25 bp, Homo sapien
caggagagcccacacgagtaacact

SEQ ID NO: 2861457 - DNA, 25 bp, Homo sapien
aatgtcaaaggatgatcaatcagat

SEQ ID NO: 2861458 - DNA, 25 bp, Homo sapien
taagtcctggagatactcattgcct

SEQ ID NO: 2861459 - DNA, 25 bp, Homo sapien
acaccatggatagggagtggcactg

SEQ ID NO: 2861460 - DNA, 25 bp, Homo sapien
tggtaggaagattgccacgttggcc

SEQ ID NO: 2861461 - DNA, 25 bp, Homo sapien
cattgcctctagaaaggtagtccgc

SEQ ID NO: 2861462 - DNA, 25 bp, Homo sapien
tcagacgatatactggcaggacagc

SEQ ID NO: 2861463 - DNA, 25 bp, Homo sapien
cggcagttggacgaatgggcaatat

SEQ ID NO: 2861464 - DNA, 25 bp, Homo sapien
tatactggcaggacagcggcagttg

SEQ ID NO: 2861465 - DNA, 25 bp, Homo sapien
gcagttggacgaatgggcaatatct

SEQ ID NO: 2861466 - DNA, 25 bp, Homo sapien
ggtagtaatcaaaacgtgcctttca

SEQ ID NO: 2861467 - DNA, 25 bp, Homo sapien
cagactgtgaatgtcggtagtaatc

SEQ ID NO: 2861468 - DNA, 25 bp, Homo sapien
tttagatttgtcacccgtgtccaga

SEQ ID NO: 2861469 - DNA, 25 bp, Homo sapien
tttgtcacccgtgtccagactgtga

SEQ ID NO: 2861470 - DNA, 25 bp, Homo sapien
ctggcaagaaataatggaatgaata

SEQ ID NO: 2861471 - DNA, 25 bp, Homo sapien
aaataatggaatgaataaaacacac

SEQ ID NO: 2861472 - DNA, 25 bp, Homo sapien
ggcaagaaataatggaatgaataaa

SEQ ID NO: 2861473 - DNA, 25 bp, Homo sapien
ataatggaatgaataaaacacacat

SEQ ID NO: 2861474 - DNA, 25 bp, Homo sapien
tcacgaagactagagataaggcctg

SEQ ID NO: 2861475 - DNA, 25 bp, Homo sapien
cttatgtggtgtattaagtatgcca

SEQ ID NO: 2861476 - DNA, 25 bp, Homo sapien
tgcaaccgtgacctcaggtccaggc

SEQ ID NO: 2861477 - DNA, 25 bp, Homo sapien
gctctgattggttggatgctcttgg

SEQ ID NO: 2861478 - DNA, 25 bp, Homo sapien
ttcaccgtggcaaccagtaggtgcc

SEQ ID NO: 2861479 - DNA, 25 bp, Homo sapien
taaactgaatgctaatagctgcctc

SEQ ID NO: 2861480 - DNA, 25 bp, Homo sapien
ggttctttggatgataatgggcaca

SEQ ID NO: 2861481 - DNA, 25 bp, Homo sapien
tatgaaacggtaaacacacttccag

SEQ ID NO: 2861482 - DNA, 25 bp, Homo sapien
gcttcctgccgagggtctgcccttg

SEQ ID NO: 2861483 - DNA, 25 bp, Homo sapien
ctcttccagaggagaaccgtgactc

SEQ ID NO: 2861484 - DNA, 25 bp, Homo sapien
cagaaaatgctggtctgcttcctgc

SEQ ID NO: 2861485 - DNA, 25 bp, Homo sapien
ttgttcaggccgtgtgagtcctccc

SEQ ID NO: 2861486 - DNA, 25 bp, Homo sapien
gctatggtgaggccggccacagcct

SEQ ID NO: 2861487 - DNA, 25 bp, Homo sapien
ttgctatggtgaggccggccacagc

SEQ ID NO: 2861488 - DNA, 25 bp, Homo sapien
ccttgctatggtgaggccggccaca

SEQ ID NO: 2861489 - DNA, 25 bp, Homo sapien
ccccttgctatggtgaggccggcca

SEQ ID NO: 2861490 - DNA, 25 bp, Homo sapien
catcaagtaatggctctaaattcat

SEQ ID NO: 2861491 - DNA, 25 bp, Homo sapien
atcaggtaggtgagaggtgccttct

SEQ ID NO: 2861492 - DNA, 25 bp, Homo sapien
caggtaggtgagaggtgccttctac

SEQ ID NO: 2861493 - DNA, 25 bp, Homo sapien
ggtaggtgagaggtgccttctactt

SEQ ID NO: 2861494 - DNA, 25 bp, Homo sapien
taggtgagaggtgccttctactttc

SEQ ID NO: 2861495 - DNA, 25 bp, Homo sapien
tccttgttcttgaaaccctagtcat

SEQ ID NO: 2861496 - DNA, 25 bp, Homo sapien
cctcagagccttcataggtgctggt

SEQ ID NO: 2861497 - DNA, 25 bp, Homo sapien
tcagagccttcataggtgctggtcc

SEQ ID NO: 2861498 - DNA, 25 bp, Homo sapien
cagagccttcataggtgctggtcct

SEQ ID NO: 2861499 - DNA, 25 bp, Homo sapien
gtagtaaataacagaaatcgatagg

SEQ ID NO: 2861500 - DNA, 25 bp, Homo sapien
ggttccattgggaggattctgggtg

SEQ ID NO: 2861501 - DNA, 25 bp, Homo sapien
ttccattgggaggattctgggtggc

SEQ ID NO: 2861502 - DNA, 25 bp, Homo sapien
gttccattgggaggattctgggtgg

SEQ ID NO: 2861503 - DNA, 25 bp, Homo sapien
ccttaggaagagaagttcgatggcc

SEQ ID NO: 2861504 - DNA, 25 bp, Homo sapien
tgataaggaggcttccaccaagttc

SEQ ID NO: 2861505 - DNA, 25 bp, Homo sapien
taagggtgtcgaaattgaccggcca

SEQ ID NO: 2861506 - DNA, 25 bp, Homo sapien
catcttctcgggaccacataggaga

SEQ ID NO: 2861507 - DNA, 25 bp, Homo sapien
tgaagcagatagcagggcttcagat

SEQ ID NO: 2861508 - DNA, 25 bp, Homo sapien
gccggcagcctgatgaaatgaagca

SEQ ID NO: 2861509 - DNA, 25 bp, Homo sapien
tgcttgctgcaaggttataatctcc

SEQ ID NO: 2861510 - DNA, 25 bp, Homo sapien
cctgggctagggcttgtctgcttgc

SEQ ID NO: 2861511 - DNA, 25 bp, Homo sapien
ggtgtggacaacaataactcctctc

SEQ ID NO: 2861512 - DNA, 25 bp, Homo sapien
cctcatctcttttggtgtggacaac

SEQ ID NO: 2861513 - DNA, 25 bp, Homo sapien
catctcttttggtgtggacaacaat

SEQ ID NO: 2861514 - DNA, 25 bp, Homo sapien
tcatctcttttggtgtggacaacaa

SEQ ID NO: 2861515 - DNA, 25 bp, Homo sapien
tgggaagctgaccaaagtgccaact

SEQ ID NO: 2861516 - DNA, 25 bp, Homo sapien
tattgtataaaaaggtgggcctggc

SEQ ID NO: 2861517 - DNA, 25 bp, Homo sapien
tagaactcggtgtcagctttgggaa

SEQ ID NO: 2861518 - DNA, 25 bp, Homo sapien
gcattcaaacagtgccagccaaggg

SEQ ID NO: 2861519 - DNA, 25 bp, Homo sapien
actggtttgatttccacagtttgcc

SEQ ID NO: 2861520 - DNA, 25 bp, Homo sapien
ggtttgatttccacagtttgcccac

SEQ ID NO: 2861521 - DNA, 25 bp, Homo sapien
tggtttgatttccacagtttgccca

SEQ ID NO: 2861522 - DNA, 25 bp, Homo sapien
ccactggtttgatttccacagtttg

SEQ ID NO: 2861523 - DNA, 25 bp, Homo sapien
taccctccatctagcaagaaaaatg

SEQ ID NO: 2861524 - DNA, 25 bp, Homo sapien
gaggaatagattccaataccctcca

SEQ ID NO: 2861525 - DNA, 25 bp, Homo sapien
tagagctatgtgctgcgtgccattt

SEQ ID NO: 2861526 - DNA, 25 bp, Homo sapien
tgccttgtcctgttgctgttttaga

SEQ ID NO: 2861527 - DNA, 25 bp, Homo sapien
cagacattcatcgtctatcagggtc

SEQ ID NO: 2861528 - DNA, 25 bp, Homo sapien
agggggtagctttggtctctgaatc

SEQ ID NO: 2861529 - DNA, 25 bp, Homo sapien
ctatcagggtctgggcataccagca

SEQ ID NO: 2861530 - DNA, 25 bp, Homo sapien
catcgtctatcagggtctgggcata

SEQ ID NO: 2861531 - DNA, 25 bp, Homo sapien
aatggttcggagggctaggtagtag

SEQ ID NO: 2861532 - DNA, 25 bp, Homo sapien
aatataatgttggtgcttgctctca

SEQ ID NO: 2861533 - DNA, 25 bp, Homo sapien
tttctgcagctgagaatataatgtt

SEQ ID NO: 2861534 - DNA, 25 bp, Homo sapien
ctgaagaggaatattgatttctgca

SEQ ID NO: 2861535 - DNA, 25 bp, Homo sapien
tctgcagctgagaatataatgttgg

SEQ ID NO: 2861536 - DNA, 25 bp, Homo sapien
ggaagcaatgtggtgataccttcaa

SEQ ID NO: 2861537 - DNA, 25 bp, Homo sapien
agctttctgaggcaactttcattac

SEQ ID NO: 2861538 - DNA, 25 bp, Homo sapien
gaaaatgttcgattcaggaagcaat

SEQ ID NO: 2861539 - DNA, 25 bp, Homo sapien
ctggtttgaaaatgttcgattcagg

SEQ ID NO: 2861540 - DNA, 25 bp, Homo sapien
agtcataggctccaggctcttgatg

SEQ ID NO: 2861541 - DNA, 25 bp, Homo sapien
tgccgagtcataggctccaggctct

SEQ ID NO: 2861542 - DNA, 25 bp, Homo sapien
gaatgccgagtcataggctccaggc

SEQ ID NO: 2861543 - DNA, 25 bp, Homo sapien
ctgggacggaatgccgagtcatagg

SEQ ID NO: 2861544 - DNA, 25 bp, Homo sapien
ccagggcatgcggaagaaataaaac

SEQ ID NO: 2861545 - DNA, 25 bp, Homo sapien
cagggcatgcggaagaaataaaacg

SEQ ID NO: 2861546 - DNA, 25 bp, Homo sapien
agaaataaaacgacatgtagctcaa

SEQ ID NO: 2861547 - DNA, 25 bp, Homo sapien
aaacgacatgtagctcaaattttac

SEQ ID NO: 2861548 - DNA, 25 bp, Homo sapien
tactatgaagcccacagaaccttgg

SEQ ID NO: 2861549 - DNA, 25 bp, Homo sapien
ctttactatgaagcccacagaacct

SEQ ID NO: 2861550 - DNA, 25 bp, Homo sapien
catttagcttatattctaaggttaa

SEQ ID NO: 2861551 - DNA, 25 bp, Homo sapien
tgaagcccacagaaccttggacatt

SEQ ID NO: 2861552 - DNA, 25 bp, Homo sapien
tctcagagctgggttcaaatgttgc

SEQ ID NO: 2861553 - DNA, 25 bp, Homo sapien
ctctcagagctgggttcaaatgttg

SEQ ID NO: 2861554 - DNA, 25 bp, Homo sapien
gtagaataaacacaagctgccactt

SEQ ID NO: 2861555 - DNA, 25 bp, Homo sapien
tccaaaagcccagtagaataaacac

SEQ ID NO: 2861556 - DNA, 25 bp, Homo sapien
tcctaagttctccaaaagcccagta

SEQ ID NO: 2861557 - DNA, 25 bp, Homo sapien
gctgccacttggaaaacaattctga

SEQ ID NO: 2861558 - DNA, 25 bp, Homo sapien
caattattgacttcccccttattct

SEQ ID NO: 2861559 - DNA, 25 bp, Homo sapien
gatgagtacattggaacatggtcgc

SEQ ID NO: 2861560 - DNA, 25 bp, Homo sapien
cattggcttcttctcgaatgcggag

SEQ ID NO: 2861561 - DNA, 25 bp, Homo sapien
cggagggaattatcggatgagtaca

SEQ ID NO: 2861562 - DNA, 25 bp, Homo sapien
tggaagatgaccaaaatgctatctc

SEQ ID NO: 2861563 - DNA, 25 bp, Homo sapien
tacacagatgctccgggatctgagg

SEQ ID NO: 2861564 - DNA, 25 bp, Homo sapien
acccagatacacagatgctccggga

SEQ ID NO: 2861565 - DNA, 25 bp, Homo sapien
ccagatacacagatgctccgggatc

SEQ ID NO: 2861566 - DNA, 25 bp, Homo sapien
atgctccgggatctgaggaagtgac

SEQ ID NO: 2861567 - DNA, 25 bp, Homo sapien
aagccttttggcacaaggcctaggt

SEQ ID NO: 2861568 - DNA, 25 bp, Homo sapien
acaaggcctaggtttgcagcatcag

SEQ ID NO: 2861569 - DNA, 25 bp, Homo sapien
tagcagccagactcatgaagccttt

SEQ ID NO: 2861570 - DNA, 25 bp, Homo sapien
accgcacactccacagtttcagctg

SEQ ID NO: 2861571 - DNA, 25 bp, Homo sapien
ggcttcttcgtcttgggtacatttc

SEQ ID NO: 2861572 - DNA, 25 bp, Homo sapien
cacggcttcttcgtcttgggtacat

SEQ ID NO: 2861573 - DNA, 25 bp, Homo sapien
cggcttcttcgtcttgggtacattt

SEQ ID NO: 2861574 - DNA, 25 bp, Homo sapien
acggcttcttcgtcttgggtacatt

SEQ ID NO: 2861575 - DNA, 25 bp, Homo sapien
gacatctgctctagtgcaagggctg

SEQ ID NO: 2861576 - DNA, 25 bp, Homo sapien
aaggacatctgctctagtgcaaggg

SEQ ID NO: 2861577 - DNA, 25 bp, Homo sapien
tgctctagtgcaagggctggttccc

SEQ ID NO: 2861578 - DNA, 25 bp, Homo sapien
catctgctctagtgcaagggctggt

SEQ ID NO: 2861579 - DNA, 25 bp, Homo sapien
aactccagaccagggggtttcgatg

SEQ ID NO: 2861580 - DNA, 25 bp, Homo sapien
gggctctatatgatgggataaggac

SEQ ID NO: 2861581 - DNA, 25 bp, Homo sapien
caggtcttggggctctatatgatgg

SEQ ID NO: 2861582 - DNA, 25 bp, Homo sapien
gtttcgatgagggtaagaccacctg

SEQ ID NO: 2861583 - DNA, 25 bp, Homo sapien
tctgggttctcagtatgttctgaag

SEQ ID NO: 2861584 - DNA, 25 bp, Homo sapien
aagatttaggctgctgtgtagttat

SEQ ID NO: 2861585 - DNA, 25 bp, Homo sapien
agtatgttctgaagatttaggctgc

SEQ ID NO: 2861586 - DNA, 25 bp, Homo sapien
tctttctgggttctcagtatgttct

SEQ ID NO: 2861587 - DNA, 25 bp, Homo sapien
taagtctcgttgagtcaaccctctt

SEQ ID NO: 2861588 - DNA, 25 bp, Homo sapien
tcgttgagtcaaccctcttatcttc

SEQ ID NO: 2861589 - DNA, 25 bp, Homo sapien
ctctaagtctcgttgagtcaaccct

SEQ ID NO: 2861590 - DNA, 25 bp, Homo sapien
caaccctcttatcttcttatatctg

SEQ ID NO: 2861591 - DNA, 25 bp, Homo sapien
taatcctgggacagagacatctgat

SEQ ID NO: 2861592 - DNA, 25 bp, Homo sapien
aataatcctgggacagagacatctg

SEQ ID NO: 2861593 - DNA, 25 bp, Homo sapien
atgtcccatgttcgtggctgaataa

SEQ ID NO: 2861594 - DNA, 25 bp, Homo sapien
gcagttgcctcagtggcaccttatg

SEQ ID NO: 2861595 - DNA, 25 bp, Homo sapien
ggtcagagccccgtatgtgctggct

SEQ ID NO: 2861596 - DNA, 25 bp, Homo sapien
ttgcaggggacccaaacaccaggtc

SEQ ID NO: 2861597 - DNA, 25 bp, Homo sapien
caaacaccaggtcagagccccgtat

SEQ ID NO: 2861598 - DNA, 25 bp, Homo sapien
gagccccgtatgtgctggctgtccc

SEQ ID NO: 2861599 - DNA, 25 bp, Homo sapien
gggacagcagggttaagggaacaga

SEQ ID NO: 2861600 - DNA, 25 bp, Homo sapien
tctactgcttcctttccacccttca

SEQ ID NO: 2861601 - DNA, 25 bp, Homo sapien
tctcttcctgctttcaaattttctt

SEQ ID NO: 2861602 - DNA, 25 bp, Homo sapien
actcccttgccctggatttttctct

SEQ ID NO: 2861603 - DNA, 25 bp, Homo sapien
tctttcccctttcatctctactgct

SEQ ID NO: 2861604 - DNA, 25 bp, Homo sapien
ttcagagtcgcatcccctttcaagg

SEQ ID NO: 2861605 - DNA, 25 bp, Homo sapien
ttttcagagtcgcatcccctttcaa

SEQ ID NO: 2861606 - DNA, 25 bp, Homo sapien
caacacagcgttagtggagaggaga

SEQ ID NO: 2861607 - DNA, 25 bp, Homo sapien
agacatcagcaacacagcgttagtg

SEQ ID NO: 2861608 - DNA, 25 bp, Homo sapien
gatgtagtgatgtaccgagtgtagc

SEQ ID NO: 2861609 - DNA, 25 bp, Homo sapien
tccagaaagatcgagtgatgtagtg

SEQ ID NO: 2861610 - DNA, 25 bp, Homo sapien
acagccaagtccacagtctgtcact

SEQ ID NO: 2861611 - DNA, 25 bp, Homo sapien
tggtcaagtcccaggaaagtccctg

SEQ ID NO: 2861612 - DNA, 25 bp, Homo sapien
gataccagaaactgtctcgtgatat

SEQ ID NO: 2861613 - DNA, 25 bp, Homo sapien
accagaaactgtctcgtgatatcat

SEQ ID NO: 2861614 - DNA, 25 bp, Homo sapien
tctctgataccagaaactgtctcgt

SEQ ID NO: 2861615 - DNA, 25 bp, Homo sapien
tcctcccttctctgataccagaaac

SEQ ID NO: 2861616 - DNA, 25 bp, Homo sapien
gctgcggacagcactactgaagtct

SEQ ID NO: 2861617 - DNA, 25 bp, Homo sapien
ggcagccatgctgcggacagcacta

SEQ ID NO: 2861618 - DNA, 25 bp, Homo sapien
ggagcaaggccccagataaccttca

SEQ ID NO: 2861619 - DNA, 25 bp, Homo sapien
tgaaattgcaacaacatgtgttggg

SEQ ID NO: 2861620 - DNA, 25 bp, Homo sapien
cactgtcatttgccattgcaccatt

SEQ ID NO: 2861621 - DNA, 25 bp, Homo sapien
ctgtcatttgccattgcaccatttt

SEQ ID NO: 2861622 - DNA, 25 bp, Homo sapien
caggccactgtcatttgccattgca

SEQ ID NO: 2861623 - DNA, 25 bp, Homo sapien
ctgtggaaccaggccaggccactgt

SEQ ID NO: 2861624 - DNA, 25 bp, Homo sapien
agtttttccctttgtgagcccatgt

SEQ ID NO: 2861625 - DNA, 25 bp, Homo sapien
ttctgttgattagggcttcttcagc

SEQ ID NO: 2861626 - DNA, 25 bp, Homo sapien
gaactgtgattcctagtctgatgtg

SEQ ID NO: 2861627 - DNA, 25 bp, Homo sapien
ccaaggagattctgttgattagggc

SEQ ID NO: 2861628 - DNA, 25 bp, Homo sapien
cctagtctgatgtgggtagaataga

SEQ ID NO: 2861629 - DNA, 25 bp, Homo sapien
catcttcagttgcgctcaactctct

SEQ ID NO: 2861630 - DNA, 25 bp, Homo sapien
tcttcagttgcgctcaactctctgg

SEQ ID NO: 2861631 - DNA, 25 bp, Homo sapien
gtccatcttcagttgcgctcaactc

SEQ ID NO: 2861632 - DNA, 25 bp, Homo sapien
cttcagttgcgctcaactctctggc

SEQ ID NO: 2861633 - DNA, 25 bp, Homo sapien
ctagctcgcggggagggcgtcgcgc

SEQ ID NO: 2861634 - DNA, 25 bp, Homo sapien
tagctcgcggggagggcgtcgcgcg

SEQ ID NO: 2861635 - DNA, 25 bp, Homo sapien
agctcgcggggagggcgtcgcgcgg

SEQ ID NO: 2861636 - DNA, 25 bp, Homo sapien
gccgggctcgtctgcattgacgtct

SEQ ID NO: 2861637 - DNA, 25 bp, Homo sapien
tcgtctgcattgacgtctgcggcgg

SEQ ID NO: 2861638 - DNA, 25 bp, Homo sapien
ccgagcgccgggctcgtctgcattg

SEQ ID NO: 2861639 - DNA, 25 bp, Homo sapien
ctagcggcgcggacctgggtctcct

SEQ ID NO: 2861640 - DNA, 25 bp, Homo sapien
aattatgatgcacatccaccgcggc

SEQ ID NO: 2861641 - DNA, 25 bp, Homo sapien
ctgggtgaattatgatgcacatcca

SEQ ID NO: 2861642 - DNA, 25 bp, Homo sapien
ggtgaattatgatgcacatccaccg

SEQ ID NO: 2861643 - DNA, 25 bp, Homo sapien
ttatgatgcacatccaccgcggctg

SEQ ID NO: 2861644 - DNA, 25 bp, Homo sapien
gtttgggattcgcacagacagagcc

SEQ ID NO: 2861645 - DNA, 25 bp, Homo sapien
tgtgggcgtcattcagtgggcttca

SEQ ID NO: 2861646 - DNA, 25 bp, Homo sapien
cttcaagggaatcgggcacagcttt

SEQ ID NO: 2861647 - DNA, 25 bp, Homo sapien
tttatcacggaaacactggcatctg

SEQ ID NO: 2861648 - DNA, 25 bp, Homo sapien
tcttatccttattctgctgatgtgt

SEQ ID NO: 2861649 - DNA, 25 bp, Homo sapien
ctccacatccttatgagttttaaca

SEQ ID NO: 2861650 - DNA, 25 bp, Homo sapien
cacatccttatgagttttaacagag

SEQ ID NO: 2861651 - DNA, 25 bp, Homo sapien
acagagatgtaagattgtatcataa

SEQ ID NO: 2861652 - DNA, 25 bp, Homo sapien
ggaggaactgctcagaatcttgccc

SEQ ID NO: 2861653 - DNA, 25 bp, Homo sapien
gagttaaccaggacagcaccaccag

SEQ ID NO: 2861654 - DNA, 25 bp, Homo sapien
accagggtcacaagcctgccctcct

SEQ ID NO: 2861655 - DNA, 25 bp, Homo sapien
cctcagagttaaccaggacagcacc

SEQ ID NO: 2861656 - DNA, 25 bp, Homo sapien
ttccagagggtgtggaaatatcagg

SEQ ID NO: 2861657 - DNA, 25 bp, Homo sapien
caagacttccagagggtgtggaaat

SEQ ID NO: 2861658 - DNA, 25 bp, Homo sapien
tcacttggggcacgactgagtcaag

SEQ ID NO: 2861659 - DNA, 25 bp, Homo sapien
acactttccactgaggtcacttggg

SEQ ID NO: 2861660 - DNA, 25 bp, Homo sapien
caatgctcgctctgggctctttcca

SEQ ID NO: 2861661 - DNA, 25 bp, Homo sapien
ctcgctctgggctctttccacagag

SEQ ID NO: 2861662 - DNA, 25 bp, Homo sapien
ctgctggcaatgctcgctctgggct

SEQ ID NO: 2861663 - DNA, 25 bp, Homo sapien
tccacagagagaggtcacattccat

SEQ ID NO: 2861664 - DNA, 25 bp, Homo sapien
tactgcgaacatttgtgctctgagc

SEQ ID NO: 2861665 - DNA, 25 bp, Homo sapien
ggcatcaaaggcaaaggtcctcccc

SEQ ID NO: 2861666 - DNA, 25 bp, Homo sapien
ctgcctactgcgaacatttgtgctc

SEQ ID NO: 2861667 - DNA, 25 bp, Homo sapien
tggcatcaaaggcaaaggtcctccc

SEQ ID NO: 2861668 - DNA, 25 bp, Homo sapien
ctcatgaaactcatgatggcattta

SEQ ID NO: 2861669 - DNA, 25 bp, Homo sapien
tgctcatgaaactcatgatggcatt

SEQ ID NO: 2861670 - DNA, 25 bp, Homo sapien
tcatgaaactcatgatggcatttag

SEQ ID NO: 2861671 - DNA, 25 bp, Homo sapien
gctcatgaaactcatgatggcattt

SEQ ID NO: 2861672 - DNA, 25 bp, Homo sapien
gggaatagcttgatgtagatccagc

SEQ ID NO: 2861673 - DNA, 25 bp, Homo sapien
gaatagcttgatgtagatccagcac

SEQ ID NO: 2861674 - DNA, 25 bp, Homo sapien
cactagttctgggtaagttaatctc

SEQ ID NO: 2861675 - DNA, 25 bp, Homo sapien
tagatccagcactagttctgggtaa

SEQ ID NO: 2861676 - DNA, 25 bp, Homo sapien
tgtctcaggccttaggtgaccttac

SEQ ID NO: 2861677 - DNA, 25 bp, Homo sapien
aatcagattctattacctccaggct

SEQ ID NO: 2861678 - DNA, 25 bp, Homo sapien
tactcctatgataaaggccaaacca

SEQ ID NO: 2861679 - DNA, 25 bp, Homo sapien
cttccccatggttacagataaatct

SEQ ID NO: 2861680 - DNA, 25 bp, Homo sapien
caattggatttcatctaaggggtga

SEQ ID NO: 2861681 - DNA, 25 bp, Homo sapien
cttgcaaagggcgagtggtgagcgg

SEQ ID NO: 2861682 - DNA, 25 bp, Homo sapien
gtgatgagaatggcaggcctcaaga

SEQ ID NO: 2861683 - DNA, 25 bp, Homo sapien
tgggtgaaactaacactcccagtat

SEQ ID NO: 2861684 - DNA, 25 bp, Homo sapien
gcggtattatcggagtcgggtatct

SEQ ID NO: 2861685 - DNA, 25 bp, Homo sapien
gagctcagtctgcggtattatcgga

SEQ ID NO: 2861686 - DNA, 25 bp, Homo sapien
tattatcggagtcgggtatctcctt

SEQ ID NO: 2861687 - DNA, 25 bp, Homo sapien
cagtctgcggtattatcggagtcgg

SEQ ID NO: 2861688 - DNA, 25 bp, Homo sapien
ctgcttggccaaaagtctctacctg

SEQ ID NO: 2861689 - DNA, 25 bp, Homo sapien
gcttggccaaaagtctctacctgga

SEQ ID NO: 2861690 - DNA, 25 bp, Homo sapien
tgcttggccaaaagtctctacctgg

SEQ ID NO: 2861691 - DNA, 25 bp, Homo sapien
aaatatcaactgtatggcattctgg

SEQ ID NO: 2861692 - DNA, 25 bp, Homo sapien
cccagaggactaaataccaatggct

SEQ ID NO: 2861693 - DNA, 25 bp, Homo sapien
gaacacgtggctttgtatcaataaa

SEQ ID NO: 2861694 - DNA, 25 bp, Homo sapien
tgtcggccctcgatgaatgcactga

SEQ ID NO: 2861695 - DNA, 25 bp, Homo sapien
ttcccatagatctacttcataattt

SEQ ID NO: 2861696 - DNA, 25 bp, Homo sapien
gttatctcaggaaccagtgagcagc

SEQ ID NO: 2861697 - DNA, 25 bp, Homo sapien
aaactgcggttctgatattggaggg

SEQ ID NO: 2861698 - DNA, 25 bp, Homo sapien
cagcagccttgaagcgatgtccaac

SEQ ID NO: 2861699 - DNA, 25 bp, Homo sapien
gtatagacgcatccctgtaccagtg

SEQ ID NO: 2861700 - DNA, 25 bp, Homo sapien
gttagaaattcagcaccaatccggg

SEQ ID NO: 2861701 - DNA, 25 bp, Homo sapien
taaaaacccgaggtcagcaaacagc

SEQ ID NO: 2861702 - DNA, 25 bp, Homo sapien
tttaagtccacagagaaagcaagcc

SEQ ID NO: 2861703 - DNA, 25 bp, Homo sapien
ccctctaagatggtagctatgctca

SEQ ID NO: 2861704 - DNA, 25 bp, Homo sapien
gatccacaatgttcaggcatctcag

SEQ ID NO: 2861705 - DNA, 25 bp, Homo sapien
tacagtctaacctgggaatccacgt

SEQ ID NO: 2861706 - DNA, 25 bp, Homo sapien
gatcagcattcagacagggtagggt

SEQ ID NO: 2861707 - DNA, 25 bp, Homo sapien
tgccctgatgggtcaggaagcaagc

SEQ ID NO: 2861708 - DNA, 25 bp, Homo sapien
gcaagcggaaacttgcaagtttttc

SEQ ID NO: 2861709 - DNA, 25 bp, Homo sapien
caagatgctctgttatgccaaaagg

SEQ ID NO: 2861710 - DNA, 25 bp, Homo sapien
cacagttcaaatagcttcacaggcc

SEQ ID NO: 2861711 - DNA, 25 bp, Homo sapien
tctctgcatagtgtgtccagtctgg

SEQ ID NO: 2861712 - DNA, 25 bp, Homo sapien
tctgcatagtgtgtccagtctggac

SEQ ID NO: 2861713 - DNA, 25 bp, Homo sapien
aaggcctctctgcatagtgtgtcca

SEQ ID NO: 2861714 - DNA, 25 bp, Homo sapien
tgggagtttaagaggccagaggggc

SEQ ID NO: 2861715 - DNA, 25 bp, Homo sapien
tctagaatgccaaagggagccactg

SEQ ID NO: 2861716 - DNA, 25 bp, Homo sapien
tgctggctctgttgatgattccact

SEQ ID NO: 2861717 - DNA, 25 bp, Homo sapien
tgaagctgctcttaacccctgctgc

SEQ ID NO: 2861718 - DNA, 25 bp, Homo sapien
ccacttaaaggaaccagttgtgttg

SEQ ID NO: 2861719 - DNA, 25 bp, Homo sapien
gcaaagggctgccactgagctctct

SEQ ID NO: 2861720 - DNA, 25 bp, Homo sapien
cagcctgctgcaaagggctgccact

SEQ ID NO: 2861721 - DNA, 25 bp, Homo sapien
taccagggagtgctgtatgactggc

SEQ ID NO: 2861722 - DNA, 25 bp, Homo sapien
agctctctctgccttaccagggagt

SEQ ID NO: 2861723 - DNA, 25 bp, Homo sapien
tcttcttccacaagcgtcgagtgag

SEQ ID NO: 2861724 - DNA, 25 bp, Homo sapien
gactttgccccagggagtaccgaga

SEQ ID NO: 2861725 - DNA, 25 bp, Homo sapien
tctcatgacacctaaacaaatggtc

SEQ ID NO: 2861726 - DNA, 25 bp, Homo sapien
taccgagaaaatgaaatatcgtctg

SEQ ID NO: 2861727 - DNA, 25 bp, Homo sapien
ctccagaataaaaaccctgcctcgg

SEQ ID NO: 2861728 - DNA, 25 bp, Homo sapien
tgactctagtgtggctgcttgccca

SEQ ID NO: 2861729 - DNA, 25 bp, Homo sapien
gcttgcccactttcctatcaaagga

SEQ ID NO: 2861730 - DNA, 25 bp, Homo sapien
taaacaagatctagcagcaagtcaa

SEQ ID NO: 2861731 - DNA, 25 bp, Homo sapien
aattattctgctgttacctacccca

SEQ ID NO: 2861732 - DNA, 25 bp, Homo sapien
tgtaagcatacatatccacatgcgt

SEQ ID NO: 2861733 - DNA, 25 bp, Homo sapien
tctgtgtcagaatgcatagagttac

SEQ ID NO: 2861734 - DNA, 25 bp, Homo sapien
taccagattgtgtatgctttccaaa

SEQ ID NO: 2861735 - DNA, 25 bp, Homo sapien
ttagttgcaaaattcggattggccc

SEQ ID NO: 2861736 - DNA, 25 bp, Homo sapien
tgaaaactcaattgagcaccactca

SEQ ID NO: 2861737 - DNA, 25 bp, Homo sapien
caccactcaagaagcaaggagctgg

SEQ ID NO: 2861738 - DNA, 25 bp, Homo sapien
gccctggaagatgccagactcacga

SEQ ID NO: 2861739 - DNA, 25 bp, Homo sapien
cccttcaacctaagcaggcccagga

SEQ ID NO: 2861740 - DNA, 25 bp, Homo sapien
ccttcaacctaagcaggcccaggaa

SEQ ID NO: 2861741 - DNA, 25 bp, Homo sapien
gactggctctcaaggactcaggaag

SEQ ID NO: 2861742 - DNA, 25 bp, Homo sapien
gagaatatttttggcccctgttcac

SEQ ID NO: 2861743 - DNA, 25 bp, Homo sapien
ccctgttcacaaggactggctctca

SEQ ID NO: 2861744 - DNA, 25 bp, Homo sapien
ataaggcatcaaaattaagagaata

SEQ ID NO: 2861745 - DNA, 25 bp, Homo sapien
tggccttatccagcgggtcttcaag

SEQ ID NO: 2861746 - DNA, 25 bp, Homo sapien
ttcaagtggggtcctcagcgcagca

SEQ ID NO: 2861747 - DNA, 25 bp, Homo sapien
actgtgagtggccttatccagcggg

SEQ ID NO: 2861748 - DNA, 25 bp, Homo sapien
gttgtcagagagcatccactgtgag

SEQ ID NO: 2861749 - DNA, 25 bp, Homo sapien
atgcttggcacatattccataactc

SEQ ID NO: 2861750 - DNA, 25 bp, Homo sapien
cagatgcttggcacatattccataa

SEQ ID NO: 2861751 - DNA, 25 bp, Homo sapien
tggtgtcagatgcttggcacatatt

SEQ ID NO: 2861752 - DNA, 25 bp, Homo sapien
ctggtgtcagatgcttggcacatat

SEQ ID NO: 2861753 - DNA, 25 bp, Homo sapien
agtcggcctcatgccagatcctagc

SEQ ID NO: 2861754 - DNA, 25 bp, Homo sapien
gtgaatctcagtcggcctcatgcca

SEQ ID NO: 2861755 - DNA, 25 bp, Homo sapien
caggatatgtgaatctcagtcggcc

SEQ ID NO: 2861756 - DNA, 25 bp, Homo sapien
aggctggaaccaggatatgtgaatc

SEQ ID NO: 2861757 - DNA, 25 bp, Homo sapien
aatggtctttgagggcaatgccggc

SEQ ID NO: 2861758 - DNA, 25 bp, Homo sapien
atcaaaggtggaggagtgggtgtct

SEQ ID NO: 2861759 - DNA, 25 bp, Homo sapien
gccggccccagcatcaaaggtggag

SEQ ID NO: 2861760 - DNA, 25 bp, Homo sapien
aaaatggtctttgagggcaatgccg

SEQ ID NO: 2861761 - DNA, 25 bp, Homo sapien
gacaacctggtgctcagtgtcgccc

SEQ ID NO: 2861762 - DNA, 25 bp, Homo sapien
cctggtgctcagtgtcgccccagat

SEQ ID NO: 2861763 - DNA, 25 bp, Homo sapien
aacctggtgctcagtgtcgccccag

SEQ ID NO: 2861764 - DNA, 25 bp, Homo sapien
acaacctggtgctcagtgtcgcccc

SEQ ID NO: 2861765 - DNA, 25 bp, Homo sapien
tttcgagacggcaggtgaggtccat

SEQ ID NO: 2861766 - DNA, 25 bp, Homo sapien
ttcgagacggcaggtgaggtccatg

SEQ ID NO: 2861767 - DNA, 25 bp, Homo sapien
tcgagacggcaggtgaggtccatga

SEQ ID NO: 2861768 - DNA, 25 bp, Homo sapien
gacacgttggtgatgtggacacaga

SEQ ID NO: 2861769 - DNA, 25 bp, Homo sapien
gttggtgatgtggacacagaagccc

SEQ ID NO: 2861770 - DNA, 25 bp, Homo sapien
ctgacacgttggtgatgtggacaca

SEQ ID NO: 2861771 - DNA, 25 bp, Homo sapien
tggtgatgtggacacagaagcccat

SEQ ID NO: 2861772 - DNA, 25 bp, Homo sapien
ttcttgttcagcttagagatgaccc

SEQ ID NO: 2861773 - DNA, 25 bp, Homo sapien
gcttcttgttcagcttagagatgac

SEQ ID NO: 2861774 - DNA, 25 bp, Homo sapien
gtcagtgagcttcttgttcagctta

SEQ ID NO: 2861775 - DNA, 25 bp, Homo sapien
gtgagcttcttgttcagcttagaga

SEQ ID NO: 2861776 - DNA, 25 bp, Homo sapien
agctgacgatattgagtctgttgtc

SEQ ID NO: 2861777 - DNA, 25 bp, Homo sapien
ggaggcatagctgacgatattgagt

SEQ ID NO: 2861778 - DNA, 25 bp, Homo sapien
gatggcgtggactgtattctggaat

SEQ ID NO: 2861779 - DNA, 25 bp, Homo sapien
cgcagccgtcgcaccacagtttccc

SEQ ID NO: 2861780 - DNA, 25 bp, Homo sapien
gacttcacaacatattcagcgccag

SEQ ID NO: 2861781 - DNA, 25 bp, Homo sapien
acttcacaacatattcagcgccagc

SEQ ID NO: 2861782 - DNA, 25 bp, Homo sapien
ggacttcacaacatattcagcgcca

SEQ ID NO: 2861783 - DNA, 25 bp, Homo sapien
cttcacaacatattcagcgccagca

SEQ ID NO: 2861784 - DNA, 25 bp, Homo sapien
tttagcacggtctggatggatagac

SEQ ID NO: 2861785 - DNA, 25 bp, Homo sapien
ccctagtggagaatttagcacggtc

SEQ ID NO: 2861786 - DNA, 25 bp, Homo sapien
agagcccctagtggagaatttagca

SEQ ID NO: 2861787 - DNA, 25 bp, Homo sapien
gagaatttagcacggtctggatgga

SEQ ID NO: 2861788 - DNA, 25 bp, Homo sapien
cctctttatttccattgatctggat

SEQ ID NO: 2861789 - DNA, 25 bp, Homo sapien
attcctctttatttccattgatctg

SEQ ID NO: 2861790 - DNA, 25 bp, Homo sapien
tccattgatctggatatttttctca

SEQ ID NO: 2861791 - DNA, 25 bp, Homo sapien
tatttccattgatctggatattttt

SEQ ID NO: 2861792 - DNA, 25 bp, Homo sapien
ggtaagtctcaatgcccacacagca

SEQ ID NO: 2861793 - DNA, 25 bp, Homo sapien
tggaaagagcagtagggtaagtctc

SEQ ID NO: 2861794 - DNA, 25 bp, Homo sapien
ttcatcttggtagcagtggtactgg

SEQ ID NO: 2861795 - DNA, 25 bp, Homo sapien
tggcagttgtaacagtagcagcgct

SEQ ID NO: 2861796 - DNA, 25 bp, Homo sapien
gtccttaaccactaaactccactgc

SEQ ID NO: 2861797 - DNA, 25 bp, Homo sapien
tgaacccagatctacctacctgtga

SEQ ID NO: 2861798 - DNA, 25 bp, Homo sapien
gccagggctagggtttgaacccaga

SEQ ID NO: 2861799 - DNA, 25 bp, Homo sapien
agatctacctacctgtgatgtctga

SEQ ID NO: 2861800 - DNA, 25 bp, Homo sapien
ccccctaatcccagcagctactgtg

SEQ ID NO: 2861801 - DNA, 25 bp, Homo sapien
gcaggccagtgcagcaaacgggacc

SEQ ID NO: 2861802 - DNA, 25 bp, Homo sapien
gacccccctaatcccagcagctact

SEQ ID NO: 2861803 - DNA, 25 bp, Homo sapien
tacttaacgacagcttcttggtttc

SEQ ID NO: 2861804 - DNA, 25 bp, Homo sapien
cgtcgcctgggcggctgcgcctaca

SEQ ID NO: 2861805 - DNA, 25 bp, Homo sapien
gcctgggcggctgcgcctacaccta

SEQ ID NO: 2861806 - DNA, 25 bp, Homo sapien
cctgggcggctgcgcctacacctac

SEQ ID NO: 2861807 - DNA, 25 bp, Homo sapien
tcgcctgggcggctgcgcctacacc

SEQ ID NO: 2861808 - DNA, 25 bp, Homo sapien
gcagctgcctgagcggcagccagcg

SEQ ID NO: 2861809 - DNA, 25 bp, Homo sapien
gcagtcgcgcaaggactcgctggac

SEQ ID NO: 2861810 - DNA, 25 bp, Homo sapien
ggactcgctggacgacagcggcagc

SEQ ID NO: 2861811 - DNA, 25 bp, Homo sapien
cgctggagcgctcgcagtcgcgcaa

SEQ ID NO: 2861812 - DNA, 25 bp, Homo sapien
agtcgagctgtgcgccttccccgag

SEQ ID NO: 2861813 - DNA, 25 bp, Homo sapien
gctgtgcgccttccccgagtggaag

SEQ ID NO: 2861814 - DNA, 25 bp, Homo sapien
cgagctgtgcgccttccccgagtgg

SEQ ID NO: 2861815 - DNA, 25 bp, Homo sapien
gcgcgccaccgccagtcgagctgtg

SEQ ID NO: 2861816 - DNA, 25 bp, Homo sapien
gccagcaacggaggctgcgaggccg

SEQ ID NO: 2861817 - DNA, 25 bp, Homo sapien
ggcagccgggcttcaaaagcaacat

SEQ ID NO: 2861818 - DNA, 25 bp, Homo sapien
gaggccgcggccgacgtggccaacg

SEQ ID NO: 2861819 - DNA, 25 bp, Homo sapien
ttcaagctcctgaccgagcccgaga

SEQ ID NO: 2861820 - DNA, 25 bp, Homo sapien
ggcagttttagggcccccgtgcgca

SEQ ID NO: 2861821 - DNA, 25 bp, Homo sapien
aggtcctcccaatcatctgtttgca

SEQ ID NO: 2861822 - DNA, 25 bp, Homo sapien
tggcatgcatgggtcacaggattct

SEQ ID NO: 2861823 - DNA, 25 bp, Homo sapien
gtgccagccgaaccgaaattaggat

SEQ ID NO: 2861824 - DNA, 25 bp, Homo sapien
tgctgcattagtgactcccaggtcc

SEQ ID NO: 2861825 - DNA, 25 bp, Homo sapien
gaggagcattctgcttggaacaagg

SEQ ID NO: 2861826 - DNA, 25 bp, Homo sapien
ccttgaggctttgcaactttgggag

SEQ ID NO: 2861827 - DNA, 25 bp, Homo sapien
gagttccgtctagcccttgaggctt

SEQ ID NO: 2861828 - DNA, 25 bp, Homo sapien
aagcctgatcctgcattgcgaagag

SEQ ID NO: 2861829 - DNA, 25 bp, Homo sapien
tcaacggcgcctactgtcttaacag

SEQ ID NO: 2861830 - DNA, 25 bp, Homo sapien
tccactttgctaaacaccgagttgg

SEQ ID NO: 2861831 - DNA, 25 bp, Homo sapien
gtcttaacagggtccactttgctaa

SEQ ID NO: 2861832 - DNA, 25 bp, Homo sapien
acaccgagttggaaaagcagcttcc

SEQ ID NO: 2861833 - DNA, 25 bp, Homo sapien
tggacgagcccggttccagaaacca

SEQ ID NO: 2861834 - DNA, 25 bp, Homo sapien
ctctgcaggcccgtaaatatttgcc

SEQ ID NO: 2861835 - DNA, 25 bp, Homo sapien
gtgttttctgccgttgccaggagct

SEQ ID NO: 2861836 - DNA, 25 bp, Homo sapien
taaatcacgcgtagaggtttcagtt

SEQ ID NO: 2861837 - DNA, 25 bp, Homo sapien
ctactggcggtgtcagttcctgtaa

SEQ ID NO: 2861838 - DNA, 25 bp, Homo sapien
aagatgactctcagagcacccccca

SEQ ID NO: 2861839 - DNA, 25 bp, Homo sapien
atgctactggcggtgtcagttcctg

SEQ ID NO: 2861840 - DNA, 25 bp, Homo sapien
ctggtcatactcagccttccaaggg

SEQ ID NO: 2861841 - DNA, 25 bp, Homo sapien
aagaaagcctagcagagtggtcact

SEQ ID NO: 2861842 - DNA, 25 bp, Homo sapien
ccagctcatatggaagaaagcctag

SEQ ID NO: 2861843 - DNA, 25 bp, Homo sapien
ccacattgccccagctcatatggaa

SEQ ID NO: 2861844 - DNA, 25 bp, Homo sapien
tcatatggaagaaagcctagcagag

SEQ ID NO: 2861845 - DNA, 25 bp, Homo sapien
cctcatcaggtatcagagagtattt

SEQ ID NO: 2861846 - DNA, 25 bp, Homo sapien
cttcctcatcaggtatcagagagta

SEQ ID NO: 2861847 - DNA, 25 bp, Homo sapien
tcttcctcatcaggtatcagagagt

SEQ ID NO: 2861848 - DNA, 25 bp, Homo sapien
tcctcatcaggtatcagagagtatt

SEQ ID NO: 2861849 - DNA, 25 bp, Homo sapien
atttgctagtcactgtatgggcagc

SEQ ID NO: 2861850 - DNA, 25 bp, Homo sapien
tgtgctctcctagcatactgtgtct

SEQ ID NO: 2861851 - DNA, 25 bp, Homo sapien
tctgaaacttgtccgaggccacata

SEQ ID NO: 2861852 - DNA, 25 bp, Homo sapien
tggccatctatgtgagtttctgagt

SEQ ID NO: 2861853 - DNA, 25 bp, Homo sapien
attacaagtgcgcgccaccacgcca

SEQ ID NO: 2861854 - DNA, 25 bp, Homo sapien
ttacaagtgcgcgccaccacgccag

SEQ ID NO: 2861855 - DNA, 25 bp, Homo sapien
cacctcagcttcccaaagtgctggg

SEQ ID NO: 2861856 - DNA, 25 bp, Homo sapien
ccacctcagcttcccaaagtgctgg

SEQ ID NO: 2861857 - DNA, 25 bp, Homo sapien
gcttaataatcacttctaggcacac

SEQ ID NO: 2861858 - DNA, 25 bp, Homo sapien
caaagaataccatcacaacagttgt

SEQ ID NO: 2861859 - DNA, 25 bp, Homo sapien
ggactaccattgtaagcagcagaca

SEQ ID NO: 2861860 - DNA, 25 bp, Homo sapien
ggtcctctgaggtattagtagacta

SEQ ID NO: 2861861 - DNA, 25 bp, Homo sapien
cctatgataaaaatgccctgttctg

SEQ ID NO: 2861862 - DNA, 25 bp, Homo sapien
caagagcgacacatacatgaaactg

SEQ ID NO: 2861863 - DNA, 25 bp, Homo sapien
gaatacttccatacttccgatagga

SEQ ID NO: 2861864 - DNA, 25 bp, Homo sapien
taaattcaccttggtttactgtgcc

SEQ ID NO: 2861865 - DNA, 25 bp, Homo sapien
gaaatgcagtatgttgaaccaaaac

SEQ ID NO: 2861866 - DNA, 25 bp, Homo sapien
tggctaggctgacggtctcaaagtc

SEQ ID NO: 2861867 - DNA, 25 bp, Homo sapien
gcatcaaccacctcatagtgctgga

SEQ ID NO: 2861868 - DNA, 25 bp, Homo sapien
tcaaagtcctgaccccaattgacct

SEQ ID NO: 2861869 - DNA, 25 bp, Homo sapien
ctaagaggggcgttcagctctgctc

SEQ ID NO: 2861870 - DNA, 25 bp, Homo sapien
taagaggggcgttcagctctgctct

SEQ ID NO: 2861871 - DNA, 25 bp, Homo sapien
gccatggcactgagttttatctttt

SEQ ID NO: 2861872 - DNA, 25 bp, Homo sapien
agtcactcagttgttcactcctggc

SEQ ID NO: 2861873 - DNA, 25 bp, Homo sapien
caaagacagggcattgccccagtaa

SEQ ID NO: 2861874 - DNA, 25 bp, Homo sapien
tcctggtgtcctgattcttaaagtc

SEQ ID NO: 2861875 - DNA, 25 bp, Homo sapien
cactctggcacacatgtgggccttg

SEQ ID NO: 2861876 - DNA, 25 bp, Homo sapien
cgcctggccaatgaagtgtatttct

SEQ ID NO: 2861877 - DNA, 25 bp, Homo sapien
cctggccaatgaagtgtatttctta

SEQ ID NO: 2861878 - DNA, 25 bp, Homo sapien
cgcgcctggccaatgaagtgtattt

SEQ ID NO: 2861879 - DNA, 25 bp, Homo sapien
ggccaatgaagtgtatttcttaaat

SEQ ID NO: 2861880 - DNA, 25 bp, Homo sapien
tattatgtgtctactacctgccagg

SEQ ID NO: 2861881 - DNA, 25 bp, Homo sapien
ctgttggcagagttggcagacccct

SEQ ID NO: 2861882 - DNA, 25 bp, Homo sapien
tgatggattttagagtgcagccact

SEQ ID NO: 2861883 - DNA, 25 bp, Homo sapien
gcatctctaccacacatagcaaggt

SEQ ID NO: 2861884 - DNA, 25 bp, Homo sapien
ttggagaaatacatcttcatgactg

SEQ ID NO: 2861885 - DNA, 25 bp, Homo sapien
tgcatttggagaaatacatcttcat

SEQ ID NO: 2861886 - DNA, 25 bp, Homo sapien
catttggagaaatacatcttcatga

SEQ ID NO: 2861887 - DNA, 25 bp, Homo sapien
ctgcatttggagaaatacatcttca

SEQ ID NO: 2861888 - DNA, 25 bp, Homo sapien
agaaaagctgctaagaagtgggaag

SEQ ID NO: 2861889 - DNA, 25 bp, Homo sapien
tttactctaagatgggaggcctcag

SEQ ID NO: 2861890 - DNA, 25 bp, Homo sapien
gcctcagagtgagaaaagctgctaa

SEQ ID NO: 2861891 - DNA, 25 bp, Homo sapien
agcctgtacctctggtgattaggga

SEQ ID NO: 2861892 - DNA, 25 bp, Homo sapien
gctgtgcaaatcaagatgatcccat

SEQ ID NO: 2861893 - DNA, 25 bp, Homo sapien
cccaagtcgtgtaaataaagcctga

SEQ ID NO: 2861894 - DNA, 25 bp, Homo sapien
tggctgctgccgttctagagagaag

SEQ ID NO: 2861895 - DNA, 25 bp, Homo sapien
cagggtgccttgagcctcactggaa

SEQ ID NO: 2861896 - DNA, 25 bp, Homo sapien
aacaggattcctctaccggctcgta

SEQ ID NO: 2861897 - DNA, 25 bp, Homo sapien
ccatcaatttcgttcaaaatccaaa

SEQ ID NO: 2861898 - DNA, 25 bp, Homo sapien
aaagctttacaagctgacttggaat

SEQ ID NO: 2861899 - DNA, 25 bp, Homo sapien
ttgggctctccacggaaaatttcca

SEQ ID NO: 2861900 - DNA, 25 bp, Homo sapien
tcacacaagttgtatggaaaccgtg

SEQ ID NO: 2861901 - DNA, 25 bp, Homo sapien
gaaactgttaaatctggcatccaat

SEQ ID NO: 2861902 - DNA, 25 bp, Homo sapien
aaccgtgtggaatgctggatggtct

SEQ ID NO: 2861903 - DNA, 25 bp, Homo sapien
ttcttttggtcaaagtgaacctcag

SEQ ID NO: 2861904 - DNA, 25 bp, Homo sapien
caccgtgcccaaacttttatttcag

SEQ ID NO: 2861905 - DNA, 25 bp, Homo sapien
gtgcccaaacttttatttcagcagc

SEQ ID NO: 2861906 - DNA, 25 bp, Homo sapien
caaacttttatttcagcagcccttc

SEQ ID NO: 2861907 - DNA, 25 bp, Homo sapien
aaacttttatttcagcagcccttca

SEQ ID NO: 2861908 - DNA, 25 bp, Homo sapien
ggagtattgcttgaggccagagatc

SEQ ID NO: 2861909 - DNA, 25 bp, Homo sapien
ccaacgcaggagtattgcttgaggc

SEQ ID NO: 2861910 - DNA, 25 bp, Homo sapien
tgcttgaggccagagatccagacca

SEQ ID NO: 2861911 - DNA, 25 bp, Homo sapien
attgcttgaggccagagatccagac

SEQ ID NO: 2861912 - DNA, 25 bp, Homo sapien
ttaagagaagatgcccgagactacc

SEQ ID NO: 2861913 - DNA, 25 bp, Homo sapien
cgagactaccattgccacgagtgta

SEQ ID NO: 2861914 - DNA, 25 bp, Homo sapien
gaaatggtctccagaacacctatgg

SEQ ID NO: 2861915 - DNA, 25 bp, Homo sapien
agaaggactatctgtgcctccaagg

SEQ ID NO: 2861916 - DNA, 25 bp, Homo sapien
gcccccattcagatgcagccttatg

SEQ ID NO: 2861917 - DNA, 25 bp, Homo sapien
gatcacttcccttcattactgtgcc

SEQ ID NO: 2861918 - DNA, 25 bp, Homo sapien
gcctgcagctgatggtcgctgccag

SEQ ID NO: 2861919 - DNA, 25 bp, Homo sapien
gctgccagctggattgtatgttcct

SEQ ID NO: 2861920 - DNA, 25 bp, Homo sapien
tttaggcctgtccaaactgtactga

SEQ ID NO: 2861921 - DNA, 25 bp, Homo sapien
accttctgttaatcctgagcctggg

SEQ ID NO: 2861922 - DNA, 25 bp, Homo sapien
taggccatatagagtagggcacccc

SEQ ID NO: 2861923 - DNA, 25 bp, Homo sapien
gctcattagacacaagactgcctgc

SEQ ID NO: 2861924 - DNA, 25 bp, Homo sapien
gattttgtgttgccttccggtgttc

SEQ ID NO: 2861925 - DNA, 25 bp, Homo sapien
tttgtgttgccttccggtgttccca

SEQ ID NO: 2861926 - DNA, 25 bp, Homo sapien
ttgtgttgccttccggtgttcccat

SEQ ID NO: 2861927 - DNA, 25 bp, Homo sapien
acatttcactgggtattctatcatg

SEQ ID NO: 2861928 - DNA, 25 bp, Homo sapien
gcttccttcgcttactagatcaagc

SEQ ID NO: 2861929 - DNA, 25 bp, Homo sapien
cgcttactagatcaagccctacaaa

SEQ ID NO: 2861930 - DNA, 25 bp, Homo sapien
tctatcatgtttctcctcaagcaat

SEQ ID NO: 2861931 - DNA, 25 bp, Homo sapien
ctcttcactttgtggcagggcttaa

SEQ ID NO: 2861932 - DNA, 25 bp, Homo sapien
gtggcagggcttaaaacagacagac

SEQ ID NO: 2861933 - DNA, 25 bp, Homo sapien
aatctacttcaggaatgattaagtg

SEQ ID NO: 2861934 - DNA, 25 bp, Homo sapien
atgattaagtgatgacatgatgccc

SEQ ID NO: 2861935 - DNA, 25 bp, Homo sapien
cagacactgtaagggagcagcagga

SEQ ID NO: 2861936 - DNA, 25 bp, Homo sapien
tgctcccagtctgaatccacagtgg

SEQ ID NO: 2861937 - DNA, 25 bp, Homo sapien
tctgaatccacagtggtctgtcaga

SEQ ID NO: 2861938 - DNA, 25 bp, Homo sapien
cactgttaacttcaatgctcccagt

SEQ ID NO: 2861939 - DNA, 25 bp, Homo sapien
ctttagaatttaccactagcacagg

SEQ ID NO: 2861940 - DNA, 25 bp, Homo sapien
tagaatttaccactagcacaggata

SEQ ID NO: 2861941 - DNA, 25 bp, Homo sapien
gcttttaggatctcgaggcttttct

SEQ ID NO: 2861942 - DNA, 25 bp, Homo sapien
taatcttcccctcaatgcttttagg

SEQ ID NO: 2861943 - DNA, 25 bp, Homo sapien
agatgacagatttgtgattaacagc

SEQ ID NO: 2861944 - DNA, 25 bp, Homo sapien
agccagattccttgctaaaactaaa

SEQ ID NO: 2861945 - DNA, 25 bp, Homo sapien
acactcagccagattccttgctaaa

SEQ ID NO: 2861946 - DNA, 25 bp, Homo sapien
gggagatgacagatttgtgattaac

SEQ ID NO: 2861947 - DNA, 25 bp, Homo sapien
taaaatgctacggtcctagggaagc

SEQ ID NO: 2861948 - DNA, 25 bp, Homo sapien
cacacacagttcaaggcgttggaat

SEQ ID NO: 2861949 - DNA, 25 bp, Homo sapien
tttgtgaagttctcctaataggacc

SEQ ID NO: 2861950 - DNA, 25 bp, Homo sapien
taataggacctccactgcattgggc

SEQ ID NO: 2861951 - DNA, 25 bp, Homo sapien
tgagatggtcatcggtcattaggac

SEQ ID NO: 2861952 - DNA, 25 bp, Homo sapien
tcattaggacatgtctgaaccagaa

SEQ ID NO: 2861953 - DNA, 25 bp, Homo sapien
caggccctgtgtttggcataaggga

SEQ ID NO: 2861954 - DNA, 25 bp, Homo sapien
tccagagacttgtgaataatcatgc

SEQ ID NO: 2861955 - DNA, 25 bp, Homo sapien
atgagagttgaatggatgttccttc

SEQ ID NO: 2861956 - DNA, 25 bp, Homo sapien
tctgtaaatgagagttgaatggatg

SEQ ID NO: 2861957 - DNA, 25 bp, Homo sapien
aaatgagagttgaatggatgttcct

SEQ ID NO: 2861958 - DNA, 25 bp, Homo sapien
gtaaatgagagttgaatggatgttc

SEQ ID NO: 2861959 - DNA, 25 bp, Homo sapien
tgtggtgacttccaatggtcttgcc

SEQ ID NO: 2861960 - DNA, 25 bp, Homo sapien
cctatgccttgggatggtttcgaac

SEQ ID NO: 2861961 - DNA, 25 bp, Homo sapien
caatttcagttgaggctatggctcc

SEQ ID NO: 2861962 - DNA, 25 bp, Homo sapien
tgcgcatagaaaggctaagtgttca

SEQ ID NO: 2861963 - DNA, 25 bp, Homo sapien
caaaccatgaaatacgggcctcctg

SEQ ID NO: 2861964 - DNA, 25 bp, Homo sapien
gctttcagaagaactacactcagag

SEQ ID NO: 2861965 - DNA, 25 bp, Homo sapien
tgatagccttgcgatacaggccctt

SEQ ID NO: 2861966 - DNA, 25 bp, Homo sapien
tgtgtcaacaaagcccgcacttcgg

SEQ ID NO: 2861967 - DNA, 25 bp, Homo sapien
cctgagctaggattctgatatcgac

SEQ ID NO: 2861968 - DNA, 25 bp, Homo sapien
cttgcctgggtcgtagtttaatagc

SEQ ID NO: 2861969 - DNA, 25 bp, Homo sapien
taacacttcccgagctttcgcatga

SEQ ID NO: 2861970 - DNA, 25 bp, Homo sapien
tagaagagtcagttgcactactacc

SEQ ID NO: 2861971 - DNA, 25 bp, Homo sapien
ctgtcacagggataccatggggccc

SEQ ID NO: 2861972 - DNA, 25 bp, Homo sapien
cacagggataccatggggcccaaac

SEQ ID NO: 2861973 - DNA, 25 bp, Homo sapien
tactgtcacagggataccatggggc

SEQ ID NO: 2861974 - DNA, 25 bp, Homo sapien
actgtcacagggataccatggggcc

SEQ ID NO: 2861975 - DNA, 25 bp, Homo sapien
gaatagttgactatacttaaagtag

SEQ ID NO: 2861976 - DNA, 25 bp, Homo sapien
aaacaaacagctgccctaagcaatg

SEQ ID NO: 2861977 - DNA, 25 bp, Homo sapien
tcttaaacgtaaacaacatctgatg

SEQ ID NO: 2861978 - DNA, 25 bp, Homo sapien
agactacaaaaatctactatctctt

SEQ ID NO: 2861979 - DNA, 25 bp, Homo sapien
cactatttctgaccttaaaaggatt

SEQ ID NO: 2861980 - DNA, 25 bp, Homo sapien
gactccgtgtttctacaaataggaa

SEQ ID NO: 2861981 - DNA, 25 bp, Homo sapien
tcaataggtgaatacgcggcagcca

SEQ ID NO: 2861982 - DNA, 25 bp, Homo sapien
aaactagtaacttacagcctgatgc

SEQ ID NO: 2861983 - DNA, 25 bp, Homo sapien
tgattttagaaactaccttgcctta

SEQ ID NO: 2861984 - DNA, 25 bp, Homo sapien
agccagatggtgtctctacagaaaa

SEQ ID NO: 2861985 - DNA, 25 bp, Homo sapien
ttttgagccaatgattttagaaact

SEQ ID NO: 2861986 - DNA, 25 bp, Homo sapien
tattttgagccaatgattttagaaa

SEQ ID NO: 2861987 - DNA, 25 bp, Homo sapien
catagtccaaagtatttaggaggct

SEQ ID NO: 2861988 - DNA, 25 bp, Homo sapien
aaaaaatgcgtggccggccactggg

SEQ ID NO: 2861989 - DNA, 25 bp, Homo sapien
atgcccatagtccaaagtatttagg

SEQ ID NO: 2861990 - DNA, 25 bp, Homo sapien
aaaaaaaatgcgtggccggccactg

SEQ ID NO: 2861991 - DNA, 25 bp, Homo sapien
aaaagaggagactggctgagagtga

SEQ ID NO: 2861992 - DNA, 25 bp, Homo sapien
tggctgagagtgatagcaatggctc

SEQ ID NO: 2861993 - DNA, 25 bp, Homo sapien
gaaggttaagcctgaagtgagccat

SEQ ID NO: 2861994 - DNA, 25 bp, Homo sapien
tagtgaagtcttctgtctagtgatg

SEQ ID NO: 2861995 - DNA, 25 bp, Homo sapien
gagtggcccggaggattctttagac

SEQ ID NO: 2861996 - DNA, 25 bp, Homo sapien
tactgcacagtagtgggcgtcctaa

SEQ ID NO: 2861997 - DNA, 25 bp, Homo sapien
caagcatactacttgagggcctaag

SEQ ID NO: 2861998 - DNA, 25 bp, Homo sapien
tcagggagtgactggcacttgcctc

SEQ ID NO: 2861999 - DNA, 25 bp, Homo sapien
gtagggctattgcaccatacgtttc

SEQ ID NO: 2862000 - DNA, 25 bp, Homo sapien
ccaaaagtagggctattgcaccata

SEQ ID NO: 2862001 - DNA, 25 bp, Homo sapien
gggctattgcaccatacgtttcatg

SEQ ID NO: 2862002 - DNA, 25 bp, Homo sapien
aaagtagggctattgcaccatacgt

SEQ ID NO: 2862003 - DNA, 25 bp, Homo sapien
tttcaagaacttagtgaaaactgaa

SEQ ID NO: 2862004 - DNA, 25 bp, Homo sapien
aattgctttcaagaacttagtgaaa

SEQ ID NO: 2862005 - DNA, 25 bp, Homo sapien
tttaatccaacagtacccccatgta

SEQ ID NO: 2862006 - DNA, 25 bp, Homo sapien
ttaatccaacagtacccccatgtac

SEQ ID NO: 2862007 - DNA, 25 bp, Homo sapien
tgccagcaggtaagacatccataat

SEQ ID NO: 2862008 - DNA, 25 bp, Homo sapien
gatagacctaaaagtttgccagcag

SEQ ID NO: 2862009 - DNA, 25 bp, Homo sapien
gctctttgcaaatagtcttgagtgg

SEQ ID NO: 2862010 - DNA, 25 bp, Homo sapien
taggactgtgtttaagggatagacc

SEQ ID NO: 2862011 - DNA, 25 bp, Homo sapien
tctacaaagtccatggattaacagt

SEQ ID NO: 2862012 - DNA, 25 bp, Homo sapien
tttagatatctgcactggccggacg

SEQ ID NO: 2862013 - DNA, 25 bp, Homo sapien
caatgtatgagctttatttggatcc

SEQ ID NO: 2862014 - DNA, 25 bp, Homo sapien
tgcccggccaacagtctgacatttt

SEQ ID NO: 2862015 - DNA, 25 bp, Homo sapien
ttctgtaccatgcataacgtcaagc

SEQ ID NO: 2862016 - DNA, 25 bp, Homo sapien
tccccggtattcagctaaggaacta

SEQ ID NO: 2862017 - DNA, 25 bp, Homo sapien
tggagtctccggagccaggtttcac

SEQ ID NO: 2862018 - DNA, 25 bp, Homo sapien
tcagagcttactatgtattccccgg

SEQ ID NO: 2862019 - DNA, 25 bp, Homo sapien
agattctcacacaatcactggccat

SEQ ID NO: 2862020 - DNA, 25 bp, Homo sapien
aaagccgtgaatgggagtctctgca

SEQ ID NO: 2862021 - DNA, 25 bp, Homo sapien
taagccattgcaaacaggtgagata

SEQ ID NO: 2862022 - DNA, 25 bp, Homo sapien
gagatacgatcagagcgtgtgctgt

SEQ ID NO: 2862023 - DNA, 25 bp, Homo sapien
aatggaaagccgtgaatgggagtct

SEQ ID NO: 2862024 - DNA, 25 bp, Homo sapien
gacaagcgcgtcctcaatgatgtgg

SEQ ID NO: 2862025 - DNA, 25 bp, Homo sapien
acccgaacggacagtttctcctcag

SEQ ID NO: 2862026 - DNA, 25 bp, Homo sapien
tgatgtggtccagcgtgacccgcac

SEQ ID NO: 2862027 - DNA, 25 bp, Homo sapien
gatcagttgcgacaccgtggagtcc

SEQ ID NO: 2862028 - DNA, 25 bp, Homo sapien
gattgctgcccgtcagtctcgccat

SEQ ID NO: 2862029 - DNA, 25 bp, Homo sapien
cctgaggagcggattgctgcccgtc

SEQ ID NO: 2862030 - DNA, 25 bp, Homo sapien
gagcggcggctcgtcggcctgagga

SEQ ID NO: 2862031 - DNA, 25 bp, Homo sapien
gtcagtctcgccatccggcacagac

SEQ ID NO: 2862032 - DNA, 25 bp, Homo sapien
cgggagggggtcagtgccggcctca

SEQ ID NO: 2862033 - DNA, 25 bp, Homo sapien
gggagggggtcagtgccggcctcac

SEQ ID NO: 2862034 - DNA, 25 bp, Homo sapien
cttcagtggccgtgaccgggagggg

SEQ ID NO: 2862035 - DNA, 25 bp, Homo sapien
gccgtgaccgggagggggtcagtgc

SEQ ID NO: 2862036 - DNA, 25 bp, Homo sapien
tgggctccatctccggctcggcctc

SEQ ID NO: 2862037 - DNA, 25 bp, Homo sapien
tccggctcggcctcgccggcgcccc

SEQ ID NO: 2862038 - DNA, 25 bp, Homo sapien
ccgggggacgctgcagtcgctgccg

SEQ ID NO: 2862039 - DNA, 25 bp, Homo sapien
cccgggggacgctgcagtcgctgcc

SEQ ID NO: 2862040 - DNA, 25 bp, Homo sapien
cttcctagcttctccctcctccaac

SEQ ID NO: 2862041 - DNA, 25 bp, Homo sapien
tcttcctagcttctccctcctccaa

SEQ ID NO: 2862042 - DNA, 25 bp, Homo sapien
tgatgctcgtttctggcacctcgcc

SEQ ID NO: 2862043 - DNA, 25 bp, Homo sapien
ccctgatgctcgtttctggcacctc

SEQ ID NO: 2862044 - DNA, 25 bp, Homo sapien
gatgctcgtttctggcacctcgcca

SEQ ID NO: 2862045 - DNA, 25 bp, Homo sapien
gcggcgacagcgctgcttggttccc

SEQ ID NO: 2862046 - DNA, 25 bp, Homo sapien
tttctaggcgcggacttcttgcggc

SEQ ID NO: 2862047 - DNA, 25 bp, Homo sapien
ggatggaatcatgtggcgtgccact

SEQ ID NO: 2862048 - DNA, 25 bp, Homo sapien
tctgcgcagagatccttagaataaa

SEQ ID NO: 2862049 - DNA, 25 bp, Homo sapien
catcgcctcttgctattggctggaa

SEQ ID NO: 2862050 - DNA, 25 bp, Homo sapien
cacttgcaaagtggacgcacctggt

SEQ ID NO: 2862051 - DNA, 25 bp, Homo sapien
gttctccataacctcatagcagcgg

SEQ ID NO: 2862052 - DNA, 25 bp, Homo sapien
tgctggactgatatgtgaacactgc

SEQ ID NO: 2862053 - DNA, 25 bp, Homo sapien
gaatggaatgttcaagacgttctcc

SEQ ID NO: 2862054 - DNA, 25 bp, Homo sapien
ctgggggaccgagtaccacgtgcat

SEQ ID NO: 2862055 - DNA, 25 bp, Homo sapien
gaagcctcaaccctgcggttattgc

SEQ ID NO: 2862056 - DNA, 25 bp, Homo sapien
gcggttattgctcgatattcattca

SEQ ID NO: 2862057 - DNA, 25 bp, Homo sapien
cattcataataaggccacccctgag

SEQ ID NO: 2862058 - DNA, 25 bp, Homo sapien
gtgcccggtctgaaagcaagtttat

SEQ ID NO: 2862059 - DNA, 25 bp, Homo sapien
ttgtgcccggtctgaaagcaagttt

SEQ ID NO: 2862060 - DNA, 25 bp, Homo sapien
ccattgtgcccggtctgaaagcaag

SEQ ID NO: 2862061 - DNA, 25 bp, Homo sapien
cattgtgcccggtctgaaagcaagt

SEQ ID NO: 2862062 - DNA, 25 bp, Homo sapien
agatttttatgtgcaacctatttct

SEQ ID NO: 2862063 - DNA, 25 bp, Homo sapien
ttttatgtgcaacctatttctgttt

SEQ ID NO: 2862064 - DNA, 25 bp, Homo sapien
gaaatcagatttttatgtgcaacct

SEQ ID NO: 2862065 - DNA, 25 bp, Homo sapien
aaatcagatttttatgtgcaaccta

SEQ ID NO: 2862066 - DNA, 25 bp, Homo sapien
gggcgtcccattagtgaactgacac

SEQ ID NO: 2862067 - DNA, 25 bp, Homo sapien
tgtaggttccattagtgtctccgat

SEQ ID NO: 2862068 - DNA, 25 bp, Homo sapien
ggttccattagtgtctccgatattg

SEQ ID NO: 2862069 - DNA, 25 bp, Homo sapien
ctgacactgggttcctgtaggttcc

SEQ ID NO: 2862070 - DNA, 25 bp, Homo sapien
taagagagtgcccagcagtatcagg

SEQ ID NO: 2862071 - DNA, 25 bp, Homo sapien
tatcagggatgataaggaccaggca

SEQ ID NO: 2862072 - DNA, 25 bp, Homo sapien
ggaccaggcacgactcagaatcatg

SEQ ID NO: 2862073 - DNA, 25 bp, Homo sapien
gaatcatggcatttcggacctccag

SEQ ID NO: 2862074 - DNA, 25 bp, Homo sapien
acagacagacaagcaattccagcat

SEQ ID NO: 2862075 - DNA, 25 bp, Homo sapien
tccacttgggggacaggacagacag

SEQ ID NO: 2862076 - DNA, 25 bp, Homo sapien
aggacagacagacaagcaattccag

SEQ ID NO: 2862077 - DNA, 25 bp, Homo sapien
cttccacttgggggacaggacagac

SEQ ID NO: 2862078 - DNA, 25 bp, Homo sapien
caagaagtccacagggtatagagca

SEQ ID NO: 2862079 - DNA, 25 bp, Homo sapien
tatagagcaacgtggctccctcttt

SEQ ID NO: 2862080 - DNA, 25 bp, Homo sapien
tccacagggtatagagcaacgtggc

SEQ ID NO: 2862081 - DNA, 25 bp, Homo sapien
cagggtatagagcaacgtggctccc

SEQ ID NO: 2862082 - DNA, 25 bp, Homo sapien
caaagtggcctccagttgagaagcg

SEQ ID NO: 2862083 - DNA, 25 bp, Homo sapien
tctcagcactgttggcgccgatcat

SEQ ID NO: 2862084 - DNA, 25 bp, Homo sapien
tatctggctacatagtctggagtcc

SEQ ID NO: 2862085 - DNA, 25 bp, Homo sapien
gaataagacttcacttgagacagcg

SEQ ID NO: 2862086 - DNA, 25 bp, Homo sapien
agatgcaggcgctgactcaggtagc

SEQ ID NO: 2862087 - DNA, 25 bp, Homo sapien
atgaagacagtgacgatgatgatgg

SEQ ID NO: 2862088 - DNA, 25 bp, Homo sapien
cgctgactcaggtagctccgtgaag

SEQ ID NO: 2862089 - DNA, 25 bp, Homo sapien
cagcccagaggcgatgaagacagtg

SEQ ID NO: 2862090 - DNA, 25 bp, Homo sapien
tccctcagaggacggacacttggag

SEQ ID NO: 2862091 - DNA, 25 bp, Homo sapien
tctctgtgatgctaataacagactt

SEQ ID NO: 2862092 - DNA, 25 bp, Homo sapien
tgttgttactaagatggcttccctc

SEQ ID NO: 2862093 - DNA, 25 bp, Homo sapien
tcggccacccctagagacgatggcg

SEQ ID NO: 2862094 - DNA, 25 bp, Homo sapien
gtgtaagtcactgcgcacggccgca

SEQ ID NO: 2862095 - DNA, 25 bp, Homo sapien
ggtgtaagtcactgcgcacggccgc

SEQ ID NO: 2862096 - DNA, 25 bp, Homo sapien
tgcgcacggccgcatcctattttct

SEQ ID NO: 2862097 - DNA, 25 bp, Homo sapien
gcacggccgcatcctattttcttta

SEQ ID NO: 2862098 - DNA, 25 bp, Homo sapien
tgcacatggttacaagagtcttcct

SEQ ID NO: 2862099 - DNA, 25 bp, Homo sapien
catgctgagcacaagctgcgagtca

SEQ ID NO: 2862100 - DNA, 25 bp, Homo sapien
gaaagcaagaccacttcgggaagca

SEQ ID NO: 2862101 - DNA, 25 bp, Homo sapien
tggaatcttccggaaccgagagctg

SEQ ID NO: 2862102 - DNA, 25 bp, Homo sapien
tctgcccacatctccaaggcttcct

SEQ ID NO: 2862103 - DNA, 25 bp, Homo sapien
tccacgttccaaggctcttcaggga

SEQ ID NO: 2862104 - DNA, 25 bp, Homo sapien
taaaaggagcacagaccctccacgt

SEQ ID NO: 2862105 - DNA, 25 bp, Homo sapien
caaggcttcctcgtgaggtctggag

SEQ ID NO: 2862106 - DNA, 25 bp, Homo sapien
tagctgcttccataggtggtggcga

SEQ ID NO: 2862107 - DNA, 25 bp, Homo sapien
gggatgagcctgtactccccgagag

SEQ ID NO: 2862108 - DNA, 25 bp, Homo sapien
acgggacacatatccaagggctgca

SEQ ID NO: 2862109 - DNA, 25 bp, Homo sapien
aaggagtcccgataggccaagcata

SEQ ID NO: 2862110 - DNA, 25 bp, Homo sapien
tgacggctacggcatccttgaggac

SEQ ID NO: 2862111 - DNA, 25 bp, Homo sapien
catccttgaggacgttgtcatacac

SEQ ID NO: 2862112 - DNA, 25 bp, Homo sapien
aaggcctggctcttgacggctacgg

SEQ ID NO: 2862113 - DNA, 25 bp, Homo sapien
ggctcttgacggctacggcatcctt

SEQ ID NO: 2862114 - DNA, 25 bp, Homo sapien
tccaggaggatggcgcctgcttgtg

SEQ ID NO: 2862115 - DNA, 25 bp, Homo sapien
ggaggatggcgcctgcttgtgctca

SEQ ID NO: 2862116 - DNA, 25 bp, Homo sapien
caggaggatggcgcctgcttgtgct

SEQ ID NO: 2862117 - DNA, 25 bp, Homo sapien
gaggatggcgcctgcttgtgctcac

SEQ ID NO: 2862118 - DNA, 25 bp, Homo sapien
ggtcactccttagctagctgatatc

SEQ ID NO: 2862119 - DNA, 25 bp, Homo sapien
cctgaatgagcccaatctctgcttt

SEQ ID NO: 2862120 - DNA, 25 bp, Homo sapien
gatatcaaccaaattgaccgctggg

SEQ ID NO: 2862121 - DNA, 25 bp, Homo sapien
gggcctgaatgagcccaatctctgc

SEQ ID NO: 2862122 - DNA, 25 bp, Homo sapien
aggccgcagcgaccacagaaggctg

SEQ ID NO: 2862123 - DNA, 25 bp, Homo sapien
atttcaatacacgtgctgaggtgct

SEQ ID NO: 2862124 - DNA, 25 bp, Homo sapien
tgaggtgctccagggaatagcttga

SEQ ID NO: 2862125 - DNA, 25 bp, Homo sapien
caggtctctggtccagtagggagaa

SEQ ID NO: 2862126 - DNA, 25 bp, Homo sapien
aaaatactgtccacggctcccaggg

SEQ ID NO: 2862127 - DNA, 25 bp, Homo sapien
atttctgatagcagcctagaacagt

SEQ ID NO: 2862128 - DNA, 25 bp, Homo sapien
ttcaaaatactgtccacggctccca

SEQ ID NO: 2862129 - DNA, 25 bp, Homo sapien
tttctgatagcagcctagaacagtg

SEQ ID NO: 2862130 - DNA, 25 bp, Homo sapien
tgagaaggcctgatctggatggaca

SEQ ID NO: 2862131 - DNA, 25 bp, Homo sapien
ggacatgccttttagagccgcctga

SEQ ID NO: 2862132 - DNA, 25 bp, Homo sapien
caaagttaagagtgatctgggtgca

SEQ ID NO: 2862133 - DNA, 25 bp, Homo sapien
ttacatgttactgggcgaatccttg

SEQ ID NO: 2862134 - DNA, 25 bp, Homo sapien
ggacgtggtcttcccgatcctcgaa

SEQ ID NO: 2862135 - DNA, 25 bp, Homo sapien
agtaatgggcatactccttgaggca

SEQ ID NO: 2862136 - DNA, 25 bp, Homo sapien
tccttctggctgacggaggccaaga

SEQ ID NO: 2862137 - DNA, 25 bp, Homo sapien
ccttgaggcactctttggtcttgcg

SEQ ID NO: 2862138 - DNA, 25 bp, Homo sapien
tgaacccaggaagctaacggcccac

SEQ ID NO: 2862139 - DNA, 25 bp, Homo sapien
ctgaacccaggaagctaacggccca

SEQ ID NO: 2862140 - DNA, 25 bp, Homo sapien
cagttcccatctctcatgctgctta

SEQ ID NO: 2862141 - DNA, 25 bp, Homo sapien
ttcccatctctcatgctgcttaggg

SEQ ID NO: 2862142 - DNA, 25 bp, Homo sapien
ggagataaggaagtaaccaccacag

SEQ ID NO: 2862143 - DNA, 25 bp, Homo sapien
tcatgctgcttaggggagataagga

SEQ ID NO: 2862144 - DNA, 25 bp, Homo sapien
tccaatggaaggcaccagggattac

SEQ ID NO: 2862145 - DNA, 25 bp, Homo sapien
gaggattatcctccaatggaaggca

SEQ ID NO: 2862146 - DNA, 25 bp, Homo sapien
caggcccaagaggattatcctccaa

SEQ ID NO: 2862147 - DNA, 25 bp, Homo sapien
ggattactgcggaatctgatttcac

SEQ ID NO: 2862148 - DNA, 25 bp, Homo sapien
agagctcctgggcaattcgtggcag

SEQ ID NO: 2862149 - DNA, 25 bp, Homo sapien
cacagagctcctgggcaattcgtgg

SEQ ID NO: 2862150 - DNA, 25 bp, Homo sapien
ctcttatgtgccctcctttctgcat

SEQ ID NO: 2862151 - DNA, 25 bp, Homo sapien
acggtggtgcctgtaagtgatgcct

SEQ ID NO: 2862152 - DNA, 25 bp, Homo sapien
aagtgcttctgtcctcgtacggagg

SEQ ID NO: 2862153 - DNA, 25 bp, Homo sapien
gttcctttgtgctccgctttacacg

SEQ ID NO: 2862154 - DNA, 25 bp, Homo sapien
tgtcactgactgaaagcagggcctg

SEQ ID NO: 2862155 - DNA, 25 bp, Homo sapien
gctttacacgtgacccaaataagtg

SEQ ID NO: 2862156 - DNA, 25 bp, Homo sapien
aggtctgacggcactgctgcgctga

SEQ ID NO: 2862157 - DNA, 25 bp, Homo sapien
tgcctctggcccaggtctgacggca

SEQ ID NO: 2862158 - DNA, 25 bp, Homo sapien
tggggaccctgatcctttgttccga

SEQ ID NO: 2862159 - DNA, 25 bp, Homo sapien
cactgctgcgctgaacgtgtgggca

SEQ ID NO: 2862160 - DNA, 25 bp, Homo sapien
agctacttggggcggtgtgggtggg

SEQ ID NO: 2862161 - DNA, 25 bp, Homo sapien
ctcagctacttggggcggtgtgggt

SEQ ID NO: 2862162 - DNA, 25 bp, Homo sapien
tcagctacttggggcggtgtgggtg

SEQ ID NO: 2862163 - DNA, 25 bp, Homo sapien
tgtgggatttccacgttgtcaaatt

SEQ ID NO: 2862164 - DNA, 25 bp, Homo sapien
gttgtgggatttccacgttgtcaaa

SEQ ID NO: 2862165 - DNA, 25 bp, Homo sapien
tggaagttgtgggatttccacgttg

SEQ ID NO: 2862166 - DNA, 25 bp, Homo sapien
aagttgtgggatttccacgttgtca

SEQ ID NO: 2862167 - DNA, 25 bp, Homo sapien
gcagatctccaaacttcccgaggca

SEQ ID NO: 2862168 - DNA, 25 bp, Homo sapien
agatctccaaacttcccgaggcaag

SEQ ID NO: 2862169 - DNA, 25 bp, Homo sapien
cagatctccaaacttcccgaggcaa

SEQ ID NO: 2862170 - DNA, 25 bp, Homo sapien
tctgcagcatatggcaggtgtcctg

SEQ ID NO: 2862171 - DNA, 25 bp, Homo sapien
catggccccatggaaatataagtcc

SEQ ID NO: 2862172 - DNA, 25 bp, Homo sapien
ctgtgctgccctcagacacgtgggt

SEQ ID NO: 2862173 - DNA, 25 bp, Homo sapien
tctgcctctctgtctgaaacgtccc

SEQ ID NO: 2862174 - DNA, 25 bp, Homo sapien
aggccaaaggccgtggcgcaaattt

SEQ ID NO: 2862175 - DNA, 25 bp, Homo sapien
cttgaaatacgatgcccagtgtgcc

SEQ ID NO: 2862176 - DNA, 25 bp, Homo sapien
agcccacagatcacagacagcagca

SEQ ID NO: 2862177 - DNA, 25 bp, Homo sapien
gtggcgcaaatttctcctgtgctgc

SEQ ID NO: 2862178 - DNA, 25 bp, Homo sapien
gcaggagacggccacggtgtagagc

SEQ ID NO: 2862179 - DNA, 25 bp, Homo sapien
tagagctgcttggaggtggtgacgt

SEQ ID NO: 2862180 - DNA, 25 bp, Homo sapien
agacggccacggtgtagagctgctt

SEQ ID NO: 2862181 - DNA, 25 bp, Homo sapien
aggtggtgacgttgtagcgatccat

SEQ ID NO: 2862182 - DNA, 25 bp, Homo sapien
gtccacgaagaaccggcggctcttc

SEQ ID NO: 2862183 - DNA, 25 bp, Homo sapien
caggtagacggccaggtgccgggct

SEQ ID NO: 2862184 - DNA, 25 bp, Homo sapien
gtagacggccaggtgccgggctgca

SEQ ID NO: 2862185 - DNA, 25 bp, Homo sapien
atgtccacgaagaaccggcggctct

SEQ ID NO: 2862186 - DNA, 25 bp, Homo sapien
cacaggctcataaagtatcaaggac

SEQ ID NO: 2862187 - DNA, 25 bp, Homo sapien
caggaaatgggacctcagggcctga

SEQ ID NO: 2862188 - DNA, 25 bp, Homo sapien
gcctgaatgggaggcaacgattccc

SEQ ID NO: 2862189 - DNA, 25 bp, Homo sapien
gagtctcggctgtcccaggaaatgg

SEQ ID NO: 2862190 - DNA, 25 bp, Homo sapien
ggaaaggtaaggatctctcactagg

SEQ ID NO: 2862191 - DNA, 25 bp, Homo sapien
gaaaggtaaggatctctcactagga

SEQ ID NO: 2862192 - DNA, 25 bp, Homo sapien
aaggtaaggatctctcactaggaga

SEQ ID NO: 2862193 - DNA, 25 bp, Homo sapien
aaaggtaaggatctctcactaggag

SEQ ID NO: 2862194 - DNA, 25 bp, Homo sapien
ctgcaaagccacacaagtgtcccat

SEQ ID NO: 2862195 - DNA, 25 bp, Homo sapien
gaaataacaatgtaggactgcagca

SEQ ID NO: 2862196 - DNA, 25 bp, Homo sapien
tgcagagccctcaaaccaagtagaa

SEQ ID NO: 2862197 - DNA, 25 bp, Homo sapien
caagtagaattagcagctctgagcc

SEQ ID NO: 2862198 - DNA, 25 bp, Homo sapien
ctgaggtgcctctgtcagtgtgtcc

SEQ ID NO: 2862199 - DNA, 25 bp, Homo sapien
ctaagtccacttgaaggccgcagca

SEQ ID NO: 2862200 - DNA, 25 bp, Homo sapien
taaagctctccccagattaggcagg

SEQ ID NO: 2862201 - DNA, 25 bp, Homo sapien
gatcacttcgctaacccaattaggg

SEQ ID NO: 2862202 - DNA, 25 bp, Homo sapien
tacaagggctttgctctaagggact

SEQ ID NO: 2862203 - DNA, 25 bp, Homo sapien
ctggcagggccacaggcggtgagag

SEQ ID NO: 2862204 - DNA, 25 bp, Homo sapien
ttcccctcagcatgcctggcagggc

SEQ ID NO: 2862205 - DNA, 25 bp, Homo sapien
caggcggtgagagtgtgggcagcag

SEQ ID NO: 2862206 - DNA, 25 bp, Homo sapien
gggcagcagaaaggctagggggagg

SEQ ID NO: 2862207 - DNA, 25 bp, Homo sapien
caaatcacttgatgaccacttccag

SEQ ID NO: 2862208 - DNA, 25 bp, Homo sapien
tatccatgtcacaagaatgcccagg

SEQ ID NO: 2862209 - DNA, 25 bp, Homo sapien
tccaattcccgatgcttctgttctg

SEQ ID NO: 2862210 - DNA, 25 bp, Homo sapien
ctggcggcatggcatgggtatccat

SEQ ID NO: 2862211 - DNA, 25 bp, Homo sapien
cgtccatagcggctggcttctcagg

SEQ ID NO: 2862212 - DNA, 25 bp, Homo sapien
catccgttggagagcgccagaaaac

SEQ ID NO: 2862213 - DNA, 25 bp, Homo sapien
gtttagagagagcacatccgttgga

SEQ ID NO: 2862214 - DNA, 25 bp, Homo sapien
aggcccacgtccatagcggctggct

SEQ ID NO: 2862215 - DNA, 25 bp, Homo sapien
cacaaagactgtcctggcagatgcc

SEQ ID NO: 2862216 - DNA, 25 bp, Homo sapien
cgagatgaaggattcccaggaagca

SEQ ID NO: 2862217 - DNA, 25 bp, Homo sapien
tgggcaccacagtcaatgctgtgcc

SEQ ID NO: 2862218 - DNA, 25 bp, Homo sapien
gaacatgcaggtctgtaggaagctg

SEQ ID NO: 2862219 - DNA, 25 bp, Homo sapien
gggcacacgtagcaggcaagaaacc

SEQ ID NO: 2862220 - DNA, 25 bp, Homo sapien
gaaaaacatcactagcagcctcctc

SEQ ID NO: 2862221 - DNA, 25 bp, Homo sapien
tcctcactggtgacgccagcctggt

SEQ ID NO: 2862222 - DNA, 25 bp, Homo sapien
gcctggtgacaatctactcctcctt

SEQ ID NO: 2862223 - DNA, 25 bp, Homo sapien
cttcttgtccagatgcctagaatgt

SEQ ID NO: 2862224 - DNA, 25 bp, Homo sapien
tagaatgtgccacacgttggccact

SEQ ID NO: 2862225 - DNA, 25 bp, Homo sapien
tcttgtccagatgcctagaatgtgc

SEQ ID NO: 2862226 - DNA, 25 bp, Homo sapien
tgtgccacacgttggccactctgtt

SEQ ID NO: 2862227 - DNA, 25 bp, Homo sapien
tggacgtccgaggcgacgcgccctt

SEQ ID NO: 2862228 - DNA, 25 bp, Homo sapien
tgcagtggacgtccgaggcgacgcg

SEQ ID NO: 2862229 - DNA, 25 bp, Homo sapien
agtggacgtccgaggcgacgcgccc

SEQ ID NO: 2862230 - DNA, 25 bp, Homo sapien
agggtgcagtggacgtccgaggcga

SEQ ID NO: 2862231 - DNA, 25 bp, Homo sapien
gaggctacccggctctcagggcgca

SEQ ID NO: 2862232 - DNA, 25 bp, Homo sapien
atcgcgtacgcagcgccgctatccg

SEQ ID NO: 2862233 - DNA, 25 bp, Homo sapien
tacgcagcgccgctatccgaggcta

SEQ ID NO: 2862234 - DNA, 25 bp, Homo sapien
tatccgaggctacccggctctcagg

SEQ ID NO: 2862235 - DNA, 25 bp, Homo sapien
tgccggcggttggaccctcgtccga

SEQ ID NO: 2862236 - DNA, 25 bp, Homo sapien
gcgcccctgcgtgcgctcgggtccc

SEQ ID NO: 2862237 - DNA, 25 bp, Homo sapien
gtcccgccgcggctcgcaggctccc

SEQ ID NO: 2862238 - DNA, 25 bp, Homo sapien
tcgtccgaggcgctccgcactcccg

SEQ ID NO: 2862239 - DNA, 25 bp, Homo sapien
cctccctccctcgctgggggaattg

SEQ ID NO: 2862240 - DNA, 25 bp, Homo sapien
ggaattgggggccgggcctcgcgca

SEQ ID NO: 2862241 - DNA, 25 bp, Homo sapien
gaattgggggccgggcctcgcgcat

SEQ ID NO: 2862242 - DNA, 25 bp, Homo sapien
ctccctccctcgctgggggaattgg

SEQ ID NO: 2862243 - DNA, 25 bp, Homo sapien
gtgaaacgtgcggacaggacgcccc

SEQ ID NO: 2862244 - DNA, 25 bp, Homo sapien
agaaagttctgccttccgcgcgcac

SEQ ID NO: 2862245 - DNA, 25 bp, Homo sapien
ctgcgcgcaccacgcgtgaaacgtg

SEQ ID NO: 2862246 - DNA, 25 bp, Homo sapien
ttccgcgcgcactgctctagccatc

SEQ ID NO: 2862247 - DNA, 25 bp, Homo sapien
tgtgatattatcaactgcccagttt

SEQ ID NO: 2862248 - DNA, 25 bp, Homo sapien
gaagtaccaatgcaactggaatcac

SEQ ID NO: 2862249 - DNA, 25 bp, Homo sapien
gaagctcacaggttgggaacaacag

SEQ ID NO: 2862250 - DNA, 25 bp, Homo sapien
caacagatttagagcaagtgcattc

SEQ ID NO: 2862251 - DNA, 25 bp, Homo sapien
tgatccttgactacaagttcttgag

SEQ ID NO: 2862252 - DNA, 25 bp, Homo sapien
caagttcttgagatatgagtcggca

SEQ ID NO: 2862253 - DNA, 25 bp, Homo sapien
tgagatatgagtcggcagattaggt

SEQ ID NO: 2862254 - DNA, 25 bp, Homo sapien
gtcaagagaacatttgccaaatcct

SEQ ID NO: 2862255 - DNA, 25 bp, Homo sapien
agcagcagggtgctgctttccttgg

SEQ ID NO: 2862256 - DNA, 25 bp, Homo sapien
caccttctatgaggggcttccgtag

SEQ ID NO: 2862257 - DNA, 25 bp, Homo sapien
gctgctttccttgggccacctggat

SEQ ID NO: 2862258 - DNA, 25 bp, Homo sapien
ggatgccacaaagccaccttctatg

SEQ ID NO: 2862259 - DNA, 25 bp, Homo sapien
cacttgggccaccactgagttcagc

SEQ ID NO: 2862260 - DNA, 25 bp, Homo sapien
gccacttgggccaccactgagttca

SEQ ID NO: 2862261 - DNA, 25 bp, Homo sapien
ttgggccaccactgagttcagccac

SEQ ID NO: 2862262 - DNA, 25 bp, Homo sapien
tgttgcacagccacttgggccacca

SEQ ID NO: 2862263 - DNA, 25 bp, Homo sapien
taagccaccgaacttggctgctggg

SEQ ID NO: 2862264 - DNA, 25 bp, Homo sapien
aaccatgttgactcccaccttaggg

SEQ ID NO: 2862265 - DNA, 25 bp, Homo sapien
caagtggttaccagttctgcagggc

SEQ ID NO: 2862266 - DNA, 25 bp, Homo sapien
caccttagggacgttgcattgagaa

SEQ ID NO: 2862267 - DNA, 25 bp, Homo sapien
caggcttggtctgcgtcagagggaa

SEQ ID NO: 2862268 - DNA, 25 bp, Homo sapien
tgagcagcagaacctcaagaagcta

SEQ ID NO: 2862269 - DNA, 25 bp, Homo sapien
gccacgggagctgacacagtattac

SEQ ID NO: 2862270 - DNA, 25 bp, Homo sapien
tcataactcagttctcaagctcagt

SEQ ID NO: 2862271 - DNA, 25 bp, Homo sapien
ggaccccgggtgcattcttcagcct

SEQ ID NO: 2862272 - DNA, 25 bp, Homo sapien
ttggggaccccgggtgcattcttca

SEQ ID NO: 2862273 - DNA, 25 bp, Homo sapien
gggaccccgggtgcattcttcagcc

SEQ ID NO: 2862274 - DNA, 25 bp, Homo sapien
ggggaccccgggtgcattcttcagc

SEQ ID NO: 2862275 - DNA, 25 bp, Homo sapien
gaatggaacgagctctgccatggcc

SEQ ID NO: 2862276 - DNA, 25 bp, Homo sapien
tgagcagattcaagatgatccgcct

SEQ ID NO: 2862277 - DNA, 25 bp, Homo sapien
taaagcgctcaagtctgtggccgac

SEQ ID NO: 2862278 - DNA, 25 bp, Homo sapien
gaagcgggcctgcaaaagattaact

SEQ ID NO: 2862279 - DNA, 25 bp, Homo sapien
ctgaggctagaaccgctcactcgac

SEQ ID NO: 2862280 - DNA, 25 bp, Homo sapien
aggtgagcctgaggctagaaccgct

SEQ ID NO: 2862281 - DNA, 25 bp, Homo sapien
agcctacagttgtggggtcttgctc

SEQ ID NO: 2862282 - DNA, 25 bp, Homo sapien
cttgctctgtaagcccaagtccaga

SEQ ID NO: 2862283 - DNA, 25 bp, Homo sapien
tgtcaaacttgatgggcagccgctc

SEQ ID NO: 2862284 - DNA, 25 bp, Homo sapien
tgctctgagtagaagatctgcagcc

SEQ ID NO: 2862285 - DNA, 25 bp, Homo sapien
aaagctgacttggtatggccactgc

SEQ ID NO: 2862286 - DNA, 25 bp, Homo sapien
tggtcactgccaccgagaaagctga

SEQ ID NO: 2862287 - DNA, 25 bp, Homo sapien
gccacgggggccagcccgcccaatg

SEQ ID NO: 2862288 - DNA, 25 bp, Homo sapien
gccagcccgcccaatggccccggct

SEQ ID NO: 2862289 - DNA, 25 bp, Homo sapien
gctttgccctttggtcctggctttc

SEQ ID NO: 2862290 - DNA, 25 bp, Homo sapien
caatggccccggctttgccctttgg

SEQ ID NO: 2862291 - DNA, 25 bp, Homo sapien
ggaaagcccattcgtcccatcattc

SEQ ID NO: 2862292 - DNA, 25 bp, Homo sapien
ctttgccaggaaagcccattcgtcc

SEQ ID NO: 2862293 - DNA, 25 bp, Homo sapien
ccggtcgccgtcgtgtccatcttgg

SEQ ID NO: 2862294 - DNA, 25 bp, Homo sapien
catcttggccgtctttgccaggaaa

SEQ ID NO: 2862295 - DNA, 25 bp, Homo sapien
ttccggaagtccctgcgagcaaagg

SEQ ID NO: 2862296 - DNA, 25 bp, Homo sapien
ggagcctttccggaagtccctgcga

SEQ ID NO: 2862297 - DNA, 25 bp, Homo sapien
aaaggcgccaagcagtgggtcagca

SEQ ID NO: 2862298 - DNA, 25 bp, Homo sapien
cctgcgagcaaaggcgccaagcagt

SEQ ID NO: 2862299 - DNA, 25 bp, Homo sapien
aaacaatctgagttcctaaattgtc

SEQ ID NO: 2862300 - DNA, 25 bp, Homo sapien
tgttagtttaatatggaagccttca

SEQ ID NO: 2862301 - DNA, 25 bp, Homo sapien
caatctgagttcctaaattgtcctt

SEQ ID NO: 2862302 - DNA, 25 bp, Homo sapien
ggaagccttcattagagccttccta

SEQ ID NO: 2862303 - DNA, 25 bp, Homo sapien
tctgccacgtggagaccaaggactg

SEQ ID NO: 2862304 - DNA, 25 bp, Homo sapien
aagccatcaagctttggcattgtct

SEQ ID NO: 2862305 - DNA, 25 bp, Homo sapien
caagctttggcattgtctgcagctg

SEQ ID NO: 2862306 - DNA, 25 bp, Homo sapien
aagacaaagccatcaagctttggca

SEQ ID NO: 2862307 - DNA, 25 bp, Homo sapien
caaactttggcatcaatggcaatga

SEQ ID NO: 2862308 - DNA, 25 bp, Homo sapien
cccgtgaggagctgaacatttgcaa

SEQ ID NO: 2862309 - DNA, 25 bp, Homo sapien
taaacctggatagacctgggtctgc

SEQ ID NO: 2862310 - DNA, 25 bp, Homo sapien
aagtggccgtaacagtgaccccgtg

SEQ ID NO: 2862311 - DNA, 25 bp, Homo sapien
ccccaggcatagttttcccatcccg

SEQ ID NO: 2862312 - DNA, 25 bp, Homo sapien
ggcccgcagcgcagcattctctttt

SEQ ID NO: 2862313 - DNA, 25 bp, Homo sapien
agcaaagaagctctcggcggggctc

SEQ ID NO: 2862314 - DNA, 25 bp, Homo sapien
ttcctcccggtcacgtgggctggcc

SEQ ID NO: 2862315 - DNA, 25 bp, Homo sapien
catcagggctgttcggtgtatgtac

SEQ ID NO: 2862316 - DNA, 25 bp, Homo sapien
gatggcagcttggtgtaaaactgga

SEQ ID NO: 2862317 - DNA, 25 bp, Homo sapien
gcacatcagtggttggatgtacacg

SEQ ID NO: 2862318 - DNA, 25 bp, Homo sapien
cgatagtggctagacatctgtatgt

SEQ ID NO: 2862319 - DNA, 25 bp, Homo sapien
tgtgaccacaatgggcccattggat

SEQ ID NO: 2862320 - DNA, 25 bp, Homo sapien
tcctgtctccttaagagagggaccc

SEQ ID NO: 2862321 - DNA, 25 bp, Homo sapien
taaagttgtcagtcaacaggctgat

SEQ ID NO: 2862322 - DNA, 25 bp, Homo sapien
caaagctggcagagtagcatcttca

SEQ ID NO: 2862323 - DNA, 25 bp, Homo sapien
gtatcctactggttgactttcacat

SEQ ID NO: 2862324 - DNA, 25 bp, Homo sapien
tcacatgttgctggattgagtttgc

SEQ ID NO: 2862325 - DNA, 25 bp, Homo sapien
tctgttagtttgatgtatcctactg

SEQ ID NO: 2862326 - DNA, 25 bp, Homo sapien
taagcatattcataaggaatactgg

SEQ ID NO: 2862327 - DNA, 25 bp, Homo sapien
tttgttggtatgcaattgttcataa

SEQ ID NO: 2862328 - DNA, 25 bp, Homo sapien
ggccctgagcctttctctggttcct

SEQ ID NO: 2862329 - DNA, 25 bp, Homo sapien
atctggccctgagcctttctctggt

SEQ ID NO: 2862330 - DNA, 25 bp, Homo sapien
tccatctggccctgagcctttctct

SEQ ID NO: 2862331 - DNA, 25 bp, Homo sapien
tgatattcatagcacaggagctagg

SEQ ID NO: 2862332 - DNA, 25 bp, Homo sapien
ttaatatgatattcatagcacagga

SEQ ID NO: 2862333 - DNA, 25 bp, Homo sapien
aatatgatattcatagcacaggagc

SEQ ID NO: 2862334 - DNA, 25 bp, Homo sapien
tatgatattcatagcacaggagcta

SEQ ID NO: 2862335 - DNA, 25 bp, Homo sapien
ggaatggacattgtgagactaactc

SEQ ID NO: 2862336 - DNA, 25 bp, Homo sapien
caaagacgggcgaactcaatctttc

SEQ ID NO: 2862337 - DNA, 25 bp, Homo sapien
ttttcatataccacacgaacaggtt

SEQ ID NO: 2862338 - DNA, 25 bp, Homo sapien
aaatctcatgatagcaactaggcag

SEQ ID NO: 2862339 - DNA, 25 bp, Homo sapien
ttttcacatgcctcattcaaaatta

SEQ ID NO: 2862340 - DNA, 25 bp, Homo sapien
tccgttgtacaggtgaaccagtagc

SEQ ID NO: 2862341 - DNA, 25 bp, Homo sapien
caatgatgtccgagaaacgaggaac

SEQ ID NO: 2862342 - DNA, 25 bp, Homo sapien
aataggcgatgatttggagctctcc

SEQ ID NO: 2862343 - DNA, 25 bp, Homo sapien
ttttcacgtaggcaacaaactcgga

SEQ ID NO: 2862344 - DNA, 25 bp, Homo sapien
aaaattctcaggtagtattccagag

SEQ ID NO: 2862345 - DNA, 25 bp, Homo sapien
tctcaggtagtattccagagatgcc

SEQ ID NO: 2862346 - DNA, 25 bp, Homo sapien
aattctcaggtagtattccagagat

SEQ ID NO: 2862347 - DNA, 25 bp, Homo sapien
aaaaattctcaggtagtattccaga

SEQ ID NO: 2862348 - DNA, 25 bp, Homo sapien
tgagcttagacaagttatgaacacc

SEQ ID NO: 2862349 - DNA, 25 bp, Homo sapien
gccatgacaggatatagttcaactt

SEQ ID NO: 2862350 - DNA, 25 bp, Homo sapien
gcctgcagcatgtcaattcgaagta

SEQ ID NO: 2862351 - DNA, 25 bp, Homo sapien
tgaacacctgtaagtcctttattgg

SEQ ID NO: 2862352 - DNA, 25 bp, Homo sapien
caagataagtaagtgatccccaaag

SEQ ID NO: 2862353 - DNA, 25 bp, Homo sapien
ttccaaagttctgtgccagagaatg

SEQ ID NO: 2862354 - DNA, 25 bp, Homo sapien
ccaagataagtaagtgatccccaaa

SEQ ID NO: 2862355 - DNA, 25 bp, Homo sapien
agataagtaagtgatccccaaagtt

SEQ ID NO: 2862356 - DNA, 25 bp, Homo sapien
cagtgaaaacaccaaagtgcagctg

SEQ ID NO: 2862357 - DNA, 25 bp, Homo sapien
gttaaaagtgaacactcacaaaaca

SEQ ID NO: 2862358 - DNA, 25 bp, Homo sapien
tagccactgcgtatgcaagatcatg

SEQ ID NO: 2862359 - DNA, 25 bp, Homo sapien
caagatcatgataggcgcaggtgtc

SEQ ID NO: 2862360 - DNA, 25 bp, Homo sapien
taaaatcaatagccaggagaatggg

SEQ ID NO: 2862361 - DNA, 25 bp, Homo sapien
atcaatagccaggagaatgggggca

SEQ ID NO: 2862362 - DNA, 25 bp, Homo sapien
gggatcgtggctttgtcacttacag

SEQ ID NO: 2862363 - DNA, 25 bp, Homo sapien
gacgctccaggggcaaacgcctggg

SEQ ID NO: 2862364 - DNA, 25 bp, Homo sapien
gagagagaagcatccgcaacaacct

SEQ ID NO: 2862365 - DNA, 25 bp, Homo sapien
gagatttttacagcctcccgggtga

SEQ ID NO: 2862366 - DNA, 25 bp, Homo sapien
gctcttaactgataggacctgatgg

SEQ ID NO: 2862367 - DNA, 25 bp, Homo sapien
tttaggcgcccgtttcaggctccag

SEQ ID NO: 2862368 - DNA, 25 bp, Homo sapien
gacttaatgcagtatcctacaggtg

SEQ ID NO: 2862369 - DNA, 25 bp, Homo sapien
taccaatctaaagctcgacactatg

SEQ ID NO: 2862370 - DNA, 25 bp, Homo sapien
cacatttagtctactccagaggcca

SEQ ID NO: 2862371 - DNA, 25 bp, Homo sapien
tatagggccacaaaaatcgaagcaa

SEQ ID NO: 2862372 - DNA, 25 bp, Homo sapien
caatcatcaataagaagctgaaaag

SEQ ID NO: 2862373 - DNA, 25 bp, Homo sapien
ttttctatctacaatcatcaataag

SEQ ID NO: 2862374 - DNA, 25 bp, Homo sapien
agctgcatctatcttggatggtctt

SEQ ID NO: 2862375 - DNA, 25 bp, Homo sapien
gctgcatctatcttggatggtcttc

SEQ ID NO: 2862376 - DNA, 25 bp, Homo sapien
cttgacatgaagaaggcgggcctcc

SEQ ID NO: 2862377 - DNA, 25 bp, Homo sapien
tcatacatgctattgtaaggccgct

SEQ ID NO: 2862378 - DNA, 25 bp, Homo sapien
gggtcatctggcctctgacgtttca

SEQ ID NO: 2862379 - DNA, 25 bp, Homo sapien
tcagtaggttctcgagtttcataca

SEQ ID NO: 2862380 - DNA, 25 bp, Homo sapien
agagtaccaacacaccccactgaat

SEQ ID NO: 2862381 - DNA, 25 bp, Homo sapien
aaaaacgcagattgcctgaaagagc

SEQ ID NO: 2862382 - DNA, 25 bp, Homo sapien
tgctctatcaaaaacgcagattgcc

SEQ ID NO: 2862383 - DNA, 25 bp, Homo sapien
tatcacagctctacatcagatgtct

SEQ ID NO: 2862384 - DNA, 25 bp, Homo sapien
ttttcaatttttcatgcttcttttc

SEQ ID NO: 2862385 - DNA, 25 bp, Homo sapien
ctttttcaatttttcatgcttcttt

SEQ ID NO: 2862386 - DNA, 25 bp, Homo sapien
tttcaatttttcatgcttcttttct

SEQ ID NO: 2862387 - DNA, 25 bp, Homo sapien
tcaatttttcatgcttcttttcttc

SEQ ID NO: 2862388 - DNA, 25 bp, Homo sapien
tcctctttcagtttttcttgatgca

SEQ ID NO: 2862389 - DNA, 25 bp, Homo sapien
tttcctctttcagtttttcttgatg

SEQ ID NO: 2862390 - DNA, 25 bp, Homo sapien
cctctttcagtttttcttgatgcag

SEQ ID NO: 2862391 - DNA, 25 bp, Homo sapien
ttcctctttcagtttttcttgatgc

SEQ ID NO: 2862392 - DNA, 25 bp, Homo sapien
gggaggattgaaatgcagtgttatt

SEQ ID NO: 2862393 - DNA, 25 bp, Homo sapien
gaggattgaaatgcagtgttattaa

SEQ ID NO: 2862394 - DNA, 25 bp, Homo sapien
ggaggattgaaatgcagtgttatta

SEQ ID NO: 2862395 - DNA, 25 bp, Homo sapien
agggaggattgaaatgcagtgttat

SEQ ID NO: 2862396 - DNA, 25 bp, Homo sapien
catttataatacactcctcagagtt

SEQ ID NO: 2862397 - DNA, 25 bp, Homo sapien
gcttctccagtacaataggaatact

SEQ ID NO: 2862398 - DNA, 25 bp, Homo sapien
aaagagtgacagcatttgtatcccc

SEQ ID NO: 2862399 - DNA, 25 bp, Homo sapien
gacagcatttgtatccccatcggcc

SEQ ID NO: 2862400 - DNA, 25 bp, Homo sapien
ctttccagtacgatccccagatatg

SEQ ID NO: 2862401 - DNA, 25 bp, Homo sapien
aaatgcaatacagagcaaaaccaac

SEQ ID NO: 2862402 - DNA, 25 bp, Homo sapien
caaatggttagctaataaagttgta

SEQ ID NO: 2862403 - DNA, 25 bp, Homo sapien
aagttgtagtggaaaaatgcaatac

SEQ ID NO: 2862404 - DNA, 25 bp, Homo sapien
tagagaatacaaatggttagctaat

SEQ ID NO: 2862405 - DNA, 25 bp, Homo sapien
ggcatccaaatgttcttggccacca

SEQ ID NO: 2862406 - DNA, 25 bp, Homo sapien
aacagcccgctcctgtcctttgatg

SEQ ID NO: 2862407 - DNA, 25 bp, Homo sapien
gagtactccacatagtcttcagtct

SEQ ID NO: 2862408 - DNA, 25 bp, Homo sapien
tcctcatacttagagcaggcaacag

SEQ ID NO: 2862409 - DNA, 25 bp, Homo sapien
ttctgaggcaaatagaagatgtctc

SEQ ID NO: 2862410 - DNA, 25 bp, Homo sapien
tatctttctatacatgcccttttgc

SEQ ID NO: 2862411 - DNA, 25 bp, Homo sapien
actgggttttgttatagaaagcaca

SEQ ID NO: 2862412 - DNA, 25 bp, Homo sapien
tacagtaagttacaagatggccata

SEQ ID NO: 2862413 - DNA, 25 bp, Homo sapien
tgtagatgcacttcagatcccttgt

SEQ ID NO: 2862414 - DNA, 25 bp, Homo sapien
tgaaggacttatacaacagctctag

SEQ ID NO: 2862415 - DNA, 25 bp, Homo sapien
ttgtcataggcttcccatgcaaaca

SEQ ID NO: 2862416 - DNA, 25 bp, Homo sapien
ctttgtaggatctgcctgtagatgc

SEQ ID NO: 2862417 - DNA, 25 bp, Homo sapien
cagctgcattactgtatgcttcttg

SEQ ID NO: 2862418 - DNA, 25 bp, Homo sapien
caaaacatcttagtgagttggcagc

SEQ ID NO: 2862419 - DNA, 25 bp, Homo sapien
ttaaacaatcccaaacgtcttatga

SEQ ID NO: 2862420 - DNA, 25 bp, Homo sapien
aaacaatcccaaacgtcttatgagc

SEQ ID NO: 2862421 - DNA, 25 bp, Homo sapien
tgtgtacctaacaaagttatctcca

SEQ ID NO: 2862422 - DNA, 25 bp, Homo sapien
tctgagccattgaaatggtatctcc

SEQ ID NO: 2862423 - DNA, 25 bp, Homo sapien
tgtgtctgagccattgaaatggtat

SEQ ID NO: 2862424 - DNA, 25 bp, Homo sapien
gaaatggtatctcctgtgtacctaa

SEQ ID NO: 2862425 - DNA, 25 bp, Homo sapien
tagtttttggatcatagtaggcaga

SEQ ID NO: 2862426 - DNA, 25 bp, Homo sapien
tcatagtaggcagaatttggatcta

SEQ ID NO: 2862427 - DNA, 25 bp, Homo sapien
aatttggatctaaattcctcaaata

SEQ ID NO: 2862428 - DNA, 25 bp, Homo sapien
gctctagtttttggatcatagtagg

SEQ ID NO: 2862429 - DNA, 25 bp, Homo sapien
gaatcctgagattccggacagtaat

SEQ ID NO: 2862430 - DNA, 25 bp, Homo sapien
caaaattctgtccaggcatgtcaat

SEQ ID NO: 2862431 - DNA, 25 bp, Homo sapien
gacagtaattcgtctcttggagtca

SEQ ID NO: 2862432 - DNA, 25 bp, Homo sapien
tgcaatatcttctcgaatcctgaga

SEQ ID NO: 2862433 - DNA, 25 bp, Homo sapien
gagaatttggttcctcttctcccca

SEQ ID NO: 2862434 - DNA, 25 bp, Homo sapien
catctgagaatttggttcctcttct

SEQ ID NO: 2862435 - DNA, 25 bp, Homo sapien
ttctccccactggtgttttggagaa

SEQ ID NO: 2862436 - DNA, 25 bp, Homo sapien
ctccccactggtgttttggagaatt

SEQ ID NO: 2862437 - DNA, 25 bp, Homo sapien
gctcggccagagatggattttaaac

SEQ ID NO: 2862438 - DNA, 25 bp, Homo sapien
tacaatgttaacttgcctggtaggt

SEQ ID NO: 2862439 - DNA, 25 bp, Homo sapien
taagagcatgtatgtctcatggagc

SEQ ID NO: 2862440 - DNA, 25 bp, Homo sapien
tacttatacatggtttagagtccct

SEQ ID NO: 2862441 - DNA, 25 bp, Homo sapien
attttcctgaggctaattcctcttg

SEQ ID NO: 2862442 - DNA, 25 bp, Homo sapien
tctgggctttcaatgttcgttttgc

SEQ ID NO: 2862443 - DNA, 25 bp, Homo sapien
ttcctgaggctaattcctcttggag

SEQ ID NO: 2862444 - DNA, 25 bp, Homo sapien
cctgaggctaattcctcttggagtt

SEQ ID NO: 2862445 - DNA, 25 bp, Homo sapien
gatccctcttcccatcatagtcaaa

SEQ ID NO: 2862446 - DNA, 25 bp, Homo sapien
tgaggctggacatgttcatctggag

SEQ ID NO: 2862447 - DNA, 25 bp, Homo sapien
atttggctccaactcgcctaggtct

SEQ ID NO: 2862448 - DNA, 25 bp, Homo sapien
tattagtacctgtaaatttggctcc

SEQ ID NO: 2862449 - DNA, 25 bp, Homo sapien
tgcggtacttagtaattatggaatt

SEQ ID NO: 2862450 - DNA, 25 bp, Homo sapien
ttttgtgtgtcatggccccacaatt

SEQ ID NO: 2862451 - DNA, 25 bp, Homo sapien
gtgtcatggccccacaattttcaca

SEQ ID NO: 2862452 - DNA, 25 bp, Homo sapien
ctcctttgcggtacttagtaattat

SEQ ID NO: 2862453 - DNA, 25 bp, Homo sapien
taagttcttaaactctccatatcca

SEQ ID NO: 2862454 - DNA, 25 bp, Homo sapien
tgaatttcaataccagataaagggt

SEQ ID NO: 2862455 - DNA, 25 bp, Homo sapien
gataaaatagtaatgcactgtgaat

SEQ ID NO: 2862456 - DNA, 25 bp, Homo sapien
tccatgaagatgtatacaggttgcc

SEQ ID NO: 2862457 - DNA, 25 bp, Homo sapien
cacccctcttgtaccattctccaga

SEQ ID NO: 2862458 - DNA, 25 bp, Homo sapien
tgtggtctctggtgttttaaagtag

SEQ ID NO: 2862459 - DNA, 25 bp, Homo sapien
tttacacccctcttgtaccattctc

SEQ ID NO: 2862460 - DNA, 25 bp, Homo sapien
ttttctggttgtggtctctggtgtt

SEQ ID NO: 2862461 - DNA, 25 bp, Homo sapien
cactgaagaaatatactgaggaata

SEQ ID NO: 2862462 - DNA, 25 bp, Homo sapien
taccatggcactgaagaaatatact

SEQ ID NO: 2862463 - DNA, 25 bp, Homo sapien
tgaaggatcaatataccatggcact

SEQ ID NO: 2862464 - DNA, 25 bp, Homo sapien
gaaggatcaatataccatggcactg

SEQ ID NO: 2862465 - DNA, 25 bp, Homo sapien
ggagcattgcccaattttcgctgtt

SEQ ID NO: 2862466 - DNA, 25 bp, Homo sapien
ctgcatctacaactgtggctgacat

SEQ ID NO: 2862467 - DNA, 25 bp, Homo sapien
gataggggtgcagcattaactgcat

SEQ ID NO: 2862468 - DNA, 25 bp, Homo sapien
aattttcgctgttcttctagctcct

SEQ ID NO: 2862469 - DNA, 25 bp, Homo sapien
gctaccaccctagtgtaagttatta

SEQ ID NO: 2862470 - DNA, 25 bp, Homo sapien
tgttgccgccatgtgagaggtacct

SEQ ID NO: 2862471 - DNA, 25 bp, Homo sapien
aatgaaagacaacaccatccgtccc

SEQ ID NO: 2862472 - DNA, 25 bp, Homo sapien
agagaccgggtgagagatcactgaa

SEQ ID NO: 2862473 - DNA, 25 bp, Homo sapien
caatgcagtaccgtccaaaaattca

SEQ ID NO: 2862474 - DNA, 25 bp, Homo sapien
ggctatgtcttcattggcaatgtga

SEQ ID NO: 2862475 - DNA, 25 bp, Homo sapien
tactgcccaagcttaaaatcctcca

SEQ ID NO: 2862476 - DNA, 25 bp, Homo sapien
agattaatacaatgtcctactgccc

SEQ ID NO: 2862477 - DNA, 25 bp, Homo sapien
ttcatttatacccgcatgatacccc

SEQ ID NO: 2862478 - DNA, 25 bp, Homo sapien
cgacttaacaggaaaaactgaagct

SEQ ID NO: 2862479 - DNA, 25 bp, Homo sapien
atgataccccactgaagtcggatca

SEQ ID NO: 2862480 - DNA, 25 bp, Homo sapien
cggatcatctcgacttaacaggaaa

SEQ ID NO: 2862481 - DNA, 25 bp, Homo sapien
cgccgtgggaaacgcgagaactcta

SEQ ID NO: 2862482 - DNA, 25 bp, Homo sapien
ggatgaccggcacatgcgcactaat

SEQ ID NO: 2862483 - DNA, 25 bp, Homo sapien
gcggccactgcggtaacttccggat

SEQ ID NO: 2862484 - DNA, 25 bp, Homo sapien
gaactctagctgctgcgtatcgcgc

SEQ ID NO: 2862485 - DNA, 25 bp, Homo sapien
tagttcagagtatatgcaactatca

SEQ ID NO: 2862486 - DNA, 25 bp, Homo sapien
tactttggaatgatgtccctctgcc

SEQ ID NO: 2862487 - DNA, 25 bp, Homo sapien
ctcattccccacttcatttactttg

SEQ ID NO: 2862488 - DNA, 25 bp, Homo sapien
tgagttgctcagtgtggctcacacg

SEQ ID NO: 2862489 - DNA, 25 bp, Homo sapien
tgccagatcagtgctaagtgcctca

SEQ ID NO: 2862490 - DNA, 25 bp, Homo sapien
tcctttggactctcagagaaacgcc

SEQ ID NO: 2862491 - DNA, 25 bp, Homo sapien
caccgccacctgacattgataagta

SEQ ID NO: 2862492 - DNA, 25 bp, Homo sapien
tgataagtacttactggctgccaga

SEQ ID NO: 2862493 - DNA, 25 bp, Homo sapien
ccaaatataaggtccagcgggagat

SEQ ID NO: 2862494 - DNA, 25 bp, Homo sapien
ttaacatataggtgggcccgggcca

SEQ ID NO: 2862495 - DNA, 25 bp, Homo sapien
gcgggagattctccatctaaaggct

SEQ ID NO: 2862496 - DNA, 25 bp, Homo sapien
tgcaacatatacgtgggcaccaaat

SEQ ID NO: 2862497 - DNA, 25 bp, Homo sapien
cgcctagagactttccaagtttctg

SEQ ID NO: 2862498 - DNA, 25 bp, Homo sapien
agtcgcctagagactttccaagttt

SEQ ID NO: 2862499 - DNA, 25 bp, Homo sapien
tttcaagtcgcctagagactttcca

SEQ ID NO: 2862500 - DNA, 25 bp, Homo sapien
tcaagtcgcctagagactttccaag

SEQ ID NO: 2862501 - DNA, 25 bp, Homo sapien
ttatgcttgatatgcagcaccttcg

SEQ ID NO: 2862502 - DNA, 25 bp, Homo sapien
tttctttggatataggaagtccagc

SEQ ID NO: 2862503 - DNA, 25 bp, Homo sapien
tatgcagcaccttcgtgggccaaag

SEQ ID NO: 2862504 - DNA, 25 bp, Homo sapien
cagcaccttcgtgggccaaagggca

SEQ ID NO: 2862505 - DNA, 25 bp, Homo sapien
aagccaacaggctcattgggcagcc

SEQ ID NO: 2862506 - DNA, 25 bp, Homo sapien
tgcggagagtacagacaggaagcct

SEQ ID NO: 2862507 - DNA, 25 bp, Homo sapien
gggacccagcgcctgaccagaactt

SEQ ID NO: 2862508 - DNA, 25 bp, Homo sapien
cgataaagctctcgggatttccccg

SEQ ID NO: 2862509 - DNA, 25 bp, Homo sapien
ggccaaagcaccaggctgctcctga

SEQ ID NO: 2862510 - DNA, 25 bp, Homo sapien
tgacacgtgctgcaagagggtcccc

SEQ ID NO: 2862511 - DNA, 25 bp, Homo sapien
tgctgcaagagggtccccgacccgg

SEQ ID NO: 2862512 - DNA, 25 bp, Homo sapien
catcctgcacagaacgctctagagc

SEQ ID NO: 2862513 - DNA, 25 bp, Homo sapien
accagcagggccgattggagtggta

SEQ ID NO: 2862514 - DNA, 25 bp, Homo sapien
gcagggccgattggagtggtaaacc

SEQ ID NO: 2862515 - DNA, 25 bp, Homo sapien
gcttgaccgctcttcctttcctgga

SEQ ID NO: 2862516 - DNA, 25 bp, Homo sapien
atgctctttctccaagacgcttgac

SEQ ID NO: 2862517 - DNA, 25 bp, Homo sapien
cttgtggagtgggtgatgtttcatc

SEQ ID NO: 2862518 - DNA, 25 bp, Homo sapien
gaattcctagagtcccactttctcc

SEQ ID NO: 2862519 - DNA, 25 bp, Homo sapien
cttcaggattctgtgaggccaggcc

SEQ ID NO: 2862520 - DNA, 25 bp, Homo sapien
ccggttgtttggagttgttggactg

SEQ ID NO: 2862521 - DNA, 25 bp, Homo sapien
cctttctgaaccttcagaaaggctg

SEQ ID NO: 2862522 - DNA, 25 bp, Homo sapien
ttctgaaccttcagaaaggctgctg

SEQ ID NO: 2862523 - DNA, 25 bp, Homo sapien
aaccttcagaaaggctgctgaatct

SEQ ID NO: 2862524 - DNA, 25 bp, Homo sapien
ccttcagaaaggctgctgaatcttc

SEQ ID NO: 2862525 - DNA, 25 bp, Homo sapien
agctgggatatctctgtcatcgtgg

SEQ ID NO: 2862526 - DNA, 25 bp, Homo sapien
tggagagagtagatcctgaagaact

SEQ ID NO: 2862527 - DNA, 25 bp, Homo sapien
ttccatgggttgtgtcagtgtcaga

SEQ ID NO: 2862528 - DNA, 25 bp, Homo sapien
catcgtgggcttgaggacctggaga

SEQ ID NO: 2862529 - DNA, 25 bp, Homo sapien
ccagttttttcgaggaatggtagag

SEQ ID NO: 2862530 - DNA, 25 bp, Homo sapien
tactgaactatgcaggctggtgtct

SEQ ID NO: 2862531 - DNA, 25 bp, Homo sapien
gatggctgaactactgaactatgca

SEQ ID NO: 2862532 - DNA, 25 bp, Homo sapien
tgacttttcagttggacagatggct

SEQ ID NO: 2862533 - DNA, 25 bp, Homo sapien
tttgccatttctgaaatcaactgga

SEQ ID NO: 2862534 - DNA, 25 bp, Homo sapien
gccatttctgaaatcaactggacca

SEQ ID NO: 2862535 - DNA, 25 bp, Homo sapien
gaatttgccatttctgaaatcaact

SEQ ID NO: 2862536 - DNA, 25 bp, Homo sapien
cagaatttgccatttctgaaatcaa

SEQ ID NO: 2862537 - DNA, 25 bp, Homo sapien
gcgtgtacgcatcacagtggagttc

SEQ ID NO: 2862538 - DNA, 25 bp, Homo sapien
agtggagttctgggctccccggctg

SEQ ID NO: 2862539 - DNA, 25 bp, Homo sapien
cgtgtacgcatcacagtggagttct

SEQ ID NO: 2862540 - DNA, 25 bp, Homo sapien
gattgacggtgaagggctgctccat

SEQ ID NO: 2862541 - DNA, 25 bp, Homo sapien
cctgattgacggtgaagggctgctc

SEQ ID NO: 2862542 - DNA, 25 bp, Homo sapien
cacagctgcctgattgacggtgaag

SEQ ID NO: 2862543 - DNA, 25 bp, Homo sapien
ttccacagctgcctgattgacggtg

SEQ ID NO: 2862544 - DNA, 25 bp, Homo sapien
catcgtccatgttgggcaggacccg

SEQ ID NO: 2862545 - DNA, 25 bp, Homo sapien
gatgcaacagtctggccgaccagct

SEQ ID NO: 2862546 - DNA, 25 bp, Homo sapien
cagagacacacgtttgcaggtggca

SEQ ID NO: 2862547 - DNA, 25 bp, Homo sapien
ccaggtctggtgtaacaggcgtgct

SEQ ID NO: 2862548 - DNA, 25 bp, Homo sapien
caccttcttgattgacagcactgac

SEQ ID NO: 2862549 - DNA, 25 bp, Homo sapien
aatacaaattgtattggcacaagcc

SEQ ID NO: 2862550 - DNA, 25 bp, Homo sapien
gcctccaccttcttgattgacagca

SEQ ID NO: 2862551 - DNA, 25 bp, Homo sapien
ttgtattggcacaagcctccacctt

SEQ ID NO: 2862552 - DNA, 25 bp, Homo sapien
tggcctctacgtggcctcctccttc

SEQ ID NO: 2862553 - DNA, 25 bp, Homo sapien
gctgtggcctctacgtggcctcctc

SEQ ID NO: 2862554 - DNA, 25 bp, Homo sapien
gcttgttgcaggagcacccatggcc

SEQ ID NO: 2862555 - DNA, 25 bp, Homo sapien
tcttctggctcccacctgatagagt

SEQ ID NO: 2862556 - DNA, 25 bp, Homo sapien
tgaggcccaccccaagaatactgct

SEQ ID NO: 2862557 - DNA, 25 bp, Homo sapien
tctggacaccgctaatgctttcagt

SEQ ID NO: 2862558 - DNA, 25 bp, Homo sapien
tctctctggacaccgctaatgcttt

SEQ ID NO: 2862559 - DNA, 25 bp, Homo sapien
gactctctctggacaccgctaatgc

SEQ ID NO: 2862560 - DNA, 25 bp, Homo sapien
tttgccttctttgcacactgtgtct

SEQ ID NO: 2862561 - DNA, 25 bp, Homo sapien
ttttgccttctttgcacactgtgtc

SEQ ID NO: 2862562 - DNA, 25 bp, Homo sapien
tgccttctttgcacactgtgtcttt

SEQ ID NO: 2862563 - DNA, 25 bp, Homo sapien
cttctttgcacactgtgtctttgct

SEQ ID NO: 2862564 - DNA, 25 bp, Homo sapien
tatccattggcactgccaagatcct

SEQ ID NO: 2862565 - DNA, 25 bp, Homo sapien
ttatccattggcactgccaagatcc

SEQ ID NO: 2862566 - DNA, 25 bp, Homo sapien
attctttatccattggcactgccaa

SEQ ID NO: 2862567 - DNA, 25 bp, Homo sapien
taattctttatccattggcactgcc

SEQ ID NO: 2862568 - DNA, 25 bp, Homo sapien
gctctggtaattggtgcagtttcca

SEQ ID NO: 2862569 - DNA, 25 bp, Homo sapien
taatgcagacgtacagggagaaatc

SEQ ID NO: 2862570 - DNA, 25 bp, Homo sapien
tccagagtcatttgtatggacattg

SEQ ID NO: 2862571 - DNA, 25 bp, Homo sapien
ccttgagatgtatccagtggctctg

SEQ ID NO: 2862572 - DNA, 25 bp, Homo sapien
cttctcaatgcctacgggttttaat

SEQ ID NO: 2862573 - DNA, 25 bp, Homo sapien
ttgttccttctcaatgcctacgggt

SEQ ID NO: 2862574 - DNA, 25 bp, Homo sapien
gaatgtatactttgggcaagagccc

SEQ ID NO: 2862575 - DNA, 25 bp, Homo sapien
taaccactagactataaaccttgcc

SEQ ID NO: 2862576 - DNA, 25 bp, Homo sapien
tctccaggggtgatgggaagaggag

SEQ ID NO: 2862577 - DNA, 25 bp, Homo sapien
ttctccaggggtgatgggaagagga

SEQ ID NO: 2862578 - DNA, 25 bp, Homo sapien
cttgccaatggccatccatgggaaa

SEQ ID NO: 2862579 - DNA, 25 bp, Homo sapien
tgccaatggccatccatgggaaatc

SEQ ID NO: 2862580 - DNA, 25 bp, Homo sapien
ttgccaatggccatccatgggaaat

SEQ ID NO: 2862581 - DNA, 25 bp, Homo sapien
gccaatggccatccatgggaaatct

SEQ ID NO: 2862582 - DNA, 25 bp, Homo sapien
gaaaacttgctctcaggtatggctc

SEQ ID NO: 2862583 - DNA, 25 bp, Homo sapien
tcaggtatggctctaactttagtca

SEQ ID NO: 2862584 - DNA, 25 bp, Homo sapien
tctgtcctgcccacgtgaaaacttg

SEQ ID NO: 2862585 - DNA, 25 bp, Homo sapien
tgcccacgtgaaaacttgctctcag

SEQ ID NO: 2862586 - DNA, 25 bp, Homo sapien
ttttggtcatcattatgggagagtc

SEQ ID NO: 2862587 - DNA, 25 bp, Homo sapien
gggttttggatccataccatattca

SEQ ID NO: 2862588 - DNA, 25 bp, Homo sapien
ctctgataaaagtttataacctggg

SEQ ID NO: 2862589 - DNA, 25 bp, Homo sapien
gagtctgttcatgatgctctgataa

SEQ ID NO: 2862590 - DNA, 25 bp, Homo sapien
ggtctatatctaagtgaaacttgaa

SEQ ID NO: 2862591 - DNA, 25 bp, Homo sapien
tttgacagaggcttggtctatatct

SEQ ID NO: 2862592 - DNA, 25 bp, Homo sapien
ggcttggtctatatctaagtgaaac

SEQ ID NO: 2862593 - DNA, 25 bp, Homo sapien
cagaggcttggtctatatctaagtg

SEQ ID NO: 2862594 - DNA, 25 bp, Homo sapien
tatcatgagcagaaggtgtgagaaa

SEQ ID NO: 2862595 - DNA, 25 bp, Homo sapien
tacagcggtaatacatcagctcaca

SEQ ID NO: 2862596 - DNA, 25 bp, Homo sapien
ggtaatacatcagctcacaaaaatc

SEQ ID NO: 2862597 - DNA, 25 bp, Homo sapien
tgagaaagtccccttacagcggtaa

SEQ ID NO: 2862598 - DNA, 25 bp, Homo sapien
taacatgtcttctagggcaccaatc

SEQ ID NO: 2862599 - DNA, 25 bp, Homo sapien
tctctcggctctgtgtcagtgtttg

SEQ ID NO: 2862600 - DNA, 25 bp, Homo sapien
catggctctggctgttagagttgta

SEQ ID NO: 2862601 - DNA, 25 bp, Homo sapien
tagagttgtaattagaactgggcca

SEQ ID NO: 2862602 - DNA, 25 bp, Homo sapien
tttaattatcctttccaggagctgg

SEQ ID NO: 2862603 - DNA, 25 bp, Homo sapien
ggctttaattatcctttccaggagc

SEQ ID NO: 2862604 - DNA, 25 bp, Homo sapien
ctttaattatcctttccaggagctg

SEQ ID NO: 2862605 - DNA, 25 bp, Homo sapien
gctttaattatcctttccaggagct

SEQ ID NO: 2862606 - DNA, 25 bp, Homo sapien
gtatgtgtacctgccccttattggg

SEQ ID NO: 2862607 - DNA, 25 bp, Homo sapien
cacattggatggtcacagttggctt

SEQ ID NO: 2862608 - DNA, 25 bp, Homo sapien
taatacctatgtcaagcctgggaag

SEQ ID NO: 2862609 - DNA, 25 bp, Homo sapien
gctggtggcatgactcgtaggctca

SEQ ID NO: 2862610 - DNA, 25 bp, Homo sapien
ctatccccattctggaataggctga

SEQ ID NO: 2862611 - DNA, 25 bp, Homo sapien
tccccattctggaataggctgaatg

SEQ ID NO: 2862612 - DNA, 25 bp, Homo sapien
cccattctggaataggctgaatggg

SEQ ID NO: 2862613 - DNA, 25 bp, Homo sapien
cctatccccattctggaataggctg

SEQ ID NO: 2862614 - DNA, 25 bp, Homo sapien
aatcttggaaacttacggcactggg

SEQ ID NO: 2862615 - DNA, 25 bp, Homo sapien
gaaactttaactctgggcactgagg

SEQ ID NO: 2862616 - DNA, 25 bp, Homo sapien
catatgggcctattctgggtgcaga

SEQ ID NO: 2862617 - DNA, 25 bp, Homo sapien
gaaccaactcgctgtgcctggaagg

SEQ ID NO: 2862618 - DNA, 25 bp, Homo sapien
cattatcctgttaggtcccagcagg

SEQ ID NO: 2862619 - DNA, 25 bp, Homo sapien
tgagcaccggcacatatcagtctgt

SEQ ID NO: 2862620 - DNA, 25 bp, Homo sapien
tcagtgaactctgggatcggcgatg

SEQ ID NO: 2862621 - DNA, 25 bp, Homo sapien
gagtcccctgagcatgagtcatccc

SEQ ID NO: 2862622 - DNA, 25 bp, Homo sapien
tagatgacactgggtggtgagttgg

SEQ ID NO: 2862623 - DNA, 25 bp, Homo sapien
ggtggtgagttggtcgagccacttc

SEQ ID NO: 2862624 - DNA, 25 bp, Homo sapien
cactgggtggtgagttggtcgagcc

SEQ ID NO: 2862625 - DNA, 25 bp, Homo sapien
ggtgagttggtcgagccacttcggg

SEQ ID NO: 2862626 - DNA, 25 bp, Homo sapien
gcttttgagattagagacttcccac

SEQ ID NO: 2862627 - DNA, 25 bp, Homo sapien
gtgggaaacaacagaataaagatat

SEQ ID NO: 2862628 - DNA, 25 bp, Homo sapien
tggtgggaaacaacagaataaagat

SEQ ID NO: 2862629 - DNA, 25 bp, Homo sapien
ctggtgggaaacaacagaataaaga

SEQ ID NO: 2862630 - DNA, 25 bp, Homo sapien
ggtgggaaacaacagaataaagata

SEQ ID NO: 2862631 - DNA, 25 bp, Homo sapien
gtggcattgtacaggagggatacca

SEQ ID NO: 2862632 - DNA, 25 bp, Homo sapien
taccagaaagtacatcaggaagctg

SEQ ID NO: 2862633 - DNA, 25 bp, Homo sapien
tgagaaagcagacgaggtagaaagt

SEQ ID NO: 2862634 - DNA, 25 bp, Homo sapien
tggccttccatcacccaatagggat

SEQ ID NO: 2862635 - DNA, 25 bp, Homo sapien
aggtaaagacatctatatcagagcc

SEQ ID NO: 2862636 - DNA, 25 bp, Homo sapien
tggtgttgattggtgtcccaaaggt

SEQ ID NO: 2862637 - DNA, 25 bp, Homo sapien
catctatatcagagcccttataggc

SEQ ID NO: 2862638 - DNA, 25 bp, Homo sapien
gagatggtgttgattggtgtcccaa

SEQ ID NO: 2862639 - DNA, 25 bp, Homo sapien
gatgaggctctggtagaatgcatcc

SEQ ID NO: 2862640 - DNA, 25 bp, Homo sapien
tctggtagaatgcatccaccataga

SEQ ID NO: 2862641 - DNA, 25 bp, Homo sapien
tccagaaagtcgacaggttatagca

SEQ ID NO: 2862642 - DNA, 25 bp, Homo sapien
gcatccaccatagaaatccagaaag

SEQ ID NO: 2862643 - DNA, 25 bp, Homo sapien
tagtaagtactcaggccttagtgcc

SEQ ID NO: 2862644 - DNA, 25 bp, Homo sapien
cattaatctttgtgccttccccagg

SEQ ID NO: 2862645 - DNA, 25 bp, Homo sapien
tgctactgttgctacaaacctggca

SEQ ID NO: 2862646 - DNA, 25 bp, Homo sapien
taaacttagaagagcccaaggtgaa

SEQ ID NO: 2862647 - DNA, 25 bp, Homo sapien
gatgtctttgtcaaggactccaaag

SEQ ID NO: 2862648 - DNA, 25 bp, Homo sapien
actcttgtatagctcaggcaatgcc

SEQ ID NO: 2862649 - DNA, 25 bp, Homo sapien
gattgaagaatatcatctgccagta

SEQ ID NO: 2862650 - DNA, 25 bp, Homo sapien
tgcagagatgtctttgtcaaggact

SEQ ID NO: 2862651 - DNA, 25 bp, Homo sapien
tggccatgcacgagcagcaacttct

SEQ ID NO: 2862652 - DNA, 25 bp, Homo sapien
cttaaagcgggtgatggcaaagtcg

SEQ ID NO: 2862653 - DNA, 25 bp, Homo sapien
ctggccaggcgcgagtaacaccagt

SEQ ID NO: 2862654 - DNA, 25 bp, Homo sapien
cacgttcttgtagaggtagtacacc

SEQ ID NO: 2862655 - DNA, 25 bp, Homo sapien
tcctgtccagatattccaattccaa

SEQ ID NO: 2862656 - DNA, 25 bp, Homo sapien
cttcctgtccagatattccaattcc

SEQ ID NO: 2862657 - DNA, 25 bp, Homo sapien
ttcctgtccagatattccaattcca

SEQ ID NO: 2862658 - DNA, 25 bp, Homo sapien
aatccaaagagcttgcggtctggct

SEQ ID NO: 2862659 - DNA, 25 bp, Homo sapien
tatggaaagggtcatgacgcgcaac

SEQ ID NO: 2862660 - DNA, 25 bp, Homo sapien
catcgatgaccaatccagcttctgg

SEQ ID NO: 2862661 - DNA, 25 bp, Homo sapien
tgcacaattgaggatggattcacag

SEQ ID NO: 2862662 - DNA, 25 bp, Homo sapien
agtgctcttctggttaatatcctcc

SEQ ID NO: 2862663 - DNA, 25 bp, Homo sapien
gataggagcacacaatctcagtgcc

SEQ ID NO: 2862664 - DNA, 25 bp, Homo sapien
taatatcctccatggaatccaaccc

SEQ ID NO: 2862665 - DNA, 25 bp, Homo sapien
tgtggtggaactttaccttctgcaa

SEQ ID NO: 2862666 - DNA, 25 bp, Homo sapien
gcctcccgcagagtggcaatcgtat

SEQ ID NO: 2862667 - DNA, 25 bp, Homo sapien
tgggcaatgttgaccgctgtctcct

SEQ ID NO: 2862668 - DNA, 25 bp, Homo sapien
gcttatctccagtcaggacccagag

SEQ ID NO: 2862669 - DNA, 25 bp, Homo sapien
taacagtctgcaggaatgggcaatg

SEQ ID NO: 2862670 - DNA, 25 bp, Homo sapien
tgagaagctcatctcggttgtcgag

SEQ ID NO: 2862671 - DNA, 25 bp, Homo sapien
tgagttgattctccagatgctgtgc

SEQ ID NO: 2862672 - DNA, 25 bp, Homo sapien
gagttgattctccagatgctgtgca

SEQ ID NO: 2862673 - DNA, 25 bp, Homo sapien
ctcggttgtcgagggatgcctcagc

SEQ ID NO: 2862674 - DNA, 25 bp, Homo sapien
agcacgcttggaggaattgttctta

SEQ ID NO: 2862675 - DNA, 25 bp, Homo sapien
caaggccattcagctatttaatgat

SEQ ID NO: 2862676 - DNA, 25 bp, Homo sapien
aaagcacgcttggaggaattgttct

SEQ ID NO: 2862677 - DNA, 25 bp, Homo sapien
ttaatgatattcaaagcacgcttgg

SEQ ID NO: 2862678 - DNA, 25 bp, Homo sapien
tgggtccgggctcggatttttctca

SEQ ID NO: 2862679 - DNA, 25 bp, Homo sapien
ggccatctcttgcatacaagtctag

SEQ ID NO: 2862680 - DNA, 25 bp, Homo sapien
cttcttggcaatgcatagtgtgcgc

SEQ ID NO: 2862681 - DNA, 25 bp, Homo sapien
tacaagtctagatgcttttgggtcc

SEQ ID NO: 2862682 - DNA, 25 bp, Homo sapien
ctgtcaaatagccattttcccgcat

SEQ ID NO: 2862683 - DNA, 25 bp, Homo sapien
ctgtttgcatgagaaccgcctggga

SEQ ID NO: 2862684 - DNA, 25 bp, Homo sapien
caggttgccctggaagataatgcag

SEQ ID NO: 2862685 - DNA, 25 bp, Homo sapien
taatgcagggagtccttaagctgtc

SEQ ID NO: 2862686 - DNA, 25 bp, Homo sapien
gaggccacatacaaatgctcaggga

SEQ ID NO: 2862687 - DNA, 25 bp, Homo sapien
agagtgccgtggctcccttgactca

SEQ ID NO: 2862688 - DNA, 25 bp, Homo sapien
gtgaggagcaaataaagagacatct

SEQ ID NO: 2862689 - DNA, 25 bp, Homo sapien
tcatagccccataactgtcttctcc

SEQ ID NO: 2862690 - DNA, 25 bp, Homo sapien
gaagcggctgcacactaattcatgc

SEQ ID NO: 2862691 - DNA, 25 bp, Homo sapien
caaaattggacactgatatgtaggg

SEQ ID NO: 2862692 - DNA, 25 bp, Homo sapien
tgttccaaaattggacactgatatg

SEQ ID NO: 2862693 - DNA, 25 bp, Homo sapien
tctgtgcctggaaccctggtaaggc

SEQ ID NO: 2862694 - DNA, 25 bp, Homo sapien
cctggaaccctggtaaggcaggact

SEQ ID NO: 2862695 - DNA, 25 bp, Homo sapien
tgcctggaaccctggtaaggcagga

SEQ ID NO: 2862696 - DNA, 25 bp, Homo sapien
ggaaccctggtaaggcaggactcac

SEQ ID NO: 2862697 - DNA, 25 bp, Homo sapien
tctctcatccgagtctgtggtggcc

SEQ ID NO: 2862698 - DNA, 25 bp, Homo sapien
caatctcgccagtcagtgggtgcct

SEQ ID NO: 2862699 - DNA, 25 bp, Homo sapien
gactggctgaggctcaatagcttca

SEQ ID NO: 2862700 - DNA, 25 bp, Homo sapien
catgatgaccgagtcagcacccttg

SEQ ID NO: 2862701 - DNA, 25 bp, Homo sapien
tatgcggaatatgaaggtacttttg

SEQ ID NO: 2862702 - DNA, 25 bp, Homo sapien
aagtgaagccagatattttcctcca

SEQ ID NO: 2862703 - DNA, 25 bp, Homo sapien
taataccaagttgtcttatgcggaa

SEQ ID NO: 2862704 - DNA, 25 bp, Homo sapien
gccctgaaattctaagcattgacaa

SEQ ID NO: 2862705 - DNA, 25 bp, Homo sapien
cacagggcagcatctcgaaccttgg

SEQ ID NO: 2862706 - DNA, 25 bp, Homo sapien
gaagccttggcaggtctgctgtctg

SEQ ID NO: 2862707 - DNA, 25 bp, Homo sapien
cagtaggtttttatctggagttaca

SEQ ID NO: 2862708 - DNA, 25 bp, Homo sapien
gacaaggtctccaaccacagggcag

SEQ ID NO: 2862709 - DNA, 25 bp, Homo sapien
ctgacagttcttcactctcagtgtc

SEQ ID NO: 2862710 - DNA, 25 bp, Homo sapien
tctcagtgtcttcccaccatttgtg

SEQ ID NO: 2862711 - DNA, 25 bp, Homo sapien
caccatttgtgttgcttccagccat

SEQ ID NO: 2862712 - DNA, 25 bp, Homo sapien
agatgctgacagttcttcactctca

SEQ ID NO: 2862713 - DNA, 25 bp, Homo sapien
cagtcaccacagacttgttgccaca

SEQ ID NO: 2862714 - DNA, 25 bp, Homo sapien
tcaccacagacttgttgccacaggg

SEQ ID NO: 2862715 - DNA, 25 bp, Homo sapien
agacttgttgccacagggcaaggct

SEQ ID NO: 2862716 - DNA, 25 bp, Homo sapien
accacagacttgttgccacagggca

SEQ ID NO: 2862717 - DNA, 25 bp, Homo sapien
ttttgctccagcccactggtttccc

SEQ ID NO: 2862718 - DNA, 25 bp, Homo sapien
ttgctccagcccactggtttcccat

SEQ ID NO: 2862719 - DNA, 25 bp, Homo sapien
tccttttgctccagcccactggttt

SEQ ID NO: 2862720 - DNA, 25 bp, Homo sapien
ggctccttttgctccagcccactgg

SEQ ID NO: 2862721 - DNA, 25 bp, Homo sapien
gagctctctagggacggcttcaagg

SEQ ID NO: 2862722 - DNA, 25 bp, Homo sapien
ggcttcaaggatctgacaccagcta

SEQ ID NO: 2862723 - DNA, 25 bp, Homo sapien
gatgggttagcacaagagtccttaa

SEQ ID NO: 2862724 - DNA, 25 bp, Homo sapien
tccttaaaggctgcatacttcactc

SEQ ID NO: 2862725 - DNA, 25 bp, Homo sapien
ggcagtgaattgatgtgacccaact

SEQ ID NO: 2862726 - DNA, 25 bp, Homo sapien
gctgctgagacttgtcagactgaac

SEQ ID NO: 2862727 - DNA, 25 bp, Homo sapien
cctgcatccaagatttactgcctgg

SEQ ID NO: 2862728 - DNA, 25 bp, Homo sapien
gagacatactcaggcatgtgggatg

SEQ ID NO: 2862729 - DNA, 25 bp, Homo sapien
caggcattggtattgggtccactct

SEQ ID NO: 2862730 - DNA, 25 bp, Homo sapien
ggctgtgagctttcacggtgcccca

SEQ ID NO: 2862731 - DNA, 25 bp, Homo sapien
gacctttgccggtagtggccctgga

SEQ ID NO: 2862732 - DNA, 25 bp, Homo sapien
cctggatgggcacccgggcactctg

SEQ ID NO: 2862733 - DNA, 25 bp, Homo sapien
ggtctgctatcaccatggcaaaggg

SEQ ID NO: 2862734 - DNA, 25 bp, Homo sapien
cagtccatgcaaggtaacagtccag

SEQ ID NO: 2862735 - DNA, 25 bp, Homo sapien
aagccttggttgtgtgactggcaca

SEQ ID NO: 2862736 - DNA, 25 bp, Homo sapien
tctggcaccagacaaagatcagctg

SEQ ID NO: 2862737 - DNA, 25 bp, Homo sapien
cttttagaaagagggatggagccct

SEQ ID NO: 2862738 - DNA, 25 bp, Homo sapien
cttaggagagcagggtatttccttt

SEQ ID NO: 2862739 - DNA, 25 bp, Homo sapien
cagcctctaagagagccaggagaat

SEQ ID NO: 2862740 - DNA, 25 bp, Homo sapien
tacaagtaattggaacagccctgat

SEQ ID NO: 2862741 - DNA, 25 bp, Homo sapien
tcttggtgagaatactcgctgccca

SEQ ID NO: 2862742 - DNA, 25 bp, Homo sapien
taaatcggtctcttcatcatacagg

SEQ ID NO: 2862743 - DNA, 25 bp, Homo sapien
cccatgatggtgcaacgtcggaaca

SEQ ID NO: 2862744 - DNA, 25 bp, Homo sapien
tcagggtccccgtcttatcggagaa

SEQ ID NO: 2862745 - DNA, 25 bp, Homo sapien
gcaggatgatcattgtgaggaacat

SEQ ID NO: 2862746 - DNA, 25 bp, Homo sapien
catctggcacatcgaagggagggtg

SEQ ID NO: 2862747 - DNA, 25 bp, Homo sapien
gaacatgtagaagcccccaagggca

SEQ ID NO: 2862748 - DNA, 25 bp, Homo sapien
cacatcgaagggagggtgttcttca

SEQ ID NO: 2862749 - DNA, 25 bp, Homo sapien
aagatgtctatattcatgcgccgct

SEQ ID NO: 2862750 - DNA, 25 bp, Homo sapien
tacagctccaataaggcacatgagg

SEQ ID NO: 2862751 - DNA, 25 bp, Homo sapien
ctcaatcttgctgcgtttgtaccgg

SEQ ID NO: 2862752 - DNA, 25 bp, Homo sapien
catgaggatgaggatcccaatgcag

SEQ ID NO: 2862753 - DNA, 25 bp, Homo sapien
aagcagaagactctcacagccaaag

SEQ ID NO: 2862754 - DNA, 25 bp, Homo sapien
caaagccagtcctggtctggtcagg

SEQ ID NO: 2862755 - DNA, 25 bp, Homo sapien
gacaatgccaacagccatctcggtg

SEQ ID NO: 2862756 - DNA, 25 bp, Homo sapien
ttctgatggtgcagcctcgaagcag

SEQ ID NO: 2862757 - DNA, 25 bp, Homo sapien
ttgtggaaaagctctggttcgaact

SEQ ID NO: 2862758 - DNA, 25 bp, Homo sapien
aaagctctggttcgaactgtacctc

SEQ ID NO: 2862759 - DNA, 25 bp, Homo sapien
cacacgatggtattgtggaaaagct

SEQ ID NO: 2862760 - DNA, 25 bp, Homo sapien
gggtttctcacacacgatggtattg

SEQ ID NO: 2862761 - DNA, 25 bp, Homo sapien
taaattacccatccaggagtttcta

SEQ ID NO: 2862762 - DNA, 25 bp, Homo sapien
ataaattacccatccaggagtttct

SEQ ID NO: 2862763 - DNA, 25 bp, Homo sapien
tctttcagggacaaacacttgctga

SEQ ID NO: 2862764 - DNA, 25 bp, Homo sapien
cttccaagcacatttgcatcttaaa

SEQ ID NO: 2862765 - DNA, 25 bp, Homo sapien
caagcacatttgcatcttaaagtac

SEQ ID NO: 2862766 - DNA, 25 bp, Homo sapien
ctcttccaagcacatttgcatctta

SEQ ID NO: 2862767 - DNA, 25 bp, Homo sapien
tccaagcacatttgcatcttaaagt

SEQ ID NO: 2862768 - DNA, 25 bp, Homo sapien
gtcccaggtacagcaagcctgccat

SEQ ID NO: 2862769 - DNA, 25 bp, Homo sapien
tgtgtcccaggtacagcaagcctgc

SEQ ID NO: 2862770 - DNA, 25 bp, Homo sapien
ctgtgtcccaggtacagcaagcctg

SEQ ID NO: 2862771 - DNA, 25 bp, Homo sapien
tgtcccaggtacagcaagcctgcca

SEQ ID NO: 2862772 - DNA, 25 bp, Homo sapien
tatggtaccgagttagccagaagcg

SEQ ID NO: 2862773 - DNA, 25 bp, Homo sapien
caatacgttagggaaatcctatggt

SEQ ID NO: 2862774 - DNA, 25 bp, Homo sapien
ggaaatcctatggtaccgagttagc

SEQ ID NO: 2862775 - DNA, 25 bp, Homo sapien
ggtaccgagttagccagaagcgagt

SEQ ID NO: 2862776 - DNA, 25 bp, Homo sapien
tatccatactcagaaatctttctgc

SEQ ID NO: 2862777 - DNA, 25 bp, Homo sapien
atccatactcagaaatctttctgcc

SEQ ID NO: 2862778 - DNA, 25 bp, Homo sapien
ctatccatactcagaaatctttctg

SEQ ID NO: 2862779 - DNA, 25 bp, Homo sapien
cctttttgcaaacactagggtgatt

SEQ ID NO: 2862780 - DNA, 25 bp, Homo sapien
tgcctttttgcaaacactagggtga

SEQ ID NO: 2862781 - DNA, 25 bp, Homo sapien
cctgcctttttgcaaacactagggt

SEQ ID NO: 2862782 - DNA, 25 bp, Homo sapien
cactagggtgatttagcaaatgcgg

SEQ ID NO: 2862783 - DNA, 25 bp, Homo sapien
tgtctgctgggacaatctcattgca

SEQ ID NO: 2862784 - DNA, 25 bp, Homo sapien
tccagcacttctgcacataggtctg

SEQ ID NO: 2862785 - DNA, 25 bp, Homo sapien
tgtgagaagcccttcacgacacatc

SEQ ID NO: 2862786 - DNA, 25 bp, Homo sapien
ggatgaagtctcccacgcgcacatc

SEQ ID NO: 2862787 - DNA, 25 bp, Homo sapien
ggaggtgatgactggccgaatcctg

SEQ ID NO: 2862788 - DNA, 25 bp, Homo sapien
gctgatacagaaaagcagcatgctc

SEQ ID NO: 2862789 - DNA, 25 bp, Homo sapien
tcctccactgtcaggaccatatctg

SEQ ID NO: 2862790 - DNA, 25 bp, Homo sapien
tgtggaaaagtcagggatgcacaca

SEQ ID NO: 2862791 - DNA, 25 bp, Homo sapien
tttccttgagggctgttattcagag

SEQ ID NO: 2862792 - DNA, 25 bp, Homo sapien
tatgagccagatgaggccacctaca

SEQ ID NO: 2862793 - DNA, 25 bp, Homo sapien
taagaagttgagttggaccaagtgg

SEQ ID NO: 2862794 - DNA, 25 bp, Homo sapien
gacttctgcctatcaaggctaccga

SEQ ID NO: 2862795 - DNA, 25 bp, Homo sapien
gtccagtgtgctcataacattcaag

SEQ ID NO: 2862796 - DNA, 25 bp, Homo sapien
taacattcaagacaattggatctag

SEQ ID NO: 2862797 - DNA, 25 bp, Homo sapien
atattcaaaggcgaggaacgactaa

SEQ ID NO: 2862798 - DNA, 25 bp, Homo sapien
ctaaatgttaactctggctgtccag

SEQ ID NO: 2862799 - DNA, 25 bp, Homo sapien
tgactgccaggataacacagattgg

SEQ ID NO: 2862800 - DNA, 25 bp, Homo sapien
gaggtcttcccaagcgtccttgatg

SEQ ID NO: 2862801 - DNA, 25 bp, Homo sapien
tagagattggcaaaccggtgtagct

SEQ ID NO: 2862802 - DNA, 25 bp, Homo sapien
gataaaattcagaaccgcaatgccc

SEQ ID NO: 2862803 - DNA, 25 bp, Homo sapien
cttgatttgattcccacgatgatgt

SEQ ID NO: 2862804 - DNA, 25 bp, Homo sapien
ctggtcttgatttgattcccacgat

SEQ ID NO: 2862805 - DNA, 25 bp, Homo sapien
ggtcttgatttgattcccacgatga

SEQ ID NO: 2862806 - DNA, 25 bp, Homo sapien
tcttgatttgattcccacgatgatg

SEQ ID NO: 2862807 - DNA, 25 bp, Homo sapien
ctgttggggttctctttgtgagacc

SEQ ID NO: 2862808 - DNA, 25 bp, Homo sapien
gttggggttctctttgtgagaccat

SEQ ID NO: 2862809 - DNA, 25 bp, Homo sapien
ttggggttctctttgtgagaccatc

SEQ ID NO: 2862810 - DNA, 25 bp, Homo sapien
tgttggggttctctttgtgagacca

SEQ ID NO: 2862811 - DNA, 25 bp, Homo sapien
gagcaagttagagaccactactcgc

SEQ ID NO: 2862812 - DNA, 25 bp, Homo sapien
aaagagcaagttagagaccactact

SEQ ID NO: 2862813 - DNA, 25 bp, Homo sapien
accactactcgcttcttgtcttctt

SEQ ID NO: 2862814 - DNA, 25 bp, Homo sapien
gcaagttagagaccactactcgctt

SEQ ID NO: 2862815 - DNA, 25 bp, Homo sapien
tgctcaatgttgtctttttaattct

SEQ ID NO: 2862816 - DNA, 25 bp, Homo sapien
tgtctttttaattctcataatttaa

SEQ ID NO: 2862817 - DNA, 25 bp, Homo sapien
caatgttgtctttttaattctcata

SEQ ID NO: 2862818 - DNA, 25 bp, Homo sapien
ctcaatgttgtctttttaattctca

SEQ ID NO: 2862819 - DNA, 25 bp, Homo sapien
ttccttctacttgtttgagactcca

SEQ ID NO: 2862820 - DNA, 25 bp, Homo sapien
tccttctacttgtttgagactccac

SEQ ID NO: 2862821 - DNA, 25 bp, Homo sapien
ctgttggaatgtagacgtcacctac

SEQ ID NO: 2862822 - DNA, 25 bp, Homo sapien
gggcatccagttcaaaatcaccagg

SEQ ID NO: 2862823 - DNA, 25 bp, Homo sapien
catgatgacgaacaggacaatggcc

SEQ ID NO: 2862824 - DNA, 25 bp, Homo sapien
gtctcttgaagtcctccatgccatc

SEQ ID NO: 2862825 - DNA, 25 bp, Homo sapien
catgccatccttgatcatgatgacg

SEQ ID NO: 2862826 - DNA, 25 bp, Homo sapien
tgcaggttctgttgccagggtatct

SEQ ID NO: 2862827 - DNA, 25 bp, Homo sapien
cagcggtgtggtttccgatggacaa

SEQ ID NO: 2862828 - DNA, 25 bp, Homo sapien
gaacacgacccgctgctgtgtcaag

SEQ ID NO: 2862829 - DNA, 25 bp, Homo sapien
cgatgccacgatgagtccactgaga

SEQ ID NO: 2862830 - DNA, 25 bp, Homo sapien
ggctcacatttccaattgactccag

SEQ ID NO: 2862831 - DNA, 25 bp, Homo sapien
tcacatttccaattgactccagttc

SEQ ID NO: 2862832 - DNA, 25 bp, Homo sapien
gctcacatttccaattgactccagt

SEQ ID NO: 2862833 - DNA, 25 bp, Homo sapien
ctcacatttccaattgactccagtt

SEQ ID NO: 2862834 - DNA, 25 bp, Homo sapien
ctactaatgcaggaaaggctgctaa

SEQ ID NO: 2862835 - DNA, 25 bp, Homo sapien
ctaatgcaggaaaggctgctaacat

SEQ ID NO: 2862836 - DNA, 25 bp, Homo sapien
actaatgcaggaaaggctgctaaca

SEQ ID NO: 2862837 - DNA, 25 bp, Homo sapien
tactaatgcaggaaaggctgctaac

SEQ ID NO: 2862838 - DNA, 25 bp, Homo sapien
ctcgacttatgtcaagtccaggggg

SEQ ID NO: 2862839 - DNA, 25 bp, Homo sapien
tatgtcaagtccagggggatgcatg

SEQ ID NO: 2862840 - DNA, 25 bp, Homo sapien
caagtccagggggatgcatgaccat

SEQ ID NO: 2862841 - DNA, 25 bp, Homo sapien
tcgacttatgtcaagtccaggggga

SEQ ID NO: 2862842 - DNA, 25 bp, Homo sapien
gttagtttgatgggctttcctttga

SEQ ID NO: 2862843 - DNA, 25 bp, Homo sapien
ttgatgggctttcctttgagggtaa

SEQ ID NO: 2862844 - DNA, 25 bp, Homo sapien
ccgctgttagtttgatgggctttcc

SEQ ID NO: 2862845 - DNA, 25 bp, Homo sapien
agtttgatgggctttcctttgaggg

SEQ ID NO: 2862846 - DNA, 25 bp, Homo sapien
ccctacagccacaggaagagggggc

SEQ ID NO: 2862847 - DNA, 25 bp, Homo sapien
gcagatgtagtactttagctgggca

SEQ ID NO: 2862848 - DNA, 25 bp, Homo sapien
ctgttagcggagtccctttaaggag

SEQ ID NO: 2862849 - DNA, 25 bp, Homo sapien
agtgacctttgctgtgcccctacag

SEQ ID NO: 2862850 - DNA, 25 bp, Homo sapien
tttgtttgagtaacaagcccctgga

SEQ ID NO: 2862851 - DNA, 25 bp, Homo sapien
gtttgagtaacaagcccctggaatg

SEQ ID NO: 2862852 - DNA, 25 bp, Homo sapien
ttagggtggtcttatggactgggct

SEQ ID NO: 2862853 - DNA, 25 bp, Homo sapien
gtggtcttatggactgggctccctc

SEQ ID NO: 2862854 - DNA, 25 bp, Homo sapien
gttccttgaatcactgatgataacg

SEQ ID NO: 2862855 - DNA, 25 bp, Homo sapien
ccttgaatcactgatgataacggtc

SEQ ID NO: 2862856 - DNA, 25 bp, Homo sapien
tggaacctggggttccttgaatcac

SEQ ID NO: 2862857 - DNA, 25 bp, Homo sapien
gaacctggggttccttgaatcactg

SEQ ID NO: 2862858 - DNA, 25 bp, Homo sapien
aaattcaaaggatcgttagtggctg

SEQ ID NO: 2862859 - DNA, 25 bp, Homo sapien
caagtaaacaatctaatgatgcatc

SEQ ID NO: 2862860 - DNA, 25 bp, Homo sapien
ggtatgatgataaatgggaaaatct

SEQ ID NO: 2862861 - DNA, 25 bp, Homo sapien
ggctgctatgagcaaaggtatgatg

SEQ ID NO: 2862862 - DNA, 25 bp, Homo sapien
tcagtgccccatgtataccatttga

SEQ ID NO: 2862863 - DNA, 25 bp, Homo sapien
catctcctgttacatctgcttcctt

SEQ ID NO: 2862864 - DNA, 25 bp, Homo sapien
gtgccccatgtataccatttgatgc

SEQ ID NO: 2862865 - DNA, 25 bp, Homo sapien
ttctcagtgccccatgtataccatt

SEQ ID NO: 2862866 - DNA, 25 bp, Homo sapien
ccactgagtgagatgaataatagga

SEQ ID NO: 2862867 - DNA, 25 bp, Homo sapien
aacaaatgtcaccagtcggttctga

SEQ ID NO: 2862868 - DNA, 25 bp, Homo sapien
tcctttttgaagtctcagtgtttat

SEQ ID NO: 2862869 - DNA, 25 bp, Homo sapien
gaaaaactacttactcttcacactg

SEQ ID NO: 2862870 - DNA, 25 bp, Homo sapien
agaaacaaattgagtgcagtttgcc

SEQ ID NO: 2862871 - DNA, 25 bp, Homo sapien
gagaaaaggtggctcttccaagcca

SEQ ID NO: 2862872 - DNA, 25 bp, Homo sapien
ggagaaaaggtggctcttccaagcc

SEQ ID NO: 2862873 - DNA, 25 bp, Homo sapien
agaaaaggtggctcttccaagccag

SEQ ID NO: 2862874 - DNA, 25 bp, Homo sapien
tgctgtagaatccttgccagccctc

SEQ ID NO: 2862875 - DNA, 25 bp, Homo sapien
gccctcaaaatctcctagagttatt

SEQ ID NO: 2862876 - DNA, 25 bp, Homo sapien
ttcacatacactgatgcaactttgg

SEQ ID NO: 2862877 - DNA, 25 bp, Homo sapien
ggagctctttgtggagtttcacata

SEQ ID NO: 2862878 - DNA, 25 bp, Homo sapien
ttcaaaaggaatgttgtggagctga

SEQ ID NO: 2862879 - DNA, 25 bp, Homo sapien
aagtagtgacagctgagatatagat

SEQ ID NO: 2862880 - DNA, 25 bp, Homo sapien
ctgagatatagattactgatgaggc

SEQ ID NO: 2862881 - DNA, 25 bp, Homo sapien
tctgtaagagctctgtttctcacac

SEQ ID NO: 2862882 - DNA, 25 bp, Homo sapien
ggctcagaaatggactgtgcttgtt

SEQ ID NO: 2862883 - DNA, 25 bp, Homo sapien
aaaattgttgggttgagttgtcagt

SEQ ID NO: 2862884 - DNA, 25 bp, Homo sapien
aaaaataactcgagatagagagaca

SEQ ID NO: 2862885 - DNA, 25 bp, Homo sapien
tgttgttgtcggaagaatgtttagc

SEQ ID NO: 2862886 - DNA, 25 bp, Homo sapien
tcagtcagtccatcatgttttctca

SEQ ID NO: 2862887 - DNA, 25 bp, Homo sapien
cacatattcaggcaatcaaagtctt

SEQ ID NO: 2862888 - DNA, 25 bp, Homo sapien
catcagtcagtccatcatgttttct

SEQ ID NO: 2862889 - DNA, 25 bp, Homo sapien
atcagtcagtccatcatgttttctc

SEQ ID NO: 2862890 - DNA, 25 bp, Homo sapien
accaagttccaccagacacaggcat

SEQ ID NO: 2862891 - DNA, 25 bp, Homo sapien
aaattgcctggcaaattcagagaaa

SEQ ID NO: 2862892 - DNA, 25 bp, Homo sapien
gagaaaattgcctggcaaattcaga

SEQ ID NO: 2862893 - DNA, 25 bp, Homo sapien
tcagagaaaaaccaagttccaccag

SEQ ID NO: 2862894 - DNA, 25 bp, Homo sapien
gaaagtggcggtatttctctcgcac

SEQ ID NO: 2862895 - DNA, 25 bp, Homo sapien
tgagcagactccagtagaagaaaac

SEQ ID NO: 2862896 - DNA, 25 bp, Homo sapien
caaagctgacgtccctattgagcag

SEQ ID NO: 2862897 - DNA, 25 bp, Homo sapien
tctcgcacaccttggctaaaatagt

SEQ ID NO: 2862898 - DNA, 25 bp, Homo sapien
cttcctgatgaggttaccacctgta

SEQ ID NO: 2862899 - DNA, 25 bp, Homo sapien
tgacagtttcttcgccataggcttg

SEQ ID NO: 2862900 - DNA, 25 bp, Homo sapien
gaggttaccacctgtactaccctgc

SEQ ID NO: 2862901 - DNA, 25 bp, Homo sapien
ttcgccataggcttgagtactgatg

SEQ ID NO: 2862902 - DNA, 25 bp, Homo sapien
ggagatctccctagtgccataatga

SEQ ID NO: 2862903 - DNA, 25 bp, Homo sapien
gagaacatccctggttaggtcctag

SEQ ID NO: 2862904 - DNA, 25 bp, Homo sapien
cacttattgaatgtccgctggccca

SEQ ID NO: 2862905 - DNA, 25 bp, Homo sapien
gagctgctcatctgctatcgaagga

SEQ ID NO: 2862906 - DNA, 25 bp, Homo sapien
gctggctgagtgttccaaggagcaa

SEQ ID NO: 2862907 - DNA, 25 bp, Homo sapien
tgcctcagcagttgttagctgcagc

SEQ ID NO: 2862908 - DNA, 25 bp, Homo sapien
caaggagcaagctttcggggagctg

SEQ ID NO: 2862909 - DNA, 25 bp, Homo sapien
tgtcatggtcctttgctgcctcagc

SEQ ID NO: 2862910 - DNA, 25 bp, Homo sapien
atctctgacaccatctcatgacagc

SEQ ID NO: 2862911 - DNA, 25 bp, Homo sapien
catctctgacaccatctcatgacag

SEQ ID NO: 2862912 - DNA, 25 bp, Homo sapien
cttcactcgcaggagagcaaagatg

SEQ ID NO: 2862913 - DNA, 25 bp, Homo sapien
caggctaaagatgacaggacaccga

SEQ ID NO: 2862914 - DNA, 25 bp, Homo sapien
gctaaagatgacaggacaccgataa

SEQ ID NO: 2862915 - DNA, 25 bp, Homo sapien
aggctaaagatgacaggacaccgat

SEQ ID NO: 2862916 - DNA, 25 bp, Homo sapien
ggctaaagatgacaggacaccgata

SEQ ID NO: 2862917 - DNA, 25 bp, Homo sapien
tttttctggtgggacactagggaga

SEQ ID NO: 2862918 - DNA, 25 bp, Homo sapien
gatatcccatcaaaggggagcgact

SEQ ID NO: 2862919 - DNA, 25 bp, Homo sapien
cttggtgtaaactccatagctgaca

SEQ ID NO: 2862920 - DNA, 25 bp, Homo sapien
gagaaagactgagctgctaccaccc

SEQ ID NO: 2862921 - DNA, 25 bp, Homo sapien
tacagttatgatacccactccaggg

SEQ ID NO: 2862922 - DNA, 25 bp, Homo sapien
taaggccaaactcaggtacaacgtc

SEQ ID NO: 2862923 - DNA, 25 bp, Homo sapien
tgtcggccatgggactcaaagtctc

SEQ ID NO: 2862924 - DNA, 25 bp, Homo sapien
tgagcaaaacatgagcgcacgtgtg

SEQ ID NO: 2862925 - DNA, 25 bp, Homo sapien
gagatggtgccacactttatcagct

SEQ ID NO: 2862926 - DNA, 25 bp, Homo sapien
aatacagtctaacctttcatctctg

SEQ ID NO: 2862927 - DNA, 25 bp, Homo sapien
ggataacaatgcagatgccaacagt

SEQ ID NO: 2862928 - DNA, 25 bp, Homo sapien
ccaacagtttttgccctgggagatg

SEQ ID NO: 2862929 - DNA, 25 bp, Homo sapien
acatgcagccaaatgttgccacaag

SEQ ID NO: 2862930 - DNA, 25 bp, Homo sapien
caagaagggcgccactgcttctaaa

SEQ ID NO: 2862931 - DNA, 25 bp, Homo sapien
cagataactcccaggaatctcgcag

SEQ ID NO: 2862932 - DNA, 25 bp, Homo sapien
tctcgcagataatccaggctgttgg

SEQ ID NO: 2862933 - DNA, 25 bp, Homo sapien
tgttcatggcgccaaatgtcaggtt

SEQ ID NO: 2862934 - DNA, 25 bp, Homo sapien
caattgtggacggtttcaacatggc

SEQ ID NO: 2862935 - DNA, 25 bp, Homo sapien
gtcaggttctaactgaggtccaagg

SEQ ID NO: 2862936 - DNA, 25 bp, Homo sapien
caggagagcctgaacgtaagccata

SEQ ID NO: 2862937 - DNA, 25 bp, Homo sapien
ctgaggttgttaaaggcaccgccag

SEQ ID NO: 2862938 - DNA, 25 bp, Homo sapien
taaaggcaccgccagctggagaatg

SEQ ID NO: 2862939 - DNA, 25 bp, Homo sapien
ggttgttaaaggcaccgccagctgg

SEQ ID NO: 2862940 - DNA, 25 bp, Homo sapien
ccagctggagaatgggcaaggagag

SEQ ID NO: 2862941 - DNA, 25 bp, Homo sapien
tgtgcctgtttgaaagctccaaagt

SEQ ID NO: 2862942 - DNA, 25 bp, Homo sapien
cacatcattgtagttggcttcatgg

SEQ ID NO: 2862943 - DNA, 25 bp, Homo sapien
ggcttcatggtctatctgtagataa

SEQ ID NO: 2862944 - DNA, 25 bp, Homo sapien
ttgaaagctccaaagtacatcacat

SEQ ID NO: 2862945 - DNA, 25 bp, Homo sapien
tctttttatagtcagcccatagcag

SEQ ID NO: 2862946 - DNA, 25 bp, Homo sapien
gccaaaatggcctatttaagttgca

SEQ ID NO: 2862947 - DNA, 25 bp, Homo sapien
gatcattcatgtcttggaattctgg

SEQ ID NO: 2862948 - DNA, 25 bp, Homo sapien
tcagcccatagcagactttctttgc

SEQ ID NO: 2862949 - DNA, 25 bp, Homo sapien
aaatgtgggatctacctttggtgca

SEQ ID NO: 2862950 - DNA, 25 bp, Homo sapien
tgggatctacctttggtgcatgagc

SEQ ID NO: 2862951 - DNA, 25 bp, Homo sapien
tgtgggatctacctttggtgcatga

SEQ ID NO: 2862952 - DNA, 25 bp, Homo sapien
gatctacctttggtgcatgagctgt

SEQ ID NO: 2862953 - DNA, 25 bp, Homo sapien
taaagtgtgacggtttgatggctca

SEQ ID NO: 2862954 - DNA, 25 bp, Homo sapien
gctggagtccatgacattagcaact

SEQ ID NO: 2862955 - DNA, 25 bp, Homo sapien
tggaatcttcagtggtaaccctggg

SEQ ID NO: 2862956 - DNA, 25 bp, Homo sapien
tagtggtgcacaggatgccaactct

SEQ ID NO: 2862957 - DNA, 25 bp, Homo sapien
cagacttatcttaggagtaatgccc

SEQ ID NO: 2862958 - DNA, 25 bp, Homo sapien
tgaagtttcactacgcagacttatc

SEQ ID NO: 2862959 - DNA, 25 bp, Homo sapien
tcagtgaagtttcactacgcagact

SEQ ID NO: 2862960 - DNA, 25 bp, Homo sapien
tcactacgcagacttatcttaggag

SEQ ID NO: 2862961 - DNA, 25 bp, Homo sapien
ccaatgagttggaagagactaaaat

SEQ ID NO: 2862962 - DNA, 25 bp, Homo sapien
cagccatggctgttgtgatgtttga

SEQ ID NO: 2862963 - DNA, 25 bp, Homo sapien
gtggtgataagatgtcaggagtccc

SEQ ID NO: 2862964 - DNA, 25 bp, Homo sapien
aagtctgctgtatgccaaatgcctt

SEQ ID NO: 2862965 - DNA, 25 bp, Homo sapien
gagagagatagccttatgcctcaca

SEQ ID NO: 2862966 - DNA, 25 bp, Homo sapien
ggtaattactgcctgccacactaaa

SEQ ID NO: 2862967 - DNA, 25 bp, Homo sapien
ttatgcctcacaatggtaattactg

SEQ ID NO: 2862968 - DNA, 25 bp, Homo sapien
tagccttatgcctcacaatggtaat

SEQ ID NO: 2862969 - DNA, 25 bp, Homo sapien
taagactgtaccacatgaccccgtg

SEQ ID NO: 2862970 - DNA, 25 bp, Homo sapien
aagactgtaccacatgaccccgtgc

SEQ ID NO: 2862971 - DNA, 25 bp, Homo sapien
gactgtaccacatgaccccgtgcag

SEQ ID NO: 2862972 - DNA, 25 bp, Homo sapien
agtaagactgtaccacatgaccccg

SEQ ID NO: 2862973 - DNA, 25 bp, Homo sapien
tcttatggtggacgtttcaggcaca

SEQ ID NO: 2862974 - DNA, 25 bp, Homo sapien
tcaggcacaaatcttatggtggacg

SEQ ID NO: 2862975 - DNA, 25 bp, Homo sapien
aaaaaggtgtcagtagtttcaggca

SEQ ID NO: 2862976 - DNA, 25 bp, Homo sapien
gcacaggtccgaaggctgggcttct

SEQ ID NO: 2862977 - DNA, 25 bp, Homo sapien
gatgtaaggttcaaacggatagcct

SEQ ID NO: 2862978 - DNA, 25 bp, Homo sapien
gctacgtagctcatgtgacttcttt

SEQ ID NO: 2862979 - DNA, 25 bp, Homo sapien
tctaccttacttgtaatagcctcca

SEQ ID NO: 2862980 - DNA, 25 bp, Homo sapien
cggatagccttgtttaatctctacc

SEQ ID NO: 2862981 - DNA, 25 bp, Homo sapien
accatcacgcctggctaatttttgt

SEQ ID NO: 2862982 - DNA, 25 bp, Homo sapien
tgagattacagccacccaccatcac

SEQ ID NO: 2862983 - DNA, 25 bp, Homo sapien
cgggtgatctgcctgcctcagcctc

SEQ ID NO: 2862984 - DNA, 25 bp, Homo sapien
gggtgatctgcctgcctcagcctcc

SEQ ID NO: 2862985 - DNA, 25 bp, Homo sapien
aaagtggattttcataccctgagca

SEQ ID NO: 2862986 - DNA, 25 bp, Homo sapien
gattttcataccctgagcacatcac

SEQ ID NO: 2862987 - DNA, 25 bp, Homo sapien
agtggattttcataccctgagcaca

SEQ ID NO: 2862988 - DNA, 25 bp, Homo sapien
ctaaagtggattttcataccctgag

SEQ ID NO: 2862989 - DNA, 25 bp, Homo sapien
ttttgaatccaaacatgtattatag

SEQ ID NO: 2862990 - DNA, 25 bp, Homo sapien
tctcctttgaatttgtccctgaggg

SEQ ID NO: 2862991 - DNA, 25 bp, Homo sapien
ccctgagggatgtgactgtattttg

SEQ ID NO: 2862992 - DNA, 25 bp, Homo sapien
ctgtattttgaatccaaacatgtat

SEQ ID NO: 2862993 - DNA, 25 bp, Homo sapien
tgtcattttttaagtcgacgaacac

SEQ ID NO: 2862994 - DNA, 25 bp, Homo sapien
tctcctttacccttgcaagtcattg

SEQ ID NO: 2862995 - DNA, 25 bp, Homo sapien
gctgcaggaaatctgtcagtttctc

SEQ ID NO: 2862996 - DNA, 25 bp, Homo sapien
cgacgaacacaatctgagttcccat

SEQ ID NO: 2862997 - DNA, 25 bp, Homo sapien
tttcctatacttctgacattaaaag

SEQ ID NO: 2862998 - DNA, 25 bp, Homo sapien
tgaattggatgtgcactgtagcaca

SEQ ID NO: 2862999 - DNA, 25 bp, Homo sapien
gtagcacatccatacagaacgaatc

SEQ ID NO: 2863000 - DNA, 25 bp, Homo sapien
tgacattaaaagcagggtcttttcc

SEQ ID NO: 2863001 - DNA, 25 bp, Homo sapien
aattcagcttgaggctgacagctat

SEQ ID NO: 2863002 - DNA, 25 bp, Homo sapien
gacagctatagaaacatccacgtag

SEQ ID NO: 2863003 - DNA, 25 bp, Homo sapien
cataaattctcagggagttcctaac

SEQ ID NO: 2863004 - DNA, 25 bp, Homo sapien
ttctcagggagttcctaacatgctc

SEQ ID NO: 2863005 - DNA, 25 bp, Homo sapien
tcacgcttacccttatactttcact

SEQ ID NO: 2863006 - DNA, 25 bp, Homo sapien
gtctctactgctatggagccctgct

SEQ ID NO: 2863007 - DNA, 25 bp, Homo sapien
cattgaagagattgcatgtctctac

SEQ ID NO: 2863008 - DNA, 25 bp, Homo sapien
tcctgagtgctaagtttcatctgca

SEQ ID NO: 2863009 - DNA, 25 bp, Homo sapien
caaagatgatactcagaggtgctca

SEQ ID NO: 2863010 - DNA, 25 bp, Homo sapien
tactggctgctatgcacaattaggg

SEQ ID NO: 2863011 - DNA, 25 bp, Homo sapien
gatgccccaaaatgattgcctagga

SEQ ID NO: 2863012 - DNA, 25 bp, Homo sapien
tcagattagaggatgtgacacggca

SEQ ID NO: 2863013 - DNA, 25 bp, Homo sapien
tgctcaagcaaagggactggccaaa

SEQ ID NO: 2863014 - DNA, 25 bp, Homo sapien
gaatctagtccttgcttccagtggg

SEQ ID NO: 2863015 - DNA, 25 bp, Homo sapien
aattattcccctctgagtaggctgc

SEQ ID NO: 2863016 - DNA, 25 bp, Homo sapien
tatgaaatggaccacaggataggcc

SEQ ID NO: 2863017 - DNA, 25 bp, Homo sapien
catttcggccaaaactatgcctggg

SEQ ID NO: 2863018 - DNA, 25 bp, Homo sapien
catgtcgttccagagcatttcggcc

SEQ ID NO: 2863019 - DNA, 25 bp, Homo sapien
tgattttcagttgggaggcgcgtct

SEQ ID NO: 2863020 - DNA, 25 bp, Homo sapien
accactgggaagaatatgcgggacc

SEQ ID NO: 2863021 - DNA, 25 bp, Homo sapien
ggtgtgccttctctgtaccaggcta

SEQ ID NO: 2863022 - DNA, 25 bp, Homo sapien
tcccaattaccaaactatacaactg

SEQ ID NO: 2863023 - DNA, 25 bp, Homo sapien
caattggcccggagttacacagtaa

SEQ ID NO: 2863024 - DNA, 25 bp, Homo sapien
tcctcaattacgagttctgtcttgg

SEQ ID NO: 2863025 - DNA, 25 bp, Homo sapien
tgcaaaggggaaatgggactatctg

SEQ ID NO: 2863026 - DNA, 25 bp, Homo sapien
gaaatgggactatctgaaatccaag

SEQ ID NO: 2863027 - DNA, 25 bp, Homo sapien
aatgggactatctgaaatccaagtt

SEQ ID NO: 2863028 - DNA, 25 bp, Homo sapien
gggaaatgggactatctgaaatcca

SEQ ID NO: 2863029 - DNA, 25 bp, Homo sapien
cacgcctggccgttatcctaaagca

SEQ ID NO: 2863030 - DNA, 25 bp, Homo sapien
cctggccgttatcctaaagcaattt

SEQ ID NO: 2863031 - DNA, 25 bp, Homo sapien
cgcctggccgttatcctaaagcaat

SEQ ID NO: 2863032 - DNA, 25 bp, Homo sapien
attttaacaaaaatgccctcatgta

SEQ ID NO: 2863033 - DNA, 25 bp, Homo sapien
aggaacaatggtgtgtaaacctgtc

SEQ ID NO: 2863034 - DNA, 25 bp, Homo sapien
cctcatttgtgggagtgcaaggtaa

SEQ ID NO: 2863035 - DNA, 25 bp, Homo sapien
gcaaggtaattgtgtgcgtatacac

SEQ ID NO: 2863036 - DNA, 25 bp, Homo sapien
aacctttctagtgaacaacctgact

SEQ ID NO: 2863037 - DNA, 25 bp, Homo sapien
tatacagagagaaatcgtaattggt

SEQ ID NO: 2863038 - DNA, 25 bp, Homo sapien
cgtaattggtagtccgtctagttgg

SEQ ID NO: 2863039 - DNA, 25 bp, Homo sapien
gggtcccacaaggatcgatattggg

SEQ ID NO: 2863040 - DNA, 25 bp, Homo sapien
caaggatcgatattgggtcccattt

SEQ ID NO: 2863041 - DNA, 25 bp, Homo sapien
tcatgatgctgacacaaaggacagc

SEQ ID NO: 2863042 - DNA, 25 bp, Homo sapien
catgagtttaagaagcaaggagggc

SEQ ID NO: 2863043 - DNA, 25 bp, Homo sapien
ccatgagtttaagaagcaaggaggg

SEQ ID NO: 2863044 - DNA, 25 bp, Homo sapien
cagaagggccatgaaaacgaagaca

SEQ ID NO: 2863045 - DNA, 25 bp, Homo sapien
ttgttgacatccaggcgcatcttct

SEQ ID NO: 2863046 - DNA, 25 bp, Homo sapien
gactagggcatattccagaagggcc

SEQ ID NO: 2863047 - DNA, 25 bp, Homo sapien
aaagaagatgtagttgactagggca

SEQ ID NO: 2863048 - DNA, 25 bp, Homo sapien
tgtttgcaggataaagtagccaatg

SEQ ID NO: 2863049 - DNA, 25 bp, Homo sapien
taaagctgagggataacctgggata

SEQ ID NO: 2863050 - DNA, 25 bp, Homo sapien
taatgccacccttgcagctgaagca

SEQ ID NO: 2863051 - DNA, 25 bp, Homo sapien
gaagcatcgtaattaatccagaagg

SEQ ID NO: 2863052 - DNA, 25 bp, Homo sapien
ttatcatcgccacgccagtaaaact

SEQ ID NO: 2863053 - DNA, 25 bp, Homo sapien
tgtaatctacaatagagaactgtgg

SEQ ID NO: 2863054 - DNA, 25 bp, Homo sapien
tcaattttcgttactcctgttactg

SEQ ID NO: 2863055 - DNA, 25 bp, Homo sapien
gataagtttgtaatctacaatagag

SEQ ID NO: 2863056 - DNA, 25 bp, Homo sapien
aagacgaaagagcaacgagctccat

SEQ ID NO: 2863057 - DNA, 25 bp, Homo sapien
ttggtttctgaagacgaaagagcaa

SEQ ID NO: 2863058 - DNA, 25 bp, Homo sapien
ttctgaagacgaaagagcaacgagc

SEQ ID NO: 2863059 - DNA, 25 bp, Homo sapien
tgaagacgaaagagcaacgagctcc

SEQ ID NO: 2863060 - DNA, 25 bp, Homo sapien
ccttcactattatgtagagttgaca

SEQ ID NO: 2863061 - DNA, 25 bp, Homo sapien
ttcttgtccttcactattatgtaga

SEQ ID NO: 2863062 - DNA, 25 bp, Homo sapien
tgtccttcactattatgtagagttg

SEQ ID NO: 2863063 - DNA, 25 bp, Homo sapien
cttgtccttcactattatgtagagt

SEQ ID NO: 2863064 - DNA, 25 bp, Homo sapien
agagctgtcatgaggtcccctgagc

SEQ ID NO: 2863065 - DNA, 25 bp, Homo sapien
actccgtggctactcagagctgtca

SEQ ID NO: 2863066 - DNA, 25 bp, Homo sapien
tctgaggagaggctgccaaaaatcc

SEQ ID NO: 2863067 - DNA, 25 bp, Homo sapien
ttttcctctcgagcaactccgtggc

SEQ ID NO: 2863068 - DNA, 25 bp, Homo sapien
ctgcacactgatcttcctaacaatg

SEQ ID NO: 2863069 - DNA, 25 bp, Homo sapien
tctgaaggccttgtgaatgactgac

SEQ ID NO: 2863070 - DNA, 25 bp, Homo sapien
cagaagagtgtgcatagaatatagt

SEQ ID NO: 2863071 - DNA, 25 bp, Homo sapien
gaatatagttctaaagggcacataa

SEQ ID NO: 2863072 - DNA, 25 bp, Homo sapien
tgtgccataagccttgaataattct

SEQ ID NO: 2863073 - DNA, 25 bp, Homo sapien
tcattaaccagatcagtgaccttga

SEQ ID NO: 2863074 - DNA, 25 bp, Homo sapien
tataacccatatgttctagccctga

SEQ ID NO: 2863075 - DNA, 25 bp, Homo sapien
tccagaatcacagactatcaagtaa

SEQ ID NO: 2863076 - DNA, 25 bp, Homo sapien
gcaacaatgcccaaatgtacagggc

SEQ ID NO: 2863077 - DNA, 25 bp, Homo sapien
tgagcatcaatttccaccgcagata

SEQ ID NO: 2863078 - DNA, 25 bp, Homo sapien
taaacacactaaacactgcttgcca

SEQ ID NO: 2863079 - DNA, 25 bp, Homo sapien
taccatcagcatgtgccactaaaca

SEQ ID NO: 2863080 - DNA, 25 bp, Homo sapien
gcctctggcttatgatgttcacatc

SEQ ID NO: 2863081 - DNA, 25 bp, Homo sapien
tgggtgtatttacgcctctggctta

SEQ ID NO: 2863082 - DNA, 25 bp, Homo sapien
tatttacgcctctggcttatgatgt

SEQ ID NO: 2863083 - DNA, 25 bp, Homo sapien
ttatgatgttcacatcaggtttcac

SEQ ID NO: 2863084 - DNA, 25 bp, Homo sapien
gatgttttgagactactgttatact

SEQ ID NO: 2863085 - DNA, 25 bp, Homo sapien
actctaaggtgctatcgacgtttac

SEQ ID NO: 2863086 - DNA, 25 bp, Homo sapien
actgttatactctaaggtgctatcg

SEQ ID NO: 2863087 - DNA, 25 bp, Homo sapien
cagatgttttgagactactgttata

SEQ ID NO: 2863088 - DNA, 25 bp, Homo sapien
tgtcaaagcaagggccagaataaaa

SEQ ID NO: 2863089 - DNA, 25 bp, Homo sapien
atgtcaaagcaagggccagaataaa

SEQ ID NO: 2863090 - DNA, 25 bp, Homo sapien
gtcaaagcaagggccagaataaaat

SEQ ID NO: 2863091 - DNA, 25 bp, Homo sapien
tcagacaagcagttcacacgcccta

SEQ ID NO: 2863092 - DNA, 25 bp, Homo sapien
cacacgccctaagtggaaaacctgg

SEQ ID NO: 2863093 - DNA, 25 bp, Homo sapien
ggaaccagagtgaagactagataag

SEQ ID NO: 2863094 - DNA, 25 bp, Homo sapien
tgaagactagataaggcagcttttc

SEQ ID NO: 2863095 - DNA, 25 bp, Homo sapien
taataatttagcaatgacacagtta

SEQ ID NO: 2863096 - DNA, 25 bp, Homo sapien
ataatttagcaatgacacagttagg

SEQ ID NO: 2863097 - DNA, 25 bp, Homo sapien
tcgatatgctgacaaggtattaata

SEQ ID NO: 2863098 - DNA, 25 bp, Homo sapien
ccaatgtattgattgtcgatatgct

SEQ ID NO: 2863099 - DNA, 25 bp, Homo sapien
tgaataaggcagaatgagaagcatc

SEQ ID NO: 2863100 - DNA, 25 bp, Homo sapien
cagtctaaatatgaataagccccaa

SEQ ID NO: 2863101 - DNA, 25 bp, Homo sapien
gagaagcatcaattggagaaccagt

SEQ ID NO: 2863102 - DNA, 25 bp, Homo sapien
ggtctgttaatctggtccctccaaa

SEQ ID NO: 2863103 - DNA, 25 bp, Homo sapien
aatgatcttgaacaaatcaccttac

SEQ ID NO: 2863104 - DNA, 25 bp, Homo sapien
atgatcttgaacaaatcaccttacc

SEQ ID NO: 2863105 - DNA, 25 bp, Homo sapien
gaggccttgtttacttatctgagag

SEQ ID NO: 2863106 - DNA, 25 bp, Homo sapien
aaacacttgggtgttgcctgcataa

SEQ ID NO: 2863107 - DNA, 25 bp, Homo sapien
taatatccatgaaagtccttcacct

SEQ ID NO: 2863108 - DNA, 25 bp, Homo sapien
gcctgcataattaggcatccattct

SEQ ID NO: 2863109 - DNA, 25 bp, Homo sapien
tcatgagtggtacatagcaacgtgc

SEQ ID NO: 2863110 - DNA, 25 bp, Homo sapien
ttagttgggctagcagaacctttgc

SEQ ID NO: 2863111 - DNA, 25 bp, Homo sapien
gactggaggcctctgcgtaagaacc

SEQ ID NO: 2863112 - DNA, 25 bp, Homo sapien
tcataaaggctaagagtaccctcac

SEQ ID NO: 2863113 - DNA, 25 bp, Homo sapien
tttgttcatccagtgggtacctcct

SEQ ID NO: 2863114 - DNA, 25 bp, Homo sapien
ccagtgggtacctccttaggtccat

SEQ ID NO: 2863115 - DNA, 25 bp, Homo sapien
ttcatccagtgggtacctccttagg

SEQ ID NO: 2863116 - DNA, 25 bp, Homo sapien
catccagtgggtacctccttaggtc

SEQ ID NO: 2863117 - DNA, 25 bp, Homo sapien
catgcaggcagctgtggttgtgatt

SEQ ID NO: 2863118 - DNA, 25 bp, Homo sapien
cagaagatagagactggactaaatc

SEQ ID NO: 2863119 - DNA, 25 bp, Homo sapien
gagactggactaaatctgcatttcc

SEQ ID NO: 2863120 - DNA, 25 bp, Homo sapien
gatagagactggactaaatctgcat

SEQ ID NO: 2863121 - DNA, 25 bp, Homo sapien
gactggactaaatctgcatttccca

SEQ ID NO: 2863122 - DNA, 25 bp, Homo sapien
tgttcccatttgataaatcatgcat

SEQ ID NO: 2863123 - DNA, 25 bp, Homo sapien
catgcatttcagattagagctattt

SEQ ID NO: 2863124 - DNA, 25 bp, Homo sapien
gattagagctatttgtactcttctg

SEQ ID NO: 2863125 - DNA, 25 bp, Homo sapien
taaatcatgcatttcagattagagc

SEQ ID NO: 2863126 - DNA, 25 bp, Homo sapien
aggttgcaaagaattcccagccact

SEQ ID NO: 2863127 - DNA, 25 bp, Homo sapien
tcagagtccccttctagccctgtga

SEQ ID NO: 2863128 - DNA, 25 bp, Homo sapien
accactacctgggtcaggttgcaaa

SEQ ID NO: 2863129 - DNA, 25 bp, Homo sapien
tatgcctgctgtaatgctgagcagc

SEQ ID NO: 2863130 - DNA, 25 bp, Homo sapien
atattttgaattggggacaacagac

SEQ ID NO: 2863131 - DNA, 25 bp, Homo sapien
gttatattttgaattggggacaaca

SEQ ID NO: 2863132 - DNA, 25 bp, Homo sapien
caggaaaagttatattttgaattgg

SEQ ID NO: 2863133 - DNA, 25 bp, Homo sapien
tcaggaaaagttatattttgaattg

SEQ ID NO: 2863134 - DNA, 25 bp, Homo sapien
tgcggttcttaacagtcactccgtg

SEQ ID NO: 2863135 - DNA, 25 bp, Homo sapien
gaaataggtatcaggcacccagagc

SEQ ID NO: 2863136 - DNA, 25 bp, Homo sapien
aaaggacggtgccatcaggatgcag

SEQ ID NO: 2863137 - DNA, 25 bp, Homo sapien
caggatgcaggcgaatcatgcggtt

SEQ ID NO: 2863138 - DNA, 25 bp, Homo sapien
gcttcaagggtcaaaatgatttgga

SEQ ID NO: 2863139 - DNA, 25 bp, Homo sapien
tgcttcaagggtcaaaatgatttgg

SEQ ID NO: 2863140 - DNA, 25 bp, Homo sapien
tcctctatggctttgtcttttagta

SEQ ID NO: 2863141 - DNA, 25 bp, Homo sapien
ctttgtcttttagtaggattactgc

SEQ ID NO: 2863142 - DNA, 25 bp, Homo sapien
gaattcagggttagagcctggtcag

SEQ ID NO: 2863143 - DNA, 25 bp, Homo sapien
gagaattcagggttagagcctggtc

SEQ ID NO: 2863144 - DNA, 25 bp, Homo sapien
agaattcagggttagagcctggtca

SEQ ID NO: 2863145 - DNA, 25 bp, Homo sapien
gaaaaccactatgccctttagcgca

SEQ ID NO: 2863146 - DNA, 25 bp, Homo sapien
tcatgtcactattttgaaaaccact

SEQ ID NO: 2863147 - DNA, 25 bp, Homo sapien
tttgaaaaccactatgccctttagc

SEQ ID NO: 2863148 - DNA, 25 bp, Homo sapien
ctattttgaaaaccactatgccctt

SEQ ID NO: 2863149 - DNA, 25 bp, Homo sapien
cacacaagggaattctatgcaactg

SEQ ID NO: 2863150 - DNA, 25 bp, Homo sapien
ggactgattgaacaagtatgctgca

SEQ ID NO: 2863151 - DNA, 25 bp, Homo sapien
tcacaatagccaaagaacccaaatg

SEQ ID NO: 2863152 - DNA, 25 bp, Homo sapien
cagtagttgtatctgggtgatgaca

SEQ ID NO: 2863153 - DNA, 25 bp, Homo sapien
ttcttgagcttctaaattgaatggc

SEQ ID NO: 2863154 - DNA, 25 bp, Homo sapien
aacactgtccatatatttgtgcacc

SEQ ID NO: 2863155 - DNA, 25 bp, Homo sapien
cacagcttaattggtgtagagccaa

SEQ ID NO: 2863156 - DNA, 25 bp, Homo sapien
cctggtttcctgataagacagtcct

SEQ ID NO: 2863157 - DNA, 25 bp, Homo sapien
tattttgactagcaggtcttggcat

SEQ ID NO: 2863158 - DNA, 25 bp, Homo sapien
tccaaaatgttgcatgtaggcaaaa

SEQ ID NO: 2863159 - DNA, 25 bp, Homo sapien
gccttaactggatctatattttgac

SEQ ID NO: 2863160 - DNA, 25 bp, Homo sapien
aatagctttaagtgatgacaccttg

SEQ ID NO: 2863161 - DNA, 25 bp, Homo sapien
gggatgacacatgggtctgagccta

SEQ ID NO: 2863162 - DNA, 25 bp, Homo sapien
aaggagtactgctgtcaattaactg

SEQ ID NO: 2863163 - DNA, 25 bp, Homo sapien
gaatgaattgctaaagtgaacgggg

SEQ ID NO: 2863164 - DNA, 25 bp, Homo sapien
caagcttaggacatgtggtgaatga

SEQ ID NO: 2863165 - DNA, 25 bp, Homo sapien
acgaaagtttgcaaagaagtagtca

SEQ ID NO: 2863166 - DNA, 25 bp, Homo sapien
cccccaatagctggctcatttctcc

SEQ ID NO: 2863167 - DNA, 25 bp, Homo sapien
aaagtttgcaaagaagtagtcataa

SEQ ID NO: 2863168 - DNA, 25 bp, Homo sapien
caaacgaaagtttgcaaagaagtag

SEQ ID NO: 2863169 - DNA, 25 bp, Homo sapien
attgacttcagaaaccatatcgatg

SEQ ID NO: 2863170 - DNA, 25 bp, Homo sapien
catattgacttcagaaaccatatcg

SEQ ID NO: 2863171 - DNA, 25 bp, Homo sapien
agaaaccatatcgatgctggcaatg

SEQ ID NO: 2863172 - DNA, 25 bp, Homo sapien
ttcagaaaccatatcgatgctggca

SEQ ID NO: 2863173 - DNA, 25 bp, Homo sapien
tatccaccgtctctttaaccagcga

SEQ ID NO: 2863174 - DNA, 25 bp, Homo sapien
cgacatattactagggtcattgaca

SEQ ID NO: 2863175 - DNA, 25 bp, Homo sapien
tccaaaatctggtctcagacgaatg

SEQ ID NO: 2863176 - DNA, 25 bp, Homo sapien
tagcctttcaggagtctatccaccg

SEQ ID NO: 2863177 - DNA, 25 bp, Homo sapien
cacagacagcggcgattattaaggg

SEQ ID NO: 2863178 - DNA, 25 bp, Homo sapien
cagacagcggcgattattaagggga

SEQ ID NO: 2863179 - DNA, 25 bp, Homo sapien
cgcacagacagcggcgattattaag

SEQ ID NO: 2863180 - DNA, 25 bp, Homo sapien
agtagccccttttccgcactctcca

SEQ ID NO: 2863181 - DNA, 25 bp, Homo sapien
gtttttgatggaattgagggtttca

SEQ ID NO: 2863182 - DNA, 25 bp, Homo sapien
ctgaagagaggagatccaacttagt

SEQ ID NO: 2863183 - DNA, 25 bp, Homo sapien
taatgtgaggcgcatgcgcacggcg

SEQ ID NO: 2863184 - DNA, 25 bp, Homo sapien
ctaatgtgaggcgcatgcgcacggc

SEQ ID NO: 2863185 - DNA, 25 bp, Homo sapien
tgtgaggcgcatgcgcacggcgtac

SEQ ID NO: 2863186 - DNA, 25 bp, Homo sapien
aatgtgaggcgcatgcgcacggcgt

SEQ ID NO: 2863187 - DNA, 25 bp, Homo sapien
aacatcaaaggggaagcggcggctg

SEQ ID NO: 2863188 - DNA, 25 bp, Homo sapien
acatcaaaggggaagcggcggctgc

SEQ ID NO: 2863189 - DNA, 25 bp, Homo sapien
aaacatcaaaggggaagcggcggct

SEQ ID NO: 2863190 - DNA, 25 bp, Homo sapien
cctctggatacaagaagccggagcg

SEQ ID NO: 2863191 - DNA, 25 bp, Homo sapien
tacctctggatacaagaagccggag

SEQ ID NO: 2863192 - DNA, 25 bp, Homo sapien
ctgtacctctggatacaagaagccg

SEQ ID NO: 2863193 - DNA, 25 bp, Homo sapien
tctggatacaagaagccggagcggt

SEQ ID NO: 2863194 - DNA, 25 bp, Homo sapien
ggcaaaatgaggaagagcccctcac

SEQ ID NO: 2863195 - DNA, 25 bp, Homo sapien
aggcaaaatgaggaagagcccctca

SEQ ID NO: 2863196 - DNA, 25 bp, Homo sapien
tccggaggcactgtgttctcccgcg

SEQ ID NO: 2863197 - DNA, 25 bp, Homo sapien
cggaggcactgtgttctcccgcggt

SEQ ID NO: 2863198 - DNA, 25 bp, Homo sapien
aggcactgtgttctcccgcggtctc

SEQ ID NO: 2863199 - DNA, 25 bp, Homo sapien
ggaggcactgtgttctcccgcggtc

SEQ ID NO: 2863200 - DNA, 25 bp, Homo sapien
ctcttcttcccttccccgcgcccag

SEQ ID NO: 2863201 - DNA, 25 bp, Homo sapien
ttccccgcgcccaggggactcgcac

SEQ ID NO: 2863202 - DNA, 25 bp, Homo sapien
cttccccgcgcccaggggactcgca

SEQ ID NO: 2863203 - DNA, 25 bp, Homo sapien
ccccgcgcccaggggactcgcacac

SEQ ID NO: 2863204 - DNA, 25 bp, Homo sapien
cctgaagctcaggccgcctcgccgt

SEQ ID NO: 2863205 - DNA, 25 bp, Homo sapien
cgccgggacccggaggaggcagcaa

SEQ ID NO: 2863206 - DNA, 25 bp, Homo sapien
agctcaggccgcctcgccgtggccg

SEQ ID NO: 2863207 - DNA, 25 bp, Homo sapien
ttcctcctgaagctcaggccgcctc

SEQ ID NO: 2863208 - DNA, 25 bp, Homo sapien
aaagagaggagccacgggcggcgtg

SEQ ID NO: 2863209 - DNA, 25 bp, Homo sapien
gggagatactcaattcacaaaagaa

SEQ ID NO: 2863210 - DNA, 25 bp, Homo sapien
cggcgtgaggtgctacgagtctggg

SEQ ID NO: 2863211 - DNA, 25 bp, Homo sapien
gggagggagatactcaattcacaaa

SEQ ID NO: 2863212 - DNA, 25 bp, Homo sapien
cagcggctctccgggtactcctgag

SEQ ID NO: 2863213 - DNA, 25 bp, Homo sapien
tccgggtactcctgagtttatcttg

SEQ ID NO: 2863214 - DNA, 25 bp, Homo sapien
ggctctccgggtactcctgagttta

SEQ ID NO: 2863215 - DNA, 25 bp, Homo sapien
gggtactcctgagtttatcttggaa

SEQ ID NO: 2863216 - DNA, 25 bp, Homo sapien
gtcatctgggggtagtttgtgggga

SEQ ID NO: 2863217 - DNA, 25 bp, Homo sapien
tctgggggtagtttgtggggatgac

SEQ ID NO: 2863218 - DNA, 25 bp, Homo sapien
tgtggggatgactccgggggaagtg

SEQ ID NO: 2863219 - DNA, 25 bp, Homo sapien
tgactccgggggaagtgtggaggcg

SEQ ID NO: 2863220 - DNA, 25 bp, Homo sapien
gagtacttacttgtgctagccactg

SEQ ID NO: 2863221 - DNA, 25 bp, Homo sapien
tgaggcaactaaggatgtacaaagt

SEQ ID NO: 2863222 - DNA, 25 bp, Homo sapien
cactgagtttgggattgccattgac

SEQ ID NO: 2863223 - DNA, 25 bp, Homo sapien
aggtagtaaccttaaacacagtgca

SEQ ID NO: 2863224 - DNA, 25 bp, Homo sapien
aataatacaggcattgaatatgcac

SEQ ID NO: 2863225 - DNA, 25 bp, Homo sapien
cataatttctatgttcccaactttg

SEQ ID NO: 2863226 - DNA, 25 bp, Homo sapien
tttaataaatatcaaccagtaataa

SEQ ID NO: 2863227 - DNA, 25 bp, Homo sapien
tagctgaacaaacgacataaacttt

SEQ ID NO: 2863228 - DNA, 25 bp, Homo sapien
tacattgaggatggaccagtaggtg

SEQ ID NO: 2863229 - DNA, 25 bp, Homo sapien
gtaaagaggtcatttggaaaggctg

SEQ ID NO: 2863230 - DNA, 25 bp, Homo sapien
tattcttttacggttctcaggtggc

SEQ ID NO: 2863231 - DNA, 25 bp, Homo sapien
ggctgtagcattcataagagggtat

SEQ ID NO: 2863232 - DNA, 25 bp, Homo sapien
tgtcccatgaggctggttaactttc

SEQ ID NO: 2863233 - DNA, 25 bp, Homo sapien
gatacacagttggtatagtgggctg

SEQ ID NO: 2863234 - DNA, 25 bp, Homo sapien
tcgtcactagagactgcaaaaggaa

SEQ ID NO: 2863235 - DNA, 25 bp, Homo sapien
cacagttggtatagtgggctgtaag

SEQ ID NO: 2863236 - DNA, 25 bp, Homo sapien
attaagtgtcgtcactagagactgc

SEQ ID NO: 2863237 - DNA, 25 bp, Homo sapien
acgtcagcatggggcctgctccgtg

SEQ ID NO: 2863238 - DNA, 25 bp, Homo sapien
agggacgtcagcatggggcctgctc

SEQ ID NO: 2863239 - DNA, 25 bp, Homo sapien
gagggacgtcagcatggggcctgct

SEQ ID NO: 2863240 - DNA, 25 bp, Homo sapien
ggacgtcagcatggggcctgctccg

SEQ ID NO: 2863241 - DNA, 25 bp, Homo sapien
gcgtcagcagttccccaatctgttg

SEQ ID NO: 2863242 - DNA, 25 bp, Homo sapien
gcagttccccaatctgttgcataga

SEQ ID NO: 2863243 - DNA, 25 bp, Homo sapien
ttccccaatctgttgcatagagact

SEQ ID NO: 2863244 - DNA, 25 bp, Homo sapien
agttccccaatctgttgcatagaga

SEQ ID NO: 2863245 - DNA, 25 bp, Homo sapien
tccagaagcctttgtttggtggaca

SEQ ID NO: 2863246 - DNA, 25 bp, Homo sapien
gaggcaccattctcgctcctgtgag

SEQ ID NO: 2863247 - DNA, 25 bp, Homo sapien
tttgtttggtggacaattgactgag

SEQ ID NO: 2863248 - DNA, 25 bp, Homo sapien
gaggctgtgatatcgacaaattcca

SEQ ID NO: 2863249 - DNA, 25 bp, Homo sapien
gattttgcagttcacgaactcttga

SEQ ID NO: 2863250 - DNA, 25 bp, Homo sapien
tgcagttcacgaactcttgagccat

SEQ ID NO: 2863251 - DNA, 25 bp, Homo sapien
tgcagtatggacaggtgggcttgat

SEQ ID NO: 2863252 - DNA, 25 bp, Homo sapien
ccaggctggattttgcagttcacga

SEQ ID NO: 2863253 - DNA, 25 bp, Homo sapien
ggtaggtgctggtccctgaactctg

SEQ ID NO: 2863254 - DNA, 25 bp, Homo sapien
gcagaggatgaatcaaccagtcgag

SEQ ID NO: 2863255 - DNA, 25 bp, Homo sapien
tcagcaaggatcagccccactgttg

SEQ ID NO: 2863256 - DNA, 25 bp, Homo sapien
gatgaatcaaccagtcgaggttcca

SEQ ID NO: 2863257 - DNA, 25 bp, Homo sapien
aagcaagtcatgacacactctctgg

SEQ ID NO: 2863258 - DNA, 25 bp, Homo sapien
tgacacactctctggcgttgatgct

SEQ ID NO: 2863259 - DNA, 25 bp, Homo sapien
tctggcgttgatgctcatagaggaa

SEQ ID NO: 2863260 - DNA, 25 bp, Homo sapien
catagaggaatggttgggctgacac

SEQ ID NO: 2863261 - DNA, 25 bp, Homo sapien
tctgggctagagtttaccagtctca

SEQ ID NO: 2863262 - DNA, 25 bp, Homo sapien
tgggctagagtttaccagtctcatt

SEQ ID NO: 2863263 - DNA, 25 bp, Homo sapien
aagtctgggctagagtttaccagtc

SEQ ID NO: 2863264 - DNA, 25 bp, Homo sapien
gtctgggctagagtttaccagtctc

SEQ ID NO: 2863265 - DNA, 25 bp, Homo sapien
ttctctacagaatcttcacactgca

SEQ ID NO: 2863266 - DNA, 25 bp, Homo sapien
tctctacagaatcttcacactgcat

SEQ ID NO: 2863267 - DNA, 25 bp, Homo sapien
cttctctacagaatcttcacactgc

SEQ ID NO: 2863268 - DNA, 25 bp, Homo sapien
tctgttcgctctgaacataaatgca

SEQ ID NO: 2863269 - DNA, 25 bp, Homo sapien
tggatgataaggtgcaaatgaattg

SEQ ID NO: 2863270 - DNA, 25 bp, Homo sapien
ttaggtaaatcggtagtcatcaatt

SEQ ID NO: 2863271 - DNA, 25 bp, Homo sapien
taaatcggtagtcatcaattggatg

SEQ ID NO: 2863272 - DNA, 25 bp, Homo sapien
tttggcaagtgggaaccatattgga

SEQ ID NO: 2863273 - DNA, 25 bp, Homo sapien
aatgacaagaccaagcttcttgaag

SEQ ID NO: 2863274 - DNA, 25 bp, Homo sapien
cagaagctttacatgaatctcttcg

SEQ ID NO: 2863275 - DNA, 25 bp, Homo sapien
tgggaaccatattggacacttgagc

SEQ ID NO: 2863276 - DNA, 25 bp, Homo sapien
tttacataaaagtagccttcgagga

SEQ ID NO: 2863277 - DNA, 25 bp, Homo sapien
ttcgaggataaactaattcagtgcc

SEQ ID NO: 2863278 - DNA, 25 bp, Homo sapien
gcctcccctgcgaattgagctatta

SEQ ID NO: 2863279 - DNA, 25 bp, Homo sapien
gactatgtctcctcgtgattttctg

SEQ ID NO: 2863280 - DNA, 25 bp, Homo sapien
tgaactatcaatctggatgccagaa

SEQ ID NO: 2863281 - DNA, 25 bp, Homo sapien
taatcagctgctgaactatcaatct

SEQ ID NO: 2863282 - DNA, 25 bp, Homo sapien
agctgctgaactatcaatctggatg

SEQ ID NO: 2863283 - DNA, 25 bp, Homo sapien
gctgaactatcaatctggatgccag

SEQ ID NO: 2863284 - DNA, 25 bp, Homo sapien
caggattgctgtgactggggaaacc

SEQ ID NO: 2863285 - DNA, 25 bp, Homo sapien
ggtgagaggggagtacaggattgct

SEQ ID NO: 2863286 - DNA, 25 bp, Homo sapien
tacaggattgctgtgactggggaaa

SEQ ID NO: 2863287 - DNA, 25 bp, Homo sapien
attgctgtgactggggaaacctgag

SEQ ID NO: 2863288 - DNA, 25 bp, Homo sapien
ctaaagaggatagggtagaaagtgt

SEQ ID NO: 2863289 - DNA, 25 bp, Homo sapien
cttcattttatttaagagtcgttct

SEQ ID NO: 2863290 - DNA, 25 bp, Homo sapien
agccttcattttatttaagagtcgt

SEQ ID NO: 2863291 - DNA, 25 bp, Homo sapien
cagccttcattttatttaagagtcg

SEQ ID NO: 2863292 - DNA, 25 bp, Homo sapien
gtttgcaagatgtgttcatcagttt

SEQ ID NO: 2863293 - DNA, 25 bp, Homo sapien
atcagtttcttggtaccatattggc

SEQ ID NO: 2863294 - DNA, 25 bp, Homo sapien
gtttcttggtaccatattggcatat

SEQ ID NO: 2863295 - DNA, 25 bp, Homo sapien
ttggtaccatattggcatatgccca

SEQ ID NO: 2863296 - DNA, 25 bp, Homo sapien
tgtgccagcacaaagggctaaattc

SEQ ID NO: 2863297 - DNA, 25 bp, Homo sapien
ttatgtcccagccatactgcttttc

SEQ ID NO: 2863298 - DNA, 25 bp, Homo sapien
aatttccagtatgattttgtgccag

SEQ ID NO: 2863299 - DNA, 25 bp, Homo sapien
tcatccattatgtcccagccatact

SEQ ID NO: 2863300 - DNA, 25 bp, Homo sapien
gaaactgaatccacatactgggagg

SEQ ID NO: 2863301 - DNA, 25 bp, Homo sapien
ggcaaatgcgcaaacaatagacact

SEQ ID NO: 2863302 - DNA, 25 bp, Homo sapien
gcatcacaattatctccaggtaagg

SEQ ID NO: 2863303 - DNA, 25 bp, Homo sapien
actgggaggccagttgtcctcatca

SEQ ID NO: 2863304 - DNA, 25 bp, Homo sapien
gactaggaggtcagatcagttttcc

SEQ ID NO: 2863305 - DNA, 25 bp, Homo sapien
tcccaaggacctgacattcgttcag

SEQ ID NO: 2863306 - DNA, 25 bp, Homo sapien
tgacttagtcgaatggtgcaccagg

SEQ ID NO: 2863307 - DNA, 25 bp, Homo sapien
caagcagaaggaaacgtaggtacaa

SEQ ID NO: 2863308 - DNA, 25 bp, Homo sapien
gagggtcctgaaacttatatattac

SEQ ID NO: 2863309 - DNA, 25 bp, Homo sapien
tccaattacaacacctaaatagatt

SEQ ID NO: 2863310 - DNA, 25 bp, Homo sapien
cacgccttgtgtatacatggagtta

SEQ ID NO: 2863311 - DNA, 25 bp, Homo sapien
actggtgagcatcaagcactagaga

SEQ ID NO: 2863312 - DNA, 25 bp, Homo sapien
ggatgcttccatttgtgacagtata

SEQ ID NO: 2863313 - DNA, 25 bp, Homo sapien
aattgtggtgcaaaggaatattatt

SEQ ID NO: 2863314 - DNA, 25 bp, Homo sapien
aatacatagaagtggagatagtaga

SEQ ID NO: 2863315 - DNA, 25 bp, Homo sapien
taggtcaagaggtacaaatcgtaat

SEQ ID NO: 2863316 - DNA, 25 bp, Homo sapien
tgaactgacagcaatgtgctggcca

SEQ ID NO: 2863317 - DNA, 25 bp, Homo sapien
catcatcatactgactgacagcctg

SEQ ID NO: 2863318 - DNA, 25 bp, Homo sapien
gacagcctgctgtattgaccactca

SEQ ID NO: 2863319 - DNA, 25 bp, Homo sapien
tagaattgtctgactttaagacaga

SEQ ID NO: 2863320 - DNA, 25 bp, Homo sapien
caagacctgaatctgtatctgcaac

SEQ ID NO: 2863321 - DNA, 25 bp, Homo sapien
tattgattcattcaagacctgaatc

SEQ ID NO: 2863322 - DNA, 25 bp, Homo sapien
ttgcgttctgtagctattgattcat

SEQ ID NO: 2863323 - DNA, 25 bp, Homo sapien
ttctgaagactttgcgttctgtagc

SEQ ID NO: 2863324 - DNA, 25 bp, Homo sapien
cagaaatacagatgacatgtaagtc

SEQ ID NO: 2863325 - DNA, 25 bp, Homo sapien
caaggcttacactcacaggactcat

SEQ ID NO: 2863326 - DNA, 25 bp, Homo sapien
gacatgtaagtcataatcctttcgt

SEQ ID NO: 2863327 - DNA, 25 bp, Homo sapien
taatcctttcgtccaaggcttacac

SEQ ID NO: 2863328 - DNA, 25 bp, Homo sapien
aaaggggcaacactttcctatatgt

SEQ ID NO: 2863329 - DNA, 25 bp, Homo sapien
aaaaggggcaacactttcctatatg

SEQ ID NO: 2863330 - DNA, 25 bp, Homo sapien
tctaaatgcaggcacacgaagcaag

SEQ ID NO: 2863331 - DNA, 25 bp, Homo sapien
gaatctccctaatctcctaccagtg

SEQ ID NO: 2863332 - DNA, 25 bp, Homo sapien
gaccaaacacaaaggaaggccctca

SEQ ID NO: 2863333 - DNA, 25 bp, Homo sapien
ggccctcataggagtaagcctctaa

SEQ ID NO: 2863334 - DNA, 25 bp, Homo sapien
ataaccccaaagagatggacccagg

SEQ ID NO: 2863335 - DNA, 25 bp, Homo sapien
tcttctgcaaccaagaggcaagagg

SEQ ID NO: 2863336 - DNA, 25 bp, Homo sapien
cagtgaaggacctactagaggcagg

SEQ ID NO: 2863337 - DNA, 25 bp, Homo sapien
gccgctgccagagtgacgctttgat

SEQ ID NO: 2863338 - DNA, 25 bp, Homo sapien
ctagtagacttggcacactgtggtg

SEQ ID NO: 2863339 - DNA, 25 bp, Homo sapien
cacactgtggtgcttgtgttttagc

SEQ ID NO: 2863340 - DNA, 25 bp, Homo sapien
tagtagacttggcacactgtggtgc

SEQ ID NO: 2863341 - DNA, 25 bp, Homo sapien
atgatgtcttactgaggacatttga

SEQ ID NO: 2863342 - DNA, 25 bp, Homo sapien
tatgatgtcttactgaggacatttg

SEQ ID NO: 2863343 - DNA, 25 bp, Homo sapien
cttactgaggacatttgatgtaata

SEQ ID NO: 2863344 - DNA, 25 bp, Homo sapien
gtcttactgaggacatttgatgtaa

SEQ ID NO: 2863345 - DNA, 25 bp, Homo sapien
caggaatacaaaaagcgacgtggcc

SEQ ID NO: 2863346 - DNA, 25 bp, Homo sapien
gggaaatccactgatgccgcacttt

SEQ ID NO: 2863347 - DNA, 25 bp, Homo sapien
gtagaaaagctgtagacttgctggc

SEQ ID NO: 2863348 - DNA, 25 bp, Homo sapien
cgacgtggccttggagatatgacag

SEQ ID NO: 2863349 - DNA, 25 bp, Homo sapien
attttcacttgtcgagggtcaagta

SEQ ID NO: 2863350 - DNA, 25 bp, Homo sapien
catttgcatcgcacgtgaagaagct

SEQ ID NO: 2863351 - DNA, 25 bp, Homo sapien
tcaggccaggtgtaccatttgcatc

SEQ ID NO: 2863352 - DNA, 25 bp, Homo sapien
gagtgagtataagagcagaagtttc

SEQ ID NO: 2863353 - DNA, 25 bp, Homo sapien
aagaagctgtccatttcaccccaat

SEQ ID NO: 2863354 - DNA, 25 bp, Homo sapien
gctgccaagtgatgacagtcgtgat

SEQ ID NO: 2863355 - DNA, 25 bp, Homo sapien
gagcggtgtcaagttaaatctgtca

SEQ ID NO: 2863356 - DNA, 25 bp, Homo sapien
cgtgatagcccacagctctgagcag

SEQ ID NO: 2863357 - DNA, 25 bp, Homo sapien
ccaggacagcaagctaagctgccaa

SEQ ID NO: 2863358 - DNA, 25 bp, Homo sapien
gatgctgcattgacgtcagcccctc

SEQ ID NO: 2863359 - DNA, 25 bp, Homo sapien
tgtttttccatgcagacccttctca

SEQ ID NO: 2863360 - DNA, 25 bp, Homo sapien
cccttctcataaatgcagtcatttg

SEQ ID NO: 2863361 - DNA, 25 bp, Homo sapien
caggccactctgtgaagctatttca

SEQ ID NO: 2863362 - DNA, 25 bp, Homo sapien
atgaacagtgcaccccacgaatcca

SEQ ID NO: 2863363 - DNA, 25 bp, Homo sapien
gtgtgcgcatattcatctgcccatg

SEQ ID NO: 2863364 - DNA, 25 bp, Homo sapien
gggccagtcttcagtgtgcgcatat

SEQ ID NO: 2863365 - DNA, 25 bp, Homo sapien
cccacgaatccacactgacatgtca

SEQ ID NO: 2863366 - DNA, 25 bp, Homo sapien
ttagactttctccttgaccacttgc

SEQ ID NO: 2863367 - DNA, 25 bp, Homo sapien
gactttctccttgaccacttgccat

SEQ ID NO: 2863368 - DNA, 25 bp, Homo sapien
ggctacagtactgacttagactttc

SEQ ID NO: 2863369 - DNA, 25 bp, Homo sapien
gctacagtactgacttagactttct

SEQ ID NO: 2863370 - DNA, 25 bp, Homo sapien
taacaattgccagctaagccttgta

SEQ ID NO: 2863371 - DNA, 25 bp, Homo sapien
cttaacaattgccagctaagccttg

SEQ ID NO: 2863372 - DNA, 25 bp, Homo sapien
ttcttaacaattgccagctaagcct

SEQ ID NO: 2863373 - DNA, 25 bp, Homo sapien
cttcttaacaattgccagctaagcc

SEQ ID NO: 2863374 - DNA, 25 bp, Homo sapien
caagaatggtgaacttactgctgcc

SEQ ID NO: 2863375 - DNA, 25 bp, Homo sapien
actccatgctagtgttgacaaccca

SEQ ID NO: 2863376 - DNA, 25 bp, Homo sapien
gcaatgccaaaacctcattacggga

SEQ ID NO: 2863377 - DNA, 25 bp, Homo sapien
aaaagttaatctgttgagcaatgcc

SEQ ID NO: 2863378 - DNA, 25 bp, Homo sapien
ttccaacacttcagactgaatgatt

SEQ ID NO: 2863379 - DNA, 25 bp, Homo sapien
tttccaacacttcagactgaatgat

SEQ ID NO: 2863380 - DNA, 25 bp, Homo sapien
tataagcttggacttcatgcgtggc

SEQ ID NO: 2863381 - DNA, 25 bp, Homo sapien
acgaagtccttctggaccactctgc

SEQ ID NO: 2863382 - DNA, 25 bp, Homo sapien
gattttgtcatgacctgtcacgaag

SEQ ID NO: 2863383 - DNA, 25 bp, Homo sapien
attgctttttccagtgaggtgcccc

SEQ ID NO: 2863384 - DNA, 25 bp, Homo sapien
tttctctttggcttgcaattatgcc

SEQ ID NO: 2863385 - DNA, 25 bp, Homo sapien
cactgctctagacgtgaagactggc

SEQ ID NO: 2863386 - DNA, 25 bp, Homo sapien
taaagccaggtattaggcagaggct

SEQ ID NO: 2863387 - DNA, 25 bp, Homo sapien
tttctgactgcactatttttggata

SEQ ID NO: 2863388 - DNA, 25 bp, Homo sapien
cttctgggagtatgtgaccttcggt

SEQ ID NO: 2863389 - DNA, 25 bp, Homo sapien
cagtctggttggatagggcctgggc

SEQ ID NO: 2863390 - DNA, 25 bp, Homo sapien
tctgggagtatgtgaccttcggtgt

SEQ ID NO: 2863391 - DNA, 25 bp, Homo sapien
tctggttggatagggcctgggctct

SEQ ID NO: 2863392 - DNA, 25 bp, Homo sapien
aacacacactgtaccgtcagaagca

SEQ ID NO: 2863393 - DNA, 25 bp, Homo sapien
cactgtaccgtcagaagcaaccagt

SEQ ID NO: 2863394 - DNA, 25 bp, Homo sapien
gaagcaaccagtatagtactgcttg

SEQ ID NO: 2863395 - DNA, 25 bp, Homo sapien
tgcaccagcaacacacactgtaccg

SEQ ID NO: 2863396 - DNA, 25 bp, Homo sapien
actgagatttgaagactcgttgaca

SEQ ID NO: 2863397 - DNA, 25 bp, Homo sapien
agactcgttgacaaagtagggcaga

SEQ ID NO: 2863398 - DNA, 25 bp, Homo sapien
tcaggggactgagatttgaagactc

SEQ ID NO: 2863399 - DNA, 25 bp, Homo sapien
tttgaagactcgttgacaaagtagg

SEQ ID NO: 2863400 - DNA, 25 bp, Homo sapien
ccacagcatcattgtgtttcaactt

SEQ ID NO: 2863401 - DNA, 25 bp, Homo sapien
caactttaccgaatcagcagtgaac

SEQ ID NO: 2863402 - DNA, 25 bp, Homo sapien
aataatcattcatgtcaaccatcac

SEQ ID NO: 2863403 - DNA, 25 bp, Homo sapien
ccatactgacaatcataataatcat

SEQ ID NO: 2863404 - DNA, 25 bp, Homo sapien
ggttgctcagatgtgattcagaaat

SEQ ID NO: 2863405 - DNA, 25 bp, Homo sapien
tgagctcccaaacagagctagctgt

SEQ ID NO: 2863406 - DNA, 25 bp, Homo sapien
aaagaacatgagtgggaatgttccc

SEQ ID NO: 2863407 - DNA, 25 bp, Homo sapien
ccctagaaagttgttggttgctcag

SEQ ID NO: 2863408 - DNA, 25 bp, Homo sapien
ttaagttgacatatatgattggttc

SEQ ID NO: 2863409 - DNA, 25 bp, Homo sapien
cctaaccccatttgcaattaagttg

SEQ ID NO: 2863410 - DNA, 25 bp, Homo sapien
taaccccatttgcaattaagttgac

SEQ ID NO: 2863411 - DNA, 25 bp, Homo sapien
ccccatttgcaattaagttgacata

SEQ ID NO: 2863412 - DNA, 25 bp, Homo sapien
gatccccgcgttctcgctatgttct

SEQ ID NO: 2863413 - DNA, 25 bp, Homo sapien
atactggttgatccccgcgttctcg

SEQ ID NO: 2863414 - DNA, 25 bp, Homo sapien
gacaatactggttgatccccgcgtt

SEQ ID NO: 2863415 - DNA, 25 bp, Homo sapien
aagatggtcctgacaatactggttg

SEQ ID NO: 2863416 - DNA, 25 bp, Homo sapien
ctacagcagactaccttctacagtg

SEQ ID NO: 2863417 - DNA, 25 bp, Homo sapien
tctacagtgagataaccgaaaactg

SEQ ID NO: 2863418 - DNA, 25 bp, Homo sapien
gcagactaccttctacagtgagata

SEQ ID NO: 2863419 - DNA, 25 bp, Homo sapien
tgagataaccgaaaactgttagtaa

SEQ ID NO: 2863420 - DNA, 25 bp, Homo sapien
tattgtacaggaagactttcaacac

SEQ ID NO: 2863421 - DNA, 25 bp, Homo sapien
ctttcaacaccataactggtttttg

SEQ ID NO: 2863422 - DNA, 25 bp, Homo sapien
tagttttggggcatatgcatttgca

SEQ ID NO: 2863423 - DNA, 25 bp, Homo sapien
aactggtttttggagcatatgcatc

SEQ ID NO: 2863424 - DNA, 25 bp, Homo sapien
ggctgtgcatcagagtggaatgagg

SEQ ID NO: 2863425 - DNA, 25 bp, Homo sapien
ctgtgcatcagagtggaatgaggcc

SEQ ID NO: 2863426 - DNA, 25 bp, Homo sapien
gtgcatcagagtggaatgaggccat

SEQ ID NO: 2863427 - DNA, 25 bp, Homo sapien
aaggctgtgcatcagagtggaatga

SEQ ID NO: 2863428 - DNA, 25 bp, Homo sapien
tgaggctgccacgaggaagtcatga

SEQ ID NO: 2863429 - DNA, 25 bp, Homo sapien
gattccaggaacaccaccatagacc

SEQ ID NO: 2863430 - DNA, 25 bp, Homo sapien
tggctgtaccaaatgcacgtgctgt

SEQ ID NO: 2863431 - DNA, 25 bp, Homo sapien
tgtgatctcagaatcatgaggctgc

SEQ ID NO: 2863432 - DNA, 25 bp, Homo sapien
cacaaagctaaggactccacacaag

SEQ ID NO: 2863433 - DNA, 25 bp, Homo sapien
aagctaaggactccacacaagaaat

SEQ ID NO: 2863434 - DNA, 25 bp, Homo sapien
gtcacaaagctaaggactccacaca

SEQ ID NO: 2863435 - DNA, 25 bp, Homo sapien
caaagctaaggactccacacaagaa

SEQ ID NO: 2863436 - DNA, 25 bp, Homo sapien
tggcttttgtggttttattggagaa

SEQ ID NO: 2863437 - DNA, 25 bp, Homo sapien
aaccatggcttttgtggttttattg

SEQ ID NO: 2863438 - DNA, 25 bp, Homo sapien
catggcttttgtggttttattggag

SEQ ID NO: 2863439 - DNA, 25 bp, Homo sapien
tggttttattggagaaagaaactgc

SEQ ID NO: 2863440 - DNA, 25 bp, Homo sapien
tccattatggaagttagcaactctc

SEQ ID NO: 2863441 - DNA, 25 bp, Homo sapien
aactctctagccagtatttacagaa

SEQ ID NO: 2863442 - DNA, 25 bp, Homo sapien
gaaaaagggctttgattctattgat

SEQ ID NO: 2863443 - DNA, 25 bp, Homo sapien
tattgatcagaagactgtgtaaaga

SEQ ID NO: 2863444 - DNA, 25 bp, Homo sapien
cttccaccatgggataaagcagcaa

SEQ ID NO: 2863445 - DNA, 25 bp, Homo sapien
ttccaccatgggataaagcagcaag

SEQ ID NO: 2863446 - DNA, 25 bp, Homo sapien
gatcatcagttatcctcatacaaca

SEQ ID NO: 2863447 - DNA, 25 bp, Homo sapien
tacaacagatagctgaaccattcat

SEQ ID NO: 2863448 - DNA, 25 bp, Homo sapien
ttgttttgatcatcagttatcctca

SEQ ID NO: 2863449 - DNA, 25 bp, Homo sapien
gttatcctcatacaacagatagctg

SEQ ID NO: 2863450 - DNA, 25 bp, Homo sapien
catagtgatcagtgtataataaata

SEQ ID NO: 2863451 - DNA, 25 bp, Homo sapien
tcatagtgatcagtgtataataaat

SEQ ID NO: 2863452 - DNA, 25 bp, Homo sapien
tcttcatagtgatcagtgtataata

SEQ ID NO: 2863453 - DNA, 25 bp, Homo sapien
atgtcttcatagtgatcagtgtata

SEQ ID NO: 2863454 - DNA, 25 bp, Homo sapien
cccaagagtagacagcttgcttaat

SEQ ID NO: 2863455 - DNA, 25 bp, Homo sapien
gagtgactgagttataacgaccaga

SEQ ID NO: 2863456 - DNA, 25 bp, Homo sapien
ttcaaagcgtccaccaaagcaatat

SEQ ID NO: 2863457 - DNA, 25 bp, Homo sapien
ggactcttcacagtatgcacaggca

SEQ ID NO: 2863458 - DNA, 25 bp, Homo sapien
tgtaggaagtcaggcgatgaataca

SEQ ID NO: 2863459 - DNA, 25 bp, Homo sapien
agctgtaggaagtcaggcgatgaat

SEQ ID NO: 2863460 - DNA, 25 bp, Homo sapien
ctgaagagctgtaggaagtcaggcg

SEQ ID NO: 2863461 - DNA, 25 bp, Homo sapien
ggaagtcaggcgatgaatacaaaac

SEQ ID NO: 2863462 - DNA, 25 bp, Homo sapien
ggcaaacagcaattgagtctgagta

SEQ ID NO: 2863463 - DNA, 25 bp, Homo sapien
gaggcaaacagcaattgagtctgag

SEQ ID NO: 2863464 - DNA, 25 bp, Homo sapien
ctgaggcaaacagcaattgagtctg

SEQ ID NO: 2863465 - DNA, 25 bp, Homo sapien
gcaaacagcaattgagtctgagtat

SEQ ID NO: 2863466 - DNA, 25 bp, Homo sapien
taatctatgcaactgggcttttcct

SEQ ID NO: 2863467 - DNA, 25 bp, Homo sapien
gaatcctggccctcataatctatgc

SEQ ID NO: 2863468 - DNA, 25 bp, Homo sapien
gaaattgccaagctcagtactccag

SEQ ID NO: 2863469 - DNA, 25 bp, Homo sapien
cactgcctgtcgtatctcctcagaa

SEQ ID NO: 2863470 - DNA, 25 bp, Homo sapien
tcggcagtgtgacaatataacagtg

SEQ ID NO: 2863471 - DNA, 25 bp, Homo sapien
tagtgacttgattctaaagttcggc

SEQ ID NO: 2863472 - DNA, 25 bp, Homo sapien
tagttgacacattcctcgtgaggca

SEQ ID NO: 2863473 - DNA, 25 bp, Homo sapien
gattccaggatgattcagctgctct

SEQ ID NO: 2863474 - DNA, 25 bp, Homo sapien
ctcagaagcttgtgagtttccttga

SEQ ID NO: 2863475 - DNA, 25 bp, Homo sapien
ctacaaagttccactctggaaagtc

SEQ ID NO: 2863476 - DNA, 25 bp, Homo sapien
aagtctctattctcagaagcttgtg

SEQ ID NO: 2863477 - DNA, 25 bp, Homo sapien
gatggctttagcagcacttgaactg

SEQ ID NO: 2863478 - DNA, 25 bp, Homo sapien
cgatcacttcacagatggctttagc

SEQ ID NO: 2863479 - DNA, 25 bp, Homo sapien
cttgaactgacattgcagttgattg

SEQ ID NO: 2863480 - DNA, 25 bp, Homo sapien
gaactgacattgcagttgattgcca

SEQ ID NO: 2863481 - DNA, 25 bp, Homo sapien
gtagaaattctaaattgtcctccat

SEQ ID NO: 2863482 - DNA, 25 bp, Homo sapien
tgtagaaattctaaattgtcctcca

SEQ ID NO: 2863483 - DNA, 25 bp, Homo sapien
tagaaattctaaattgtcctccatt

SEQ ID NO: 2863484 - DNA, 25 bp, Homo sapien
ttgatctgtaaatcacggtaatatt

SEQ ID NO: 2863485 - DNA, 25 bp, Homo sapien
ccacgtaggccagaaatttttccat

SEQ ID NO: 2863486 - DNA, 25 bp, Homo sapien
ttatccttggcaatgggaagggaag

SEQ ID NO: 2863487 - DNA, 25 bp, Homo sapien
ggcaggaacaactgtacttgtgctg

SEQ ID NO: 2863488 - DNA, 25 bp, Homo sapien
acttgtgctgttttttatccttggc

SEQ ID NO: 2863489 - DNA, 25 bp, Homo sapien
ttgtgcaataataatttgcctttct

SEQ ID NO: 2863490 - DNA, 25 bp, Homo sapien
caatgagcaggctgccgggaggcat

SEQ ID NO: 2863491 - DNA, 25 bp, Homo sapien
gatggccctagctttctgcaccagg

SEQ ID NO: 2863492 - DNA, 25 bp, Homo sapien
tacagttgtaatgtcctggcaggaa

SEQ ID NO: 2863493 - DNA, 25 bp, Homo sapien
gagattgtgccctgagttacctgaa

SEQ ID NO: 2863494 - DNA, 25 bp, Homo sapien
tcaaaaccaccgatggaagccagag

SEQ ID NO: 2863495 - DNA, 25 bp, Homo sapien
cttctcctcaaggtataaagagtgt

SEQ ID NO: 2863496 - DNA, 25 bp, Homo sapien
ttctcctcaaggtataaagagtgtt

SEQ ID NO: 2863497 - DNA, 25 bp, Homo sapien
tctcctcaaggtataaagagtgttt

SEQ ID NO: 2863498 - DNA, 25 bp, Homo sapien
tcagtccatagtgtaaaacttcctt

SEQ ID NO: 2863499 - DNA, 25 bp, Homo sapien
ctcttttagatccatgtaccaaaat

SEQ ID NO: 2863500 - DNA, 25 bp, Homo sapien
ttctcttttagatccatgtaccaaa

SEQ ID NO: 2863501 - DNA, 25 bp, Homo sapien
cagtccatagtgtaaaacttccttt

SEQ ID NO: 2863502 - DNA, 25 bp, Homo sapien
tagtatgaagtgccagagcccacca

SEQ ID NO: 2863503 - DNA, 25 bp, Homo sapien
ctgaagaagggtagtatgaagtgcc

SEQ ID NO: 2863504 - DNA, 25 bp, Homo sapien
gcccaccaggatgagaagggcatcc

SEQ ID NO: 2863505 - DNA, 25 bp, Homo sapien
agcccaccaggatgagaagggcatc

SEQ ID NO: 2863506 - DNA, 25 bp, Homo sapien
gagagggaggatcagtgtagccaga

SEQ ID NO: 2863507 - DNA, 25 bp, Homo sapien
cattgatgcttacatacaccaggca

SEQ ID NO: 2863508 - DNA, 25 bp, Homo sapien
acaccaggcaaggacagacggtcat

SEQ ID NO: 2863509 - DNA, 25 bp, Homo sapien
ttacatacaccaggcaaggacagac

SEQ ID NO: 2863510 - DNA, 25 bp, Homo sapien
gatgcttacatacaccaggcaagga

SEQ ID NO: 2863511 - DNA, 25 bp, Homo sapien
ggttgtcatcacttaaatttacaca

SEQ ID NO: 2863512 - DNA, 25 bp, Homo sapien
gttgtcatcacttaaatttacacaa

SEQ ID NO: 2863513 - DNA, 25 bp, Homo sapien
aggttgtcatcacttaaatttacac

SEQ ID NO: 2863514 - DNA, 25 bp, Homo sapien
ttagaggtgaacttgatcacagata

SEQ ID NO: 2863515 - DNA, 25 bp, Homo sapien
ctttgagatcatcaggctaggcagt

SEQ ID NO: 2863516 - DNA, 25 bp, Homo sapien
caccttggatgtaatcagagggcat

SEQ ID NO: 2863517 - DNA, 25 bp, Homo sapien
gatcatcaggctaggcagtttccac

SEQ ID NO: 2863518 - DNA, 25 bp, Homo sapien
tggttcatggcaccttggatgtaat

SEQ ID NO: 2863519 - DNA, 25 bp, Homo sapien
ttggctcactggaacaatggtctgt

SEQ ID NO: 2863520 - DNA, 25 bp, Homo sapien
ctaattcttgggcactctttgatgt

SEQ ID NO: 2863521 - DNA, 25 bp, Homo sapien
ggtctgtgcggggatacctaaagtc

SEQ ID NO: 2863522 - DNA, 25 bp, Homo sapien
attcttgggcactctttgatgtcac

SEQ ID NO: 2863523 - DNA, 25 bp, Homo sapien
caaagtggtcaatatccctaaatgt

SEQ ID NO: 2863524 - DNA, 25 bp, Homo sapien
taaatgtcaaggttggcacactgtt

SEQ ID NO: 2863525 - DNA, 25 bp, Homo sapien
caaggttggcacactgttagtttcc

SEQ ID NO: 2863526 - DNA, 25 bp, Homo sapien
gcagaagcaaagtggtcaatatccc

SEQ ID NO: 2863527 - DNA, 25 bp, Homo sapien
tttgtttgtagcagccaaaaaccag

SEQ ID NO: 2863528 - DNA, 25 bp, Homo sapien
tatcaagtgttggtaagggtttgga

SEQ ID NO: 2863529 - DNA, 25 bp, Homo sapien
tatacacccgacatataatctcgac

SEQ ID NO: 2863530 - DNA, 25 bp, Homo sapien
tgcagacatattagattcgctgaaa

SEQ ID NO: 2863531 - DNA, 25 bp, Homo sapien
caagatgagtaatttggtgtcctca

SEQ ID NO: 2863532 - DNA, 25 bp, Homo sapien
tctcggctacgtattcatgaactgt

SEQ ID NO: 2863533 - DNA, 25 bp, Homo sapien
caaatggaggtatgtcacagatgac

SEQ ID NO: 2863534 - DNA, 25 bp, Homo sapien
taggttgtccacatgaaccggacac

SEQ ID NO: 2863535 - DNA, 25 bp, Homo sapien
gattgtaggtatgtactgaatgtga

SEQ ID NO: 2863536 - DNA, 25 bp, Homo sapien
cattgattgtaggtatgtactgaat

SEQ ID NO: 2863537 - DNA, 25 bp, Homo sapien
tttgcattgattgtaggtatgtact

SEQ ID NO: 2863538 - DNA, 25 bp, Homo sapien
tgtaggtatgtactgaatgtgatag

SEQ ID NO: 2863539 - DNA, 25 bp, Homo sapien
cactggttgcaatgcctgcagaaac

SEQ ID NO: 2863540 - DNA, 25 bp, Homo sapien
gacactggttgcaatgcctgcagaa

SEQ ID NO: 2863541 - DNA, 25 bp, Homo sapien
tctgatgacactggttgcaatgcct

SEQ ID NO: 2863542 - DNA, 25 bp, Homo sapien
gatgacactggttgcaatgcctgca

SEQ ID NO: 2863543 - DNA, 25 bp, Homo sapien
acggaataatgggaccttcaaagag

SEQ ID NO: 2863544 - DNA, 25 bp, Homo sapien
tacggaataatgggaccttcaaaga

SEQ ID NO: 2863545 - DNA, 25 bp, Homo sapien
cggaataatgggaccttcaaagagg

SEQ ID NO: 2863546 - DNA, 25 bp, Homo sapien
aactgtaatttcatctgacacgaaa

SEQ ID NO: 2863547 - DNA, 25 bp, Homo sapien
gaatttgtgctatttcctcatactt

SEQ ID NO: 2863548 - DNA, 25 bp, Homo sapien
gaataagccaagtatttcaactgta

SEQ ID NO: 2863549 - DNA, 25 bp, Homo sapien
catctgacacgaaacttgaatgaat

SEQ ID NO: 2863550 - DNA, 25 bp, Homo sapien
tttcccttaaagatgatgattatca

SEQ ID NO: 2863551 - DNA, 25 bp, Homo sapien
ttttcccttaaagatgatgattatc

SEQ ID NO: 2863552 - DNA, 25 bp, Homo sapien
ttcccttaaagatgatgattatcaa

SEQ ID NO: 2863553 - DNA, 25 bp, Homo sapien
cattttgggagccatccaataaatc

SEQ ID NO: 2863554 - DNA, 25 bp, Homo sapien
tgggagccatccaataaatcattta

SEQ ID NO: 2863555 - DNA, 25 bp, Homo sapien
ttgggagccatccaataaatcattt

SEQ ID NO: 2863556 - DNA, 25 bp, Homo sapien
ttttgggagccatccaataaatcat

SEQ ID NO: 2863557 - DNA, 25 bp, Homo sapien
gaagttgagagtctgtgagagaaaa

SEQ ID NO: 2863558 - DNA, 25 bp, Homo sapien
gaaaaaggagttatgcctgaaatcc

SEQ ID NO: 2863559 - DNA, 25 bp, Homo sapien
aggagttatgcctgaaatcctgatc

SEQ ID NO: 2863560 - DNA, 25 bp, Homo sapien
cagaataagtgaaccgatatgccta

SEQ ID NO: 2863561 - DNA, 25 bp, Homo sapien
tctgccaccagtaaggagactattg

SEQ ID NO: 2863562 - DNA, 25 bp, Homo sapien
aaaataactacagccgtaattgaat

SEQ ID NO: 2863563 - DNA, 25 bp, Homo sapien
gctcatccttcagtaaactggctgg

SEQ ID NO: 2863564 - DNA, 25 bp, Homo sapien
cagccgtaattgaatttttcgctcc

SEQ ID NO: 2863565 - DNA, 25 bp, Homo sapien
taagtggactgtatgagatagaccc

SEQ ID NO: 2863566 - DNA, 25 bp, Homo sapien
taatacgggttcttgctgagaagga

SEQ ID NO: 2863567 - DNA, 25 bp, Homo sapien
tgaaagagtattactgggttgtttg

SEQ ID NO: 2863568 - DNA, 25 bp, Homo sapien
gcacttagtgtgaataaacctagaa

SEQ ID NO: 2863569 - DNA, 25 bp, Homo sapien
ttatccaaaatccaacttgaattat

SEQ ID NO: 2863570 - DNA, 25 bp, Homo sapien
aatatacggttggaatatttatcca

SEQ ID NO: 2863571 - DNA, 25 bp, Homo sapien
tatacggttggaatatttatccaaa

SEQ ID NO: 2863572 - DNA, 25 bp, Homo sapien
atccaaaatccaacttgaattatac

SEQ ID NO: 2863573 - DNA, 25 bp, Homo sapien
ttatacatacctcaaagaatgccca

SEQ ID NO: 2863574 - DNA, 25 bp, Homo sapien
gaggaccttatttaaacatcttgaa

SEQ ID NO: 2863575 - DNA, 25 bp, Homo sapien
taagttgaagcaatgccacttcact

SEQ ID NO: 2863576 - DNA, 25 bp, Homo sapien
tgtgtgaaccaagtacataatgctg

SEQ ID NO: 2863577 - DNA, 25 bp, Homo sapien
caaaagaatatcctggtctggccca

SEQ ID NO: 2863578 - DNA, 25 bp, Homo sapien
caggtggttgctggtctttcacaga

SEQ ID NO: 2863579 - DNA, 25 bp, Homo sapien
tcgtagagagtgatgtaggccaaaa

SEQ ID NO: 2863580 - DNA, 25 bp, Homo sapien
taattagagctgtaggcacactggc

SEQ ID NO: 2863581 - DNA, 25 bp, Homo sapien
agtaatttatagactcaatgctatc

SEQ ID NO: 2863582 - DNA, 25 bp, Homo sapien
tcttcacagatttagaaaaaaacta

SEQ ID NO: 2863583 - DNA, 25 bp, Homo sapien
ctttaaatttcatatggaagcaaaa

SEQ ID NO: 2863584 - DNA, 25 bp, Homo sapien
cccatcaagctacccttgactttct

SEQ ID NO: 2863585 - DNA, 25 bp, Homo sapien
ccaaccagtcccctatcgatatagt

SEQ ID NO: 2863586 - DNA, 25 bp, Homo sapien
gacagtgttgcaacaaacacccctg

SEQ ID NO: 2863587 - DNA, 25 bp, Homo sapien
gatgtagcagtatttatccaaccag

SEQ ID NO: 2863588 - DNA, 25 bp, Homo sapien
tcttattatgttccccaggttactc

SEQ ID NO: 2863589 - DNA, 25 bp, Homo sapien
cctgtctaaggaagcaatctctcag

SEQ ID NO: 2863590 - DNA, 25 bp, Homo sapien
ctcttcaaggagacctgtctaagga

SEQ ID NO: 2863591 - DNA, 25 bp, Homo sapien
cagccagcaccatccttctgtgaaa

SEQ ID NO: 2863592 - DNA, 25 bp, Homo sapien
ggagacctgtctaaggaagcaatct

SEQ ID NO: 2863593 - DNA, 25 bp, Homo sapien
ggatcagacttgagttgcaacctga

SEQ ID NO: 2863594 - DNA, 25 bp, Homo sapien
cagacttgagttgcaacctgatggt

SEQ ID NO: 2863595 - DNA, 25 bp, Homo sapien
gacttgagttgcaacctgatggttc

SEQ ID NO: 2863596 - DNA, 25 bp, Homo sapien
tcagacttgagttgcaacctgatgg

SEQ ID NO: 2863597 - DNA, 25 bp, Homo sapien
tgactgatttgagatggtatcttat

SEQ ID NO: 2863598 - DNA, 25 bp, Homo sapien
ctgactgatttgagatggtatctta

SEQ ID NO: 2863599 - DNA, 25 bp, Homo sapien
gactgatttgagatggtatcttatt

SEQ ID NO: 2863600 - DNA, 25 bp, Homo sapien
ctgatttgagatggtatcttattgt

SEQ ID NO: 2863601 - DNA, 25 bp, Homo sapien
atgatgacattaaggcttgcgggaa

SEQ ID NO: 2863602 - DNA, 25 bp, Homo sapien
tgatgacattaaggcttgcgggaag

SEQ ID NO: 2863603 - DNA, 25 bp, Homo sapien
cctggcagcaaagaacacggcagat

SEQ ID NO: 2863604 - DNA, 25 bp, Homo sapien
ggcagcaaagaacacggcagatact

SEQ ID NO: 2863605 - DNA, 25 bp, Homo sapien
tagccatgtgtagaaagctgaaatt

SEQ ID NO: 2863606 - DNA, 25 bp, Homo sapien
aacaccacacatctacaaccatgtg

SEQ ID NO: 2863607 - DNA, 25 bp, Homo sapien
caccacacatctacaaccatgtgat

SEQ ID NO: 2863608 - DNA, 25 bp, Homo sapien
ataacaccacacatctacaaccatg

SEQ ID NO: 2863609 - DNA, 25 bp, Homo sapien
catctcaacccagtcagcattcatt

SEQ ID NO: 2863610 - DNA, 25 bp, Homo sapien
acatgactcggcatctcaacccagt

SEQ ID NO: 2863611 - DNA, 25 bp, Homo sapien
ttctcttctcaactgtctaacatga

SEQ ID NO: 2863612 - DNA, 25 bp, Homo sapien
tctcaactgtctaacatgactcggc

SEQ ID NO: 2863613 - DNA, 25 bp, Homo sapien
cagtagtaattaagtccacctcatc

SEQ ID NO: 2863614 - DNA, 25 bp, Homo sapien
atcagtagtaattaagtccacctca

SEQ ID NO: 2863615 - DNA, 25 bp, Homo sapien
tcagtagtaattaagtccacctcat

SEQ ID NO: 2863616 - DNA, 25 bp, Homo sapien
catcagtagtaattaagtccacctc

SEQ ID NO: 2863617 - DNA, 25 bp, Homo sapien
ggtcctcactgatgggctttctttc

SEQ ID NO: 2863618 - DNA, 25 bp, Homo sapien
tcactgatgggctttctttctaagg

SEQ ID NO: 2863619 - DNA, 25 bp, Homo sapien
ctcactgatgggctttctttctaag

SEQ ID NO: 2863620 - DNA, 25 bp, Homo sapien
ctcaggtcctcactgatgggctttc

SEQ ID NO: 2863621 - DNA, 25 bp, Homo sapien
gactgcttgatggtacagccaaaat

SEQ ID NO: 2863622 - DNA, 25 bp, Homo sapien
tttcctcagtgatcagactgcttga

SEQ ID NO: 2863623 - DNA, 25 bp, Homo sapien
ctctgttgaatttgggtgatgagtc

SEQ ID NO: 2863624 - DNA, 25 bp, Homo sapien
gtcactcgggtgaagcttttgatat

SEQ ID NO: 2863625 - DNA, 25 bp, Homo sapien
gttccttaatgatagaagaggggag

SEQ ID NO: 2863626 - DNA, 25 bp, Homo sapien
agttccttaatgatagaagagggga

SEQ ID NO: 2863627 - DNA, 25 bp, Homo sapien
tccttaatgatagaagaggggagca

SEQ ID NO: 2863628 - DNA, 25 bp, Homo sapien
ttccttaatgatagaagaggggagc

SEQ ID NO: 2863629 - DNA, 25 bp, Homo sapien
ctgccaaggttaatgcaggctctga

SEQ ID NO: 2863630 - DNA, 25 bp, Homo sapien
taatataacctatttgatgaggctg

SEQ ID NO: 2863631 - DNA, 25 bp, Homo sapien
gatgaggctgtattaatttaggaga

SEQ ID NO: 2863632 - DNA, 25 bp, Homo sapien
catgatcttgtatcacagtgtctgt

SEQ ID NO: 2863633 - DNA, 25 bp, Homo sapien
cctgatgtctaacttggtgcccctt

SEQ ID NO: 2863634 - DNA, 25 bp, Homo sapien
caatatgacctgatgtctaacttgg

SEQ ID NO: 2863635 - DNA, 25 bp, Homo sapien
tagagtaaatcccaatatgacctga

SEQ ID NO: 2863636 - DNA, 25 bp, Homo sapien
tgtctaacttggtgccccttttgcc

SEQ ID NO: 2863637 - DNA, 25 bp, Homo sapien
cttggtaagttcatcagcctgagga

SEQ ID NO: 2863638 - DNA, 25 bp, Homo sapien
tggtaagttcatcagcctgaggagc

SEQ ID NO: 2863639 - DNA, 25 bp, Homo sapien
ggtaagttcatcagcctgaggagca

SEQ ID NO: 2863640 - DNA, 25 bp, Homo sapien
gacttggtaagttcatcagcctgag

SEQ ID NO: 2863641 - DNA, 25 bp, Homo sapien
gtctcaaaatccgagctccctgaat

SEQ ID NO: 2863642 - DNA, 25 bp, Homo sapien
tgtatgcactggtggtcatagagaa

SEQ ID NO: 2863643 - DNA, 25 bp, Homo sapien
ggctgtatgcactggtggtcataga

SEQ ID NO: 2863644 - DNA, 25 bp, Homo sapien
tatgcactggtggtcatagagaaac

SEQ ID NO: 2863645 - DNA, 25 bp, Homo sapien
taaaaggttgaagctcccactcgtg

SEQ ID NO: 2863646 - DNA, 25 bp, Homo sapien
taagccaccctacaggatgagtgaa

SEQ ID NO: 2863647 - DNA, 25 bp, Homo sapien
tgggggccgttccagtcccagtgga

SEQ ID NO: 2863648 - DNA, 25 bp, Homo sapien
attctaaaaggttgaagctcccact

SEQ ID NO: 2863649 - DNA, 25 bp, Homo sapien
cttgtgttaacagggccattgctac

SEQ ID NO: 2863650 - DNA, 25 bp, Homo sapien
gccagggccctacagtctggtttaa

SEQ ID NO: 2863651 - DNA, 25 bp, Homo sapien
tttttaattcatgaaaagctcattg

SEQ ID NO: 2863652 - DNA, 25 bp, Homo sapien
atcttgtaactgtttgatttcaagc

SEQ ID NO: 2863653 - DNA, 25 bp, Homo sapien
gtggagtgggcttatttgtgcctga

SEQ ID NO: 2863654 - DNA, 25 bp, Homo sapien
gtgtcacagtaacaccgtactctcc

SEQ ID NO: 2863655 - DNA, 25 bp, Homo sapien
tcctggtgtcacagtaacaccgtac

SEQ ID NO: 2863656 - DNA, 25 bp, Homo sapien
gttcctagtggagtgggcttatttg

SEQ ID NO: 2863657 - DNA, 25 bp, Homo sapien
aggagatacttggtgcctccttcac

SEQ ID NO: 2863658 - DNA, 25 bp, Homo sapien
gctggttccatgctgcttaggagat

SEQ ID NO: 2863659 - DNA, 25 bp, Homo sapien
ttccatgctgcttaggagatacttg

SEQ ID NO: 2863660 - DNA, 25 bp, Homo sapien
tacacctactccttctacacctact

SEQ ID NO: 2863661 - DNA, 25 bp, Homo sapien
tagtcctgagagtcacatagaagta

SEQ ID NO: 2863662 - DNA, 25 bp, Homo sapien
tcacatggtgtattagtcccttctc

SEQ ID NO: 2863663 - DNA, 25 bp, Homo sapien
aaggtcagtagggaccataagctct

SEQ ID NO: 2863664 - DNA, 25 bp, Homo sapien
tacctcggctctactcctgtagctg

SEQ ID NO: 2863665 - DNA, 25 bp, Homo sapien
ctacaattcaggatggggtttgagt

SEQ ID NO: 2863666 - DNA, 25 bp, Homo sapien
cagccaaaccttatctttccaccct

SEQ ID NO: 2863667 - DNA, 25 bp, Homo sapien
cacccttgacccctcccaaatcaca

SEQ ID NO: 2863668 - DNA, 25 bp, Homo sapien
gtccaaaatacaatagggcagtcat

SEQ ID NO: 2863669 - DNA, 25 bp, Homo sapien
gattgctagatcctgtagtggttct

SEQ ID NO: 2863670 - DNA, 25 bp, Homo sapien
tcttcacatcttagccagcatttgg

SEQ ID NO: 2863671 - DNA, 25 bp, Homo sapien
tacttaagtgagcatgtttcatggg

SEQ ID NO: 2863672 - DNA, 25 bp, Homo sapien
tctttacctagaccaacgttctgga

SEQ ID NO: 2863673 - DNA, 25 bp, Homo sapien
gacttcatgaccaagaacccaaaag

SEQ ID NO: 2863674 - DNA, 25 bp, Homo sapien
ggcaaagacttcatgaccaagaacc

SEQ ID NO: 2863675 - DNA, 25 bp, Homo sapien
aagacttcatgaccaagaacccaaa

SEQ ID NO: 2863676 - DNA, 25 bp, Homo sapien
caaagacttcatgaccaagaaccca

SEQ ID NO: 2863677 - DNA, 25 bp, Homo sapien
gaaggccctgtgttcaatgactagc

SEQ ID NO: 2863678 - DNA, 25 bp, Homo sapien
aatgagtttcatagtggcccctgaa

SEQ ID NO: 2863679 - DNA, 25 bp, Homo sapien
tgagacaggcgcacaaacagaatag

SEQ ID NO: 2863680 - DNA, 25 bp, Homo sapien
gatcatccagatttaggaaggccct

SEQ ID NO: 2863681 - DNA, 25 bp, Homo sapien
tctacagcagagttttccataccac

SEQ ID NO: 2863682 - DNA, 25 bp, Homo sapien
tccatgttttatgaagtagccaaga

SEQ ID NO: 2863683 - DNA, 25 bp, Homo sapien
tacttatggtgagtcgacctggcag

SEQ ID NO: 2863684 - DNA, 25 bp, Homo sapien
catgcaatgcctagttatacttacc

SEQ ID NO: 2863685 - DNA, 25 bp, Homo sapien
gaaggtaaactgtgaatcttcattt

SEQ ID NO: 2863686 - DNA, 25 bp, Homo sapien
gtggtattgaaaatgctattggagg

SEQ ID NO: 2863687 - DNA, 25 bp, Homo sapien
tattggatcaatatatttaggtggt

SEQ ID NO: 2863688 - DNA, 25 bp, Homo sapien
ggaggagtcacactaatactatcaa

SEQ ID NO: 2863689 - DNA, 25 bp, Homo sapien
tttcccacactaaggtaagttcaga

SEQ ID NO: 2863690 - DNA, 25 bp, Homo sapien
gatcctccatggcagttagtgaatg

SEQ ID NO: 2863691 - DNA, 25 bp, Homo sapien
tggcagaggtaaactaaccaactac

SEQ ID NO: 2863692 - DNA, 25 bp, Homo sapien
cagttactcagtgcaatgtatagcc

SEQ ID NO: 2863693 - DNA, 25 bp, Homo sapien
catgtgttatgttagcctgcttgga

SEQ ID NO: 2863694 - DNA, 25 bp, Homo sapien
taattaaacaacacttcagcagcgt

SEQ ID NO: 2863695 - DNA, 25 bp, Homo sapien
gcccacttgaagttttgtgccagcc

SEQ ID NO: 2863696 - DNA, 25 bp, Homo sapien
tcagcagcgtggttgctaatgccag

SEQ ID NO: 2863697 - DNA, 25 bp, Homo sapien
tttagtcaggacagccaaagggtgg

SEQ ID NO: 2863698 - DNA, 25 bp, Homo sapien
taggtcgaggacagcatgagaagcc

SEQ ID NO: 2863699 - DNA, 25 bp, Homo sapien
gccaatttttaaggccgagcgcagt

SEQ ID NO: 2863700 - DNA, 25 bp, Homo sapien
tatcaccgtgcttggaatgcagcca

SEQ ID NO: 2863701 - DNA, 25 bp, Homo sapien
catttcacatgatctatactctaat

SEQ ID NO: 2863702 - DNA, 25 bp, Homo sapien
ttaactgtaggcatccgcatttttc

SEQ ID NO: 2863703 - DNA, 25 bp, Homo sapien
gaatagttcccacagtacatttcct

SEQ ID NO: 2863704 - DNA, 25 bp, Homo sapien
aagttggcaatatctgctaggatcc

SEQ ID NO: 2863705 - DNA, 25 bp, Homo sapien
tgagaaatctggtccacctttagtg

SEQ ID NO: 2863706 - DNA, 25 bp, Homo sapien
tctggtccacctttagtgtagtttc

SEQ ID NO: 2863707 - DNA, 25 bp, Homo sapien
tctcaaggtttgagaaatctggtcc

SEQ ID NO: 2863708 - DNA, 25 bp, Homo sapien
caaggtttgagaaatctggtccacc

SEQ ID NO: 2863709 - DNA, 25 bp, Homo sapien
ctctctaatgtaagctttctctgca

SEQ ID NO: 2863710 - DNA, 25 bp, Homo sapien
tctttgtaagaacaatacgaaccat

SEQ ID NO: 2863711 - DNA, 25 bp, Homo sapien
tttttggaatctctctaatgtaagc

SEQ ID NO: 2863712 - DNA, 25 bp, Homo sapien
tcttgcacccaaggatccgctgcat

SEQ ID NO: 2863713 - DNA, 25 bp, Homo sapien
gttccctcatcagctattgtagaat

SEQ ID NO: 2863714 - DNA, 25 bp, Homo sapien
catcagctattgtagaatcaaagag

SEQ ID NO: 2863715 - DNA, 25 bp, Homo sapien
ctattgtagaatcaaagagtttgcc

SEQ ID NO: 2863716 - DNA, 25 bp, Homo sapien
agtccatgttccctcatcagctatt

SEQ ID NO: 2863717 - DNA, 25 bp, Homo sapien
tcacacgaatcttgaggcactcaaa

SEQ ID NO: 2863718 - DNA, 25 bp, Homo sapien
gcagctactgctaaattccgaaagt

SEQ ID NO: 2863719 - DNA, 25 bp, Homo sapien
gaaaagtaactgagatccaagctga

SEQ ID NO: 2863720 - DNA, 25 bp, Homo sapien
gaaatcccaaattcagcagctactg

SEQ ID NO: 2863721 - DNA, 25 bp, Homo sapien
taatctgttcccagctgaagcccgt

SEQ ID NO: 2863722 - DNA, 25 bp, Homo sapien
tgaattacgcttccgtacaggagct

SEQ ID NO: 2863723 - DNA, 25 bp, Homo sapien
tgaccactccacaaacatgcaggat

SEQ ID NO: 2863724 - DNA, 25 bp, Homo sapien
tccactgcaggtacgttatctgttg

SEQ ID NO: 2863725 - DNA, 25 bp, Homo sapien
tcctccaaggtctggtaccactggc

SEQ ID NO: 2863726 - DNA, 25 bp, Homo sapien
aggccgcactggatatcctgggcgc

SEQ ID NO: 2863727 - DNA, 25 bp, Homo sapien
gcctggcggcacctgaacttcaatg

SEQ ID NO: 2863728 - DNA, 25 bp, Homo sapien
acagcgccacatgccggctctggag

SEQ ID NO: 2863729 - DNA, 25 bp, Homo sapien
cgcggaatcccacgcttaggctacg

SEQ ID NO: 2863730 - DNA, 25 bp, Homo sapien
ttggaaccagtgaagccggaactca

SEQ ID NO: 2863731 - DNA, 25 bp, Homo sapien
gtcccctaagtgacgccaaaatgca

SEQ ID NO: 2863732 - DNA, 25 bp, Homo sapien
gaatggccgtttacggcaccggcag

SEQ ID NO: 2863733 - DNA, 25 bp, Homo sapien
tcattacaggaaaaagcggccaagg

SEQ ID NO: 2863734 - DNA, 25 bp, Homo sapien
caaaggatgcttctagatctgcaga

SEQ ID NO: 2863735 - DNA, 25 bp, Homo sapien
tataaagcgttaacagccagtgaga

SEQ ID NO: 2863736 - DNA, 25 bp, Homo sapien
tctatgattagaacctgagtgcctt

SEQ ID NO: 2863737 - DNA, 25 bp, Homo sapien
tagagcacccttaggcttcagcttc

SEQ ID NO: 2863738 - DNA, 25 bp, Homo sapien
acccctgctttagagcacccttagg

SEQ ID NO: 2863739 - DNA, 25 bp, Homo sapien
cctaacaggccttggatgggtattg

SEQ ID NO: 2863740 - DNA, 25 bp, Homo sapien
tattggtctgtagcccggaggttgg

SEQ ID NO: 2863741 - DNA, 25 bp, Homo sapien
tctcaacatgcctcataccactgga

SEQ ID NO: 2863742 - DNA, 25 bp, Homo sapien
gaaggggtatctcaacatgcctcat

SEQ ID NO: 2863743 - DNA, 25 bp, Homo sapien
gtatctcaacatgcctcataccact

SEQ ID NO: 2863744 - DNA, 25 bp, Homo sapien
gggtatctcaacatgcctcatacca

SEQ ID NO: 2863745 - DNA, 25 bp, Homo sapien
gctatgtctcactcattaggtccag

SEQ ID NO: 2863746 - DNA, 25 bp, Homo sapien
gtgagcataatgtcgtcaatgtaat

SEQ ID NO: 2863747 - DNA, 25 bp, Homo sapien
ggtctggagtagttgctatgtctca

SEQ ID NO: 2863748 - DNA, 25 bp, Homo sapien
cactcattaggtccagtgagcataa

SEQ ID NO: 2863749 - DNA, 25 bp, Homo sapien
tctggtcggccttatagacagggat

SEQ ID NO: 2863750 - DNA, 25 bp, Homo sapien
catttctagccttgctagctaaaag

SEQ ID NO: 2863751 - DNA, 25 bp, Homo sapien
aggtaggacatgaaggtgcatttct

SEQ ID NO: 2863752 - DNA, 25 bp, Homo sapien
tggtgagttgatatgccctgaggta

SEQ ID NO: 2863753 - DNA, 25 bp, Homo sapien
gtccctataggaattgagcattgct

SEQ ID NO: 2863754 - DNA, 25 bp, Homo sapien
tagttctagtggcttctacttggcc

SEQ ID NO: 2863755 - DNA, 25 bp, Homo sapien
tagccctcactccataggtaaggaa

SEQ ID NO: 2863756 - DNA, 25 bp, Homo sapien
tggagtcaccacctagttaagtttg

SEQ ID NO: 2863757 - DNA, 25 bp, Homo sapien
cagcgcacacgggtcagtgtttttt

SEQ ID NO: 2863758 - DNA, 25 bp, Homo sapien
tactttcgagttctgtctctgctcc

SEQ ID NO: 2863759 - DNA, 25 bp, Homo sapien
gagaaagagctctctatacactttg

SEQ ID NO: 2863760 - DNA, 25 bp, Homo sapien
ggcgccaccgagtttgtttatctca

SEQ ID NO: 2863761 - DNA, 25 bp, Homo sapien
gcagagctgtacacaaagaatttca

SEQ ID NO: 2863762 - DNA, 25 bp, Homo sapien
gattctaatgcagttcatcacatca

SEQ ID NO: 2863763 - DNA, 25 bp, Homo sapien
gcatgcagttggctgtggtttcaga

SEQ ID NO: 2863764 - DNA, 25 bp, Homo sapien
ttctggttactggtgccactgggct

SEQ ID NO: 2863765 - DNA, 25 bp, Homo sapien
ccccatgttatagtacattgtgcag

SEQ ID NO: 2863766 - DNA, 25 bp, Homo sapien
gctgcctctcaacttaatgtggatg

SEQ ID NO: 2863767 - DNA, 25 bp, Homo sapien
tatagtacattgtgcagcagagaga

SEQ ID NO: 2863768 - DNA, 25 bp, Homo sapien
gaccagatgttgtagaaaatcagcc

SEQ ID NO: 2863769 - DNA, 25 bp, Homo sapien
gagatccttttgccttactcagcct

SEQ ID NO: 2863770 - DNA, 25 bp, Homo sapien
ggcagtcatgccctgtttgcagtaa

SEQ ID NO: 2863771 - DNA, 25 bp, Homo sapien
tttcatcccatgttgccgctaagtg

SEQ ID NO: 2863772 - DNA, 25 bp, Homo sapien
taaatgatgctcttgcactagtgaa

SEQ ID NO: 2863773 - DNA, 25 bp, Homo sapien
tgtctaaagaaactaaagggcagtc

SEQ ID NO: 2863774 - DNA, 25 bp, Homo sapien
tgtgatattcagtaggtttatgtgt

SEQ ID NO: 2863775 - DNA, 25 bp, Homo sapien
tctgtagttacaattcaccccgaaa

SEQ ID NO: 2863776 - DNA, 25 bp, Homo sapien
ccttggaaagttgaaagagggatga

SEQ ID NO: 2863777 - DNA, 25 bp, Homo sapien
tagaacacataaggtccttggaaag

SEQ ID NO: 2863778 - DNA, 25 bp, Homo sapien
agagggatgatggttctggccttca

SEQ ID NO: 2863779 - DNA, 25 bp, Homo sapien
aatggccgatttggctggctgatgt

SEQ ID NO: 2863780 - DNA, 25 bp, Homo sapien
gatttggctggctgatgtagagtgt

SEQ ID NO: 2863781 - DNA, 25 bp, Homo sapien
ggccgatttggctggctgatgtaga

SEQ ID NO: 2863782 - DNA, 25 bp, Homo sapien
gcaatgaaaaatggccgatttggct

SEQ ID NO: 2863783 - DNA, 25 bp, Homo sapien
tgggccagtctggtgctccaagaat

SEQ ID NO: 2863784 - DNA, 25 bp, Homo sapien
catggcaaatgcctcggcagtggtg

SEQ ID NO: 2863785 - DNA, 25 bp, Homo sapien
cagtggtggcagtagaatcctccct

SEQ ID NO: 2863786 - DNA, 25 bp, Homo sapien
tatcgtatcacgaagggctgatggg

SEQ ID NO: 2863787 - DNA, 25 bp, Homo sapien
ggcacatttgttagacttcattgga

SEQ ID NO: 2863788 - DNA, 25 bp, Homo sapien
gcactattcttttagaccacacgag

SEQ ID NO: 2863789 - DNA, 25 bp, Homo sapien
tagaccacacgagggcaatggtgtc

SEQ ID NO: 2863790 - DNA, 25 bp, Homo sapien
gtgtaaaagatgctcgcctgctgct

SEQ ID NO: 2863791 - DNA, 25 bp, Homo sapien
gtcctgctgggttcctaatgtcccc

SEQ ID NO: 2863792 - DNA, 25 bp, Homo sapien
ttcactcagaactaaccagctcact

SEQ ID NO: 2863793 - DNA, 25 bp, Homo sapien
tctgggttctggaggtcttcactca

SEQ ID NO: 2863794 - DNA, 25 bp, Homo sapien
cctttcacggatgggcttggtcctg

SEQ ID NO: 2863795 - DNA, 25 bp, Homo sapien
tttcgctatcaaagacccgcagcgc

SEQ ID NO: 2863796 - DNA, 25 bp, Homo sapien
cggtccgggataagccggtggctgc

SEQ ID NO: 2863797 - DNA, 25 bp, Homo sapien
tgcggctccaatgcggaaccggttc

SEQ ID NO: 2863798 - DNA, 25 bp, Homo sapien
tgcctgcgggcgtttcgctatcaaa

SEQ ID NO: 2863799 - DNA, 25 bp, Homo sapien
atatgtaaatcagcatgttcctaga

SEQ ID NO: 2863800 - DNA, 25 bp, Homo sapien
caatgtaacgaatgggtattgtggt

SEQ ID NO: 2863801 - DNA, 25 bp, Homo sapien
aatcagcatgttcctagatacaatg

SEQ ID NO: 2863802 - DNA, 25 bp, Homo sapien
tcctagatacaatgtaacgaatggg

SEQ ID NO: 2863803 - DNA, 25 bp, Homo sapien
aagggtcatccaccttgtttctgca

SEQ ID NO: 2863804 - DNA, 25 bp, Homo sapien
gaccctgaaagggtcatccaccttg

SEQ ID NO: 2863805 - DNA, 25 bp, Homo sapien
ggtcatccaccttgtttctgcagga

SEQ ID NO: 2863806 - DNA, 25 bp, Homo sapien
cctgaaagggtcatccaccttgttt

SEQ ID NO: 2863807 - DNA, 25 bp, Homo sapien
tcttgatgttccaggcaagttgggc

SEQ ID NO: 2863808 - DNA, 25 bp, Homo sapien
cacatgattgctgcgtcttgagtag

SEQ ID NO: 2863809 - DNA, 25 bp, Homo sapien
gagattgattgatgatcccaggctt

SEQ ID NO: 2863810 - DNA, 25 bp, Homo sapien
caccatgatgggttcgctttcactc

SEQ ID NO: 2863811 - DNA, 25 bp, Homo sapien
tcggtagcttgtaattgccctgtgc

SEQ ID NO: 2863812 - DNA, 25 bp, Homo sapien
gggtaattgctcctatgggccatgg

SEQ ID NO: 2863813 - DNA, 25 bp, Homo sapien
gaagtgtagccacaaaccactgttt

SEQ ID NO: 2863814 - DNA, 25 bp, Homo sapien
gttccattagcaccgtatagtcaag

SEQ ID NO: 2863815 - DNA, 25 bp, Homo sapien
cactactgtagttgtagtcaggtac

SEQ ID NO: 2863816 - DNA, 25 bp, Homo sapien
catgtgtctgttgatgccctcatga

SEQ ID NO: 2863817 - DNA, 25 bp, Homo sapien
gggcagttgttaatagccacactcc

SEQ ID NO: 2863818 - DNA, 25 bp, Homo sapien
ctgttcctccagtaagacaaataca

SEQ ID NO: 2863819 - DNA, 25 bp, Homo sapien
aagagagggctctcggagagctaga

SEQ ID NO: 2863820 - DNA, 25 bp, Homo sapien
tgaagagagggctctcggagagcta

SEQ ID NO: 2863821 - DNA, 25 bp, Homo sapien
tcaggtcgactctgccttctgaaga

SEQ ID NO: 2863822 - DNA, 25 bp, Homo sapien
agagggctctcggagagctagaagc

SEQ ID NO: 2863823 - DNA, 25 bp, Homo sapien
tgggacagtgcttttgattcaaact

SEQ ID NO: 2863824 - DNA, 25 bp, Homo sapien
tcatcatcatctcgctttgattggg

SEQ ID NO: 2863825 - DNA, 25 bp, Homo sapien
tgccgtgctgctcgatcgggaatca

SEQ ID NO: 2863826 - DNA, 25 bp, Homo sapien
tgcaagttgtttataggtagtaacc

SEQ ID NO: 2863827 - DNA, 25 bp, Homo sapien
ccataggtgtcaggttatctttcag

SEQ ID NO: 2863828 - DNA, 25 bp, Homo sapien
ataggtgtcaggttatctttcagat

SEQ ID NO: 2863829 - DNA, 25 bp, Homo sapien
cataggtgtcaggttatctttcaga

SEQ ID NO: 2863830 - DNA, 25 bp, Homo sapien
taggtgtcaggttatctttcagatg

SEQ ID NO: 2863831 - DNA, 25 bp, Homo sapien
gatcaataggcacaattctgatgag

SEQ ID NO: 2863832 - DNA, 25 bp, Homo sapien
tgattaaacaggtaattggccattg

SEQ ID NO: 2863833 - DNA, 25 bp, Homo sapien
ggtttggctgagctccgggaagagg

SEQ ID NO: 2863834 - DNA, 25 bp, Homo sapien
caatctatcttcgatgaatgcaagc

SEQ ID NO: 2863835 - DNA, 25 bp, Homo sapien
gttgagaacaacatccaggcagcca

SEQ ID NO: 2863836 - DNA, 25 bp, Homo sapien
catggcttccagtagaatcctaggc

SEQ ID NO: 2863837 - DNA, 25 bp, Homo sapien
aatcctaggctcgaggatctcttgg

SEQ ID NO: 2863838 - DNA, 25 bp, Homo sapien
ggcagccacaaagcacatggcttcc

SEQ ID NO: 2863839 - DNA, 25 bp, Homo sapien
tcagttttagagttataactttaga

SEQ ID NO: 2863840 - DNA, 25 bp, Homo sapien
aactttagatgatcttgagggacca

SEQ ID NO: 2863841 - DNA, 25 bp, Homo sapien
ctttagatgatcttgagggaccatc

SEQ ID NO: 2863842 - DNA, 25 bp, Homo sapien
ataactttagatgatcttgagggac

SEQ ID NO: 2863843 - DNA, 25 bp, Homo sapien
tatcaatttgggtgcagttttctcc

SEQ ID NO: 2863844 - DNA, 25 bp, Homo sapien
catctctctaagacctgcttcaggc

SEQ ID NO: 2863845 - DNA, 25 bp, Homo sapien
cccagagaactgagttgccataaca

SEQ ID NO: 2863846 - DNA, 25 bp, Homo sapien
tagaagttagcaaggacccagagaa

SEQ ID NO: 2863847 - DNA, 25 bp, Homo sapien
gcagaccatggaggatcacagggat

SEQ ID NO: 2863848 - DNA, 25 bp, Homo sapien
cacagggatctgaatttgcaggtga

SEQ ID NO: 2863849 - DNA, 25 bp, Homo sapien
gatggtccaaattcttggctccaag

SEQ ID NO: 2863850 - DNA, 25 bp, Homo sapien
aggagcagaccatggaggatcacag

SEQ ID NO: 2863851 - DNA, 25 bp, Homo sapien
cttatctcttttaggaggtctctca

SEQ ID NO: 2863852 - DNA, 25 bp, Homo sapien
tatctcttttaggaggtctctcagt

SEQ ID NO: 2863853 - DNA, 25 bp, Homo sapien
attcttatctcttttaggaggtctc

SEQ ID NO: 2863854 - DNA, 25 bp, Homo sapien
tctcttttaggaggtctctcagttt

SEQ ID NO: 2863855 - DNA, 25 bp, Homo sapien
gtgatttcagggcattcagtgcatt

SEQ ID NO: 2863856 - DNA, 25 bp, Homo sapien
tgatttcagggcattcagtgcattt

SEQ ID NO: 2863857 - DNA, 25 bp, Homo sapien
ctatcgttgtagaccgtatgcttgt

SEQ ID NO: 2863858 - DNA, 25 bp, Homo sapien
cccatagagagtccacttatttttc

SEQ ID NO: 2863859 - DNA, 25 bp, Homo sapien
ctttgctttggatgtccccatagag

SEQ ID NO: 2863860 - DNA, 25 bp, Homo sapien
tgtagaccgtatgcttgttttcctt

SEQ ID NO: 2863861 - DNA, 25 bp, Homo sapien
tgcctacagttcagccagttcatat

SEQ ID NO: 2863862 - DNA, 25 bp, Homo sapien
cttcctgtgttgtgcctacagttca

SEQ ID NO: 2863863 - DNA, 25 bp, Homo sapien
cctgtgttgtgcctacagttcagcc

SEQ ID NO: 2863864 - DNA, 25 bp, Homo sapien
tgttgtgcctacagttcagccagtt

SEQ ID NO: 2863865 - DNA, 25 bp, Homo sapien
tatagcctgaaagtatgctgttggc

SEQ ID NO: 2863866 - DNA, 25 bp, Homo sapien
tgctgttggcttgagagttagtact

SEQ ID NO: 2863867 - DNA, 25 bp, Homo sapien
aatttggtggttgcatatagcctga

SEQ ID NO: 2863868 - DNA, 25 bp, Homo sapien
ggatgttgcataaatcatagctgaa

SEQ ID NO: 2863869 - DNA, 25 bp, Homo sapien
tcagataagcagaaggtcggccagt

SEQ ID NO: 2863870 - DNA, 25 bp, Homo sapien
agaagtaagcaagtatatgttcact

SEQ ID NO: 2863871 - DNA, 25 bp, Homo sapien
caaattgcgtaagatcagataagca

SEQ ID NO: 2863872 - DNA, 25 bp, Homo sapien
gttcactttcaccaaacaaattgcg

SEQ ID NO: 2863873 - DNA, 25 bp, Homo sapien
gctgcttaagttcagaattgaggtt

SEQ ID NO: 2863874 - DNA, 25 bp, Homo sapien
tgctgcttaagttcagaattgaggt

SEQ ID NO: 2863875 - DNA, 25 bp, Homo sapien
ttgctgcttaagttcagaattgagg

SEQ ID NO: 2863876 - DNA, 25 bp, Homo sapien
cttgctgcttaagttcagaattgag

SEQ ID NO: 2863877 - DNA, 25 bp, Homo sapien
cactgacagcgttgtgggagattga

SEQ ID NO: 2863878 - DNA, 25 bp, Homo sapien
caatgggaacccagatactgcactg

SEQ ID NO: 2863879 - DNA, 25 bp, Homo sapien
taccaaatgctcagggtcaatggga

SEQ ID NO: 2863880 - DNA, 25 bp, Homo sapien
ttgacagtattaagggaaaccatcg

SEQ ID NO: 2863881 - DNA, 25 bp, Homo sapien
cttgttatcaaaactgtcctttgcc

SEQ ID NO: 2863882 - DNA, 25 bp, Homo sapien
tgttatcaaaactgtcctttgccaa

SEQ ID NO: 2863883 - DNA, 25 bp, Homo sapien
ttgttatcaaaactgtcctttgcca

SEQ ID NO: 2863884 - DNA, 25 bp, Homo sapien
ccttgttatcaaaactgtcctttgc

SEQ ID NO: 2863885 - DNA, 25 bp, Homo sapien
gatagagcaatggtgtggctattgt

SEQ ID NO: 2863886 - DNA, 25 bp, Homo sapien
caagatagagcaatggtgtggctat

SEQ ID NO: 2863887 - DNA, 25 bp, Homo sapien
gataccaagatagagcaatggtgtg

SEQ ID NO: 2863888 - DNA, 25 bp, Homo sapien
taccaagatagagcaatggtgtggc

SEQ ID NO: 2863889 - DNA, 25 bp, Homo sapien
catcaatatcaacagtctttagtgc

SEQ ID NO: 2863890 - DNA, 25 bp, Homo sapien
ttatgtcagcgagaattaaagaaac

SEQ ID NO: 2863891 - DNA, 25 bp, Homo sapien
gggcttcacttatgtcagcgagaat

SEQ ID NO: 2863892 - DNA, 25 bp, Homo sapien
gcatgaaacttctaggagagcttac

SEQ ID NO: 2863893 - DNA, 25 bp, Homo sapien
acagctggtgctactgtgaattgtg

SEQ ID NO: 2863894 - DNA, 25 bp, Homo sapien
ccatttgtcctttgccaagcggatt

SEQ ID NO: 2863895 - DNA, 25 bp, Homo sapien
gatacctgtttgagctgatggcaaa

SEQ ID NO: 2863896 - DNA, 25 bp, Homo sapien
gattccaagacctgttgatacctgt

SEQ ID NO: 2863897 - DNA, 25 bp, Homo sapien
gatttagtgattcctcgaaggagcc

SEQ ID NO: 2863898 - DNA, 25 bp, Homo sapien
ggccaacatcttagatgctgcggca

SEQ ID NO: 2863899 - DNA, 25 bp, Homo sapien
tactgtgtatcagaccatggtggct

SEQ ID NO: 2863900 - DNA, 25 bp, Homo sapien
gcagcatcatactggaacaatgggg

SEQ ID NO: 2863901 - DNA, 25 bp, Homo sapien
tttcaagaagtgaggaatggccaac

SEQ ID NO: 2863902 - DNA, 25 bp, Homo sapien
cacaggtcatatacagtagaggtag

SEQ ID NO: 2863903 - DNA, 25 bp, Homo sapien
gaatcgagagccttcttcgtcccag

SEQ ID NO: 2863904 - DNA, 25 bp, Homo sapien
gagccttcttcgtcccagggtatgg

SEQ ID NO: 2863905 - DNA, 25 bp, Homo sapien
cacggttcgcttagtctcacagaaa

SEQ ID NO: 2863906 - DNA, 25 bp, Homo sapien
gaaattgctacaagatttgccagtg

SEQ ID NO: 2863907 - DNA, 25 bp, Homo sapien
agattatccgtgaaattgctacaag

SEQ ID NO: 2863908 - DNA, 25 bp, Homo sapien
tttgccagtggtctcacgggatagg

SEQ ID NO: 2863909 - DNA, 25 bp, Homo sapien
caatctgccataagattatccgtga

SEQ ID NO: 2863910 - DNA, 25 bp, Homo sapien
ctataattatatgaagccacaggag

SEQ ID NO: 2863911 - DNA, 25 bp, Homo sapien
tcacagaaaaactcgcctggctttc

SEQ ID NO: 2863912 - DNA, 25 bp, Homo sapien
gacagtgtggagattattgatataa

SEQ ID NO: 2863913 - DNA, 25 bp, Homo sapien
tgaagtgattaacgatggtgcagca

SEQ ID NO: 2863914 - DNA, 25 bp, Homo sapien
tgcaagcggcgtctgggacactgtt

SEQ ID NO: 2863915 - DNA, 25 bp, Homo sapien
ggatgtgaatacaaaccggcagctt

SEQ ID NO: 2863916 - DNA, 25 bp, Homo sapien
agttttggtgccctgctcgaaggag

SEQ ID NO: 2863917 - DNA, 25 bp, Homo sapien
gatggactgtattctccggctgccc

SEQ ID NO: 2863918 - DNA, 25 bp, Homo sapien
tctaggttggcttctgtggtttcaa

SEQ ID NO: 2863919 - DNA, 25 bp, Homo sapien
cagtcattgttttgaagaaggtcat

SEQ ID NO: 2863920 - DNA, 25 bp, Homo sapien
tgtggtttcaaagacagtcattgtt

SEQ ID NO: 2863921 - DNA, 25 bp, Homo sapien
agcttccttctaggttggcttctgt

SEQ ID NO: 2863922 - DNA, 25 bp, Homo sapien
ctttgacactgattgtctgcgctct

SEQ ID NO: 2863923 - DNA, 25 bp, Homo sapien
tttgtgggcctttgacactgattgt

SEQ ID NO: 2863924 - DNA, 25 bp, Homo sapien
gggcctttgacactgattgtctgcg

SEQ ID NO: 2863925 - DNA, 25 bp, Homo sapien
cactgattgtctgcgctctctcctg

SEQ ID NO: 2863926 - DNA, 25 bp, Homo sapien
aataatcccctcttcgtacttcagc

SEQ ID NO: 2863927 - DNA, 25 bp, Homo sapien
tgaaataatcccctcttcgtacttc

SEQ ID NO: 2863928 - DNA, 25 bp, Homo sapien
aaatatctggcaccatgttgtaaac

SEQ ID NO: 2863929 - DNA, 25 bp, Homo sapien
ccaaatatctggcaccatgttgtaa

SEQ ID NO: 2863930 - DNA, 25 bp, Homo sapien
aattgaacttcgtccttcattcaga

SEQ ID NO: 2863931 - DNA, 25 bp, Homo sapien
gaagcctgtatcagctccagtgcta

SEQ ID NO: 2863932 - DNA, 25 bp, Homo sapien
tccttcctaatgaagcctgtatcag

SEQ ID NO: 2863933 - DNA, 25 bp, Homo sapien
tgcatgacgtgcacatcagtgcctc

SEQ ID NO: 2863934 - DNA, 25 bp, Homo sapien
cagtttgattcggttggggccgcaa

SEQ ID NO: 2863935 - DNA, 25 bp, Homo sapien
gggccgcaactatagcttggctgcg

SEQ ID NO: 2863936 - DNA, 25 bp, Homo sapien
caactatagcttggctgcgggcagg

SEQ ID NO: 2863937 - DNA, 25 bp, Homo sapien
cggttggggccgcaactatagcttg

SEQ ID NO: 2863938 - DNA, 25 bp, Homo sapien
ttgctgagttccagtagggtctggt

SEQ ID NO: 2863939 - DNA, 25 bp, Homo sapien
ctgagttccagtagggtctggtccc

SEQ ID NO: 2863940 - DNA, 25 bp, Homo sapien
aggttgctgagttccagtagggtct

SEQ ID NO: 2863941 - DNA, 25 bp, Homo sapien
tgagttccagtagggtctggtccca

SEQ ID NO: 2863942 - DNA, 25 bp, Homo sapien
cctttcgacaaactctgctctggtc

SEQ ID NO: 2863943 - DNA, 25 bp, Homo sapien
gacctttcgacaaactctgctctgg

SEQ ID NO: 2863944 - DNA, 25 bp, Homo sapien
tttcgacaaactctgctctggtctc

SEQ ID NO: 2863945 - DNA, 25 bp, Homo sapien
cagacctttcgacaaactctgctct

SEQ ID NO: 2863946 - DNA, 25 bp, Homo sapien
tcctaaaatgtgtaccccgttcaga

SEQ ID NO: 2863947 - DNA, 25 bp, Homo sapien
taatcagaacgggaagtcccggaga

SEQ ID NO: 2863948 - DNA, 25 bp, Homo sapien
tgtgtaccccgttcagaaagtctgg

SEQ ID NO: 2863949 - DNA, 25 bp, Homo sapien
gctggctgctcctaaaatgtgtacc

SEQ ID NO: 2863950 - DNA, 25 bp, Homo sapien
tagaccactcattggcacaactctg

SEQ ID NO: 2863951 - DNA, 25 bp, Homo sapien
gtctcctgccaaacctgcgctgttg

SEQ ID NO: 2863952 - DNA, 25 bp, Homo sapien
acaactctgagtcccggtctttctg

SEQ ID NO: 2863953 - DNA, 25 bp, Homo sapien
gggctgttcccttgtgctgtaccgc

SEQ ID NO: 2863954 - DNA, 25 bp, Homo sapien
acagaaatatactgtagagctaaaa

SEQ ID NO: 2863955 - DNA, 25 bp, Homo sapien
gcctaagcaagaaattggaacagaa

SEQ ID NO: 2863956 - DNA, 25 bp, Homo sapien
aatctttactacaattaccataatg

SEQ ID NO: 2863957 - DNA, 25 bp, Homo sapien
agctaaaaagtcttaaagtgcctct

SEQ ID NO: 2863958 - DNA, 25 bp, Homo sapien
tacaaaacccttctcagctctacgg

SEQ ID NO: 2863959 - DNA, 25 bp, Homo sapien
tgatgaccaggccaataatgcagag

SEQ ID NO: 2863960 - DNA, 25 bp, Homo sapien
ggaatcggagtgttttcaactacaa

SEQ ID NO: 2863961 - DNA, 25 bp, Homo sapien
tcttccgcacatgttgagcaaaagc

SEQ ID NO: 2863962 - DNA, 25 bp, Homo sapien
caaacgcatttgcaagtaccagaaa

SEQ ID NO: 2863963 - DNA, 25 bp, Homo sapien
tccccaaacgcatttgcaagtacca

SEQ ID NO: 2863964 - DNA, 25 bp, Homo sapien
tttgcaagtaccagaaatgtttcat

SEQ ID NO: 2863965 - DNA, 25 bp, Homo sapien
cttctccccaaacgcatttgcaagt

SEQ ID NO: 2863966 - DNA, 25 bp, Homo sapien
gccgaaatctgtcaatactttgtgt

SEQ ID NO: 2863967 - DNA, 25 bp, Homo sapien
tagaggctccatttaccagggaggg

SEQ ID NO: 2863968 - DNA, 25 bp, Homo sapien
cctagaggctccatttaccagggag

SEQ ID NO: 2863969 - DNA, 25 bp, Homo sapien
gggacagggtaagggtggcataatg

SEQ ID NO: 2863970 - DNA, 25 bp, Homo sapien
tctggcggcagacatgcttcatgga

SEQ ID NO: 2863971 - DNA, 25 bp, Homo sapien
catattcgtctcttgtaaacagact

SEQ ID NO: 2863972 - DNA, 25 bp, Homo sapien
cagattcagaagttgtcacagggag

SEQ ID NO: 2863973 - DNA, 25 bp, Homo sapien
gagacacctgatttttctggcggca

SEQ ID NO: 2863974 - DNA, 25 bp, Homo sapien
tgacactgtaggcattggaaatgca

SEQ ID NO: 2863975 - DNA, 25 bp, Homo sapien
tttctgtgcttgacactgtaggcat

SEQ ID NO: 2863976 - DNA, 25 bp, Homo sapien
tgatctacatatacttgttctccaa

SEQ ID NO: 2863977 - DNA, 25 bp, Homo sapien
atatacaaacgggtagttgatctac

SEQ ID NO: 2863978 - DNA, 25 bp, Homo sapien
gtggaggaatatcattgaaccacat

SEQ ID NO: 2863979 - DNA, 25 bp, Homo sapien
ctgtggaggaatatcattgaaccac

SEQ ID NO: 2863980 - DNA, 25 bp, Homo sapien
tgtggaggaatatcattgaaccaca

SEQ ID NO: 2863981 - DNA, 25 bp, Homo sapien
accacatgatatcaaggacatacaa

SEQ ID NO: 2863982 - DNA, 25 bp, Homo sapien
attttaatatatgcactgtcaaagt

SEQ ID NO: 2863983 - DNA, 25 bp, Homo sapien
tcacgcatcttatccttcaggtaca

SEQ ID NO: 2863984 - DNA, 25 bp, Homo sapien
cttcagtctcaattggggttgtact

SEQ ID NO: 2863985 - DNA, 25 bp, Homo sapien
tcatccaacttttcttcacgcatct

SEQ ID NO: 2863986 - DNA, 25 bp, Homo sapien
gggttgtactatccacttcaattct

SEQ ID NO: 2863987 - DNA, 25 bp, Homo sapien
taagtattagttcttgctgagagca

SEQ ID NO: 2863988 - DNA, 25 bp, Homo sapien
tccatttgcattttgggagcgtcta

SEQ ID NO: 2863989 - DNA, 25 bp, Homo sapien
gcagtggactccatgaactgttgaa

SEQ ID NO: 2863990 - DNA, 25 bp, Homo sapien
tcagcaggctcgaaggtacagatca

SEQ ID NO: 2863991 - DNA, 25 bp, Homo sapien
tctctggaggtgtcttgacttgttt

SEQ ID NO: 2863992 - DNA, 25 bp, Homo sapien
tgttcacagaatgcacctcatagcc

SEQ ID NO: 2863993 - DNA, 25 bp, Homo sapien
tgcccaatgccgagtaatggtaagt

SEQ ID NO: 2863994 - DNA, 25 bp, Homo sapien
gccgagtaatggtaagttgttcaca

SEQ ID NO: 2863995 - DNA, 25 bp, Homo sapien
tagccctgctcggttgttctggaca

SEQ ID NO: 2863996 - DNA, 25 bp, Homo sapien
ccaactgtacccattggcattcctt

SEQ ID NO: 2863997 - DNA, 25 bp, Homo sapien
tagtcaccagttccaagttctgaga

SEQ ID NO: 2863998 - DNA, 25 bp, Homo sapien
tccttcctttgtagtcaccagttcc

SEQ ID NO: 2863999 - DNA, 25 bp, Homo sapien
ccagtttctccatataatctggcct

SEQ ID NO: 2864000 - DNA, 25 bp, Homo sapien
tcacccaaactgattttggtctctc

SEQ ID NO: 2864001 - DNA, 25 bp, Homo sapien
tttcacccaaactgattttggtctc

SEQ ID NO: 2864002 - DNA, 25 bp, Homo sapien
cacccaaactgattttggtctctca

SEQ ID NO: 2864003 - DNA, 25 bp, Homo sapien
tgtgttttcacccaaactgattttg

SEQ ID NO: 2864004 - DNA, 25 bp, Homo sapien
tccatctgctagaggtaggagagtc

SEQ ID NO: 2864005 - DNA, 25 bp, Homo sapien
ccatctgctagaggtaggagagtct

SEQ ID NO: 2864006 - DNA, 25 bp, Homo sapien
atctgctagaggtaggagagtctgg

SEQ ID NO: 2864007 - DNA, 25 bp, Homo sapien
cttccatctgctagaggtaggagag

SEQ ID NO: 2864008 - DNA, 25 bp, Homo sapien
tcagtctgaatgcttttccacacat

SEQ ID NO: 2864009 - DNA, 25 bp, Homo sapien
tctgaatgcttttccacacatttct

SEQ ID NO: 2864010 - DNA, 25 bp, Homo sapien
gaatgcttttccacacatttcttac

SEQ ID NO: 2864011 - DNA, 25 bp, Homo sapien
agtctgaatgcttttccacacattt

SEQ ID NO: 2864012 - DNA, 25 bp, Homo sapien
ctgaagtatctgaagtgaactgtga

SEQ ID NO: 2864013 - DNA, 25 bp, Homo sapien
tgaagtatctgaagtgaactgtgaa

SEQ ID NO: 2864014 - DNA, 25 bp, Homo sapien
gaagtatctgaagtgaactgtgaaa

SEQ ID NO: 2864015 - DNA, 25 bp, Homo sapien
cctgaagtatctgaagtgaactgtg

SEQ ID NO: 2864016 - DNA, 25 bp, Homo sapien
tgacccatgaaaggacagatactgg

SEQ ID NO: 2864017 - DNA, 25 bp, Homo sapien
ctgaaattggtagtgtctctgtgac

SEQ ID NO: 2864018 - DNA, 25 bp, Homo sapien
tggatggatagtctaaaaaggcagc

SEQ ID NO: 2864019 - DNA, 25 bp, Homo sapien
ctcaggtaaccaagaggatcaagca

SEQ ID NO: 2864020 - DNA, 25 bp, Homo sapien
aattaactcaagatgagttaaagac

SEQ ID NO: 2864021 - DNA, 25 bp, Homo sapien
caaaagaaactatcatcagagtgaa

SEQ ID NO: 2864022 - DNA, 25 bp, Homo sapien
caaaaattaactcaagatgagttaa

SEQ ID NO: 2864023 - DNA, 25 bp, Homo sapien
gcaaaagaaactatcatcagagtga

SEQ ID NO: 2864024 - DNA, 25 bp, Homo sapien
tcagacacgtagggcagcaatctaa

SEQ ID NO: 2864025 - DNA, 25 bp, Homo sapien
ttcagacacgtagggcagcaatcta

SEQ ID NO: 2864026 - DNA, 25 bp, Homo sapien
cttcagacacgtagggcagcaatct

SEQ ID NO: 2864027 - DNA, 25 bp, Homo sapien
tgttgacctcgaaccctttcttgcg

SEQ ID NO: 2864028 - DNA, 25 bp, Homo sapien
cagctttgaggccatacacgaatat

SEQ ID NO: 2864029 - DNA, 25 bp, Homo sapien
aaagtcgtttgtactctctggctca

SEQ ID NO: 2864030 - DNA, 25 bp, Homo sapien
cattgtcccggtctacgatgcttct

SEQ ID NO: 2864031 - DNA, 25 bp, Homo sapien
acttgtaatagcaaattctgagttg

SEQ ID NO: 2864032 - DNA, 25 bp, Homo sapien
ttcaggtcgtttcaggatttgactt

SEQ ID NO: 2864033 - DNA, 25 bp, Homo sapien
tttcaggtcgtttcaggatttgact

SEQ ID NO: 2864034 - DNA, 25 bp, Homo sapien
gagagagatgattcacacagattat

SEQ ID NO: 2864035 - DNA, 25 bp, Homo sapien
taccaggtatgaggccatccagtag

SEQ ID NO: 2864036 - DNA, 25 bp, Homo sapien
tgattcacacagattataacagtaa

SEQ ID NO: 2864037 - DNA, 25 bp, Homo sapien
cagtaataactgtttaccaggtatg

SEQ ID NO: 2864038 - DNA, 25 bp, Homo sapien
tagccataggcagagcataaattct

SEQ ID NO: 2864039 - DNA, 25 bp, Homo sapien
ctagccataggcagagcataaattc

SEQ ID NO: 2864040 - DNA, 25 bp, Homo sapien
gccataggcagagcataaattctta

SEQ ID NO: 2864041 - DNA, 25 bp, Homo sapien
ccataggcagagcataaattcttac

SEQ ID NO: 2864042 - DNA, 25 bp, Homo sapien
ttccactgtgtaagctgtatatcca

SEQ ID NO: 2864043 - DNA, 25 bp, Homo sapien
tgtatatccacagggccatattgtc

SEQ ID NO: 2864044 - DNA, 25 bp, Homo sapien
tgtgtaagctgtatatccacagggc

SEQ ID NO: 2864045 - DNA, 25 bp, Homo sapien
tcctgttccactgtgtaagctgtat

SEQ ID NO: 2864046 - DNA, 25 bp, Homo sapien
gccccacggccagatggatttggtt

SEQ ID NO: 2864047 - DNA, 25 bp, Homo sapien
gacttgggagcactgaattactctc

SEQ ID NO: 2864048 - DNA, 25 bp, Homo sapien
tctctccaattatggctgaaattat

SEQ ID NO: 2864049 - DNA, 25 bp, Homo sapien
gagccccacggccagatggatttgg

SEQ ID NO: 2864050 - DNA, 25 bp, Homo sapien
atggaccaacaagataaggcacagc

SEQ ID NO: 2864051 - DNA, 25 bp, Homo sapien
ctgaataaatggaccaacaagataa

SEQ ID NO: 2864052 - DNA, 25 bp, Homo sapien
aaatggaccaacaagataaggcaca

SEQ ID NO: 2864053 - DNA, 25 bp, Homo sapien
aataaatggaccaacaagataaggc

SEQ ID NO: 2864054 - DNA, 25 bp, Homo sapien
gtgctgcgtagctcttccttctttt

SEQ ID NO: 2864055 - DNA, 25 bp, Homo sapien
ggacatttgcctgaaagtgcgggtt

SEQ ID NO: 2864056 - DNA, 25 bp, Homo sapien
tctgcatggagggcgtatttttgtg

SEQ ID NO: 2864057 - DNA, 25 bp, Homo sapien
tttgtgggtattggtgtgatagaag

SEQ ID NO: 2864058 - DNA, 25 bp, Homo sapien
catggagggcgtatttttgtgggta

SEQ ID NO: 2864059 - DNA, 25 bp, Homo sapien
gacatccttagtcacacccagtatg

SEQ ID NO: 2864060 - DNA, 25 bp, Homo sapien
ctttgacatccttagtcacacccag

SEQ ID NO: 2864061 - DNA, 25 bp, Homo sapien
ttagtcacacccagtatgactgatg

SEQ ID NO: 2864062 - DNA, 25 bp, Homo sapien
tccttagtcacacccagtatgactg

SEQ ID NO: 2864063 - DNA, 25 bp, Homo sapien
ctcaataactgcctgtcaaaatctt

SEQ ID NO: 2864064 - DNA, 25 bp, Homo sapien
ccctcaataactgcctgtcaaaatc

SEQ ID NO: 2864065 - DNA, 25 bp, Homo sapien
caataactgcctgtcaaaatcttca

SEQ ID NO: 2864066 - DNA, 25 bp, Homo sapien
atcttcattcttcaaaaatccagct

SEQ ID NO: 2864067 - DNA, 25 bp, Homo sapien
gagcattgagaattctgatgctgtc

SEQ ID NO: 2864068 - DNA, 25 bp, Homo sapien
gctagttacaacagtcactctgagc

SEQ ID NO: 2864069 - DNA, 25 bp, Homo sapien
cagtgactgaacctgtagtcttgct

SEQ ID NO: 2864070 - DNA, 25 bp, Homo sapien
tctgatgctgtctccggtgttgtaa

SEQ ID NO: 2864071 - DNA, 25 bp, Homo sapien
tttcttctctagcccttctagaccc

SEQ ID NO: 2864072 - DNA, 25 bp, Homo sapien
ttcttctctagcccttctagacccc

SEQ ID NO: 2864073 - DNA, 25 bp, Homo sapien
tcttctctagcccttctagacccca

SEQ ID NO: 2864074 - DNA, 25 bp, Homo sapien
cttctctagcccttctagaccccat

SEQ ID NO: 2864075 - DNA, 25 bp, Homo sapien
tacttctctgcctttctgctgcagc

SEQ ID NO: 2864076 - DNA, 25 bp, Homo sapien
tgaaagcagctgtttacttctctgc

SEQ ID NO: 2864077 - DNA, 25 bp, Homo sapien
ctgaaagcagctgtttacttctctg

SEQ ID NO: 2864078 - DNA, 25 bp, Homo sapien
ttctctgcctttctgctgcagccat

SEQ ID NO: 2864079 - DNA, 25 bp, Homo sapien
agctcctgtcccactctcgtgggtt

SEQ ID NO: 2864080 - DNA, 25 bp, Homo sapien
ccttagctctaagttggctattgtc

SEQ ID NO: 2864081 - DNA, 25 bp, Homo sapien
tggctattgtcaatctcagctcctg

SEQ ID NO: 2864082 - DNA, 25 bp, Homo sapien
taagttggctattgtcaatctcagc

SEQ ID NO: 2864083 - DNA, 25 bp, Homo sapien
tcactgatgatgctgtcctgtagcc

SEQ ID NO: 2864084 - DNA, 25 bp, Homo sapien
tgggagatgcactgccttgtcccct

SEQ ID NO: 2864085 - DNA, 25 bp, Homo sapien
tgatgatgctgtcctgtagccattt

SEQ ID NO: 2864086 - DNA, 25 bp, Homo sapien
gaagtgggagatgcactgccttgtc

SEQ ID NO: 2864087 - DNA, 25 bp, Homo sapien
cttgctctttttgaacgtggctgcc

SEQ ID NO: 2864088 - DNA, 25 bp, Homo sapien
tgctctttttgaacgtggctgccag

SEQ ID NO: 2864089 - DNA, 25 bp, Homo sapien
ttgctctttttgaacgtggctgcca

SEQ ID NO: 2864090 - DNA, 25 bp, Homo sapien
ctggggacctggatcccccatccca

SEQ ID NO: 2864091 - DNA, 25 bp, Homo sapien
cctcctcagctgtcctattgatttt

SEQ ID NO: 2864092 - DNA, 25 bp, Homo sapien
gatgggagtggagccctggggacct

SEQ ID NO: 2864093 - DNA, 25 bp, Homo sapien
cctcctcctcagctgtcctattgat

SEQ ID NO: 2864094 - DNA, 25 bp, Homo sapien
gatttcatgcaaaatgtcccagacc

SEQ ID NO: 2864095 - DNA, 25 bp, Homo sapien
gagatacagtcaagttccactccat

SEQ ID NO: 2864096 - DNA, 25 bp, Homo sapien
acatctgttctggagatacagtcaa

SEQ ID NO: 2864097 - DNA, 25 bp, Homo sapien
aaacactttcggtgactccccattg

SEQ ID NO: 2864098 - DNA, 25 bp, Homo sapien
tgcagccgtaatgtgagtttcacca

SEQ ID NO: 2864099 - DNA, 25 bp, Homo sapien
tcctgcagccgtaatgtgagtttca

SEQ ID NO: 2864100 - DNA, 25 bp, Homo sapien
cagccgtaatgtgagtttcaccaca

SEQ ID NO: 2864101 - DNA, 25 bp, Homo sapien
gtaatgtgagtttcaccacagctgt

SEQ ID NO: 2864102 - DNA, 25 bp, Homo sapien
gatgcacaccctcaaaatctgctca

SEQ ID NO: 2864103 - DNA, 25 bp, Homo sapien
caccctcaaaatctgctcacagcat

SEQ ID NO: 2864104 - DNA, 25 bp, Homo sapien
taactgaacacataaccggagatgc

SEQ ID NO: 2864105 - DNA, 25 bp, Homo sapien
ttaactgaacacataaccggagatg

SEQ ID NO: 2864106 - DNA, 25 bp, Homo sapien
gctttctaaaatgacgtgttgagag

SEQ ID NO: 2864107 - DNA, 25 bp, Homo sapien
tttaaaattgcaccttgaatgctgc

SEQ ID NO: 2864108 - DNA, 25 bp, Homo sapien
tttgatggccttagataactcttgg

SEQ ID NO: 2864109 - DNA, 25 bp, Homo sapien
gagatctgggtgtgtggctaattat

SEQ ID NO: 2864110 - DNA, 25 bp, Homo sapien
ggccatcaactttaatacgtctcac

SEQ ID NO: 2864111 - DNA, 25 bp, Homo sapien
aagtctcccacactcatcaagaagt

SEQ ID NO: 2864112 - DNA, 25 bp, Homo sapien
tcccacactcatcaagaagtttatc

SEQ ID NO: 2864113 - DNA, 25 bp, Homo sapien
agtctcccacactcatcaagaagtt

SEQ ID NO: 2864114 - DNA, 25 bp, Homo sapien
tctcccacactcatcaagaagttta

SEQ ID NO: 2864115 - DNA, 25 bp, Homo sapien
tggcacaaatgatgatacaaggtga

SEQ ID NO: 2864116 - DNA, 25 bp, Homo sapien
ccaagtggatgtgctagcaatgtcc

SEQ ID NO: 2864117 - DNA, 25 bp, Homo sapien
caaggtgaccaagtggatgtgctag

SEQ ID NO: 2864118 - DNA, 25 bp, Homo sapien
caaatgatgatacaaggtgaccaag

SEQ ID NO: 2864119 - DNA, 25 bp, Homo sapien
tacagataacttcaatcattacatt

SEQ ID NO: 2864120 - DNA, 25 bp, Homo sapien
actacagataacttcaatcattaca

SEQ ID NO: 2864121 - DNA, 25 bp, Homo sapien
taactacagataacttcaatcatta

SEQ ID NO: 2864122 - DNA, 25 bp, Homo sapien
acagataacttcaatcattacattt

SEQ ID NO: 2864123 - DNA, 25 bp, Homo sapien
ctgcatcctatgacttgaatttggg

SEQ ID NO: 2864124 - DNA, 25 bp, Homo sapien
gggttctgtgtggtactccagtctc

SEQ ID NO: 2864125 - DNA, 25 bp, Homo sapien
atctgcatcctatgacttgaatttg

SEQ ID NO: 2864126 - DNA, 25 bp, Homo sapien
ggtactccagtctctcataagactt

SEQ ID NO: 2864127 - DNA, 25 bp, Homo sapien
agagtgatagcgagaactttttacc

SEQ ID NO: 2864128 - DNA, 25 bp, Homo sapien
caattacaacctatcagtggaagag

SEQ ID NO: 2864129 - DNA, 25 bp, Homo sapien
ggcaatgccgatcaataatctgaaa

SEQ ID NO: 2864130 - DNA, 25 bp, Homo sapien
cagcactgaagtagcatagagaaag

SEQ ID NO: 2864131 - DNA, 25 bp, Homo sapien
tctggttttgagctcaagttgtcct

SEQ ID NO: 2864132 - DNA, 25 bp, Homo sapien
gagctcaagttgtcctttttaattg

SEQ ID NO: 2864133 - DNA, 25 bp, Homo sapien
tgtcctttttaattggatctcttct

SEQ ID NO: 2864134 - DNA, 25 bp, Homo sapien
ccctctggttttgagctcaagttgt

SEQ ID NO: 2864135 - DNA, 25 bp, Homo sapien
tatattggaggcgtctctcagatgc

SEQ ID NO: 2864136 - DNA, 25 bp, Homo sapien
tgtccagtgaagatctccaaaaggt

SEQ ID NO: 2864137 - DNA, 25 bp, Homo sapien
tggagttccatctcaaaggatctgg

SEQ ID NO: 2864138 - DNA, 25 bp, Homo sapien
gatgtgtgagtcaaaattcaacccc

SEQ ID NO: 2864139 - DNA, 25 bp, Homo sapien
gtttttctgtagttctgcaacttgg

SEQ ID NO: 2864140 - DNA, 25 bp, Homo sapien
gtgtttttctgtagttctgcaactt

SEQ ID NO: 2864141 - DNA, 25 bp, Homo sapien
tttctgtagttctgcaacttggcct

SEQ ID NO: 2864142 - DNA, 25 bp, Homo sapien
ttttctgtagttctgcaacttggcc

SEQ ID NO: 2864143 - DNA, 25 bp, Homo sapien
gtgactcagatgacacatatgtccc

SEQ ID NO: 2864144 - DNA, 25 bp, Homo sapien
tgtacatcgtatttctgtgactcag

SEQ ID NO: 2864145 - DNA, 25 bp, Homo sapien
ccttccctgatctgtagtttatgta

SEQ ID NO: 2864146 - DNA, 25 bp, Homo sapien
cctgatctgtagtttatgtacatcg

SEQ ID NO: 2864147 - DNA, 25 bp, Homo sapien
tagattgctgcattctgggactcca

SEQ ID NO: 2864148 - DNA, 25 bp, Homo sapien
caggagatgtgtggtaacaaaaccc

SEQ ID NO: 2864149 - DNA, 25 bp, Homo sapien
tacaccacatacgtctctgttgggc

SEQ ID NO: 2864150 - DNA, 25 bp, Homo sapien
tgggactccaactgacagaggctcc

SEQ ID NO: 2864151 - DNA, 25 bp, Homo sapien
aatatttatggttgacagcctctgc

SEQ ID NO: 2864152 - DNA, 25 bp, Homo sapien
caaaagtgcttttgtcaggtaaatc

SEQ ID NO: 2864153 - DNA, 25 bp, Homo sapien
aatctggtgcaatatccaacatgcg

SEQ ID NO: 2864154 - DNA, 25 bp, Homo sapien
ccaacatgcgatgtcacttcatcaa

SEQ ID NO: 2864155 - DNA, 25 bp, Homo sapien
gttaattgccacattatagacatcc

SEQ ID NO: 2864156 - DNA, 25 bp, Homo sapien
ttgccacattatagacatccagaga

SEQ ID NO: 2864157 - DNA, 25 bp, Homo sapien
attaggtcattaagaagctgctggt

SEQ ID NO: 2864158 - DNA, 25 bp, Homo sapien
tgctggttaattgccacattataga

SEQ ID NO: 2864159 - DNA, 25 bp, Homo sapien
aggagttcaagaccagcctgggcaa

SEQ ID NO: 2864160 - DNA, 25 bp, Homo sapien
caaggtgggcagatggcttgagttc

SEQ ID NO: 2864161 - DNA, 25 bp, Homo sapien
tgggcaacatggtaaaaccacatct

SEQ ID NO: 2864162 - DNA, 25 bp, Homo sapien
cctgggcaacatggtaaaaccacat

SEQ ID NO: 2864163 - DNA, 25 bp, Homo sapien
ttacatggcattgatgcaagcaata

SEQ ID NO: 2864164 - DNA, 25 bp, Homo sapien
ttgatgcaagcaatagttactctgg

SEQ ID NO: 2864165 - DNA, 25 bp, Homo sapien
gcaagcaatagttactctggacaag

SEQ ID NO: 2864166 - DNA, 25 bp, Homo sapien
tggcattgatgcaagcaatagttac

SEQ ID NO: 2864167 - DNA, 25 bp, Homo sapien
cacagaaccacctgaactggttgat

SEQ ID NO: 2864168 - DNA, 25 bp, Homo sapien
acacagaaccacctgaactggttga

SEQ ID NO: 2864169 - DNA, 25 bp, Homo sapien
cagaaccacctgaactggttgatac

SEQ ID NO: 2864170 - DNA, 25 bp, Homo sapien
gaaccacctgaactggttgatacat

SEQ ID NO: 2864171 - DNA, 25 bp, Homo sapien
agtcagtgcgaccttcatgttcttg

SEQ ID NO: 2864172 - DNA, 25 bp, Homo sapien
aagcatagagtcagtgcgaccttca

SEQ ID NO: 2864173 - DNA, 25 bp, Homo sapien
gtcagcagtttaagcatagagtcag

SEQ ID NO: 2864174 - DNA, 25 bp, Homo sapien
aactgtcagcagtttaagcatagag

SEQ ID NO: 2864175 - DNA, 25 bp, Homo sapien
tccaacaccaacaactttacccaga

SEQ ID NO: 2864176 - DNA, 25 bp, Homo sapien
cccagaccagaaaagatcatccaca

SEQ ID NO: 2864177 - DNA, 25 bp, Homo sapien
caccaacaactttacccagaccaga

SEQ ID NO: 2864178 - DNA, 25 bp, Homo sapien
gaccagaaaagatcatccacaacag

SEQ ID NO: 2864179 - DNA, 25 bp, Homo sapien
tgcgcagagaccaaacaggcagcac

SEQ ID NO: 2864180 - DNA, 25 bp, Homo sapien
ctgctgcgcagagaccaaacaggca

SEQ ID NO: 2864181 - DNA, 25 bp, Homo sapien
agaccaaacaggcagcacggagagg

SEQ ID NO: 2864182 - DNA, 25 bp, Homo sapien
gcagagaccaaacaggcagcacgga

SEQ ID NO: 2864183 - DNA, 25 bp, Homo sapien
tgctcagtaaattactaactggagc

SEQ ID NO: 2864184 - DNA, 25 bp, Homo sapien
gtgctcagtaaattactaactggag

SEQ ID NO: 2864185 - DNA, 25 bp, Homo sapien
agacattaccaatcactatgtccag

SEQ ID NO: 2864186 - DNA, 25 bp, Homo sapien
tccccaaatatagcatttttccaag

SEQ ID NO: 2864187 - DNA, 25 bp, Homo sapien
gagtaagtgtgcagacattaccaat

SEQ ID NO: 2864188 - DNA, 25 bp, Homo sapien
ccccaaatatagcatttttccaagg

SEQ ID NO: 2864189 - DNA, 25 bp, Homo sapien
cagagggtagggtatctgcacacac

SEQ ID NO: 2864190 - DNA, 25 bp, Homo sapien
tctgaatatactctatgagccgaag

SEQ ID NO: 2864191 - DNA, 25 bp, Homo sapien
tccctagtgtgagttgtaaaggcac

SEQ ID NO: 2864192 - DNA, 25 bp, Homo sapien
tgagccgaaggagcaatatttaaag

SEQ ID NO: 2864193 - DNA, 25 bp, Homo sapien
gtttcttgcctgtaccaaagttgtg

SEQ ID NO: 2864194 - DNA, 25 bp, Homo sapien
tcctggtctaagtcgcaattttcaa

SEQ ID NO: 2864195 - DNA, 25 bp, Homo sapien
gcttcacagttgcaaactcgggcat

SEQ ID NO: 2864196 - DNA, 25 bp, Homo sapien
gcatccttgggaagcatgatcatag

SEQ ID NO: 2864197 - DNA, 25 bp, Homo sapien
gggagtaacgtgctgcactggttca

SEQ ID NO: 2864198 - DNA, 25 bp, Homo sapien
tcattgcagcgcttttccagggagt

SEQ ID NO: 2864199 - DNA, 25 bp, Homo sapien
ggagtaacgtgctgcactggttcag

SEQ ID NO: 2864200 - DNA, 25 bp, Homo sapien
gggcagctgcactgttgcctgccag

SEQ ID NO: 2864201 - DNA, 25 bp, Homo sapien
caaaggataactctccattcgtgag

SEQ ID NO: 2864202 - DNA, 25 bp, Homo sapien
ttgactgccgaatgaaccaaaggat

SEQ ID NO: 2864203 - DNA, 25 bp, Homo sapien
cagcctgtcctctttgactgccgaa

SEQ ID NO: 2864204 - DNA, 25 bp, Homo sapien
aaactgggagcgcaaacagcccctt

SEQ ID NO: 2864205 - DNA, 25 bp, Homo sapien
tgggagcgcaaacagccccttgttt

SEQ ID NO: 2864206 - DNA, 25 bp, Homo sapien
gctgtgctgaaactgggagcgcaaa

SEQ ID NO: 2864207 - DNA, 25 bp, Homo sapien
gctgaaactgggagcgcaaacagcc

SEQ ID NO: 2864208 - DNA, 25 bp, Homo sapien
caactgtctgagtctcgttcccacg

SEQ ID NO: 2864209 - DNA, 25 bp, Homo sapien
gagtctcgttcccacgaacaccata

SEQ ID NO: 2864210 - DNA, 25 bp, Homo sapien
gttcccacgaacaccataaattcta

SEQ ID NO: 2864211 - DNA, 25 bp, Homo sapien
tgtctgagtctcgttcccacgaaca

SEQ ID NO: 2864212 - DNA, 25 bp, Homo sapien
ttggtaaccattgagaagagtgttc

SEQ ID NO: 2864213 - DNA, 25 bp, Homo sapien
tgagaatggcaggtgccagattcct

SEQ ID NO: 2864214 - DNA, 25 bp, Homo sapien
ttctgtggacattggtaaccattga

SEQ ID NO: 2864215 - DNA, 25 bp, Homo sapien
gagaatggcaggtgccagattcctg

SEQ ID NO: 2864216 - DNA, 25 bp, Homo sapien
taggagataaagaatctgattccac

SEQ ID NO: 2864217 - DNA, 25 bp, Homo sapien
ctgtcagaatctcgtactgcctgaa

SEQ ID NO: 2864218 - DNA, 25 bp, Homo sapien
cctgaagatgtagtataggagataa

SEQ ID NO: 2864219 - DNA, 25 bp, Homo sapien
agataaagaatctgattccacagtt

SEQ ID NO: 2864220 - DNA, 25 bp, Homo sapien
ctgaatgattgcaggaacaaaaggc

SEQ ID NO: 2864221 - DNA, 25 bp, Homo sapien
tgcacttgtactcagttttgtattt

SEQ ID NO: 2864222 - DNA, 25 bp, Homo sapien
ctgcacttgtactcagttttgtatt

SEQ ID NO: 2864223 - DNA, 25 bp, Homo sapien
gcacttgtactcagttttgtatttg

SEQ ID NO: 2864224 - DNA, 25 bp, Homo sapien
tccactcagtggtttagtctggaag

SEQ ID NO: 2864225 - DNA, 25 bp, Homo sapien
cgtggtcatccccttgagcaaggag

SEQ ID NO: 2864226 - DNA, 25 bp, Homo sapien
aaagggacaagatctgtattctgcc

SEQ ID NO: 2864227 - DNA, 25 bp, Homo sapien
gaagcagctcagtgagtgttctgga

SEQ ID NO: 2864228 - DNA, 25 bp, Homo sapien
taggttgccacggtcactgccaagg

SEQ ID NO: 2864229 - DNA, 25 bp, Homo sapien
aggttgccacggtcactgccaaggg

SEQ ID NO: 2864230 - DNA, 25 bp, Homo sapien
tctccctcagtgtggtcgttagagc

SEQ ID NO: 2864231 - DNA, 25 bp, Homo sapien
tgtggtcgttagagcgttgttttgt

SEQ ID NO: 2864232 - DNA, 25 bp, Homo sapien
cctcagtgtggtcgttagagcgttg

SEQ ID NO: 2864233 - DNA, 25 bp, Homo sapien
cagtgtggtcgttagagcgttgttt

SEQ ID NO: 2864234 - DNA, 25 bp, Homo sapien
tctgcttgtacaaagatgaactgga

SEQ ID NO: 2864235 - DNA, 25 bp, Homo sapien
actgagaataagcaaacatttgtac

SEQ ID NO: 2864236 - DNA, 25 bp, Homo sapien
tgtaaatccactaacagaaactgag

SEQ ID NO: 2864237 - DNA, 25 bp, Homo sapien
caattacttgggtgggatcctcttc

SEQ ID NO: 2864238 - DNA, 25 bp, Homo sapien
tactgagtacccatgctgtatcaag

SEQ ID NO: 2864239 - DNA, 25 bp, Homo sapien
tgacaagtcgaaaggtctgtactcc

SEQ ID NO: 2864240 - DNA, 25 bp, Homo sapien
tcaagcatgtgacctgatgggagga

SEQ ID NO: 2864241 - DNA, 25 bp, Homo sapien
tccagagcctcaattcagaactgat

SEQ ID NO: 2864242 - DNA, 25 bp, Homo sapien
ggaccaaatacctgcttatacttct

SEQ ID NO: 2864243 - DNA, 25 bp, Homo sapien
ctgcttatacttctttgcaggaaag

SEQ ID NO: 2864244 - DNA, 25 bp, Homo sapien
atggaccaaatacctgcttatactt

SEQ ID NO: 2864245 - DNA, 25 bp, Homo sapien
aaatacctgcttatacttctttgca

SEQ ID NO: 2864246 - DNA, 25 bp, Homo sapien
gaatgtggaaagacgagactagacc

SEQ ID NO: 2864247 - DNA, 25 bp, Homo sapien
tgtaaacgtggtctcctgaatgtgg

SEQ ID NO: 2864248 - DNA, 25 bp, Homo sapien
caacataaggtgcagggctgtttct

SEQ ID NO: 2864249 - DNA, 25 bp, Homo sapien
cagttccaatgcagccgtgtaaacg

SEQ ID NO: 2864250 - DNA, 25 bp, Homo sapien
catgcttacagtcagcattagagcc

SEQ ID NO: 2864251 - DNA, 25 bp, Homo sapien
taatttgacagcagtctagggccag

SEQ ID NO: 2864252 - DNA, 25 bp, Homo sapien
tgagagagtgaataactcatccggg

SEQ ID NO: 2864253 - DNA, 25 bp, Homo sapien
gccaggattggaattaagatgcccc

SEQ ID NO: 2864254 - DNA, 25 bp, Homo sapien
ttcaaagaccagttgcaattcgacc

SEQ ID NO: 2864255 - DNA, 25 bp, Homo sapien
taatatgctttgagtcgctaaaggg

SEQ ID NO: 2864256 - DNA, 25 bp, Homo sapien
ccttttgatcagaagaaatgcacca

SEQ ID NO: 2864257 - DNA, 25 bp, Homo sapien
ttgaccagctggagttataatatgc

SEQ ID NO: 2864258 - DNA, 25 bp, Homo sapien
gactcatgattcccattgtcagaaa

SEQ ID NO: 2864259 - DNA, 25 bp, Homo sapien
ggactcatgattcccattgtcagaa

SEQ ID NO: 2864260 - DNA, 25 bp, Homo sapien
gtgttcaagccctcaccgctatctt

SEQ ID NO: 2864261 - DNA, 25 bp, Homo sapien
ctgatctctcattaattccttagtg

SEQ ID NO: 2864262 - DNA, 25 bp, Homo sapien
tcaccgctatcttccgttaaagtaa

SEQ ID NO: 2864263 - DNA, 25 bp, Homo sapien
cattaattccttagtgttcaagccc

SEQ ID NO: 2864264 - DNA, 25 bp, Homo sapien
tcgtgaagccttcgtcctctctcag

SEQ ID NO: 2864265 - DNA, 25 bp, Homo sapien
tgaagccttcgtcctctctcagtac

SEQ ID NO: 2864266 - DNA, 25 bp, Homo sapien
aaacacgctcgtgaagccttcgtcc

SEQ ID NO: 2864267 - DNA, 25 bp, Homo sapien
cttggtttcaaacacgctcgtgaag

SEQ ID NO: 2864268 - DNA, 25 bp, Homo sapien
atggtcatttcagcccgttgtgttg

SEQ ID NO: 2864269 - DNA, 25 bp, Homo sapien
ggcacataccggtattatggtcatt

SEQ ID NO: 2864270 - DNA, 25 bp, Homo sapien
ctggcacataccggtattatggtca

SEQ ID NO: 2864271 - DNA, 25 bp, Homo sapien
cacataccggtattatggtcatttc

SEQ ID NO: 2864272 - DNA, 25 bp, Homo sapien
ctgtgcacagagagtaatatagtgg

SEQ ID NO: 2864273 - DNA, 25 bp, Homo sapien
ggtctcctttcatttatgcaggcat

SEQ ID NO: 2864274 - DNA, 25 bp, Homo sapien
ttcttttgtctacccactaggagca

SEQ ID NO: 2864275 - DNA, 25 bp, Homo sapien
agcctgatgaggtaaaggattatgt

SEQ ID NO: 2864276 - DNA, 25 bp, Homo sapien
tccctgtcacgattcctctgttttg

SEQ ID NO: 2864277 - DNA, 25 bp, Homo sapien
ccctgtcacgattcctctgttttgg

SEQ ID NO: 2864278 - DNA, 25 bp, Homo sapien
ggctgcctgcaacgttaccccgcat

SEQ ID NO: 2864279 - DNA, 25 bp, Homo sapien
gggctgcctgcaacgttaccccgca

SEQ ID NO: 2864280 - DNA, 25 bp, Homo sapien
gggtaaagtacggtctgtgggctgc

SEQ ID NO: 2864281 - DNA, 25 bp, Homo sapien
gtaaagtacggtctgtgggctgcct

SEQ ID NO: 2864282 - DNA, 25 bp, Homo sapien
tcaagatatgccagagtgagagctt

SEQ ID NO: 2864283 - DNA, 25 bp, Homo sapien
tactttaccaaatagcagtagcttc

SEQ ID NO: 2864284 - DNA, 25 bp, Homo sapien
caatcacttgatccttaagcagtaa

SEQ ID NO: 2864285 - DNA, 25 bp, Homo sapien
tacagattcgtatccatagtgtcga

SEQ ID NO: 2864286 - DNA, 25 bp, Homo sapien
catgactccacgcatgaggctcttc

SEQ ID NO: 2864287 - DNA, 25 bp, Homo sapien
gattccttcaccctcttatcctggt

SEQ ID NO: 2864288 - DNA, 25 bp, Homo sapien
gttccacccatagcaggattccttc

SEQ ID NO: 2864289 - DNA, 25 bp, Homo sapien
ttgcctatgcattctgttccaccca

SEQ ID NO: 2864290 - DNA, 25 bp, Homo sapien
aactgctctgctagagcagcttgga

SEQ ID NO: 2864291 - DNA, 25 bp, Homo sapien
agagcagcttggagcctcggaaatg

SEQ ID NO: 2864292 - DNA, 25 bp, Homo sapien
gcatggacccctcatacatacctcc

SEQ ID NO: 2864293 - DNA, 25 bp, Homo sapien
ctagagcagcttggagcctcggaaa

SEQ ID NO: 2864294 - DNA, 25 bp, Homo sapien
tttgttgaaggagcgttattttcag

SEQ ID NO: 2864295 - DNA, 25 bp, Homo sapien
ttgaaggagcgttattttcagccat

SEQ ID NO: 2864296 - DNA, 25 bp, Homo sapien
ctggtcttcaacgtgattatttgtt

SEQ ID NO: 2864297 - DNA, 25 bp, Homo sapien
tcaacgtgattatttgttgaaggag

SEQ ID NO: 2864298 - DNA, 25 bp, Homo sapien
tcattgcagatggtaagtgctttgt

SEQ ID NO: 2864299 - DNA, 25 bp, Homo sapien
tgtttgtgaacagataacaatctct

SEQ ID NO: 2864300 - DNA, 25 bp, Homo sapien
gagctgcttccctctacagaattaa

SEQ ID NO: 2864301 - DNA, 25 bp, Homo sapien
ttgcctcaggagaaatttctctctt

SEQ ID NO: 2864302 - DNA, 25 bp, Homo sapien
accgaaatcgaggtgagtttgctgt

SEQ ID NO: 2864303 - DNA, 25 bp, Homo sapien
tccacactaggttgggcccaaccga

SEQ ID NO: 2864304 - DNA, 25 bp, Homo sapien
gagtttgctgtaagaataggaatga

SEQ ID NO: 2864305 - DNA, 25 bp, Homo sapien
ccttctccacactaggttgggccca

SEQ ID NO: 2864306 - DNA, 25 bp, Homo sapien
ccttttggtgctccaggaatgggca

SEQ ID NO: 2864307 - DNA, 25 bp, Homo sapien
gaagagcaaggggaaattcaagtga

SEQ ID NO: 2864308 - DNA, 25 bp, Homo sapien
cgtgctgccttttggtgctccagga

SEQ ID NO: 2864309 - DNA, 25 bp, Homo sapien
gagcaaggggaaattcaagtgaaga

SEQ ID NO: 2864310 - DNA, 25 bp, Homo sapien
tatttccatgacatgaactgatgct

SEQ ID NO: 2864311 - DNA, 25 bp, Homo sapien
cagtgcttgtactaaacattcctta

SEQ ID NO: 2864312 - DNA, 25 bp, Homo sapien
ttcagctggaaagaactcgcttctt

SEQ ID NO: 2864313 - DNA, 25 bp, Homo sapien
gcttcttccctgtacagacagtgct

SEQ ID NO: 2864314 - DNA, 25 bp, Homo sapien
tctttaagatttgttcctttctcca

SEQ ID NO: 2864315 - DNA, 25 bp, Homo sapien
taagatttgttcctttctccaccat

SEQ ID NO: 2864316 - DNA, 25 bp, Homo sapien
tgtttctggtctttaagatttgttc

SEQ ID NO: 2864317 - DNA, 25 bp, Homo sapien
tcagtttctgtttctggtctttaag

SEQ ID NO: 2864318 - DNA, 25 bp, Homo sapien
agttgatagcgttgccttcatgtta

SEQ ID NO: 2864319 - DNA, 25 bp, Homo sapien
aatttgattgtactgcttgccatgt

SEQ ID NO: 2864320 - DNA, 25 bp, Homo sapien
gcgttgccttcatgttagacaagca

SEQ ID NO: 2864321 - DNA, 25 bp, Homo sapien
cactttgtttctggtggcatgacaa

SEQ ID NO: 2864322 - DNA, 25 bp, Homo sapien
gtctccagacaaatgatgccatcta

SEQ ID NO: 2864323 - DNA, 25 bp, Homo sapien
tatttctcaataggctgggttttct

SEQ ID NO: 2864324 - DNA, 25 bp, Homo sapien
tgattgtaaagatccagatcacagg

SEQ ID NO: 2864325 - DNA, 25 bp, Homo sapien
tcacaggttcccattatcaaatgac

SEQ ID NO: 2864326 - DNA, 25 bp, Homo sapien
tttaataatatctgcctctcgtacc

SEQ ID NO: 2864327 - DNA, 25 bp, Homo sapien
taataatatctgcctctcgtaccat

SEQ ID NO: 2864328 - DNA, 25 bp, Homo sapien
ctttaataatatctgcctctcgtac

SEQ ID NO: 2864329 - DNA, 25 bp, Homo sapien
ttaataatatctgcctctcgtacca

SEQ ID NO: 2864330 - DNA, 25 bp, Homo sapien
cttgggtaagtcactaacgtatagt

SEQ ID NO: 2864331 - DNA, 25 bp, Homo sapien
gaggtgattaagtttgtccattgga

SEQ ID NO: 2864332 - DNA, 25 bp, Homo sapien
tagttttgttatccatatcaggagg

SEQ ID NO: 2864333 - DNA, 25 bp, Homo sapien
gatgatcttgactgtgactttaacc

SEQ ID NO: 2864334 - DNA, 25 bp, Homo sapien
tgaatacaggcacctcgctgaagct

SEQ ID NO: 2864335 - DNA, 25 bp, Homo sapien
ttgccaagcacttactgaatacagg

SEQ ID NO: 2864336 - DNA, 25 bp, Homo sapien
aatgacactggatcttgtggcacag

SEQ ID NO: 2864337 - DNA, 25 bp, Homo sapien
taatagtttctatgaggtcacacag

SEQ ID NO: 2864338 - DNA, 25 bp, Homo sapien
tggagatatgtgtgcctttattagc

SEQ ID NO: 2864339 - DNA, 25 bp, Homo sapien
agatatgtgtgcctttattagcgga

SEQ ID NO: 2864340 - DNA, 25 bp, Homo sapien
ttttttggagatatgtgtgccttta

SEQ ID NO: 2864341 - DNA, 25 bp, Homo sapien
tatgtgtgcctttattagcggagcc

SEQ ID NO: 2864342 - DNA, 25 bp, Homo sapien
gggagatgaagcgggaggagtgggt

SEQ ID NO: 2864343 - DNA, 25 bp, Homo sapien
gagatgaagcgggaggagtgggtgg

SEQ ID NO: 2864344 - DNA, 25 bp, Homo sapien
ttgagggagatgaagcgggaggagt

SEQ ID NO: 2864345 - DNA, 25 bp, Homo sapien
gatgaagcgggaggagtgggtggac

SEQ ID NO: 2864346 - DNA, 25 bp, Homo sapien
caatgccaggccggccgtgcttcac

SEQ ID NO: 2864347 - DNA, 25 bp, Homo sapien
cgtggccgatcatctccagcttgat

SEQ ID NO: 2864348 - DNA, 25 bp, Homo sapien
tcgtggccgatcatctccagcttga

SEQ ID NO: 2864349 - DNA, 25 bp, Homo sapien
ggtcgtggccgatcatctccagctt

SEQ ID NO: 2864350 - DNA, 25 bp, Homo sapien
caggtcgtggccgatcatctccagc

SEQ ID NO: 2864351 - DNA, 25 bp, Homo sapien
gccgttgtagacgcccaccctgctg

SEQ ID NO: 2864352 - DNA, 25 bp, Homo sapien
gtcttgccgttgtagacgcccaccc

SEQ ID NO: 2864353 - DNA, 25 bp, Homo sapien
cgttgtagacgcccaccctgctgcc

SEQ ID NO: 2864354 - DNA, 25 bp, Homo sapien
ctggttgaaggtcttgccgttgtag

SEQ ID NO: 2864355 - DNA, 25 bp, Homo sapien
ataggcgcctcagcagcgaatgcgg

SEQ ID NO: 2864356 - DNA, 25 bp, Homo sapien
gcattccgccacaggccgtggttca

SEQ ID NO: 2864357 - DNA, 25 bp, Homo sapien
gcgaatgcggcttgagcctcagcat

SEQ ID NO: 2864358 - DNA, 25 bp, Homo sapien
tccttcttggcctagcataggcgcc

SEQ ID NO: 2864359 - DNA, 25 bp, Homo sapien
gcggaagatccgctgcttcttctcc

SEQ ID NO: 2864360 - DNA, 25 bp, Homo sapien
tgcggaagatccgctgcttcttctc

SEQ ID NO: 2864361 - DNA, 25 bp, Homo sapien
agtatattccaacgcatgtcatagg

SEQ ID NO: 2864362 - DNA, 25 bp, Homo sapien
cgtagatagcatcacagacaactgg

SEQ ID NO: 2864363 - DNA, 25 bp, Homo sapien
gatatatgagtgagaagactgtgcc

SEQ ID NO: 2864364 - DNA, 25 bp, Homo sapien
tgtcataggaaagggacgtgagtct

SEQ ID NO: 2864365 - DNA, 25 bp, Homo sapien
tggacaggttcattccatattctgt

SEQ ID NO: 2864366 - DNA, 25 bp, Homo sapien
ttgttggaatgacataatttcctcc

SEQ ID NO: 2864367 - DNA, 25 bp, Homo sapien
tattctgtctagagttgaagcaacc

SEQ ID NO: 2864368 - DNA, 25 bp, Homo sapien
cataatgccatctgggttcatccat

SEQ ID NO: 2864369 - DNA, 25 bp, Homo sapien
tttgtcactaacaaatgtcctgcag

SEQ ID NO: 2864370 - DNA, 25 bp, Homo sapien
tgtcctgcagaaacgtgataactgc

SEQ ID NO: 2864371 - DNA, 25 bp, Homo sapien
aattttgtcactaacaaatgtcctg

SEQ ID NO: 2864372 - DNA, 25 bp, Homo sapien
tgctgttcaacatgcatcacaattt

SEQ ID NO: 2864373 - DNA, 25 bp, Homo sapien
ggcgtcctcaacaggattccttaac

SEQ ID NO: 2864374 - DNA, 25 bp, Homo sapien
ctaggcgtcctcaacaggattcctt

SEQ ID NO: 2864375 - DNA, 25 bp, Homo sapien
tcctcaacaggattccttaactctg

SEQ ID NO: 2864376 - DNA, 25 bp, Homo sapien
ctcaacaggattccttaactctgca

SEQ ID NO: 2864377 - DNA, 25 bp, Homo sapien
gctgcaggcgagtattatggcaata

SEQ ID NO: 2864378 - DNA, 25 bp, Homo sapien
taacttaagtatctagctgcaggcg

SEQ ID NO: 2864379 - DNA, 25 bp, Homo sapien
caggcctttggatcacaagacacaa

SEQ ID NO: 2864380 - DNA, 25 bp, Homo sapien
gttaaatctcatccataggccgggc

SEQ ID NO: 2864381 - DNA, 25 bp, Homo sapien
attcacctccctttgattgatccaa

SEQ ID NO: 2864382 - DNA, 25 bp, Homo sapien
gtgccttgctgattcacctcccttt

SEQ ID NO: 2864383 - DNA, 25 bp, Homo sapien
ctcttttgtgccttgctgattcacc

SEQ ID NO: 2864384 - DNA, 25 bp, Homo sapien
ttcacctccctttgattgatccaac

SEQ ID NO: 2864385 - DNA, 25 bp, Homo sapien
ctttatgcgtggagtccaaggacat

SEQ ID NO: 2864386 - DNA, 25 bp, Homo sapien
gagcagaagtcctcaaagctttatg

SEQ ID NO: 2864387 - DNA, 25 bp, Homo sapien
tcaaagctttatgcgtggagtccaa

SEQ ID NO: 2864388 - DNA, 25 bp, Homo sapien
gtggtaatgacctgcagctttccca

SEQ ID NO: 2864389 - DNA, 25 bp, Homo sapien
agaacaattaacacctgctgatatg

SEQ ID NO: 2864390 - DNA, 25 bp, Homo sapien
cccactgttagccttaataggatta

SEQ ID NO: 2864391 - DNA, 25 bp, Homo sapien
taagatcgccttttatgtttggact

SEQ ID NO: 2864392 - DNA, 25 bp, Homo sapien
taagttgcagtaggccatactccca

SEQ ID NO: 2864393 - DNA, 25 bp, Homo sapien
tattgcaccacattccttgattctc

SEQ ID NO: 2864394 - DNA, 25 bp, Homo sapien
tgattctcacaggcacaagtccaca

SEQ ID NO: 2864395 - DNA, 25 bp, Homo sapien
gccctaggatatctctgctgccact

SEQ ID NO: 2864396 - DNA, 25 bp, Homo sapien
ttctgctcatactgggtccctcttg

SEQ ID NO: 2864397 - DNA, 25 bp, Homo sapien
attttggcactcaagattgtcctta

SEQ ID NO: 2864398 - DNA, 25 bp, Homo sapien
gcactcaagattgtccttagtgtct

SEQ ID NO: 2864399 - DNA, 25 bp, Homo sapien
gattgtccttagtgtctgggcatgg

SEQ ID NO: 2864400 - DNA, 25 bp, Homo sapien
ttgtccttagtgtctgggcatggtg

SEQ ID NO: 2864401 - DNA, 25 bp, Homo sapien
gagttggatgaatcccctaagagca

SEQ ID NO: 2864402 - DNA, 25 bp, Homo sapien
taagagcactcatggccactggaaa

SEQ ID NO: 2864403 - DNA, 25 bp, Homo sapien
cagcttgcctgtgatccactggaca

SEQ ID NO: 2864404 - DNA, 25 bp, Homo sapien
cagaatgaggatcccacacagtcaa

SEQ ID NO: 2864405 - DNA, 25 bp, Homo sapien
gatggttgaaatgttattaacggga

SEQ ID NO: 2864406 - DNA, 25 bp, Homo sapien
caggcagttatttatacagctctca

SEQ ID NO: 2864407 - DNA, 25 bp, Homo sapien
cagttgtgatggttgaaatgttatt

SEQ ID NO: 2864408 - DNA, 25 bp, Homo sapien
gactccactacttcttttacagttg

SEQ ID NO: 2864409 - DNA, 25 bp, Homo sapien
gcagctctctcagcactgcggctct

SEQ ID NO: 2864410 - DNA, 25 bp, Homo sapien
ggatgtcaatcagatgtgcaattct

SEQ ID NO: 2864411 - DNA, 25 bp, Homo sapien
tgtcaatcagatgtgcaattctgca

SEQ ID NO: 2864412 - DNA, 25 bp, Homo sapien
gtcaatcagatgtgcaattctgcag

SEQ ID NO: 2864413 - DNA, 25 bp, Homo sapien
agcacccagtttcaacaatcatttg

SEQ ID NO: 2864414 - DNA, 25 bp, Homo sapien
gagcaggtctttacttagacaaata

SEQ ID NO: 2864415 - DNA, 25 bp, Homo sapien
catttgtacacagagcaggtcttta

SEQ ID NO: 2864416 - DNA, 25 bp, Homo sapien
cttctttccaagcacccagtttcaa

SEQ ID NO: 2864417 - DNA, 25 bp, Homo sapien
gtgactaacagtggagtacccaata

SEQ ID NO: 2864418 - DNA, 25 bp, Homo sapien
ctaacagtggagtacccaataatgg

SEQ ID NO: 2864419 - DNA, 25 bp, Homo sapien
gactaacagtggagtacccaataat

SEQ ID NO: 2864420 - DNA, 25 bp, Homo sapien
taacagtggagtacccaataatggt

SEQ ID NO: 2864421 - DNA, 25 bp, Homo sapien
gctgccaatgccctaggaaatgtca

SEQ ID NO: 2864422 - DNA, 25 bp, Homo sapien
ccaatgccctaggaaatgtcacacc

SEQ ID NO: 2864423 - DNA, 25 bp, Homo sapien
tgagtgggtgagcagcaaagatgta

SEQ ID NO: 2864424 - DNA, 25 bp, Homo sapien
ctgaacagctgccaatgccctagga

SEQ ID NO: 2864425 - DNA, 25 bp, Homo sapien
caggccccgtcatcccataagtttg

SEQ ID NO: 2864426 - DNA, 25 bp, Homo sapien
ccaggccccgtcatcccataagttt

SEQ ID NO: 2864427 - DNA, 25 bp, Homo sapien
caccccaggccagagctagcacccc

SEQ ID NO: 2864428 - DNA, 25 bp, Homo sapien
tgtgtaggagtttcttggaagacta

SEQ ID NO: 2864429 - DNA, 25 bp, Homo sapien
tcatcatctatttccaccaggctgc

SEQ ID NO: 2864430 - DNA, 25 bp, Homo sapien
caggaggttcctcatcatctatttc

SEQ ID NO: 2864431 - DNA, 25 bp, Homo sapien
caggctgccgctgcgattatctttg

SEQ ID NO: 2864432 - DNA, 25 bp, Homo sapien
tggagattcgcctccttaaacttcc

SEQ ID NO: 2864433 - DNA, 25 bp, Homo sapien
tctatatccgcagactctagtaggt

SEQ ID NO: 2864434 - DNA, 25 bp, Homo sapien
taaacttccaaccttctatatccgc

SEQ ID NO: 2864435 - DNA, 25 bp, Homo sapien
gagattcgcctccttaaacttccaa

SEQ ID NO: 2864436 - DNA, 25 bp, Homo sapien
cagaatgtgaatcgaaacatgaggt

SEQ ID NO: 2864437 - DNA, 25 bp, Homo sapien
tacaaagtgaattattctcatgaca

SEQ ID NO: 2864438 - DNA, 25 bp, Homo sapien
catgaggtaaagctcaatgagctgt

SEQ ID NO: 2864439 - DNA, 25 bp, Homo sapien
caatgagctgtagaaacttacaaag

SEQ ID NO: 2864440 - DNA, 25 bp, Homo sapien
cctgccatgctccagtaaactgcat

SEQ ID NO: 2864441 - DNA, 25 bp, Homo sapien
cttcttcctgccatgctccagtaaa

SEQ ID NO: 2864442 - DNA, 25 bp, Homo sapien
cagtttttggcctcctgccttcttc

SEQ ID NO: 2864443 - DNA, 25 bp, Homo sapien
ttccagtttttggcctcctgccttc

SEQ ID NO: 2864444 - DNA, 25 bp, Homo sapien
tccactatgatcagcgaatatatac

SEQ ID NO: 2864445 - DNA, 25 bp, Homo sapien
aatgtcctgcttgcttgcaaatgcc

SEQ ID NO: 2864446 - DNA, 25 bp, Homo sapien
gcgaatatatactgaatgtcctgct

SEQ ID NO: 2864447 - DNA, 25 bp, Homo sapien
gcttgcttgcaaatgccctacttgg

SEQ ID NO: 2864448 - DNA, 25 bp, Homo sapien
gtttttgctgttgtgacaactgttc

SEQ ID NO: 2864449 - DNA, 25 bp, Homo sapien
ttcttgataatcttgtgtttttgct

SEQ ID NO: 2864450 - DNA, 25 bp, Homo sapien
ccatttcttgataatcttgtgtttt

SEQ ID NO: 2864451 - DNA, 25 bp, Homo sapien
tgacaactgttctagaaaaagccat

SEQ ID NO: 2864452 - DNA, 25 bp, Homo sapien
gcattcctcctccggttgggtgtaa

SEQ ID NO: 2864453 - DNA, 25 bp, Homo sapien
ggtgcattcctcctccggttgggtg

SEQ ID NO: 2864454 - DNA, 25 bp, Homo sapien
atggtgcattcctcctccggttggg

SEQ ID NO: 2864455 - DNA, 25 bp, Homo sapien
tgcattcctcctccggttgggtgta

SEQ ID NO: 2864456 - DNA, 25 bp, Homo sapien
tagatgtgtagatcactaggtaagc

SEQ ID NO: 2864457 - DNA, 25 bp, Homo sapien
tatatgactgctaattctggacttt

SEQ ID NO: 2864458 - DNA, 25 bp, Homo sapien
tagaataaacaatctggatacagag

SEQ ID NO: 2864459 - DNA, 25 bp, Homo sapien
ggtggttttgattgatcccgaaaga

SEQ ID NO: 2864460 - DNA, 25 bp, Homo sapien
cctttgtccaccttgcaactctttc

SEQ ID NO: 2864461 - DNA, 25 bp, Homo sapien
aactctttctgaaaggcggtggaca

SEQ ID NO: 2864462 - DNA, 25 bp, Homo sapien
caactctttctgaaaggcggtggac

SEQ ID NO: 2864463 - DNA, 25 bp, Homo sapien
tgcaactctttctgaaaggcggtgg

SEQ ID NO: 2864464 - DNA, 25 bp, Homo sapien
ttcttcagataactccactcactct

SEQ ID NO: 2864465 - DNA, 25 bp, Homo sapien
aaatgcatctggtttcttcagataa

SEQ ID NO: 2864466 - DNA, 25 bp, Homo sapien
ctggtttcttcagataactccactc

SEQ ID NO: 2864467 - DNA, 25 bp, Homo sapien
tctctgaaaatgcatctggtttctt

SEQ ID NO: 2864468 - DNA, 25 bp, Homo sapien
gaatcagtgagctcagcagtcagga

SEQ ID NO: 2864469 - DNA, 25 bp, Homo sapien
gagaggcactgccttacttggtttg

SEQ ID NO: 2864470 - DNA, 25 bp, Homo sapien
gatgcctggtgagagtatgcctttc

SEQ ID NO: 2864471 - DNA, 25 bp, Homo sapien
gatggattgaggttttaccctgtca

SEQ ID NO: 2864472 - DNA, 25 bp, Homo sapien
tttgtatatcgtccttgcacagggg

SEQ ID NO: 2864473 - DNA, 25 bp, Homo sapien
gaatttgtatatcgtccttgcacag

SEQ ID NO: 2864474 - DNA, 25 bp, Homo sapien
tcatgaatttgtatatcgtccttgc

SEQ ID NO: 2864475 - DNA, 25 bp, Homo sapien
catgaatttgtatatcgtccttgca

SEQ ID NO: 2864476 - DNA, 25 bp, Homo sapien
ggctcgtttcaaatgacacctcctc

SEQ ID NO: 2864477 - DNA, 25 bp, Homo sapien
gacatagtacatggcctgtcttaca

SEQ ID NO: 2864478 - DNA, 25 bp, Homo sapien
gatactccttttaccctactacaga

SEQ ID NO: 2864479 - DNA, 25 bp, Homo sapien
tttcaaggctcgtttcaaatgacac

SEQ ID NO: 2864480 - DNA, 25 bp, Homo sapien
gactccaaatgtttcttgtgtattc

SEQ ID NO: 2864481 - DNA, 25 bp, Homo sapien
ctccaaatgtttcttgtgtattcat

SEQ ID NO: 2864482 - DNA, 25 bp, Homo sapien
actccaaatgtttcttgtgtattca

SEQ ID NO: 2864483 - DNA, 25 bp, Homo sapien
ttctgaagtaaagctcttctttaaa

SEQ ID NO: 2864484 - DNA, 25 bp, Homo sapien
aagtaaagctcttctttaaataatg

SEQ ID NO: 2864485 - DNA, 25 bp, Homo sapien
ctaaattctgaagtaaagctcttct

SEQ ID NO: 2864486 - DNA, 25 bp, Homo sapien
tgaagtaaagctcttctttaaataa

SEQ ID NO: 2864487 - DNA, 25 bp, Homo sapien
agttgtccctagatctgtctttgtc

SEQ ID NO: 2864488 - DNA, 25 bp, Homo sapien
cctagatctgtctttgtccaccggc

SEQ ID NO: 2864489 - DNA, 25 bp, Homo sapien
tagatctgtctttgtccaccggcat

SEQ ID NO: 2864490 - DNA, 25 bp, Homo sapien
tgtccctagatctgtctttgtccac

SEQ ID NO: 2864491 - DNA, 25 bp, Homo sapien
ctgtgtactaccagttttgctgctg

SEQ ID NO: 2864492 - DNA, 25 bp, Homo sapien
aattttatcagtatagttgccgact

SEQ ID NO: 2864493 - DNA, 25 bp, Homo sapien
gtatagttgccgacttgtcttaaag

SEQ ID NO: 2864494 - DNA, 25 bp, Homo sapien
tgccgacttgtcttaaagtattagg

SEQ ID NO: 2864495 - DNA, 25 bp, Homo sapien
gtaatactggtatagaatttatcat

SEQ ID NO: 2864496 - DNA, 25 bp, Homo sapien
gctcaaattgtaacttttggcagcg

SEQ ID NO: 2864497 - DNA, 25 bp, Homo sapien
gccttccgctgacagaggagattaa

SEQ ID NO: 2864498 - DNA, 25 bp, Homo sapien
tcctgcctgaatatcgctcaaattg

SEQ ID NO: 2864499 - DNA, 25 bp, Homo sapien
tctcgctgtaggaaatttggccata

SEQ ID NO: 2864500 - DNA, 25 bp, Homo sapien
cagtgttacaaatatgttctctagg

SEQ ID NO: 2864501 - DNA, 25 bp, Homo sapien
ccaagcactagatgagaggttctga

SEQ ID NO: 2864502 - DNA, 25 bp, Homo sapien
gactgatcattggtactaattagac

SEQ ID NO: 2864503 - DNA, 25 bp, Homo sapien
ttctctaggttctattgcaaatcac

SEQ ID NO: 2864504 - DNA, 25 bp, Homo sapien
cttaggttcaatgacttggctttgc

SEQ ID NO: 2864505 - DNA, 25 bp, Homo sapien
ttaggttcaatgacttggctttgca

SEQ ID NO: 2864506 - DNA, 25 bp, Homo sapien
taggttcaatgacttggctttgcat

SEQ ID NO: 2864507 - DNA, 25 bp, Homo sapien
catacacaatctgtctgtgtcaact

SEQ ID NO: 2864508 - DNA, 25 bp, Homo sapien
tgtctgtgtcaactttatttctacc

SEQ ID NO: 2864509 - DNA, 25 bp, Homo sapien
tctcttccacatacacaatctgtct

SEQ ID NO: 2864510 - DNA, 25 bp, Homo sapien
actttatttctaccaagctggagaa

SEQ ID NO: 2864511 - DNA, 25 bp, Homo sapien
tttctcttttcattggccaggttct

SEQ ID NO: 2864512 - DNA, 25 bp, Homo sapien
tggatttctcttttcattggccagg

SEQ ID NO: 2864513 - DNA, 25 bp, Homo sapien
aaaatatcgaatctggatttctctt

SEQ ID NO: 2864514 - DNA, 25 bp, Homo sapien
tctcttttcattggccaggttctca

SEQ ID NO: 2864515 - DNA, 25 bp, Homo sapien
tcacacaataccatctgaggaggag

SEQ ID NO: 2864516 - DNA, 25 bp, Homo sapien
cacacaataccatctgaggaggagt

SEQ ID NO: 2864517 - DNA, 25 bp, Homo sapien
tcagcccttgtaaacaagttaccat

SEQ ID NO: 2864518 - DNA, 25 bp, Homo sapien
ttcagcccttgtaaacaagttacca

SEQ ID NO: 2864519 - DNA, 25 bp, Homo sapien
tgtatttcagcccttgtaaacaagt

SEQ ID NO: 2864520 - DNA, 25 bp, Homo sapien
ttgtatttcagcccttgtaaacaag

SEQ ID NO: 2864521 - DNA, 25 bp, Homo sapien
aaattcttctgttaggcttgtcaca

SEQ ID NO: 2864522 - DNA, 25 bp, Homo sapien
cttctgttaggcttgtcacattttc

SEQ ID NO: 2864523 - DNA, 25 bp, Homo sapien
caaattcttctgttaggcttgtcac

SEQ ID NO: 2864524 - DNA, 25 bp, Homo sapien
attcttctgttaggcttgtcacatt

SEQ ID NO: 2864525 - DNA, 25 bp, Homo sapien
tcattatgcccccagattctaaccg

SEQ ID NO: 2864526 - DNA, 25 bp, Homo sapien
cgctttagcctttcttgttcatccc

SEQ ID NO: 2864527 - DNA, 25 bp, Homo sapien
cttgttcatccctcaagaaaatgca

SEQ ID NO: 2864528 - DNA, 25 bp, Homo sapien
tatttcttgtcagtgatcctgggtg

SEQ ID NO: 2864529 - DNA, 25 bp, Homo sapien
cagtaactttgtaagaagctctttc

SEQ ID NO: 2864530 - DNA, 25 bp, Homo sapien
gtaactttgtaagaagctctttcca

SEQ ID NO: 2864531 - DNA, 25 bp, Homo sapien
taactttgtaagaagctctttccat

SEQ ID NO: 2864532 - DNA, 25 bp, Homo sapien
aatctgggtggttgcatatgggaat

SEQ ID NO: 2864533 - DNA, 25 bp, Homo sapien
ctgctcaacctgccttggtgctttt

SEQ ID NO: 2864534 - DNA, 25 bp, Homo sapien
cattgaggctaattctaatctcaca

SEQ ID NO: 2864535 - DNA, 25 bp, Homo sapien
gtacaatatgaatggacaagggcag

SEQ ID NO: 2864536 - DNA, 25 bp, Homo sapien
ttcccaccagtgaaagtacaatatg

SEQ ID NO: 2864537 - DNA, 25 bp, Homo sapien
ctcattatgatctttagactgtcat

SEQ ID NO: 2864538 - DNA, 25 bp, Homo sapien
taaccaccgagtaatcagattcggg

SEQ ID NO: 2864539 - DNA, 25 bp, Homo sapien
taaatgtcacaagcttaggattctt

SEQ ID NO: 2864540 - DNA, 25 bp, Homo sapien
aacagctttgtaaatgtcacaagct

SEQ ID NO: 2864541 - DNA, 25 bp, Homo sapien
cagattcgggttggttgtggttcat

SEQ ID NO: 2864542 - DNA, 25 bp, Homo sapien
caggacttgacaccaaccacctccc

SEQ ID NO: 2864543 - DNA, 25 bp, Homo sapien
tcacattagttccacatgcactcat

SEQ ID NO: 2864544 - DNA, 25 bp, Homo sapien
tctttccgtgaagttccaactttgc

SEQ ID NO: 2864545 - DNA, 25 bp, Homo sapien
gttccaactttgctcacattagttc

SEQ ID NO: 2864546 - DNA, 25 bp, Homo sapien
ggttccatgaatcctgacacagcca

SEQ ID NO: 2864547 - DNA, 25 bp, Homo sapien
cagccactggtgttcaattgcataa

SEQ ID NO: 2864548 - DNA, 25 bp, Homo sapien
gctgtcagatttggaagcacaaggt

SEQ ID NO: 2864549 - DNA, 25 bp, Homo sapien
ctggctgacaccatgaaagctgtca

SEQ ID NO: 2864550 - DNA, 25 bp, Homo sapien
ttggactttctatttatttgccagt

SEQ ID NO: 2864551 - DNA, 25 bp, Homo sapien
cttggactttctatttatttgccag

SEQ ID NO: 2864552 - DNA, 25 bp, Homo sapien
acttggactttctatttatttgcca

SEQ ID NO: 2864553 - DNA, 25 bp, Homo sapien
caagagaaaagtagggtgcttaaat

SEQ ID NO: 2864554 - DNA, 25 bp, Homo sapien
ggaaaatcaagcattgcactgatat

SEQ ID NO: 2864555 - DNA, 25 bp, Homo sapien
ggaacacgttaattagatctaattg

SEQ ID NO: 2864556 - DNA, 25 bp, Homo sapien
gctgcatttaacctatttaattgga

SEQ ID NO: 2864557 - DNA, 25 bp, Homo sapien
tatagtccagcagtacatacgcaac

SEQ ID NO: 2864558 - DNA, 25 bp, Homo sapien
catgctcagttcagggtatagtcca

SEQ ID NO: 2864559 - DNA, 25 bp, Homo sapien
gttaagagacgatcacactggtttc

SEQ ID NO: 2864560 - DNA, 25 bp, Homo sapien
tattaagcaatcaacctattcaggc

SEQ ID NO: 2864561 - DNA, 25 bp, Homo sapien
tgctaaaactaggagaatcatggac

SEQ ID NO: 2864562 - DNA, 25 bp, Homo sapien
cctgtgctgttttcacggtagtgaa

SEQ ID NO: 2864563 - DNA, 25 bp, Homo sapien
tggaagtgaaactcatgaacaacct

SEQ ID NO: 2864564 - DNA, 25 bp, Homo sapien
caaaccctgttgagccttactccaa

SEQ ID NO: 2864565 - DNA, 25 bp, Homo sapien
ttaaaacaatagaactggttcactg

SEQ ID NO: 2864566 - DNA, 25 bp, Homo sapien
aaaacaatagaactggttcactgca

SEQ ID NO: 2864567 - DNA, 25 bp, Homo sapien
aaacaatagaactggttcactgcag

SEQ ID NO: 2864568 - DNA, 25 bp, Homo sapien
taaaacaatagaactggttcactgc

SEQ ID NO: 2864569 - DNA, 25 bp, Homo sapien
caccaccatcaccactgccaaaagg

SEQ ID NO: 2864570 - DNA, 25 bp, Homo sapien
accaccatcaccactgccaaaaggc

SEQ ID NO: 2864571 - DNA, 25 bp, Homo sapien
ccaccatcaccactgccaaaaggca

SEQ ID NO: 2864572 - DNA, 25 bp, Homo sapien
caccatcaccactgccaaaaggcat

SEQ ID NO: 2864573 - DNA, 25 bp, Homo sapien
ttatgcaattgtgggagttagttaa

SEQ ID NO: 2864574 - DNA, 25 bp, Homo sapien
cttatgcaattgtgggagttagtta

SEQ ID NO: 2864575 - DNA, 25 bp, Homo sapien
ggaagatgattgtaaagtggggaaa

SEQ ID NO: 2864576 - DNA, 25 bp, Homo sapien
ggaaagggaagatgattgtaaagtg

SEQ ID NO: 2864577 - DNA, 25 bp, Homo sapien
ataaactgaaatgcatgccatttct

SEQ ID NO: 2864578 - DNA, 25 bp, Homo sapien
gttaaaatatacaagctggagccac

SEQ ID NO: 2864579 - DNA, 25 bp, Homo sapien
gagttaaatacaaacacctggccgc

SEQ ID NO: 2864580 - DNA, 25 bp, Homo sapien
taaatacaaacacctggccgcagag

SEQ ID NO: 2864581 - DNA, 25 bp, Homo sapien
taggtccgtcagaagatgagtctcc

SEQ ID NO: 2864582 - DNA, 25 bp, Homo sapien
cttgatggtataggttaggtccgtc

SEQ ID NO: 2864583 - DNA, 25 bp, Homo sapien
gtgacacagttctcacttactgaag

SEQ ID NO: 2864584 - DNA, 25 bp, Homo sapien
tactgaagtatctggaaacatcctg

SEQ ID NO: 2864585 - DNA, 25 bp, Homo sapien
caaacattctagaggatctcccgca

SEQ ID NO: 2864586 - DNA, 25 bp, Homo sapien
aattgggctgctatagttttccaca

SEQ ID NO: 2864587 - DNA, 25 bp, Homo sapien
tctcctgggagatgcattcttcttt

SEQ ID NO: 2864588 - DNA, 25 bp, Homo sapien
cctgggtggttaggatctataactc

SEQ ID NO: 2864589 - DNA, 25 bp, Homo sapien
ggaacccagatgtctagaccagcag

SEQ ID NO: 2864590 - DNA, 25 bp, Homo sapien
tctgtttgtgtagtggccaccgaat

SEQ ID NO: 2864591 - DNA, 25 bp, Homo sapien
taccactagttcttcacgttcattg

SEQ ID NO: 2864592 - DNA, 25 bp, Homo sapien
agcagcaaaccagcaatatctgttt

SEQ ID NO: 2864593 - DNA, 25 bp, Homo sapien
gttcattgcttctaactcccaccat

SEQ ID NO: 2864594 - DNA, 25 bp, Homo sapien
tccatcctactgaattccacgtggg

SEQ ID NO: 2864595 - DNA, 25 bp, Homo sapien
ttcaaacgctctgtgatattccctc

SEQ ID NO: 2864596 - DNA, 25 bp, Homo sapien
gatttcaaacgctctgtgatattcc

SEQ ID NO: 2864597 - DNA, 25 bp, Homo sapien
cttgatttcaaacgctctgtgatat

SEQ ID NO: 2864598 - DNA, 25 bp, Homo sapien
tttcaaacgctctgtgatattccct

SEQ ID NO: 2864599 - DNA, 25 bp, Homo sapien
tcagttcccctttcttcaaaacata

SEQ ID NO: 2864600 - DNA, 25 bp, Homo sapien
ctcagttcccctttcttcaaaacat

SEQ ID NO: 2864601 - DNA, 25 bp, Homo sapien
gcagttgctaattaattcgtgaaca

SEQ ID NO: 2864602 - DNA, 25 bp, Homo sapien
gactgtacagcgtgtaaccttgagg

SEQ ID NO: 2864603 - DNA, 25 bp, Homo sapien
tcaagggaaatgtcagtcaaacacc

SEQ ID NO: 2864604 - DNA, 25 bp, Homo sapien
ttcgtgaacattgactcgggttgca

SEQ ID NO: 2864605 - DNA, 25 bp, Homo sapien
ttaccagcctttccttcagtttgag

SEQ ID NO: 2864606 - DNA, 25 bp, Homo sapien
tttaccagcctttccttcagtttga

SEQ ID NO: 2864607 - DNA, 25 bp, Homo sapien
ccagcctttccttcagtttgagcat

SEQ ID NO: 2864608 - DNA, 25 bp, Homo sapien
taccagcctttccttcagtttgagc

SEQ ID NO: 2864609 - DNA, 25 bp, Homo sapien
attgtatttcccgatctttttgctc

SEQ ID NO: 2864610 - DNA, 25 bp, Homo sapien
tgcacaattgtatttcccgatcttt

SEQ ID NO: 2864611 - DNA, 25 bp, Homo sapien
gcacaattgtatttcccgatctttt

SEQ ID NO: 2864612 - DNA, 25 bp, Homo sapien
gtatttcccgatctttttgctctag

SEQ ID NO: 2864613 - DNA, 25 bp, Homo sapien
cttctgcatatttgcgagagagcaa

SEQ ID NO: 2864614 - DNA, 25 bp, Homo sapien
cggtggttatttacttcagtatgag

SEQ ID NO: 2864615 - DNA, 25 bp, Homo sapien
ctgcatatttgcgagagagcaattt

SEQ ID NO: 2864616 - DNA, 25 bp, Homo sapien
catatttgcgagagagcaatttgaa

SEQ ID NO: 2864617 - DNA, 25 bp, Homo sapien
ttctgactgatcaccaacaccaaaa

SEQ ID NO: 2864618 - DNA, 25 bp, Homo sapien
tttctgactgatcaccaacaccaaa

SEQ ID NO: 2864619 - DNA, 25 bp, Homo sapien
tctgactgatcaccaacaccaaaat

SEQ ID NO: 2864620 - DNA, 25 bp, Homo sapien
gaaggtcctatgtgtcttataccag

SEQ ID NO: 2864621 - DNA, 25 bp, Homo sapien
cattcaaagtttgcctcaaagggct

SEQ ID NO: 2864622 - DNA, 25 bp, Homo sapien
aataccagctttgacaatgccatag

SEQ ID NO: 2864623 - DNA, 25 bp, Homo sapien
tgtatatatactgtctgaagccaag

SEQ ID NO: 2864624 - DNA, 25 bp, Homo sapien
ctaaagtgccgaagaatgagaaatc

SEQ ID NO: 2864625 - DNA, 25 bp, Homo sapien
taaagtgccgaagaatgagaaatca

SEQ ID NO: 2864626 - DNA, 25 bp, Homo sapien
ttatgagtacaacagcgtgccaacg

SEQ ID NO: 2864627 - DNA, 25 bp, Homo sapien
ttaagacaatcataggcacagagaa

SEQ ID NO: 2864628 - DNA, 25 bp, Homo sapien
acagcgtgccaacgttgatgtaagc

SEQ ID NO: 2864629 - DNA, 25 bp, Homo sapien
caacgttgatgtaagctattaagac

SEQ ID NO: 2864630 - DNA, 25 bp, Homo sapien
cagtctttcttacagcttcatgctc

SEQ ID NO: 2864631 - DNA, 25 bp, Homo sapien
tccagtctttcttacagcttcatgc

SEQ ID NO: 2864632 - DNA, 25 bp, Homo sapien
ttccagtctttcttacagcttcatg

SEQ ID NO: 2864633 - DNA, 25 bp, Homo sapien
ctttccagtctttcttacagcttca

SEQ ID NO: 2864634 - DNA, 25 bp, Homo sapien
ttccttttaaatctttggtgatatg

SEQ ID NO: 2864635 - DNA, 25 bp, Homo sapien
tccttttaaatctttggtgatatgt

SEQ ID NO: 2864636 - DNA, 25 bp, Homo sapien
ccttttaaatctttggtgatatgtt

SEQ ID NO: 2864637 - DNA, 25 bp, Homo sapien
cttttaaatctttggtgatatgttt

SEQ ID NO: 2864638 - DNA, 25 bp, Homo sapien
tttcaatgtacactgaagcaaatta

SEQ ID NO: 2864639 - DNA, 25 bp, Homo sapien
tgctcgtttcattccaggatcatca

SEQ ID NO: 2864640 - DNA, 25 bp, Homo sapien
gctcgtttcattccaggatcatcaa

SEQ ID NO: 2864641 - DNA, 25 bp, Homo sapien
ttcattccaggatcatcaaatggcc

SEQ ID NO: 2864642 - DNA, 25 bp, Homo sapien
ttccaggatcatcaaatggccccat

SEQ ID NO: 2864643 - DNA, 25 bp, Homo sapien
tgttgaatgattcttgctcattggg

SEQ ID NO: 2864644 - DNA, 25 bp, Homo sapien
gattcttgctcattgggccatagcc

SEQ ID NO: 2864645 - DNA, 25 bp, Homo sapien
tgctcattgggccatagcccattca

SEQ ID NO: 2864646 - DNA, 25 bp, Homo sapien
cattgggccatagcccattcactgc

SEQ ID NO: 2864647 - DNA, 25 bp, Homo sapien
gtggagcatgttcaccagtagctaa

SEQ ID NO: 2864648 - DNA, 25 bp, Homo sapien
tgttcaccagtagctaagtgtggga

SEQ ID NO: 2864649 - DNA, 25 bp, Homo sapien
cagatatcctgtatgccatatattc

SEQ ID NO: 2864650 - DNA, 25 bp, Homo sapien
caccagtagctaagtgtgggaggta

SEQ ID NO: 2864651 - DNA, 25 bp, Homo sapien
tgggatcatatacaaacgtgatgac

SEQ ID NO: 2864652 - DNA, 25 bp, Homo sapien
gaatatctttctggatgggatcata

SEQ ID NO: 2864653 - DNA, 25 bp, Homo sapien
ttataagcgatgagtccaatcacag

SEQ ID NO: 2864654 - DNA, 25 bp, Homo sapien
cacagtgaagtttatttggaatatc

SEQ ID NO: 2864655 - DNA, 25 bp, Homo sapien
gctcatttgatttcctccggccaca

SEQ ID NO: 2864656 - DNA, 25 bp, Homo sapien
gcctgcaattccagccaggatttta

SEQ ID NO: 2864657 - DNA, 25 bp, Homo sapien
tctcgtgtccttgtcaacattgcaa

SEQ ID NO: 2864658 - DNA, 25 bp, Homo sapien
tgtctccactttcatattacgcaac

SEQ ID NO: 2864659 - DNA, 25 bp, Homo sapien
tgatgggttttagcttgtttctcac

SEQ ID NO: 2864660 - DNA, 25 bp, Homo sapien
tgtttctcacacttccagagtgctt

SEQ ID NO: 2864661 - DNA, 25 bp, Homo sapien
gcagatgtgataaaggccaaaattc

SEQ ID NO: 2864662 - DNA, 25 bp, Homo sapien
tccagagtgctttggagggttcttg

SEQ ID NO: 2864663 - DNA, 25 bp, Homo sapien
tatgtcttcatatgtcagaacagga

SEQ ID NO: 2864664 - DNA, 25 bp, Homo sapien
gtatgtcttcatatgtcagaacagg

SEQ ID NO: 2864665 - DNA, 25 bp, Homo sapien
tctggaaagcgaagattctgcaaat

SEQ ID NO: 2864666 - DNA, 25 bp, Homo sapien
gattctgcaaatttacatccttccc

SEQ ID NO: 2864667 - DNA, 25 bp, Homo sapien
ttccatttctggaaagcgaagattc

SEQ ID NO: 2864668 - DNA, 25 bp, Homo sapien
catttctggaaagcgaagattctgc

SEQ ID NO: 2864669 - DNA, 25 bp, Homo sapien
tagtcctggtagaacaacttgttga

SEQ ID NO: 2864670 - DNA, 25 bp, Homo sapien
taactacggtataagctagtcctgg

SEQ ID NO: 2864671 - DNA, 25 bp, Homo sapien
tatatactgattgtgcatgcaggac

SEQ ID NO: 2864672 - DNA, 25 bp, Homo sapien
gcaggaaggtgaacctctatgtcac

SEQ ID NO: 2864673 - DNA, 25 bp, Homo sapien
ttgtaagctgcaggctctcatgatc

SEQ ID NO: 2864674 - DNA, 25 bp, Homo sapien
cactctgctaaggtgcaccaggtgc

SEQ ID NO: 2864675 - DNA, 25 bp, Homo sapien
aaaggcacgtccctgttagctattg

SEQ ID NO: 2864676 - DNA, 25 bp, Homo sapien
taaggtgcaccaggtgcaagaaaaa

SEQ ID NO: 2864677 - DNA, 25 bp, Homo sapien
tgataggcccttccacttgttactt

SEQ ID NO: 2864678 - DNA, 25 bp, Homo sapien
gattctgatttgatatcccagtcct

SEQ ID NO: 2864679 - DNA, 25 bp, Homo sapien
acaccaagcacaagcctgataggcc

SEQ ID NO: 2864680 - DNA, 25 bp, Homo sapien
taacttcacgattctattatcacag

SEQ ID NO: 2864681 - DNA, 25 bp, Homo sapien
ttcagtttcgaatctccatccaagt

SEQ ID NO: 2864682 - DNA, 25 bp, Homo sapien
tcacctgaagccagattcctatcac

SEQ ID NO: 2864683 - DNA, 25 bp, Homo sapien
atcacctgaagccagattcctatca

SEQ ID NO: 2864684 - DNA, 25 bp, Homo sapien
cctgaagccagattcctatcactta

SEQ ID NO: 2864685 - DNA, 25 bp, Homo sapien
gaagccagattcctatcacttatag

SEQ ID NO: 2864686 - DNA, 25 bp, Homo sapien
aaaggggaagtgtgattggccctct

SEQ ID NO: 2864687 - DNA, 25 bp, Homo sapien
gggaagtgtgattggccctctaact

SEQ ID NO: 2864688 - DNA, 25 bp, Homo sapien
cctctaacttggcagctatttggca

SEQ ID NO: 2864689 - DNA, 25 bp, Homo sapien
acttggcagctatttggcatcccat

SEQ ID NO: 2864690 - DNA, 25 bp, Homo sapien
tccatagaatcaggatctaagccag

SEQ ID NO: 2864691 - DNA, 25 bp, Homo sapien
cagtccccttgacaagtcactttca

SEQ ID NO: 2864692 - DNA, 25 bp, Homo sapien
tcatataaagacttaccgtttaatg

SEQ ID NO: 2864693 - DNA, 25 bp, Homo sapien
tgctgactcctttgaaacagtaaag

SEQ ID NO: 2864694 - DNA, 25 bp, Homo sapien
cacagttggaatttttaccagctta

SEQ ID NO: 2864695 - DNA, 25 bp, Homo sapien
tccttttgcgtatgtttgctgtttc

SEQ ID NO: 2864696 - DNA, 25 bp, Homo sapien
tgtggagttacaaatcaacgttata

SEQ ID NO: 2864697 - DNA, 25 bp, Homo sapien
atactaacttttagactaatggttg

SEQ ID NO: 2864698 - DNA, 25 bp, Homo sapien
tgttgccgattggttgccagttggt

SEQ ID NO: 2864699 - DNA, 25 bp, Homo sapien
gtctgggagggccttgtaacatgtt

SEQ ID NO: 2864700 - DNA, 25 bp, Homo sapien
ctgggagggccttgtaacatgtttc

SEQ ID NO: 2864701 - DNA, 25 bp, Homo sapien
cttctctgttttgttgccgattggt

SEQ ID NO: 2864702 - DNA, 25 bp, Homo sapien
aacatattgagcttccatttgaatg

SEQ ID NO: 2864703 - DNA, 25 bp, Homo sapien
attgagcttccatttgaatggctgc

SEQ ID NO: 2864704 - DNA, 25 bp, Homo sapien
cagtcctaacatattgagcttccat

SEQ ID NO: 2864705 - DNA, 25 bp, Homo sapien
aaagccagtcctaacatattgagct

SEQ ID NO: 2864706 - DNA, 25 bp, Homo sapien
gagatgatatgaacgcccatgagtc

SEQ ID NO: 2864707 - DNA, 25 bp, Homo sapien
ggggctgtcaccagctgacacccag

SEQ ID NO: 2864708 - DNA, 25 bp, Homo sapien
tgagtcaattccctcttgtctcaac

SEQ ID NO: 2864709 - DNA, 25 bp, Homo sapien
gtgcagagatgatatgaacgcccat

SEQ ID NO: 2864710 - DNA, 25 bp, Homo sapien
tgccaaaaaggtttgcaattgccac

SEQ ID NO: 2864711 - DNA, 25 bp, Homo sapien
ttctgccaaaaaggtttgcaattgc

SEQ ID NO: 2864712 - DNA, 25 bp, Homo sapien
ctgccaaaaaggtttgcaattgcca

SEQ ID NO: 2864713 - DNA, 25 bp, Homo sapien
tctgccaaaaaggtttgcaattgcc

SEQ ID NO: 2864714 - DNA, 25 bp, Homo sapien
cttggttagattcattattaagact

SEQ ID NO: 2864715 - DNA, 25 bp, Homo sapien
ttcattattaagacttgaaccggtg

SEQ ID NO: 2864716 - DNA, 25 bp, Homo sapien
tattaagacttgaaccggtgataca

SEQ ID NO: 2864717 - DNA, 25 bp, Homo sapien
ttaagacttgaaccggtgatacagc

SEQ ID NO: 2864718 - DNA, 25 bp, Homo sapien
cggttaaaacagctcacacagtatt

SEQ ID NO: 2864719 - DNA, 25 bp, Homo sapien
gaaaactgctctaattggattcggt

SEQ ID NO: 2864720 - DNA, 25 bp, Homo sapien
gatgattgtagctaccactgtcctc

SEQ ID NO: 2864721 - DNA, 25 bp, Homo sapien
tggattcggtagaccttgactggct

SEQ ID NO: 2864722 - DNA, 25 bp, Homo sapien
taagggcacttaattcgacattcat

SEQ ID NO: 2864723 - DNA, 25 bp, Homo sapien
ggctgcaacagataattaccaccat

SEQ ID NO: 2864724 - DNA, 25 bp, Homo sapien
cgcatcgtatttggtactgcatggc

SEQ ID NO: 2864725 - DNA, 25 bp, Homo sapien
tagccaccaaaatgagtatatgagg

SEQ ID NO: 2864726 - DNA, 25 bp, Homo sapien
aaaaccatttccatgacattcagca

SEQ ID NO: 2864727 - DNA, 25 bp, Homo sapien
tcaagtgttgtgttcagaggcgatc

SEQ ID NO: 2864728 - DNA, 25 bp, Homo sapien
aaatgtttgttctggcggaacaaat

SEQ ID NO: 2864729 - DNA, 25 bp, Homo sapien
ggcgatcttgctgacacttatactt

SEQ ID NO: 2864730 - DNA, 25 bp, Homo sapien
ttttcttgatgatcagaggtctcac

SEQ ID NO: 2864731 - DNA, 25 bp, Homo sapien
ttttttcttgatgatcagaggtctc

SEQ ID NO: 2864732 - DNA, 25 bp, Homo sapien
tcatgaaaaatgtccatttaagttt

SEQ ID NO: 2864733 - DNA, 25 bp, Homo sapien
tcttttttcttgatgatcagaggtc

SEQ ID NO: 2864734 - DNA, 25 bp, Homo sapien
tgtgagaccccatcacacaatggga

SEQ ID NO: 2864735 - DNA, 25 bp, Homo sapien
gtgagaccccatcacacaatgggaa

SEQ ID NO: 2864736 - DNA, 25 bp, Homo sapien
tgtgtgagaccccatcacacaatgg

SEQ ID NO: 2864737 - DNA, 25 bp, Homo sapien
gagaccccatcacacaatgggaact

SEQ ID NO: 2864738 - DNA, 25 bp, Homo sapien
ccaacaatggcagtatcgtatagct

SEQ ID NO: 2864739 - DNA, 25 bp, Homo sapien
ccttttgtaagctcgataatcaatt

SEQ ID NO: 2864740 - DNA, 25 bp, Homo sapien
ggcagtatcgtatagctttatctcc

SEQ ID NO: 2864741 - DNA, 25 bp, Homo sapien
aaaccttttgtaagctcgataatca

SEQ ID NO: 2864742 - DNA, 25 bp, Homo sapien
cacaggtttcaagtgacctgtttat

SEQ ID NO: 2864743 - DNA, 25 bp, Homo sapien
gatttagttgaggaaagatttgtca

SEQ ID NO: 2864744 - DNA, 25 bp, Homo sapien
tagaaatgaagtgactaagcatgct

SEQ ID NO: 2864745 - DNA, 25 bp, Homo sapien
cattgaacagcagtacatacaagca

SEQ ID NO: 2864746 - DNA, 25 bp, Homo sapien
tacaagcatatcaagagagtgagca

SEQ ID NO: 2864747 - DNA, 25 bp, Homo sapien
ctccaaagtaggtggaatttcaagc

SEQ ID NO: 2864748 - DNA, 25 bp, Homo sapien
tccaaagtaggtggaatttcaagca

SEQ ID NO: 2864749 - DNA, 25 bp, Homo sapien
tataatcggcattcttgaatgttgg

SEQ ID NO: 2864750 - DNA, 25 bp, Homo sapien
ataatcggcattcttgaatgttggc

SEQ ID NO: 2864751 - DNA, 25 bp, Homo sapien
ttataatcggcattcttgaatgttg

SEQ ID NO: 2864752 - DNA, 25 bp, Homo sapien
ccaagtctgaccatgccgttcttcc

SEQ ID NO: 2864753 - DNA, 25 bp, Homo sapien
tttattgttaccatcccacagtcca

SEQ ID NO: 2864754 - DNA, 25 bp, Homo sapien
tattgttaccatcccacagtccaag

SEQ ID NO: 2864755 - DNA, 25 bp, Homo sapien
aagtctgaccatgccgttcttccca

SEQ ID NO: 2864756 - DNA, 25 bp, Homo sapien
tctcaagggatctggatctgttacc

SEQ ID NO: 2864757 - DNA, 25 bp, Homo sapien
ctggatctgttaccccagatttatc

SEQ ID NO: 2864758 - DNA, 25 bp, Homo sapien
acctctcaagggatctggatctgtt

SEQ ID NO: 2864759 - DNA, 25 bp, Homo sapien
aagggatctggatctgttaccccag

SEQ ID NO: 2864760 - DNA, 25 bp, Homo sapien
gatgagggaacatcaaaggctcatg

SEQ ID NO: 2864761 - DNA, 25 bp, Homo sapien
ataaagatgagggaacatcaaaggc

SEQ ID NO: 2864762 - DNA, 25 bp, Homo sapien
aagatgagggaacatcaaaggctca

SEQ ID NO: 2864763 - DNA, 25 bp, Homo sapien
taaagatgagggaacatcaaaggct

SEQ ID NO: 2864764 - DNA, 25 bp, Homo sapien
cttccgaaatgaacatgatctgggc

SEQ ID NO: 2864765 - DNA, 25 bp, Homo sapien
ttccgaaatgaacatgatctgggct

SEQ ID NO: 2864766 - DNA, 25 bp, Homo sapien
ccagaagagattatgattaaagtta

SEQ ID NO: 2864767 - DNA, 25 bp, Homo sapien
aagccagaagagattatgattaaag

SEQ ID NO: 2864768 - DNA, 25 bp, Homo sapien
gccagaagagattatgattaaagtt

SEQ ID NO: 2864769 - DNA, 25 bp, Homo sapien
agccagaagagattatgattaaagt

SEQ ID NO: 2864770 - DNA, 25 bp, Homo sapien
tgtttcacacgtggaagcaccagaa

SEQ ID NO: 2864771 - DNA, 25 bp, Homo sapien
aaatgtgggtgctttgtttagtatc

SEQ ID NO: 2864772 - DNA, 25 bp, Homo sapien
gctgtctgatctcaaggtcctgcat

SEQ ID NO: 2864773 - DNA, 25 bp, Homo sapien
tgtttagtatcttgtaactagcttg

SEQ ID NO: 2864774 - DNA, 25 bp, Homo sapien
cagtgtgtgccagtaattcctcttg

SEQ ID NO: 2864775 - DNA, 25 bp, Homo sapien
tcctcttgagaacggtataatttag

SEQ ID NO: 2864776 - DNA, 25 bp, Homo sapien
tctgtagcggttccaagggatgcgc

SEQ ID NO: 2864777 - DNA, 25 bp, Homo sapien
taatttagagagtccaattgctttc

SEQ ID NO: 2864778 - DNA, 25 bp, Homo sapien
ggaacagtaaactgatactgatata

SEQ ID NO: 2864779 - DNA, 25 bp, Homo sapien
tgcaaggagaatctctgtgcatgac

SEQ ID NO: 2864780 - DNA, 25 bp, Homo sapien
ataattttgagggctgagtgttacc

SEQ ID NO: 2864781 - DNA, 25 bp, Homo sapien
ggagttaggaacagtaaactgatac

SEQ ID NO: 2864782 - DNA, 25 bp, Homo sapien
gcatttgatactgatacagctccca

SEQ ID NO: 2864783 - DNA, 25 bp, Homo sapien
taaacaccacgcttctctggtctct

SEQ ID NO: 2864784 - DNA, 25 bp, Homo sapien
tgggcggaaaaacgtatcttccata

SEQ ID NO: 2864785 - DNA, 25 bp, Homo sapien
catggtcaacattttagttgggcgg

SEQ ID NO: 2864786 - DNA, 25 bp, Homo sapien
atggcaaaactgtgtctgcagcatt

SEQ ID NO: 2864787 - DNA, 25 bp, Homo sapien
catggcaaaactgtgtctgcagcat

SEQ ID NO: 2864788 - DNA, 25 bp, Homo sapien
ggcaaaactgtgtctgcagcattac

SEQ ID NO: 2864789 - DNA, 25 bp, Homo sapien
tggcaaaactgtgtctgcagcatta

SEQ ID NO: 2864790 - DNA, 25 bp, Homo sapien
agcatgtcacgggcattgttgtaaa

SEQ ID NO: 2864791 - DNA, 25 bp, Homo sapien
gcatgtcacgggcattgttgtaaac

SEQ ID NO: 2864792 - DNA, 25 bp, Homo sapien
cagcatgtcacgggcattgttgtaa

SEQ ID NO: 2864793 - DNA, 25 bp, Homo sapien
ctgccaagagaagtaatgtgcatat

SEQ ID NO: 2864794 - DNA, 25 bp, Homo sapien
ccaagagaagtaatgtgcatattga

SEQ ID NO: 2864795 - DNA, 25 bp, Homo sapien
gagaagtaatgtgcatattgagcat

SEQ ID NO: 2864796 - DNA, 25 bp, Homo sapien
aagagaagtaatgtgcatattgagc

SEQ ID NO: 2864797 - DNA, 25 bp, Homo sapien
taggcactctaggagccaagatagc

SEQ ID NO: 2864798 - DNA, 25 bp, Homo sapien
ggcactctaggagccaagatagctt

SEQ ID NO: 2864799 - DNA, 25 bp, Homo sapien
gttaggcactctaggagccaagata

SEQ ID NO: 2864800 - DNA, 25 bp, Homo sapien
gcactctaggagccaagatagcttc

SEQ ID NO: 2864801 - DNA, 25 bp, Homo sapien
tgtgggttagtctctattccttcca

SEQ ID NO: 2864802 - DNA, 25 bp, Homo sapien
gtgtcactttgtgggttagtctcta

SEQ ID NO: 2864803 - DNA, 25 bp, Homo sapien
cactttgtgggttagtctctattcc

SEQ ID NO: 2864804 - DNA, 25 bp, Homo sapien
gtgggttagtctctattccttccag

SEQ ID NO: 2864805 - DNA, 25 bp, Homo sapien
aagatttggtctccaggatggccac

SEQ ID NO: 2864806 - DNA, 25 bp, Homo sapien
tatgatgctgcaccgaagatttggt

SEQ ID NO: 2864807 - DNA, 25 bp, Homo sapien
tgcaccgaagatttggtctccagga

SEQ ID NO: 2864808 - DNA, 25 bp, Homo sapien
ctttatgatgctgcaccgaagattt

SEQ ID NO: 2864809 - DNA, 25 bp, Homo sapien
ctcgcaatgagctggaattgctgtt

SEQ ID NO: 2864810 - DNA, 25 bp, Homo sapien
atttctgacaactcgcaatgagctg

SEQ ID NO: 2864811 - DNA, 25 bp, Homo sapien
gacaactcgcaatgagctggaattg

SEQ ID NO: 2864812 - DNA, 25 bp, Homo sapien
atgggagattatcatctgtccagat

SEQ ID NO: 2864813 - DNA, 25 bp, Homo sapien
tgtgcctgagcttaacgaaggtaga

SEQ ID NO: 2864814 - DNA, 25 bp, Homo sapien
tgtttgatattgcacttcagcacag

SEQ ID NO: 2864815 - DNA, 25 bp, Homo sapien
aatcaggcaaggaagaccaattagg

SEQ ID NO: 2864816 - DNA, 25 bp, Homo sapien
aggaacaccaccagctgacagtaat

SEQ ID NO: 2864817 - DNA, 25 bp, Homo sapien
ggaactaagaaatagatttcatcaa

SEQ ID NO: 2864818 - DNA, 25 bp, Homo sapien
acgaggaactaagaaatagatttca

SEQ ID NO: 2864819 - DNA, 25 bp, Homo sapien
tcactggaaaacgaggaactaagaa

SEQ ID NO: 2864820 - DNA, 25 bp, Homo sapien
ttcactggaaaacgaggaactaaga

SEQ ID NO: 2864821 - DNA, 25 bp, Homo sapien
tacatgagacaatgctcagaactgt

SEQ ID NO: 2864822 - DNA, 25 bp, Homo sapien
gcttttttgatacatgagacaatgc

SEQ ID NO: 2864823 - DNA, 25 bp, Homo sapien
tgagacaatgctcagaactgtcaca

SEQ ID NO: 2864824 - DNA, 25 bp, Homo sapien
ttttgatacatgagacaatgctcag

SEQ ID NO: 2864825 - DNA, 25 bp, Homo sapien
ggacagagaaggttgtgcgtctcat

SEQ ID NO: 2864826 - DNA, 25 bp, Homo sapien
taactggagtaccttcgaagtcatc

SEQ ID NO: 2864827 - DNA, 25 bp, Homo sapien
gatggcacgctacctattaccttaa

SEQ ID NO: 2864828 - DNA, 25 bp, Homo sapien
taacccacattggtattacagtaag

SEQ ID NO: 2864829 - DNA, 25 bp, Homo sapien
taagtaacttgattagatggcacgc

SEQ ID NO: 2864830 - DNA, 25 bp, Homo sapien
ttcaacttccgagagttcagctgcc

SEQ ID NO: 2864831 - DNA, 25 bp, Homo sapien
gacactcccgtaacagatatttccc

SEQ ID NO: 2864832 - DNA, 25 bp, Homo sapien
cccatgaactgctgacggctgtctt

SEQ ID NO: 2864833 - DNA, 25 bp, Homo sapien
cttgtgctgtaatatttccgagcat

SEQ ID NO: 2864834 - DNA, 25 bp, Homo sapien
taaagcacagtggataagagcaggc

SEQ ID NO: 2864835 - DNA, 25 bp, Homo sapien
gacaccatcagaagtctggactgct

SEQ ID NO: 2864836 - DNA, 25 bp, Homo sapien
ctaaatggtaaatgaaacagtctcc

SEQ ID NO: 2864837 - DNA, 25 bp, Homo sapien
taaatgtgggagagaacaccgtgct

SEQ ID NO: 2864838 - DNA, 25 bp, Homo sapien
tctgcataacttgggtcttctgatt

SEQ ID NO: 2864839 - DNA, 25 bp, Homo sapien
cagacgatagtcatacatggagatt

SEQ ID NO: 2864840 - DNA, 25 bp, Homo sapien
gggtggttgacagccaaatctattg

SEQ ID NO: 2864841 - DNA, 25 bp, Homo sapien
tgttagcgctttgacactgagtgac

SEQ ID NO: 2864842 - DNA, 25 bp, Homo sapien
tctggaaattccccttgcatgcctt

SEQ ID NO: 2864843 - DNA, 25 bp, Homo sapien
tctgcctggtggaaaaggtaatttg

SEQ ID NO: 2864844 - DNA, 25 bp, Homo sapien
ttttcttcactctgcctggtggaaa

SEQ ID NO: 2864845 - DNA, 25 bp, Homo sapien
tgcctggtggaaaaggtaatttgaa

SEQ ID NO: 2864846 - DNA, 25 bp, Homo sapien
tcttcactctgcctggtggaaaagg

SEQ ID NO: 2864847 - DNA, 25 bp, Homo sapien
ccattgatacctctgatcctgatga

SEQ ID NO: 2864848 - DNA, 25 bp, Homo sapien
cattgatacctctgatcctgatgac

SEQ ID NO: 2864849 - DNA, 25 bp, Homo sapien
accattgatacctctgatcctgatg

SEQ ID NO: 2864850 - DNA, 25 bp, Homo sapien
cttgccatccttgtcattcgaattt

SEQ ID NO: 2864851 - DNA, 25 bp, Homo sapien
aaactccaatttgggttctgcaggt

SEQ ID NO: 2864852 - DNA, 25 bp, Homo sapien
ccatccttgtcattcgaatttcagt

SEQ ID NO: 2864853 - DNA, 25 bp, Homo sapien
ttttcttgccatccttgtcattcga

SEQ ID NO: 2864854 - DNA, 25 bp, Homo sapien
ctctgcaaaattctttcgctttttc

SEQ ID NO: 2864855 - DNA, 25 bp, Homo sapien
gctctgcaaaattctttcgcttttt

SEQ ID NO: 2864856 - DNA, 25 bp, Homo sapien
ttcagctctgcaaaattctttcgct

SEQ ID NO: 2864857 - DNA, 25 bp, Homo sapien
cagctctgcaaaattctttcgcttt

SEQ ID NO: 2864858 - DNA, 25 bp, Homo sapien
tcttcttctcttctataacctccat

SEQ ID NO: 2864859 - DNA, 25 bp, Homo sapien
ggcacagcaggaaacttcttcttct

SEQ ID NO: 2864860 - DNA, 25 bp, Homo sapien
cacagcaggaaacttcttcttctct

SEQ ID NO: 2864861 - DNA, 25 bp, Homo sapien
ctggcacagcaggaaacttcttctt

SEQ ID NO: 2864862 - DNA, 25 bp, Homo sapien
catgagggccttatctcttagggca

SEQ ID NO: 2864863 - DNA, 25 bp, Homo sapien
tccagctggcctatagatggatgcc

SEQ ID NO: 2864864 - DNA, 25 bp, Homo sapien
gacacacagcactcataattcttgg

SEQ ID NO: 2864865 - DNA, 25 bp, Homo sapien
aaatgatgtccaataaccatgaggg

SEQ ID NO: 2864866 - DNA, 25 bp, Homo sapien
ctaatctctaagagttctgtttggt

SEQ ID NO: 2864867 - DNA, 25 bp, Homo sapien
tctctaagagttctgtttggtgatg

SEQ ID NO: 2864868 - DNA, 25 bp, Homo sapien
taatctctaagagttctgtttggtg

SEQ ID NO: 2864869 - DNA, 25 bp, Homo sapien
aatctctaagagttctgtttggtga

SEQ ID NO: 2864870 - DNA, 25 bp, Homo sapien
tccacttttgacgagggcttgtgca

SEQ ID NO: 2864871 - DNA, 25 bp, Homo sapien
tttgggcagtttccacttttgacga

SEQ ID NO: 2864872 - DNA, 25 bp, Homo sapien
ttgtcagagacattgctgtctgtgc

SEQ ID NO: 2864873 - DNA, 25 bp, Homo sapien
ttttgacgagggcttgtgcatttgt

SEQ ID NO: 2864874 - DNA, 25 bp, Homo sapien
ttctgctgacttcttacgctgctca

SEQ ID NO: 2864875 - DNA, 25 bp, Homo sapien
tctgctgacttcttacgctgctcat

SEQ ID NO: 2864876 - DNA, 25 bp, Homo sapien
gttctgctgacttcttacgctgctc

SEQ ID NO: 2864877 - DNA, 25 bp, Homo sapien
cctgatagcctttcacccctttcat

SEQ ID NO: 2864878 - DNA, 25 bp, Homo sapien
catcctgatagcctttcaccccttt

SEQ ID NO: 2864879 - DNA, 25 bp, Homo sapien
tccttctcatcctgatagcctttca

SEQ ID NO: 2864880 - DNA, 25 bp, Homo sapien
catccttctcatcctgatagccttt

SEQ ID NO: 2864881 - DNA, 25 bp, Homo sapien
gaccaagcactccttcaattctagg

SEQ ID NO: 2864882 - DNA, 25 bp, Homo sapien
ttctagggctaaatgatgtcatgac

SEQ ID NO: 2864883 - DNA, 25 bp, Homo sapien
taacctgtcaccctgcactatctgt

SEQ ID NO: 2864884 - DNA, 25 bp, Homo sapien
tatgatcctagaagaactaacctgt

SEQ ID NO: 2864885 - DNA, 25 bp, Homo sapien
gatcgtttgtccaccacttggcggg

SEQ ID NO: 2864886 - DNA, 25 bp, Homo sapien
agccccgatcgtttgtccaccactt

SEQ ID NO: 2864887 - DNA, 25 bp, Homo sapien
agctcagccccgatcgtttgtccac

SEQ ID NO: 2864888 - DNA, 25 bp, Homo sapien
gtccagctcagccccgatcgtttgt

SEQ ID NO: 2864889 - DNA, 25 bp, Homo sapien
gcaggtggcagagttgtaatctggc

SEQ ID NO: 2864890 - DNA, 25 bp, Homo sapien
ccagatccatttggcaggtggcaga

SEQ ID NO: 2864891 - DNA, 25 bp, Homo sapien
caggtggcagagttgtaatctggca

SEQ ID NO: 2864892 - DNA, 25 bp, Homo sapien
ttggcaggtggcagagttgtaatct

SEQ ID NO: 2864893 - DNA, 25 bp, Homo sapien
ttcctttaccatatggacagctggg

SEQ ID NO: 2864894 - DNA, 25 bp, Homo sapien
ttgtctagaaggtcacagaatgctg

SEQ ID NO: 2864895 - DNA, 25 bp, Homo sapien
gctgagattcagacaacacaggagt

SEQ ID NO: 2864896 - DNA, 25 bp, Homo sapien
aagggtttctgttccacgaggtcat

SEQ ID NO: 2864897 - DNA, 25 bp, Homo sapien
gatccgtagtggagattgagcagac

SEQ ID NO: 2864898 - DNA, 25 bp, Homo sapien
tgacagatccgtagtggagattgag

SEQ ID NO: 2864899 - DNA, 25 bp, Homo sapien
ggtgtcagcattgacagatccgtag

SEQ ID NO: 2864900 - DNA, 25 bp, Homo sapien
gacaaggtgtcagcattgacagatc

SEQ ID NO: 2864901 - DNA, 25 bp, Homo sapien
gcaaaaatgtagtctctcacagtct

SEQ ID NO: 2864902 - DNA, 25 bp, Homo sapien
tttaacacccaaatcagagaaagga

SEQ ID NO: 2864903 - DNA, 25 bp, Homo sapien
tgtgcttccagcctcactcgtgtgg

SEQ ID NO: 2864904 - DNA, 25 bp, Homo sapien
cctggctgagagtctttcacaaggc

SEQ ID NO: 2864905 - DNA, 25 bp, Homo sapien
ccttgcatagttggcagcaagtagc

SEQ ID NO: 2864906 - DNA, 25 bp, Homo sapien
attctcctgccctgttacaaggtat

SEQ ID NO: 2864907 - DNA, 25 bp, Homo sapien
catagttggcagcaagtagccaaaa

SEQ ID NO: 2864908 - DNA, 25 bp, Homo sapien
tctcctgccctgttacaaggtattt

SEQ ID NO: 2864909 - DNA, 25 bp, Homo sapien
cccagaggagcgctgaggtatttgc

SEQ ID NO: 2864910 - DNA, 25 bp, Homo sapien
tggcggatcagttgtgagtgagtca

SEQ ID NO: 2864911 - DNA, 25 bp, Homo sapien
tgagtgagtcagctgtaggagccct

SEQ ID NO: 2864912 - DNA, 25 bp, Homo sapien
gtatttgcaaaggacgattggcgga

SEQ ID NO: 2864913 - DNA, 25 bp, Homo sapien
tgtctcattcgtacaaaaccttcag

SEQ ID NO: 2864914 - DNA, 25 bp, Homo sapien
cctgttgccaaggaaaatggcctat

SEQ ID NO: 2864915 - DNA, 25 bp, Homo sapien
ttcagggcacgggtaaattcctgtc

SEQ ID NO: 2864916 - DNA, 25 bp, Homo sapien
cagctgtcaggcacggttagtctcc

SEQ ID NO: 2864917 - DNA, 25 bp, Homo sapien
ctactccatgccgaccagcatctcc

SEQ ID NO: 2864918 - DNA, 25 bp, Homo sapien
agattaaatgcaattgatccagtat

SEQ ID NO: 2864919 - DNA, 25 bp, Homo sapien
tccttctactccatgccgaccagca

SEQ ID NO: 2864920 - DNA, 25 bp, Homo sapien
ttaaatgcaattgatccagtatctg

SEQ ID NO: 2864921 - DNA, 25 bp, Homo sapien
cgctgtataatgcttcaccataagg

SEQ ID NO: 2864922 - DNA, 25 bp, Homo sapien
ttatcgaggctctatagcgctgtat

SEQ ID NO: 2864923 - DNA, 25 bp, Homo sapien
caccataaggctgtaaaatcatgtt

SEQ ID NO: 2864924 - DNA, 25 bp, Homo sapien
atcatgttgggatggtgagtgaggc

SEQ ID NO: 2864925 - DNA, 25 bp, Homo sapien
ctgattccgtcataaccaaaccttc

SEQ ID NO: 2864926 - DNA, 25 bp, Homo sapien
ccgtcataaccaaaccttcatccaa

SEQ ID NO: 2864927 - DNA, 25 bp, Homo sapien
cgtcataaccaaaccttcatccaac

SEQ ID NO: 2864928 - DNA, 25 bp, Homo sapien
attccgtcataaccaaaccttcatc

SEQ ID NO: 2864929 - DNA, 25 bp, Homo sapien
cctgtttcctcaatacaccctacct

SEQ ID NO: 2864930 - DNA, 25 bp, Homo sapien
ctgtttcctcaatacaccctacctc

SEQ ID NO: 2864931 - DNA, 25 bp, Homo sapien
attatttctttgcccaaagagggca

SEQ ID NO: 2864932 - DNA, 25 bp, Homo sapien
ttatttctttgcccaaagagggcac

SEQ ID NO: 2864933 - DNA, 25 bp, Homo sapien
attggaataaaacggtagtagcgca

SEQ ID NO: 2864934 - DNA, 25 bp, Homo sapien
aaaacggtagtagcgcactgtcagc

SEQ ID NO: 2864935 - DNA, 25 bp, Homo sapien
ctgtcagcacaaatgcttctgagct

SEQ ID NO: 2864936 - DNA, 25 bp, Homo sapien
ggtagtagcgcactgtcagcacaaa

SEQ ID NO: 2864937 - DNA, 25 bp, Homo sapien
ctttgggctttctcaagtccacttc

SEQ ID NO: 2864938 - DNA, 25 bp, Homo sapien
tgtactttgggctttctcaagtcca

SEQ ID NO: 2864939 - DNA, 25 bp, Homo sapien
tactttgggctttctcaagtccact

SEQ ID NO: 2864940 - DNA, 25 bp, Homo sapien
aggcaacagttggttggaattttgt

SEQ ID NO: 2864941 - DNA, 25 bp, Homo sapien
tgaacacaagtgtagaagttgaggc

SEQ ID NO: 2864942 - DNA, 25 bp, Homo sapien
tctcgtaatacaaccagtatgaggc

SEQ ID NO: 2864943 - DNA, 25 bp, Homo sapien
tggtatgaaagtccctgctattgca

SEQ ID NO: 2864944 - DNA, 25 bp, Homo sapien
tgcaggaggctcctatatgaacaca

SEQ ID NO: 2864945 - DNA, 25 bp, Homo sapien
aggaccatccatattgccagtgcat

SEQ ID NO: 2864946 - DNA, 25 bp, Homo sapien
ctgaacagaaggaccatccatattg

SEQ ID NO: 2864947 - DNA, 25 bp, Homo sapien
cagaaggaccatccatattgccagt

SEQ ID NO: 2864948 - DNA, 25 bp, Homo sapien
gaacagaaggaccatccatattgcc

SEQ ID NO: 2864949 - DNA, 25 bp, Homo sapien
caggtatgcagttgactatgtcatc

SEQ ID NO: 2864950 - DNA, 25 bp, Homo sapien
ttttgcaggtatgcagttgactatg

SEQ ID NO: 2864951 - DNA, 25 bp, Homo sapien
tgcagttgactatgtcatcctctcc

SEQ ID NO: 2864952 - DNA, 25 bp, Homo sapien
tatgtcatcctctcctgacgctgtc

SEQ ID NO: 2864953 - DNA, 25 bp, Homo sapien
tgattcctgtttcagtcaagactgg

SEQ ID NO: 2864954 - DNA, 25 bp, Homo sapien
tcagtcaagactggctcaagtagtg

SEQ ID NO: 2864955 - DNA, 25 bp, Homo sapien
tgaatatcagttgcccaatcttgga

SEQ ID NO: 2864956 - DNA, 25 bp, Homo sapien
gactggctcaagtagtgcatgggac

SEQ ID NO: 2864957 - DNA, 25 bp, Homo sapien
atggagtcataaaggctacttgaag

SEQ ID NO: 2864958 - DNA, 25 bp, Homo sapien
tcatggagtcataaaggctacttga

SEQ ID NO: 2864959 - DNA, 25 bp, Homo sapien
tggagtcataaaggctacttgaagt

SEQ ID NO: 2864960 - DNA, 25 bp, Homo sapien
catggagtcataaaggctacttgaa

SEQ ID NO: 2864961 - DNA, 25 bp, Homo sapien
tatctactctagggttgatctgttc

SEQ ID NO: 2864962 - DNA, 25 bp, Homo sapien
ttttcttccacacttatctttgcct

SEQ ID NO: 2864963 - DNA, 25 bp, Homo sapien
atctactctagggttgatctgttca

SEQ ID NO: 2864964 - DNA, 25 bp, Homo sapien
gtaaggaagccatgtagagaatctg

SEQ ID NO: 2864965 - DNA, 25 bp, Homo sapien
agcaacaacctcatcctgggctcta

SEQ ID NO: 2864966 - DNA, 25 bp, Homo sapien
aaggaagccatgtagagaatctgta

SEQ ID NO: 2864967 - DNA, 25 bp, Homo sapien
taaggaagccatgtagagaatctgt

SEQ ID NO: 2864968 - DNA, 25 bp, Homo sapien
tgtcacatgtctctcattcatagag

SEQ ID NO: 2864969 - DNA, 25 bp, Homo sapien
tagagtttgcatatccgttgtccat

SEQ ID NO: 2864970 - DNA, 25 bp, Homo sapien
tcattcatagagtttgcatatccgt

SEQ ID NO: 2864971 - DNA, 25 bp, Homo sapien
tctcagcattgtcacatgtctctca

SEQ ID NO: 2864972 - DNA, 25 bp, Homo sapien
gcagaacccttagtgatagagtggc

SEQ ID NO: 2864973 - DNA, 25 bp, Homo sapien
tgctcctaccagtgttacagcttgg

SEQ ID NO: 2864974 - DNA, 25 bp, Homo sapien
ctggtgctcctccaatgtagcattt

SEQ ID NO: 2864975 - DNA, 25 bp, Homo sapien
tatcatcttccattcgtattcctgg

SEQ ID NO: 2864976 - DNA, 25 bp, Homo sapien
cctaaaaacagcagcaggggcagca

SEQ ID NO: 2864977 - DNA, 25 bp, Homo sapien
aaaacagcagcaggggcagcagcat

SEQ ID NO: 2864978 - DNA, 25 bp, Homo sapien
ggcctaaaaacagcagcaggggcag

SEQ ID NO: 2864979 - DNA, 25 bp, Homo sapien
taaaaacagcagcaggggcagcagc

SEQ ID NO: 2864980 - DNA, 25 bp, Homo sapien
gggacaaccctagactttaagcatg

SEQ ID NO: 2864981 - DNA, 25 bp, Homo sapien
cactgattgcaaacggtccatgaat

SEQ ID NO: 2864982 - DNA, 25 bp, Homo sapien
aacggtccatgaatccatccaaagc

SEQ ID NO: 2864983 - DNA, 25 bp, Homo sapien
taagcatgttaggacataaattgtg

SEQ ID NO: 2864984 - DNA, 25 bp, Homo sapien
tcttcagaaattgtatggtctgttg

SEQ ID NO: 2864985 - DNA, 25 bp, Homo sapien
tctgttgaatggtagagacgatgaa

SEQ ID NO: 2864986 - DNA, 25 bp, Homo sapien
tctgtgcatcaaagcctgggttaat

SEQ ID NO: 2864987 - DNA, 25 bp, Homo sapien
gcctgggttaatgatatcttcagaa

SEQ ID NO: 2864988 - DNA, 25 bp, Homo sapien
gtgatgaagacaaagatactgaagt

SEQ ID NO: 2864989 - DNA, 25 bp, Homo sapien
cgaagaccactattgtttgtgatga

SEQ ID NO: 2864990 - DNA, 25 bp, Homo sapien
ttaccgaagaccactattgtttgtg

SEQ ID NO: 2864991 - DNA, 25 bp, Homo sapien
tgtataagtctatcatctccatatg

SEQ ID NO: 2864992 - DNA, 25 bp, Homo sapien
tgaatcacattacgcagaatagaca

SEQ ID NO: 2864993 - DNA, 25 bp, Homo sapien
caaggtgccttatgaatcacattac

SEQ ID NO: 2864994 - DNA, 25 bp, Homo sapien
gccttatgaatcacattacgcagaa

SEQ ID NO: 2864995 - DNA, 25 bp, Homo sapien
atcccaaggtgccttatgaatcaca

SEQ ID NO: 2864996 - DNA, 25 bp, Homo sapien
caaaggaatgagtttcattgccaca

SEQ ID NO: 2864997 - DNA, 25 bp, Homo sapien
gaatgagtttcattgccacagactc

SEQ ID NO: 2864998 - DNA, 25 bp, Homo sapien
ctgatgatatcgcaaaggaatgagt

SEQ ID NO: 2864999 - DNA, 25 bp, Homo sapien
gatatcgcaaaggaatgagtttcat

SEQ ID NO: 2865000 - DNA, 25 bp, Homo sapien
tcttgtgagccagtaggaagtagca

SEQ ID NO: 2865001 - DNA, 25 bp, Homo sapien
ggaagtagcatcaacaaatctgtgc

SEQ ID NO: 2865002 - DNA, 25 bp, Homo sapien
acagtgtcttgggtggaccattccc

SEQ ID NO: 2865003 - DNA, 25 bp, Homo sapien
tggtccctgctgactcaggagaaag

SEQ ID NO: 2865004 - DNA, 25 bp, Homo sapien
tcttcacaaaggtcgtcagctggcc

SEQ ID NO: 2865005 - DNA, 25 bp, Homo sapien
ttatcttcttcacaaaggtcgtcag

SEQ ID NO: 2865006 - DNA, 25 bp, Homo sapien
tcttcttcacaaaggtcgtcagctg

SEQ ID NO: 2865007 - DNA, 25 bp, Homo sapien
gaaggtgacagaggcatgagtggca

SEQ ID NO: 2865008 - DNA, 25 bp, Homo sapien
ccttcacataagctattggatagaa

SEQ ID NO: 2865009 - DNA, 25 bp, Homo sapien
ctgctttgccttacaattcctgaag

SEQ ID NO: 2865010 - DNA, 25 bp, Homo sapien
acaatgtgctgctccggtggatgca

SEQ ID NO: 2865011 - DNA, 25 bp, Homo sapien
tggatagaatactggtactgaatac

SEQ ID NO: 2865012 - DNA, 25 bp, Homo sapien
cagaatagcaaggatgcaccttctc

SEQ ID NO: 2865013 - DNA, 25 bp, Homo sapien
gtcagaatagcaaggatgcaccttc

SEQ ID NO: 2865014 - DNA, 25 bp, Homo sapien
tcagaatagcaaggatgcaccttct

SEQ ID NO: 2865015 - DNA, 25 bp, Homo sapien
gaatagcaaggatgcaccttctcca

SEQ ID NO: 2865016 - DNA, 25 bp, Homo sapien
gtacaaacgagtcctggccttgtct

SEQ ID NO: 2865017 - DNA, 25 bp, Homo sapien
agtaccccattctatcatcaacggg

SEQ ID NO: 2865018 - DNA, 25 bp, Homo sapien
gcatcagtaccccattctatcatca

SEQ ID NO: 2865019 - DNA, 25 bp, Homo sapien
cgggtacaaacgagtcctggccttg

SEQ ID NO: 2865020 - DNA, 25 bp, Homo sapien
tttgactaatcaccaaaaagcaacc

SEQ ID NO: 2865021 - DNA, 25 bp, Homo sapien
gagtccctggagtcccatttcaggg

SEQ ID NO: 2865022 - DNA, 25 bp, Homo sapien
agtccctggagtcccatttcagggt

SEQ ID NO: 2865023 - DNA, 25 bp, Homo sapien
catatagccgtagagtccctggagt

SEQ ID NO: 2865024 - DNA, 25 bp, Homo sapien
agagtccctggagtcccatttcagg

SEQ ID NO: 2865025 - DNA, 25 bp, Homo sapien
cagtcatggcagtgggagactgaga

SEQ ID NO: 2865026 - DNA, 25 bp, Homo sapien
tcatggcagtgggagactgagagcc

SEQ ID NO: 2865027 - DNA, 25 bp, Homo sapien
cagtgggagactgagagcctgccat

SEQ ID NO: 2865028 - DNA, 25 bp, Homo sapien
tggcagtgggagactgagagcctgc

SEQ ID NO: 2865029 - DNA, 25 bp, Homo sapien
tttggccttgattccctctcatgtc

SEQ ID NO: 2865030 - DNA, 25 bp, Homo sapien
caaagattctgaacagcaccaagag

SEQ ID NO: 2865031 - DNA, 25 bp, Homo sapien
ttcaaagattctgaacagcaccaag

SEQ ID NO: 2865032 - DNA, 25 bp, Homo sapien
tggccttgattccctctcatgtcct

SEQ ID NO: 2865033 - DNA, 25 bp, Homo sapien
tactgctgcgtggtactgaaacacc

SEQ ID NO: 2865034 - DNA, 25 bp, Homo sapien
tgcttggtgtattggcgtctagcaa

SEQ ID NO: 2865035 - DNA, 25 bp, Homo sapien
cacttgagcaggtccatcggcagat

SEQ ID NO: 2865036 - DNA, 25 bp, Homo sapien
tagggcaccagcttttactgctgcg

SEQ ID NO: 2865037 - DNA, 25 bp, Homo sapien
cttctgaatagccatatgatatgct

SEQ ID NO: 2865038 - DNA, 25 bp, Homo sapien
tctgaatagccatatgatatgcttc

SEQ ID NO: 2865039 - DNA, 25 bp, Homo sapien
gtgagaagatgggagcatttatcca

SEQ ID NO: 2865040 - DNA, 25 bp, Homo sapien
gatgggagcatttatccacatgcat

SEQ ID NO: 2865041 - DNA, 25 bp, Homo sapien
ctggttgtacaagggcgagcactga

SEQ ID NO: 2865042 - DNA, 25 bp, Homo sapien
tttctggttgtacaagggcgagcac

SEQ ID NO: 2865043 - DNA, 25 bp, Homo sapien
cattttctggttgtacaagggcgag

SEQ ID NO: 2865044 - DNA, 25 bp, Homo sapien
gcattttctggttgtacaagggcga

SEQ ID NO: 2865045 - DNA, 25 bp, Homo sapien
tcagaggtgacccttggatcgagtt

SEQ ID NO: 2865046 - DNA, 25 bp, Homo sapien
tgagaatacatccaagggcccatgg

SEQ ID NO: 2865047 - DNA, 25 bp, Homo sapien
tatcaaggcaggagacacatttact

SEQ ID NO: 2865048 - DNA, 25 bp, Homo sapien
gaaagaaggtcatcaatcagaggtg

SEQ ID NO: 2865049 - DNA, 25 bp, Homo sapien
tctgtattgtctctcccatggggag

SEQ ID NO: 2865050 - DNA, 25 bp, Homo sapien
ctgccaaaaggagcctgcaggacag

SEQ ID NO: 2865051 - DNA, 25 bp, Homo sapien
gggagtactgccaaaaggagcctgc

SEQ ID NO: 2865052 - DNA, 25 bp, Homo sapien
taaactgctcttctgtattgtctct

SEQ ID NO: 2865053 - DNA, 25 bp, Homo sapien
taacatatgatagagggcacccgca

SEQ ID NO: 2865054 - DNA, 25 bp, Homo sapien
gcatgcttccgtgtcttctcaaaag

SEQ ID NO: 2865055 - DNA, 25 bp, Homo sapien
tatttcgatagggaagagcaaagcc

SEQ ID NO: 2865056 - DNA, 25 bp, Homo sapien
aatgtcattgagcacacgagagggc

SEQ ID NO: 2865057 - DNA, 25 bp, Homo sapien
gtgccaagagtcaccatggtccatg

SEQ ID NO: 2865058 - DNA, 25 bp, Homo sapien
ggtgtctccacactgtgccaagagt

SEQ ID NO: 2865059 - DNA, 25 bp, Homo sapien
tcccattggataaggcccaggtaca

SEQ ID NO: 2865060 - DNA, 25 bp, Homo sapien
tccatagtaagaaaacatcccattg

SEQ ID NO: 2865061 - DNA, 25 bp, Homo sapien
ttatggatttgccagtgtgtgcagt

SEQ ID NO: 2865062 - DNA, 25 bp, Homo sapien
tttgccagtgtgtgcagtttgcata

SEQ ID NO: 2865063 - DNA, 25 bp, Homo sapien
tggatttgccagtgtgtgcagtttg

SEQ ID NO: 2865064 - DNA, 25 bp, Homo sapien
cagtgtgtgcagtttgcatagtaca

SEQ ID NO: 2865065 - DNA, 25 bp, Homo sapien
tgatgcctgccgagtggtcgttcat

SEQ ID NO: 2865066 - DNA, 25 bp, Homo sapien
tagtgaaatggatttgatgcctgcc

SEQ ID NO: 2865067 - DNA, 25 bp, Homo sapien
gaaatggatttgatgcctgccgagt

SEQ ID NO: 2865068 - DNA, 25 bp, Homo sapien
tcttctgaccaagggaattagtgaa

SEQ ID NO: 2865069 - DNA, 25 bp, Homo sapien
taggatgtactgttgcttgatgatc

SEQ ID NO: 2865070 - DNA, 25 bp, Homo sapien
ttataggatgtactgttgcttgatg

SEQ ID NO: 2865071 - DNA, 25 bp, Homo sapien
aggatgtactgttgcttgatgatca

SEQ ID NO: 2865072 - DNA, 25 bp, Homo sapien
gatgtactgttgcttgatgatcatc

SEQ ID NO: 2865073 - DNA, 25 bp, Homo sapien
aaccctccacataaggcaaagtgtt

SEQ ID NO: 2865074 - DNA, 25 bp, Homo sapien
gcaaagtgtttgccagtgtgtttcc

SEQ ID NO: 2865075 - DNA, 25 bp, Homo sapien
tcttgctgccctaaccctccacata

SEQ ID NO: 2865076 - DNA, 25 bp, Homo sapien
aaagtgtttgccagtgtgtttccag

SEQ ID NO: 2865077 - DNA, 25 bp, Homo sapien
taccaagatagtttccaggattcct

SEQ ID NO: 2865078 - DNA, 25 bp, Homo sapien
tttggtgttattttgtccacgatca

SEQ ID NO: 2865079 - DNA, 25 bp, Homo sapien
ccaagtaccaagatagtttccagga

SEQ ID NO: 2865080 - DNA, 25 bp, Homo sapien
gtgtggcaccaagtaccaagatagt

SEQ ID NO: 2865081 - DNA, 25 bp, Homo sapien
ctgctaaaactctgaacggacaaca

SEQ ID NO: 2865082 - DNA, 25 bp, Homo sapien
taaaactctgaacggacaacagata

SEQ ID NO: 2865083 - DNA, 25 bp, Homo sapien
gctgctaaaactctgaacggacaac

SEQ ID NO: 2865084 - DNA, 25 bp, Homo sapien
gctaaaactctgaacggacaacaga

SEQ ID NO: 2865085 - DNA, 25 bp, Homo sapien
tgtgctttggcccacatgaggtaat

SEQ ID NO: 2865086 - DNA, 25 bp, Homo sapien
ttggaaacactgtgtagtaactggg

SEQ ID NO: 2865087 - DNA, 25 bp, Homo sapien
ttgcaaactgatggtttccaagcag

SEQ ID NO: 2865088 - DNA, 25 bp, Homo sapien
aactgatggtttccaagcagttttc

SEQ ID NO: 2865089 - DNA, 25 bp, Homo sapien
caatgtacagtgtcaggtaatagtc

SEQ ID NO: 2865090 - DNA, 25 bp, Homo sapien
tactagcaccaatgtacagtgtcag

SEQ ID NO: 2865091 - DNA, 25 bp, Homo sapien
cttactagcaccaatgtacagtgtc

SEQ ID NO: 2865092 - DNA, 25 bp, Homo sapien
gcaccaatgtacagtgtcaggtaat

SEQ ID NO: 2865093 - DNA, 25 bp, Homo sapien
ctgccagtaagttgaaataagccac

SEQ ID NO: 2865094 - DNA, 25 bp, Homo sapien
gccacagtatgcgaatgtttgagat

SEQ ID NO: 2865095 - DNA, 25 bp, Homo sapien
tctcttccgaccatatcacactgcc

SEQ ID NO: 2865096 - DNA, 25 bp, Homo sapien
ttctctgtcttgcaaatggccctct

SEQ ID NO: 2865097 - DNA, 25 bp, Homo sapien
atctgtcaaatctacaatcagatgt

SEQ ID NO: 2865098 - DNA, 25 bp, Homo sapien
gaagccaaatgtaatgtgactccat

SEQ ID NO: 2865099 - DNA, 25 bp, Homo sapien
acaatcagatgtattccacagaagc

SEQ ID NO: 2865100 - DNA, 25 bp, Homo sapien
tcagatgtattccacagaagccaaa

SEQ ID NO: 2865101 - DNA, 25 bp, Homo sapien
tagctcaggtatcttaactcctagg

SEQ ID NO: 2865102 - DNA, 25 bp, Homo sapien
tccaacaaagacagttgtctagctc

SEQ ID NO: 2865103 - DNA, 25 bp, Homo sapien
taactcctaggtctgtttcccagct

SEQ ID NO: 2865104 - DNA, 25 bp, Homo sapien
tatttgtcgactcacaaactcctgt

SEQ ID NO: 2865105 - DNA, 25 bp, Homo sapien
acaaagacatccagacggctctgca

SEQ ID NO: 2865106 - DNA, 25 bp, Homo sapien
ataagctgatagctttagctggtgc

SEQ ID NO: 2865107 - DNA, 25 bp, Homo sapien
agctgatagctttagctggtgcttt

SEQ ID NO: 2865108 - DNA, 25 bp, Homo sapien
caaagacatccagacggctctgcat

SEQ ID NO: 2865109 - DNA, 25 bp, Homo sapien
agcacacattcggggaatcttttta

SEQ ID NO: 2865110 - DNA, 25 bp, Homo sapien
gcacacattcggggaatctttttac

SEQ ID NO: 2865111 - DNA, 25 bp, Homo sapien
cacacattcggggaatctttttact

SEQ ID NO: 2865112 - DNA, 25 bp, Homo sapien
tgtgaagggtctatatatgcatgag

SEQ ID NO: 2865113 - DNA, 25 bp, Homo sapien
gggtcatatgaatctgccttagaaa

SEQ ID NO: 2865114 - DNA, 25 bp, Homo sapien
caaggaaaacgtcattgggataggg

SEQ ID NO: 2865115 - DNA, 25 bp, Homo sapien
cagaatctaagtggagtattgggtc

SEQ ID NO: 2865116 - DNA, 25 bp, Homo sapien
tacatgattgtgaaccgtcttatgt

SEQ ID NO: 2865117 - DNA, 25 bp, Homo sapien
aatatttgagacttgtaagctttat

SEQ ID NO: 2865118 - DNA, 25 bp, Homo sapien
gatgttgcaattatatggattggaa

SEQ ID NO: 2865119 - DNA, 25 bp, Homo sapien
tatatggattggaaagtattacatg

SEQ ID NO: 2865120 - DNA, 25 bp, Homo sapien
tgtgggattccaaagatactggttc

SEQ ID NO: 2865121 - DNA, 25 bp, Homo sapien
gacaggcaaatacttgtgggattcc

SEQ ID NO: 2865122 - DNA, 25 bp, Homo sapien
tttcttgacaggcaaatacttgtgg

SEQ ID NO: 2865123 - DNA, 25 bp, Homo sapien
ggattccaaagatactggttctgca

SEQ ID NO: 2865124 - DNA, 25 bp, Homo sapien
ttacaagttatctgaggggcgcaca

SEQ ID NO: 2865125 - DNA, 25 bp, Homo sapien
tacaagttatctgaggggcgcacac

SEQ ID NO: 2865126 - DNA, 25 bp, Homo sapien
aaatgacatgtccacatcagtgcct

SEQ ID NO: 2865127 - DNA, 25 bp, Homo sapien
gaggcaaatgacatgtccacatcag

SEQ ID NO: 2865128 - DNA, 25 bp, Homo sapien
ccacatcagtgcctgcggcacacac

SEQ ID NO: 2865129 - DNA, 25 bp, Homo sapien
ttgagaggcaaatgacatgtccaca

SEQ ID NO: 2865130 - DNA, 25 bp, Homo sapien
tcaagtattctcggcaagtgcccag

SEQ ID NO: 2865131 - DNA, 25 bp, Homo sapien
ctcaagtattctcggcaagtgccca

SEQ ID NO: 2865132 - DNA, 25 bp, Homo sapien
caagtgcccagtggatgatggtaca

SEQ ID NO: 2865133 - DNA, 25 bp, Homo sapien
aagtgcccagtggatgatggtacac

SEQ ID NO: 2865134 - DNA, 25 bp, Homo sapien
cagcgcagccagtgtgatatgtata

SEQ ID NO: 2865135 - DNA, 25 bp, Homo sapien
ttgagcccagtgtatgttcctttga

SEQ ID NO: 2865136 - DNA, 25 bp, Homo sapien
catgtgtcatacacggcttgagccc

SEQ ID NO: 2865137 - DNA, 25 bp, Homo sapien
aaatcagagatagtgagaacacggg

SEQ ID NO: 2865138 - DNA, 25 bp, Homo sapien
gaacaccactctgaacctgaagata

SEQ ID NO: 2865139 - DNA, 25 bp, Homo sapien
caagaacaccactctgaacctgaag

SEQ ID NO: 2865140 - DNA, 25 bp, Homo sapien
caccactctgaacctgaagatataa

SEQ ID NO: 2865141 - DNA, 25 bp, Homo sapien
ctctgaacctgaagatataaaatca

SEQ ID NO: 2865142 - DNA, 25 bp, Homo sapien
cttcccgacgaatctatatttgtat

SEQ ID NO: 2865143 - DNA, 25 bp, Homo sapien
tgctgatcaagaatatttgttcaat

SEQ ID NO: 2865144 - DNA, 25 bp, Homo sapien
aatgctgatcaagaatatttgttca

SEQ ID NO: 2865145 - DNA, 25 bp, Homo sapien
ttcccgacgaatctatatttgtata

SEQ ID NO: 2865146 - DNA, 25 bp, Homo sapien
ctaggttcctaatgactcttgacgg

SEQ ID NO: 2865147 - DNA, 25 bp, Homo sapien
tcttgacggagctttatggctgagc

SEQ ID NO: 2865148 - DNA, 25 bp, Homo sapien
ttcccattggtaagagcactctcct

SEQ ID NO: 2865149 - DNA, 25 bp, Homo sapien
aatgtcgacatttgtgctcgtggag

SEQ ID NO: 2865150 - DNA, 25 bp, Homo sapien
gggttgcaattgagaaaactgctga

SEQ ID NO: 2865151 - DNA, 25 bp, Homo sapien
gggatgggctaacggcctcactggg

SEQ ID NO: 2865152 - DNA, 25 bp, Homo sapien
tgtggctcttgcagtcacctgtctg

SEQ ID NO: 2865153 - DNA, 25 bp, Homo sapien
aactgctgaacacagttactggcct

SEQ ID NO: 2865154 - DNA, 25 bp, Homo sapien
cggtgggagtggcttgccgacattc

SEQ ID NO: 2865155 - DNA, 25 bp, Homo sapien
tgtcttgtctttgctatcggtggga

SEQ ID NO: 2865156 - DNA, 25 bp, Homo sapien
tgtatccgaccagttccctccatgt

SEQ ID NO: 2865157 - DNA, 25 bp, Homo sapien
ggctgtatccgaccagttccctcca

SEQ ID NO: 2865158 - DNA, 25 bp, Homo sapien
catgcaggggagacacaggtgtcgg

SEQ ID NO: 2865159 - DNA, 25 bp, Homo sapien
gggagacacaggtgtcgggctgcag

SEQ ID NO: 2865160 - DNA, 25 bp, Homo sapien
agacacaggtgtcgggctgcaggtg

SEQ ID NO: 2865161 - DNA, 25 bp, Homo sapien
gcaggggagacacaggtgtcgggct

SEQ ID NO: 2865162 - DNA, 25 bp, Homo sapien
gaaatcctcatctgagggcactgtg

SEQ ID NO: 2865163 - DNA, 25 bp, Homo sapien
agaaatcctcatctgagggcactgt

SEQ ID NO: 2865164 - DNA, 25 bp, Homo sapien
gagaaatcctcatctgagggcactg

SEQ ID NO: 2865165 - DNA, 25 bp, Homo sapien
aagagaaatcctcatctgagggcac

SEQ ID NO: 2865166 - DNA, 25 bp, Homo sapien
ttctgggtcactccgaaatttgtgc

SEQ ID NO: 2865167 - DNA, 25 bp, Homo sapien
ctatggtgatgaaggaaactcgttt

SEQ ID NO: 2865168 - DNA, 25 bp, Homo sapien
cttgcatagtctagtgagtggcatt

SEQ ID NO: 2865169 - DNA, 25 bp, Homo sapien
tgaaagcatgagagattattcctgt

SEQ ID NO: 2865170 - DNA, 25 bp, Homo sapien
gaactaattgaataacagaaaactc

SEQ ID NO: 2865171 - DNA, 25 bp, Homo sapien
ggagtcagtgtgaactaattgaata

SEQ ID NO: 2865172 - DNA, 25 bp, Homo sapien
caactgtaaagaacctgaaagtatc

SEQ ID NO: 2865173 - DNA, 25 bp, Homo sapien
tttagcaactgtaaagaacctgaaa

SEQ ID NO: 2865174 - DNA, 25 bp, Homo sapien
aatataaggtcccatgagaccatgg

SEQ ID NO: 2865175 - DNA, 25 bp, Homo sapien
catgagaccatggaaaagtattgac

SEQ ID NO: 2865176 - DNA, 25 bp, Homo sapien
caacaaatataaggtcccatgagac

SEQ ID NO: 2865177 - DNA, 25 bp, Homo sapien
gaaaagtattgactcctcttccatt

SEQ ID NO: 2865178 - DNA, 25 bp, Homo sapien
tgagaactgtggttgctaccgcctt

SEQ ID NO: 2865179 - DNA, 25 bp, Homo sapien
aaaacgagaacagggcatcatttcc

SEQ ID NO: 2865180 - DNA, 25 bp, Homo sapien
gctctggcttgattgttgacagtca

SEQ ID NO: 2865181 - DNA, 25 bp, Homo sapien
tattcccgctcgcaaaagctctggc

SEQ ID NO: 2865182 - DNA, 25 bp, Homo sapien
aggggtgagaaatggtgtttcctct

SEQ ID NO: 2865183 - DNA, 25 bp, Homo sapien
ctgtataagaaggggtgagaaatgg

SEQ ID NO: 2865184 - DNA, 25 bp, Homo sapien
gtataagaaggggtgagaaatggtg

SEQ ID NO: 2865185 - DNA, 25 bp, Homo sapien
ggtgagaaatggtgtttcctctcat

SEQ ID NO: 2865186 - DNA, 25 bp, Homo sapien
agtgcccatgttccacagtgccctt

SEQ ID NO: 2865187 - DNA, 25 bp, Homo sapien
tatgaaaatagaccaggaacaaaac

SEQ ID NO: 2865188 - DNA, 25 bp, Homo sapien
tgaaaatagaccaggaacaaaacca

SEQ ID NO: 2865189 - DNA, 25 bp, Homo sapien
cctgtgttacagacagtgtttctgc

SEQ ID NO: 2865190 - DNA, 25 bp, Homo sapien
ctgctttgaaactttgccccatccc

SEQ ID NO: 2865191 - DNA, 25 bp, Homo sapien
ttcctgtgttacagacagtgtttct

SEQ ID NO: 2865192 - DNA, 25 bp, Homo sapien
ctgtgttacagacagtgtttctgct

SEQ ID NO: 2865193 - DNA, 25 bp, Homo sapien
ttgatacctcggttgatgtttcaga

SEQ ID NO: 2865194 - DNA, 25 bp, Homo sapien
aagagtggacaagtgaaacatttcc

SEQ ID NO: 2865195 - DNA, 25 bp, Homo sapien
taactgatctactaaaatgcctctg

SEQ ID NO: 2865196 - DNA, 25 bp, Homo sapien
ggatcacttatttgcacttatttgg

SEQ ID NO: 2865197 - DNA, 25 bp, Homo sapien
ctttaatctcaaatgaaaactggca

SEQ ID NO: 2865198 - DNA, 25 bp, Homo sapien
atctcaaatgaaaactggcattcca

SEQ ID NO: 2865199 - DNA, 25 bp, Homo sapien
taatctcaaatgaaaactggcattc

SEQ ID NO: 2865200 - DNA, 25 bp, Homo sapien
ctctttaatctcaaatgaaaactgg

SEQ ID NO: 2865201 - DNA, 25 bp, Homo sapien
ttatgtacgaggtccagcagcattt

SEQ ID NO: 2865202 - DNA, 25 bp, Homo sapien
ctggtctgctcttactaatgtcaaa

SEQ ID NO: 2865203 - DNA, 25 bp, Homo sapien
aatgtcaaagtcagtttcatataga

SEQ ID NO: 2865204 - DNA, 25 bp, Homo sapien
tatgtacgaggtccagcagcattta

SEQ ID NO: 2865205 - DNA, 25 bp, Homo sapien
tctctctttttgctcggatggcata

SEQ ID NO: 2865206 - DNA, 25 bp, Homo sapien
tctttttgctcggatggcatactct

SEQ ID NO: 2865207 - DNA, 25 bp, Homo sapien
tctctttttgctcggatggcatact

SEQ ID NO: 2865208 - DNA, 25 bp, Homo sapien
ctctctttttgctcggatggcatac

SEQ ID NO: 2865209 - DNA, 25 bp, Homo sapien
gcccctcatgatggattgaaaccag

SEQ ID NO: 2865210 - DNA, 25 bp, Homo sapien
atacaattgattggctggtctcagc

SEQ ID NO: 2865211 - DNA, 25 bp, Homo sapien
agttcccgtgggatagactgcccct

SEQ ID NO: 2865212 - DNA, 25 bp, Homo sapien
tgaaacatcacctttcgctgtcagt

SEQ ID NO: 2865213 - DNA, 25 bp, Homo sapien
gctgaaacacctgctaacctgctat

SEQ ID NO: 2865214 - DNA, 25 bp, Homo sapien
caattcctgtacatcaaggaggtac

SEQ ID NO: 2865215 - DNA, 25 bp, Homo sapien
tgggctagaactaggcaagcagtca

SEQ ID NO: 2865216 - DNA, 25 bp, Homo sapien
taaaggctttgacaatttccacgtg

SEQ ID NO: 2865217 - DNA, 25 bp, Homo sapien
ctctgaggatgcttgttgatggctg

SEQ ID NO: 2865218 - DNA, 25 bp, Homo sapien
gttgatggctgtgaactgttcaaag

SEQ ID NO: 2865219 - DNA, 25 bp, Homo sapien
cttgttgatggctgtgaactgttca

SEQ ID NO: 2865220 - DNA, 25 bp, Homo sapien
acctgttacttctctgaggatgctt

SEQ ID NO: 2865221 - DNA, 25 bp, Homo sapien
tgagccaggtgtgggatatagtctc

SEQ ID NO: 2865222 - DNA, 25 bp, Homo sapien
tagtctcgtggtgcgccgtttctta

SEQ ID NO: 2865223 - DNA, 25 bp, Homo sapien
tctgagccaggtgtgggatatagtc

SEQ ID NO: 2865224 - DNA, 25 bp, Homo sapien
atatagtctcgtggtgcgccgtttc

SEQ ID NO: 2865225 - DNA, 25 bp, Homo sapien
tctgagtgagggttcccccagccag

SEQ ID NO: 2865226 - DNA, 25 bp, Homo sapien
cctcgaggagaggtaacaggtggga

SEQ ID NO: 2865227 - DNA, 25 bp, Homo sapien
gcctgaacaaaggtggagcctcgag

SEQ ID NO: 2865228 - DNA, 25 bp, Homo sapien
gagtggtgcagaaggcttgcttggc

SEQ ID NO: 2865229 - DNA, 25 bp, Homo sapien
ctggaagaagcggtctgggtgcagc

SEQ ID NO: 2865230 - DNA, 25 bp, Homo sapien
tcacattgctacagatttgcaggag

SEQ ID NO: 2865231 - DNA, 25 bp, Homo sapien
gaactactgtatggtacatgctggc

SEQ ID NO: 2865232 - DNA, 25 bp, Homo sapien
aaaatgccgttttgcatcacattgc

SEQ ID NO: 2865233 - DNA, 25 bp, Homo sapien
gagatgccagtgattccagaactac

SEQ ID NO: 2865234 - DNA, 25 bp, Homo sapien
ccctttctactaggcagtctgggaa

SEQ ID NO: 2865235 - DNA, 25 bp, Homo sapien
tccttgcttctaacggtccctggct

SEQ ID NO: 2865236 - DNA, 25 bp, Homo sapien
ccattgaaagttccaagctggtgca

SEQ ID NO: 2865237 - DNA, 25 bp, Homo sapien
tgaagagagtctgccccttatgtat

SEQ ID NO: 2865238 - DNA, 25 bp, Homo sapien
aagcaaacgctttgtccaagcaggc

SEQ ID NO: 2865239 - DNA, 25 bp, Homo sapien
catatagcccagtgacaaagcctag

SEQ ID NO: 2865240 - DNA, 25 bp, Homo sapien
gcaggctcacatactggcatgtgga

SEQ ID NO: 2865241 - DNA, 25 bp, Homo sapien
gcagatgcacttgcaattatctgga

SEQ ID NO: 2865242 - DNA, 25 bp, Homo sapien
ttgaaaagacaccagctttaggcat

SEQ ID NO: 2865243 - DNA, 25 bp, Homo sapien
tatctttaggcttggagaggaacca

SEQ ID NO: 2865244 - DNA, 25 bp, Homo sapien
ataatacccagaagcggacccttgg

SEQ ID NO: 2865245 - DNA, 25 bp, Homo sapien
gggtgagagcccactaatagctcag

SEQ ID NO: 2865246 - DNA, 25 bp, Homo sapien
gaaattcccgtagagagctgtgggc

SEQ ID NO: 2865247 - DNA, 25 bp, Homo sapien
ccaggacccaactgtcagcagagct

SEQ ID NO: 2865248 - DNA, 25 bp, Homo sapien
aggacccaactgtcagcagagcttg

SEQ ID NO: 2865249 - DNA, 25 bp, Homo sapien
caggacccaactgtcagcagagctt

SEQ ID NO: 2865250 - DNA, 25 bp, Homo sapien
gccaggacccaactgtcagcagagc

SEQ ID NO: 2865251 - DNA, 25 bp, Homo sapien
gaagacagttttcctcagttagata

SEQ ID NO: 2865252 - DNA, 25 bp, Homo sapien
ctgcggttggaagacagttttcctc

SEQ ID NO: 2865253 - DNA, 25 bp, Homo sapien
gttcttgtagatggccaaccatgac

SEQ ID NO: 2865254 - DNA, 25 bp, Homo sapien
gacagttttcctcagttagatattt

SEQ ID NO: 2865255 - DNA, 25 bp, Homo sapien
tgtacgaattcacagaaagatttct

SEQ ID NO: 2865256 - DNA, 25 bp, Homo sapien
agggctttcttcgtggtgtctttca

SEQ ID NO: 2865257 - DNA, 25 bp, Homo sapien
gcattcagtgtgtacgaattcacag

SEQ ID NO: 2865258 - DNA, 25 bp, Homo sapien
gtttccaagggaatatagtatggat

SEQ ID NO: 2865259 - DNA, 25 bp, Homo sapien
tcatttgtttggactttttctcaga

SEQ ID NO: 2865260 - DNA, 25 bp, Homo sapien
tttgtttggactttttctcagatac

SEQ ID NO: 2865261 - DNA, 25 bp, Homo sapien
atttgtttggactttttctcagata

SEQ ID NO: 2865262 - DNA, 25 bp, Homo sapien
catttgtttggactttttctcagat

SEQ ID NO: 2865263 - DNA, 25 bp, Homo sapien
gcctgtgcgttaggtttgcagcgta

SEQ ID NO: 2865264 - DNA, 25 bp, Homo sapien
gcgtatcgacgtacacatttgtgag

SEQ ID NO: 2865265 - DNA, 25 bp, Homo sapien
gtttgggaaccgtgcctgtgcgtta

SEQ ID NO: 2865266 - DNA, 25 bp, Homo sapien
aaatgctgaggatgtttctaaggaa

SEQ ID NO: 2865267 - DNA, 25 bp, Homo sapien
tccaccttttctatcagtagcctgg

SEQ ID NO: 2865268 - DNA, 25 bp, Homo sapien
ggatacatggcttctttgacagcca

SEQ ID NO: 2865269 - DNA, 25 bp, Homo sapien
catattctgattccaggtaaatgaa

SEQ ID NO: 2865270 - DNA, 25 bp, Homo sapien
ttgacagccatattctgattccagg

SEQ ID NO: 2865271 - DNA, 25 bp, Homo sapien
gaaacaccaaggccatcaatgaagc

SEQ ID NO: 2865272 - DNA, 25 bp, Homo sapien
ctggtattgtgaaacaccaaggcca

SEQ ID NO: 2865273 - DNA, 25 bp, Homo sapien
tattgtgaaacaccaaggccatcaa

SEQ ID NO: 2865274 - DNA, 25 bp, Homo sapien
ggtattgtgaaacaccaaggccatc

SEQ ID NO: 2865275 - DNA, 25 bp, Homo sapien
gagccagctccgtgtttacatcttc

SEQ ID NO: 2865276 - DNA, 25 bp, Homo sapien
gtattataacggaaaggccttcatc

SEQ ID NO: 2865277 - DNA, 25 bp, Homo sapien
tgcagggctcattgggctgatggtg

SEQ ID NO: 2865278 - DNA, 25 bp, Homo sapien
taattactgctgatgcctgccagac

SEQ ID NO: 2865279 - DNA, 25 bp, Homo sapien
tgccagacacccctgttatttacca

SEQ ID NO: 2865280 - DNA, 25 bp, Homo sapien
tgaagttaattatgacaagctgatt

SEQ ID NO: 2865281 - DNA, 25 bp, Homo sapien
acaagctgattgtggtctttagcac

SEQ ID NO: 2865282 - DNA, 25 bp, Homo sapien
tgacaagctgattgtggtctttagc

SEQ ID NO: 2865283 - DNA, 25 bp, Homo sapien
tatcttccttagttatgaagttaat

SEQ ID NO: 2865284 - DNA, 25 bp, Homo sapien
ctctgcccactttgtgggagaacct

SEQ ID NO: 2865285 - DNA, 25 bp, Homo sapien
ttctctgcccactttgtgggagaac

SEQ ID NO: 2865286 - DNA, 25 bp, Homo sapien
aaggaaacgatgtgctttctctgcc

SEQ ID NO: 2865287 - DNA, 25 bp, Homo sapien
tatgcttccgcattccactgaagga

SEQ ID NO: 2865288 - DNA, 25 bp, Homo sapien
gagctctgaacatagggagtccaat

SEQ ID NO: 2865289 - DNA, 25 bp, Homo sapien
gaacatagggagtccaatctgcact

SEQ ID NO: 2865290 - DNA, 25 bp, Homo sapien
cgagattgagggttgcttgcttctt

SEQ ID NO: 2865291 - DNA, 25 bp, Homo sapien
aatctgcactttacgagattgaggg

SEQ ID NO: 2865292 - DNA, 25 bp, Homo sapien
caggctgaagtgtgctcttttctct

SEQ ID NO: 2865293 - DNA, 25 bp, Homo sapien
gcatctctctaccaagcaggctgaa

SEQ ID NO: 2865294 - DNA, 25 bp, Homo sapien
taccagcaaccacaaggtcagtgtg

SEQ ID NO: 2865295 - DNA, 25 bp, Homo sapien
gagtgtctccacttacagttttctc

SEQ ID NO: 2865296 - DNA, 25 bp, Homo sapien
agcttttctacactgcttggtgtcc

SEQ ID NO: 2865297 - DNA, 25 bp, Homo sapien
aagcatgagatgtagtaggaaccaa

SEQ ID NO: 2865298 - DNA, 25 bp, Homo sapien
gagttgagatgtaggataagagtgt

SEQ ID NO: 2865299 - DNA, 25 bp, Homo sapien
gttacccagtaatgagtcaaaggtg

SEQ ID NO: 2865300 - DNA, 25 bp, Homo sapien
tgtcaaaataacagtaagcatgaga

SEQ ID NO: 2865301 - DNA, 25 bp, Homo sapien
cccagaggatttagttgcagtgcat

SEQ ID NO: 2865302 - DNA, 25 bp, Homo sapien
tataatagagccctttacaaaagtc

SEQ ID NO: 2865303 - DNA, 25 bp, Homo sapien
agtacacaagtggtattcttttgtt

SEQ ID NO: 2865304 - DNA, 25 bp, Homo sapien
aaaagtcgttgccttctaagtgtgc

SEQ ID NO: 2865305 - DNA, 25 bp, Homo sapien
ccattaagggagctggtagtttgaa

SEQ ID NO: 2865306 - DNA, 25 bp, Homo sapien
atttccattaagggagctggtagtt

SEQ ID NO: 2865307 - DNA, 25 bp, Homo sapien
taagggagctggtagtttgaatgaa

SEQ ID NO: 2865308 - DNA, 25 bp, Homo sapien
cccattcctcacattgtaatatcat

SEQ ID NO: 2865309 - DNA, 25 bp, Homo sapien
catctgtagttctccagttggtgtt

SEQ ID NO: 2865310 - DNA, 25 bp, Homo sapien
tgcatctgtagttctccagttggtg

SEQ ID NO: 2865311 - DNA, 25 bp, Homo sapien
gtattgtgcatctattgcatctgta

SEQ ID NO: 2865312 - DNA, 25 bp, Homo sapien
gaagacaatcacagccttgtattgt

SEQ ID NO: 2865313 - DNA, 25 bp, Homo sapien
tataatgaaaccccagtcaccctct

SEQ ID NO: 2865314 - DNA, 25 bp, Homo sapien
gctaaaactgtttgcaggcccttta

SEQ ID NO: 2865315 - DNA, 25 bp, Homo sapien
ttggcatttgtgctaaaactgtttg

SEQ ID NO: 2865316 - DNA, 25 bp, Homo sapien
caatagcttcactaataaacacaaa

SEQ ID NO: 2865317 - DNA, 25 bp, Homo sapien
gaagcaatgcatcatctccgggcac

SEQ ID NO: 2865318 - DNA, 25 bp, Homo sapien
gagatggaagcaatgcatcatctcc

SEQ ID NO: 2865319 - DNA, 25 bp, Homo sapien
gcaatgcatcatctccgggcactcg

SEQ ID NO: 2865320 - DNA, 25 bp, Homo sapien
tggaagcaatgcatcatctccgggc

SEQ ID NO: 2865321 - DNA, 25 bp, Homo sapien
ctgtcttcagttaccacgtgtttgt

SEQ ID NO: 2865322 - DNA, 25 bp, Homo sapien
tgtcttcagttaccacgtgtttgtt

SEQ ID NO: 2865323 - DNA, 25 bp, Homo sapien
gtcttcagttaccacgtgtttgttg

SEQ ID NO: 2865324 - DNA, 25 bp, Homo sapien
gatgacaatgtacaagggctggaga

SEQ ID NO: 2865325 - DNA, 25 bp, Homo sapien
tttcatccctagtcttgtgtactgg

SEQ ID NO: 2865326 - DNA, 25 bp, Homo sapien
gtccggttccttttgtcagagataa

SEQ ID NO: 2865327 - DNA, 25 bp, Homo sapien
cctctagcaaagacagtccggttcc

SEQ ID NO: 2865328 - DNA, 25 bp, Homo sapien
gttgaatctcacgaattgacagtgt

SEQ ID NO: 2865329 - DNA, 25 bp, Homo sapien
ttaatattgccagttgaatctcacg

SEQ ID NO: 2865330 - DNA, 25 bp, Homo sapien
ccaatccatacaatctggcatcatg

SEQ ID NO: 2865331 - DNA, 25 bp, Homo sapien
cagtgttccaatccatacaatctgg

SEQ ID NO: 2865332 - DNA, 25 bp, Homo sapien
cagcttggaatgttgcaccctgcag

SEQ ID NO: 2865333 - DNA, 25 bp, Homo sapien
taggcgtagcaaggaaagctttcag

SEQ ID NO: 2865334 - DNA, 25 bp, Homo sapien
tatctgttggaggaaacccatgtcc

SEQ ID NO: 2865335 - DNA, 25 bp, Homo sapien
ggtagcctggctcgggatatcctgt

SEQ ID NO: 2865336 - DNA, 25 bp, Homo sapien
tggaggcggaaaagtctaggatcaa

SEQ ID NO: 2865337 - DNA, 25 bp, Homo sapien
aagtctaggatcaaagtgccaggag

SEQ ID NO: 2865338 - DNA, 25 bp, Homo sapien
gaggcggaaaagtctaggatcaaag

SEQ ID NO: 2865339 - DNA, 25 bp, Homo sapien
cggaaaagtctaggatcaaagtgcc

SEQ ID NO: 2865340 - DNA, 25 bp, Homo sapien
gggaatggggcttggagatagagag

SEQ ID NO: 2865341 - DNA, 25 bp, Homo sapien
atggggcttggagatagagaggatc

SEQ ID NO: 2865342 - DNA, 25 bp, Homo sapien
gaatggggcttggagatagagagga

SEQ ID NO: 2865343 - DNA, 25 bp, Homo sapien
tggggcttggagatagagaggatct

SEQ ID NO: 2865344 - DNA, 25 bp, Homo sapien
tcgagcctcgtaggcaaagctaaac

SEQ ID NO: 2865345 - DNA, 25 bp, Homo sapien
ggagtcgagcctcgtaggcaaagct

SEQ ID NO: 2865346 - DNA, 25 bp, Homo sapien
agcctcgtaggcaaagctaaaccaa

SEQ ID NO: 2865347 - DNA, 25 bp, Homo sapien
gaagagatgtgggagtcgagcctcg

SEQ ID NO: 2865348 - DNA, 25 bp, Homo sapien
gctgtgctctcaaatgacagcttat

SEQ ID NO: 2865349 - DNA, 25 bp, Homo sapien
gtttcttgtaggctgtgctctcaaa

SEQ ID NO: 2865350 - DNA, 25 bp, Homo sapien
ttcttgtaggctgtgctctcaaatg

SEQ ID NO: 2865351 - DNA, 25 bp, Homo sapien
tgctctcaaatgacagcttatgaac

SEQ ID NO: 2865352 - DNA, 25 bp, Homo sapien
ttggcattaatgctgtgaaatgttg

SEQ ID NO: 2865353 - DNA, 25 bp, Homo sapien
cattaatgctgtgaaatgttggatg

SEQ ID NO: 2865354 - DNA, 25 bp, Homo sapien
gttcattggcattaatgctgtgaaa

SEQ ID NO: 2865355 - DNA, 25 bp, Homo sapien
ttcattggcattaatgctgtgaaat

SEQ ID NO: 2865356 - DNA, 25 bp, Homo sapien
agcctagggctttgacggaggacat

SEQ ID NO: 2865357 - DNA, 25 bp, Homo sapien
ctgtccagattgatattcccgattg

SEQ ID NO: 2865358 - DNA, 25 bp, Homo sapien
tattcccgattgagtgcctgtgtcc

SEQ ID NO: 2865359 - DNA, 25 bp, Homo sapien
ctttgatggagcctagggctttgac

SEQ ID NO: 2865360 - DNA, 25 bp, Homo sapien
ctcatgtattgtggtgttataagaa

SEQ ID NO: 2865361 - DNA, 25 bp, Homo sapien
aacagtaaactctttcttgtatgaa

SEQ ID NO: 2865362 - DNA, 25 bp, Homo sapien
tctgttatctcatgtattgtggtgt

SEQ ID NO: 2865363 - DNA, 25 bp, Homo sapien
ttctggaactggaaatctgttatct

SEQ ID NO: 2865364 - DNA, 25 bp, Homo sapien
atgccaatgggactgaaaatcctac

SEQ ID NO: 2865365 - DNA, 25 bp, Homo sapien
aatgccaatgggactgaaaatccta

SEQ ID NO: 2865366 - DNA, 25 bp, Homo sapien
gagaacgatagcagtttgaatttga

SEQ ID NO: 2865367 - DNA, 25 bp, Homo sapien
tctgccccttgttgagaacgatagc

SEQ ID NO: 2865368 - DNA, 25 bp, Homo sapien
cttgttgagaacgatagcagtttga

SEQ ID NO: 2865369 - DNA, 25 bp, Homo sapien
gccccttgttgagaacgatagcagt

SEQ ID NO: 2865370 - DNA, 25 bp, Homo sapien
tattgcagcctcttacaagttgggc

SEQ ID NO: 2865371 - DNA, 25 bp, Homo sapien
gaaatgatcgagtattattgcagcc

SEQ ID NO: 2865372 - DNA, 25 bp, Homo sapien
tctgccatcgtgctgttaaaatgat

SEQ ID NO: 2865373 - DNA, 25 bp, Homo sapien
taaaatgatgcataacccaaccagc

SEQ ID NO: 2865374 - DNA, 25 bp, Homo sapien
cttaaaccctttggtaatgtgcagt

SEQ ID NO: 2865375 - DNA, 25 bp, Homo sapien
ccaagtcgaaaggaaagacaccata

SEQ ID NO: 2865376 - DNA, 25 bp, Homo sapien
tctcttcacattcagcagctccaag

SEQ ID NO: 2865377 - DNA, 25 bp, Homo sapien
tgctgtgggaggtcaataaatccct

SEQ ID NO: 2865378 - DNA, 25 bp, Homo sapien
tgattcatgccatagagccgtggcg

SEQ ID NO: 2865379 - DNA, 25 bp, Homo sapien
tcgatgtagcgaacagcaggacttg

SEQ ID NO: 2865380 - DNA, 25 bp, Homo sapien
gctaggagctaggaggtttccccaa

SEQ ID NO: 2865381 - DNA, 25 bp, Homo sapien
tagaggcgcgatattgggcttcact

SEQ ID NO: 2865382 - DNA, 25 bp, Homo sapien
caactcaagaatgcccctctaagtc

SEQ ID NO: 2865383 - DNA, 25 bp, Homo sapien
aaactgagaaggatttacacaaaat

SEQ ID NO: 2865384 - DNA, 25 bp, Homo sapien
aactgagaaggatttacacaaaatg

SEQ ID NO: 2865385 - DNA, 25 bp, Homo sapien
atcaaaccaactcaagaatgcccct

SEQ ID NO: 2865386 - DNA, 25 bp, Homo sapien
tgcaagtgaaaagcaggaagcaacg

SEQ ID NO: 2865387 - DNA, 25 bp, Homo sapien
gaaaagcaggaagcaacgtgaaact

SEQ ID NO: 2865388 - DNA, 25 bp, Homo sapien
aagcaggaagcaacgtgaaactgac

SEQ ID NO: 2865389 - DNA, 25 bp, Homo sapien
gtgaaaagcaggaagcaacgtgaaa

SEQ ID NO: 2865390 - DNA, 25 bp, Homo sapien
gagcgtgtctgggtacagctatagc

SEQ ID NO: 2865391 - DNA, 25 bp, Homo sapien
gatttgctgcacatgtgcggtcacg

SEQ ID NO: 2865392 - DNA, 25 bp, Homo sapien
cttctaaacgattccctgggtcctg

SEQ ID NO: 2865393 - DNA, 25 bp, Homo sapien
aaatggcaataggtttgagcagcgc

SEQ ID NO: 2865394 - DNA, 25 bp, Homo sapien
tggtaggacaagtgggttttgtcta

SEQ ID NO: 2865395 - DNA, 25 bp, Homo sapien
ttcagatgtcttgttagtgggcaaa

SEQ ID NO: 2865396 - DNA, 25 bp, Homo sapien
cttgttagtgggcaaatgaagtggt

SEQ ID NO: 2865397 - DNA, 25 bp, Homo sapien
aatgaagtggtaggacaagtgggtt

SEQ ID NO: 2865398 - DNA, 25 bp, Homo sapien
tagcattgtgattacttttccccaa

SEQ ID NO: 2865399 - DNA, 25 bp, Homo sapien
tgagggtttacttcttgctcatgtc

SEQ ID NO: 2865400 - DNA, 25 bp, Homo sapien
taagtaaccttcaaacttcagcggc

SEQ ID NO: 2865401 - DNA, 25 bp, Homo sapien
cagcggctttacataatgagggttt

SEQ ID NO: 2865402 - DNA, 25 bp, Homo sapien
gaatgggttctacccatcagagtcg

SEQ ID NO: 2865403 - DNA, 25 bp, Homo sapien
ggtgtcttctctattcagtaggtgg

SEQ ID NO: 2865404 - DNA, 25 bp, Homo sapien
catcagagtcgtgcagtgacccagg

SEQ ID NO: 2865405 - DNA, 25 bp, Homo sapien
cattggacagggaatgggttctacc

SEQ ID NO: 2865406 - DNA, 25 bp, Homo sapien
taagttcccatttgttcacgcccca

SEQ ID NO: 2865407 - DNA, 25 bp, Homo sapien
accttgggtggtcctcatagcctag

SEQ ID NO: 2865408 - DNA, 25 bp, Homo sapien
cactttcaagctgtggctacctgga

SEQ ID NO: 2865409 - DNA, 25 bp, Homo sapien
tattggatcagcaagtcccgtctgt

SEQ ID NO: 2865410 - DNA, 25 bp, Homo sapien
tatatcatgtcacggctgaggtcaa

SEQ ID NO: 2865411 - DNA, 25 bp, Homo sapien
ctagaagggcgaatttatcttctgc

SEQ ID NO: 2865412 - DNA, 25 bp, Homo sapien
agaagggcgaatttatcttctgcaa

SEQ ID NO: 2865413 - DNA, 25 bp, Homo sapien
agtgttctatatcatgtcacggctg

SEQ ID NO: 2865414 - DNA, 25 bp, Homo sapien
tgcacaaaatacagtccaaactctg

SEQ ID NO: 2865415 - DNA, 25 bp, Homo sapien
acaaaatacagtccaaactctgcct

SEQ ID NO: 2865416 - DNA, 25 bp, Homo sapien
cagtccaaactctgcctgagattcc

SEQ ID NO: 2865417 - DNA, 25 bp, Homo sapien
taatgcacaaaatacagtccaaact

SEQ ID NO: 2865418 - DNA, 25 bp, Homo sapien
tgctacccttcacaagtcctcttgt

SEQ ID NO: 2865419 - DNA, 25 bp, Homo sapien
gcattcactgttctctgtattcacc

SEQ ID NO: 2865420 - DNA, 25 bp, Homo sapien
tgttctctgtattcaccagctgtct

SEQ ID NO: 2865421 - DNA, 25 bp, Homo sapien
agcaaaaattgtccacatgtcttcc

SEQ ID NO: 2865422 - DNA, 25 bp, Homo sapien
gaaagttcaattcgaatcagaggtg

SEQ ID NO: 2865423 - DNA, 25 bp, Homo sapien
tcagggaaagcagttgacatgtggc

SEQ ID NO: 2865424 - DNA, 25 bp, Homo sapien
ggtggctccccatattcgtgtcagg

SEQ ID NO: 2865425 - DNA, 25 bp, Homo sapien
gataggatgggtgtcaagactcaga

SEQ ID NO: 2865426 - DNA, 25 bp, Homo sapien
ttattaaagcggctccagaacaagg

SEQ ID NO: 2865427 - DNA, 25 bp, Homo sapien
tcagacttcagggtgtttatacatt

SEQ ID NO: 2865428 - DNA, 25 bp, Homo sapien
gaaactccacattaaagcatccaga

SEQ ID NO: 2865429 - DNA, 25 bp, Homo sapien
aagtgagtttctcatcctggtcggg

SEQ ID NO: 2865430 - DNA, 25 bp, Homo sapien
taaggatggagtgttagcgcagaca

SEQ ID NO: 2865431 - DNA, 25 bp, Homo sapien
gagtgttagcgcagacagcagagtt

SEQ ID NO: 2865432 - DNA, 25 bp, Homo sapien
ttcccagtgggtaaggatggagtgt

SEQ ID NO: 2865433 - DNA, 25 bp, Homo sapien
gacagcagagttaagccggaatgtc

SEQ ID NO: 2865434 - DNA, 25 bp, Homo sapien
gtaatactactttatcgatcccttc

SEQ ID NO: 2865435 - DNA, 25 bp, Homo sapien
atactactttatcgatcccttccac

SEQ ID NO: 2865436 - DNA, 25 bp, Homo sapien
caaagggtaatactactttatcgat

SEQ ID NO: 2865437 - DNA, 25 bp, Homo sapien
catcacaaagggtaatactacttta

SEQ ID NO: 2865438 - DNA, 25 bp, Homo sapien
tttctaatgtcatacagataaaaca

SEQ ID NO: 2865439 - DNA, 25 bp, Homo sapien
agataaaacaacagggctctcctcc

SEQ ID NO: 2865440 - DNA, 25 bp, Homo sapien
aacaacagggctctcctccggtctt

SEQ ID NO: 2865441 - DNA, 25 bp, Homo sapien
tgatttctaatgtcatacagataaa

SEQ ID NO: 2865442 - DNA, 25 bp, Homo sapien
gttgttgtgatgtgaataactaact

SEQ ID NO: 2865443 - DNA, 25 bp, Homo sapien
tgtgatgtgaataactaacttctcc

SEQ ID NO: 2865444 - DNA, 25 bp, Homo sapien
ttgtgatgtgaataactaacttctc

SEQ ID NO: 2865445 - DNA, 25 bp, Homo sapien
tgttgtgatgtgaataactaacttc

SEQ ID NO: 2865446 - DNA, 25 bp, Homo sapien
tctctgggagcttggcttcaatctt

SEQ ID NO: 2865447 - DNA, 25 bp, Homo sapien
catctctgggagcttggcttcaatc

SEQ ID NO: 2865448 - DNA, 25 bp, Homo sapien
tccatctctgggagcttggcttcaa

SEQ ID NO: 2865449 - DNA, 25 bp, Homo sapien
ttccatctctgggagcttggcttca

SEQ ID NO: 2865450 - DNA, 25 bp, Homo sapien
cactgtgaagggtgtctcactgcta

SEQ ID NO: 2865451 - DNA, 25 bp, Homo sapien
agggtgtctcactgctattgtgcca

SEQ ID NO: 2865452 - DNA, 25 bp, Homo sapien
tgtgccaaatgagaaggttatacaa

SEQ ID NO: 2865453 - DNA, 25 bp, Homo sapien
aggttatacaaggtgtgaccctcac

SEQ ID NO: 2865454 - DNA, 25 bp, Homo sapien
tcgtaatgaggccataacagccgcc

SEQ ID NO: 2865455 - DNA, 25 bp, Homo sapien
gccaatatcacgagaaaaatcactt

SEQ ID NO: 2865456 - DNA, 25 bp, Homo sapien
tttgctgaagtctggcacaggatgc

SEQ ID NO: 2865457 - DNA, 25 bp, Homo sapien
acttccctggtgatgtcgcaaagca

SEQ ID NO: 2865458 - DNA, 25 bp, Homo sapien
tttgcggtcaacttcttggccatcg

SEQ ID NO: 2865459 - DNA, 25 bp, Homo sapien
ttggccatcgtttgcattaccagga

SEQ ID NO: 2865460 - DNA, 25 bp, Homo sapien
ttgcattaccaggatccactgagtc

SEQ ID NO: 2865461 - DNA, 25 bp, Homo sapien
gaaggatcaaatttgcggtcaactt

SEQ ID NO: 2865462 - DNA, 25 bp, Homo sapien
cttactggcctgtctgaatctttcc

SEQ ID NO: 2865463 - DNA, 25 bp, Homo sapien
tgaatctttccagcagtatccttcc

SEQ ID NO: 2865464 - DNA, 25 bp, Homo sapien
aaataagctcatcgggaggtaggaa

SEQ ID NO: 2865465 - DNA, 25 bp, Homo sapien
tgaaataagctcatcgggaggtagg

SEQ ID NO: 2865466 - DNA, 25 bp, Homo sapien
acatgttccccaacaagctttcaaa

SEQ ID NO: 2865467 - DNA, 25 bp, Homo sapien
tttcaaataagtccttaggtcataa

SEQ ID NO: 2865468 - DNA, 25 bp, Homo sapien
atgttccccaacaagctttcaaata

SEQ ID NO: 2865469 - DNA, 25 bp, Homo sapien
agtccttaggtcataattcgagctc

SEQ ID NO: 2865470 - DNA, 25 bp, Homo sapien
ccaactttatcctgttcaaaactga

SEQ ID NO: 2865471 - DNA, 25 bp, Homo sapien
cagatatccaactgcgccatctgga

SEQ ID NO: 2865472 - DNA, 25 bp, Homo sapien
cacagatccttatccagatatccaa

SEQ ID NO: 2865473 - DNA, 25 bp, Homo sapien
cttatccagatatccaactgcgcca

SEQ ID NO: 2865474 - DNA, 25 bp, Homo sapien
ctttagaagcatagagtgaaaggct

SEQ ID NO: 2865475 - DNA, 25 bp, Homo sapien
tttagaagcatagagtgaaaggctc

SEQ ID NO: 2865476 - DNA, 25 bp, Homo sapien
cctttagaagcatagagtgaaaggc

SEQ ID NO: 2865477 - DNA, 25 bp, Homo sapien
tgaagaaaggcgttgtgaaatctgc

SEQ ID NO: 2865478 - DNA, 25 bp, Homo sapien
gtggccgagctgtgctatcttcctg

SEQ ID NO: 2865479 - DNA, 25 bp, Homo sapien
tcagagctgcatattcataagctgc

SEQ ID NO: 2865480 - DNA, 25 bp, Homo sapien
gaaaacccttgtgattgggagtgaa

SEQ ID NO: 2865481 - DNA, 25 bp, Homo sapien
tgtttggaagggcaatggaagtggt

SEQ ID NO: 2865482 - DNA, 25 bp, Homo sapien
agtgtttggaagggcaatggaagtg

SEQ ID NO: 2865483 - DNA, 25 bp, Homo sapien
gtgtttggaagggcaatggaagtgg

SEQ ID NO: 2865484 - DNA, 25 bp, Homo sapien
tcccagttcgcaaagatgaccttca

SEQ ID NO: 2865485 - DNA, 25 bp, Homo sapien
gaactgtttacatcccagttcgcaa

SEQ ID NO: 2865486 - DNA, 25 bp, Homo sapien
tgaccagaactgtttacatcccagt

SEQ ID NO: 2865487 - DNA, 25 bp, Homo sapien
tgtttacatcccagttcgcaaagat

SEQ ID NO: 2865488 - DNA, 25 bp, Homo sapien
cgtctattcatcacctcatcattca

SEQ ID NO: 2865489 - DNA, 25 bp, Homo sapien
gtctattcatcacctcatcattcat

SEQ ID NO: 2865490 - DNA, 25 bp, Homo sapien
ccgtctattcatcacctcatcattc

SEQ ID NO: 2865491 - DNA, 25 bp, Homo sapien
gtttcaatggacatattggctgcaa

SEQ ID NO: 2865492 - DNA, 25 bp, Homo sapien
tagagagtagttccagcgagttaag

SEQ ID NO: 2865493 - DNA, 25 bp, Homo sapien
gaatttgtttgtagcactttgaacc

SEQ ID NO: 2865494 - DNA, 25 bp, Homo sapien
taaagtcggatccatgtacggggaa

SEQ ID NO: 2865495 - DNA, 25 bp, Homo sapien
tgtttcttggcttttgaaaggtgat

SEQ ID NO: 2865496 - DNA, 25 bp, Homo sapien
gaaaggtgatttaattcaggcgtat

SEQ ID NO: 2865497 - DNA, 25 bp, Homo sapien
tgatttaattcaggcgtatcagagc

SEQ ID NO: 2865498 - DNA, 25 bp, Homo sapien
taattcaggcgtatcagagcccctt

SEQ ID NO: 2865499 - DNA, 25 bp, Homo sapien
ggaagaaatcaaatccgtgtgttga

SEQ ID NO: 2865500 - DNA, 25 bp, Homo sapien
agtatcattacagctattaagacaa

SEQ ID NO: 2865501 - DNA, 25 bp, Homo sapien
gtgaaaaccatactccccgcaacac

SEQ ID NO: 2865502 - DNA, 25 bp, Homo sapien
tggaaattgtagttcaagcttagtg

SEQ ID NO: 2865503 - DNA, 25 bp, Homo sapien
gcctagacctcttcatccgctgtct

SEQ ID NO: 2865504 - DNA, 25 bp, Homo sapien
agacctcttcatccgctgtctctct

SEQ ID NO: 2865505 - DNA, 25 bp, Homo sapien
ctagacctcttcatccgctgtctct

SEQ ID NO: 2865506 - DNA, 25 bp, Homo sapien
ttgcctagacctcttcatccgctgt

SEQ ID NO: 2865507 - DNA, 25 bp, Homo sapien
catattcggattatagcttctcaca

SEQ ID NO: 2865508 - DNA, 25 bp, Homo sapien
ttcggattatagcttctcacagctc

SEQ ID NO: 2865509 - DNA, 25 bp, Homo sapien
tttcttagcatattcggattatagc

SEQ ID NO: 2865510 - DNA, 25 bp, Homo sapien
tagcatattcggattatagcttctc

SEQ ID NO: 2865511 - DNA, 25 bp, Homo sapien
cattcatcgcatgcacttggagcag

SEQ ID NO: 2865512 - DNA, 25 bp, Homo sapien
tgcctgctgagatcattgtgtgggt

SEQ ID NO: 2865513 - DNA, 25 bp, Homo sapien
gagggttcaggttgataagttgcaa

SEQ ID NO: 2865514 - DNA, 25 bp, Homo sapien
cactgaattaaggtaatcaggccac

SEQ ID NO: 2865515 - DNA, 25 bp, Homo sapien
gctggggcagccatagcctttgatt

SEQ ID NO: 2865516 - DNA, 25 bp, Homo sapien
ttggagtgtgtaccaagctggggca

SEQ ID NO: 2865517 - DNA, 25 bp, Homo sapien
gggatggatactgaagaggctcagt

SEQ ID NO: 2865518 - DNA, 25 bp, Homo sapien
ccatagcctttgattaagaggataa

SEQ ID NO: 2865519 - DNA, 25 bp, Homo sapien
tctgatctaaggctttgggtccgtc

SEQ ID NO: 2865520 - DNA, 25 bp, Homo sapien
tttgggtccgtccaagtgaccacat

SEQ ID NO: 2865521 - DNA, 25 bp, Homo sapien
taaggctttgggtccgtccaagtga

SEQ ID NO: 2865522 - DNA, 25 bp, Homo sapien
gatctaaggctttgggtccgtccaa

SEQ ID NO: 2865523 - DNA, 25 bp, Homo sapien
tgtgacacaggaatagcagacttgt

SEQ ID NO: 2865524 - DNA, 25 bp, Homo sapien
cagatgaaagctcacaaagtgccag

SEQ ID NO: 2865525 - DNA, 25 bp, Homo sapien
ctggtggtctgctcatgagccgcga

SEQ ID NO: 2865526 - DNA, 25 bp, Homo sapien
taatgaggctcctaaccccttgtga

SEQ ID NO: 2865527 - DNA, 25 bp, Homo sapien
taacctctgactaccatatgaatgc

SEQ ID NO: 2865528 - DNA, 25 bp, Homo sapien
aacacacagatacagcgcgtgcaca

SEQ ID NO: 2865529 - DNA, 25 bp, Homo sapien
tcctgtctaacctcaatagggagag

SEQ ID NO: 2865530 - DNA, 25 bp, Homo sapien
gcaatcagatgaccaagagctgtga

SEQ ID NO: 2865531 - DNA, 25 bp, Homo sapien
caggtccttgggcagatatgtaaat

SEQ ID NO: 2865532 - DNA, 25 bp, Homo sapien
aaatccctgctcttgaatcgatccg

SEQ ID NO: 2865533 - DNA, 25 bp, Homo sapien
tcgatccgacattaaaggcgatggg

SEQ ID NO: 2865534 - DNA, 25 bp, Homo sapien
tttcacttaaagtgactgtcctctt

SEQ ID NO: 2865535 - DNA, 25 bp, Homo sapien
taaaagaagtatatgcttaaagcta

SEQ ID NO: 2865536 - DNA, 25 bp, Homo sapien
aattaattttggtctgtctctgtag

SEQ ID NO: 2865537 - DNA, 25 bp, Homo sapien
tagtcttctgagggccttataaaag

SEQ ID NO: 2865538 - DNA, 25 bp, Homo sapien
tgcttaaagctaatacacaggaagg

SEQ ID NO: 2865539 - DNA, 25 bp, Homo sapien
cacagagtgagcatggataaacttg

SEQ ID NO: 2865540 - DNA, 25 bp, Homo sapien
ggctggttgcagtgagatgtctaat

SEQ ID NO: 2865541 - DNA, 25 bp, Homo sapien
gaggtcaaagcccataccactgagg

SEQ ID NO: 2865542 - DNA, 25 bp, Homo sapien
agattaccaatttgtgacaccttgc

SEQ ID NO: 2865543 - DNA, 25 bp, Homo sapien
taacaccaacacttgctgattcctt

SEQ ID NO: 2865544 - DNA, 25 bp, Homo sapien
aacaccaacacttgctgattccttc

SEQ ID NO: 2865545 - DNA, 25 bp, Homo sapien
ttaacaccaacacttgctgattcct

SEQ ID NO: 2865546 - DNA, 25 bp, Homo sapien
taagatacctccatgaatcccaatg

SEQ ID NO: 2865547 - DNA, 25 bp, Homo sapien
ctccacgtgaatcctgatgccagag

SEQ ID NO: 2865548 - DNA, 25 bp, Homo sapien
catgaatcccaatgcctccacgtga

SEQ ID NO: 2865549 - DNA, 25 bp, Homo sapien
taacgtaagatacctccatgaatcc

SEQ ID NO: 2865550 - DNA, 25 bp, Homo sapien
tcagatctatcaaaacatgggctgt

SEQ ID NO: 2865551 - DNA, 25 bp, Homo sapien
aatttggaagcctagcagcaaggtg

SEQ ID NO: 2865552 - DNA, 25 bp, Homo sapien
catgggctgttgatacaatttgagc

SEQ ID NO: 2865553 - DNA, 25 bp, Homo sapien
gagagtttatcagcgaatgtttatc

SEQ ID NO: 2865554 - DNA, 25 bp, Homo sapien
tataccaaacagcaataaatcatta

SEQ ID NO: 2865555 - DNA, 25 bp, Homo sapien
atcattatttctcagatgaccaata

SEQ ID NO: 2865556 - DNA, 25 bp, Homo sapien
tatttctcagatgaccaatatcagc

SEQ ID NO: 2865557 - DNA, 25 bp, Homo sapien
catataccaaacagcaataaatcat

SEQ ID NO: 2865558 - DNA, 25 bp, Homo sapien
catacgtatgttgatgaagggctga

SEQ ID NO: 2865559 - DNA, 25 bp, Homo sapien
tagtcctgtggtatggtcttaaccc

SEQ ID NO: 2865560 - DNA, 25 bp, Homo sapien
tctcttgcgatgatgggtaaggcag

SEQ ID NO: 2865561 - DNA, 25 bp, Homo sapien
cttctcttggaaggatgtgcaacta

SEQ ID NO: 2865562 - DNA, 25 bp, Homo sapien
tcactcaatggtgtaactgcccaaa

SEQ ID NO: 2865563 - DNA, 25 bp, Homo sapien
cactcaatggtgtaactgcccaaac

SEQ ID NO: 2865564 - DNA, 25 bp, Homo sapien
ctcaatggtgtaactgcccaaaccg

SEQ ID NO: 2865565 - DNA, 25 bp, Homo sapien
caatggtgtaactgcccaaaccgtc

SEQ ID NO: 2865566 - DNA, 25 bp, Homo sapien
ctcctggactctgaaaggcgagtga

SEQ ID NO: 2865567 - DNA, 25 bp, Homo sapien
cacagtttgaatttagtgttttgtc

SEQ ID NO: 2865568 - DNA, 25 bp, Homo sapien
tggactctgaaaggcgagtgaacac

SEQ ID NO: 2865569 - DNA, 25 bp, Homo sapien
tctgaaaggcgagtgaacactgaaa

SEQ ID NO: 2865570 - DNA, 25 bp, Homo sapien
tacgtgaggctcagccagtaaagtt

SEQ ID NO: 2865571 - DNA, 25 bp, Homo sapien
tacaactttgacttgggtgaggatc

SEQ ID NO: 2865572 - DNA, 25 bp, Homo sapien
tgaagaactactgagttgttacaac

SEQ ID NO: 2865573 - DNA, 25 bp, Homo sapien
caattttacttgatccttgaagaac

SEQ ID NO: 2865574 - DNA, 25 bp, Homo sapien
cattcataccacatggaactgcttc

SEQ ID NO: 2865575 - DNA, 25 bp, Homo sapien
ctgaccccattcataccacatggaa

SEQ ID NO: 2865576 - DNA, 25 bp, Homo sapien
ctgaagagtaacacctgaccccatt

SEQ ID NO: 2865577 - DNA, 25 bp, Homo sapien
aactgcttccccctggaaattctgg

SEQ ID NO: 2865578 - DNA, 25 bp, Homo sapien
caagagacagctgtactggaggagc

SEQ ID NO: 2865579 - DNA, 25 bp, Homo sapien
cctaggagcctggattgaacagatt

SEQ ID NO: 2865580 - DNA, 25 bp, Homo sapien
tcattgtgacagaggcgtttccacc

SEQ ID NO: 2865581 - DNA, 25 bp, Homo sapien
tgaacagattggcttgcaagagaca

SEQ ID NO: 2865582 - DNA, 25 bp, Homo sapien
ctgacagcctggtcactgaagaggt

SEQ ID NO: 2865583 - DNA, 25 bp, Homo sapien
ctgaagaggttaacacactccagtg

SEQ ID NO: 2865584 - DNA, 25 bp, Homo sapien
cactgaagaggttaacacactccag

SEQ ID NO: 2865585 - DNA, 25 bp, Homo sapien
gaagaggttaacacactccagtgct

SEQ ID NO: 2865586 - DNA, 25 bp, Homo sapien
gttctgttttccctgaggaggcaag

SEQ ID NO: 2865587 - DNA, 25 bp, Homo sapien
tgaccccaagattgtcagagcctcc

SEQ ID NO: 2865588 - DNA, 25 bp, Homo sapien
taagcgacgatatcttgaccccaag

SEQ ID NO: 2865589 - DNA, 25 bp, Homo sapien
gcaagttggtgtgccgtttctcata

SEQ ID NO: 2865590 - DNA, 25 bp, Homo sapien
tttgtatgcaacagccacgaccttt

SEQ ID NO: 2865591 - DNA, 25 bp, Homo sapien
taagttgtcattgaccaagagaccg

SEQ ID NO: 2865592 - DNA, 25 bp, Homo sapien
caaaactggcagtatggaacaggac

SEQ ID NO: 2865593 - DNA, 25 bp, Homo sapien
cactttgactatccttaagagggac

SEQ ID NO: 2865594 - DNA, 25 bp, Homo sapien
gatggcttctttcctccttagcctc

SEQ ID NO: 2865595 - DNA, 25 bp, Homo sapien
ttttgatggcttctttcctccttag

SEQ ID NO: 2865596 - DNA, 25 bp, Homo sapien
tgatggcttctttcctccttagcct

SEQ ID NO: 2865597 - DNA, 25 bp, Homo sapien
attattttgatggcttctttcctcc

SEQ ID NO: 2865598 - DNA, 25 bp, Homo sapien
cctcaaggcaactatgatactttgg

SEQ ID NO: 2865599 - DNA, 25 bp, Homo sapien
tgtgcccagccaatagctgatttct

SEQ ID NO: 2865600 - DNA, 25 bp, Homo sapien
gaaactattgtgctcatgatggcaa

SEQ ID NO: 2865601 - DNA, 25 bp, Homo sapien
aaatagactagtctgtatggccaca

SEQ ID NO: 2865602 - DNA, 25 bp, Homo sapien
tatccaggatgatatctgaatttgc

SEQ ID NO: 2865603 - DNA, 25 bp, Homo sapien
ctgacaattttggttatccaggatg

SEQ ID NO: 2865604 - DNA, 25 bp, Homo sapien
agggagttgtctgacaattttggtt

SEQ ID NO: 2865605 - DNA, 25 bp, Homo sapien
tgaatttgcacaatcatcagggaaa

SEQ ID NO: 2865606 - DNA, 25 bp, Homo sapien
tccacaaggtgttctattaaaagtc

SEQ ID NO: 2865607 - DNA, 25 bp, Homo sapien
agctctccactctcttgtttgaaca

SEQ ID NO: 2865608 - DNA, 25 bp, Homo sapien
aagtcccaattaaatgtgtacagcc

SEQ ID NO: 2865609 - DNA, 25 bp, Homo sapien
gttgtcaaggatacccagctctcca

SEQ ID NO: 2865610 - DNA, 25 bp, Homo sapien
tctgtgttgatcttcccaaactgtg

SEQ ID NO: 2865611 - DNA, 25 bp, Homo sapien
tttggtatttcccaacctggtgctg

SEQ ID NO: 2865612 - DNA, 25 bp, Homo sapien
cagttgccaaatcaagtgcataaat

SEQ ID NO: 2865613 - DNA, 25 bp, Homo sapien
cccaacctggtgctgttaacaagaa

SEQ ID NO: 2865614 - DNA, 25 bp, Homo sapien
catttgaagcagtcccgctagaagc

SEQ ID NO: 2865615 - DNA, 25 bp, Homo sapien
tccagcaagcggacttagatgtctg

SEQ ID NO: 2865616 - DNA, 25 bp, Homo sapien
gctggtgatgcacgtcgcaaatgga

SEQ ID NO: 2865617 - DNA, 25 bp, Homo sapien
cgctagaagcccaggagcaatctaa

SEQ ID NO: 2865618 - DNA, 25 bp, Homo sapien
ctggtatggaagtcgctagcttgtg

SEQ ID NO: 2865619 - DNA, 25 bp, Homo sapien
cattcatggagggattgctggtatg

SEQ ID NO: 2865620 - DNA, 25 bp, Homo sapien
tatggaagtcgctagcttgtgtcac

SEQ ID NO: 2865621 - DNA, 25 bp, Homo sapien
cttccattcatggagggattgctgg

SEQ ID NO: 2865622 - DNA, 25 bp, Homo sapien
ggagagctccaaagctgcacggcac

SEQ ID NO: 2865623 - DNA, 25 bp, Homo sapien
cggtcgtagcaactaaattctgggc

SEQ ID NO: 2865624 - DNA, 25 bp, Homo sapien
ccaatttcaatctgactgtcggtcg

SEQ ID NO: 2865625 - DNA, 25 bp, Homo sapien
acggcaccctctgaaatgagcttgg

SEQ ID NO: 2865626 - DNA, 25 bp, Homo sapien
gctgtgatcattgtgcaacttctgg

SEQ ID NO: 2865627 - DNA, 25 bp, Homo sapien
tgaagaaactcgcaaacagtgcagc

SEQ ID NO: 2865628 - DNA, 25 bp, Homo sapien
aataaaacctgtagcagtgaatgcg

SEQ ID NO: 2865629 - DNA, 25 bp, Homo sapien
tctgatgaatacgttcaaggctgtg

SEQ ID NO: 2865630 - DNA, 25 bp, Homo sapien
caagaaccaaatagtccaccaaagc

SEQ ID NO: 2865631 - DNA, 25 bp, Homo sapien
acaagaaccaaatagtccaccaaag

SEQ ID NO: 2865632 - DNA, 25 bp, Homo sapien
ggaactgctctgcttgtaatcactg

SEQ ID NO: 2865633 - DNA, 25 bp, Homo sapien
cccagacaggaactgatgcaatttc

SEQ ID NO: 2865634 - DNA, 25 bp, Homo sapien
gagcccaggaatctcgtacccagac

SEQ ID NO: 2865635 - DNA, 25 bp, Homo sapien
gatgcaatttcaggaccaatgacct

SEQ ID NO: 2865636 - DNA, 25 bp, Homo sapien
cattttaatactatcagagatgggg

SEQ ID NO: 2865637 - DNA, 25 bp, Homo sapien
tttaatactatcagagatggggtgc

SEQ ID NO: 2865638 - DNA, 25 bp, Homo sapien
gcagttccaaagttgcagcttgcac

SEQ ID NO: 2865639 - DNA, 25 bp, Homo sapien
ccaaagttgcagcttgcaccagagc

SEQ ID NO: 2865640 - DNA, 25 bp, Homo sapien
ttcgacagtcgtagccaagcgttgt

SEQ ID NO: 2865641 - DNA, 25 bp, Homo sapien
tcagttcttctgacggttcgacagt

SEQ ID NO: 2865642 - DNA, 25 bp, Homo sapien
cactgtgttaatagaaatactcctg

SEQ ID NO: 2865643 - DNA, 25 bp, Homo sapien
tcctggtgtcggagataaaccacca

SEQ ID NO: 2865644 - DNA, 25 bp, Homo sapien
tctctctggttacaagcacttcttc

SEQ ID NO: 2865645 - DNA, 25 bp, Homo sapien
taagctctggatttgcctttcgatg

SEQ ID NO: 2865646 - DNA, 25 bp, Homo sapien
tgttagtcatttagaaccacagaaa

SEQ ID NO: 2865647 - DNA, 25 bp, Homo sapien
gacatgaagtctaacctcagcaaga

SEQ ID NO: 2865648 - DNA, 25 bp, Homo sapien
aagaaatatcgagcccaaagctggc

SEQ ID NO: 2865649 - DNA, 25 bp, Homo sapien
tgacttactcagcaaattgggatga

SEQ ID NO: 2865650 - DNA, 25 bp, Homo sapien
ccatgttgctcataatcttatttaa

SEQ ID NO: 2865651 - DNA, 25 bp, Homo sapien
taatgccatttttagctggtatgac

SEQ ID NO: 2865652 - DNA, 25 bp, Homo sapien
tttgaatccctctgggtaagagccc

SEQ ID NO: 2865653 - DNA, 25 bp, Homo sapien
ccattgggaaaatactgccagcaaa

SEQ ID NO: 2865654 - DNA, 25 bp, Homo sapien
gtgttccttcaaactgtcattggtg

SEQ ID NO: 2865655 - DNA, 25 bp, Homo sapien
caaacctaggatcaggcatctggtg

SEQ ID NO: 2865656 - DNA, 25 bp, Homo sapien
caaactgtcattggtgagcatgtgc

SEQ ID NO: 2865657 - DNA, 25 bp, Homo sapien
tgccagggatataagcaaacctagg

SEQ ID NO: 2865658 - DNA, 25 bp, Homo sapien
ttaggtccccagtgagaagtgttcc

SEQ ID NO: 2865659 - DNA, 25 bp, Homo sapien
cacttgcatgcaaactggaggagta

SEQ ID NO: 2865660 - DNA, 25 bp, Homo sapien
tgctgctgagcatagttaggccact

SEQ ID NO: 2865661 - DNA, 25 bp, Homo sapien
catggtggccagtttcgacatcaaa

SEQ ID NO: 2865662 - DNA, 25 bp, Homo sapien
gttcatccacgctgccctggacctt

SEQ ID NO: 2865663 - DNA, 25 bp, Homo sapien
agacatctgtgtttgcactcctttc

SEQ ID NO: 2865664 - DNA, 25 bp, Homo sapien
acatctgtgtttgcactcctttcat

SEQ ID NO: 2865665 - DNA, 25 bp, Homo sapien
gtgttcatccacgctgccctggacc

SEQ ID NO: 2865666 - DNA, 25 bp, Homo sapien
cagcgccgacatcccctctccatca

SEQ ID NO: 2865667 - DNA, 25 bp, Homo sapien
tttcggcagcgccgacatcccctct

SEQ ID NO: 2865668 - DNA, 25 bp, Homo sapien
ttcggcagcgccgacatcccctctc

SEQ ID NO: 2865669 - DNA, 25 bp, Homo sapien
ggcagcgccgacatcccctctccat

SEQ ID NO: 2865670 - DNA, 25 bp, Homo sapien
taaaaagcagttgttagtaagagcg

SEQ ID NO: 2865671 - DNA, 25 bp, Homo sapien
ttgttagtaagagcgctacctgtca

SEQ ID NO: 2865672 - DNA, 25 bp, Homo sapien
caagcacatttgtcacagggagtaa

SEQ ID NO: 2865673 - DNA, 25 bp, Homo sapien
gagcgctacctgtcatactaatgga

SEQ ID NO: 2865674 - DNA, 25 bp, Homo sapien
tgtgggccacgcatggctgcttcat

SEQ ID NO: 2865675 - DNA, 25 bp, Homo sapien
tgaacttccggtagggcacacgaag

SEQ ID NO: 2865676 - DNA, 25 bp, Homo sapien
tcagagtgggccagtcacacactac

SEQ ID NO: 2865677 - DNA, 25 bp, Homo sapien
tgttgcccaggattacacaagtaga

SEQ ID NO: 2865678 - DNA, 25 bp, Homo sapien
cataatcacaccctagttgttgctt

SEQ ID NO: 2865679 - DNA, 25 bp, Homo sapien
cagaactagaagtcctatagcctgt

SEQ ID NO: 2865680 - DNA, 25 bp, Homo sapien
caatttgtagggttccataatcaca

SEQ ID NO: 2865681 - DNA, 25 bp, Homo sapien
gttgcttcaccagatatgatgcact

SEQ ID NO: 2865682 - DNA, 25 bp, Homo sapien
tgaagtggtggaaatcaaatgaaaa

SEQ ID NO: 2865683 - DNA, 25 bp, Homo sapien
gatgaagtggtggaaatcaaatgaa

SEQ ID NO: 2865684 - DNA, 25 bp, Homo sapien
gaagtggtggaaatcaaatgaaaac

SEQ ID NO: 2865685 - DNA, 25 bp, Homo sapien
agatgaagtggtggaaatcaaatga

SEQ ID NO: 2865686 - DNA, 25 bp, Homo sapien
catgatgattatctggttttgcatt

SEQ ID NO: 2865687 - DNA, 25 bp, Homo sapien
cttccatgatgattatctggttttg

SEQ ID NO: 2865688 - DNA, 25 bp, Homo sapien
gatgattatctggttttgcattttg

SEQ ID NO: 2865689 - DNA, 25 bp, Homo sapien
tccatgatgattatctggttttgca

SEQ ID NO: 2865690 - DNA, 25 bp, Homo sapien
cgatttatccagtgcaatttcactt

SEQ ID NO: 2865691 - DNA, 25 bp, Homo sapien
ccactcccagtcgatttatccagtg

SEQ ID NO: 2865692 - DNA, 25 bp, Homo sapien
tttaagcttaccaccaaaccagtca

SEQ ID NO: 2865693 - DNA, 25 bp, Homo sapien
ttaagcttaccaccaaaccagtcat

SEQ ID NO: 2865694 - DNA, 25 bp, Homo sapien
atgctacatcgcagccaacaggatt

SEQ ID NO: 2865695 - DNA, 25 bp, Homo sapien
tgtctgaatgctacatcgcagccaa

SEQ ID NO: 2865696 - DNA, 25 bp, Homo sapien
tgaatgctacatcgcagccaacagg

SEQ ID NO: 2865697 - DNA, 25 bp, Homo sapien
tctgaatgctacatcgcagccaaca

SEQ ID NO: 2865698 - DNA, 25 bp, Homo sapien
gacaatgactctctttctgattaga

SEQ ID NO: 2865699 - DNA, 25 bp, Homo sapien
tgttcacgctttcccgaagacaatg

SEQ ID NO: 2865700 - DNA, 25 bp, Homo sapien
gaaatgcatttgttcacgctttccc

SEQ ID NO: 2865701 - DNA, 25 bp, Homo sapien
gctttcccgaagacaatgactctct

SEQ ID NO: 2865702 - DNA, 25 bp, Homo sapien
ggctttccatgcaaccaagggagca

SEQ ID NO: 2865703 - DNA, 25 bp, Homo sapien
cataacaatgacatgagggcttgga

SEQ ID NO: 2865704 - DNA, 25 bp, Homo sapien
caaccaagggagcataacaatgaca

SEQ ID NO: 2865705 - DNA, 25 bp, Homo sapien
ccagaggctttccatgcaaccaagg

SEQ ID NO: 2865706 - DNA, 25 bp, Homo sapien
taaaccactctaatgaattaatcca

SEQ ID NO: 2865707 - DNA, 25 bp, Homo sapien
tgaattcagtgcaattaccctagta

SEQ ID NO: 2865708 - DNA, 25 bp, Homo sapien
acagtgtcaatttgtggaatggagg

SEQ ID NO: 2865709 - DNA, 25 bp, Homo sapien
agtgcaattaccctagtaagtaagg

SEQ ID NO: 2865710 - DNA, 25 bp, Homo sapien
tgcagcattgaagtcccgggcttaa

SEQ ID NO: 2865711 - DNA, 25 bp, Homo sapien
gattgagcccttttccagaggtggg

SEQ ID NO: 2865712 - DNA, 25 bp, Homo sapien
agcagtttgagtgaggattgagccc

SEQ ID NO: 2865713 - DNA, 25 bp, Homo sapien
taggcaaacagctaatctgagggct

SEQ ID NO: 2865714 - DNA, 25 bp, Homo sapien
catgctttacggtgcttttctcaaa

SEQ ID NO: 2865715 - DNA, 25 bp, Homo sapien
ctcaaaggaagcattagtcaggtcc

SEQ ID NO: 2865716 - DNA, 25 bp, Homo sapien
tccttaaagggagggctgtagaatg

SEQ ID NO: 2865717 - DNA, 25 bp, Homo sapien
ccttaataagagatgttggactggg

SEQ ID NO: 2865718 - DNA, 25 bp, Homo sapien
ctgggcgacagagcaaggctgtgtc

SEQ ID NO: 2865719 - DNA, 25 bp, Homo sapien
gcctgggcgacagagcaaggctgtg

SEQ ID NO: 2865720 - DNA, 25 bp, Homo sapien
agcctgggcgacagagcaaggctgt

SEQ ID NO: 2865721 - DNA, 25 bp, Homo sapien
gggcgacagagcaaggctgtgtctc

SEQ ID NO: 2865722 - DNA, 25 bp, Homo sapien
acagacctcaccaaaaaagtggctg

SEQ ID NO: 2865723 - DNA, 25 bp, Homo sapien
cggtagatgtcattagtgtcatcct

SEQ ID NO: 2865724 - DNA, 25 bp, Homo sapien
gctgcgatcccatttcatatgtttt

SEQ ID NO: 2865725 - DNA, 25 bp, Homo sapien
tcctggtcacagacctcaccaaaaa

SEQ ID NO: 2865726 - DNA, 25 bp, Homo sapien
gtttcacatcaaaaagatggatggc

SEQ ID NO: 2865727 - DNA, 25 bp, Homo sapien
gatcaaaactcccaaggtgtccaga

SEQ ID NO: 2865728 - DNA, 25 bp, Homo sapien
gatggcaatgcatccaagagggagc

SEQ ID NO: 2865729 - DNA, 25 bp, Homo sapien
gagataagtacaaagggagccctgc

SEQ ID NO: 2865730 - DNA, 25 bp, Homo sapien
ctttgatttggtgcccccaaaatgt

SEQ ID NO: 2865731 - DNA, 25 bp, Homo sapien
tgatttggtgcccccaaaatgttta

SEQ ID NO: 2865732 - DNA, 25 bp, Homo sapien
cgcaagatgtggttcccggtttaat

SEQ ID NO: 2865733 - DNA, 25 bp, Homo sapien
ccatcgctaaacaattatcccataa

SEQ ID NO: 2865734 - DNA, 25 bp, Homo sapien
aaaccagctgtcaaaacgcaagatg

SEQ ID NO: 2865735 - DNA, 25 bp, Homo sapien
cttcatccatcgctaaacaattatc

SEQ ID NO: 2865736 - DNA, 25 bp, Homo sapien
gtgatgtgttctccggttacctcgg

SEQ ID NO: 2865737 - DNA, 25 bp, Homo sapien
tgtgtgatgtgttctccggttacct

SEQ ID NO: 2865738 - DNA, 25 bp, Homo sapien
tacctcggggaaaattgactcaggc

SEQ ID NO: 2865739 - DNA, 25 bp, Homo sapien
ctcggggaaaattgactcaggctgt

SEQ ID NO: 2865740 - DNA, 25 bp, Homo sapien
gttagtattgacttattccacagca

SEQ ID NO: 2865741 - DNA, 25 bp, Homo sapien
gaaaacaagtgctcatattttaagg

SEQ ID NO: 2865742 - DNA, 25 bp, Homo sapien
ttttaaggaactcaatgacagctga

SEQ ID NO: 2865743 - DNA, 25 bp, Homo sapien
ataaagcttccaccttaaagaaatg

SEQ ID NO: 2865744 - DNA, 25 bp, Homo sapien
tgccataattttgggcccatgaccc

SEQ ID NO: 2865745 - DNA, 25 bp, Homo sapien
ttggtttgccataattttgggccca

SEQ ID NO: 2865746 - DNA, 25 bp, Homo sapien
gctttcagtgtgaagggttcttttg

SEQ ID NO: 2865747 - DNA, 25 bp, Homo sapien
tttgctttcagtgtgaagggttctt

SEQ ID NO: 2865748 - DNA, 25 bp, Homo sapien
gcctcatccttccaattgcaaaatt

SEQ ID NO: 2865749 - DNA, 25 bp, Homo sapien
ttggcctcattttgcctcatccttc

SEQ ID NO: 2865750 - DNA, 25 bp, Homo sapien
tcatccttccaattgcaaaatttgt

SEQ ID NO: 2865751 - DNA, 25 bp, Homo sapien
ctttggcctcattttgcctcatcct

SEQ ID NO: 2865752 - DNA, 25 bp, Homo sapien
gactgcagaaatactctctgcatct

SEQ ID NO: 2865753 - DNA, 25 bp, Homo sapien
ctctcctctgactgcagaaatactc

SEQ ID NO: 2865754 - DNA, 25 bp, Homo sapien
ctctgactgcagaaatactctctgc

SEQ ID NO: 2865755 - DNA, 25 bp, Homo sapien
tctcctctgactgcagaaatactct

SEQ ID NO: 2865756 - DNA, 25 bp, Homo sapien
ctatgtgcagtaacttgagctcttt

SEQ ID NO: 2865757 - DNA, 25 bp, Homo sapien
tatgtgcagtaacttgagctctttt

SEQ ID NO: 2865758 - DNA, 25 bp, Homo sapien
atgtgcagtaacttgagctcttttc

SEQ ID NO: 2865759 - DNA, 25 bp, Homo sapien
tgtgcagtaacttgagctcttttcc

SEQ ID NO: 2865760 - DNA, 25 bp, Homo sapien
tacctttccggtcaaagtactgcat

SEQ ID NO: 2865761 - DNA, 25 bp, Homo sapien
ctacctttccggtcaaagtactgca

SEQ ID NO: 2865762 - DNA, 25 bp, Homo sapien
ttttgttgtgcttcaaaagtttgtg

SEQ ID NO: 2865763 - DNA, 25 bp, Homo sapien
ttaggtgttttgttgtgcttcaaaa

SEQ ID NO: 2865764 - DNA, 25 bp, Homo sapien
tttgttgtgcttcaaaagtttgtgt

SEQ ID NO: 2865765 - DNA, 25 bp, Homo sapien
cctgtgtgccagctatggaagtttt

SEQ ID NO: 2865766 - DNA, 25 bp, Homo sapien
gatttatctttccacaagaccattg

SEQ ID NO: 2865767 - DNA, 25 bp, Homo sapien
caagaccattgaacagtcctgtgtg

SEQ ID NO: 2865768 - DNA, 25 bp, Homo sapien
aaggtctggatttatctttccacaa

SEQ ID NO: 2865769 - DNA, 25 bp, Homo sapien
tttcgtgcattgagaatggcattgt

SEQ ID NO: 2865770 - DNA, 25 bp, Homo sapien
ggtctgatgtctgctaagtctctag

SEQ ID NO: 2865771 - DNA, 25 bp, Homo sapien
gatgtctgctaagtctctagaaaat

SEQ ID NO: 2865772 - DNA, 25 bp, Homo sapien
aatggcattgttgggtctgatgtct

SEQ ID NO: 2865773 - DNA, 25 bp, Homo sapien
tttccaacctgctagcgtatggccc

SEQ ID NO: 2865774 - DNA, 25 bp, Homo sapien
gccttcttgttttgcatgcacctgg

SEQ ID NO: 2865775 - DNA, 25 bp, Homo sapien
ggtggcatctcttagctgaattacc

SEQ ID NO: 2865776 - DNA, 25 bp, Homo sapien
ttacccaagtccattgaatcctgcc

SEQ ID NO: 2865777 - DNA, 25 bp, Homo sapien
tgcaaagtcaagctcgggggatcta

SEQ ID NO: 2865778 - DNA, 25 bp, Homo sapien
gctcgggggatctatcacccaattt

SEQ ID NO: 2865779 - DNA, 25 bp, Homo sapien
ggatctatcacccaatttatttttg

SEQ ID NO: 2865780 - DNA, 25 bp, Homo sapien
tcaagctcgggggatctatcaccca

SEQ ID NO: 2865781 - DNA, 25 bp, Homo sapien
ttgtgaagactccgcgggaccaagt

SEQ ID NO: 2865782 - DNA, 25 bp, Homo sapien
tgaagactccgcgggaccaagtcct

SEQ ID NO: 2865783 - DNA, 25 bp, Homo sapien
aagactccgcgggaccaagtcctgt

SEQ ID NO: 2865784 - DNA, 25 bp, Homo sapien
gactccgcgggaccaagtcctgttc

SEQ ID NO: 2865785 - DNA, 25 bp, Homo sapien
ggtttcaataacatagcacagagga

SEQ ID NO: 2865786 - DNA, 25 bp, Homo sapien
tttcaataacatagcacagaggact

SEQ ID NO: 2865787 - DNA, 25 bp, Homo sapien
tcaataacatagcacagaggactag

SEQ ID NO: 2865788 - DNA, 25 bp, Homo sapien
aataacatagcacagaggactagag

SEQ ID NO: 2865789 - DNA, 25 bp, Homo sapien
tttagcttcatgatctatggtcaaa

SEQ ID NO: 2865790 - DNA, 25 bp, Homo sapien
cctggagacaatgttggtgggaacc

SEQ ID NO: 2865791 - DNA, 25 bp, Homo sapien
tggacacaagctcctacgaaggcaa

SEQ ID NO: 2865792 - DNA, 25 bp, Homo sapien
taaatgtatgctgtcgaggccaggc

SEQ ID NO: 2865793 - DNA, 25 bp, Homo sapien
aaccacaagggttcctgggcatgcc

SEQ ID NO: 2865794 - DNA, 25 bp, Homo sapien
gcttgccacgaaaccatctaaaaat

SEQ ID NO: 2865795 - DNA, 25 bp, Homo sapien
ggaaataacaataatgcttgccacg

SEQ ID NO: 2865796 - DNA, 25 bp, Homo sapien
gaactactgatagctgttcctgcag

SEQ ID NO: 2865797 - DNA, 25 bp, Homo sapien
tttgcagtagccttcaaccggaact

SEQ ID NO: 2865798 - DNA, 25 bp, Homo sapien
atgccagttaatgcataatgtctcc

SEQ ID NO: 2865799 - DNA, 25 bp, Homo sapien
gagtgtaaaagtccaatagttgttg

SEQ ID NO: 2865800 - DNA, 25 bp, Homo sapien
tagtgcctcagtggtagttccaata

SEQ ID NO: 2865801 - DNA, 25 bp, Homo sapien
tccccgcatgaaacctgatcaaaaa

SEQ ID NO: 2865802 - DNA, 25 bp, Homo sapien
tatttaaaaatagtccaggtggcta

SEQ ID NO: 2865803 - DNA, 25 bp, Homo sapien
gcgaagacagcaatgtatttcccaa

SEQ ID NO: 2865804 - DNA, 25 bp, Homo sapien
gcttgttgcaagtgctgcgaagaca

SEQ ID NO: 2865805 - DNA, 25 bp, Homo sapien
caatgttgtccaggcccgcatttct

SEQ ID NO: 2865806 - DNA, 25 bp, Homo sapien
catttctgcggacattggctgctcc

SEQ ID NO: 2865807 - DNA, 25 bp, Homo sapien
ttgctttgaccaggtgtattagact

SEQ ID NO: 2865808 - DNA, 25 bp, Homo sapien
caggtgtattagactttgtcaaaag

SEQ ID NO: 2865809 - DNA, 25 bp, Homo sapien
ttgaccaggtgtattagactttgtc

SEQ ID NO: 2865810 - DNA, 25 bp, Homo sapien
ggtgtattagactttgtcaaaagca

SEQ ID NO: 2865811 - DNA, 25 bp, Homo sapien
tcggggaatgttaatggcccacctc

SEQ ID NO: 2865812 - DNA, 25 bp, Homo sapien
tatcttcggggaatgttaatggccc

SEQ ID NO: 2865813 - DNA, 25 bp, Homo sapien
ggaatggttcattatcttcggggaa

SEQ ID NO: 2865814 - DNA, 25 bp, Homo sapien
atgttaatggcccacctcgaggatt

SEQ ID NO: 2865815 - DNA, 25 bp, Homo sapien
catctgtcagtccataaagccagga

SEQ ID NO: 2865816 - DNA, 25 bp, Homo sapien
gaagagttgagagacaagtctgtct

SEQ ID NO: 2865817 - DNA, 25 bp, Homo sapien
caggtcatctgtcagtccataaagc

SEQ ID NO: 2865818 - DNA, 25 bp, Homo sapien
ggaagagttgagagacaagtctgtc

SEQ ID NO: 2865819 - DNA, 25 bp, Homo sapien
gtgaccacacccacatagggttcta

SEQ ID NO: 2865820 - DNA, 25 bp, Homo sapien
gaaaacctaccaagctttactgatg

SEQ ID NO: 2865821 - DNA, 25 bp, Homo sapien
tacagagccaacaaagtgcactagt

SEQ ID NO: 2865822 - DNA, 25 bp, Homo sapien
tactgatggatctctgctgaaaaga

SEQ ID NO: 2865823 - DNA, 25 bp, Homo sapien
tgggatgcattgtttcttggtagaa

SEQ ID NO: 2865824 - DNA, 25 bp, Homo sapien
gggatgcattgtttcttggtagaat

SEQ ID NO: 2865825 - DNA, 25 bp, Homo sapien
ggatgcattgtttcttggtagaatt

SEQ ID NO: 2865826 - DNA, 25 bp, Homo sapien
ccacttcagcagctacactatgaca

SEQ ID NO: 2865827 - DNA, 25 bp, Homo sapien
cacttcagcagctacactatgacat

SEQ ID NO: 2865828 - DNA, 25 bp, Homo sapien
ttcagcagctacactatgacattcc

SEQ ID NO: 2865829 - DNA, 25 bp, Homo sapien
cttcagcagctacactatgacattc

SEQ ID NO: 2865830 - DNA, 25 bp, Homo sapien
tgacagggtagttggagtatttact

SEQ ID NO: 2865831 - DNA, 25 bp, Homo sapien
ctcactgacagggtagttggagtat

SEQ ID NO: 2865832 - DNA, 25 bp, Homo sapien
cactgacagggtagttggagtattt

SEQ ID NO: 2865833 - DNA, 25 bp, Homo sapien
ggatgatggatgtgcatgcagatgg

SEQ ID NO: 2865834 - DNA, 25 bp, Homo sapien
tttatcaggactctgattttgtaag

SEQ ID NO: 2865835 - DNA, 25 bp, Homo sapien
ttatcaggactctgattttgtaagt

SEQ ID NO: 2865836 - DNA, 25 bp, Homo sapien
ccttgcacgctgtcataaaatttca

SEQ ID NO: 2865837 - DNA, 25 bp, Homo sapien
tcttctcttctatcattaaataggg

SEQ ID NO: 2865838 - DNA, 25 bp, Homo sapien
ctcttctatcattaaatagggcact

SEQ ID NO: 2865839 - DNA, 25 bp, Homo sapien
cattaaatagggcactgtcacatgc

SEQ ID NO: 2865840 - DNA, 25 bp, Homo sapien
tatcattaaatagggcactgtcaca

SEQ ID NO: 2865841 - DNA, 25 bp, Homo sapien
cagaccatggattgaggaccacagg

SEQ ID NO: 2865842 - DNA, 25 bp, Homo sapien
gcagaccatggattgaggaccacag

SEQ ID NO: 2865843 - DNA, 25 bp, Homo sapien
tctgcagaccatggattgaggacca

SEQ ID NO: 2865844 - DNA, 25 bp, Homo sapien
tgcagaccatggattgaggaccaca

SEQ ID NO: 2865845 - DNA, 25 bp, Homo sapien
gcaattatcatgtatctgctgagcc

SEQ ID NO: 2865846 - DNA, 25 bp, Homo sapien
cttcaaccaacgagctaggagtgcc

SEQ ID NO: 2865847 - DNA, 25 bp, Homo sapien
taggagtgccattggaaccagcgcc

SEQ ID NO: 2865848 - DNA, 25 bp, Homo sapien
cacagaggtagtgccagaagggcca

SEQ ID NO: 2865849 - DNA, 25 bp, Homo sapien
ttccattatcactgattacccagct

SEQ ID NO: 2865850 - DNA, 25 bp, Homo sapien
taaattcccagttcacactttctct

SEQ ID NO: 2865851 - DNA, 25 bp, Homo sapien
tatcactgattacccagcttataaa

SEQ ID NO: 2865852 - DNA, 25 bp, Homo sapien
cttataaattcccagttcacacttt

SEQ ID NO: 2865853 - DNA, 25 bp, Homo sapien
caaagtcacaagagtgtattccagc

SEQ ID NO: 2865854 - DNA, 25 bp, Homo sapien
aaatattggcactcaaagtcacaag

SEQ ID NO: 2865855 - DNA, 25 bp, Homo sapien
gaaaccgggactgtggccctaatgc

SEQ ID NO: 2865856 - DNA, 25 bp, Homo sapien
tgtagagcaattccggaaaccggga

SEQ ID NO: 2865857 - DNA, 25 bp, Homo sapien
tcttcgtgggaaggtgtctcaatca

SEQ ID NO: 2865858 - DNA, 25 bp, Homo sapien
ttgcctggcaaagaacccaatgagt

SEQ ID NO: 2865859 - DNA, 25 bp, Homo sapien
cttagcgtaggcatctcagatagga

SEQ ID NO: 2865860 - DNA, 25 bp, Homo sapien
gactggattgtcagctctccaagga

SEQ ID NO: 2865861 - DNA, 25 bp, Homo sapien
tatccataacgaggaacatgcagga

SEQ ID NO: 2865862 - DNA, 25 bp, Homo sapien
ctctgggcaaatgcagggatgtgtt

SEQ ID NO: 2865863 - DNA, 25 bp, Homo sapien
tccgtttacaaatgactgggtatgc

SEQ ID NO: 2865864 - DNA, 25 bp, Homo sapien
ccccagaaggtgcagttgtcttctt

SEQ ID NO: 2865865 - DNA, 25 bp, Homo sapien
tatgctcagtgtgaacgtggcttgt

SEQ ID NO: 2865866 - DNA, 25 bp, Homo sapien
aacgtggcttgtcttgagatttgca

SEQ ID NO: 2865867 - DNA, 25 bp, Homo sapien
ctagcatgtggctagagttgttcat

SEQ ID NO: 2865868 - DNA, 25 bp, Homo sapien
gatttgcagtgataactagcatgtg

SEQ ID NO: 2865869 - DNA, 25 bp, Homo sapien
cttgcaactccaggcttccttttct

SEQ ID NO: 2865870 - DNA, 25 bp, Homo sapien
gctgctgtcaataaaagaatccaat

SEQ ID NO: 2865871 - DNA, 25 bp, Homo sapien
gctgtcaataaaagaatccaatcac

SEQ ID NO: 2865872 - DNA, 25 bp, Homo sapien
gggctgctgtcaataaaagaatcca

SEQ ID NO: 2865873 - DNA, 25 bp, Homo sapien
gtgggctgctgtcaataaaagaatc

SEQ ID NO: 2865874 - DNA, 25 bp, Homo sapien
tagagaaggctacaaccagctggag

SEQ ID NO: 2865875 - DNA, 25 bp, Homo sapien
gcaatcatctcctatggatactgct

SEQ ID NO: 2865876 - DNA, 25 bp, Homo sapien
tcatctcctatggatactgctgaca

SEQ ID NO: 2865877 - DNA, 25 bp, Homo sapien
gctgacaaattctgtcctgttccca

SEQ ID NO: 2865878 - DNA, 25 bp, Homo sapien
ttgttttataaagatgccccatgtg

SEQ ID NO: 2865879 - DNA, 25 bp, Homo sapien
ttttataaagatgccccatgtgcag

SEQ ID NO: 2865880 - DNA, 25 bp, Homo sapien
tttagatggcccaagcaagctggct

SEQ ID NO: 2865881 - DNA, 25 bp, Homo sapien
agcaaatcctgctttagatggccca

SEQ ID NO: 2865882 - DNA, 25 bp, Homo sapien
gagaactagtagaggcaagcttcca

SEQ ID NO: 2865883 - DNA, 25 bp, Homo sapien
ggccttctgagaactagtagaggca

SEQ ID NO: 2865884 - DNA, 25 bp, Homo sapien
tctgagaactagtagaggcaagctt

SEQ ID NO: 2865885 - DNA, 25 bp, Homo sapien
ctagtagaggcaagcttccaaatca

SEQ ID NO: 2865886 - DNA, 25 bp, Homo sapien
tgtctctgacgccatgaccaaatgc

SEQ ID NO: 2865887 - DNA, 25 bp, Homo sapien
tttttctgtctctgacgccatgacc

SEQ ID NO: 2865888 - DNA, 25 bp, Homo sapien
ttttctgtctctgacgccatgacca

SEQ ID NO: 2865889 - DNA, 25 bp, Homo sapien
ttctgtctctgacgccatgaccaaa

SEQ ID NO: 2865890 - DNA, 25 bp, Homo sapien
gatcgcccagccaagtttggctgct

SEQ ID NO: 2865891 - DNA, 25 bp, Homo sapien
aacatttcttctctggatcgcccag

SEQ ID NO: 2865892 - DNA, 25 bp, Homo sapien
tcttctctggatcgcccagccaagt

SEQ ID NO: 2865893 - DNA, 25 bp, Homo sapien
tcattcctcgacttgaatggatgag

SEQ ID NO: 2865894 - DNA, 25 bp, Homo sapien
ttgggtaaagcgatgttcgactctg

SEQ ID NO: 2865895 - DNA, 25 bp, Homo sapien
ttatttgggtaaagcgatgttcgac

SEQ ID NO: 2865896 - DNA, 25 bp, Homo sapien
taaagcgatgttcgactctgcatga

SEQ ID NO: 2865897 - DNA, 25 bp, Homo sapien
gatgttcgactctgcatgattccta

SEQ ID NO: 2865898 - DNA, 25 bp, Homo sapien
ggctttcagatagtccatgccgaaa

SEQ ID NO: 2865899 - DNA, 25 bp, Homo sapien
aaaatgcacacgcttgccttctcca

SEQ ID NO: 2865900 - DNA, 25 bp, Homo sapien
taatgggctttcagatagtccatgc

SEQ ID NO: 2865901 - DNA, 25 bp, Homo sapien
cagatagtccatgccgaaaagcaaa

SEQ ID NO: 2865902 - DNA, 25 bp, Homo sapien
cataaacgttgcagtgcctggaccc

SEQ ID NO: 2865903 - DNA, 25 bp, Homo sapien
agggaactgttctcgtcacccctca

SEQ ID NO: 2865904 - DNA, 25 bp, Homo sapien
ctagaaacataaacgttgcagtgcc

SEQ ID NO: 2865905 - DNA, 25 bp, Homo sapien
gcctggacccttcagattataaaac

SEQ ID NO: 2865906 - DNA, 25 bp, Homo sapien
ctttagccattctttcatctttttc

SEQ ID NO: 2865907 - DNA, 25 bp, Homo sapien
tttagccattctttcatctttttct

SEQ ID NO: 2865908 - DNA, 25 bp, Homo sapien
tctttagccattctttcatcttttt

SEQ ID NO: 2865909 - DNA, 25 bp, Homo sapien
ttagccattctttcatctttttctc

SEQ ID NO: 2865910 - DNA, 25 bp, Homo sapien
gatgagaggaacatcttggatccct

SEQ ID NO: 2865911 - DNA, 25 bp, Homo sapien
tagtagtagctccatagtccttctc

SEQ ID NO: 2865912 - DNA, 25 bp, Homo sapien
tctttgacaagcttcatgatgtcgt

SEQ ID NO: 2865913 - DNA, 25 bp, Homo sapien
catcttggatccctctagtagtagc

SEQ ID NO: 2865914 - DNA, 25 bp, Homo sapien
gtcttgcagcatgcataatctgatg

SEQ ID NO: 2865915 - DNA, 25 bp, Homo sapien
tgccaagggctgctgtctttatgtg

SEQ ID NO: 2865916 - DNA, 25 bp, Homo sapien
cattaggccgcatgttagttttcaa

SEQ ID NO: 2865917 - DNA, 25 bp, Homo sapien
taatctgatgcttgatttccactga

SEQ ID NO: 2865918 - DNA, 25 bp, Homo sapien
tgttgatgttggacagggagtcggg

SEQ ID NO: 2865919 - DNA, 25 bp, Homo sapien
gctcctgtggagctccgtattttcc

SEQ ID NO: 2865920 - DNA, 25 bp, Homo sapien
tccgtattttccattaccaggacac

SEQ ID NO: 2865921 - DNA, 25 bp, Homo sapien
tcgggaagcaccaaacctgtagggc

SEQ ID NO: 2865922 - DNA, 25 bp, Homo sapien
gctggggagacatcctgacttggct

SEQ ID NO: 2865923 - DNA, 25 bp, Homo sapien
gggagacatcctgacttggctgctt

SEQ ID NO: 2865924 - DNA, 25 bp, Homo sapien
acttggaataggtcatgattatgta

SEQ ID NO: 2865925 - DNA, 25 bp, Homo sapien
ttatgtagcaattgggagggcgtaa

SEQ ID NO: 2865926 - DNA, 25 bp, Homo sapien
gactggtgaccgcatccctggtatt

SEQ ID NO: 2865927 - DNA, 25 bp, Homo sapien
gacccgatgccacacagactggtga

SEQ ID NO: 2865928 - DNA, 25 bp, Homo sapien
tgtgaaccacagtcagggacccgat

SEQ ID NO: 2865929 - DNA, 25 bp, Homo sapien
gagcaatgcctatctttgatggcca

SEQ ID NO: 2865930 - DNA, 25 bp, Homo sapien
caacgcgggttgaattccttagtgg

SEQ ID NO: 2865931 - DNA, 25 bp, Homo sapien
gaggatgagaggaaccgcttcaagc

SEQ ID NO: 2865932 - DNA, 25 bp, Homo sapien
caagctgagagcacagttgtttcca

SEQ ID NO: 2865933 - DNA, 25 bp, Homo sapien
ggttagtgggctggataacccagca

SEQ ID NO: 2865934 - DNA, 25 bp, Homo sapien
gatatctaagttgggttggacaaag

SEQ ID NO: 2865935 - DNA, 25 bp, Homo sapien
ccatctcagacagcgcttttcctcc

SEQ ID NO: 2865936 - DNA, 25 bp, Homo sapien
acaaagtcattggaagtgacagtca

SEQ ID NO: 2865937 - DNA, 25 bp, Homo sapien
ttttcctcccaagatatctaagttg

SEQ ID NO: 2865938 - DNA, 25 bp, Homo sapien
taattcaggtttgtgatggctcccc

SEQ ID NO: 2865939 - DNA, 25 bp, Homo sapien
tcagccctgcgtactgtcctggagg

SEQ ID NO: 2865940 - DNA, 25 bp, Homo sapien
ctgcgtactgtcctggaggccagag

SEQ ID NO: 2865941 - DNA, 25 bp, Homo sapien
atcgcctgctgcctttgtcgtcctt

SEQ ID NO: 2865942 - DNA, 25 bp, Homo sapien
cctaccactaacttgcttcttatct

SEQ ID NO: 2865943 - DNA, 25 bp, Homo sapien
ctaccactaacttgcttcttatctg

SEQ ID NO: 2865944 - DNA, 25 bp, Homo sapien
caaattttcaagcgtccccacttgg

SEQ ID NO: 2865945 - DNA, 25 bp, Homo sapien
acaaattttcaagcgtccccacttg

SEQ ID NO: 2865946 - DNA, 25 bp, Homo sapien
gtgcgtgtagtacatgggtttctgc

SEQ ID NO: 2865947 - DNA, 25 bp, Homo sapien
agaaagcagacccactgagcgtttg

SEQ ID NO: 2865948 - DNA, 25 bp, Homo sapien
ctctttgcatagtgcgtgtagtaca

SEQ ID NO: 2865949 - DNA, 25 bp, Homo sapien
gaccctagtggttccatgaacatct

SEQ ID NO: 2865950 - DNA, 25 bp, Homo sapien
ttcccgcagcccaacacgtcgtgta

SEQ ID NO: 2865951 - DNA, 25 bp, Homo sapien
aagctgctccagttgtagaatttgg

SEQ ID NO: 2865952 - DNA, 25 bp, Homo sapien
caagctgctccagttgtagaatttg

SEQ ID NO: 2865953 - DNA, 25 bp, Homo sapien
gtcgtgtacctgtacctttctctcc

SEQ ID NO: 2865954 - DNA, 25 bp, Homo sapien
caaggtggttcggaataaccggcat

SEQ ID NO: 2865955 - DNA, 25 bp, Homo sapien
catgtatgtttctctgtagtggcct

SEQ ID NO: 2865956 - DNA, 25 bp, Homo sapien
cataattgctcagaattaacactct

SEQ ID NO: 2865957 - DNA, 25 bp, Homo sapien
tcctgtcctcccctaagtagtcttc

SEQ ID NO: 2865958 - DNA, 25 bp, Homo sapien
gaaccttgcggacagaaagatcatc

SEQ ID NO: 2865959 - DNA, 25 bp, Homo sapien
tcccaacagttctttcaggtctaaa

SEQ ID NO: 2865960 - DNA, 25 bp, Homo sapien
ggtcctgtccatatgtagatttcca

SEQ ID NO: 2865961 - DNA, 25 bp, Homo sapien
acagagtcacgttttggccccaatg

SEQ ID NO: 2865962 - DNA, 25 bp, Homo sapien
agaggaggcactggaaaatctgctt

SEQ ID NO: 2865963 - DNA, 25 bp, Homo sapien
tgagaggaggcactggaaaatctgc

SEQ ID NO: 2865964 - DNA, 25 bp, Homo sapien
tttgcatactttgatcaagctcggt

SEQ ID NO: 2865965 - DNA, 25 bp, Homo sapien
tttgatcaagctcggttttctgaga

SEQ ID NO: 2865966 - DNA, 25 bp, Homo sapien
catctgtagtactctaaaagaagca

SEQ ID NO: 2865967 - DNA, 25 bp, Homo sapien
gccatctgtagtactctaaaagaag

SEQ ID NO: 2865968 - DNA, 25 bp, Homo sapien
gctggcgtcattgccatctgtagta

SEQ ID NO: 2865969 - DNA, 25 bp, Homo sapien
agaccaagaagctggcgtcattgcc

SEQ ID NO: 2865970 - DNA, 25 bp, Homo sapien
gcccgcgggcaccagctgcagatat

SEQ ID NO: 2865971 - DNA, 25 bp, Homo sapien
gaagcagagccgctgccgcgaccga

SEQ ID NO: 2865972 - DNA, 25 bp, Homo sapien
caccagctgcagatatgaagcagag

SEQ ID NO: 2865973 - DNA, 25 bp, Homo sapien
gggcaccagctgcagatatgaagca

SEQ ID NO: 2865974 - DNA, 25 bp, Homo sapien
aacgggccaggatgacaatggcggc

SEQ ID NO: 2865975 - DNA, 25 bp, Homo sapien
cgggccaggatgacaatggcggctt

SEQ ID NO: 2865976 - DNA, 25 bp, Homo sapien
ggctttgtggaatagaaaggcggga

SEQ ID NO: 2865977 - DNA, 25 bp, Homo sapien
ggcggctttgtggaatagaaaggcg

SEQ ID NO: 2865978 - DNA, 25 bp, Homo sapien
cagcaatttggctgccaggagctcc

SEQ ID NO: 2865979 - DNA, 25 bp, Homo sapien
ccagcaatttggctgccaggagctc

SEQ ID NO: 2865980 - DNA, 25 bp, Homo sapien
catcattggggtgattggtttatca

SEQ ID NO: 2865981 - DNA, 25 bp, Homo sapien
gagaagagacatcaatcataactag

SEQ ID NO: 2865982 - DNA, 25 bp, Homo sapien
tggagaagagacatcaatcataact

SEQ ID NO: 2865983 - DNA, 25 bp, Homo sapien
gaagagacatcaatcataactagca

SEQ ID NO: 2865984 - DNA, 25 bp, Homo sapien
gcacataagccactttgactccagg

SEQ ID NO: 2865985 - DNA, 25 bp, Homo sapien
cactgggtagtacaggctaagtcca

SEQ ID NO: 2865986 - DNA, 25 bp, Homo sapien
ccaggcagaggtttggttccagctg

SEQ ID NO: 2865987 - DNA, 25 bp, Homo sapien
gacattcagagctacctgcggctcc

SEQ ID NO: 2865988 - DNA, 25 bp, Homo sapien
ccatctgattggataccgtgttttc

SEQ ID NO: 2865989 - DNA, 25 bp, Homo sapien
tgactaggatcgcatttcaatctgt

SEQ ID NO: 2865990 - DNA, 25 bp, Homo sapien
agcactcgttcccagttcccaaggt

SEQ ID NO: 2865991 - DNA, 25 bp, Homo sapien
tcttcccgtctgtggtaatggagca

SEQ ID NO: 2865992 - DNA, 25 bp, Homo sapien
tcattaacaataatctccatctcca

SEQ ID NO: 2865993 - DNA, 25 bp, Homo sapien
actgctaatgtcattaacaataatc

SEQ ID NO: 2865994 - DNA, 25 bp, Homo sapien
ctaatgtcattaacaataatctcca

SEQ ID NO: 2865995 - DNA, 25 bp, Homo sapien
tgtcattaacaataatctccatctc

SEQ ID NO: 2865996 - DNA, 25 bp, Homo sapien
tgatgagggcggtacaaagaggatt

SEQ ID NO: 2865997 - DNA, 25 bp, Homo sapien
gcccttattaaaaagcacggagaca

SEQ ID NO: 2865998 - DNA, 25 bp, Homo sapien
gaggattgaaacactgaatctgtcc

SEQ ID NO: 2865999 - DNA, 25 bp, Homo sapien
taaaaagcacggagacataggaaga

SEQ ID NO: 2866000 - DNA, 25 bp, Homo sapien
aatagaggtgtcacaatgaaaaata

SEQ ID NO: 2866001 - DNA, 25 bp, Homo sapien
tgtgatcattatgccaccagctttc

SEQ ID NO: 2866002 - DNA, 25 bp, Homo sapien
ttcaatagaggtgtcacaatgaaaa

SEQ ID NO: 2866003 - DNA, 25 bp, Homo sapien
ctgatttagttgaacaatgtgatca

SEQ ID NO: 2866004 - DNA, 25 bp, Homo sapien
gataacttataatgtgcgccagccc

SEQ ID NO: 2866005 - DNA, 25 bp, Homo sapien
taatgtgcgccagccccaagatttc

SEQ ID NO: 2866006 - DNA, 25 bp, Homo sapien
cctgcaggagataacttataatgtg

SEQ ID NO: 2866007 - DNA, 25 bp, Homo sapien
caggagataacttataatgtgcgcc

SEQ ID NO: 2866008 - DNA, 25 bp, Homo sapien
gctgaatagagtgcctttcaattta

SEQ ID NO: 2866009 - DNA, 25 bp, Homo sapien
ctttcaatttatggaaaggggtcat

SEQ ID NO: 2866010 - DNA, 25 bp, Homo sapien
ctgctgaatagagtgcctttcaatt

SEQ ID NO: 2866011 - DNA, 25 bp, Homo sapien
tctgctgaatagagtgcctttcaat

SEQ ID NO: 2866012 - DNA, 25 bp, Homo sapien
aaatttaaatcagatcggtgagaag

SEQ ID NO: 2866013 - DNA, 25 bp, Homo sapien
gtgaaaaatttaaatcagatcggtg

SEQ ID NO: 2866014 - DNA, 25 bp, Homo sapien
tgagtcagagccaaaggacttggtt

SEQ ID NO: 2866015 - DNA, 25 bp, Homo sapien
tttttgttcaatgagtcagagccaa

SEQ ID NO: 2866016 - DNA, 25 bp, Homo sapien
tcaaagccagctttgatctggcccc

SEQ ID NO: 2866017 - DNA, 25 bp, Homo sapien
tccaggagtagagttcaccttgaaa

SEQ ID NO: 2866018 - DNA, 25 bp, Homo sapien
ccagcctttgccgagaagcgcatct

SEQ ID NO: 2866019 - DNA, 25 bp, Homo sapien
caccttgaaaggctgagacgcctgt

SEQ ID NO: 2866020 - DNA, 25 bp, Homo sapien
ggtttctcactcagagctgcaatgg

SEQ ID NO: 2866021 - DNA, 25 bp, Homo sapien
aatgggaggtatgtaaccatcaccc

SEQ ID NO: 2866022 - DNA, 25 bp, Homo sapien
tttggtgttgttgcttaagcaggga

SEQ ID NO: 2866023 - DNA, 25 bp, Homo sapien
tcagagctgcaatgggaggtatgta

SEQ ID NO: 2866024 - DNA, 25 bp, Homo sapien
gatgaaagtaatggaatgctagtgc

SEQ ID NO: 2866025 - DNA, 25 bp, Homo sapien
taaagtgctggcgaatgttaattgc

SEQ ID NO: 2866026 - DNA, 25 bp, Homo sapien
aaaccgctgaatgcagcttgactgg

SEQ ID NO: 2866027 - DNA, 25 bp, Homo sapien
tttataagaatgcagaaaccgctga

SEQ ID NO: 2866028 - DNA, 25 bp, Homo sapien
tttcggagtgcctgaggattgttct

SEQ ID NO: 2866029 - DNA, 25 bp, Homo sapien
gggcatctgcatttcggagtgcctg

SEQ ID NO: 2866030 - DNA, 25 bp, Homo sapien
gaggattgttctgggatgagtccat

SEQ ID NO: 2866031 - DNA, 25 bp, Homo sapien
gtgcctgaggattgttctgggatga

SEQ ID NO: 2866032 - DNA, 25 bp, Homo sapien
catttggatgtgcaaggatttcact

SEQ ID NO: 2866033 - DNA, 25 bp, Homo sapien
atgataagctccagtaagcagagag

SEQ ID NO: 2866034 - DNA, 25 bp, Homo sapien
tggcagcgtcttcatcttatccgat

SEQ ID NO: 2866035 - DNA, 25 bp, Homo sapien
ccgattggtgttgtcctgatgataa

SEQ ID NO: 2866036 - DNA, 25 bp, Homo sapien
ttgtttattgctcctcctagaccag

SEQ ID NO: 2866037 - DNA, 25 bp, Homo sapien
tcctcctagaccaggatgtagatag

SEQ ID NO: 2866038 - DNA, 25 bp, Homo sapien
ggatgtagatagattcccatcatgt

SEQ ID NO: 2866039 - DNA, 25 bp, Homo sapien
tccttgtttattgctcctcctagac

SEQ ID NO: 2866040 - DNA, 25 bp, Homo sapien
ctgtataatctcagaacctccgccg

SEQ ID NO: 2866041 - DNA, 25 bp, Homo sapien
ggtgagcagaatcaggtgcagtttt

SEQ ID NO: 2866042 - DNA, 25 bp, Homo sapien
ggctctcaggcccagttagctgaat

SEQ ID NO: 2866043 - DNA, 25 bp, Homo sapien
tgaatacagatgacacgcaaagtgc

SEQ ID NO: 2866044 - DNA, 25 bp, Homo sapien
gacacgcaaagtgctcttgctgact

SEQ ID NO: 2866045 - DNA, 25 bp, Homo sapien
cattcaggcgagtcaataggatgcc

SEQ ID NO: 2866046 - DNA, 25 bp, Homo sapien
ttctgtccatgagcgcttgccagga

SEQ ID NO: 2866047 - DNA, 25 bp, Homo sapien
caaacgttgtttttctcgacaggag

SEQ ID NO: 2866048 - DNA, 25 bp, Homo sapien
taggcaagaatgtccaactggctgc

SEQ ID NO: 2866049 - DNA, 25 bp, Homo sapien
cattagaagcgcctggagagcttga

SEQ ID NO: 2866050 - DNA, 25 bp, Homo sapien
attgcacgtcttgtctaaaggttcc

SEQ ID NO: 2866051 - DNA, 25 bp, Homo sapien
agcttgagattgcacgtcttgtcta

SEQ ID NO: 2866052 - DNA, 25 bp, Homo sapien
agcgcctggagagcttgagattgca

SEQ ID NO: 2866053 - DNA, 25 bp, Homo sapien
ctaggagcccccgaaatgtctatgg

SEQ ID NO: 2866054 - DNA, 25 bp, Homo sapien
gagcccccgaaatgtctatggttcc

SEQ ID NO: 2866055 - DNA, 25 bp, Homo sapien
cccccgaaatgtctatggttcccat

SEQ ID NO: 2866056 - DNA, 25 bp, Homo sapien
ctctctaggagcccccgaaatgtct

SEQ ID NO: 2866057 - DNA, 25 bp, Homo sapien
gagacatgtcgagagcctttgggta

SEQ ID NO: 2866058 - DNA, 25 bp, Homo sapien
cctggtaggagtgtagacatcccca

SEQ ID NO: 2866059 - DNA, 25 bp, Homo sapien
gcctagccactgatgtaacacgatg

SEQ ID NO: 2866060 - DNA, 25 bp, Homo sapien
caagtaccgatgtcaagcctagcca

SEQ ID NO: 2866061 - DNA, 25 bp, Homo sapien
ggattgcaatgatagagcaacttgc

SEQ ID NO: 2866062 - DNA, 25 bp, Homo sapien
ccaagaagccctgagaaacaaattg

SEQ ID NO: 2866063 - DNA, 25 bp, Homo sapien
tgtgatgaacaactcaggacgtcag

SEQ ID NO: 2866064 - DNA, 25 bp, Homo sapien
gaatgtttcagtaacccaagaagcc

SEQ ID NO: 2866065 - DNA, 25 bp, Homo sapien
cagggagtgcatgggtcttaatagt

SEQ ID NO: 2866066 - DNA, 25 bp, Homo sapien
ttgtcaagatccttagggcaattga

SEQ ID NO: 2866067 - DNA, 25 bp, Homo sapien
ttcactcctaaacttctcgacaggg

SEQ ID NO: 2866068 - DNA, 25 bp, Homo sapien
caacaatcaacataacgtctgggca

SEQ ID NO: 2866069 - DNA, 25 bp, Homo sapien
gggtgctaaacagcaacgtgccact

SEQ ID NO: 2866070 - DNA, 25 bp, Homo sapien
caatcggcggagtcagatccacgcc

SEQ ID NO: 2866071 - DNA, 25 bp, Homo sapien
tggagacccggtaagtccccatcgc

SEQ ID NO: 2866072 - DNA, 25 bp, Homo sapien
acaccagagtccgttcagcttcagg

SEQ ID NO: 2866073 - DNA, 25 bp, Homo sapien
tttgaccctggacagtaggttgaca

SEQ ID NO: 2866074 - DNA, 25 bp, Homo sapien
atgtgtctccttttaaagcttgttt

SEQ ID NO: 2866075 - DNA, 25 bp, Homo sapien
taggttgacaggtatttcttcgttc

SEQ ID NO: 2866076 - DNA, 25 bp, Homo sapien
tttctcggatagctcttgtgtaccc

SEQ ID NO: 2866077 - DNA, 25 bp, Homo sapien
caaagccctcagcaattgatttttc

SEQ ID NO: 2866078 - DNA, 25 bp, Homo sapien
gagaattgagtgcagttattggcca

SEQ ID NO: 2866079 - DNA, 25 bp, Homo sapien
ttggccagacttattttgattctaa

SEQ ID NO: 2866080 - DNA, 25 bp, Homo sapien
taatagcatatgtagtatatccaaa

SEQ ID NO: 2866081 - DNA, 25 bp, Homo sapien
gcatttcatgttgcagtgcacttta

SEQ ID NO: 2866082 - DNA, 25 bp, Homo sapien
ttttgacaccacgatctcgcctggc

SEQ ID NO: 2866083 - DNA, 25 bp, Homo sapien
agcatttcatgttgcagtgcacttt

SEQ ID NO: 2866084 - DNA, 25 bp, Homo sapien
cctttttgacaccacgatctcgcct

SEQ ID NO: 2866085 - DNA, 25 bp, Homo sapien
tttcgcagaagccagataaggcatc

SEQ ID NO: 2866086 - DNA, 25 bp, Homo sapien
gcgcaagtcctttctaattctggct

SEQ ID NO: 2866087 - DNA, 25 bp, Homo sapien
ttcccagaggatattttatctggct

SEQ ID NO: 2866088 - DNA, 25 bp, Homo sapien
gaaacttgatgaagcgcaagtcctt

SEQ ID NO: 2866089 - DNA, 25 bp, Homo sapien
tttattagtcttggccttatttgct

SEQ ID NO: 2866090 - DNA, 25 bp, Homo sapien
aaaccgtcacgagatactcagccat

SEQ ID NO: 2866091 - DNA, 25 bp, Homo sapien
cagacttgcaaaccgtcacgagata

SEQ ID NO: 2866092 - DNA, 25 bp, Homo sapien
ggaatcttatgtccccagacttgca

SEQ ID NO: 2866093 - DNA, 25 bp, Homo sapien
tattaggcccactgaagcatttggt

SEQ ID NO: 2866094 - DNA, 25 bp, Homo sapien
gggactctaaggagctctactctcc

SEQ ID NO: 2866095 - DNA, 25 bp, Homo sapien
gacataatcatctctgaaatgccga

SEQ ID NO: 2866096 - DNA, 25 bp, Homo sapien
gggcggtgctatgcacatgtgcatt

SEQ ID NO: 2866097 - DNA, 25 bp, Homo sapien
tggagtttttgaccctgtgccatga

SEQ ID NO: 2866098 - DNA, 25 bp, Homo sapien
tgtgccatgatactggtctttaggg

SEQ ID NO: 2866099 - DNA, 25 bp, Homo sapien
taactctcatctttcaagtctcctt

SEQ ID NO: 2866100 - DNA, 25 bp, Homo sapien
ggccatgaagccagacatcccattt

SEQ ID NO: 2866101 - DNA, 25 bp, Homo sapien
ggagcctggcattgatctgtgtaga

SEQ ID NO: 2866102 - DNA, 25 bp, Homo sapien
gcgccatttccagccaagcagttca

SEQ ID NO: 2866103 - DNA, 25 bp, Homo sapien
tgtagactggtgaagcttcatctgc

SEQ ID NO: 2866104 - DNA, 25 bp, Homo sapien
gagtgacagtggttctgttctgaca

SEQ ID NO: 2866105 - DNA, 25 bp, Homo sapien
gatgtcatttgactcttcaggcccc

SEQ ID NO: 2866106 - DNA, 25 bp, Homo sapien
agctttcttctgttccgtccccatc

SEQ ID NO: 2866107 - DNA, 25 bp, Homo sapien
tcttcttgacataatagctttcttc

SEQ ID NO: 2866108 - DNA, 25 bp, Homo sapien
catttttgcccttcatcgttgatgt

SEQ ID NO: 2866109 - DNA, 25 bp, Homo sapien
tgtgttacgtatcgccagccactca

SEQ ID NO: 2866110 - DNA, 25 bp, Homo sapien
gattgtcgcacctatgccacctaca

SEQ ID NO: 2866111 - DNA, 25 bp, Homo sapien
caagggccagccatgaaatttaatt

SEQ ID NO: 2866112 - DNA, 25 bp, Homo sapien
tatccattagccttccgattgtcgc

SEQ ID NO: 2866113 - DNA, 25 bp, Homo sapien
tctgtcagcacagacgcttgtttcc

SEQ ID NO: 2866114 - DNA, 25 bp, Homo sapien
tagttgatgctacagtaagtgtgat

SEQ ID NO: 2866115 - DNA, 25 bp, Homo sapien
gcatagctctctcaagccataacat

SEQ ID NO: 2866116 - DNA, 25 bp, Homo sapien
tctaggatctcaggacaattaagaa

SEQ ID NO: 2866117 - DNA, 25 bp, Homo sapien
tacacacgagacagccaggcagttt

SEQ ID NO: 2866118 - DNA, 25 bp, Homo sapien
tgataaatcctcaggttccacccgg

SEQ ID NO: 2866119 - DNA, 25 bp, Homo sapien
ggagtccatatgctttacacacgag

SEQ ID NO: 2866120 - DNA, 25 bp, Homo sapien
aatttgatcctagctgaagttcctg

SEQ ID NO: 2866121 - DNA, 25 bp, Homo sapien
ctgtatgggcagagacctagtgcct

SEQ ID NO: 2866122 - DNA, 25 bp, Homo sapien
gagacctagtgcctagacctggagg

SEQ ID NO: 2866123 - DNA, 25 bp, Homo sapien
tatgggcagagacctagtgcctaga

SEQ ID NO: 2866124 - DNA, 25 bp, Homo sapien
gagggagatgtctgggctctctcac

SEQ ID NO: 2866125 - DNA, 25 bp, Homo sapien
catagaaacagacaagaggagcttg

SEQ ID NO: 2866126 - DNA, 25 bp, Homo sapien
agaaacagacaagaggagcttgttc

SEQ ID NO: 2866127 - DNA, 25 bp, Homo sapien
tcctccaccttcatagaaacagaca

SEQ ID NO: 2866128 - DNA, 25 bp, Homo sapien
agaggagcttgttccttcccttcat

SEQ ID NO: 2866129 - DNA, 25 bp, Homo sapien
cctgtctactataagtctttgtcca

SEQ ID NO: 2866130 - DNA, 25 bp, Homo sapien
ttctggtggccgcgtgccacgtgca

SEQ ID NO: 2866131 - DNA, 25 bp, Homo sapien
tagtcagtggtctcaccgatctgcc

SEQ ID NO: 2866132 - DNA, 25 bp, Homo sapien
gatctgcccctctttaacggggctg

SEQ ID NO: 2866133 - DNA, 25 bp, Homo sapien
cacgtgcagcctgcgtcttctttcc

SEQ ID NO: 2866134 - DNA, 25 bp, Homo sapien
gccacacactcgcagtgtcaacagc

SEQ ID NO: 2866135 - DNA, 25 bp, Homo sapien
acacactcgcagtgtcaacagcacc

SEQ ID NO: 2866136 - DNA, 25 bp, Homo sapien
cacacactcgcagtgtcaacagcac

SEQ ID NO: 2866137 - DNA, 25 bp, Homo sapien
acactcgcagtgtcaacagcaccca

SEQ ID NO: 2866138 - DNA, 25 bp, Homo sapien
gcagcagcgggttccaggagacaag

SEQ ID NO: 2866139 - DNA, 25 bp, Homo sapien
gagggacgctgccagtcggggagcc

SEQ ID NO: 2866140 - DNA, 25 bp, Homo sapien
tcggggagccccacgcatcctgaag

SEQ ID NO: 2866141 - DNA, 25 bp, Homo sapien
tgaagctgacaggagccccatttgt

SEQ ID NO: 2866142 - DNA, 25 bp, Homo sapien
agggatttgtgggtgtaacttccat

SEQ ID NO: 2866143 - DNA, 25 bp, Homo sapien
ctggtctctgaatgagctctgccat

SEQ ID NO: 2866144 - DNA, 25 bp, Homo sapien
gattgactctcttgtcaggttgatc

SEQ ID NO: 2866145 - DNA, 25 bp, Homo sapien
cacagaaggttctaagtggcaccca

SEQ ID NO: 2866146 - DNA, 25 bp, Homo sapien
gctctctgggaagtattgctgacat

SEQ ID NO: 2866147 - DNA, 25 bp, Homo sapien
atgtttgccctctttgacaagcagg

SEQ ID NO: 2866148 - DNA, 25 bp, Homo sapien
cagactccaaacgtctccctgtcaa

SEQ ID NO: 2866149 - DNA, 25 bp, Homo sapien
ttgtgttccctgcagataattgttt

SEQ ID NO: 2866150 - DNA, 25 bp, Homo sapien
taattgtgttccctgcagataattg

SEQ ID NO: 2866151 - DNA, 25 bp, Homo sapien
aacgtctccctgtcaacagcccttt

SEQ ID NO: 2866152 - DNA, 25 bp, Homo sapien
gaaacgatgatgtggcaacaatgcc

SEQ ID NO: 2866153 - DNA, 25 bp, Homo sapien
caaaggtgaggttacagctgctgct

SEQ ID NO: 2866154 - DNA, 25 bp, Homo sapien
acagctgctgcttgccctcttgagg

SEQ ID NO: 2866155 - DNA, 25 bp, Homo sapien
gaaaattctgagctctcgccagctg

SEQ ID NO: 2866156 - DNA, 25 bp, Homo sapien
aataggtacaaatttggactcagag

SEQ ID NO: 2866157 - DNA, 25 bp, Homo sapien
ggagctttccttcaagcagtcattt

SEQ ID NO: 2866158 - DNA, 25 bp, Homo sapien
gaggttggagctttccttcaagcag

SEQ ID NO: 2866159 - DNA, 25 bp, Homo sapien
ccctgtgcatctttgggcaggaggt

SEQ ID NO: 2866160 - DNA, 25 bp, Homo sapien
tgcccccagaggtgcacattagtca

SEQ ID NO: 2866161 - DNA, 25 bp, Homo sapien
ctgcccccagaggtgcacattagtc

SEQ ID NO: 2866162 - DNA, 25 bp, Homo sapien
gcccccagaggtgcacattagtcat

SEQ ID NO: 2866163 - DNA, 25 bp, Homo sapien
gggattagataagccttgagaaaga

SEQ ID NO: 2866164 - DNA, 25 bp, Homo sapien
tctgggattagataagccttgagaa

SEQ ID NO: 2866165 - DNA, 25 bp, Homo sapien
tagatctgggattagataagccttg

SEQ ID NO: 2866166 - DNA, 25 bp, Homo sapien
ctgtagatctgggattagataagcc

SEQ ID NO: 2866167 - DNA, 25 bp, Homo sapien
attggtggtcctggaacagctggca

SEQ ID NO: 2866168 - DNA, 25 bp, Homo sapien
tattggtggtcctggaacagctggc

SEQ ID NO: 2866169 - DNA, 25 bp, Homo sapien
catattggtggtcctggaacagctg

SEQ ID NO: 2866170 - DNA, 25 bp, Homo sapien
ttggtggtcctggaacagctggcat

SEQ ID NO: 2866171 - DNA, 25 bp, Homo sapien
tggagacaagttcccttgcacatct

SEQ ID NO: 2866172 - DNA, 25 bp, Homo sapien
ggagacaagttcccttgcacatctc

SEQ ID NO: 2866173 - DNA, 25 bp, Homo sapien
cctggagacaagttcccttgcacat

SEQ ID NO: 2866174 - DNA, 25 bp, Homo sapien
tgctataagaagcactggggctcct

SEQ ID NO: 2866175 - DNA, 25 bp, Homo sapien
tagaacactcgtgggtgctgatttc

SEQ ID NO: 2866176 - DNA, 25 bp, Homo sapien
tcaggtttccacagtagattagaac

SEQ ID NO: 2866177 - DNA, 25 bp, Homo sapien
cacagtagattagaacactcgtggg

SEQ ID NO: 2866178 - DNA, 25 bp, Homo sapien
tagattagaacactcgtgggtgctg

SEQ ID NO: 2866179 - DNA, 25 bp, Homo sapien
cactgatcggcattattgaggtaac

SEQ ID NO: 2866180 - DNA, 25 bp, Homo sapien
gaatctgggcatcgctgagcataac

SEQ ID NO: 2866181 - DNA, 25 bp, Homo sapien
tgagcataacttgcctctcaaccag

SEQ ID NO: 2866182 - DNA, 25 bp, Homo sapien
ggaaaccagaatcatggaaaagcca

SEQ ID NO: 2866183 - DNA, 25 bp, Homo sapien
cacagttaaacacggaggcagagaa

SEQ ID NO: 2866184 - DNA, 25 bp, Homo sapien
ggagtaaaattacacctgctgccaa

SEQ ID NO: 2866185 - DNA, 25 bp, Homo sapien
ctaggtagcattagtggcagtcccc

SEQ ID NO: 2866186 - DNA, 25 bp, Homo sapien
tcttcacaacaccatatgagctagg

SEQ ID NO: 2866187 - DNA, 25 bp, Homo sapien
gaagctgatagaacgaaatgtgtgc

SEQ ID NO: 2866188 - DNA, 25 bp, Homo sapien
cagtgttcattctcacaactagagc

SEQ ID NO: 2866189 - DNA, 25 bp, Homo sapien
aaagtaaactttaggccagctgtgg

SEQ ID NO: 2866190 - DNA, 25 bp, Homo sapien
taagtggcctcttacgaattccagt

SEQ ID NO: 2866191 - DNA, 25 bp, Homo sapien
tgcagctgggccgattgcatttagt

SEQ ID NO: 2866192 - DNA, 25 bp, Homo sapien
aagtgactcagatactgtaagtagg

SEQ ID NO: 2866193 - DNA, 25 bp, Homo sapien
tggttcttatagtggcccgagcagt

SEQ ID NO: 2866194 - DNA, 25 bp, Homo sapien
tgatgagctgctacagtctggaaat

SEQ ID NO: 2866195 - DNA, 25 bp, Homo sapien
cctataagaaattatcttgaccggg

SEQ ID NO: 2866196 - DNA, 25 bp, Homo sapien
tgtcctataagaaattatcttgacc

SEQ ID NO: 2866197 - DNA, 25 bp, Homo sapien
catcttttcctgggtgatcctgtcc

SEQ ID NO: 2866198 - DNA, 25 bp, Homo sapien
agaaattatcttgaccgggcacggt

SEQ ID NO: 2866199 - DNA, 25 bp, Homo sapien
aaggaagttacagccattcctctgg

SEQ ID NO: 2866200 - DNA, 25 bp, Homo sapien
tctggctgacagcaatttgtagaca

SEQ ID NO: 2866201 - DNA, 25 bp, Homo sapien
ctcggcaccaaggaagttacagcca

SEQ ID NO: 2866202 - DNA, 25 bp, Homo sapien
ttgcagttggacattttcgaggttg

SEQ ID NO: 2866203 - DNA, 25 bp, Homo sapien
tcagctcaagtttacgttcagatgt

SEQ ID NO: 2866204 - DNA, 25 bp, Homo sapien
ctatgtgttcgatgctttcagctca

SEQ ID NO: 2866205 - DNA, 25 bp, Homo sapien
tgtgttcgatgctttcagctcaagt

SEQ ID NO: 2866206 - DNA, 25 bp, Homo sapien
tttcagctcaagtttacgttcagat

SEQ ID NO: 2866207 - DNA, 25 bp, Homo sapien
tcaagtaaggtgatgatacatccac

SEQ ID NO: 2866208 - DNA, 25 bp, Homo sapien
gatccacaaagccatatctgagccc

SEQ ID NO: 2866209 - DNA, 25 bp, Homo sapien
ccgtgaaaacgggagaaatatgtct

SEQ ID NO: 2866210 - DNA, 25 bp, Homo sapien
ccaacaggcctgatttggaagccgt

SEQ ID NO: 2866211 - DNA, 25 bp, Homo sapien
tgcctgacacgggcctctgcagctg

SEQ ID NO: 2866212 - DNA, 25 bp, Homo sapien
gctctgttggtaagccacaaggttt

SEQ ID NO: 2866213 - DNA, 25 bp, Homo sapien
tgcagctgcgatcccaactggatgg

SEQ ID NO: 2866214 - DNA, 25 bp, Homo sapien
tggatgggtcccgactgctctgttg

SEQ ID NO: 2866215 - DNA, 25 bp, Homo sapien
attggtaggcaaacggcaggcaccg

SEQ ID NO: 2866216 - DNA, 25 bp, Homo sapien
gctgcattgagcacgggacctgtaa

SEQ ID NO: 2866217 - DNA, 25 bp, Homo sapien
gcaggcaccgaaacaggcacatatt

SEQ ID NO: 2866218 - DNA, 25 bp, Homo sapien
tatagtgatggtcgcgcatggcaac

SEQ ID NO: 2866219 - DNA, 25 bp, Homo sapien
atttgggtggttatacagagataaa

SEQ ID NO: 2866220 - DNA, 25 bp, Homo sapien
tgcaatctctcgatgacgctccagg

SEQ ID NO: 2866221 - DNA, 25 bp, Homo sapien
acgaccatagcactgggaccctgct

SEQ ID NO: 2866222 - DNA, 25 bp, Homo sapien
ttccatctgattgggcatccgaggg

SEQ ID NO: 2866223 - DNA, 25 bp, Homo sapien
ccctgctgggacagtctgttggcag

SEQ ID NO: 2866224 - DNA, 25 bp, Homo sapien
cctgtatcgcactgggcccttctat

SEQ ID NO: 2866225 - DNA, 25 bp, Homo sapien
gccgtgcgatgatccgatgtgctga

SEQ ID NO: 2866226 - DNA, 25 bp, Homo sapien
tcagaagtagacagggtcacagtcc

SEQ ID NO: 2866227 - DNA, 25 bp, Homo sapien
cccaaggtaaaaccagccgtgcgat

SEQ ID NO: 2866228 - DNA, 25 bp, Homo sapien
agggactcctacagcactgccccta

SEQ ID NO: 2866229 - DNA, 25 bp, Homo sapien
actgcccctactgccaggatccatg

SEQ ID NO: 2866230 - DNA, 25 bp, Homo sapien
cattggtgctcacgctactgaagtc

SEQ ID NO: 2866231 - DNA, 25 bp, Homo sapien
gccaaggttgtgttcccccgtgcca

SEQ ID NO: 2866232 - DNA, 25 bp, Homo sapien
gattgagactgggacagctttggct

SEQ ID NO: 2866233 - DNA, 25 bp, Homo sapien
gaagcatcatttgcctggattgaga

SEQ ID NO: 2866234 - DNA, 25 bp, Homo sapien
ccagggcaggattagtattgagtga

SEQ ID NO: 2866235 - DNA, 25 bp, Homo sapien
tggcttctcttgtttgatgccccat

SEQ ID NO: 2866236 - DNA, 25 bp, Homo sapien
ggcgcagaactttgttgaaagggta

SEQ ID NO: 2866237 - DNA, 25 bp, Homo sapien
actttgttgaaagggtattccagtg

SEQ ID NO: 2866238 - DNA, 25 bp, Homo sapien
gcctgggcgcagaactttgttgaaa

SEQ ID NO: 2866239 - DNA, 25 bp, Homo sapien
ttgaaagggtattccagtggtaaga

SEQ ID NO: 2866240 - DNA, 25 bp, Homo sapien
aatgcagccttaaggtctggagtcg

SEQ ID NO: 2866241 - DNA, 25 bp, Homo sapien
caagaattagatgaagctggccgga

SEQ ID NO: 2866242 - DNA, 25 bp, Homo sapien
tattgccaagaattagatgaagctg

SEQ ID NO: 2866243 - DNA, 25 bp, Homo sapien
tgaagctggccggatgaatgcagcc

SEQ ID NO: 2866244 - DNA, 25 bp, Homo sapien
caatggttctctccgcgtctccact

SEQ ID NO: 2866245 - DNA, 25 bp, Homo sapien
gagctgctgtgactcaatggttctc

SEQ ID NO: 2866246 - DNA, 25 bp, Homo sapien
tcaatggttctctccgcgtctccac

SEQ ID NO: 2866247 - DNA, 25 bp, Homo sapien
gctgctgtgactcaatggttctctc

SEQ ID NO: 2866248 - DNA, 25 bp, Homo sapien
ctgatgcggcacgatgctcccctgt

SEQ ID NO: 2866249 - DNA, 25 bp, Homo sapien
tcctgatgcggcacgatgctcccct

SEQ ID NO: 2866250 - DNA, 25 bp, Homo sapien
gatgcggcacgatgctcccctgtca

SEQ ID NO: 2866251 - DNA, 25 bp, Homo sapien
tctgtcctgatgcggcacgatgctc

SEQ ID NO: 2866252 - DNA, 25 bp, Homo sapien
ctatttccatactggtaggtaccac

SEQ ID NO: 2866253 - DNA, 25 bp, Homo sapien
tcaaagtcgtgctttgtccctattt

SEQ ID NO: 2866254 - DNA, 25 bp, Homo sapien
tgctttgtccctatttccatactgg

SEQ ID NO: 2866255 - DNA, 25 bp, Homo sapien
tccatactggtaggtaccacattca

SEQ ID NO: 2866256 - DNA, 25 bp, Homo sapien
tttctctgcaactggggacggcttt

SEQ ID NO: 2866257 - DNA, 25 bp, Homo sapien
ctgagctcattttgttcctgcagaa

SEQ ID NO: 2866258 - DNA, 25 bp, Homo sapien
ttaaagctgaaggtagctggaggtt

SEQ ID NO: 2866259 - DNA, 25 bp, Homo sapien
tgcaactggggacggctttccctcc

SEQ ID NO: 2866260 - DNA, 25 bp, Homo sapien
tggtgctttacttgcctgctggact

SEQ ID NO: 2866261 - DNA, 25 bp, Homo sapien
actggtgctttacttgcctgctgga

SEQ ID NO: 2866262 - DNA, 25 bp, Homo sapien
gaggagaggtgtgtagaccaaacaa

SEQ ID NO: 2866263 - DNA, 25 bp, Homo sapien
gaggtgtgtagaccaaacaagcctt

SEQ ID NO: 2866264 - DNA, 25 bp, Homo sapien
gatgtgcattgaactccccgctttg

SEQ ID NO: 2866265 - DNA, 25 bp, Homo sapien
gggatgtgcattgaactccccgctt

SEQ ID NO: 2866266 - DNA, 25 bp, Homo sapien
tgtgcattgaactccccgctttggg

SEQ ID NO: 2866267 - DNA, 25 bp, Homo sapien
gtgcattgaactccccgctttggga

SEQ ID NO: 2866268 - DNA, 25 bp, Homo sapien
ttgctactgcatgcgttgcctgctc

SEQ ID NO: 2866269 - DNA, 25 bp, Homo sapien
agcggctgccctgcggccttgctcc

SEQ ID NO: 2866270 - DNA, 25 bp, Homo sapien
tgtcttgctactgcatgcgttgcct

SEQ ID NO: 2866271 - DNA, 25 bp, Homo sapien
gggatcccctgcatctgtgacccca

SEQ ID NO: 2866272 - DNA, 25 bp, Homo sapien
aacggtaacgggagatgcacactgg

SEQ ID NO: 2866273 - DNA, 25 bp, Homo sapien
ggtcagaacagctggcagtgtgtct

SEQ ID NO: 2866274 - DNA, 25 bp, Homo sapien
cagtgtgtctgccagaccggctgga

SEQ ID NO: 2866275 - DNA, 25 bp, Homo sapien
gcccggatgcaacgttgccatggaa

SEQ ID NO: 2866276 - DNA, 25 bp, Homo sapien
ttctcattcccagcccctaagagca

SEQ ID NO: 2866277 - DNA, 25 bp, Homo sapien
caaggataatgagggaggtgagcac

SEQ ID NO: 2866278 - DNA, 25 bp, Homo sapien
gtgagcacgcgtcttctcattccca

SEQ ID NO: 2866279 - DNA, 25 bp, Homo sapien
cagagcgttgtccatgcttttgtca

SEQ ID NO: 2866280 - DNA, 25 bp, Homo sapien
tcggaaagacctcccctgcactatt

SEQ ID NO: 2866281 - DNA, 25 bp, Homo sapien
tcccctgcactattgtcaaatgttg

SEQ ID NO: 2866282 - DNA, 25 bp, Homo sapien
tttcttcggaaagacctcccctgca

SEQ ID NO: 2866283 - DNA, 25 bp, Homo sapien
cactattgtcaaatgttgttgtaac

SEQ ID NO: 2866284 - DNA, 25 bp, Homo sapien
ctcccattcattcattttctctttc

SEQ ID NO: 2866285 - DNA, 25 bp, Homo sapien
gatgtggtttacagagctcccattc

SEQ ID NO: 2866286 - DNA, 25 bp, Homo sapien
agctcccattcattcattttctctt

SEQ ID NO: 2866287 - DNA, 25 bp, Homo sapien
ctgatgtggtttacagagctcccat

SEQ ID NO: 2866288 - DNA, 25 bp, Homo sapien
tgtcagcagctgaaagcataacaaa

SEQ ID NO: 2866289 - DNA, 25 bp, Homo sapien
tggtgtcagcagctgaaagcataac

SEQ ID NO: 2866290 - DNA, 25 bp, Homo sapien
gtgtcagcagctgaaagcataacaa

SEQ ID NO: 2866291 - DNA, 25 bp, Homo sapien
cttccccgttcctggtgtcagcagc

SEQ ID NO: 2866292 - DNA, 25 bp, Homo sapien
ccgccactcatgtaacctcaggaag

SEQ ID NO: 2866293 - DNA, 25 bp, Homo sapien
ccccagtcatgtgaccgccactcat

SEQ ID NO: 2866294 - DNA, 25 bp, Homo sapien
tgtgaccgccactcatgtaacctca

SEQ ID NO: 2866295 - DNA, 25 bp, Homo sapien
catgtaacctcaggaagcaatggct

SEQ ID NO: 2866296 - DNA, 25 bp, Homo sapien
ctgaagggacaagccacacctgccc

SEQ ID NO: 2866297 - DNA, 25 bp, Homo sapien
gaagggacaagccacacctgcccat

SEQ ID NO: 2866298 - DNA, 25 bp, Homo sapien
gacaagccacacctgcccatggcca

SEQ ID NO: 2866299 - DNA, 25 bp, Homo sapien
agggacaagccacacctgcccatgg

SEQ ID NO: 2866300 - DNA, 25 bp, Homo sapien
taaactaggagagatgtcttttccc

SEQ ID NO: 2866301 - DNA, 25 bp, Homo sapien
ctcgttccgtttcaacacagcactg

SEQ ID NO: 2866302 - DNA, 25 bp, Homo sapien
aagatgttttgcaccttctctttca

SEQ ID NO: 2866303 - DNA, 25 bp, Homo sapien
aactaggagagatgtcttttcccct

SEQ ID NO: 2866304 - DNA, 25 bp, Homo sapien
ccttggttcactccaaaggaggctg

SEQ ID NO: 2866305 - DNA, 25 bp, Homo sapien
gcaaggctcggttccttggttcact

SEQ ID NO: 2866306 - DNA, 25 bp, Homo sapien
gccttgggttaagagacgtggatcc

SEQ ID NO: 2866307 - DNA, 25 bp, Homo sapien
ggttaagagacgtggatcctggcct

SEQ ID NO: 2866308 - DNA, 25 bp, Homo sapien
gcataagtgcttgaacaacctccgc

SEQ ID NO: 2866309 - DNA, 25 bp, Homo sapien
cctccggttttggatttggaatgca

SEQ ID NO: 2866310 - DNA, 25 bp, Homo sapien
tgcttaaaaataccatcggcgttag

SEQ ID NO: 2866311 - DNA, 25 bp, Homo sapien
cagaaacacgaattttgcagcatgc

SEQ ID NO: 2866312 - DNA, 25 bp, Homo sapien
aatagcaaggtgttagcaagcagca

SEQ ID NO: 2866313 - DNA, 25 bp, Homo sapien
gctggactttaaatagcaaggtgtt

SEQ ID NO: 2866314 - DNA, 25 bp, Homo sapien
ccagagaaaactgcgaggtgttccc

SEQ ID NO: 2866315 - DNA, 25 bp, Homo sapien
cagggtatgtcatcatggagctctc

SEQ ID NO: 2866316 - DNA, 25 bp, Homo sapien
tccacaggaagctcgtagaatagcc

SEQ ID NO: 2866317 - DNA, 25 bp, Homo sapien
ccaactcctctaattccacaggaag

SEQ ID NO: 2866318 - DNA, 25 bp, Homo sapien
agaatagccaagtccgggcccttct

SEQ ID NO: 2866319 - DNA, 25 bp, Homo sapien
gaatgacaccgtttagaaattagta

SEQ ID NO: 2866320 - DNA, 25 bp, Homo sapien
tgacctgtcagtgggctctttgaaa

SEQ ID NO: 2866321 - DNA, 25 bp, Homo sapien
gctgcactggccgtcggctcagttc

SEQ ID NO: 2866322 - DNA, 25 bp, Homo sapien
aggaacagagcagggtagaccaggc

SEQ ID NO: 2866323 - DNA, 25 bp, Homo sapien
ttgaaatggaggttgatgaggaaca

SEQ ID NO: 2866324 - DNA, 25 bp, Homo sapien
ttgatgggtgtccactgccttgtct

SEQ ID NO: 2866325 - DNA, 25 bp, Homo sapien
tgttgatgggtgtccactgccttgt

SEQ ID NO: 2866326 - DNA, 25 bp, Homo sapien
gttgatgggtgtccactgccttgtc

SEQ ID NO: 2866327 - DNA, 25 bp, Homo sapien
aagtcgctttcccataaccgctgag

SEQ ID NO: 2866328 - DNA, 25 bp, Homo sapien
tagcagagacgagcttcaaacccaa

SEQ ID NO: 2866329 - DNA, 25 bp, Homo sapien
tatgagtagactagaaccagagctg

SEQ ID NO: 2866330 - DNA, 25 bp, Homo sapien
tgttgaatggagacatcggccacct

SEQ ID NO: 2866331 - DNA, 25 bp, Homo sapien
cattgtggggttcaaatgtataggg

SEQ ID NO: 2866332 - DNA, 25 bp, Homo sapien
gtgatcacaaattctccattgtggg

SEQ ID NO: 2866333 - DNA, 25 bp, Homo sapien
taaatccagtgatcacaaattctcc

SEQ ID NO: 2866334 - DNA, 25 bp, Homo sapien
cataatgtagataaatccagtgatc

SEQ ID NO: 2866335 - DNA, 25 bp, Homo sapien
tggtcaagaccaacactgcatagcc

SEQ ID NO: 2866336 - DNA, 25 bp, Homo sapien
ttaaaaatcagacataacttcacct

SEQ ID NO: 2866337 - DNA, 25 bp, Homo sapien
agggcagtgtggtcaagaccaacac

SEQ ID NO: 2866338 - DNA, 25 bp, Homo sapien
caacactgcatagccttagccaaaa

SEQ ID NO: 2866339 - DNA, 25 bp, Homo sapien
taccagaaagctcctaggtcttagg

SEQ ID NO: 2866340 - DNA, 25 bp, Homo sapien
gatttagtttcatccctgagggaac

SEQ ID NO: 2866341 - DNA, 25 bp, Homo sapien
gatttccccagatgcaggccactgg

SEQ ID NO: 2866342 - DNA, 25 bp, Homo sapien
tttagaaattagcaaagcgcttggc

SEQ ID NO: 2866343 - DNA, 25 bp, Homo sapien
tggaaaccctatcatgcctgctaag

SEQ ID NO: 2866344 - DNA, 25 bp, Homo sapien
gaataagctgccatgcaattcatga

SEQ ID NO: 2866345 - DNA, 25 bp, Homo sapien
tgaaggctggaatgggcccctttaa

SEQ ID NO: 2866346 - DNA, 25 bp, Homo sapien
aagagcctctttagtcatgttcaac

SEQ ID NO: 2866347 - DNA, 25 bp, Homo sapien
gctagcatgagtgcaagaattttgc

SEQ ID NO: 2866348 - DNA, 25 bp, Homo sapien
gcatgagtgcaagaattttgctcca

SEQ ID NO: 2866349 - DNA, 25 bp, Homo sapien
ttgccctcttcagctagcatgagtg

SEQ ID NO: 2866350 - DNA, 25 bp, Homo sapien
tcttcagctagcatgagtgcaagaa

SEQ ID NO: 2866351 - DNA, 25 bp, Homo sapien
cagagaatgtacttgtcagcaggag

SEQ ID NO: 2866352 - DNA, 25 bp, Homo sapien
cctttggcccatgagattctagtcc

SEQ ID NO: 2866353 - DNA, 25 bp, Homo sapien
ggaggcagccgaatcttcttaaaag

SEQ ID NO: 2866354 - DNA, 25 bp, Homo sapien
tgtaagtgtccccaaactacagtgg

SEQ ID NO: 2866355 - DNA, 25 bp, Homo sapien
ttcgtcaaaattccatacagcaaaa

SEQ ID NO: 2866356 - DNA, 25 bp, Homo sapien
gaagattcgtcaaaattccatacag

SEQ ID NO: 2866357 - DNA, 25 bp, Homo sapien
aagattcgtcaaaattccatacagc

SEQ ID NO: 2866358 - DNA, 25 bp, Homo sapien
gattcgtcaaaattccatacagcaa

SEQ ID NO: 2866359 - DNA, 25 bp, Homo sapien
gaggagccctattgatttagcagac

SEQ ID NO: 2866360 - DNA, 25 bp, Homo sapien
gaatctcccatcaaggaacatctag

SEQ ID NO: 2866361 - DNA, 25 bp, Homo sapien
tgatagcggtggatcctgagctcac

SEQ ID NO: 2866362 - DNA, 25 bp, Homo sapien
gaaacccatgttgtcgatcctgatg

SEQ ID NO: 2866363 - DNA, 25 bp, Homo sapien
agtttctcagatccctgaaagcctg

SEQ ID NO: 2866364 - DNA, 25 bp, Homo sapien
ttctcagatccctgaaagcctgagc

SEQ ID NO: 2866365 - DNA, 25 bp, Homo sapien
tctcagatccctgaaagcctgagcc

SEQ ID NO: 2866366 - DNA, 25 bp, Homo sapien
tttctcagatccctgaaagcctgag

SEQ ID NO: 2866367 - DNA, 25 bp, Homo sapien
tgaccaacgtgacgcgccccacggg

SEQ ID NO: 2866368 - DNA, 25 bp, Homo sapien
cacgaaggccgcctgaccaacgtga

SEQ ID NO: 2866369 - DNA, 25 bp, Homo sapien
cctgaccaacgtgacgcgccccacg

SEQ ID NO: 2866370 - DNA, 25 bp, Homo sapien
ctgaccaacgtgacgcgccccacgg

SEQ ID NO: 2866371 - DNA, 25 bp, Homo sapien
accctgagggtgatgtatgctaatg

SEQ ID NO: 2866372 - DNA, 25 bp, Homo sapien
ccctgcctatggagaatggcttaaa

SEQ ID NO: 2866373 - DNA, 25 bp, Homo sapien
gatgggtatcagcttccacagcgag

SEQ ID NO: 2866374 - DNA, 25 bp, Homo sapien
taaactccattgagtggcgcctaag

SEQ ID NO: 2866375 - DNA, 25 bp, Homo sapien
gagccaggcccctccatattaagat

SEQ ID NO: 2866376 - DNA, 25 bp, Homo sapien
cctctgctggtatctgcaaagttgc

SEQ ID NO: 2866377 - DNA, 25 bp, Homo sapien
gagagtagaaggctcagcatcgcca

SEQ ID NO: 2866378 - DNA, 25 bp, Homo sapien
taggttagcagcagtctcccaggtt

SEQ ID NO: 2866379 - DNA, 25 bp, Homo sapien
tctcatgggcgtaacacatcgcagt

SEQ ID NO: 2866380 - DNA, 25 bp, Homo sapien
taggccacggccaggtaacaaatta

SEQ ID NO: 2866381 - DNA, 25 bp, Homo sapien
catcgggcggctcttcttaatgagg

SEQ ID NO: 2866382 - DNA, 25 bp, Homo sapien
catcgcagtccaaatgcatcgggcg

SEQ ID NO: 2866383 - DNA, 25 bp, Homo sapien
agagtttgggtgattcacgagagct

SEQ ID NO: 2866384 - DNA, 25 bp, Homo sapien
gtttgggtgattcacgagagcttaa

SEQ ID NO: 2866385 - DNA, 25 bp, Homo sapien
gattcacgagagcttaataagcagg

SEQ ID NO: 2866386 - DNA, 25 bp, Homo sapien
ggtgattcacgagagcttaataagc

SEQ ID NO: 2866387 - DNA, 25 bp, Homo sapien
gtttaaatagccgaccatggcctgg

SEQ ID NO: 2866388 - DNA, 25 bp, Homo sapien
caggctaacatttatcctgagggca

SEQ ID NO: 2866389 - DNA, 25 bp, Homo sapien
gagccctacctggacttcattagca

SEQ ID NO: 2866390 - DNA, 25 bp, Homo sapien
attagaaagctctctccagcctggg

SEQ ID NO: 2866391 - DNA, 25 bp, Homo sapien
tctccccatgatcatgtaaactggg

SEQ ID NO: 2866392 - DNA, 25 bp, Homo sapien
ggctctccccatgatcatgtaaact

SEQ ID NO: 2866393 - DNA, 25 bp, Homo sapien
acaggctctccccatgatcatgtaa

SEQ ID NO: 2866394 - DNA, 25 bp, Homo sapien
caggctctccccatgatcatgtaaa

SEQ ID NO: 2866395 - DNA, 25 bp, Homo sapien
tctctgagatgaccttatagaaaca

SEQ ID NO: 2866396 - DNA, 25 bp, Homo sapien
gctcttatgtaagatagtttctatg

SEQ ID NO: 2866397 - DNA, 25 bp, Homo sapien
ggagaatctgtagtcctgggttcag

SEQ ID NO: 2866398 - DNA, 25 bp, Homo sapien
tctagttatgggactcctgtagacc

SEQ ID NO: 2866399 - DNA, 25 bp, Homo sapien
gttattgagcatggaggtaaacctc

SEQ ID NO: 2866400 - DNA, 25 bp, Homo sapien
cccagtggcagtcatttctaagcaa

SEQ ID NO: 2866401 - DNA, 25 bp, Homo sapien
caggccctcaattcttaaagtatca

SEQ ID NO: 2866402 - DNA, 25 bp, Homo sapien
taatcagggtatgtgtttcacacag

SEQ ID NO: 2866403 - DNA, 25 bp, Homo sapien
tgcttcagagccaacgtcagtatat

SEQ ID NO: 2866404 - DNA, 25 bp, Homo sapien
ggacgccaggtgttctacaagtatg

SEQ ID NO: 2866405 - DNA, 25 bp, Homo sapien
tacaacccgcctgaaagcaatgctt

SEQ ID NO: 2866406 - DNA, 25 bp, Homo sapien
gactacagtgatgacggccgcatcc

SEQ ID NO: 2866407 - DNA, 25 bp, Homo sapien
tcttggtttggtgggagcttcgtgc

SEQ ID NO: 2866408 - DNA, 25 bp, Homo sapien
ttcgtgcggactggccactgtgttt

SEQ ID NO: 2866409 - DNA, 25 bp, Homo sapien
acagcttccagtgggtcatgaggac

SEQ ID NO: 2866410 - DNA, 25 bp, Homo sapien
gaggaccgctcaaatcttggtttgg

SEQ ID NO: 2866411 - DNA, 25 bp, Homo sapien
tctactttcagagtcaccaagcaca

SEQ ID NO: 2866412 - DNA, 25 bp, Homo sapien
agactagccatgtgaacaagggaca

SEQ ID NO: 2866413 - DNA, 25 bp, Homo sapien
gcttttcagaaagggtgacatctgg

SEQ ID NO: 2866414 - DNA, 25 bp, Homo sapien
acaagggacatctgttcaggcattc

SEQ ID NO: 2866415 - DNA, 25 bp, Homo sapien
ggaataacagtcaggctaagaagct

SEQ ID NO: 2866416 - DNA, 25 bp, Homo sapien
gcaggggattggagctcagcgggaa

SEQ ID NO: 2866417 - DNA, 25 bp, Homo sapien
caggctaagaagctgggtattctcc

SEQ ID NO: 2866418 - DNA, 25 bp, Homo sapien
cagagatgaggtttgttggagggaa

SEQ ID NO: 2866419 - DNA, 25 bp, Homo sapien
ggaaagttctgattcagcacgctca

SEQ ID NO: 2866420 - DNA, 25 bp, Homo sapien
caagtggcgactttccaggaaagtt

SEQ ID NO: 2866421 - DNA, 25 bp, Homo sapien
ctttccaggaaagttctgattcagc

SEQ ID NO: 2866422 - DNA, 25 bp, Homo sapien
tgattcagcacgctcacacccaagc

SEQ ID NO: 2866423 - DNA, 25 bp, Homo sapien
cggaaagcaaggctgcaccagctgc

SEQ ID NO: 2866424 - DNA, 25 bp, Homo sapien
tgcacgccgccctcggaaagcaagg

SEQ ID NO: 2866425 - DNA, 25 bp, Homo sapien
tgggcagcctgtaaggcgccattcc

SEQ ID NO: 2866426 - DNA, 25 bp, Homo sapien
ctcctcccggcaaatgttgggtttg

SEQ ID NO: 2866427 - DNA, 25 bp, Homo sapien
agtgaattgactgccccaacacccc

SEQ ID NO: 2866428 - DNA, 25 bp, Homo sapien
aactacctcagttgacttcatgagc

SEQ ID NO: 2866429 - DNA, 25 bp, Homo sapien
cttctcctcttcaactacctcagtt

SEQ ID NO: 2866430 - DNA, 25 bp, Homo sapien
tgaggtctctaccccgattcttctc

SEQ ID NO: 2866431 - DNA, 25 bp, Homo sapien
gtgtgcttccaagtgccggccgatt

SEQ ID NO: 2866432 - DNA, 25 bp, Homo sapien
gaacaaactccaggcagtggaccgt

SEQ ID NO: 2866433 - DNA, 25 bp, Homo sapien
agttcctggccacgctgccagtggg

SEQ ID NO: 2866434 - DNA, 25 bp, Homo sapien
gtggaccgtgtccacactgtgtgct

SEQ ID NO: 2866435 - DNA, 25 bp, Homo sapien
taatttaagcgcctgggtaccatgg

SEQ ID NO: 2866436 - DNA, 25 bp, Homo sapien
ggtaccatggcgatgcaagctctat

SEQ ID NO: 2866437 - DNA, 25 bp, Homo sapien
gagatgcagtctcatgccgacagtc

SEQ ID NO: 2866438 - DNA, 25 bp, Homo sapien
tactaaactgtaagctccacgggac

SEQ ID NO: 2866439 - DNA, 25 bp, Homo sapien
gcagcgcggttacctgcaccgcccg

SEQ ID NO: 2866440 - DNA, 25 bp, Homo sapien
gccctaggacccgccctcgaggcgc

SEQ ID NO: 2866441 - DNA, 25 bp, Homo sapien
cgcctcccgtttccggggcagcgcg

SEQ ID NO: 2866442 - DNA, 25 bp, Homo sapien
cggggcagcgcggttacctgcaccg

SEQ ID NO: 2866443 - DNA, 25 bp, Homo sapien
accagctggatcgacccgcgggaca

SEQ ID NO: 2866444 - DNA, 25 bp, Homo sapien
cagcgcttgggaagatgccccggcc

SEQ ID NO: 2866445 - DNA, 25 bp, Homo sapien
tcgacggcaaggtctactacataga

SEQ ID NO: 2866446 - DNA, 25 bp, Homo sapien
tacatagaccacacgaaccgcacca

SEQ ID NO: 2866447 - DNA, 25 bp, Homo sapien
actgggaggccgaaattcctgagga

SEQ ID NO: 2866448 - DNA, 25 bp, Homo sapien
aaaagtgatttcttagccaccaagg

SEQ ID NO: 2866449 - DNA, 25 bp, Homo sapien
caaaatagcgtctctggttaccaac

SEQ ID NO: 2866450 - DNA, 25 bp, Homo sapien
agctgttttgtgtgctggccggcca

SEQ ID NO: 2866451 - DNA, 25 bp, Homo sapien
accattctggtgtggtcaggtcatg

SEQ ID NO: 2866452 - DNA, 25 bp, Homo sapien
ccattctggtgtggtcaggtcatgg

SEQ ID NO: 2866453 - DNA, 25 bp, Homo sapien
tgaccattctggtgtggtcaggtca

SEQ ID NO: 2866454 - DNA, 25 bp, Homo sapien
ttctggtgtggtcaggtcatgggca

SEQ ID NO: 2866455 - DNA, 25 bp, Homo sapien
catgacgtgtatcaggagctctctc

SEQ ID NO: 2866456 - DNA, 25 bp, Homo sapien
tctgggcaaaaaactcccgtcttgc

SEQ ID NO: 2866457 - DNA, 25 bp, Homo sapien
gaagtggcctggtgacatccctatc

SEQ ID NO: 2866458 - DNA, 25 bp, Homo sapien
cctaatgtcaggtggctgtccatga

SEQ ID NO: 2866459 - DNA, 25 bp, Homo sapien
gaaactggatacagtgacattttgt

SEQ ID NO: 2866460 - DNA, 25 bp, Homo sapien
ctcgaatccgtttcagagtgagata

SEQ ID NO: 2866461 - DNA, 25 bp, Homo sapien
ttgctgctgcctcgaatccgtttca

SEQ ID NO: 2866462 - DNA, 25 bp, Homo sapien
tttgttattagaccttccccagcag

SEQ ID NO: 2866463 - DNA, 25 bp, Homo sapien
caggcgttcactgttgtgtgcggag

SEQ ID NO: 2866464 - DNA, 25 bp, Homo sapien
gcaggcgttcactgttgtgtgcgga

SEQ ID NO: 2866465 - DNA, 25 bp, Homo sapien
gggcaggcgttcactgttgtgtgcg

SEQ ID NO: 2866466 - DNA, 25 bp, Homo sapien
ggcgttcactgttgtgtgcggagaa

SEQ ID NO: 2866467 - DNA, 25 bp, Homo sapien
tgactttccccagtcggctgcctgc

SEQ ID NO: 2866468 - DNA, 25 bp, Homo sapien
actttccccagtcggctgcctgctg

SEQ ID NO: 2866469 - DNA, 25 bp, Homo sapien
gactttccccagtcggctgcctgct

SEQ ID NO: 2866470 - DNA, 25 bp, Homo sapien
ttgttggattcgtccctggggtagc

SEQ ID NO: 2866471 - DNA, 25 bp, Homo sapien
cttgttggattcgtccctggggtag

SEQ ID NO: 2866472 - DNA, 25 bp, Homo sapien
tggttacttgttggattcgtccctg

SEQ ID NO: 2866473 - DNA, 25 bp, Homo sapien
agtggtggttacttgttggattcgt

SEQ ID NO: 2866474 - DNA, 25 bp, Homo sapien
tatatgaatcagtaaactcccctcc

SEQ ID NO: 2866475 - DNA, 25 bp, Homo sapien
cattagagctcgcaaaccaccttgg

SEQ ID NO: 2866476 - DNA, 25 bp, Homo sapien
accttggcagcactcattatatgaa

SEQ ID NO: 2866477 - DNA, 25 bp, Homo sapien
gaagcgactcttgccagtgagctgg

SEQ ID NO: 2866478 - DNA, 25 bp, Homo sapien
gccaggactcccctgcgctgagctg

SEQ ID NO: 2866479 - DNA, 25 bp, Homo sapien
tccctacttcaactccaggaagtgc

SEQ ID NO: 2866480 - DNA, 25 bp, Homo sapien
ctttcattagaatgtatagaatttg

SEQ ID NO: 2866481 - DNA, 25 bp, Homo sapien
ttctctttcattagaatgtatagaa

SEQ ID NO: 2866482 - DNA, 25 bp, Homo sapien
tgaagcctccggtgcccatttctgg

SEQ ID NO: 2866483 - DNA, 25 bp, Homo sapien
tttctgtgtctagacaagcaccgca

SEQ ID NO: 2866484 - DNA, 25 bp, Homo sapien
gcaccgcaaacaacaaatcgaaaat

SEQ ID NO: 2866485 - DNA, 25 bp, Homo sapien
aaaattgaatccagtcctggtctca

SEQ ID NO: 2866486 - DNA, 25 bp, Homo sapien
ggaaaaaagcacaggaatctcaggc

SEQ ID NO: 2866487 - DNA, 25 bp, Homo sapien
aatctcaggcaaggaatagcggccc

SEQ ID NO: 2866488 - DNA, 25 bp, Homo sapien
tgtgaccctcggcaagctgcttaat

SEQ ID NO: 2866489 - DNA, 25 bp, Homo sapien
cctcatttatgagtcagttctgcct

SEQ ID NO: 2866490 - DNA, 25 bp, Homo sapien
tgggagacagaggttacagtgaccg

SEQ ID NO: 2866491 - DNA, 25 bp, Homo sapien
ttgcaccattacactctagcctggg

SEQ ID NO: 2866492 - DNA, 25 bp, Homo sapien
gagacagaggttacagtgaccgaga

SEQ ID NO: 2866493 - DNA, 25 bp, Homo sapien
tgcaccattacactctagcctgggt

SEQ ID NO: 2866494 - DNA, 25 bp, Homo sapien
catctcccagactcaagtaattctc

SEQ ID NO: 2866495 - DNA, 25 bp, Homo sapien
ggcatgatctctgcaacctccatct

SEQ ID NO: 2866496 - DNA, 25 bp, Homo sapien
caatggcatgatctctgcaacctcc

SEQ ID NO: 2866497 - DNA, 25 bp, Homo sapien
tccatctcccagactcaagtaattc

SEQ ID NO: 2866498 - DNA, 25 bp, Homo sapien
gaggccgagatgggtgggtcacctg

SEQ ID NO: 2866499 - DNA, 25 bp, Homo sapien
cgagatgggtgggtcacctgagttc

SEQ ID NO: 2866500 - DNA, 25 bp, Homo sapien
aggccgagatgggtgggtcacctga

SEQ ID NO: 2866501 - DNA, 25 bp, Homo sapien
gccgagatgggtgggtcacctgagt

SEQ ID NO: 2866502 - DNA, 25 bp, Homo sapien
cctttgactcgctggcaagggcaga

SEQ ID NO: 2866503 - DNA, 25 bp, Homo sapien
agaagcaagctaacctccatggcct

SEQ ID NO: 2866504 - DNA, 25 bp, Homo sapien
tgcatagcattgagaccacgtgtgt

SEQ ID NO: 2866505 - DNA, 25 bp, Homo sapien
gagagctttctggaacctgccaagc

SEQ ID NO: 2866506 - DNA, 25 bp, Homo sapien
gccatgctcgctgagattggcaggg

SEQ ID NO: 2866507 - DNA, 25 bp, Homo sapien
gggccatgctcgctgagattggcag

SEQ ID NO: 2866508 - DNA, 25 bp, Homo sapien
cttggggccatgctcgctgagattg

SEQ ID NO: 2866509 - DNA, 25 bp, Homo sapien
tggggccatgctcgctgagattggc

SEQ ID NO: 2866510 - DNA, 25 bp, Homo sapien
tggtggatggcatcattgtcagtct

SEQ ID NO: 2866511 - DNA, 25 bp, Homo sapien
ctggagtggtggatggcatcattgt

SEQ ID NO: 2866512 - DNA, 25 bp, Homo sapien
agtggtggatggcatcattgtcagt

SEQ ID NO: 2866513 - DNA, 25 bp, Homo sapien
ggtggatggcatcattgtcagtctc

SEQ ID NO: 2866514 - DNA, 25 bp, Homo sapien
tttttgagacactaggaagctggag

SEQ ID NO: 2866515 - DNA, 25 bp, Homo sapien
gaaatgggtttgcaattatggtcct

SEQ ID NO: 2866516 - DNA, 25 bp, Homo sapien
gtttcatgcccaattggcaagttgg

SEQ ID NO: 2866517 - DNA, 25 bp, Homo sapien
gagtgagattgtggctttttgagac

SEQ ID NO: 2866518 - DNA, 25 bp, Homo sapien
cactgagctctgcactggtgtggct

SEQ ID NO: 2866519 - DNA, 25 bp, Homo sapien
tctgaagtgctatctgtccagaaac

SEQ ID NO: 2866520 - DNA, 25 bp, Homo sapien
ctctgtgacttttgcaacctgtaga

SEQ ID NO: 2866521 - DNA, 25 bp, Homo sapien
tttgcaacctgtagaggctgctctg

SEQ ID NO: 2866522 - DNA, 25 bp, Homo sapien
ctggatatgtgggccccacaaaacc

SEQ ID NO: 2866523 - DNA, 25 bp, Homo sapien
gagaaactcagctgtaggtgatttc

SEQ ID NO: 2866524 - DNA, 25 bp, Homo sapien
gcctgtgccccagaactccttgttg

SEQ ID NO: 2866525 - DNA, 25 bp, Homo sapien
gaactccttgttgtatgtttaacac

SEQ ID NO: 2866526 - DNA, 25 bp, Homo sapien
tgtttaacactgactccaccgtagg

SEQ ID NO: 2866527 - DNA, 25 bp, Homo sapien
tagggaagaaagacgaaattcgtca

SEQ ID NO: 2866528 - DNA, 25 bp, Homo sapien
tttacttgtgtgcttggtattgtca

SEQ ID NO: 2866529 - DNA, 25 bp, Homo sapien
cttgtgtgcttggtattgtcactca

SEQ ID NO: 2866530 - DNA, 25 bp, Homo sapien
tacttgtgtgcttggtattgtcact

SEQ ID NO: 2866531 - DNA, 25 bp, Homo sapien
acttgtgtgcttggtattgtcactc

SEQ ID NO: 2866532 - DNA, 25 bp, Homo sapien
cttcccctagccagtggacttcggt

SEQ ID NO: 2866533 - DNA, 25 bp, Homo sapien
cccttcccctagccagtggacttcg

SEQ ID NO: 2866534 - DNA, 25 bp, Homo sapien
ttcccctagccagtggacttcggta

SEQ ID NO: 2866535 - DNA, 25 bp, Homo sapien
tcccctagccagtggacttcggtac

SEQ ID NO: 2866536 - DNA, 25 bp, Homo sapien
tccagagcgctggttccaagggcat

SEQ ID NO: 2866537 - DNA, 25 bp, Homo sapien
caccagcatgtgtaatgggaggaaa

SEQ ID NO: 2866538 - DNA, 25 bp, Homo sapien
gcctgtgtcagacaccagcatgtgt

SEQ ID NO: 2866539 - DNA, 25 bp, Homo sapien
acagcttccatgtccagagcgctgg

SEQ ID NO: 2866540 - DNA, 25 bp, Homo sapien
gaacagaccccatactgtggacgga

SEQ ID NO: 2866541 - DNA, 25 bp, Homo sapien
caagtatctgggcactaggcaggga

SEQ ID NO: 2866542 - DNA, 25 bp, Homo sapien
tcttgagcaaagaaccggaggatgc

SEQ ID NO: 2866543 - DNA, 25 bp, Homo sapien
tcccaaagggtagatgaagagccat

SEQ ID NO: 2866544 - DNA, 25 bp, Homo sapien
caattcccgggtctgacttgccagt

SEQ ID NO: 2866545 - DNA, 25 bp, Homo sapien
tctcagggcccgttctttggtcatt

SEQ ID NO: 2866546 - DNA, 25 bp, Homo sapien
ttcagtcttcccagggagggttctc

SEQ ID NO: 2866547 - DNA, 25 bp, Homo sapien
acctttgaatgtttgtcatggaccc

SEQ ID NO: 2866548 - DNA, 25 bp, Homo sapien
catggcagaatcctgccgcatgatt

SEQ ID NO: 2866549 - DNA, 25 bp, Homo sapien
gattcattacgtcgctgaagagcgt

SEQ ID NO: 2866550 - DNA, 25 bp, Homo sapien
gccgcatgatttctgccgactagat

SEQ ID NO: 2866551 - DNA, 25 bp, Homo sapien
ctgaagagcgtgtttattgtaaggc

SEQ ID NO: 2866552 - DNA, 25 bp, Homo sapien
acacttcttgagtcctgttcagttc

SEQ ID NO: 2866553 - DNA, 25 bp, Homo sapien
gcacacttcttgagtcctgttcagt

SEQ ID NO: 2866554 - DNA, 25 bp, Homo sapien
cacacttcttgagtcctgttcagtt

SEQ ID NO: 2866555 - DNA, 25 bp, Homo sapien
gaggccttgtttgctacccagtggg

SEQ ID NO: 2866556 - DNA, 25 bp, Homo sapien
tcgagtagagctatccaagggctgc

SEQ ID NO: 2866557 - DNA, 25 bp, Homo sapien
gaagggaattggctcttgtcgcgct

SEQ ID NO: 2866558 - DNA, 25 bp, Homo sapien
taccagctgggaataagggaagccc

SEQ ID NO: 2866559 - DNA, 25 bp, Homo sapien
caacctcgtctctccatgaatggga

SEQ ID NO: 2866560 - DNA, 25 bp, Homo sapien
ctcgtctctccatgaatgggagctt

SEQ ID NO: 2866561 - DNA, 25 bp, Homo sapien
tcccaacctcgtctctccatgaatg

SEQ ID NO: 2866562 - DNA, 25 bp, Homo sapien
ccatgaatgggagcttcatagttct

SEQ ID NO: 2866563 - DNA, 25 bp, Homo sapien
cctcttggcatttgttccggagaga

SEQ ID NO: 2866564 - DNA, 25 bp, Homo sapien
ccggagagaatcttgctgtccagat

SEQ ID NO: 2866565 - DNA, 25 bp, Homo sapien
tgtaagttgcatagccttccatagg

SEQ ID NO: 2866566 - DNA, 25 bp, Homo sapien
tgcatagccttccataggcacttcc

SEQ ID NO: 2866567 - DNA, 25 bp, Homo sapien
cctgctgctgcagctatgtgttcac

SEQ ID NO: 2866568 - DNA, 25 bp, Homo sapien
tcctgctgctgcagctatgtgttca

SEQ ID NO: 2866569 - DNA, 25 bp, Homo sapien
ttatcctgctgctgcagctatgtgt

SEQ ID NO: 2866570 - DNA, 25 bp, Homo sapien
tatcctgctgctgcagctatgtgtt

SEQ ID NO: 2866571 - DNA, 25 bp, Homo sapien
gctgtggtgtaaaacttttggatct

SEQ ID NO: 2866572 - DNA, 25 bp, Homo sapien
cttgccaggtacaccaaaccgctca

SEQ ID NO: 2866573 - DNA, 25 bp, Homo sapien
aggtacaccaaaccgctcacctttg

SEQ ID NO: 2866574 - DNA, 25 bp, Homo sapien
ctgtaggctgatggagtctgtttct

SEQ ID NO: 2866575 - DNA, 25 bp, Homo sapien
gaccacaacaccagtaagttcccga

SEQ ID NO: 2866576 - DNA, 25 bp, Homo sapien
cacaacaccagtaagttcccgacgg

SEQ ID NO: 2866577 - DNA, 25 bp, Homo sapien
ccacaacaccagtaagttcccgacg

SEQ ID NO: 2866578 - DNA, 25 bp, Homo sapien
tagaccacaacaccagtaagttccc

SEQ ID NO: 2866579 - DNA, 25 bp, Homo sapien
cattctctaccgactgaaccagttg

SEQ ID NO: 2866580 - DNA, 25 bp, Homo sapien
tcattctctaccgactgaaccagtt

SEQ ID NO: 2866581 - DNA, 25 bp, Homo sapien
gtctcattctctaccgactgaacca

SEQ ID NO: 2866582 - DNA, 25 bp, Homo sapien
tctcattctctaccgactgaaccag

SEQ ID NO: 2866583 - DNA, 25 bp, Homo sapien
tagaagtcttctttagcaccacgac

SEQ ID NO: 2866584 - DNA, 25 bp, Homo sapien
gcagcagctgattagccctgatcca

SEQ ID NO: 2866585 - DNA, 25 bp, Homo sapien
tcatcgatggtaggaatctctccgc

SEQ ID NO: 2866586 - DNA, 25 bp, Homo sapien
taaggcctgtgtctatatgcccgca

SEQ ID NO: 2866587 - DNA, 25 bp, Homo sapien
taacctagtacgatggttcccagaa

SEQ ID NO: 2866588 - DNA, 25 bp, Homo sapien
gttctctacaggcaaaaaggcaatg

SEQ ID NO: 2866589 - DNA, 25 bp, Homo sapien
gtttcccatgaatcacctatgctag

SEQ ID NO: 2866590 - DNA, 25 bp, Homo sapien
ccagtgcaactaagagaagggttcc

SEQ ID NO: 2866591 - DNA, 25 bp, Homo sapien
taaagcagtattgagttgctgctct

SEQ ID NO: 2866592 - DNA, 25 bp, Homo sapien
atttaaatgaactaaagcagtattg

SEQ ID NO: 2866593 - DNA, 25 bp, Homo sapien
cacgctggtctcagatgcccagtga

SEQ ID NO: 2866594 - DNA, 25 bp, Homo sapien
gacgtgtttttatgtggctgcccaa

SEQ ID NO: 2866595 - DNA, 25 bp, Homo sapien
taatcctaataggacgtcccgcact

SEQ ID NO: 2866596 - DNA, 25 bp, Homo sapien
cagcctagtctatgtgggtgacagg

SEQ ID NO: 2866597 - DNA, 25 bp, Homo sapien
acaagtctggccacacagtgtaaga

SEQ ID NO: 2866598 - DNA, 25 bp, Homo sapien
tgtaagagacggagttattactcaa

SEQ ID NO: 2866599 - DNA, 25 bp, Homo sapien
agtttaattgacacaagtctggcca

SEQ ID NO: 2866600 - DNA, 25 bp, Homo sapien
gccacacagtgtaagagacggagtt

SEQ ID NO: 2866601 - DNA, 25 bp, Homo sapien
taaatacctagaaagtgtcacctga

SEQ ID NO: 2866602 - DNA, 25 bp, Homo sapien
gcacttgccgatactcttctagatg

SEQ ID NO: 2866603 - DNA, 25 bp, Homo sapien
tagtattgcaagttatcccagaatc

SEQ ID NO: 2866604 - DNA, 25 bp, Homo sapien
taaggtctattgcacgtctggccaa

SEQ ID NO: 2866605 - DNA, 25 bp, Homo sapien
cctggtgctgactaaaccctaaagc

SEQ ID NO: 2866606 - DNA, 25 bp, Homo sapien
taaagcctctgcgttgcggccttgg

SEQ ID NO: 2866607 - DNA, 25 bp, Homo sapien
acgggtgtgatgcaatcgcgccaca

SEQ ID NO: 2866608 - DNA, 25 bp, Homo sapien
gccattggtggtgccgagttattct

SEQ ID NO: 2866609 - DNA, 25 bp, Homo sapien
cagcaccatgatgtctgccagcttc

SEQ ID NO: 2866610 - DNA, 25 bp, Homo sapien
gagaacaggcggaatagaactccca

SEQ ID NO: 2866611 - DNA, 25 bp, Homo sapien
gggccatgtgtccacagcgtcagca

SEQ ID NO: 2866612 - DNA, 25 bp, Homo sapien
cagcttctccctcgctcagatgcct

SEQ ID NO: 2866613 - DNA, 25 bp, Homo sapien
tacaaattgcctagaataaaacagg

SEQ ID NO: 2866614 - DNA, 25 bp, Homo sapien
gttctgctatatatacccgcccata

SEQ ID NO: 2866615 - DNA, 25 bp, Homo sapien
tgaaacaaccgtaaatccacatgca

SEQ ID NO: 2866616 - DNA, 25 bp, Homo sapien
cccgcccatatgaaagtatcacagt

SEQ ID NO: 2866617 - DNA, 25 bp, Homo sapien
agtgcggtggcacagatctaggctc

SEQ ID NO: 2866618 - DNA, 25 bp, Homo sapien
cggtggcacagatctaggctcagtg

SEQ ID NO: 2866619 - DNA, 25 bp, Homo sapien
aattaaaaggcaatcttctcgcggg

SEQ ID NO: 2866620 - DNA, 25 bp, Homo sapien
tgagccaggtacaacatcgatgaaa

SEQ ID NO: 2866621 - DNA, 25 bp, Homo sapien
tgtgacaactattgactgagccagg

SEQ ID NO: 2866622 - DNA, 25 bp, Homo sapien
gattttgcccagctaaaggccaacg

SEQ ID NO: 2866623 - DNA, 25 bp, Homo sapien
tgcaaactgaagagtgtggccacag

SEQ ID NO: 2866624 - DNA, 25 bp, Homo sapien
ctattgcaaactgaagagtgtggcc

SEQ ID NO: 2866625 - DNA, 25 bp, Homo sapien
caaactgaagagtgtggccacagta

SEQ ID NO: 2866626 - DNA, 25 bp, Homo sapien
aactgaagagtgtggccacagtatt

SEQ ID NO: 2866627 - DNA, 25 bp, Homo sapien
ccagggaacggagtctggtccaact

SEQ ID NO: 2866628 - DNA, 25 bp, Homo sapien
ggaacggagtctggtccaacttcag

SEQ ID NO: 2866629 - DNA, 25 bp, Homo sapien
cggagtctggtccaacttcagagaa

SEQ ID NO: 2866630 - DNA, 25 bp, Homo sapien
cagggaacggagtctggtccaactt

SEQ ID NO: 2866631 - DNA, 25 bp, Homo sapien
tatagattggcttctcaacacctgc

SEQ ID NO: 2866632 - DNA, 25 bp, Homo sapien
ccctacaattgctgaaggatctcat

SEQ ID NO: 2866633 - DNA, 25 bp, Homo sapien
tctaaagagcgccagtgtagtgact

SEQ ID NO: 2866634 - DNA, 25 bp, Homo sapien
gcaaaaacttacgacttccagggca

SEQ ID NO: 2866635 - DNA, 25 bp, Homo sapien
tggtaaagcccagtatcactgggca

SEQ ID NO: 2866636 - DNA, 25 bp, Homo sapien
tctccagaataccaacgacgtccag

SEQ ID NO: 2866637 - DNA, 25 bp, Homo sapien
gaccaaagatctggatctccagaat

SEQ ID NO: 2866638 - DNA, 25 bp, Homo sapien
ccaagatgaactccagaccaaagat

SEQ ID NO: 2866639 - DNA, 25 bp, Homo sapien
gcagagtccgcattacaagccagta

SEQ ID NO: 2866640 - DNA, 25 bp, Homo sapien
taaggcaaccagtaatagccaacaa

SEQ ID NO: 2866641 - DNA, 25 bp, Homo sapien
ccagtaatctagtggcccaggatca

SEQ ID NO: 2866642 - DNA, 25 bp, Homo sapien
ccaactcagcttgtctgcagaatcc

SEQ ID NO: 2866643 - DNA, 25 bp, Homo sapien
tggttgacaaagagtgcaacagaaa

SEQ ID NO: 2866644 - DNA, 25 bp, Homo sapien
acagaaaggagccaatcatatcacc

SEQ ID NO: 2866645 - DNA, 25 bp, Homo sapien
gccaaagtggttgacaaagagtgca

SEQ ID NO: 2866646 - DNA, 25 bp, Homo sapien
tgagcaaaacctcagagggagagtc

SEQ ID NO: 2866647 - DNA, 25 bp, Homo sapien
agtgtaactgagaaagtcctgtatg

SEQ ID NO: 2866648 - DNA, 25 bp, Homo sapien
tgtatgactgtctcaggagcactga

SEQ ID NO: 2866649 - DNA, 25 bp, Homo sapien
tttcaaagtgtaactgagaaagtcc

SEQ ID NO: 2866650 - DNA, 25 bp, Homo sapien
agtcctgtatgactgtctcaggagc

SEQ ID NO: 2866651 - DNA, 25 bp, Homo sapien
tatgaacaacggcaacaaaaccacg

SEQ ID NO: 2866652 - DNA, 25 bp, Homo sapien
tacctgctagagtgagcaaccatct

SEQ ID NO: 2866653 - DNA, 25 bp, Homo sapien
tcagtcagtagccattttaaaaccc

SEQ ID NO: 2866654 - DNA, 25 bp, Homo sapien
tacctgtggcaaatactgtattagc

SEQ ID NO: 2866655 - DNA, 25 bp, Homo sapien
actccctgtaagctcactgtggtaa

SEQ ID NO: 2866656 - DNA, 25 bp, Homo sapien
tgaaggctgccaaagattataattt

SEQ ID NO: 2866657 - DNA, 25 bp, Homo sapien
tattaagatctcgagtaactccctg

SEQ ID NO: 2866658 - DNA, 25 bp, Homo sapien
caaagctctatgttcttaacggtgc

SEQ ID NO: 2866659 - DNA, 25 bp, Homo sapien
tacatatgggtagtggctactgcac

SEQ ID NO: 2866660 - DNA, 25 bp, Homo sapien
ctactgcactggacatcgaagttct

SEQ ID NO: 2866661 - DNA, 25 bp, Homo sapien
caaatgaacactatcactgtcgttg

SEQ ID NO: 2866662 - DNA, 25 bp, Homo sapien
ttggactaaccatatttcaaatgct

SEQ ID NO: 2866663 - DNA, 25 bp, Homo sapien
tcttaaggttgaaggcagagggctc

SEQ ID NO: 2866664 - DNA, 25 bp, Homo sapien
cctctgctgagtggaatttgcattc

SEQ ID NO: 2866665 - DNA, 25 bp, Homo sapien
taagacacaacttcctacatagagg

SEQ ID NO: 2866666 - DNA, 25 bp, Homo sapien
tactgataaagttgcctaagacaca

SEQ ID NO: 2866667 - DNA, 25 bp, Homo sapien
gaaagtgcaacatcaccaaacgtgc

SEQ ID NO: 2866668 - DNA, 25 bp, Homo sapien
tggttcccagtgacaaacaatgcag

SEQ ID NO: 2866669 - DNA, 25 bp, Homo sapien
catacagtactgcaatgttggctac

SEQ ID NO: 2866670 - DNA, 25 bp, Homo sapien
taataaggcatggtagaggttttcc

SEQ ID NO: 2866671 - DNA, 25 bp, Homo sapien
gtgcaccaactgctccaaagtaacc

SEQ ID NO: 2866672 - DNA, 25 bp, Homo sapien
gcccaagaagtgcaccaactgctcc

SEQ ID NO: 2866673 - DNA, 25 bp, Homo sapien
tggcagcccaagaagtgcaccaact

SEQ ID NO: 2866674 - DNA, 25 bp, Homo sapien
ttagctgaaatttggcagcccaaga

SEQ ID NO: 2866675 - DNA, 25 bp, Homo sapien
aacctaccaatttctgcgttgttag

SEQ ID NO: 2866676 - DNA, 25 bp, Homo sapien
ttatgtagtacagcttttaagttag

SEQ ID NO: 2866677 - DNA, 25 bp, Homo sapien
gaatctgtattcttgatgtctacac

SEQ ID NO: 2866678 - DNA, 25 bp, Homo sapien
ccaatttctgcgttgttagctatta

SEQ ID NO: 2866679 - DNA, 25 bp, Homo sapien
gaccttttgaccagtaatccagtgc

SEQ ID NO: 2866680 - DNA, 25 bp, Homo sapien
ttgaccagtaatccagtgcatatgc

SEQ ID NO: 2866681 - DNA, 25 bp, Homo sapien
cttttgaccagtaatccagtgcata

SEQ ID NO: 2866682 - DNA, 25 bp, Homo sapien
accttttgaccagtaatccagtgca

SEQ ID NO: 2866683 - DNA, 25 bp, Homo sapien
tcagaggatttgcatatttgttctc

SEQ ID NO: 2866684 - DNA, 25 bp, Homo sapien
taaaaaactgatgagaccaagttct

SEQ ID NO: 2866685 - DNA, 25 bp, Homo sapien
gcaatttgtcctctaccactctctg

SEQ ID NO: 2866686 - DNA, 25 bp, Homo sapien
tagtaactccatcaaccaactaaca

SEQ ID NO: 2866687 - DNA, 25 bp, Homo sapien
gctgcttgatccatatgcaacaagg

SEQ ID NO: 2866688 - DNA, 25 bp, Homo sapien
ttgatccatatgcaacaaggcagca

SEQ ID NO: 2866689 - DNA, 25 bp, Homo sapien
acaatgctgcttgatccatatgcaa

SEQ ID NO: 2866690 - DNA, 25 bp, Homo sapien
caatgccttcatagccctgtacaat

SEQ ID NO: 2866691 - DNA, 25 bp, Homo sapien
ttgccagatcttctttactaacaga

SEQ ID NO: 2866692 - DNA, 25 bp, Homo sapien
gcacacattcgtgccacagaaccaa

SEQ ID NO: 2866693 - DNA, 25 bp, Homo sapien
taactaaagtagctcttgccagatc

SEQ ID NO: 2866694 - DNA, 25 bp, Homo sapien
gattctcgcttctccttataaatca

SEQ ID NO: 2866695 - DNA, 25 bp, Homo sapien
cataaatatcacggaccagcttgtc

SEQ ID NO: 2866696 - DNA, 25 bp, Homo sapien
ataaatatcacggaccagcttgtca

SEQ ID NO: 2866697 - DNA, 25 bp, Homo sapien
tccataaatatcacggaccagcttg

SEQ ID NO: 2866698 - DNA, 25 bp, Homo sapien
cctccataaatatcacggaccagct

SEQ ID NO: 2866699 - DNA, 25 bp, Homo sapien
ttaaccgaagaaggcaatagcagtg

SEQ ID NO: 2866700 - DNA, 25 bp, Homo sapien
tggcatagagaattacaacagaggt

SEQ ID NO: 2866701 - DNA, 25 bp, Homo sapien
tagaacactgttgcttccaagtaaa

SEQ ID NO: 2866702 - DNA, 25 bp, Homo sapien
cagtgtacaattctttggcatagag

SEQ ID NO: 2866703 - DNA, 25 bp, Homo sapien
cggcttgtccattgaaactgacaga

SEQ ID NO: 2866704 - DNA, 25 bp, Homo sapien
gtccattgaaactgacagagtctat

SEQ ID NO: 2866705 - DNA, 25 bp, Homo sapien
ttagcaaaataatagcactcggctt

SEQ ID NO: 2866706 - DNA, 25 bp, Homo sapien
aatagcactcggcttgtccattgaa

SEQ ID NO: 2866707 - DNA, 25 bp, Homo sapien
cccatttgacacaggaacatggcag

SEQ ID NO: 2866708 - DNA, 25 bp, Homo sapien
gtaacagattttcattcaggtgtcc

SEQ ID NO: 2866709 - DNA, 25 bp, Homo sapien
gaagatggcaaactgctaacagcac

SEQ ID NO: 2866710 - DNA, 25 bp, Homo sapien
acaaatttcagtggtcctaaacaga

SEQ ID NO: 2866711 - DNA, 25 bp, Homo sapien
catatgccacgttagaagtcaaata

SEQ ID NO: 2866712 - DNA, 25 bp, Homo sapien
gatccatatgccacgttagaagtca

SEQ ID NO: 2866713 - DNA, 25 bp, Homo sapien
ggtggatccatatgccacgttagaa

SEQ ID NO: 2866714 - DNA, 25 bp, Homo sapien
atgccggtggatccatatgccacgt

SEQ ID NO: 2866715 - DNA, 25 bp, Homo sapien
caccgcgctcggcccttcaaagttt

SEQ ID NO: 2866716 - DNA, 25 bp, Homo sapien
ccaccgcgctcggcccttcaaagtt

SEQ ID NO: 2866717 - DNA, 25 bp, Homo sapien
agggtttcttggcatctttgatctt

SEQ ID NO: 2866718 - DNA, 25 bp, Homo sapien
gtttcttggcatctttgatcttcat

SEQ ID NO: 2866719 - DNA, 25 bp, Homo sapien
ggtttcttggcatctttgatcttca

SEQ ID NO: 2866720 - DNA, 25 bp, Homo sapien
gggtttcttggcatctttgatcttc

SEQ ID NO: 2866721 - DNA, 25 bp, Homo sapien
ctccgatccggggcactgagagcag

SEQ ID NO: 2866722 - DNA, 25 bp, Homo sapien
gcctccgatccggggcactgagagc

SEQ ID NO: 2866723 - DNA, 25 bp, Homo sapien
gggcgatggacggcctccgatccgg

SEQ ID NO: 2866724 - DNA, 25 bp, Homo sapien
ggcgtcggcccgaggggcgatggac

SEQ ID NO: 2866725 - DNA, 25 bp, Homo sapien
ctccggaggtggctgggccgcgcgg

SEQ ID NO: 2866726 - DNA, 25 bp, Homo sapien
ccggaggtggctgggccgcgcggcg

SEQ ID NO: 2866727 - DNA, 25 bp, Homo sapien
ggaggtggctgggccgcgcggcgag

SEQ ID NO: 2866728 - DNA, 25 bp, Homo sapien
gactccggaggtggctgggccgcgc

SEQ ID NO: 2866729 - DNA, 25 bp, Homo sapien
ccgggaccgagcaagctggggaagg

SEQ ID NO: 2866730 - DNA, 25 bp, Homo sapien
aggagatgcccggcccagggggcgg

SEQ ID NO: 2866731 - DNA, 25 bp, Homo sapien
ggagatgcccggcccagggggcggc

SEQ ID NO: 2866732 - DNA, 25 bp, Homo sapien
tggccgggaccgagcaagctgggga

SEQ ID NO: 2866733 - DNA, 25 bp, Homo sapien
gcagccgctccaaacaaaaggcccc

SEQ ID NO: 2866734 - DNA, 25 bp, Homo sapien
cagccgctccaaacaaaaggccccg

SEQ ID NO: 2866735 - DNA, 25 bp, Homo sapien
cgcagccgctccaaacaaaaggccc

SEQ ID NO: 2866736 - DNA, 25 bp, Homo sapien
cgccgccgcactgagaaatagcccg

SEQ ID NO: 2866737 - DNA, 25 bp, Homo sapien
ttccgcccggctgctggggattgta

SEQ ID NO: 2866738 - DNA, 25 bp, Homo sapien
gcactgagaaatagcccgcccaggc

SEQ ID NO: 2866739 - DNA, 25 bp, Homo sapien
aggccgaacgcccacgtgacgcgag

SEQ ID NO: 2866740 - DNA, 25 bp, Homo sapien
ccaagattcgcatttttgacctggg

SEQ ID NO: 2866741 - DNA, 25 bp, Homo sapien
tggaggctgcccgaatttgtgccaa

SEQ ID NO: 2866742 - DNA, 25 bp, Homo sapien
gatggcttccatatccgggtgcggc

SEQ ID NO: 2866743 - DNA, 25 bp, Homo sapien
agaacaagccgtacccaaagtctcg

SEQ ID NO: 2866744 - DNA, 25 bp, Homo sapien
cactcatgtgcaaatataaggatgg

SEQ ID NO: 2866745 - DNA, 25 bp, Homo sapien
gatggttgttgggtcagcctgggcc

SEQ ID NO: 2866746 - DNA, 25 bp, Homo sapien
ttcctgctgtccatcacataacctg

SEQ ID NO: 2866747 - DNA, 25 bp, Homo sapien
taaggatggttgttgggtcagcctg

SEQ ID NO: 2866748 - DNA, 25 bp, Homo sapien
ctgtagaactagtggggatgacacc

SEQ ID NO: 2866749 - DNA, 25 bp, Homo sapien
gcagaggcccaaagggacaggtaaa

SEQ ID NO: 2866750 - DNA, 25 bp, Homo sapien
caggtgtgatgaagactgagaggcc

SEQ ID NO: 2866751 - DNA, 25 bp, Homo sapien
gatgacaccatgtgggacatcaggg

SEQ ID NO: 2866752 - DNA, 25 bp, Homo sapien
ggctcaggaatcttaacaattgtgg

SEQ ID NO: 2866753 - DNA, 25 bp, Homo sapien
aaaaagaaattgagccaagggctca

SEQ ID NO: 2866754 - DNA, 25 bp, Homo sapien
acacattcttaacaagatctctcaa

SEQ ID NO: 2866755 - DNA, 25 bp, Homo sapien
tctcatactgcaagagtgggagcaa

SEQ ID NO: 2866756 - DNA, 25 bp, Homo sapien
cagatggctaaatcgttgacagaca

SEQ ID NO: 2866757 - DNA, 25 bp, Homo sapien
aaaggcattgagttttgccctagca

SEQ ID NO: 2866758 - DNA, 25 bp, Homo sapien
cagacaatcttagtcctgtggaagc

SEQ ID NO: 2866759 - DNA, 25 bp, Homo sapien
tctagagtctctggagtttactatc

SEQ ID NO: 2866760 - DNA, 25 bp, Homo sapien
atgtgaggcacctggaactcaaggg

SEQ ID NO: 2866761 - DNA, 25 bp, Homo sapien
aggcacctggaactcaaggggtatc

SEQ ID NO: 2866762 - DNA, 25 bp, Homo sapien
ctagatgtccaggccatcgtggcag

SEQ ID NO: 2866763 - DNA, 25 bp, Homo sapien
gatgtccaggccatcgtggcagctg

SEQ ID NO: 2866764 - DNA, 25 bp, Homo sapien
ataaaactatacaagggcatctttg

SEQ ID NO: 2866765 - DNA, 25 bp, Homo sapien
ctttgctggaggcttagggccccca

SEQ ID NO: 2866766 - DNA, 25 bp, Homo sapien
tgctggaggcttagggcccccagtc

SEQ ID NO: 2866767 - DNA, 25 bp, Homo sapien
tttgctggaggcttagggcccccag

SEQ ID NO: 2866768 - DNA, 25 bp, Homo sapien
tatggtagtcatgagagcatctgat

SEQ ID NO: 2866769 - DNA, 25 bp, Homo sapien
tagtcatgagagcatctgatagctc

SEQ ID NO: 2866770 - DNA, 25 bp, Homo sapien
tcatgagagcatctgatagctcctc

SEQ ID NO: 2866771 - DNA, 25 bp, Homo sapien
ggtagtcatgagagcatctgatagc

SEQ ID NO: 2866772 - DNA, 25 bp, Homo sapien
caggtcacttgttgctatgggcttc

SEQ ID NO: 2866773 - DNA, 25 bp, Homo sapien
gaaaggttagatcatcctggtcctg

SEQ ID NO: 2866774 - DNA, 25 bp, Homo sapien
aatcatcatttgttagaggagcctc

SEQ ID NO: 2866775 - DNA, 25 bp, Homo sapien
aagaactttggcctgggtggacaca

SEQ ID NO: 2866776 - DNA, 25 bp, Homo sapien
gtggtgggataaggctcagatccac

SEQ ID NO: 2866777 - DNA, 25 bp, Homo sapien
tgggataaggctcagatccacctgc

SEQ ID NO: 2866778 - DNA, 25 bp, Homo sapien
ttggtggtgggataaggctcagatc

SEQ ID NO: 2866779 - DNA, 25 bp, Homo sapien
cagtgaccctcggtggggctcttga

SEQ ID NO: 2866780 - DNA, 25 bp, Homo sapien
cacaggctgtaggatcctcaaaggc

SEQ ID NO: 2866781 - DNA, 25 bp, Homo sapien
gaagtccccttcaggaatggaggca

SEQ ID NO: 2866782 - DNA, 25 bp, Homo sapien
cacagatgggcaaggagtctctatc

SEQ ID NO: 2866783 - DNA, 25 bp, Homo sapien
tgctctgatggatttaagccgcctg

SEQ ID NO: 2866784 - DNA, 25 bp, Homo sapien
agggctgactaccttctctactggg

SEQ ID NO: 2866785 - DNA, 25 bp, Homo sapien
agttggacatctagcgctgtgggca

SEQ ID NO: 2866786 - DNA, 25 bp, Homo sapien
cagccttccgcttccaagaagggct

SEQ ID NO: 2866787 - DNA, 25 bp, Homo sapien
tgtgggcagacttgacttggctccc

SEQ ID NO: 2866788 - DNA, 25 bp, Homo sapien
agggccagtgcatgggtcctgagga

SEQ ID NO: 2866789 - DNA, 25 bp, Homo sapien
gagagggccagtgcatgggtcctga

SEQ ID NO: 2866790 - DNA, 25 bp, Homo sapien
agagagggccagtgcatgggtcctg

SEQ ID NO: 2866791 - DNA, 25 bp, Homo sapien
gagggccagtgcatgggtcctgagg

SEQ ID NO: 2866792 - DNA, 25 bp, Homo sapien
tcagtcctcgattggaagccagggc

SEQ ID NO: 2866793 - DNA, 25 bp, Homo sapien
agcagctcttggtctactgccgaca

SEQ ID NO: 2866794 - DNA, 25 bp, Homo sapien
ccagtgggttcagatacggaagcca

SEQ ID NO: 2866795 - DNA, 25 bp, Homo sapien
caggactccgaaaagctgggtaatt

SEQ ID NO: 2866796 - DNA, 25 bp, Homo sapien
tcctcagacaggctatcattcttta

SEQ ID NO: 2866797 - DNA, 25 bp, Homo sapien
cctcagacaggctatcattctttat

SEQ ID NO: 2866798 - DNA, 25 bp, Homo sapien
ctcagacaggctatcattctttatt

SEQ ID NO: 2866799 - DNA, 25 bp, Homo sapien
ttcctcagacaggctatcattcttt

SEQ ID NO: 2866800 - DNA, 25 bp, Homo sapien
tacgcagatggtgtaatatatttat

SEQ ID NO: 2866801 - DNA, 25 bp, Homo sapien
acgcagatggtgtaatatatttata

SEQ ID NO: 2866802 - DNA, 25 bp, Homo sapien
aataactcactatatggtacatata

SEQ ID NO: 2866803 - DNA, 25 bp, Homo sapien
atacttaatattctcttcttcttta

SEQ ID NO: 2866804 - DNA, 25 bp, Homo sapien
caatatacttaatattctcttcttc

SEQ ID NO: 2866805 - DNA, 25 bp, Homo sapien
tacttaatattctcttcttctttac

SEQ ID NO: 2866806 - DNA, 25 bp, Homo sapien
ttacaatatacttaatattctcttc

SEQ ID NO: 2866807 - DNA, 25 bp, Homo sapien
cacatggctgtcccaactccatcaa

SEQ ID NO: 2866808 - DNA, 25 bp, Homo sapien
acatggctgtcccaactccatcaag

SEQ ID NO: 2866809 - DNA, 25 bp, Homo sapien
ctggagtccgagaggtggcaggcag

SEQ ID NO: 2866810 - DNA, 25 bp, Homo sapien
ggcagccgcactctaagtgtctctc

SEQ ID NO: 2866811 - DNA, 25 bp, Homo sapien
gcagccgcactctaagtgtctctcc

SEQ ID NO: 2866812 - DNA, 25 bp, Homo sapien
aggcagccgcactctaagtgtctct

SEQ ID NO: 2866813 - DNA, 25 bp, Homo sapien
cactggaagacgtatttccgccgct

SEQ ID NO: 2866814 - DNA, 25 bp, Homo sapien
tctggcggcggatcacctctcggac

SEQ ID NO: 2866815 - DNA, 25 bp, Homo sapien
gcggatcacctctcggactacttgt

SEQ ID NO: 2866816 - DNA, 25 bp, Homo sapien
tcttctacaaacgaggagccgtccg

SEQ ID NO: 2866817 - DNA, 25 bp, Homo sapien
tgttgtcacacaagtcccctccata

SEQ ID NO: 2866818 - DNA, 25 bp, Homo sapien
tgagcaggcattggcagagtcattc

SEQ ID NO: 2866819 - DNA, 25 bp, Homo sapien
cttgttggcagtgctcgccgctaaa

SEQ ID NO: 2866820 - DNA, 25 bp, Homo sapien
acacttgcacatgtatgaggtccca

SEQ ID NO: 2866821 - DNA, 25 bp, Homo sapien
ggcacaggccgtgcttgcacacggt

SEQ ID NO: 2866822 - DNA, 25 bp, Homo sapien
ttgttgatgcgcacctcatggatgc

SEQ ID NO: 2866823 - DNA, 25 bp, Homo sapien
ctcctgatcgcagagtgggccggtc

SEQ ID NO: 2866824 - DNA, 25 bp, Homo sapien
tcatggatgcatccgtggaagccgc

SEQ ID NO: 2866825 - DNA, 25 bp, Homo sapien
tgctgccttatgtgcggtgtacccc

SEQ ID NO: 2866826 - DNA, 25 bp, Homo sapien
tatgatcccactggctgaactgagg

SEQ ID NO: 2866827 - DNA, 25 bp, Homo sapien
aatccagggcaggtgagctacagct

SEQ ID NO: 2866828 - DNA, 25 bp, Homo sapien
catacagggacgtgcatccttggtc

SEQ ID NO: 2866829 - DNA, 25 bp, Homo sapien
tgggcccgtgctagtctctgcaggt

SEQ ID NO: 2866830 - DNA, 25 bp, Homo sapien
aagcagggcacccagttccgttctg

SEQ ID NO: 2866831 - DNA, 25 bp, Homo sapien
ttccgttctgggtgcacctggagca

SEQ ID NO: 2866832 - DNA, 25 bp, Homo sapien
tgcaggtggactctgggtaaagtct

SEQ ID NO: 2866833 - DNA, 25 bp, Homo sapien
acttaaccccttgagaactatcagt

SEQ ID NO: 2866834 - DNA, 25 bp, Homo sapien
tgaacgagcagttttggtagctttt

SEQ ID NO: 2866835 - DNA, 25 bp, Homo sapien
cttaggattgaacgagcagttttgg

SEQ ID NO: 2866836 - DNA, 25 bp, Homo sapien
accccttgagaactatcagtgcagg

SEQ ID NO: 2866837 - DNA, 25 bp, Homo sapien
ttgtccactactaggttcagggtct

SEQ ID NO: 2866838 - DNA, 25 bp, Homo sapien
gggctgttgatgcccactgctggct

SEQ ID NO: 2866839 - DNA, 25 bp, Homo sapien
gctccacactgtgaaactgcccatc

SEQ ID NO: 2866840 - DNA, 25 bp, Homo sapien
tggtttagcgtcaccagctccacac

SEQ ID NO: 2866841 - DNA, 25 bp, Homo sapien
tacactgtggttggaggggaactca

SEQ ID NO: 2866842 - DNA, 25 bp, Homo sapien
gaggggaactcaggctgtcatagac

SEQ ID NO: 2866843 - DNA, 25 bp, Homo sapien
ggaggggaactcaggctgtcataga

SEQ ID NO: 2866844 - DNA, 25 bp, Homo sapien
ctgtacactgtggttggaggggaac

SEQ ID NO: 2866845 - DNA, 25 bp, Homo sapien
cctttgtagagaaggatgccgttgt

SEQ ID NO: 2866846 - DNA, 25 bp, Homo sapien
gtctcctttgtagagaaggatgccg

SEQ ID NO: 2866847 - DNA, 25 bp, Homo sapien
gtagagaaggatgccgttgtccttg

SEQ ID NO: 2866848 - DNA, 25 bp, Homo sapien
agctccagtgccagggggtcattgt

SEQ ID NO: 2866849 - DNA, 25 bp, Homo sapien
tgcagggagatgttggcctggggtc

SEQ ID NO: 2866850 - DNA, 25 bp, Homo sapien
gggagatgttggcctggggtcggac

SEQ ID NO: 2866851 - DNA, 25 bp, Homo sapien
cagggagatgttggcctggggtcgg

SEQ ID NO: 2866852 - DNA, 25 bp, Homo sapien
ctgcagggagatgttggcctggggt

SEQ ID NO: 2866853 - DNA, 25 bp, Homo sapien
cgttctggcactcgtactggtcgca

SEQ ID NO: 2866854 - DNA, 25 bp, Homo sapien
ttccacgtaggagtctttgcccacg

SEQ ID NO: 2866855 - DNA, 25 bp, Homo sapien
cagtgatgagcttctcgcatctggg

SEQ ID NO: 2866856 - DNA, 25 bp, Homo sapien
tttgcccacgaagttgacagtgatg

SEQ ID NO: 2866857 - DNA, 25 bp, Homo sapien
atgggtggggggtgttcacagaagg

SEQ ID NO: 2866858 - DNA, 25 bp, Homo sapien
tggggggtgttcacagaagggtcca

SEQ ID NO: 2866859 - DNA, 25 bp, Homo sapien
catgggtggggggtgttcacagaag

SEQ ID NO: 2866860 - DNA, 25 bp, Homo sapien
cgtggcggcacttgtgggccacaca

SEQ ID NO: 2866861 - DNA, 25 bp, Homo sapien
ttgattgtgtccacgcactgggccc

SEQ ID NO: 2866862 - DNA, 25 bp, Homo sapien
tgtctcacagagcttcccgctgtag

SEQ ID NO: 2866863 - DNA, 25 bp, Homo sapien
tgtgtagccattgattgtgtccacg

SEQ ID NO: 2866864 - DNA, 25 bp, Homo sapien
ccaagttcctttgggatctgcaaag

SEQ ID NO: 2866865 - DNA, 25 bp, Homo sapien
cagggttggactcatccagcttttg

SEQ ID NO: 2866866 - DNA, 25 bp, Homo sapien
gcgagtcttgtgttccagagccagg

SEQ ID NO: 2866867 - DNA, 25 bp, Homo sapien
gcttttggcttggatctgccacttc

SEQ ID NO: 2866868 - DNA, 25 bp, Homo sapien
gtgaggaacacagggttggactcat

SEQ ID NO: 2866869 - DNA, 25 bp, Homo sapien
aagcctgtgtacctttctgggccca

SEQ ID NO: 2866870 - DNA, 25 bp, Homo sapien
tctagtgggcaggtaaaaataatag

SEQ ID NO: 2866871 - DNA, 25 bp, Homo sapien
cagctgaattctagtgggcaggtaa

SEQ ID NO: 2866872 - DNA, 25 bp, Homo sapien
ttctgggcccaacagctgaattcta

SEQ ID NO: 2866873 - DNA, 25 bp, Homo sapien
ccttgtactcaggtaacttgactgc

SEQ ID NO: 2866874 - DNA, 25 bp, Homo sapien
caggtaacttgactgcctaaaagtc

SEQ ID NO: 2866875 - DNA, 25 bp, Homo sapien
tactcaggtaacttgactgcctaaa

SEQ ID NO: 2866876 - DNA, 25 bp, Homo sapien
tgtactcaggtaacttgactgccta

SEQ ID NO: 2866877 - DNA, 25 bp, Homo sapien
acccaccctcaagggtcacccacat

SEQ ID NO: 2866878 - DNA, 25 bp, Homo sapien
aacagagccagaatcgtggggccta

SEQ ID NO: 2866879 - DNA, 25 bp, Homo sapien
agccagaatcgtggggcctagaact

SEQ ID NO: 2866880 - DNA, 25 bp, Homo sapien
ccccagtggagccgtccttccttct

SEQ ID NO: 2866881 - DNA, 25 bp, Homo sapien
ttatggggtctgctaacatcctggg

SEQ ID NO: 2866882 - DNA, 25 bp, Homo sapien
aaaccctgactccttggtgctagtg

SEQ ID NO: 2866883 - DNA, 25 bp, Homo sapien
gctttcctctggtgttggacagaga

SEQ ID NO: 2866884 - DNA, 25 bp, Homo sapien
tccagttgccccggactgcctgttt

SEQ ID NO: 2866885 - DNA, 25 bp, Homo sapien
cagtctcaagggtctcacaatcttc

SEQ ID NO: 2866886 - DNA, 25 bp, Homo sapien
tcccaggagtgccattggatcctca

SEQ ID NO: 2866887 - DNA, 25 bp, Homo sapien
gaagagatgagtacagggcctggga

SEQ ID NO: 2866888 - DNA, 25 bp, Homo sapien
tgcatggctttctgacctgaggcag

SEQ ID NO: 2866889 - DNA, 25 bp, Homo sapien
cctgcaacaggtgcataagctgaaa

SEQ ID NO: 2866890 - DNA, 25 bp, Homo sapien
ctgcaacaggtgcataagctgaaaa

SEQ ID NO: 2866891 - DNA, 25 bp, Homo sapien
ctggaggggcagcgtactgcaaagg

SEQ ID NO: 2866892 - DNA, 25 bp, Homo sapien
gacagaggcacgcatagggaaacag

SEQ ID NO: 2866893 - DNA, 25 bp, Homo sapien
gactgagataattagatcatggctg

SEQ ID NO: 2866894 - DNA, 25 bp, Homo sapien
caaataccctttagacgctgcttcc

SEQ ID NO: 2866895 - DNA, 25 bp, Homo sapien
tacagagacttagagacacccacag

SEQ ID NO: 2866896 - DNA, 25 bp, Homo sapien
gtcaatcacctcgtcgcatagctca

SEQ ID NO: 2866897 - DNA, 25 bp, Homo sapien
ctgaatcctttgtccagggggatgc

SEQ ID NO: 2866898 - DNA, 25 bp, Homo sapien
catgctgacagaggttcagctcagg

SEQ ID NO: 2866899 - DNA, 25 bp, Homo sapien
cacagtggtcaatcacctcgtcgca

SEQ ID NO: 2866900 - DNA, 25 bp, Homo sapien
tagttaggcggacagatacacacgt

SEQ ID NO: 2866901 - DNA, 25 bp, Homo sapien
gggttgatctcacaccgctgcccct

SEQ ID NO: 2866902 - DNA, 25 bp, Homo sapien
gtagttgttgatcccgtccacgcag

SEQ ID NO: 2866903 - DNA, 25 bp, Homo sapien
ttcgcagtcgttgtcctcacagtca

SEQ ID NO: 2866904 - DNA, 25 bp, Homo sapien
cttcaaacgctgtggggcggcaaga

SEQ ID NO: 2866905 - DNA, 25 bp, Homo sapien
ttggcttcaaacgctgtggggcggc

SEQ ID NO: 2866906 - DNA, 25 bp, Homo sapien
ggcttcaaacgctgtggggcggcaa

SEQ ID NO: 2866907 - DNA, 25 bp, Homo sapien
ttcaaacgctgtggggcggcaagat

SEQ ID NO: 2866908 - DNA, 25 bp, Homo sapien
ctgggcgtgcaagatcggttagaac

SEQ ID NO: 2866909 - DNA, 25 bp, Homo sapien
gatcttggtcatatccccaggactg

SEQ ID NO: 2866910 - DNA, 25 bp, Homo sapien
gagtgtgcgcttcagcttcagatct

SEQ ID NO: 2866911 - DNA, 25 bp, Homo sapien
gaatctcgatctttctttggcctaa

SEQ ID NO: 2866912 - DNA, 25 bp, Homo sapien
acagtctgctttggtcagagccaca

SEQ ID NO: 2866913 - DNA, 25 bp, Homo sapien
aacagtctgctttggtcagagccac

SEQ ID NO: 2866914 - DNA, 25 bp, Homo sapien
aaaggagcccgttcccaacagtctg

SEQ ID NO: 2866915 - DNA, 25 bp, Homo sapien
cagggatgccaaaggagcccgttcc

SEQ ID NO: 2866916 - DNA, 25 bp, Homo sapien
ctgaacccatccttgtggctgtcac

SEQ ID NO: 2866917 - DNA, 25 bp, Homo sapien
gcctccatgctgacaggggttctgg

SEQ ID NO: 2866918 - DNA, 25 bp, Homo sapien
ttctggatgcaggtgttgatgggca

SEQ ID NO: 2866919 - DNA, 25 bp, Homo sapien
caggtgcctccatgctgacaggggt

SEQ ID NO: 2866920 - DNA, 25 bp, Homo sapien
tggggaggtgactgctgcatccttt

SEQ ID NO: 2866921 - DNA, 25 bp, Homo sapien
tggtggaggtgatcatgggagccca

SEQ ID NO: 2866922 - DNA, 25 bp, Homo sapien
ctggtggaggtgatcatgggagccc

SEQ ID NO: 2866923 - DNA, 25 bp, Homo sapien
ggtggaggtgatcatgggagcccac

SEQ ID NO: 2866924 - DNA, 25 bp, Homo sapien
gatggaatggaactggggcttcctg

SEQ ID NO: 2866925 - DNA, 25 bp, Homo sapien
ggcttcctggctgcgacgctgcagc

SEQ ID NO: 2866926 - DNA, 25 bp, Homo sapien
tgtggaccctctcaaacaccagagc

SEQ ID NO: 2866927 - DNA, 25 bp, Homo sapien
tggctgcgacgctgcagccaactgg

SEQ ID NO: 2866928 - DNA, 25 bp, Homo sapien
atttctgttagccactcatgcagaa

SEQ ID NO: 2866929 - DNA, 25 bp, Homo sapien
gagcttggttttgtgggtatctggg

SEQ ID NO: 2866930 - DNA, 25 bp, Homo sapien
tttctgttagccactcatgcagaac

SEQ ID NO: 2866931 - DNA, 25 bp, Homo sapien
gatttctgttagccactcatgcaga

SEQ ID NO: 2866932 - DNA, 25 bp, Homo sapien
cttagtcgctctgtttgggcgggct

SEQ ID NO: 2866933 - DNA, 25 bp, Homo sapien
tgggactcagtggtaagtttaagac

SEQ ID NO: 2866934 - DNA, 25 bp, Homo sapien
tttaagactttggaggtggctggct

SEQ ID NO: 2866935 - DNA, 25 bp, Homo sapien
cagcttatgaaatgacggtgtatgg

SEQ ID NO: 2866936 - DNA, 25 bp, Homo sapien
tctcttgtcccaggcccataggtgg

SEQ ID NO: 2866937 - DNA, 25 bp, Homo sapien
catgtcccgttattcttgcacgggc

SEQ ID NO: 2866938 - DNA, 25 bp, Homo sapien
gcatttggccacaatgttgatgtcc

SEQ ID NO: 2866939 - DNA, 25 bp, Homo sapien
aggcacagcggtacagctccacagg

SEQ ID NO: 2866940 - DNA, 25 bp, Homo sapien
ctgggtgcatgtcccgttattcttg

SEQ ID NO: 2866941 - DNA, 25 bp, Homo sapien
agccccttcccaactccatgcccag

SEQ ID NO: 2866942 - DNA, 25 bp, Homo sapien
cttcccaactccatgcccagatggc

SEQ ID NO: 2866943 - DNA, 25 bp, Homo sapien
caactccatgcccagatggcagctg

SEQ ID NO: 2866944 - DNA, 25 bp, Homo sapien
ctcctcagccagcacatccagtcca

SEQ ID NO: 2866945 - DNA, 25 bp, Homo sapien
atgggctcagggctactgcagcggg

SEQ ID NO: 2866946 - DNA, 25 bp, Homo sapien
cgacagccaccgaagactgcagtca

SEQ ID NO: 2866947 - DNA, 25 bp, Homo sapien
cgggcgatgccaggctccttgtacc

SEQ ID NO: 2866948 - DNA, 25 bp, Homo sapien
agccaccgaagactgcagtcacagt

SEQ ID NO: 2866949 - DNA, 25 bp, Homo sapien
aaagagatgtgaggtcgttgaagga

SEQ ID NO: 2866950 - DNA, 25 bp, Homo sapien
agagatgtgaggtcgttgaaggagc

SEQ ID NO: 2866951 - DNA, 25 bp, Homo sapien
ggaaatgtcattgccatggagggtt

SEQ ID NO: 2866952 - DNA, 25 bp, Homo sapien
tgaaggagccttcaggaacgctgga

SEQ ID NO: 2866953 - DNA, 25 bp, Homo sapien
tcctcaattcccatcagaggcctct

SEQ ID NO: 2866954 - DNA, 25 bp, Homo sapien
ttggcagagcggtcagcgcctgtcc

SEQ ID NO: 2866955 - DNA, 25 bp, Homo sapien
gagacattgcatcttggcagagcgg

SEQ ID NO: 2866956 - DNA, 25 bp, Homo sapien
ccaggactgcagaggagacattgca

SEQ ID NO: 2866957 - DNA, 25 bp, Homo sapien
ctgggtgaggaagaaaatgcctcat

SEQ ID NO: 2866958 - DNA, 25 bp, Homo sapien
cctcagccggttgtagctcaggatc

SEQ ID NO: 2866959 - DNA, 25 bp, Homo sapien
acggggatgcacctcagccggttgt

SEQ ID NO: 2866960 - DNA, 25 bp, Homo sapien
tgaaggcgtggacggggatgcacct

SEQ ID NO: 2866961 - DNA, 25 bp, Homo sapien
ggatgcacctcagccggttgtagct

SEQ ID NO: 2866962 - DNA, 25 bp, Homo sapien
aaggtgtaattggtcagcatgctga

SEQ ID NO: 2866963 - DNA, 25 bp, Homo sapien
gtgtaattggtcagcatgctgatgc

SEQ ID NO: 2866964 - DNA, 25 bp, Homo sapien
tactgaaggtgtaattggtcagcat

SEQ ID NO: 2866965 - DNA, 25 bp, Homo sapien
aggtgagacatgttactgaaggtgt

SEQ ID NO: 2866966 - DNA, 25 bp, Homo sapien
ggttctgtcttaggaggactgaggt

SEQ ID NO: 2866967 - DNA, 25 bp, Homo sapien
aggttctgtcttaggaggactgagg

SEQ ID NO: 2866968 - DNA, 25 bp, Homo sapien
gttctgtcttaggaggactgaggtt

SEQ ID NO: 2866969 - DNA, 25 bp, Homo sapien
tccgtcttatcaggttctgtcttag

SEQ ID NO: 2866970 - DNA, 25 bp, Homo sapien
cagctctctgggcacggctgttagg

SEQ ID NO: 2866971 - DNA, 25 bp, Homo sapien
tgtcggagggcggacagctctctgg

SEQ ID NO: 2866972 - DNA, 25 bp, Homo sapien
gcacggctgttaggtggtttccttc

SEQ ID NO: 2866973 - DNA, 25 bp, Homo sapien
ataagcgtcaggtgtcggagggcgg

SEQ ID NO: 2866974 - DNA, 25 bp, Homo sapien
gaagtgttctgtggacagtgtggct

SEQ ID NO: 2866975 - DNA, 25 bp, Homo sapien
tcttctccagggagatccgagggag

SEQ ID NO: 2866976 - DNA, 25 bp, Homo sapien
ttctccagggagatccgagggagtt

SEQ ID NO: 2866977 - DNA, 25 bp, Homo sapien
caggacaggcagagaagcgctggtc

SEQ ID NO: 2866978 - DNA, 25 bp, Homo sapien
acaggcagagaagcgctggtccagg

SEQ ID NO: 2866979 - DNA, 25 bp, Homo sapien
gacccctaataagtagagagactga

SEQ ID NO: 2866980 - DNA, 25 bp, Homo sapien
tacaggctaacatcctgaatggaca

SEQ ID NO: 2866981 - DNA, 25 bp, Homo sapien
gataatagaccatgatcaggttgtg

SEQ ID NO: 2866982 - DNA, 25 bp, Homo sapien
ggaagcatgcaacctcctgaaattg

SEQ ID NO: 2866983 - DNA, 25 bp, Homo sapien
cactctcagagagttgcatctcagc

SEQ ID NO: 2866984 - DNA, 25 bp, Homo sapien
actcactctcagagagttgcatctc

SEQ ID NO: 2866985 - DNA, 25 bp, Homo sapien
tcactctcagagagttgcatctcag

SEQ ID NO: 2866986 - DNA, 25 bp, Homo sapien
ctcactctcagagagttgcatctca

SEQ ID NO: 2866987 - DNA, 25 bp, Homo sapien
ttgttgctgcatcgcaccactgtct

SEQ ID NO: 2866988 - DNA, 25 bp, Homo sapien
acatccttgggcatgcctctgggga

SEQ ID NO: 2866989 - DNA, 25 bp, Homo sapien
tcagctggcagctactctcctcgtt

SEQ ID NO: 2866990 - DNA, 25 bp, Homo sapien
atacaggtgcactgctccgggcagc

SEQ ID NO: 2866991 - DNA, 25 bp, Homo sapien
ttctccacaaagacaagttgtcccc

SEQ ID NO: 2866992 - DNA, 25 bp, Homo sapien
ctgcgtgttctccacaaagacaagt

SEQ ID NO: 2866993 - DNA, 25 bp, Homo sapien
ttgtgggagataagccccactaggg

SEQ ID NO: 2866994 - DNA, 25 bp, Homo sapien
cacaaagacaagttgtcccctgtcc

SEQ ID NO: 2866995 - DNA, 25 bp, Homo sapien
tctgattgtgcatcttcgccatctt

SEQ ID NO: 2866996 - DNA, 25 bp, Homo sapien
gtatctgattgtgcatcttcgccat

SEQ ID NO: 2866997 - DNA, 25 bp, Homo sapien
gattgtgcatcttcgccatcttcct

SEQ ID NO: 2866998 - DNA, 25 bp, Homo sapien
cagggagtatctgattgtgcatctt

SEQ ID NO: 2866999 - DNA, 25 bp, Homo sapien
ctggcacctagggttcccactgacg

SEQ ID NO: 2867000 - DNA, 25 bp, Homo sapien
tcctggatgggaatctccttgagga

SEQ ID NO: 2867001 - DNA, 25 bp, Homo sapien
tagggttcccactgacgatccgcct

SEQ ID NO: 2867002 - DNA, 25 bp, Homo sapien
tggatgggaatctccttgaggaaaa

SEQ ID NO: 2867003 - DNA, 25 bp, Homo sapien
ctcaaccacttgccgagccaggcca

SEQ ID NO: 2867004 - DNA, 25 bp, Homo sapien
ggtggcagttgcagttgaaggggtt

SEQ ID NO: 2867005 - DNA, 25 bp, Homo sapien
accacttgccgagccaggccaggtg

SEQ ID NO: 2867006 - DNA, 25 bp, Homo sapien
cagttgaaggggttggacaggaggt

SEQ ID NO: 2867007 - DNA, 25 bp, Homo sapien
gacagatagatgagcctggctagag

SEQ ID NO: 2867008 - DNA, 25 bp, Homo sapien
tgtgcagcctcaacacctagacgat

SEQ ID NO: 2867009 - DNA, 25 bp, Homo sapien
gacgagtttttaagtggacagacag

SEQ ID NO: 2867010 - DNA, 25 bp, Homo sapien
tgcagagtgggatcccagagtccgt

SEQ ID NO: 2867011 - DNA, 25 bp, Homo sapien
agtctcaccgaactcaggccggcaa

SEQ ID NO: 2867012 - DNA, 25 bp, Homo sapien
ggtgatccgattgtcatagagggac

SEQ ID NO: 2867013 - DNA, 25 bp, Homo sapien
aaaggtgtcattactcacacagccg

SEQ ID NO: 2867014 - DNA, 25 bp, Homo sapien
tcatagagggacagcagtctcaccg

SEQ ID NO: 2867015 - DNA, 25 bp, Homo sapien
ctccctctcgcacctccttgatctt

SEQ ID NO: 2867016 - DNA, 25 bp, Homo sapien
gctccatcgaaagctccctctcgca

SEQ ID NO: 2867017 - DNA, 25 bp, Homo sapien
acacgcgcccgtgcacggtctccag

SEQ ID NO: 2867018 - DNA, 25 bp, Homo sapien
gaggccactgaggccacggaacacg

SEQ ID NO: 2867019 - DNA, 25 bp, Homo sapien
tgatagatgttagaagtgacggata

SEQ ID NO: 2867020 - DNA, 25 bp, Homo sapien
tagtgttagatagggtgacagtcac

SEQ ID NO: 2867021 - DNA, 25 bp, Homo sapien
ttgatcactgtacattgcatgcatg

SEQ ID NO: 2867022 - DNA, 25 bp, Homo sapien
agtgacggatatcctaaatatcctg

SEQ ID NO: 2867023 - DNA, 25 bp, Homo sapien
tttccgcaggttgggcaacttcttg

SEQ ID NO: 2867024 - DNA, 25 bp, Homo sapien
agatacctcattgtcattcagtcgc

SEQ ID NO: 2867025 - DNA, 25 bp, Homo sapien
ggcctccagaacagatacctcattg

SEQ ID NO: 2867026 - DNA, 25 bp, Homo sapien
attttccgcaggttgggcaacttct

SEQ ID NO: 2867027 - DNA, 25 bp, Homo sapien
gaacctcacactcggtgaaggacca

SEQ ID NO: 2867028 - DNA, 25 bp, Homo sapien
aagcaagatgagtggtaggttagct

SEQ ID NO: 2867029 - DNA, 25 bp, Homo sapien
ggaggcatatgcagtgctgcttcct

SEQ ID NO: 2867030 - DNA, 25 bp, Homo sapien
tggtaggttagctgtggacgaggcc

SEQ ID NO: 2867031 - DNA, 25 bp, Homo sapien
ttggagcagtccacaatcgtgccct

SEQ ID NO: 2867032 - DNA, 25 bp, Homo sapien
gaacctgctgcggtaatcctcggag

SEQ ID NO: 2867033 - DNA, 25 bp, Homo sapien
gaggtggcttgggatgcggaccagc

SEQ ID NO: 2867034 - DNA, 25 bp, Homo sapien
gggcacacgaggtccatgaagcact

SEQ ID NO: 2867035 - DNA, 25 bp, Homo sapien
gaatgttctcctcggggaagtgctc

SEQ ID NO: 2867036 - DNA, 25 bp, Homo sapien
ggaagaccagactcaagatctgtgg

SEQ ID NO: 2867037 - DNA, 25 bp, Homo sapien
gcctccttcccatggatctttgtta

SEQ ID NO: 2867038 - DNA, 25 bp, Homo sapien
gatctgtgggcccttatgcttttgg

SEQ ID NO: 2867039 - DNA, 25 bp, Homo sapien
gtcagaagcctggtcctgtcctcct

SEQ ID NO: 2867040 - DNA, 25 bp, Homo sapien
agacagggagtcagaagcctggtcc

SEQ ID NO: 2867041 - DNA, 25 bp, Homo sapien
ctccatctccccttctaccgctagg

SEQ ID NO: 2867042 - DNA, 25 bp, Homo sapien
tctctctccatttccgctcctccat

SEQ ID NO: 2867043 - DNA, 25 bp, Homo sapien
ctgaaggcgtgcaccggctgggctg

SEQ ID NO: 2867044 - DNA, 25 bp, Homo sapien
tttccttcacaatgtgtctataatg

SEQ ID NO: 2867045 - DNA, 25 bp, Homo sapien
aaggaaccctgactgctgatcaaag

SEQ ID NO: 2867046 - DNA, 25 bp, Homo sapien
ttcaaggcgatgagcctgaaggcgt

SEQ ID NO: 2867047 - DNA, 25 bp, Homo sapien
ggacaggtagggagccaagctccca

SEQ ID NO: 2867048 - DNA, 25 bp, Homo sapien
caggtagggagccaagctcccatgt

SEQ ID NO: 2867049 - DNA, 25 bp, Homo sapien
ggtagggagccaagctcccatgttt

SEQ ID NO: 2867050 - DNA, 25 bp, Homo sapien
gacaggtagggagccaagctcccat

SEQ ID NO: 2867051 - DNA, 25 bp, Homo sapien
tctggaatcagatgaccctgggtaa

SEQ ID NO: 2867052 - DNA, 25 bp, Homo sapien
aactactaagcaatggttgggctcc

SEQ ID NO: 2867053 - DNA, 25 bp, Homo sapien
tagacgaggtaataagagtcacacc

SEQ ID NO: 2867054 - DNA, 25 bp, Homo sapien
tccatgctggagaggaacagccatt

SEQ ID NO: 2867055 - DNA, 25 bp, Homo sapien
ggaacaagcaaaataagaggtacca

SEQ ID NO: 2867056 - DNA, 25 bp, Homo sapien
ctctcttgcagaataggacaaagac

SEQ ID NO: 2867057 - DNA, 25 bp, Homo sapien
gaatgaacaacacagtcttctggtt

SEQ ID NO: 2867058 - DNA, 25 bp, Homo sapien
tctggttacactgggtctaggattt

SEQ ID NO: 2867059 - DNA, 25 bp, Homo sapien
aggagaggtgtccagcggtggtggc

SEQ ID NO: 2867060 - DNA, 25 bp, Homo sapien
gtgggctgcggtgctccagagcaga

SEQ ID NO: 2867061 - DNA, 25 bp, Homo sapien
caggtggtgggctgcggtgctccag

SEQ ID NO: 2867062 - DNA, 25 bp, Homo sapien
tggtgggctgcggtgctccagagca

SEQ ID NO: 2867063 - DNA, 25 bp, Homo sapien
cagaaccatgttccgtttccatcgt

SEQ ID NO: 2867064 - DNA, 25 bp, Homo sapien
tgctttccgcggtgcttgacagaac

SEQ ID NO: 2867065 - DNA, 25 bp, Homo sapien
tccatcgttccaccacatggttaga

SEQ ID NO: 2867066 - DNA, 25 bp, Homo sapien
tgcaggagagcacggtgctttccgc

SEQ ID NO: 2867067 - DNA, 25 bp, Homo sapien
acaaagcggggaggcatgaaggaag

SEQ ID NO: 2867068 - DNA, 25 bp, Homo sapien
acacaaagcggggaggcatgaagga

SEQ ID NO: 2867069 - DNA, 25 bp, Homo sapien
cacaaagcggggaggcatgaaggaa

SEQ ID NO: 2867070 - DNA, 25 bp, Homo sapien
tcacacaaagcggggaggcatgaag

SEQ ID NO: 2867071 - DNA, 25 bp, Homo sapien
caggaggacttaatctgatggtcag

SEQ ID NO: 2867072 - DNA, 25 bp, Homo sapien
tgcaactgccaagtgctcccaggga

SEQ ID NO: 2867073 - DNA, 25 bp, Homo sapien
caggcagccagacggagccttttca

SEQ ID NO: 2867074 - DNA, 25 bp, Homo sapien
cggagccttttcaggaggacttaat

SEQ ID NO: 2867075 - DNA, 25 bp, Homo sapien
agcatccaaccctaaactgatcttg

SEQ ID NO: 2867076 - DNA, 25 bp, Homo sapien
tccaaccctaaactgatcttgctgc

SEQ ID NO: 2867077 - DNA, 25 bp, Homo sapien
ggcagcatccaaccctaaactgatc

SEQ ID NO: 2867078 - DNA, 25 bp, Homo sapien
gccggcagcatccaaccctaaactg

SEQ ID NO: 2867079 - DNA, 25 bp, Homo sapien
gcagctgggaaaccagacgccctgc

SEQ ID NO: 2867080 - DNA, 25 bp, Homo sapien
aggcagctgggaaaccagacgccct

SEQ ID NO: 2867081 - DNA, 25 bp, Homo sapien
cacaggcagctgggaaaccagacgc

SEQ ID NO: 2867082 - DNA, 25 bp, Homo sapien
ctgatagagagaggcagacacaggc

SEQ ID NO: 2867083 - DNA, 25 bp, Homo sapien
tctacaggtaggacgatagtggcag

SEQ ID NO: 2867084 - DNA, 25 bp, Homo sapien
gggtaccactgtttggcagagctaa

SEQ ID NO: 2867085 - DNA, 25 bp, Homo sapien
cagtcatgcccagaaaattgccaag

SEQ ID NO: 2867086 - DNA, 25 bp, Homo sapien
gagctaattaactcagccctggcca

SEQ ID NO: 2867087 - DNA, 25 bp, Homo sapien
tcatgtagctgtcgggtcaaggaga

SEQ ID NO: 2867088 - DNA, 25 bp, Homo sapien
gataggctgagaattcccctgctgt

SEQ ID NO: 2867089 - DNA, 25 bp, Homo sapien
tgtaagaagcacaagtctgcctggg

SEQ ID NO: 2867090 - DNA, 25 bp, Homo sapien
gcttgtgaacttggagtgccccttc

SEQ ID NO: 2867091 - DNA, 25 bp, Homo sapien
ttctgcagggctaactgaatttccc

SEQ ID NO: 2867092 - DNA, 25 bp, Homo sapien
taatttgcaaagatgctccccagga

SEQ ID NO: 2867093 - DNA, 25 bp, Homo sapien
cataaggtaactggttttctgcagg

SEQ ID NO: 2867094 - DNA, 25 bp, Homo sapien
tccccaggagccattacagtgctcg

SEQ ID NO: 2867095 - DNA, 25 bp, Homo sapien
ttgtcctggaggtagtcggccagcc

SEQ ID NO: 2867096 - DNA, 25 bp, Homo sapien
tggcagtcgcacacaaatgggtttt

SEQ ID NO: 2867097 - DNA, 25 bp, Homo sapien
cagcgggccccgcttgtctcgatgg

SEQ ID NO: 2867098 - DNA, 25 bp, Homo sapien
ggtagtcggccagccacttcaagtg

SEQ ID NO: 2867099 - DNA, 25 bp, Homo sapien
ggtgctactttcagacagggctcaa

SEQ ID NO: 2867100 - DNA, 25 bp, Homo sapien
tggcaatccactgcaaggactggcc

SEQ ID NO: 2867101 - DNA, 25 bp, Homo sapien
ggccgttaatcaggagtgacccacg

SEQ ID NO: 2867102 - DNA, 25 bp, Homo sapien
aagacagtcacagatgcagctagca

SEQ ID NO: 2867103 - DNA, 25 bp, Homo sapien
cctgaaacgtgttcacccgcaggca

SEQ ID NO: 2867104 - DNA, 25 bp, Homo sapien
ctgcaggtcctgaaacgtgttcacc

SEQ ID NO: 2867105 - DNA, 25 bp, Homo sapien
cagggagagcaagttgaggttctgc

SEQ ID NO: 2867106 - DNA, 25 bp, Homo sapien
ggtcctgaaacgtgttcacccgcag

SEQ ID NO: 2867107 - DNA, 25 bp, Homo sapien
agaagagagcctggttgattcacta

SEQ ID NO: 2867108 - DNA, 25 bp, Homo sapien
gagagcctggttgattcactaatcc

SEQ ID NO: 2867109 - DNA, 25 bp, Homo sapien
gagcctggttgattcactaatcctg

SEQ ID NO: 2867110 - DNA, 25 bp, Homo sapien
ctggttgattcactaatcctggtaa

SEQ ID NO: 2867111 - DNA, 25 bp, Homo sapien
gggcaagggttgcacctgcagggga

SEQ ID NO: 2867112 - DNA, 25 bp, Homo sapien
caagggttgcacctgcaggggatgg

SEQ ID NO: 2867113 - DNA, 25 bp, Homo sapien
aagggttgcacctgcaggggatggg

SEQ ID NO: 2867114 - DNA, 25 bp, Homo sapien
ggcaagggttgcacctgcaggggat

SEQ ID NO: 2867115 - DNA, 25 bp, Homo sapien
tagctcaaatgtccgctcctcagag

SEQ ID NO: 2867116 - DNA, 25 bp, Homo sapien
tcctggcactcatcgcaatttgtga

SEQ ID NO: 2867117 - DNA, 25 bp, Homo sapien
tgggaccctcactccattatcgtct

SEQ ID NO: 2867118 - DNA, 25 bp, Homo sapien
gattataggatatctaccattggcc

SEQ ID NO: 2867119 - DNA, 25 bp, Homo sapien
cattcagggccttctgagtacatca

SEQ ID NO: 2867120 - DNA, 25 bp, Homo sapien
gcagcattttgcgtcatgccacata

SEQ ID NO: 2867121 - DNA, 25 bp, Homo sapien
ccagggctcaggaatggacccttca

SEQ ID NO: 2867122 - DNA, 25 bp, Homo sapien
taattgaggtctctagagggctcag

SEQ ID NO: 2867123 - DNA, 25 bp, Homo sapien
ctgggtatgcttcagatggacaaag

SEQ ID NO: 2867124 - DNA, 25 bp, Homo sapien
cagatggacaaaggtctggttgggt

SEQ ID NO: 2867125 - DNA, 25 bp, Homo sapien
gttgggtttggaagaccctgcttgc

SEQ ID NO: 2867126 - DNA, 25 bp, Homo sapien
gggtttggaagaccctgcttgcctc

SEQ ID NO: 2867127 - DNA, 25 bp, Homo sapien
tgccgacgtgggagctgatatgcct

SEQ ID NO: 2867128 - DNA, 25 bp, Homo sapien
ggcacgaggtggcaggttctttact

SEQ ID NO: 2867129 - DNA, 25 bp, Homo sapien
tgatcaagccttcgttggcacgagg

SEQ ID NO: 2867130 - DNA, 25 bp, Homo sapien
tcaggatcactgaccgaatgccgac

SEQ ID NO: 2867131 - DNA, 25 bp, Homo sapien
gagttcctgggcatcaaccacataa

SEQ ID NO: 2867132 - DNA, 25 bp, Homo sapien
ccagcttgagtcctggcccacaaac

SEQ ID NO: 2867133 - DNA, 25 bp, Homo sapien
acccctttagagccccagcttgagt

SEQ ID NO: 2867134 - DNA, 25 bp, Homo sapien
tcaaccacataagatgtgtcccttg

SEQ ID NO: 2867135 - DNA, 25 bp, Homo sapien
caaacagtcccttgacaatctcggt

SEQ ID NO: 2867136 - DNA, 25 bp, Homo sapien
tgacaatctcggtgatcttgttccc

SEQ ID NO: 2867137 - DNA, 25 bp, Homo sapien
atcaaacagtcccttgacaatctcg

SEQ ID NO: 2867138 - DNA, 25 bp, Homo sapien
gacaatctcggtgatcttgttccca

SEQ ID NO: 2867139 - DNA, 25 bp, Homo sapien
aggaacgcaggaactcagaaccctt

SEQ ID NO: 2867140 - DNA, 25 bp, Homo sapien
ttctatccgcttttcctattctttg

SEQ ID NO: 2867141 - DNA, 25 bp, Homo sapien
tgaccctcatactggtgtctctgat

SEQ ID NO: 2867142 - DNA, 25 bp, Homo sapien
cctttctcttacgggcctccagtga

SEQ ID NO: 2867143 - DNA, 25 bp, Homo sapien
gaagctttggttccaaccagtgggc

SEQ ID NO: 2867144 - DNA, 25 bp, Homo sapien
ctataggatggggtggatgttttct

SEQ ID NO: 2867145 - DNA, 25 bp, Homo sapien
aatcaaagacaggaagggctatagg

SEQ ID NO: 2867146 - DNA, 25 bp, Homo sapien
tcttaggacaatggccatgagggtg

SEQ ID NO: 2867147 - DNA, 25 bp, Homo sapien
ggagcaatatccgatatctgattct

SEQ ID NO: 2867148 - DNA, 25 bp, Homo sapien
atctggagcaatatccgatatctga

SEQ ID NO: 2867149 - DNA, 25 bp, Homo sapien
tatccgatatctgattcttgctgat

SEQ ID NO: 2867150 - DNA, 25 bp, Homo sapien
gcaatatccgatatctgattcttgc

SEQ ID NO: 2867151 - DNA, 25 bp, Homo sapien
cgttaacggtaaagtctgagaacat

SEQ ID NO: 2867152 - DNA, 25 bp, Homo sapien
ttactcatagtgcaagagaaggagc

SEQ ID NO: 2867153 - DNA, 25 bp, Homo sapien
ggagcttaaagagccttcagttcaa

SEQ ID NO: 2867154 - DNA, 25 bp, Homo sapien
taagtgtgaatcaagcatttcagac

SEQ ID NO: 2867155 - DNA, 25 bp, Homo sapien
gctcaaaggtgcgataacggtcact

SEQ ID NO: 2867156 - DNA, 25 bp, Homo sapien
ttttcaaagaatactcacccgtggc

SEQ ID NO: 2867157 - DNA, 25 bp, Homo sapien
ctcatgataaagtgcaccacattta

SEQ ID NO: 2867158 - DNA, 25 bp, Homo sapien
acgaggctgtgaacacgtgaaccat

SEQ ID NO: 2867159 - DNA, 25 bp, Homo sapien
catcttcatcgggacacgaggctgt

SEQ ID NO: 2867160 - DNA, 25 bp, Homo sapien
cacaggttaaggctcttcggcacag

SEQ ID NO: 2867161 - DNA, 25 bp, Homo sapien
ggattctattaatgctgggcccggg

SEQ ID NO: 2867162 - DNA, 25 bp, Homo sapien
tttagactggactagcgggaaggcc

SEQ ID NO: 2867163 - DNA, 25 bp, Homo sapien
ctttagctggcgaaatcacctccga

SEQ ID NO: 2867164 - DNA, 25 bp, Homo sapien
gctgcctcattatgttggtttccac

SEQ ID NO: 2867165 - DNA, 25 bp, Homo sapien
ttctggaattgcaccagaagaaaag

SEQ ID NO: 2867166 - DNA, 25 bp, Homo sapien
gagatgggaagttggcttcccaaga

SEQ ID NO: 2867167 - DNA, 25 bp, Homo sapien
ggaagaagtacgtgcttcgagctgc

SEQ ID NO: 2867168 - DNA, 25 bp, Homo sapien
agagcagtgctcaaggtcgtcatgg

SEQ ID NO: 2867169 - DNA, 25 bp, Homo sapien
tgacattgtcacatggtggggatga

SEQ ID NO: 2867170 - DNA, 25 bp, Homo sapien
gggcggtgatgcaatggtgccgtcc

SEQ ID NO: 2867171 - DNA, 25 bp, Homo sapien
gatgagggcggtgatgcaatggtgc

SEQ ID NO: 2867172 - DNA, 25 bp, Homo sapien
gacagcgttccaggtctgaaacaga

SEQ ID NO: 2867173 - DNA, 25 bp, Homo sapien
caagcttaggacagcgttccaggtc

SEQ ID NO: 2867174 - DNA, 25 bp, Homo sapien
taggacagcgttccaggtctgaaac

SEQ ID NO: 2867175 - DNA, 25 bp, Homo sapien
ctcccaagcttaggacagcgttcca

SEQ ID NO: 2867176 - DNA, 25 bp, Homo sapien
gtttcttgtactgggtgaaggctcc

SEQ ID NO: 2867177 - DNA, 25 bp, Homo sapien
attcgcttcagtttcttgtactggg

SEQ ID NO: 2867178 - DNA, 25 bp, Homo sapien
ttgtactgggtgaaggctcctgcag

SEQ ID NO: 2867179 - DNA, 25 bp, Homo sapien
tttgatggagttctgttctaggcgt

SEQ ID NO: 2867180 - DNA, 25 bp, Homo sapien
ctgtccaagggtctaactctccttg

SEQ ID NO: 2867181 - DNA, 25 bp, Homo sapien
tgattattataaactgcttttggca

SEQ ID NO: 2867182 - DNA, 25 bp, Homo sapien
cttgattattataaactgcttttgg

SEQ ID NO: 2867183 - DNA, 25 bp, Homo sapien
ttgattattataaactgcttttggc

SEQ ID NO: 2867184 - DNA, 25 bp, Homo sapien
ctaatgtggaatggtttgtcaggcc

SEQ ID NO: 2867185 - DNA, 25 bp, Homo sapien
tcttgaagagtaatccccgctgtag

SEQ ID NO: 2867186 - DNA, 25 bp, Homo sapien
ttgtcaggccaacccataacacaga

SEQ ID NO: 2867187 - DNA, 25 bp, Homo sapien
tgctaatggagcagtttgccagcaa

SEQ ID NO: 2867188 - DNA, 25 bp, Homo sapien
gactgtgggctactggatacagcca

SEQ ID NO: 2867189 - DNA, 25 bp, Homo sapien
agagacagcagacttgaggcagcct

SEQ ID NO: 2867190 - DNA, 25 bp, Homo sapien
tctcagagactgtgggctactggat

SEQ ID NO: 2867191 - DNA, 25 bp, Homo sapien
ccagctgagcatagagttcagcaga

SEQ ID NO: 2867192 - DNA, 25 bp, Homo sapien
gatttcagctggatgatgcctccag

SEQ ID NO: 2867193 - DNA, 25 bp, Homo sapien
tgccactgtggcaagagatttcagc

SEQ ID NO: 2867194 - DNA, 25 bp, Homo sapien
caagagatttcagctggatgatgcc

SEQ ID NO: 2867195 - DNA, 25 bp, Homo sapien
atgatgcctccagggaaagccactg

SEQ ID NO: 2867196 - DNA, 25 bp, Homo sapien
gaagatacgagacacgggataccac

SEQ ID NO: 2867197 - DNA, 25 bp, Homo sapien
gaagaagatgggactctaaagacag

SEQ ID NO: 2867198 - DNA, 25 bp, Homo sapien
gaagacatttagcttccatagcaga

SEQ ID NO: 2867199 - DNA, 25 bp, Homo sapien
ttgtgactggacacggaagcctgtc

SEQ ID NO: 2867200 - DNA, 25 bp, Homo sapien
caagttggcaggaatctccatcaag

SEQ ID NO: 2867201 - DNA, 25 bp, Homo sapien
tcgacgatgccctccggcaagttgg

SEQ ID NO: 2867202 - DNA, 25 bp, Homo sapien
cacgatgttattgctgcacgtgcag

SEQ ID NO: 2867203 - DNA, 25 bp, Homo sapien
ctttcctcgacagtccacgatgtta

SEQ ID NO: 2867204 - DNA, 25 bp, Homo sapien
aattctacggtgtgaaaggctccca

SEQ ID NO: 2867205 - DNA, 25 bp, Homo sapien
catcacccacatcgaagggaggttg

SEQ ID NO: 2867206 - DNA, 25 bp, Homo sapien
ctaaagaaaactgcggagcctggcc

SEQ ID NO: 2867207 - DNA, 25 bp, Homo sapien
tgtttgaagtacagatggcgttccc

SEQ ID NO: 2867208 - DNA, 25 bp, Homo sapien
agaagtcccacacttgggacacctt

SEQ ID NO: 2867209 - DNA, 25 bp, Homo sapien
gaagtcccacacttgggacaccttc

SEQ ID NO: 2867210 - DNA, 25 bp, Homo sapien
cagggagaagtcccacacttgggac

SEQ ID NO: 2867211 - DNA, 25 bp, Homo sapien
atcgatgccaatggaccaagcccat

SEQ ID NO: 2867212 - DNA, 25 bp, Homo sapien
tgatcgatgccaatggaccaagccc

SEQ ID NO: 2867213 - DNA, 25 bp, Homo sapien
ctgtgatcgatgccaatggaccaag

SEQ ID NO: 2867214 - DNA, 25 bp, Homo sapien
tgtgatcgatgccaatggaccaagc

SEQ ID NO: 2867215 - DNA, 25 bp, Homo sapien
cagagtcaaaagctccaatggcctt

SEQ ID NO: 2867216 - DNA, 25 bp, Homo sapien
tccagtattcaaattaagcatcctt

SEQ ID NO: 2867217 - DNA, 25 bp, Homo sapien
tccttactggcctctggcctttcaa

SEQ ID NO: 2867218 - DNA, 25 bp, Homo sapien
caatggccttgtgagcatgtggaaa

SEQ ID NO: 2867219 - DNA, 25 bp, Homo sapien
taccctttgccgaataattactgta

SEQ ID NO: 2867220 - DNA, 25 bp, Homo sapien
tcacttatgccgatattgtaccctt

SEQ ID NO: 2867221 - DNA, 25 bp, Homo sapien
tatgtgtttgatgggaagtgatttc

SEQ ID NO: 2867222 - DNA, 25 bp, Homo sapien
ctatatttgaagttggtgcctgcgt

SEQ ID NO: 2867223 - DNA, 25 bp, Homo sapien
tagggtatgtgttcaaggtcagggt

SEQ ID NO: 2867224 - DNA, 25 bp, Homo sapien
tcagggtgatgttgtgggagctcat

SEQ ID NO: 2867225 - DNA, 25 bp, Homo sapien
accaagctctgggctagggtatgtg

SEQ ID NO: 2867226 - DNA, 25 bp, Homo sapien
catgggtgggtgggtcatagcacag

SEQ ID NO: 2867227 - DNA, 25 bp, Homo sapien
tgtcgcagccaatccgagagccagg

SEQ ID NO: 2867228 - DNA, 25 bp, Homo sapien
tcttctgcacatccgccacgttgaa

SEQ ID NO: 2867229 - DNA, 25 bp, Homo sapien
gtgtgaactggccaactgtccgtcg

SEQ ID NO: 2867230 - DNA, 25 bp, Homo sapien
ttgaagcccctcaaatgcacaggag

SEQ ID NO: 2867231 - DNA, 25 bp, Homo sapien
gattcctgcaggtgagagtcatttt

SEQ ID NO: 2867232 - DNA, 25 bp, Homo sapien
tcttcgatgcaacccacatgtctgg

SEQ ID NO: 2867233 - DNA, 25 bp, Homo sapien
gcttcttgcccagaagccctgggtc

SEQ ID NO: 2867234 - DNA, 25 bp, Homo sapien
aggagctggacggctgattcctgca

SEQ ID NO: 2867235 - DNA, 25 bp, Homo sapien
gatcttcggcatgtggttgaagctg

SEQ ID NO: 2867236 - DNA, 25 bp, Homo sapien
agagttcggatcttcggcatgtggt

SEQ ID NO: 2867237 - DNA, 25 bp, Homo sapien
aagctggtgaccaggatgcgactga

SEQ ID NO: 2867238 - DNA, 25 bp, Homo sapien
agctggtgaccaggatgcgactgat

SEQ ID NO: 2867239 - DNA, 25 bp, Homo sapien
aagagttggatacagcccttggtac

SEQ ID NO: 2867240 - DNA, 25 bp, Homo sapien
cttggtacaattcctcatggtggcc

SEQ ID NO: 2867241 - DNA, 25 bp, Homo sapien
gttcctgtgcccttctattctccgc

SEQ ID NO: 2867242 - DNA, 25 bp, Homo sapien
tctattctccgctcctcccagaacc

SEQ ID NO: 2867243 - DNA, 25 bp, Homo sapien
catgtaattggctctaatgcaacaa

SEQ ID NO: 2867244 - DNA, 25 bp, Homo sapien
taggccatcgctttttcactctgtg

SEQ ID NO: 2867245 - DNA, 25 bp, Homo sapien
ttaataaggctgatgtttccctctg

SEQ ID NO: 2867246 - DNA, 25 bp, Homo sapien
taatctgcgtgttgtgtgtccataa

SEQ ID NO: 2867247 - DNA, 25 bp, Homo sapien
gcagtcgagctctcatttgacacct

SEQ ID NO: 2867248 - DNA, 25 bp, Homo sapien
gactctaaagtgatttggcaccggg

SEQ ID NO: 2867249 - DNA, 25 bp, Homo sapien
tggcaccgggtgagcgttattttta

SEQ ID NO: 2867250 - DNA, 25 bp, Homo sapien
tattcactgacgtatagcagtcgag

SEQ ID NO: 2867251 - DNA, 25 bp, Homo sapien
atgcttcagggcagccaaacaccat

SEQ ID NO: 2867252 - DNA, 25 bp, Homo sapien
agggccaatttcacaagcctgtgaa

SEQ ID NO: 2867253 - DNA, 25 bp, Homo sapien
gtcattgctagtttgcctccatcag

SEQ ID NO: 2867254 - DNA, 25 bp, Homo sapien
ccccagcgggattgtgagtcattgc

SEQ ID NO: 2867255 - DNA, 25 bp, Homo sapien
agctgtttcgtggcagctggtgact

SEQ ID NO: 2867256 - DNA, 25 bp, Homo sapien
gcagctggtgacttccgtttcctgg

SEQ ID NO: 2867257 - DNA, 25 bp, Homo sapien
gctgtttcgtggcagctggtgactt

SEQ ID NO: 2867258 - DNA, 25 bp, Homo sapien
cagctgtttcgtggcagctggtgac

SEQ ID NO: 2867259 - DNA, 25 bp, Homo sapien
tccaaatcgcgcagcgctcggaagg

SEQ ID NO: 2867260 - DNA, 25 bp, Homo sapien
ggatctccaaatcgcgcagcgctcg

SEQ ID NO: 2867261 - DNA, 25 bp, Homo sapien
aatcgcgcagcgctcggaaggctcc

SEQ ID NO: 2867262 - DNA, 25 bp, Homo sapien
cagcgctcggaaggctccatcttca

SEQ ID NO: 2867263 - DNA, 25 bp, Homo sapien
ggagagcatgaaggctgagcggggg

SEQ ID NO: 2867264 - DNA, 25 bp, Homo sapien
gagagcatgaaggctgagcgggggc

SEQ ID NO: 2867265 - DNA, 25 bp, Homo sapien
tggtccccgccaggagctcgtgcag

SEQ ID NO: 2867266 - DNA, 25 bp, Homo sapien
gccagcctgtctgccacgctgctcc

SEQ ID NO: 2867267 - DNA, 25 bp, Homo sapien
gtccccgccaggagctcgtgcagag

SEQ ID NO: 2867268 - DNA, 25 bp, Homo sapien
tgctggtccccgccaggagctcgtg

SEQ ID NO: 2867269 - DNA, 25 bp, Homo sapien
catccaatccattacgagctcttac

SEQ ID NO: 2867270 - DNA, 25 bp, Homo sapien
gggcatccaatccattacgagctct

SEQ ID NO: 2867271 - DNA, 25 bp, Homo sapien
gcatccaatccattacgagctctta

SEQ ID NO: 2867272 - DNA, 25 bp, Homo sapien
agggcatccaatccattacgagctc

SEQ ID NO: 2867273 - DNA, 25 bp, Homo sapien
gcttttggcttcgagaaactgttca

SEQ ID NO: 2867274 - DNA, 25 bp, Homo sapien
tggagttggcttttggcttcgagaa

SEQ ID NO: 2867275 - DNA, 25 bp, Homo sapien
aattcggcaaaaatggcaccatccg

SEQ ID NO: 2867276 - DNA, 25 bp, Homo sapien
gaacatgctgaattcggcaaaaatg

SEQ ID NO: 2867277 - DNA, 25 bp, Homo sapien
tgatacttcctgcaaatacactagg

SEQ ID NO: 2867278 - DNA, 25 bp, Homo sapien
tacttcctgcaaatacactaggtct

SEQ ID NO: 2867279 - DNA, 25 bp, Homo sapien
tcagcgtattcgtaaaaagcccaat

SEQ ID NO: 2867280 - DNA, 25 bp, Homo sapien
atctccatggcaccgagcatcagcg

SEQ ID NO: 2867281 - DNA, 25 bp, Homo sapien
tggggggagcagcacactcaacagt

SEQ ID NO: 2867282 - DNA, 25 bp, Homo sapien
ggagcagcacactcaacagtgtccc

SEQ ID NO: 2867283 - DNA, 25 bp, Homo sapien
gggagcagcacactcaacagtgtcc

SEQ ID NO: 2867284 - DNA, 25 bp, Homo sapien
gggtggggggagcagcacactcaac

SEQ ID NO: 2867285 - DNA, 25 bp, Homo sapien
taaaagccctcaacggtgtgcctat

SEQ ID NO: 2867286 - DNA, 25 bp, Homo sapien
tgaacagttaagacgaggactctcc

SEQ ID NO: 2867287 - DNA, 25 bp, Homo sapien
gattcacgtaggagttcttaggcgg

SEQ ID NO: 2867288 - DNA, 25 bp, Homo sapien
tcttaggcgggacaagactggctct

SEQ ID NO: 2867289 - DNA, 25 bp, Homo sapien
catcttctggagatgtctcctcttc

SEQ ID NO: 2867290 - DNA, 25 bp, Homo sapien
ggttagacacaaggtgtcgggccac

SEQ ID NO: 2867291 - DNA, 25 bp, Homo sapien
ttctaccccatcttctggagatgtc

SEQ ID NO: 2867292 - DNA, 25 bp, Homo sapien
tagacacaaggtgtcgggccaccgg

SEQ ID NO: 2867293 - DNA, 25 bp, Homo sapien
actcccctgcagcagcgttgggctt

SEQ ID NO: 2867294 - DNA, 25 bp, Homo sapien
tgcagcagcgttgggcttacgcgtt

SEQ ID NO: 2867295 - DNA, 25 bp, Homo sapien
tacgcgttgggctcccagcagcttt

SEQ ID NO: 2867296 - DNA, 25 bp, Homo sapien
ttgggcttacgcgttgggctcccag

SEQ ID NO: 2867297 - DNA, 25 bp, Homo sapien
gcattcttggcatttacatcccggg

SEQ ID NO: 2867298 - DNA, 25 bp, Homo sapien
ttggcatttacatcccggggactca

SEQ ID NO: 2867299 - DNA, 25 bp, Homo sapien
ttacatcccggggactcagcacatc

SEQ ID NO: 2867300 - DNA, 25 bp, Homo sapien
aggcattcttggcatttacatcccg

SEQ ID NO: 2867301 - DNA, 25 bp, Homo sapien
tctgaggcacacaataaggaagggc

SEQ ID NO: 2867302 - DNA, 25 bp, Homo sapien
tgtgcagggcaatgatgtacccctt

SEQ ID NO: 2867303 - DNA, 25 bp, Homo sapien
tggacccaaatggaagttcagtgcc

SEQ ID NO: 2867304 - DNA, 25 bp, Homo sapien
cagaacatgtaaagagagcccagga

SEQ ID NO: 2867305 - DNA, 25 bp, Homo sapien
ttttcagtgaccatatggagccagg

SEQ ID NO: 2867306 - DNA, 25 bp, Homo sapien
cagacggagacgaatgccatgcata

SEQ ID NO: 2867307 - DNA, 25 bp, Homo sapien
tggagccaggagcatactttgaact

SEQ ID NO: 2867308 - DNA, 25 bp, Homo sapien
acatgcagcctgttgacaatgaccc

SEQ ID NO: 2867309 - DNA, 25 bp, Homo sapien
tccaaaggtcatggggttggctgct

SEQ ID NO: 2867310 - DNA, 25 bp, Homo sapien
tggctgctggtgattcgttgttgaa

SEQ ID NO: 2867311 - DNA, 25 bp, Homo sapien
tcagaaatgcccgttgaatacaaat

SEQ ID NO: 2867312 - DNA, 25 bp, Homo sapien
tgaaagatatctcagggctggtcaa

SEQ ID NO: 2867313 - DNA, 25 bp, Homo sapien
ccatgggtcaatgtggttgtactta

SEQ ID NO: 2867314 - DNA, 25 bp, Homo sapien
gtcaatgtggttgtacttatgcaaa

SEQ ID NO: 2867315 - DNA, 25 bp, Homo sapien
acagccatgggtcaatgtggttgta

SEQ ID NO: 2867316 - DNA, 25 bp, Homo sapien
gggtcaatgtggttgtacttatgca

SEQ ID NO: 2867317 - DNA, 25 bp, Homo sapien
gaccctgccacggaattttacctca

SEQ ID NO: 2867318 - DNA, 25 bp, Homo sapien
ttacctcaatgacaaaacctagctc

SEQ ID NO: 2867319 - DNA, 25 bp, Homo sapien
ggcctcaaagaaccatcaaactctg

SEQ ID NO: 2867320 - DNA, 25 bp, Homo sapien
ggtgctggcttcttgaccctgccac

SEQ ID NO: 2867321 - DNA, 25 bp, Homo sapien
ctggaatgcatgtcctacacagtcc

SEQ ID NO: 2867322 - DNA, 25 bp, Homo sapien
cagacacgggcggtgcggcaacaca

SEQ ID NO: 2867323 - DNA, 25 bp, Homo sapien
gaatgcatgtcctacacagtcctcg

SEQ ID NO: 2867324 - DNA, 25 bp, Homo sapien
cacagactaactagagaacacaaag

SEQ ID NO: 2867325 - DNA, 25 bp, Homo sapien
catggcctctagcaactcactgact

SEQ ID NO: 2867326 - DNA, 25 bp, Homo sapien
agagagagatacgagcctaaaccct

SEQ ID NO: 2867327 - DNA, 25 bp, Homo sapien
cactgactgcgaagctctgttgatt

SEQ ID NO: 2867328 - DNA, 25 bp, Homo sapien
cctaaaccctcacattggactacag

SEQ ID NO: 2867329 - DNA, 25 bp, Homo sapien
agagacgcctctgccctcttgcgtg

SEQ ID NO: 2867330 - DNA, 25 bp, Homo sapien
caccagctgccttgagtgtgccagt

SEQ ID NO: 2867331 - DNA, 25 bp, Homo sapien
ttgagtgtgccagtaaactaaaacc

SEQ ID NO: 2867332 - DNA, 25 bp, Homo sapien
tttccgctaagtccacaggggaggc

SEQ ID NO: 2867333 - DNA, 25 bp, Homo sapien
ttcacatcggtgatgccgcggaacg

SEQ ID NO: 2867334 - DNA, 25 bp, Homo sapien
gatgccgcggaacgccttcctcggg

SEQ ID NO: 2867335 - DNA, 25 bp, Homo sapien
cttcctcgggatcccctggatctgg

SEQ ID NO: 2867336 - DNA, 25 bp, Homo sapien
aggttcttcacatcggtgatgccgc

SEQ ID NO: 2867337 - DNA, 25 bp, Homo sapien
ctgtaaagaccgacccatcaggcct

SEQ ID NO: 2867338 - DNA, 25 bp, Homo sapien
tgttttcactaagaacgcaggcctg

SEQ ID NO: 2867339 - DNA, 25 bp, Homo sapien
gagcgtgcaaactggccctgcaaaa

SEQ ID NO: 2867340 - DNA, 25 bp, Homo sapien
ggatctcaacgagtaatcaatctgt

SEQ ID NO: 2867341 - DNA, 25 bp, Homo sapien
gtagcagtcgtacaaaggttctgat

SEQ ID NO: 2867342 - DNA, 25 bp, Homo sapien
tctgatttgcaatacggtgggatga

SEQ ID NO: 2867343 - DNA, 25 bp, Homo sapien
cttgtttgagtagacaacatcccat

SEQ ID NO: 2867344 - DNA, 25 bp, Homo sapien
ccataatacactgggaggagtagca

SEQ ID NO: 2867345 - DNA, 25 bp, Homo sapien
cagcttcaatggtgttactgatggg

SEQ ID NO: 2867346 - DNA, 25 bp, Homo sapien
tgggctgacaaactgacagcttcaa

SEQ ID NO: 2867347 - DNA, 25 bp, Homo sapien
tggggcgtggaggagggttcagggc

SEQ ID NO: 2867348 - DNA, 25 bp, Homo sapien
ctccagtgggctgacaaactgacag

SEQ ID NO: 2867349 - DNA, 25 bp, Homo sapien
gagaagcgtccttgttcccgtgtct

SEQ ID NO: 2867350 - DNA, 25 bp, Homo sapien
tatgtaaatcgatcctttggcccga

SEQ ID NO: 2867351 - DNA, 25 bp, Homo sapien
caaagacattcccatgccaaaaagc

SEQ ID NO: 2867352 - DNA, 25 bp, Homo sapien
caaaaagcttttgcaattaggagat

SEQ ID NO: 2867353 - DNA, 25 bp, Homo sapien
tgggcacaggaaagagtaagtttgg

SEQ ID NO: 2867354 - DNA, 25 bp, Homo sapien
tggaaaggttgctggttgcttcacc

SEQ ID NO: 2867355 - DNA, 25 bp, Homo sapien
tggttttggaaaggttgctggttgc

SEQ ID NO: 2867356 - DNA, 25 bp, Homo sapien
ctgggcacaggaaagagtaagtttg

SEQ ID NO: 2867357 - DNA, 25 bp, Homo sapien
tgtactactgttgtggatcccttcc

SEQ ID NO: 2867358 - DNA, 25 bp, Homo sapien
aaacgcttgagttctgaaaccttag

SEQ ID NO: 2867359 - DNA, 25 bp, Homo sapien
ggatggaacattgcccctaagatga

SEQ ID NO: 2867360 - DNA, 25 bp, Homo sapien
gaaaccttagccaggccattggatg

SEQ ID NO: 2867361 - DNA, 25 bp, Homo sapien
cttccacgttgctggttgattggtt

SEQ ID NO: 2867362 - DNA, 25 bp, Homo sapien
gctggttgattggttgcaaatgtac

SEQ ID NO: 2867363 - DNA, 25 bp, Homo sapien
ttttcctcttccacgttgctggttg

SEQ ID NO: 2867364 - DNA, 25 bp, Homo sapien
tcctcttccacgttgctggttgatt

SEQ ID NO: 2867365 - DNA, 25 bp, Homo sapien
tttcttatgtagtaaagtataatca

SEQ ID NO: 2867366 - DNA, 25 bp, Homo sapien
ttcttatgtagtaaagtataatcat

SEQ ID NO: 2867367 - DNA, 25 bp, Homo sapien
tctcctaatctgtctgaatgccatg

SEQ ID NO: 2867368 - DNA, 25 bp, Homo sapien
aatgccatgcagtccacggtttggt

SEQ ID NO: 2867369 - DNA, 25 bp, Homo sapien
tgtctgaatgccatgcagtccacgg

SEQ ID NO: 2867370 - DNA, 25 bp, Homo sapien
cttctcatacccttgccctctccta

SEQ ID NO: 2867371 - DNA, 25 bp, Homo sapien
acttacagcataccttaatttggac

SEQ ID NO: 2867372 - DNA, 25 bp, Homo sapien
tggaaccgcatcgttttggacaaaa

SEQ ID NO: 2867373 - DNA, 25 bp, Homo sapien
gaactgtgtatagattgtagtttaa

SEQ ID NO: 2867374 - DNA, 25 bp, Homo sapien
tccagaggctgctgtatggaaccgc

SEQ ID NO: 2867375 - DNA, 25 bp, Homo sapien
tttaacggctctgaacccttcctgc

SEQ ID NO: 2867376 - DNA, 25 bp, Homo sapien
ccttcctgctctgctgtggtcctgg

SEQ ID NO: 2867377 - DNA, 25 bp, Homo sapien
gagttggattttaacggctctgaac

SEQ ID NO: 2867378 - DNA, 25 bp, Homo sapien
cctgctctgctgtggtcctgggcat

SEQ ID NO: 2867379 - DNA, 25 bp, Homo sapien
ggctctctgcaacaatgaccttctt

SEQ ID NO: 2867380 - DNA, 25 bp, Homo sapien
aggctttttgggtatctggtcctca

SEQ ID NO: 2867381 - DNA, 25 bp, Homo sapien
ttttgggtatctggtcctcacttgg

SEQ ID NO: 2867382 - DNA, 25 bp, Homo sapien
cttgcattgctgaaacatcaggctc

SEQ ID NO: 2867383 - DNA, 25 bp, Homo sapien
aagatatatgggagaagccaacctc

SEQ ID NO: 2867384 - DNA, 25 bp, Homo sapien
gtaaagatatatgggagaagccaac

SEQ ID NO: 2867385 - DNA, 25 bp, Homo sapien
atatatgggagaagccaacctcaag

SEQ ID NO: 2867386 - DNA, 25 bp, Homo sapien
tagtaaagatatatgggagaagcca

SEQ ID NO: 2867387 - DNA, 25 bp, Homo sapien
atgtccttgaccattgagattttgc

SEQ ID NO: 2867388 - DNA, 25 bp, Homo sapien
aaactcacaattacatcacatatgt

SEQ ID NO: 2867389 - DNA, 25 bp, Homo sapien
cacaattacatcacatatgtccttg

SEQ ID NO: 2867390 - DNA, 25 bp, Homo sapien
acatcacatatgtccttgaccattg

SEQ ID NO: 2867391 - DNA, 25 bp, Homo sapien
ccccatggcccgcatttttgccaaa

SEQ ID NO: 2867392 - DNA, 25 bp, Homo sapien
ttgacaccccatggcccgcattttt

SEQ ID NO: 2867393 - DNA, 25 bp, Homo sapien
ctttgacaccccatggcccgcattt

SEQ ID NO: 2867394 - DNA, 25 bp, Homo sapien
ccatggcccgcatttttgccaaaag

SEQ ID NO: 2867395 - DNA, 25 bp, Homo sapien
tcattcttctggaccagataaaaag

SEQ ID NO: 2867396 - DNA, 25 bp, Homo sapien
tcttctggaccagataaaaagagga

SEQ ID NO: 2867397 - DNA, 25 bp, Homo sapien
caaatcattcttctggaccagataa

SEQ ID NO: 2867398 - DNA, 25 bp, Homo sapien
ttcttctggaccagataaaaagagg

SEQ ID NO: 2867399 - DNA, 25 bp, Homo sapien
tttctctacacaatgattattatta

SEQ ID NO: 2867400 - DNA, 25 bp, Homo sapien
gccctttcaggtaactgaaggagga

SEQ ID NO: 2867401 - DNA, 25 bp, Homo sapien
tctcacggatcatgataaaaggctc

SEQ ID NO: 2867402 - DNA, 25 bp, Homo sapien
ccagtctctgacttgccctttcagg

SEQ ID NO: 2867403 - DNA, 25 bp, Homo sapien
taaaaggctcatcgaaagggtgcag

SEQ ID NO: 2867404 - DNA, 25 bp, Homo sapien
tcactttgttatgcacagtccccat

SEQ ID NO: 2867405 - DNA, 25 bp, Homo sapien
ggcccagcagcgcacattctgaagg

SEQ ID NO: 2867406 - DNA, 25 bp, Homo sapien
cccagcagcgcacattctgaaggtt

SEQ ID NO: 2867407 - DNA, 25 bp, Homo sapien
tctgaaggttcactttgttatgcac

SEQ ID NO: 2867408 - DNA, 25 bp, Homo sapien
ctgcaacctctgtctcctgggttca

SEQ ID NO: 2867409 - DNA, 25 bp, Homo sapien
agtggtacaatctcgatcttggctc

SEQ ID NO: 2867410 - DNA, 25 bp, Homo sapien
tagtagagatgggggtctcgccatg

SEQ ID NO: 2867411 - DNA, 25 bp, Homo sapien
gtctcctgggttcaaaactctcctg

SEQ ID NO: 2867412 - DNA, 25 bp, Homo sapien
taagtgtcactgagcatgggccaca

SEQ ID NO: 2867413 - DNA, 25 bp, Homo sapien
cagtcctgggaacgtatcacagaga

SEQ ID NO: 2867414 - DNA, 25 bp, Homo sapien
tgaacggagtttcacctgcgggtgt

SEQ ID NO: 2867415 - DNA, 25 bp, Homo sapien
ggaccgttcagcgtctttgcagaca

SEQ ID NO: 2867416 - DNA, 25 bp, Homo sapien
tctttgacacaatccatgacagttc

SEQ ID NO: 2867417 - DNA, 25 bp, Homo sapien
tttgacacaatccatgacagttctt

SEQ ID NO: 2867418 - DNA, 25 bp, Homo sapien
catgacagttctttgatatagattg

SEQ ID NO: 2867419 - DNA, 25 bp, Homo sapien
aatctttgacacaatccatgacagt

SEQ ID NO: 2867420 - DNA, 25 bp, Homo sapien
taaaagctgtagacagactctatgc

SEQ ID NO: 2867421 - DNA, 25 bp, Homo sapien
tgtaccagacatggtctgagtgcac

SEQ ID NO: 2867422 - DNA, 25 bp, Homo sapien
tctgagaacaaggtgaaccggtacc

SEQ ID NO: 2867423 - DNA, 25 bp, Homo sapien
aaaattgacctaatgaggaaggcag

SEQ ID NO: 2867424 - DNA, 25 bp, Homo sapien
ttccagatgtggagagcacaagcat

SEQ ID NO: 2867425 - DNA, 25 bp, Homo sapien
cttccagatgtggagagcacaagca

SEQ ID NO: 2867426 - DNA, 25 bp, Homo sapien
cagcttccagatgtggagagcacaa

SEQ ID NO: 2867427 - DNA, 25 bp, Homo sapien
gcttccagatgtggagagcacaagc

SEQ ID NO: 2867428 - DNA, 25 bp, Homo sapien
actaaagggatccatcccagtgctg

SEQ ID NO: 2867429 - DNA, 25 bp, Homo sapien
caccaggaggtatgagactgaaaga

SEQ ID NO: 2867430 - DNA, 25 bp, Homo sapien
ggtatgctaccatgggactgccctc

SEQ ID NO: 2867431 - DNA, 25 bp, Homo sapien
gcaaaacctatttctgggcactcta

SEQ ID NO: 2867432 - DNA, 25 bp, Homo sapien
aagagacaggtgctctcatgcattt

SEQ ID NO: 2867433 - DNA, 25 bp, Homo sapien
ccggtaatgtctttcagttgagcaa

SEQ ID NO: 2867434 - DNA, 25 bp, Homo sapien
caaaagctcttaacgtgcacataac

SEQ ID NO: 2867435 - DNA, 25 bp, Homo sapien
agtcagagttaggtcatggtgttcc

SEQ ID NO: 2867436 - DNA, 25 bp, Homo sapien
ctgctctggcaggcattcaaattcc

SEQ ID NO: 2867437 - DNA, 25 bp, Homo sapien
tgctctggcaggcattcaaattcct

SEQ ID NO: 2867438 - DNA, 25 bp, Homo sapien
tctggcaggcattcaaattccttcc

SEQ ID NO: 2867439 - DNA, 25 bp, Homo sapien
ggcaggcattcaaattccttcctca

SEQ ID NO: 2867440 - DNA, 25 bp, Homo sapien
tcccaaatatggcaggcataggagc

SEQ ID NO: 2867441 - DNA, 25 bp, Homo sapien
cttcccaaatatggcaggcatagga

SEQ ID NO: 2867442 - DNA, 25 bp, Homo sapien
cccaaatatggcaggcataggagct

SEQ ID NO: 2867443 - DNA, 25 bp, Homo sapien
ggcataggagctccagacttcacac

SEQ ID NO: 2867444 - DNA, 25 bp, Homo sapien
tttgccatgcatccagagctacggg

SEQ ID NO: 2867445 - DNA, 25 bp, Homo sapien
catccagagctacgggtgggcgtcc

SEQ ID NO: 2867446 - DNA, 25 bp, Homo sapien
ctacgggtgggcgtcctgatctcac

SEQ ID NO: 2867447 - DNA, 25 bp, Homo sapien
gggtgggcgtcctgatctcactccc

SEQ ID NO: 2867448 - DNA, 25 bp, Homo sapien
gggagaggcttcaacatatttatca

SEQ ID NO: 2867449 - DNA, 25 bp, Homo sapien
ttggtacattggtagctgcagggag

SEQ ID NO: 2867450 - DNA, 25 bp, Homo sapien
attggtacattggtagctgcaggga

SEQ ID NO: 2867451 - DNA, 25 bp, Homo sapien
cagggagaggcttcaacatatttat

SEQ ID NO: 2867452 - DNA, 25 bp, Homo sapien
tcttcactggaaagggtgacgcggc

SEQ ID NO: 2867453 - DNA, 25 bp, Homo sapien
aatagagcctctacctcggccaagg

SEQ ID NO: 2867454 - DNA, 25 bp, Homo sapien
aggaatcccgagatgtcagccaagc

SEQ ID NO: 2867455 - DNA, 25 bp, Homo sapien
tcagccaagcgcagaatagccaggt

SEQ ID NO: 2867456 - DNA, 25 bp, Homo sapien
ggttgtggctgataagtaaggaaca

SEQ ID NO: 2867457 - DNA, 25 bp, Homo sapien
tattccaagcatgaactaatgttgg

SEQ ID NO: 2867458 - DNA, 25 bp, Homo sapien
gctgactgattctcacgttaggaaa

SEQ ID NO: 2867459 - DNA, 25 bp, Homo sapien
gctaaacaggctttgacatggtggc

SEQ ID NO: 2867460 - DNA, 25 bp, Homo sapien
tcatgttaagtagctgcgtgccacc

SEQ ID NO: 2867461 - DNA, 25 bp, Homo sapien
ggttacagatagtgacagcctcata

SEQ ID NO: 2867462 - DNA, 25 bp, Homo sapien
tcgccgaaaagcaagcacgctgtgt

SEQ ID NO: 2867463 - DNA, 25 bp, Homo sapien
tatcactgagagaagctacctttcc

SEQ ID NO: 2867464 - DNA, 25 bp, Homo sapien
tatggactcttcagtcagacctggg

SEQ ID NO: 2867465 - DNA, 25 bp, Homo sapien
tcaggtgtgcccgttgaaggatgcc

SEQ ID NO: 2867466 - DNA, 25 bp, Homo sapien
gggtcttttactagcactggccaca

SEQ ID NO: 2867467 - DNA, 25 bp, Homo sapien
gcctggctcgcctgaactgtgaaag

SEQ ID NO: 2867468 - DNA, 25 bp, Homo sapien
tggatacagacacttgtagactgag

SEQ ID NO: 2867469 - DNA, 25 bp, Homo sapien
tgatcctgtagctaaaaacaatgag

SEQ ID NO: 2867470 - DNA, 25 bp, Homo sapien
tcaagaaaggttgagccagagatgt

SEQ ID NO: 2867471 - DNA, 25 bp, Homo sapien
gactgagttttcacccactatgtat

SEQ ID NO: 2867472 - DNA, 25 bp, Homo sapien
cgctctaagctcaaacatgttaagt

SEQ ID NO: 2867473 - DNA, 25 bp, Homo sapien
ccgaggggagcaaaagccaagccaa

SEQ ID NO: 2867474 - DNA, 25 bp, Homo sapien
gacatcctcccgaggggagcaaaag

SEQ ID NO: 2867475 - DNA, 25 bp, Homo sapien
agagagtgagcgctctaagctcaaa

SEQ ID NO: 2867476 - DNA, 25 bp, Homo sapien
caacagcacaggatcgggagaacat

SEQ ID NO: 2867477 - DNA, 25 bp, Homo sapien
gtcaaaaacttctcactgggcaggg

SEQ ID NO: 2867478 - DNA, 25 bp, Homo sapien
tattgagcgtgaacacagtaccgga

SEQ ID NO: 2867479 - DNA, 25 bp, Homo sapien
caacatgagccgtgggaagacagac

SEQ ID NO: 2867480 - DNA, 25 bp, Homo sapien
ggcctcctagagtcatggtatgcaa

SEQ ID NO: 2867481 - DNA, 25 bp, Homo sapien
gagttcccagctcgtaccagaaggt

SEQ ID NO: 2867482 - DNA, 25 bp, Homo sapien
ggatctctgtgctgtaaggaaacta

SEQ ID NO: 2867483 - DNA, 25 bp, Homo sapien
ccatacctggtaaagacgaggcata

SEQ ID NO: 2867484 - DNA, 25 bp, Homo sapien
aaatctcagttcatgggacccaagc

SEQ ID NO: 2867485 - DNA, 25 bp, Homo sapien
taaaattaacatggccttccactgg

SEQ ID NO: 2867486 - DNA, 25 bp, Homo sapien
cataaggcccagctagacgctagat

SEQ ID NO: 2867487 - DNA, 25 bp, Homo sapien
tgtcaaggccaatcaattgtccagg

SEQ ID NO: 2867488 - DNA, 25 bp, Homo sapien
tcttcacaacaagactacaaagtga

SEQ ID NO: 2867489 - DNA, 25 bp, Homo sapien
agagtcttgaatcctgttacatcaa

SEQ ID NO: 2867490 - DNA, 25 bp, Homo sapien
tgaaacagttaatatcgtagagtct

SEQ ID NO: 2867491 - DNA, 25 bp, Homo sapien
tacaaagtgagtaccacgataatct

SEQ ID NO: 2867492 - DNA, 25 bp, Homo sapien
tttcaagctcaatataaagcagtgg

SEQ ID NO: 2867493 - DNA, 25 bp, Homo sapien
gggcatgaaatcggatgtttttcaa

SEQ ID NO: 2867494 - DNA, 25 bp, Homo sapien
cagcatttaatttccgaatagggca

SEQ ID NO: 2867495 - DNA, 25 bp, Homo sapien
taaagaacatctaaacgcacagcat

SEQ ID NO: 2867496 - DNA, 25 bp, Homo sapien
taattcctatcgaccacatccaggg

SEQ ID NO: 2867497 - DNA, 25 bp, Homo sapien
tctttgggagacagacggatgaata

SEQ ID NO: 2867498 - DNA, 25 bp, Homo sapien
cagagtatatcaaggcatgtgcaat

SEQ ID NO: 2867499 - DNA, 25 bp, Homo sapien
taagctttgcgtgatggcactggat

SEQ ID NO: 2867500 - DNA, 25 bp, Homo sapien
tgcacaaatccccaaagcctgtgag

SEQ ID NO: 2867501 - DNA, 25 bp, Homo sapien
tctttgccacgattgggtctgtgcc

SEQ ID NO: 2867502 - DNA, 25 bp, Homo sapien
cactgtctgatgttaaggagtctct

SEQ ID NO: 2867503 - DNA, 25 bp, Homo sapien
cctaattaaagcagagtcactcgac

SEQ ID NO: 2867504 - DNA, 25 bp, Homo sapien
gggagggctcttctttctacataat

SEQ ID NO: 2867505 - DNA, 25 bp, Homo sapien
aacatcttcatatctacaggacggc

SEQ ID NO: 2867506 - DNA, 25 bp, Homo sapien
tggtcactctcagtgtctcctatag

SEQ ID NO: 2867507 - DNA, 25 bp, Homo sapien
caggacggcctgtgaaagtactatt

SEQ ID NO: 2867508 - DNA, 25 bp, Homo sapien
gaagctaacgttccctcttgctttg

SEQ ID NO: 2867509 - DNA, 25 bp, Homo sapien
tggtctaaacttggaggaagctaac

SEQ ID NO: 2867510 - DNA, 25 bp, Homo sapien
caaggaaaactctgattgtgtctgt

SEQ ID NO: 2867511 - DNA, 25 bp, Homo sapien
ctattgattccaacctggctccaga

SEQ ID NO: 2867512 - DNA, 25 bp, Homo sapien
caccataaatcaggaccctggcagt

SEQ ID NO: 2867513 - DNA, 25 bp, Homo sapien
tatgtgtgtgatgcggacaccataa

SEQ ID NO: 2867514 - DNA, 25 bp, Homo sapien
ccctggcagtatttaaatctgtgaa

SEQ ID NO: 2867515 - DNA, 25 bp, Homo sapien
aaacagggagatcctagtgaaagtt

SEQ ID NO: 2867516 - DNA, 25 bp, Homo sapien
gatgcaaaggccagattcaccactt

SEQ ID NO: 2867517 - DNA, 25 bp, Homo sapien
gaccttccaaggtatttaaagatgc

SEQ ID NO: 2867518 - DNA, 25 bp, Homo sapien
tgccaactgggaggaccaagtgttc

SEQ ID NO: 2867519 - DNA, 25 bp, Homo sapien
gcatcagggtttctgtgctaatctg

SEQ ID NO: 2867520 - DNA, 25 bp, Homo sapien
catggattcagtcaagctggacctc

SEQ ID NO: 2867521 - DNA, 25 bp, Homo sapien
cacatgaactatatacggcttgact

SEQ ID NO: 2867522 - DNA, 25 bp, Homo sapien
gaatgcccttgacctttgaccctta

SEQ ID NO: 2867523 - DNA, 25 bp, Homo sapien
ctgtgagaacagtcaaggccaaggg

SEQ ID NO: 2867524 - DNA, 25 bp, Homo sapien
tggcactggtgccttggagcttgct

SEQ ID NO: 2867525 - DNA, 25 bp, Homo sapien
gcagtagcaggagggctgtcaggtt

SEQ ID NO: 2867526 - DNA, 25 bp, Homo sapien
tacgaagagtagttacacgatgatg

SEQ ID NO: 2867527 - DNA, 25 bp, Homo sapien
gatgtcagcttagcagccacagaca

SEQ ID NO: 2867528 - DNA, 25 bp, Homo sapien
ctggcaggatggtctcagggtatct

SEQ ID NO: 2867529 - DNA, 25 bp, Homo sapien
ggtctcagggtatctctgggggctg

SEQ ID NO: 2867530 - DNA, 25 bp, Homo sapien
gtctcagggtatctctgggggctgt

SEQ ID NO: 2867531 - DNA, 25 bp, Homo sapien
gcaggatggtctcagggtatctctg

SEQ ID NO: 2867532 - DNA, 25 bp, Homo sapien
gcagaactccagggcagaggaagcg

SEQ ID NO: 2867533 - DNA, 25 bp, Homo sapien
gaactccagggcagaggaagcgtac

SEQ ID NO: 2867534 - DNA, 25 bp, Homo sapien
cagaactccagggcagaggaagcgt

SEQ ID NO: 2867535 - DNA, 25 bp, Homo sapien
agaactccagggcagaggaagcgta

SEQ ID NO: 2867536 - DNA, 25 bp, Homo sapien
tttgcatagggtaattctgatgagg

SEQ ID NO: 2867537 - DNA, 25 bp, Homo sapien
tctttgcatagggtaattctgatga

SEQ ID NO: 2867538 - DNA, 25 bp, Homo sapien
gcatagggtaattctgatgaggttt

SEQ ID NO: 2867539 - DNA, 25 bp, Homo sapien
tgcatagggtaattctgatgaggtt

SEQ ID NO: 2867540 - DNA, 25 bp, Homo sapien
tgatttgtgggctctgtgaacggca

SEQ ID NO: 2867541 - DNA, 25 bp, Homo sapien
ctgtgaacggcaggtttctggcaga

SEQ ID NO: 2867542 - DNA, 25 bp, Homo sapien
tggcagatccacaatttcgatttcc

SEQ ID NO: 2867543 - DNA, 25 bp, Homo sapien
atccacaatttcgatttcccctttg

SEQ ID NO: 2867544 - DNA, 25 bp, Homo sapien
aagtagaaagatcaagattcatctg

SEQ ID NO: 2867545 - DNA, 25 bp, Homo sapien
acaatatcccgaggccatccctgga

SEQ ID NO: 2867546 - DNA, 25 bp, Homo sapien
aaagatcaagattcatctgttctca

SEQ ID NO: 2867547 - DNA, 25 bp, Homo sapien
accagacaatatcccgaggccatcc

SEQ ID NO: 2867548 - DNA, 25 bp, Homo sapien
cagcaggaatatcaagatcctcttt

SEQ ID NO: 2867549 - DNA, 25 bp, Homo sapien
tatgaagtcaaacaacagcaggaat

SEQ ID NO: 2867550 - DNA, 25 bp, Homo sapien
gcaggaatatcaagatcctcttttc

SEQ ID NO: 2867551 - DNA, 25 bp, Homo sapien
gtgccagttgctgagatatgaagtc

SEQ ID NO: 2867552 - DNA, 25 bp, Homo sapien
catggcggctgactggaaagatcta

SEQ ID NO: 2867553 - DNA, 25 bp, Homo sapien
gcagacaggtgtctgaaggcccaag

SEQ ID NO: 2867554 - DNA, 25 bp, Homo sapien
caaagtaccaagatatctctccagg

SEQ ID NO: 2867555 - DNA, 25 bp, Homo sapien
gctatgctgacagaacatggcggct

SEQ ID NO: 2867556 - DNA, 25 bp, Homo sapien
tctagtgccatccaacagagttcca

SEQ ID NO: 2867557 - DNA, 25 bp, Homo sapien
tgcaagtctcaaaggcaacagggac

SEQ ID NO: 2867558 - DNA, 25 bp, Homo sapien
tagatgggaggccagtaataaccct

SEQ ID NO: 2867559 - DNA, 25 bp, Homo sapien
tggctaaacacccaactgtggcacg

SEQ ID NO: 2867560 - DNA, 25 bp, Homo sapien
tgtagagctctaacaagaagggttt

SEQ ID NO: 2867561 - DNA, 25 bp, Homo sapien
tcattacttggcttctgtagagctc

SEQ ID NO: 2867562 - DNA, 25 bp, Homo sapien
cccactttgggaatctaacttacag

SEQ ID NO: 2867563 - DNA, 25 bp, Homo sapien
gagcaaacagtgacatacggcaaat

SEQ ID NO: 2867564 - DNA, 25 bp, Homo sapien
tcagcaagtttgtaaagggaataag

SEQ ID NO: 2867565 - DNA, 25 bp, Homo sapien
taagttctcagcaagtttgtaaagg

SEQ ID NO: 2867566 - DNA, 25 bp, Homo sapien
aagtagtaagttctcagcaagtttg

SEQ ID NO: 2867567 - DNA, 25 bp, Homo sapien
tctcagcaagtttgtaaagggaata

SEQ ID NO: 2867568 - DNA, 25 bp, Homo sapien
tcttgagtggtgagagcccaccttt

SEQ ID NO: 2867569 - DNA, 25 bp, Homo sapien
tggtctacagcccatagccgttgag

SEQ ID NO: 2867570 - DNA, 25 bp, Homo sapien
catgaatgtaaagcctagagcctgc

SEQ ID NO: 2867571 - DNA, 25 bp, Homo sapien
caatgcactctgtgaaggacatgcc

SEQ ID NO: 2867572 - DNA, 25 bp, Homo sapien
tacagcactatccacgaggttaggt

SEQ ID NO: 2867573 - DNA, 25 bp, Homo sapien
tcagtagagggtgtctggtgcaacc

SEQ ID NO: 2867574 - DNA, 25 bp, Homo sapien
gactgatctgagagttcttggccct

SEQ ID NO: 2867575 - DNA, 25 bp, Homo sapien
tacgcctgaagccaaaaaggaagcc

SEQ ID NO: 2867576 - DNA, 25 bp, Homo sapien
cccgaactaggacgatctgacagca

SEQ ID NO: 2867577 - DNA, 25 bp, Homo sapien
tctgagggctctgcaatgattgact

SEQ ID NO: 2867578 - DNA, 25 bp, Homo sapien
gcagaatctaagctctagccacagt

SEQ ID NO: 2867579 - DNA, 25 bp, Homo sapien
ggctatcagcacaagtccacagaat

SEQ ID NO: 2867580 - DNA, 25 bp, Homo sapien
gccccacaagctgctaaaggtataa

SEQ ID NO: 2867581 - DNA, 25 bp, Homo sapien
tctcaattctaacgtagatacaagg

SEQ ID NO: 2867582 - DNA, 25 bp, Homo sapien
taacgtagatacaaggctgggactg

SEQ ID NO: 2867583 - DNA, 25 bp, Homo sapien
tagagagaaaatatgagcctgagtc

SEQ ID NO: 2867584 - DNA, 25 bp, Homo sapien
catagaccatctctgggcttcagta

SEQ ID NO: 2867585 - DNA, 25 bp, Homo sapien
tgctttcattacagagggtgctact

SEQ ID NO: 2867586 - DNA, 25 bp, Homo sapien
tgtagggcccattcttagtgtaacc

SEQ ID NO: 2867587 - DNA, 25 bp, Homo sapien
taaagggtgccaacacgtgtttagc

SEQ ID NO: 2867588 - DNA, 25 bp, Homo sapien
gtagatgtgcaaattatccagcccc

SEQ ID NO: 2867589 - DNA, 25 bp, Homo sapien
tcagaaactggtgggtaggttcagc

SEQ ID NO: 2867590 - DNA, 25 bp, Homo sapien
gtatgacagtcatcctcaaagtggg

SEQ ID NO: 2867591 - DNA, 25 bp, Homo sapien
tgcccgtggttagtaagccacagag

SEQ ID NO: 2867592 - DNA, 25 bp, Homo sapien
gacaaagtcgagattcagacccaga

SEQ ID NO: 2867593 - DNA, 25 bp, Homo sapien
tacaccgtaggtcaacagaacccaa

SEQ ID NO: 2867594 - DNA, 25 bp, Homo sapien
cactgtgctgggagctctacatgca

SEQ ID NO: 2867595 - DNA, 25 bp, Homo sapien
caacggctctatgatttaggtgtca

SEQ ID NO: 2867596 - DNA, 25 bp, Homo sapien
gtaatatcaaccagatgtggcaaag

SEQ ID NO: 2867597 - DNA, 25 bp, Homo sapien
tcccttccagtaatatcaaccagat

SEQ ID NO: 2867598 - DNA, 25 bp, Homo sapien
tccaaagcattgtaaagtcacagct

SEQ ID NO: 2867599 - DNA, 25 bp, Homo sapien
tgtggcaaagaagtctgtgcagaat

SEQ ID NO: 2867600 - DNA, 25 bp, Homo sapien
cttacttcaacctctgcctcctggg

SEQ ID NO: 2867601 - DNA, 25 bp, Homo sapien
ctggagtgcagtggcatgatctcag

SEQ ID NO: 2867602 - DNA, 25 bp, Homo sapien
gacggagtctcactttgtcagcagg

SEQ ID NO: 2867603 - DNA, 25 bp, Homo sapien
ctacatgcacgcaccaccacaccct

SEQ ID NO: 2867604 - DNA, 25 bp, Homo sapien
cacagcttacaggtagaagagccag

SEQ ID NO: 2867605 - DNA, 25 bp, Homo sapien
ccagccacgcagaggattttaatca

SEQ ID NO: 2867606 - DNA, 25 bp, Homo sapien
ctgccatccaagctagagtgccgtg

SEQ ID NO: 2867607 - DNA, 25 bp, Homo sapien
gaagagccagcatgacgactcaggt

SEQ ID NO: 2867608 - DNA, 25 bp, Homo sapien
agtctggtgagcttcggcgtgctct

SEQ ID NO: 2867609 - DNA, 25 bp, Homo sapien
tggaaggacttgcagcttattcttg

SEQ ID NO: 2867610 - DNA, 25 bp, Homo sapien
gagcttcggcgtgctctggaaaagc

SEQ ID NO: 2867611 - DNA, 25 bp, Homo sapien
gacttgcagcttattcttgttcagg

SEQ ID NO: 2867612 - DNA, 25 bp, Homo sapien
tgtacatcaaaggagctcctaaaga

SEQ ID NO: 2867613 - DNA, 25 bp, Homo sapien
tacatcaaaggagctcctaaagatt

SEQ ID NO: 2867614 - DNA, 25 bp, Homo sapien
ttgtacatcaaaggagctcctaaag

SEQ ID NO: 2867615 - DNA, 25 bp, Homo sapien
catcaaaggagctcctaaagatttc

SEQ ID NO: 2867616 - DNA, 25 bp, Homo sapien
catctgtaattcctcgatggttatc

SEQ ID NO: 2867617 - DNA, 25 bp, Homo sapien
cgtgctgtaatgttaaaccccaaag

SEQ ID NO: 2867618 - DNA, 25 bp, Homo sapien
gggaagaacgtgctgtaatgttaaa

SEQ ID NO: 2867619 - DNA, 25 bp, Homo sapien
gccactctttgccctgagccctgat

SEQ ID NO: 2867620 - DNA, 25 bp, Homo sapien
catcctgtttgggtggggagctatc

SEQ ID NO: 2867621 - DNA, 25 bp, Homo sapien
ctgtttgggtggggagctatctgag

SEQ ID NO: 2867622 - DNA, 25 bp, Homo sapien
aatgcctgtgaatctgtcttccgga

SEQ ID NO: 2867623 - DNA, 25 bp, Homo sapien
cctgtgaatctgtcttccggaccat

SEQ ID NO: 2867624 - DNA, 25 bp, Homo sapien
gcctgtgaatctgtcttccggacca

SEQ ID NO: 2867625 - DNA, 25 bp, Homo sapien
tgcctgtgaatctgtcttccggacc

SEQ ID NO: 2867626 - DNA, 25 bp, Homo sapien
ccggcagagccgtgagctgttgcag

SEQ ID NO: 2867627 - DNA, 25 bp, Homo sapien
tcttctagggaagccggcagagccg

SEQ ID NO: 2867628 - DNA, 25 bp, Homo sapien
acagaacacagttcttctagggaag

SEQ ID NO: 2867629 - DNA, 25 bp, Homo sapien
aacagaacacagttcttctagggaa

SEQ ID NO: 2867630 - DNA, 25 bp, Homo sapien
tgacgctgacctggttgtcttccag

SEQ ID NO: 2867631 - DNA, 25 bp, Homo sapien
cctctctcgatgacgctgacctggt

SEQ ID NO: 2867632 - DNA, 25 bp, Homo sapien
caggtcctggaaggcgcctctctcg

SEQ ID NO: 2867633 - DNA, 25 bp, Homo sapien
tggaaggcgcctctctcgatgacgc

SEQ ID NO: 2867634 - DNA, 25 bp, Homo sapien
aagactcggaggttcttgagcccag

SEQ ID NO: 2867635 - DNA, 25 bp, Homo sapien
ggttcttgagcccagcgaagtccat

SEQ ID NO: 2867636 - DNA, 25 bp, Homo sapien
tcggaggttcttgagcccagcgaag

SEQ ID NO: 2867637 - DNA, 25 bp, Homo sapien
ggaggttcttgagcccagcgaagtc

SEQ ID NO: 2867638 - DNA, 25 bp, Homo sapien
atcctggtgatattatttctgtcca

SEQ ID NO: 2867639 - DNA, 25 bp, Homo sapien
gatcctggtgatattatttctgtcc

SEQ ID NO: 2867640 - DNA, 25 bp, Homo sapien
tgatcctggtgatattatttctgtc

SEQ ID NO: 2867641 - DNA, 25 bp, Homo sapien
ttaaggatattgtatggaataaacc

SEQ ID NO: 2867642 - DNA, 25 bp, Homo sapien
taaggatattgtatggaataaacca

SEQ ID NO: 2867643 - DNA, 25 bp, Homo sapien
aaggatattgtatggaataaaccat

SEQ ID NO: 2867644 - DNA, 25 bp, Homo sapien
ggatattgtatggaataaaccattc

SEQ ID NO: 2867645 - DNA, 25 bp, Homo sapien
aggacacagcatggtatctcagcag

SEQ ID NO: 2867646 - DNA, 25 bp, Homo sapien
ttggggaccttgacaactgtgaata

SEQ ID NO: 2867647 - DNA, 25 bp, Homo sapien
atctgaattcagatggatgtttggg

SEQ ID NO: 2867648 - DNA, 25 bp, Homo sapien
gacaatgcaaccaagggtttaatta

SEQ ID NO: 2867649 - DNA, 25 bp, Homo sapien
tctgaggctagcttagaagaggcaa

SEQ ID NO: 2867650 - DNA, 25 bp, Homo sapien
gcagatgatctgaagcctccatgct

SEQ ID NO: 2867651 - DNA, 25 bp, Homo sapien
gcagatacctttgggactcagcctc

SEQ ID NO: 2867652 - DNA, 25 bp, Homo sapien
tcaggcacattaggtgcagatacct

SEQ ID NO: 2867653 - DNA, 25 bp, Homo sapien
ttgctgtgtttacccctgtctggtt

SEQ ID NO: 2867654 - DNA, 25 bp, Homo sapien
tgctgtgtttacccctgtctggttt

SEQ ID NO: 2867655 - DNA, 25 bp, Homo sapien
tctctgcaggttcgacccaaggaaa

SEQ ID NO: 2867656 - DNA, 25 bp, Homo sapien
taacgttaaggtctgttgcgaagga

SEQ ID NO: 2867657 - DNA, 25 bp, Homo sapien
cacacatggagggaatttgccgagt

SEQ ID NO: 2867658 - DNA, 25 bp, Homo sapien
cacgcaggaaatcagagacaggtct

SEQ ID NO: 2867659 - DNA, 25 bp, Homo sapien
gcttccagggtatcccaagggacat

SEQ ID NO: 2867660 - DNA, 25 bp, Homo sapien
taggcttccagggtatcccaaggga

SEQ ID NO: 2867661 - DNA, 25 bp, Homo sapien
catagactcgtaatgggcaaatgag

SEQ ID NO: 2867662 - DNA, 25 bp, Homo sapien
gacatctgggtccatagactcgtaa

SEQ ID NO: 2867663 - DNA, 25 bp, Homo sapien
tggtccaaagagtcgccgggatgcc

SEQ ID NO: 2867664 - DNA, 25 bp, Homo sapien
ttcaactggtccaaagagtcgccgg

SEQ ID NO: 2867665 - DNA, 25 bp, Homo sapien
tctatcctctttggttcaactggtc

SEQ ID NO: 2867666 - DNA, 25 bp, Homo sapien
tttggttcaactggtccaaagagtc

SEQ ID NO: 2867667 - DNA, 25 bp, Homo sapien
tatttatcatctttgtgttccacag

SEQ ID NO: 2867668 - DNA, 25 bp, Homo sapien
tcatatttatcatctttgtgttcca

SEQ ID NO: 2867669 - DNA, 25 bp, Homo sapien
tgctgcatgttcatatttatcatct

SEQ ID NO: 2867670 - DNA, 25 bp, Homo sapien
attgctgcatgttcatatttatcat

SEQ ID NO: 2867671 - DNA, 25 bp, Homo sapien
tagtaaaatttacactcaacagcct

SEQ ID NO: 2867672 - DNA, 25 bp, Homo sapien
gtagtaaaatttacactcaacagcc

SEQ ID NO: 2867673 - DNA, 25 bp, Homo sapien
agtaaaatttacactcaacagcctc

SEQ ID NO: 2867674 - DNA, 25 bp, Homo sapien
ggtagtaaaatttacactcaacagc

SEQ ID NO: 2867675 - DNA, 25 bp, Homo sapien
gcaatgaaagttggcacacaagtat

SEQ ID NO: 2867676 - DNA, 25 bp, Homo sapien
gaaagttggcacacaagtatctgtt

SEQ ID NO: 2867677 - DNA, 25 bp, Homo sapien
aggtgacccaccacgagtggccagc

SEQ ID NO: 2867678 - DNA, 25 bp, Homo sapien
tgctgcaatgaaagttggcacacaa

SEQ ID NO: 2867679 - DNA, 25 bp, Homo sapien
tgtaccatgaggacccgggagaaaa

SEQ ID NO: 2867680 - DNA, 25 bp, Homo sapien
ggagtatcaaatagcagacccctgc

SEQ ID NO: 2867681 - DNA, 25 bp, Homo sapien
gctttattggacatggagactctct

SEQ ID NO: 2867682 - DNA, 25 bp, Homo sapien
gaagacggcagcattcagcttggcc

SEQ ID NO: 2867683 - DNA, 25 bp, Homo sapien
agtaaataatgtcccctctggtgcc

SEQ ID NO: 2867684 - DNA, 25 bp, Homo sapien
gcatgggaaagttgactctgccact

SEQ ID NO: 2867685 - DNA, 25 bp, Homo sapien
tgcacaagaggcagaatgcttagtg

SEQ ID NO: 2867686 - DNA, 25 bp, Homo sapien
gccacttatgagcttccagacatga

SEQ ID NO: 2867687 - DNA, 25 bp, Homo sapien
ataaagacgaagtctgaggttgttt

SEQ ID NO: 2867688 - DNA, 25 bp, Homo sapien
gggttctgatggtgacagtccaaat

SEQ ID NO: 2867689 - DNA, 25 bp, Homo sapien
ggtccaggccatgaaatccaatttc

SEQ ID NO: 2867690 - DNA, 25 bp, Homo sapien
aagtctgcagtctccagtgaaggtc

SEQ ID NO: 2867691 - DNA, 25 bp, Homo sapien
gcccgttctccttcgcaaacaggaa

SEQ ID NO: 2867692 - DNA, 25 bp, Homo sapien
gccacccctcactgcagtgagaagt

SEQ ID NO: 2867693 - DNA, 25 bp, Homo sapien
ccagcatgttccagagccaagtgaa

SEQ ID NO: 2867694 - DNA, 25 bp, Homo sapien
tatttaaatacagcagtctccagca

SEQ ID NO: 2867695 - DNA, 25 bp, Homo sapien
ccccggagtccaagttttgaatctg

SEQ ID NO: 2867696 - DNA, 25 bp, Homo sapien
accccaactgcggactaagaggagc

SEQ ID NO: 2867697 - DNA, 25 bp, Homo sapien
ataacgctcggtctcatttgaaggg

SEQ ID NO: 2867698 - DNA, 25 bp, Homo sapien
gaatctggtccgaggatcaaaatga

SEQ ID NO: 2867699 - DNA, 25 bp, Homo sapien
caggtacacttggtggggcaggcga

SEQ ID NO: 2867700 - DNA, 25 bp, Homo sapien
ggatgccccgaggaaccgcgcggag

SEQ ID NO: 2867701 - DNA, 25 bp, Homo sapien
caggcgacggctggaggcccactca

SEQ ID NO: 2867702 - DNA, 25 bp, Homo sapien
agcccgtggcagtccacgctggcag

SEQ ID NO: 2867703 - DNA, 25 bp, Homo sapien
ctcgccagcgccaaggccagcgcca

SEQ ID NO: 2867704 - DNA, 25 bp, Homo sapien
tgccccgctgcgcatcgctgggagt

SEQ ID NO: 2867705 - DNA, 25 bp, Homo sapien
gcgagctcggtgctcaggcgcacgg

SEQ ID NO: 2867706 - DNA, 25 bp, Homo sapien
gggcaagacgcgtggagcccgagga

SEQ ID NO: 2867707 - DNA, 25 bp, Homo sapien
gagcgggcggcggagttagcgcgga

SEQ ID NO: 2867708 - DNA, 25 bp, Homo sapien
tttgcctgaagagccttggttgaca

SEQ ID NO: 2867709 - DNA, 25 bp, Homo sapien
ctagtactcatggcagagatccaca

SEQ ID NO: 2867710 - DNA, 25 bp, Homo sapien
ttttgcctgaagagccttggttgac

SEQ ID NO: 2867711 - DNA, 25 bp, Homo sapien
tgacttcggtatttaagaactctaa

SEQ ID NO: 2867712 - DNA, 25 bp, Homo sapien
gtacagatgctgttgttatcgcccc

SEQ ID NO: 2867713 - DNA, 25 bp, Homo sapien
tccttttatccctttgctctgaagc

SEQ ID NO: 2867714 - DNA, 25 bp, Homo sapien
tgctccggtcttcagggtgacttcg

SEQ ID NO: 2867715 - DNA, 25 bp, Homo sapien
tacagctatgggtctccttggaaac

SEQ ID NO: 2867716 - DNA, 25 bp, Homo sapien
aaggtcatagttcgtgttcagcagc

SEQ ID NO: 2867717 - DNA, 25 bp, Homo sapien
gaggcagtactgttccccaggaaac

SEQ ID NO: 2867718 - DNA, 25 bp, Homo sapien
gatatatttgcttcaccccatcagg

SEQ ID NO: 2867719 - DNA, 25 bp, Homo sapien
ttatttaaagagcaccagagagcca

SEQ ID NO: 2867720 - DNA, 25 bp, Homo sapien
ttctgctgtattccccttcatcaag

SEQ ID NO: 2867721 - DNA, 25 bp, Homo sapien
gttctgctgtattccccttcatcaa

SEQ ID NO: 2867722 - DNA, 25 bp, Homo sapien
aggttctgctgtattccccttcatc

SEQ ID NO: 2867723 - DNA, 25 bp, Homo sapien
ggttctgctgtattccccttcatca

SEQ ID NO: 2867724 - DNA, 25 bp, Homo sapien
tctgtcaatatgctttgcctggatt

SEQ ID NO: 2867725 - DNA, 25 bp, Homo sapien
tactacatagcctctgtcaatatgc

SEQ ID NO: 2867726 - DNA, 25 bp, Homo sapien
tagcctctgtcaatatgctttgcct

SEQ ID NO: 2867727 - DNA, 25 bp, Homo sapien
cttttctactacatagcctctgtca

SEQ ID NO: 2867728 - DNA, 25 bp, Homo sapien
actgtaggttctgtactctatggcc

SEQ ID NO: 2867729 - DNA, 25 bp, Homo sapien
tgaacattcgctgcctcgtagagga

SEQ ID NO: 2867730 - DNA, 25 bp, Homo sapien
tctatggcctccttgctttgaagac

SEQ ID NO: 2867731 - DNA, 25 bp, Homo sapien
gaaggtcaccttggcaatacccact

SEQ ID NO: 2867732 - DNA, 25 bp, Homo sapien
ctcagtctggcctggatgcatggat

SEQ ID NO: 2867733 - DNA, 25 bp, Homo sapien
tcagtctggcctggatgcatggata

SEQ ID NO: 2867734 - DNA, 25 bp, Homo sapien
cagtctggcctggatgcatggatag

SEQ ID NO: 2867735 - DNA, 25 bp, Homo sapien
gtctggcctggatgcatggatagtg

SEQ ID NO: 2867736 - DNA, 25 bp, Homo sapien
aaactcgaaaaccttggcagcaata

SEQ ID NO: 2867737 - DNA, 25 bp, Homo sapien
aactcgaaaaccttggcagcaatac

SEQ ID NO: 2867738 - DNA, 25 bp, Homo sapien
gggatgtagtgtgggtatctgtcgg

SEQ ID NO: 2867739 - DNA, 25 bp, Homo sapien
cttggcagtgaaattcttgggtcat

SEQ ID NO: 2867740 - DNA, 25 bp, Homo sapien
tcttgggtcatattgtccagctcat

SEQ ID NO: 2867741 - DNA, 25 bp, Homo sapien
gtcatattgtccagctcattgtctg

SEQ ID NO: 2867742 - DNA, 25 bp, Homo sapien
ctttcctgaccatcttgaacatttc

SEQ ID NO: 2867743 - DNA, 25 bp, Homo sapien
catgctggatatcaaaatccagatt

SEQ ID NO: 2867744 - DNA, 25 bp, Homo sapien
ggatatcaaaatccagatttacttt

SEQ ID NO: 2867745 - DNA, 25 bp, Homo sapien
taataagtagataacatgctggata

SEQ ID NO: 2867746 - DNA, 25 bp, Homo sapien
caatctgtgaatggagatagtaata

SEQ ID NO: 2867747 - DNA, 25 bp, Homo sapien
agggagcaaatagggacttcaatga

SEQ ID NO: 2867748 - DNA, 25 bp, Homo sapien
atagggacttcaatgatttggatgc

SEQ ID NO: 2867749 - DNA, 25 bp, Homo sapien
atgctggtgacagcgatcaatgatg

SEQ ID NO: 2867750 - DNA, 25 bp, Homo sapien
tgacagcgatcaatgatgatgtgat

SEQ ID NO: 2867751 - DNA, 25 bp, Homo sapien
agctgatgaaacaccctgggactag

SEQ ID NO: 2867752 - DNA, 25 bp, Homo sapien
tggtcctaaagggatgccaatcctc

SEQ ID NO: 2867753 - DNA, 25 bp, Homo sapien
gtgacagccagttcccatttgagag

SEQ ID NO: 2867754 - DNA, 25 bp, Homo sapien
tattgacagaggcatacacagaggt

SEQ ID NO: 2867755 - DNA, 25 bp, Homo sapien
taattttcacctggccacgtaagct

SEQ ID NO: 2867756 - DNA, 25 bp, Homo sapien
ctggcaggagggcaaaaactaattt

SEQ ID NO: 2867757 - DNA, 25 bp, Homo sapien
taacttcaaggcagtagagcagtgt

SEQ ID NO: 2867758 - DNA, 25 bp, Homo sapien
tagagacccaggcacatagagcttc

SEQ ID NO: 2867759 - DNA, 25 bp, Homo sapien
aaccattatgtgcagagaccgcaga

SEQ ID NO: 2867760 - DNA, 25 bp, Homo sapien
gaaggggaaccattatgtgcagaga

SEQ ID NO: 2867761 - DNA, 25 bp, Homo sapien
ttctgcaggtatggcaccagcgtct

SEQ ID NO: 2867762 - DNA, 25 bp, Homo sapien
gggaaccattatgtgcagagaccgc

SEQ ID NO: 2867763 - DNA, 25 bp, Homo sapien
cttcttaagtatcaactgttccagc

SEQ ID NO: 2867764 - DNA, 25 bp, Homo sapien
ctattctattgaggcctgaagcttt

SEQ ID NO: 2867765 - DNA, 25 bp, Homo sapien
taaagaagaaatgtaccacctcttc

SEQ ID NO: 2867766 - DNA, 25 bp, Homo sapien
cagttcccaaggtcatgcttctcgg

SEQ ID NO: 2867767 - DNA, 25 bp, Homo sapien
gtgctaagggacttctgttcaattg

SEQ ID NO: 2867768 - DNA, 25 bp, Homo sapien
tcaattggatcaaacttggctgtat

SEQ ID NO: 2867769 - DNA, 25 bp, Homo sapien
cagtgctaagggacttctgttcaat

SEQ ID NO: 2867770 - DNA, 25 bp, Homo sapien
agtgctaagggacttctgttcaatt

SEQ ID NO: 2867771 - DNA, 25 bp, Homo sapien
ttgtgttgtctatgatttgtttcag

SEQ ID NO: 2867772 - DNA, 25 bp, Homo sapien
tagaagagctgctgatttatgcaaa

SEQ ID NO: 2867773 - DNA, 25 bp, Homo sapien
tttgcagctattgcaaaaggagtta

SEQ ID NO: 2867774 - DNA, 25 bp, Homo sapien
gctattgcaaaaggagttaagttct

SEQ ID NO: 2867775 - DNA, 25 bp, Homo sapien
tattttcatggttttaggtcctatg

SEQ ID NO: 2867776 - DNA, 25 bp, Homo sapien
gaatattagccatttgtctgatgga

SEQ ID NO: 2867777 - DNA, 25 bp, Homo sapien
aagtatttgcccctatgtcctgaat

SEQ ID NO: 2867778 - DNA, 25 bp, Homo sapien
tttagacatgaagtatttgccccta

SEQ ID NO: 2867779 - DNA, 25 bp, Homo sapien
ctgagcaagccagtgaatgaagtct

SEQ ID NO: 2867780 - DNA, 25 bp, Homo sapien
gagaagacaagttatatattaagca

SEQ ID NO: 2867781 - DNA, 25 bp, Homo sapien
ggagaagacaagttatatattaagc

SEQ ID NO: 2867782 - DNA, 25 bp, Homo sapien
ctctgagcaagccagtgaatgaagt

SEQ ID NO: 2867783 - DNA, 25 bp, Homo sapien
gacatgcaactgaaacaccaaacag

SEQ ID NO: 2867784 - DNA, 25 bp, Homo sapien
gagacagagaagcaaccttcttaca

SEQ ID NO: 2867785 - DNA, 25 bp, Homo sapien
gaagcaaccttcttacagacaacct

SEQ ID NO: 2867786 - DNA, 25 bp, Homo sapien
cagacaacctccttaatcacataga

SEQ ID NO: 2867787 - DNA, 25 bp, Homo sapien
ggggatgctgatcatcaatttccat

SEQ ID NO: 2867788 - DNA, 25 bp, Homo sapien
tggggatgctgatcatcaatttcca

SEQ ID NO: 2867789 - DNA, 25 bp, Homo sapien
gggtgtattaatctgctcaggcaac

SEQ ID NO: 2867790 - DNA, 25 bp, Homo sapien
tagcttcatgagaggcttgatgcag

SEQ ID NO: 2867791 - DNA, 25 bp, Homo sapien
cagggacagctctagcttcatgaga

SEQ ID NO: 2867792 - DNA, 25 bp, Homo sapien
gctcaaatggcatgaccagaactct

SEQ ID NO: 2867793 - DNA, 25 bp, Homo sapien
gaatgtgatggttctacaacacccc

SEQ ID NO: 2867794 - DNA, 25 bp, Homo sapien
tttattaaggaagaacagtgagcca

SEQ ID NO: 2867795 - DNA, 25 bp, Homo sapien
tccatgattctaataggctcccctg

SEQ ID NO: 2867796 - DNA, 25 bp, Homo sapien
tgactgagctggaaagtagcctaac

SEQ ID NO: 2867797 - DNA, 25 bp, Homo sapien
tgtcagtgtttaaagaaccaatgtt

SEQ ID NO: 2867798 - DNA, 25 bp, Homo sapien
tgggaaggttgtaaactatgttgta

SEQ ID NO: 2867799 - DNA, 25 bp, Homo sapien
tgtaaactatgttgtaaaaatagga

SEQ ID NO: 2867800 - DNA, 25 bp, Homo sapien
atgggaaggttgtaaactatgttgt

SEQ ID NO: 2867801 - DNA, 25 bp, Homo sapien
taatagattaagcactcatcacatc

SEQ ID NO: 2867802 - DNA, 25 bp, Homo sapien
gcttatttgttatgcaagcaaggca

SEQ ID NO: 2867803 - DNA, 25 bp, Homo sapien
tgtttattacatgttgacactccaa

SEQ ID NO: 2867804 - DNA, 25 bp, Homo sapien
gagactacaaccagaataagtttcc

SEQ ID NO: 2867805 - DNA, 25 bp, Homo sapien
gatccatctgcgattcatgtttcga

SEQ ID NO: 2867806 - DNA, 25 bp, Homo sapien
cctattgaagacatgcagaggatcc

SEQ ID NO: 2867807 - DNA, 25 bp, Homo sapien
gatgggactactctacacgatggat

SEQ ID NO: 2867808 - DNA, 25 bp, Homo sapien
gaaaagaactttgccatgtcctatg

SEQ ID NO: 2867809 - DNA, 25 bp, Homo sapien
cctgttctgatgtgacagattgcag

SEQ ID NO: 2867810 - DNA, 25 bp, Homo sapien
gagcccactttgcccgtttcaactg

SEQ ID NO: 2867811 - DNA, 25 bp, Homo sapien
caaaacgtcccttccacactctgga

SEQ ID NO: 2867812 - DNA, 25 bp, Homo sapien
gaggcatcaaagttcttcaagtgag

SEQ ID NO: 2867813 - DNA, 25 bp, Homo sapien
caattgttagcactgaaagtgtggc

SEQ ID NO: 2867814 - DNA, 25 bp, Homo sapien
attgttagcactgaaagtgtggccc

SEQ ID NO: 2867815 - DNA, 25 bp, Homo sapien
tgttagcactgaaagtgtggccctg

SEQ ID NO: 2867816 - DNA, 25 bp, Homo sapien
gtggccctgtccctccctggcttaa

SEQ ID NO: 2867817 - DNA, 25 bp, Homo sapien
taaaggtaagactccactgtatctc

SEQ ID NO: 2867818 - DNA, 25 bp, Homo sapien
gcgtgttcttaaaggtaagactcca

SEQ ID NO: 2867819 - DNA, 25 bp, Homo sapien
caaatctgatttgagacaagtaatt

SEQ ID NO: 2867820 - DNA, 25 bp, Homo sapien
ttctgttagtggagctggacaaatc

SEQ ID NO: 2867821 - DNA, 25 bp, Homo sapien
agataaggggcttgatgactgttta

SEQ ID NO: 2867822 - DNA, 25 bp, Homo sapien
cagagataaggggcttgatgactgt

SEQ ID NO: 2867823 - DNA, 25 bp, Homo sapien
gagataaggggcttgatgactgttt

SEQ ID NO: 2867824 - DNA, 25 bp, Homo sapien
ggcagagataaggggcttgatgact

SEQ ID NO: 2867825 - DNA, 25 bp, Homo sapien
tcacccatccgtgatttctgtttgt

SEQ ID NO: 2867826 - DNA, 25 bp, Homo sapien
aacactgtgtgaatcactctcaagt

SEQ ID NO: 2867827 - DNA, 25 bp, Homo sapien
ggcttggtgtgctcagtggaaacac

SEQ ID NO: 2867828 - DNA, 25 bp, Homo sapien
tgtagaattgaatttcatcgggctt

SEQ ID NO: 2867829 - DNA, 25 bp, Homo sapien
tgaaatcaacccaagctagtaatgg

SEQ ID NO: 2867830 - DNA, 25 bp, Homo sapien
tgaaagccatacttgcccttaggac

SEQ ID NO: 2867831 - DNA, 25 bp, Homo sapien
ttcccttagaaatatatagaagcaa

SEQ ID NO: 2867832 - DNA, 25 bp, Homo sapien
gaggtgtccttcttaagcatacatt

SEQ ID NO: 2867833 - DNA, 25 bp, Homo sapien
ggccagtaatccagctcagctctga

SEQ ID NO: 2867834 - DNA, 25 bp, Homo sapien
taagggttcatgtgagggcctcaac

SEQ ID NO: 2867835 - DNA, 25 bp, Homo sapien
gtcagtggcccaagcaatgcggtgt

SEQ ID NO: 2867836 - DNA, 25 bp, Homo sapien
tattcaagaatggacaaacaggccg

SEQ ID NO: 2867837 - DNA, 25 bp, Homo sapien
taaagttcacaccaaaaacagattc

SEQ ID NO: 2867838 - DNA, 25 bp, Homo sapien
ctatggagtcttaaagttcacacca

SEQ ID NO: 2867839 - DNA, 25 bp, Homo sapien
gttcacaccaaaaacagattccacc

SEQ ID NO: 2867840 - DNA, 25 bp, Homo sapien
aaaacagattccacccatttgccag

SEQ ID NO: 2867841 - DNA, 25 bp, Homo sapien
ctaggcagagaagaagcatgatggt

SEQ ID NO: 2867842 - DNA, 25 bp, Homo sapien
caagtttataccctggggtggcctg

SEQ ID NO: 2867843 - DNA, 25 bp, Homo sapien
tgctgaaatcctctttgaattacac

SEQ ID NO: 2867844 - DNA, 25 bp, Homo sapien
ttgaattacacttatccagcacagc

SEQ ID NO: 2867845 - DNA, 25 bp, Homo sapien
gatccaccagaagcatttctttttc

SEQ ID NO: 2867846 - DNA, 25 bp, Homo sapien
cagatccaccagaagcatttctttt

SEQ ID NO: 2867847 - DNA, 25 bp, Homo sapien
tcagatccaccagaagcatttcttt

SEQ ID NO: 2867848 - DNA, 25 bp, Homo sapien
tccaccagaagcatttctttttcac

SEQ ID NO: 2867849 - DNA, 25 bp, Homo sapien
cttaagtcctgcttttccggggctg

SEQ ID NO: 2867850 - DNA, 25 bp, Homo sapien
tcctgctgccgaaaatcatactcta

SEQ ID NO: 2867851 - DNA, 25 bp, Homo sapien
gactctgcaaaacttcatggaacct

SEQ ID NO: 2867852 - DNA, 25 bp, Homo sapien
gggcgatgcctcctcaactggctct

SEQ ID NO: 2867853 - DNA, 25 bp, Homo sapien
agtgaattcgaatcagcacagactg

SEQ ID NO: 2867854 - DNA, 25 bp, Homo sapien
tgaattcgaatcagcacagactgat

SEQ ID NO: 2867855 - DNA, 25 bp, Homo sapien
gaatcagcacagactgattaagcat

SEQ ID NO: 2867856 - DNA, 25 bp, Homo sapien
ttcgaatcagcacagactgattaag

SEQ ID NO: 2867857 - DNA, 25 bp, Homo sapien
tcacaaacattgaggaggtaaaagt

SEQ ID NO: 2867858 - DNA, 25 bp, Homo sapien
tttggtgtcattaacatacggactg

SEQ ID NO: 2867859 - DNA, 25 bp, Homo sapien
tgcattgtcccgtgctgattatcac

SEQ ID NO: 2867860 - DNA, 25 bp, Homo sapien
caaacattgaggaggtaaaagtgaa

SEQ ID NO: 2867861 - DNA, 25 bp, Homo sapien
gaggaaacgtggtcatgaaaacagt

SEQ ID NO: 2867862 - DNA, 25 bp, Homo sapien
ttcataccaggggtctcagaaggcc

SEQ ID NO: 2867863 - DNA, 25 bp, Homo sapien
gatgcttataagaaagctcttaagc

SEQ ID NO: 2867864 - DNA, 25 bp, Homo sapien
ttttcagtgccaagatgcttataag

SEQ ID NO: 2867865 - DNA, 25 bp, Homo sapien
cttgtttagccagaaggaaaatgaa

SEQ ID NO: 2867866 - DNA, 25 bp, Homo sapien
ttagccagaaggaaaatgaaatgtt

SEQ ID NO: 2867867 - DNA, 25 bp, Homo sapien
ccagaaggaaaatgaaatgttgcat

SEQ ID NO: 2867868 - DNA, 25 bp, Homo sapien
gccagaaggaaaatgaaatgttgca

SEQ ID NO: 2867869 - DNA, 25 bp, Homo sapien
ccggggacccgagttcatgctgctg

SEQ ID NO: 2867870 - DNA, 25 bp, Homo sapien
gccggggacccgagttcatgctgct

SEQ ID NO: 2867871 - DNA, 25 bp, Homo sapien
ccagggccggggacccgagttcatg

SEQ ID NO: 2867872 - DNA, 25 bp, Homo sapien
gggccggggacccgagttcatgctg

SEQ ID NO: 2867873 - DNA, 25 bp, Homo sapien
caaagagtgcctcgtccctgagcat

SEQ ID NO: 2867874 - DNA, 25 bp, Homo sapien
cccaaagagtgcctcgtccctgagc

SEQ ID NO: 2867875 - DNA, 25 bp, Homo sapien
gccccaaagagtgcctcgtccctga

SEQ ID NO: 2867876 - DNA, 25 bp, Homo sapien
gagccccaaagagtgcctcgtccct

SEQ ID NO: 2867877 - DNA, 25 bp, Homo sapien
acgccgtgttctggcaggtactgca

SEQ ID NO: 2867878 - DNA, 25 bp, Homo sapien
ctgtatatgatgcacgccgtgttct

SEQ ID NO: 2867879 - DNA, 25 bp, Homo sapien
ttggccagttcgataaaagttgcgc

SEQ ID NO: 2867880 - DNA, 25 bp, Homo sapien
caattgttgagatcttggccagttc

SEQ ID NO: 2867881 - DNA, 25 bp, Homo sapien
cctatacggcagtgctgattctgat

SEQ ID NO: 2867882 - DNA, 25 bp, Homo sapien
agtgtttctctcctatacggcagtg

SEQ ID NO: 2867883 - DNA, 25 bp, Homo sapien
ttctgattcatacagcaaacagcag

SEQ ID NO: 2867884 - DNA, 25 bp, Homo sapien
tctctcctactgtttttgatgagct

SEQ ID NO: 2867885 - DNA, 25 bp, Homo sapien
tgagagctcgagctttctccaagtc

SEQ ID NO: 2867886 - DNA, 25 bp, Homo sapien
tcttggttcgagtgcagagattcct

SEQ ID NO: 2867887 - DNA, 25 bp, Homo sapien
gagattcctccacagattgcagtcg

SEQ ID NO: 2867888 - DNA, 25 bp, Homo sapien
ggccttggaggtcgcagagttcacc

SEQ ID NO: 2867889 - DNA, 25 bp, Homo sapien
gatgggagatgattacttcctggac

SEQ ID NO: 2867890 - DNA, 25 bp, Homo sapien
cactgttagttttgagtgacaccag

SEQ ID NO: 2867891 - DNA, 25 bp, Homo sapien
gaaactccagtgtgtctgactcggt

SEQ ID NO: 2867892 - DNA, 25 bp, Homo sapien
ggttgtttgccgtctgctcctgaca

SEQ ID NO: 2867893 - DNA, 25 bp, Homo sapien
tctgaatctagtggagtcacccttc

SEQ ID NO: 2867894 - DNA, 25 bp, Homo sapien
ggctggcaacgctggtggcatttaa

SEQ ID NO: 2867895 - DNA, 25 bp, Homo sapien
tgatgaaggacagtctgaggctctt

SEQ ID NO: 2867896 - DNA, 25 bp, Homo sapien
ccttgggaggaatgcatgggacacc

SEQ ID NO: 2867897 - DNA, 25 bp, Homo sapien
cgttgacctggatggcactttggga

SEQ ID NO: 2867898 - DNA, 25 bp, Homo sapien
cctgttcagagaggttaccgttgac

SEQ ID NO: 2867899 - DNA, 25 bp, Homo sapien
tcagaagacacaatgtcctgttcag

SEQ ID NO: 2867900 - DNA, 25 bp, Homo sapien
ggcaaggtcagaagacacaatgtcc

SEQ ID NO: 2867901 - DNA, 25 bp, Homo sapien
ttccaccagggacttactggctgtg

SEQ ID NO: 2867902 - DNA, 25 bp, Homo sapien
ggaagtttggattgcaatgttgcga

SEQ ID NO: 2867903 - DNA, 25 bp, Homo sapien
tttggattgcaatgttgcgaaagcc

SEQ ID NO: 2867904 - DNA, 25 bp, Homo sapien
ggacttactggctgtgagtctcttc

SEQ ID NO: 2867905 - DNA, 25 bp, Homo sapien
gtgcctggttgcttgagtcttcccc

SEQ ID NO: 2867906 - DNA, 25 bp, Homo sapien
tggggaaggagagcgagtaggtggg

SEQ ID NO: 2867907 - DNA, 25 bp, Homo sapien
ggtgcctggttgcttgagtcttccc

SEQ ID NO: 2867908 - DNA, 25 bp, Homo sapien
gccagttggattcttagtggtccca

SEQ ID NO: 2867909 - DNA, 25 bp, Homo sapien
tcttccttgaatctcacctgctggg

SEQ ID NO: 2867910 - DNA, 25 bp, Homo sapien
tcttctggagtttggacgtcaacct

SEQ ID NO: 2867911 - DNA, 25 bp, Homo sapien
gactgttacgctttagaagcacagg

SEQ ID NO: 2867912 - DNA, 25 bp, Homo sapien
tccctgttgtggtgtgttggccgaa

SEQ ID NO: 2867913 - DNA, 25 bp, Homo sapien
gatgatacatgatgctcccaaggga

SEQ ID NO: 2867914 - DNA, 25 bp, Homo sapien
gctggcacgcggttctgatcttgga

SEQ ID NO: 2867915 - DNA, 25 bp, Homo sapien
ccagggtgaaactgcaggaaactta

SEQ ID NO: 2867916 - DNA, 25 bp, Homo sapien
gatatctgcaagcaggcgaggagca

SEQ ID NO: 2867917 - DNA, 25 bp, Homo sapien
ctgcagcctccatgatgatgtatgt

SEQ ID NO: 2867918 - DNA, 25 bp, Homo sapien
gcacggtgagctacgtctgcagcct

SEQ ID NO: 2867919 - DNA, 25 bp, Homo sapien
tgagctggggtctgatatctgcaag

SEQ ID NO: 2867920 - DNA, 25 bp, Homo sapien
cagcattcacgcatcctcttctttt

SEQ ID NO: 2867921 - DNA, 25 bp, Homo sapien
ccctaaagctccttcggtgccccat

SEQ ID NO: 2867922 - DNA, 25 bp, Homo sapien
gcagccagcattcacgcatcctctt

SEQ ID NO: 2867923 - DNA, 25 bp, Homo sapien
cacactccctaaagctccttcggtg

SEQ ID NO: 2867924 - DNA, 25 bp, Homo sapien
gcagctgttgttctggccactaaat

SEQ ID NO: 2867925 - DNA, 25 bp, Homo sapien
gatgctcgttggtccactagcaggc

SEQ ID NO: 2867926 - DNA, 25 bp, Homo sapien
agctgttgttctggccactaaatct

SEQ ID NO: 2867927 - DNA, 25 bp, Homo sapien
ctttgctgatgctcgttggtccact

SEQ ID NO: 2867928 - DNA, 25 bp, Homo sapien
cctcaattgtagtgccttctccaca

SEQ ID NO: 2867929 - DNA, 25 bp, Homo sapien
aatgggtgataattttgtatagaat

SEQ ID NO: 2867930 - DNA, 25 bp, Homo sapien
aaccattaaagtgttgtctctagtt

SEQ ID NO: 2867931 - DNA, 25 bp, Homo sapien
cataaccattaaagtgttgtctcta

SEQ ID NO: 2867932 - DNA, 25 bp, Homo sapien
caccctgggaatagaacaagctcat

SEQ ID NO: 2867933 - DNA, 25 bp, Homo sapien
aacaccctgggaatagaacaagctc

SEQ ID NO: 2867934 - DNA, 25 bp, Homo sapien
acaccctgggaatagaacaagctca

SEQ ID NO: 2867935 - DNA, 25 bp, Homo sapien
cacacgaagctagatgagagcctac

SEQ ID NO: 2867936 - DNA, 25 bp, Homo sapien
ccatggaggttatacttgcaagaca

SEQ ID NO: 2867937 - DNA, 25 bp, Homo sapien
gaaaagtttacagctaccgcacagc

SEQ ID NO: 2867938 - DNA, 25 bp, Homo sapien
tgtgcctaacatgcaccagccatgg

SEQ ID NO: 2867939 - DNA, 25 bp, Homo sapien
agctgaacggtttctgaccatggga

SEQ ID NO: 2867940 - DNA, 25 bp, Homo sapien
tgttgtctgtgatgatcggaaagct

SEQ ID NO: 2867941 - DNA, 25 bp, Homo sapien
gctccagttgctcagaatgcttcat

SEQ ID NO: 2867942 - DNA, 25 bp, Homo sapien
tgatgatcggaaagctgaacggttt

SEQ ID NO: 2867943 - DNA, 25 bp, Homo sapien
tgcaatcttcccaggcgttcttttt

SEQ ID NO: 2867944 - DNA, 25 bp, Homo sapien
atttcgaaggtgagaaaatcagggc

SEQ ID NO: 2867945 - DNA, 25 bp, Homo sapien
gatagtattgtgctcatttcgaagg

SEQ ID NO: 2867946 - DNA, 25 bp, Homo sapien
cagagctcacagctactaactggct

SEQ ID NO: 2867947 - DNA, 25 bp, Homo sapien
gcctccgtcctttgtgcagcctgat

SEQ ID NO: 2867948 - DNA, 25 bp, Homo sapien
gctcctcccgcttaaaaatcattct

SEQ ID NO: 2867949 - DNA, 25 bp, Homo sapien
ttcttgactcgtccttatttgcata

SEQ ID NO: 2867950 - DNA, 25 bp, Homo sapien
tattgtttggattcgcccacggcct

SEQ ID NO: 2867951 - DNA, 25 bp, Homo sapien
ttccttgcatccattcacagaccat

SEQ ID NO: 2867952 - DNA, 25 bp, Homo sapien
tcctccctgcttccttgcatccatt

SEQ ID NO: 2867953 - DNA, 25 bp, Homo sapien
ccctgcttccttgcatccattcaca

SEQ ID NO: 2867954 - DNA, 25 bp, Homo sapien
tgcttccttgcatccattcacagac

SEQ ID NO: 2867955 - DNA, 25 bp, Homo sapien
tgctctctaactgggcgactgaggg

SEQ ID NO: 2867956 - DNA, 25 bp, Homo sapien
taggattattctggactgccacagt

SEQ ID NO: 2867957 - DNA, 25 bp, Homo sapien
gagccaaagctgtgtttacccagga

SEQ ID NO: 2867958 - DNA, 25 bp, Homo sapien
cccagtcacttgaagagaaggccaa

SEQ ID NO: 2867959 - DNA, 25 bp, Homo sapien
tgctcggcagctaccatgtgaaaag

SEQ ID NO: 2867960 - DNA, 25 bp, Homo sapien
caagaagtgtagtgggtctgctcac

SEQ ID NO: 2867961 - DNA, 25 bp, Homo sapien
ccttgcacaatgagccaggctttga

SEQ ID NO: 2867962 - DNA, 25 bp, Homo sapien
tgaaaagaaaagacctctagtggcc

SEQ ID NO: 2867963 - DNA, 25 bp, Homo sapien
tgcaattaaaagatacatctgtcag

SEQ ID NO: 2867964 - DNA, 25 bp, Homo sapien
aaaaaaggcattgactgcagctgcc

SEQ ID NO: 2867965 - DNA, 25 bp, Homo sapien
gcagctgccttaatcagagaaggta

SEQ ID NO: 2867966 - DNA, 25 bp, Homo sapien
gaaggtatttattagaagggcaaga

SEQ ID NO: 2867967 - DNA, 25 bp, Homo sapien
aatcatggccctatttgcagagcag

SEQ ID NO: 2867968 - DNA, 25 bp, Homo sapien
tgacatttgagcaaccccagctagg

SEQ ID NO: 2867969 - DNA, 25 bp, Homo sapien
cacaatgaggagaacagacatggtc

SEQ ID NO: 2867970 - DNA, 25 bp, Homo sapien
taagctaagatagcacccatctggg

SEQ ID NO: 2867971 - DNA, 25 bp, Homo sapien
gaagaggaaagccatgcgtggaaca

SEQ ID NO: 2867972 - DNA, 25 bp, Homo sapien
gagcttgaatgctaacaagcccagc

SEQ ID NO: 2867973 - DNA, 25 bp, Homo sapien
tgtccacggacctgtgagctgctgc

SEQ ID NO: 2867974 - DNA, 25 bp, Homo sapien
gcgtggaacatcgaagcctcagaga

SEQ ID NO: 2867975 - DNA, 25 bp, Homo sapien
catgactcttgttccttaggtgcca

SEQ ID NO: 2867976 - DNA, 25 bp, Homo sapien
aatgttctcttggttcgaataagcc

SEQ ID NO: 2867977 - DNA, 25 bp, Homo sapien
ctggtgatgcccttgcccaatgcca

SEQ ID NO: 2867978 - DNA, 25 bp, Homo sapien
caggaagctccctggaaggaaggca

SEQ ID NO: 2867979 - DNA, 25 bp, Homo sapien
ctggaaggagttggttgaccagcac

SEQ ID NO: 2867980 - DNA, 25 bp, Homo sapien
ctatgaggccttccgggtgtctgct

SEQ ID NO: 2867981 - DNA, 25 bp, Homo sapien
tccgggtgtctgctccatcagggct

SEQ ID NO: 2867982 - DNA, 25 bp, Homo sapien
tgctgagagacttgcattctggaag

SEQ ID NO: 2867983 - DNA, 25 bp, Homo sapien
ttggcattgctgactgggctgcttg

SEQ ID NO: 2867984 - DNA, 25 bp, Homo sapien
gcacaccattggcattgctgactgg

SEQ ID NO: 2867985 - DNA, 25 bp, Homo sapien
caccattggcattgctgactgggct

SEQ ID NO: 2867986 - DNA, 25 bp, Homo sapien
ggcaaagcacaccattggcattgct

SEQ ID NO: 2867987 - DNA, 25 bp, Homo sapien
tttgccgtccactatatggtgggtg

SEQ ID NO: 2867988 - DNA, 25 bp, Homo sapien
actttgccgtccactatatggtggg

SEQ ID NO: 2867989 - DNA, 25 bp, Homo sapien
tgccgtccactatatggtgggtggt

SEQ ID NO: 2867990 - DNA, 25 bp, Homo sapien
ccactttgccgtccactatatggtg

SEQ ID NO: 2867991 - DNA, 25 bp, Homo sapien
cagctccttgtattgggcccggatg

SEQ ID NO: 2867992 - DNA, 25 bp, Homo sapien
ccagctccttgtattgggcccggat

SEQ ID NO: 2867993 - DNA, 25 bp, Homo sapien
cttccgagccagctccttgtattgg

SEQ ID NO: 2867994 - DNA, 25 bp, Homo sapien
acatttgtgtcatcagtgactttgc

SEQ ID NO: 2867995 - DNA, 25 bp, Homo sapien
catttgtgtcatcagtgactttgca

SEQ ID NO: 2867996 - DNA, 25 bp, Homo sapien
tttgtgtcatcagtgactttgcaga

SEQ ID NO: 2867997 - DNA, 25 bp, Homo sapien
tgtgtcatcagtgactttgcagagc

SEQ ID NO: 2867998 - DNA, 25 bp, Homo sapien
cattgttgatctgcagaacaatgcg

SEQ ID NO: 2867999 - DNA, 25 bp, Homo sapien
ggcattgttgatctgcagaacaatg

SEQ ID NO: 2868000 - DNA, 25 bp, Homo sapien
tgttgatctgcagaacaatgcgggc

SEQ ID NO: 2868001 - DNA, 25 bp, Homo sapien
acgggcattgttgatctgcagaaca

SEQ ID NO: 2868002 - DNA, 25 bp, Homo sapien
cccagattttgttttccagcttctg

SEQ ID NO: 2868003 - DNA, 25 bp, Homo sapien
gcttctggttctcggtctcctggct

SEQ ID NO: 2868004 - DNA, 25 bp, Homo sapien
aaagatctgagtcctcagttcctcg

SEQ ID NO: 2868005 - DNA, 25 bp, Homo sapien
agattttgttttccagcttctggtt

SEQ ID NO: 2868006 - DNA, 25 bp, Homo sapien
ccagaccccaagcagccttggaagt

SEQ ID NO: 2868007 - DNA, 25 bp, Homo sapien
cagaccccaagcagccttggaagtt

SEQ ID NO: 2868008 - DNA, 25 bp, Homo sapien
agcagccttggaagttggtggagcg

SEQ ID NO: 2868009 - DNA, 25 bp, Homo sapien
ccaagcagccttggaagttggtgga

SEQ ID NO: 2868010 - DNA, 25 bp, Homo sapien
tgggaggctgaacggagcctaggga

SEQ ID NO: 2868011 - DNA, 25 bp, Homo sapien
tgaagcgagtggtgaatctcgtgct

SEQ ID NO: 2868012 - DNA, 25 bp, Homo sapien
cagctggacaccatagctgggaggc

SEQ ID NO: 2868013 - DNA, 25 bp, Homo sapien
gaggctgaacggagcctagggactg

SEQ ID NO: 2868014 - DNA, 25 bp, Homo sapien
ctgggaaggagattgagaggacagc

SEQ ID NO: 2868015 - DNA, 25 bp, Homo sapien
gggaaggagattgagaggacagcac

SEQ ID NO: 2868016 - DNA, 25 bp, Homo sapien
aaggagattgagaggacagcactca

SEQ ID NO: 2868017 - DNA, 25 bp, Homo sapien
cagcactcaggctttgccgaccaaa

SEQ ID NO: 2868018 - DNA, 25 bp, Homo sapien
gaagcgcaaaggcagggaggagcgg

SEQ ID NO: 2868019 - DNA, 25 bp, Homo sapien
tcagaaaactaagctggaaaaggcc

SEQ ID NO: 2868020 - DNA, 25 bp, Homo sapien
aaattcaggcgcagcagctacctca

SEQ ID NO: 2868021 - DNA, 25 bp, Homo sapien
gggataactggaaaggcagtcagaa

SEQ ID NO: 2868022 - DNA, 25 bp, Homo sapien
aaaggccttgaatgccaaattcagg

SEQ ID NO: 2868023 - DNA, 25 bp, Homo sapien
tggcatggcgatggccattaagggc

SEQ ID NO: 2868024 - DNA, 25 bp, Homo sapien
atcctcccgcagcacccttgccctc

SEQ ID NO: 2868025 - DNA, 25 bp, Homo sapien
tggcgatggccattaagggcacaca

SEQ ID NO: 2868026 - DNA, 25 bp, Homo sapien
ggctggcatggcgatggccattaag

SEQ ID NO: 2868027 - DNA, 25 bp, Homo sapien
ctggtggttccaagatcgggtctga

SEQ ID NO: 2868028 - DNA, 25 bp, Homo sapien
caagatcgggtctgattgcctgcat

SEQ ID NO: 2868029 - DNA, 25 bp, Homo sapien
tcgggtctgattgcctgcatacctt

SEQ ID NO: 2868030 - DNA, 25 bp, Homo sapien
tggttccaagatcgggtctgattgc

SEQ ID NO: 2868031 - DNA, 25 bp, Homo sapien
tgcaccagaatcttccgagtccagg

SEQ ID NO: 2868032 - DNA, 25 bp, Homo sapien
ccagaatcttccgagtccaggagct

SEQ ID NO: 2868033 - DNA, 25 bp, Homo sapien
caccagaatcttccgagtccaggag

SEQ ID NO: 2868034 - DNA, 25 bp, Homo sapien
agaatcttccgagtccaggagcttg

SEQ ID NO: 2868035 - DNA, 25 bp, Homo sapien
tgagggccagcggttgctatcaggg

SEQ ID NO: 2868036 - DNA, 25 bp, Homo sapien
gccagcggttgctatcagggtgaac

SEQ ID NO: 2868037 - DNA, 25 bp, Homo sapien
gtgaacaccagttgtcagtagaaaa

SEQ ID NO: 2868038 - DNA, 25 bp, Homo sapien
aacaccagttgtcagtagaaaagga

SEQ ID NO: 2868039 - DNA, 25 bp, Homo sapien
tttcggctttatcagctccactcag

SEQ ID NO: 2868040 - DNA, 25 bp, Homo sapien
gacttgtttgtgaagtggccttcta

SEQ ID NO: 2868041 - DNA, 25 bp, Homo sapien
gaattgcaaatggtaggattatcag

SEQ ID NO: 2868042 - DNA, 25 bp, Homo sapien
cccagattagtgatcagtgacaatt

SEQ ID NO: 2868043 - DNA, 25 bp, Homo sapien
cacattcgggttcccggagctcctt

SEQ ID NO: 2868044 - DNA, 25 bp, Homo sapien
agtccttgcaaattgcagccagaag

SEQ ID NO: 2868045 - DNA, 25 bp, Homo sapien
cgcacattcgggttcccggagctcc

SEQ ID NO: 2868046 - DNA, 25 bp, Homo sapien
gcacattcgggttcccggagctcct

SEQ ID NO: 2868047 - DNA, 25 bp, Homo sapien
gccggctcagcccagtccctgcagc

SEQ ID NO: 2868048 - DNA, 25 bp, Homo sapien
gcagccagcctggagtttccagagc

SEQ ID NO: 2868049 - DNA, 25 bp, Homo sapien
tgctttcccgcctgaagccggctca

SEQ ID NO: 2868050 - DNA, 25 bp, Homo sapien
ccagcctggagtttccagagctcat

SEQ ID NO: 2868051 - DNA, 25 bp, Homo sapien
tgacttgggccgtgagagcagcatt

SEQ ID NO: 2868052 - DNA, 25 bp, Homo sapien
tatagagattcttaggcccagatga

SEQ ID NO: 2868053 - DNA, 25 bp, Homo sapien
gattgatcgggaacactctccggag

SEQ ID NO: 2868054 - DNA, 25 bp, Homo sapien
taatccgaagtaggcatgaaccagg

SEQ ID NO: 2868055 - DNA, 25 bp, Homo sapien
gctgaaggcacagtgtacattttca

SEQ ID NO: 2868056 - DNA, 25 bp, Homo sapien
ccaagctcgctgaaggcacagtgta

SEQ ID NO: 2868057 - DNA, 25 bp, Homo sapien
cttggatccagacattgccacccac

SEQ ID NO: 2868058 - DNA, 25 bp, Homo sapien
cctagtggccttattgtgcaaagtc

SEQ ID NO: 2868059 - DNA, 25 bp, Homo sapien
aaaaacagatgaccagagggacagg

SEQ ID NO: 2868060 - DNA, 25 bp, Homo sapien
tcctatttcttagcttgaggcaaga

SEQ ID NO: 2868061 - DNA, 25 bp, Homo sapien
tgggcctccattgattttgaaacag

SEQ ID NO: 2868062 - DNA, 25 bp, Homo sapien
gaaacacttttacattgccggtgga

SEQ ID NO: 2868063 - DNA, 25 bp, Homo sapien
taacgtgcctcatgctaaggttggg

SEQ ID NO: 2868064 - DNA, 25 bp, Homo sapien
tgacttgcagataggtgaccacaaa

SEQ ID NO: 2868065 - DNA, 25 bp, Homo sapien
gaggtacacgttggcttgacttcgc

SEQ ID NO: 2868066 - DNA, 25 bp, Homo sapien
ttttacaccctgcagaagcatggac

SEQ ID NO: 2868067 - DNA, 25 bp, Homo sapien
tatcaattgactaacataagtgggc

SEQ ID NO: 2868068 - DNA, 25 bp, Homo sapien
aatccccgtggaaagtgatttgcac

SEQ ID NO: 2868069 - DNA, 25 bp, Homo sapien
tactcttgacagactaacctcttgg

SEQ ID NO: 2868070 - DNA, 25 bp, Homo sapien
gaggctcaggcccaatatggttaag

SEQ ID NO: 2868071 - DNA, 25 bp, Homo sapien
tctgaggaagcctaattatgaaggt

SEQ ID NO: 2868072 - DNA, 25 bp, Homo sapien
tgacttcacgttctaatctgaggaa

SEQ ID NO: 2868073 - DNA, 25 bp, Homo sapien
tgacacacgttgatttgacttcacg

SEQ ID NO: 2868074 - DNA, 25 bp, Homo sapien
gaacaccacaacaaacagttagctg

SEQ ID NO: 2868075 - DNA, 25 bp, Homo sapien
ttaatggccgcatgatattccactg

SEQ ID NO: 2868076 - DNA, 25 bp, Homo sapien
tccactgtgcggctgaaccaaaaat

SEQ ID NO: 2868077 - DNA, 25 bp, Homo sapien
tgtgggttcccctaggaatctcttg

SEQ ID NO: 2868078 - DNA, 25 bp, Homo sapien
ccagttccaagttgttgggcataca

SEQ ID NO: 2868079 - DNA, 25 bp, Homo sapien
ccaaacacaccgacttggcaataat

SEQ ID NO: 2868080 - DNA, 25 bp, Homo sapien
accgagtctgaattggaaaggcttc

SEQ ID NO: 2868081 - DNA, 25 bp, Homo sapien
tcatgaatattaggcccagggcaaa

SEQ ID NO: 2868082 - DNA, 25 bp, Homo sapien
atattaggcccagggcaaatttctc

SEQ ID NO: 2868083 - DNA, 25 bp, Homo sapien
tccatgcagaagcaaactcggagcg

SEQ ID NO: 2868084 - DNA, 25 bp, Homo sapien
gttgcagccagatgggtttgtacta

SEQ ID NO: 2868085 - DNA, 25 bp, Homo sapien
gcagccagatgggtttgtactattt

SEQ ID NO: 2868086 - DNA, 25 bp, Homo sapien
tcagctctagtccatcttccccttc

SEQ ID NO: 2868087 - DNA, 25 bp, Homo sapien
gggcctggtcatccggttcctgaat

SEQ ID NO: 2868088 - DNA, 25 bp, Homo sapien
gaaaatcacccactaagaagccaag

SEQ ID NO: 2868089 - DNA, 25 bp, Homo sapien
tatgttctccaagaccggctggtgg

SEQ ID NO: 2868090 - DNA, 25 bp, Homo sapien
tctgggtaataatgcccctcagctg

SEQ ID NO: 2868091 - DNA, 25 bp, Homo sapien
acaactgttacacttaaaagctcca

SEQ ID NO: 2868092 - DNA, 25 bp, Homo sapien
caatttcactcacaactgttacact

SEQ ID NO: 2868093 - DNA, 25 bp, Homo sapien
tttcactcacaactgttacacttaa

SEQ ID NO: 2868094 - DNA, 25 bp, Homo sapien
cactcacaactgttacacttaaaag

SEQ ID NO: 2868095 - DNA, 25 bp, Homo sapien
cttctgacctagtgagtcttcctta

SEQ ID NO: 2868096 - DNA, 25 bp, Homo sapien
tcttccttagactcaaaaaagatag

SEQ ID NO: 2868097 - DNA, 25 bp, Homo sapien
actccttctgacctagtgagtcttc

SEQ ID NO: 2868098 - DNA, 25 bp, Homo sapien
tgagtcttccttagactcaaaaaag

SEQ ID NO: 2868099 - DNA, 25 bp, Homo sapien
cctgctaggtcaaggcaagccgtag

SEQ ID NO: 2868100 - DNA, 25 bp, Homo sapien
ggactttaataatccaagccgcagg

SEQ ID NO: 2868101 - DNA, 25 bp, Homo sapien
tagcaagcacttggtggccgatcaa

SEQ ID NO: 2868102 - DNA, 25 bp, Homo sapien
tcaatggcaaatacgaacactggct

SEQ ID NO: 2868103 - DNA, 25 bp, Homo sapien
gcagagatgggaccgtatgtagcac

SEQ ID NO: 2868104 - DNA, 25 bp, Homo sapien
ccaggcttcttgtgcacacgccaaa

SEQ ID NO: 2868105 - DNA, 25 bp, Homo sapien
tcttgtgcatatagctgtccggccc

SEQ ID NO: 2868106 - DNA, 25 bp, Homo sapien
tgtccggccctatgataaaatgcat

SEQ ID NO: 2868107 - DNA, 25 bp, Homo sapien
catattgtcagtggccactcgtgtg

SEQ ID NO: 2868108 - DNA, 25 bp, Homo sapien
ccatagtgtcgtttgtttcagggaa

SEQ ID NO: 2868109 - DNA, 25 bp, Homo sapien
tgtgttcttgcaaacaaacctgtgg

SEQ ID NO: 2868110 - DNA, 25 bp, Homo sapien
ggtttcaacaactaacagggcatgt

SEQ ID NO: 2868111 - DNA, 25 bp, Homo sapien
gagtcagttgtaacccggcatccag

SEQ ID NO: 2868112 - DNA, 25 bp, Homo sapien
tcagtgctttttccgccaacgtggc

SEQ ID NO: 2868113 - DNA, 25 bp, Homo sapien
catacgataggtgaggacatctgca

SEQ ID NO: 2868114 - DNA, 25 bp, Homo sapien
tagaacctgcggtgctaacgatggc

SEQ ID NO: 2868115 - DNA, 25 bp, Homo sapien
gatgtttagtcgctcacctcacaga

SEQ ID NO: 2868116 - DNA, 25 bp, Homo sapien
aacctgtgtcagttatgaggcctac

SEQ ID NO: 2868117 - DNA, 25 bp, Homo sapien
gaagatccaaggtagcagagcccta

SEQ ID NO: 2868118 - DNA, 25 bp, Homo sapien
ttttgtcagggaccaggctctttcc

SEQ ID NO: 2868119 - DNA, 25 bp, Homo sapien
tcctggtagtgaacgccaagcacaa

SEQ ID NO: 2868120 - DNA, 25 bp, Homo sapien
caggttgaaagagagctactaaatt

SEQ ID NO: 2868121 - DNA, 25 bp, Homo sapien
tatgacataggaaattggccatggg

SEQ ID NO: 2868122 - DNA, 25 bp, Homo sapien
tgaagaatggcttaacttacgtcac

SEQ ID NO: 2868123 - DNA, 25 bp, Homo sapien
ggtcatatagaaggtctgtggccaa

SEQ ID NO: 2868124 - DNA, 25 bp, Homo sapien
gagcaactgtgactgatgcacctgg

SEQ ID NO: 2868125 - DNA, 25 bp, Homo sapien
gagtgaccctgattgacccagcttt

SEQ ID NO: 2868126 - DNA, 25 bp, Homo sapien
caaaaggagttgtcggtgcttgaac

SEQ ID NO: 2868127 - DNA, 25 bp, Homo sapien
ttttttaatctggctgaatgcctat

SEQ ID NO: 2868128 - DNA, 25 bp, Homo sapien
tttttaatctggctgaatgcctata

SEQ ID NO: 2868129 - DNA, 25 bp, Homo sapien
tgttcattaaacctagacccacgat

SEQ ID NO: 2868130 - DNA, 25 bp, Homo sapien
caggaagcctttggtaaaatctata

SEQ ID NO: 2868131 - DNA, 25 bp, Homo sapien
taatctaaagtgttgctccctcgtc

SEQ ID NO: 2868132 - DNA, 25 bp, Homo sapien
tatatccctggacaatgcttttggg

SEQ ID NO: 2868133 - DNA, 25 bp, Homo sapien
caggaggacggttcatttgctcggc

SEQ ID NO: 2868134 - DNA, 25 bp, Homo sapien
tattgctgctgagaaaacgaggttt

SEQ ID NO: 2868135 - DNA, 25 bp, Homo sapien
taagtgtttgtccattgaccaaggc

SEQ ID NO: 2868136 - DNA, 25 bp, Homo sapien
ggctgattgatctcgtgttggcaac

SEQ ID NO: 2868137 - DNA, 25 bp, Homo sapien
ttcctgaagtagtcaataatatctg

SEQ ID NO: 2868138 - DNA, 25 bp, Homo sapien
cccatcaatgagcagaagtggcatt

SEQ ID NO: 2868139 - DNA, 25 bp, Homo sapien
gaacctcggtttttcccatcaatga

SEQ ID NO: 2868140 - DNA, 25 bp, Homo sapien
cgttaatgtgcactggtatctggaa

SEQ ID NO: 2868141 - DNA, 25 bp, Homo sapien
ggcatgcagagtggcataaataaag

SEQ ID NO: 2868142 - DNA, 25 bp, Homo sapien
catgtgatttaatcctaaatttgcc

SEQ ID NO: 2868143 - DNA, 25 bp, Homo sapien
caaagatcgctccatgaaggcatgc

SEQ ID NO: 2868144 - DNA, 25 bp, Homo sapien
tacagcacggactctcaaagatcgc

SEQ ID NO: 2868145 - DNA, 25 bp, Homo sapien
tctttccctcggagtccagttccca

SEQ ID NO: 2868146 - DNA, 25 bp, Homo sapien
cagttcccaacaagtaaacttgact

SEQ ID NO: 2868147 - DNA, 25 bp, Homo sapien
tccttctgataacggatctggatgt

SEQ ID NO: 2868148 - DNA, 25 bp, Homo sapien
aactttatctttgtacaacaccatg

SEQ ID NO: 2868149 - DNA, 25 bp, Homo sapien
aagtcaatctcgttaaagcctcctg

SEQ ID NO: 2868150 - DNA, 25 bp, Homo sapien
taaagtttcggcactggctacggga

SEQ ID NO: 2868151 - DNA, 25 bp, Homo sapien
gcctctagggatctgacaaacatgt

SEQ ID NO: 2868152 - DNA, 25 bp, Homo sapien
tctccgggtgatctaaatgtgcaac

SEQ ID NO: 2868153 - DNA, 25 bp, Homo sapien
aatgggtctcctaggtattacagaa

SEQ ID NO: 2868154 - DNA, 25 bp, Homo sapien
tctgccagcctaatgattcccgagc

SEQ ID NO: 2868155 - DNA, 25 bp, Homo sapien
gacaccatgtgattcctatgacaag

SEQ ID NO: 2868156 - DNA, 25 bp, Homo sapien
gatgctgccaaccaaatgactgcct

SEQ ID NO: 2868157 - DNA, 25 bp, Homo sapien
taagaaacgtaccactcttcattta

SEQ ID NO: 2868158 - DNA, 25 bp, Homo sapien
ctctggtcgggtaatataagaaacg

SEQ ID NO: 2868159 - DNA, 25 bp, Homo sapien
ctggtttatctttctaagagcagct

SEQ ID NO: 2868160 - DNA, 25 bp, Homo sapien
agcttctgcctctggtcgggtaata

SEQ ID NO: 2868161 - DNA, 25 bp, Homo sapien
aagtggcaaggggaagtttctgcct

SEQ ID NO: 2868162 - DNA, 25 bp, Homo sapien
ccgaggtttgtttggaagtggcaag

SEQ ID NO: 2868163 - DNA, 25 bp, Homo sapien
gaagtttctgccttcggctctgata

SEQ ID NO: 2868164 - DNA, 25 bp, Homo sapien
ggctctgataggtggtctgttgcta

SEQ ID NO: 2868165 - DNA, 25 bp, Homo sapien
tgaagcacgtcacaaaagcccagag

SEQ ID NO: 2868166 - DNA, 25 bp, Homo sapien
tggctgaagcacgtcacaaaagccc

SEQ ID NO: 2868167 - DNA, 25 bp, Homo sapien
aaggcttgatggctgaagcacgtca

SEQ ID NO: 2868168 - DNA, 25 bp, Homo sapien
tgatggctgaagcacgtcacaaaag

SEQ ID NO: 2868169 - DNA, 25 bp, Homo sapien
ggaggcactctgtggaaaactgctg

SEQ ID NO: 2868170 - DNA, 25 bp, Homo sapien
ttgagagaagtatggtggcagggag

SEQ ID NO: 2868171 - DNA, 25 bp, Homo sapien
agggaggcactctgtggaaaactgc

SEQ ID NO: 2868172 - DNA, 25 bp, Homo sapien
cttgagagaagtatggtggcaggga

SEQ ID NO: 2868173 - DNA, 25 bp, Homo sapien
tgagcagtgaatccccagggcttag

SEQ ID NO: 2868174 - DNA, 25 bp, Homo sapien
cagcacacagggaatggaactacat

SEQ ID NO: 2868175 - DNA, 25 bp, Homo sapien
tacattccgctgtggaccatgccaa

SEQ ID NO: 2868176 - DNA, 25 bp, Homo sapien
caacattcaactgtgtaaagggcac

SEQ ID NO: 2868177 - DNA, 25 bp, Homo sapien
cagacggtgatagcatttgcagggc

SEQ ID NO: 2868178 - DNA, 25 bp, Homo sapien
agaagggaagtgcatgttaggtggg

SEQ ID NO: 2868179 - DNA, 25 bp, Homo sapien
tcctgttcatgcatctgcccctggg

SEQ ID NO: 2868180 - DNA, 25 bp, Homo sapien
ctgggcctttctcctgttcatgcat

SEQ ID NO: 2868181 - DNA, 25 bp, Homo sapien
ttgtttggggacaatgactgggcct

SEQ ID NO: 2868182 - DNA, 25 bp, Homo sapien
ggcctttctcctgttcatgcatctg

SEQ ID NO: 2868183 - DNA, 25 bp, Homo sapien
gatgggagagggttcatgggacttg

SEQ ID NO: 2868184 - DNA, 25 bp, Homo sapien
gagctcataggaagtagtgctggct

SEQ ID NO: 2868185 - DNA, 25 bp, Homo sapien
gaaagtgttggagctcataggaagt

SEQ ID NO: 2868186 - DNA, 25 bp, Homo sapien
cttgaagggaaagtgttggagctca

SEQ ID NO: 2868187 - DNA, 25 bp, Homo sapien
tctctcttctgtctggtccccatcc

SEQ ID NO: 2868188 - DNA, 25 bp, Homo sapien
attctctcttctgtctggtccccat

SEQ ID NO: 2868189 - DNA, 25 bp, Homo sapien
tcttctgtctggtccccatccatgc

SEQ ID NO: 2868190 - DNA, 25 bp, Homo sapien
tctcttctgtctggtccccatccat

SEQ ID NO: 2868191 - DNA, 25 bp, Homo sapien
catgtctttccgtggtcggtggtaa

SEQ ID NO: 2868192 - DNA, 25 bp, Homo sapien
ttcatgtctttccgtggtcggtggt

SEQ ID NO: 2868193 - DNA, 25 bp, Homo sapien
tcatgtctttccgtggtcggtggta

SEQ ID NO: 2868194 - DNA, 25 bp, Homo sapien
cttgggtaaatgctccccgagtgac

SEQ ID NO: 2868195 - DNA, 25 bp, Homo sapien
cttgtcagaaaatggtggtttcttt

SEQ ID NO: 2868196 - DNA, 25 bp, Homo sapien
ttgtcagaaaatggtggtttctttc

SEQ ID NO: 2868197 - DNA, 25 bp, Homo sapien
gcccagcaaaatttgccaatttttg

SEQ ID NO: 2868198 - DNA, 25 bp, Homo sapien
tttgcatattctctgagcatgttaa

SEQ ID NO: 2868199 - DNA, 25 bp, Homo sapien
ccatgcccagcaaaatttgccaatt

SEQ ID NO: 2868200 - DNA, 25 bp, Homo sapien
tgcatattctctgagcatgttaaaa

SEQ ID NO: 2868201 - DNA, 25 bp, Homo sapien
tagtgtgaagggttctctatcaaac

SEQ ID NO: 2868202 - DNA, 25 bp, Homo sapien
aacggagctaatgaacgatctaggg

SEQ ID NO: 2868203 - DNA, 25 bp, Homo sapien
cttctgtctattgaaggagcaggga

SEQ ID NO: 2868204 - DNA, 25 bp, Homo sapien
gggaggtttcgtgcttctgtctatt

SEQ ID NO: 2868205 - DNA, 25 bp, Homo sapien
ggagtgcctggtgggaacagggcaa

SEQ ID NO: 2868206 - DNA, 25 bp, Homo sapien
aagagagagcagcccttgtactcac

SEQ ID NO: 2868207 - DNA, 25 bp, Homo sapien
gaacagggcaagagagagcagccct

SEQ ID NO: 2868208 - DNA, 25 bp, Homo sapien
ctaggggagtgcctggtgggaacag

SEQ ID NO: 2868209 - DNA, 25 bp, Homo sapien
ctgggttcttcgtggttggtctggg

SEQ ID NO: 2868210 - DNA, 25 bp, Homo sapien
ctgctgggttcttcgtggttggtct

SEQ ID NO: 2868211 - DNA, 25 bp, Homo sapien
gctgggttcttcgtggttggtctgg

SEQ ID NO: 2868212 - DNA, 25 bp, Homo sapien
tctgctgggttcttcgtggttggtc

SEQ ID NO: 2868213 - DNA, 25 bp, Homo sapien
gatccaaacgttaggaagcacttcc

SEQ ID NO: 2868214 - DNA, 25 bp, Homo sapien
taccgcagtagcctcctatctgagc

SEQ ID NO: 2868215 - DNA, 25 bp, Homo sapien
caatacatcagcaagagccggcact

SEQ ID NO: 2868216 - DNA, 25 bp, Homo sapien
tatctgagctccctgttctagactc

SEQ ID NO: 2868217 - DNA, 25 bp, Homo sapien
cggccatcggtctctgggggggcac

SEQ ID NO: 2868218 - DNA, 25 bp, Homo sapien
gggagggcggccatcggtctctggg

SEQ ID NO: 2868219 - DNA, 25 bp, Homo sapien
ggcgggagggcggccatcggtctct

SEQ ID NO: 2868220 - DNA, 25 bp, Homo sapien
cgagtgattccggccggctggtggg

SEQ ID NO: 2868221 - DNA, 25 bp, Homo sapien
taagaagccgagcagatatcgagac

SEQ ID NO: 2868222 - DNA, 25 bp, Homo sapien
gctgctcgggccagaaaatccggaa

SEQ ID NO: 2868223 - DNA, 25 bp, Homo sapien
gttgaaactgccaaatagccttagg

SEQ ID NO: 2868224 - DNA, 25 bp, Homo sapien
cagagctttctgctacatgggcaag

SEQ ID NO: 2868225 - DNA, 25 bp, Homo sapien
gcgtcatcttccacgggtgcctctt

SEQ ID NO: 2868226 - DNA, 25 bp, Homo sapien
catcattgggactttcataatcgtc

SEQ ID NO: 2868227 - DNA, 25 bp, Homo sapien
agggtggcggctcataatccgcgtc

SEQ ID NO: 2868228 - DNA, 25 bp, Homo sapien
cagagcttcctcgtcattggagggt

SEQ ID NO: 2868229 - DNA, 25 bp, Homo sapien
caagagaggctgcatggcaaggatt

SEQ ID NO: 2868230 - DNA, 25 bp, Homo sapien
ggatcgaagactagcctcaggcaca

SEQ ID NO: 2868231 - DNA, 25 bp, Homo sapien
gccaagctctatagccactagtgaa

SEQ ID NO: 2868232 - DNA, 25 bp, Homo sapien
cactagtgaatggaagccctcagtt

SEQ ID NO: 2868233 - DNA, 25 bp, Homo sapien
caactggattgcaccctctttgagg

SEQ ID NO: 2868234 - DNA, 25 bp, Homo sapien
ccagaaggcccacgtgactgagggt

SEQ ID NO: 2868235 - DNA, 25 bp, Homo sapien
gaacagattgggctacggtccataa

SEQ ID NO: 2868236 - DNA, 25 bp, Homo sapien
tacaatccgtcagactctcagaggg

SEQ ID NO: 2868237 - DNA, 25 bp, Homo sapien
tggctccttatcacaaagctgccct

SEQ ID NO: 2868238 - DNA, 25 bp, Homo sapien
ggacactgctgtaaaggtgcaagaa

SEQ ID NO: 2868239 - DNA, 25 bp, Homo sapien
cttatcacaaagctgccctggacac

SEQ ID NO: 2868240 - DNA, 25 bp, Homo sapien
tgccctggacactgctgtaaaggtg

SEQ ID NO: 2868241 - DNA, 25 bp, Homo sapien
agcccccattgtcctcttcgtggct

SEQ ID NO: 2868242 - DNA, 25 bp, Homo sapien
gcccccattgtcctcttcgtggctt

SEQ ID NO: 2868243 - DNA, 25 bp, Homo sapien
ggaaggagatgacaccaccatcagc

SEQ ID NO: 2868244 - DNA, 25 bp, Homo sapien
gaaggagatgacaccaccatcagca

SEQ ID NO: 2868245 - DNA, 25 bp, Homo sapien
tggaaggagatgacaccaccatcag

SEQ ID NO: 2868246 - DNA, 25 bp, Homo sapien
tgtctcttcaggaaaccgcgggact

SEQ ID NO: 2868247 - DNA, 25 bp, Homo sapien
ctgtctcttcaggaaaccgcgggac

SEQ ID NO: 2868248 - DNA, 25 bp, Homo sapien
ttcctgacttaacttactgagaatc

SEQ ID NO: 2868249 - DNA, 25 bp, Homo sapien
taagtggttgtttcaagaagacgat

SEQ ID NO: 2868250 - DNA, 25 bp, Homo sapien
gttgtttcaagaagacgatgggcat

SEQ ID NO: 2868251 - DNA, 25 bp, Homo sapien
catgccgtcagaatgcttgtgacat

SEQ ID NO: 2868252 - DNA, 25 bp, Homo sapien
cgtcagaatgcttgtgacatggttc

SEQ ID NO: 2868253 - DNA, 25 bp, Homo sapien
gacctacctgaacggactctctgag

SEQ ID NO: 2868254 - DNA, 25 bp, Homo sapien
gctgttctctcagtgggaccctgga

SEQ ID NO: 2868255 - DNA, 25 bp, Homo sapien
tctgtctaaaggcacgtgaccagca

SEQ ID NO: 2868256 - DNA, 25 bp, Homo sapien
tatccttgtcacctgagaagccggg

SEQ ID NO: 2868257 - DNA, 25 bp, Homo sapien
gatgcctcagtacgttgtttctgcc

SEQ ID NO: 2868258 - DNA, 25 bp, Homo sapien
caggcatgagaatgttcctttcgcc

SEQ ID NO: 2868259 - DNA, 25 bp, Homo sapien
caatacctaattgctgcctgcacca

SEQ ID NO: 2868260 - DNA, 25 bp, Homo sapien
gcagaaagagcatcatccaatacct

SEQ ID NO: 2868261 - DNA, 25 bp, Homo sapien
tcttgggatcaaccatgtcctgaga

SEQ ID NO: 2868262 - DNA, 25 bp, Homo sapien
tgagagagccttccttaccacaact

SEQ ID NO: 2868263 - DNA, 25 bp, Homo sapien
tatattgtaaacgtcagggaaggaa

SEQ ID NO: 2868264 - DNA, 25 bp, Homo sapien
tgagagagtgactgcattttcaggc

SEQ ID NO: 2868265 - DNA, 25 bp, Homo sapien
cctttcatgcatggactgatctgtg

SEQ ID NO: 2868266 - DNA, 25 bp, Homo sapien
ggcactctaccgaatgactatgttt

SEQ ID NO: 2868267 - DNA, 25 bp, Homo sapien
cgttgaatgaactctaggctcctgg

SEQ ID NO: 2868268 - DNA, 25 bp, Homo sapien
ggcctggagattctcaaagcagcaa

SEQ ID NO: 2868269 - DNA, 25 bp, Homo sapien
gctcccagatcacccatagagttgg

SEQ ID NO: 2868270 - DNA, 25 bp, Homo sapien
ttcaagccgacaatgacatagaact

SEQ ID NO: 2868271 - DNA, 25 bp, Homo sapien
tcttcatgtaacttctgttccccac

SEQ ID NO: 2868272 - DNA, 25 bp, Homo sapien
gctttcttatttcaagccgacaatg

SEQ ID NO: 2868273 - DNA, 25 bp, Homo sapien
gcacccggagcttggggaacttctg

SEQ ID NO: 2868274 - DNA, 25 bp, Homo sapien
acatatggcaggcaggttacaaccc

SEQ ID NO: 2868275 - DNA, 25 bp, Homo sapien
atgaagacacatatggcaggcaggt

SEQ ID NO: 2868276 - DNA, 25 bp, Homo sapien
tatggcaggcaggttacaacccaca

SEQ ID NO: 2868277 - DNA, 25 bp, Homo sapien
gacacatatggcaggcaggttacaa

SEQ ID NO: 2868278 - DNA, 25 bp, Homo sapien
ctccctgcctgccatggagatatga

SEQ ID NO: 2868279 - DNA, 25 bp, Homo sapien
tccctgcctgccatggagatatgat

SEQ ID NO: 2868280 - DNA, 25 bp, Homo sapien
ccctgcctgccatggagatatgatg

SEQ ID NO: 2868281 - DNA, 25 bp, Homo sapien
tctccctgcctgccatggagatatg

SEQ ID NO: 2868282 - DNA, 25 bp, Homo sapien
tcccaactgacacaagtctcaagct

SEQ ID NO: 2868283 - DNA, 25 bp, Homo sapien
agaagcatagcttctaccagataag

SEQ ID NO: 2868284 - DNA, 25 bp, Homo sapien
cctggcacccgcctatacatttatt

SEQ ID NO: 2868285 - DNA, 25 bp, Homo sapien
gactgacctttatttggttaggcca

SEQ ID NO: 2868286 - DNA, 25 bp, Homo sapien
ccactcatgagtatgtgctccagag

SEQ ID NO: 2868287 - DNA, 25 bp, Homo sapien
tggagacagccatatcacatgtgtg

SEQ ID NO: 2868288 - DNA, 25 bp, Homo sapien
ttgggcttctcaaaggatggatggc

SEQ ID NO: 2868289 - DNA, 25 bp, Homo sapien
catgtgtgcttgatgcaaaatcagc

SEQ ID NO: 2868290 - DNA, 25 bp, Homo sapien
cgagccccatcgatgtggtacttct

SEQ ID NO: 2868291 - DNA, 25 bp, Homo sapien
aagcgagccccatcgatgtggtact

SEQ ID NO: 2868292 - DNA, 25 bp, Homo sapien
caagaagcgagccccatcgatgtgg

SEQ ID NO: 2868293 - DNA, 25 bp, Homo sapien
agaagcgagccccatcgatgtggta

SEQ ID NO: 2868294 - DNA, 25 bp, Homo sapien
aggacctctgagcgaaagggcacat

SEQ ID NO: 2868295 - DNA, 25 bp, Homo sapien
acctctgagcgaaagggcacattcc

SEQ ID NO: 2868296 - DNA, 25 bp, Homo sapien
ctctgagcgaaagggcacattcctc

SEQ ID NO: 2868297 - DNA, 25 bp, Homo sapien
gacctctgagcgaaagggcacattc

SEQ ID NO: 2868298 - DNA, 25 bp, Homo sapien
tcacaagctgagcatgggcgcttca

SEQ ID NO: 2868299 - DNA, 25 bp, Homo sapien
tggcgtagccagatcccagaaagca

SEQ ID NO: 2868300 - DNA, 25 bp, Homo sapien
tgtggaacacccctgttggagccga

SEQ ID NO: 2868301 - DNA, 25 bp, Homo sapien
tcaaatccagagctcggaggcgttc

SEQ ID NO: 2868302 - DNA, 25 bp, Homo sapien
cagaaggaccactgtgaccctgtgc

SEQ ID NO: 2868303 - DNA, 25 bp, Homo sapien
gaaggaccactgtgaccctgtgcag

SEQ ID NO: 2868304 - DNA, 25 bp, Homo sapien
gagaccagaaggaccactgtgaccc

SEQ ID NO: 2868305 - DNA, 25 bp, Homo sapien
ccactgtgaccctgtgcaggctcag

SEQ ID NO: 2868306 - DNA, 25 bp, Homo sapien
ccagtagggcatagtgatttgaagc

SEQ ID NO: 2868307 - DNA, 25 bp, Homo sapien
aaatggggcggccatgaaagcagcc

SEQ ID NO: 2868308 - DNA, 25 bp, Homo sapien
agcagtggtggggataccctcgccc

SEQ ID NO: 2868309 - DNA, 25 bp, Homo sapien
gccatgaaagcagcctctgggtaca

SEQ ID NO: 2868310 - DNA, 25 bp, Homo sapien
tacaaggaggtgctgcaagctcaaa

SEQ ID NO: 2868311 - DNA, 25 bp, Homo sapien
tctgatgggataactgaccgcctaa

SEQ ID NO: 2868312 - DNA, 25 bp, Homo sapien
gaccgcctaatgcaacctactctgg

SEQ ID NO: 2868313 - DNA, 25 bp, Homo sapien
cagggagcagctcaatccaagatca

SEQ ID NO: 2868314 - DNA, 25 bp, Homo sapien
gaccatggtgaggacttgcactgca

SEQ ID NO: 2868315 - DNA, 25 bp, Homo sapien
tgcagaaccggtcctggaacttcag

SEQ ID NO: 2868316 - DNA, 25 bp, Homo sapien
caccagatgggagaccttgagcaaa

SEQ ID NO: 2868317 - DNA, 25 bp, Homo sapien
tgcgagggctctatgtacaatttgg

SEQ ID NO: 2868318 - DNA, 25 bp, Homo sapien
aatatggtctccttgaaggcaggtc

SEQ ID NO: 2868319 - DNA, 25 bp, Homo sapien
gcaggtcagcgtggtatctccatga

SEQ ID NO: 2868320 - DNA, 25 bp, Homo sapien
tctccatgattaacagggtgcctgg

SEQ ID NO: 2868321 - DNA, 25 bp, Homo sapien
atctacacatggccatctcgctgct

SEQ ID NO: 2868322 - DNA, 25 bp, Homo sapien
tcccacgtctgtatggtggctcgtg

SEQ ID NO: 2868323 - DNA, 25 bp, Homo sapien
acgtctgtatggtggctcgtgaaga

SEQ ID NO: 2868324 - DNA, 25 bp, Homo sapien
tctgtatggtggctcgtgaagagca

SEQ ID NO: 2868325 - DNA, 25 bp, Homo sapien
cttcaggggaattcccacgtctgta

SEQ ID NO: 2868326 - DNA, 25 bp, Homo sapien
cctgaaggatttcttgtaccttgtg

SEQ ID NO: 2868327 - DNA, 25 bp, Homo sapien
cactgggcctttgtccttgacctga

SEQ ID NO: 2868328 - DNA, 25 bp, Homo sapien
ggatttcttgtaccttgtgcacttt

SEQ ID NO: 2868329 - DNA, 25 bp, Homo sapien
ctttgtccttgacctgaaggatttc

SEQ ID NO: 2868330 - DNA, 25 bp, Homo sapien
tgttttccatttccatagacctgtt

SEQ ID NO: 2868331 - DNA, 25 bp, Homo sapien
ttttccatttccatagacctgttcc

SEQ ID NO: 2868332 - DNA, 25 bp, Homo sapien
tttgttttccatttccatagacctg

SEQ ID NO: 2868333 - DNA, 25 bp, Homo sapien
ttgttttccatttccatagacctgt

SEQ ID NO: 2868334 - DNA, 25 bp, Homo sapien
ccaatgtggactgcacaacctttga

SEQ ID NO: 2868335 - DNA, 25 bp, Homo sapien
gaccccattctgcttctacaccaca

SEQ ID NO: 2868336 - DNA, 25 bp, Homo sapien
agcgtatcagacagctgaccattga

SEQ ID NO: 2868337 - DNA, 25 bp, Homo sapien
cagctgaccattgatcattggatcc

SEQ ID NO: 2868338 - DNA, 25 bp, Homo sapien
tgcttgggatcaaagatgccaaaag

SEQ ID NO: 2868339 - DNA, 25 bp, Homo sapien
gtgcttgggatcaaagatgccaaaa

SEQ ID NO: 2868340 - DNA, 25 bp, Homo sapien
tctgatggctgttgtttatcaaggc

SEQ ID NO: 2868341 - DNA, 25 bp, Homo sapien
gatggctgttgtttatcaaggcaac

SEQ ID NO: 2868342 - DNA, 25 bp, Homo sapien
ggctgttgtttatcaaggcaaccat

SEQ ID NO: 2868343 - DNA, 25 bp, Homo sapien
ctgatggctgttgtttatcaaggca

SEQ ID NO: 2868344 - DNA, 25 bp, Homo sapien
tcatccactaagagtcgagctctgt

SEQ ID NO: 2868345 - DNA, 25 bp, Homo sapien
ctggtgcagggcctaccacatggta

SEQ ID NO: 2868346 - DNA, 25 bp, Homo sapien
gctgaaactctatacgctttggcca

SEQ ID NO: 2868347 - DNA, 25 bp, Homo sapien
tccttgctgtgcattactctagagc

SEQ ID NO: 2868348 - DNA, 25 bp, Homo sapien
tcattgcatcctaggcaaaccaggg

SEQ ID NO: 2868349 - DNA, 25 bp, Homo sapien
aaaccagggacctcccatgtcttgg

SEQ ID NO: 2868350 - DNA, 25 bp, Homo sapien
tgggaaacggctgagtgactgaaat

SEQ ID NO: 2868351 - DNA, 25 bp, Homo sapien
tgactgaaatcacccacgtgggcca

SEQ ID NO: 2868352 - DNA, 25 bp, Homo sapien
cagacctggatgtcgtggcagtcac

SEQ ID NO: 2868353 - DNA, 25 bp, Homo sapien
tcagacctggatgtcgtggcagtca

SEQ ID NO: 2868354 - DNA, 25 bp, Homo sapien
gacctggatgtcgtggcagtcactg

SEQ ID NO: 2868355 - DNA, 25 bp, Homo sapien
agacctggatgtcgtggcagtcact

SEQ ID NO: 2868356 - DNA, 25 bp, Homo sapien
gaagctggctggaaccacaaagccc

SEQ ID NO: 2868357 - DNA, 25 bp, Homo sapien
acaaagccccatggacaagcaagct

SEQ ID NO: 2868358 - DNA, 25 bp, Homo sapien
ccatggacaagcaagctctggcact

SEQ ID NO: 2868359 - DNA, 25 bp, Homo sapien
caccaccctggaagggagaagctgg

SEQ ID NO: 2868360 - DNA, 25 bp, Homo sapien
ctcacagggcacatgaggtaaaaag

SEQ ID NO: 2868361 - DNA, 25 bp, Homo sapien
ggccaggcctattattatcacgggt

SEQ ID NO: 2868362 - DNA, 25 bp, Homo sapien
tggccaggcctattattatcacggg

SEQ ID NO: 2868363 - DNA, 25 bp, Homo sapien
ttctggccaggcctattattatcac

SEQ ID NO: 2868364 - DNA, 25 bp, Homo sapien
caggcctattattatcacgggtcat

SEQ ID NO: 2868365 - DNA, 25 bp, Homo sapien
tatcccgtgcataaagttctgtgag

SEQ ID NO: 2868366 - DNA, 25 bp, Homo sapien
cacgtaggcacagggtctaactcca

SEQ ID NO: 2868367 - DNA, 25 bp, Homo sapien
aactgatgaaggttctctgctccca

SEQ ID NO: 2868368 - DNA, 25 bp, Homo sapien
gaaggccagtctttattgacaggag

SEQ ID NO: 2868369 - DNA, 25 bp, Homo sapien
aacaaacctgaacgtgtaccctgca

SEQ ID NO: 2868370 - DNA, 25 bp, Homo sapien
caaagagatgaaatcgggcagagta

SEQ ID NO: 2868371 - DNA, 25 bp, Homo sapien
taatattccatgacgtatacgtacc

SEQ ID NO: 2868372 - DNA, 25 bp, Homo sapien
atgatgtgtcaaacattccttcagc

SEQ ID NO: 2868373 - DNA, 25 bp, Homo sapien
caaaggttagtcctgcaacagaaga

SEQ ID NO: 2868374 - DNA, 25 bp, Homo sapien
tgatgcagccggaaacaggtatgag

SEQ ID NO: 2868375 - DNA, 25 bp, Homo sapien
aatagagagctagaactggctggcc

SEQ ID NO: 2868376 - DNA, 25 bp, Homo sapien
tcaggcacagaggtgacgatcatcg

SEQ ID NO: 2868377 - DNA, 25 bp, Homo sapien
taatgaggaggccaccggtcagcag

SEQ ID NO: 2868378 - DNA, 25 bp, Homo sapien
tggacaggtactggttgctcttcac

SEQ ID NO: 2868379 - DNA, 25 bp, Homo sapien
tgctcttcaccatggcgataatgag

SEQ ID NO: 2868380 - DNA, 25 bp, Homo sapien
cgctggaataggacgctggtttcgt

SEQ ID NO: 2868381 - DNA, 25 bp, Homo sapien
gcattagcattccactttacaaggg

SEQ ID NO: 2868382 - DNA, 25 bp, Homo sapien
gagtcaccgggattccactttgagg

SEQ ID NO: 2868383 - DNA, 25 bp, Homo sapien
gggccaactgatcgctttaggaaag

SEQ ID NO: 2868384 - DNA, 25 bp, Homo sapien
cacagccagttagcggcagattcaa

SEQ ID NO: 2868385 - DNA, 25 bp, Homo sapien
gggacagttaggaacaggctcacac

SEQ ID NO: 2868386 - DNA, 25 bp, Homo sapien
ggacagttaggaacaggctcacaca

SEQ ID NO: 2868387 - DNA, 25 bp, Homo sapien
ggacagggacagttaggaacaggct

SEQ ID NO: 2868388 - DNA, 25 bp, Homo sapien
gacagttaggaacaggctcacacac

SEQ ID NO: 2868389 - DNA, 25 bp, Homo sapien
cagggataaagggatgtgtccccat

SEQ ID NO: 2868390 - DNA, 25 bp, Homo sapien
acagggataaagggatgtgtcccca

SEQ ID NO: 2868391 - DNA, 25 bp, Homo sapien
agggataaagggatgtgtccccatc

SEQ ID NO: 2868392 - DNA, 25 bp, Homo sapien
gggataaagggatgtgtccccatcc

SEQ ID NO: 2868393 - DNA, 25 bp, Homo sapien
gctcctcctggtccctgatgttggt

SEQ ID NO: 2868394 - DNA, 25 bp, Homo sapien
gacacgttgacccacaggcatgggt

SEQ ID NO: 2868395 - DNA, 25 bp, Homo sapien
gatgttggtctcaatcaggtggcac

SEQ ID NO: 2868396 - DNA, 25 bp, Homo sapien
tgctggttctggtcccgagtgtcct

SEQ ID NO: 2868397 - DNA, 25 bp, Homo sapien
accatggttacacccaggcaaaggg

SEQ ID NO: 2868398 - DNA, 25 bp, Homo sapien
ggcagcacagtcgtgaccaggatgt

SEQ ID NO: 2868399 - DNA, 25 bp, Homo sapien
tagtaggtgatgacggcacacacca

SEQ ID NO: 2868400 - DNA, 25 bp, Homo sapien
cagtcgtgaccaggatgtagtaggt

SEQ ID NO: 2868401 - DNA, 25 bp, Homo sapien
gacacagactcggagagcaggtacc

SEQ ID NO: 2868402 - DNA, 25 bp, Homo sapien
catgcccaaacatggtcaagtctga

SEQ ID NO: 2868403 - DNA, 25 bp, Homo sapien
ccagagtctcgtgggaaacagattt

SEQ ID NO: 2868404 - DNA, 25 bp, Homo sapien
tcttcccggcgtcctgtgggtcttg

SEQ ID NO: 2868405 - DNA, 25 bp, Homo sapien
cacaaatggaatagaagggcagtga

SEQ ID NO: 2868406 - DNA, 25 bp, Homo sapien
tgtaccagggaatgaccacatagat

SEQ ID NO: 2868407 - DNA, 25 bp, Homo sapien
tcttaggtcacacactatggcacaa

SEQ ID NO: 2868408 - DNA, 25 bp, Homo sapien
aaagtgctttatctactcttaggtc

SEQ ID NO: 2868409 - DNA, 25 bp, Homo sapien
ctccttccatggcacatgtctcctc

SEQ ID NO: 2868410 - DNA, 25 bp, Homo sapien
cagccccttagccactctccgcgcc

SEQ ID NO: 2868411 - DNA, 25 bp, Homo sapien
tctccttccatggcacatgtctcct

SEQ ID NO: 2868412 - DNA, 25 bp, Homo sapien
cttagccactctccgcgcctcctgg

SEQ ID NO: 2868413 - DNA, 25 bp, Homo sapien
tagctgcagcaaaggtagactcctg

SEQ ID NO: 2868414 - DNA, 25 bp, Homo sapien
aatcggtgtccctaggtgtgctgca

SEQ ID NO: 2868415 - DNA, 25 bp, Homo sapien
caccgtgagagcctttgcaagccaa

SEQ ID NO: 2868416 - DNA, 25 bp, Homo sapien
ccaagtgttcaaccatcaggagctg

SEQ ID NO: 2868417 - DNA, 25 bp, Homo sapien
tgccagcacaccactttagaggata

SEQ ID NO: 2868418 - DNA, 25 bp, Homo sapien
gacaggttataggaaaccacaggga

SEQ ID NO: 2868419 - DNA, 25 bp, Homo sapien
gaggatacacttcaactgggaaacc

SEQ ID NO: 2868420 - DNA, 25 bp, Homo sapien
gaaacctgaggaggtattaggaatg

SEQ ID NO: 2868421 - DNA, 25 bp, Homo sapien
tgtcatcttaagacctctgttttaa

SEQ ID NO: 2868422 - DNA, 25 bp, Homo sapien
ggtattttattaagaggcatgtcca

SEQ ID NO: 2868423 - DNA, 25 bp, Homo sapien
ttgtcatcttaagacctctgtttta

SEQ ID NO: 2868424 - DNA, 25 bp, Homo sapien
attttattaagaggcatgtccaaca

SEQ ID NO: 2868425 - DNA, 25 bp, Homo sapien
cagaggggagctgcatattgtagta

SEQ ID NO: 2868426 - DNA, 25 bp, Homo sapien
tagtagaaaacagctcctaagcttc

SEQ ID NO: 2868427 - DNA, 25 bp, Homo sapien
agaaaacagctcctaagcttcccac

SEQ ID NO: 2868428 - DNA, 25 bp, Homo sapien
gtagaaaacagctcctaagcttccc

SEQ ID NO: 2868429 - DNA, 25 bp, Homo sapien
tcactgcggcccttgtcaaaaaaac

SEQ ID NO: 2868430 - DNA, 25 bp, Homo sapien
ggatcgcagacatagtgcaggggca

SEQ ID NO: 2868431 - DNA, 25 bp, Homo sapien
cccatgcagggtattgcagacacag

SEQ ID NO: 2868432 - DNA, 25 bp, Homo sapien
gtcccccatgcagggtattgcagac

SEQ ID NO: 2868433 - DNA, 25 bp, Homo sapien
tcaggagatcgcagacacagtgcag

SEQ ID NO: 2868434 - DNA, 25 bp, Homo sapien
cagagagggttgcagacacttaata

SEQ ID NO: 2868435 - DNA, 25 bp, Homo sapien
cagacaatcttctaggtgcagagag

SEQ ID NO: 2868436 - DNA, 25 bp, Homo sapien
tgccgagcgccaaataaaagtcagt

SEQ ID NO: 2868437 - DNA, 25 bp, Homo sapien
taagcaactccaaggtgccagacaa

SEQ ID NO: 2868438 - DNA, 25 bp, Homo sapien
ggcctgggtctttcagggccctctg

SEQ ID NO: 2868439 - DNA, 25 bp, Homo sapien
tcttggtagatgaagcctggcctgg

SEQ ID NO: 2868440 - DNA, 25 bp, Homo sapien
actttcaaactcatcgtgcctggcc

SEQ ID NO: 2868441 - DNA, 25 bp, Homo sapien
aggcacagctgcagtggacactttc

SEQ ID NO: 2868442 - DNA, 25 bp, Homo sapien
tctacatgaaaacaaagaggatgat

SEQ ID NO: 2868443 - DNA, 25 bp, Homo sapien
catgaaaacaaagaggatgatgatc

SEQ ID NO: 2868444 - DNA, 25 bp, Homo sapien
cccactctacatgaaaacaaagagg

SEQ ID NO: 2868445 - DNA, 25 bp, Homo sapien
ctcagcccactctacatgaaaacaa

SEQ ID NO: 2868446 - DNA, 25 bp, Homo sapien
gctactcaggaagctgaggcaggag

SEQ ID NO: 2868447 - DNA, 25 bp, Homo sapien
aatcacttgaacctgggaggccgag

SEQ ID NO: 2868448 - DNA, 25 bp, Homo sapien
ctgtaagaatacagcatattcccag

SEQ ID NO: 2868449 - DNA, 25 bp, Homo sapien
tttgcagtgagccaaaatcgcacca

SEQ ID NO: 2868450 - DNA, 25 bp, Homo sapien
tgctcttgggttccctgtccttacc

SEQ ID NO: 2868451 - DNA, 25 bp, Homo sapien
tcactgccgtcaaagcagcactggc

SEQ ID NO: 2868452 - DNA, 25 bp, Homo sapien
tactagggagcttctcagacatgct

SEQ ID NO: 2868453 - DNA, 25 bp, Homo sapien
taggctggacataaatcattcatcg

SEQ ID NO: 2868454 - DNA, 25 bp, Homo sapien
gccttttagcaatgatgagagcagt

SEQ ID NO: 2868455 - DNA, 25 bp, Homo sapien
atgatgagagcagtgaagaccagac

SEQ ID NO: 2868456 - DNA, 25 bp, Homo sapien
tcaggccttttagcaatgatgagag

SEQ ID NO: 2868457 - DNA, 25 bp, Homo sapien
gcagtgaagaccagaccaagactca

SEQ ID NO: 2868458 - DNA, 25 bp, Homo sapien
ctttcccttctcaatgcccctttga

SEQ ID NO: 2868459 - DNA, 25 bp, Homo sapien
tgatcaaagcctggttctatgtccc

SEQ ID NO: 2868460 - DNA, 25 bp, Homo sapien
ttgatcaaagcctggttctatgtcc

SEQ ID NO: 2868461 - DNA, 25 bp, Homo sapien
ttctcaatgcccctttgatcaaagc

SEQ ID NO: 2868462 - DNA, 25 bp, Homo sapien
tccttgttgtactcctctgtgcctg

SEQ ID NO: 2868463 - DNA, 25 bp, Homo sapien
ggaaacatccttgttgtactcctct

SEQ ID NO: 2868464 - DNA, 25 bp, Homo sapien
gctggaaacatccttgttgtactcc

SEQ ID NO: 2868465 - DNA, 25 bp, Homo sapien
actgtggtgctggaaacatccttgt

SEQ ID NO: 2868466 - DNA, 25 bp, Homo sapien
catacgccacccagacccctcgggt

SEQ ID NO: 2868467 - DNA, 25 bp, Homo sapien
tgtccatacgccacccagacccctc

SEQ ID NO: 2868468 - DNA, 25 bp, Homo sapien
ccatacgccacccagacccctcggg

SEQ ID NO: 2868469 - DNA, 25 bp, Homo sapien
gtccatacgccacccagacccctcg

SEQ ID NO: 2868470 - DNA, 25 bp, Homo sapien
attcaaaaacatcccagtaggagct

SEQ ID NO: 2868471 - DNA, 25 bp, Homo sapien
aattcaaaaacatcccagtaggagc

SEQ ID NO: 2868472 - DNA, 25 bp, Homo sapien
tctgctgtatgccagctgggaaagc

SEQ ID NO: 2868473 - DNA, 25 bp, Homo sapien
ttcaaaaacatcccagtaggagctg

SEQ ID NO: 2868474 - DNA, 25 bp, Homo sapien
agagagaggcaaaccacaaagggga

SEQ ID NO: 2868475 - DNA, 25 bp, Homo sapien
caagagagaggcaaaccacaaaggg

SEQ ID NO: 2868476 - DNA, 25 bp, Homo sapien
gcaagagagaggcaaaccacaaagg

SEQ ID NO: 2868477 - DNA, 25 bp, Homo sapien
ctgcaagagagaggcaaaccacaaa

SEQ ID NO: 2868478 - DNA, 25 bp, Homo sapien
tgtacatctgctgtacgccaggccc

SEQ ID NO: 2868479 - DNA, 25 bp, Homo sapien
gtacatctgctgtacgccaggcccc

SEQ ID NO: 2868480 - DNA, 25 bp, Homo sapien
aggtagaagtgctcacattgctgtg

SEQ ID NO: 2868481 - DNA, 25 bp, Homo sapien
caggtagaagtgctcacattgctgt

SEQ ID NO: 2868482 - DNA, 25 bp, Homo sapien
agtgaaaggcaaagtccaacttaag

SEQ ID NO: 2868483 - DNA, 25 bp, Homo sapien
tcaaaaaaatgatacaacaggtgaa

SEQ ID NO: 2868484 - DNA, 25 bp, Homo sapien
caggaaggcaccagtgaaaggcaaa

SEQ ID NO: 2868485 - DNA, 25 bp, Homo sapien
ggcaaagtccaacttaaggaaatca

SEQ ID NO: 2868486 - DNA, 25 bp, Homo sapien
ccagacggttaggaggcaagctcca

SEQ ID NO: 2868487 - DNA, 25 bp, Homo sapien
agacggttaggaggcaagctccaga

SEQ ID NO: 2868488 - DNA, 25 bp, Homo sapien
agtgtggatgcccagacggttagga

SEQ ID NO: 2868489 - DNA, 25 bp, Homo sapien
atgcccagacggttaggaggcaagc

SEQ ID NO: 2868490 - DNA, 25 bp, Homo sapien
tctctgtacacatgctccacctgtt

SEQ ID NO: 2868491 - DNA, 25 bp, Homo sapien
gatccttcaggaacatgagcactgg

SEQ ID NO: 2868492 - DNA, 25 bp, Homo sapien
tgtgtgccacaagtgctctctgtac

SEQ ID NO: 2868493 - DNA, 25 bp, Homo sapien
tccacctgttctgatgatctttcag

SEQ ID NO: 2868494 - DNA, 25 bp, Homo sapien
tgatgagttccaccaggcagaccat

SEQ ID NO: 2868495 - DNA, 25 bp, Homo sapien
tttgatgagttccaccaggcagacc

SEQ ID NO: 2868496 - DNA, 25 bp, Homo sapien
ttttgatgagttccaccaggcagac

SEQ ID NO: 2868497 - DNA, 25 bp, Homo sapien
cttttgatgagttccaccaggcaga

SEQ ID NO: 2868498 - DNA, 25 bp, Homo sapien
gagctgccgggcgcttttctctcct

SEQ ID NO: 2868499 - DNA, 25 bp, Homo sapien
aattcagagtagacaaaccacgggg

SEQ ID NO: 2868500 - DNA, 25 bp, Homo sapien
aataccaagctgcaggcgagctgcc

SEQ ID NO: 2868501 - DNA, 25 bp, Homo sapien
gcctccacgcttgctgaataccaag

SEQ ID NO: 2868502 - DNA, 25 bp, Homo sapien
gcttcagcagcaagctgcggcccgt

SEQ ID NO: 2868503 - DNA, 25 bp, Homo sapien
caggcttcagcagcaagctgcggcc

SEQ ID NO: 2868504 - DNA, 25 bp, Homo sapien
cctcaggcttcagcagcaagctgcg

SEQ ID NO: 2868505 - DNA, 25 bp, Homo sapien
agaggcctcaggcttcagcagcaag

SEQ ID NO: 2868506 - DNA, 25 bp, Homo sapien
tcttggtcaccatttcaacaccttg

SEQ ID NO: 2868507 - DNA, 25 bp, Homo sapien
tggtaattatcctgcttcttaagtt

SEQ ID NO: 2868508 - DNA, 25 bp, Homo sapien
ttggtaattatcctgcttcttaagt

SEQ ID NO: 2868509 - DNA, 25 bp, Homo sapien
ctgaaccttagacagcgtcttggtc

SEQ ID NO: 2868510 - DNA, 25 bp, Homo sapien
tctcggttctggactccttcatggg

SEQ ID NO: 2868511 - DNA, 25 bp, Homo sapien
gtcacacagcagtgttgtgcccccg

SEQ ID NO: 2868512 - DNA, 25 bp, Homo sapien
catattccagagattcaagtttcca

SEQ ID NO: 2868513 - DNA, 25 bp, Homo sapien
cttgggcatctcatgttctctccac

SEQ ID NO: 2868514 - DNA, 25 bp, Homo sapien
ttatgactgtggccccgtgccaggc

SEQ ID NO: 2868515 - DNA, 25 bp, Homo sapien
tcagcattggagcaccagcgacaga

SEQ ID NO: 2868516 - DNA, 25 bp, Homo sapien
agcgacagacggccggcactgactg

SEQ ID NO: 2868517 - DNA, 25 bp, Homo sapien
tggggacaccgaacaggagatgcct

SEQ ID NO: 2868518 - DNA, 25 bp, Homo sapien
tttgccttaaatcagctcttaaatg

SEQ ID NO: 2868519 - DNA, 25 bp, Homo sapien
taaatcagctcttaaatgccctggg

SEQ ID NO: 2868520 - DNA, 25 bp, Homo sapien
cagctcttaaatgccctgggatgaa

SEQ ID NO: 2868521 - DNA, 25 bp, Homo sapien
cttaaatcagctcttaaatgccctg

SEQ ID NO: 2868522 - DNA, 25 bp, Homo sapien
ccagccctggccgtgctttagagca

SEQ ID NO: 2868523 - DNA, 25 bp, Homo sapien
tggccgtgctttagagcactctgca

SEQ ID NO: 2868524 - DNA, 25 bp, Homo sapien
gccctggccgtgctttagagcactc

SEQ ID NO: 2868525 - DNA, 25 bp, Homo sapien
gccgtgctttagagcactctgcatc

SEQ ID NO: 2868526 - DNA, 25 bp, Homo sapien
gccaaagatacttccagccagggca

SEQ ID NO: 2868527 - DNA, 25 bp, Homo sapien
ccagagtatctggatacccagtttg

SEQ ID NO: 2868528 - DNA, 25 bp, Homo sapien
cagtttgggccaaagatacttccag

SEQ ID NO: 2868529 - DNA, 25 bp, Homo sapien
cagggcactcgtcaaccaccttgat

SEQ ID NO: 2868530 - DNA, 25 bp, Homo sapien
cattggctttctccatccccagcac

SEQ ID NO: 2868531 - DNA, 25 bp, Homo sapien
accccaagccccaagaatacaagag

SEQ ID NO: 2868532 - DNA, 25 bp, Homo sapien
tggctgcggcgtaagctaccagcat

SEQ ID NO: 2868533 - DNA, 25 bp, Homo sapien
cctgtggctgcactacacgtctgca

SEQ ID NO: 2868534 - DNA, 25 bp, Homo sapien
tctgtcaccaagcatcgggcctgtg

SEQ ID NO: 2868535 - DNA, 25 bp, Homo sapien
tgagcgcaaataccgtgttcacccg

SEQ ID NO: 2868536 - DNA, 25 bp, Homo sapien
gaatgacattcgactctgcttagag

SEQ ID NO: 2868537 - DNA, 25 bp, Homo sapien
tgaaatggacatacctccagggagt

SEQ ID NO: 2868538 - DNA, 25 bp, Homo sapien
gaacggacgtctcaaaaaatgggca

SEQ ID NO: 2868539 - DNA, 25 bp, Homo sapien
aggcaaaggggtggcggcttccagg

SEQ ID NO: 2868540 - DNA, 25 bp, Homo sapien
gcaaaggggtggcggcttccaggta

SEQ ID NO: 2868541 - DNA, 25 bp, Homo sapien
gaggcaaaggggtggcggcttccag

SEQ ID NO: 2868542 - DNA, 25 bp, Homo sapien
tgcctgctccaagggaggcatctcc

SEQ ID NO: 2868543 - DNA, 25 bp, Homo sapien
cacgatctacgacattggcttcaaa

SEQ ID NO: 2868544 - DNA, 25 bp, Homo sapien
gctcctggcagcttcgaatggctga

SEQ ID NO: 2868545 - DNA, 25 bp, Homo sapien
caggaaccggctccattgtctgtgc

SEQ ID NO: 2868546 - DNA, 25 bp, Homo sapien
tgcgtgtgggaggttggattgtgac

SEQ ID NO: 2868547 - DNA, 25 bp, Homo sapien
ggcttctgaagcgacatttgatttc

SEQ ID NO: 2868548 - DNA, 25 bp, Homo sapien
tactgaaatgtcaaagggtcctgag

SEQ ID NO: 2868549 - DNA, 25 bp, Homo sapien
agggccgggcttctgaagcgacatt

SEQ ID NO: 2868550 - DNA, 25 bp, Homo sapien
ccatagccgggagtaaaggacagat

SEQ ID NO: 2868551 - DNA, 25 bp, Homo sapien
tacacaatcattagagggtctcagt

SEQ ID NO: 2868552 - DNA, 25 bp, Homo sapien
actgagtaactgtgggagcagcacg

SEQ ID NO: 2868553 - DNA, 25 bp, Homo sapien
gagttggcatgtagtgagcaccgac

SEQ ID NO: 2868554 - DNA, 25 bp, Homo sapien
tataacttgaaagagattgtacagt

SEQ ID NO: 2868555 - DNA, 25 bp, Homo sapien
tcaaggggatattaaaccaccagga

SEQ ID NO: 2868556 - DNA, 25 bp, Homo sapien
attcaaggggatattaaaccaccag

SEQ ID NO: 2868557 - DNA, 25 bp, Homo sapien
aagagattgtacagtaattcaaggg

SEQ ID NO: 2868558 - DNA, 25 bp, Homo sapien
ctcggcaaataaataggcgtttgtg

SEQ ID NO: 2868559 - DNA, 25 bp, Homo sapien
cggcaaataaataggcgtttgtggc

SEQ ID NO: 2868560 - DNA, 25 bp, Homo sapien
ggcaaataaataggcgtttgtggct

SEQ ID NO: 2868561 - DNA, 25 bp, Homo sapien
tactcggcaaataaataggcgtttg

SEQ ID NO: 2868562 - DNA, 25 bp, Homo sapien
tagacatgctatcatttttccaata

SEQ ID NO: 2868563 - DNA, 25 bp, Homo sapien
ctgtagacatgctatcatttttcca

SEQ ID NO: 2868564 - DNA, 25 bp, Homo sapien
atgctatcatttttccaatatccat

SEQ ID NO: 2868565 - DNA, 25 bp, Homo sapien
catgctatcatttttccaatatcca

SEQ ID NO: 2868566 - DNA, 25 bp, Homo sapien
tccgcaagcagcgagagtagcacgg

SEQ ID NO: 2868567 - DNA, 25 bp, Homo sapien
agcagcgagagtagcacggctctga

SEQ ID NO: 2868568 - DNA, 25 bp, Homo sapien
gaactctgacctcttgccaacctgc

SEQ ID NO: 2868569 - DNA, 25 bp, Homo sapien
acctgccttccgcaagcagcgagag

SEQ ID NO: 2868570 - DNA, 25 bp, Homo sapien
caaggaaataagctcatctcaaggt

SEQ ID NO: 2868571 - DNA, 25 bp, Homo sapien
gagtagaatgatcacaagagctgcc

SEQ ID NO: 2868572 - DNA, 25 bp, Homo sapien
tcaaggtatctctggctcccaaaga

SEQ ID NO: 2868573 - DNA, 25 bp, Homo sapien
tgaaaatttcctggccccttggagc

SEQ ID NO: 2868574 - DNA, 25 bp, Homo sapien
tcttggaagaatgtaagtctttaca

SEQ ID NO: 2868575 - DNA, 25 bp, Homo sapien
caaggttaggagacaatccagaagg

SEQ ID NO: 2868576 - DNA, 25 bp, Homo sapien
gacagtgggaaccactactctgcct

SEQ ID NO: 2868577 - DNA, 25 bp, Homo sapien
agttgctcctaaagttcaaggttag

SEQ ID NO: 2868578 - DNA, 25 bp, Homo sapien
cctctgggcaggtgaatttctcagg

SEQ ID NO: 2868579 - DNA, 25 bp, Homo sapien
gatctggaatggtagcgtggcatcc

SEQ ID NO: 2868580 - DNA, 25 bp, Homo sapien
ggtgtcaacaccctaccatggctga

SEQ ID NO: 2868581 - DNA, 25 bp, Homo sapien
aattattacacttgctagggcccca

SEQ ID NO: 2868582 - DNA, 25 bp, Homo sapien
ttcctggtggtacagtttccaggga

SEQ ID NO: 2868583 - DNA, 25 bp, Homo sapien
tcctggtggtacagtttccagggac

SEQ ID NO: 2868584 - DNA, 25 bp, Homo sapien
ccagggagacattcacagatgctaa

SEQ ID NO: 2868585 - DNA, 25 bp, Homo sapien
agccccagacatgcaacacattcat

SEQ ID NO: 2868586 - DNA, 25 bp, Homo sapien
gtaaagagccccagacatgcaacac

SEQ ID NO: 2868587 - DNA, 25 bp, Homo sapien
cttttaaactgctcaactaatagag

SEQ ID NO: 2868588 - DNA, 25 bp, Homo sapien
tgccttcatggtaatgatgtagacc

SEQ ID NO: 2868589 - DNA, 25 bp, Homo sapien
gatgccttcatggtaatgatgtaga

SEQ ID NO: 2868590 - DNA, 25 bp, Homo sapien
tcaaggctgtttccttgtaggtggg

SEQ ID NO: 2868591 - DNA, 25 bp, Homo sapien
gggatgccttcatggtaatgatgta

SEQ ID NO: 2868592 - DNA, 25 bp, Homo sapien
tgatcaacagtctttcatccagagg

SEQ ID NO: 2868593 - DNA, 25 bp, Homo sapien
cctgttctgttccacggactgagat

SEQ ID NO: 2868594 - DNA, 25 bp, Homo sapien
caacagtctttcatccagagggttg

SEQ ID NO: 2868595 - DNA, 25 bp, Homo sapien
ttccacggactgagatgatcaacag

SEQ ID NO: 2868596 - DNA, 25 bp, Homo sapien
cacattctatgtcgtgattttgtgg

SEQ ID NO: 2868597 - DNA, 25 bp, Homo sapien
tctatgtcgtgattttgtggacttt

SEQ ID NO: 2868598 - DNA, 25 bp, Homo sapien
tacatttgtgaccattaatttccac

SEQ ID NO: 2868599 - DNA, 25 bp, Homo sapien
catttgtgaccattaatttccacca

SEQ ID NO: 2868600 - DNA, 25 bp, Homo sapien
tgaaaatagacttcccgagagggca

SEQ ID NO: 2868601 - DNA, 25 bp, Homo sapien
tagcctgcctctggcttgatgaccc

SEQ ID NO: 2868602 - DNA, 25 bp, Homo sapien
ccacagtgtgcataaaaattgcctg

SEQ ID NO: 2868603 - DNA, 25 bp, Homo sapien
cacaagactgaacagagagcctaag

SEQ ID NO: 2868604 - DNA, 25 bp, Homo sapien
gcttaagcttaaacagtagtgcaca

SEQ ID NO: 2868605 - DNA, 25 bp, Homo sapien
tcatgtggctcagtctctgattgcc

SEQ ID NO: 2868606 - DNA, 25 bp, Homo sapien
cactgctgccctatggaaggtccct

SEQ ID NO: 2868607 - DNA, 25 bp, Homo sapien
tctatggaacccagcatcatgtggc

SEQ ID NO: 2868608 - DNA, 25 bp, Homo sapien
agacctcctgtcagctggacacggt

SEQ ID NO: 2868609 - DNA, 25 bp, Homo sapien
gacctcctgtcagctggacacggtg

SEQ ID NO: 2868610 - DNA, 25 bp, Homo sapien
tatgccaagtgagaatagggtactc

SEQ ID NO: 2868611 - DNA, 25 bp, Homo sapien
taggttctgtaagatcaccgtcctg

SEQ ID NO: 2868612 - DNA, 25 bp, Homo sapien
tattcaagtttacatggctgcctgt

SEQ ID NO: 2868613 - DNA, 25 bp, Homo sapien
tcatcccaggatcatctttgcaggc

SEQ ID NO: 2868614 - DNA, 25 bp, Homo sapien
gggtaaccaacaccaggattgagtc

SEQ ID NO: 2868615 - DNA, 25 bp, Homo sapien
gcctggtctagggtaaccaacacca

SEQ ID NO: 2868616 - DNA, 25 bp, Homo sapien
ttcactggcctggtctagggtaacc

SEQ ID NO: 2868617 - DNA, 25 bp, Homo sapien
tctagggtaaccaacaccaggattg

SEQ ID NO: 2868618 - DNA, 25 bp, Homo sapien
ggtacccaggctagggacttctctc

SEQ ID NO: 2868619 - DNA, 25 bp, Homo sapien
tagggacttctctcagtatctgttt

SEQ ID NO: 2868620 - DNA, 25 bp, Homo sapien
gggacttctctcagtatctgtttct

SEQ ID NO: 2868621 - DNA, 25 bp, Homo sapien
aggctctctgggtacccaggctagg

SEQ ID NO: 2868622 - DNA, 25 bp, Homo sapien
attaaagtcagcctcctgggcaata

SEQ ID NO: 2868623 - DNA, 25 bp, Homo sapien
aagtcagcctcctgggcaataagac

SEQ ID NO: 2868624 - DNA, 25 bp, Homo sapien
taaagtcagcctcctgggcaataag

SEQ ID NO: 2868625 - DNA, 25 bp, Homo sapien
attattaaagtcagcctcctgggca

SEQ ID NO: 2868626 - DNA, 25 bp, Homo sapien
gacctagcaacagattcaccctgag

SEQ ID NO: 2868627 - DNA, 25 bp, Homo sapien
tgcagagatgccacgatgacctagc

SEQ ID NO: 2868628 - DNA, 25 bp, Homo sapien
gcagggaatcctggctgtgaggtgt

SEQ ID NO: 2868629 - DNA, 25 bp, Homo sapien
tgtgaggtgtagaagtcttcctcct

SEQ ID NO: 2868630 - DNA, 25 bp, Homo sapien
gaaaggccacttttggagtcacagg

SEQ ID NO: 2868631 - DNA, 25 bp, Homo sapien
ggctgcattatttagtatagtaccc

SEQ ID NO: 2868632 - DNA, 25 bp, Homo sapien
tcagaggagaaaggccacttttgga

SEQ ID NO: 2868633 - DNA, 25 bp, Homo sapien
tgaaacctctgttaagatgctcaga

SEQ ID NO: 2868634 - DNA, 25 bp, Homo sapien
tccaggtctttctgtcagggcccat

SEQ ID NO: 2868635 - DNA, 25 bp, Homo sapien
ctccaggtctttctgtcagggccca

SEQ ID NO: 2868636 - DNA, 25 bp, Homo sapien
caaatttcatgcatgtccgtgtgaa

SEQ ID NO: 2868637 - DNA, 25 bp, Homo sapien
caccaaatttcatgcatgtccgtgt

SEQ ID NO: 2868638 - DNA, 25 bp, Homo sapien
accaaatttcatgcatgtccgtgtg

SEQ ID NO: 2868639 - DNA, 25 bp, Homo sapien
ccaaatttcatgcatgtccgtgtga

SEQ ID NO: 2868640 - DNA, 25 bp, Homo sapien
tgtacgttcagacacgtttacagat

SEQ ID NO: 2868641 - DNA, 25 bp, Homo sapien
tcagatggtgagtgcacctaaggat

SEQ ID NO: 2868642 - DNA, 25 bp, Homo sapien
caaatcagcgatgccccatcatcat

SEQ ID NO: 2868643 - DNA, 25 bp, Homo sapien
gctgtacctccaaatcagcgatgcc

SEQ ID NO: 2868644 - DNA, 25 bp, Homo sapien
ccaaagccaagagatcagggagacg

SEQ ID NO: 2868645 - DNA, 25 bp, Homo sapien
aattttggcataggcgaatgtggaa

SEQ ID NO: 2868646 - DNA, 25 bp, Homo sapien
gatgtagatcctgaaaaattttggc

SEQ ID NO: 2868647 - DNA, 25 bp, Homo sapien
gacgctgggatgtagatcctgaaaa

SEQ ID NO: 2868648 - DNA, 25 bp, Homo sapien
gccagcgggctcacttttcaatctg

SEQ ID NO: 2868649 - DNA, 25 bp, Homo sapien
agccagcgggctcacttttcaatct

SEQ ID NO: 2868650 - DNA, 25 bp, Homo sapien
tgagccagcgggctcacttttcaat

SEQ ID NO: 2868651 - DNA, 25 bp, Homo sapien
cagcgggctcacttttcaatctggt

SEQ ID NO: 2868652 - DNA, 25 bp, Homo sapien
ctgcagtgacatcgctgagaaatga

SEQ ID NO: 2868653 - DNA, 25 bp, Homo sapien
tccagtcctttaagcatctctagaa

SEQ ID NO: 2868654 - DNA, 25 bp, Homo sapien
cagtgacatcgctgagaaatgagtt

SEQ ID NO: 2868655 - DNA, 25 bp, Homo sapien
agcatctctagaatctggaggttta

SEQ ID NO: 2868656 - DNA, 25 bp, Homo sapien
tgaaggccctcctcctaaatgcagg

SEQ ID NO: 2868657 - DNA, 25 bp, Homo sapien
gatgtgctgcggatgcaacactcca

SEQ ID NO: 2868658 - DNA, 25 bp, Homo sapien
gattggctcgtctaccacagggagt

SEQ ID NO: 2868659 - DNA, 25 bp, Homo sapien
tgaaattaagcaccagacatggctt

SEQ ID NO: 2868660 - DNA, 25 bp, Homo sapien
caatggtgctacaagtgactgaaat

SEQ ID NO: 2868661 - DNA, 25 bp, Homo sapien
gaaggagaccattgggtaaccctca

SEQ ID NO: 2868662 - DNA, 25 bp, Homo sapien
tactcagggctgtttattcggtggc

SEQ ID NO: 2868663 - DNA, 25 bp, Homo sapien
ctaagctgtgtagaagtcctagcat

SEQ ID NO: 2868664 - DNA, 25 bp, Homo sapien
aaagatctcctccagtagtgttaaa

SEQ ID NO: 2868665 - DNA, 25 bp, Homo sapien
tccactgctgccaagggtctgctat

SEQ ID NO: 2868666 - DNA, 25 bp, Homo sapien
gagtctttgcaccacttaacccaat

SEQ ID NO: 2868667 - DNA, 25 bp, Homo sapien
atcgggcttctccacagattcccag

SEQ ID NO: 2868668 - DNA, 25 bp, Homo sapien
acattggcttgaaatcatctgtggc

SEQ ID NO: 2868669 - DNA, 25 bp, Homo sapien
tgatgtcaacattggcttgaaatca

SEQ ID NO: 2868670 - DNA, 25 bp, Homo sapien
gcattcttctcggaataatgggtgg

SEQ ID NO: 2868671 - DNA, 25 bp, Homo sapien
tttttaaccatctctctgggggcat

SEQ ID NO: 2868672 - DNA, 25 bp, Homo sapien
tcttctcggaataatgggtggagag

SEQ ID NO: 2868673 - DNA, 25 bp, Homo sapien
ctctgggggcattcttctcggaata

SEQ ID NO: 2868674 - DNA, 25 bp, Homo sapien
tgtcctgaatgttataaccacagtc

SEQ ID NO: 2868675 - DNA, 25 bp, Homo sapien
gtcctgaatgttataaccacagtca

SEQ ID NO: 2868676 - DNA, 25 bp, Homo sapien
tttgtcctgaatgttataaccacag

SEQ ID NO: 2868677 - DNA, 25 bp, Homo sapien
ttgtcctgaatgttataaccacagt

SEQ ID NO: 2868678 - DNA, 25 bp, Homo sapien
ttcacccccgtcctttgaatgatgt

SEQ ID NO: 2868679 - DNA, 25 bp, Homo sapien
caaactgattcacccccgtcctttg

SEQ ID NO: 2868680 - DNA, 25 bp, Homo sapien
tgcaaaccaaactgattcacccccg

SEQ ID NO: 2868681 - DNA, 25 bp, Homo sapien
tgattcacccccgtcctttgaatga

SEQ ID NO: 2868682 - DNA, 25 bp, Homo sapien
gacagtaaacctctaagtgcagcac

SEQ ID NO: 2868683 - DNA, 25 bp, Homo sapien
tttataagggcaccagctgtactgg

SEQ ID NO: 2868684 - DNA, 25 bp, Homo sapien
cgattactggtgagggtgctcttcc

SEQ ID NO: 2868685 - DNA, 25 bp, Homo sapien
gaacattcaagatcaaggtccagca

SEQ ID NO: 2868686 - DNA, 25 bp, Homo sapien
tcttcgtccacaaatcagaaggcta

SEQ ID NO: 2868687 - DNA, 25 bp, Homo sapien
cattggatcttgtggaaatcatcaa

SEQ ID NO: 2868688 - DNA, 25 bp, Homo sapien
tcatcaacaaggcaatcttcgtcca

SEQ ID NO: 2868689 - DNA, 25 bp, Homo sapien
gaagagttgtcagcactaaagaaga

SEQ ID NO: 2868690 - DNA, 25 bp, Homo sapien
caaaaggacagaggaaatatgacaa

SEQ ID NO: 2868691 - DNA, 25 bp, Homo sapien
tatatatgactgttaagccagaatt

SEQ ID NO: 2868692 - DNA, 25 bp, Homo sapien
cagactatcaactttcatgtataca

SEQ ID NO: 2868693 - DNA, 25 bp, Homo sapien
gaagttaggcttactgaaaaatata

SEQ ID NO: 2868694 - DNA, 25 bp, Homo sapien
ttaaatttcttcatgttcattttct

SEQ ID NO: 2868695 - DNA, 25 bp, Homo sapien
aaatttcttcatgttcattttctgg

SEQ ID NO: 2868696 - DNA, 25 bp, Homo sapien
tttcttcatgttcattttctggcct

SEQ ID NO: 2868697 - DNA, 25 bp, Homo sapien
aatttcttcatgttcattttctggc

SEQ ID NO: 2868698 - DNA, 25 bp, Homo sapien
ctagattgatattacttggggagtc

SEQ ID NO: 2868699 - DNA, 25 bp, Homo sapien
tttaattgtggagtgctggatacaa

SEQ ID NO: 2868700 - DNA, 25 bp, Homo sapien
tcctgtataaacactattgtgtaac

SEQ ID NO: 2868701 - DNA, 25 bp, Homo sapien
tgctggatacaaagagtttggttca

SEQ ID NO: 2868702 - DNA, 25 bp, Homo sapien
gacccaatgatttgagataccagtt

SEQ ID NO: 2868703 - DNA, 25 bp, Homo sapien
taccttggagtagttctaccctgcc

SEQ ID NO: 2868704 - DNA, 25 bp, Homo sapien
gacggagctgtcaggtgataatgct

SEQ ID NO: 2868705 - DNA, 25 bp, Homo sapien
tacactgtgtattaaccagagcatc

SEQ ID NO: 2868706 - DNA, 25 bp, Homo sapien
tgtgaaagcacttagcgttaggagt

SEQ ID NO: 2868707 - DNA, 25 bp, Homo sapien
gatcatgtgaggtttattcagtggg

SEQ ID NO: 2868708 - DNA, 25 bp, Homo sapien
ttgtctgacctgaatcaccaagagg

SEQ ID NO: 2868709 - DNA, 25 bp, Homo sapien
taggagtttgacattttgtctgacc

SEQ ID NO: 2868710 - DNA, 25 bp, Homo sapien
tgctttgccagacaatttaggtatc

SEQ ID NO: 2868711 - DNA, 25 bp, Homo sapien
taggtatcttatttgctagtacaag

SEQ ID NO: 2868712 - DNA, 25 bp, Homo sapien
gatttggtgtgtaaccttagataga

SEQ ID NO: 2868713 - DNA, 25 bp, Homo sapien
cttagatagactgtagcattttggg

SEQ ID NO: 2868714 - DNA, 25 bp, Homo sapien
ctaaatctaatgcagaaattgttcc

SEQ ID NO: 2868715 - DNA, 25 bp, Homo sapien
aaatctaatgcagaaattgttccag

SEQ ID NO: 2868716 - DNA, 25 bp, Homo sapien
ttctaaatctaatgcagaaattgtt

SEQ ID NO: 2868717 - DNA, 25 bp, Homo sapien
taaatctaatgcagaaattgttcca

SEQ ID NO: 2868718 - DNA, 25 bp, Homo sapien
cgttcactagccctttagccgtcat

SEQ ID NO: 2868719 - DNA, 25 bp, Homo sapien
tctatcttccttctctgtgtctcca

SEQ ID NO: 2868720 - DNA, 25 bp, Homo sapien
ctatcttccttctctgtgtctccat

SEQ ID NO: 2868721 - DNA, 25 bp, Homo sapien
atctatcttccttctctgtgtctcc

SEQ ID NO: 2868722 - DNA, 25 bp, Homo sapien
gagtttctctgttacgatgtgcaga

SEQ ID NO: 2868723 - DNA, 25 bp, Homo sapien
tgtcctagactgacccaggtccagt

SEQ ID NO: 2868724 - DNA, 25 bp, Homo sapien
tgtagagtttctctgttacgatgtg

SEQ ID NO: 2868725 - DNA, 25 bp, Homo sapien
tttgtcctagactgacccaggtcca

SEQ ID NO: 2868726 - DNA, 25 bp, Homo sapien
gcatacaactaaattgtactttgca

SEQ ID NO: 2868727 - DNA, 25 bp, Homo sapien
caactaaattgtactttgcataaga

SEQ ID NO: 2868728 - DNA, 25 bp, Homo sapien
attaaaacaattcttggaacactct

SEQ ID NO: 2868729 - DNA, 25 bp, Homo sapien
aacaattcttggaacactctcctcc

SEQ ID NO: 2868730 - DNA, 25 bp, Homo sapien
tgacagctatagtgcagagattccc

SEQ ID NO: 2868731 - DNA, 25 bp, Homo sapien
catgttctaagatccagtagttcat

SEQ ID NO: 2868732 - DNA, 25 bp, Homo sapien
gacccactcataagaataagtgttg

SEQ ID NO: 2868733 - DNA, 25 bp, Homo sapien
taggcaaggattgtctacagtgcaa

SEQ ID NO: 2868734 - DNA, 25 bp, Homo sapien
ctcttcgatgttttcataaccacat

SEQ ID NO: 2868735 - DNA, 25 bp, Homo sapien
cttcgatgttttcataaccacatgg

SEQ ID NO: 2868736 - DNA, 25 bp, Homo sapien
gctatcaataagactgtcttcaccc

SEQ ID NO: 2868737 - DNA, 25 bp, Homo sapien
ctagctatcaataagactgtcttca

SEQ ID NO: 2868738 - DNA, 25 bp, Homo sapien
tagagtgaacacttcccttttcttg

SEQ ID NO: 2868739 - DNA, 25 bp, Homo sapien
tcaggtgtcgaacaaccttctacac

SEQ ID NO: 2868740 - DNA, 25 bp, Homo sapien
tcagtgacaatcatagtctcagcga

SEQ ID NO: 2868741 - DNA, 25 bp, Homo sapien
gctcactcgccttctgatggtagat

SEQ ID NO: 2868742 - DNA, 25 bp, Homo sapien
gcaagtcggagatgtaactgagtga

SEQ ID NO: 2868743 - DNA, 25 bp, Homo sapien
cttaggcaagtcggagatgtaactg

SEQ ID NO: 2868744 - DNA, 25 bp, Homo sapien
taggcaagtcggagatgtaactgag

SEQ ID NO: 2868745 - DNA, 25 bp, Homo sapien
agtcggagatgtaactgagtgacag

SEQ ID NO: 2868746 - DNA, 25 bp, Homo sapien
tgtgtaggcaacagctactgagatc

SEQ ID NO: 2868747 - DNA, 25 bp, Homo sapien
tgtgcctcagaatgcatgcagctgc

SEQ ID NO: 2868748 - DNA, 25 bp, Homo sapien
taagtgagtaacctgagaactgtgc

SEQ ID NO: 2868749 - DNA, 25 bp, Homo sapien
gaaattggattagcagttggcagct

SEQ ID NO: 2868750 - DNA, 25 bp, Homo sapien
gattttgctttgatccctgtagcag

SEQ ID NO: 2868751 - DNA, 25 bp, Homo sapien
taaaagttttcgcactaagtgccaa

SEQ ID NO: 2868752 - DNA, 25 bp, Homo sapien
gccaaatgttgcaaacagcacttta

SEQ ID NO: 2868753 - DNA, 25 bp, Homo sapien
aacactccagttgaaacaccttggg

SEQ ID NO: 2868754 - DNA, 25 bp, Homo sapien
atggccagagtaaaagcggcaggca

SEQ ID NO: 2868755 - DNA, 25 bp, Homo sapien
ttattcagatgggaacagagtgctg

SEQ ID NO: 2868756 - DNA, 25 bp, Homo sapien
aaaaatcaattccacccgctctctg

SEQ ID NO: 2868757 - DNA, 25 bp, Homo sapien
tctgagtcggctggactgaacggat

SEQ ID NO: 2868758 - DNA, 25 bp, Homo sapien
catggcatttaactacaaattgtga

SEQ ID NO: 2868759 - DNA, 25 bp, Homo sapien
gagctgtcaggagctataaaaatca

SEQ ID NO: 2868760 - DNA, 25 bp, Homo sapien
tcatgacatgcatcccaaagtgaat

SEQ ID NO: 2868761 - DNA, 25 bp, Homo sapien
catacttcagtagggacttaagctg

SEQ ID NO: 2868762 - DNA, 25 bp, Homo sapien
tttcagccagtgacaatacatttaa

SEQ ID NO: 2868763 - DNA, 25 bp, Homo sapien
catattgagtgagccagaatccagt

SEQ ID NO: 2868764 - DNA, 25 bp, Homo sapien
atattgagtgagccagaatccagtc

SEQ ID NO: 2868765 - DNA, 25 bp, Homo sapien
tattgagtgagccagaatccagtct

SEQ ID NO: 2868766 - DNA, 25 bp, Homo sapien
tcacctaaattgaagacgtgaaaac

SEQ ID NO: 2868767 - DNA, 25 bp, Homo sapien
cctaaattgaagacgtgaaaactca

SEQ ID NO: 2868768 - DNA, 25 bp, Homo sapien
agacgtgaaaactcaagagccatga

SEQ ID NO: 2868769 - DNA, 25 bp, Homo sapien
aattgaagacgtgaaaactcaagag

SEQ ID NO: 2868770 - DNA, 25 bp, Homo sapien
taaattgggcatttcggccaggcac

SEQ ID NO: 2868771 - DNA, 25 bp, Homo sapien
catctttgtctattctatttcagca

SEQ ID NO: 2868772 - DNA, 25 bp, Homo sapien
aatacagttcactctctagcagtaa

SEQ ID NO: 2868773 - DNA, 25 bp, Homo sapien
tctagcagtaaagcatccaacacaa

SEQ ID NO: 2868774 - DNA, 25 bp, Homo sapien
gagcatttagttaccgccttgccat

SEQ ID NO: 2868775 - DNA, 25 bp, Homo sapien
atagagaaagtatgactcgggccag

SEQ ID NO: 2868776 - DNA, 25 bp, Homo sapien
gaaagtatgactcgggccagacgca

SEQ ID NO: 2868777 - DNA, 25 bp, Homo sapien
tagtgagcatttagttaccgccttg

SEQ ID NO: 2868778 - DNA, 25 bp, Homo sapien
gcaacgttcgtctgcattcgcctcg

SEQ ID NO: 2868779 - DNA, 25 bp, Homo sapien
agggcgcgtccacttccgcaacgtt

SEQ ID NO: 2868780 - DNA, 25 bp, Homo sapien
gcctgggcagatgcctaggccgtcc

SEQ ID NO: 2868781 - DNA, 25 bp, Homo sapien
tgcaggtcagttggtgccggccacc

SEQ ID NO: 2868782 - DNA, 25 bp, Homo sapien
cacttttgttcctgggacgtagtga

SEQ ID NO: 2868783 - DNA, 25 bp, Homo sapien
cttttgttcctgggacgtagtgaga

SEQ ID NO: 2868784 - DNA, 25 bp, Homo sapien
gcacttttgttcctgggacgtagtg

SEQ ID NO: 2868785 - DNA, 25 bp, Homo sapien
acttttgttcctgggacgtagtgag

SEQ ID NO: 2868786 - DNA, 25 bp, Homo sapien
tcaggaaggctctactgcccacccg

SEQ ID NO: 2868787 - DNA, 25 bp, Homo sapien
ggaaggctctactgcccacccgcac

SEQ ID NO: 2868788 - DNA, 25 bp, Homo sapien
aaggctctactgcccacccgcacac

SEQ ID NO: 2868789 - DNA, 25 bp, Homo sapien
aggaaggctctactgcccacccgca

SEQ ID NO: 2868790 - DNA, 25 bp, Homo sapien
tggcggtgaggcgccctggtgtagc

SEQ ID NO: 2868791 - DNA, 25 bp, Homo sapien
agaagaacaggctctggtgaacccc

SEQ ID NO: 2868792 - DNA, 25 bp, Homo sapien
acaggctctggtgaacccctgtggc

SEQ ID NO: 2868793 - DNA, 25 bp, Homo sapien
ggtgaggcgccctggtgtagcccac

SEQ ID NO: 2868794 - DNA, 25 bp, Homo sapien
taccgtcattgatgttaaaagctat

SEQ ID NO: 2868795 - DNA, 25 bp, Homo sapien
tgcattttgcatattagcacgtaac

SEQ ID NO: 2868796 - DNA, 25 bp, Homo sapien
gcacgtaactcttgttcctgtctcc

SEQ ID NO: 2868797 - DNA, 25 bp, Homo sapien
cagtaaagtggtacttaccgtcatt

SEQ ID NO: 2868798 - DNA, 25 bp, Homo sapien
cccccgaggatacctctgattaact

SEQ ID NO: 2868799 - DNA, 25 bp, Homo sapien
ttccccccgaggatacctctgatta

SEQ ID NO: 2868800 - DNA, 25 bp, Homo sapien
ccgaggatacctctgattaacttac

SEQ ID NO: 2868801 - DNA, 25 bp, Homo sapien
cccgaggatacctctgattaactta

SEQ ID NO: 2868802 - DNA, 25 bp, Homo sapien
gcacattaaagcgctctttaaattc

SEQ ID NO: 2868803 - DNA, 25 bp, Homo sapien
tctttaaattcttcttttattgcca

SEQ ID NO: 2868804 - DNA, 25 bp, Homo sapien
cattaaagcgctctttaaattcttc

SEQ ID NO: 2868805 - DNA, 25 bp, Homo sapien
ctttaaattcttcttttattgccat

SEQ ID NO: 2868806 - DNA, 25 bp, Homo sapien
gagcgaatcacggaagccttcctga

SEQ ID NO: 2868807 - DNA, 25 bp, Homo sapien
cacttgggagctgacgacagctgtg

SEQ ID NO: 2868808 - DNA, 25 bp, Homo sapien
agaggaactgacacggaggcctgca

SEQ ID NO: 2868809 - DNA, 25 bp, Homo sapien
gggagcgaatcacggaagccttcct

SEQ ID NO: 2868810 - DNA, 25 bp, Homo sapien
gcaggctcccctggcatgggtgtct

SEQ ID NO: 2868811 - DNA, 25 bp, Homo sapien
taggtggggtgcctgccacatttac

SEQ ID NO: 2868812 - DNA, 25 bp, Homo sapien
gagaaatctggcaaggactcctgga

SEQ ID NO: 2868813 - DNA, 25 bp, Homo sapien
ccatccctcctgaatgcaggctccc

SEQ ID NO: 2868814 - DNA, 25 bp, Homo sapien
caacctggccctgcgttgagaggca

SEQ ID NO: 2868815 - DNA, 25 bp, Homo sapien
gacatgggcttaagtgggatgccac

SEQ ID NO: 2868816 - DNA, 25 bp, Homo sapien
tacaagcagggcatactggaagggc

SEQ ID NO: 2868817 - DNA, 25 bp, Homo sapien
cacagtgggaactcgcttgaaagca

SEQ ID NO: 2868818 - DNA, 25 bp, Homo sapien
tgctagggacacaactacatctccc

SEQ ID NO: 2868819 - DNA, 25 bp, Homo sapien
tctctgctagggacacaactacatc

SEQ ID NO: 2868820 - DNA, 25 bp, Homo sapien
ttctgataaggatacgatttctctg

SEQ ID NO: 2868821 - DNA, 25 bp, Homo sapien
gataaggatacgatttctctgctag

SEQ ID NO: 2868822 - DNA, 25 bp, Homo sapien
tttcagccacggtttttggccttca

SEQ ID NO: 2868823 - DNA, 25 bp, Homo sapien
tgaatcaactggatctgccgctgag

SEQ ID NO: 2868824 - DNA, 25 bp, Homo sapien
ggaagcctttgccacgcttggtgct

SEQ ID NO: 2868825 - DNA, 25 bp, Homo sapien
tgctttaggaaagaagcggcatttc

SEQ ID NO: 2868826 - DNA, 25 bp, Homo sapien
taatatttactggtcgttgtgctcg

SEQ ID NO: 2868827 - DNA, 25 bp, Homo sapien
gatgacactcggaggagcaggaaga

SEQ ID NO: 2868828 - DNA, 25 bp, Homo sapien
gaggagcaggaagacaatttgtggg

SEQ ID NO: 2868829 - DNA, 25 bp, Homo sapien
gaggcagcgcacatttaacaggaat

SEQ ID NO: 2868830 - DNA, 25 bp, Homo sapien
ctatgtaatcacaaaggccagtatg

SEQ ID NO: 2868831 - DNA, 25 bp, Homo sapien
atcacaaaggccagtatgtacagac

SEQ ID NO: 2868832 - DNA, 25 bp, Homo sapien
gtaatcacaaaggccagtatgtaca

SEQ ID NO: 2868833 - DNA, 25 bp, Homo sapien
tatgtaatcacaaaggccagtatgt

SEQ ID NO: 2868834 - DNA, 25 bp, Homo sapien
gcactcttcacgttgctttcgtgct

SEQ ID NO: 2868835 - DNA, 25 bp, Homo sapien
tcgacaaagtgttgatgatcccctc

SEQ ID NO: 2868836 - DNA, 25 bp, Homo sapien
tcttcgtccttcgacaaagtgttga

SEQ ID NO: 2868837 - DNA, 25 bp, Homo sapien
ttcatctcttcgtccttcgacaaag

SEQ ID NO: 2868838 - DNA, 25 bp, Homo sapien
gtggtgattgatcttcttagagtca

SEQ ID NO: 2868839 - DNA, 25 bp, Homo sapien
tgatcttcttagagtcacggtatct

SEQ ID NO: 2868840 - DNA, 25 bp, Homo sapien
ctatgatacatgtggtgattgatct

SEQ ID NO: 2868841 - DNA, 25 bp, Homo sapien
gatacatgtggtgattgatcttctt

SEQ ID NO: 2868842 - DNA, 25 bp, Homo sapien
gagcagcgggcgcagaatcctcatt

SEQ ID NO: 2868843 - DNA, 25 bp, Homo sapien
cagcgggcgcagaatcctcattctg

SEQ ID NO: 2868844 - DNA, 25 bp, Homo sapien
gggcgcagaatcctcattctgctca

SEQ ID NO: 2868845 - DNA, 25 bp, Homo sapien
gcgggcgcagaatcctcattctgct

SEQ ID NO: 2868846 - DNA, 25 bp, Homo sapien
ccatagcggaggacactagcggcag

SEQ ID NO: 2868847 - DNA, 25 bp, Homo sapien
ctgcagccacagcagagaagagaga

SEQ ID NO: 2868848 - DNA, 25 bp, Homo sapien
ggctgcagccacagcagagaagaga

SEQ ID NO: 2868849 - DNA, 25 bp, Homo sapien
gctgcagccacagcagagaagagag

SEQ ID NO: 2868850 - DNA, 25 bp, Homo sapien
gctccaaatgcctccgtaacctggg

SEQ ID NO: 2868851 - DNA, 25 bp, Homo sapien
tcaaatttcgtatgagcacattggg

SEQ ID NO: 2868852 - DNA, 25 bp, Homo sapien
acctgggttactggccaaaacagca

SEQ ID NO: 2868853 - DNA, 25 bp, Homo sapien
gactgcagtctctaggctcacagtg

SEQ ID NO: 2868854 - DNA, 25 bp, Homo sapien
gaaccaccatgctagacagtatttt

SEQ ID NO: 2868855 - DNA, 25 bp, Homo sapien
accaccatgctagacagtatttttt

SEQ ID NO: 2868856 - DNA, 25 bp, Homo sapien
aaccaccatgctagacagtattttt

SEQ ID NO: 2868857 - DNA, 25 bp, Homo sapien
gaataagacattgcatagagaggaa

SEQ ID NO: 2868858 - DNA, 25 bp, Homo sapien
tactacctattataatcagattgct

SEQ ID NO: 2868859 - DNA, 25 bp, Homo sapien
gaaccgcagacgaaagaaacatgaa

SEQ ID NO: 2868860 - DNA, 25 bp, Homo sapien
gacagctgacttcttgttagaagaa

SEQ ID NO: 2868861 - DNA, 25 bp, Homo sapien
aggcaagagctcagacaatcctctc

SEQ ID NO: 2868862 - DNA, 25 bp, Homo sapien
cactggtgcgaactcagctcacgca

SEQ ID NO: 2868863 - DNA, 25 bp, Homo sapien
gctcaggcaagagctcagacaatcc

SEQ ID NO: 2868864 - DNA, 25 bp, Homo sapien
caggctcaggcaagagctcagacaa

SEQ ID NO: 2868865 - DNA, 25 bp, Homo sapien
tttaaaacattgtcaggtgaggcaa

SEQ ID NO: 2868866 - DNA, 25 bp, Homo sapien
gattgttgatgacactcagtatgga

SEQ ID NO: 2868867 - DNA, 25 bp, Homo sapien
tttccagcctgaagaggcatgggtg

SEQ ID NO: 2868868 - DNA, 25 bp, Homo sapien
gcaaatgcacaagtaatagaaagca

SEQ ID NO: 2868869 - DNA, 25 bp, Homo sapien
gaaccaagagattgtttccagcctg

SEQ ID NO: 2868870 - DNA, 25 bp, Homo sapien
agaaagtgctttagggaaccaagag

SEQ ID NO: 2868871 - DNA, 25 bp, Homo sapien
ctcttggttccctaaagcactttct

SEQ ID NO: 2868872 - DNA, 25 bp, Homo sapien
tccatactgagtgtcatcaacaatc

SEQ ID NO: 2868873 - DNA, 25 bp, Homo sapien
cacccatgcctcttcaggctggaaa

SEQ ID NO: 2868874 - DNA, 25 bp, Homo sapien
ttgcctcacctgacaatgttttaaa

SEQ ID NO: 2868875 - DNA, 25 bp, Homo sapien
caggctggaaacaatctcttggttc

SEQ ID NO: 2868876 - DNA, 25 bp, Homo sapien
tgctttctattacttgtgcatttgc

SEQ ID NO: 2868877 - DNA, 25 bp, Homo sapien
tgtccttacacttatgagtcaactg

SEQ ID NO: 2868878 - DNA, 25 bp, Homo sapien
tgtaaaatctaacagctaactcaag

SEQ ID NO: 2868879 - DNA, 25 bp, Homo sapien
tgaccacaggaaacctaaagaccat

SEQ ID NO: 2868880 - DNA, 25 bp, Homo sapien
tgaagtgcaaaatactatggcagaa

SEQ ID NO: 2868881 - DNA, 25 bp, Homo sapien
taaatgcagcatccgttctccacac

SEQ ID NO: 2868882 - DNA, 25 bp, Homo sapien
tatgtatctggtagtagccacaatt

SEQ ID NO: 2868883 - DNA, 25 bp, Homo sapien
cagttgactcataagtgtaaggaca

SEQ ID NO: 2868884 - DNA, 25 bp, Homo sapien
aattgtggctactaccagatacata

SEQ ID NO: 2868885 - DNA, 25 bp, Homo sapien
tatcgtgtggagaacggatgctgca

SEQ ID NO: 2868886 - DNA, 25 bp, Homo sapien
tggtctttaggtttcctgtggtcag

SEQ ID NO: 2868887 - DNA, 25 bp, Homo sapien
tgtgaaagtcttagtcaacataaag

SEQ ID NO: 2868888 - DNA, 25 bp, Homo sapien
taaatagggatgttaggtatcgtgt

SEQ ID NO: 2868889 - DNA, 25 bp, Homo sapien
gaacctgatcatcttatagcccatc

SEQ ID NO: 2868890 - DNA, 25 bp, Homo sapien
cagcaaccaaagactgaacctgatc

SEQ ID NO: 2868891 - DNA, 25 bp, Homo sapien
ttatcatcactttccttggcagtag

SEQ ID NO: 2868892 - DNA, 25 bp, Homo sapien
gctgcttagctgttagtacatgctg

SEQ ID NO: 2868893 - DNA, 25 bp, Homo sapien
tacagaagactactgcaacttaatc

SEQ ID NO: 2868894 - DNA, 25 bp, Homo sapien
aaataaacagttgcataacgcggag

SEQ ID NO: 2868895 - DNA, 25 bp, Homo sapien
gatgggctataagatgatcaggttc

SEQ ID NO: 2868896 - DNA, 25 bp, Homo sapien
tactgccaaggaaagtgatgataaa

SEQ ID NO: 2868897 - DNA, 25 bp, Homo sapien
gatcaggttcagtctttggttgctg

SEQ ID NO: 2868898 - DNA, 25 bp, Homo sapien
gcatgtactaacagctaagcagcat

SEQ ID NO: 2868899 - DNA, 25 bp, Homo sapien
tgaaactccgcgttatgcaactgtt

SEQ ID NO: 2868900 - DNA, 25 bp, Homo sapien
gaaagtcagacataaataaccagca

SEQ ID NO: 2868901 - DNA, 25 bp, Homo sapien
cattttggacaacacattcttggca

SEQ ID NO: 2868902 - DNA, 25 bp, Homo sapien
gcaaagggtggagttccatctttaa

SEQ ID NO: 2868903 - DNA, 25 bp, Homo sapien
caggcattttggacaacacattctt

SEQ ID NO: 2868904 - DNA, 25 bp, Homo sapien
ccgctactactatgtcctatcataa

SEQ ID NO: 2868905 - DNA, 25 bp, Homo sapien
gaccaccgctactactatgtcctat

SEQ ID NO: 2868906 - DNA, 25 bp, Homo sapien
gtctgaccaccgctactactatgtc

SEQ ID NO: 2868907 - DNA, 25 bp, Homo sapien
ttatgataggacatagtagtagcgg

SEQ ID NO: 2868908 - DNA, 25 bp, Homo sapien
taaagatggaactccaccctttgct

SEQ ID NO: 2868909 - DNA, 25 bp, Homo sapien
taggacatagtagtagcggtggtca

SEQ ID NO: 2868910 - DNA, 25 bp, Homo sapien
tgccaagaatgtgttgtccaaaatg

SEQ ID NO: 2868911 - DNA, 25 bp, Homo sapien
aagaatgtgttgtccaaaatgcctg

SEQ ID NO: 2868912 - DNA, 25 bp, Homo sapien
gacatagtagtagcggtggtcagac

SEQ ID NO: 2868913 - DNA, 25 bp, Homo sapien
gtttcagacgaaagttctaggtgcg

SEQ ID NO: 2868914 - DNA, 25 bp, Homo sapien
taatgcaggtgtgtctgattccgac

SEQ ID NO: 2868915 - DNA, 25 bp, Homo sapien
tagtaggcaaggcagcgagatgctc

SEQ ID NO: 2868916 - DNA, 25 bp, Homo sapien
tagcacatggctgcgtagcccaagc

SEQ ID NO: 2868917 - DNA, 25 bp, Homo sapien
ttgcagtgacgtctcggggccgctt

SEQ ID NO: 2868918 - DNA, 25 bp, Homo sapien
ccgcttggtggtagccgtgtgtttc

SEQ ID NO: 2868919 - DNA, 25 bp, Homo sapien
gtggtagccgtgtgtttccaaagct

SEQ ID NO: 2868920 - DNA, 25 bp, Homo sapien
tccccggcgtgcagccgtccgtgct

SEQ ID NO: 2868921 - DNA, 25 bp, Homo sapien
tcactgcgctcgggcgcagagctcc

SEQ ID NO: 2868922 - DNA, 25 bp, Homo sapien
gggcgcagagctccgacggcttcca

SEQ ID NO: 2868923 - DNA, 25 bp, Homo sapien
gctcgggcgcagagctccgacggct

SEQ ID NO: 2868924 - DNA, 25 bp, Homo sapien
tgcgctcgggcgcagagctccgacg

SEQ ID NO: 2868925 - DNA, 25 bp, Homo sapien
gcacccaggcgagctgagcgcccgt

SEQ ID NO: 2868926 - DNA, 25 bp, Homo sapien
gggctgggcgcacccaggcgagctg

SEQ ID NO: 2868927 - DNA, 25 bp, Homo sapien
accccgagccgccaggagaaggagg

SEQ ID NO: 2868928 - DNA, 25 bp, Homo sapien
cagcttcagtctcgcgggtcctgcc

SEQ ID NO: 2868929 - DNA, 25 bp, Homo sapien
aagggactgtagtcaacccacaggt

SEQ ID NO: 2868930 - DNA, 25 bp, Homo sapien
gaagcccttcaagtacacgacggtg

SEQ ID NO: 2868931 - DNA, 25 bp, Homo sapien
gtgcatttcatgaagcgctacccca

SEQ ID NO: 2868932 - DNA, 25 bp, Homo sapien
tgacaaaagactcacgcaaagggac

SEQ ID NO: 2868933 - DNA, 25 bp, Homo sapien
gaatttccacggtttgatgggctgc

SEQ ID NO: 2868934 - DNA, 25 bp, Homo sapien
taacgcgcggaccttgatgaaatca

SEQ ID NO: 2868935 - DNA, 25 bp, Homo sapien
atgtgtcccctaacgcgcggacctt

SEQ ID NO: 2868936 - DNA, 25 bp, Homo sapien
catgtttacatctttgaatattctc

SEQ ID NO: 2868937 - DNA, 25 bp, Homo sapien
agtctttgccgctctactccacaga

SEQ ID NO: 2868938 - DNA, 25 bp, Homo sapien
gcagaagtctttgccgctctactcc

SEQ ID NO: 2868939 - DNA, 25 bp, Homo sapien
agcctaggctaacaacctccttcag

SEQ ID NO: 2868940 - DNA, 25 bp, Homo sapien
gctaacaacctccttcagcagcaga

SEQ ID NO: 2868941 - DNA, 25 bp, Homo sapien
caatatggctgtgtgcatcttctgc

SEQ ID NO: 2868942 - DNA, 25 bp, Homo sapien
tgggtcccttggagccttggtggtg

SEQ ID NO: 2868943 - DNA, 25 bp, Homo sapien
gagagtccgcaggtttttctgcaag

SEQ ID NO: 2868944 - DNA, 25 bp, Homo sapien
ttctgcaagaggctacaatatggct

SEQ ID NO: 2868945 - DNA, 25 bp, Homo sapien
ggcatctagaaaggcctcctcccac

SEQ ID NO: 2868946 - DNA, 25 bp, Homo sapien
catctagaaaggcctcctcccacat

SEQ ID NO: 2868947 - DNA, 25 bp, Homo sapien
gcatctagaaaggcctcctcccaca

SEQ ID NO: 2868948 - DNA, 25 bp, Homo sapien
ctcatgacaactcaaacatgatgag

SEQ ID NO: 2868949 - DNA, 25 bp, Homo sapien
tcctcaatggatcagagacaacacc

SEQ ID NO: 2868950 - DNA, 25 bp, Homo sapien
ttgcttcagctgggatgatttcttt

SEQ ID NO: 2868951 - DNA, 25 bp, Homo sapien
tgaatctcctcatgacaactcaaac

SEQ ID NO: 2868952 - DNA, 25 bp, Homo sapien
tctgtgagggtgtcaaagcgaccca

SEQ ID NO: 2868953 - DNA, 25 bp, Homo sapien
gctgccggtgaagaaggtactgatt

SEQ ID NO: 2868954 - DNA, 25 bp, Homo sapien
cgggcagtacaggagctcccgagcc

SEQ ID NO: 2868955 - DNA, 25 bp, Homo sapien
tctgtgatgactagtcctgatggct

SEQ ID NO: 2868956 - DNA, 25 bp, Homo sapien
caccagaatatttcatgttgatatc

SEQ ID NO: 2868957 - DNA, 25 bp, Homo sapien
tccctgccagtttcacataaaagga

SEQ ID NO: 2868958 - DNA, 25 bp, Homo sapien
tgatatcaattaggcgaaggagaag

SEQ ID NO: 2868959 - DNA, 25 bp, Homo sapien
aaaggaatattctcccagaggccaa

SEQ ID NO: 2868960 - DNA, 25 bp, Homo sapien
aaaaaaggtaaggcccgctgtgcag

SEQ ID NO: 2868961 - DNA, 25 bp, Homo sapien
gcctggattttggaagattatcttc

SEQ ID NO: 2868962 - DNA, 25 bp, Homo sapien
tccaggcgctcgagcctcacaattt

SEQ ID NO: 2868963 - DNA, 25 bp, Homo sapien
gtcctcctttcaaaagctcgcctgg

SEQ ID NO: 2868964 - DNA, 25 bp, Homo sapien
tttgagaatactttatcctcagtgc

SEQ ID NO: 2868965 - DNA, 25 bp, Homo sapien
tatttaagtgtcagaagcccaactc

SEQ ID NO: 2868966 - DNA, 25 bp, Homo sapien
gggatatttctatttaagtgtcaga

SEQ ID NO: 2868967 - DNA, 25 bp, Homo sapien
gcatcttctcaaacattcgtggaca

SEQ ID NO: 2868968 - DNA, 25 bp, Homo sapien
cttgattttgcatcctcaatgagaa

SEQ ID NO: 2868969 - DNA, 25 bp, Homo sapien
actgtccagggtcaattcattgccc

SEQ ID NO: 2868970 - DNA, 25 bp, Homo sapien
tactttgtgccaccttgtagtggca

SEQ ID NO: 2868971 - DNA, 25 bp, Homo sapien
cattgcccggggtactttgtgccac

SEQ ID NO: 2868972 - DNA, 25 bp, Homo sapien
gagagtccgtcactgtctgctgcct

SEQ ID NO: 2868973 - DNA, 25 bp, Homo sapien
caatttccaatttcctatggaatta

SEQ ID NO: 2868974 - DNA, 25 bp, Homo sapien
cacccggacacctctgacaggcaat

SEQ ID NO: 2868975 - DNA, 25 bp, Homo sapien
tcaggagagcttccgaaaagggccc

SEQ ID NO: 2868976 - DNA, 25 bp, Homo sapien
tcagcgagggaaagccaaaagcatg

SEQ ID NO: 2868977 - DNA, 25 bp, Homo sapien
aaacatgtcatctgcacaaacatcc

SEQ ID NO: 2868978 - DNA, 25 bp, Homo sapien
cccaaccaaaatcagcgagggaaag

SEQ ID NO: 2868979 - DNA, 25 bp, Homo sapien
aaaagcatgagtaaggagaggttgg

SEQ ID NO: 2868980 - DNA, 25 bp, Homo sapien
ggcccctctcagacacggtagaact

SEQ ID NO: 2868981 - DNA, 25 bp, Homo sapien
tgtttgtgaccccaaaagtaaggca

SEQ ID NO: 2868982 - DNA, 25 bp, Homo sapien
gtaaggcagtagaccagaccatggg

SEQ ID NO: 2868983 - DNA, 25 bp, Homo sapien
gacagatgattctccagggatccag

SEQ ID NO: 2868984 - DNA, 25 bp, Homo sapien
tgcaggtcctataaagtcagccact

SEQ ID NO: 2868985 - DNA, 25 bp, Homo sapien
ccactgctgcaatgatgagtgtcct

SEQ ID NO: 2868986 - DNA, 25 bp, Homo sapien
tcaggcatctccaggaaccatagca

SEQ ID NO: 2868987 - DNA, 25 bp, Homo sapien
catcttgctgcaggtcctataaagt

SEQ ID NO: 2868988 - DNA, 25 bp, Homo sapien
aacaggcatgaaaatcttccctttg

SEQ ID NO: 2868989 - DNA, 25 bp, Homo sapien
ttatgaaacaggcatgaaaatcttc

SEQ ID NO: 2868990 - DNA, 25 bp, Homo sapien
tgaaacaggcatgaaaatcttccct

SEQ ID NO: 2868991 - DNA, 25 bp, Homo sapien
ggcatgaaaatcttccctttggcac

SEQ ID NO: 2868992 - DNA, 25 bp, Homo sapien
aggtcaaagctcagaattgtcatgg

SEQ ID NO: 2868993 - DNA, 25 bp, Homo sapien
gaatctttcggcaggtcaaagctca

SEQ ID NO: 2868994 - DNA, 25 bp, Homo sapien
ggtgagaatatagcaatttgatgtc

SEQ ID NO: 2868995 - DNA, 25 bp, Homo sapien
tgtctgttgagaatctttcggcagg

SEQ ID NO: 2868996 - DNA, 25 bp, Homo sapien
gtctgctgaactgggcgtacggacc

SEQ ID NO: 2868997 - DNA, 25 bp, Homo sapien
agacatgcctttgagcaggtctgct

SEQ ID NO: 2868998 - DNA, 25 bp, Homo sapien
tacgcatggaaatcagacatgcctt

SEQ ID NO: 2868999 - DNA, 25 bp, Homo sapien
gggtaggactgactcaatacgcatg

SEQ ID NO: 2869000 - DNA, 25 bp, Homo sapien
catgacgtacaggagcgatgaggag

SEQ ID NO: 2869001 - DNA, 25 bp, Homo sapien
acatgacgtacaggagcgatgagga

SEQ ID NO: 2869002 - DNA, 25 bp, Homo sapien
gacatgacgtacaggagcgatgagg

SEQ ID NO: 2869003 - DNA, 25 bp, Homo sapien
atgacgtacaggagcgatgaggagt

SEQ ID NO: 2869004 - DNA, 25 bp, Homo sapien
tatgactccttggatttgtccccag

SEQ ID NO: 2869005 - DNA, 25 bp, Homo sapien
caagtccgtggcttcatatctgggt

SEQ ID NO: 2869006 - DNA, 25 bp, Homo sapien
ccatgaaagtttggcatccgcaagg

SEQ ID NO: 2869007 - DNA, 25 bp, Homo sapien
gactcaaagagggagagggccattc

SEQ ID NO: 2869008 - DNA, 25 bp, Homo sapien
agggtacagtcttcggctctcccgt

SEQ ID NO: 2869009 - DNA, 25 bp, Homo sapien
aagggtacagtcttcggctctcccg

SEQ ID NO: 2869010 - DNA, 25 bp, Homo sapien
caatattttacgggcaagggtacag

SEQ ID NO: 2869011 - DNA, 25 bp, Homo sapien
gggtacagtcttcggctctcccgtg

SEQ ID NO: 2869012 - DNA, 25 bp, Homo sapien
ctctcggaaactcatgtcagcggcc

SEQ ID NO: 2869013 - DNA, 25 bp, Homo sapien
tcagcggcctgacagctgtattcca

SEQ ID NO: 2869014 - DNA, 25 bp, Homo sapien
agctgtattccactggccggccaca

SEQ ID NO: 2869015 - DNA, 25 bp, Homo sapien
aggcctgacggccgctcaggaaagc

SEQ ID NO: 2869016 - DNA, 25 bp, Homo sapien
tcactctcaccttgtgccccattca

SEQ ID NO: 2869017 - DNA, 25 bp, Homo sapien
tgagcccctgcaggttcagctcact

SEQ ID NO: 2869018 - DNA, 25 bp, Homo sapien
ctggccacagatatggccatgagcc

SEQ ID NO: 2869019 - DNA, 25 bp, Homo sapien
ggttcagctcactctcaccttgtgc

SEQ ID NO: 2869020 - DNA, 25 bp, Homo sapien
tccggagtctgctttgctggtggct

SEQ ID NO: 2869021 - DNA, 25 bp, Homo sapien
ggcagcaggcggagacctcctttga

SEQ ID NO: 2869022 - DNA, 25 bp, Homo sapien
gggactaattgccacaaggtacaga

SEQ ID NO: 2869023 - DNA, 25 bp, Homo sapien
tgtcgtagtccttaagccaagtggg

SEQ ID NO: 2869024 - DNA, 25 bp, Homo sapien
ctgattggccctgacagttgtctgg

SEQ ID NO: 2869025 - DNA, 25 bp, Homo sapien
gattggtggagaaaatgtcgcattc

SEQ ID NO: 2869026 - DNA, 25 bp, Homo sapien
aaaatgtcgcattcaattaaggctg

SEQ ID NO: 2869027 - DNA, 25 bp, Homo sapien
gtttataaggtacatctaatctgga

SEQ ID NO: 2869028 - DNA, 25 bp, Homo sapien
cctctgtgccaaaggaggcgatgcc

SEQ ID NO: 2869029 - DNA, 25 bp, Homo sapien
tctgtgccaaaggaggcgatgccag

SEQ ID NO: 2869030 - DNA, 25 bp, Homo sapien
tcaataggcctctgtgccaaaggag

SEQ ID NO: 2869031 - DNA, 25 bp, Homo sapien
tgtgccaaaggaggcgatgccaggt

SEQ ID NO: 2869032 - DNA, 25 bp, Homo sapien
cacaactttgaacctcaaagatgag

SEQ ID NO: 2869033 - DNA, 25 bp, Homo sapien
caagtgctgtccgtcatcagaggcc

SEQ ID NO: 2869034 - DNA, 25 bp, Homo sapien
tcagaggccttctcacaactttgaa

SEQ ID NO: 2869035 - DNA, 25 bp, Homo sapien
tcctctgggcctgtatgcagatagc

SEQ ID NO: 2869036 - DNA, 25 bp, Homo sapien
tcacttataatatctttgcttcttt

SEQ ID NO: 2869037 - DNA, 25 bp, Homo sapien
cttataatatctttgcttctttggg

SEQ ID NO: 2869038 - DNA, 25 bp, Homo sapien
acttataatatctttgcttctttgg

SEQ ID NO: 2869039 - DNA, 25 bp, Homo sapien
tataatatctttgcttctttggggc

SEQ ID NO: 2869040 - DNA, 25 bp, Homo sapien
tcagtgccatttctgagctcccagt

SEQ ID NO: 2869041 - DNA, 25 bp, Homo sapien
tttctgagctctcagtgccatttct

SEQ ID NO: 2869042 - DNA, 25 bp, Homo sapien
ctgattcatttctgagctctcagtg

SEQ ID NO: 2869043 - DNA, 25 bp, Homo sapien
tcatttctgagctctcagtgccatt

SEQ ID NO: 2869044 - DNA, 25 bp, Homo sapien
tatgaaacatggtacctcaagcagc

SEQ ID NO: 2869045 - DNA, 25 bp, Homo sapien
tgatgcctttattgcctgaccttgg

SEQ ID NO: 2869046 - DNA, 25 bp, Homo sapien
gaagaataagtgtccctggtgcata

SEQ ID NO: 2869047 - DNA, 25 bp, Homo sapien
taaaacagtggcagccgaagctctc

SEQ ID NO: 2869048 - DNA, 25 bp, Homo sapien
tcaggcaccggccaggcatctgggt

SEQ ID NO: 2869049 - DNA, 25 bp, Homo sapien
tatctttcccatgagcaacaccaga

SEQ ID NO: 2869050 - DNA, 25 bp, Homo sapien
aacaccagaatcagccagcctagag

SEQ ID NO: 2869051 - DNA, 25 bp, Homo sapien
gcaaacgctttggatgacatcatac

SEQ ID NO: 2869052 - DNA, 25 bp, Homo sapien
tgtgacgaacattttacaagtattc

SEQ ID NO: 2869053 - DNA, 25 bp, Homo sapien
ctgtgacgaacattttacaagtatt

SEQ ID NO: 2869054 - DNA, 25 bp, Homo sapien
tgtcagccacatgaagcctaatggt

SEQ ID NO: 2869055 - DNA, 25 bp, Homo sapien
gatgtcagccacatgaagcctaatg

SEQ ID NO: 2869056 - DNA, 25 bp, Homo sapien
cagccacatgaagcctaatggtctg

SEQ ID NO: 2869057 - DNA, 25 bp, Homo sapien
agatgtcagccacatgaagcctaat

SEQ ID NO: 2869058 - DNA, 25 bp, Homo sapien
ctgcttctcgtttgtcagaagagac

SEQ ID NO: 2869059 - DNA, 25 bp, Homo sapien
agctgcttctcgtttgtcagaagag

SEQ ID NO: 2869060 - DNA, 25 bp, Homo sapien
cagctgcttctcgtttgtcagaaga

SEQ ID NO: 2869061 - DNA, 25 bp, Homo sapien
gctgcttctcgtttgtcagaagaga

SEQ ID NO: 2869062 - DNA, 25 bp, Homo sapien
cactttcaaggagcgcatgctgcgg

SEQ ID NO: 2869063 - DNA, 25 bp, Homo sapien
aattctgatgactggtagagtgccc

SEQ ID NO: 2869064 - DNA, 25 bp, Homo sapien
taaagagctacaatgaacggcttcc

SEQ ID NO: 2869065 - DNA, 25 bp, Homo sapien
tagagtgcccaagcgaatctttgac

SEQ ID NO: 2869066 - DNA, 25 bp, Homo sapien
tactatggggtagatagagctcaat

SEQ ID NO: 2869067 - DNA, 25 bp, Homo sapien
aaagccatcctttattactatgggg

SEQ ID NO: 2869068 - DNA, 25 bp, Homo sapien
gggtagatagagctcaatgtttgcc

SEQ ID NO: 2869069 - DNA, 25 bp, Homo sapien
tagatagagctcaatgtttgccacc

SEQ ID NO: 2869070 - DNA, 25 bp, Homo sapien
taattcaggtgtccgatcatcagac

SEQ ID NO: 2869071 - DNA, 25 bp, Homo sapien
acagataattcaggtgtccgatcat

SEQ ID NO: 2869072 - DNA, 25 bp, Homo sapien
ggtgtccgatcatcagacccatctc

SEQ ID NO: 2869073 - DNA, 25 bp, Homo sapien
gggcttctagtaggcaccattttca

SEQ ID NO: 2869074 - DNA, 25 bp, Homo sapien
gctgatggatgacaatttcctgttt

SEQ ID NO: 2869075 - DNA, 25 bp, Homo sapien
agtttgctgatggatgacaatttcc

SEQ ID NO: 2869076 - DNA, 25 bp, Homo sapien
taggttggtcaagggagaagagagt

SEQ ID NO: 2869077 - DNA, 25 bp, Homo sapien
gagagtttgctgatggatgacaatt

SEQ ID NO: 2869078 - DNA, 25 bp, Homo sapien
tgacaattaggtatggtccaaatag

SEQ ID NO: 2869079 - DNA, 25 bp, Homo sapien
ggtatggtccaaatagagcctttct

SEQ ID NO: 2869080 - DNA, 25 bp, Homo sapien
caattaggtatggtccaaatagagc

SEQ ID NO: 2869081 - DNA, 25 bp, Homo sapien
ttaggtatggtccaaatagagcctt

SEQ ID NO: 2869082 - DNA, 25 bp, Homo sapien
gcttttgaagtcgtctgcaccaacc

SEQ ID NO: 2869083 - DNA, 25 bp, Homo sapien
ccagacgcggcttttgaagtcgtct

SEQ ID NO: 2869084 - DNA, 25 bp, Homo sapien
tggccccaacgagcggccccactgt

SEQ ID NO: 2869085 - DNA, 25 bp, Homo sapien
tcatttctccgcgtgccagacgcgg

SEQ ID NO: 2869086 - DNA, 25 bp, Homo sapien
gccagagcgggtatgcaatgagcca

SEQ ID NO: 2869087 - DNA, 25 bp, Homo sapien
gatgtcgaagtacagtaagtctaga

SEQ ID NO: 2869088 - DNA, 25 bp, Homo sapien
gcacattacagagcagcatcgccag

SEQ ID NO: 2869089 - DNA, 25 bp, Homo sapien
caaaagggcccctggatgtcgaagt

SEQ ID NO: 2869090 - DNA, 25 bp, Homo sapien
tttgaaagttcagggtggctccagc

SEQ ID NO: 2869091 - DNA, 25 bp, Homo sapien
tacgttgccgttctccagtgttgga

SEQ ID NO: 2869092 - DNA, 25 bp, Homo sapien
caaatccagggacataccaggacct

SEQ ID NO: 2869093 - DNA, 25 bp, Homo sapien
tggtgctacaaaggagccagaatct

SEQ ID NO: 2869094 - DNA, 25 bp, Homo sapien
cagcctgcctttgggatgaccttgg

SEQ ID NO: 2869095 - DNA, 25 bp, Homo sapien
tgccttgacacgtcacccagggtgg

SEQ ID NO: 2869096 - DNA, 25 bp, Homo sapien
caagtgatccagaacagagctacct

SEQ ID NO: 2869097 - DNA, 25 bp, Homo sapien
tgagagtcaataccagggcagcaga

SEQ ID NO: 2869098 - DNA, 25 bp, Homo sapien
tcaggcaacctgtatctgaaccttc

SEQ ID NO: 2869099 - DNA, 25 bp, Homo sapien
tcagagggcttgaagggcatggatg

SEQ ID NO: 2869100 - DNA, 25 bp, Homo sapien
tacgtggtcagagggcttgaagggc

SEQ ID NO: 2869101 - DNA, 25 bp, Homo sapien
cgttgtggttacgtggtcagagggc

SEQ ID NO: 2869102 - DNA, 25 bp, Homo sapien
gggagagagacgttgtggttacgtg

SEQ ID NO: 2869103 - DNA, 25 bp, Homo sapien
aagagggcagagttgacgggcacag

SEQ ID NO: 2869104 - DNA, 25 bp, Homo sapien
accagcacactaaatggagcagaca

SEQ ID NO: 2869105 - DNA, 25 bp, Homo sapien
gggcagagttgacgggcacagggtg

SEQ ID NO: 2869106 - DNA, 25 bp, Homo sapien
ccagcacactaaatggagcagacac

SEQ ID NO: 2869107 - DNA, 25 bp, Homo sapien
aaatgcataggaagtggaccgggag

SEQ ID NO: 2869108 - DNA, 25 bp, Homo sapien
gatggccaactttcagtagtgacca

SEQ ID NO: 2869109 - DNA, 25 bp, Homo sapien
aagtggaccgggagaagcgatggcc

SEQ ID NO: 2869110 - DNA, 25 bp, Homo sapien
ccgggagaagcgatggccaactttc

SEQ ID NO: 2869111 - DNA, 25 bp, Homo sapien
gctgatgaccatgttccatgccgtg

SEQ ID NO: 2869112 - DNA, 25 bp, Homo sapien
ctactggaactaggagggaggattc

SEQ ID NO: 2869113 - DNA, 25 bp, Homo sapien
ctggccacctctagtaggaaaggtt

SEQ ID NO: 2869114 - DNA, 25 bp, Homo sapien
ttcatcggagatgggcacttgcccc

SEQ ID NO: 2869115 - DNA, 25 bp, Homo sapien
catgccgggctatatgcctctctct

SEQ ID NO: 2869116 - DNA, 25 bp, Homo sapien
ttctctgactcccatgccgggctat

SEQ ID NO: 2869117 - DNA, 25 bp, Homo sapien
gccgggctatatgcctctctcttca

SEQ ID NO: 2869118 - DNA, 25 bp, Homo sapien
tctgactcccatgccgggctatatg

SEQ ID NO: 2869119 - DNA, 25 bp, Homo sapien
tatcacgtagcaagagcctggtggc

SEQ ID NO: 2869120 - DNA, 25 bp, Homo sapien
tagaccctgactgccttgagggtgg

SEQ ID NO: 2869121 - DNA, 25 bp, Homo sapien
tggagccagcctgaatatcacgtag

SEQ ID NO: 2869122 - DNA, 25 bp, Homo sapien
gaatgtatccgtctatagaccctga

SEQ ID NO: 2869123 - DNA, 25 bp, Homo sapien
tttgccatgacaagaacatccttta

SEQ ID NO: 2869124 - DNA, 25 bp, Homo sapien
cttttgccatgacaagaacatcctt

SEQ ID NO: 2869125 - DNA, 25 bp, Homo sapien
ccttttgccatgacaagaacatcct

SEQ ID NO: 2869126 - DNA, 25 bp, Homo sapien
ttgccatgacaagaacatcctttag

SEQ ID NO: 2869127 - DNA, 25 bp, Homo sapien
cagagaccagcccaggcgagcccag

SEQ ID NO: 2869128 - DNA, 25 bp, Homo sapien
cccaggcgagcccagccaagatcag

SEQ ID NO: 2869129 - DNA, 25 bp, Homo sapien
cgagcccagccaagatcagccacat

SEQ ID NO: 2869130 - DNA, 25 bp, Homo sapien
agagaccagcccaggcgagcccagc

SEQ ID NO: 2869131 - DNA, 25 bp, Homo sapien
gagtcctctttcagctcaactgaga

SEQ ID NO: 2869132 - DNA, 25 bp, Homo sapien
tgggtcgatggagccacttcctaaa

SEQ ID NO: 2869133 - DNA, 25 bp, Homo sapien
ttcccaataaagagtccctcgagtc

SEQ ID NO: 2869134 - DNA, 25 bp, Homo sapien
tatttgcctccgaaggctggtgctg

SEQ ID NO: 2869135 - DNA, 25 bp, Homo sapien
catggcttcagagctaaggtgggaa

SEQ ID NO: 2869136 - DNA, 25 bp, Homo sapien
gaagaggctagtgcaaacttggctc

SEQ ID NO: 2869137 - DNA, 25 bp, Homo sapien
taggaatagtagtttctccagccct

SEQ ID NO: 2869138 - DNA, 25 bp, Homo sapien
ggaattcctgcttaatggaagaggc

SEQ ID NO: 2869139 - DNA, 25 bp, Homo sapien
gggtgtacatacaagcactgtcctt

SEQ ID NO: 2869140 - DNA, 25 bp, Homo sapien
tgggtgtacatacaagcactgtcct

SEQ ID NO: 2869141 - DNA, 25 bp, Homo sapien
ctgggtgtacatacaagcactgtcc

SEQ ID NO: 2869142 - DNA, 25 bp, Homo sapien
ctcctgtgtattactcaggaatttt

SEQ ID NO: 2869143 - DNA, 25 bp, Homo sapien
gttctcctgtgtattactcaggaat

SEQ ID NO: 2869144 - DNA, 25 bp, Homo sapien
tagttctcctgtgtattactcagga

SEQ ID NO: 2869145 - DNA, 25 bp, Homo sapien
ctagttctcctgtgtattactcagg

SEQ ID NO: 2869146 - DNA, 25 bp, Homo sapien
cccgggtacttcagatgtaactata

SEQ ID NO: 2869147 - DNA, 25 bp, Homo sapien
agtgaggtcattaggtggaccttaa

SEQ ID NO: 2869148 - DNA, 25 bp, Homo sapien
taggtggaccttaatccattatgag

SEQ ID NO: 2869149 - DNA, 25 bp, Homo sapien
ccattatgagttgtgtatggccggg

SEQ ID NO: 2869150 - DNA, 25 bp, Homo sapien
gcaggtgaatctgaacagtgctccc

SEQ ID NO: 2869151 - DNA, 25 bp, Homo sapien
catacttgggcgacacatttggctc

SEQ ID NO: 2869152 - DNA, 25 bp, Homo sapien
tcaggtccgacagctttgtgctttc

SEQ ID NO: 2869153 - DNA, 25 bp, Homo sapien
cctctaagatcggagagtgtggact

SEQ ID NO: 2869154 - DNA, 25 bp, Homo sapien
tcagtagttattgccaaatgtgccc

SEQ ID NO: 2869155 - DNA, 25 bp, Homo sapien
catggaaagatgaaggagagactgc

SEQ ID NO: 2869156 - DNA, 25 bp, Homo sapien
ggccattcgggcttcattcctagaa

SEQ ID NO: 2869157 - DNA, 25 bp, Homo sapien
caagatctcgatatgttaccccagc

SEQ ID NO: 2869158 - DNA, 25 bp, Homo sapien
tttgagaggcctcgaaggccgaccc

SEQ ID NO: 2869159 - DNA, 25 bp, Homo sapien
taatagaatcaaaggacaagaggcc

SEQ ID NO: 2869160 - DNA, 25 bp, Homo sapien
tcatctcaatgcagagagcgctcac

SEQ ID NO: 2869161 - DNA, 25 bp, Homo sapien
agaggccaggctctcttgtgctgag

SEQ ID NO: 2869162 - DNA, 25 bp, Homo sapien
tgcaggctcgggaggaccttccgct

SEQ ID NO: 2869163 - DNA, 25 bp, Homo sapien
gcaggctcgggaggaccttccgctc

SEQ ID NO: 2869164 - DNA, 25 bp, Homo sapien
gtgcaggctcgggaggaccttccgc

SEQ ID NO: 2869165 - DNA, 25 bp, Homo sapien
tgtgcaggctcgggaggaccttccg

SEQ ID NO: 2869166 - DNA, 25 bp, Homo sapien
tctggatcctcagcacgcagcgggc

SEQ ID NO: 2869167 - DNA, 25 bp, Homo sapien
gacttgatgacgtagagagagagaa

SEQ ID NO: 2869168 - DNA, 25 bp, Homo sapien
gaaggccgcctgtttcccaggtgga

SEQ ID NO: 2869169 - DNA, 25 bp, Homo sapien
ctctgcactgacttgatgacgtaga

SEQ ID NO: 2869170 - DNA, 25 bp, Homo sapien
ctcatgcgcacacgctcgggtttca

SEQ ID NO: 2869171 - DNA, 25 bp, Homo sapien
cacacgctcgggtttcatgataatc

SEQ ID NO: 2869172 - DNA, 25 bp, Homo sapien
gtttcatgataatccgagtgatggt

SEQ ID NO: 2869173 - DNA, 25 bp, Homo sapien
catgataatccgagtgatggttctc

SEQ ID NO: 2869174 - DNA, 25 bp, Homo sapien
cccatactcgatttattgacattac

SEQ ID NO: 2869175 - DNA, 25 bp, Homo sapien
gacattacttagcaatttactggac

SEQ ID NO: 2869176 - DNA, 25 bp, Homo sapien
tgaagtaacaattgcatgaagccag

SEQ ID NO: 2869177 - DNA, 25 bp, Homo sapien
tgaagccagattaggtgcactgcat

SEQ ID NO: 2869178 - DNA, 25 bp, Homo sapien
gatgcatgaattccagagccaagac

SEQ ID NO: 2869179 - DNA, 25 bp, Homo sapien
ggacttgggagctttgagaacctgc

SEQ ID NO: 2869180 - DNA, 25 bp, Homo sapien
tagtagagtgtgcttccacgggaag

SEQ ID NO: 2869181 - DNA, 25 bp, Homo sapien
caaaggacaaatcagagcccagggc

SEQ ID NO: 2869182 - DNA, 25 bp, Homo sapien
ggtagccacgtagccagtagttcaa

SEQ ID NO: 2869183 - DNA, 25 bp, Homo sapien
cagcgtctagaaccaattccagctt

SEQ ID NO: 2869184 - DNA, 25 bp, Homo sapien
gaagagttaggctgctttgcatcta

SEQ ID NO: 2869185 - DNA, 25 bp, Homo sapien
gctgtgaacgaactcccttaggcat

SEQ ID NO: 2869186 - DNA, 25 bp, Homo sapien
aaatgacctacatacgcacatgtac

SEQ ID NO: 2869187 - DNA, 25 bp, Homo sapien
gggagcataaactgactgaactctt

SEQ ID NO: 2869188 - DNA, 25 bp, Homo sapien
taacaacagagcatatccaaacaat

SEQ ID NO: 2869189 - DNA, 25 bp, Homo sapien
taatgccccaggaccagaagtggac

SEQ ID NO: 2869190 - DNA, 25 bp, Homo sapien
cacagagttgtcaatactgttccta

SEQ ID NO: 2869191 - DNA, 25 bp, Homo sapien
tgtatagaattcactggccctcagc

SEQ ID NO: 2869192 - DNA, 25 bp, Homo sapien
tcttccagactgaacacgcttagta

SEQ ID NO: 2869193 - DNA, 25 bp, Homo sapien
tcagttcctaggacacagccaagta

SEQ ID NO: 2869194 - DNA, 25 bp, Homo sapien
catggaagcagaataggttttaggg

SEQ ID NO: 2869195 - DNA, 25 bp, Homo sapien
tttaggggtctctcaacagatactc

SEQ ID NO: 2869196 - DNA, 25 bp, Homo sapien
tcaacagatactcttctctgattca

SEQ ID NO: 2869197 - DNA, 25 bp, Homo sapien
tgattcatccttgaggaaaggatgg

SEQ ID NO: 2869198 - DNA, 25 bp, Homo sapien
gatgtgactataaagatccagcctt

SEQ ID NO: 2869199 - DNA, 25 bp, Homo sapien
tgaactctgcaaaagttgacacgtc

SEQ ID NO: 2869200 - DNA, 25 bp, Homo sapien
gatgaaaacccacacaataggcagg

SEQ ID NO: 2869201 - DNA, 25 bp, Homo sapien
aactcaagccttgtatggatgtgac

SEQ ID NO: 2869202 - DNA, 25 bp, Homo sapien
ctgaaacgggtgaaagtgcagactg

SEQ ID NO: 2869203 - DNA, 25 bp, Homo sapien
gagccgaaacacacgtccagaatgt

SEQ ID NO: 2869204 - DNA, 25 bp, Homo sapien
tcatcaaactggagccgaaacacac

SEQ ID NO: 2869205 - DNA, 25 bp, Homo sapien
aaactggagccgaaacacacgtcca

SEQ ID NO: 2869206 - DNA, 25 bp, Homo sapien
aaactcatcaaactggagccgaaac

SEQ ID NO: 2869207 - DNA, 25 bp, Homo sapien
caccaatgtgcgcaaacacaatgtg

SEQ ID NO: 2869208 - DNA, 25 bp, Homo sapien
accaatgtgcgcaaacacaatgtgc

SEQ ID NO: 2869209 - DNA, 25 bp, Homo sapien
aacacaatgtgcttgctggggctcg

SEQ ID NO: 2869210 - DNA, 25 bp, Homo sapien
cacaatgtgcttgctggggctcgag

SEQ ID NO: 2869211 - DNA, 25 bp, Homo sapien
aggcaccacattcaatatcccagag

SEQ ID NO: 2869212 - DNA, 25 bp, Homo sapien
ggcaccacattcaatatcccagagc

SEQ ID NO: 2869213 - DNA, 25 bp, Homo sapien
gcctgctctgtcagcacaccaactt

SEQ ID NO: 2869214 - DNA, 25 bp, Homo sapien
caatgtggcaaaaatcagcctgctc

SEQ ID NO: 2869215 - DNA, 25 bp, Homo sapien
cctgagttgttttgagcattagaac

SEQ ID NO: 2869216 - DNA, 25 bp, Homo sapien
cattagaactaggagatgagtcaac

SEQ ID NO: 2869217 - DNA, 25 bp, Homo sapien
gtacgaacaaattcacaggtgctcg

SEQ ID NO: 2869218 - DNA, 25 bp, Homo sapien
tggagacaggcaatgccccgcttgt

SEQ ID NO: 2869219 - DNA, 25 bp, Homo sapien
caggcgatccctgtactggagacag

SEQ ID NO: 2869220 - DNA, 25 bp, Homo sapien
ccgcttgtgcccattgagagtacga

SEQ ID NO: 2869221 - DNA, 25 bp, Homo sapien
ccctcttttgtggtatctgacttag

SEQ ID NO: 2869222 - DNA, 25 bp, Homo sapien
cagcaaccagagtgccctgaattat

SEQ ID NO: 2869223 - DNA, 25 bp, Homo sapien
gatcaaggacctacacataagcact

SEQ ID NO: 2869224 - DNA, 25 bp, Homo sapien
tagatctccacaagtaaaagaatgg

SEQ ID NO: 2869225 - DNA, 25 bp, Homo sapien
aggttggtataagccacctctgctt

SEQ ID NO: 2869226 - DNA, 25 bp, Homo sapien
caggttggtataagccacctctgct

SEQ ID NO: 2869227 - DNA, 25 bp, Homo sapien
aagccacctctgctttgtctctgtt

SEQ ID NO: 2869228 - DNA, 25 bp, Homo sapien
tataagccacctctgctttgtctct

SEQ ID NO: 2869229 - DNA, 25 bp, Homo sapien
ctactacattgacggcagcccggtg

SEQ ID NO: 2869230 - DNA, 25 bp, Homo sapien
gatgtacttgtcgtcaaagtctact

SEQ ID NO: 2869231 - DNA, 25 bp, Homo sapien
acggcgtaaagtgatgtcggtcgca

SEQ ID NO: 2869232 - DNA, 25 bp, Homo sapien
caccagaggcagacacgatgtactt

SEQ ID NO: 2869233 - DNA, 25 bp, Homo sapien
cagttacaatgacacgctcatcata

SEQ ID NO: 2869234 - DNA, 25 bp, Homo sapien
ccagttacaatgacacgctcatcat

SEQ ID NO: 2869235 - DNA, 25 bp, Homo sapien
cgtagaatctgaagagccagttaca

SEQ ID NO: 2869236 - DNA, 25 bp, Homo sapien
ctcaccgtagaatctgaagagccag

SEQ ID NO: 2869237 - DNA, 25 bp, Homo sapien
aacattccaggctggttttatccca

SEQ ID NO: 2869238 - DNA, 25 bp, Homo sapien
gtgtgtcctgttaacactttcaaac

SEQ ID NO: 2869239 - DNA, 25 bp, Homo sapien
cactttcaaacattccaggctggtt

SEQ ID NO: 2869240 - DNA, 25 bp, Homo sapien
tgcagacagaggacagagcctgtgt

SEQ ID NO: 2869241 - DNA, 25 bp, Homo sapien
actgtggtatgattggacattgtat

SEQ ID NO: 2869242 - DNA, 25 bp, Homo sapien
tcatagcttagctcttacataacag

SEQ ID NO: 2869243 - DNA, 25 bp, Homo sapien
ccataagctattgtacaggtggtat

SEQ ID NO: 2869244 - DNA, 25 bp, Homo sapien
ttagctcttacataacagtgagaac

SEQ ID NO: 2869245 - DNA, 25 bp, Homo sapien
gacacctttactattttcagagcgg

SEQ ID NO: 2869246 - DNA, 25 bp, Homo sapien
gaatcctctgcaagttgtgtcgtcc

SEQ ID NO: 2869247 - DNA, 25 bp, Homo sapien
aatagaattatctcgtaggccactg

SEQ ID NO: 2869248 - DNA, 25 bp, Homo sapien
tgtgtcgtccacaccgccagttaga

SEQ ID NO: 2869249 - DNA, 25 bp, Homo sapien
gtaactttggcaaaggactcgctgc

SEQ ID NO: 2869250 - DNA, 25 bp, Homo sapien
taatgctaataagcctgagccttcc

SEQ ID NO: 2869251 - DNA, 25 bp, Homo sapien
gtagcccactgtggtagaaaatacc

SEQ ID NO: 2869252 - DNA, 25 bp, Homo sapien
aagtgggctgcaacaacaaatacat

SEQ ID NO: 2869253 - DNA, 25 bp, Homo sapien
gcttcttttaggagcgagcctcagg

SEQ ID NO: 2869254 - DNA, 25 bp, Homo sapien
ccaagaagagcacttcggaggcgtt

SEQ ID NO: 2869255 - DNA, 25 bp, Homo sapien
taaaccctctctatgtgtggcaaga

SEQ ID NO: 2869256 - DNA, 25 bp, Homo sapien
cctgaataacaggagttggctgcac

SEQ ID NO: 2869257 - DNA, 25 bp, Homo sapien
gggtataatgacctataaaatgaat

SEQ ID NO: 2869258 - DNA, 25 bp, Homo sapien
aatgaatttggagggccatctgtgg

SEQ ID NO: 2869259 - DNA, 25 bp, Homo sapien
tttgggtataatgacctataaaatg

SEQ ID NO: 2869260 - DNA, 25 bp, Homo sapien
aaatgaatttggagggccatctgtg

SEQ ID NO: 2869261 - DNA, 25 bp, Homo sapien
agtcctttccataggggatcagtgc

SEQ ID NO: 2869262 - DNA, 25 bp, Homo sapien
gtcctttccataggggatcagtgcg

SEQ ID NO: 2869263 - DNA, 25 bp, Homo sapien
cctttccataggggatcagtgcgta

SEQ ID NO: 2869264 - DNA, 25 bp, Homo sapien
ctttccataggggatcagtgcgtac

SEQ ID NO: 2869265 - DNA, 25 bp, Homo sapien
ctggcatccaggtacgaaagaatgt

SEQ ID NO: 2869266 - DNA, 25 bp, Homo sapien
tctttacataccagctctgctgcac

SEQ ID NO: 2869267 - DNA, 25 bp, Homo sapien
aaagcattccttctgagatcactcg

SEQ ID NO: 2869268 - DNA, 25 bp, Homo sapien
tcgctgccattctttacataccagc

SEQ ID NO: 2869269 - DNA, 25 bp, Homo sapien
ctaaaattctcttactctggactag

SEQ ID NO: 2869270 - DNA, 25 bp, Homo sapien
ggccagatgtaggtaaattattaaa

SEQ ID NO: 2869271 - DNA, 25 bp, Homo sapien
gtagtataatagcactaaacttggt

SEQ ID NO: 2869272 - DNA, 25 bp, Homo sapien
taaacttggttgttgaaaggccaga

SEQ ID NO: 2869273 - DNA, 25 bp, Homo sapien
tatttatatacataacacatgttca

SEQ ID NO: 2869274 - DNA, 25 bp, Homo sapien
atatttatatacataacacatgttc

SEQ ID NO: 2869275 - DNA, 25 bp, Homo sapien
atttatatacataacacatgttcat

SEQ ID NO: 2869276 - DNA, 25 bp, Homo sapien
catatttatatacataacacatgtt

SEQ ID NO: 2869277 - DNA, 25 bp, Homo sapien
gagattagaaatcagaagctggttt

SEQ ID NO: 2869278 - DNA, 25 bp, Homo sapien
gctggtttgtcaatttgcagcctca

SEQ ID NO: 2869279 - DNA, 25 bp, Homo sapien
tcagaagctggtttgtcaatttgca

SEQ ID NO: 2869280 - DNA, 25 bp, Homo sapien
tttgtcaatttgcagcctcaggttt

SEQ ID NO: 2869281 - DNA, 25 bp, Homo sapien
ggcaaagtgcagactctaaactaca

SEQ ID NO: 2869282 - DNA, 25 bp, Homo sapien
tttgggacacttcccaaacatacaa

SEQ ID NO: 2869283 - DNA, 25 bp, Homo sapien
caaatgaatgccctaaacttttggg

SEQ ID NO: 2869284 - DNA, 25 bp, Homo sapien
cagaccaaatgaagcaacagttatg

SEQ ID NO: 2869285 - DNA, 25 bp, Homo sapien
gcttttgaaaagacaagtacagtta

SEQ ID NO: 2869286 - DNA, 25 bp, Homo sapien
cagcttttgaaaagacaagtacagt

SEQ ID NO: 2869287 - DNA, 25 bp, Homo sapien
tcagcttttgaaaagacaagtacag

SEQ ID NO: 2869288 - DNA, 25 bp, Homo sapien
agcttttgaaaagacaagtacagtt

SEQ ID NO: 2869289 - DNA, 25 bp, Homo sapien
cagaccactggtcaaaatatttaat

SEQ ID NO: 2869290 - DNA, 25 bp, Homo sapien
taagagttaatatgtccatgctgat

SEQ ID NO: 2869291 - DNA, 25 bp, Homo sapien
agttaatatgtccatgctgataatg

SEQ ID NO: 2869292 - DNA, 25 bp, Homo sapien
ggtaagagttaatatgtccatgctg

SEQ ID NO: 2869293 - DNA, 25 bp, Homo sapien
ttctttggggactcatcttcatttt

SEQ ID NO: 2869294 - DNA, 25 bp, Homo sapien
tttgatcttccataactgaagtgtt

SEQ ID NO: 2869295 - DNA, 25 bp, Homo sapien
cattttgatcttccataactgaagt

SEQ ID NO: 2869296 - DNA, 25 bp, Homo sapien
tcattttgatcttccataactgaag

SEQ ID NO: 2869297 - DNA, 25 bp, Homo sapien
gtctcagctacttgctacttgggag

SEQ ID NO: 2869298 - DNA, 25 bp, Homo sapien
tcccaccatcacaaagaaaacacag

SEQ ID NO: 2869299 - DNA, 25 bp, Homo sapien
tcacaaagaaaacacaggctgggcg

SEQ ID NO: 2869300 - DNA, 25 bp, Homo sapien
cagtggctcatgcctgtaatcccag

SEQ ID NO: 2869301 - DNA, 25 bp, Homo sapien
aggtaagaatgttccctctcaacac

SEQ ID NO: 2869302 - DNA, 25 bp, Homo sapien
tcaacgtgataaagaacacctgcaa

SEQ ID NO: 2869303 - DNA, 25 bp, Homo sapien
acatcatcctctaagttctagctaa

SEQ ID NO: 2869304 - DNA, 25 bp, Homo sapien
catacgtattagtgaaaaagttgac

SEQ ID NO: 2869305 - DNA, 25 bp, Homo sapien
tcatttcatcatgaactgtttccat

SEQ ID NO: 2869306 - DNA, 25 bp, Homo sapien
ttcatttcatcatgaactgtttcca

SEQ ID NO: 2869307 - DNA, 25 bp, Homo sapien
ttttagagcaaacccgtggcctgca

SEQ ID NO: 2869308 - DNA, 25 bp, Homo sapien
tttttagagcaaacccgtggcctgc

SEQ ID NO: 2869309 - DNA, 25 bp, Homo sapien
gaggcaatgaattcaaacagccatg

SEQ ID NO: 2869310 - DNA, 25 bp, Homo sapien
cactgagcaacccaaaacgttcaca

SEQ ID NO: 2869311 - DNA, 25 bp, Homo sapien
agccatgtctgaccttagacagacc

SEQ ID NO: 2869312 - DNA, 25 bp, Homo sapien
cccagagtgctataggataattaag

SEQ ID NO: 2869313 - DNA, 25 bp, Homo sapien
gagaattacaacctcaaggtgaggg

SEQ ID NO: 2869314 - DNA, 25 bp, Homo sapien
tgggaggtggcccaaactgacaaat

SEQ ID NO: 2869315 - DNA, 25 bp, Homo sapien
tttatgccagtagtgattccctccc

SEQ ID NO: 2869316 - DNA, 25 bp, Homo sapien
tggcacatgcgcaactattaaacat

SEQ ID NO: 2869317 - DNA, 25 bp, Homo sapien
cgcacatgctctctaccaggttggc

SEQ ID NO: 2869318 - DNA, 25 bp, Homo sapien
caggttggcgcagcctagccacaaa

SEQ ID NO: 2869319 - DNA, 25 bp, Homo sapien
tctgcaggcaactcagtgcgcacat

SEQ ID NO: 2869320 - DNA, 25 bp, Homo sapien
tggagacatctgacactgggcatgc

SEQ ID NO: 2869321 - DNA, 25 bp, Homo sapien
aagcagttagaggccgcaacaaatc

SEQ ID NO: 2869322 - DNA, 25 bp, Homo sapien
agcagttagaggccgcaacaaatca

SEQ ID NO: 2869323 - DNA, 25 bp, Homo sapien
cagttagaggccgcaacaaatcact

SEQ ID NO: 2869324 - DNA, 25 bp, Homo sapien
gcagttagaggccgcaacaaatcac

SEQ ID NO: 2869325 - DNA, 25 bp, Homo sapien
ccgtaagtgattcttgaagcttcaa

SEQ ID NO: 2869326 - DNA, 25 bp, Homo sapien
ggccgtaagtgattcttgaagcttc

SEQ ID NO: 2869327 - DNA, 25 bp, Homo sapien
ctggccgtaagtgattcttgaagct

SEQ ID NO: 2869328 - DNA, 25 bp, Homo sapien
gtaagtgattcttgaagcttcaaat

SEQ ID NO: 2869329 - DNA, 25 bp, Homo sapien
ccactgccttcaagagtattaaaac

SEQ ID NO: 2869330 - DNA, 25 bp, Homo sapien
tgacccaattatagtcagactacat

SEQ ID NO: 2869331 - DNA, 25 bp, Homo sapien
tttgctaaacggaaaaagatggcta

SEQ ID NO: 2869332 - DNA, 25 bp, Homo sapien
gatggctaaattcctaaagtatgaa

SEQ ID NO: 2869333 - DNA, 25 bp, Homo sapien
taggacagccttagagtaagggact

SEQ ID NO: 2869334 - DNA, 25 bp, Homo sapien
gattcccttcacattgtttgaatcc

SEQ ID NO: 2869335 - DNA, 25 bp, Homo sapien
tagagtaagggactcctgctgcttg

SEQ ID NO: 2869336 - DNA, 25 bp, Homo sapien
gctgcacagcaaggatgtctttgat

SEQ ID NO: 2869337 - DNA, 25 bp, Homo sapien
tgacttcatctttttgtcctatttt

SEQ ID NO: 2869338 - DNA, 25 bp, Homo sapien
ccctgacttcatctttttgtcctat

SEQ ID NO: 2869339 - DNA, 25 bp, Homo sapien
gtcctatttttcctttcatcttcat

SEQ ID NO: 2869340 - DNA, 25 bp, Homo sapien
ttgtcctatttttcctttcatcttc

SEQ ID NO: 2869341 - DNA, 25 bp, Homo sapien
cattcgactgggcaactgcttggca

SEQ ID NO: 2869342 - DNA, 25 bp, Homo sapien
tcttgctctatcaagcaaagctctc

SEQ ID NO: 2869343 - DNA, 25 bp, Homo sapien
ggattgcatatgtcctccaaaaagc

SEQ ID NO: 2869344 - DNA, 25 bp, Homo sapien
ttttcaggatcaagtcaattacgag

SEQ ID NO: 2869345 - DNA, 25 bp, Homo sapien
agcagcttagccacgagagtacact

SEQ ID NO: 2869346 - DNA, 25 bp, Homo sapien
tgagatagtaaaaccctaagacttg

SEQ ID NO: 2869347 - DNA, 25 bp, Homo sapien
gaactttgatccctaccgcaaccat

SEQ ID NO: 2869348 - DNA, 25 bp, Homo sapien
tgtaaataatggtggtggactaact

SEQ ID NO: 2869349 - DNA, 25 bp, Homo sapien
aaaacagtattgtggttacacatgc

SEQ ID NO: 2869350 - DNA, 25 bp, Homo sapien
gatgtactttgtttggatcctgttt

SEQ ID NO: 2869351 - DNA, 25 bp, Homo sapien
gagtggtatcaaagacattcttgag

SEQ ID NO: 2869352 - DNA, 25 bp, Homo sapien
tgtggttgtatacacggagatatgg

SEQ ID NO: 2869353 - DNA, 25 bp, Homo sapien
tgagaaaagacagcagtcaagcatc

SEQ ID NO: 2869354 - DNA, 25 bp, Homo sapien
ccctttcagactagtctgagaaaag

SEQ ID NO: 2869355 - DNA, 25 bp, Homo sapien
tccaccaatccagaatgaatggggg

SEQ ID NO: 2869356 - DNA, 25 bp, Homo sapien
tttccgtttactgtatccagctttc

SEQ ID NO: 2869357 - DNA, 25 bp, Homo sapien
taacagatgccaggtgagtagtgtc

SEQ ID NO: 2869358 - DNA, 25 bp, Homo sapien
gctggcaggccttatgctagtaata

SEQ ID NO: 2869359 - DNA, 25 bp, Homo sapien
tgcttttcaaggtacgactatccaa

SEQ ID NO: 2869360 - DNA, 25 bp, Homo sapien
tgttgacagtccacaggcaatgact

SEQ ID NO: 2869361 - DNA, 25 bp, Homo sapien
agtagccttcaataaatgggcttag

SEQ ID NO: 2869362 - DNA, 25 bp, Homo sapien
gggcttaggtccattcctatcagtg

SEQ ID NO: 2869363 - DNA, 25 bp, Homo sapien
tatcagtgctgacaaaggaaacgtg

SEQ ID NO: 2869364 - DNA, 25 bp, Homo sapien
caataaatgggcttaggtccattcc

SEQ ID NO: 2869365 - DNA, 25 bp, Homo sapien
gtaatacagccacttaagagataag

SEQ ID NO: 2869366 - DNA, 25 bp, Homo sapien
ccatccattaattgtgtaaagggaa

SEQ ID NO: 2869367 - DNA, 25 bp, Homo sapien
gggaaatgactcacttaaggtcact

SEQ ID NO: 2869368 - DNA, 25 bp, Homo sapien
taaggatcagtgtattttaacctac

SEQ ID NO: 2869369 - DNA, 25 bp, Homo sapien
ggcaggatcgcctttcctaaagtga

SEQ ID NO: 2869370 - DNA, 25 bp, Homo sapien
tctgctggcttcttacagggtaatc

SEQ ID NO: 2869371 - DNA, 25 bp, Homo sapien
gaagctcttgtgagtgctttctagt

SEQ ID NO: 2869372 - DNA, 25 bp, Homo sapien
tacagggtaatctaatcatctttct

SEQ ID NO: 2869373 - DNA, 25 bp, Homo sapien
aatgaagtccattgaacatagccgg

SEQ ID NO: 2869374 - DNA, 25 bp, Homo sapien
tcaaagctgaatcctatagagtggg

SEQ ID NO: 2869375 - DNA, 25 bp, Homo sapien
cactaacaggtatagccctgggcca

SEQ ID NO: 2869376 - DNA, 25 bp, Homo sapien
taaggccctaaaagtcatctggcgg

SEQ ID NO: 2869377 - DNA, 25 bp, Homo sapien
tgtgaattatgcaaaggacagcaaa

SEQ ID NO: 2869378 - DNA, 25 bp, Homo sapien
ctttgaaaacaaccccacgtgcaca

SEQ ID NO: 2869379 - DNA, 25 bp, Homo sapien
gaaaccatgcagctatccaacagac

SEQ ID NO: 2869380 - DNA, 25 bp, Homo sapien
tgttgtaagtacatgcactgtgtgt

SEQ ID NO: 2869381 - DNA, 25 bp, Homo sapien
gcataaacgagcgagggtcgtccga

SEQ ID NO: 2869382 - DNA, 25 bp, Homo sapien
cagcataaacgagcgagggtcgtcc

SEQ ID NO: 2869383 - DNA, 25 bp, Homo sapien
ataaacgagcgagggtcgtccgaga

SEQ ID NO: 2869384 - DNA, 25 bp, Homo sapien
ctacagcataaacgagcgagggtcg

SEQ ID NO: 2869385 - DNA, 25 bp, Homo sapien
agctcgatggtcttgtcctcaatca

SEQ ID NO: 2869386 - DNA, 25 bp, Homo sapien
cctcaatcaccgagtcgggctccat

SEQ ID NO: 2869387 - DNA, 25 bp, Homo sapien
gagctcgatggtcttgtcctcaatc

SEQ ID NO: 2869388 - DNA, 25 bp, Homo sapien
tcctcaatcaccgagtcgggctcca

SEQ ID NO: 2869389 - DNA, 25 bp, Homo sapien
ggaggcgacggcggaggcggcagag

SEQ ID NO: 2869390 - DNA, 25 bp, Homo sapien
gcgacggcggaggcggcagaggcgg

SEQ ID NO: 2869391 - DNA, 25 bp, Homo sapien
gaggcgacggcggaggcggcagagg

SEQ ID NO: 2869392 - DNA, 25 bp, Homo sapien
tcggcgaacgcagtacgcagatcgg

SEQ ID NO: 2869393 - DNA, 25 bp, Homo sapien
cccctcggcgaacgcagtacgcaga

SEQ ID NO: 2869394 - DNA, 25 bp, Homo sapien
cgccctccccctcggcgaacgcagt

SEQ ID NO: 2869395 - DNA, 25 bp, Homo sapien
cctcggcgaacgcagtacgcagatc

SEQ ID NO: 2869396 - DNA, 25 bp, Homo sapien
cgtaggacgtgcagacctgaagagt

SEQ ID NO: 2869397 - DNA, 25 bp, Homo sapien
ctgaactccgagctgagagtagcac

SEQ ID NO: 2869398 - DNA, 25 bp, Homo sapien
tagcactggacggtgggcgtaggac

SEQ ID NO: 2869399 - DNA, 25 bp, Homo sapien
tgacaccaggttgctggctcttggc

SEQ ID NO: 2869400 - DNA, 25 bp, Homo sapien
ttttagactgtactacttattaaca

SEQ ID NO: 2869401 - DNA, 25 bp, Homo sapien
tagactgtactacttattaacaaaa

SEQ ID NO: 2869402 - DNA, 25 bp, Homo sapien
tttagactgtactacttattaacaa

SEQ ID NO: 2869403 - DNA, 25 bp, Homo sapien
ttagactgtactacttattaacaaa

SEQ ID NO: 2869404 - DNA, 25 bp, Homo sapien
ttcatcatgtcgatcaggccggtca

SEQ ID NO: 2869405 - DNA, 25 bp, Homo sapien
ccctctctcatgtagataagatagt

SEQ ID NO: 2869406 - DNA, 25 bp, Homo sapien
tctggatgttgtctcataggtcctt

SEQ ID NO: 2869407 - DNA, 25 bp, Homo sapien
tgtgctattaaccttatccagtgaa

SEQ ID NO: 2869408 - DNA, 25 bp, Homo sapien
taatactttctcacacgccaggcta

SEQ ID NO: 2869409 - DNA, 25 bp, Homo sapien
gcctggcctggtagaactgggtcta

SEQ ID NO: 2869410 - DNA, 25 bp, Homo sapien
gacgcggcaactccttgaagggcaa

SEQ ID NO: 2869411 - DNA, 25 bp, Homo sapien
aaagcactaacacagggcacgagga

SEQ ID NO: 2869412 - DNA, 25 bp, Homo sapien
cagcgaaacactacccagactcaat

SEQ ID NO: 2869413 - DNA, 25 bp, Homo sapien
gcccgcatgattactccaaatcatt

SEQ ID NO: 2869414 - DNA, 25 bp, Homo sapien
taaatctgtaggagtgaaggcggaa

SEQ ID NO: 2869415 - DNA, 25 bp, Homo sapien
ccaaatcattaccagttttgtgttg

SEQ ID NO: 2869416 - DNA, 25 bp, Homo sapien
ccatctgaggtacagaacctgtgct

SEQ ID NO: 2869417 - DNA, 25 bp, Homo sapien
tgaagagaagtccaacagactgcca

SEQ ID NO: 2869418 - DNA, 25 bp, Homo sapien
aggtgggactcctgaacacagtcgg

SEQ ID NO: 2869419 - DNA, 25 bp, Homo sapien
tattgcgttatatacattctgcagc

SEQ ID NO: 2869420 - DNA, 25 bp, Homo sapien
tgtgcattcacacccatgtgcagga

SEQ ID NO: 2869421 - DNA, 25 bp, Homo sapien
ggctcaggcagcaaacgtgttccaa

SEQ ID NO: 2869422 - DNA, 25 bp, Homo sapien
cgagatggcatgaaacacgggagaa

SEQ ID NO: 2869423 - DNA, 25 bp, Homo sapien
gaccaagtcctgtgtgtacgcgtat

SEQ ID NO: 2869424 - DNA, 25 bp, Homo sapien
aaaaccaagaattccagcccggatg

SEQ ID NO: 2869425 - DNA, 25 bp, Homo sapien
tggctcctctgggaacagaaatggc

SEQ ID NO: 2869426 - DNA, 25 bp, Homo sapien
gatttgagctggcacagacgcaaga

SEQ ID NO: 2869427 - DNA, 25 bp, Homo sapien
tcgcaaacaggagaggactcgaggc

SEQ ID NO: 2869428 - DNA, 25 bp, Homo sapien
gaagaacttggcggccttgcttggg

SEQ ID NO: 2869429 - DNA, 25 bp, Homo sapien
gaagcatccgcagaactgtagggga

SEQ ID NO: 2869430 - DNA, 25 bp, Homo sapien
ccgcagaactgtaggggaagaactt

SEQ ID NO: 2869431 - DNA, 25 bp, Homo sapien
ccgcttcttctggttcagatcctct

SEQ ID NO: 2869432 - DNA, 25 bp, Homo sapien
acttgggcgacggtgcgagactcca

SEQ ID NO: 2869433 - DNA, 25 bp, Homo sapien
tccaacttgggcgacggtgcgagac

SEQ ID NO: 2869434 - DNA, 25 bp, Homo sapien
caacttgggcgacggtgcgagactc

SEQ ID NO: 2869435 - DNA, 25 bp, Homo sapien
cactccaacttgggcgacggtgcga

SEQ ID NO: 2869436 - DNA, 25 bp, Homo sapien
tgggtttcgtgctctaccaggaggt

SEQ ID NO: 2869437 - DNA, 25 bp, Homo sapien
cttcaggttctggttatggctctca

SEQ ID NO: 2869438 - DNA, 25 bp, Homo sapien
cagtttctgggtttcgtgctctacc

SEQ ID NO: 2869439 - DNA, 25 bp, Homo sapien
tcttgcgcggccgaagcttgtcccg

SEQ ID NO: 2869440 - DNA, 25 bp, Homo sapien
acctcacgctgtggctacgagggca

SEQ ID NO: 2869441 - DNA, 25 bp, Homo sapien
gactgagacacacctcacgctgtgg

SEQ ID NO: 2869442 - DNA, 25 bp, Homo sapien
cgcaggccctgaagactgagacaca

SEQ ID NO: 2869443 - DNA, 25 bp, Homo sapien
gggcaccagcatcgttcatttatta

SEQ ID NO: 2869444 - DNA, 25 bp, Homo sapien
catgtcccgcatctggttctcgtgt

SEQ ID NO: 2869445 - DNA, 25 bp, Homo sapien
cagcatgtcccgcatctggttctcg

SEQ ID NO: 2869446 - DNA, 25 bp, Homo sapien
tgcgccagcatgtcccgcatctggt

SEQ ID NO: 2869447 - DNA, 25 bp, Homo sapien
ttgctctcacactgcgccagcatgt

SEQ ID NO: 2869448 - DNA, 25 bp, Homo sapien
catattctccaaaactgtataaggc

SEQ ID NO: 2869449 - DNA, 25 bp, Homo sapien
tattctccaaaactgtataaggccc

SEQ ID NO: 2869450 - DNA, 25 bp, Homo sapien
tccaaaactgtataaggcccaggtc

SEQ ID NO: 2869451 - DNA, 25 bp, Homo sapien
tgtataaggcccaggtcccgccaaa

SEQ ID NO: 2869452 - DNA, 25 bp, Homo sapien
ccccgccgttgatgtggaggctctt

SEQ ID NO: 2869453 - DNA, 25 bp, Homo sapien
gctgctctatcatgcgctggttgta

SEQ ID NO: 2869454 - DNA, 25 bp, Homo sapien
ctatcatgcgctggttgtagcgctg

SEQ ID NO: 2869455 - DNA, 25 bp, Homo sapien
gtacatggccatgcgcgtcttgccc

SEQ ID NO: 2869456 - DNA, 25 bp, Homo sapien
agtgagagagcgactccatctcgaa

SEQ ID NO: 2869457 - DNA, 25 bp, Homo sapien
gggtgaaagcccaactctgctaaaa

SEQ ID NO: 2869458 - DNA, 25 bp, Homo sapien
cctgagtgagagagcgactccatct

SEQ ID NO: 2869459 - DNA, 25 bp, Homo sapien
ccaacagggtgaaagcccaactctg

SEQ ID NO: 2869460 - DNA, 25 bp, Homo sapien
cttctcatgcttgcgcagcagctcg

SEQ ID NO: 2869461 - DNA, 25 bp, Homo sapien
tgccgctggaggaagtactggtctt

SEQ ID NO: 2869462 - DNA, 25 bp, Homo sapien
gctgctgcttcaccagctggtgcct

SEQ ID NO: 2869463 - DNA, 25 bp, Homo sapien
ttgcgcagcagctcgtgccgctgga

SEQ ID NO: 2869464 - DNA, 25 bp, Homo sapien
tgcagaggacatgccaccgagctgg

SEQ ID NO: 2869465 - DNA, 25 bp, Homo sapien
ctgcagaggacatgccaccgagctg

SEQ ID NO: 2869466 - DNA, 25 bp, Homo sapien
gcagaggacatgccaccgagctggt

SEQ ID NO: 2869467 - DNA, 25 bp, Homo sapien
cagaggacatgccaccgagctggtg

SEQ ID NO: 2869468 - DNA, 25 bp, Homo sapien
tcggtggtgagcctcttcatggcca

SEQ ID NO: 2869469 - DNA, 25 bp, Homo sapien
ttgtcacagatctcccgcctgttgt

SEQ ID NO: 2869470 - DNA, 25 bp, Homo sapien
ttcttcatgaggcactcgcgctcct

SEQ ID NO: 2869471 - DNA, 25 bp, Homo sapien
cgcctgttgtcggtggtgagcctct

SEQ ID NO: 2869472 - DNA, 25 bp, Homo sapien
gaataggcttaacgccactacactg

SEQ ID NO: 2869473 - DNA, 25 bp, Homo sapien
cacgtgtccgtcgatagataaatgg

SEQ ID NO: 2869474 - DNA, 25 bp, Homo sapien
gagatatgtgtgcacccaagttcac

SEQ ID NO: 2869475 - DNA, 25 bp, Homo sapien
gggatgaaaacagcccacgtgtccg

SEQ ID NO: 2869476 - DNA, 25 bp, Homo sapien
gccagatttaggtattcagaacggg

SEQ ID NO: 2869477 - DNA, 25 bp, Homo sapien
ccagagatggaagagcttacttcca

SEQ ID NO: 2869478 - DNA, 25 bp, Homo sapien
cagggcaatcgaggaaggctgcatg

SEQ ID NO: 2869479 - DNA, 25 bp, Homo sapien
gaatatactgggttggtcaaggaga

SEQ ID NO: 2869480 - DNA, 25 bp, Homo sapien
catgctttccttccgctgctgtcgg

SEQ ID NO: 2869481 - DNA, 25 bp, Homo sapien
ccatcttctgcttcatgctttcctt

SEQ ID NO: 2869482 - DNA, 25 bp, Homo sapien
gaagctgctttttctgcgtgtgctc

SEQ ID NO: 2869483 - DNA, 25 bp, Homo sapien
ctgctgtcgggggagcttctccacc

SEQ ID NO: 2869484 - DNA, 25 bp, Homo sapien
tgaggtccaggtgaactgacatccc

SEQ ID NO: 2869485 - DNA, 25 bp, Homo sapien
tgagctttgggacgtttgctggaac

SEQ ID NO: 2869486 - DNA, 25 bp, Homo sapien
gagataagcacgtgaccctcactgg

SEQ ID NO: 2869487 - DNA, 25 bp, Homo sapien
tactgaagaaaagctacctgctgtc

SEQ ID NO: 2869488 - DNA, 25 bp, Homo sapien
taacccaaaacctgcattgacagag

SEQ ID NO: 2869489 - DNA, 25 bp, Homo sapien
aaaggcccgcctgtgatcaaaaaga

SEQ ID NO: 2869490 - DNA, 25 bp, Homo sapien
aatatgaaagcagctacttgaggac

SEQ ID NO: 2869491 - DNA, 25 bp, Homo sapien
agttctggcatggtgaggtaagcca

SEQ ID NO: 2869492 - DNA, 25 bp, Homo sapien
tcagctccgggatgacacagatgtt

SEQ ID NO: 2869493 - DNA, 25 bp, Homo sapien
gaaaataatgactccagtgaccatg

SEQ ID NO: 2869494 - DNA, 25 bp, Homo sapien
taactgtactccatgaggtaaagcc

SEQ ID NO: 2869495 - DNA, 25 bp, Homo sapien
tggattccccaacagacactaggga

SEQ ID NO: 2869496 - DNA, 25 bp, Homo sapien
ggcgcacggcatggtcttgctccat

SEQ ID NO: 2869497 - DNA, 25 bp, Homo sapien
aggttctctaattccgtgtcaaaga

SEQ ID NO: 2869498 - DNA, 25 bp, Homo sapien
cttggaacctggtgtagtcccgatc

SEQ ID NO: 2869499 - DNA, 25 bp, Homo sapien
ttgctgcttttgctgacgctccagg

SEQ ID NO: 2869500 - DNA, 25 bp, Homo sapien
tcagctgggtctggttccgatgctc

SEQ ID NO: 2869501 - DNA, 25 bp, Homo sapien
caaaacgtttatgcatttgctccag

SEQ ID NO: 2869502 - DNA, 25 bp, Homo sapien
gctcatgcttgttactcagctgggt

SEQ ID NO: 2869503 - DNA, 25 bp, Homo sapien
tctggagcagccgaagctctcggag

SEQ ID NO: 2869504 - DNA, 25 bp, Homo sapien
aatctgaagtccgaaatgttccagt

SEQ ID NO: 2869505 - DNA, 25 bp, Homo sapien
aatgttccagtgagaatttgatgtc

SEQ ID NO: 2869506 - DNA, 25 bp, Homo sapien
aaaatttgacctaggccatgcgtgg

SEQ ID NO: 2869507 - DNA, 25 bp, Homo sapien
gaatattatacttactgaacgagca

SEQ ID NO: 2869508 - DNA, 25 bp, Homo sapien
tgttaccaccattggtggcccttcc

SEQ ID NO: 2869509 - DNA, 25 bp, Homo sapien
taccaccattggtggcccttcccag

SEQ ID NO: 2869510 - DNA, 25 bp, Homo sapien
cctgttaccaccattggtggccctt

SEQ ID NO: 2869511 - DNA, 25 bp, Homo sapien
ttaccaccattggtggcccttccca

SEQ ID NO: 2869512 - DNA, 25 bp, Homo sapien
ctcatcttcgctgatgatcttggag

SEQ ID NO: 2869513 - DNA, 25 bp, Homo sapien
tctcatcttcgctgatgatcttgga

SEQ ID NO: 2869514 - DNA, 25 bp, Homo sapien
ttctcatcttcgctgatgatcttgg

SEQ ID NO: 2869515 - DNA, 25 bp, Homo sapien
ctccacaccatccaccacaaatttg

SEQ ID NO: 2869516 - DNA, 25 bp, Homo sapien
acaccatccaccacaaatttgcgtg

SEQ ID NO: 2869517 - DNA, 25 bp, Homo sapien
aaatttgcgtgtccgcttgagggtt

SEQ ID NO: 2869518 - DNA, 25 bp, Homo sapien
acaaatttgcgtgtccgcttgaggg

SEQ ID NO: 2869519 - DNA, 25 bp, Homo sapien
ctctttttggtgtagcccagccctg

SEQ ID NO: 2869520 - DNA, 25 bp, Homo sapien
gcaggatgccggtcctaaggaagac

SEQ ID NO: 2869521 - DNA, 25 bp, Homo sapien
ggaagacgctgctcacaggtaacag

SEQ ID NO: 2869522 - DNA, 25 bp, Homo sapien
cctaaagctgattggccgttgcggc

SEQ ID NO: 2869523 - DNA, 25 bp, Homo sapien
gctgctgtgcatgcttgtcccggtg

SEQ ID NO: 2869524 - DNA, 25 bp, Homo sapien
ttgtacagggttcgcctcaagccca

SEQ ID NO: 2869525 - DNA, 25 bp, Homo sapien
aaatggagccacagaacatcctgca

SEQ ID NO: 2869526 - DNA, 25 bp, Homo sapien
cccaggcctctagtgcggtggctat

SEQ ID NO: 2869527 - DNA, 25 bp, Homo sapien
cagaacttcatttgtagctaaggcc

SEQ ID NO: 2869528 - DNA, 25 bp, Homo sapien
tctggcatccattgacacgggtcgg

SEQ ID NO: 2869529 - DNA, 25 bp, Homo sapien
tgccaggccgttctcatttccaggg

SEQ ID NO: 2869530 - DNA, 25 bp, Homo sapien
tcctgggctacctgaattctggcat

SEQ ID NO: 2869531 - DNA, 25 bp, Homo sapien
gtaccatagtccatgctctcagagg

SEQ ID NO: 2869532 - DNA, 25 bp, Homo sapien
gtagccactttccaggtcaggaggg

SEQ ID NO: 2869533 - DNA, 25 bp, Homo sapien
tagtcaacacccagagtgatggctc

SEQ ID NO: 2869534 - DNA, 25 bp, Homo sapien
gatggctcaaaaacgcagatctgat

SEQ ID NO: 2869535 - DNA, 25 bp, Homo sapien
gctgtgcctgcttataaacgtggta

SEQ ID NO: 2869536 - DNA, 25 bp, Homo sapien
caaaagagttccaaatgtgcccaga

SEQ ID NO: 2869537 - DNA, 25 bp, Homo sapien
gaaaactcacaggatcgggatctgg

SEQ ID NO: 2869538 - DNA, 25 bp, Homo sapien
taaggccagggattacggagcaaca

SEQ ID NO: 2869539 - DNA, 25 bp, Homo sapien
tcttacgttacctgcagcgtgggag

SEQ ID NO: 2869540 - DNA, 25 bp, Homo sapien
agccttgttactggtgatgctgctg

SEQ ID NO: 2869541 - DNA, 25 bp, Homo sapien
ctcatcccggccgtcttcgatctct

SEQ ID NO: 2869542 - DNA, 25 bp, Homo sapien
cccggccgtcttcgatctcttccat

SEQ ID NO: 2869543 - DNA, 25 bp, Homo sapien
gccttgttactggtgatgctgctga

SEQ ID NO: 2869544 - DNA, 25 bp, Homo sapien
aaaggtctcagcgatattaagtcag

SEQ ID NO: 2869545 - DNA, 25 bp, Homo sapien
tgcaaaacgccaaagcaaaaggtct

SEQ ID NO: 2869546 - DNA, 25 bp, Homo sapien
tgaggtatcctgagtgagggcaccc

SEQ ID NO: 2869547 - DNA, 25 bp, Homo sapien
gaatgttcttttacggaccttgcaa

SEQ ID NO: 2869548 - DNA, 25 bp, Homo sapien
tcacaagccaccaacaggctgcagt

SEQ ID NO: 2869549 - DNA, 25 bp, Homo sapien
gctgtagactctagaaccaaggcac

SEQ ID NO: 2869550 - DNA, 25 bp, Homo sapien
gagatgtcattctggctgctctgta

SEQ ID NO: 2869551 - DNA, 25 bp, Homo sapien
caaagtagcatgcagttaagagtgc

SEQ ID NO: 2869552 - DNA, 25 bp, Homo sapien
gagttcattaggctccacccttcag

SEQ ID NO: 2869553 - DNA, 25 bp, Homo sapien
tggtgagttcattaggctccaccct

SEQ ID NO: 2869554 - DNA, 25 bp, Homo sapien
tcactggtgagttcattaggctcca

SEQ ID NO: 2869555 - DNA, 25 bp, Homo sapien
cactggtgagttcattaggctccac

SEQ ID NO: 2869556 - DNA, 25 bp, Homo sapien
ttctgggttcttatccagggctatc

SEQ ID NO: 2869557 - DNA, 25 bp, Homo sapien
gcagctgcgcggcactgggtcgggt

SEQ ID NO: 2869558 - DNA, 25 bp, Homo sapien
tccagggctatcttcaggaagtcac

SEQ ID NO: 2869559 - DNA, 25 bp, Homo sapien
gcgcggcactgggtcgggtttctgg

SEQ ID NO: 2869560 - DNA, 25 bp, Homo sapien
ggcgtgtctttcatggtctcacaca

SEQ ID NO: 2869561 - DNA, 25 bp, Homo sapien
cagatgtcggctttgtagtcgtagg

SEQ ID NO: 2869562 - DNA, 25 bp, Homo sapien
gagggtccgacttggcgatctttag

SEQ ID NO: 2869563 - DNA, 25 bp, Homo sapien
tgggccatctcaatcagcgtgatgc

SEQ ID NO: 2869564 - DNA, 25 bp, Homo sapien
aatctcgtttctgtagagtcttcag

SEQ ID NO: 2869565 - DNA, 25 bp, Homo sapien
cgtgccgatgaaggaatctcgtttc

SEQ ID NO: 2869566 - DNA, 25 bp, Homo sapien
gagtcttcagattcttggcagacac

SEQ ID NO: 2869567 - DNA, 25 bp, Homo sapien
taaggcgtgccgatgaaggaatctc

SEQ ID NO: 2869568 - DNA, 25 bp, Homo sapien
tccaagtcgactaacagatgccatt

SEQ ID NO: 2869569 - DNA, 25 bp, Homo sapien
tgagaggaagtaccgagatgaacac

SEQ ID NO: 2869570 - DNA, 25 bp, Homo sapien
accataattgcttggctatcaggca

SEQ ID NO: 2869571 - DNA, 25 bp, Homo sapien
tctactaacgagagcctgcactggc

SEQ ID NO: 2869572 - DNA, 25 bp, Homo sapien
acacagttgaatatactgtctggtc

SEQ ID NO: 2869573 - DNA, 25 bp, Homo sapien
tataccacactacttaaatggctgt

SEQ ID NO: 2869574 - DNA, 25 bp, Homo sapien
ttgaatatactgtctggtcagaatc

SEQ ID NO: 2869575 - DNA, 25 bp, Homo sapien
cggccttactgattactatttatat

SEQ ID NO: 2869576 - DNA, 25 bp, Homo sapien
agacgggcagggcagttacaaagcc

SEQ ID NO: 2869577 - DNA, 25 bp, Homo sapien
cagggcagttacaaagcctctgagc

SEQ ID NO: 2869578 - DNA, 25 bp, Homo sapien
ccatctgtgacacgggggtgatagc

SEQ ID NO: 2869579 - DNA, 25 bp, Homo sapien
cacgggggtgatagcacagaaccat

SEQ ID NO: 2869580 - DNA, 25 bp, Homo sapien
caggtttatcgaatgagcatgctca

SEQ ID NO: 2869581 - DNA, 25 bp, Homo sapien
ggaaatctccctttctccgctgtaa

SEQ ID NO: 2869582 - DNA, 25 bp, Homo sapien
gagacagaatttgctaaaatgcctt

SEQ ID NO: 2869583 - DNA, 25 bp, Homo sapien
tatccctggcacgttatctggagca

SEQ ID NO: 2869584 - DNA, 25 bp, Homo sapien
tccgtgccagagactgaagacaagc

SEQ ID NO: 2869585 - DNA, 25 bp, Homo sapien
ccaatggtgagttcgggttcaggca

SEQ ID NO: 2869586 - DNA, 25 bp, Homo sapien
tacggtcctggcagcgttaagggcc

SEQ ID NO: 2869587 - DNA, 25 bp, Homo sapien
ggagccgaacctacatgcacagaaa

SEQ ID NO: 2869588 - DNA, 25 bp, Homo sapien
tgcctggccgaaaatcattacttta

SEQ ID NO: 2869589 - DNA, 25 bp, Homo sapien
atgcctggccgaaaatcattacttt

SEQ ID NO: 2869590 - DNA, 25 bp, Homo sapien
gtggtggtcatgctggaagtgactg

SEQ ID NO: 2869591 - DNA, 25 bp, Homo sapien
gcctggccgaaaatcattactttaa

SEQ ID NO: 2869592 - DNA, 25 bp, Homo sapien
gcgatgcagaagtacacatgagaag

SEQ ID NO: 2869593 - DNA, 25 bp, Homo sapien
gatgcagaagtacacatgagaagag

SEQ ID NO: 2869594 - DNA, 25 bp, Homo sapien
cgatgcagaagtacacatgagaaga

SEQ ID NO: 2869595 - DNA, 25 bp, Homo sapien
atgcagaagtacacatgagaagagc

SEQ ID NO: 2869596 - DNA, 25 bp, Homo sapien
ccagcctgatgtctccctcgagggt

SEQ ID NO: 2869597 - DNA, 25 bp, Homo sapien
ggtggatgatcctcttgctgtgcag

SEQ ID NO: 2869598 - DNA, 25 bp, Homo sapien
gggcttctagcatctggcggcaaac

SEQ ID NO: 2869599 - DNA, 25 bp, Homo sapien
catcagcacgttgccagctttcaga

SEQ ID NO: 2869600 - DNA, 25 bp, Homo sapien
tggctctgaacttgtcagctgtccc

SEQ ID NO: 2869601 - DNA, 25 bp, Homo sapien
ctctgaacttgtcagctgtccccat

SEQ ID NO: 2869602 - DNA, 25 bp, Homo sapien
gctctgaacttgtcagctgtcccca

SEQ ID NO: 2869603 - DNA, 25 bp, Homo sapien
gctggagcagtcaggaccacgagga

SEQ ID NO: 2869604 - DNA, 25 bp, Homo sapien
ttaggagcgggtcacccagacctgg

SEQ ID NO: 2869605 - DNA, 25 bp, Homo sapien
ctttcaagtgtcagcccaatcaaaa

SEQ ID NO: 2869606 - DNA, 25 bp, Homo sapien
caagtgtcagcccaatcaaaaataa

SEQ ID NO: 2869607 - DNA, 25 bp, Homo sapien
caggatgggccatggtccatggtta

SEQ ID NO: 2869608 - DNA, 25 bp, Homo sapien
atgatggcgtccacggctccccctg

SEQ ID NO: 2869609 - DNA, 25 bp, Homo sapien
cacggctccccctggacagaactca

SEQ ID NO: 2869610 - DNA, 25 bp, Homo sapien
acggctccccctggacagaactcaa

SEQ ID NO: 2869611 - DNA, 25 bp, Homo sapien
tgaaaccgccccagtgctaaaagga

SEQ ID NO: 2869612 - DNA, 25 bp, Homo sapien
tgatcaagtccaaagtgaaaccgcc

SEQ ID NO: 2869613 - DNA, 25 bp, Homo sapien
tatctgagctcctagtgcgtggcaa

SEQ ID NO: 2869614 - DNA, 25 bp, Homo sapien
ttcctggataaagggaggctcctca

SEQ ID NO: 2869615 - DNA, 25 bp, Homo sapien
tcctatctcatacaggaaggagcat

SEQ ID NO: 2869616 - DNA, 25 bp, Homo sapien
tctgctcctatctcatacaggaagg

SEQ ID NO: 2869617 - DNA, 25 bp, Homo sapien
tatctcatacaggaaggagcatgaa

SEQ ID NO: 2869618 - DNA, 25 bp, Homo sapien
atcatctgctcctatctcatacagg

SEQ ID NO: 2869619 - DNA, 25 bp, Homo sapien
gacaaaccagggagcatgtacctat

SEQ ID NO: 2869620 - DNA, 25 bp, Homo sapien
caggacaaaccagggagcatgtacc

SEQ ID NO: 2869621 - DNA, 25 bp, Homo sapien
ggcaggacaaaccagggagcatgta

SEQ ID NO: 2869622 - DNA, 25 bp, Homo sapien
aaccagggagcatgtacctatgtag

SEQ ID NO: 2869623 - DNA, 25 bp, Homo sapien
cctgtcctgctagttaagatgcctg

SEQ ID NO: 2869624 - DNA, 25 bp, Homo sapien
tgccatctgcgtagcctgtgggcgt

SEQ ID NO: 2869625 - DNA, 25 bp, Homo sapien
tgtggactatgagcaacacgcctgt

SEQ ID NO: 2869626 - DNA, 25 bp, Homo sapien
taccatgaaagccacgagcaggtct

SEQ ID NO: 2869627 - DNA, 25 bp, Homo sapien
tcccgtcgtgatagtaggctcccag

SEQ ID NO: 2869628 - DNA, 25 bp, Homo sapien
ggtttcaatgactttggccgcagcc

SEQ ID NO: 2869629 - DNA, 25 bp, Homo sapien
aaagcacccgtctccttattcttgg

SEQ ID NO: 2869630 - DNA, 25 bp, Homo sapien
ggatctcaatctccacgatgtagtc

SEQ ID NO: 2869631 - DNA, 25 bp, Homo sapien
cgcagtcctgcatgagtgtgaaaac

SEQ ID NO: 2869632 - DNA, 25 bp, Homo sapien
tccagatgctgaaccggaacgtaca

SEQ ID NO: 2869633 - DNA, 25 bp, Homo sapien
cccgcagtcctgcatgagtgtgaaa

SEQ ID NO: 2869634 - DNA, 25 bp, Homo sapien
acagaggccggatgtccagatgctg

SEQ ID NO: 2869635 - DNA, 25 bp, Homo sapien
caaagagctgactgataatctagga

SEQ ID NO: 2869636 - DNA, 25 bp, Homo sapien
aaagagctgactgataatctaggat

SEQ ID NO: 2869637 - DNA, 25 bp, Homo sapien
aagagctgactgataatctaggatt

SEQ ID NO: 2869638 - DNA, 25 bp, Homo sapien
tcttaaatgactaaggaatgaatga

SEQ ID NO: 2869639 - DNA, 25 bp, Homo sapien
gagagaaatgaggtcctccacataa

SEQ ID NO: 2869640 - DNA, 25 bp, Homo sapien
aagtgataagaagtcgactttctcc

SEQ ID NO: 2869641 - DNA, 25 bp, Homo sapien
ggtcctccacataagagaggaaagg

SEQ ID NO: 2869642 - DNA, 25 bp, Homo sapien
gggccaggatgtacacagctgagtc

SEQ ID NO: 2869643 - DNA, 25 bp, Homo sapien
gcagaatgacgtggctttcaaagac

SEQ ID NO: 2869644 - DNA, 25 bp, Homo sapien
tcagggaaatgttgagccgcaaaag

SEQ ID NO: 2869645 - DNA, 25 bp, Homo sapien
tgccaagtttcagctcaacgacaag

SEQ ID NO: 2869646 - DNA, 25 bp, Homo sapien
ccttggctgaaaacgggagcaacct

SEQ ID NO: 2869647 - DNA, 25 bp, Homo sapien
caacagtccttgtggtgctgaagta

SEQ ID NO: 2869648 - DNA, 25 bp, Homo sapien
caagggactcgcctttggtattctg

SEQ ID NO: 2869649 - DNA, 25 bp, Homo sapien
caaagcttttcataatccaagggac

SEQ ID NO: 2869650 - DNA, 25 bp, Homo sapien
tggtattctgcggtgggacgttctt

SEQ ID NO: 2869651 - DNA, 25 bp, Homo sapien
tagcatacgctaaaaacaccaactg

SEQ ID NO: 2869652 - DNA, 25 bp, Homo sapien
ttagcatacgctaaaaacaccaact

SEQ ID NO: 2869653 - DNA, 25 bp, Homo sapien
gagaaagtgggtcctgtggtgagct

SEQ ID NO: 2869654 - DNA, 25 bp, Homo sapien
ggagaaagtgggtcctgtggtgagc

SEQ ID NO: 2869655 - DNA, 25 bp, Homo sapien
ggctctgtctaaggcagtcaaggac

SEQ ID NO: 2869656 - DNA, 25 bp, Homo sapien
gagcaggctctgtctaaggcagtca

SEQ ID NO: 2869657 - DNA, 25 bp, Homo sapien
tgccctcacagtagtcagagcacag

SEQ ID NO: 2869658 - DNA, 25 bp, Homo sapien
gaggatcgttctctggtgccaccag

SEQ ID NO: 2869659 - DNA, 25 bp, Homo sapien
tctcagtccatgggccacccctcgc

SEQ ID NO: 2869660 - DNA, 25 bp, Homo sapien
ctctcagtccatgggccacccctcg

SEQ ID NO: 2869661 - DNA, 25 bp, Homo sapien
tcagtccatgggccacccctcgccc

SEQ ID NO: 2869662 - DNA, 25 bp, Homo sapien
agtccatgggccacccctcgcccac

SEQ ID NO: 2869663 - DNA, 25 bp, Homo sapien
aacccgtccaagcgcagccgagttt

SEQ ID NO: 2869664 - DNA, 25 bp, Homo sapien
cagccgagtttctcggtccacatcg

SEQ ID NO: 2869665 - DNA, 25 bp, Homo sapien
ggtccacatcgcctcgatattccca

SEQ ID NO: 2869666 - DNA, 25 bp, Homo sapien
gatgtgtccctagctcccaacccgt

SEQ ID NO: 2869667 - DNA, 25 bp, Homo sapien
gccgagcgcagtgcaggacacacag

SEQ ID NO: 2869668 - DNA, 25 bp, Homo sapien
ctttgtctccccgtgcggcgccgag

SEQ ID NO: 2869669 - DNA, 25 bp, Homo sapien
tgaggtcctgtcaacgcccctttgt

SEQ ID NO: 2869670 - DNA, 25 bp, Homo sapien
aggtccctcgagtggccctctcgga

SEQ ID NO: 2869671 - DNA, 25 bp, Homo sapien
tattcgcgggactttctcttctcga

SEQ ID NO: 2869672 - DNA, 25 bp, Homo sapien
tcttctcgaaggtagacaggcgcag

SEQ ID NO: 2869673 - DNA, 25 bp, Homo sapien
cttgtaaaccttgccgaaggcgccg

SEQ ID NO: 2869674 - DNA, 25 bp, Homo sapien
aggtcgcggcggacgtgctcatatt

SEQ ID NO: 2869675 - DNA, 25 bp, Homo sapien
acctcggtcaagtgtgccctgggca

SEQ ID NO: 2869676 - DNA, 25 bp, Homo sapien
ggaggagttggaggacgccgcgtct

SEQ ID NO: 2869677 - DNA, 25 bp, Homo sapien
aggacgccgcgtctctcggggttct

SEQ ID NO: 2869678 - DNA, 25 bp, Homo sapien
ggagcacccggaaccgcgcaggcgg

SEQ ID NO: 2869679 - DNA, 25 bp, Homo sapien
gtcccagctatgaggaggtggaggt

SEQ ID NO: 2869680 - DNA, 25 bp, Homo sapien
gatagcttgagcctgggattcaagg

SEQ ID NO: 2869681 - DNA, 25 bp, Homo sapien
aaaaattaatgtcagggcacagtgg

SEQ ID NO: 2869682 - DNA, 25 bp, Homo sapien
aaaaaaaattaatgtcagggcacag

SEQ ID NO: 2869683 - DNA, 25 bp, Homo sapien
gattagccatagttccaaagtgccc

SEQ ID NO: 2869684 - DNA, 25 bp, Homo sapien
tctggcaagcaagtatggacactac

SEQ ID NO: 2869685 - DNA, 25 bp, Homo sapien
gatgcaacgcatctcacaacagtgc

SEQ ID NO: 2869686 - DNA, 25 bp, Homo sapien
ctacctcgtggaactgtgaaaaaca

SEQ ID NO: 2869687 - DNA, 25 bp, Homo sapien
tctatatccgctacaaagagggaag

SEQ ID NO: 2869688 - DNA, 25 bp, Homo sapien
tggtcaaccaagtgtgttcaggtgg

SEQ ID NO: 2869689 - DNA, 25 bp, Homo sapien
ttttggatggtaccaaccctctgta

SEQ ID NO: 2869690 - DNA, 25 bp, Homo sapien
ggagggctgacccagctacagtttc

SEQ ID NO: 2869691 - DNA, 25 bp, Homo sapien
cccgggaccttttaagcatgcaagt

SEQ ID NO: 2869692 - DNA, 25 bp, Homo sapien
cagcaaagccgaccagaatagagac

SEQ ID NO: 2869693 - DNA, 25 bp, Homo sapien
gagtaccactgcacctatgaagagg

SEQ ID NO: 2869694 - DNA, 25 bp, Homo sapien
ttgagtgtgtctcccagatcagcag

SEQ ID NO: 2869695 - DNA, 25 bp, Homo sapien
tcctttgggattaatgctgtggtct

SEQ ID NO: 2869696 - DNA, 25 bp, Homo sapien
gagagctcaaatcctcaacaaagaa

SEQ ID NO: 2869697 - DNA, 25 bp, Homo sapien
taggttagttaaacatgcccagaga

SEQ ID NO: 2869698 - DNA, 25 bp, Homo sapien
gctgctattcgatgtggcacacaaa

SEQ ID NO: 2869699 - DNA, 25 bp, Homo sapien
aagggtgcctgccactaatgtgctg

SEQ ID NO: 2869700 - DNA, 25 bp, Homo sapien
tgcctagtgttccagaagggtgcct

SEQ ID NO: 2869701 - DNA, 25 bp, Homo sapien
caactgagaacagcgttaagtgcct

SEQ ID NO: 2869702 - DNA, 25 bp, Homo sapien
acttatgcagcaagatgacagcgac

SEQ ID NO: 2869703 - DNA, 25 bp, Homo sapien
tttagagcagtgaaatagatttcac

SEQ ID NO: 2869704 - DNA, 25 bp, Homo sapien
tgttggtctccatcacagatggaat

SEQ ID NO: 2869705 - DNA, 25 bp, Homo sapien
tttcacgccgcagagtaggaaatga

SEQ ID NO: 2869706 - DNA, 25 bp, Homo sapien
tcagaactaaatccattcataggga

SEQ ID NO: 2869707 - DNA, 25 bp, Homo sapien
ggcgcaaacgaagctgacattcata

SEQ ID NO: 2869708 - DNA, 25 bp, Homo sapien
catgcaaccgtctcttcatgtggaa

SEQ ID NO: 2869709 - DNA, 25 bp, Homo sapien
gggatcttcagctcttcgaacttca

SEQ ID NO: 2869710 - DNA, 25 bp, Homo sapien
tgtgctgcgaaccacaagcttgagg

SEQ ID NO: 2869711 - DNA, 25 bp, Homo sapien
cggtgccaagcaatacactggaagc

SEQ ID NO: 2869712 - DNA, 25 bp, Homo sapien
gttgattggcggtgccaagcaatac

SEQ ID NO: 2869713 - DNA, 25 bp, Homo sapien
ttggcggtgccaagcaatacactgg

SEQ ID NO: 2869714 - DNA, 25 bp, Homo sapien
gattggcggtgccaagcaatacact

SEQ ID NO: 2869715 - DNA, 25 bp, Homo sapien
gaataagaacttaatccttaatgaa

SEQ ID NO: 2869716 - DNA, 25 bp, Homo sapien
agatatgaataagaacttaatcctt

SEQ ID NO: 2869717 - DNA, 25 bp, Homo sapien
tatgaataagaacttaatccttaat

SEQ ID NO: 2869718 - DNA, 25 bp, Homo sapien
ataagaacttaatccttaatgaatg

SEQ ID NO: 2869719 - DNA, 25 bp, Homo sapien
agaagtccttagtccagagatcaca

SEQ ID NO: 2869720 - DNA, 25 bp, Homo sapien
gatcacaaattagagatgacagcct

SEQ ID NO: 2869721 - DNA, 25 bp, Homo sapien
agagatgacagccttagcagctgcc

SEQ ID NO: 2869722 - DNA, 25 bp, Homo sapien
ctaaattgaagcacttggcaagaag

SEQ ID NO: 2869723 - DNA, 25 bp, Homo sapien
cattggcaatctggtacagaaaacc

SEQ ID NO: 2869724 - DNA, 25 bp, Homo sapien
gagacttgcatcactacatgaacag

SEQ ID NO: 2869725 - DNA, 25 bp, Homo sapien
caaggtttttgtagcactatgagcc

SEQ ID NO: 2869726 - DNA, 25 bp, Homo sapien
cctgctatggcaaaggaaagcctta

SEQ ID NO: 2869727 - DNA, 25 bp, Homo sapien
tgattatgtttcctctgtccttgag

SEQ ID NO: 2869728 - DNA, 25 bp, Homo sapien
tgtccttgaggaacaccaaacctac

SEQ ID NO: 2869729 - DNA, 25 bp, Homo sapien
cagaaacaaagttgattatgtttcc

SEQ ID NO: 2869730 - DNA, 25 bp, Homo sapien
aaagttgattatgtttcctctgtcc

SEQ ID NO: 2869731 - DNA, 25 bp, Homo sapien
aaaagcatgtgcagcagccttcaag

SEQ ID NO: 2869732 - DNA, 25 bp, Homo sapien
tatgtttgcaccatcaatgattgct

SEQ ID NO: 2869733 - DNA, 25 bp, Homo sapien
agctggtgctgtatcccaaaattca

SEQ ID NO: 2869734 - DNA, 25 bp, Homo sapien
agccttcaaggcatcccaaatctct

SEQ ID NO: 2869735 - DNA, 25 bp, Homo sapien
tttcaaaggctggttacgacctaga

SEQ ID NO: 2869736 - DNA, 25 bp, Homo sapien
aaaggctggttacgacctagagcaa

SEQ ID NO: 2869737 - DNA, 25 bp, Homo sapien
caaaggctggttacgacctagagca

SEQ ID NO: 2869738 - DNA, 25 bp, Homo sapien
tcaaaggctggttacgacctagagc

SEQ ID NO: 2869739 - DNA, 25 bp, Homo sapien
tagcgctggaataagcctgatgcag

SEQ ID NO: 2869740 - DNA, 25 bp, Homo sapien
taggccaagggattagctccgaacc

SEQ ID NO: 2869741 - DNA, 25 bp, Homo sapien
gaaaacagagggcaagtggcagcat

SEQ ID NO: 2869742 - DNA, 25 bp, Homo sapien
gataatctttgatgctaggccaagg

SEQ ID NO: 2869743 - DNA, 25 bp, Homo sapien
ctgcctccagacataatagggaaca

SEQ ID NO: 2869744 - DNA, 25 bp, Homo sapien
tgcctccagacataatagggaacat

SEQ ID NO: 2869745 - DNA, 25 bp, Homo sapien
cctccagacataatagggaacatac

SEQ ID NO: 2869746 - DNA, 25 bp, Homo sapien
ccagacataatagggaacatacata

SEQ ID NO: 2869747 - DNA, 25 bp, Homo sapien
cttctcctttaatgggtttttgcag

SEQ ID NO: 2869748 - DNA, 25 bp, Homo sapien
acttgaagttgtactcatttgtcaa

SEQ ID NO: 2869749 - DNA, 25 bp, Homo sapien
gtactcatttgtcaagtccttctcc

SEQ ID NO: 2869750 - DNA, 25 bp, Homo sapien
ggtttttgcagtcaaagccctcttg

SEQ ID NO: 2869751 - DNA, 25 bp, Homo sapien
gtctttttagttcatcagaccgagc

SEQ ID NO: 2869752 - DNA, 25 bp, Homo sapien
tccggacactgtaaaggtttgattc

SEQ ID NO: 2869753 - DNA, 25 bp, Homo sapien
cagaccgagcaaacgtccatgtgca

SEQ ID NO: 2869754 - DNA, 25 bp, Homo sapien
tgtgtcgtcttctgtgtgctttcaa

SEQ ID NO: 2869755 - DNA, 25 bp, Homo sapien
actttgttgcatccatcgtaatcac

SEQ ID NO: 2869756 - DNA, 25 bp, Homo sapien
tttgttgcatccatcgtaatcacat

SEQ ID NO: 2869757 - DNA, 25 bp, Homo sapien
ctttgttgcatccatcgtaatcaca

SEQ ID NO: 2869758 - DNA, 25 bp, Homo sapien
gtgtatcctccacttcgagtatccg

SEQ ID NO: 2869759 - DNA, 25 bp, Homo sapien
ctgtgtatcctccacttcgagtatc

SEQ ID NO: 2869760 - DNA, 25 bp, Homo sapien
gtatcctccacttcgagtatccggg

SEQ ID NO: 2869761 - DNA, 25 bp, Homo sapien
cctccacttcgagtatccggggatt

SEQ ID NO: 2869762 - DNA, 25 bp, Homo sapien
ggctggatgaccagcaagatcccca

SEQ ID NO: 2869763 - DNA, 25 bp, Homo sapien
caccggctggatgaccagcaagatc

SEQ ID NO: 2869764 - DNA, 25 bp, Homo sapien
catgtacataaaggggatgggctgc

SEQ ID NO: 2869765 - DNA, 25 bp, Homo sapien
gatccccaggctccatattctgtgc

SEQ ID NO: 2869766 - DNA, 25 bp, Homo sapien
gacaagtggcacgtcaaaaggctgc

SEQ ID NO: 2869767 - DNA, 25 bp, Homo sapien
ggacaagtggcacgtcaaaaggctg

SEQ ID NO: 2869768 - DNA, 25 bp, Homo sapien
caagtggcacgtcaaaaggctgcca

SEQ ID NO: 2869769 - DNA, 25 bp, Homo sapien
agtggcacgtcaaaaggctgccagc

SEQ ID NO: 2869770 - DNA, 25 bp, Homo sapien
gaactcatcaggcaattgtgtggag

SEQ ID NO: 2869771 - DNA, 25 bp, Homo sapien
ctcatcaggcaattgtgtggagtag

SEQ ID NO: 2869772 - DNA, 25 bp, Homo sapien
cacaggccttctagggtctgaaaga

SEQ ID NO: 2869773 - DNA, 25 bp, Homo sapien
ggccttctagggtctgaaagaactc

SEQ ID NO: 2869774 - DNA, 25 bp, Homo sapien
tttgagaggtgtggttagggacgcc

SEQ ID NO: 2869775 - DNA, 25 bp, Homo sapien
gtatgacaccgagacagggtccacg

SEQ ID NO: 2869776 - DNA, 25 bp, Homo sapien
tagggacgccgcccacgagaaataa

SEQ ID NO: 2869777 - DNA, 25 bp, Homo sapien
ccacgggcctcttgcttaacaggaa

SEQ ID NO: 2869778 - DNA, 25 bp, Homo sapien
ctaaataggagtgctaagagtgggc

SEQ ID NO: 2869779 - DNA, 25 bp, Homo sapien
tgtaaattgccttgggctgtatgcc

SEQ ID NO: 2869780 - DNA, 25 bp, Homo sapien
ttatagtttgacaggagtgcatcca

SEQ ID NO: 2869781 - DNA, 25 bp, Homo sapien
gctaaagtttccgatctaggagctt

SEQ ID NO: 2869782 - DNA, 25 bp, Homo sapien
cggtatcccactggtttcatctgaa

SEQ ID NO: 2869783 - DNA, 25 bp, Homo sapien
aacagcacgaaagccctaagatggg

SEQ ID NO: 2869784 - DNA, 25 bp, Homo sapien
aggaaacagcacgaaagccctaaga

SEQ ID NO: 2869785 - DNA, 25 bp, Homo sapien
gagtcactggatgtaaagactgcat

SEQ ID NO: 2869786 - DNA, 25 bp, Homo sapien
tggaaaatagttcaaccgtcctctg

SEQ ID NO: 2869787 - DNA, 25 bp, Homo sapien
tggttacgtaggagaacagctttac

SEQ ID NO: 2869788 - DNA, 25 bp, Homo sapien
cttcaaaaagtcaatgtcggccggg

SEQ ID NO: 2869789 - DNA, 25 bp, Homo sapien
taggtgacaggcgttcaagggtttc

SEQ ID NO: 2869790 - DNA, 25 bp, Homo sapien
gccggtgtggaggtgcacacgtgta

SEQ ID NO: 2869791 - DNA, 25 bp, Homo sapien
tagccggtgtggaggtgcacacgtg

SEQ ID NO: 2869792 - DNA, 25 bp, Homo sapien
cggtgtggaggtgcacacgtgtaat

SEQ ID NO: 2869793 - DNA, 25 bp, Homo sapien
aattagccggtgtggaggtgcacac

SEQ ID NO: 2869794 - DNA, 25 bp, Homo sapien
tgagtaggtgtctgtaaggctgcta

SEQ ID NO: 2869795 - DNA, 25 bp, Homo sapien
tgtctgtaaggctgctataaatggg

SEQ ID NO: 2869796 - DNA, 25 bp, Homo sapien
ctataaatgggtatctgaaagaact

SEQ ID NO: 2869797 - DNA, 25 bp, Homo sapien
taaggctgctataaatgggtatctg

SEQ ID NO: 2869798 - DNA, 25 bp, Homo sapien
cccgcctggttggtgaatgtaatta

SEQ ID NO: 2869799 - DNA, 25 bp, Homo sapien
cgcctggttggtgaatgtaattaaa

SEQ ID NO: 2869800 - DNA, 25 bp, Homo sapien
accccgcctggttggtgaatgtaat

SEQ ID NO: 2869801 - DNA, 25 bp, Homo sapien
ccaccccgcctggttggtgaatgta

SEQ ID NO: 2869802 - DNA, 25 bp, Homo sapien
agcttgggcgataaagcaagaacct

SEQ ID NO: 2869803 - DNA, 25 bp, Homo sapien
gaacctgtctcgagaaaccaaacca

SEQ ID NO: 2869804 - DNA, 25 bp, Homo sapien
agccctccacacatcccccaaacct

SEQ ID NO: 2869805 - DNA, 25 bp, Homo sapien
gcaagaacctgtctcgagaaaccaa

SEQ ID NO: 2869806 - DNA, 25 bp, Homo sapien
agactcctccagccgagctccagaa

SEQ ID NO: 2869807 - DNA, 25 bp, Homo sapien
ctccagccgagctccagaaactcgc

SEQ ID NO: 2869808 - DNA, 25 bp, Homo sapien
tccccacccctccttaatacaatgc

SEQ ID NO: 2869809 - DNA, 25 bp, Homo sapien
aatacaatgcctgcggccactggag

SEQ ID NO: 2869810 - DNA, 25 bp, Homo sapien
cacagaacaaggaagggtgcggaaa

SEQ ID NO: 2869811 - DNA, 25 bp, Homo sapien
ctcaggaaagctgagaccagccaac

SEQ ID NO: 2869812 - DNA, 25 bp, Homo sapien
gtcggagggaacgcatcaagctccc

SEQ ID NO: 2869813 - DNA, 25 bp, Homo sapien
tcaattcgcttttctgcaaccccgg

SEQ ID NO: 2869814 - DNA, 25 bp, Homo sapien
gcagcttcgggtccgacttccccga

SEQ ID NO: 2869815 - DNA, 25 bp, Homo sapien
tccccggcgctcagaggacttttct

SEQ ID NO: 2869816 - DNA, 25 bp, Homo sapien
tcggcgaggccaagggctacgtccc

SEQ ID NO: 2869817 - DNA, 25 bp, Homo sapien
gggcggtcggcgaggccaagggcta

SEQ ID NO: 2869818 - DNA, 25 bp, Homo sapien
gccacctccggacgctcgtccgggc

SEQ ID NO: 2869819 - DNA, 25 bp, Homo sapien
ccggtgccctccgagttctcgttga

SEQ ID NO: 2869820 - DNA, 25 bp, Homo sapien
tctcgttgaggctgcccgaggagtc

SEQ ID NO: 2869821 - DNA, 25 bp, Homo sapien
tgcccgaggagtcgtgctgggcgcc

SEQ ID NO: 2869822 - DNA, 25 bp, Homo sapien
aactaactatacacgttggcagaca

SEQ ID NO: 2869823 - DNA, 25 bp, Homo sapien
taaacagatggtaggcacccaaatg

SEQ ID NO: 2869824 - DNA, 25 bp, Homo sapien
caaaaagagcttatgccatcgatgt

SEQ ID NO: 2869825 - DNA, 25 bp, Homo sapien
gaagagaagctgcatgccgaatatt

SEQ ID NO: 2869826 - DNA, 25 bp, Homo sapien
cagcagcaaggacatgacgtggttc

SEQ ID NO: 2869827 - DNA, 25 bp, Homo sapien
acagcagcaaggacatgacgtggtt

SEQ ID NO: 2869828 - DNA, 25 bp, Homo sapien
ttcccaagtgctgtccgcatcttga

SEQ ID NO: 2869829 - DNA, 25 bp, Homo sapien
tctaagagggacttccacagggctc

SEQ ID NO: 2869830 - DNA, 25 bp, Homo sapien
gtgctgtccgcatcttgattcttct

SEQ ID NO: 2869831 - DNA, 25 bp, Homo sapien
tgattcttctaagagggacttccac

SEQ ID NO: 2869832 - DNA, 25 bp, Homo sapien
gttgcccctgatagatgctctgtga

SEQ ID NO: 2869833 - DNA, 25 bp, Homo sapien
tttattacatgaaacgttgcccctg

SEQ ID NO: 2869834 - DNA, 25 bp, Homo sapien
tacttgcagaatacacaccggttga

SEQ ID NO: 2869835 - DNA, 25 bp, Homo sapien
gcttgaagtcagtgagcagctctct

SEQ ID NO: 2869836 - DNA, 25 bp, Homo sapien
cttagatgagggagtgtttgcaggt

SEQ ID NO: 2869837 - DNA, 25 bp, Homo sapien
ggagtgtttgcaggtatgagagggt

SEQ ID NO: 2869838 - DNA, 25 bp, Homo sapien
gagggagtgtttgcaggtatgagag

SEQ ID NO: 2869839 - DNA, 25 bp, Homo sapien
gatgagggagtgtttgcaggtatga

SEQ ID NO: 2869840 - DNA, 25 bp, Homo sapien
tttgatcccgaagatcccaggccac

SEQ ID NO: 2869841 - DNA, 25 bp, Homo sapien
ttctgttctttgatcccgaagatcc

SEQ ID NO: 2869842 - DNA, 25 bp, Homo sapien
actgcatcttcatgatgaagcttga

SEQ ID NO: 2869843 - DNA, 25 bp, Homo sapien
ttctttgatcccgaagatcccaggc

SEQ ID NO: 2869844 - DNA, 25 bp, Homo sapien
catgctacagctagttgttctcacc

SEQ ID NO: 2869845 - DNA, 25 bp, Homo sapien
gaatgccaatttgccaagagggtag

SEQ ID NO: 2869846 - DNA, 25 bp, Homo sapien
tcctatgagcagacacgaggtggtg

SEQ ID NO: 2869847 - DNA, 25 bp, Homo sapien
gggatctccagcgtcatcctatgag

SEQ ID NO: 2869848 - DNA, 25 bp, Homo sapien
aaatggcctgttacttggaagctcc

SEQ ID NO: 2869849 - DNA, 25 bp, Homo sapien
catccctgattggagctaagaaggc

SEQ ID NO: 2869850 - DNA, 25 bp, Homo sapien
gacatctaaaagtgaaggctaccga

SEQ ID NO: 2869851 - DNA, 25 bp, Homo sapien
taccgactgtggcactgcgtttggc

SEQ ID NO: 2869852 - DNA, 25 bp, Homo sapien
tagttaggagcaattcctccaggcc

SEQ ID NO: 2869853 - DNA, 25 bp, Homo sapien
ccagtctgtagaaaggtgctctgaa

SEQ ID NO: 2869854 - DNA, 25 bp, Homo sapien
ggaggagctcgataacttggcagaa

SEQ ID NO: 2869855 - DNA, 25 bp, Homo sapien
tcaggcctcgatgcatgctgctcta

SEQ ID NO: 2869856 - DNA, 25 bp, Homo sapien
tcagtgggcgcaaacattttagggc

SEQ ID NO: 2869857 - DNA, 25 bp, Homo sapien
taagacttgggcacgatgaaaggac

SEQ ID NO: 2869858 - DNA, 25 bp, Homo sapien
caaagagaaaggtacggcctccaag

SEQ ID NO: 2869859 - DNA, 25 bp, Homo sapien
ttaaaatgactaccgtaacctggca

SEQ ID NO: 2869860 - DNA, 25 bp, Homo sapien
tacccgcgggtcatgtcagaataat

SEQ ID NO: 2869861 - DNA, 25 bp, Homo sapien
tggatacagacgtcctcaggccata

SEQ ID NO: 2869862 - DNA, 25 bp, Homo sapien
gtaaatctaagtccccaggcaagga

SEQ ID NO: 2869863 - DNA, 25 bp, Homo sapien
cacgatgggcctggacactttctag

SEQ ID NO: 2869864 - DNA, 25 bp, Homo sapien
tgtgggtccaaaagtatctcgcctg

SEQ ID NO: 2869865 - DNA, 25 bp, Homo sapien
caaagtatctgaaagcgtcgctgaa

SEQ ID NO: 2869866 - DNA, 25 bp, Homo sapien
tatgggaccgctgcatgctatgctc

SEQ ID NO: 2869867 - DNA, 25 bp, Homo sapien
aatgggatttgcaggccgactggac

SEQ ID NO: 2869868 - DNA, 25 bp, Homo sapien
ggaccctggcattctcctgtcatgg

SEQ ID NO: 2869869 - DNA, 25 bp, Homo sapien
cattctcctgtcatggagatgcagc

SEQ ID NO: 2869870 - DNA, 25 bp, Homo sapien
ccagggcagcctttggtataggctg

SEQ ID NO: 2869871 - DNA, 25 bp, Homo sapien
catggagatgcagctgttgagtcca

SEQ ID NO: 2869872 - DNA, 25 bp, Homo sapien
ggcacatggagcgtgaatttcctca

SEQ ID NO: 2869873 - DNA, 25 bp, Homo sapien
gcaagaagtcacagtaccccagagt

SEQ ID NO: 2869874 - DNA, 25 bp, Homo sapien
gcatgaatgcaaagcgccaagtaca

SEQ ID NO: 2869875 - DNA, 25 bp, Homo sapien
ccctggaactggtaatggaatgcat

SEQ ID NO: 2869876 - DNA, 25 bp, Homo sapien
tctgagatagttggaaggaatccac

SEQ ID NO: 2869877 - DNA, 25 bp, Homo sapien
tttctgagatagttggaaggaatcc

SEQ ID NO: 2869878 - DNA, 25 bp, Homo sapien
ttctgagatagttggaaggaatcca

SEQ ID NO: 2869879 - DNA, 25 bp, Homo sapien
tgttttctccaatcttgccggtccc

SEQ ID NO: 2869880 - DNA, 25 bp, Homo sapien
gccacggccacatacaaagagtcct

SEQ ID NO: 2869881 - DNA, 25 bp, Homo sapien
tgctgttcttctcccggacttcaaa

SEQ ID NO: 2869882 - DNA, 25 bp, Homo sapien
aaagagtccttcaggccgtcggcat

SEQ ID NO: 2869883 - DNA, 25 bp, Homo sapien
gatgtcgacttggtcttcgccctga

SEQ ID NO: 2869884 - DNA, 25 bp, Homo sapien
gctttcgtggccttcacactgtgga

SEQ ID NO: 2869885 - DNA, 25 bp, Homo sapien
tcttggagaggaacaggcacgctct

SEQ ID NO: 2869886 - DNA, 25 bp, Homo sapien
tctcctgggaggaagcttcggctga

SEQ ID NO: 2869887 - DNA, 25 bp, Homo sapien
ccagaaagttgggtctcgacgcgtt

SEQ ID NO: 2869888 - DNA, 25 bp, Homo sapien
gagatctcctcgtagcctgctgacg

SEQ ID NO: 2869889 - DNA, 25 bp, Homo sapien
ggctggcatcatcggcaaaatcacg

SEQ ID NO: 2869890 - DNA, 25 bp, Homo sapien
gagtccatgacaccatgcggtgcgt

SEQ ID NO: 2869891 - DNA, 25 bp, Homo sapien
gggatgggcggcttcggcaggttga

SEQ ID NO: 2869892 - DNA, 25 bp, Homo sapien
cgtctgggatggttgtctggaattc

SEQ ID NO: 2869893 - DNA, 25 bp, Homo sapien
cggcttcggcaggttgaggcctcga

SEQ ID NO: 2869894 - DNA, 25 bp, Homo sapien
gaattcggcgatggtgtaatactct

SEQ ID NO: 2869895 - DNA, 25 bp, Homo sapien
tgcgagtgggactagcatttctaca

SEQ ID NO: 2869896 - DNA, 25 bp, Homo sapien
gtgggactagcatttctacagcctg

SEQ ID NO: 2869897 - DNA, 25 bp, Homo sapien
gttgtgtggacaggaaagagagcat

SEQ ID NO: 2869898 - DNA, 25 bp, Homo sapien
tctacagcctgcttcacaaggctgt

SEQ ID NO: 2869899 - DNA, 25 bp, Homo sapien
aatggtcatgtcccggcgaggaggg

SEQ ID NO: 2869900 - DNA, 25 bp, Homo sapien
atggtcatgtcccggcgaggagggg

SEQ ID NO: 2869901 - DNA, 25 bp, Homo sapien
ctgggtgccaggtcgggtctatttt

SEQ ID NO: 2869902 - DNA, 25 bp, Homo sapien
gagaaatgagagcttattacatctt

SEQ ID NO: 2869903 - DNA, 25 bp, Homo sapien
agagcttattacatcttgtgctaca

SEQ ID NO: 2869904 - DNA, 25 bp, Homo sapien
tgggtgccaggtcgggtctattttc

SEQ ID NO: 2869905 - DNA, 25 bp, Homo sapien
cttcaaaccgcccgtccctctggct

SEQ ID NO: 2869906 - DNA, 25 bp, Homo sapien
tgctgccgggaaacaccatccaagt

SEQ ID NO: 2869907 - DNA, 25 bp, Homo sapien
gctccccactgttcttctttaggta

SEQ ID NO: 2869908 - DNA, 25 bp, Homo sapien
catccaagtcaagggcacccgggtg

SEQ ID NO: 2869909 - DNA, 25 bp, Homo sapien
gcaagggctccccactgttcttctt

SEQ ID NO: 2869910 - DNA, 25 bp, Homo sapien
ccagcaaccgtggggggcagcggct

SEQ ID NO: 2869911 - DNA, 25 bp, Homo sapien
catcctggtcccgagctgtgtacgg

SEQ ID NO: 2869912 - DNA, 25 bp, Homo sapien
cccgagctgtgtacgggtagatgac

SEQ ID NO: 2869913 - DNA, 25 bp, Homo sapien
cgggtagatgactgtgtacttctcc

SEQ ID NO: 2869914 - DNA, 25 bp, Homo sapien
ctgtgtacgggtagatgactgtgta

SEQ ID NO: 2869915 - DNA, 25 bp, Homo sapien
tcctgcatccttcagctgagttgca

SEQ ID NO: 2869916 - DNA, 25 bp, Homo sapien
gcatccttcagctgagttgcatgga

SEQ ID NO: 2869917 - DNA, 25 bp, Homo sapien
ccttcagctgagttgcatggatgga

SEQ ID NO: 2869918 - DNA, 25 bp, Homo sapien
ggtcctgcatccttcagctgagttg

SEQ ID NO: 2869919 - DNA, 25 bp, Homo sapien
atgcaacaggcacgggtggtcccag

SEQ ID NO: 2869920 - DNA, 25 bp, Homo sapien
caggcacgggtggtcccagagcagg

SEQ ID NO: 2869921 - DNA, 25 bp, Homo sapien
ggcacgggtggtcccagagcaggga

SEQ ID NO: 2869922 - DNA, 25 bp, Homo sapien
caacaggcacgggtggtcccagagc

SEQ ID NO: 2869923 - DNA, 25 bp, Homo sapien
gggcagagaccaatacctccatgag

SEQ ID NO: 2869924 - DNA, 25 bp, Homo sapien
gatggcatacaagtcccccagagtc

SEQ ID NO: 2869925 - DNA, 25 bp, Homo sapien
ttgacgccagctgatggcatacaag

SEQ ID NO: 2869926 - DNA, 25 bp, Homo sapien
gccagctgatggcatacaagtcccc

SEQ ID NO: 2869927 - DNA, 25 bp, Homo sapien
gccttcgaggcacgttgcagggacc

SEQ ID NO: 2869928 - DNA, 25 bp, Homo sapien
aggcacgttgcagggacccagcctt

SEQ ID NO: 2869929 - DNA, 25 bp, Homo sapien
tcggcagtgctgacgaaccaccaac

SEQ ID NO: 2869930 - DNA, 25 bp, Homo sapien
ctcggcagtgctgacgaaccaccaa

SEQ ID NO: 2869931 - DNA, 25 bp, Homo sapien
ccacgctgaggctgatctccgaact

SEQ ID NO: 2869932 - DNA, 25 bp, Homo sapien
ggctgatctccgaactctcctgctt

SEQ ID NO: 2869933 - DNA, 25 bp, Homo sapien
accacatactgctccaggaccatgg

SEQ ID NO: 2869934 - DNA, 25 bp, Homo sapien
tctcctgcttctggtagttggctac

SEQ ID NO: 2869935 - DNA, 25 bp, Homo sapien
tcaaaaccccaggattgcagtttcc

SEQ ID NO: 2869936 - DNA, 25 bp, Homo sapien
agcatctaccccaggatacagcctg

SEQ ID NO: 2869937 - DNA, 25 bp, Homo sapien
tacagcctgcccgagggctcaaaac

SEQ ID NO: 2869938 - DNA, 25 bp, Homo sapien
agctggaccaggtaagtgtgtttcc

SEQ ID NO: 2869939 - DNA, 25 bp, Homo sapien
tgcacatgtgcttggtaagagtcct

SEQ ID NO: 2869940 - DNA, 25 bp, Homo sapien
catcttgggtcataagcaaccttgg

SEQ ID NO: 2869941 - DNA, 25 bp, Homo sapien
tggtcatgtaacgaagccccagaca

SEQ ID NO: 2869942 - DNA, 25 bp, Homo sapien
caggaggtaactggctctgcatcac

SEQ ID NO: 2869943 - DNA, 25 bp, Homo sapien
gtttgtcaacccctggcctagaaca

SEQ ID NO: 2869944 - DNA, 25 bp, Homo sapien
ttaaaactcagctttgccgggcgca

SEQ ID NO: 2869945 - DNA, 25 bp, Homo sapien
catgggtggcttcttactagggctc

SEQ ID NO: 2869946 - DNA, 25 bp, Homo sapien
ctgtatgtggcctataaaggctaac

SEQ ID NO: 2869947 - DNA, 25 bp, Homo sapien
cagatttctttttcccaatgtgctc

SEQ ID NO: 2869948 - DNA, 25 bp, Homo sapien
agatttctttttcccaatgtgctcc

SEQ ID NO: 2869949 - DNA, 25 bp, Homo sapien
ggcacagcagaggtccctgccccat

SEQ ID NO: 2869950 - DNA, 25 bp, Homo sapien
ctcatcaggcacagcagaggtccct

SEQ ID NO: 2869951 - DNA, 25 bp, Homo sapien
catcaggcacagcagaggtccctgc

SEQ ID NO: 2869952 - DNA, 25 bp, Homo sapien
caggcacagcagaggtccctgcccc

SEQ ID NO: 2869953 - DNA, 25 bp, Homo sapien
gtgacgcccgctttactgatgagaa

SEQ ID NO: 2869954 - DNA, 25 bp, Homo sapien
caagttttcctactcatggcggcca

SEQ ID NO: 2869955 - DNA, 25 bp, Homo sapien
cagctggctaggaaagacgcccaaa

SEQ ID NO: 2869956 - DNA, 25 bp, Homo sapien
tcctgtatgtctgggaggcgcagca

SEQ ID NO: 2869957 - DNA, 25 bp, Homo sapien
tcagccttggttacggctgctgcct

SEQ ID NO: 2869958 - DNA, 25 bp, Homo sapien
tcttgatacacatacagtgcttggc

SEQ ID NO: 2869959 - DNA, 25 bp, Homo sapien
tatttctccgttagccagatccctt

SEQ ID NO: 2869960 - DNA, 25 bp, Homo sapien
cttctcgaatgagcccagacggacc

SEQ ID NO: 2869961 - DNA, 25 bp, Homo sapien
tggctgtgtagcgacaggcgtctgg

SEQ ID NO: 2869962 - DNA, 25 bp, Homo sapien
cgacaggcgtctgggcaagtggcct

SEQ ID NO: 2869963 - DNA, 25 bp, Homo sapien
gacaggcgtctgggcaagtggcctg

SEQ ID NO: 2869964 - DNA, 25 bp, Homo sapien
tgctggctgtgtagcgacaggcgtc

SEQ ID NO: 2869965 - DNA, 25 bp, Homo sapien
cattttggagagcttcggagcctgg

SEQ ID NO: 2869966 - DNA, 25 bp, Homo sapien
cacacctcgataagtgctgtgggca

SEQ ID NO: 2869967 - DNA, 25 bp, Homo sapien
tagatgaatctacggctcagcccct

SEQ ID NO: 2869968 - DNA, 25 bp, Homo sapien
tctgaaggctaagtgaagtgcggtc

SEQ ID NO: 2869969 - DNA, 25 bp, Homo sapien
ttgtctcaaagaactgcagcacctc

SEQ ID NO: 2869970 - DNA, 25 bp, Homo sapien
tctttggggggattcaggtcctcag

SEQ ID NO: 2869971 - DNA, 25 bp, Homo sapien
ttcaggtcctcaggtcttgtctcaa

SEQ ID NO: 2869972 - DNA, 25 bp, Homo sapien
cctcatcacactgagagatgtaggg

SEQ ID NO: 2869973 - DNA, 25 bp, Homo sapien
aattccacattaatctgccccagtg

SEQ ID NO: 2869974 - DNA, 25 bp, Homo sapien
tatgtcttaactcacgaatctgaag

SEQ ID NO: 2869975 - DNA, 25 bp, Homo sapien
caaagctggtttatctactaacagg

SEQ ID NO: 2869976 - DNA, 25 bp, Homo sapien
caactcgtctactggtgaatcttta

SEQ ID NO: 2869977 - DNA, 25 bp, Homo sapien
cccagcctcagcctccctagtagct

SEQ ID NO: 2869978 - DNA, 25 bp, Homo sapien
ggagtgctgtggtgctatcttagca

SEQ ID NO: 2869979 - DNA, 25 bp, Homo sapien
gggttcaagtgattccccagcctca

SEQ ID NO: 2869980 - DNA, 25 bp, Homo sapien
tagcacactgcaacctctgcctccc

SEQ ID NO: 2869981 - DNA, 25 bp, Homo sapien
tttaagtccccgagctgcaatctgc

SEQ ID NO: 2869982 - DNA, 25 bp, Homo sapien
tctagtagggcaccttccctggtca

SEQ ID NO: 2869983 - DNA, 25 bp, Homo sapien
tctggttccaagcagtgagtggtca

SEQ ID NO: 2869984 - DNA, 25 bp, Homo sapien
gataaacacatcatgagggacgtgg

SEQ ID NO: 2869985 - DNA, 25 bp, Homo sapien
taagcagttccctccctgtggttag

SEQ ID NO: 2869986 - DNA, 25 bp, Homo sapien
gggcctggacaaaagaagatcatct

SEQ ID NO: 2869987 - DNA, 25 bp, Homo sapien
ggaacttcccggctaggcaaggtga

SEQ ID NO: 2869988 - DNA, 25 bp, Homo sapien
aagagtctgtctatccgtgtgctaa

SEQ ID NO: 2869989 - DNA, 25 bp, Homo sapien
tgtagttgtacacatctggcttctt

SEQ ID NO: 2869990 - DNA, 25 bp, Homo sapien
ctaatttacaggtcatctctgtttc

SEQ ID NO: 2869991 - DNA, 25 bp, Homo sapien
caatatgtagttgtacacatctggc

SEQ ID NO: 2869992 - DNA, 25 bp, Homo sapien
taatttacaggtcatctctgtttct

SEQ ID NO: 2869993 - DNA, 25 bp, Homo sapien
ggtgactatctcaactgtttgttaa

SEQ ID NO: 2869994 - DNA, 25 bp, Homo sapien
gtttgtggtattttgctatgcagcc

SEQ ID NO: 2869995 - DNA, 25 bp, Homo sapien
ctaggaaacgaatgcaacaggtgac

SEQ ID NO: 2869996 - DNA, 25 bp, Homo sapien
taaatgatgttgtaagccaaccagt

SEQ ID NO: 2869997 - DNA, 25 bp, Homo sapien
tgcaccatcaaacaacagggattgg

SEQ ID NO: 2869998 - DNA, 25 bp, Homo sapien
cagggattggctaaataactttgga

SEQ ID NO: 2869999 - DNA, 25 bp, Homo sapien
ttaggacgttcaagggacaggaagc

SEQ ID NO: 2870000 - DNA, 25 bp, Homo sapien
cctctcccatcagaatcgctagtga

SEQ ID NO: 2870001 - DNA, 25 bp, Homo sapien
tttgacagccacgtcccggatgtgg

SEQ ID NO: 2870002 - DNA, 25 bp, Homo sapien
tgtggcttcgtctgaagagaatctt

SEQ ID NO: 2870003 - DNA, 25 bp, Homo sapien
tatcaggcgtttgacagccacgtcc

SEQ ID NO: 2870004 - DNA, 25 bp, Homo sapien
agtattcatcaattggtatcaggcg

SEQ ID NO: 2870005 - DNA, 25 bp, Homo sapien
agcagagcccgagttgtggctcagg

SEQ ID NO: 2870006 - DNA, 25 bp, Homo sapien
gaaccgtgaggccagtggtaggcat

SEQ ID NO: 2870007 - DNA, 25 bp, Homo sapien
cagcagagcccgagttgtggctcag

SEQ ID NO: 2870008 - DNA, 25 bp, Homo sapien
gcagaaccgtgaggccagtggtagg

SEQ ID NO: 2870009 - DNA, 25 bp, Homo sapien
ccttccatgggaaatttgtccaaca

SEQ ID NO: 2870010 - DNA, 25 bp, Homo sapien
gcagaaaggggatgatccgctgctt

SEQ ID NO: 2870011 - DNA, 25 bp, Homo sapien
tgtcctccttccatgggaaatttgt

SEQ ID NO: 2870012 - DNA, 25 bp, Homo sapien
ggatgatccgctgcttggggtcctt

SEQ ID NO: 2870013 - DNA, 25 bp, Homo sapien
caactgagcaaacgctttgggaggc

SEQ ID NO: 2870014 - DNA, 25 bp, Homo sapien
taaaaacgggctgaacttgatgtcg

SEQ ID NO: 2870015 - DNA, 25 bp, Homo sapien
gaatccaagagctcttcaatgccag

SEQ ID NO: 2870016 - DNA, 25 bp, Homo sapien
ggctgaaccaatgaacgcaactgag

SEQ ID NO: 2870017 - DNA, 25 bp, Homo sapien
ggttggtcccgaatagcctggtcat

SEQ ID NO: 2870018 - DNA, 25 bp, Homo sapien
tgacccaagatgagccaatgagact

SEQ ID NO: 2870019 - DNA, 25 bp, Homo sapien
gatgtgtggtgcctagatccagcca

SEQ ID NO: 2870020 - DNA, 25 bp, Homo sapien
gaaaacaagatctcatggccagcaa

SEQ ID NO: 2870021 - DNA, 25 bp, Homo sapien
catattgattggcgtcgagttgagc

SEQ ID NO: 2870022 - DNA, 25 bp, Homo sapien
ctcatattgattggcgtcgagttga

SEQ ID NO: 2870023 - DNA, 25 bp, Homo sapien
tcactcatattgattggcgtcgagt

SEQ ID NO: 2870024 - DNA, 25 bp, Homo sapien
cactcatattgattggcgtcgagtt

SEQ ID NO: 2870025 - DNA, 25 bp, Homo sapien
accacgcccagccatggatgtcatt

SEQ ID NO: 2870026 - DNA, 25 bp, Homo sapien
caaacttctaacctcgagtgatcca

SEQ ID NO: 2870027 - DNA, 25 bp, Homo sapien
cacgcccagccatggatgtcatttt

SEQ ID NO: 2870028 - DNA, 25 bp, Homo sapien
cgcccagccatggatgtcattttta

SEQ ID NO: 2870029 - DNA, 25 bp, Homo sapien
tgtagcgccggtaaatggcctcggt

SEQ ID NO: 2870030 - DNA, 25 bp, Homo sapien
tggaccacgtgacccggatgatgta

SEQ ID NO: 2870031 - DNA, 25 bp, Homo sapien
gagccgctggaccacgtgacccgga

SEQ ID NO: 2870032 - DNA, 25 bp, Homo sapien
aaaacttgctgtagcgccggtaaat

SEQ ID NO: 2870033 - DNA, 25 bp, Homo sapien
ctttggtctgtagaaagggaccctg

SEQ ID NO: 2870034 - DNA, 25 bp, Homo sapien
ccttggcaggcctttggtctgtaga

SEQ ID NO: 2870035 - DNA, 25 bp, Homo sapien
tgcttctccttggcaggcctttggt

SEQ ID NO: 2870036 - DNA, 25 bp, Homo sapien
gaggagtgcttctccttggcaggcc

SEQ ID NO: 2870037 - DNA, 25 bp, Homo sapien
tctgtgagctcccaagtgttcacca

SEQ ID NO: 2870038 - DNA, 25 bp, Homo sapien
atgtgaaacagctgccgccctgctt

SEQ ID NO: 2870039 - DNA, 25 bp, Homo sapien
tgtccccagggtcggatgatgtgaa

SEQ ID NO: 2870040 - DNA, 25 bp, Homo sapien
gctgtagctcttagaaaggccccag

SEQ ID NO: 2870041 - DNA, 25 bp, Homo sapien
taagattgagaatgaggatggtcct

SEQ ID NO: 2870042 - DNA, 25 bp, Homo sapien
tagcaagtgctactactggttttcc

SEQ ID NO: 2870043 - DNA, 25 bp, Homo sapien
ttttccccaggtatagtagacagct

SEQ ID NO: 2870044 - DNA, 25 bp, Homo sapien
cctgtgttagtggaattccttgcca

SEQ ID NO: 2870045 - DNA, 25 bp, Homo sapien
gcatctgggccagcaaataagggag

SEQ ID NO: 2870046 - DNA, 25 bp, Homo sapien
tgtcacgtcagtgggcaaaggatgc

SEQ ID NO: 2870047 - DNA, 25 bp, Homo sapien
cagagcctcggcttctgggcattac

SEQ ID NO: 2870048 - DNA, 25 bp, Homo sapien
tcatgtcagctggttcccgtgtcac

SEQ ID NO: 2870049 - DNA, 25 bp, Homo sapien
gccctgaactccgggtgcagttctc

SEQ ID NO: 2870050 - DNA, 25 bp, Homo sapien
aatgacatctacagcacctgtgacc

SEQ ID NO: 2870051 - DNA, 25 bp, Homo sapien
ctgtccctcacaggcaagtgagtga

SEQ ID NO: 2870052 - DNA, 25 bp, Homo sapien
tcacaggcaagtgagtgatgagcag

SEQ ID NO: 2870053 - DNA, 25 bp, Homo sapien
tctctgttcctgtggatgactcagg

SEQ ID NO: 2870054 - DNA, 25 bp, Homo sapien
ccctgccatcaaggcagtaaatgtt

SEQ ID NO: 2870055 - DNA, 25 bp, Homo sapien
ctgtggatgactcaggcttcagttc

SEQ ID NO: 2870056 - DNA, 25 bp, Homo sapien
gccatcaaggcagtaaatgttctct

SEQ ID NO: 2870057 - DNA, 25 bp, Homo sapien
ttctcaccgccagagacactatagc

SEQ ID NO: 2870058 - DNA, 25 bp, Homo sapien
cctgctgtaatgaggccctccccaa

SEQ ID NO: 2870059 - DNA, 25 bp, Homo sapien
ctgctgtaatgaggccctccccaag

SEQ ID NO: 2870060 - DNA, 25 bp, Homo sapien
tgcccacttctcaccgccagagaca

SEQ ID NO: 2870061 - DNA, 25 bp, Homo sapien
ctttatctccacctagaacctgcga

SEQ ID NO: 2870062 - DNA, 25 bp, Homo sapien
taggttgctgcggaagccactttcc

SEQ ID NO: 2870063 - DNA, 25 bp, Homo sapien
cctagaacctgcgaggtggtcccag

SEQ ID NO: 2870064 - DNA, 25 bp, Homo sapien
gacgtgtcccctaggttgctgcgga

SEQ ID NO: 2870065 - DNA, 25 bp, Homo sapien
gaatgcagctctatgttccaggacc

SEQ ID NO: 2870066 - DNA, 25 bp, Homo sapien
ctggagggagggaagcccgaatgca

SEQ ID NO: 2870067 - DNA, 25 bp, Homo sapien
tgcaaaacgacgctactgtcccatt

SEQ ID NO: 2870068 - DNA, 25 bp, Homo sapien
cagccttcctatctgcaaaacgacg

SEQ ID NO: 2870069 - DNA, 25 bp, Homo sapien
gtggctggggactgcgggtctgcgc

SEQ ID NO: 2870070 - DNA, 25 bp, Homo sapien
ctggggactgcgggtctgcgcgcct

SEQ ID NO: 2870071 - DNA, 25 bp, Homo sapien
ctgtggctggggactgcgggtctgc

SEQ ID NO: 2870072 - DNA, 25 bp, Homo sapien
tggctggggactgcgggtctgcgcg

SEQ ID NO: 2870073 - DNA, 25 bp, Homo sapien
ccgcttctgcacgtctagcaccttc

SEQ ID NO: 2870074 - DNA, 25 bp, Homo sapien
tctgcacgtctagcaccttcacctc

SEQ ID NO: 2870075 - DNA, 25 bp, Homo sapien
ataatgcttgttgggcacccgccgc

SEQ ID NO: 2870076 - DNA, 25 bp, Homo sapien
gcttctgcacgtctagcaccttcac

SEQ ID NO: 2870077 - DNA, 25 bp, Homo sapien
cgcgccgccgcgggcagggaacctg

SEQ ID NO: 2870078 - DNA, 25 bp, Homo sapien
gagcgcaatcgcagccggggccgag

SEQ ID NO: 2870079 - DNA, 25 bp, Homo sapien
cgccgccgcgggcagggaacctgga

SEQ ID NO: 2870080 - DNA, 25 bp, Homo sapien
aacctggagctgagcgcaatcgcag

SEQ ID NO: 2870081 - DNA, 25 bp, Homo sapien
cacagggtgctggattgatgcttcg

SEQ ID NO: 2870082 - DNA, 25 bp, Homo sapien
acacagggtgctggattgatgcttc

SEQ ID NO: 2870083 - DNA, 25 bp, Homo sapien
ctggattgatgcttcgtgttactca

SEQ ID NO: 2870084 - DNA, 25 bp, Homo sapien
ggtgctggattgatgcttcgtgtta

SEQ ID NO: 2870085 - DNA, 25 bp, Homo sapien
gtattttcacaatctccagctgttc

SEQ ID NO: 2870086 - DNA, 25 bp, Homo sapien
tgtattttcacaatctccagctgtt

SEQ ID NO: 2870087 - DNA, 25 bp, Homo sapien
ttctgtattttcacaatctccagct

SEQ ID NO: 2870088 - DNA, 25 bp, Homo sapien
cttagctttctgtattttcacaatc

SEQ ID NO: 2870089 - DNA, 25 bp, Homo sapien
tggcgttgatcagaaaggacattgg

SEQ ID NO: 2870090 - DNA, 25 bp, Homo sapien
cagttccagacaggaccaagcgtgg

SEQ ID NO: 2870091 - DNA, 25 bp, Homo sapien
ccgccccttggcgttgatcagaaag

SEQ ID NO: 2870092 - DNA, 25 bp, Homo sapien
tcctttgtatgaggcctccatgttc

SEQ ID NO: 2870093 - DNA, 25 bp, Homo sapien
gacagacttgggaaagccagggtcc

SEQ ID NO: 2870094 - DNA, 25 bp, Homo sapien
agacacagcagggggaacttcaaca

SEQ ID NO: 2870095 - DNA, 25 bp, Homo sapien
cacagcagggggaacttcaacaggg

SEQ ID NO: 2870096 - DNA, 25 bp, Homo sapien
agggtcccagaggaaaccagacaca

SEQ ID NO: 2870097 - DNA, 25 bp, Homo sapien
ttgattcatatgtgttgatcatctg

SEQ ID NO: 2870098 - DNA, 25 bp, Homo sapien
cattgattcatatgtgttgatcatc

SEQ ID NO: 2870099 - DNA, 25 bp, Homo sapien
attgattcatatgtgttgatcatct

SEQ ID NO: 2870100 - DNA, 25 bp, Homo sapien
ttcaagggccctaccacatgtaaga

SEQ ID NO: 2870101 - DNA, 25 bp, Homo sapien
gatgttgggcgcacaaaaaagtgat

SEQ ID NO: 2870102 - DNA, 25 bp, Homo sapien
agactgcagtgtcgtacttccagtg

SEQ ID NO: 2870103 - DNA, 25 bp, Homo sapien
aaagtgatgagcacagactgcagtg

SEQ ID NO: 2870104 - DNA, 25 bp, Homo sapien
gggctctgatgttgggcgcacaaaa

SEQ ID NO: 2870105 - DNA, 25 bp, Homo sapien
tctcatccaagcatcctctaagcat

SEQ ID NO: 2870106 - DNA, 25 bp, Homo sapien
gcaagaggtggctctcatccaagca

SEQ ID NO: 2870107 - DNA, 25 bp, Homo sapien
ttcttcgcagaaggcaggcagtctt

SEQ ID NO: 2870108 - DNA, 25 bp, Homo sapien
ggcagtcttcctgcagcaagaggtg

SEQ ID NO: 2870109 - DNA, 25 bp, Homo sapien
cagggcacctgcttgacaccaggtc

SEQ ID NO: 2870110 - DNA, 25 bp, Homo sapien
accaggtcctgcttgggcatgaagg

SEQ ID NO: 2870111 - DNA, 25 bp, Homo sapien
gggcacctgcttgacaccaggtcct

SEQ ID NO: 2870112 - DNA, 25 bp, Homo sapien
tcctgcttgggcatgaaggcagtag

SEQ ID NO: 2870113 - DNA, 25 bp, Homo sapien
gttggactttacaccacagacatag

SEQ ID NO: 2870114 - DNA, 25 bp, Homo sapien
caggaagtcctattgcaaatgggct

SEQ ID NO: 2870115 - DNA, 25 bp, Homo sapien
tctgtgatgtctcctgaccagggtc

SEQ ID NO: 2870116 - DNA, 25 bp, Homo sapien
ggtatttaactaggacactgcagga

SEQ ID NO: 2870117 - DNA, 25 bp, Homo sapien
gtgtatgcatgcacgcttactctcc

SEQ ID NO: 2870118 - DNA, 25 bp, Homo sapien
agccttcctgtgataaaccaccagt

SEQ ID NO: 2870119 - DNA, 25 bp, Homo sapien
tatgcatgcacgcttactctcccaa

SEQ ID NO: 2870120 - DNA, 25 bp, Homo sapien
ccttcctgtgataaaccaccagtat

SEQ ID NO: 2870121 - DNA, 25 bp, Homo sapien
tccaagatcccaattagcagtaacg

SEQ ID NO: 2870122 - DNA, 25 bp, Homo sapien
agctcaacatggtagaggtgtgttc

SEQ ID NO: 2870123 - DNA, 25 bp, Homo sapien
acacacttgattgagccttgttggg

SEQ ID NO: 2870124 - DNA, 25 bp, Homo sapien
tgcaccaggagttgttccaagatcc

SEQ ID NO: 2870125 - DNA, 25 bp, Homo sapien
ggacagtggtcgttccttgaggcac

SEQ ID NO: 2870126 - DNA, 25 bp, Homo sapien
gtcgttccttgaggcacgccaggag

SEQ ID NO: 2870127 - DNA, 25 bp, Homo sapien
gtggtcgttccttgaggcacgccag

SEQ ID NO: 2870128 - DNA, 25 bp, Homo sapien
cagtggtcgttccttgaggcacgcc

SEQ ID NO: 2870129 - DNA, 25 bp, Homo sapien
tacgctttgggaatcgcaggctaca

SEQ ID NO: 2870130 - DNA, 25 bp, Homo sapien
cccatgggcgttgtccaaggattac

SEQ ID NO: 2870131 - DNA, 25 bp, Homo sapien
tattgaatttccaagaaggccgtga

SEQ ID NO: 2870132 - DNA, 25 bp, Homo sapien
tgtagctcagccaggagtcaggaag

SEQ ID NO: 2870133 - DNA, 25 bp, Homo sapien
tctgcatcagtcagccctttcttgc

SEQ ID NO: 2870134 - DNA, 25 bp, Homo sapien
gcaggatctgcatcagtcagccctt

SEQ ID NO: 2870135 - DNA, 25 bp, Homo sapien
agagcaggatctgcatcagtcagcc

SEQ ID NO: 2870136 - DNA, 25 bp, Homo sapien
ggatctgcatcagtcagccctttct

SEQ ID NO: 2870137 - DNA, 25 bp, Homo sapien
ccattcatctgtatgtccagcaaca

SEQ ID NO: 2870138 - DNA, 25 bp, Homo sapien
ctccgtcggcccatccattcatctg

SEQ ID NO: 2870139 - DNA, 25 bp, Homo sapien
atccattcatctgtatgtccagcaa

SEQ ID NO: 2870140 - DNA, 25 bp, Homo sapien
gtgcatccgttcctccgtcggccca

SEQ ID NO: 2870141 - DNA, 25 bp, Homo sapien
taccgtcttcagaatggctgagtgc

SEQ ID NO: 2870142 - DNA, 25 bp, Homo sapien
cttttaccgtcttcagaatggctga

SEQ ID NO: 2870143 - DNA, 25 bp, Homo sapien
tcagaatggctgagtgcagacctgt

SEQ ID NO: 2870144 - DNA, 25 bp, Homo sapien
ctctcacttttaccgtcttcagaat

SEQ ID NO: 2870145 - DNA, 25 bp, Homo sapien
cctggttcacgctcatggagtcatg

SEQ ID NO: 2870146 - DNA, 25 bp, Homo sapien
tggttcacgctcatggagtcatggt

SEQ ID NO: 2870147 - DNA, 25 bp, Homo sapien
tgagcagaatagtcctggttcacgc

SEQ ID NO: 2870148 - DNA, 25 bp, Homo sapien
aaggtgagcagaatagtcctggttc

SEQ ID NO: 2870149 - DNA, 25 bp, Homo sapien
cagacgcccacggagcacatatttt

SEQ ID NO: 2870150 - DNA, 25 bp, Homo sapien
caacatctacgacattcttcctgct

SEQ ID NO: 2870151 - DNA, 25 bp, Homo sapien
cacatattttaatgcgccttcacag

SEQ ID NO: 2870152 - DNA, 25 bp, Homo sapien
aaaacagatgcaacatctacgacat

SEQ ID NO: 2870153 - DNA, 25 bp, Homo sapien
cagcaattaaagagaggattgggtg

SEQ ID NO: 2870154 - DNA, 25 bp, Homo sapien
ctgcaacagcaattaaagagaggat

SEQ ID NO: 2870155 - DNA, 25 bp, Homo sapien
attaaagagaggattgggtgagggg

SEQ ID NO: 2870156 - DNA, 25 bp, Homo sapien
gagaggattgggtgaggggggaggc

SEQ ID NO: 2870157 - DNA, 25 bp, Homo sapien
cccaggctggggctttctttgccaa

SEQ ID NO: 2870158 - DNA, 25 bp, Homo sapien
ggctcggtcagcaaagcctggcatt

SEQ ID NO: 2870159 - DNA, 25 bp, Homo sapien
tctagcactatgacatctttctccc

SEQ ID NO: 2870160 - DNA, 25 bp, Homo sapien
aggcagtcagggtaaccagggccca

SEQ ID NO: 2870161 - DNA, 25 bp, Homo sapien
ctgtggtgagtcctttcttctggca

SEQ ID NO: 2870162 - DNA, 25 bp, Homo sapien
aaaggacgtttcaggttttcagctg

SEQ ID NO: 2870163 - DNA, 25 bp, Homo sapien
tgtagtccctgtggtgagtcctttc

SEQ ID NO: 2870164 - DNA, 25 bp, Homo sapien
gttttcagctgtagtccctgtggtg

SEQ ID NO: 2870165 - DNA, 25 bp, Homo sapien
caatgcatcaaagccatgattccaa

SEQ ID NO: 2870166 - DNA, 25 bp, Homo sapien
tataatccccaagggcttcatgaaa

SEQ ID NO: 2870167 - DNA, 25 bp, Homo sapien
aaagttgcccaactaacacttcatt

SEQ ID NO: 2870168 - DNA, 25 bp, Homo sapien
agcaatgcatcaaagccatgattcc

SEQ ID NO: 2870169 - DNA, 25 bp, Homo sapien
gagctactagtattccatcgatcag

SEQ ID NO: 2870170 - DNA, 25 bp, Homo sapien
tgcacgaggctggtggagcacatac

SEQ ID NO: 2870171 - DNA, 25 bp, Homo sapien
gcacatactgataacgtctttctgg

SEQ ID NO: 2870172 - DNA, 25 bp, Homo sapien
tgaacaggcatctctcgcactgcac

SEQ ID NO: 2870173 - DNA, 25 bp, Homo sapien
ctaatgacttctgggcttcgtccat

SEQ ID NO: 2870174 - DNA, 25 bp, Homo sapien
aatacacgacccttcgtgactctta

SEQ ID NO: 2870175 - DNA, 25 bp, Homo sapien
cgacaatggaatcacaggatgggct

SEQ ID NO: 2870176 - DNA, 25 bp, Homo sapien
actttgcagcattcccgacaatgga

SEQ ID NO: 2870177 - DNA, 25 bp, Homo sapien
gccacgaacttcgactctaaggctg

SEQ ID NO: 2870178 - DNA, 25 bp, Homo sapien
gccccactttatagatcaggacata

SEQ ID NO: 2870179 - DNA, 25 bp, Homo sapien
caggacatataaggcacaggacggt

SEQ ID NO: 2870180 - DNA, 25 bp, Homo sapien
aggacggtgacgtcacctgcctcag

SEQ ID NO: 2870181 - DNA, 25 bp, Homo sapien
ctgcatggcagagggtttagcccca

SEQ ID NO: 2870182 - DNA, 25 bp, Homo sapien
tcagggccacccagagctggccgct

SEQ ID NO: 2870183 - DNA, 25 bp, Homo sapien
acagacccagcaaactcatcccttc

SEQ ID NO: 2870184 - DNA, 25 bp, Homo sapien
tgagcagagtttgggacagccatcc

SEQ ID NO: 2870185 - DNA, 25 bp, Homo sapien
tcatcttattaccaggactcagggc

SEQ ID NO: 2870186 - DNA, 25 bp, Homo sapien
caaaagatgttatggcagggaatag

SEQ ID NO: 2870187 - DNA, 25 bp, Homo sapien
gcaaaagatgttatggcagggaata

SEQ ID NO: 2870188 - DNA, 25 bp, Homo sapien
aaaagatgttatggcagggaataga

SEQ ID NO: 2870189 - DNA, 25 bp, Homo sapien
tccccgcggccttcgcttttagctc

SEQ ID NO: 2870190 - DNA, 25 bp, Homo sapien
ctacttcttgggctgtttcagtggc

SEQ ID NO: 2870191 - DNA, 25 bp, Homo sapien
gctgtttcagtggcttcttcttgcc

SEQ ID NO: 2870192 - DNA, 25 bp, Homo sapien
ctgtttcagtggcttcttcttgcca

SEQ ID NO: 2870193 - DNA, 25 bp, Homo sapien
tgtttcagtggcttcttcttgccac

SEQ ID NO: 2870194 - DNA, 25 bp, Homo sapien
tgtgcatggagtctgggtatgtttc

SEQ ID NO: 2870195 - DNA, 25 bp, Homo sapien
tccaaggacgcatgttataaaggtc

SEQ ID NO: 2870196 - DNA, 25 bp, Homo sapien
cctgaagttgaatatcagattgtgc

SEQ ID NO: 2870197 - DNA, 25 bp, Homo sapien
tcactcaaggtctacagtccaagga

SEQ ID NO: 2870198 - DNA, 25 bp, Homo sapien
agctaaggatctctgcacccgcaga

SEQ ID NO: 2870199 - DNA, 25 bp, Homo sapien
acagcttactcggccagagagggag

SEQ ID NO: 2870200 - DNA, 25 bp, Homo sapien
gggaagtaggcacagcttactcggc

SEQ ID NO: 2870201 - DNA, 25 bp, Homo sapien
gtaggcacagcttactcggccagag

SEQ ID NO: 2870202 - DNA, 25 bp, Homo sapien
gaagtaggcacagcttactcggcca

SEQ ID NO: 2870203 - DNA, 25 bp, Homo sapien
ttgaagagggccacctcaggcacat

SEQ ID NO: 2870204 - DNA, 25 bp, Homo sapien
tcaggcacatcaagagagatcaaac

SEQ ID NO: 2870205 - DNA, 25 bp, Homo sapien
ggtttcccaagtgctataaatccag

SEQ ID NO: 2870206 - DNA, 25 bp, Homo sapien
ggcataattcgaaaaagcatgtgca

SEQ ID NO: 2870207 - DNA, 25 bp, Homo sapien
ccagggtcacatcgctggtcagctt

SEQ ID NO: 2870208 - DNA, 25 bp, Homo sapien
gattaaatgactatcccagggtcac

SEQ ID NO: 2870209 - DNA, 25 bp, Homo sapien
catgtgcatataatgccttgagcgg

SEQ ID NO: 2870210 - DNA, 25 bp, Homo sapien
aagagagtgatacctgcttcatggg

SEQ ID NO: 2870211 - DNA, 25 bp, Homo sapien
catccatgttgagcactagtagtca

SEQ ID NO: 2870212 - DNA, 25 bp, Homo sapien
gcccgagacgaagtgcccattatct

SEQ ID NO: 2870213 - DNA, 25 bp, Homo sapien
ttgtctgaaccaacagcaagcttgg

SEQ ID NO: 2870214 - DNA, 25 bp, Homo sapien
ggaaccatcagacatagtcatcatt

SEQ ID NO: 2870215 - DNA, 25 bp, Homo sapien
taacgaaaaatgctggcactgggat

SEQ ID NO: 2870216 - DNA, 25 bp, Homo sapien
tcccagatcacatctgggctgatgg

SEQ ID NO: 2870217 - DNA, 25 bp, Homo sapien
tgttaactaatgatcgagacagtaa

SEQ ID NO: 2870218 - DNA, 25 bp, Homo sapien
gctggtatttcctgggaccttgacc

SEQ ID NO: 2870219 - DNA, 25 bp, Homo sapien
ttcaaacccgggagtgtctgctgcc

SEQ ID NO: 2870220 - DNA, 25 bp, Homo sapien
cattcatataacaaacactgctggg

SEQ ID NO: 2870221 - DNA, 25 bp, Homo sapien
ccggtgagtccgtccagttgaggca

SEQ ID NO: 2870222 - DNA, 25 bp, Homo sapien
tcctctagctgggagtaatcacagt

SEQ ID NO: 2870223 - DNA, 25 bp, Homo sapien
gacattagtgaagtacccaggcaga

SEQ ID NO: 2870224 - DNA, 25 bp, Homo sapien
tgcctgttcagaaacagcgacccag

SEQ ID NO: 2870225 - DNA, 25 bp, Homo sapien
gcagcaagtagcagtggcaagccta

SEQ ID NO: 2870226 - DNA, 25 bp, Homo sapien
gcctaagacgagcagagcttccacg

SEQ ID NO: 2870227 - DNA, 25 bp, Homo sapien
gctgagcttttacggctttgccgcc

SEQ ID NO: 2870228 - DNA, 25 bp, Homo sapien
gccttacgggtagatgactttttca

SEQ ID NO: 2870229 - DNA, 25 bp, Homo sapien
tcaagcgccttacgggtagatgact

SEQ ID NO: 2870230 - DNA, 25 bp, Homo sapien
gccaccatcaagcgccttacgggta

SEQ ID NO: 2870231 - DNA, 25 bp, Homo sapien
gatggccatggcgtgaaacctttta

SEQ ID NO: 2870232 - DNA, 25 bp, Homo sapien
cagcatatgcaaaggtatggaggcc

SEQ ID NO: 2870233 - DNA, 25 bp, Homo sapien
cctgagcctgagtggagataaagaa

SEQ ID NO: 2870234 - DNA, 25 bp, Homo sapien
caagaggttgatggcgatactccca

SEQ ID NO: 2870235 - DNA, 25 bp, Homo sapien
cttggaggctgcaacactttaggca

SEQ ID NO: 2870236 - DNA, 25 bp, Homo sapien
cttctcagcagacgtaacaagtcag

SEQ ID NO: 2870237 - DNA, 25 bp, Homo sapien
ccatgcctagctcagagaagtagtt

SEQ ID NO: 2870238 - DNA, 25 bp, Homo sapien
gaaatgtcaaggaagctactggcta

SEQ ID NO: 2870239 - DNA, 25 bp, Homo sapien
tcgctatagatctggcttttaaaaa

SEQ ID NO: 2870240 - DNA, 25 bp, Homo sapien
tgcacattcattctcgctatagatc

SEQ ID NO: 2870241 - DNA, 25 bp, Homo sapien
caaaagcagatatggctgccttgga

SEQ ID NO: 2870242 - DNA, 25 bp, Homo sapien
gatgtcaggcctctattgtagtcag

SEQ ID NO: 2870243 - DNA, 25 bp, Homo sapien
ttctcagccttaacctcggcgggca

SEQ ID NO: 2870244 - DNA, 25 bp, Homo sapien
ggcttggtaaggtcttcaccaaaca

SEQ ID NO: 2870245 - DNA, 25 bp, Homo sapien
gtagagcaccgccaccgcgatgtgc

SEQ ID NO: 2870246 - DNA, 25 bp, Homo sapien
atcaatgattggcttggtaaggtct

SEQ ID NO: 2870247 - DNA, 25 bp, Homo sapien
ctggaaacggaggcacagacccccg

SEQ ID NO: 2870248 - DNA, 25 bp, Homo sapien
acggaggcacagacccccgtggtag

SEQ ID NO: 2870249 - DNA, 25 bp, Homo sapien
ggcagtgacggcaaccggggtccgc

SEQ ID NO: 2870250 - DNA, 25 bp, Homo sapien
ggcccaggcagtgacggcaaccggg

SEQ ID NO: 2870251 - DNA, 25 bp, Homo sapien
ctgtcccgcaacagggcccaggcag

SEQ ID NO: 2870252 - DNA, 25 bp, Homo sapien
tgacggcaaccggggtccgctgcca

SEQ ID NO: 2870253 - DNA, 25 bp, Homo sapien
tggcggttcagagtttttgagggaa

SEQ ID NO: 2870254 - DNA, 25 bp, Homo sapien
tgtggcggttcagagtttttgaggg

SEQ ID NO: 2870255 - DNA, 25 bp, Homo sapien
tcgccactcggaagtgcaccctggc

SEQ ID NO: 2870256 - DNA, 25 bp, Homo sapien
cgccactcggaagtgcaccctggct

SEQ ID NO: 2870257 - DNA, 25 bp, Homo sapien
gccactcggaagtgcaccctggctt

SEQ ID NO: 2870258 - DNA, 25 bp, Homo sapien
gacactaactagttggacctatcag

SEQ ID NO: 2870259 - DNA, 25 bp, Homo sapien
gaaggtccaggatccctcactgcct

SEQ ID NO: 2870260 - DNA, 25 bp, Homo sapien
ttgtcccaggtatttggaacagaat

SEQ ID NO: 2870261 - DNA, 25 bp, Homo sapien
taaatcccatctttgcagtgtgctc

SEQ ID NO: 2870262 - DNA, 25 bp, Homo sapien
caatgttagcaatggtcaggttggg

SEQ ID NO: 2870263 - DNA, 25 bp, Homo sapien
gcgtgaatgtcctccacaatgttag

SEQ ID NO: 2870264 - DNA, 25 bp, Homo sapien
gacgggcaagtgaaagtctgaaaca

SEQ ID NO: 2870265 - DNA, 25 bp, Homo sapien
gaaggaggcaactaccaaaaatgcc

SEQ ID NO: 2870266 - DNA, 25 bp, Homo sapien
tactaagagttcagctgtagcgtcc

SEQ ID NO: 2870267 - DNA, 25 bp, Homo sapien
catggtaggttacagagccgctaaa

SEQ ID NO: 2870268 - DNA, 25 bp, Homo sapien
tgaagaaggcaatccagacaagtgg

SEQ ID NO: 2870269 - DNA, 25 bp, Homo sapien
gccatttcatgggaccaacgggcca

SEQ ID NO: 2870270 - DNA, 25 bp, Homo sapien
tattggtcccgaatgtgctgagttc

SEQ ID NO: 2870271 - DNA, 25 bp, Homo sapien
tcctctcaaggagcatggagtccca

SEQ ID NO: 2870272 - DNA, 25 bp, Homo sapien
tcgagcccctcccagagttattgca

SEQ ID NO: 2870273 - DNA, 25 bp, Homo sapien
gacatttgtgaaggcagacacctac

SEQ ID NO: 2870274 - DNA, 25 bp, Homo sapien
ttagtcctcataaggtaagcaaggc

SEQ ID NO: 2870275 - DNA, 25 bp, Homo sapien
aaggcctcgtccagcttgactcgat

SEQ ID NO: 2870276 - DNA, 25 bp, Homo sapien
tggctgaccgggaaatgcctgcctg

SEQ ID NO: 2870277 - DNA, 25 bp, Homo sapien
cagcgcactgttcgtggagtggaca

SEQ ID NO: 2870278 - DNA, 25 bp, Homo sapien
ttgagagttcaggagaaccacccca

SEQ ID NO: 2870279 - DNA, 25 bp, Homo sapien
cagaggttgggcttagtggctaaaa

SEQ ID NO: 2870280 - DNA, 25 bp, Homo sapien
ggaatgttgcccacaccagactgat

SEQ ID NO: 2870281 - DNA, 25 bp, Homo sapien
taaagtgggacatcgaatcaaattc

SEQ ID NO: 2870282 - DNA, 25 bp, Homo sapien
gaagtcaatggcctcgttgaaccag

SEQ ID NO: 2870283 - DNA, 25 bp, Homo sapien
tatgaagtcaatggcctcgttgaac

SEQ ID NO: 2870284 - DNA, 25 bp, Homo sapien
ctatgaagtcaatggcctcgttgaa

SEQ ID NO: 2870285 - DNA, 25 bp, Homo sapien
tgaagtcaatggcctcgttgaacca

SEQ ID NO: 2870286 - DNA, 25 bp, Homo sapien
gctcttgtactggtagtgaccctca

SEQ ID NO: 2870287 - DNA, 25 bp, Homo sapien
cacagggatgctcttgtactggtag

SEQ ID NO: 2870288 - DNA, 25 bp, Homo sapien
caaaatggttgggacaattggctga

SEQ ID NO: 2870289 - DNA, 25 bp, Homo sapien
aattggctgagacgttgatcaaggc

SEQ ID NO: 2870290 - DNA, 25 bp, Homo sapien
tccttgcgggaagcgtgatacgcac

SEQ ID NO: 2870291 - DNA, 25 bp, Homo sapien
gtgatacgcactgcccaggtacaga

SEQ ID NO: 2870292 - DNA, 25 bp, Homo sapien
gcactgcccaggtacagaaagggca

SEQ ID NO: 2870293 - DNA, 25 bp, Homo sapien
aagcgtgatacgcactgcccaggta

SEQ ID NO: 2870294 - DNA, 25 bp, Homo sapien
tagagcctacaattggagactcggc

SEQ ID NO: 2870295 - DNA, 25 bp, Homo sapien
gaataaatcatatccctgtgtcccc

SEQ ID NO: 2870296 - DNA, 25 bp, Homo sapien
tgggcaggaccagcaagttcatttc

SEQ ID NO: 2870297 - DNA, 25 bp, Homo sapien
tgtgtcccctccgttataaataatg

SEQ ID NO: 2870298 - DNA, 25 bp, Homo sapien
caggaagccgaaaacgcttcgtatc

SEQ ID NO: 2870299 - DNA, 25 bp, Homo sapien
tgcacccagattccgcgctgtcagg

SEQ ID NO: 2870300 - DNA, 25 bp, Homo sapien
ctgtcagggacgctagtactcaggg

SEQ ID NO: 2870301 - DNA, 25 bp, Homo sapien
catgggggtcgactgtttgctgcac

SEQ ID NO: 2870302 - DNA, 25 bp, Homo sapien
gagataaatgtactccagcgcccac

SEQ ID NO: 2870303 - DNA, 25 bp, Homo sapien
tttccagagccaaacaaagccaatg

SEQ ID NO: 2870304 - DNA, 25 bp, Homo sapien
gctggaagtttacatcggaaaggcc

SEQ ID NO: 2870305 - DNA, 25 bp, Homo sapien
tccccattagtgacaccgggacacg

SEQ ID NO: 2870306 - DNA, 25 bp, Homo sapien
caacaccacggcgtggtaggcgccg

SEQ ID NO: 2870307 - DNA, 25 bp, Homo sapien
aaagcgaagaaggagcggcagtcca

SEQ ID NO: 2870308 - DNA, 25 bp, Homo sapien
tgctgaagcgcacgttgacagagcc

SEQ ID NO: 2870309 - DNA, 25 bp, Homo sapien
tcggcgttgggcacgatgtgctcca

SEQ ID NO: 2870310 - DNA, 25 bp, Homo sapien
gtgatcggccctgcggtgctctttg

SEQ ID NO: 2870311 - DNA, 25 bp, Homo sapien
aaatgtccttcgcagcgagcctggc

SEQ ID NO: 2870312 - DNA, 25 bp, Homo sapien
aaaagccgcttttggactgagagag

SEQ ID NO: 2870313 - DNA, 25 bp, Homo sapien
cgggctcctcggcttcttcgcggtt

SEQ ID NO: 2870314 - DNA, 25 bp, Homo sapien
tgtgcgagctgtatcaccagtggca

SEQ ID NO: 2870315 - DNA, 25 bp, Homo sapien
gaaagcaaaatccaatcccgggcca

SEQ ID NO: 2870316 - DNA, 25 bp, Homo sapien
gacgcgctgggtacacaaacataaa

SEQ ID NO: 2870317 - DNA, 25 bp, Homo sapien
ggacctggatcgcaacacttgggaa

SEQ ID NO: 2870318 - DNA, 25 bp, Homo sapien
cttcatttgaacattggtcgaggac

SEQ ID NO: 2870319 - DNA, 25 bp, Homo sapien
catttgaacattggtcgaggacagc

SEQ ID NO: 2870320 - DNA, 25 bp, Homo sapien
ttgaacattggtcgaggacagcaaa

SEQ ID NO: 2870321 - DNA, 25 bp, Homo sapien
aacattggtcgaggacagcaaagag

SEQ ID NO: 2870322 - DNA, 25 bp, Homo sapien
tggtaaacgtgtagccacctaggcc

SEQ ID NO: 2870323 - DNA, 25 bp, Homo sapien
caagtggtaaacgtgtagccaccta

SEQ ID NO: 2870324 - DNA, 25 bp, Homo sapien
ccggcgacaagtggtaaacgtgtag

SEQ ID NO: 2870325 - DNA, 25 bp, Homo sapien
gcgacaagtggtaaacgtgtagcca

SEQ ID NO: 2870326 - DNA, 25 bp, Homo sapien
aaagagagcccagcataatctggtc

SEQ ID NO: 2870327 - DNA, 25 bp, Homo sapien
gagccaaagagagcccagcataatc

SEQ ID NO: 2870328 - DNA, 25 bp, Homo sapien
ccaaagagagcccagcataatctgg

SEQ ID NO: 2870329 - DNA, 25 bp, Homo sapien
tgaggatggagccaaagagagccca

SEQ ID NO: 2870330 - DNA, 25 bp, Homo sapien
ctacctttaatgtgtggccttgagt

SEQ ID NO: 2870331 - DNA, 25 bp, Homo sapien
tggagacagtgaggagtagcggaaa

SEQ ID NO: 2870332 - DNA, 25 bp, Homo sapien
ctggagacagtgaggagtagcggaa

SEQ ID NO: 2870333 - DNA, 25 bp, Homo sapien
ggagacagtgaggagtagcggaaag

SEQ ID NO: 2870334 - DNA, 25 bp, Homo sapien
tgtgtacaagtcacctagatctttg

SEQ ID NO: 2870335 - DNA, 25 bp, Homo sapien
gatctttgtcgtactctccccaggt

SEQ ID NO: 2870336 - DNA, 25 bp, Homo sapien
tactacctttgatgcagtgcctggc

SEQ ID NO: 2870337 - DNA, 25 bp, Homo sapien
cacatagtaggttcacaatttggga

SEQ ID NO: 2870338 - DNA, 25 bp, Homo sapien
tttgatcagtaactgacagtcaaca

SEQ ID NO: 2870339 - DNA, 25 bp, Homo sapien
ttgatcagtaactgacagtcaacaa

SEQ ID NO: 2870340 - DNA, 25 bp, Homo sapien
gtttgatcagtaactgacagtcaac

SEQ ID NO: 2870341 - DNA, 25 bp, Homo sapien
tgatcagtaactgacagtcaacaaa

SEQ ID NO: 2870342 - DNA, 25 bp, Homo sapien
agggctgtgttatctagggtaaaag

SEQ ID NO: 2870343 - DNA, 25 bp, Homo sapien
ggccccgcctctgggtgtttcagag

SEQ ID NO: 2870344 - DNA, 25 bp, Homo sapien
gtaggagaacgctccaagggctgtg

SEQ ID NO: 2870345 - DNA, 25 bp, Homo sapien
gttatctagggtaaaagccacatga

SEQ ID NO: 2870346 - DNA, 25 bp, Homo sapien
tcttttcaggcctctattatacttg

SEQ ID NO: 2870347 - DNA, 25 bp, Homo sapien
aggctgcgctccgatggattgcgac

SEQ ID NO: 2870348 - DNA, 25 bp, Homo sapien
gctgcgctccgatggattgcgaccc

SEQ ID NO: 2870349 - DNA, 25 bp, Homo sapien
gatggattgcgacccctgttcctcc

SEQ ID NO: 2870350 - DNA, 25 bp, Homo sapien
ctccgatggattgcgacccctgttc

SEQ ID NO: 2870351 - DNA, 25 bp, Homo sapien
agcatctggcggaacattctgcccc

SEQ ID NO: 2870352 - DNA, 25 bp, Homo sapien
cagcatctggcggaacattctgccc

SEQ ID NO: 2870353 - DNA, 25 bp, Homo sapien
caaaacaaacagtgggctgagggcc

SEQ ID NO: 2870354 - DNA, 25 bp, Homo sapien
ggagggtgttgcaccacacaaggcc

SEQ ID NO: 2870355 - DNA, 25 bp, Homo sapien
caaactgggatgctacggtcctcca

SEQ ID NO: 2870356 - DNA, 25 bp, Homo sapien
gctgagagactgagaactgggcaaa

SEQ ID NO: 2870357 - DNA, 25 bp, Homo sapien
ttcctggtcataatcacttcctcca

SEQ ID NO: 2870358 - DNA, 25 bp, Homo sapien
cctggtcataatcacttcctccatc

SEQ ID NO: 2870359 - DNA, 25 bp, Homo sapien
ttcctccatccccggcttctgtcat

SEQ ID NO: 2870360 - DNA, 25 bp, Homo sapien
acttcctccatccccggcttctgtc

SEQ ID NO: 2870361 - DNA, 25 bp, Homo sapien
cagttgtggaactagccttgtgacc

SEQ ID NO: 2870362 - DNA, 25 bp, Homo sapien
ccttgtgacccacatccgtgtgtgt

SEQ ID NO: 2870363 - DNA, 25 bp, Homo sapien
ttgtttcgagttccggctggcctgg

SEQ ID NO: 2870364 - DNA, 25 bp, Homo sapien
taatggctggctgttgcagttgtgg

SEQ ID NO: 2870365 - DNA, 25 bp, Homo sapien
tacccggtacatctaaatcagtgag

SEQ ID NO: 2870366 - DNA, 25 bp, Homo sapien
caaggccgtttggattcctgactgt

SEQ ID NO: 2870367 - DNA, 25 bp, Homo sapien
tcctagccagtttttgtcaggcgtg

SEQ ID NO: 2870368 - DNA, 25 bp, Homo sapien
taatgcacagccaagacggaggaga

SEQ ID NO: 2870369 - DNA, 25 bp, Homo sapien
tggtcagacccagagttagacccct

SEQ ID NO: 2870370 - DNA, 25 bp, Homo sapien
gatagatggcagtagtgggtcttct

SEQ ID NO: 2870371 - DNA, 25 bp, Homo sapien
acagccatagacgtcaaacaccagt

SEQ ID NO: 2870372 - DNA, 25 bp, Homo sapien
cacatgggaacacctgagatggtca

SEQ ID NO: 2870373 - DNA, 25 bp, Homo sapien
ctggagcgcgaggccctgtggggaa

SEQ ID NO: 2870374 - DNA, 25 bp, Homo sapien
ggagcgcgaggccctgtggggaagg

SEQ ID NO: 2870375 - DNA, 25 bp, Homo sapien
acctggagcgcgaggccctgtgggg

SEQ ID NO: 2870376 - DNA, 25 bp, Homo sapien
cctggagcgcgaggccctgtgggga

SEQ ID NO: 2870377 - DNA, 25 bp, Homo sapien
tccagttgatggcaggagtcatatg

SEQ ID NO: 2870378 - DNA, 25 bp, Homo sapien
tcttggtgaatgttaggtcctcaca

SEQ ID NO: 2870379 - DNA, 25 bp, Homo sapien
cctctctgtcctggtgcatagcaca

SEQ ID NO: 2870380 - DNA, 25 bp, Homo sapien
tggtgcatagcacaagacctcaccc

SEQ ID NO: 2870381 - DNA, 25 bp, Homo sapien
tgctgagatggtctcgggcctaacc

SEQ ID NO: 2870382 - DNA, 25 bp, Homo sapien
caaccttaagtgaggccttgctgta

SEQ ID NO: 2870383 - DNA, 25 bp, Homo sapien
cacactgccgggtgggaacaatgac

SEQ ID NO: 2870384 - DNA, 25 bp, Homo sapien
tgatctggacccagcaaacatggcc

SEQ ID NO: 2870385 - DNA, 25 bp, Homo sapien
ggtccgctgttgtccacagaaagaa

SEQ ID NO: 2870386 - DNA, 25 bp, Homo sapien
cagccagatgtttggggccaaagtc

SEQ ID NO: 2870387 - DNA, 25 bp, Homo sapien
gagggccctgcccaagattccaagg

SEQ ID NO: 2870388 - DNA, 25 bp, Homo sapien
gctgggagcttgtgagggccctgcc

SEQ ID NO: 2870389 - DNA, 25 bp, Homo sapien
tgggatctcccaggtctgggtcgtc

SEQ ID NO: 2870390 - DNA, 25 bp, Homo sapien
cttcatagcttcctgggatctccca

SEQ ID NO: 2870391 - DNA, 25 bp, Homo sapien
cctgggatctcccaggtctgggtcg

SEQ ID NO: 2870392 - DNA, 25 bp, Homo sapien
ggatctcccaggtctgggtcgtcat

SEQ ID NO: 2870393 - DNA, 25 bp, Homo sapien
ccagtgccacggcctgctgtcagca

SEQ ID NO: 2870394 - DNA, 25 bp, Homo sapien
gtgccacggcctgctgtcagcatgg

SEQ ID NO: 2870395 - DNA, 25 bp, Homo sapien
agtgccacggcctgctgtcagcatg

SEQ ID NO: 2870396 - DNA, 25 bp, Homo sapien
gccacggcctgctgtcagcatgggc

SEQ ID NO: 2870397 - DNA, 25 bp, Homo sapien
gataacccattttcttagtgacatt

SEQ ID NO: 2870398 - DNA, 25 bp, Homo sapien
aacccattttcttagtgacattcat

SEQ ID NO: 2870399 - DNA, 25 bp, Homo sapien
agcctcctgataacccattttctta

SEQ ID NO: 2870400 - DNA, 25 bp, Homo sapien
cagcctcctgataacccattttctt

SEQ ID NO: 2870401 - DNA, 25 bp, Homo sapien
ttcagaggaccagtatggcagaccc

SEQ ID NO: 2870402 - DNA, 25 bp, Homo sapien
tccagaggttaagtacctgaggcag

SEQ ID NO: 2870403 - DNA, 25 bp, Homo sapien
tagcgttcatcagaccctaagcatt

SEQ ID NO: 2870404 - DNA, 25 bp, Homo sapien
tattaagcactttccacctagcgtt

SEQ ID NO: 2870405 - DNA, 25 bp, Homo sapien
tccgtcttctcaatcatcatgacag

SEQ ID NO: 2870406 - DNA, 25 bp, Homo sapien
gtttagctcagttaattataacaac

SEQ ID NO: 2870407 - DNA, 25 bp, Homo sapien
ttcctgggggctagacatgctaagc

SEQ ID NO: 2870408 - DNA, 25 bp, Homo sapien
gacatgctaagctctcttcttccgt

SEQ ID NO: 2870409 - DNA, 25 bp, Homo sapien
agaggatggctcgatgttttgcagc

SEQ ID NO: 2870410 - DNA, 25 bp, Homo sapien
cagctgggcaagatgcattgacgcc

SEQ ID NO: 2870411 - DNA, 25 bp, Homo sapien
tctgaggcctggaagaagatccagc

SEQ ID NO: 2870412 - DNA, 25 bp, Homo sapien
gagccccaagaacagagtcaggcaa

SEQ ID NO: 2870413 - DNA, 25 bp, Homo sapien
gatttgtcactatagatggaaccct

SEQ ID NO: 2870414 - DNA, 25 bp, Homo sapien
gacatggtttgtgcacttacgtcca

SEQ ID NO: 2870415 - DNA, 25 bp, Homo sapien
gactccctacgggtgcagagcactt

SEQ ID NO: 2870416 - DNA, 25 bp, Homo sapien
ttacgtccagatgggaagcatcctt

SEQ ID NO: 2870417 - DNA, 25 bp, Homo sapien
ggagtccctttggtgtgtgaatatg

SEQ ID NO: 2870418 - DNA, 25 bp, Homo sapien
tctggtatcggtggccacttggatg

SEQ ID NO: 2870419 - DNA, 25 bp, Homo sapien
ttacattctgttccccagttacagg

SEQ ID NO: 2870420 - DNA, 25 bp, Homo sapien
ttggttatttctggtatcggtggcc

SEQ ID NO: 2870421 - DNA, 25 bp, Homo sapien
tagcccagggtcattgtcgaatgtg

SEQ ID NO: 2870422 - DNA, 25 bp, Homo sapien
gagagacagagaacggaacaactga

SEQ ID NO: 2870423 - DNA, 25 bp, Homo sapien
gggaacaccgatacaggtttctctg

SEQ ID NO: 2870424 - DNA, 25 bp, Homo sapien
ctctgtaaggtagagccttagccca

SEQ ID NO: 2870425 - DNA, 25 bp, Homo sapien
ccagatgtggattacagtggtttca

SEQ ID NO: 2870426 - DNA, 25 bp, Homo sapien
gtggtttcatataagaggatttcta

SEQ ID NO: 2870427 - DNA, 25 bp, Homo sapien
gagaagctgaagtgttgcaaacaac

SEQ ID NO: 2870428 - DNA, 25 bp, Homo sapien
gcgtctctggagacgtgcttcgtga

SEQ ID NO: 2870429 - DNA, 25 bp, Homo sapien
ttaaattcttgccggaaacaatgtg

SEQ ID NO: 2870430 - DNA, 25 bp, Homo sapien
cagcctgtggttagtttttattact

SEQ ID NO: 2870431 - DNA, 25 bp, Homo sapien
gggaggccactggaggtctcaatcc

SEQ ID NO: 2870432 - DNA, 25 bp, Homo sapien
attcttgccggaaacaatgtgggag

SEQ ID NO: 2870433 - DNA, 25 bp, Homo sapien
gaaggttcattagctgctgcggcag

SEQ ID NO: 2870434 - DNA, 25 bp, Homo sapien
gaggtcacgcacttcattctggcca

SEQ ID NO: 2870435 - DNA, 25 bp, Homo sapien
gagagacctcgtaacttggcatggc

SEQ ID NO: 2870436 - DNA, 25 bp, Homo sapien
tgcatgccaggcaagagtgactgct

SEQ ID NO: 2870437 - DNA, 25 bp, Homo sapien
tgtcatccaggatatcattgtgcct

SEQ ID NO: 2870438 - DNA, 25 bp, Homo sapien
tcactacattgttagaatgacagcc

SEQ ID NO: 2870439 - DNA, 25 bp, Homo sapien
gagttcctgcgcatgtttccagggg

SEQ ID NO: 2870440 - DNA, 25 bp, Homo sapien
gggcatgagacaagacagccagtct

SEQ ID NO: 2870441 - DNA, 25 bp, Homo sapien
gacctttactgtgtgtgcgccgtta

SEQ ID NO: 2870442 - DNA, 25 bp, Homo sapien
gcagggcatgggtttgactaacacc

SEQ ID NO: 2870443 - DNA, 25 bp, Homo sapien
tcctgggttgccgataggtaatgac

SEQ ID NO: 2870444 - DNA, 25 bp, Homo sapien
gcttctgcaaatagcccaggtgtgg

SEQ ID NO: 2870445 - DNA, 25 bp, Homo sapien
actgcagcccagggaacaagagcga

SEQ ID NO: 2870446 - DNA, 25 bp, Homo sapien
ctgcactgcagcccagggaacaaga

SEQ ID NO: 2870447 - DNA, 25 bp, Homo sapien
cactgcactgcagcccagggaacaa

SEQ ID NO: 2870448 - DNA, 25 bp, Homo sapien
gcactgcagcccagggaacaagagc

SEQ ID NO: 2870449 - DNA, 25 bp, Homo sapien
ttaacccgaagagagtcgagaccca

SEQ ID NO: 2870450 - DNA, 25 bp, Homo sapien
caaagtgtcggcctagccagtggtt

SEQ ID NO: 2870451 - DNA, 25 bp, Homo sapien
cttgcatagaataaaccccgtcggt

SEQ ID NO: 2870452 - DNA, 25 bp, Homo sapien
gagtttcagcatgccggcatttggc

SEQ ID NO: 2870453 - DNA, 25 bp, Homo sapien
accccaagccgctgggggcgccatt

SEQ ID NO: 2870454 - DNA, 25 bp, Homo sapien
gcactgagatcccaccccaagccgc

SEQ ID NO: 2870455 - DNA, 25 bp, Homo sapien
actgagatcccaccccaagccgctg

SEQ ID NO: 2870456 - DNA, 25 bp, Homo sapien
gccgctgggggcgccattcgacttc

SEQ ID NO: 2870457 - DNA, 25 bp, Homo sapien
ggaataaatagaacctgttgtgcaa

SEQ ID NO: 2870458 - DNA, 25 bp, Homo sapien
tgtgcaaccacggtttaaccggaga

SEQ ID NO: 2870459 - DNA, 25 bp, Homo sapien
aaagccaagtctcgacaagttggaa

SEQ ID NO: 2870460 - DNA, 25 bp, Homo sapien
aaccggagattttgaggctagggtg

SEQ ID NO: 2870461 - DNA, 25 bp, Homo sapien
caccatgagcggcttcagcactgag

SEQ ID NO: 2870462 - DNA, 25 bp, Homo sapien
tcctgatgcaggcaattatactgat

SEQ ID NO: 2870463 - DNA, 25 bp, Homo sapien
gataaggatgtgttccacgtggtag

SEQ ID NO: 2870464 - DNA, 25 bp, Homo sapien
ggtagttgaagtaccactgtggtct

SEQ ID NO: 2870465 - DNA, 25 bp, Homo sapien
cttctggtgtggagaatttgtcatt

SEQ ID NO: 2870466 - DNA, 25 bp, Homo sapien
atgactaccttctggtgtggagaat

SEQ ID NO: 2870467 - DNA, 25 bp, Homo sapien
taccttctggtgtggagaatttgtc

SEQ ID NO: 2870468 - DNA, 25 bp, Homo sapien
aatttgacaattttgattctcactg

SEQ ID NO: 2870469 - DNA, 25 bp, Homo sapien
gactaccttctggtgtggagaattt

SEQ ID NO: 2870470 - DNA, 25 bp, Homo sapien
gtgtggagaatttgtcattggaaaa

SEQ ID NO: 2870471 - DNA, 25 bp, Homo sapien
cagtgagaatcaaaattgtcaaatt

SEQ ID NO: 2870472 - DNA, 25 bp, Homo sapien
caaattctccacaccagaaggtagt

SEQ ID NO: 2870473 - DNA, 25 bp, Homo sapien
gacaaattctccacaccagaaggta

SEQ ID NO: 2870474 - DNA, 25 bp, Homo sapien
aatgacaaattctccacaccagaag

SEQ ID NO: 2870475 - DNA, 25 bp, Homo sapien
aattctccacaccagaaggtagtca

SEQ ID NO: 2870476 - DNA, 25 bp, Homo sapien
ttttccaatgacaaattctccacac

SEQ ID NO: 2870477 - DNA, 25 bp, Homo sapien
ggactcctgagtcccattatactag

SEQ ID NO: 2870478 - DNA, 25 bp, Homo sapien
cccattatactaggctgtttctata

SEQ ID NO: 2870479 - DNA, 25 bp, Homo sapien
tcctgagtcccattatactaggctg

SEQ ID NO: 2870480 - DNA, 25 bp, Homo sapien
ctgagtcccattatactaggctgtt

SEQ ID NO: 2870481 - DNA, 25 bp, Homo sapien
tataggctattaaggatgaaacagg

SEQ ID NO: 2870482 - DNA, 25 bp, Homo sapien
gagtcccattatactaggctgtttc

SEQ ID NO: 2870483 - DNA, 25 bp, Homo sapien
ctagtataatgggactcaggagtcc

SEQ ID NO: 2870484 - DNA, 25 bp, Homo sapien
gaaacagcctagtataatgggactc

SEQ ID NO: 2870485 - DNA, 25 bp, Homo sapien
cagcctagtataatgggactcagga

SEQ ID NO: 2870486 - DNA, 25 bp, Homo sapien
gtataatgggactcaggagtcctgg

SEQ ID NO: 2870487 - DNA, 25 bp, Homo sapien
tatagaaacagcctagtataatggg

SEQ ID NO: 2870488 - DNA, 25 bp, Homo sapien
cctgtttcatccttaatagcctata

SEQ ID NO: 2870489 - DNA, 25 bp, Homo sapien
gaagagttgtccctatgtttgcttc

SEQ ID NO: 2870490 - DNA, 25 bp, Homo sapien
ttagtcataaaacttttgcctagac

SEQ ID NO: 2870491 - DNA, 25 bp, Homo sapien
tctgaagagttgtccctatgtttgc

SEQ ID NO: 2870492 - DNA, 25 bp, Homo sapien
aagagttgtccctatgtttgcttct

SEQ ID NO: 2870493 - DNA, 25 bp, Homo sapien
ctgaagagttgtccctatgtttgct

SEQ ID NO: 2870494 - DNA, 25 bp, Homo sapien
gagttgtccctatgtttgcttctag

SEQ ID NO: 2870495 - DNA, 25 bp, Homo sapien
agcaaacatagggacaactcttcag

SEQ ID NO: 2870496 - DNA, 25 bp, Homo sapien
ctagaagcaaacatagggacaactc

SEQ ID NO: 2870497 - DNA, 25 bp, Homo sapien
gtctaggcaaaagttttatgactaa

SEQ ID NO: 2870498 - DNA, 25 bp, Homo sapien
tagaagcaaacatagggacaactct

SEQ ID NO: 2870499 - DNA, 25 bp, Homo sapien
gaagcaaacatagggacaactcttc

SEQ ID NO: 2870500 - DNA, 25 bp, Homo sapien
caaacatagggacaactcttcagag

SEQ ID NO: 2870501 - DNA, 25 bp, Homo sapien
gaatacccagccagagtactcggag

SEQ ID NO: 2870502 - DNA, 25 bp, Homo sapien
tacccagccagagtactcggagtaa

SEQ ID NO: 2870503 - DNA, 25 bp, Homo sapien
gtgacgcgacaggttctgaccctga

SEQ ID NO: 2870504 - DNA, 25 bp, Homo sapien
gagaaaaaagtgacgcgacaggttc

SEQ ID NO: 2870505 - DNA, 25 bp, Homo sapien
aaaagtgacgcgacaggttctgacc

SEQ ID NO: 2870506 - DNA, 25 bp, Homo sapien
acgcgacaggttctgaccctgacaa

SEQ ID NO: 2870507 - DNA, 25 bp, Homo sapien
gaacctgtcgcgtcacttttttctc

SEQ ID NO: 2870508 - DNA, 25 bp, Homo sapien
tcagggtcagaacctgtcgcgtcac

SEQ ID NO: 2870509 - DNA, 25 bp, Homo sapien
ggtcagaacctgtcgcgtcactttt

SEQ ID NO: 2870510 - DNA, 25 bp, Homo sapien
ctccgagtactctggctgggtattc

SEQ ID NO: 2870511 - DNA, 25 bp, Homo sapien
ttactccgagtactctggctgggta

SEQ ID NO: 2870512 - DNA, 25 bp, Homo sapien
ttgtcagggtcagaacctgtcgcgt

SEQ ID NO: 2870513 - DNA, 25 bp, Homo sapien
cgagaaagttaaccaagccaacact

SEQ ID NO: 2870514 - DNA, 25 bp, Homo sapien
cacaggataatcaacttggtgcaag

SEQ ID NO: 2870515 - DNA, 25 bp, Homo sapien
taacatcgagaaagttaaccaagcc

SEQ ID NO: 2870516 - DNA, 25 bp, Homo sapien
gataatcaacttggtgcaagtttgg

SEQ ID NO: 2870517 - DNA, 25 bp, Homo sapien
aatatgaaacacaggataatcaact

SEQ ID NO: 2870518 - DNA, 25 bp, Homo sapien
acatcgagaaagttaaccaagccaa

SEQ ID NO: 2870519 - DNA, 25 bp, Homo sapien
ccaaacttgcaccaagttgattatc

SEQ ID NO: 2870520 - DNA, 25 bp, Homo sapien
cttgcaccaagttgattatcctgtg

SEQ ID NO: 2870521 - DNA, 25 bp, Homo sapien
tgcaccaagttgattatcctgtgtt

SEQ ID NO: 2870522 - DNA, 25 bp, Homo sapien
agtgttggcttggttaactttctcg

SEQ ID NO: 2870523 - DNA, 25 bp, Homo sapien
ggcttggttaactttctcgatgtta

SEQ ID NO: 2870524 - DNA, 25 bp, Homo sapien
aacttgcaccaagttgattatcctg

SEQ ID NO: 2870525 - DNA, 25 bp, Homo sapien
taatggccaaaacaggcaagtcaag

SEQ ID NO: 2870526 - DNA, 25 bp, Homo sapien
aacacgctgcattgtagaataaggc

SEQ ID NO: 2870527 - DNA, 25 bp, Homo sapien
gagtcggcacagttcaggttatgga

SEQ ID NO: 2870528 - DNA, 25 bp, Homo sapien
cataatcgttttgtggagtcggcac

SEQ ID NO: 2870529 - DNA, 25 bp, Homo sapien
taacgtttaaggcagctaatggcca

SEQ ID NO: 2870530 - DNA, 25 bp, Homo sapien
tggaggcacgtaattcaccaaagtg

SEQ ID NO: 2870531 - DNA, 25 bp, Homo sapien
gtgccgactccacaaaacgattatg

SEQ ID NO: 2870532 - DNA, 25 bp, Homo sapien
aatctgtggatttgaagatggctcc

SEQ ID NO: 2870533 - DNA, 25 bp, Homo sapien
cactttggtgaattacgtgcctcca

SEQ ID NO: 2870534 - DNA, 25 bp, Homo sapien
agagcacgttcagagggaagagcca

SEQ ID NO: 2870535 - DNA, 25 bp, Homo sapien
gaatgccttattctacaatgcagcg

SEQ ID NO: 2870536 - DNA, 25 bp, Homo sapien
tccataacctgaactgtgccgactc

SEQ ID NO: 2870537 - DNA, 25 bp, Homo sapien
gacctccatttagcccgttcagagg

SEQ ID NO: 2870538 - DNA, 25 bp, Homo sapien
tagcccgttcagaggataccgaaaa

SEQ ID NO: 2870539 - DNA, 25 bp, Homo sapien
catccagtgtttgtcagggcccaga

SEQ ID NO: 2870540 - DNA, 25 bp, Homo sapien
ccgaaaatgttcctgcgctccagag

SEQ ID NO: 2870541 - DNA, 25 bp, Homo sapien
gtgcagtagtcaggcaaaagagcag

SEQ ID NO: 2870542 - DNA, 25 bp, Homo sapien
aagtgcagtagtcaggcaaaagagc

SEQ ID NO: 2870543 - DNA, 25 bp, Homo sapien
agtgcagtagtcaggcaaaagagca

SEQ ID NO: 2870544 - DNA, 25 bp, Homo sapien
tgtacagtcgtatacgggtctctct

SEQ ID NO: 2870545 - DNA, 25 bp, Homo sapien
taggcgcttctgtagtagtggcatt

SEQ ID NO: 2870546 - DNA, 25 bp, Homo sapien
ctctcttcaaaggtgcacgcagtct

SEQ ID NO: 2870547 - DNA, 25 bp, Homo sapien
tgatccctgtgcctcggaatccgtg

SEQ ID NO: 2870548 - DNA, 25 bp, Homo sapien
agtccgatcggaccaggaagtagct

SEQ ID NO: 2870549 - DNA, 25 bp, Homo sapien
tgtccgaaggcgagtccgatcggac

SEQ ID NO: 2870550 - DNA, 25 bp, Homo sapien
gagcctgacctcgacccgcctttct

SEQ ID NO: 2870551 - DNA, 25 bp, Homo sapien
tgtttcgggtgtccgaaggcgagtc

SEQ ID NO: 2870552 - DNA, 25 bp, Homo sapien
gattccttatccagaaggacatgtg

SEQ ID NO: 2870553 - DNA, 25 bp, Homo sapien
ctttgattccttatccagaaggaca

SEQ ID NO: 2870554 - DNA, 25 bp, Homo sapien
tccttatccagaaggacatgtggtc

SEQ ID NO: 2870555 - DNA, 25 bp, Homo sapien
ttgattccttatccagaaggacatg

SEQ ID NO: 2870556 - DNA, 25 bp, Homo sapien
gactgctcggaagggcattgcattt

SEQ ID NO: 2870557 - DNA, 25 bp, Homo sapien
tggatgactgctcggaagggcattg

SEQ ID NO: 2870558 - DNA, 25 bp, Homo sapien
tgctcggaagggcattgcatttggc

SEQ ID NO: 2870559 - DNA, 25 bp, Homo sapien
gctcggaagggcattgcatttggca

SEQ ID NO: 2870560 - DNA, 25 bp, Homo sapien
tatgatggtcattctcaaagatgtc

SEQ ID NO: 2870561 - DNA, 25 bp, Homo sapien
atatgatggtcattctcaaagatgt

SEQ ID NO: 2870562 - DNA, 25 bp, Homo sapien
gatatgatggtcattctcaaagatg

SEQ ID NO: 2870563 - DNA, 25 bp, Homo sapien
gattatgactacataccagttgtag

SEQ ID NO: 2870564 - DNA, 25 bp, Homo sapien
gagaattagggcaatgattatgact

SEQ ID NO: 2870565 - DNA, 25 bp, Homo sapien
cataccagttgtaggacgacggcat

SEQ ID NO: 2870566 - DNA, 25 bp, Homo sapien
ggcaatgattatgactacataccag

SEQ ID NO: 2870567 - DNA, 25 bp, Homo sapien
cctgctgtttattgtggaaatcatc

SEQ ID NO: 2870568 - DNA, 25 bp, Homo sapien
catcttcgatcttggaattgaaagt

SEQ ID NO: 2870569 - DNA, 25 bp, Homo sapien
aaagcagtgatccaagcaattgaat

SEQ ID NO: 2870570 - DNA, 25 bp, Homo sapien
gggaaacctgctgtttattgtggaa

SEQ ID NO: 2870571 - DNA, 25 bp, Homo sapien
tgggtcagctttttagcagtctctg

SEQ ID NO: 2870572 - DNA, 25 bp, Homo sapien
tcaggtcatgggtcagctttttagc

SEQ ID NO: 2870573 - DNA, 25 bp, Homo sapien
ctgatggccttcaggtcatgggtca

SEQ ID NO: 2870574 - DNA, 25 bp, Homo sapien
tggccttcaggtcatgggtcagctt

SEQ ID NO: 2870575 - DNA, 25 bp, Homo sapien
ctttgggacagttaggcacccactt

SEQ ID NO: 2870576 - DNA, 25 bp, Homo sapien
tagcctagtgtaagcggaatggatc

SEQ ID NO: 2870577 - DNA, 25 bp, Homo sapien
ggatgcctttcgaagccacaccttt

SEQ ID NO: 2870578 - DNA, 25 bp, Homo sapien
tctcttagcaaacagttcggatcca

SEQ ID NO: 2870579 - DNA, 25 bp, Homo sapien
ttttcggaacaaactctgatgagca

SEQ ID NO: 2870580 - DNA, 25 bp, Homo sapien
tggagagatggtcatagccacacac

SEQ ID NO: 2870581 - DNA, 25 bp, Homo sapien
ggagagatggtcatagccacacaca

SEQ ID NO: 2870582 - DNA, 25 bp, Homo sapien
gatttctagttatacagttgccaaa

SEQ ID NO: 2870583 - DNA, 25 bp, Homo sapien
gccaaaatatcatacttggtattat

SEQ ID NO: 2870584 - DNA, 25 bp, Homo sapien
taattgatattctgatgatctatcc

SEQ ID NO: 2870585 - DNA, 25 bp, Homo sapien
gcctaacatatgatctaaactagag

SEQ ID NO: 2870586 - DNA, 25 bp, Homo sapien
gcctcctgggttcaagcaattttcc

SEQ ID NO: 2870587 - DNA, 25 bp, Homo sapien
cacaatcttgactcattgcagtctc

SEQ ID NO: 2870588 - DNA, 25 bp, Homo sapien
tgggttcaagcaattttcctgcctc

SEQ ID NO: 2870589 - DNA, 25 bp, Homo sapien
ggtacccgccaccatgcccagctaa

SEQ ID NO: 2870590 - DNA, 25 bp, Homo sapien
gcctgtgggccatattagatgttca

SEQ ID NO: 2870591 - DNA, 25 bp, Homo sapien
tgtatatggcacacccagcacttgt

SEQ ID NO: 2870592 - DNA, 25 bp, Homo sapien
tgattaaaactgctactggcatcag

SEQ ID NO: 2870593 - DNA, 25 bp, Homo sapien
tagatgttcattgtcagagctcaag

SEQ ID NO: 2870594 - DNA, 25 bp, Homo sapien
tccatagtagataagttggtggcca

SEQ ID NO: 2870595 - DNA, 25 bp, Homo sapien
gaccggaagaagacaaatacttgca

SEQ ID NO: 2870596 - DNA, 25 bp, Homo sapien
caaagacaaatgcaactgatatggc

SEQ ID NO: 2870597 - DNA, 25 bp, Homo sapien
catatttcggtacttgaccggaaga

SEQ ID NO: 2870598 - DNA, 25 bp, Homo sapien
tcaaagatcaacacaggctaaaaca

SEQ ID NO: 2870599 - DNA, 25 bp, Homo sapien
tccgattgatgtattattgtgcatg

SEQ ID NO: 2870600 - DNA, 25 bp, Homo sapien
ggtattttcaaactagcttcttcaa

SEQ ID NO: 2870601 - DNA, 25 bp, Homo sapien
gttgccacttttccgattgatgtat

SEQ ID NO: 2870602 - DNA, 25 bp, Homo sapien
gaattgggtgccacacttttccagt

SEQ ID NO: 2870603 - DNA, 25 bp, Homo sapien
tgtctccatatgaaagcatgctgtc

SEQ ID NO: 2870604 - DNA, 25 bp, Homo sapien
catgctgtccagtcgctcttgttaa

SEQ ID NO: 2870605 - DNA, 25 bp, Homo sapien
tacaaaagcatcatgaaggatttca

SEQ ID NO: 2870606 - DNA, 25 bp, Homo sapien
tgcatagttgcgtaggatcctgttt

SEQ ID NO: 2870607 - DNA, 25 bp, Homo sapien
ttgtggttgacagcgatactagggc

SEQ ID NO: 2870608 - DNA, 25 bp, Homo sapien
tgagcacttctagtcagatacagat

SEQ ID NO: 2870609 - DNA, 25 bp, Homo sapien
tcccaactggagctatgacactttt

SEQ ID NO: 2870610 - DNA, 25 bp, Homo sapien
ggtcatttgcagcaagtccatgtgg

SEQ ID NO: 2870611 - DNA, 25 bp, Homo sapien
tcagccagactggtcatttgcagca

SEQ ID NO: 2870612 - DNA, 25 bp, Homo sapien
caaatgtggttgtatgatcccggga

SEQ ID NO: 2870613 - DNA, 25 bp, Homo sapien
actcctagacggcaagtgcgggcac

SEQ ID NO: 2870614 - DNA, 25 bp, Homo sapien
gcactgccgtctgctactctctgga

SEQ ID NO: 2870615 - DNA, 25 bp, Homo sapien
gctcacgttacacagcatcatgttg

SEQ ID NO: 2870616 - DNA, 25 bp, Homo sapien
cttgggcctccctgtgccttgcttg

SEQ ID NO: 2870617 - DNA, 25 bp, Homo sapien
tgggcctccctgtgccttgcttggg

SEQ ID NO: 2870618 - DNA, 25 bp, Homo sapien
gggcctccctgtgccttgcttgggt

SEQ ID NO: 2870619 - DNA, 25 bp, Homo sapien
gcctccctgtgccttgcttgggtca

SEQ ID NO: 2870620 - DNA, 25 bp, Homo sapien
tcattcaagttggtgccctgcgtca

SEQ ID NO: 2870621 - DNA, 25 bp, Homo sapien
gcagcttctgactgggcccaatgca

SEQ ID NO: 2870622 - DNA, 25 bp, Homo sapien
atgcagccggactttcctcattcaa

SEQ ID NO: 2870623 - DNA, 25 bp, Homo sapien
aagttggtgccctgcgtcagcccct

SEQ ID NO: 2870624 - DNA, 25 bp, Homo sapien
tccttgagaattctccagtggcctc

SEQ ID NO: 2870625 - DNA, 25 bp, Homo sapien
ccttgagaattctccagtggcctcc

SEQ ID NO: 2870626 - DNA, 25 bp, Homo sapien
cctccttgagaattctccagtggcc

SEQ ID NO: 2870627 - DNA, 25 bp, Homo sapien
ggcctccttgagaattctccagtgg

SEQ ID NO: 2870628 - DNA, 25 bp, Homo sapien
tatagccattgaggagtgaggcgct

SEQ ID NO: 2870629 - DNA, 25 bp, Homo sapien
agcccgagggctaccctatagccat

SEQ ID NO: 2870630 - DNA, 25 bp, Homo sapien
aggcgctgagggtccactcggtccc

SEQ ID NO: 2870631 - DNA, 25 bp, Homo sapien
gagggctaccctatagccattgagg

SEQ ID NO: 2870632 - DNA, 25 bp, Homo sapien
acagctcaggacgaaacctctcctg

SEQ ID NO: 2870633 - DNA, 25 bp, Homo sapien
cagagtagggccattttcaaaaggg

SEQ ID NO: 2870634 - DNA, 25 bp, Homo sapien
cttgacatcgaaagcgtgtggcatc

SEQ ID NO: 2870635 - DNA, 25 bp, Homo sapien
gggtgacgctcctcacttgcacagc

SEQ ID NO: 2870636 - DNA, 25 bp, Homo sapien
gaaggctgcaggatgaaagggcaga

SEQ ID NO: 2870637 - DNA, 25 bp, Homo sapien
cagaaggctgcaggatgaaagggca

SEQ ID NO: 2870638 - DNA, 25 bp, Homo sapien
aggctgcaggatgaaagggcagagg

SEQ ID NO: 2870639 - DNA, 25 bp, Homo sapien
cctttgttggcaagctcacaaagac

SEQ ID NO: 2870640 - DNA, 25 bp, Homo sapien
gttggcaagctcacaaagacattaa

SEQ ID NO: 2870641 - DNA, 25 bp, Homo sapien
cagacctttgttggcaagctcacaa

SEQ ID NO: 2870642 - DNA, 25 bp, Homo sapien
gcaagctcacaaagacattaacaag

SEQ ID NO: 2870643 - DNA, 25 bp, Homo sapien
atacagaaaacttaacagtgtacat

SEQ ID NO: 2870644 - DNA, 25 bp, Homo sapien
tttatatacagaaaacttaacagtg

SEQ ID NO: 2870645 - DNA, 25 bp, Homo sapien
tatacagaaaacttaacagtgtaca

SEQ ID NO: 2870646 - DNA, 25 bp, Homo sapien
tatatacagaaaacttaacagtgta

SEQ ID NO: 2870647 - DNA, 25 bp, Homo sapien
tggatctcatcatatttgtcgttgt

SEQ ID NO: 2870648 - DNA, 25 bp, Homo sapien
cggtggatctcatcatatttgtcgt

SEQ ID NO: 2870649 - DNA, 25 bp, Homo sapien
acggtggatctcatcatatttgtcg

SEQ ID NO: 2870650 - DNA, 25 bp, Homo sapien
cttttcaagcttggcgatgtgaacc

SEQ ID NO: 2870651 - DNA, 25 bp, Homo sapien
ctgtgtgaaggcggcagtggtgcag

SEQ ID NO: 2870652 - DNA, 25 bp, Homo sapien
gaaggcggcagtggtgcaggtcttc

SEQ ID NO: 2870653 - DNA, 25 bp, Homo sapien
tgtgaaggcggcagtggtgcaggtc

SEQ ID NO: 2870654 - DNA, 25 bp, Homo sapien
tgaaggcggcagtggtgcaggtctt

SEQ ID NO: 2870655 - DNA, 25 bp, Homo sapien
ctgtggactgactacacgccccagt

SEQ ID NO: 2870656 - DNA, 25 bp, Homo sapien
gtggactgactacacgccccagtct

SEQ ID NO: 2870657 - DNA, 25 bp, Homo sapien
tgtggactgactacacgccccagtc

SEQ ID NO: 2870658 - DNA, 25 bp, Homo sapien
tggactgactacacgccccagtctt

SEQ ID NO: 2870659 - DNA, 25 bp, Homo sapien
tatgacacagtgcaggcagggagac

SEQ ID NO: 2870660 - DNA, 25 bp, Homo sapien
tttatgacacagtgcaggcagggag

SEQ ID NO: 2870661 - DNA, 25 bp, Homo sapien
tgacacagtgcaggcagggagacaa

SEQ ID NO: 2870662 - DNA, 25 bp, Homo sapien
cttttatgacacagtgcaggcaggg

SEQ ID NO: 2870663 - DNA, 25 bp, Homo sapien
caaagtggtgatggtgttaactcct

SEQ ID NO: 2870664 - DNA, 25 bp, Homo sapien
ctctaccaaagtggtgatggtgtta

SEQ ID NO: 2870665 - DNA, 25 bp, Homo sapien
aagtggtgatggtgttaactcctgc

SEQ ID NO: 2870666 - DNA, 25 bp, Homo sapien
accaaagtggtgatggtgttaactc

SEQ ID NO: 2870667 - DNA, 25 bp, Homo sapien
tatgagccagtttaagcagctgagt

SEQ ID NO: 2870668 - DNA, 25 bp, Homo sapien
tctgtacttatgagccagtttaagc

SEQ ID NO: 2870669 - DNA, 25 bp, Homo sapien
tacttatgagccagtttaagcagct

SEQ ID NO: 2870670 - DNA, 25 bp, Homo sapien
ctctggtctgtacttatgagccagt

SEQ ID NO: 2870671 - DNA, 25 bp, Homo sapien
tattttaaagatctcacctgaaaag

SEQ ID NO: 2870672 - DNA, 25 bp, Homo sapien
tagccacttattttaaagatctcac

SEQ ID NO: 2870673 - DNA, 25 bp, Homo sapien
cttattttaaagatctcacctgaaa

SEQ ID NO: 2870674 - DNA, 25 bp, Homo sapien
ctatagccacttattttaaagatct

SEQ ID NO: 2870675 - DNA, 25 bp, Homo sapien
actggcaagagtctgggttctgctc

SEQ ID NO: 2870676 - DNA, 25 bp, Homo sapien
gatgatcttgaccacccacgtaacc

SEQ ID NO: 2870677 - DNA, 25 bp, Homo sapien
ctggagagacatccacagtgtggcg

SEQ ID NO: 2870678 - DNA, 25 bp, Homo sapien
tgaccacccacgtaacctcctcagt

SEQ ID NO: 2870679 - DNA, 25 bp, Homo sapien
ttcctggtgaggcagtaggacagct

SEQ ID NO: 2870680 - DNA, 25 bp, Homo sapien
tgaggcagtaggacagctcctggtt

SEQ ID NO: 2870681 - DNA, 25 bp, Homo sapien
agagagacaccacaggcgctggcgg

SEQ ID NO: 2870682 - DNA, 25 bp, Homo sapien
gctggcggggctgcatggttcctgg

SEQ ID NO: 2870683 - DNA, 25 bp, Homo sapien
gagtcaggggaacattgagaagcac

SEQ ID NO: 2870684 - DNA, 25 bp, Homo sapien
tgggagtcaggggaacattgagaag

SEQ ID NO: 2870685 - DNA, 25 bp, Homo sapien
acattgagaagcactcggttcctgg

SEQ ID NO: 2870686 - DNA, 25 bp, Homo sapien
ggaacattgagaagcactcggttcc

SEQ ID NO: 2870687 - DNA, 25 bp, Homo sapien
gagaacgcttgccaagggcttgggt

SEQ ID NO: 2870688 - DNA, 25 bp, Homo sapien
tgatgaggccccgacgtggcatctg

SEQ ID NO: 2870689 - DNA, 25 bp, Homo sapien
gcctcggcactcagtcccacgggca

SEQ ID NO: 2870690 - DNA, 25 bp, Homo sapien
ggtgagcaccatccgcaggacacct

SEQ ID NO: 2870691 - DNA, 25 bp, Homo sapien
gaacaaacgcgcgtgggacagaaaa

SEQ ID NO: 2870692 - DNA, 25 bp, Homo sapien
tctccgcaggagtgaatgcaaaatc

SEQ ID NO: 2870693 - DNA, 25 bp, Homo sapien
caacgcactctctttaatgggaagg

SEQ ID NO: 2870694 - DNA, 25 bp, Homo sapien
gactcagggtcatgttgggagcccc

SEQ ID NO: 2870695 - DNA, 25 bp, Homo sapien
tcccgagttgctctgcggaatcccg

SEQ ID NO: 2870696 - DNA, 25 bp, Homo sapien
atgcagcgtggacactcccgagttg

SEQ ID NO: 2870697 - DNA, 25 bp, Homo sapien
tataaccgtagggattgaggcccac

SEQ ID NO: 2870698 - DNA, 25 bp, Homo sapien
cccgacgccgaagttcacgaagttg

SEQ ID NO: 2870699 - DNA, 25 bp, Homo sapien
cttgccatcgcgcaccagcactggc

SEQ ID NO: 2870700 - DNA, 25 bp, Homo sapien
atcgcgcaccagcactggcaccgcg

SEQ ID NO: 2870701 - DNA, 25 bp, Homo sapien
gcgcaccagcactggcaccgcgatc

SEQ ID NO: 2870702 - DNA, 25 bp, Homo sapien
ttgccatcgcgcaccagcactggca

SEQ ID NO: 2870703 - DNA, 25 bp, Homo sapien
ctggtcctgccgctgccgcttgcac

SEQ ID NO: 2870704 - DNA, 25 bp, Homo sapien
cagctccagagtctggtcctgccgc

SEQ ID NO: 2870705 - DNA, 25 bp, Homo sapien
gctccagagtctggtcctgccgctg

SEQ ID NO: 2870706 - DNA, 25 bp, Homo sapien
gtctggtcctgccgctgccgcttgc

SEQ ID NO: 2870707 - DNA, 25 bp, Homo sapien
gacgtgagtttcagcacgctggcca

SEQ ID NO: 2870708 - DNA, 25 bp, Homo sapien
ctgcgtggacgtgagtttcagcacg

SEQ ID NO: 2870709 - DNA, 25 bp, Homo sapien
gccgctccgcgttgtccgcctctgt

SEQ ID NO: 2870710 - DNA, 25 bp, Homo sapien
cacgctggccagctggtcgcgttcg

SEQ ID NO: 2870711 - DNA, 25 bp, Homo sapien
ggccagcatgcaggaggagggcgcc

SEQ ID NO: 2870712 - DNA, 25 bp, Homo sapien
cggcgggaaaggcagacgcacactt

SEQ ID NO: 2870713 - DNA, 25 bp, Homo sapien
ctgtaggcacgtggatagaaggcgg

SEQ ID NO: 2870714 - DNA, 25 bp, Homo sapien
tcttttcggctctagggtccttggc

SEQ ID NO: 2870715 - DNA, 25 bp, Homo sapien
agaagggcgtgggcgtgagagcagg

SEQ ID NO: 2870716 - DNA, 25 bp, Homo sapien
gaagggcgtgggcgtgagagcaggg

SEQ ID NO: 2870717 - DNA, 25 bp, Homo sapien
agcgccaggtgggcggcagaaagcg

SEQ ID NO: 2870718 - DNA, 25 bp, Homo sapien
gcgccaggtgggcggcagaaagcgg

SEQ ID NO: 2870719 - DNA, 25 bp, Homo sapien
cagctctggatgtgtccgggcagca

SEQ ID NO: 2870720 - DNA, 25 bp, Homo sapien
cgtcggccagctctggatgtgtccg

SEQ ID NO: 2870721 - DNA, 25 bp, Homo sapien
gcacccgtcggccagctctggatgt

SEQ ID NO: 2870722 - DNA, 25 bp, Homo sapien
ccgcgcacccgtcggccagctctgg

SEQ ID NO: 2870723 - DNA, 25 bp, Homo sapien
gcctcgatgacaggagcgatgagca

SEQ ID NO: 2870724 - DNA, 25 bp, Homo sapien
cgatgagcagtttcgtgtcacctaa

SEQ ID NO: 2870725 - DNA, 25 bp, Homo sapien
gaggagggggactcagcctgccatt

SEQ ID NO: 2870726 - DNA, 25 bp, Homo sapien
tgacaggagcgatgagcagtttcgt

SEQ ID NO: 2870727 - DNA, 25 bp, Homo sapien
tcgcctggacttttggccacgttac

SEQ ID NO: 2870728 - DNA, 25 bp, Homo sapien
cttcctcgcctggacttttggccac

SEQ ID NO: 2870729 - DNA, 25 bp, Homo sapien
tcctcgcctggacttttggccacgt

SEQ ID NO: 2870730 - DNA, 25 bp, Homo sapien
cctcgcctggacttttggccacgtt

SEQ ID NO: 2870731 - DNA, 25 bp, Homo sapien
gcctatcgccgaggcggtgacgtct

SEQ ID NO: 2870732 - DNA, 25 bp, Homo sapien
gtcgttggagaggatgcctatcgcc

SEQ ID NO: 2870733 - DNA, 25 bp, Homo sapien
ttgaagattgttttcgagcgcgggc

SEQ ID NO: 2870734 - DNA, 25 bp, Homo sapien
ggtgacgtctggcaaacgagccaca

SEQ ID NO: 2870735 - DNA, 25 bp, Homo sapien
ttgaaagataagctggaactatcac

SEQ ID NO: 2870736 - DNA, 25 bp, Homo sapien
aattgaaagataagctggaactatc

SEQ ID NO: 2870737 - DNA, 25 bp, Homo sapien
taattgaaagataagctggaactat

SEQ ID NO: 2870738 - DNA, 25 bp, Homo sapien
ttaattgaaagataagctggaacta

SEQ ID NO: 2870739 - DNA, 25 bp, Homo sapien
caggcggcgttatccgcggctttat

SEQ ID NO: 2870740 - DNA, 25 bp, Homo sapien
tttatcttcaacaacgcctcgctct

SEQ ID NO: 2870741 - DNA, 25 bp, Homo sapien
gtttctgtctgggacgctcgcccca

SEQ ID NO: 2870742 - DNA, 25 bp, Homo sapien
acgtccattggagacaggcggcgtt

SEQ ID NO: 2870743 - DNA, 25 bp, Homo sapien
tgaacattagcactttttcggacta

SEQ ID NO: 2870744 - DNA, 25 bp, Homo sapien
aatcgcaactcgtgggagtccccgg

SEQ ID NO: 2870745 - DNA, 25 bp, Homo sapien
cattagcactttttcggactactgt

SEQ ID NO: 2870746 - DNA, 25 bp, Homo sapien
tattttgggaagaatcgcaactcgt

SEQ ID NO: 2870747 - DNA, 25 bp, Homo sapien
cgagagcgcgactctgctcttcgtc

SEQ ID NO: 2870748 - DNA, 25 bp, Homo sapien
tcttcgtccggctgatggatgagca

SEQ ID NO: 2870749 - DNA, 25 bp, Homo sapien
ctgatggatgagcagctccggctgc

SEQ ID NO: 2870750 - DNA, 25 bp, Homo sapien
gcaataattggcgagaaagcaaaca

SEQ ID NO: 2870751 - DNA, 25 bp, Homo sapien
gaggtagacaggcacgtgggtagtt

SEQ ID NO: 2870752 - DNA, 25 bp, Homo sapien
gcagaggtagacaggcacgtgggta

SEQ ID NO: 2870753 - DNA, 25 bp, Homo sapien
ggtagacaggcacgtgggtagttgt

SEQ ID NO: 2870754 - DNA, 25 bp, Homo sapien
cagaggtagacaggcacgtgggtag

SEQ ID NO: 2870755 - DNA, 25 bp, Homo sapien
caaaacgaacatgcctaagagggag

SEQ ID NO: 2870756 - DNA, 25 bp, Homo sapien
tctaacaggatgcaccagtgtctct

SEQ ID NO: 2870757 - DNA, 25 bp, Homo sapien
gatcaatgtaaagtgtcccaagcct

SEQ ID NO: 2870758 - DNA, 25 bp, Homo sapien
gcttattcttatccctctaacagga

SEQ ID NO: 2870759 - DNA, 25 bp, Homo sapien
tctcgtataattcggcgcaagcggt

SEQ ID NO: 2870760 - DNA, 25 bp, Homo sapien
gcgttctgcgctccaagcaaattgg

SEQ ID NO: 2870761 - DNA, 25 bp, Homo sapien
taccggagcaaagtcgggatcagca

SEQ ID NO: 2870762 - DNA, 25 bp, Homo sapien
gaaaagagagctggcgaactgccgc

SEQ ID NO: 2870763 - DNA, 25 bp, Homo sapien
aaaggagacgccacccgcattagga

SEQ ID NO: 2870764 - DNA, 25 bp, Homo sapien
cacccgcattaggacctagactggg

SEQ ID NO: 2870765 - DNA, 25 bp, Homo sapien
cccaaacgccgcctgtcaaaggaga

SEQ ID NO: 2870766 - DNA, 25 bp, Homo sapien
cttatctctcgtccccgctgttgtc

SEQ ID NO: 2870767 - DNA, 25 bp, Homo sapien
caggggtattccagcgtagagaaca

SEQ ID NO: 2870768 - DNA, 25 bp, Homo sapien
tgcttgcccagtagtaggtgctaaa

SEQ ID NO: 2870769 - DNA, 25 bp, Homo sapien
cacctgtcggtagcattttggtaac

SEQ ID NO: 2870770 - DNA, 25 bp, Homo sapien
gaaacagcacctgtcggtagcattt

SEQ ID NO: 2870771 - DNA, 25 bp, Homo sapien
atttggccccgttcaagtccacctg

SEQ ID NO: 2870772 - DNA, 25 bp, Homo sapien
tcaggctttcatttggccccgttca

SEQ ID NO: 2870773 - DNA, 25 bp, Homo sapien
aggctttcatttggccccgttcaag

SEQ ID NO: 2870774 - DNA, 25 bp, Homo sapien
tttcatttggccccgttcaagtcca

SEQ ID NO: 2870775 - DNA, 25 bp, Homo sapien
tccttcgctgctcgtggggcttctc

SEQ ID NO: 2870776 - DNA, 25 bp, Homo sapien
ctgacaaaggttcacctgcccactt

SEQ ID NO: 2870777 - DNA, 25 bp, Homo sapien
tccgtagcggggtgcccctgacaaa

SEQ ID NO: 2870778 - DNA, 25 bp, Homo sapien
ctttccttcgctgctcgtggggctt

SEQ ID NO: 2870779 - DNA, 25 bp, Homo sapien
ttgtaaacaccattgcactcggacc

SEQ ID NO: 2870780 - DNA, 25 bp, Homo sapien
taactggttgtgaccaattagttgt

SEQ ID NO: 2870781 - DNA, 25 bp, Homo sapien
aatggagaaggaataaagaaacctg

SEQ ID NO: 2870782 - DNA, 25 bp, Homo sapien
taaacaccattgcactcggaccacc

SEQ ID NO: 2870783 - DNA, 25 bp, Homo sapien
cttctgtccggtaactggtgggcat

SEQ ID NO: 2870784 - DNA, 25 bp, Homo sapien
tgggcattggggtagccccctgagg

SEQ ID NO: 2870785 - DNA, 25 bp, Homo sapien
tctgtccggtaactggtgggcattg

SEQ ID NO: 2870786 - DNA, 25 bp, Homo sapien
tccttctgtccggtaactggtgggc

SEQ ID NO: 2870787 - DNA, 25 bp, Homo sapien
ggccctgggtgccagactggggcaa

SEQ ID NO: 2870788 - DNA, 25 bp, Homo sapien
ctctgtaactgagaaggcattggat

SEQ ID NO: 2870789 - DNA, 25 bp, Homo sapien
actgagaaggcattggatgaggttt

SEQ ID NO: 2870790 - DNA, 25 bp, Homo sapien
ctccttcgggaaacctccactctct

SEQ ID NO: 2870791 - DNA, 25 bp, Homo sapien
tgtgctaaacaatgactgcgtcctt

SEQ ID NO: 2870792 - DNA, 25 bp, Homo sapien
gatatttccaactgctgagccatgg

SEQ ID NO: 2870793 - DNA, 25 bp, Homo sapien
ctgtgctggagacggtggatatttc

SEQ ID NO: 2870794 - DNA, 25 bp, Homo sapien
tctgccggggatctggttcatcttg

SEQ ID NO: 2870795 - DNA, 25 bp, Homo sapien
ctggtctgatgcttttccggcacac

SEQ ID NO: 2870796 - DNA, 25 bp, Homo sapien
tgatgcttttccggcacacagggat

SEQ ID NO: 2870797 - DNA, 25 bp, Homo sapien
tctgatgcttttccggcacacaggg

SEQ ID NO: 2870798 - DNA, 25 bp, Homo sapien
atgcttttccggcacacagggatag

SEQ ID NO: 2870799 - DNA, 25 bp, Homo sapien
cctgtttggcggagatggaagactt

SEQ ID NO: 2870800 - DNA, 25 bp, Homo sapien
ttacggcggagttgcctgtttggcg

SEQ ID NO: 2870801 - DNA, 25 bp, Homo sapien
catttcataggcagcggattcccgc

SEQ ID NO: 2870802 - DNA, 25 bp, Homo sapien
gcggattcccgcagtttcagactgg

SEQ ID NO: 2870803 - DNA, 25 bp, Homo sapien
ccaaggatcttagtgggtgagcagt

SEQ ID NO: 2870804 - DNA, 25 bp, Homo sapien
tcaggaagaggctctacatagaacc

SEQ ID NO: 2870805 - DNA, 25 bp, Homo sapien
tgagcagtgtccaagccaaggcgga

SEQ ID NO: 2870806 - DNA, 25 bp, Homo sapien
ctacatagaaccttgtggcgttcac

SEQ ID NO: 2870807 - DNA, 25 bp, Homo sapien
cacccggcaaggtggcagttggtgg

SEQ ID NO: 2870808 - DNA, 25 bp, Homo sapien
tgtccagagcagtgaactgcgtcat

SEQ ID NO: 2870809 - DNA, 25 bp, Homo sapien
cctggtgcattgagggaggcttctc

SEQ ID NO: 2870810 - DNA, 25 bp, Homo sapien
cacttgcctaggaaggttgcctgca

SEQ ID NO: 2870811 - DNA, 25 bp, Homo sapien
cagagactgtaggtgggatttgccc

SEQ ID NO: 2870812 - DNA, 25 bp, Homo sapien
ggagctctgagaccatcacatcagg

SEQ ID NO: 2870813 - DNA, 25 bp, Homo sapien
agagcttgagttgtcagcgagaata

SEQ ID NO: 2870814 - DNA, 25 bp, Homo sapien
gaagagcttgagttgtcagcgagaa

SEQ ID NO: 2870815 - DNA, 25 bp, Homo sapien
cagaagagcttgagttgtcagcgag

SEQ ID NO: 2870816 - DNA, 25 bp, Homo sapien
gcttgagttgtcagcgagaataaac

SEQ ID NO: 2870817 - DNA, 25 bp, Homo sapien
ttcttttaagggctgcgcagagttg

SEQ ID NO: 2870818 - DNA, 25 bp, Homo sapien
atttgctgctgctccgggatctttg

SEQ ID NO: 2870819 - DNA, 25 bp, Homo sapien
cccggctggtttgaaggtgccccat

SEQ ID NO: 2870820 - DNA, 25 bp, Homo sapien
cagtgtttcctagagcactctcagc

SEQ ID NO: 2870821 - DNA, 25 bp, Homo sapien
ctgtgcgcggatgcctgcagacgcc

SEQ ID NO: 2870822 - DNA, 25 bp, Homo sapien
cgccagcgcgaaggtgagaccgggc

SEQ ID NO: 2870823 - DNA, 25 bp, Homo sapien
gcgccacgtgcttacccggcggcct

SEQ ID NO: 2870824 - DNA, 25 bp, Homo sapien
cccagcggcgctgcaggaaccagcc

SEQ ID NO: 2870825 - DNA, 25 bp, Homo sapien
gaatttagagcccttttggatggca

SEQ ID NO: 2870826 - DNA, 25 bp, Homo sapien
cataaaaagtcaggctcggatgaca

SEQ ID NO: 2870827 - DNA, 25 bp, Homo sapien
tcggatgacagaggcagaatttaga

SEQ ID NO: 2870828 - DNA, 25 bp, Homo sapien
aggctctggacagcataaaaagtca

SEQ ID NO: 2870829 - DNA, 25 bp, Homo sapien
ggcgagtcaacacactcaggctcgc

SEQ ID NO: 2870830 - DNA, 25 bp, Homo sapien
aaccggaggcgagtcaacacactca

SEQ ID NO: 2870831 - DNA, 25 bp, Homo sapien
agtcaacacactcaggctcgctgca

SEQ ID NO: 2870832 - DNA, 25 bp, Homo sapien
ctgtcaaccggaggcgagtcaacac

SEQ ID NO: 2870833 - DNA, 25 bp, Homo sapien
ctgtcacccagatgcgactctttgc

SEQ ID NO: 2870834 - DNA, 25 bp, Homo sapien
gggctgtgtcaacaaagtccactca

SEQ ID NO: 2870835 - DNA, 25 bp, Homo sapien
ccagatgcgactctttgcccttcat

SEQ ID NO: 2870836 - DNA, 25 bp, Homo sapien
tgtgtcaacaaagtccactcactgt

SEQ ID NO: 2870837 - DNA, 25 bp, Homo sapien
tccctttctcatactaaccaggcct

SEQ ID NO: 2870838 - DNA, 25 bp, Homo sapien
tgtccagggcggtgtggctgtagac

SEQ ID NO: 2870839 - DNA, 25 bp, Homo sapien
agaccaggcatgtccagggcggtgt

SEQ ID NO: 2870840 - DNA, 25 bp, Homo sapien
caggcatgtccagggcggtgtggct

SEQ ID NO: 2870841 - DNA, 25 bp, Homo sapien
tgatgtgggcagctataattatttc

SEQ ID NO: 2870842 - DNA, 25 bp, Homo sapien
ccgcgtccaggactgtcttgaaggt

SEQ ID NO: 2870843 - DNA, 25 bp, Homo sapien
caaggaccgtaaacatatctttcct

SEQ ID NO: 2870844 - DNA, 25 bp, Homo sapien
cacccaaggatactcagattgtgag

SEQ ID NO: 2870845 - DNA, 25 bp, Homo sapien
gtgatgcgattgtggcaagttgctt

SEQ ID NO: 2870846 - DNA, 25 bp, Homo sapien
ttgcttctgagcgtcaggcctcttg

SEQ ID NO: 2870847 - DNA, 25 bp, Homo sapien
ttgtggcaagttgctttgcttctga

SEQ ID NO: 2870848 - DNA, 25 bp, Homo sapien
tctgtagaatggaccgttcctcggg

SEQ ID NO: 2870849 - DNA, 25 bp, Homo sapien
cctgctgggaaggtgcagtaagctc

SEQ ID NO: 2870850 - DNA, 25 bp, Homo sapien
tgctgggaaggtgcagtaagctcac

SEQ ID NO: 2870851 - DNA, 25 bp, Homo sapien
tctgcctgctgggaaggtgcagtaa

SEQ ID NO: 2870852 - DNA, 25 bp, Homo sapien
tgcctgctgggaaggtgcagtaagc

SEQ ID NO: 2870853 - DNA, 25 bp, Homo sapien
cattggatcagttgagcgggtgtac

SEQ ID NO: 2870854 - DNA, 25 bp, Homo sapien
tagaaagcttccaatactgtattgg

SEQ ID NO: 2870855 - DNA, 25 bp, Homo sapien
gattctccctgtgcccgttggcact

SEQ ID NO: 2870856 - DNA, 25 bp, Homo sapien
tctgggtgccttgttcgtagaaagc

SEQ ID NO: 2870857 - DNA, 25 bp, Homo sapien
ggcaagtgggctcaggtgccaagct

SEQ ID NO: 2870858 - DNA, 25 bp, Homo sapien
ggatgtcagtgtggccattgagacc

SEQ ID NO: 2870859 - DNA, 25 bp, Homo sapien
ggctcaggtgccaagctgaaggatg

SEQ ID NO: 2870860 - DNA, 25 bp, Homo sapien
catggtctctgggatgtctgaatcc

SEQ ID NO: 2870861 - DNA, 25 bp, Homo sapien
tatggcacagtgggccggcttctcc

SEQ ID NO: 2870862 - DNA, 25 bp, Homo sapien
ccactcccgcctggtcattccgtgc

SEQ ID NO: 2870863 - DNA, 25 bp, Homo sapien
gtcattccgtgcaggggcatctcct

SEQ ID NO: 2870864 - DNA, 25 bp, Homo sapien
ggcacagtgggccggcttctccgct

SEQ ID NO: 2870865 - DNA, 25 bp, Homo sapien
gaccactgccttctcgggcaggcct

SEQ ID NO: 2870866 - DNA, 25 bp, Homo sapien
cctgtgaagcccatcgaagaccact

SEQ ID NO: 2870867 - DNA, 25 bp, Homo sapien
agctgcctccccaccgtgagtcccc

SEQ ID NO: 2870868 - DNA, 25 bp, Homo sapien
gaagcccatcgaagaccactgcctt

SEQ ID NO: 2870869 - DNA, 25 bp, Homo sapien
tttctgctgctctacgtggtctcct

SEQ ID NO: 2870870 - DNA, 25 bp, Homo sapien
gctgctctacgtggtctccttcctt

SEQ ID NO: 2870871 - DNA, 25 bp, Homo sapien
ccaagcaagggggaaacacagctgt

SEQ ID NO: 2870872 - DNA, 25 bp, Homo sapien
catttctgcagcacgaaattctttc

SEQ ID NO: 2870873 - DNA, 25 bp, Homo sapien
aggcaaggcacggagcacatcatgg

SEQ ID NO: 2870874 - DNA, 25 bp, Homo sapien
tgagtttagtgaggaaagctccagc

SEQ ID NO: 2870875 - DNA, 25 bp, Homo sapien
tgttggtgaagggtttggaggaggc

SEQ ID NO: 2870876 - DNA, 25 bp, Homo sapien
gggtccccaggaatctgcagctgtc

SEQ ID NO: 2870877 - DNA, 25 bp, Homo sapien
gtaaaacagtcaacgtgcctgccgc

SEQ ID NO: 2870878 - DNA, 25 bp, Homo sapien
tgctatctacccgacttctgaggag

SEQ ID NO: 2870879 - DNA, 25 bp, Homo sapien
ggtttacactcgttcccatggcaga

SEQ ID NO: 2870880 - DNA, 25 bp, Homo sapien
cacttagcaagctcacgtggtgcca

SEQ ID NO: 2870881 - DNA, 25 bp, Homo sapien
cacggctcgccaaactgaaagtact

SEQ ID NO: 2870882 - DNA, 25 bp, Homo sapien
tgtcaaatgtactccccaggtgtgt

SEQ ID NO: 2870883 - DNA, 25 bp, Homo sapien
gagtagtttcgacagagacctcacg

SEQ ID NO: 2870884 - DNA, 25 bp, Homo sapien
gagtccatgtcaggcagtcagatgt

SEQ ID NO: 2870885 - DNA, 25 bp, Homo sapien
tttgtttgaaagccatttatttaga

SEQ ID NO: 2870886 - DNA, 25 bp, Homo sapien
tttgaaagccatttatttagatgac

SEQ ID NO: 2870887 - DNA, 25 bp, Homo sapien
tgtttgaaagccatttatttagatg

SEQ ID NO: 2870888 - DNA, 25 bp, Homo sapien
ttgaaagccatttatttagatgaca

SEQ ID NO: 2870889 - DNA, 25 bp, Homo sapien
gttccgcgaacacacacctcgatga

SEQ ID NO: 2870890 - DNA, 25 bp, Homo sapien
ggcgcgctcccttgagtacgtgtaa

SEQ ID NO: 2870891 - DNA, 25 bp, Homo sapien
gaggaaagatttcgtggccaggcct

SEQ ID NO: 2870892 - DNA, 25 bp, Homo sapien
cgtgtaagtgcagaattcaccaggc

SEQ ID NO: 2870893 - DNA, 25 bp, Homo sapien
tcgggcatgggcgtttgggtggctc

SEQ ID NO: 2870894 - DNA, 25 bp, Homo sapien
agactgttcgtcttcccactcgctg

SEQ ID NO: 2870895 - DNA, 25 bp, Homo sapien
tcacccttggcacctcggccagtct

SEQ ID NO: 2870896 - DNA, 25 bp, Homo sapien
actcgctgcttccggaaggtccctg

SEQ ID NO: 2870897 - DNA, 25 bp, Homo sapien
caagttcacgaggtccacgtagggt

SEQ ID NO: 2870898 - DNA, 25 bp, Homo sapien
ggaggtgatgtcctgcttccccgtg

SEQ ID NO: 2870899 - DNA, 25 bp, Homo sapien
gctcaagatggagcacaggcttccc

SEQ ID NO: 2870900 - DNA, 25 bp, Homo sapien
cactgaacctgcacgctgtgggtga

SEQ ID NO: 2870901 - DNA, 25 bp, Homo sapien
aatggagcaagtcccgaatggacca

SEQ ID NO: 2870902 - DNA, 25 bp, Homo sapien
ggagcaagtcccgaatggaccacag

SEQ ID NO: 2870903 - DNA, 25 bp, Homo sapien
aagtcccgaatggaccacagagggc

SEQ ID NO: 2870904 - DNA, 25 bp, Homo sapien
catggccagtgcttgtcttgggttc

SEQ ID NO: 2870905 - DNA, 25 bp, Homo sapien
tgtgcaatgaactcgcctagttctg

SEQ ID NO: 2870906 - DNA, 25 bp, Homo sapien
caggccattccggttgtcttgggtt

SEQ ID NO: 2870907 - DNA, 25 bp, Homo sapien
gaactcgcctagttctggagggcag

SEQ ID NO: 2870908 - DNA, 25 bp, Homo sapien
gccagttcctcaggccattccggtt

SEQ ID NO: 2870909 - DNA, 25 bp, Homo sapien
gggagaaggtggctcttggaagctt

SEQ ID NO: 2870910 - DNA, 25 bp, Homo sapien
tgcaaaaactgagaaaagcagggag

SEQ ID NO: 2870911 - DNA, 25 bp, Homo sapien
ctcatggatgcaaaaactgagaaaa

SEQ ID NO: 2870912 - DNA, 25 bp, Homo sapien
gagaaggtggctcttggaagcttct

SEQ ID NO: 2870913 - DNA, 25 bp, Homo sapien
ctgtttagggcctgcttgatgactt

SEQ ID NO: 2870914 - DNA, 25 bp, Homo sapien
ctccatttgacaggcattcagcctc

SEQ ID NO: 2870915 - DNA, 25 bp, Homo sapien
ccatacacattgccatccttgctgg

SEQ ID NO: 2870916 - DNA, 25 bp, Homo sapien
gcctctagaagcaacgcggctctcc

SEQ ID NO: 2870917 - DNA, 25 bp, Homo sapien
ttttagtagagtcagtgtagctttc

SEQ ID NO: 2870918 - DNA, 25 bp, Homo sapien
ggcacttccggcttatgcagccgaa

SEQ ID NO: 2870919 - DNA, 25 bp, Homo sapien
tatcacccgggtgttctcctgggca

SEQ ID NO: 2870920 - DNA, 25 bp, Homo sapien
aactgggacaccatttccctgatgg

SEQ ID NO: 2870921 - DNA, 25 bp, Homo sapien
tcgtgcttgaggtagcattcccgct

SEQ ID NO: 2870922 - DNA, 25 bp, Homo sapien
tcatgcaaatcccatgtaagccccg

SEQ ID NO: 2870923 - DNA, 25 bp, Homo sapien
tccagcgttgtgcagaaaagtcatg

SEQ ID NO: 2870924 - DNA, 25 bp, Homo sapien
tctcacaagagttgttctcgaaaca

SEQ ID NO: 2870925 - DNA, 25 bp, Homo sapien
tctcgaaacattcaaacacgccaca

SEQ ID NO: 2870926 - DNA, 25 bp, Homo sapien
tatatacaaaactctaacccatgct

SEQ ID NO: 2870927 - DNA, 25 bp, Homo sapien
ctaaaaggaaaatcacatacaaata

SEQ ID NO: 2870928 - DNA, 25 bp, Homo sapien
caaatatatacaaaactctaaccca

SEQ ID NO: 2870929 - DNA, 25 bp, Homo sapien
aatatatacaaaactctaacccatg

SEQ ID NO: 2870930 - DNA, 25 bp, Homo sapien
ctatttcaggacctaaaaagcctgg

SEQ ID NO: 2870931 - DNA, 25 bp, Homo sapien
tgggaatacttagtttgagagcaaa

SEQ ID NO: 2870932 - DNA, 25 bp, Homo sapien
acaaaaattacaaccagaaggctgg

SEQ ID NO: 2870933 - DNA, 25 bp, Homo sapien
ctggtctgagcattcctccttttca

SEQ ID NO: 2870934 - DNA, 25 bp, Homo sapien
tacttgatctgtagaagttgctgct

SEQ ID NO: 2870935 - DNA, 25 bp, Homo sapien
tctctacttgatctgtagaagttgc

SEQ ID NO: 2870936 - DNA, 25 bp, Homo sapien
gatctgtagaagttgctgctattaa

SEQ ID NO: 2870937 - DNA, 25 bp, Homo sapien
ctgctattaaatcacagccatttgc

SEQ ID NO: 2870938 - DNA, 25 bp, Homo sapien
tgaggtatcacccaatcccctagaa

SEQ ID NO: 2870939 - DNA, 25 bp, Homo sapien
ccactatcagaggttgcaggctcct

SEQ ID NO: 2870940 - DNA, 25 bp, Homo sapien
agttaactgtcaggctgcagcgtgc

SEQ ID NO: 2870941 - DNA, 25 bp, Homo sapien
gagccttcagaaacgccactatcag

SEQ ID NO: 2870942 - DNA, 25 bp, Homo sapien
tggaggcgacaggatccgtaagacc

SEQ ID NO: 2870943 - DNA, 25 bp, Homo sapien
gacaggatccgtaagaccccacgcg

SEQ ID NO: 2870944 - DNA, 25 bp, Homo sapien
agttctcagaggaagcgccagagga

SEQ ID NO: 2870945 - DNA, 25 bp, Homo sapien
ccagcatgtggaggcgacaggatcc

SEQ ID NO: 2870946 - DNA, 25 bp, Homo sapien
cggtgagccaagagccggtagagca

SEQ ID NO: 2870947 - DNA, 25 bp, Homo sapien
ggcgtccctaatgggcactcgtgca

SEQ ID NO: 2870948 - DNA, 25 bp, Homo sapien
gaggcgcacggttcgggtcgtgtca

SEQ ID NO: 2870949 - DNA, 25 bp, Homo sapien
tcgtgcattccagctcgtgcggtga

SEQ ID NO: 2870950 - DNA, 25 bp, Homo sapien
tcacgctcccttccgaaagcagtgc

SEQ ID NO: 2870951 - DNA, 25 bp, Homo sapien
tcgccggcaaagttctgggatgtcg

SEQ ID NO: 2870952 - DNA, 25 bp, Homo sapien
ggaggtacgctttgcgctgccctca

SEQ ID NO: 2870953 - DNA, 25 bp, Homo sapien
gcaatgccatttgtctcgccggcaa

SEQ ID NO: 2870954 - DNA, 25 bp, Homo sapien
ttgaggagggggaagacgcggcacc

SEQ ID NO: 2870955 - DNA, 25 bp, Homo sapien
tttgaggagggggaagacgcggcac

SEQ ID NO: 2870956 - DNA, 25 bp, Homo sapien
ttttgaggagggggaagacgcggca

SEQ ID NO: 2870957 - DNA, 25 bp, Homo sapien
tgaggagggggaagacgcggcaccc

SEQ ID NO: 2870958 - DNA, 25 bp, Homo sapien
caggccaggaagagaagttctccgg

SEQ ID NO: 2870959 - DNA, 25 bp, Homo sapien
cctcccgcgtgccggccgggatgaa

SEQ ID NO: 2870960 - DNA, 25 bp, Homo sapien
caggaagagaagttctccgggcgca

SEQ ID NO: 2870961 - DNA, 25 bp, Homo sapien
cgcgtgccggccgggatgaagcgcg

SEQ ID NO: 2870962 - DNA, 25 bp, Homo sapien
gctggcagcgtcagacgctgcttca

SEQ ID NO: 2870963 - DNA, 25 bp, Homo sapien
gcgctggcagcgtcagacgctgctt

SEQ ID NO: 2870964 - DNA, 25 bp, Homo sapien
tggcgctggcagcgtcagacgctgc

SEQ ID NO: 2870965 - DNA, 25 bp, Homo sapien
ctggcagcgtcagacgctgcttcat

SEQ ID NO: 2870966 - DNA, 25 bp, Homo sapien
cagggacaggcggcctttctgctgg

SEQ ID NO: 2870967 - DNA, 25 bp, Homo sapien
aaagccagggtcatgaactggccca

SEQ ID NO: 2870968 - DNA, 25 bp, Homo sapien
tcaaaggtggccaacaccaaagcca

SEQ ID NO: 2870969 - DNA, 25 bp, Homo sapien
accaaagccagggtcatgaactggc

SEQ ID NO: 2870970 - DNA, 25 bp, Homo sapien
cgtcgggagacctggatcctttgtg

SEQ ID NO: 2870971 - DNA, 25 bp, Homo sapien
ctcccgtcgggagacctggatcctt

SEQ ID NO: 2870972 - DNA, 25 bp, Homo sapien
tcgggagacctggatcctttgtgct

SEQ ID NO: 2870973 - DNA, 25 bp, Homo sapien
gggagacctggatcctttgtgctcc

SEQ ID NO: 2870974 - DNA, 25 bp, Homo sapien
cacttgaatgaaggagtcgagcagg

SEQ ID NO: 2870975 - DNA, 25 bp, Homo sapien
tgtgaccaggccgttagcagcgccg

SEQ ID NO: 2870976 - DNA, 25 bp, Homo sapien
tcccgtagctctccggagagcatgt

SEQ ID NO: 2870977 - DNA, 25 bp, Homo sapien
ccgcggctcggatagaggttaccca

SEQ ID NO: 2870978 - DNA, 25 bp, Homo sapien
tccagggcaatggtcgaaaggactg

SEQ ID NO: 2870979 - DNA, 25 bp, Homo sapien
tcaactactacaggaggaagccgag

SEQ ID NO: 2870980 - DNA, 25 bp, Homo sapien
cgattgaagataggagcagaagcac

SEQ ID NO: 2870981 - DNA, 25 bp, Homo sapien
gaaaggcaactttacgcgtctccaa

SEQ ID NO: 2870982 - DNA, 25 bp, Homo sapien
tgtgaccgtcttttgaccagccgtg

SEQ ID NO: 2870983 - DNA, 25 bp, Homo sapien
cttgagcggtgcacgaaatctggtc

SEQ ID NO: 2870984 - DNA, 25 bp, Homo sapien
ccagccgtgggatccatttgtcaag

SEQ ID NO: 2870985 - DNA, 25 bp, Homo sapien
cttgagccggctcgctgatggagaa

SEQ ID NO: 2870986 - DNA, 25 bp, Homo sapien
cttcccccgtgagcttcgtcctgag

SEQ ID NO: 2870987 - DNA, 25 bp, Homo sapien
ctcctgctgggagtagagctcgctc

SEQ ID NO: 2870988 - DNA, 25 bp, Homo sapien
gggagtagagctcgctctctccttc

SEQ ID NO: 2870989 - DNA, 25 bp, Homo sapien
tctccttcccccgtgagcttcgtcc

SEQ ID NO: 2870990 - DNA, 25 bp, Homo sapien
ggctctgtctcctcgtgctgctgct

SEQ ID NO: 2870991 - DNA, 25 bp, Homo sapien
tgcttctgcccaggggcgtccttca

SEQ ID NO: 2870992 - DNA, 25 bp, Homo sapien
gctgcttctgcccaggggcgtcctt

SEQ ID NO: 2870993 - DNA, 25 bp, Homo sapien
cctgcactggagctggctctgtctc

SEQ ID NO: 2870994 - DNA, 25 bp, Homo sapien
cagtcgtcagaccaggagagttgtc

SEQ ID NO: 2870995 - DNA, 25 bp, Homo sapien
tgaggaaggccagtcgtcagaccag

SEQ ID NO: 2870996 - DNA, 25 bp, Homo sapien
aggccagtcgtcagaccaggagagt

SEQ ID NO: 2870997 - DNA, 25 bp, Homo sapien
gccagtcgtcagaccaggagagttg

SEQ ID NO: 2870998 - DNA, 25 bp, Homo sapien
gtcaacagctcgtactgagcccttc

SEQ ID NO: 2870999 - DNA, 25 bp, Homo sapien
ccgcttgcagtcagtcaacagctcg

SEQ ID NO: 2871000 - DNA, 25 bp, Homo sapien
tgcagtcagtcaacagctcgtactg

SEQ ID NO: 2871001 - DNA, 25 bp, Homo sapien
agccccgcttgcagtcagtcaacag

SEQ ID NO: 2871002 - DNA, 25 bp, Homo sapien
gtatatgtggtgccaaaatgagcac

SEQ ID NO: 2871003 - DNA, 25 bp, Homo sapien
aatgtcatgcttcatgaatttttgt

SEQ ID NO: 2871004 - DNA, 25 bp, Homo sapien
tttagtatatgtggtgccaaaatga

SEQ ID NO: 2871005 - DNA, 25 bp, Homo sapien
atgtcatgcttcatgaatttttgtg

SEQ ID NO: 2871006 - DNA, 25 bp, Homo sapien
tcccagatgccctggttcatcaatt

SEQ ID NO: 2871007 - DNA, 25 bp, Homo sapien
cagatgccctggttcatcaattctc

SEQ ID NO: 2871008 - DNA, 25 bp, Homo sapien
tcaattctctgtccacttgcagcat

SEQ ID NO: 2871009 - DNA, 25 bp, Homo sapien
tgccctggttcatcaattctctgtc

SEQ ID NO: 2871010 - DNA, 25 bp, Homo sapien
gcagttgatcaaggctgcctttgcc

SEQ ID NO: 2871011 - DNA, 25 bp, Homo sapien
tttatcatagccagtggaatcctgg

SEQ ID NO: 2871012 - DNA, 25 bp, Homo sapien
tttgcctacaggttcgtgctttatc

SEQ ID NO: 2871013 - DNA, 25 bp, Homo sapien
cctctgcagttgatcaaggctgcct

SEQ ID NO: 2871014 - DNA, 25 bp, Homo sapien
gggagcctcgccagcaggactcgaa

SEQ ID NO: 2871015 - DNA, 25 bp, Homo sapien
ttgccgctcacaagttcacgtgctt

SEQ ID NO: 2871016 - DNA, 25 bp, Homo sapien
cacgtgctttctctgtcaaagaagg

SEQ ID NO: 2871017 - DNA, 25 bp, Homo sapien
cctctcacaggataaatggcctttg

SEQ ID NO: 2871018 - DNA, 25 bp, Homo sapien
ccatagtgaacaatgattatatatc

SEQ ID NO: 2871019 - DNA, 25 bp, Homo sapien
tttgcaaagttgaaagtctaataca

SEQ ID NO: 2871020 - DNA, 25 bp, Homo sapien
tttctttctaattgttatctcaact

SEQ ID NO: 2871021 - DNA, 25 bp, Homo sapien
tcataccaataccatagtgaacaat

SEQ ID NO: 2871022 - DNA, 25 bp, Homo sapien
tgttcaacaccttggatcttagcca

SEQ ID NO: 2871023 - DNA, 25 bp, Homo sapien
tgctgttcaacaccttggatcttag

SEQ ID NO: 2871024 - DNA, 25 bp, Homo sapien
tttgctgttcaacaccttggatctt

SEQ ID NO: 2871025 - DNA, 25 bp, Homo sapien
gttcaacaccttggatcttagccat

SEQ ID NO: 2871026 - DNA, 25 bp, Homo sapien
tggatatcccggagacagctcattc

SEQ ID NO: 2871027 - DNA, 25 bp, Homo sapien
cagtgtggtgagacaaaggcaagct

SEQ ID NO: 2871028 - DNA, 25 bp, Homo sapien
ttcagagccgggatgaggaattgca

SEQ ID NO: 2871029 - DNA, 25 bp, Homo sapien
tccacgagcatggtgtaggcaggcc

SEQ ID NO: 2871030 - DNA, 25 bp, Homo sapien
atggagctggtatgtcacggaatcc

SEQ ID NO: 2871031 - DNA, 25 bp, Homo sapien
ggtatgtcacggaatccaatataag

SEQ ID NO: 2871032 - DNA, 25 bp, Homo sapien
ggagctggtatgtcacggaatccaa

SEQ ID NO: 2871033 - DNA, 25 bp, Homo sapien
gctggtatgtcacggaatccaatat

SEQ ID NO: 2871034 - DNA, 25 bp, Homo sapien
atcttgactttggtaacttccctag

SEQ ID NO: 2871035 - DNA, 25 bp, Homo sapien
tccacattaattctggccatagcag

SEQ ID NO: 2871036 - DNA, 25 bp, Homo sapien
cctcgcaaggcccagaagatttttg

SEQ ID NO: 2871037 - DNA, 25 bp, Homo sapien
aacttccctagtgggcctcgcaagg

SEQ ID NO: 2871038 - DNA, 25 bp, Homo sapien
atttgaattgcaacagtcggcatca

SEQ ID NO: 2871039 - DNA, 25 bp, Homo sapien
tgggaaatagcagttgagatttctc

SEQ ID NO: 2871040 - DNA, 25 bp, Homo sapien
agctccatcttcatcccgccgagtc

SEQ ID NO: 2871041 - DNA, 25 bp, Homo sapien
cctggtatttttgaacgtacatttg

SEQ ID NO: 2871042 - DNA, 25 bp, Homo sapien
tttgtgcgtcgctcctgtaggtgaa

SEQ ID NO: 2871043 - DNA, 25 bp, Homo sapien
gccgtgttgctaacccccttgagaa

SEQ ID NO: 2871044 - DNA, 25 bp, Homo sapien
ccttcttgggcaggctttgtgcgtc

SEQ ID NO: 2871045 - DNA, 25 bp, Homo sapien
tgtaggtgaaccatctgggcctcct

SEQ ID NO: 2871046 - DNA, 25 bp, Homo sapien
ggtgggattaaattcatcattggat

SEQ ID NO: 2871047 - DNA, 25 bp, Homo sapien
gccaggtgggattaaattcatcatt

SEQ ID NO: 2871048 - DNA, 25 bp, Homo sapien
cttcctggtgccaggtgggattaaa

SEQ ID NO: 2871049 - DNA, 25 bp, Homo sapien
tgctttttatagacaagggaaccag

SEQ ID NO: 2871050 - DNA, 25 bp, Homo sapien
taagaagtgaaccactgaaatgaag

SEQ ID NO: 2871051 - DNA, 25 bp, Homo sapien
aatgctgataagaagtgaaccactg

SEQ ID NO: 2871052 - DNA, 25 bp, Homo sapien
gggtctgaaattgtaatgctgataa

SEQ ID NO: 2871053 - DNA, 25 bp, Homo sapien
agtgaaccactgaaatgaaggagtt

SEQ ID NO: 2871054 - DNA, 25 bp, Homo sapien
atctttggctgaacctcgcaaggcc

SEQ ID NO: 2871055 - DNA, 25 bp, Homo sapien
aatctttggctgaacctcgcaaggc

SEQ ID NO: 2871056 - DNA, 25 bp, Homo sapien
gaatctttggctgaacctcgcaagg

SEQ ID NO: 2871057 - DNA, 25 bp, Homo sapien
gctgctgctgaatgcggatgttgtc

SEQ ID NO: 2871058 - DNA, 25 bp, Homo sapien
gctgctgaatgcggatgttgtcaca

SEQ ID NO: 2871059 - DNA, 25 bp, Homo sapien
ctgctgaatgcggatgttgtcacag

SEQ ID NO: 2871060 - DNA, 25 bp, Homo sapien
ctgctgctgaatgcggatgttgtca

SEQ ID NO: 2871061 - DNA, 25 bp, Homo sapien
gagtattaccagcatcaagattccg

SEQ ID NO: 2871062 - DNA, 25 bp, Homo sapien
gaagaccacattcgctcccattagg

SEQ ID NO: 2871063 - DNA, 25 bp, Homo sapien
catgttcacggaggaaatagtcact

SEQ ID NO: 2871064 - DNA, 25 bp, Homo sapien
taactcgttgttagagcacccctga

SEQ ID NO: 2871065 - DNA, 25 bp, Homo sapien
tgttccaggagttgcagcctcagca

SEQ ID NO: 2871066 - DNA, 25 bp, Homo sapien
caaggtggaagcatgtgttccagga

SEQ ID NO: 2871067 - DNA, 25 bp, Homo sapien
gtgttccaggagttgcagcctcagc

SEQ ID NO: 2871068 - DNA, 25 bp, Homo sapien
aggacagacgggcaaggtggaagca

SEQ ID NO: 2871069 - DNA, 25 bp, Homo sapien
tctcctgacacgcttgacaaaaaca

SEQ ID NO: 2871070 - DNA, 25 bp, Homo sapien
ggaagaggagttgtattgtcacccc

SEQ ID NO: 2871071 - DNA, 25 bp, Homo sapien
tactggtggaggtttggtcgtcttc

SEQ ID NO: 2871072 - DNA, 25 bp, Homo sapien
gcttcatgagatgtcaagtatccga

SEQ ID NO: 2871073 - DNA, 25 bp, Homo sapien
tcatctgctgatagtcgaaggtcaa

SEQ ID NO: 2871074 - DNA, 25 bp, Homo sapien
gaaggtcaagttctatgtcaccacc

SEQ ID NO: 2871075 - DNA, 25 bp, Homo sapien
tcctgttagtcaaatgattcctttg

SEQ ID NO: 2871076 - DNA, 25 bp, Homo sapien
gaatagacagggtgaaaacattcct

SEQ ID NO: 2871077 - DNA, 25 bp, Homo sapien
gaggaaggcaggagcacacatcagg

SEQ ID NO: 2871078 - DNA, 25 bp, Homo sapien
gacagaaatgaattcagcgggagga

SEQ ID NO: 2871079 - DNA, 25 bp, Homo sapien
ctgtagaaggacagaaatgaattca

SEQ ID NO: 2871080 - DNA, 25 bp, Homo sapien
gaaatgaattcagcgggaggaggag

SEQ ID NO: 2871081 - DNA, 25 bp, Homo sapien
tggggtaaaagtagggaagtgtgca

SEQ ID NO: 2871082 - DNA, 25 bp, Homo sapien
tgcatgtgtgcgaggcaatgggtga

SEQ ID NO: 2871083 - DNA, 25 bp, Homo sapien
gtagatagaccaggtctgcttctgt

SEQ ID NO: 2871084 - DNA, 25 bp, Homo sapien
ctgcgtagatagaccaggtctgctt

SEQ ID NO: 2871085 - DNA, 25 bp, Homo sapien
cttctcggctggccgcctggcgctg

SEQ ID NO: 2871086 - DNA, 25 bp, Homo sapien
gcttctcggctggccgcctggcgct

SEQ ID NO: 2871087 - DNA, 25 bp, Homo sapien
ttctcggctggccgcctggcgctgt

SEQ ID NO: 2871088 - DNA, 25 bp, Homo sapien
tctcggctggccgcctggcgctgtc

SEQ ID NO: 2871089 - DNA, 25 bp, Homo sapien
aggggtcttcttctggggctcttca

SEQ ID NO: 2871090 - DNA, 25 bp, Homo sapien
ttctggggctcttcaaactgtacca

SEQ ID NO: 2871091 - DNA, 25 bp, Homo sapien
tcttctggggctcttcaaactgtac

SEQ ID NO: 2871092 - DNA, 25 bp, Homo sapien
ctggggctcttcaaactgtaccaag

SEQ ID NO: 2871093 - DNA, 25 bp, Homo sapien
tgctctgtgaagaagtggggaccca

SEQ ID NO: 2871094 - DNA, 25 bp, Homo sapien
ccctgctctgtgaagaagtggggac

SEQ ID NO: 2871095 - DNA, 25 bp, Homo sapien
gtgaagaagtggggacccatctgac

SEQ ID NO: 2871096 - DNA, 25 bp, Homo sapien
ctattgcaaactgccctcctccctg

SEQ ID NO: 2871097 - DNA, 25 bp, Homo sapien
gatgcttagggacatcttttccagc

SEQ ID NO: 2871098 - DNA, 25 bp, Homo sapien
cacagtcaagatgcttagggacatc

SEQ ID NO: 2871099 - DNA, 25 bp, Homo sapien
atatagtttcacagtcaagatgctt

SEQ ID NO: 2871100 - DNA, 25 bp, Homo sapien
tagtttcacagtcaagatgcttagg

SEQ ID NO: 2871101 - DNA, 25 bp, Homo sapien
ttggcaaactggcaggattcttggg

SEQ ID NO: 2871102 - DNA, 25 bp, Homo sapien
acatcgtgaattcccctttgcctgg

SEQ ID NO: 2871103 - DNA, 25 bp, Homo sapien
tcagatcagcaaaataggaagcctc

SEQ ID NO: 2871104 - DNA, 25 bp, Homo sapien
caggtagccattgtgaggtctcaaa

SEQ ID NO: 2871105 - DNA, 25 bp, Homo sapien
gttccaaaagatccccctccagtga

SEQ ID NO: 2871106 - DNA, 25 bp, Homo sapien
tccagggctcagatctgaaagtgta

SEQ ID NO: 2871107 - DNA, 25 bp, Homo sapien
catttccttctggttacccaggtgt

SEQ ID NO: 2871108 - DNA, 25 bp, Homo sapien
tccagtgatacactccgttctccag

SEQ ID NO: 2871109 - DNA, 25 bp, Homo sapien
gatttccaaggagtagaagtggcag

SEQ ID NO: 2871110 - DNA, 25 bp, Homo sapien
ccatgaacgatgtcataaaacatac

SEQ ID NO: 2871111 - DNA, 25 bp, Homo sapien
aacatacagcccttcgttgtcccag

SEQ ID NO: 2871112 - DNA, 25 bp, Homo sapien
agtttggtggccatgaacgatgtca

SEQ ID NO: 2871113 - DNA, 25 bp, Homo sapien
cgtttggtcggtagggagagccttg

SEQ ID NO: 2871114 - DNA, 25 bp, Homo sapien
ctagggaaggagtgaccacattgtt

SEQ ID NO: 2871115 - DNA, 25 bp, Homo sapien
gtgaccacattgttgagcgtttggt

SEQ ID NO: 2871116 - DNA, 25 bp, Homo sapien
acattgttgagcgtttggtcggtag

SEQ ID NO: 2871117 - DNA, 25 bp, Homo sapien
gtggcagcttgaccgctccactggg

SEQ ID NO: 2871118 - DNA, 25 bp, Homo sapien
tgtgaaaagggaacacgtggcagct

SEQ ID NO: 2871119 - DNA, 25 bp, Homo sapien
ggactctctgttctcaaataggcaa

SEQ ID NO: 2871120 - DNA, 25 bp, Homo sapien
gacaaggagctgaaattcattcact

SEQ ID NO: 2871121 - DNA, 25 bp, Homo sapien
tctgcgtggctcccacagtacccac

SEQ ID NO: 2871122 - DNA, 25 bp, Homo sapien
ctctgcgtggctcccacagtaccca

SEQ ID NO: 2871123 - DNA, 25 bp, Homo sapien
tctatttcgttatctgggttctctg

SEQ ID NO: 2871124 - DNA, 25 bp, Homo sapien
gtttcctgctcagtgtaacgttcta

SEQ ID NO: 2871125 - DNA, 25 bp, Homo sapien
gctgggcagtgtttgagtttagacc

SEQ ID NO: 2871126 - DNA, 25 bp, Homo sapien
tctgctgggcagtgtttgagtttag

SEQ ID NO: 2871127 - DNA, 25 bp, Homo sapien
gtggctgagcagttccgtagcaggg

SEQ ID NO: 2871128 - DNA, 25 bp, Homo sapien
tgtggctgagcagttccgtagcagg

SEQ ID NO: 2871129 - DNA, 25 bp, Homo sapien
caaacgatgattctgctttagggcc

SEQ ID NO: 2871130 - DNA, 25 bp, Homo sapien
gacctttgaagtatctgaccctgta

SEQ ID NO: 2871131 - DNA, 25 bp, Homo sapien
gaagtatttgggcaatcactgcccg

SEQ ID NO: 2871132 - DNA, 25 bp, Homo sapien
tcactgcccgtagctaggactcttg

SEQ ID NO: 2871133 - DNA, 25 bp, Homo sapien
tctgggatgtcaccttttgcaatgg

SEQ ID NO: 2871134 - DNA, 25 bp, Homo sapien
aaatattctgggatgtcaccttttg

SEQ ID NO: 2871135 - DNA, 25 bp, Homo sapien
gatgtcaccttttgcaatggatctg

SEQ ID NO: 2871136 - DNA, 25 bp, Homo sapien
tcaccttttgcaatggatctgcagg

SEQ ID NO: 2871137 - DNA, 25 bp, Homo sapien
ttcttttgttccagtttccacatag

SEQ ID NO: 2871138 - DNA, 25 bp, Homo sapien
gttccagtttccacatagatcagca

SEQ ID NO: 2871139 - DNA, 25 bp, Homo sapien
ttgttccagtttccacatagatcag

SEQ ID NO: 2871140 - DNA, 25 bp, Homo sapien
ttttgttccagtttccacatagatc

SEQ ID NO: 2871141 - DNA, 25 bp, Homo sapien
ggccggctgcccattcatccacagg

SEQ ID NO: 2871142 - DNA, 25 bp, Homo sapien
gcccattcatccacagggctgccct

SEQ ID NO: 2871143 - DNA, 25 bp, Homo sapien
ctaggccggctgcccattcatccac

SEQ ID NO: 2871144 - DNA, 25 bp, Homo sapien
ctgcccattcatccacagggctgcc

SEQ ID NO: 2871145 - DNA, 25 bp, Homo sapien
gctcatgccggcagctgttgactgg

SEQ ID NO: 2871146 - DNA, 25 bp, Homo sapien
ggctcatgccggcagctgttgactg

SEQ ID NO: 2871147 - DNA, 25 bp, Homo sapien
tgtcctcggcttgctaaaaatcctc

SEQ ID NO: 2871148 - DNA, 25 bp, Homo sapien
gaactccagttcgtagaaggttgca

SEQ ID NO: 2871149 - DNA, 25 bp, Homo sapien
gaacagtaaatcctgcaggcacagg

SEQ ID NO: 2871150 - DNA, 25 bp, Homo sapien
tgcatagaacttgtcctgtcctcgg

SEQ ID NO: 2871151 - DNA, 25 bp, Homo sapien
tcctcctatgcctgctgcttagaac

SEQ ID NO: 2871152 - DNA, 25 bp, Homo sapien
aacaaaaaggaaatctgtgaagagt

SEQ ID NO: 2871153 - DNA, 25 bp, Homo sapien
caaaaaggaaatctgtgaagagtca

SEQ ID NO: 2871154 - DNA, 25 bp, Homo sapien
ctcctatgcctgctgcttagaacaa

SEQ ID NO: 2871155 - DNA, 25 bp, Homo sapien
cagcactgctgcggctccaataaag

SEQ ID NO: 2871156 - DNA, 25 bp, Homo sapien
gcactgctgcggctccaataaaggg

SEQ ID NO: 2871157 - DNA, 25 bp, Homo sapien
cctctcctggctgcacacgctgctt

SEQ ID NO: 2871158 - DNA, 25 bp, Homo sapien
cggctccaataaaggggcaccgtgg

SEQ ID NO: 2871159 - DNA, 25 bp, Homo sapien
tattgattgagagcttcagccactg

SEQ ID NO: 2871160 - DNA, 25 bp, Homo sapien
cactgtgagctatgtgacctcggca

SEQ ID NO: 2871161 - DNA, 25 bp, Homo sapien
ccttgaaatagggtgaatggagcat

SEQ ID NO: 2871162 - DNA, 25 bp, Homo sapien
gaaggacacgtcagagctcatgagc

SEQ ID NO: 2871163 - DNA, 25 bp, Homo sapien
tccttccgagttagagattggctaa

SEQ ID NO: 2871164 - DNA, 25 bp, Homo sapien
caggaagtttggataggtcacagac

SEQ ID NO: 2871165 - DNA, 25 bp, Homo sapien
gctggatgtaacctttgaaaaccga

SEQ ID NO: 2871166 - DNA, 25 bp, Homo sapien
gattggctaaatcacccttggaaag

SEQ ID NO: 2871167 - DNA, 25 bp, Homo sapien
atgaaccaacatcccaacattcctt

SEQ ID NO: 2871168 - DNA, 25 bp, Homo sapien
gatgcatgaaccaacatcccaacat

SEQ ID NO: 2871169 - DNA, 25 bp, Homo sapien
tgcatgaaccaacatcccaacattc

SEQ ID NO: 2871170 - DNA, 25 bp, Homo sapien
gaaccaacatcccaacattccttgg

SEQ ID NO: 2871171 - DNA, 25 bp, Homo sapien
gtaggatggaagcaaggttagcagg

SEQ ID NO: 2871172 - DNA, 25 bp, Homo sapien
cgctgggcccatgtgcactgaaggc

SEQ ID NO: 2871173 - DNA, 25 bp, Homo sapien
tggaagcaaggttagcagggccctg

SEQ ID NO: 2871174 - DNA, 25 bp, Homo sapien
ggatggaagcaaggttagcagggcc

SEQ ID NO: 2871175 - DNA, 25 bp, Homo sapien
tccttggaggcatcgccggatgtgc

SEQ ID NO: 2871176 - DNA, 25 bp, Homo sapien
gagatagttcttggcgaggcacgcc

SEQ ID NO: 2871177 - DNA, 25 bp, Homo sapien
tgtcatagacggtgctgtccacagg

SEQ ID NO: 2871178 - DNA, 25 bp, Homo sapien
agtctacactatgaaccctggcagg

SEQ ID NO: 2871179 - DNA, 25 bp, Homo sapien
catatgagttttaaagctgtttgca

SEQ ID NO: 2871180 - DNA, 25 bp, Homo sapien
aagctgtttgcatgaagtatgcaat

SEQ ID NO: 2871181 - DNA, 25 bp, Homo sapien
gcatgaagtatgcaatggaaatcca

SEQ ID NO: 2871182 - DNA, 25 bp, Homo sapien
tcatatgagttttaaagctgtttgc

SEQ ID NO: 2871183 - DNA, 25 bp, Homo sapien
tgttaagaaatctaaccctgaagag

SEQ ID NO: 2871184 - DNA, 25 bp, Homo sapien
tcaagtgccgtccaatgccagttta

SEQ ID NO: 2871185 - DNA, 25 bp, Homo sapien
aatgccagtttacttgactcgcccc

SEQ ID NO: 2871186 - DNA, 25 bp, Homo sapien
gaagaggatttacaaggagccagga

SEQ ID NO: 2871187 - DNA, 25 bp, Homo sapien
taggtgagtagctcccactttgcca

SEQ ID NO: 2871188 - DNA, 25 bp, Homo sapien
tactcaaaataggtgagtagctccc

SEQ ID NO: 2871189 - DNA, 25 bp, Homo sapien
tgtctgcgcaaggatcacaaggtcc

SEQ ID NO: 2871190 - DNA, 25 bp, Homo sapien
tgctttcaagacagggagcttggga

SEQ ID NO: 2871191 - DNA, 25 bp, Homo sapien
cgcgacacaagtaattgcatcgatt

SEQ ID NO: 2871192 - DNA, 25 bp, Homo sapien
taccgttagaattcttagtgcaaac

SEQ ID NO: 2871193 - DNA, 25 bp, Homo sapien
tgggctccgaaatactaccgttaga

SEQ ID NO: 2871194 - DNA, 25 bp, Homo sapien
ctgttctgggctccgaaatactacc

SEQ ID NO: 2871195 - DNA, 25 bp, Homo sapien
ggtagaggaagcgaacatctagatt

SEQ ID NO: 2871196 - DNA, 25 bp, Homo sapien
ggcttccattgtggccgttggtgca

SEQ ID NO: 2871197 - DNA, 25 bp, Homo sapien
gaagcgaacatctagattctccaga

SEQ ID NO: 2871198 - DNA, 25 bp, Homo sapien
ccattgtggccgttggtgcaggact

SEQ ID NO: 2871199 - DNA, 25 bp, Homo sapien
tcacggccgtccttccgtgactgca

SEQ ID NO: 2871200 - DNA, 25 bp, Homo sapien
gccctcacggccgtccttccgtgac

SEQ ID NO: 2871201 - DNA, 25 bp, Homo sapien
aggccctcacggccgtccttccgtg

SEQ ID NO: 2871202 - DNA, 25 bp, Homo sapien
ggccgtccttccgtgactgcatcat

SEQ ID NO: 2871203 - DNA, 25 bp, Homo sapien
gaccgtcgagagttccttgggccat

SEQ ID NO: 2871204 - DNA, 25 bp, Homo sapien
tagtggagaaaaagggtcactgccg

SEQ ID NO: 2871205 - DNA, 25 bp, Homo sapien
gtcactgccgaacgccagctgcgga

SEQ ID NO: 2871206 - DNA, 25 bp, Homo sapien
tgcagcccgggtctgtggatttccc

SEQ ID NO: 2871207 - DNA, 25 bp, Homo sapien
aaattgatatgcaaggcccctttcc

SEQ ID NO: 2871208 - DNA, 25 bp, Homo sapien
caaattgatatgcaaggcccctttc

SEQ ID NO: 2871209 - DNA, 25 bp, Homo sapien
attgatatgcaaggcccctttccag

SEQ ID NO: 2871210 - DNA, 25 bp, Homo sapien
gatatgcaaggcccctttccaggcc

SEQ ID NO: 2871211 - DNA, 25 bp, Homo sapien
tataacggacgataacactagcccc

SEQ ID NO: 2871212 - DNA, 25 bp, Homo sapien
gaagatccatgacacacatgcgagg

SEQ ID NO: 2871213 - DNA, 25 bp, Homo sapien
tatactagtggaaccctggacacag

SEQ ID NO: 2871214 - DNA, 25 bp, Homo sapien
taagcattcgtgctccaaagccaga

SEQ ID NO: 2871215 - DNA, 25 bp, Homo sapien
gaatctcaggtgtcttcgggatcat

SEQ ID NO: 2871216 - DNA, 25 bp, Homo sapien
cccttgtcgaggaaggacactctct

SEQ ID NO: 2871217 - DNA, 25 bp, Homo sapien
ggaccccaccagttgaacactaatg

SEQ ID NO: 2871218 - DNA, 25 bp, Homo sapien
gataacttgcagtactgcgcgccca

SEQ ID NO: 2871219 - DNA, 25 bp, Homo sapien
ttagggaaatgaagggatggtgcaa

SEQ ID NO: 2871220 - DNA, 25 bp, Homo sapien
agggaaatgaagggatggtgcaaat

SEQ ID NO: 2871221 - DNA, 25 bp, Homo sapien
tagggaaatgaagggatggtgcaaa

SEQ ID NO: 2871222 - DNA, 25 bp, Homo sapien
ttgttaaagtgacatcgccatcctt

SEQ ID NO: 2871223 - DNA, 25 bp, Homo sapien
agagccgtcccggacccggagctgc

SEQ ID NO: 2871224 - DNA, 25 bp, Homo sapien
tcctcagagccgtcccggacccgga

SEQ ID NO: 2871225 - DNA, 25 bp, Homo sapien
ttaaagtgacatcgccatccttcct

SEQ ID NO: 2871226 - DNA, 25 bp, Homo sapien
tgagaggcgagtttcttgctgaggt

SEQ ID NO: 2871227 - DNA, 25 bp, Homo sapien
tcaagaagcctaagaggtcatcact

SEQ ID NO: 2871228 - DNA, 25 bp, Homo sapien
tgtgatcaccaatgctgtgccaggt

SEQ ID NO: 2871229 - DNA, 25 bp, Homo sapien
tatgaggcaggcactactataaccc

SEQ ID NO: 2871230 - DNA, 25 bp, Homo sapien
tgtgtgttcattcacgggccaaact

SEQ ID NO: 2871231 - DNA, 25 bp, Homo sapien
gtttatagcagtggcactgagggga

SEQ ID NO: 2871232 - DNA, 25 bp, Homo sapien
aagacagctttcaggccacactggg

SEQ ID NO: 2871233 - DNA, 25 bp, Homo sapien
acaaacgctgcggttgggcttgggt

SEQ ID NO: 2871234 - DNA, 25 bp, Homo sapien
cactgaggggacaaacgctgcggtt

SEQ ID NO: 2871235 - DNA, 25 bp, Homo sapien
ctgacaatgagccacaacaggggcc

SEQ ID NO: 2871236 - DNA, 25 bp, Homo sapien
ggctgacaatgagccacaacagggg

SEQ ID NO: 2871237 - DNA, 25 bp, Homo sapien
tggctgacaatgagccacaacaggg

SEQ ID NO: 2871238 - DNA, 25 bp, Homo sapien
agtggctgacaatgagccacaacag

SEQ ID NO: 2871239 - DNA, 25 bp, Homo sapien
gggcaaggtagtgtccatggagatg

SEQ ID NO: 2871240 - DNA, 25 bp, Homo sapien
tggtttctgagtcaccaggtagggc

SEQ ID NO: 2871241 - DNA, 25 bp, Homo sapien
ggctgggcaaggtagtgtccatgga

SEQ ID NO: 2871242 - DNA, 25 bp, Homo sapien
tttctgagtcaccaggtagggctgg

SEQ ID NO: 2871243 - DNA, 25 bp, Homo sapien
aatgagcccgcagacaagttttcca

SEQ ID NO: 2871244 - DNA, 25 bp, Homo sapien
tgtgatgattaaggaggaggcaccc

SEQ ID NO: 2871245 - DNA, 25 bp, Homo sapien
tacaaacccgatctgtcagctgaag

SEQ ID NO: 2871246 - DNA, 25 bp, Homo sapien
gaataagtaaactgactcggctcca

SEQ ID NO: 2871247 - DNA, 25 bp, Homo sapien
tctaacagaggagctgcctagtccc

SEQ ID NO: 2871248 - DNA, 25 bp, Homo sapien
tgggtctccaatcgcctagaggatg

SEQ ID NO: 2871249 - DNA, 25 bp, Homo sapien
gtccccactgtagagatgtcctgaa

SEQ ID NO: 2871250 - DNA, 25 bp, Homo sapien
gacccctgctaaagaatggaaccca

SEQ ID NO: 2871251 - DNA, 25 bp, Homo sapien
tgcaaagaggcttacctggtgacca

SEQ ID NO: 2871252 - DNA, 25 bp, Homo sapien
ccaacagtaacgatgtgcccaatta

SEQ ID NO: 2871253 - DNA, 25 bp, Homo sapien
tacacgatggcgctcttaagacact

SEQ ID NO: 2871254 - DNA, 25 bp, Homo sapien
caactagagagaggcctaactggct

SEQ ID NO: 2871255 - DNA, 25 bp, Homo sapien
aatggaactgcacctaccaggtggg

SEQ ID NO: 2871256 - DNA, 25 bp, Homo sapien
tgggaacagaccacacgtcagatat

SEQ ID NO: 2871257 - DNA, 25 bp, Homo sapien
tatacagagtatgttcagaggcctg

SEQ ID NO: 2871258 - DNA, 25 bp, Homo sapien
tagtagactcaaccaagaaccacag

SEQ ID NO: 2871259 - DNA, 25 bp, Homo sapien
tcactgcccatggtcaaggttgaaa

SEQ ID NO: 2871260 - DNA, 25 bp, Homo sapien
taaacatacctaagactcactggcc

SEQ ID NO: 2871261 - DNA, 25 bp, Homo sapien
tagtgtctacttggtgtcatgccct

SEQ ID NO: 2871262 - DNA, 25 bp, Homo sapien
gagatcagtgacgaccttggcctat

SEQ ID NO: 2871263 - DNA, 25 bp, Homo sapien
agctttcaaaaggtgtctggcgtat

SEQ ID NO: 2871264 - DNA, 25 bp, Homo sapien
ttagctttcaaaaggtgtctggcgt

SEQ ID NO: 2871265 - DNA, 25 bp, Homo sapien
gctttcaaaaggtgtctggcgtatt

SEQ ID NO: 2871266 - DNA, 25 bp, Homo sapien
tagctttcaaaaggtgtctggcgta

SEQ ID NO: 2871267 - DNA, 25 bp, Homo sapien
tgaattgctcgttctatttgtggcc

SEQ ID NO: 2871268 - DNA, 25 bp, Homo sapien
actcatgaattgctcgttctatttg

SEQ ID NO: 2871269 - DNA, 25 bp, Homo sapien
ctcatgaattgctcgttctatttgt

SEQ ID NO: 2871270 - DNA, 25 bp, Homo sapien
atgaattgctcgttctatttgtggc

SEQ ID NO: 2871271 - DNA, 25 bp, Homo sapien
taaatgtccaccttcaaagctacag

SEQ ID NO: 2871272 - DNA, 25 bp, Homo sapien
ttagccccaataagtgtcacgtgcg

SEQ ID NO: 2871273 - DNA, 25 bp, Homo sapien
tacagcccttctagggagtttagag

SEQ ID NO: 2871274 - DNA, 25 bp, Homo sapien
gagtttagaggtcaatccacttacc

SEQ ID NO: 2871275 - DNA, 25 bp, Homo sapien
taaacaaggccgatcagtcagggct

SEQ ID NO: 2871276 - DNA, 25 bp, Homo sapien
tatcggcccttagtgatgagcatcg

SEQ ID NO: 2871277 - DNA, 25 bp, Homo sapien
tagaccaggcattagacagtatcgg

SEQ ID NO: 2871278 - DNA, 25 bp, Homo sapien
taactaacagcttatcgacaggaag

SEQ ID NO: 2871279 - DNA, 25 bp, Homo sapien
ttctttctgaaagagcccggtgcca

SEQ ID NO: 2871280 - DNA, 25 bp, Homo sapien
tactgactccagaatgacaaggcac

SEQ ID NO: 2871281 - DNA, 25 bp, Homo sapien
ggaagcgccacatgcatacctctag

SEQ ID NO: 2871282 - DNA, 25 bp, Homo sapien
aagggaaaggcactcggtactgact

SEQ ID NO: 2871283 - DNA, 25 bp, Homo sapien
gcctcagaccatttcgcaactggtt

SEQ ID NO: 2871284 - DNA, 25 bp, Homo sapien
cagaccatttcgcaactggtttttg

SEQ ID NO: 2871285 - DNA, 25 bp, Homo sapien
cgcaactggtttttgttcatcgtag

SEQ ID NO: 2871286 - DNA, 25 bp, Homo sapien
ccatttcgcaactggtttttgttca

SEQ ID NO: 2871287 - DNA, 25 bp, Homo sapien
cagtcccggcggaagctgtcaaaaa

SEQ ID NO: 2871288 - DNA, 25 bp, Homo sapien
tcccggcggaagctgtcaaaaaggc

SEQ ID NO: 2871289 - DNA, 25 bp, Homo sapien
gcagtcccggcggaagctgtcaaaa

SEQ ID NO: 2871290 - DNA, 25 bp, Homo sapien
agtcccggcggaagctgtcaaaaag

SEQ ID NO: 2871291 - DNA, 25 bp, Homo sapien
ctgccccggcagaggcctggctagt

SEQ ID NO: 2871292 - DNA, 25 bp, Homo sapien
ccagtagcgccagtcgctgccccgg

SEQ ID NO: 2871293 - DNA, 25 bp, Homo sapien
agaggcctggctagttccgccgccg

SEQ ID NO: 2871294 - DNA, 25 bp, Homo sapien
ctggccccagtagcgccagtcgctg

SEQ ID NO: 2871295 - DNA, 25 bp, Homo sapien
gggcccacaagggagaacgactata

SEQ ID NO: 2871296 - DNA, 25 bp, Homo sapien
gggagaacgactatagcttcttctc

SEQ ID NO: 2871297 - DNA, 25 bp, Homo sapien
caagggagaacgactatagcttctt

SEQ ID NO: 2871298 - DNA, 25 bp, Homo sapien
cccacaagggagaacgactatagct

SEQ ID NO: 2871299 - DNA, 25 bp, Homo sapien
cggcggaggtggcgatggcggcagg

SEQ ID NO: 2871300 - DNA, 25 bp, Homo sapien
ggttgtggtggacgcggcagaaacg

SEQ ID NO: 2871301 - DNA, 25 bp, Homo sapien
cagaggttgtggtggacgcggcaga

SEQ ID NO: 2871302 - DNA, 25 bp, Homo sapien
gaaggccccctctgatacagcagag

SEQ ID NO: 2871303 - DNA, 25 bp, Homo sapien
ggcgaaggccccctctgatacagca

SEQ ID NO: 2871304 - DNA, 25 bp, Homo sapien
tcaacgttgacctttgcattgtggg

SEQ ID NO: 2871305 - DNA, 25 bp, Homo sapien
cgtcaacgttgacctttgcattgtg

SEQ ID NO: 2871306 - DNA, 25 bp, Homo sapien
ggcgtcaacgttgacctttgcattg

SEQ ID NO: 2871307 - DNA, 25 bp, Homo sapien
tgtggggcgggaagttttctgtggc

SEQ ID NO: 2871308 - DNA, 25 bp, Homo sapien
ctttggtaaagatttacttgaatgc

SEQ ID NO: 2871309 - DNA, 25 bp, Homo sapien
ttggtaaagatttacttgaatgcaa

SEQ ID NO: 2871310 - DNA, 25 bp, Homo sapien
gtaaagatttacttgaatgcaaaag

SEQ ID NO: 2871311 - DNA, 25 bp, Homo sapien
ggtaaagatttacttgaatgcaaaa

SEQ ID NO: 2871312 - DNA, 25 bp, Homo sapien
tttgttggcaatgtatcctctctgg

SEQ ID NO: 2871313 - DNA, 25 bp, Homo sapien
gttggcaatgtatcctctctggcct

SEQ ID NO: 2871314 - DNA, 25 bp, Homo sapien
tcaagctctacgacctttgttggca

SEQ ID NO: 2871315 - DNA, 25 bp, Homo sapien
tacgacctttgttggcaatgtatcc

SEQ ID NO: 2871316 - DNA, 25 bp, Homo sapien
tgtatacattcacgtgtgctgcacg

SEQ ID NO: 2871317 - DNA, 25 bp, Homo sapien
gtgtatacattcacgtgtgctgcac

SEQ ID NO: 2871318 - DNA, 25 bp, Homo sapien
ggcaagcagaagtatctgagctgat

SEQ ID NO: 2871319 - DNA, 25 bp, Homo sapien
gagctgatgctcgtgggaatccctt

SEQ ID NO: 2871320 - DNA, 25 bp, Homo sapien
gtatctgagctgatgctcgtgggaa

SEQ ID NO: 2871321 - DNA, 25 bp, Homo sapien
gaggcaagcagaagtatctgagctg

SEQ ID NO: 2871322 - DNA, 25 bp, Homo sapien
tttccgagggttgagcaggccccag

SEQ ID NO: 2871323 - DNA, 25 bp, Homo sapien
ccgagggttgagcaggccccagcat

SEQ ID NO: 2871324 - DNA, 25 bp, Homo sapien
ttccgagggttgagcaggccccagc

SEQ ID NO: 2871325 - DNA, 25 bp, Homo sapien
atttccgagggttgagcaggcccca

SEQ ID NO: 2871326 - DNA, 25 bp, Homo sapien
cttctcttggctcaggaaggacgcc

SEQ ID NO: 2871327 - DNA, 25 bp, Homo sapien
gacgccccactgcaagaagggaaat

SEQ ID NO: 2871328 - DNA, 25 bp, Homo sapien
ggaaggacgccccactgcaagaagg

SEQ ID NO: 2871329 - DNA, 25 bp, Homo sapien
ttctcttggctcaggaaggacgccc

SEQ ID NO: 2871330 - DNA, 25 bp, Homo sapien
cagagggatgagagtcaaagcctgc

SEQ ID NO: 2871331 - DNA, 25 bp, Homo sapien
gcagagggatgagagtcaaagcctg

SEQ ID NO: 2871332 - DNA, 25 bp, Homo sapien
agttgctgctcgaccgctctctgac

SEQ ID NO: 2871333 - DNA, 25 bp, Homo sapien
ggctccccaagttgctgctcgaccg

SEQ ID NO: 2871334 - DNA, 25 bp, Homo sapien
gctcgaccgctctctgacctggatt

SEQ ID NO: 2871335 - DNA, 25 bp, Homo sapien
caagttgctgctcgaccgctctctg

SEQ ID NO: 2871336 - DNA, 25 bp, Homo sapien
tcaggcctttgccacgggctccatg

SEQ ID NO: 2871337 - DNA, 25 bp, Homo sapien
tccatggagtggccggagcccaggg

SEQ ID NO: 2871338 - DNA, 25 bp, Homo sapien
ctccatggagtggccggagcccagg

SEQ ID NO: 2871339 - DNA, 25 bp, Homo sapien
cagttagtagccagctggcagattt

SEQ ID NO: 2871340 - DNA, 25 bp, Homo sapien
gctgaggggccgctgggtgcctgat

SEQ ID NO: 2871341 - DNA, 25 bp, Homo sapien
tgcctgatgagtcctgggaaatgcc

SEQ ID NO: 2871342 - DNA, 25 bp, Homo sapien
gggtgcctgatgagtcctgggaaat

SEQ ID NO: 2871343 - DNA, 25 bp, Homo sapien
ctgatgagtcctgggaaatgcctgg

SEQ ID NO: 2871344 - DNA, 25 bp, Homo sapien
cccagagtaatcaggtggtcaggtc

SEQ ID NO: 2871345 - DNA, 25 bp, Homo sapien
gctccgactgctttgggaagttcta

SEQ ID NO: 2871346 - DNA, 25 bp, Homo sapien
taaacacaagcaaatcgagcactgt

SEQ ID NO: 2871347 - DNA, 25 bp, Homo sapien
tcagagtggatctcacctcagctcc

SEQ ID NO: 2871348 - DNA, 25 bp, Homo sapien
cagtttacgtgtctcctctaccgga

SEQ ID NO: 2871349 - DNA, 25 bp, Homo sapien
caagaccagtggtataatctgccca

SEQ ID NO: 2871350 - DNA, 25 bp, Homo sapien
tctaccggactgatggtcagccgca

SEQ ID NO: 2871351 - DNA, 25 bp, Homo sapien
ggattaaaggaacgtgccaccagtc

SEQ ID NO: 2871352 - DNA, 25 bp, Homo sapien
agggtcctgtgccccgtgacagaag

SEQ ID NO: 2871353 - DNA, 25 bp, Homo sapien
tgccccgtgacagaaggacctattc

SEQ ID NO: 2871354 - DNA, 25 bp, Homo sapien
tgtgccccgtgacagaaggacctat

SEQ ID NO: 2871355 - DNA, 25 bp, Homo sapien
gtcctgtgccccgtgacagaaggac

SEQ ID NO: 2871356 - DNA, 25 bp, Homo sapien
ctgtgaaaggaatagaaagggcctt

SEQ ID NO: 2871357 - DNA, 25 bp, Homo sapien
tggagagaggcccatggtcatcttc

SEQ ID NO: 2871358 - DNA, 25 bp, Homo sapien
tcttcttgaagaatggtccttgctt

SEQ ID NO: 2871359 - DNA, 25 bp, Homo sapien
tgaaaggaatagaaagggccttgtg

SEQ ID NO: 2871360 - DNA, 25 bp, Homo sapien
ccccgctccctgtaaatgtctgttt

SEQ ID NO: 2871361 - DNA, 25 bp, Homo sapien
atcccccgctccctgtaaatgtctg

SEQ ID NO: 2871362 - DNA, 25 bp, Homo sapien
tcccccgctccctgtaaatgtctgt

SEQ ID NO: 2871363 - DNA, 25 bp, Homo sapien
ccatcccccgctccctgtaaatgtc

SEQ ID NO: 2871364 - DNA, 25 bp, Homo sapien
tgcagcgaggcagagcatagggcca

SEQ ID NO: 2871365 - DNA, 25 bp, Homo sapien
gcgaggcagagcatagggccaggtt

SEQ ID NO: 2871366 - DNA, 25 bp, Homo sapien
aggcagagcatagggccaggtttcc

SEQ ID NO: 2871367 - DNA, 25 bp, Homo sapien
agagctgcagcgaggcagagcatag

SEQ ID NO: 2871368 - DNA, 25 bp, Homo sapien
gaacagggcctctgttggagggcag

SEQ ID NO: 2871369 - DNA, 25 bp, Homo sapien
gctgttccttccttaagtgcgggga

SEQ ID NO: 2871370 - DNA, 25 bp, Homo sapien
gctgttcatacagctcagtggctgt

SEQ ID NO: 2871371 - DNA, 25 bp, Homo sapien
gagaaaagtgaggtgcacgagcatg

SEQ ID NO: 2871372 - DNA, 25 bp, Homo sapien
gctgttctttatgacacctgggagt

SEQ ID NO: 2871373 - DNA, 25 bp, Homo sapien
cagtagggaggtctctctgtgactc

SEQ ID NO: 2871374 - DNA, 25 bp, Homo sapien
cggtgcagccgttcctattgtctga

SEQ ID NO: 2871375 - DNA, 25 bp, Homo sapien
tctgatgtgacgttcccaagccgaa

SEQ ID NO: 2871376 - DNA, 25 bp, Homo sapien
ggtgggtctatagatatatgcgtaa

SEQ ID NO: 2871377 - DNA, 25 bp, Homo sapien
tgtgtctttgtgtgtaggtttgcct

SEQ ID NO: 2871378 - DNA, 25 bp, Homo sapien
tctttgtgtgtaggtttgcctttgt

SEQ ID NO: 2871379 - DNA, 25 bp, Homo sapien
tatatgcgtaagtgtgctctgtgtc

SEQ ID NO: 2871380 - DNA, 25 bp, Homo sapien
catatattttggacggactgtacat

SEQ ID NO: 2871381 - DNA, 25 bp, Homo sapien
gattatattagagctgggtgtccag

SEQ ID NO: 2871382 - DNA, 25 bp, Homo sapien
agactccaggctcttaccaacacag

SEQ ID NO: 2871383 - DNA, 25 bp, Homo sapien
tacatgtatatagaggtggctgggt

SEQ ID NO: 2871384 - DNA, 25 bp, Homo sapien
gggacacttggatcagctcgtttga

SEQ ID NO: 2871385 - DNA, 25 bp, Homo sapien
tgccaggcacatagggaatgccctt

SEQ ID NO: 2871386 - DNA, 25 bp, Homo sapien
gcacggccaaaacatgatacgaggg

SEQ ID NO: 2871387 - DNA, 25 bp, Homo sapien
ctgaccagatggagtcggagcctct

SEQ ID NO: 2871388 - DNA, 25 bp, Homo sapien
gctatattctgcctagagagagacc

SEQ ID NO: 2871389 - DNA, 25 bp, Homo sapien
tcatggaaagaaactggagacaaaa

SEQ ID NO: 2871390 - DNA, 25 bp, Homo sapien
aggaggaattctagacccatctgtc

SEQ ID NO: 2871391 - DNA, 25 bp, Homo sapien
ccacggtctgaagaatgtagaggcc

SEQ ID NO: 2871392 - DNA, 25 bp, Homo sapien
tcaccttgcagtggagaagacttct

SEQ ID NO: 2871393 - DNA, 25 bp, Homo sapien
gagggacagtccgagaatcacagag

SEQ ID NO: 2871394 - DNA, 25 bp, Homo sapien
gctccaaccgcatttctgccagagg

SEQ ID NO: 2871395 - DNA, 25 bp, Homo sapien
gagtggaggtcctttactgaagcca

SEQ ID NO: 2871396 - DNA, 25 bp, Homo sapien
tttccaatctcctgagaaactcatc

SEQ ID NO: 2871397 - DNA, 25 bp, Homo sapien
gctgaaaagccaacgaagactcatt

SEQ ID NO: 2871398 - DNA, 25 bp, Homo sapien
gcctcaactgacttcaagcagggaa

SEQ ID NO: 2871399 - DNA, 25 bp, Homo sapien
gagcctttgctcatgatgtcctcct

SEQ ID NO: 2871400 - DNA, 25 bp, Homo sapien
gacattctcacatgcgttcagttgg

SEQ ID NO: 2871401 - DNA, 25 bp, Homo sapien
tgctaagaagacctaccactgactg

SEQ ID NO: 2871402 - DNA, 25 bp, Homo sapien
gagcagtttctatttccggtgccca

SEQ ID NO: 2871403 - DNA, 25 bp, Homo sapien
tcaggattgaacagaggcttactct

SEQ ID NO: 2871404 - DNA, 25 bp, Homo sapien
attcctcaggctaggcccctccttc

SEQ ID NO: 2871405 - DNA, 25 bp, Homo sapien
ctttattcctcaggctaggcccctc

SEQ ID NO: 2871406 - DNA, 25 bp, Homo sapien
ttattcctcaggctaggcccctcct

SEQ ID NO: 2871407 - DNA, 25 bp, Homo sapien
ttctttattcctcaggctaggcccc

SEQ ID NO: 2871408 - DNA, 25 bp, Homo sapien
taaatcgctcccacggtgctctgtg

SEQ ID NO: 2871409 - DNA, 25 bp, Homo sapien
gctggatcccatgacattctggtgg

SEQ ID NO: 2871410 - DNA, 25 bp, Homo sapien
tctgtgaagccaagtacccatgcta

SEQ ID NO: 2871411 - DNA, 25 bp, Homo sapien
tactttctcaatatggctcctccca

SEQ ID NO: 2871412 - DNA, 25 bp, Homo sapien
ccatggtcacatcctctcagatgtg

SEQ ID NO: 2871413 - DNA, 25 bp, Homo sapien
gaagtctgtgcccaatctctctttg

SEQ ID NO: 2871414 - DNA, 25 bp, Homo sapien
tccagtgctcagcatagagcttgcc

SEQ ID NO: 2871415 - DNA, 25 bp, Homo sapien
ggtcacatcctctcagatgtgagct

SEQ ID NO: 2871416 - DNA, 25 bp, Homo sapien
tgttgtgggaggatcttgattgggc

SEQ ID NO: 2871417 - DNA, 25 bp, Homo sapien
cttgttgtgggaggatcttgattgg

SEQ ID NO: 2871418 - DNA, 25 bp, Homo sapien
tcttgattgggccttcttgttggca

SEQ ID NO: 2871419 - DNA, 25 bp, Homo sapien
ctcttgttgtgggaggatcttgatt

SEQ ID NO: 2871420 - DNA, 25 bp, Homo sapien
tgcagagaggagagaatccaacctc

SEQ ID NO: 2871421 - DNA, 25 bp, Homo sapien
ggaactgatcctcaatggccactct

SEQ ID NO: 2871422 - DNA, 25 bp, Homo sapien
cacacagctcagaggtgcatggcca

SEQ ID NO: 2871423 - DNA, 25 bp, Homo sapien
gcacagtgagcaatccctataggaa

SEQ ID NO: 2871424 - DNA, 25 bp, Homo sapien
tgggtcatcctggaacaagtgctgc

SEQ ID NO: 2871425 - DNA, 25 bp, Homo sapien
tgggacaaagtctggcaattgctga

SEQ ID NO: 2871426 - DNA, 25 bp, Homo sapien
caaagtctggcaattgctgaggaaa

SEQ ID NO: 2871427 - DNA, 25 bp, Homo sapien
gtctggcaattgctgaggaaaaggc

SEQ ID NO: 2871428 - DNA, 25 bp, Homo sapien
tcagcaaagcccgaaagtgctctct

SEQ ID NO: 2871429 - DNA, 25 bp, Homo sapien
cacgctggagaccagtgtgctctcc

SEQ ID NO: 2871430 - DNA, 25 bp, Homo sapien
tctccccacgctggagaccagtgtg

SEQ ID NO: 2871431 - DNA, 25 bp, Homo sapien
gcaaagcccgaaagtgctctctctc

SEQ ID NO: 2871432 - DNA, 25 bp, Homo sapien
atggcagagcctcctaatgacctgg

SEQ ID NO: 2871433 - DNA, 25 bp, Homo sapien
cctcctaatgacctggaaggccaga

SEQ ID NO: 2871434 - DNA, 25 bp, Homo sapien
gagcctcctaatgacctggaaggcc

SEQ ID NO: 2871435 - DNA, 25 bp, Homo sapien
gcagagcctcctaatgacctggaag

SEQ ID NO: 2871436 - DNA, 25 bp, Homo sapien
ttcacattggcatgcggcagctact

SEQ ID NO: 2871437 - DNA, 25 bp, Homo sapien
tcacattggcatgcggcagctactt

SEQ ID NO: 2871438 - DNA, 25 bp, Homo sapien
tttcacattggcatgcggcagctac

SEQ ID NO: 2871439 - DNA, 25 bp, Homo sapien
cacattggcatgcggcagctacttt

SEQ ID NO: 2871440 - DNA, 25 bp, Homo sapien
ctaaggccagtggatatgggtcatc

SEQ ID NO: 2871441 - DNA, 25 bp, Homo sapien
ggcccttagtctttcccagagtcaa

SEQ ID NO: 2871442 - DNA, 25 bp, Homo sapien
gttagccttagtatttgacacctgg

SEQ ID NO: 2871443 - DNA, 25 bp, Homo sapien
cagggtcctaaagctggtcctgtcc

SEQ ID NO: 2871444 - DNA, 25 bp, Homo sapien
cctgggatcatgaacgctgtggagt

SEQ ID NO: 2871445 - DNA, 25 bp, Homo sapien
cgctgtggagtcctgaccaggctca

SEQ ID NO: 2871446 - DNA, 25 bp, Homo sapien
tgggatcatgaacgctgtggagtcc

SEQ ID NO: 2871447 - DNA, 25 bp, Homo sapien
tgacctgggatcatgaacgctgtgg

SEQ ID NO: 2871448 - DNA, 25 bp, Homo sapien
tcacagatctggctggctctcccaa

SEQ ID NO: 2871449 - DNA, 25 bp, Homo sapien
aggtcttccaggcaggacaggcctc

SEQ ID NO: 2871450 - DNA, 25 bp, Homo sapien
aggacaggcctccatcagacccatt

SEQ ID NO: 2871451 - DNA, 25 bp, Homo sapien
tcccaagccaggtctgtcatcagga

SEQ ID NO: 2871452 - DNA, 25 bp, Homo sapien
agccgcaaggttagcttgtgcgctc

SEQ ID NO: 2871453 - DNA, 25 bp, Homo sapien
gccgcaaggttagcttgtgcgctca

SEQ ID NO: 2871454 - DNA, 25 bp, Homo sapien
ccgcaaggttagcttgtgcgctcat

SEQ ID NO: 2871455 - DNA, 25 bp, Homo sapien
cagccgcaaggttagcttgtgcgct

SEQ ID NO: 2871456 - DNA, 25 bp, Homo sapien
gatctctacataagggcatggtgca

SEQ ID NO: 2871457 - DNA, 25 bp, Homo sapien
gctcatagggaactcatctgcaaat

SEQ ID NO: 2871458 - DNA, 25 bp, Homo sapien
tacttggactacacatgctcatagg

SEQ ID NO: 2871459 - DNA, 25 bp, Homo sapien
tgctaaaccatcagttgtcccctgg

SEQ ID NO: 2871460 - DNA, 25 bp, Homo sapien
taacattaggactgtgctgcaaact

SEQ ID NO: 2871461 - DNA, 25 bp, Homo sapien
caggcataccggcatgtgcttgtac

SEQ ID NO: 2871462 - DNA, 25 bp, Homo sapien
aaactgaccacagccaacctaggaa

SEQ ID NO: 2871463 - DNA, 25 bp, Homo sapien
gaataatacatgaaggttgggcgcg

SEQ ID NO: 2871464 - DNA, 25 bp, Homo sapien
ctgcattcctaggtagaagactcat

SEQ ID NO: 2871465 - DNA, 25 bp, Homo sapien
gcattcctaggtagaagactcattt

SEQ ID NO: 2871466 - DNA, 25 bp, Homo sapien
tgcattcctaggtagaagactcatt

SEQ ID NO: 2871467 - DNA, 25 bp, Homo sapien
ttagagaactgctatgggttccctg

SEQ ID NO: 2871468 - DNA, 25 bp, Homo sapien
actgctatgggttccctgggtcagc

SEQ ID NO: 2871469 - DNA, 25 bp, Homo sapien
gagaactgctatgggttccctgggt

SEQ ID NO: 2871470 - DNA, 25 bp, Homo sapien
gctatgggttccctgggtcagcttt

SEQ ID NO: 2871471 - DNA, 25 bp, Homo sapien
ttggatgactctccagtgtcccatt

SEQ ID NO: 2871472 - DNA, 25 bp, Homo sapien
tggatgactctccagtgtcccattt

SEQ ID NO: 2871473 - DNA, 25 bp, Homo sapien
gttggatgactctccagtgtcccat

SEQ ID NO: 2871474 - DNA, 25 bp, Homo sapien
tgttggatgactctccagtgtccca

SEQ ID NO: 2871475 - DNA, 25 bp, Homo sapien
cctctgtggacaggctatcttggtc

SEQ ID NO: 2871476 - DNA, 25 bp, Homo sapien
tcttaggattggatcagcctgggtc

SEQ ID NO: 2871477 - DNA, 25 bp, Homo sapien
ggacaggctatcttggtctgctatc

SEQ ID NO: 2871478 - DNA, 25 bp, Homo sapien
ctctgattttgccaggaggatatgg

SEQ ID NO: 2871479 - DNA, 25 bp, Homo sapien
tgttccaatgtggatattaccacag

SEQ ID NO: 2871480 - DNA, 25 bp, Homo sapien
ttcttcatctgcagctaacctttcc

SEQ ID NO: 2871481 - DNA, 25 bp, Homo sapien
gatacgtgacttgaatatagtctgg

SEQ ID NO: 2871482 - DNA, 25 bp, Homo sapien
caggcaataatagtgtttgtgctcc

SEQ ID NO: 2871483 - DNA, 25 bp, Homo sapien
cgcaggtaccggcatacagccactt

SEQ ID NO: 2871484 - DNA, 25 bp, Homo sapien
gaaggcttgctagaaccaattggac

SEQ ID NO: 2871485 - DNA, 25 bp, Homo sapien
gaacgtcagtaggatctagcagctg

SEQ ID NO: 2871486 - DNA, 25 bp, Homo sapien
agctggtcgccaccactgttcaggg

SEQ ID NO: 2871487 - DNA, 25 bp, Homo sapien
aggatgtcacccaaaggtcttttca

SEQ ID NO: 2871488 - DNA, 25 bp, Homo sapien
tatgtaggatgtcacccaaaggtct

SEQ ID NO: 2871489 - DNA, 25 bp, Homo sapien
tgtaggatgtcacccaaaggtcttt

SEQ ID NO: 2871490 - DNA, 25 bp, Homo sapien
ttatgtaggatgtcacccaaaggtc

SEQ ID NO: 2871491 - DNA, 25 bp, Homo sapien
ctggcaccttccagtaccgatgtct

SEQ ID NO: 2871492 - DNA, 25 bp, Homo sapien
ccttccagtaccgatgtctgtcccc

SEQ ID NO: 2871493 - DNA, 25 bp, Homo sapien
gacctgatgtatggatctacacatt

SEQ ID NO: 2871494 - DNA, 25 bp, Homo sapien
cctgatgtatggatctacacatttt

SEQ ID NO: 2871495 - DNA, 25 bp, Homo sapien
tgtagatccttttggagatcctaaa

SEQ ID NO: 2871496 - DNA, 25 bp, Homo sapien
agatccttttggagatcctaaatgg

SEQ ID NO: 2871497 - DNA, 25 bp, Homo sapien
gatccttttggagatcctaaatgga

SEQ ID NO: 2871498 - DNA, 25 bp, Homo sapien
tagatccttttggagatcctaaatg

SEQ ID NO: 2871499 - DNA, 25 bp, Homo sapien
tccctctggtattgcgtgtaaggtg

SEQ ID NO: 2871500 - DNA, 25 bp, Homo sapien
cttcgaaataatgggcaaccataga

SEQ ID NO: 2871501 - DNA, 25 bp, Homo sapien
ggcttgaataccagactaacaagtt

SEQ ID NO: 2871502 - DNA, 25 bp, Homo sapien
aaatcggagcatgtgagggtcaaga

SEQ ID NO: 2871503 - DNA, 25 bp, Homo sapien
aagggagagtccctcgtgaggtcta

SEQ ID NO: 2871504 - DNA, 25 bp, Homo sapien
ctcgggccagagcacgtgatgcttg

SEQ ID NO: 2871505 - DNA, 25 bp, Homo sapien
aaacgcagttctaggcaccgcacag

SEQ ID NO: 2871506 - DNA, 25 bp, Homo sapien
cattctgggcaagggcaaacgcagt

SEQ ID NO: 2871507 - DNA, 25 bp, Homo sapien
ccttgaccgtatgccttcgtgagcg

SEQ ID NO: 2871508 - DNA, 25 bp, Homo sapien
tgagcgaggaatccgttctccttga

SEQ ID NO: 2871509 - DNA, 25 bp, Homo sapien
attcatccgcggtttcacgggccgc

SEQ ID NO: 2871510 - DNA, 25 bp, Homo sapien
ttcgatctccaacaccttgaccgta

SEQ ID NO: 2871511 - DNA, 25 bp, Homo sapien
gcccacacaaaagatggcgacctgc

SEQ ID NO: 2871512 - DNA, 25 bp, Homo sapien
acctgctgcgctcactctgggtggg

SEQ ID NO: 2871513 - DNA, 25 bp, Homo sapien
aagagaaatatcaaaggagtccctt

SEQ ID NO: 2871514 - DNA, 25 bp, Homo sapien
gaaatatcaaaggagtcccttgccc

SEQ ID NO: 2871515 - DNA, 25 bp, Homo sapien
cgacggcccagcaaccgtgaggaga

SEQ ID NO: 2871516 - DNA, 25 bp, Homo sapien
ggcccagcaaccgtgaggagaaaca

SEQ ID NO: 2871517 - DNA, 25 bp, Homo sapien
ccagcaaccgtgaggagaaacaaaa

SEQ ID NO: 2871518 - DNA, 25 bp, Homo sapien
gcggcgacggcccagcaaccgtgag

SEQ ID NO: 2871519 - DNA, 25 bp, Homo sapien
gctcaccctcgtcgagtctcgctaa

SEQ ID NO: 2871520 - DNA, 25 bp, Homo sapien
gagtctcgctaatccctcctgatcg

SEQ ID NO: 2871521 - DNA, 25 bp, Homo sapien
aacagcgaccgcagcaagatctgca

SEQ ID NO: 2871522 - DNA, 25 bp, Homo sapien
tcgcgacccccgcaagagggagaaa

SEQ ID NO: 2871523 - DNA, 25 bp, Homo sapien
aacagccccagaggccaaaactgca

SEQ ID NO: 2871524 - DNA, 25 bp, Homo sapien
ggaacagccccagaggccaaaactg

SEQ ID NO: 2871525 - DNA, 25 bp, Homo sapien
ccggagcctcaggaacagccccaga

SEQ ID NO: 2871526 - DNA, 25 bp, Homo sapien
caggaacagccccagaggccaaaac

SEQ ID NO: 2871527 - DNA, 25 bp, Homo sapien
acagcagaaacctccctgcaatcat

SEQ ID NO: 2871528 - DNA, 25 bp, Homo sapien
tccattagtcaatgctgatttcctc

SEQ ID NO: 2871529 - DNA, 25 bp, Homo sapien
gctgatttcctctcccgaaaccagg

SEQ ID NO: 2871530 - DNA, 25 bp, Homo sapien
ttcctctcccgaaaccaggaattca

SEQ ID NO: 2871531 - DNA, 25 bp, Homo sapien
accaggaattcacttcccaccccag

SEQ ID NO: 2871532 - DNA, 25 bp, Homo sapien
cattttaactggattaagatttggc

SEQ ID NO: 2871533 - DNA, 25 bp, Homo sapien
gatttggctcagaactaaatacacc

SEQ ID NO: 2871534 - DNA, 25 bp, Homo sapien
taagacattgacaatcccatgaagt

SEQ ID NO: 2871535 - DNA, 25 bp, Homo sapien
ctttagtggtcaagtaaaaaggctg

SEQ ID NO: 2871536 - DNA, 25 bp, Homo sapien
gatattagcacttcaatttaattac

SEQ ID NO: 2871537 - DNA, 25 bp, Homo sapien
tataacttgcaggcacgtgcctgta

SEQ ID NO: 2871538 - DNA, 25 bp, Homo sapien
ataacttgcaggcacgtgcctgtaa

SEQ ID NO: 2871539 - DNA, 25 bp, Homo sapien
aaagttaaggtctggtgcggtggct

SEQ ID NO: 2871540 - DNA, 25 bp, Homo sapien
ctgtgaatctataattagcactttg

SEQ ID NO: 2871541 - DNA, 25 bp, Homo sapien
cacagaccctgtctttatataataa

SEQ ID NO: 2871542 - DNA, 25 bp, Homo sapien
tacttttgcaacttgctgtgaatct

SEQ ID NO: 2871543 - DNA, 25 bp, Homo sapien
ccccatgttagctctggttcccaga

SEQ ID NO: 2871544 - DNA, 25 bp, Homo sapien
gccgcaagccattggagaacctctg

SEQ ID NO: 2871545 - DNA, 25 bp, Homo sapien
tcccagagtatttagtggaactagc

SEQ ID NO: 2871546 - DNA, 25 bp, Homo sapien
tgttggattgatgggaccccatgtt

SEQ ID NO: 2871547 - DNA, 25 bp, Homo sapien
ggcaccttggaacagattcattcag

SEQ ID NO: 2871548 - DNA, 25 bp, Homo sapien
gccaggctttttacgacagctcaga

SEQ ID NO: 2871549 - DNA, 25 bp, Homo sapien
tataaatagaaaccacgagccaggc

SEQ ID NO: 2871550 - DNA, 25 bp, Homo sapien
gacgcagtagtcaggcatcttcaca

SEQ ID NO: 2871551 - DNA, 25 bp, Homo sapien
tgcataagcaagactgagcagcatt

SEQ ID NO: 2871552 - DNA, 25 bp, Homo sapien
ccaggaaacctaccaaagctagaat

SEQ ID NO: 2871553 - DNA, 25 bp, Homo sapien
taacactatcggtctatctgacagt

SEQ ID NO: 2871554 - DNA, 25 bp, Homo sapien
taatgacaactggtgggaaacctag

SEQ ID NO: 2871555 - DNA, 25 bp, Homo sapien
cctggcttatgacccctatggatga

SEQ ID NO: 2871556 - DNA, 25 bp, Homo sapien
ttgtacatgacctgctgaatttcgg

SEQ ID NO: 2871557 - DNA, 25 bp, Homo sapien
taaattatgaatgtcgtgcactggc

SEQ ID NO: 2871558 - DNA, 25 bp, Homo sapien
cagtcatgcgaatggagggtgctct

SEQ ID NO: 2871559 - DNA, 25 bp, Homo sapien
tggcgccagccatgtacttacaatg

SEQ ID NO: 2871560 - DNA, 25 bp, Homo sapien
tggaaagacttgataattcacccct

SEQ ID NO: 2871561 - DNA, 25 bp, Homo sapien
tagttctagcgcactagcatggcgc

SEQ ID NO: 2871562 - DNA, 25 bp, Homo sapien
ggtccctgcgctttggtataatata

SEQ ID NO: 2871563 - DNA, 25 bp, Homo sapien
agtcattttcacgttaagttcctat

SEQ ID NO: 2871564 - DNA, 25 bp, Homo sapien
cagttaattgtactacttggctgaa

SEQ ID NO: 2871565 - DNA, 25 bp, Homo sapien
ccagtgtattgctcatattatcaga

SEQ ID NO: 2871566 - DNA, 25 bp, Homo sapien
catttgttgaagtgctagtgaaaaa

SEQ ID NO: 2871567 - DNA, 25 bp, Homo sapien
tagcattgagccctgaacacctttc

SEQ ID NO: 2871568 - DNA, 25 bp, Homo sapien
cccattccttcagggttgggccagg

SEQ ID NO: 2871569 - DNA, 25 bp, Homo sapien
ttctcaacaagagcacaaggatgtt

SEQ ID NO: 2871570 - DNA, 25 bp, Homo sapien
taattaagagactgggcgcaaaacc

SEQ ID NO: 2871571 - DNA, 25 bp, Homo sapien
gagtattcaagtcccccactactgt

SEQ ID NO: 2871572 - DNA, 25 bp, Homo sapien
ggccaatcatatggtctactttgaa

SEQ ID NO: 2871573 - DNA, 25 bp, Homo sapien
ggttaatgtcattaacggtctatca

SEQ ID NO: 2871574 - DNA, 25 bp, Homo sapien
cagacgatttcataggttgtgttac

SEQ ID NO: 2871575 - DNA, 25 bp, Homo sapien
caccagcgtccctcaggtatacaac

SEQ ID NO: 2871576 - DNA, 25 bp, Homo sapien
caactttgattttggtgtgcttgaa

SEQ ID NO: 2871577 - DNA, 25 bp, Homo sapien
ccatggagttgatctcaggggtcag

SEQ ID NO: 2871578 - DNA, 25 bp, Homo sapien
ttgattttggtgtgcttgaacctgg

SEQ ID NO: 2871579 - DNA, 25 bp, Homo sapien
tatggcctccctattgtgtcttggt

SEQ ID NO: 2871580 - DNA, 25 bp, Homo sapien
tcagagttcaagtgttaggtggcac

SEQ ID NO: 2871581 - DNA, 25 bp, Homo sapien
gcttaggttcaagtctgggctctgc

SEQ ID NO: 2871582 - DNA, 25 bp, Homo sapien
tcttggttccccaggatcagagttc

SEQ ID NO: 2871583 - DNA, 25 bp, Homo sapien
tgaggcttggagagaatgttgtcag

SEQ ID NO: 2871584 - DNA, 25 bp, Homo sapien
taatgattttgaaggagagaactga

SEQ ID NO: 2871585 - DNA, 25 bp, Homo sapien
tcataatgattttgaaggagagaac

SEQ ID NO: 2871586 - DNA, 25 bp, Homo sapien
ctgaggcttggagagaatgttgtca

SEQ ID NO: 2871587 - DNA, 25 bp, Homo sapien
gctcttgcggacagaaactgccctg

SEQ ID NO: 2871588 - DNA, 25 bp, Homo sapien
gccccgtatgcctatacattctggg

SEQ ID NO: 2871589 - DNA, 25 bp, Homo sapien
ttcctttcctgcgtttttctggtgc

SEQ ID NO: 2871590 - DNA, 25 bp, Homo sapien
tgctatgaaagcctgggctcttgcg

SEQ ID NO: 2871591 - DNA, 25 bp, Homo sapien
gtctggtattaatgtcattctgcct

SEQ ID NO: 2871592 - DNA, 25 bp, Homo sapien
tgtgaggttgtgttgagatttactt

SEQ ID NO: 2871593 - DNA, 25 bp, Homo sapien
tcaggtctggtattaatgtcattct

SEQ ID NO: 2871594 - DNA, 25 bp, Homo sapien
attaatattgtgaggttgtgttgag

SEQ ID NO: 2871595 - DNA, 25 bp, Homo sapien
aatattaatggagcagtatttgcag

SEQ ID NO: 2871596 - DNA, 25 bp, Homo sapien
gacgtggcttacaatttaatgttcc

SEQ ID NO: 2871597 - DNA, 25 bp, Homo sapien
gtgaatttgattctaaagcaatatc

SEQ ID NO: 2871598 - DNA, 25 bp, Homo sapien
tcccagggtgcggacatacagctga

SEQ ID NO: 2871599 - DNA, 25 bp, Homo sapien
cttggatttagagttcagtagctca

SEQ ID NO: 2871600 - DNA, 25 bp, Homo sapien
tttccttcttgcatcagagtctggc

SEQ ID NO: 2871601 - DNA, 25 bp, Homo sapien
tccttcttgcatcagagtctggctt

SEQ ID NO: 2871602 - DNA, 25 bp, Homo sapien
ggatttagagttcagtagctcagtc

SEQ ID NO: 2871603 - DNA, 25 bp, Homo sapien
tttcactgtcatgggccactccaac

SEQ ID NO: 2871604 - DNA, 25 bp, Homo sapien
ctcaccttgccttctatgagtcttt

SEQ ID NO: 2871605 - DNA, 25 bp, Homo sapien
tccatcacatcgcttctcaccttgc

SEQ ID NO: 2871606 - DNA, 25 bp, Homo sapien
tccaagacttgtctttcactgtcat

SEQ ID NO: 2871607 - DNA, 25 bp, Homo sapien
tgcaaagcttccttgcaaagctcct

SEQ ID NO: 2871608 - DNA, 25 bp, Homo sapien
taggtcataatgagctggttgggca

SEQ ID NO: 2871609 - DNA, 25 bp, Homo sapien
gagctggcgtgcttgcaaagcttcc

SEQ ID NO: 2871610 - DNA, 25 bp, Homo sapien
tgcccactgctcatgaaattcagga

SEQ ID NO: 2871611 - DNA, 25 bp, Homo sapien
ccaacttatggccatcctttttcct

SEQ ID NO: 2871612 - DNA, 25 bp, Homo sapien
cctccaacttatggccatccttttt

SEQ ID NO: 2871613 - DNA, 25 bp, Homo sapien
caacttatggccatcctttttcctt

SEQ ID NO: 2871614 - DNA, 25 bp, Homo sapien
ctgcctccaacttatggccatcctt

SEQ ID NO: 2871615 - DNA, 25 bp, Homo sapien
gaggcaggttccctctaggtcccga

SEQ ID NO: 2871616 - DNA, 25 bp, Homo sapien
taggtcccgagcatgccacagcagc

SEQ ID NO: 2871617 - DNA, 25 bp, Homo sapien
gttagaatctcattcccgtccttga

SEQ ID NO: 2871618 - DNA, 25 bp, Homo sapien
ccttgacaacgattgtctggagctg

SEQ ID NO: 2871619 - DNA, 25 bp, Homo sapien
caggcttctccgtgcaggaagaata

SEQ ID NO: 2871620 - DNA, 25 bp, Homo sapien
tcctgacccacgaggaaagaaggaa

SEQ ID NO: 2871621 - DNA, 25 bp, Homo sapien
ggtgtacactaccacctccggctag

SEQ ID NO: 2871622 - DNA, 25 bp, Homo sapien
tagctgaagtcaggatgccacaggg

SEQ ID NO: 2871623 - DNA, 25 bp, Homo sapien
ccatcagaagacgttgaagggcagt

SEQ ID NO: 2871624 - DNA, 25 bp, Homo sapien
cacagaccgggactattccattagc

SEQ ID NO: 2871625 - DNA, 25 bp, Homo sapien
taacccatagtgaaatgtgctggcc

SEQ ID NO: 2871626 - DNA, 25 bp, Homo sapien
ccagggttgcagagtatgagtgaca

SEQ ID NO: 2871627 - DNA, 25 bp, Homo sapien
gagatcatcgtatgcaacagctggg

SEQ ID NO: 2871628 - DNA, 25 bp, Homo sapien
tcaaagcggaataacaagttgtccc

SEQ ID NO: 2871629 - DNA, 25 bp, Homo sapien
aaccaggagcctcaagtgacagcca

SEQ ID NO: 2871630 - DNA, 25 bp, Homo sapien
aagttgtccctagcaaaaccgctga

SEQ ID NO: 2871631 - DNA, 25 bp, Homo sapien
agcaacaagcggtactttttgcttg

SEQ ID NO: 2871632 - DNA, 25 bp, Homo sapien
gagagagtgctgccctccaagtgaa

SEQ ID NO: 2871633 - DNA, 25 bp, Homo sapien
cgttgaaaagcaacaagcggtactt

SEQ ID NO: 2871634 - DNA, 25 bp, Homo sapien
tcagattctgcatcgttgaaaagca

SEQ ID NO: 2871635 - DNA, 25 bp, Homo sapien
tactaaataagtgctctggccttgc

SEQ ID NO: 2871636 - DNA, 25 bp, Homo sapien
tgttactaaataagtgctctggcct

SEQ ID NO: 2871637 - DNA, 25 bp, Homo sapien
attgcatgttactaaataagtgctc

SEQ ID NO: 2871638 - DNA, 25 bp, Homo sapien
catgttactaaataagtgctctggc

SEQ ID NO: 2871639 - DNA, 25 bp, Homo sapien
ttgagctaacttatatttaaagctg

SEQ ID NO: 2871640 - DNA, 25 bp, Homo sapien
tcatggactgtggtaatgcgttagc

SEQ ID NO: 2871641 - DNA, 25 bp, Homo sapien
cgttagctcaattggaatattcctc

SEQ ID NO: 2871642 - DNA, 25 bp, Homo sapien
gctgacaccctgattattaacttca

SEQ ID NO: 2871643 - DNA, 25 bp, Homo sapien
ggtgttgatctccccaacattgact

SEQ ID NO: 2871644 - DNA, 25 bp, Homo sapien
ttgactcccccttctttagccaata

SEQ ID NO: 2871645 - DNA, 25 bp, Homo sapien
tgttgatctccccaacattgactcc

SEQ ID NO: 2871646 - DNA, 25 bp, Homo sapien
ctttagccaatagacggatcttcat

SEQ ID NO: 2871647 - DNA, 25 bp, Homo sapien
gacacatcgtggctttgtttgcagc

SEQ ID NO: 2871648 - DNA, 25 bp, Homo sapien
tatttattccccgttgctcagggag

SEQ ID NO: 2871649 - DNA, 25 bp, Homo sapien
cagagctggctgcaaagattagggt

SEQ ID NO: 2871650 - DNA, 25 bp, Homo sapien
gggtgccagcaagaatccaagagaa

SEQ ID NO: 2871651 - DNA, 25 bp, Homo sapien
aagccatgaggtgcatagtctacag

SEQ ID NO: 2871652 - DNA, 25 bp, Homo sapien
gcatagtctacagggctattgtctg

SEQ ID NO: 2871653 - DNA, 25 bp, Homo sapien
tacagggctattgtctgggagcatc

SEQ ID NO: 2871654 - DNA, 25 bp, Homo sapien
tctagggccctctttggggcaatct

SEQ ID NO: 2871655 - DNA, 25 bp, Homo sapien
ggatgccataggcagggctctagtc

SEQ ID NO: 2871656 - DNA, 25 bp, Homo sapien
tgctggtgtcggcttggaggttcca

SEQ ID NO: 2871657 - DNA, 25 bp, Homo sapien
ttaaaggctactgggaactgcggtg

SEQ ID NO: 2871658 - DNA, 25 bp, Homo sapien
aactgcggtgttctagctggtgctt

SEQ ID NO: 2871659 - DNA, 25 bp, Homo sapien
gagcttggtattcttcgatgtggaa

SEQ ID NO: 2871660 - DNA, 25 bp, Homo sapien
acctgctcattgagagctctgctgg

SEQ ID NO: 2871661 - DNA, 25 bp, Homo sapien
ctgggtctgagcttggtattcttcg

SEQ ID NO: 2871662 - DNA, 25 bp, Homo sapien
tattcttcgatgtggaagcaatggg

SEQ ID NO: 2871663 - DNA, 25 bp, Homo sapien
tcctttctgcgttccagctgatctg

SEQ ID NO: 2871664 - DNA, 25 bp, Homo sapien
ggctccctctcctatgctccagctc

SEQ ID NO: 2871665 - DNA, 25 bp, Homo sapien
cagacctcaaattttacaggactta

SEQ ID NO: 2871666 - DNA, 25 bp, Homo sapien
agacctcaaattttacaggacttat

SEQ ID NO: 2871667 - DNA, 25 bp, Homo sapien
accatttctatcctgactgccacgg

SEQ ID NO: 2871668 - DNA, 25 bp, Homo sapien
cttcactgtggccaaccatttctat

SEQ ID NO: 2871669 - DNA, 25 bp, Homo sapien
gccacggccctagctctggcctctt

SEQ ID NO: 2871670 - DNA, 25 bp, Homo sapien
ctggccagtcctctaaaggactctt

SEQ ID NO: 2871671 - DNA, 25 bp, Homo sapien
ccttgctccctgtaagcctatgctc

SEQ ID NO: 2871672 - DNA, 25 bp, Homo sapien
ttgctccctgtaagcctatgctccc

SEQ ID NO: 2871673 - DNA, 25 bp, Homo sapien
tgctccctgtaagcctatgctcccc

SEQ ID NO: 2871674 - DNA, 25 bp, Homo sapien
tccctgtaagcctatgctccccttc

SEQ ID NO: 2871675 - DNA, 25 bp, Homo sapien
ttgcacagcccgctgttgtagccct

SEQ ID NO: 2871676 - DNA, 25 bp, Homo sapien
agcccgctgttgtagcccttggctg

SEQ ID NO: 2871677 - DNA, 25 bp, Homo sapien
ttgttttactccaaggctccttgca

SEQ ID NO: 2871678 - DNA, 25 bp, Homo sapien
tctagctgaaccaacagctcctttg

SEQ ID NO: 2871679 - DNA, 25 bp, Homo sapien
gctgggacaacaattgtgaggagtt

SEQ ID NO: 2871680 - DNA, 25 bp, Homo sapien
cattagtgacgcgtctgtttggctg

SEQ ID NO: 2871681 - DNA, 25 bp, Homo sapien
tttggctgggacaacaattgtgagg

SEQ ID NO: 2871682 - DNA, 25 bp, Homo sapien
tcacagtgggcgttcattagtgacg

SEQ ID NO: 2871683 - DNA, 25 bp, Homo sapien
ggttgatgtcttttaaggctgagag

SEQ ID NO: 2871684 - DNA, 25 bp, Homo sapien
ctgagagcagagacccggaagactt

SEQ ID NO: 2871685 - DNA, 25 bp, Homo sapien
gctccattttggcacggtggacacc

SEQ ID NO: 2871686 - DNA, 25 bp, Homo sapien
gacgtctcctgtttgattctggttg

SEQ ID NO: 2871687 - DNA, 25 bp, Homo sapien
tccctgatatccatggaacatactc

SEQ ID NO: 2871688 - DNA, 25 bp, Homo sapien
tctcacaagtgtagggaggtaaacc

SEQ ID NO: 2871689 - DNA, 25 bp, Homo sapien
tctttttataaccaagagcagtggt

SEQ ID NO: 2871690 - DNA, 25 bp, Homo sapien
tgttgcatacgtttttctctcacaa

SEQ ID NO: 2871691 - DNA, 25 bp, Homo sapien
gcgtgttcaccaccccacatgggtg

SEQ ID NO: 2871692 - DNA, 25 bp, Homo sapien
gctgaacagctgagagttaccgtgg

SEQ ID NO: 2871693 - DNA, 25 bp, Homo sapien
tctgagtatagacctctggccctct

SEQ ID NO: 2871694 - DNA, 25 bp, Homo sapien
tgcaggaagagtggatgccgcccct

SEQ ID NO: 2871695 - DNA, 25 bp, Homo sapien
tttaagatggtgaggagactgttca

SEQ ID NO: 2871696 - DNA, 25 bp, Homo sapien
ttttaagatggtgaggagactgttc

SEQ ID NO: 2871697 - DNA, 25 bp, Homo sapien
tggctaatacccttgaaggcctggc

SEQ ID NO: 2871698 - DNA, 25 bp, Homo sapien
caacctgtggcagaacgtgggcctg

SEQ ID NO: 2871699 - DNA, 25 bp, Homo sapien
gaagcctaattaatcccgttgttga

SEQ ID NO: 2871700 - DNA, 25 bp, Homo sapien
ttaggccttggtcctggaacccagc

SEQ ID NO: 2871701 - DNA, 25 bp, Homo sapien
ggcaatataatgcactgtttccaca

SEQ ID NO: 2871702 - DNA, 25 bp, Homo sapien
ggctgggtcacttggcttgtatcac

SEQ ID NO: 2871703 - DNA, 25 bp, Homo sapien
cttggcttgtatcacagcaggagca

SEQ ID NO: 2871704 - DNA, 25 bp, Homo sapien
cacattcataaggcccggccactgt

SEQ ID NO: 2871705 - DNA, 25 bp, Homo sapien
acaagtggtccacttttattagcat

SEQ ID NO: 2871706 - DNA, 25 bp, Homo sapien
cactgatttctacaagtggtccact

SEQ ID NO: 2871707 - DNA, 25 bp, Homo sapien
ctctatgaccctatagaaaccaaaa

SEQ ID NO: 2871708 - DNA, 25 bp, Homo sapien
caaaatcagctgtgtcactgatttc

SEQ ID NO: 2871709 - DNA, 25 bp, Homo sapien
gtgaatcccatatagcccatgaatt

SEQ ID NO: 2871710 - DNA, 25 bp, Homo sapien
cacatcagctgcattggccttaatg

SEQ ID NO: 2871711 - DNA, 25 bp, Homo sapien
catatagcccatgaattctacacac

SEQ ID NO: 2871712 - DNA, 25 bp, Homo sapien
atcagctgcattggccttaatgggc

SEQ ID NO: 2871713 - DNA, 25 bp, Homo sapien
aaatctgatgggattcctcacaggg

SEQ ID NO: 2871714 - DNA, 25 bp, Homo sapien
taggtcaaggcatctctgatcacct

SEQ ID NO: 2871715 - DNA, 25 bp, Homo sapien
tagcattccaggcacgatcctcttc

SEQ ID NO: 2871716 - DNA, 25 bp, Homo sapien
cattcacaccataggtcaaggcatc

SEQ ID NO: 2871717 - DNA, 25 bp, Homo sapien
tctgctgagaggatctcctggaagg

SEQ ID NO: 2871718 - DNA, 25 bp, Homo sapien
tggacccagcagtaaaggagggcag

SEQ ID NO: 2871719 - DNA, 25 bp, Homo sapien
gggcagctgggcacggctttaactt

SEQ ID NO: 2871720 - DNA, 25 bp, Homo sapien
cacggctttaacttctgctgagagg

SEQ ID NO: 2871721 - DNA, 25 bp, Homo sapien
ctgaggaaggagtggaggagcagca

SEQ ID NO: 2871722 - DNA, 25 bp, Homo sapien
aggagtggaggagcagcagctttac

SEQ ID NO: 2871723 - DNA, 25 bp, Homo sapien
gaaggagtggaggagcagcagcttt

SEQ ID NO: 2871724 - DNA, 25 bp, Homo sapien
aggaaggagtggaggagcagcagct

SEQ ID NO: 2871725 - DNA, 25 bp, Homo sapien
ccagatcggcatgctggctgctctc

SEQ ID NO: 2871726 - DNA, 25 bp, Homo sapien
cacccagatcggcatgctggctgct

SEQ ID NO: 2871727 - DNA, 25 bp, Homo sapien
tccgccacccagatcggcatgctgg

SEQ ID NO: 2871728 - DNA, 25 bp, Homo sapien
gctgatctcgaggggatgtgtctcc

SEQ ID NO: 2871729 - DNA, 25 bp, Homo sapien
tccaggtaggctgtgtcctcgccaa

SEQ ID NO: 2871730 - DNA, 25 bp, Homo sapien
ctccaggtaggctgtgtcctcgcca

SEQ ID NO: 2871731 - DNA, 25 bp, Homo sapien
cacaacccatgggacaggcatcggc

SEQ ID NO: 2871732 - DNA, 25 bp, Homo sapien
aacccatgggacaggcatcggcctt

SEQ ID NO: 2871733 - DNA, 25 bp, Homo sapien
acccatgggacaggcatcggccttt

SEQ ID NO: 2871734 - DNA, 25 bp, Homo sapien
ccatgggacaggcatcggcctttac

SEQ ID NO: 2871735 - DNA, 25 bp, Homo sapien
ccactcaacagagcctgagcatgaa

SEQ ID NO: 2871736 - DNA, 25 bp, Homo sapien
tgggcaccgggacggtccaggtgtc

SEQ ID NO: 2871737 - DNA, 25 bp, Homo sapien
tgtcctgagcgggaaaggtcggctt

SEQ ID NO: 2871738 - DNA, 25 bp, Homo sapien
cttggtctccatacagccttgggtc

SEQ ID NO: 2871739 - DNA, 25 bp, Homo sapien
ggtgcgtttcatcaagttgactatt

SEQ ID NO: 2871740 - DNA, 25 bp, Homo sapien
cagcatcgtaaacgctccaaagcct

SEQ ID NO: 2871741 - DNA, 25 bp, Homo sapien
cgtaacagcatcgtaaacgctccaa

SEQ ID NO: 2871742 - DNA, 25 bp, Homo sapien
tgtcttcatgtggtgcgtttcatca

SEQ ID NO: 2871743 - DNA, 25 bp, Homo sapien
tctagacggcactgggatgctggaa

SEQ ID NO: 2871744 - DNA, 25 bp, Homo sapien
tctgccgaagccgaaggaaggctgc

SEQ ID NO: 2871745 - DNA, 25 bp, Homo sapien
actggacgctgggaagactttcacc

SEQ ID NO: 2871746 - DNA, 25 bp, Homo sapien
gaatctgcatttgcgctgcactgga

SEQ ID NO: 2871747 - DNA, 25 bp, Homo sapien
ccagcggcggcatcggaggacgcac

SEQ ID NO: 2871748 - DNA, 25 bp, Homo sapien
gcccagcggcggcatcggaggacgc

SEQ ID NO: 2871749 - DNA, 25 bp, Homo sapien
cccagcggcggcatcggaggacgca

SEQ ID NO: 2871750 - DNA, 25 bp, Homo sapien
cccgcaaacgcgagctcctttgttt

SEQ ID NO: 2871751 - DNA, 25 bp, Homo sapien
gagagagtctgaagccccggcttcc

SEQ ID NO: 2871752 - DNA, 25 bp, Homo sapien
agccgagggtcgagtcccagccctg

SEQ ID NO: 2871753 - DNA, 25 bp, Homo sapien
tgttttgcggtcccggcttctgcgg

SEQ ID NO: 2871754 - DNA, 25 bp, Homo sapien
aggaagcgcgcaccggcaccggttc

SEQ ID NO: 2871755 - DNA, 25 bp, Homo sapien
gcaccggcaccggttcactcggtgt

SEQ ID NO: 2871756 - DNA, 25 bp, Homo sapien
accggcaccggttcactcggtgtgg

SEQ ID NO: 2871757 - DNA, 25 bp, Homo sapien
ggaggaagcgcgcaccggcaccggt

SEQ ID NO: 2871758 - DNA, 25 bp, Homo sapien
ggagctccatttatgggaggtctgt

SEQ ID NO: 2871759 - DNA, 25 bp, Homo sapien
tccgggttgattttcattgacccag

SEQ ID NO: 2871760 - DNA, 25 bp, Homo sapien
aggtctgttgggctcttccgggttg

SEQ ID NO: 2871761 - DNA, 25 bp, Homo sapien
agtttaggagtaagcattctgtgtc

SEQ ID NO: 2871762 - DNA, 25 bp, Homo sapien
cagggttgccctctgaaactgagtg

SEQ ID NO: 2871763 - DNA, 25 bp, Homo sapien
cttacagtggcttcaggagagtgca

SEQ ID NO: 2871764 - DNA, 25 bp, Homo sapien
ttgcaggcccctgatggacagctgt

SEQ ID NO: 2871765 - DNA, 25 bp, Homo sapien
gacagtggacgtcctgacttcctag

SEQ ID NO: 2871766 - DNA, 25 bp, Homo sapien
aggtccctctggctgcgatgacagg

SEQ ID NO: 2871767 - DNA, 25 bp, Homo sapien
cgatgacaggccttcagcaggcact

SEQ ID NO: 2871768 - DNA, 25 bp, Homo sapien
tgtaattgcagcgttaaaacccctc

SEQ ID NO: 2871769 - DNA, 25 bp, Homo sapien
cagccgaactggtgggatcaggtcc

SEQ ID NO: 2871770 - DNA, 25 bp, Homo sapien
gatgtcaccattgttgtagtgagca

SEQ ID NO: 2871771 - DNA, 25 bp, Homo sapien
tgttgtagtgagcactgacatagac

SEQ ID NO: 2871772 - DNA, 25 bp, Homo sapien
ctgacatagacagcatcgaccaagg

SEQ ID NO: 2871773 - DNA, 25 bp, Homo sapien
catagacagcatcgaccaaggctga

SEQ ID NO: 2871774 - DNA, 25 bp, Homo sapien
ttctggctgttgctggtacctggca

SEQ ID NO: 2871775 - DNA, 25 bp, Homo sapien
catttgggagctgatagtggtgaca

SEQ ID NO: 2871776 - DNA, 25 bp, Homo sapien
aaaggcagcccaggttgtctttgta

SEQ ID NO: 2871777 - DNA, 25 bp, Homo sapien
attccaatagtccaaagagaaagag

SEQ ID NO: 2871778 - DNA, 25 bp, Homo sapien
cattgaagaattcaaggctatttgc

SEQ ID NO: 2871779 - DNA, 25 bp, Homo sapien
taatggtccatagttacacttttaa

SEQ ID NO: 2871780 - DNA, 25 bp, Homo sapien
tcctttgagttcaattttgaccaca

SEQ ID NO: 2871781 - DNA, 25 bp, Homo sapien
gttgttttttggtgggatgttctgc

SEQ ID NO: 2871782 - DNA, 25 bp, Homo sapien
tgggtttggctgaagatgtttctaa

SEQ ID NO: 2871783 - DNA, 25 bp, Homo sapien
gtttggctgaagatgtttctaaatc

SEQ ID NO: 2871784 - DNA, 25 bp, Homo sapien
tcttatggcatgtagaatatttgct

SEQ ID NO: 2871785 - DNA, 25 bp, Homo sapien
ttcccaaaatcagtcaacagtttgg

SEQ ID NO: 2871786 - DNA, 25 bp, Homo sapien
tctctgtgtagttttgacgcagcat

SEQ ID NO: 2871787 - DNA, 25 bp, Homo sapien
ccagaatctctgtgtagttttgacg

SEQ ID NO: 2871788 - DNA, 25 bp, Homo sapien
agaatctctgtgtagttttgacgca

SEQ ID NO: 2871789 - DNA, 25 bp, Homo sapien
aatctctgtgtagttttgacgcagc

SEQ ID NO: 2871790 - DNA, 25 bp, Homo sapien
ccaggtgattcgcagtgggattgac

SEQ ID NO: 2871791 - DNA, 25 bp, Homo sapien
tcacagctgagggatgtttcctagc

SEQ ID NO: 2871792 - DNA, 25 bp, Homo sapien
tatctgactctgaagatccatgggt

SEQ ID NO: 2871793 - DNA, 25 bp, Homo sapien
caggctgtaaacagatatctgactc

SEQ ID NO: 2871794 - DNA, 25 bp, Homo sapien
aaggagctcttttcacccaaatagg

SEQ ID NO: 2871795 - DNA, 25 bp, Homo sapien
gatcaggatttctgcaccgggcctt

SEQ ID NO: 2871796 - DNA, 25 bp, Homo sapien
cccaaataggctgtcgaattactga

SEQ ID NO: 2871797 - DNA, 25 bp, Homo sapien
tgcttgagttgtgcccctctctggg

SEQ ID NO: 2871798 - DNA, 25 bp, Homo sapien
gaccaatttatcctgctaacagcca

SEQ ID NO: 2871799 - DNA, 25 bp, Homo sapien
cctatatagggttttgattgtcaaa

SEQ ID NO: 2871800 - DNA, 25 bp, Homo sapien
cgaggtaggagcaaagcaagaccaa

SEQ ID NO: 2871801 - DNA, 25 bp, Homo sapien
gtcaaagtttgattaggtgctaggg

SEQ ID NO: 2871802 - DNA, 25 bp, Homo sapien
cagtgcaatttctatgttcacaaaa

SEQ ID NO: 2871803 - DNA, 25 bp, Homo sapien
gaatatccaaagaaattctaaacaa

SEQ ID NO: 2871804 - DNA, 25 bp, Homo sapien
ctaagcaatttacggattcagtgca

SEQ ID NO: 2871805 - DNA, 25 bp, Homo sapien
gccatactacctaagcaatttacgg

SEQ ID NO: 2871806 - DNA, 25 bp, Homo sapien
cagagtgaagagataacctgaagaa

SEQ ID NO: 2871807 - DNA, 25 bp, Homo sapien
tatatttccctagctagaatgtctg

SEQ ID NO: 2871808 - DNA, 25 bp, Homo sapien
tcaactaatgggttcatatcaagtc

SEQ ID NO: 2871809 - DNA, 25 bp, Homo sapien
acaggcaacaaaagtctatttcaac

SEQ ID NO: 2871810 - DNA, 25 bp, Homo sapien
ggcagtagcagcagataacaatcag

SEQ ID NO: 2871811 - DNA, 25 bp, Homo sapien
cacatgactgttggcctaactggca

SEQ ID NO: 2871812 - DNA, 25 bp, Homo sapien
taactggcaccagcgttcaggcagt

SEQ ID NO: 2871813 - DNA, 25 bp, Homo sapien
tgcttgcaattcatagccattgcca

SEQ ID NO: 2871814 - DNA, 25 bp, Homo sapien
ctggcggcctgcctgggccacgtga

SEQ ID NO: 2871815 - DNA, 25 bp, Homo sapien
cctgcctgggccacgtgacagccat

SEQ ID NO: 2871816 - DNA, 25 bp, Homo sapien
ggcctgcctgggccacgtgacagcc

SEQ ID NO: 2871817 - DNA, 25 bp, Homo sapien
ggcggcctgcctgggccacgtgaca

SEQ ID NO: 2871818 - DNA, 25 bp, Homo sapien
tcccctctttcgatgtcttgccagt

SEQ ID NO: 2871819 - DNA, 25 bp, Homo sapien
tcttgccagttgtcaaacctggact

SEQ ID NO: 2871820 - DNA, 25 bp, Homo sapien
tgccagttgtcaaacctggactcat

SEQ ID NO: 2871821 - DNA, 25 bp, Homo sapien
atgtcttgccagttgtcaaacctgg

SEQ ID NO: 2871822 - DNA, 25 bp, Homo sapien
caatgaatggcaatgtccaccagga

SEQ ID NO: 2871823 - DNA, 25 bp, Homo sapien
aatggcaatgtccaccaggatagtg

SEQ ID NO: 2871824 - DNA, 25 bp, Homo sapien
gcaatgtccaccaggatagtggcac

SEQ ID NO: 2871825 - DNA, 25 bp, Homo sapien
tcaatgaatggcaatgtccaccagg

SEQ ID NO: 2871826 - DNA, 25 bp, Homo sapien
ctctttggtcagggagttctgaccc

SEQ ID NO: 2871827 - DNA, 25 bp, Homo sapien
cctctttggtcagggagttctgacc

SEQ ID NO: 2871828 - DNA, 25 bp, Homo sapien
tctttggtcagggagttctgaccca

SEQ ID NO: 2871829 - DNA, 25 bp, Homo sapien
ctttggtcagggagttctgacccat

SEQ ID NO: 2871830 - DNA, 25 bp, Homo sapien
cagagtaccctttgtttattgtgcc

SEQ ID NO: 2871831 - DNA, 25 bp, Homo sapien
catcctacccagtaattagcattgg

SEQ ID NO: 2871832 - DNA, 25 bp, Homo sapien
ccagacctagcaaggaggcagctct

SEQ ID NO: 2871833 - DNA, 25 bp, Homo sapien
ggttgtgttggtttaaatactggca

SEQ ID NO: 2871834 - DNA, 25 bp, Homo sapien
gaattgttctctgcttagacacgac

SEQ ID NO: 2871835 - DNA, 25 bp, Homo sapien
gacgttttgggaagccacactgatg

SEQ ID NO: 2871836 - DNA, 25 bp, Homo sapien
tattggttcaaattgctcggctgac

SEQ ID NO: 2871837 - DNA, 25 bp, Homo sapien
tcttgcgtaagtctccctggtccgt

SEQ ID NO: 2871838 - DNA, 25 bp, Homo sapien
ccctcgatggccactttgtcaagct

SEQ ID NO: 2871839 - DNA, 25 bp, Homo sapien
acacccacacctactcttccacctt

SEQ ID NO: 2871840 - DNA, 25 bp, Homo sapien
gggctggcactgccctcgatggcca

SEQ ID NO: 2871841 - DNA, 25 bp, Homo sapien
aacagcgacacccacacctactctt

SEQ ID NO: 2871842 - DNA, 25 bp, Homo sapien
ggcattcgtcgccagctgctgtctc

SEQ ID NO: 2871843 - DNA, 25 bp, Homo sapien
ttgccggcattcgtcgccagctgct

SEQ ID NO: 2871844 - DNA, 25 bp, Homo sapien
attcgtcgccagctgctgtctcaca

SEQ ID NO: 2871845 - DNA, 25 bp, Homo sapien
tcgtcgccagctgctgtctcacaaa

SEQ ID NO: 2871846 - DNA, 25 bp, Homo sapien
aaggcctccaatttagactcctcag

SEQ ID NO: 2871847 - DNA, 25 bp, Homo sapien
ccaatttagactcctcagcaaacac

SEQ ID NO: 2871848 - DNA, 25 bp, Homo sapien
tccaatttagactcctcagcaaaca

SEQ ID NO: 2871849 - DNA, 25 bp, Homo sapien
gcctccaatttagactcctcagcaa

SEQ ID NO: 2871850 - DNA, 25 bp, Homo sapien
tgttttacatcacaggggaccaagg

SEQ ID NO: 2871851 - DNA, 25 bp, Homo sapien
ggcctcactcgaaccctttcaagga

SEQ ID NO: 2871852 - DNA, 25 bp, Homo sapien
gaaatgagcatgcattttatagagg

SEQ ID NO: 2871853 - DNA, 25 bp, Homo sapien
cactttttaatatgcccaggctctt

SEQ ID NO: 2871854 - DNA, 25 bp, Homo sapien
tgcccttacacaatgccagcaggta

SEQ ID NO: 2871855 - DNA, 25 bp, Homo sapien
taggtgactaaatctgctggctgcc

SEQ ID NO: 2871856 - DNA, 25 bp, Homo sapien
gagaaccaaagaacccaagggctga

SEQ ID NO: 2871857 - DNA, 25 bp, Homo sapien
cttgtgcaagatccggcttctggga

SEQ ID NO: 2871858 - DNA, 25 bp, Homo sapien
ccttttccttgaagatgctttaact

SEQ ID NO: 2871859 - DNA, 25 bp, Homo sapien
ccttatggtaaagcacccagctcat

SEQ ID NO: 2871860 - DNA, 25 bp, Homo sapien
ttccttatggtaaagcacccagctc

SEQ ID NO: 2871861 - DNA, 25 bp, Homo sapien
tgtttccttatggtaaagcacccag

SEQ ID NO: 2871862 - DNA, 25 bp, Homo sapien
ggcccgaaggactcaatattttcag

SEQ ID NO: 2871863 - DNA, 25 bp, Homo sapien
tctagagagacctattgccatcatc

SEQ ID NO: 2871864 - DNA, 25 bp, Homo sapien
gctgggctctatttctgagtctgca

SEQ ID NO: 2871865 - DNA, 25 bp, Homo sapien
cccaagtctgggtgcaggcttttac

SEQ ID NO: 2871866 - DNA, 25 bp, Homo sapien
ctggctgccttactcctgtcttctt

SEQ ID NO: 2871867 - DNA, 25 bp, Homo sapien
ctgtcttcttgcactgaacactcat

SEQ ID NO: 2871868 - DNA, 25 bp, Homo sapien
ctcctgtcttcttgcactgaacact

SEQ ID NO: 2871869 - DNA, 25 bp, Homo sapien
tggctgccttactcctgtcttcttg

SEQ ID NO: 2871870 - DNA, 25 bp, Homo sapien
agactccggtgctcaccatggccga

SEQ ID NO: 2871871 - DNA, 25 bp, Homo sapien
gaggagactccggtgctcaccatgg

SEQ ID NO: 2871872 - DNA, 25 bp, Homo sapien
catggccgacgaaaagcccaaggaa

SEQ ID NO: 2871873 - DNA, 25 bp, Homo sapien
ggtgctcaccatggccgacgaaaag

SEQ ID NO: 2871874 - DNA, 25 bp, Homo sapien
caggtagacgtgcagcagcaagcag

SEQ ID NO: 2871875 - DNA, 25 bp, Homo sapien
ttccaggtagacgtgcagcagcaag

SEQ ID NO: 2871876 - DNA, 25 bp, Homo sapien
ggtagacgtgcagcagcaagcaggc

SEQ ID NO: 2871877 - DNA, 25 bp, Homo sapien
tccaggtagacgtgcagcagcaagc

SEQ ID NO: 2871878 - DNA, 25 bp, Homo sapien
cctgggacacctaaggatctgttgg

SEQ ID NO: 2871879 - DNA, 25 bp, Homo sapien
agccagagcttcaaggcaacagatc

SEQ ID NO: 2871880 - DNA, 25 bp, Homo sapien
tgagccagagcttcaaggcaacaga

SEQ ID NO: 2871881 - DNA, 25 bp, Homo sapien
ctaaggatctgttggatgatgagcc

SEQ ID NO: 2871882 - DNA, 25 bp, Homo sapien
tagccaacaagtgttgcctccgtga

SEQ ID NO: 2871883 - DNA, 25 bp, Homo sapien
gccaacaagtgttgcctccgtgaat

SEQ ID NO: 2871884 - DNA, 25 bp, Homo sapien
ctagccaacaagtgttgcctccgtg

SEQ ID NO: 2871885 - DNA, 25 bp, Homo sapien
ccaacaagtgttgcctccgtgaatt

SEQ ID NO: 2871886 - DNA, 25 bp, Homo sapien
cctttggctgggattagggaccaca

SEQ ID NO: 2871887 - DNA, 25 bp, Homo sapien
cgttcactggtttcctgaggctcaa

SEQ ID NO: 2871888 - DNA, 25 bp, Homo sapien
gactttacgcctgtgacctgaggac

SEQ ID NO: 2871889 - DNA, 25 bp, Homo sapien
cagctacaggtcaaagcatgtggca

SEQ ID NO: 2871890 - DNA, 25 bp, Homo sapien
gttttctctgctgtaaagtcgatat

SEQ ID NO: 2871891 - DNA, 25 bp, Homo sapien
ttttctctgctgtaaagtcgatatt

SEQ ID NO: 2871892 - DNA, 25 bp, Homo sapien
gttcctgtcgataacacgtaggccg

SEQ ID NO: 2871893 - DNA, 25 bp, Homo sapien
gccgggactgaatgtcattgcccat

SEQ ID NO: 2871894 - DNA, 25 bp, Homo sapien
cacgtaggccgggactgaatgtcat

SEQ ID NO: 2871895 - DNA, 25 bp, Homo sapien
tcgataacacgtaggccgggactga

SEQ ID NO: 2871896 - DNA, 25 bp, Homo sapien
ccggatcttggggcactggttttga

SEQ ID NO: 2871897 - DNA, 25 bp, Homo sapien
gccggatcttggggcactggttttg

SEQ ID NO: 2871898 - DNA, 25 bp, Homo sapien
gccaggcgtccaaaagtacttcaaa

SEQ ID NO: 2871899 - DNA, 25 bp, Homo sapien
gcctctgataggacagctgactttc

SEQ ID NO: 2871900 - DNA, 25 bp, Homo sapien
aatgcaccatccctgtggcggcttt

SEQ ID NO: 2871901 - DNA, 25 bp, Homo sapien
ttttctgcgagcaacctctcttctg

SEQ ID NO: 2871902 - DNA, 25 bp, Homo sapien
cgttcggcctttgatgacattgtga

SEQ ID NO: 2871903 - DNA, 25 bp, Homo sapien
gtgtaattacttgggaacacccata

SEQ ID NO: 2871904 - DNA, 25 bp, Homo sapien
ccaaatctggttctgctatgtctac

SEQ ID NO: 2871905 - DNA, 25 bp, Homo sapien
cagagttgatttacacgttcggcct

SEQ ID NO: 2871906 - DNA, 25 bp, Homo sapien
cattttacgtgctctgcttggcttc

SEQ ID NO: 2871907 - DNA, 25 bp, Homo sapien
gcccaggagacaattttcagcttta

SEQ ID NO: 2871908 - DNA, 25 bp, Homo sapien
tctgcaaggtgctccatgggcaact

SEQ ID NO: 2871909 - DNA, 25 bp, Homo sapien
caccatgtactaagcactctgcaag

SEQ ID NO: 2871910 - DNA, 25 bp, Homo sapien
ggttaacaactaatgagccatgcat

SEQ ID NO: 2871911 - DNA, 25 bp, Homo sapien
tgctatgatgtctgcaactgactct

SEQ ID NO: 2871912 - DNA, 25 bp, Homo sapien
catggtggctatttaggagaatgtc

SEQ ID NO: 2871913 - DNA, 25 bp, Homo sapien
tggactacataccaaacgacggtat

SEQ ID NO: 2871914 - DNA, 25 bp, Homo sapien
ggttctccagacagcccgactgcag

SEQ ID NO: 2871915 - DNA, 25 bp, Homo sapien
tgctggaagggttctccagacagcc

SEQ ID NO: 2871916 - DNA, 25 bp, Homo sapien
gacagcccgactgcagctggagcca

SEQ ID NO: 2871917 - DNA, 25 bp, Homo sapien
tggaagggttctccagacagcccga

SEQ ID NO: 2871918 - DNA, 25 bp, Homo sapien
acagtcgcgggctcccagtaggtca

SEQ ID NO: 2871919 - DNA, 25 bp, Homo sapien
tgtgctcgcacagtcgcgggctccc

SEQ ID NO: 2871920 - DNA, 25 bp, Homo sapien
cagtaggtcacaccgagtggcccct

SEQ ID NO: 2871921 - DNA, 25 bp, Homo sapien
gctcccagtaggtcacaccgagtgg

SEQ ID NO: 2871922 - DNA, 25 bp, Homo sapien
ggcgccttcaagaagttatcccagg

SEQ ID NO: 2871923 - DNA, 25 bp, Homo sapien
tgctgttcacaccagtacggcgcct

SEQ ID NO: 2871924 - DNA, 25 bp, Homo sapien
ttcacaccagtacggcgccttcaag

SEQ ID NO: 2871925 - DNA, 25 bp, Homo sapien
ccagtacggcgccttcaagaagtta

SEQ ID NO: 2871926 - DNA, 25 bp, Homo sapien
cctgccaaaagccgttctggtgtga

SEQ ID NO: 2871927 - DNA, 25 bp, Homo sapien
accctgccaaaagccgttctggtgt

SEQ ID NO: 2871928 - DNA, 25 bp, Homo sapien
tgccaaaagccgttctggtgtgagg

SEQ ID NO: 2871929 - DNA, 25 bp, Homo sapien
gccaaaagccgttctggtgtgagga

SEQ ID NO: 2871930 - DNA, 25 bp, Homo sapien
ctggaacatcgagacatcaaaggcg

SEQ ID NO: 2871931 - DNA, 25 bp, Homo sapien
acatcaaaggcgaaggtggcagcag

SEQ ID NO: 2871932 - DNA, 25 bp, Homo sapien
agggcgatgagtaagctccgctgca

SEQ ID NO: 2871933 - DNA, 25 bp, Homo sapien
cagcagggcgatgagtaagctccgc

SEQ ID NO: 2871934 - DNA, 25 bp, Homo sapien
ggtggaaaggatcatccacggtgac

SEQ ID NO: 2871935 - DNA, 25 bp, Homo sapien
cagccgtggtggaaaggatcatcca

SEQ ID NO: 2871936 - DNA, 25 bp, Homo sapien
gaaagctcttgcagccgtggtggaa

SEQ ID NO: 2871937 - DNA, 25 bp, Homo sapien
cttagccacatgaaagctcttgcag

SEQ ID NO: 2871938 - DNA, 25 bp, Homo sapien
cttgagttagggttgccgttgcttg

SEQ ID NO: 2871939 - DNA, 25 bp, Homo sapien
gttagggttgccgttgcttgcagct

SEQ ID NO: 2871940 - DNA, 25 bp, Homo sapien
ggttgccgttgcttgcagctaaacg

SEQ ID NO: 2871941 - DNA, 25 bp, Homo sapien
tgccgttgcttgcagctaaacgcat

SEQ ID NO: 2871942 - DNA, 25 bp, Homo sapien
gccttccaaagaggctgtacacatg

SEQ ID NO: 2871943 - DNA, 25 bp, Homo sapien
taacaactataacccagttgccttc

SEQ ID NO: 2871944 - DNA, 25 bp, Homo sapien
tgtacacatgtttccctgtctcaaa

SEQ ID NO: 2871945 - DNA, 25 bp, Homo sapien
tgctagaattgcagggtccaaaaaa

SEQ ID NO: 2871946 - DNA, 25 bp, Homo sapien
atctggatggatttacgtaatgggt

SEQ ID NO: 2871947 - DNA, 25 bp, Homo sapien
tcaatctggatggatttacgtaatg

SEQ ID NO: 2871948 - DNA, 25 bp, Homo sapien
ttagaagtaggtagggtcagatctt

SEQ ID NO: 2871949 - DNA, 25 bp, Homo sapien
agtaggtagggtcagatcttcaatc

SEQ ID NO: 2871950 - DNA, 25 bp, Homo sapien
acttttttcaaccagccgctgaggt

SEQ ID NO: 2871951 - DNA, 25 bp, Homo sapien
tgtgggtggaactttccctcatccc

SEQ ID NO: 2871952 - DNA, 25 bp, Homo sapien
ggattattagcacgccctttgcaga

SEQ ID NO: 2871953 - DNA, 25 bp, Homo sapien
tgcatgttttcctaatcacagcgtg

SEQ ID NO: 2871954 - DNA, 25 bp, Homo sapien
cgtggaatttgaaatctttctgtgg

SEQ ID NO: 2871955 - DNA, 25 bp, Homo sapien
tatggctcgatgtaacgccgtgtct

SEQ ID NO: 2871956 - DNA, 25 bp, Homo sapien
cgatgtaacgccgtgtcttgtccat

SEQ ID NO: 2871957 - DNA, 25 bp, Homo sapien
ggctcgatgtaacgccgtgtcttgt

SEQ ID NO: 2871958 - DNA, 25 bp, Homo sapien
ttatggctcgatgtaacgccgtgtc

SEQ ID NO: 2871959 - DNA, 25 bp, Homo sapien
ttccatgcatcagtgggtggtatgg

SEQ ID NO: 2871960 - DNA, 25 bp, Homo sapien
acggtctctgcaaggttaggggcaa

SEQ ID NO: 2871961 - DNA, 25 bp, Homo sapien
agggtgacggtctctgcaaggttag

SEQ ID NO: 2871962 - DNA, 25 bp, Homo sapien
ggtgacggtctctgcaaggttaggg

SEQ ID NO: 2871963 - DNA, 25 bp, Homo sapien
tgacggtctctgcaaggttaggggc

SEQ ID NO: 2871964 - DNA, 25 bp, Homo sapien
tttctgagagaatggtctctttgtt

SEQ ID NO: 2871965 - DNA, 25 bp, Homo sapien
tatctttctgagagaatggtctctt

SEQ ID NO: 2871966 - DNA, 25 bp, Homo sapien
ctatctttctgagagaatggtctct

SEQ ID NO: 2871967 - DNA, 25 bp, Homo sapien
tctttctgagagaatggtctctttg

SEQ ID NO: 2871968 - DNA, 25 bp, Homo sapien
atgatagctgtgtgatcggttttca

SEQ ID NO: 2871969 - DNA, 25 bp, Homo sapien
tgtgatcggttttcaaactccaaat

SEQ ID NO: 2871970 - DNA, 25 bp, Homo sapien
agccatttcgtggtgcctctgctga

SEQ ID NO: 2871971 - DNA, 25 bp, Homo sapien
ttagccagccatttcgtggtgcctc

SEQ ID NO: 2871972 - DNA, 25 bp, Homo sapien
ttttacatcatgtctctcctgagtg

SEQ ID NO: 2871973 - DNA, 25 bp, Homo sapien
tatgatgatgtggtaattgttggtg

SEQ ID NO: 2871974 - DNA, 25 bp, Homo sapien
gaacaagtagcagcttgacacctcc

SEQ ID NO: 2871975 - DNA, 25 bp, Homo sapien
tctctcctgagtgtttatgatgatg

SEQ ID NO: 2871976 - DNA, 25 bp, Homo sapien
ccttgtctttcaaagggagcttcac

SEQ ID NO: 2871977 - DNA, 25 bp, Homo sapien
ccagaagaggggtccttgtctttca

SEQ ID NO: 2871978 - DNA, 25 bp, Homo sapien
gtccttgtctttcaaagggagcttc

SEQ ID NO: 2871979 - DNA, 25 bp, Homo sapien
ctattcaaaacccagtggcccagaa

SEQ ID NO: 2871980 - DNA, 25 bp, Homo sapien
ctgaatgcctttgggttagcatttc

SEQ ID NO: 2871981 - DNA, 25 bp, Homo sapien
gcaggtctctggaagatcttagctt

SEQ ID NO: 2871982 - DNA, 25 bp, Homo sapien
tctgaatgcctttacaggtcttctc

SEQ ID NO: 2871983 - DNA, 25 bp, Homo sapien
caggtcttctctagaggtcttctga

SEQ ID NO: 2871984 - DNA, 25 bp, Homo sapien
cagaagtccaggaagggtaggacaa

SEQ ID NO: 2871985 - DNA, 25 bp, Homo sapien
tcagaaggacagtcccccatagggc

SEQ ID NO: 2871986 - DNA, 25 bp, Homo sapien
gtaggcacctcgctttcgggattct

SEQ ID NO: 2871987 - DNA, 25 bp, Homo sapien
taggacaaaaactgggtctccacag

SEQ ID NO: 2871988 - DNA, 25 bp, Homo sapien
cacagaaataacacagccctcttct

SEQ ID NO: 2871989 - DNA, 25 bp, Homo sapien
cctgcctgatgttgactagggccac

SEQ ID NO: 2871990 - DNA, 25 bp, Homo sapien
tcctgcctgatgttgactagggcca

SEQ ID NO: 2871991 - DNA, 25 bp, Homo sapien
acagaaataacacagccctcttctc

SEQ ID NO: 2871992 - DNA, 25 bp, Homo sapien
tgctgctgatgagcgttttcaccat

SEQ ID NO: 2871993 - DNA, 25 bp, Homo sapien
gtccagagcaataggaacgtgttcc

SEQ ID NO: 2871994 - DNA, 25 bp, Homo sapien
catctgatgtccagagcaataggaa

SEQ ID NO: 2871995 - DNA, 25 bp, Homo sapien
caataggaacgtgttcctgctgctg

SEQ ID NO: 2871996 - DNA, 25 bp, Homo sapien
cgcaggcaggacctgatgggccagt

SEQ ID NO: 2871997 - DNA, 25 bp, Homo sapien
gatgggccagtgggaaagccagttc

SEQ ID NO: 2871998 - DNA, 25 bp, Homo sapien
ggcaggacctgatgggccagtggga

SEQ ID NO: 2871999 - DNA, 25 bp, Homo sapien
gggccagtgggaaagccagttccat

SEQ ID NO: 2872000 - DNA, 25 bp, Homo sapien
cgatagccggcctcagaaatggaat

SEQ ID NO: 2872001 - DNA, 25 bp, Homo sapien
tcaggttgcattgtgcggcatcgcc

SEQ ID NO: 2872002 - DNA, 25 bp, Homo sapien
catcgcctgggtaaccgatagccgg

SEQ ID NO: 2872003 - DNA, 25 bp, Homo sapien
agttctagccggcactcaggttgca

SEQ ID NO: 2872004 - DNA, 25 bp, Homo sapien
atattctcttggaccatttaagggc

SEQ ID NO: 2872005 - DNA, 25 bp, Homo sapien
tcttggaccatttaagggctgagca

SEQ ID NO: 2872006 - DNA, 25 bp, Homo sapien
ttctcttggaccatttaagggctga

SEQ ID NO: 2872007 - DNA, 25 bp, Homo sapien
tggaccatttaagggctgagcaaac

SEQ ID NO: 2872008 - DNA, 25 bp, Homo sapien
ctggcgcctgcccgaagcccaggcc

SEQ ID NO: 2872009 - DNA, 25 bp, Homo sapien
ccggagcccgcctttcatctccccg

SEQ ID NO: 2872010 - DNA, 25 bp, Homo sapien
ggagcccgcctttcatctccccgcg

SEQ ID NO: 2872011 - DNA, 25 bp, Homo sapien
cgcctttcatctccccgcgcctggc

SEQ ID NO: 2872012 - DNA, 25 bp, Homo sapien
ctcgaaagtgctacccacatgaggg

SEQ ID NO: 2872013 - DNA, 25 bp, Homo sapien
tgaaaatgggattgtcaaacagccc

SEQ ID NO: 2872014 - DNA, 25 bp, Homo sapien
tctggcagcttgttacttatggaaa

SEQ ID NO: 2872015 - DNA, 25 bp, Homo sapien
taagtcaaccaagagttgtggccag

SEQ ID NO: 2872016 - DNA, 25 bp, Homo sapien
ttttccaggtttttgatcaggctgc

SEQ ID NO: 2872017 - DNA, 25 bp, Homo sapien
ttttgatcaggctgcctaactcggc

SEQ ID NO: 2872018 - DNA, 25 bp, Homo sapien
ggctgcctaactcggcagaacttgt

SEQ ID NO: 2872019 - DNA, 25 bp, Homo sapien
ccaggtttttgatcaggctgcctaa

SEQ ID NO: 2872020 - DNA, 25 bp, Homo sapien
cctttctgtactgttggatgatttg

SEQ ID NO: 2872021 - DNA, 25 bp, Homo sapien
aatgaagtgttcgtgggtccccaag

SEQ ID NO: 2872022 - DNA, 25 bp, Homo sapien
tccccaagaagcaaccctttctgta

SEQ ID NO: 2872023 - DNA, 25 bp, Homo sapien
tcaatgaagtgttcgtgggtcccca

SEQ ID NO: 2872024 - DNA, 25 bp, Homo sapien
agaaaggcctgattccctcttaagg

SEQ ID NO: 2872025 - DNA, 25 bp, Homo sapien
aaatcacggttatgttccactctgg

SEQ ID NO: 2872026 - DNA, 25 bp, Homo sapien
ctgattccctcttaagggttgtaag

SEQ ID NO: 2872027 - DNA, 25 bp, Homo sapien
gtgtaaatcacggttatgttccact

SEQ ID NO: 2872028 - DNA, 25 bp, Homo sapien
cagcatggctgaacgattgggcagt

SEQ ID NO: 2872029 - DNA, 25 bp, Homo sapien
ggctgaacgattgggcagttctaca

SEQ ID NO: 2872030 - DNA, 25 bp, Homo sapien
gtcagcatggctgaacgattgggca

SEQ ID NO: 2872031 - DNA, 25 bp, Homo sapien
catggctgaacgattgggcagttct

SEQ ID NO: 2872032 - DNA, 25 bp, Homo sapien
cagtcttgttactgcgtgtgcttct

SEQ ID NO: 2872033 - DNA, 25 bp, Homo sapien
tcagaaggcattcatgacaagcctt

SEQ ID NO: 2872034 - DNA, 25 bp, Homo sapien
tgatagctggcaagagttgggtgtc

SEQ ID NO: 2872035 - DNA, 25 bp, Homo sapien
tctggtcggggtacagtcttgttac

SEQ ID NO: 2872036 - DNA, 25 bp, Homo sapien
aaatgatttcagctgtctgacggaa

SEQ ID NO: 2872037 - DNA, 25 bp, Homo sapien
gaataggtgttccttgttcttcgcc

SEQ ID NO: 2872038 - DNA, 25 bp, Homo sapien
ttcgccccgacgtctacatctctgt

SEQ ID NO: 2872039 - DNA, 25 bp, Homo sapien
gtggttcatttcatccaaacccaaa

SEQ ID NO: 2872040 - DNA, 25 bp, Homo sapien
tcaaagatccctggttgggcctgtc

SEQ ID NO: 2872041 - DNA, 25 bp, Homo sapien
caaagatccctggttgggcctgtca

SEQ ID NO: 2872042 - DNA, 25 bp, Homo sapien
tgtccaaggcccagcgtgctggtca

SEQ ID NO: 2872043 - DNA, 25 bp, Homo sapien
agtgtggctgtcaatggcagtctga

SEQ ID NO: 2872044 - DNA, 25 bp, Homo sapien
tcccttgcttttcacgttctgacca

SEQ ID NO: 2872045 - DNA, 25 bp, Homo sapien
aagccgtatgttccacccaggacag

SEQ ID NO: 2872046 - DNA, 25 bp, Homo sapien
tataactataggcatatcacagggt

SEQ ID NO: 2872047 - DNA, 25 bp, Homo sapien
gcccaagtggctgcttagttctgtt

SEQ ID NO: 2872048 - DNA, 25 bp, Homo sapien
tgtagcccagtcatggagtgtccat

SEQ ID NO: 2872049 - DNA, 25 bp, Homo sapien
ttaattgcaataaggaaatagtcct

SEQ ID NO: 2872050 - DNA, 25 bp, Homo sapien
attcgaggtgcaagtttggagcaga

SEQ ID NO: 2872051 - DNA, 25 bp, Homo sapien
tacctggatggattcgaggtgcaag

SEQ ID NO: 2872052 - DNA, 25 bp, Homo sapien
tgagtacctggatggattcgaggtg

SEQ ID NO: 2872053 - DNA, 25 bp, Homo sapien
ctggatggattcgaggtgcaagttt

SEQ ID NO: 2872054 - DNA, 25 bp, Homo sapien
tagactcctgcgaagtaaccatcaa

SEQ ID NO: 2872055 - DNA, 25 bp, Homo sapien
tgataggactatctttgcctgcgga

SEQ ID NO: 2872056 - DNA, 25 bp, Homo sapien
taaaaaccctgaatactgaggcttg

SEQ ID NO: 2872057 - DNA, 25 bp, Homo sapien
gcgtggacaatcaagcatgcctcta

SEQ ID NO: 2872058 - DNA, 25 bp, Homo sapien
ttctcactcgtgttttctctctgct

SEQ ID NO: 2872059 - DNA, 25 bp, Homo sapien
tttctcactcgtgttttctctctgc

SEQ ID NO: 2872060 - DNA, 25 bp, Homo sapien
ttttctcactcgtgttttctctctg

SEQ ID NO: 2872061 - DNA, 25 bp, Homo sapien
ttgtacatcaacatttttggggaga

SEQ ID NO: 2872062 - DNA, 25 bp, Homo sapien
tgatgatgacgaggaaaatgaaata

SEQ ID NO: 2872063 - DNA, 25 bp, Homo sapien
tgaaatagttttcaaacagcccata

SEQ ID NO: 2872064 - DNA, 25 bp, Homo sapien
tgaaaatgtgagtgtctgaaatgaa

SEQ ID NO: 2872065 - DNA, 25 bp, Homo sapien
aaggtgagagttgctcatgtagtca

SEQ ID NO: 2872066 - DNA, 25 bp, Homo sapien
taaggtgagagttgctcatgtagtc

SEQ ID NO: 2872067 - DNA, 25 bp, Homo sapien
aggtgagagttgctcatgtagtcaa

SEQ ID NO: 2872068 - DNA, 25 bp, Homo sapien
ggtgagagttgctcatgtagtcaaa

SEQ ID NO: 2872069 - DNA, 25 bp, Homo sapien
tgttataagtcaagcattagtagaa

SEQ ID NO: 2872070 - DNA, 25 bp, Homo sapien
aattggttttgttgattagatctcc

SEQ ID NO: 2872071 - DNA, 25 bp, Homo sapien
tgattttgggctgcgataacacccc

SEQ ID NO: 2872072 - DNA, 25 bp, Homo sapien
tctcctttgagtaaaatgattaaaa

SEQ ID NO: 2872073 - DNA, 25 bp, Homo sapien
aatgtggatttcgtattgtagaagg

SEQ ID NO: 2872074 - DNA, 25 bp, Homo sapien
tggatttcgtattgtagaaggtgag

SEQ ID NO: 2872075 - DNA, 25 bp, Homo sapien
ttaatgtggatttcgtattgtagaa

SEQ ID NO: 2872076 - DNA, 25 bp, Homo sapien
ttcgtattgtagaaggtgaggagcc

SEQ ID NO: 2872077 - DNA, 25 bp, Homo sapien
agtaggtgccaggtcgttaggacct

SEQ ID NO: 2872078 - DNA, 25 bp, Homo sapien
tgccaggtcgttaggacctttggaa

SEQ ID NO: 2872079 - DNA, 25 bp, Homo sapien
cctgcgagtaggtgccaggtcgtta

SEQ ID NO: 2872080 - DNA, 25 bp, Homo sapien
tggaaggcctgcgagtaggtgccag

SEQ ID NO: 2872081 - DNA, 25 bp, Homo sapien
cataatgcataacaatattacattc

SEQ ID NO: 2872082 - DNA, 25 bp, Homo sapien
cgagaccataatgcataacaatatt

SEQ ID NO: 2872083 - DNA, 25 bp, Homo sapien
tcactggtgacgagaccataatgca

SEQ ID NO: 2872084 - DNA, 25 bp, Homo sapien
ccatggctatttcactggtgacgag

SEQ ID NO: 2872085 - DNA, 25 bp, Homo sapien
cccagtacgaaatttactaatgact

SEQ ID NO: 2872086 - DNA, 25 bp, Homo sapien
ttcccagtacgaaatttactaatga

SEQ ID NO: 2872087 - DNA, 25 bp, Homo sapien
tgccactgtggtagccataagcaga

SEQ ID NO: 2872088 - DNA, 25 bp, Homo sapien
tgtggtagccataagcagatttatt

SEQ ID NO: 2872089 - DNA, 25 bp, Homo sapien
ggagatactgaaaggatattagttg

SEQ ID NO: 2872090 - DNA, 25 bp, Homo sapien
ctgaaaggatattagttgggatgct

SEQ ID NO: 2872091 - DNA, 25 bp, Homo sapien
caaaagccactctgggggtaatgtg

SEQ ID NO: 2872092 - DNA, 25 bp, Homo sapien
ttatgggagagataggatcaaaagc

SEQ ID NO: 2872093 - DNA, 25 bp, Homo sapien
tctgttgggcattgcggacgctggt

SEQ ID NO: 2872094 - DNA, 25 bp, Homo sapien
cattgcggacgctggtgttggaagt

SEQ ID NO: 2872095 - DNA, 25 bp, Homo sapien
ggctgctacaatcacctgtactaag

SEQ ID NO: 2872096 - DNA, 25 bp, Homo sapien
taggcggctctgacccataaagagg

SEQ ID NO: 2872097 - DNA, 25 bp, Homo sapien
tagctatacgttggctgacctcagt

SEQ ID NO: 2872098 - DNA, 25 bp, Homo sapien
catattaaacgtctgtgccaggccc

SEQ ID NO: 2872099 - DNA, 25 bp, Homo sapien
tctaaggatgtctccgaccagtgtc

SEQ ID NO: 2872100 - DNA, 25 bp, Homo sapien
gataagacctatgctagagggaggc

SEQ ID NO: 2872101 - DNA, 25 bp, Homo sapien
caggaaacattgatggtgttcccag

SEQ ID NO: 2872102 - DNA, 25 bp, Homo sapien
agtctcgccccgcaggcagttttcc

SEQ ID NO: 2872103 - DNA, 25 bp, Homo sapien
ccgcaggcagttttcccaggaaaca

SEQ ID NO: 2872104 - DNA, 25 bp, Homo sapien
gttttcccaggaaacattgatggtg

SEQ ID NO: 2872105 - DNA, 25 bp, Homo sapien
ttggcccaaagaatactggatgaat

SEQ ID NO: 2872106 - DNA, 25 bp, Homo sapien
tagggactacgacaaagtcatcttg

SEQ ID NO: 2872107 - DNA, 25 bp, Homo sapien
aggtttggcccaaagaatactggat

SEQ ID NO: 2872108 - DNA, 25 bp, Homo sapien
ttgaggatagggactacgacaaagt

SEQ ID NO: 2872109 - DNA, 25 bp, Homo sapien
ccgctcgctgcttgtggggagtggg

SEQ ID NO: 2872110 - DNA, 25 bp, Homo sapien
tgaggccgctcgctgcttgtgggga

SEQ ID NO: 2872111 - DNA, 25 bp, Homo sapien
cttcaactgtgtgaaggggcccggg

SEQ ID NO: 2872112 - DNA, 25 bp, Homo sapien
cagcttcatcctgaggggcttcaac

SEQ ID NO: 2872113 - DNA, 25 bp, Homo sapien
tcagttactgtgactggtgtagaca

SEQ ID NO: 2872114 - DNA, 25 bp, Homo sapien
tgaagtggctggctaggctgggcat

SEQ ID NO: 2872115 - DNA, 25 bp, Homo sapien
tgtctgcaaatcagttactgtgact

SEQ ID NO: 2872116 - DNA, 25 bp, Homo sapien
tactgtgactggtgtagacatgcag

SEQ ID NO: 2872117 - DNA, 25 bp, Homo sapien
tagggccagggttgaaataactgcc

SEQ ID NO: 2872118 - DNA, 25 bp, Homo sapien
cagggttgaaataactgccgaattt

SEQ ID NO: 2872119 - DNA, 25 bp, Homo sapien
tggagcaattggtgtcccagtttta

SEQ ID NO: 2872120 - DNA, 25 bp, Homo sapien
gagcaattggtgtcccagttttagg

SEQ ID NO: 2872121 - DNA, 25 bp, Homo sapien
gacactctgtccagatgcagggggc

SEQ ID NO: 2872122 - DNA, 25 bp, Homo sapien
cagatggggtggacgcactgcctta

SEQ ID NO: 2872123 - DNA, 25 bp, Homo sapien
caattacatgcaagaaagccttggg

SEQ ID NO: 2872124 - DNA, 25 bp, Homo sapien
ctgtaggacaattacatgcaagaaa

SEQ ID NO: 2872125 - DNA, 25 bp, Homo sapien
gacattttgaggtcactctgctcca

SEQ ID NO: 2872126 - DNA, 25 bp, Homo sapien
tggtccatagtgatgattaaatcct

SEQ ID NO: 2872127 - DNA, 25 bp, Homo sapien
ttctaggaggttcttccttgcccat

SEQ ID NO: 2872128 - DNA, 25 bp, Homo sapien
catagtgatgattaaatcctgctga

SEQ ID NO: 2872129 - DNA, 25 bp, Homo sapien
gctgccgggaccacaaatatccaga

SEQ ID NO: 2872130 - DNA, 25 bp, Homo sapien
tggctgccgggaccacaaatatcca

SEQ ID NO: 2872131 - DNA, 25 bp, Homo sapien
gccgggaccacaaatatccagacat

SEQ ID NO: 2872132 - DNA, 25 bp, Homo sapien
tgccgggaccacaaatatccagaca

SEQ ID NO: 2872133 - DNA, 25 bp, Homo sapien
ccaggtactgattaaagagctaacg

SEQ ID NO: 2872134 - DNA, 25 bp, Homo sapien
aactggatgttgatgaagtcataga

SEQ ID NO: 2872135 - DNA, 25 bp, Homo sapien
gagctaacgtttagatggtcatagg

SEQ ID NO: 2872136 - DNA, 25 bp, Homo sapien
caatcagaagctctaactggatgtt

SEQ ID NO: 2872137 - DNA, 25 bp, Homo sapien
taaggatccccatgaatttcgccaa

SEQ ID NO: 2872138 - DNA, 25 bp, Homo sapien
gccatgtttgctttacctaggaaga

SEQ ID NO: 2872139 - DNA, 25 bp, Homo sapien
ggaccaactgatccatgaggtatga

SEQ ID NO: 2872140 - DNA, 25 bp, Homo sapien
caagacccttcctagctatgcgtga

SEQ ID NO: 2872141 - DNA, 25 bp, Homo sapien
ccctgatgcttgtagccagctactg

SEQ ID NO: 2872142 - DNA, 25 bp, Homo sapien
ttcttttccctgatgcttgtagcca

SEQ ID NO: 2872143 - DNA, 25 bp, Homo sapien
ttttccctgatgcttgtagccagct

SEQ ID NO: 2872144 - DNA, 25 bp, Homo sapien
gcttgtagccagctactgtttgctc

SEQ ID NO: 2872145 - DNA, 25 bp, Homo sapien
attgcagggacaaatttggagatga

SEQ ID NO: 2872146 - DNA, 25 bp, Homo sapien
agcaattgcagggacaaatttggag

SEQ ID NO: 2872147 - DNA, 25 bp, Homo sapien
gccaagcaattgcagggacaaattt

SEQ ID NO: 2872148 - DNA, 25 bp, Homo sapien
ctgccaagcaattgcagggacaaat

SEQ ID NO: 2872149 - DNA, 25 bp, Homo sapien
tgccagaggcgacctggtcctggca

SEQ ID NO: 2872150 - DNA, 25 bp, Homo sapien
gccagaggcgacctggtcctggcag

SEQ ID NO: 2872151 - DNA, 25 bp, Homo sapien
cttgcccctgctatttgtctgctca

SEQ ID NO: 2872152 - DNA, 25 bp, Homo sapien
ctctcaggagcttctaaaatgatgt

SEQ ID NO: 2872153 - DNA, 25 bp, Homo sapien
actttgaagatagtgttctctcagg

SEQ ID NO: 2872154 - DNA, 25 bp, Homo sapien
tttgaagatagtgttctctcaggag

SEQ ID NO: 2872155 - DNA, 25 bp, Homo sapien
ctactttgaagatagtgttctctca

SEQ ID NO: 2872156 - DNA, 25 bp, Homo sapien
aaacacatcgacatagccagcagcc

SEQ ID NO: 2872157 - DNA, 25 bp, Homo sapien
taaaacacatcgacatagccagcag

SEQ ID NO: 2872158 - DNA, 25 bp, Homo sapien
ctaaaacacatcgacatagccagca

SEQ ID NO: 2872159 - DNA, 25 bp, Homo sapien
acacatcgacatagccagcagccac

SEQ ID NO: 2872160 - DNA, 25 bp, Homo sapien
tggaacaagaatgggtagaaaccat

SEQ ID NO: 2872161 - DNA, 25 bp, Homo sapien
acaaatggaacaagaatgggtagaa

SEQ ID NO: 2872162 - DNA, 25 bp, Homo sapien
caccaagccccagaggttcaaacat

SEQ ID NO: 2872163 - DNA, 25 bp, Homo sapien
ccccagaggttcaaacatgaagatg

SEQ ID NO: 2872164 - DNA, 25 bp, Homo sapien
tcagtcattgcctgcaccaagcccc

SEQ ID NO: 2872165 - DNA, 25 bp, Homo sapien
aagccccagaggttcaaacatgaag

SEQ ID NO: 2872166 - DNA, 25 bp, Homo sapien
gatttaatcaatgcaagcttatgac

SEQ ID NO: 2872167 - DNA, 25 bp, Homo sapien
ggatttaatcaatgcaagcttatga

SEQ ID NO: 2872168 - DNA, 25 bp, Homo sapien
aatccccatcacgaatagggttcaa

SEQ ID NO: 2872169 - DNA, 25 bp, Homo sapien
ccatcacgaatagggttcaagagtt

SEQ ID NO: 2872170 - DNA, 25 bp, Homo sapien
taggaattcctcggtcatggggaat

SEQ ID NO: 2872171 - DNA, 25 bp, Homo sapien
tcacgaatagggttcaagagtttac

SEQ ID NO: 2872172 - DNA, 25 bp, Homo sapien
ttgggtcactgaacaccacttgtcc

SEQ ID NO: 2872173 - DNA, 25 bp, Homo sapien
cgactgctcagggatcgtgtaacca

SEQ ID NO: 2872174 - DNA, 25 bp, Homo sapien
cagttggtgtagtgcacgtgcagcc

SEQ ID NO: 2872175 - DNA, 25 bp, Homo sapien
tatctatgagcgtcacagacctgtt

SEQ ID NO: 2872176 - DNA, 25 bp, Homo sapien
caccaccacccacagaatcgagaaa

SEQ ID NO: 2872177 - DNA, 25 bp, Homo sapien
aaatcactccaccaactaagaatgg

SEQ ID NO: 2872178 - DNA, 25 bp, Homo sapien
actccaccaactaagaatggccatg

SEQ ID NO: 2872179 - DNA, 25 bp, Homo sapien
caccacccacagaatcgagaaagag

SEQ ID NO: 2872180 - DNA, 25 bp, Homo sapien
gtttccaggtaaggactacaggctg

SEQ ID NO: 2872181 - DNA, 25 bp, Homo sapien
gtcaatctgtcaatcccgtccttgt

SEQ ID NO: 2872182 - DNA, 25 bp, Homo sapien
ctgtcaatctgtcaatcccgtcctt

SEQ ID NO: 2872183 - DNA, 25 bp, Homo sapien
agtttccaggtaaggactacaggct

SEQ ID NO: 2872184 - DNA, 25 bp, Homo sapien
ctgttaggattagccccaggaacca

SEQ ID NO: 2872185 - DNA, 25 bp, Homo sapien
cctgatgccctctgttaggattagc

SEQ ID NO: 2872186 - DNA, 25 bp, Homo sapien
cttttccatcagctaaagtgggcat

SEQ ID NO: 2872187 - DNA, 25 bp, Homo sapien
tccatcagctaaagtgggcatcctg

SEQ ID NO: 2872188 - DNA, 25 bp, Homo sapien
tagaagctgagtaagttgccccagg

SEQ ID NO: 2872189 - DNA, 25 bp, Homo sapien
gagacaacctgttattcagcaagcc

SEQ ID NO: 2872190 - DNA, 25 bp, Homo sapien
gcatggtcccggctttcccaagaga

SEQ ID NO: 2872191 - DNA, 25 bp, Homo sapien
gcagcatccctttggagcatggtcc

SEQ ID NO: 2872192 - DNA, 25 bp, Homo sapien
aaggatcatcagctttgctcactac

SEQ ID NO: 2872193 - DNA, 25 bp, Homo sapien
agatgccagtgaccaaaggatcatc

SEQ ID NO: 2872194 - DNA, 25 bp, Homo sapien
tgctcactacctctgagatgtggag

SEQ ID NO: 2872195 - DNA, 25 bp, Homo sapien
cactacctctgagatgtggagcaaa

SEQ ID NO: 2872196 - DNA, 25 bp, Homo sapien
gccctgccacaagatgggacagtgt

SEQ ID NO: 2872197 - DNA, 25 bp, Homo sapien
tccaaattctccaggagctgactgg

SEQ ID NO: 2872198 - DNA, 25 bp, Homo sapien
gtcagatgaagaccacttgtgtcca

SEQ ID NO: 2872199 - DNA, 25 bp, Homo sapien
caatcagatcttccgatgggtggga

SEQ ID NO: 2872200 - DNA, 25 bp, Homo sapien
tcaaactccacgttgctgtgctggt

SEQ ID NO: 2872201 - DNA, 25 bp, Homo sapien
gctaggtgttttgcagaagacgaaa

SEQ ID NO: 2872202 - DNA, 25 bp, Homo sapien
cacagcctgcatgggttgaagaaga

SEQ ID NO: 2872203 - DNA, 25 bp, Homo sapien
gacgaaagaccaaagcaactagtga

SEQ ID NO: 2872204 - DNA, 25 bp, Homo sapien
gatgcagtttatgccgtcctggagg

SEQ ID NO: 2872205 - DNA, 25 bp, Homo sapien
ggatgcagtttatgccgtcctggag

SEQ ID NO: 2872206 - DNA, 25 bp, Homo sapien
tgcagtttatgccgtcctggaggaa

SEQ ID NO: 2872207 - DNA, 25 bp, Homo sapien
ctggatgcagtttatgccgtcctgg

SEQ ID NO: 2872208 - DNA, 25 bp, Homo sapien
aatctctgcaagtgggaggtctgtc

SEQ ID NO: 2872209 - DNA, 25 bp, Homo sapien
tctttgcaaacgctggtgcctgagc

SEQ ID NO: 2872210 - DNA, 25 bp, Homo sapien
gaggaaaacctaagtcagacaatgg

SEQ ID NO: 2872211 - DNA, 25 bp, Homo sapien
tcctccggggcgtgttgaagtgcct

SEQ ID NO: 2872212 - DNA, 25 bp, Homo sapien
tgatgatgtaagagtgcaggacttg

SEQ ID NO: 2872213 - DNA, 25 bp, Homo sapien
gaagagagacgagccaaggatacgt

SEQ ID NO: 2872214 - DNA, 25 bp, Homo sapien
atacgtcccgggtttggggcatctg

SEQ ID NO: 2872215 - DNA, 25 bp, Homo sapien
agatgatgatgtaagagtgcaggac

SEQ ID NO: 2872216 - DNA, 25 bp, Homo sapien
gaggatccattcaggggccgaagaa

SEQ ID NO: 2872217 - DNA, 25 bp, Homo sapien
ggaaatgaggaggatccattcaggg

SEQ ID NO: 2872218 - DNA, 25 bp, Homo sapien
cattcaggggccgaagaaccaagaa

SEQ ID NO: 2872219 - DNA, 25 bp, Homo sapien
gaagaaccaagaagacaattctgca

SEQ ID NO: 2872220 - DNA, 25 bp, Homo sapien
aagtcaatatttcccagagtgtgag

SEQ ID NO: 2872221 - DNA, 25 bp, Homo sapien
cacagggccccgaatatcttttgga

SEQ ID NO: 2872222 - DNA, 25 bp, Homo sapien
gctgtcccaccagacaggcagggag

SEQ ID NO: 2872223 - DNA, 25 bp, Homo sapien
gacaatagagtgaatgcagaagagc

SEQ ID NO: 2872224 - DNA, 25 bp, Homo sapien
gtggccatgggacgtttcaagctgc

SEQ ID NO: 2872225 - DNA, 25 bp, Homo sapien
gtgatgaggttagctctgcatttta

SEQ ID NO: 2872226 - DNA, 25 bp, Homo sapien
ctgcagagtgatgaggttagctctg

SEQ ID NO: 2872227 - DNA, 25 bp, Homo sapien
ccatgggacgtttcaagctgcagag

SEQ ID NO: 2872228 - DNA, 25 bp, Homo sapien
aatgaggaccgcaccggggcacgaa

SEQ ID NO: 2872229 - DNA, 25 bp, Homo sapien
gggcacgaatactcacagccggagc

SEQ ID NO: 2872230 - DNA, 25 bp, Homo sapien
attgcagaatgaggaccgcaccggg

SEQ ID NO: 2872231 - DNA, 25 bp, Homo sapien
agccggagcccattgcagaatgagg

SEQ ID NO: 2872232 - DNA, 25 bp, Homo sapien
cgcaccggggcacgaatactcacag

SEQ ID NO: 2872233 - DNA, 25 bp, Homo sapien
ggggcacgaatactcacagccgcag

SEQ ID NO: 2872234 - DNA, 25 bp, Homo sapien
gggcacgaatactcacagccgcagc

SEQ ID NO: 2872235 - DNA, 25 bp, Homo sapien
attgcagaatgaggaccgcaccggg

SEQ ID NO: 2872236 - DNA, 25 bp, Homo sapien
cagtgtctctgagaatcagagcacc

SEQ ID NO: 2872237 - DNA, 25 bp, Homo sapien
cagcagccagcaactggtgatgagg

SEQ ID NO: 2872238 - DNA, 25 bp, Homo sapien
gcccatccaaggtgatagagagctc

SEQ ID NO: 2872239 - DNA, 25 bp, Homo sapien
catcacatgtcctttctgctggtgt

SEQ ID NO: 2872240 - DNA, 25 bp, Homo sapien
tggctgtatccgcacaggtccttca

SEQ ID NO: 2872241 - DNA, 25 bp, Homo sapien
gctgtatccgcacaggtccttcaag

SEQ ID NO: 2872242 - DNA, 25 bp, Homo sapien
acatggctgtatccgcacaggtcct

SEQ ID NO: 2872243 - DNA, 25 bp, Homo sapien
agccacatggctgtatccgcacagg

SEQ ID NO: 2872244 - DNA, 25 bp, Homo sapien
gatgtcccctgaagtaataagctca

SEQ ID NO: 2872245 - DNA, 25 bp, Homo sapien
catgttagccagtttctcatcagtc

SEQ ID NO: 2872246 - DNA, 25 bp, Homo sapien
acacgatgaaagtccgatgatgtcc

SEQ ID NO: 2872247 - DNA, 25 bp, Homo sapien
gtgagctctgacacacgatgaaagt

SEQ ID NO: 2872248 - DNA, 25 bp, Homo sapien
ctgcgctaactgaagcagcaggcat

SEQ ID NO: 2872249 - DNA, 25 bp, Homo sapien
catggagcttgacatgaccgcaggg

SEQ ID NO: 2872250 - DNA, 25 bp, Homo sapien
tcttgtgcctccgtgggtcagtggc

SEQ ID NO: 2872251 - DNA, 25 bp, Homo sapien
cagtggatgccccaagcatggagct

SEQ ID NO: 2872252 - DNA, 25 bp, Homo sapien
ctcccgcagtgggcttgtgtgagaa

SEQ ID NO: 2872253 - DNA, 25 bp, Homo sapien
ccgcagtgggcttgtgtgagaacct

SEQ ID NO: 2872254 - DNA, 25 bp, Homo sapien
aggctcccgcagtgggcttgtgtga

SEQ ID NO: 2872255 - DNA, 25 bp, Homo sapien
ggaggctcccgcagtgggcttgtgt

SEQ ID NO: 2872256 - DNA, 25 bp, Homo sapien
ccacacctggtccactgaagacata

SEQ ID NO: 2872257 - DNA, 25 bp, Homo sapien
cacctggtccactgaagacatacat

SEQ ID NO: 2872258 - DNA, 25 bp, Homo sapien
acacctggtccactgaagacataca

SEQ ID NO: 2872259 - DNA, 25 bp, Homo sapien
cacacctggtccactgaagacatac

SEQ ID NO: 2872260 - DNA, 25 bp, Homo sapien
cttctgtgcagttctccacttgcgt

SEQ ID NO: 2872261 - DNA, 25 bp, Homo sapien
ctgtgcagttctccacttgcgttga

SEQ ID NO: 2872262 - DNA, 25 bp, Homo sapien
cttctgtttccagaggtgacacact

SEQ ID NO: 2872263 - DNA, 25 bp, Homo sapien
tctgtgcagttctccacttgcgttg

SEQ ID NO: 2872264 - DNA, 25 bp, Homo sapien
tttagtttggcacttgcaagtgaga

SEQ ID NO: 2872265 - DNA, 25 bp, Homo sapien
gctgctgcctttagtttggcacttg

SEQ ID NO: 2872266 - DNA, 25 bp, Homo sapien
gctgcctttagtttggcacttgcaa

SEQ ID NO: 2872267 - DNA, 25 bp, Homo sapien
cctttagtttggcacttgcaagtga

SEQ ID NO: 2872268 - DNA, 25 bp, Homo sapien
catccgggcttgtagtagaattctc

SEQ ID NO: 2872269 - DNA, 25 bp, Homo sapien
cagcaagtggcccaataatttgctc

SEQ ID NO: 2872270 - DNA, 25 bp, Homo sapien
caagtggcccaataatttgctcttc

SEQ ID NO: 2872271 - DNA, 25 bp, Homo sapien
accccatccgggcttgtagtagaat

SEQ ID NO: 2872272 - DNA, 25 bp, Homo sapien
aaagaacgtgagcaacctggacaga

SEQ ID NO: 2872273 - DNA, 25 bp, Homo sapien
ctagaaggaaagaacgtgagcaacc

SEQ ID NO: 2872274 - DNA, 25 bp, Homo sapien
gaacgtgagcaacctggacagaaac

SEQ ID NO: 2872275 - DNA, 25 bp, Homo sapien
cctggacagaaacaggaccctttgt

SEQ ID NO: 2872276 - DNA, 25 bp, Homo sapien
tctccttcataagggtgaagatatg

SEQ ID NO: 2872277 - DNA, 25 bp, Homo sapien
atttctccttcataagggtgaagat

SEQ ID NO: 2872278 - DNA, 25 bp, Homo sapien
gggtgaagatatgaaatgccttcag

SEQ ID NO: 2872279 - DNA, 25 bp, Homo sapien
gtgaagatatgaaatgccttcagca

SEQ ID NO: 2872280 - DNA, 25 bp, Homo sapien
tcaaagctctagttctaacttcttt

SEQ ID NO: 2872281 - DNA, 25 bp, Homo sapien
catatcctatactcacccactccag

SEQ ID NO: 2872282 - DNA, 25 bp, Homo sapien
tttcttcgcctaattctggcttcca

SEQ ID NO: 2872283 - DNA, 25 bp, Homo sapien
tggcttccaatccacttttgcatcc

SEQ ID NO: 2872284 - DNA, 25 bp, Homo sapien
ttttgtgatgtttgtacagctccat

SEQ ID NO: 2872285 - DNA, 25 bp, Homo sapien
gagatatagcacattccttttgtga

SEQ ID NO: 2872286 - DNA, 25 bp, Homo sapien
cttgagatatagcacattccttttg

SEQ ID NO: 2872287 - DNA, 25 bp, Homo sapien
gatatagcacattccttttgtgatg

SEQ ID NO: 2872288 - DNA, 25 bp, Homo sapien
tcatgagaatgagggcggtactcct

SEQ ID NO: 2872289 - DNA, 25 bp, Homo sapien
gtcatgagaatgagggcggtactcc

SEQ ID NO: 2872290 - DNA, 25 bp, Homo sapien
agaatgagggcggtactcctccatg

SEQ ID NO: 2872291 - DNA, 25 bp, Homo sapien
agggcggtactcctccatgtcactt

SEQ ID NO: 2872292 - DNA, 25 bp, Homo sapien
tttgggtatctaacagacaaccggc

SEQ ID NO: 2872293 - DNA, 25 bp, Homo sapien
acagacaaccggcaaaaggaatcca

SEQ ID NO: 2872294 - DNA, 25 bp, Homo sapien
aagttggatgcatccctcagcctct

SEQ ID NO: 2872295 - DNA, 25 bp, Homo sapien
gcctttggatctagtttccccatat

SEQ ID NO: 2872296 - DNA, 25 bp, Homo sapien
taaatctcagttcaaacatcacagt

SEQ ID NO: 2872297 - DNA, 25 bp, Homo sapien
tgtgcttcccatagtaagagcatct

SEQ ID NO: 2872298 - DNA, 25 bp, Homo sapien
cactgactaatatgcagtcaatcat

SEQ ID NO: 2872299 - DNA, 25 bp, Homo sapien
catagtaagagcatctatcacactc

SEQ ID NO: 2872300 - DNA, 25 bp, Homo sapien
ttcagctgtgcttcccatagtaaga

SEQ ID NO: 2872301 - DNA, 25 bp, Homo sapien
gcaggggcagtctttgaggtctctc

SEQ ID NO: 2872302 - DNA, 25 bp, Homo sapien
aagagaagaagaacttgagtgtttc

SEQ ID NO: 2872303 - DNA, 25 bp, Homo sapien
gaagcagagattcacagaaggcagc

SEQ ID NO: 2872304 - DNA, 25 bp, Homo sapien
gattctgaactttgatcttgaagca

SEQ ID NO: 2872305 - DNA, 25 bp, Homo sapien
gcaaggatgtagagccagaaccagc

SEQ ID NO: 2872306 - DNA, 25 bp, Homo sapien
tctgccgtgcacacaatgaaagcct

SEQ ID NO: 2872307 - DNA, 25 bp, Homo sapien
ggtctaccctcacactgagaaatgg

SEQ ID NO: 2872308 - DNA, 25 bp, Homo sapien
cagaaccagctggtaggaccatgca

SEQ ID NO: 2872309 - DNA, 25 bp, Homo sapien
cacttcagaacttggattagtatat

SEQ ID NO: 2872310 - DNA, 25 bp, Homo sapien
catagccggcttccagatcacatca

SEQ ID NO: 2872311 - DNA, 25 bp, Homo sapien
ccttctcaccccaagaggtcagaca

SEQ ID NO: 2872312 - DNA, 25 bp, Homo sapien
aaggacaaaacggaggagagagaag

SEQ ID NO: 2872313 - DNA, 25 bp, Homo sapien
cgggaacatcgctgtcaggggctac

SEQ ID NO: 2872314 - DNA, 25 bp, Homo sapien
gctcaggcagtaggccgggaacatc

SEQ ID NO: 2872315 - DNA, 25 bp, Homo sapien
tgtagctcaggcagtaggccgggaa

SEQ ID NO: 2872316 - DNA, 25 bp, Homo sapien
ccgggaacatcgctgtcaggggcta

SEQ ID NO: 2872317 - DNA, 25 bp, Homo sapien
gatgggcttgcctggtttcagccac

SEQ ID NO: 2872318 - DNA, 25 bp, Homo sapien
ctgatgggcttgcctggtttcagcc

SEQ ID NO: 2872319 - DNA, 25 bp, Homo sapien
tgggcttgcctggtttcagccacat

SEQ ID NO: 2872320 - DNA, 25 bp, Homo sapien
ctgtaggctccagccgcactgatgg

SEQ ID NO: 2872321 - DNA, 25 bp, Homo sapien
gggagctcaacacacccaaagggaa

SEQ ID NO: 2872322 - DNA, 25 bp, Homo sapien
tttacagtccgggtgatgatgcagg

SEQ ID NO: 2872323 - DNA, 25 bp, Homo sapien
gaaactctgttgaaatgccccacga

SEQ ID NO: 2872324 - DNA, 25 bp, Homo sapien
tctcctctagcttttgggatgagca

SEQ ID NO: 2872325 - DNA, 25 bp, Homo sapien
cacagcatgtgggatcaggtaaacc

SEQ ID NO: 2872326 - DNA, 25 bp, Homo sapien
tatggcattattcgtcgcagggcaa

SEQ ID NO: 2872327 - DNA, 25 bp, Homo sapien
catgatggctggaaaacatcgcggc

SEQ ID NO: 2872328 - DNA, 25 bp, Homo sapien
tctctcataccggaaagggctggag

SEQ ID NO: 2872329 - DNA, 25 bp, Homo sapien
agtggcaatccaagtcaatcccgtg

SEQ ID NO: 2872330 - DNA, 25 bp, Homo sapien
gggtcagtcagatttccaggagtcc

SEQ ID NO: 2872331 - DNA, 25 bp, Homo sapien
ccaagcagggaataggggtcagtca

SEQ ID NO: 2872332 - DNA, 25 bp, Homo sapien
tgagaggaccgcttgagtggcaatc

SEQ ID NO: 2872333 - DNA, 25 bp, Homo sapien
tagtcagttgcaatcacatttcggg

SEQ ID NO: 2872334 - DNA, 25 bp, Homo sapien
tctgctctgctagtcagttgcaatc

SEQ ID NO: 2872335 - DNA, 25 bp, Homo sapien
tctaaatcatcaatccagtgactcc

SEQ ID NO: 2872336 - DNA, 25 bp, Homo sapien
tggtgacaggagattctccccttct

SEQ ID NO: 2872337 - DNA, 25 bp, Homo sapien
gggtcgtctctctcaaagcccctgg

SEQ ID NO: 2872338 - DNA, 25 bp, Homo sapien
gctcccggtgcgcaaaaatcgccgg

SEQ ID NO: 2872339 - DNA, 25 bp, Homo sapien
tccgaaacgttgaggaagcgcgcct

SEQ ID NO: 2872340 - DNA, 25 bp, Homo sapien
gcttcctttcgagagcccagagcct

SEQ ID NO: 2872341 - DNA, 25 bp, Homo sapien
cgcagctgggatccgggccagcgcg

SEQ ID NO: 2872342 - DNA, 25 bp, Homo sapien
cggcgcagctgggatccgggccagc

SEQ ID NO: 2872343 - DNA, 25 bp, Homo sapien
agctgggatccgggccagcgcgcgc

SEQ ID NO: 2872344 - DNA, 25 bp, Homo sapien
ggcgcagctgggatccgggccagcg

SEQ ID NO: 2872345 - DNA, 25 bp, Homo sapien
acctcactcacaagggttccagcga

SEQ ID NO: 2872346 - DNA, 25 bp, Homo sapien
ggtcaacgccggactccagccggtg

SEQ ID NO: 2872347 - DNA, 25 bp, Homo sapien
actcaggactcctccgcttgaaaca

SEQ ID NO: 2872348 - DNA, 25 bp, Homo sapien
cctgaaaacagggaagcggaatctt

SEQ ID NO: 2872349 - DNA, 25 bp, Homo sapien
aacaaggtttaaggcagcacatcac

SEQ ID NO: 2872350 - DNA, 25 bp, Homo sapien
atcagatgagtgacgtgctgacact

SEQ ID NO: 2872351 - DNA, 25 bp, Homo sapien
gtgacgtgctgacactgtaacaagg

SEQ ID NO: 2872352 - DNA, 25 bp, Homo sapien
taacaaggtttaaggcagcacatca

SEQ ID NO: 2872353 - DNA, 25 bp, Homo sapien
gtgttttttatcaaacctatcatct

SEQ ID NO: 2872354 - DNA, 25 bp, Homo sapien
ttttatcaaacctatcatcttcctc

SEQ ID NO: 2872355 - DNA, 25 bp, Homo sapien
gctgctcctcttgtaattcctccgt

SEQ ID NO: 2872356 - DNA, 25 bp, Homo sapien
gctcctcttgtaattcctccgttgg

SEQ ID NO: 2872357 - DNA, 25 bp, Homo sapien
atgtcaccacctctatgaacatctc

SEQ ID NO: 2872358 - DNA, 25 bp, Homo sapien
caaatttggtcgcactagctcagat

SEQ ID NO: 2872359 - DNA, 25 bp, Homo sapien
gtcgcactagctcagatgtcaccac

SEQ ID NO: 2872360 - DNA, 25 bp, Homo sapien
tcccactttttcaaatttggtcgca

SEQ ID NO: 2872361 - DNA, 25 bp, Homo sapien
taaatgactgcgtgaacggatgctg

SEQ ID NO: 2872362 - DNA, 25 bp, Homo sapien
actgcgtgaacggatgctggctacg

SEQ ID NO: 2872363 - DNA, 25 bp, Homo sapien
taattgggtaaatgactgcgtgaac

SEQ ID NO: 2872364 - DNA, 25 bp, Homo sapien
tgaacggatgctggctacgccaagg

SEQ ID NO: 2872365 - DNA, 25 bp, Homo sapien
aggctgcactgagcgggacctgcga

SEQ ID NO: 2872366 - DNA, 25 bp, Homo sapien
gggaagcggtgagtcgcgggcggca

SEQ ID NO: 2872367 - DNA, 25 bp, Homo sapien
ctcggaggtcggaagcccctttgcg

SEQ ID NO: 2872368 - DNA, 25 bp, Homo sapien
ggatccctggcatcctgcggccgga

SEQ ID NO: 2872369 - DNA, 25 bp, Homo sapien
cggcgcctgcgtggcgaactcgctc

SEQ ID NO: 2872370 - DNA, 25 bp, Homo sapien
tggcgaactcgctccggggacacca

SEQ ID NO: 2872371 - DNA, 25 bp, Homo sapien
gcgctccgcgctctcggctttgcct

SEQ ID NO: 2872372 - DNA, 25 bp, Homo sapien
cgctccggggacaccaagatggctg

SEQ ID NO: 2872373 - DNA, 25 bp, Homo sapien
ggtgatgtgcaaggaagtagattct

SEQ ID NO: 2872374 - DNA, 25 bp, Homo sapien
aactcgcaatccagtagggaggtga

SEQ ID NO: 2872375 - DNA, 25 bp, Homo sapien
ctagaactcgcaatccagtagggag

SEQ ID NO: 2872376 - DNA, 25 bp, Homo sapien
tcttggagtagtagttggtcctaca

SEQ ID NO: 2872377 - DNA, 25 bp, Homo sapien
ttcacttgcttcaggtgccgtgaag

SEQ ID NO: 2872378 - DNA, 25 bp, Homo sapien
gctgatgaacccacacactctggaa

SEQ ID NO: 2872379 - DNA, 25 bp, Homo sapien
tggcgtcccgtgtagtgtgtccctc

SEQ ID NO: 2872380 - DNA, 25 bp, Homo sapien
actgtctccgcactctccctggcat

SEQ ID NO: 2872381 - DNA, 25 bp, Homo sapien
gcagtgggaacgcaaacatcttgtt

SEQ ID NO: 2872382 - DNA, 25 bp, Homo sapien
gaacgcaaacatcttgttctccaaa

SEQ ID NO: 2872383 - DNA, 25 bp, Homo sapien
gtgggaacgcaaacatcttgttctc

SEQ ID NO: 2872384 - DNA, 25 bp, Homo sapien
ctgcagtgggaacgcaaacatcttg

SEQ ID NO: 2872385 - DNA, 25 bp, Homo sapien
agcatgaagtccacacccagagcca

SEQ ID NO: 2872386 - DNA, 25 bp, Homo sapien
tatgtaacaaatttgtcactccatc

SEQ ID NO: 2872387 - DNA, 25 bp, Homo sapien
ttttactgactatatgtaacaaatt

SEQ ID NO: 2872388 - DNA, 25 bp, Homo sapien
aaatttgtcactccatctaggcaca

SEQ ID NO: 2872389 - DNA, 25 bp, Homo sapien
gtgtttattgtcctgtatgttttga

SEQ ID NO: 2872390 - DNA, 25 bp, Homo sapien
catgaacatgaccatcacaggttgt

SEQ ID NO: 2872391 - DNA, 25 bp, Homo sapien
gaatgtcagcccaggttcccatgaa

SEQ ID NO: 2872392 - DNA, 25 bp, Homo sapien
tgtagccacttgtctctaggacact

SEQ ID NO: 2872393 - DNA, 25 bp, Homo sapien
acagtgtgtttaccattacagaagc

SEQ ID NO: 2872394 - DNA, 25 bp, Homo sapien
gcaacaactggtgccgtagcaacag

SEQ ID NO: 2872395 - DNA, 25 bp, Homo sapien
cctgactctgtgtacgaagtgctaa

SEQ ID NO: 2872396 - DNA, 25 bp, Homo sapien
taaatgttcacccatcctgacagcc

SEQ ID NO: 2872397 - DNA, 25 bp, Homo sapien
tgacagcccaccagaggcattgcag

SEQ ID NO: 2872398 - DNA, 25 bp, Homo sapien
attcagtgcccaatgaggcaggaga

SEQ ID NO: 2872399 - DNA, 25 bp, Homo sapien
tcattgatccaagcatgaccctgtt

SEQ ID NO: 2872400 - DNA, 25 bp, Homo sapien
cataacatagtatcctcattgatcc

SEQ ID NO: 2872401 - DNA, 25 bp, Homo sapien
ccttggctcataacatagtatcctc

SEQ ID NO: 2872402 - DNA, 25 bp, Homo sapien
gacaagggtgtcacactgtcataag

SEQ ID NO: 2872403 - DNA, 25 bp, Homo sapien
agttacatcttataggctcctccca

SEQ ID NO: 2872404 - DNA, 25 bp, Homo sapien
ttacatcttataggctcctcccaac

SEQ ID NO: 2872405 - DNA, 25 bp, Homo sapien
gttacatcttataggctcctcccaa

SEQ ID NO: 2872406 - DNA, 25 bp, Homo sapien
gtggcattgccacaaatggtttttc

SEQ ID NO: 2872407 - DNA, 25 bp, Homo sapien
tcttgccggcaataagagatttcac

SEQ ID NO: 2872408 - DNA, 25 bp, Homo sapien
gagtgtcatcaccatacactcttgc

SEQ ID NO: 2872409 - DNA, 25 bp, Homo sapien
agcagggcctgagagtgtcatcacc

SEQ ID NO: 2872410 - DNA, 25 bp, Homo sapien
tgggtgttgggttctccagtgcatt

SEQ ID NO: 2872411 - DNA, 25 bp, Homo sapien
agttgggtgttgggttctccagtgc

SEQ ID NO: 2872412 - DNA, 25 bp, Homo sapien
ttgggtgttgggttctccagtgcat

SEQ ID NO: 2872413 - DNA, 25 bp, Homo sapien
gttgggtgttgggttctccagtgca

SEQ ID NO: 2872414 - DNA, 25 bp, Homo sapien
tgtatccgtgagctctatatctgtg

SEQ ID NO: 2872415 - DNA, 25 bp, Homo sapien
ttaacgtcatagacagttggccctc

SEQ ID NO: 2872416 - DNA, 25 bp, Homo sapien
ggtcctggaaccaagcatccacgga

SEQ ID NO: 2872417 - DNA, 25 bp, Homo sapien
tctgcagatattggtatcggagggc

SEQ ID NO: 2872418 - DNA, 25 bp, Homo sapien
caggctctgatttccgagccaggag

SEQ ID NO: 2872419 - DNA, 25 bp, Homo sapien
ttgtctgcaagatcgcgctgccgga

SEQ ID NO: 2872420 - DNA, 25 bp, Homo sapien
ggcgcagcgctgagaggcgacgcca

SEQ ID NO: 2872421 - DNA, 25 bp, Homo sapien
gacgccagggcgcagcattgtctgc

SEQ ID NO: 2872422 - DNA, 25 bp, Homo sapien
tttggcttccccaagatcaacaggc

SEQ ID NO: 2872423 - DNA, 25 bp, Homo sapien
tgtgcagatagcacgggaagagctg

SEQ ID NO: 2872424 - DNA, 25 bp, Homo sapien
agatagcacgggaagagctgctttg

SEQ ID NO: 2872425 - DNA, 25 bp, Homo sapien
ttccccaagatcaacaggccctgaa

SEQ ID NO: 2872426 - DNA, 25 bp, Homo sapien
cttctaggaaatctttgatcccacc

SEQ ID NO: 2872427 - DNA, 25 bp, Homo sapien
tctttgatcccaccaaccacaggga

SEQ ID NO: 2872428 - DNA, 25 bp, Homo sapien
taggaaatctttgatcccaccaacc

SEQ ID NO: 2872429 - DNA, 25 bp, Homo sapien
aatctttgatcccaccaaccacagg

SEQ ID NO: 2872430 - DNA, 25 bp, Homo sapien
ccacagtaaagtgaggccgttggat

SEQ ID NO: 2872431 - DNA, 25 bp, Homo sapien
ttggatgcagcagatctcccggtcc

SEQ ID NO: 2872432 - DNA, 25 bp, Homo sapien
caagctgccgatgcttccacagtaa

SEQ ID NO: 2872433 - DNA, 25 bp, Homo sapien
tccaagctgccgatgcttccacagt

SEQ ID NO: 2872434 - DNA, 25 bp, Homo sapien
ggtggagcttcgtgagatgggccat

SEQ ID NO: 2872435 - DNA, 25 bp, Homo sapien
ctgcaggctgttaccatgggtcaag

SEQ ID NO: 2872436 - DNA, 25 bp, Homo sapien
tcaaatctgcaggctgttaccatgg

SEQ ID NO: 2872437 - DNA, 25 bp, Homo sapien
aaatctgcaggctgttaccatgggt

SEQ ID NO: 2872438 - DNA, 25 bp, Homo sapien
atctgcaggctgttaccatgggtca

SEQ ID NO: 2872439 - DNA, 25 bp, Homo sapien
ctggggattcccacatgagcctttc

SEQ ID NO: 2872440 - DNA, 25 bp, Homo sapien
tcctcaattgtcaaatcggtgaagt

SEQ ID NO: 2872441 - DNA, 25 bp, Homo sapien
cagtgtcttggacaagacctgggac

SEQ ID NO: 2872442 - DNA, 25 bp, Homo sapien
ggtgaagtactcagcagtgcctgct

SEQ ID NO: 2872443 - DNA, 25 bp, Homo sapien
gcatgtgatgtgtaggctgccagtc

SEQ ID NO: 2872444 - DNA, 25 bp, Homo sapien
cctgtcggcatgtgatgtgtaggct

SEQ ID NO: 2872445 - DNA, 25 bp, Homo sapien
gatgtgtaggctgccagtcttcatt

SEQ ID NO: 2872446 - DNA, 25 bp, Homo sapien
gtgatgtgtaggctgccagtcttca

SEQ ID NO: 2872447 - DNA, 25 bp, Homo sapien
tgaacgggagacagttccattctgg

SEQ ID NO: 2872448 - DNA, 25 bp, Homo sapien
gggtgaacgggagacagttccattc

SEQ ID NO: 2872449 - DNA, 25 bp, Homo sapien
tgtgtggggtgaacgggagacagtt

SEQ ID NO: 2872450 - DNA, 25 bp, Homo sapien
gaacgggagacagttccattctggg

SEQ ID NO: 2872451 - DNA, 25 bp, Homo sapien
aatccaggtcccgttgatggagctg

SEQ ID NO: 2872452 - DNA, 25 bp, Homo sapien
ccaggtcccgttgatggagctggtg

SEQ ID NO: 2872453 - DNA, 25 bp, Homo sapien
ggaatccaggtcccgttgatggagc

SEQ ID NO: 2872454 - DNA, 25 bp, Homo sapien
tccaggtcccgttgatggagctggt

SEQ ID NO: 2872455 - DNA, 25 bp, Homo sapien
ctggtgagaagttaccaggaagctg

SEQ ID NO: 2872456 - DNA, 25 bp, Homo sapien
agttaccaggaagctggcctgagtt

SEQ ID NO: 2872457 - DNA, 25 bp, Homo sapien
gtgagaagttaccaggaagctggcc

SEQ ID NO: 2872458 - DNA, 25 bp, Homo sapien
aagttaccaggaagctggcctgagt

SEQ ID NO: 2872459 - DNA, 25 bp, Homo sapien
ccaggatgtccccatctgagccact

SEQ ID NO: 2872460 - DNA, 25 bp, Homo sapien
tggcagtcaccaagtaggcaatggg

SEQ ID NO: 2872461 - DNA, 25 bp, Homo sapien
aggccacagtggcagtcaccaagta

SEQ ID NO: 2872462 - DNA, 25 bp, Homo sapien
cacagtggcagtcaccaagtaggca

SEQ ID NO: 2872463 - DNA, 25 bp, Homo sapien
ctggagagcgatgtagggcttccct

SEQ ID NO: 2872464 - DNA, 25 bp, Homo sapien
gagcgatgtagggcttccctgccat

SEQ ID NO: 2872465 - DNA, 25 bp, Homo sapien
cctggagagcgatgtagggcttccc

SEQ ID NO: 2872466 - DNA, 25 bp, Homo sapien
gagagcgatgtagggcttccctgcc

SEQ ID NO: 2872467 - DNA, 25 bp, Homo sapien
catcatcgtcctctagagggtggag

SEQ ID NO: 2872468 - DNA, 25 bp, Homo sapien
tcatcgtcctctagagggtggagaa

SEQ ID NO: 2872469 - DNA, 25 bp, Homo sapien
catcgtcctctagagggtggagaaa

SEQ ID NO: 2872470 - DNA, 25 bp, Homo sapien
tcgtcctctagagggtggagaaaaa

SEQ ID NO: 2872471 - DNA, 25 bp, Homo sapien
tctgagtccatttcccttcagttct

SEQ ID NO: 2872472 - DNA, 25 bp, Homo sapien
ctcatggtctttccctcatggtcac

SEQ ID NO: 2872473 - DNA, 25 bp, Homo sapien
cttcagttctcatggtctttccctc

SEQ ID NO: 2872474 - DNA, 25 bp, Homo sapien
catggtcacaatatggctgcctcac

SEQ ID NO: 2872475 - DNA, 25 bp, Homo sapien
aatatctgcacaggtggcggttgcc

SEQ ID NO: 2872476 - DNA, 25 bp, Homo sapien
accgggtgcggagccaatacccgcg

SEQ ID NO: 2872477 - DNA, 25 bp, Homo sapien
tcaagggcgggctcacaatctgcgg

SEQ ID NO: 2872478 - DNA, 25 bp, Homo sapien
aaaatagaaagtgggtgagaccgtg

SEQ ID NO: 2872479 - DNA, 25 bp, Homo sapien
ctatgtctcaggaaaccagaacgac

SEQ ID NO: 2872480 - DNA, 25 bp, Homo sapien
ccgatgaccggagccacaacaggca

SEQ ID NO: 2872481 - DNA, 25 bp, Homo sapien
ccacaacaggcagcgctcagcgggt

SEQ ID NO: 2872482 - DNA, 25 bp, Homo sapien
ggatgaccgatgaccggagccacaa

SEQ ID NO: 2872483 - DNA, 25 bp, Homo sapien
ccgctgccggatgaccgatgaccgg

SEQ ID NO: 2872484 - DNA, 25 bp, Homo sapien
gcacgtgcgcgatcagcactggctt

SEQ ID NO: 2872485 - DNA, 25 bp, Homo sapien
tcataggaaggactgctacaaagca

SEQ ID NO: 2872486 - DNA, 25 bp, Homo sapien
ctggcacgtgcgcgatcagcactgg

SEQ ID NO: 2872487 - DNA, 25 bp, Homo sapien
ctggcttcttgttccatgtgtcata

SEQ ID NO: 2872488 - DNA, 25 bp, Homo sapien
catcaccttgtcccggttaaccttg

SEQ ID NO: 2872489 - DNA, 25 bp, Homo sapien
ccttttctccagacagtgcggagga

SEQ ID NO: 2872490 - DNA, 25 bp, Homo sapien
gaggcgatccggtttgcattttcta

SEQ ID NO: 2872491 - DNA, 25 bp, Homo sapien
agggatgaaggccagtactctgcag

SEQ ID NO: 2872492 - DNA, 25 bp, Homo sapien
ggaggccaggaacttaatcaggatg

SEQ ID NO: 2872493 - DNA, 25 bp, Homo sapien
caaacgttcaccgtggctgttctct

SEQ ID NO: 2872494 - DNA, 25 bp, Homo sapien
cctccaaacgttcaccgtggctgtt

SEQ ID NO: 2872495 - DNA, 25 bp, Homo sapien
tccaaacgttcaccgtggctgttct

SEQ ID NO: 2872496 - DNA, 25 bp, Homo sapien
tcctccaaacgttcaccgtggctgt

SEQ ID NO: 2872497 - DNA, 25 bp, Homo sapien
cccagtgcccagaggattcaaggaa

SEQ ID NO: 2872498 - DNA, 25 bp, Homo sapien
cagaaagtagcgagggcctcacaga

SEQ ID NO: 2872499 - DNA, 25 bp, Homo sapien
tagagaaccccatgtctgttgccat

SEQ ID NO: 2872500 - DNA, 25 bp, Homo sapien
tcatgctgaatctggagacgtagag

SEQ ID NO: 2872501 - DNA, 25 bp, Homo sapien
tgcgagattttgacgatctcctgca

SEQ ID NO: 2872502 - DNA, 25 bp, Homo sapien
tcaccgtaggctctgcgagattttg

SEQ ID NO: 2872503 - DNA, 25 bp, Homo sapien
gctctgcgagattttgacgatctcc

SEQ ID NO: 2872504 - DNA, 25 bp, Homo sapien
taggctctgcgagattttgacgatc

SEQ ID NO: 2872505 - DNA, 25 bp, Homo sapien
tgctgcctgagtggcggggcccgtg

SEQ ID NO: 2872506 - DNA, 25 bp, Homo sapien
gggcccgtgccgatgacacagacaa

SEQ ID NO: 2872507 - DNA, 25 bp, Homo sapien
ccgtgccgatgacacagacaagcca

SEQ ID NO: 2872508 - DNA, 25 bp, Homo sapien
gtgccgatgacacagacaagccagg

SEQ ID NO: 2872509 - DNA, 25 bp, Homo sapien
gcaacactgggaagaaattgtctct

SEQ ID NO: 2872510 - DNA, 25 bp, Homo sapien
tggtaggtaccccacagtttagctg

SEQ ID NO: 2872511 - DNA, 25 bp, Homo sapien
tggagtatacatgctgcctaacagc

SEQ ID NO: 2872512 - DNA, 25 bp, Homo sapien
gctgatcatctcatgcacgtgtgca

SEQ ID NO: 2872513 - DNA, 25 bp, Homo sapien
gaccgagcagtcatctgatctaaag

SEQ ID NO: 2872514 - DNA, 25 bp, Homo sapien
aagatcttctcccagggaccgagca

SEQ ID NO: 2872515 - DNA, 25 bp, Homo sapien
tctgagttgactccaagatcttctc

SEQ ID NO: 2872516 - DNA, 25 bp, Homo sapien
tcattctgagttgactccaagatct

SEQ ID NO: 2872517 - DNA, 25 bp, Homo sapien
cagggcagtgccgagtatcagcatt

SEQ ID NO: 2872518 - DNA, 25 bp, Homo sapien
taggcgtctctctgtggatctgatc

SEQ ID NO: 2872519 - DNA, 25 bp, Homo sapien
ggatctgatcctcccgtgaggctgg

SEQ ID NO: 2872520 - DNA, 25 bp, Homo sapien
atctccctgcatagtaggcgtctct

SEQ ID NO: 2872521 - DNA, 25 bp, Homo sapien
caggcaagattctgccgtcagagtg

SEQ ID NO: 2872522 - DNA, 25 bp, Homo sapien
tcatgacagttcaatacaccaaatc

SEQ ID NO: 2872523 - DNA, 25 bp, Homo sapien
cattggttcctgttctggtccctgg

SEQ ID NO: 2872524 - DNA, 25 bp, Homo sapien
cagttcaatacaccaaatccaggct

SEQ ID NO: 2872525 - DNA, 25 bp, Homo sapien
ccaggaacgagaccttccatggctc

SEQ ID NO: 2872526 - DNA, 25 bp, Homo sapien
tcgtcttctctggtcacttgcagcc

SEQ ID NO: 2872527 - DNA, 25 bp, Homo sapien
agccccaggaacgagaccttccatg

SEQ ID NO: 2872528 - DNA, 25 bp, Homo sapien
ttcacctcttgggtaatgggctgct

SEQ ID NO: 2872529 - DNA, 25 bp, Homo sapien
ctgtgggagagtcaacagctgccat

SEQ ID NO: 2872530 - DNA, 25 bp, Homo sapien
tgctgcttaacaagggctcaagggc

SEQ ID NO: 2872531 - DNA, 25 bp, Homo sapien
ctgctgcttaacaagggctcaaggg

SEQ ID NO: 2872532 - DNA, 25 bp, Homo sapien
cctgctgcttaacaagggctcaagg

SEQ ID NO: 2872533 - DNA, 25 bp, Homo sapien
caggcccagaagtcaacacaagcac

SEQ ID NO: 2872534 - DNA, 25 bp, Homo sapien
tctccgagcccatgaggtccggaag

SEQ ID NO: 2872535 - DNA, 25 bp, Homo sapien
caataggacagtagtgaacacgggt

SEQ ID NO: 2872536 - DNA, 25 bp, Homo sapien
gcagggctagccagcgtgttaccat

SEQ ID NO: 2872537 - DNA, 25 bp, Homo sapien
ggtgttcaaattcgctgccaatagg

SEQ ID NO: 2872538 - DNA, 25 bp, Homo sapien
cgtcctggcacctgtcaccgtttag

SEQ ID NO: 2872539 - DNA, 25 bp, Homo sapien
tgccgcttgagccaggtgcatgtgc

SEQ ID NO: 2872540 - DNA, 25 bp, Homo sapien
aggttaccatggtaccgctccccag

SEQ ID NO: 2872541 - DNA, 25 bp, Homo sapien
cgcttgagccaggtgcatgtgcgtc

SEQ ID NO: 2872542 - DNA, 25 bp, Homo sapien
ccttgagacctagggtagtaacatc

SEQ ID NO: 2872543 - DNA, 25 bp, Homo sapien
gacaaggaggcaggcatttagtctc

SEQ ID NO: 2872544 - DNA, 25 bp, Homo sapien
aagctcttgggcatccctgtgcaca

SEQ ID NO: 2872545 - DNA, 25 bp, Homo sapien
ttaggcaccagcgaaggatcaggga

SEQ ID NO: 2872546 - DNA, 25 bp, Homo sapien
cagtcaccctgggaccaagccaatc

SEQ ID NO: 2872547 - DNA, 25 bp, Homo sapien
tcaccctgggaccaagccaatcatc

SEQ ID NO: 2872548 - DNA, 25 bp, Homo sapien
gtcaccctgggaccaagccaatcat

SEQ ID NO: 2872549 - DNA, 25 bp, Homo sapien
cttgggcctgaccacctcctggatt

SEQ ID NO: 2872550 - DNA, 25 bp, Homo sapien
agaagcctccaggtttttccatgct

SEQ ID NO: 2872551 - DNA, 25 bp, Homo sapien
gaagcctccaggtttttccatgctt

SEQ ID NO: 2872552 - DNA, 25 bp, Homo sapien
gcctccaggtttttccatgcttccc

SEQ ID NO: 2872553 - DNA, 25 bp, Homo sapien
ttagaagcctccaggtttttccatg

SEQ ID NO: 2872554 - DNA, 25 bp, Homo sapien
ctgtggtattttgccggccagactt

SEQ ID NO: 2872555 - DNA, 25 bp, Homo sapien
tgtggtattttgccggccagacttg

SEQ ID NO: 2872556 - DNA, 25 bp, Homo sapien
ggctgtggtattttgccggccagac

SEQ ID NO: 2872557 - DNA, 25 bp, Homo sapien
gctgtggtattttgccggccagact

SEQ ID NO: 2872558 - DNA, 25 bp, Homo sapien
ttcgatcgttggtgagtctggctga

SEQ ID NO: 2872559 - DNA, 25 bp, Homo sapien
ctgggcaccctgaattcgatcgttg

SEQ ID NO: 2872560 - DNA, 25 bp, Homo sapien
caccctgaattcgatcgttggtgag

SEQ ID NO: 2872561 - DNA, 25 bp, Homo sapien
ctgaattcgatcgttggtgagtctg

SEQ ID NO: 2872562 - DNA, 25 bp, Homo sapien
agtcctcgaacttcagggcagaact

SEQ ID NO: 2872563 - DNA, 25 bp, Homo sapien
gcaggcattcgaggcggacagaaac

SEQ ID NO: 2872564 - DNA, 25 bp, Homo sapien
cgcctcctttctcgggaagcttggg

SEQ ID NO: 2872565 - DNA, 25 bp, Homo sapien
agaactgcctgggtgggaactctcc

SEQ ID NO: 2872566 - DNA, 25 bp, Homo sapien
cgcgggagcggttggcggagagacc

SEQ ID NO: 2872567 - DNA, 25 bp, Homo sapien
ggcagagggcgcctcgggcttctcg

SEQ ID NO: 2872568 - DNA, 25 bp, Homo sapien
aacaggttcgtagaacgcgcgctcg

SEQ ID NO: 2872569 - DNA, 25 bp, Homo sapien
gagcttcctagaggcggcttcctcc

SEQ ID NO: 2872570 - DNA, 25 bp, Homo sapien
gcaccgggtccctatcgggtcagca

SEQ ID NO: 2872571 - DNA, 25 bp, Homo sapien
ctatcgggtcagcactgcagcggcg

SEQ ID NO: 2872572 - DNA, 25 bp, Homo sapien
gttccgcgcggctgctaaggaccgt

SEQ ID NO: 2872573 - DNA, 25 bp, Homo sapien
accgcgaacaaagccgcgggtctgg

SEQ ID NO: 2872574 - DNA, 25 bp, Homo sapien
atccattggcgctggcagccgtgtg

SEQ ID NO: 2872575 - DNA, 25 bp, Homo sapien
aataaatccattggcgctggcagcc

SEQ ID NO: 2872576 - DNA, 25 bp, Homo sapien
gaaataaatccattggcgctggcag

SEQ ID NO: 2872577 - DNA, 25 bp, Homo sapien
ctggcagccgtgtgggcgctgcagt

SEQ ID NO: 2872578 - DNA, 25 bp, Homo sapien
tatctattgcacatcctcactgagg

SEQ ID NO: 2872579 - DNA, 25 bp, Homo sapien
catctgtatgtggaagcaacgcacg

SEQ ID NO: 2872580 - DNA, 25 bp, Homo sapien
gaaagtgtggtggtcccttcatgga

SEQ ID NO: 2872581 - DNA, 25 bp, Homo sapien
gaaatccggatctgggtcctgagaa

SEQ ID NO: 2872582 - DNA, 25 bp, Homo sapien
gactgagaggcggtaaaggggacac

SEQ ID NO: 2872583 - DNA, 25 bp, Homo sapien
cctgggcaccggatggggactgaga

SEQ ID NO: 2872584 - DNA, 25 bp, Homo sapien
cccggctctcgcctcgaggccttgg

SEQ ID NO: 2872585 - DNA, 25 bp, Homo sapien
cagggaccgccaggtcggtgctggc

SEQ ID NO: 2872586 - DNA, 25 bp, Homo sapien
ccatgggccaaaagacagtgactgt

SEQ ID NO: 2872587 - DNA, 25 bp, Homo sapien
caaattagagtcagacgtggcctcg

SEQ ID NO: 2872588 - DNA, 25 bp, Homo sapien
tataccccagaaacacggtcagtgg

SEQ ID NO: 2872589 - DNA, 25 bp, Homo sapien
tatccccagaagtggaatgctgcct

SEQ ID NO: 2872590 - DNA, 25 bp, Homo sapien
caatgtccatccctgagcaagttct

SEQ ID NO: 2872591 - DNA, 25 bp, Homo sapien
gtaaaaatcccttccgcaatgtcca

SEQ ID NO: 2872592 - DNA, 25 bp, Homo sapien
tggacgtggaaacttgatagacaga

SEQ ID NO: 2872593 - DNA, 25 bp, Homo sapien
gctgggaagctaaggacagtcacct

SEQ ID NO: 2872594 - DNA, 25 bp, Homo sapien
tgagtgtttgggcatccgccaggca

SEQ ID NO: 2872595 - DNA, 25 bp, Homo sapien
ggaaaccaaggatagagtgacccca

SEQ ID NO: 2872596 - DNA, 25 bp, Homo sapien
tgggcagggcatcaccaaagtcctt

SEQ ID NO: 2872597 - DNA, 25 bp, Homo sapien
cgcagccgcacagggatcaatattt

SEQ ID NO: 2872598 - DNA, 25 bp, Homo sapien
catgtgtttctatagtagaatgctt

SEQ ID NO: 2872599 - DNA, 25 bp, Homo sapien
catctcctttctaactgacgtgaga

SEQ ID NO: 2872600 - DNA, 25 bp, Homo sapien
agaataagaaattccgctgggcgtg

SEQ ID NO: 2872601 - DNA, 25 bp, Homo sapien
gaataagaaattccgctgggcgtgg

SEQ ID NO: 2872602 - DNA, 25 bp, Homo sapien
atgacactgtatgttctataacatt

SEQ ID NO: 2872603 - DNA, 25 bp, Homo sapien
tttgatagatcaaaaagaataagaa

SEQ ID NO: 2872604 - DNA, 25 bp, Homo sapien
gagaatcactgaccccttggagaat

SEQ ID NO: 2872605 - DNA, 25 bp, Homo sapien
ccttaccctgggaaatggatacaag

SEQ ID NO: 2872606 - DNA, 25 bp, Homo sapien
gaacgttctcttaaccagagtctgg

SEQ ID NO: 2872607 - DNA, 25 bp, Homo sapien
ggtctcacagctagtacgatctggg

SEQ ID NO: 2872608 - DNA, 25 bp, Homo sapien
ggtccacgcctaaggagctcaagga

SEQ ID NO: 2872609 - DNA, 25 bp, Homo sapien
tacatggttgcctggaagatccaat

SEQ ID NO: 2872610 - DNA, 25 bp, Homo sapien
aagacattcgctctgcctgctgcaa

SEQ ID NO: 2872611 - DNA, 25 bp, Homo sapien
ttttcccagcttgtatgactctcag

SEQ ID NO: 2872612 - DNA, 25 bp, Homo sapien
tattaaatggtgaggtagccagcct

SEQ ID NO: 2872613 - DNA, 25 bp, Homo sapien
tccaagatgggccatagtgatcccc

SEQ ID NO: 2872614 - DNA, 25 bp, Homo sapien
gatttctaaccgtcgagcactgtga

SEQ ID NO: 2872615 - DNA, 25 bp, Homo sapien
tcaggtagactagatcgggcaatgg

SEQ ID NO: 2872616 - DNA, 25 bp, Homo sapien
gaaataagctaggtgtcatggcagg

SEQ ID NO: 2872617 - DNA, 25 bp, Homo sapien
taagaacagtgcttactgacaccag

SEQ ID NO: 2872618 - DNA, 25 bp, Homo sapien
tgggtggagtactcacaagggtctt

SEQ ID NO: 2872619 - DNA, 25 bp, Homo sapien
tgacaccaggcagacgttaaaatcg

SEQ ID NO: 2872620 - DNA, 25 bp, Homo sapien
ccatggctaagtggaatttattaca

SEQ ID NO: 2872621 - DNA, 25 bp, Homo sapien
acgatgctgcaaactggcctcttgg

SEQ ID NO: 2872622 - DNA, 25 bp, Homo sapien
aagatggtggaatgatcacgatgct

SEQ ID NO: 2872623 - DNA, 25 bp, Homo sapien
gctaagtggaatttattacaggtac

SEQ ID NO: 2872624 - DNA, 25 bp, Homo sapien
ggaacacactttgtcaagctgtcgg

SEQ ID NO: 2872625 - DNA, 25 bp, Homo sapien
cacctcgcaggcttactttgaaaag

SEQ ID NO: 2872626 - DNA, 25 bp, Homo sapien
tacttctagcaagatggtgtcacag

SEQ ID NO: 2872627 - DNA, 25 bp, Homo sapien
ttgaaaagcagagcaatcacaggac

SEQ ID NO: 2872628 - DNA, 25 bp, Homo sapien
ccacagggcattcagtagagtactc

SEQ ID NO: 2872629 - DNA, 25 bp, Homo sapien
tgaatatcagaacgagcaaagaagg

SEQ ID NO: 2872630 - DNA, 25 bp, Homo sapien
catagtgagggataaccagcccaac

SEQ ID NO: 2872631 - DNA, 25 bp, Homo sapien
gcagtacatgcactatccaaggcca

SEQ ID NO: 2872632 - DNA, 25 bp, Homo sapien
ggtgtattcactaccctgactgcag

SEQ ID NO: 2872633 - DNA, 25 bp, Homo sapien
gaaactctagacaaactaaccacag

SEQ ID NO: 2872634 - DNA, 25 bp, Homo sapien
taaccacagtaacgcaaagcagatc

SEQ ID NO: 2872635 - DNA, 25 bp, Homo sapien
tcagcagttgtctattgcagggaga

SEQ ID NO: 2872636 - DNA, 25 bp, Homo sapien
gcaagatggaacaggccccaagttt

SEQ ID NO: 2872637 - DNA, 25 bp, Homo sapien
agaatacctgcccttctctaaaatg

SEQ ID NO: 2872638 - DNA, 25 bp, Homo sapien
tctaaaatgattcaactagggctgc

SEQ ID NO: 2872639 - DNA, 25 bp, Homo sapien
ttaactggcataagagcaactgtgg

SEQ ID NO: 2872640 - DNA, 25 bp, Homo sapien
ccaatggagtgttctaggcaaggga

SEQ ID NO: 2872641 - DNA, 25 bp, Homo sapien
taatgaaaccactcacatgaattgt

SEQ ID NO: 2872642 - DNA, 25 bp, Homo sapien
gggcaaagggaggctacattaacat

SEQ ID NO: 2872643 - DNA, 25 bp, Homo sapien
ggactgcttctaaattaagacctaa

SEQ ID NO: 2872644 - DNA, 25 bp, Homo sapien
agtttattaaatgctcaattctcaa

SEQ ID NO: 2872645 - DNA, 25 bp, Homo sapien
gtttattaaatgctcaattctcaaa

SEQ ID NO: 2872646 - DNA, 25 bp, Homo sapien
ggtcactactcgcactgcagagtcc

SEQ ID NO: 2872647 - DNA, 25 bp, Homo sapien
ttgtccaagttgtatcaaatgccac

SEQ ID NO: 2872648 - DNA, 25 bp, Homo sapien
aagtctaccatgcacccagaagcag

SEQ ID NO: 2872649 - DNA, 25 bp, Homo sapien
ccctccaaactaggtattgtccaag

SEQ ID NO: 2872650 - DNA, 25 bp, Homo sapien
atttagggtgcccaccaactccgag

SEQ ID NO: 2872651 - DNA, 25 bp, Homo sapien
tgcccaccaactccgagagaacaga

SEQ ID NO: 2872652 - DNA, 25 bp, Homo sapien
agggtgcccaccaactccgagagaa

SEQ ID NO: 2872653 - DNA, 25 bp, Homo sapien
caccaactccgagagaacagaccaa

SEQ ID NO: 2872654 - DNA, 25 bp, Homo sapien
gaaggaagacctctgccggggcctc

SEQ ID NO: 2872655 - DNA, 25 bp, Homo sapien
tgaaggaagacctctgccggggcct

SEQ ID NO: 2872656 - DNA, 25 bp, Homo sapien
atgaaggaagacctctgccggggcc

SEQ ID NO: 2872657 - DNA, 25 bp, Homo sapien
aggaagacctctgccggggcctcct

SEQ ID NO: 2872658 - DNA, 25 bp, Homo sapien
agcttcacagttccggcttcccggc

SEQ ID NO: 2872659 - DNA, 25 bp, Homo sapien
tttgtcatcacaggcaaatgccagc

SEQ ID NO: 2872660 - DNA, 25 bp, Homo sapien
gcttcccggctgctgtcatatttgc

SEQ ID NO: 2872661 - DNA, 25 bp, Homo sapien
gaaggtcggagactcacactgtacc

SEQ ID NO: 2872662 - DNA, 25 bp, Homo sapien
cacaggtgggttaactcaagagcag

SEQ ID NO: 2872663 - DNA, 25 bp, Homo sapien
gctggacaatgttcaccacaacgtg

SEQ ID NO: 2872664 - DNA, 25 bp, Homo sapien
aggaaagtgtctccgcgtcacaggg

SEQ ID NO: 2872665 - DNA, 25 bp, Homo sapien
gacagagccggttctgagcacaggt

SEQ ID NO: 2872666 - DNA, 25 bp, Homo sapien
ctaaaggagacaaattcattcatga

SEQ ID NO: 2872667 - DNA, 25 bp, Homo sapien
tctaaaggagacaaattcattcatg

SEQ ID NO: 2872668 - DNA, 25 bp, Homo sapien
ttgtctaaaggagacaaattcattc

SEQ ID NO: 2872669 - DNA, 25 bp, Homo sapien
gtctaaaggagacaaattcattcat

SEQ ID NO: 2872670 - DNA, 25 bp, Homo sapien
tcatgctggtgaagtagtcacatgc

SEQ ID NO: 2872671 - DNA, 25 bp, Homo sapien
agacggtagattctcatgaagttac

SEQ ID NO: 2872672 - DNA, 25 bp, Homo sapien
ccaaaggtgaaagacggtagattct

SEQ ID NO: 2872673 - DNA, 25 bp, Homo sapien
gcagagatgagatcacaagagaagt

SEQ ID NO: 2872674 - DNA, 25 bp, Homo sapien
aatgatcttccgatgctgacgccag

SEQ ID NO: 2872675 - DNA, 25 bp, Homo sapien
tgagggttcttacaggccaatccag

SEQ ID NO: 2872676 - DNA, 25 bp, Homo sapien
gacgccagcattttcccatcatggc

SEQ ID NO: 2872677 - DNA, 25 bp, Homo sapien
catggctgaaactgagggttcttac

SEQ ID NO: 2872678 - DNA, 25 bp, Homo sapien
gggtcaaacttgatacagatgcagt

SEQ ID NO: 2872679 - DNA, 25 bp, Homo sapien
gaaaagcaccgaacacacactaact

SEQ ID NO: 2872680 - DNA, 25 bp, Homo sapien
aagcatctgcacttcctgtggcaaa

SEQ ID NO: 2872681 - DNA, 25 bp, Homo sapien
aaggatgggcgttgatggactgcac

SEQ ID NO: 2872682 - DNA, 25 bp, Homo sapien
tgttcccatgaacgcttcccgagga

SEQ ID NO: 2872683 - DNA, 25 bp, Homo sapien
tctaattctatgatcccctgtgccc

SEQ ID NO: 2872684 - DNA, 25 bp, Homo sapien
tataaggactggtgctcaacactga

SEQ ID NO: 2872685 - DNA, 25 bp, Homo sapien
tacacaagcgagaaaacgagccaag

SEQ ID NO: 2872686 - DNA, 25 bp, Homo sapien
ctgctttgtcagttatgtggttccc

SEQ ID NO: 2872687 - DNA, 25 bp, Homo sapien
tgttcacctgggatagtggaaggct

SEQ ID NO: 2872688 - DNA, 25 bp, Homo sapien
tctttcaagatcaagctcacaagct

SEQ ID NO: 2872689 - DNA, 25 bp, Homo sapien
tcctactacgtggagcaggtacagg

SEQ ID NO: 2872690 - DNA, 25 bp, Homo sapien
cagtcccctaagctagaccccctca

SEQ ID NO: 2872691 - DNA, 25 bp, Homo sapien
tccttcaggataggctcacatctaa

SEQ ID NO: 2872692 - DNA, 25 bp, Homo sapien
catctccatatctgacacagcaccc

SEQ ID NO: 2872693 - DNA, 25 bp, Homo sapien
agctccttcaggataggctcacatc

SEQ ID NO: 2872694 - DNA, 25 bp, Homo sapien
tcttggcatcaataaaggtcaccac

SEQ ID NO: 2872695 - DNA, 25 bp, Homo sapien
ccatcaggactccagcagatattaa

SEQ ID NO: 2872696 - DNA, 25 bp, Homo sapien
ccaggagatttcgttgacctcgaac

SEQ ID NO: 2872697 - DNA, 25 bp, Homo sapien
tgttgcctacagcaatggtctgccc

SEQ ID NO: 2872698 - DNA, 25 bp, Homo sapien
atcagcaagataatctgtttgctca

SEQ ID NO: 2872699 - DNA, 25 bp, Homo sapien
taatcttccacaagtttattgcact

SEQ ID NO: 2872700 - DNA, 25 bp, Homo sapien
tgtttgctcataatcttccacaagt

SEQ ID NO: 2872701 - DNA, 25 bp, Homo sapien
ctgggaacccagacataatcagcaa

SEQ ID NO: 2872702 - DNA, 25 bp, Homo sapien
cacagtggcaatgcattttgtagtc

SEQ ID NO: 2872703 - DNA, 25 bp, Homo sapien
acagtggcaatgcattttgtagtcc

SEQ ID NO: 2872704 - DNA, 25 bp, Homo sapien
ttcacagtggcaatgcattttgtag

SEQ ID NO: 2872705 - DNA, 25 bp, Homo sapien
tcacagtggcaatgcattttgtagt

SEQ ID NO: 2872706 - DNA, 25 bp, Homo sapien
taacaaataggtcaggattacttgg

SEQ ID NO: 2872707 - DNA, 25 bp, Homo sapien
gattacttggatgccaacaaagctg

SEQ ID NO: 2872708 - DNA, 25 bp, Homo sapien
tccggacgccgtaacaaataggtca

SEQ ID NO: 2872709 - DNA, 25 bp, Homo sapien
ccagatgcgaatggttttatctccg

SEQ ID NO: 2872710 - DNA, 25 bp, Homo sapien
ctatccccatgtccccgataattgt

SEQ ID NO: 2872711 - DNA, 25 bp, Homo sapien
atccccatgtccccgataattgttt

SEQ ID NO: 2872712 - DNA, 25 bp, Homo sapien
ccatgtccccgataattgttttctt

SEQ ID NO: 2872713 - DNA, 25 bp, Homo sapien
cccatgtccccgataattgttttct

SEQ ID NO: 2872714 - DNA, 25 bp, Homo sapien
tctccagcaagaagacgctggccgt

SEQ ID NO: 2872715 - DNA, 25 bp, Homo sapien
cttgtcgaaggaccccgaggctagg

SEQ ID NO: 2872716 - DNA, 25 bp, Homo sapien
gccaccgagtgcaccttggcgctgt

SEQ ID NO: 2872717 - DNA, 25 bp, Homo sapien
gaactcgcgcgtcttgctgtggccc

SEQ ID NO: 2872718 - DNA, 25 bp, Homo sapien
ggcgcagtcagtcctggcgccgctg

SEQ ID NO: 2872719 - DNA, 25 bp, Homo sapien
gccgagctccccagcttccaactca

SEQ ID NO: 2872720 - DNA, 25 bp, Homo sapien
gcttccaactcacaacactgcagca

SEQ ID NO: 2872721 - DNA, 25 bp, Homo sapien
gcctccacggcgcagtcagtcctgg

SEQ ID NO: 2872722 - DNA, 25 bp, Homo sapien
gtagaccacctgatgtaaggatttt

SEQ ID NO: 2872723 - DNA, 25 bp, Homo sapien
gggtagaccacctgatgtaaggatt

SEQ ID NO: 2872724 - DNA, 25 bp, Homo sapien
agaattatttaagctggtgtggtgg

SEQ ID NO: 2872725 - DNA, 25 bp, Homo sapien
gatgtaaggattttgagaccaccct

SEQ ID NO: 2872726 - DNA, 25 bp, Homo sapien
actgccacaaccacaggaagtgagc

SEQ ID NO: 2872727 - DNA, 25 bp, Homo sapien
tccatcgctgtcactgccacaacca

SEQ ID NO: 2872728 - DNA, 25 bp, Homo sapien
cattcctgtcgagctgcagtctcca

SEQ ID NO: 2872729 - DNA, 25 bp, Homo sapien
gagccacgccatctacaggctccaa

SEQ ID NO: 2872730 - DNA, 25 bp, Homo sapien
ccgggtgtcagcttggtacctgata

SEQ ID NO: 2872731 - DNA, 25 bp, Homo sapien
tgaagccctgggtataggtatccac

SEQ ID NO: 2872732 - DNA, 25 bp, Homo sapien
tgatgcctggtgtccatatggagcg

SEQ ID NO: 2872733 - DNA, 25 bp, Homo sapien
taagacctgttgtccaccttggacc

SEQ ID NO: 2872734 - DNA, 25 bp, Homo sapien
gagtctgatacacatcctgtgcctg

SEQ ID NO: 2872735 - DNA, 25 bp, Homo sapien
tgtgcctgctgcctacatagggcct

SEQ ID NO: 2872736 - DNA, 25 bp, Homo sapien
gatggacaccttgagtccgtgtgca

SEQ ID NO: 2872737 - DNA, 25 bp, Homo sapien
acttcgggcctattgtactcctgga

SEQ ID NO: 2872738 - DNA, 25 bp, Homo sapien
tccagtgtgcacttggggcccgacg

SEQ ID NO: 2872739 - DNA, 25 bp, Homo sapien
tgatgtccatctgtggccaggtttc

SEQ ID NO: 2872740 - DNA, 25 bp, Homo sapien
aggaactggagtccctctgggacct

SEQ ID NO: 2872741 - DNA, 25 bp, Homo sapien
tacctgaggcctgggcgttcacctg

SEQ ID NO: 2872742 - DNA, 25 bp, Homo sapien
agaaagttctcgcagccctgggcgc

SEQ ID NO: 2872743 - DNA, 25 bp, Homo sapien
cttggagaaagttctcgcagccctg

SEQ ID NO: 2872744 - DNA, 25 bp, Homo sapien
tggcggcggctgatggcccgtgtgg

SEQ ID NO: 2872745 - DNA, 25 bp, Homo sapien
tggagaaagttctcgcagccctggg

SEQ ID NO: 2872746 - DNA, 25 bp, Homo sapien
atccagcggcctgtggcacgacggc

SEQ ID NO: 2872747 - DNA, 25 bp, Homo sapien
aggcgagcctgagcgactgcagctg

SEQ ID NO: 2872748 - DNA, 25 bp, Homo sapien
gcacgacggcggtggaggcgagcct

SEQ ID NO: 2872749 - DNA, 25 bp, Homo sapien
gcatccagcggcctgtggcacgacg

SEQ ID NO: 2872750 - DNA, 25 bp, Homo sapien
gaggaaatgtttagatgacgccagt

SEQ ID NO: 2872751 - DNA, 25 bp, Homo sapien
tgacgccagttatgatttcaccctg

SEQ ID NO: 2872752 - DNA, 25 bp, Homo sapien
aatttggcagtccaattggcaggtc

SEQ ID NO: 2872753 - DNA, 25 bp, Homo sapien
tctataatatctgggagcaaactgg

SEQ ID NO: 2872754 - DNA, 25 bp, Homo sapien
gctccagtccaactggcaggtggct

SEQ ID NO: 2872755 - DNA, 25 bp, Homo sapien
aatccgtggtgtcccgctcggagac

SEQ ID NO: 2872756 - DNA, 25 bp, Homo sapien
gtggctccagtccaactggcaggtg

SEQ ID NO: 2872757 - DNA, 25 bp, Homo sapien
cattttcataaaacaatccgtggtg

SEQ ID NO: 2872758 - DNA, 25 bp, Homo sapien
cgaagcagtactctacagagaccca

SEQ ID NO: 2872759 - DNA, 25 bp, Homo sapien
ccccagtatcactcccaagtaaggg

SEQ ID NO: 2872760 - DNA, 25 bp, Homo sapien
tatcactcccaagtaagggattggt

SEQ ID NO: 2872761 - DNA, 25 bp, Homo sapien
gaagtaccctgagctccattcgaag

SEQ ID NO: 2872762 - DNA, 25 bp, Homo sapien
cataggtaagtgctgaggtgaaagt

SEQ ID NO: 2872763 - DNA, 25 bp, Homo sapien
tgaaagtgccaaccaaagccgttag

SEQ ID NO: 2872764 - DNA, 25 bp, Homo sapien
caaccaaagccgttagattgaacat

SEQ ID NO: 2872765 - DNA, 25 bp, Homo sapien
gattgaacatttatgcctggaggga

SEQ ID NO: 2872766 - DNA, 25 bp, Homo sapien
tcagtagaggaactggctgtggacc

SEQ ID NO: 2872767 - DNA, 25 bp, Homo sapien
ctgtggaccttcacctctgcatccc

SEQ ID NO: 2872768 - DNA, 25 bp, Homo sapien
aactggctgtggaccttcacctctg

SEQ ID NO: 2872769 - DNA, 25 bp, Homo sapien
cagtagaggaactggctgtggacct

SEQ ID NO: 2872770 - DNA, 25 bp, Homo sapien
ggcttcgccagcagccgatgagtct

SEQ ID NO: 2872771 - DNA, 25 bp, Homo sapien
gtggattgcccagcgccagggatca

SEQ ID NO: 2872772 - DNA, 25 bp, Homo sapien
gcagcaaagtcaggcggtcggcttc

SEQ ID NO: 2872773 - DNA, 25 bp, Homo sapien
gatcaggatccggagaggtgtccag

SEQ ID NO: 2872774 - DNA, 25 bp, Homo sapien
accctgacgccatccaagggaagct

SEQ ID NO: 2872775 - DNA, 25 bp, Homo sapien
gagcgagtgactctccaggcgtctt

SEQ ID NO: 2872776 - DNA, 25 bp, Homo sapien
gcaactgcaaactgcgcgtcctggc

SEQ ID NO: 2872777 - DNA, 25 bp, Homo sapien
tcagaccaggtaggctgtgcactcg

SEQ ID NO: 2872778 - DNA, 25 bp, Homo sapien
ggtgcccatgccagcaccagatctc

SEQ ID NO: 2872779 - DNA, 25 bp, Homo sapien
atccgggaagccactccggtggccg

SEQ ID NO: 2872780 - DNA, 25 bp, Homo sapien
ccggtggccgcggggtgcccatgcc

SEQ ID NO: 2872781 - DNA, 25 bp, Homo sapien
gtgcccatgccagcaccagatctct

SEQ ID NO: 2872782 - DNA, 25 bp, Homo sapien
gcgcgcctgcgattttccgtccgtg

SEQ ID NO: 2872783 - DNA, 25 bp, Homo sapien
tgcgattttccgtccgtggtcctgg

SEQ ID NO: 2872784 - DNA, 25 bp, Homo sapien
gggccgcgcgcctgcgattttccgt

SEQ ID NO: 2872785 - DNA, 25 bp, Homo sapien
aacccgcgagcccagcggcgcctgc

SEQ ID NO: 2872786 - DNA, 25 bp, Homo sapien
gagccgggcggctttgcgaggctca

SEQ ID NO: 2872787 - DNA, 25 bp, Homo sapien
gcggctttgcgaggctcactaggtc

SEQ ID NO: 2872788 - DNA, 25 bp, Homo sapien
ttgcgaggctcactaggtctgagag

SEQ ID NO: 2872789 - DNA, 25 bp, Homo sapien
ccgggcggctttgcgaggctcacta

SEQ ID NO: 2872790 - DNA, 25 bp, Homo sapien
aagggtggaccaggcgggatcgcgg

SEQ ID NO: 2872791 - DNA, 25 bp, Homo sapien
gggtggaccaggcgggatcgcggat

SEQ ID NO: 2872792 - DNA, 25 bp, Homo sapien
tgaagggtggaccaggcgggatcgc

SEQ ID NO: 2872793 - DNA, 25 bp, Homo sapien
ctgaagggtggaccaggcgggatcg

SEQ ID NO: 2872794 - DNA, 25 bp, Homo sapien
tccacagggcgctgtcaagggcgaa

SEQ ID NO: 2872795 - DNA, 25 bp, Homo sapien
ggtaccgaatcggaagatccacagg

SEQ ID NO: 2872796 - DNA, 25 bp, Homo sapien
ggctccctaggccacgtctacaggg

SEQ ID NO: 2872797 - DNA, 25 bp, Homo sapien
gaagaagttcttcggctttgggagc

SEQ ID NO: 2872798 - DNA, 25 bp, Homo sapien
aggggtggtgccaaacggagcctca

SEQ ID NO: 2872799 - DNA, 25 bp, Homo sapien
tcagaggggtggtgccaaacggagc

SEQ ID NO: 2872800 - DNA, 25 bp, Homo sapien
gcaccctcagaggggtggtgccaaa

SEQ ID NO: 2872801 - DNA, 25 bp, Homo sapien
accctcagaggggtggtgccaaacg

SEQ ID NO: 2872802 - DNA, 25 bp, Homo sapien
ccaggtaagacttctgatagtgaat

SEQ ID NO: 2872803 - DNA, 25 bp, Homo sapien
atccaggtaagacttctgatagtga

SEQ ID NO: 2872804 - DNA, 25 bp, Homo sapien
taagacttctgatagtgaatttctc

SEQ ID NO: 2872805 - DNA, 25 bp, Homo sapien
tctgatagtgaatttctcatttctc

SEQ ID NO: 2872806 - DNA, 25 bp, Homo sapien
tggccccaggccagatgttgacact

SEQ ID NO: 2872807 - DNA, 25 bp, Homo sapien
tgttgacactcgatctgactgggcc

SEQ ID NO: 2872808 - DNA, 25 bp, Homo sapien
agaactgtcacttggccgaaccttg

SEQ ID NO: 2872809 - DNA, 25 bp, Homo sapien
gcccagaccgggtatgcaaagctgt

SEQ ID NO: 2872810 - DNA, 25 bp, Homo sapien
gacaatacagggcaatgggtaggat

SEQ ID NO: 2872811 - DNA, 25 bp, Homo sapien
caatgggtaggatgaccagacattt

SEQ ID NO: 2872812 - DNA, 25 bp, Homo sapien
tgggtaggatgaccagacatttgaa

SEQ ID NO: 2872813 - DNA, 25 bp, Homo sapien
gacagctgacaatacagggcaatgg

SEQ ID NO: 2872814 - DNA, 25 bp, Homo sapien
ttccaaatacatcaaccttcctgaa

SEQ ID NO: 2872815 - DNA, 25 bp, Homo sapien
tccaaatacatcaaccttcctgaag

SEQ ID NO: 2872816 - DNA, 25 bp, Homo sapien
ttaccaggtaagaaatgatctcaga

SEQ ID NO: 2872817 - DNA, 25 bp, Homo sapien
gaagtgtcttcgaggctttaggacc

SEQ ID NO: 2872818 - DNA, 25 bp, Homo sapien
tcagatggcattcttagatgacacc

SEQ ID NO: 2872819 - DNA, 25 bp, Homo sapien
tttaggaccattgcctcaaccactg

SEQ ID NO: 2872820 - DNA, 25 bp, Homo sapien
caatgacgtgctccaggaagctatg

SEQ ID NO: 2872821 - DNA, 25 bp, Homo sapien
ggcaataacaatgacgtgctccagg

SEQ ID NO: 2872822 - DNA, 25 bp, Homo sapien
ataacaatgacgtgctccaggaagc

SEQ ID NO: 2872823 - DNA, 25 bp, Homo sapien
caataacaatgacgtgctccaggaa

SEQ ID NO: 2872824 - DNA, 25 bp, Homo sapien
gaagagttctttaggtgatggctgc

SEQ ID NO: 2872825 - DNA, 25 bp, Homo sapien
gcacttggagggaaatgttacattt

SEQ ID NO: 2872826 - DNA, 25 bp, Homo sapien
agatcacctgctccaatgtaacgag

SEQ ID NO: 2872827 - DNA, 25 bp, Homo sapien
ataagcacttggagggaaatgttac

SEQ ID NO: 2872828 - DNA, 25 bp, Homo sapien
cataacacactgttgaggctcagtt

SEQ ID NO: 2872829 - DNA, 25 bp, Homo sapien
tcataacacactgttgaggctcagt

SEQ ID NO: 2872830 - DNA, 25 bp, Homo sapien
tctgctgcctggtcatattctgtac

SEQ ID NO: 2872831 - DNA, 25 bp, Homo sapien
ctctgctgcctggtcatattctgta

SEQ ID NO: 2872832 - DNA, 25 bp, Homo sapien
agctttcctgttgacctggaccatg

SEQ ID NO: 2872833 - DNA, 25 bp, Homo sapien
tcctgttgacctggaccatgttcat

SEQ ID NO: 2872834 - DNA, 25 bp, Homo sapien
accagtgatgtcaatggctgcgtgg

SEQ ID NO: 2872835 - DNA, 25 bp, Homo sapien
caaaccctgaaaccagtgatgtcaa

SEQ ID NO: 2872836 - DNA, 25 bp, Homo sapien
cttttgagctgtggcacctctttga

SEQ ID NO: 2872837 - DNA, 25 bp, Homo sapien
tgagctgtggcacctctttgaatct

SEQ ID NO: 2872838 - DNA, 25 bp, Homo sapien
tttgagctgtggcacctctttgaat

SEQ ID NO: 2872839 - DNA, 25 bp, Homo sapien
tacttttgagctgtggcacctcttt

SEQ ID NO: 2872840 - DNA, 25 bp, Homo sapien
tcctttttgtctgtactctgaggaa

SEQ ID NO: 2872841 - DNA, 25 bp, Homo sapien
gctgatcaagccttcctttttgtct

SEQ ID NO: 2872842 - DNA, 25 bp, Homo sapien
tactctgaggaatcccaaacaggca

SEQ ID NO: 2872843 - DNA, 25 bp, Homo sapien
ccacatgctgatcaagccttccttt

SEQ ID NO: 2872844 - DNA, 25 bp, Homo sapien
tgctggaaaggccaccagtagcctg

SEQ ID NO: 2872845 - DNA, 25 bp, Homo sapien
tggaaaggccaccagtagcctgggt

SEQ ID NO: 2872846 - DNA, 25 bp, Homo sapien
gaaaggccaccagtagcctgggtcc

SEQ ID NO: 2872847 - DNA, 25 bp, Homo sapien
tcatgctggaaaggccaccagtagc

SEQ ID NO: 2872848 - DNA, 25 bp, Homo sapien
gcaagtcgtgcatttacctcttttg

SEQ ID NO: 2872849 - DNA, 25 bp, Homo sapien
ggcgcagccgctcttttcacctggt

SEQ ID NO: 2872850 - DNA, 25 bp, Homo sapien
tggtgcgccagcttgcaagtcgtgc

SEQ ID NO: 2872851 - DNA, 25 bp, Homo sapien
gaagcctcgcgggtatgcaagatcg

SEQ ID NO: 2872852 - DNA, 25 bp, Homo sapien
atcttttcccacgtgcacgtccagg

SEQ ID NO: 2872853 - DNA, 25 bp, Homo sapien
tcttttcccacgtgcacgtccagga

SEQ ID NO: 2872854 - DNA, 25 bp, Homo sapien
ttttcccacgtgcacgtccaggaac

SEQ ID NO: 2872855 - DNA, 25 bp, Homo sapien
ccagagggtcgtccagtagaggaca

SEQ ID NO: 2872856 - DNA, 25 bp, Homo sapien
gtcgtccagtagaggacagagttga

SEQ ID NO: 2872857 - DNA, 25 bp, Homo sapien
ggtcgtccagtagaggacagagttg

SEQ ID NO: 2872858 - DNA, 25 bp, Homo sapien
ctgaccagagggtcgtccagtagag

SEQ ID NO: 2872859 - DNA, 25 bp, Homo sapien
cgttcctgagtctgttaagtcctga

SEQ ID NO: 2872860 - DNA, 25 bp, Homo sapien
gaatagtgactccatagacagggta

SEQ ID NO: 2872861 - DNA, 25 bp, Homo sapien
gaaggcattggtacattaagcatca

SEQ ID NO: 2872862 - DNA, 25 bp, Homo sapien
cagagaggagttcagtcagaaggca

SEQ ID NO: 2872863 - DNA, 25 bp, Homo sapien
ctgagcatgatccacgtggcagagg

SEQ ID NO: 2872864 - DNA, 25 bp, Homo sapien
aaattgttggacaaacttcaatagg

SEQ ID NO: 2872865 - DNA, 25 bp, Homo sapien
ggatgtctgagcatgatccacgtgg

SEQ ID NO: 2872866 - DNA, 25 bp, Homo sapien
acaaacttcaataggatgtctgagc

SEQ ID NO: 2872867 - DNA, 25 bp, Homo sapien
caggtttaacgaatagattctctag

SEQ ID NO: 2872868 - DNA, 25 bp, Homo sapien
tccaggtttaacgaatagattctct

SEQ ID NO: 2872869 - DNA, 25 bp, Homo sapien
atagattctctagatccactaaaga

SEQ ID NO: 2872870 - DNA, 25 bp, Homo sapien
agattctctagatccactaaagagg

SEQ ID NO: 2872871 - DNA, 25 bp, Homo sapien
tacgtcaactctcactacgaagtct

SEQ ID NO: 2872872 - DNA, 25 bp, Homo sapien
gggctgtcaacttctacgtcaactc

SEQ ID NO: 2872873 - DNA, 25 bp, Homo sapien
gagcaggagttgtagctctttctgc

SEQ ID NO: 2872874 - DNA, 25 bp, Homo sapien
caatacttctaagaactggtgtggg

SEQ ID NO: 2872875 - DNA, 25 bp, Homo sapien
aagagccgagttccttcttgggact

SEQ ID NO: 2872876 - DNA, 25 bp, Homo sapien
gaagagccgagttccttcttgggac

SEQ ID NO: 2872877 - DNA, 25 bp, Homo sapien
ttgttttgatggaaagcccatcctc

SEQ ID NO: 2872878 - DNA, 25 bp, Homo sapien
ttgtttgttttgatggaaagcccat

SEQ ID NO: 2872879 - DNA, 25 bp, Homo sapien
tttgtttgttttgatggaaagccca

SEQ ID NO: 2872880 - DNA, 25 bp, Homo sapien
ttttgatggaaagcccatcctctcc

SEQ ID NO: 2872881 - DNA, 25 bp, Homo sapien
gtcacctggttgatcacagagcagc

SEQ ID NO: 2872882 - DNA, 25 bp, Homo sapien
tgtccctcataacaggcaggtgtca

SEQ ID NO: 2872883 - DNA, 25 bp, Homo sapien
ggtgtcacctggttgatcacagagc

SEQ ID NO: 2872884 - DNA, 25 bp, Homo sapien
gcaggtgtcacctggttgatcacag

SEQ ID NO: 2872885 - DNA, 25 bp, Homo sapien
gggaccacatcagtgcagggagcag

SEQ ID NO: 2872886 - DNA, 25 bp, Homo sapien
cggaaaacgtccgatcttgccaggc

SEQ ID NO: 2872887 - DNA, 25 bp, Homo sapien
aaacgtccgatcttgccaggccacg

SEQ ID NO: 2872888 - DNA, 25 bp, Homo sapien
ttcctcggaaaacgtccgatcttgc

SEQ ID NO: 2872889 - DNA, 25 bp, Homo sapien
ttggtaagtggtgtgtgtccagttc

SEQ ID NO: 2872890 - DNA, 25 bp, Homo sapien
gcttttattggcagagacttccagc

SEQ ID NO: 2872891 - DNA, 25 bp, Homo sapien
ccagttcagtgcttttattggcaga

SEQ ID NO: 2872892 - DNA, 25 bp, Homo sapien
gaatcaacttgattggtaagtggtg

SEQ ID NO: 2872893 - DNA, 25 bp, Homo sapien
taccgtgtagagaacagtaacaagg

SEQ ID NO: 2872894 - DNA, 25 bp, Homo sapien
caagcttggtagaatgtgaggatgc

SEQ ID NO: 2872895 - DNA, 25 bp, Homo sapien
ggcaagtccctgacatgaaatggca

SEQ ID NO: 2872896 - DNA, 25 bp, Homo sapien
gtgggaacgccactggacaccacaa

SEQ ID NO: 2872897 - DNA, 25 bp, Homo sapien
aaatcacgaaggctttcagtgcctc

SEQ ID NO: 2872898 - DNA, 25 bp, Homo sapien
ggctaaaaatcacgaaggctttcag

SEQ ID NO: 2872899 - DNA, 25 bp, Homo sapien
cccaggctaaaaatcacgaaggctt

SEQ ID NO: 2872900 - DNA, 25 bp, Homo sapien
agccccaggctaaaaatcacgaagg

SEQ ID NO: 2872901 - DNA, 25 bp, Homo sapien
cagggcgacacttccagctgaaggg

SEQ ID NO: 2872902 - DNA, 25 bp, Homo sapien
gagccatgaatggttccgctgggaa

SEQ ID NO: 2872903 - DNA, 25 bp, Homo sapien
tgacagctggatagggatggcctcc

SEQ ID NO: 2872904 - DNA, 25 bp, Homo sapien
tccagagccggtatttggtcccaaa

SEQ ID NO: 2872905 - DNA, 25 bp, Homo sapien
tccacagcctattcctcggacaggg

SEQ ID NO: 2872906 - DNA, 25 bp, Homo sapien
gacgtccaatccacctcactgggtt

SEQ ID NO: 2872907 - DNA, 25 bp, Homo sapien
ctgggctggcttgaataactgtggt

SEQ ID NO: 2872908 - DNA, 25 bp, Homo sapien
cactttcttgaggtctgacgtccaa

SEQ ID NO: 2872909 - DNA, 25 bp, Homo sapien
gtttgctcgtaaaagatgtgtgaca

SEQ ID NO: 2872910 - DNA, 25 bp, Homo sapien
atagaccacattctgtgtgagattc

SEQ ID NO: 2872911 - DNA, 25 bp, Homo sapien
gaccacattctgtgtgagattcatt

SEQ ID NO: 2872912 - DNA, 25 bp, Homo sapien
aaagatgtgtgacaggcaaggtcca

SEQ ID NO: 2872913 - DNA, 25 bp, Homo sapien
ggaaggcagctgttccttaactgca

SEQ ID NO: 2872914 - DNA, 25 bp, Homo sapien
agtctctcaaatgtgacgttacaaa

SEQ ID NO: 2872915 - DNA, 25 bp, Homo sapien
cttaactgcatccttttaaccttga

SEQ ID NO: 2872916 - DNA, 25 bp, Homo sapien
tgtttttaatcactgagtctctcaa

SEQ ID NO: 2872917 - DNA, 25 bp, Homo sapien
tctcttttcaggagtcggtgaccga

SEQ ID NO: 2872918 - DNA, 25 bp, Homo sapien
agagctgagggtcttcaccggaaca

SEQ ID NO: 2872919 - DNA, 25 bp, Homo sapien
cttgcacagggtcagtcaggtcaaa

SEQ ID NO: 2872920 - DNA, 25 bp, Homo sapien
ctatggtcactaacaggcttcagag

SEQ ID NO: 2872921 - DNA, 25 bp, Homo sapien
gctgtgcttagatcatagctttctg

SEQ ID NO: 2872922 - DNA, 25 bp, Homo sapien
tgctgtgcttagatcatagctttct

SEQ ID NO: 2872923 - DNA, 25 bp, Homo sapien
agtgctgtgcttagatcatagcttt

SEQ ID NO: 2872924 - DNA, 25 bp, Homo sapien
gtgctgtgcttagatcatagctttc

SEQ ID NO: 2872925 - DNA, 25 bp, Homo sapien
ttcgtgagttgtttcagaggagtgt

SEQ ID NO: 2872926 - DNA, 25 bp, Homo sapien
tgcttcctcaggctcttcgtgagtt

SEQ ID NO: 2872927 - DNA, 25 bp, Homo sapien
cagtgagaactgcttcctcaggctc

SEQ ID NO: 2872928 - DNA, 25 bp, Homo sapien
aggctcttcgtgagttgtttcagag

SEQ ID NO: 2872929 - DNA, 25 bp, Homo sapien
gcataaagccttgagtccgtgtctg

SEQ ID NO: 2872930 - DNA, 25 bp, Homo sapien
tgagcgttagccatctctttggccg

SEQ ID NO: 2872931 - DNA, 25 bp, Homo sapien
taatgaaggatttagagccccgcac

SEQ ID NO: 2872932 - DNA, 25 bp, Homo sapien
tggccgctggcttaaataaacgact

SEQ ID NO: 2872933 - DNA, 25 bp, Homo sapien
gctgacacaatcacatcgtgtctta

SEQ ID NO: 2872934 - DNA, 25 bp, Homo sapien
aaatataagctgacacaatcacatc

SEQ ID NO: 2872935 - DNA, 25 bp, Homo sapien
tataagctgacacaatcacatcgtg

SEQ ID NO: 2872936 - DNA, 25 bp, Homo sapien
taagctgacacaatcacatcgtgtc

SEQ ID NO: 2872937 - DNA, 25 bp, Homo sapien
gtcaaaagcatatacagaggaagag

SEQ ID NO: 2872938 - DNA, 25 bp, Homo sapien
ggaaagtcaaaagcatatacagagg

SEQ ID NO: 2872939 - DNA, 25 bp, Homo sapien
caggaaagtcaaaagcatatacaga

SEQ ID NO: 2872940 - DNA, 25 bp, Homo sapien
aagtcaaaagcatatacagaggaag

SEQ ID NO: 2872941 - DNA, 25 bp, Homo sapien
gaaatccactggctggcggcccttc

SEQ ID NO: 2872942 - DNA, 25 bp, Homo sapien
gggcccgggaaatccactggctggc

SEQ ID NO: 2872943 - DNA, 25 bp, Homo sapien
ctggctggcggcccttccggatgaa

SEQ ID NO: 2872944 - DNA, 25 bp, Homo sapien
cccgggaaatccactggctggcggc

SEQ ID NO: 2872945 - DNA, 25 bp, Homo sapien
aaggccacaacaagtgagctcaggc

SEQ ID NO: 2872946 - DNA, 25 bp, Homo sapien
aaaggccacaacaagtgagctcagg

SEQ ID NO: 2872947 - DNA, 25 bp, Homo sapien
caaaggccacaacaagtgagctcag

SEQ ID NO: 2872948 - DNA, 25 bp, Homo sapien
tctgcctcttcggggattttcccca

SEQ ID NO: 2872949 - DNA, 25 bp, Homo sapien
ggtgccgggagagggcttgttggta

SEQ ID NO: 2872950 - DNA, 25 bp, Homo sapien
tgcaggtgccgggagagggcttgtt

SEQ ID NO: 2872951 - DNA, 25 bp, Homo sapien
cactttttctgcaggtgccgggaga

SEQ ID NO: 2872952 - DNA, 25 bp, Homo sapien
ctgggaggaagacaacaagtgcgca

SEQ ID NO: 2872953 - DNA, 25 bp, Homo sapien
cctatgatacatatggtcagattct

SEQ ID NO: 2872954 - DNA, 25 bp, Homo sapien
gagagaatcaagctgctgagtggct

SEQ ID NO: 2872955 - DNA, 25 bp, Homo sapien
ttttctttgacaaaagcaggtggcc

SEQ ID NO: 2872956 - DNA, 25 bp, Homo sapien
gacactgtgtaagtcacctatgata

SEQ ID NO: 2872957 - DNA, 25 bp, Homo sapien
ggcattctcatctgattcatatatg

SEQ ID NO: 2872958 - DNA, 25 bp, Homo sapien
tcttccacgggatcctctgtgcaac

SEQ ID NO: 2872959 - DNA, 25 bp, Homo sapien
ttcatatatgaattcttccacggga

SEQ ID NO: 2872960 - DNA, 25 bp, Homo sapien
tcctggggcattctcatctgattca

SEQ ID NO: 2872961 - DNA, 25 bp, Homo sapien
gctgacattaggaaaccagacaaga

SEQ ID NO: 2872962 - DNA, 25 bp, Homo sapien
actgtgagcgtcagaccatgctgtg

SEQ ID NO: 2872963 - DNA, 25 bp, Homo sapien
gacaagaaacagtgctcgaggtaat

SEQ ID NO: 2872964 - DNA, 25 bp, Homo sapien
caagaaacagtgctcgaggtaatgg

SEQ ID NO: 2872965 - DNA, 25 bp, Homo sapien
aatgacttgctctgaggactcccca

SEQ ID NO: 2872966 - DNA, 25 bp, Homo sapien
ggaagctctgctgccacaggcttga

SEQ ID NO: 2872967 - DNA, 25 bp, Homo sapien
ttcgacaatggcaatgacttgctct

SEQ ID NO: 2872968 - DNA, 25 bp, Homo sapien
aatggcaatgacttgctctgaggac

SEQ ID NO: 2872969 - DNA, 25 bp, Homo sapien
tccagggagtctgctactgctcagg

SEQ ID NO: 2872970 - DNA, 25 bp, Homo sapien
actgggagagcccatcctggaagca

SEQ ID NO: 2872971 - DNA, 25 bp, Homo sapien
ccttaggtgcgtgtgctagtgaact

SEQ ID NO: 2872972 - DNA, 25 bp, Homo sapien
aagtcgctaaaactacagatgcccc

SEQ ID NO: 2872973 - DNA, 25 bp, Homo sapien
ctttctcctcagcctgtacctctgc

SEQ ID NO: 2872974 - DNA, 25 bp, Homo sapien
ttcctgcggagtctcctcaagaggg

SEQ ID NO: 2872975 - DNA, 25 bp, Homo sapien
cttcagttgttgtgtgtcactatca

SEQ ID NO: 2872976 - DNA, 25 bp, Homo sapien
ggtgttcctgcggagtctcctcaag

SEQ ID NO: 2872977 - DNA, 25 bp, Homo sapien
actatcatctctggtgttcctgcgg

SEQ ID NO: 2872978 - DNA, 25 bp, Homo sapien
tctactcgataagaagcaggctttc

SEQ ID NO: 2872979 - DNA, 25 bp, Homo sapien
gataacccctatttagcacgtgcta

SEQ ID NO: 2872980 - DNA, 25 bp, Homo sapien
tgactgcctcatcaatgtgaaatgg

SEQ ID NO: 2872981 - DNA, 25 bp, Homo sapien
tcttaaacagggcataccacccagg

SEQ ID NO: 2872982 - DNA, 25 bp, Homo sapien
tagttctccagcaaaagtagggagg

SEQ ID NO: 2872983 - DNA, 25 bp, Homo sapien
agcaggaagctcaaaccagggtagt

SEQ ID NO: 2872984 - DNA, 25 bp, Homo sapien
tttccagcaggaagctcaaaccagg

SEQ ID NO: 2872985 - DNA, 25 bp, Homo sapien
ggtagttctccagcaaaagtaggga

SEQ ID NO: 2872986 - DNA, 25 bp, Homo sapien
gagatcccagagtgcatactgtaga

SEQ ID NO: 2872987 - DNA, 25 bp, Homo sapien
ttccttagcaaatgggagatcccag

SEQ ID NO: 2872988 - DNA, 25 bp, Homo sapien
ctttctcaaagctaagatccttcct

SEQ ID NO: 2872989 - DNA, 25 bp, Homo sapien
tgtagagctgaatcgctgagtgtgt

SEQ ID NO: 2872990 - DNA, 25 bp, Homo sapien
caagaatccagcgagagaaaccgcc

SEQ ID NO: 2872991 - DNA, 25 bp, Homo sapien
aggtcccaagaatccagcgagagaa

SEQ ID NO: 2872992 - DNA, 25 bp, Homo sapien
cgagtgtgctgcctggatcaggtcc

SEQ ID NO: 2872993 - DNA, 25 bp, Homo sapien
gagagaaaccgccaattctggcggt

SEQ ID NO: 2872994 - DNA, 25 bp, Homo sapien
cttcaccttcaccacagcagcagag

SEQ ID NO: 2872995 - DNA, 25 bp, Homo sapien
tcaccacagcagcagaggctgcctc

SEQ ID NO: 2872996 - DNA, 25 bp, Homo sapien
cacagcagcagaggctgcctcccat

SEQ ID NO: 2872997 - DNA, 25 bp, Homo sapien
accacagcagcagaggctgcctccc

SEQ ID NO: 2872998 - DNA, 25 bp, Homo sapien
gaagacaggatacgcatcatcacag

SEQ ID NO: 2872999 - DNA, 25 bp, Homo sapien
aatgaacacaggaacacgtgccaca

SEQ ID NO: 2873000 - DNA, 25 bp, Homo sapien
gcagttccaacacagcggcagttga

SEQ ID NO: 2873001 - DNA, 25 bp, Homo sapien
tcagcgacaggtcatcagagaatgt

SEQ ID NO: 2873002 - DNA, 25 bp, Homo sapien
tataactcatagtaattgtataaaa

SEQ ID NO: 2873003 - DNA, 25 bp, Homo sapien
ataactcatagtaattgtataaaat

SEQ ID NO: 2873004 - DNA, 25 bp, Homo sapien
taactcatagtaattgtataaaata

SEQ ID NO: 2873005 - DNA, 25 bp, Homo sapien
aactcatagtaattgtataaaatat

SEQ ID NO: 2873006 - DNA, 25 bp, Homo sapien
ttggaaggcaactgacaaggtcccc

SEQ ID NO: 2873007 - DNA, 25 bp, Homo sapien
catgagaattagcacttggaaggca

SEQ ID NO: 2873008 - DNA, 25 bp, Homo sapien
tccaggattcaatgtgttcgactca

SEQ ID NO: 2873009 - DNA, 25 bp, Homo sapien
atagccattcttatctcgtcatgag

SEQ ID NO: 2873010 - DNA, 25 bp, Homo sapien
ccacagcaaggggttgggatcatcc

SEQ ID NO: 2873011 - DNA, 25 bp, Homo sapien
tcggctggaggacctacaggaaact

SEQ ID NO: 2873012 - DNA, 25 bp, Homo sapien
gcagtctcaggatattcagagcctt

SEQ ID NO: 2873013 - DNA, 25 bp, Homo sapien
tgactgagcggccaagggcgccaca

SEQ ID NO: 2873014 - DNA, 25 bp, Homo sapien
tccaatgaggacaacagtcaccgtc

SEQ ID NO: 2873015 - DNA, 25 bp, Homo sapien
caatgaggacaacagtcaccgtcat

SEQ ID NO: 2873016 - DNA, 25 bp, Homo sapien
ggtgtccaatgaggacaacagtcac

SEQ ID NO: 2873017 - DNA, 25 bp, Homo sapien
tgtccaatgaggacaacagtcaccg

SEQ ID NO: 2873018 - DNA, 25 bp, Homo sapien
gcaccggatgtcgtctttgccatcc

SEQ ID NO: 2873019 - DNA, 25 bp, Homo sapien
ctcggcgcaccggatgtcgtctttg

SEQ ID NO: 2873020 - DNA, 25 bp, Homo sapien
agcctcggcgcaccggatgtcgtct

SEQ ID NO: 2873021 - DNA, 25 bp, Homo sapien
ggcgcaccggatgtcgtctttgcca

SEQ ID NO: 2873022 - DNA, 25 bp, Homo sapien
caaccctcttacaactgggatacca

SEQ ID NO: 2873023 - DNA, 25 bp, Homo sapien
ctgggataccatcctgtgtcacttg

SEQ ID NO: 2873024 - DNA, 25 bp, Homo sapien
cgagcccggtccaagaccaggcttt

SEQ ID NO: 2873025 - DNA, 25 bp, Homo sapien
tcttacaactgggataccatcctgt

SEQ ID NO: 2873026 - DNA, 25 bp, Homo sapien
agccagtgatgtcagtggctgcatg

SEQ ID NO: 2873027 - DNA, 25 bp, Homo sapien
aagccagtgatgtcagtggctgcat

SEQ ID NO: 2873028 - DNA, 25 bp, Homo sapien
gaagccagtgatgtcagtggctgca

SEQ ID NO: 2873029 - DNA, 25 bp, Homo sapien
tgtctacttttgagccgcggcaatt

SEQ ID NO: 2873030 - DNA, 25 bp, Homo sapien
ctatcctggagaacgttttgtgagc

SEQ ID NO: 2873031 - DNA, 25 bp, Homo sapien
tataccatgtacctagagagtttcc

SEQ ID NO: 2873032 - DNA, 25 bp, Homo sapien
tacttttctgcctagagggtgtgtc

SEQ ID NO: 2873033 - DNA, 25 bp, Homo sapien
gacatattaacgttaagtctttcaa

SEQ ID NO: 2873034 - DNA, 25 bp, Homo sapien
tattgggttcgttgtatttctactg

SEQ ID NO: 2873035 - DNA, 25 bp, Homo sapien
tcaagattattttgcctatattggg

SEQ ID NO: 2873036 - DNA, 25 bp, Homo sapien
tttgggaaacactgacatattaacg

SEQ ID NO: 2873037 - DNA, 25 bp, Homo sapien
cagcgcacctggagttgttcgtcct

SEQ ID NO: 2873038 - DNA, 25 bp, Homo sapien
gcagcgcacctggagttgttcgtcc

SEQ ID NO: 2873039 - DNA, 25 bp, Homo sapien
aacactgctcatggtgtgtccagaa

SEQ ID NO: 2873040 - DNA, 25 bp, Homo sapien
ctcaacactgctcatggtgtgtcca

SEQ ID NO: 2873041 - DNA, 25 bp, Homo sapien
gacgtgggggctcgggtgtactggc

SEQ ID NO: 2873042 - DNA, 25 bp, Homo sapien
gcaggaaagcgggagcgcgtaattc

SEQ ID NO: 2873043 - DNA, 25 bp, Homo sapien
tactggccgggccgatgcaggaaag

SEQ ID NO: 2873044 - DNA, 25 bp, Homo sapien
aagcgggagcgcgtaattcttcggc

SEQ ID NO: 2873045 - DNA, 25 bp, Homo sapien
aatagggaaggaaacctcgcgcgct

SEQ ID NO: 2873046 - DNA, 25 bp, Homo sapien
ctcagaaccccttcgtctttgtcgt

SEQ ID NO: 2873047 - DNA, 25 bp, Homo sapien
ggaaggaaacctcgcgcgctatttc

SEQ ID NO: 2873048 - DNA, 25 bp, Homo sapien
aacctcgcgcgctatttctgtttcc

SEQ ID NO: 2873049 - DNA, 25 bp, Homo sapien
aagttaaaagagaattatcacctca

SEQ ID NO: 2873050 - DNA, 25 bp, Homo sapien
tctaggccttcaagatagaacattt

SEQ ID NO: 2873051 - DNA, 25 bp, Homo sapien
cacagaatcaggatatactggagga

SEQ ID NO: 2873052 - DNA, 25 bp, Homo sapien
cagtgtcaggccgttaaagcagagt

SEQ ID NO: 2873053 - DNA, 25 bp, Homo sapien
agaattacacatcgtgaccaagtag

SEQ ID NO: 2873054 - DNA, 25 bp, Homo sapien
cccaggtatgcaaggtcaattctac

SEQ ID NO: 2873055 - DNA, 25 bp, Homo sapien
tgatcccttcaatagaggccaaaaa

SEQ ID NO: 2873056 - DNA, 25 bp, Homo sapien
cattaatgcaattcaccacatcagt

SEQ ID NO: 2873057 - DNA, 25 bp, Homo sapien
tgtcaaaacgagatcataatagaag

SEQ ID NO: 2873058 - DNA, 25 bp, Homo sapien
tcaaaacgagatcataatagaagac

SEQ ID NO: 2873059 - DNA, 25 bp, Homo sapien
attgtcaaaacgagatcataataga

SEQ ID NO: 2873060 - DNA, 25 bp, Homo sapien
aaaacgagatcataatagaagacac

SEQ ID NO: 2873061 - DNA, 25 bp, Homo sapien
tcccctaactgataaggctggagca

SEQ ID NO: 2873062 - DNA, 25 bp, Homo sapien
ttttgaattgagtgacctccccgca

SEQ ID NO: 2873063 - DNA, 25 bp, Homo sapien
gatccattaggtctgccaaaaagca

SEQ ID NO: 2873064 - DNA, 25 bp, Homo sapien
tcgtcttagcgagtcagtgagcacc

SEQ ID NO: 2873065 - DNA, 25 bp, Homo sapien
tgggcccgtggtggctgtttctttc

SEQ ID NO: 2873066 - DNA, 25 bp, Homo sapien
tggcctgggcacgtatcagttccaa

SEQ ID NO: 2873067 - DNA, 25 bp, Homo sapien
tttccttccatcactgggatgtcca

SEQ ID NO: 2873068 - DNA, 25 bp, Homo sapien
cacattcaggtcacggggtttgagg

SEQ ID NO: 2873069 - DNA, 25 bp, Homo sapien
cagtaaacagctcccggtatacaat

SEQ ID NO: 2873070 - DNA, 25 bp, Homo sapien
tacaaaagtgaaccagagtgcaaat

SEQ ID NO: 2873071 - DNA, 25 bp, Homo sapien
taagatgtctgccatgctgctctct

SEQ ID NO: 2873072 - DNA, 25 bp, Homo sapien
tatacaatatggtaagatgtctgcc

SEQ ID NO: 2873073 - DNA, 25 bp, Homo sapien
tcgtacttctgaagggatctcggtc

SEQ ID NO: 2873074 - DNA, 25 bp, Homo sapien
cagaatcgtacttctgaagggatct

SEQ ID NO: 2873075 - DNA, 25 bp, Homo sapien
aaagaggctccacttatctgacaag

SEQ ID NO: 2873076 - DNA, 25 bp, Homo sapien
tacttctgaagggatctcggtccaa

SEQ ID NO: 2873077 - DNA, 25 bp, Homo sapien
ggtgctaggatttgggccaggtaag

SEQ ID NO: 2873078 - DNA, 25 bp, Homo sapien
gtgctaggatttgggccaggtaagg

SEQ ID NO: 2873079 - DNA, 25 bp, Homo sapien
ctgtggaagaaccagaagtgaacca

SEQ ID NO: 2873080 - DNA, 25 bp, Homo sapien
tgtggaagaaccagaagtgaaccag

SEQ ID NO: 2873081 - DNA, 25 bp, Homo sapien
tggaagaaccagaagtgaaccagcc

SEQ ID NO: 2873082 - DNA, 25 bp, Homo sapien
ggaagaaccagaagtgaaccagccc

SEQ ID NO: 2873083 - DNA, 25 bp, Homo sapien
cacactagctttcctgaagcacgca

SEQ ID NO: 2873084 - DNA, 25 bp, Homo sapien
ggcttaaatacaacctcatctgcca

SEQ ID NO: 2873085 - DNA, 25 bp, Homo sapien
ctgaagcacgcaggaactcggaagg

SEQ ID NO: 2873086 - DNA, 25 bp, Homo sapien
ttccttcgcccctagaaatgtctca

SEQ ID NO: 2873087 - DNA, 25 bp, Homo sapien
cctctgcttaggtgaagagtgcgga

SEQ ID NO: 2873088 - DNA, 25 bp, Homo sapien
gggcctctgcttaggtgaagagtgc

SEQ ID NO: 2873089 - DNA, 25 bp, Homo sapien
taggtgaagagtgcggagtggtgct

SEQ ID NO: 2873090 - DNA, 25 bp, Homo sapien
tgaagagtgcggagtggtgcttggg

SEQ ID NO: 2873091 - DNA, 25 bp, Homo sapien
tgctcctaccatgtacaaagccctg

SEQ ID NO: 2873092 - DNA, 25 bp, Homo sapien
actttaggcagaagacatctacagg

SEQ ID NO: 2873093 - DNA, 25 bp, Homo sapien
catctacaggtggaatgatttcgga

SEQ ID NO: 2873094 - DNA, 25 bp, Homo sapien
taagcagggcttaagctcttgtctc

SEQ ID NO: 2873095 - DNA, 25 bp, Homo sapien
cttgccctcatcataccctgttcag

SEQ ID NO: 2873096 - DNA, 25 bp, Homo sapien
ttgccctcatcataccctgttcaga

SEQ ID NO: 2873097 - DNA, 25 bp, Homo sapien
ccctcatcataccctgttcagaact

SEQ ID NO: 2873098 - DNA, 25 bp, Homo sapien
tgccctcatcataccctgttcagaa

SEQ ID NO: 2873099 - DNA, 25 bp, Homo sapien
gcctgtcgctcaaaatgctgaatgc

SEQ ID NO: 2873100 - DNA, 25 bp, Homo sapien
gtggagtgcttcggccactcgaagg

SEQ ID NO: 2873101 - DNA, 25 bp, Homo sapien
gagtgcttcggccactcgaaggtac

SEQ ID NO: 2873102 - DNA, 25 bp, Homo sapien
cctgtcgctcaaaatgctgaatgct

SEQ ID NO: 2873103 - DNA, 25 bp, Homo sapien
tcatgatgacatgggtagctttagc

SEQ ID NO: 2873104 - DNA, 25 bp, Homo sapien
ggagggtagactggcctctccttcc

SEQ ID NO: 2873105 - DNA, 25 bp, Homo sapien
ttgtgatcagagaattcatgatgac

SEQ ID NO: 2873106 - DNA, 25 bp, Homo sapien
cttgtccacactgtcaatggctgat

SEQ ID NO: 2873107 - DNA, 25 bp, Homo sapien
gtgttactgatgctgccggtcccaa

SEQ ID NO: 2873108 - DNA, 25 bp, Homo sapien
gaaacacctgataccttgctcaggc

SEQ ID NO: 2873109 - DNA, 25 bp, Homo sapien
caccttctgcaatcgaaacacctga

SEQ ID NO: 2873110 - DNA, 25 bp, Homo sapien
gctcccaaggttcaagtaatggtct

SEQ ID NO: 2873111 - DNA, 25 bp, Homo sapien
caggcaggacttagatcacatggac

SEQ ID NO: 2873112 - DNA, 25 bp, Homo sapien
taaaggataccagttttcaggcaaa

SEQ ID NO: 2873113 - DNA, 25 bp, Homo sapien
ccttatcaggaggacggagatgtca

SEQ ID NO: 2873114 - DNA, 25 bp, Homo sapien
tggcaaacatcctaaacaatcaggg

SEQ ID NO: 2873115 - DNA, 25 bp, Homo sapien
ggcttccaagggacgctgcccatgt

SEQ ID NO: 2873116 - DNA, 25 bp, Homo sapien
cggtatatcccgatgggcagggaca

SEQ ID NO: 2873117 - DNA, 25 bp, Homo sapien
tcgagggtatcatcatagctgactg

SEQ ID NO: 2873118 - DNA, 25 bp, Homo sapien
ttggcgaggtgctgatacttgcgct

SEQ ID NO: 2873119 - DNA, 25 bp, Homo sapien
cctagaggcgcactagcctcaagag

SEQ ID NO: 2873120 - DNA, 25 bp, Homo sapien
cttgcctagaggcgcactagcctca

SEQ ID NO: 2873121 - DNA, 25 bp, Homo sapien
tgcctagaggcgcactagcctcaag

SEQ ID NO: 2873122 - DNA, 25 bp, Homo sapien
gcctagaggcgcactagcctcaaga

SEQ ID NO: 2873123 - DNA, 25 bp, Homo sapien
catttaaaggtacttgaccacaact

SEQ ID NO: 2873124 - DNA, 25 bp, Homo sapien
taaaggtacttgaccacaacttcaa

SEQ ID NO: 2873125 - DNA, 25 bp, Homo sapien
catggatcaggaaacctgaagttcc

SEQ ID NO: 2873126 - DNA, 25 bp, Homo sapien
tttcatggatcaggaaacctgaagt

SEQ ID NO: 2873127 - DNA, 25 bp, Homo sapien
caggcacttctggttgtcttgaagc

SEQ ID NO: 2873128 - DNA, 25 bp, Homo sapien
gcacttctggttgtcttgaagccat

SEQ ID NO: 2873129 - DNA, 25 bp, Homo sapien
ggcacttctggttgtcttgaagcca

SEQ ID NO: 2873130 - DNA, 25 bp, Homo sapien
aggcacttctggttgtcttgaagcc

SEQ ID NO: 2873131 - DNA, 25 bp, Homo sapien
ttttctatacagaattccgagctga

SEQ ID NO: 2873132 - DNA, 25 bp, Homo sapien
atacagaattccgagctgagtccct

SEQ ID NO: 2873133 - DNA, 25 bp, Homo sapien
tctatacagaattccgagctgagtc

SEQ ID NO: 2873134 - DNA, 25 bp, Homo sapien
acagaattccgagctgagtccctgc

SEQ ID NO: 2873135 - DNA, 25 bp, Homo sapien
tggcaggcacacagaattgaacggc

SEQ ID NO: 2873136 - DNA, 25 bp, Homo sapien
gaaggataaagtcaaacgtctcacc

SEQ ID NO: 2873137 - DNA, 25 bp, Homo sapien
gcattttcttatggtgagcagcacc

SEQ ID NO: 2873138 - DNA, 25 bp, Homo sapien
tgtgagatgacagagctaagatgcc

SEQ ID NO: 2873139 - DNA, 25 bp, Homo sapien
gctgctgcaaagtagcaaagcttcc

SEQ ID NO: 2873140 - DNA, 25 bp, Homo sapien
gctgcaaagtagcaaagcttcccag

SEQ ID NO: 2873141 - DNA, 25 bp, Homo sapien
ctgctgcaaagtagcaaagcttccc

SEQ ID NO: 2873142 - DNA, 25 bp, Homo sapien
tgctgcaaagtagcaaagcttccca

SEQ ID NO: 2873143 - DNA, 25 bp, Homo sapien
ctgggctggtcccacgaagcggagg

SEQ ID NO: 2873144 - DNA, 25 bp, Homo sapien
ctcgggctgggctggtcccacgaag

SEQ ID NO: 2873145 - DNA, 25 bp, Homo sapien
gaggttgaggacaagccgcgggggc

SEQ ID NO: 2873146 - DNA, 25 bp, Homo sapien
gggctgggctggtcccacgaagcgg

SEQ ID NO: 2873147 - DNA, 25 bp, Homo sapien
caggcagcactgcagataaagcctc

SEQ ID NO: 2873148 - DNA, 25 bp, Homo sapien
cccaagccattgtgagagcggcggc

SEQ ID NO: 2873149 - DNA, 25 bp, Homo sapien
caagacccactaggtagcagtacca

SEQ ID NO: 2873150 - DNA, 25 bp, Homo sapien
gcggcggcgatttcgaaggtcccca

SEQ ID NO: 2873151 - DNA, 25 bp, Homo sapien
ggagttgttgtccacgatcgcgaga

SEQ ID NO: 2873152 - DNA, 25 bp, Homo sapien
ttgttgtccacgatcgcgagacccg

SEQ ID NO: 2873153 - DNA, 25 bp, Homo sapien
agttgttgtccacgatcgcgagacc

SEQ ID NO: 2873154 - DNA, 25 bp, Homo sapien
gctgggagttgttgtccacgatcgc

SEQ ID NO: 2873155 - DNA, 25 bp, Homo sapien
ggccgcggccgagagcggcgctggg

SEQ ID NO: 2873156 - DNA, 25 bp, Homo sapien
gaggagctggaacagcgcgaggtgc

SEQ ID NO: 2873157 - DNA, 25 bp, Homo sapien
aggagctggaacagcgcgaggtgct

SEQ ID NO: 2873158 - DNA, 25 bp, Homo sapien
ggagctggaacagcgcgaggtgctg

SEQ ID NO: 2873159 - DNA, 25 bp, Homo sapien
tggaggagctggaacagcgcgaggt

SEQ ID NO: 2873160 - DNA, 25 bp, Homo sapien
atcgcaccccaccattctagttttt

SEQ ID NO: 2873161 - DNA, 25 bp, Homo sapien
gcctgtctggcccaaactagtgtca

SEQ ID NO: 2873162 - DNA, 25 bp, Homo sapien
cactattgcctgtctggcccaaact

SEQ ID NO: 2873163 - DNA, 25 bp, Homo sapien
gtctggcccaaactagtgtcatctt

SEQ ID NO: 2873164 - DNA, 25 bp, Homo sapien
cagaaatactcctagagcctcaagg

SEQ ID NO: 2873165 - DNA, 25 bp, Homo sapien
tcttacctgtacagtgagatgctca

SEQ ID NO: 2873166 - DNA, 25 bp, Homo sapien
aagaaccatgcagaagccttcctgg

SEQ ID NO: 2873167 - DNA, 25 bp, Homo sapien
gaaacagtctggtgacgtcatgccc

SEQ ID NO: 2873168 - DNA, 25 bp, Homo sapien
caatctgtgtctgtcgtaggaatgg

SEQ ID NO: 2873169 - DNA, 25 bp, Homo sapien
gatctgatctgctgaccaaaggcaa

SEQ ID NO: 2873170 - DNA, 25 bp, Homo sapien
cagcatttaggagagtaggaactac

SEQ ID NO: 2873171 - DNA, 25 bp, Homo sapien
cagagatgccccataaaggaaacac

SEQ ID NO: 2873172 - DNA, 25 bp, Homo sapien
gagtgtcaccgctctctgatactgg

SEQ ID NO: 2873173 - DNA, 25 bp, Homo sapien
gcacactgagggcactgaagatcca

SEQ ID NO: 2873174 - DNA, 25 bp, Homo sapien
gcactgaagatccagagtgtcaccg

SEQ ID NO: 2873175 - DNA, 25 bp, Homo sapien
atactggtacagaatgtaggtgtcc

SEQ ID NO: 2873176 - DNA, 25 bp, Homo sapien
ctgttgaacctgtgtctggtcactc

SEQ ID NO: 2873177 - DNA, 25 bp, Homo sapien
gttgaacctgtgtctggtcactcac

SEQ ID NO: 2873178 - DNA, 25 bp, Homo sapien
tgttgaacctgtgtctggtcactca

SEQ ID NO: 2873179 - DNA, 25 bp, Homo sapien
tccattctctgacctattaccatcc

SEQ ID NO: 2873180 - DNA, 25 bp, Homo sapien
aagtaactcagatgaagcagtggct

SEQ ID NO: 2873181 - DNA, 25 bp, Homo sapien
atgaagcagtggcttctgattttcc

SEQ ID NO: 2873182 - DNA, 25 bp, Homo sapien
tggcactgggggcctttgttcttaa

SEQ ID NO: 2873183 - DNA, 25 bp, Homo sapien
aatatatttgctttattatgtacac

SEQ ID NO: 2873184 - DNA, 25 bp, Homo sapien
tttgctttattatgtacacactata

SEQ ID NO: 2873185 - DNA, 25 bp, Homo sapien
tatttgctttattatgtacacacta

SEQ ID NO: 2873186 - DNA, 25 bp, Homo sapien
tatatttgctttattatgtacacac

SEQ ID NO: 2873187 - DNA, 25 bp, Homo sapien
atcacccaccctgaaaacagcaggt

SEQ ID NO: 2873188 - DNA, 25 bp, Homo sapien
gcttttccgtgaacccccagatgaa

SEQ ID NO: 2873189 - DNA, 25 bp, Homo sapien
aatataaattggagcctctgagaac

SEQ ID NO: 2873190 - DNA, 25 bp, Homo sapien
ccagatgaatataaattggagcctc

SEQ ID NO: 2873191 - DNA, 25 bp, Homo sapien
gctccagcttcactggtccggggga

SEQ ID NO: 2873192 - DNA, 25 bp, Homo sapien
ttgccttacaccctggctccagctt

SEQ ID NO: 2873193 - DNA, 25 bp, Homo sapien
ccttgccttacaccctggctccagc

SEQ ID NO: 2873194 - DNA, 25 bp, Homo sapien
actggtccgggggacgcctcagcct

SEQ ID NO: 2873195 - DNA, 25 bp, Homo sapien
ctgcaaagaatcgaggaagtcttgc

SEQ ID NO: 2873196 - DNA, 25 bp, Homo sapien
tgcaaagaatcgaggaagtcttgcc

SEQ ID NO: 2873197 - DNA, 25 bp, Homo sapien
aaagaatcgaggaagtcttgccact

SEQ ID NO: 2873198 - DNA, 25 bp, Homo sapien
aattcttctcatcacgggccatggc

SEQ ID NO: 2873199 - DNA, 25 bp, Homo sapien
gtaaaagcgtttatagacgttgatc

SEQ ID NO: 2873200 - DNA, 25 bp, Homo sapien
gatcttactccgaatctgttttggg

SEQ ID NO: 2873201 - DNA, 25 bp, Homo sapien
taattcttctcatcacgggccatgg

SEQ ID NO: 2873202 - DNA, 25 bp, Homo sapien
gacaggcaaaggctcaaatctgaac

SEQ ID NO: 2873203 - DNA, 25 bp, Homo sapien
agaatcctgacctcaaaggctgtgg

SEQ ID NO: 2873204 - DNA, 25 bp, Homo sapien
aagccacttgctatctatccctgag

SEQ ID NO: 2873205 - DNA, 25 bp, Homo sapien
catcctgaattaggcaagccacttg

SEQ ID NO: 2873206 - DNA, 25 bp, Homo sapien
gaaacaggtgctgcgcaagcagatc

SEQ ID NO: 2873207 - DNA, 25 bp, Homo sapien
tggaaccaaggtcactcagtctatc

SEQ ID NO: 2873208 - DNA, 25 bp, Homo sapien
caagcagatcaagccgcgaatggtc

SEQ ID NO: 2873209 - DNA, 25 bp, Homo sapien
tctttgcactcggtttcaggaaaca

SEQ ID NO: 2873210 - DNA, 25 bp, Homo sapien
tccccgtggttctctaccatgtagc

SEQ ID NO: 2873211 - DNA, 25 bp, Homo sapien
ggttctctaccatgtagcgtacata

SEQ ID NO: 2873212 - DNA, 25 bp, Homo sapien
cttatagtcctccccgtggttctct

SEQ ID NO: 2873213 - DNA, 25 bp, Homo sapien
tagcgtacatagtcaatgaggtccc

SEQ ID NO: 2873214 - DNA, 25 bp, Homo sapien
gtcaaaattatctttgacacggttg

SEQ ID NO: 2873215 - DNA, 25 bp, Homo sapien
cctcatattgtatatagtcaaaatt

SEQ ID NO: 2873216 - DNA, 25 bp, Homo sapien
tatagtcaaaattatctttgacacg

SEQ ID NO: 2873217 - DNA, 25 bp, Homo sapien
agaggttaggtcctcatattgtata

SEQ ID NO: 2873218 - DNA, 25 bp, Homo sapien
tgacctaaaggaatatatggaccac

SEQ ID NO: 2873219 - DNA, 25 bp, Homo sapien
cacacagtaaggtcagggtttagtc

SEQ ID NO: 2873220 - DNA, 25 bp, Homo sapien
caaaatgaggacatcttagggccct

SEQ ID NO: 2873221 - DNA, 25 bp, Homo sapien
tgagaagccatacccatgccagaga

SEQ ID NO: 2873222 - DNA, 25 bp, Homo sapien
ttccgtacaagctctttaggcctct

SEQ ID NO: 2873223 - DNA, 25 bp, Homo sapien
tttaggcctctcctctatgtccacc

SEQ ID NO: 2873224 - DNA, 25 bp, Homo sapien
ctttaggcctctcctctatgtccac

SEQ ID NO: 2873225 - DNA, 25 bp, Homo sapien
agcacatagggcttccgtacaagct

SEQ ID NO: 2873226 - DNA, 25 bp, Homo sapien
tgagggaaagttatagactcctgct

SEQ ID NO: 2873227 - DNA, 25 bp, Homo sapien
gaatgggcagtaccacgttctgaca

SEQ ID NO: 2873228 - DNA, 25 bp, Homo sapien
tgtgacgaaggtcgtaaagagaccc

SEQ ID NO: 2873229 - DNA, 25 bp, Homo sapien
tctgacacctaggtcagtatggcgg

SEQ ID NO: 2873230 - DNA, 25 bp, Homo sapien
gagacccttgctcaacgtcagttga

SEQ ID NO: 2873231 - DNA, 25 bp, Homo sapien
gccgtaccgatttagcgtggtccca

SEQ ID NO: 2873232 - DNA, 25 bp, Homo sapien
tagcgtggtcccaggcatgtcggat

SEQ ID NO: 2873233 - DNA, 25 bp, Homo sapien
ccaggttctgccgtaccgatttagc

SEQ ID NO: 2873234 - DNA, 25 bp, Homo sapien
cttacggaggggcaccgccctgttg

SEQ ID NO: 2873235 - DNA, 25 bp, Homo sapien
gcaaagagagacatcgcggatccgt

SEQ ID NO: 2873236 - DNA, 25 bp, Homo sapien
catcgcggatccgtcatctcgcgga

SEQ ID NO: 2873237 - DNA, 25 bp, Homo sapien
gagacatcgcggatccgtcatctcg

SEQ ID NO: 2873238 - DNA, 25 bp, Homo sapien
gcggatccgtcatctcgcggaccgt

SEQ ID NO: 2873239 - DNA, 25 bp, Homo sapien
cattcgatccgcggcgctgccttcc

SEQ ID NO: 2873240 - DNA, 25 bp, Homo sapien
ccggttcagacgctttcggttgaca

SEQ ID NO: 2873241 - DNA, 25 bp, Homo sapien
cagacgctttcggttgacactgtaa

SEQ ID NO: 2873242 - DNA, 25 bp, Homo sapien
tgacactgtaaccaaacttctgcct

SEQ ID NO: 2873243 - DNA, 25 bp, Homo sapien
tctgcctccgggttttgcccttggc

SEQ ID NO: 2873244 - DNA, 25 bp, Homo sapien
ggctgagccccactgtttacaggaa

SEQ ID NO: 2873245 - DNA, 25 bp, Homo sapien
aaagttcgttcgcaagacccgcgag

SEQ ID NO: 2873246 - DNA, 25 bp, Homo sapien
ttccggaaggcgtgcacaaggcttt

SEQ ID NO: 2873247 - DNA, 25 bp, Homo sapien
gatgcaacgagcatttgcgcctgcg

SEQ ID NO: 2873248 - DNA, 25 bp, Homo sapien
tctggccttgaaagctccgcagaaa

SEQ ID NO: 2873249 - DNA, 25 bp, Homo sapien
aatgattccaaaacccagggagcaa

SEQ ID NO: 2873250 - DNA, 25 bp, Homo sapien
ctttgagaggcccatgtgtcgctgg

SEQ ID NO: 2873251 - DNA, 25 bp, Homo sapien
atgaagtctcgaccctaagcccagg

SEQ ID NO: 2873252 - DNA, 25 bp, Homo sapien
ttaggaggaagctaccaccaggaac

SEQ ID NO: 2873253 - DNA, 25 bp, Homo sapien
gacaccagttgtggcttccagagaa

SEQ ID NO: 2873254 - DNA, 25 bp, Homo sapien
gaaagttctaagcacaaaccgagcc

SEQ ID NO: 2873255 - DNA, 25 bp, Homo sapien
caaaagcattctgcgagaggctgtc

SEQ ID NO: 2873256 - DNA, 25 bp, Homo sapien
gcgcaggcgggacacatctttgcac

SEQ ID NO: 2873257 - DNA, 25 bp, Homo sapien
agcaccgagcgcaggcgggacacat

SEQ ID NO: 2873258 - DNA, 25 bp, Homo sapien
cttgctgctcttggggttgaagtca

SEQ ID NO: 2873259 - DNA, 25 bp, Homo sapien
tgaagtcacatagctgggccacctt

SEQ ID NO: 2873260 - DNA, 25 bp, Homo sapien
cctccttggattccttcacgaaagc

SEQ ID NO: 2873261 - DNA, 25 bp, Homo sapien
tggctgctggtagaatgctttgtca

SEQ ID NO: 2873262 - DNA, 25 bp, Homo sapien
catctggctgctggtagaatgcttt

SEQ ID NO: 2873263 - DNA, 25 bp, Homo sapien
gcatctggctgctggtagaatgctt

SEQ ID NO: 2873264 - DNA, 25 bp, Homo sapien
tggcgctggttccactcctccaggt

SEQ ID NO: 2873265 - DNA, 25 bp, Homo sapien
cttgttcactctggcgctggttcca

SEQ ID NO: 2873266 - DNA, 25 bp, Homo sapien
tcttctctacttgttcactctggcg

SEQ ID NO: 2873267 - DNA, 25 bp, Homo sapien
tctacttgttcactctggcgctggt

SEQ ID NO: 2873268 - DNA, 25 bp, Homo sapien
cattcctgttccgtgaccttagatg

SEQ ID NO: 2873269 - DNA, 25 bp, Homo sapien
ttctcccgccattcctgttccgtga

SEQ ID NO: 2873270 - DNA, 25 bp, Homo sapien
cgccattcctgttccgtgaccttag

SEQ ID NO: 2873271 - DNA, 25 bp, Homo sapien
ttcctgttccgtgaccttagatgca

SEQ ID NO: 2873272 - DNA, 25 bp, Homo sapien
ctcctctcgccacttgcggatgctc

SEQ ID NO: 2873273 - DNA, 25 bp, Homo sapien
tcctctgctcctctcgccacttgcg

SEQ ID NO: 2873274 - DNA, 25 bp, Homo sapien
ctctgctcctctcgccacttgcgga

SEQ ID NO: 2873275 - DNA, 25 bp, Homo sapien
tgctcctctcgccacttgcggatgc

SEQ ID NO: 2873276 - DNA, 25 bp, Homo sapien
gctgcgtagccatcagcaggaccgt

SEQ ID NO: 2873277 - DNA, 25 bp, Homo sapien
caatggctgcgtagccatcagcagg

SEQ ID NO: 2873278 - DNA, 25 bp, Homo sapien
ctgggcaatggctgcgtagccatca

SEQ ID NO: 2873279 - DNA, 25 bp, Homo sapien
tagccatcagcaggaccgttggcct

SEQ ID NO: 2873280 - DNA, 25 bp, Homo sapien
aaacacgcagcagtctatccagcca

SEQ ID NO: 2873281 - DNA, 25 bp, Homo sapien
aacacgcagcagtctatccagccag

SEQ ID NO: 2873282 - DNA, 25 bp, Homo sapien
gaaggctccctattatggctagaac

SEQ ID NO: 2873283 - DNA, 25 bp, Homo sapien
ttcatgcaagctcatcttgtatccc

SEQ ID NO: 2873284 - DNA, 25 bp, Homo sapien
tgtcctctattcgtgcactcttgcc

SEQ ID NO: 2873285 - DNA, 25 bp, Homo sapien
caagtgatctggtctctccctgggc

SEQ ID NO: 2873286 - DNA, 25 bp, Homo sapien
taaagggctttctttaatcttcgca

SEQ ID NO: 2873287 - DNA, 25 bp, Homo sapien
caagcctgccctaaattaagactcc

SEQ ID NO: 2873288 - DNA, 25 bp, Homo sapien
gctttctttaatcttcgcaacccta

SEQ ID NO: 2873289 - DNA, 25 bp, Homo sapien
tcttcgcaaccctacatggttggtt

SEQ ID NO: 2873290 - DNA, 25 bp, Homo sapien
caggtaggtaaactctatctccaaa

SEQ ID NO: 2873291 - DNA, 25 bp, Homo sapien
aattgctgggtgtgactcgccacat

SEQ ID NO: 2873292 - DNA, 25 bp, Homo sapien
tagtagctaatagggcccaaagtca

SEQ ID NO: 2873293 - DNA, 25 bp, Homo sapien
tgtgacgcatagtttgtgtgcctgc

SEQ ID NO: 2873294 - DNA, 25 bp, Homo sapien
tgtgcactgaccaaatgaatgaacg

SEQ ID NO: 2873295 - DNA, 25 bp, Homo sapien
gagcgctggacactccatcagaggg

SEQ ID NO: 2873296 - DNA, 25 bp, Homo sapien
cactggactcgcgacctttgagaag

SEQ ID NO: 2873297 - DNA, 25 bp, Homo sapien
tgaatgaacgaccaaacgtataaac

SEQ ID NO: 2873298 - DNA, 25 bp, Homo sapien
tgagctgctgattcctctaagaagc

SEQ ID NO: 2873299 - DNA, 25 bp, Homo sapien
aatagttgtgggcaggctcgtcctt

SEQ ID NO: 2873300 - DNA, 25 bp, Homo sapien
tccttaggctgtattggcaactggg

SEQ ID NO: 2873301 - DNA, 25 bp, Homo sapien
ccagcggctagagcaatgttctgac

SEQ ID NO: 2873302 - DNA, 25 bp, Homo sapien
tataggcacacactattgccccagc

SEQ ID NO: 2873303 - DNA, 25 bp, Homo sapien
aacacatctccattgactgtggtcc

SEQ ID NO: 2873304 - DNA, 25 bp, Homo sapien
gaaacacatctccattgactgtggt

SEQ ID NO: 2873305 - DNA, 25 bp, Homo sapien
acacatctccattgactgtggtccc

SEQ ID NO: 2873306 - DNA, 25 bp, Homo sapien
aaacacatctccattgactgtggtc

SEQ ID NO: 2873307 - DNA, 25 bp, Homo sapien
gccccgaagccctcgtcgttctcta

SEQ ID NO: 2873308 - DNA, 25 bp, Homo sapien
ccgaagccctcgtcgttctctatgc

SEQ ID NO: 2873309 - DNA, 25 bp, Homo sapien
gagaagaagccaaagtcatcagcca

SEQ ID NO: 2873310 - DNA, 25 bp, Homo sapien
cgctctccgacgacgagaagaagcc

SEQ ID NO: 2873311 - DNA, 25 bp, Homo sapien
cggagcctccgctgcgctcggctct

SEQ ID NO: 2873312 - DNA, 25 bp, Homo sapien
accgcacttcctctccgccaccggg

SEQ ID NO: 2873313 - DNA, 25 bp, Homo sapien
gcggccgcgacgctgtcacccgagc

SEQ ID NO: 2873314 - DNA, 25 bp, Homo sapien
acgggcttggcgcggaccgcacttc

SEQ ID NO: 2873315 - DNA, 25 bp, Homo sapien
aggactgggcgcagcgctgggcccg

SEQ ID NO: 2873316 - DNA, 25 bp, Homo sapien
cgcccagctgctcgcgtcgaggaca

SEQ ID NO: 2873317 - DNA, 25 bp, Homo sapien
tgggctaggcactgctcccgcccgg

SEQ ID NO: 2873318 - DNA, 25 bp, Homo sapien
ctgctcgcgtcgaggacacctgggc

SEQ ID NO: 2873319 - DNA, 25 bp, Homo sapien
tgcagacctggtaagacctgataag

SEQ ID NO: 2873320 - DNA, 25 bp, Homo sapien
caggacgtcgtggtttgtgcagacc

SEQ ID NO: 2873321 - DNA, 25 bp, Homo sapien
cagtggaaaagcgtgtaccagaccc

SEQ ID NO: 2873322 - DNA, 25 bp, Homo sapien
cctgataagtcctgaaagaagtagc

SEQ ID NO: 2873323 - DNA, 25 bp, Homo sapien
gctgaggtcagttccggcgggtgac

SEQ ID NO: 2873324 - DNA, 25 bp, Homo sapien
gagcgggatctaacccaggagcaga

SEQ ID NO: 2873325 - DNA, 25 bp, Homo sapien
tgcagtttcaggtagcagcgagtac

SEQ ID NO: 2873326 - DNA, 25 bp, Homo sapien
gcagcagatgcctccgtgggatggg

SEQ ID NO: 2873327 - DNA, 25 bp, Homo sapien
tgggtattgataaagattagtattt

SEQ ID NO: 2873328 - DNA, 25 bp, Homo sapien
agtaggaaagtagttcacacacttc

SEQ ID NO: 2873329 - DNA, 25 bp, Homo sapien
acacttctgcaatctcccgtataca

SEQ ID NO: 2873330 - DNA, 25 bp, Homo sapien
aagtttgaccaaagctgcagtagga

SEQ ID NO: 2873331 - DNA, 25 bp, Homo sapien
agtatttcgaaagctagtctgcaag

SEQ ID NO: 2873332 - DNA, 25 bp, Homo sapien
caggcttgggttatctggtccagag

SEQ ID NO: 2873333 - DNA, 25 bp, Homo sapien
ctgggatatgtagtctgggccttcc

SEQ ID NO: 2873334 - DNA, 25 bp, Homo sapien
acttaaatgttcaagggcatccagg

SEQ ID NO: 2873335 - DNA, 25 bp, Homo sapien
caaatatgggacagcctttaccctg

SEQ ID NO: 2873336 - DNA, 25 bp, Homo sapien
taaacccatgagtttatgccctggg

SEQ ID NO: 2873337 - DNA, 25 bp, Homo sapien
ggctccttagcccacaatagtgtaa

SEQ ID NO: 2873338 - DNA, 25 bp, Homo sapien
gatgttccttgaactgcccacaagt

SEQ ID NO: 2873339 - DNA, 25 bp, Homo sapien
gctgtcctttcttaccacctgtgca

SEQ ID NO: 2873340 - DNA, 25 bp, Homo sapien
ctgtctcagtggaagtgtattattg

SEQ ID NO: 2873341 - DNA, 25 bp, Homo sapien
tgttttaaggatagaaccagaggcc

SEQ ID NO: 2873342 - DNA, 25 bp, Homo sapien
cctgtgtaatctattggaaggcaca

SEQ ID NO: 2873343 - DNA, 25 bp, Homo sapien
ttgaagggagccaagacagaactcc

SEQ ID NO: 2873344 - DNA, 25 bp, Homo sapien
ttcaagaggattcaccggaagcaca

SEQ ID NO: 2873345 - DNA, 25 bp, Homo sapien
tgaatatttgtaccctcagtggagc

SEQ ID NO: 2873346 - DNA, 25 bp, Homo sapien
gaaaattgctaatggtgccaaggcc

SEQ ID NO: 2873347 - DNA, 25 bp, Homo sapien
tcagtacaactgttagggcggcctt

SEQ ID NO: 2873348 - DNA, 25 bp, Homo sapien
cgagtcttcaatatgagggtctctc

SEQ ID NO: 2873349 - DNA, 25 bp, Homo sapien
tcagccacgagtcttcaatatgagg

SEQ ID NO: 2873350 - DNA, 25 bp, Homo sapien
cagaggcccatggatgtgaatcagc

SEQ ID NO: 2873351 - DNA, 25 bp, Homo sapien
gcagcagaggcccatggatgtgaat

SEQ ID NO: 2873352 - DNA, 25 bp, Homo sapien
tcagctttctcaggttgaaattgag

SEQ ID NO: 2873353 - DNA, 25 bp, Homo sapien
aataatgattgcactacttggtcaa

SEQ ID NO: 2873354 - DNA, 25 bp, Homo sapien
cactacttggtcaagcagaactagc

SEQ ID NO: 2873355 - DNA, 25 bp, Homo sapien
catacatttattagtgaatatccct

SEQ ID NO: 2873356 - DNA, 25 bp, Homo sapien
ttattagtgaatatccctctgaaat

SEQ ID NO: 2873357 - DNA, 25 bp, Homo sapien
accaatgtgaatcccatggaatgga

SEQ ID NO: 2873358 - DNA, 25 bp, Homo sapien
catgcctaggccagaagttggtaaa

SEQ ID NO: 2873359 - DNA, 25 bp, Homo sapien
tgttaaatgctacaaaccaatgtga

SEQ ID NO: 2873360 - DNA, 25 bp, Homo sapien
catggcatctatagcaaggtcggca

SEQ ID NO: 2873361 - DNA, 25 bp, Homo sapien
tgtgagcctgtttccgcctgcccca

SEQ ID NO: 2873362 - DNA, 25 bp, Homo sapien
ttcccccccaatagctgcttgttgg

SEQ ID NO: 2873363 - DNA, 25 bp, Homo sapien
gctgcagccgacacacaatctgtga

SEQ ID NO: 2873364 - DNA, 25 bp, Homo sapien
tgcttgttggaatcactgctgcagc

SEQ ID NO: 2873365 - DNA, 25 bp, Homo sapien
aaacacgtgggttttcaacactgct

SEQ ID NO: 2873366 - DNA, 25 bp, Homo sapien
cgtgggttttcaacactgctataaa

SEQ ID NO: 2873367 - DNA, 25 bp, Homo sapien
tctgtgtaaaacacgtgggttttca

SEQ ID NO: 2873368 - DNA, 25 bp, Homo sapien
actgctataaatatagaaacgtcac

SEQ ID NO: 2873369 - DNA, 25 bp, Homo sapien
gagcatgagaccttctgacccagga

SEQ ID NO: 2873370 - DNA, 25 bp, Homo sapien
tcaggaaatggctcgtgacaccgtc

SEQ ID NO: 2873371 - DNA, 25 bp, Homo sapien
ccccagctgggtataggacaagaaa

SEQ ID NO: 2873372 - DNA, 25 bp, Homo sapien
cacacgcagttcgttcagggcagca

SEQ ID NO: 2873373 - DNA, 25 bp, Homo sapien
tgggcacctcggaggcgtcggcccg

SEQ ID NO: 2873374 - DNA, 25 bp, Homo sapien
aggcgtcggcccggcagatgggaca

SEQ ID NO: 2873375 - DNA, 25 bp, Homo sapien
ctccctgggcacctcggaggcgtcg

SEQ ID NO: 2873376 - DNA, 25 bp, Homo sapien
ggcagatgggacacgtccggttggc

SEQ ID NO: 2873377 - DNA, 25 bp, Homo sapien
gcatgaggaatacccaggagcagac

SEQ ID NO: 2873378 - DNA, 25 bp, Homo sapien
cagaacttccgagatgatgacaagg

SEQ ID NO: 2873379 - DNA, 25 bp, Homo sapien
gacttggtccgctggagccagaact

SEQ ID NO: 2873380 - DNA, 25 bp, Homo sapien
tgtgggaacatgcacgtcaggcgtt

SEQ ID NO: 2873381 - DNA, 25 bp, Homo sapien
gaagtcactgaagcagaccacacac

SEQ ID NO: 2873382 - DNA, 25 bp, Homo sapien
aactcatggttgcaggggaggactc

SEQ ID NO: 2873383 - DNA, 25 bp, Homo sapien
ggagcagctgccgcgcctcgaagtc

SEQ ID NO: 2873384 - DNA, 25 bp, Homo sapien
ttggtgtggaactcatggttgcagg

SEQ ID NO: 2873385 - DNA, 25 bp, Homo sapien
actgatggctgtccgggttaaagcg

SEQ ID NO: 2873386 - DNA, 25 bp, Homo sapien
agcgtctgctccgactgatggctgt

SEQ ID NO: 2873387 - DNA, 25 bp, Homo sapien
ttaaagcggtacgacgggagctgct

SEQ ID NO: 2873388 - DNA, 25 bp, Homo sapien
aaagcggtacgacgggagctgctct

SEQ ID NO: 2873389 - DNA, 25 bp, Homo sapien
tgcatgcgggcaggagacggggtca

SEQ ID NO: 2873390 - DNA, 25 bp, Homo sapien
aggagacggggtcagcggcgcccag

SEQ ID NO: 2873391 - DNA, 25 bp, Homo sapien
gcgggcaggagacggggtcagcggc

SEQ ID NO: 2873392 - DNA, 25 bp, Homo sapien
gagacggggtcagcggcgcccaggg

SEQ ID NO: 2873393 - DNA, 25 bp, Homo sapien
gatggtgggccccattgctgttggt

SEQ ID NO: 2873394 - DNA, 25 bp, Homo sapien
ctgatggtgggccccattgctgttg

SEQ ID NO: 2873395 - DNA, 25 bp, Homo sapien
tctccacatcatccacgtccaggtc

SEQ ID NO: 2873396 - DNA, 25 bp, Homo sapien
atctccacatcatccacgtccaggt

SEQ ID NO: 2873397 - DNA, 25 bp, Homo sapien
actggaggttccaggagaacagggc

SEQ ID NO: 2873398 - DNA, 25 bp, Homo sapien
tctccgtggcatcatgtgagaatat

SEQ ID NO: 2873399 - DNA, 25 bp, Homo sapien
ctccgtggcatcatgtgagaatatg

SEQ ID NO: 2873400 - DNA, 25 bp, Homo sapien
ctgggtgctcagtctccgtggcatc

SEQ ID NO: 2873401 - DNA, 25 bp, Homo sapien
tccgtggcatcatgtgagaatatgg

SEQ ID NO: 2873402 - DNA, 25 bp, Homo sapien
cagaggtggagtaggtgaagctgcc

SEQ ID NO: 2873403 - DNA, 25 bp, Homo sapien
gtccacgtcgttgtcgagccgctgg

SEQ ID NO: 2873404 - DNA, 25 bp, Homo sapien
agctcctggtgcagcggatcgtggg

SEQ ID NO: 2873405 - DNA, 25 bp, Homo sapien
tggtccccacgcaggtccacgtcgt

SEQ ID NO: 2873406 - DNA, 25 bp, Homo sapien
gggtaggcctgatagggcacaggca

SEQ ID NO: 2873407 - DNA, 25 bp, Homo sapien
ggggtaggcctgatagggcacaggc

SEQ ID NO: 2873408 - DNA, 25 bp, Homo sapien
gggggtaggcctgatagggcacagg

SEQ ID NO: 2873409 - DNA, 25 bp, Homo sapien
gggaagccttgggtcgtcactgtgg

SEQ ID NO: 2873410 - DNA, 25 bp, Homo sapien
accgtgtaggacagagggacaggtc

SEQ ID NO: 2873411 - DNA, 25 bp, Homo sapien
agggggtaatgctgcccactgaaca

SEQ ID NO: 2873412 - DNA, 25 bp, Homo sapien
cactgtggtgaccgtgtaggacaga

SEQ ID NO: 2873413 - DNA, 25 bp, Homo sapien
ctctgcctctcagactggctcacag

SEQ ID NO: 2873414 - DNA, 25 bp, Homo sapien
gcacaggggatggggttctgcctac

SEQ ID NO: 2873415 - DNA, 25 bp, Homo sapien
ggcacaggggatggggttctgccta

SEQ ID NO: 2873416 - DNA, 25 bp, Homo sapien
ctctcagactggctcacagggccag

SEQ ID NO: 2873417 - DNA, 25 bp, Homo sapien
ctcccgccggcaggagccgaggctc

SEQ ID NO: 2873418 - DNA, 25 bp, Homo sapien
ctgctcgtggagatcaaccatgaac

SEQ ID NO: 2873419 - DNA, 25 bp, Homo sapien
agatcaaccatgaacgggctctgct

SEQ ID NO: 2873420 - DNA, 25 bp, Homo sapien
tcgtggagatcaaccatgaacgggc

SEQ ID NO: 2873421 - DNA, 25 bp, Homo sapien
gggagggtaagcgctcatcccgggc

SEQ ID NO: 2873422 - DNA, 25 bp, Homo sapien
tgctgggagggtaagcgctcatccc

SEQ ID NO: 2873423 - DNA, 25 bp, Homo sapien
ctgctgggagggtaagcgctcatcc

SEQ ID NO: 2873424 - DNA, 25 bp, Homo sapien
agggtaagcgctcatcccgggcagg

SEQ ID NO: 2873425 - DNA, 25 bp, Homo sapien
agaggaggccccgataggactgagg

SEQ ID NO: 2873426 - DNA, 25 bp, Homo sapien
aagccagggtgactccccccatggg

SEQ ID NO: 2873427 - DNA, 25 bp, Homo sapien
agaagccagggtgactccccccatg

SEQ ID NO: 2873428 - DNA, 25 bp, Homo sapien
aggggggccactcgtgcacagagca

SEQ ID NO: 2873429 - DNA, 25 bp, Homo sapien
cggagggtggccacctagtcactgc

SEQ ID NO: 2873430 - DNA, 25 bp, Homo sapien
ggtggccacctagtcactgccagag

SEQ ID NO: 2873431 - DNA, 25 bp, Homo sapien
aggtcccgcagagaatcgccgctgg

SEQ ID NO: 2873432 - DNA, 25 bp, Homo sapien
gtgctgccaggtcccgcagagaatc

SEQ ID NO: 2873433 - DNA, 25 bp, Homo sapien
tggaggggctgggccgggactcaca

SEQ ID NO: 2873434 - DNA, 25 bp, Homo sapien
gaggggctgggccgggactcacaac

SEQ ID NO: 2873435 - DNA, 25 bp, Homo sapien
ggtggaggggctgggccgggactca

SEQ ID NO: 2873436 - DNA, 25 bp, Homo sapien
ggaggggctgggccgggactcacaa

SEQ ID NO: 2873437 - DNA, 25 bp, Homo sapien
cagtgggttcctggtaggctcctgc

SEQ ID NO: 2873438 - DNA, 25 bp, Homo sapien
gggctacaacttggcctccaggcgg

SEQ ID NO: 2873439 - DNA, 25 bp, Homo sapien
aagtccaggcgcttgtgccatgagg

SEQ ID NO: 2873440 - DNA, 25 bp, Homo sapien
ggaccaatggtgttcagccgtgccc

SEQ ID NO: 2873441 - DNA, 25 bp, Homo sapien
ccagccgtgggtaagaatgtcagcc

SEQ ID NO: 2873442 - DNA, 25 bp, Homo sapien
tattagcgaatacgacacgctgacc

SEQ ID NO: 2873443 - DNA, 25 bp, Homo sapien
tacctcagctggtaagagtggatcc

SEQ ID NO: 2873444 - DNA, 25 bp, Homo sapien
gagattcttgcctacagaccgtggg

SEQ ID NO: 2873445 - DNA, 25 bp, Homo sapien
gcagagcttcccaacgtgtggtgcc

SEQ ID NO: 2873446 - DNA, 25 bp, Homo sapien
gaccaccagactaggagagaagact

SEQ ID NO: 2873447 - DNA, 25 bp, Homo sapien
tctgtttgcaggaagagacactccc

SEQ ID NO: 2873448 - DNA, 25 bp, Homo sapien
aagactccctagtgaccttggtcaa

SEQ ID NO: 2873449 - DNA, 25 bp, Homo sapien
ccgcagtctggaccgcccgtgatta

SEQ ID NO: 2873450 - DNA, 25 bp, Homo sapien
cctctccaaccgcagcgctcagctg

SEQ ID NO: 2873451 - DNA, 25 bp, Homo sapien
ctggggtctcgctgcccgcagtctg

SEQ ID NO: 2873452 - DNA, 25 bp, Homo sapien
tgattaacccctacggagccaccta

SEQ ID NO: 2873453 - DNA, 25 bp, Homo sapien
ggccacacgttgactcctttgttcc

SEQ ID NO: 2873454 - DNA, 25 bp, Homo sapien
acacgttgactcctttgttcccgat

SEQ ID NO: 2873455 - DNA, 25 bp, Homo sapien
tggccgcccggccacacgttgactc

SEQ ID NO: 2873456 - DNA, 25 bp, Homo sapien
ccggccacacgttgactcctttgtt

SEQ ID NO: 2873457 - DNA, 25 bp, Homo sapien
gattcacaacattcgaagcggcggg

SEQ ID NO: 2873458 - DNA, 25 bp, Homo sapien
tgtctggatcctttaagagctcccg

SEQ ID NO: 2873459 - DNA, 25 bp, Homo sapien
tttaagaactgtccgcggcggcagc

SEQ ID NO: 2873460 - DNA, 25 bp, Homo sapien
ggcggcagcggaatgtaacaaaccc

SEQ ID NO: 2873461 - DNA, 25 bp, Homo sapien
cgcacttaaagggaccgcagccata

SEQ ID NO: 2873462 - DNA, 25 bp, Homo sapien
cttcgcacttaaagggaccgcagcc

SEQ ID NO: 2873463 - DNA, 25 bp, Homo sapien
catagtcaaaagcaaggggcggggc

SEQ ID NO: 2873464 - DNA, 25 bp, Homo sapien
agccatagtcaaaagcaaggggcgg

SEQ ID NO: 2873465 - DNA, 25 bp, Homo sapien
gctggctctaacaaccctgggccgg

SEQ ID NO: 2873466 - DNA, 25 bp, Homo sapien
cgagagcggcccaagtggttatgct

SEQ ID NO: 2873467 - DNA, 25 bp, Homo sapien
tggttatgctggctctaacaaccct

SEQ ID NO: 2873468 - DNA, 25 bp, Homo sapien
tgcaatgggtctgacctctgacggg

SEQ ID NO: 2873469 - DNA, 25 bp, Homo sapien
gcaatgatcgtatcactgtgcaaca

SEQ ID NO: 2873470 - DNA, 25 bp, Homo sapien
gactgaagatggaactgagccggct

SEQ ID NO: 2873471 - DNA, 25 bp, Homo sapien
gcaatgtttagaccagcaatgatcg

SEQ ID NO: 2873472 - DNA, 25 bp, Homo sapien
cggctgtcggcagatctctaagcaa

SEQ ID NO: 2873473 - DNA, 25 bp, Homo sapien
gccggcgcgtcgctcccgctgcagc

SEQ ID NO: 2873474 - DNA, 25 bp, Homo sapien
cgcggcccctctccggcccggtgca

SEQ ID NO: 2873475 - DNA, 25 bp, Homo sapien
tgcagcccaggctcgcggtgcggct

SEQ ID NO: 2873476 - DNA, 25 bp, Homo sapien
ggcggccggcgcgtcgctcccgctg

SEQ ID NO: 2873477 - DNA, 25 bp, Homo sapien
ggttcagcctttctgaggcaaccta

SEQ ID NO: 2873478 - DNA, 25 bp, Homo sapien
tgccctacagcacagaaatcctggc

SEQ ID NO: 2873479 - DNA, 25 bp, Homo sapien
cagcacctgaagtttgacctgctct

SEQ ID NO: 2873480 - DNA, 25 bp, Homo sapien
agcacctgaagtttgacctgctctg

SEQ ID NO: 2873481 - DNA, 25 bp, Homo sapien
tcaagacaagtattttatggcctca

SEQ ID NO: 2873482 - DNA, 25 bp, Homo sapien
tatggcctcaattcaggcgtagatt

SEQ ID NO: 2873483 - DNA, 25 bp, Homo sapien
ttaaaatgcctgactatagcaactg

SEQ ID NO: 2873484 - DNA, 25 bp, Homo sapien
tatgctggtggcgtataaattttgt

SEQ ID NO: 2873485 - DNA, 25 bp, Homo sapien
agtagacttcatctctaaggacggg

SEQ ID NO: 2873486 - DNA, 25 bp, Homo sapien
tcccaggccagagacgatgattcag

SEQ ID NO: 2873487 - DNA, 25 bp, Homo sapien
agcattcagtaactgcgggcggccc

SEQ ID NO: 2873488 - DNA, 25 bp, Homo sapien
gattcagggaacaatggcgtcatcc

SEQ ID NO: 2873489 - DNA, 25 bp, Homo sapien
tgtgtgttgcacaagggcactctgc

SEQ ID NO: 2873490 - DNA, 25 bp, Homo sapien
tgcttgctaagctattcacccagcc

SEQ ID NO: 2873491 - DNA, 25 bp, Homo sapien
cacgacgttcttgcatgtccccaga

SEQ ID NO: 2873492 - DNA, 25 bp, Homo sapien
gagatgctacctactcagccaacag

SEQ ID NO: 2873493 - DNA, 25 bp, Homo sapien
ctctggaggagacgcttaaggccca

SEQ ID NO: 2873494 - DNA, 25 bp, Homo sapien
cactttgaaagccacctctggagga

SEQ ID NO: 2873495 - DNA, 25 bp, Homo sapien
gatcaagtgttcatagactggcctg

SEQ ID NO: 2873496 - DNA, 25 bp, Homo sapien
tataacacggtacagggaatctggc

SEQ ID NO: 2873497 - DNA, 25 bp, Homo sapien
gtttgtagccaaaaactgcggctgg

SEQ ID NO: 2873498 - DNA, 25 bp, Homo sapien
gagacctcacattcagagacgtgcc

SEQ ID NO: 2873499 - DNA, 25 bp, Homo sapien
cgtggagacgctcacactcgttcta

SEQ ID NO: 2873500 - DNA, 25 bp, Homo sapien
tctgggaatctcaaacctgtgactc

SEQ ID NO: 2873501 - DNA, 25 bp, Homo sapien
ggccgggttcgtggcctcgtggcca

SEQ ID NO: 2873502 - DNA, 25 bp, Homo sapien
cacgagggagcttggtagaaggggt

SEQ ID NO: 2873503 - DNA, 25 bp, Homo sapien
ggctggccgggttcgtggcctcgtg

SEQ ID NO: 2873504 - DNA, 25 bp, Homo sapien
ttcttctgtatttgtgatgggaggg

SEQ ID NO: 2873505 - DNA, 25 bp, Homo sapien
tagaggctgcacaacccctcggagg

SEQ ID NO: 2873506 - DNA, 25 bp, Homo sapien
gcctgtgatcaagaagggagcctga

SEQ ID NO: 2873507 - DNA, 25 bp, Homo sapien
ccctcggaggcctgtggcacgcaga

SEQ ID NO: 2873508 - DNA, 25 bp, Homo sapien
tgagaaggtcggaaactcgggcgta

SEQ ID NO: 2873509 - DNA, 25 bp, Homo sapien
tgcagcagcgcgcggaacaggccgg

SEQ ID NO: 2873510 - DNA, 25 bp, Homo sapien
tcggccgtgggtcccgcccgcgagc

SEQ ID NO: 2873511 - DNA, 25 bp, Homo sapien
gcagcagcgcgcggaacaggccggg

SEQ ID NO: 2873512 - DNA, 25 bp, Homo sapien
tcactcggccgtgggtcccgcccgc

SEQ ID NO: 2873513 - DNA, 25 bp, Homo sapien
gatctgtcgctccagatgcttctgg

SEQ ID NO: 2873514 - DNA, 25 bp, Homo sapien
gggcgcggtgcgcaccgagcccgaa

SEQ ID NO: 2873515 - DNA, 25 bp, Homo sapien
ggcggccgtgctcctcgatctgtcg

SEQ ID NO: 2873516 - DNA, 25 bp, Homo sapien
cttggcggccgtgctcctcgatctg

SEQ ID NO: 2873517 - DNA, 25 bp, Homo sapien
tcccagctcacgtctcgcacgggct

SEQ ID NO: 2873518 - DNA, 25 bp, Homo sapien
ccacgtcatgcccttctcgtcccag

SEQ ID NO: 2873519 - DNA, 25 bp, Homo sapien
gcggcgcggcggcttgaggtgtcat

SEQ ID NO: 2873520 - DNA, 25 bp, Homo sapien
agtggccacggagcgcgtctcggcg

SEQ ID NO: 2873521 - DNA, 25 bp, Homo sapien
ggctcacggccactgagacgcaggc

SEQ ID NO: 2873522 - DNA, 25 bp, Homo sapien
tttctggccgagactggaggcctcg

SEQ ID NO: 2873523 - DNA, 25 bp, Homo sapien
ccagcgccgtcctgcggagacatgg

SEQ ID NO: 2873524 - DNA, 25 bp, Homo sapien
cttggtgaagttgtcgcgagtccgc

SEQ ID NO: 2873525 - DNA, 25 bp, Homo sapien
ggcaccctcgggagaccgggctgag

SEQ ID NO: 2873526 - DNA, 25 bp, Homo sapien
agccgagggctttgcggtctaactg

SEQ ID NO: 2873527 - DNA, 25 bp, Homo sapien
tttgcggtctaactgcctggaggag

SEQ ID NO: 2873528 - DNA, 25 bp, Homo sapien
gggagaccgggctgagccgagggct

SEQ ID NO: 2873529 - DNA, 25 bp, Homo sapien
tcctatggaagtggaatcggcctgc

SEQ ID NO: 2873530 - DNA, 25 bp, Homo sapien
taggagcgaccttttctgaggacac

SEQ ID NO: 2873531 - DNA, 25 bp, Homo sapien
cactgtatacgtcttgctggagcac

SEQ ID NO: 2873532 - DNA, 25 bp, Homo sapien
gatccaccttgcctgaagacatggg

SEQ ID NO: 2873533 - DNA, 25 bp, Homo sapien
ttctgtgtctagactccatgcctgg

SEQ ID NO: 2873534 - DNA, 25 bp, Homo sapien
ggggcttctgtgtctagactccatg

SEQ ID NO: 2873535 - DNA, 25 bp, Homo sapien
tctgtgtctagactccatgcctggg

SEQ ID NO: 2873536 - DNA, 25 bp, Homo sapien
ggcttctgtgtctagactccatgcc

SEQ ID NO: 2873537 - DNA, 25 bp, Homo sapien
agctggagccaggccgggtcttcag

SEQ ID NO: 2873538 - DNA, 25 bp, Homo sapien
ctggagccaggccgggtcttcagca

SEQ ID NO: 2873539 - DNA, 25 bp, Homo sapien
ccaggccgggtcttcagcagtgtcc

SEQ ID NO: 2873540 - DNA, 25 bp, Homo sapien
gagccaggccgggtcttcagcagtg

SEQ ID NO: 2873541 - DNA, 25 bp, Homo sapien
ctcatgaccacgcctgcacccaagg

SEQ ID NO: 2873542 - DNA, 25 bp, Homo sapien
atgaccacgcctgcacccaaggctg

SEQ ID NO: 2873543 - DNA, 25 bp, Homo sapien
tgccctcatgaccacgcctgcaccc

SEQ ID NO: 2873544 - DNA, 25 bp, Homo sapien
ctgccctcatgaccacgcctgcacc

SEQ ID NO: 2873545 - DNA, 25 bp, Homo sapien
ctgcttgtggatgtatgtaccagct

SEQ ID NO: 2873546 - DNA, 25 bp, Homo sapien
tcctgtgttctgctcaagaagagct

SEQ ID NO: 2873547 - DNA, 25 bp, Homo sapien
ggatgtatgtaccagcttgggccac

SEQ ID NO: 2873548 - DNA, 25 bp, Homo sapien
agagcttgttgtgcgtatgtacacc

SEQ ID NO: 2873549 - DNA, 25 bp, Homo sapien
agccgcgcgcacacacccgggctca

SEQ ID NO: 2873550 - DNA, 25 bp, Homo sapien
ccccagccgcgcgcacacacccggg

SEQ ID NO: 2873551 - DNA, 25 bp, Homo sapien
gccgcgcgcacacacccgggctcat

SEQ ID NO: 2873552 - DNA, 25 bp, Homo sapien
ccagccgcgcgcacacacccgggct

SEQ ID NO: 2873553 - DNA, 25 bp, Homo sapien
ggctggcgggaggacccgcagactc

SEQ ID NO: 2873554 - DNA, 25 bp, Homo sapien
ctccggctcctgggcgagatgcgct

SEQ ID NO: 2873555 - DNA, 25 bp, Homo sapien
gggaggacccgcagactcggcgccg

SEQ ID NO: 2873556 - DNA, 25 bp, Homo sapien
ctcctgggcgagatgcgctccggct

SEQ ID NO: 2873557 - DNA, 25 bp, Homo sapien
tgaggtcgcactgaggtttagaata

SEQ ID NO: 2873558 - DNA, 25 bp, Homo sapien
caggcttgcggcacgaattgaggtc

SEQ ID NO: 2873559 - DNA, 25 bp, Homo sapien
tttagaatagggcagggtcttgcgc

SEQ ID NO: 2873560 - DNA, 25 bp, Homo sapien
ctctgcggcatagccacgccaagag

SEQ ID NO: 2873561 - DNA, 25 bp, Homo sapien
tgggacctggaagactcgccgccac

SEQ ID NO: 2873562 - DNA, 25 bp, Homo sapien
ggacctggaagactcgccgccacgt

SEQ ID NO: 2873563 - DNA, 25 bp, Homo sapien
agcccagccctgccggtgcggctct

SEQ ID NO: 2873564 - DNA, 25 bp, Homo sapien
acctggaagactcgccgccacgtgt

SEQ ID NO: 2873565 - DNA, 25 bp, Homo sapien
gccgtcgctcggatcttcgtttaaa

SEQ ID NO: 2873566 - DNA, 25 bp, Homo sapien
gatggacagacactaacacaggctc

SEQ ID NO: 2873567 - DNA, 25 bp, Homo sapien
aaacacatagaacatgctacatccg

SEQ ID NO: 2873568 - DNA, 25 bp, Homo sapien
tacatccgcgcagacgctggatggg

SEQ ID NO: 2873569 - DNA, 25 bp, Homo sapien
ctggctcatactcctgatattcctc

SEQ ID NO: 2873570 - DNA, 25 bp, Homo sapien
cctcataactctccccttctggctc

SEQ ID NO: 2873571 - DNA, 25 bp, Homo sapien
ctcataactctccccttctggctcc

SEQ ID NO: 2873572 - DNA, 25 bp, Homo sapien
tcataactctccccttctggctcca

SEQ ID NO: 2873573 - DNA, 25 bp, Homo sapien
gggctcaatcagtggttcttcagca

SEQ ID NO: 2873574 - DNA, 25 bp, Homo sapien
cagaccagcgggcatgcatgtgggc

SEQ ID NO: 2873575 - DNA, 25 bp, Homo sapien
ggcgggctgccagacacatggccag

SEQ ID NO: 2873576 - DNA, 25 bp, Homo sapien
tgcccagacaggcgcagaccagcgg

SEQ ID NO: 2873577 - DNA, 25 bp, Homo sapien
gggcatgcatgtgggcgggctgcca

SEQ ID NO: 2873578 - DNA, 25 bp, Homo sapien
cagtagggaattcctccctcttcac

SEQ ID NO: 2873579 - DNA, 25 bp, Homo sapien
cttcagatcagtagggaattcctcc

SEQ ID NO: 2873580 - DNA, 25 bp, Homo sapien
cagatcagtagggaattcctccctc

SEQ ID NO: 2873581 - DNA, 25 bp, Homo sapien
gatcagtagggaattcctccctctt

SEQ ID NO: 2873582 - DNA, 25 bp, Homo sapien
gcctgttccttggttttttcagcca

SEQ ID NO: 2873583 - DNA, 25 bp, Homo sapien
tgccccagagaacacagctcctccc

SEQ ID NO: 2873584 - DNA, 25 bp, Homo sapien
tcctgtggctgctgcgatgttccct

SEQ ID NO: 2873585 - DNA, 25 bp, Homo sapien
cagatgtgaggcctgttccttggtt

SEQ ID NO: 2873586 - DNA, 25 bp, Homo sapien
gtaccacaccttctcgggtcttgct

SEQ ID NO: 2873587 - DNA, 25 bp, Homo sapien
accacaccttctcgggtcttgcttc

SEQ ID NO: 2873588 - DNA, 25 bp, Homo sapien
cttgtaccacaccttctcgggtctt

SEQ ID NO: 2873589 - DNA, 25 bp, Homo sapien
ttgtaccacaccttctcgggtcttg

SEQ ID NO: 2873590 - DNA, 25 bp, Homo sapien
ttggttttctccgcggctgccacaa

SEQ ID NO: 2873591 - DNA, 25 bp, Homo sapien
tccttggtcttctccgccgcctcgg

SEQ ID NO: 2873592 - DNA, 25 bp, Homo sapien
ttggtcttctccgccgcctcggtga

SEQ ID NO: 2873593 - DNA, 25 bp, Homo sapien
gcggctgccacaacgccctccttgg

SEQ ID NO: 2873594 - DNA, 25 bp, Homo sapien
gagtcctagcgtccttgaaacctgg

SEQ ID NO: 2873595 - DNA, 25 bp, Homo sapien
gggccactgcctcggttatccgggc

SEQ ID NO: 2873596 - DNA, 25 bp, Homo sapien
tgcagccccgtcgaaccggagtgct

SEQ ID NO: 2873597 - DNA, 25 bp, Homo sapien
ggttcggcgcgaatatccaggaccc

SEQ ID NO: 2873598 - DNA, 25 bp, Homo sapien
catactcacatactccggggtgcac

SEQ ID NO: 2873599 - DNA, 25 bp, Homo sapien
gcaaacaccggagcatactcacata

SEQ ID NO: 2873600 - DNA, 25 bp, Homo sapien
gcagctgcaaacaccggagcatact

SEQ ID NO: 2873601 - DNA, 25 bp, Homo sapien
ctccggggtgcacactgacgcgcat

SEQ ID NO: 2873602 - DNA, 25 bp, Homo sapien
ggtgcgtagccagccaccgctcgtt

SEQ ID NO: 2873603 - DNA, 25 bp, Homo sapien
atagggccgggatcaggcgctcggg

SEQ ID NO: 2873604 - DNA, 25 bp, Homo sapien
gttcctcgcgccctgcgagctcgcg

SEQ ID NO: 2873605 - DNA, 25 bp, Homo sapien
gcgctcgggtcgcgggtcctgagca

SEQ ID NO: 2873606 - DNA, 25 bp, Homo sapien
ttggggatggtgccagaaggcccca

SEQ ID NO: 2873607 - DNA, 25 bp, Homo sapien
gttggggatggtgccagaaggcccc

SEQ ID NO: 2873608 - DNA, 25 bp, Homo sapien
gaaagttcgcacaatctagtcggta

SEQ ID NO: 2873609 - DNA, 25 bp, Homo sapien
tccttgagaccaagagagtgcggtg

SEQ ID NO: 2873610 - DNA, 25 bp, Homo sapien
tagtcggtaacagccactttccttg

SEQ ID NO: 2873611 - DNA, 25 bp, Homo sapien
gcatgtgcccagcaatgtggctcct

SEQ ID NO: 2873612 - DNA, 25 bp, Homo sapien
tgttcttgcacgaaggttccccatg

SEQ ID NO: 2873613 - DNA, 25 bp, Homo sapien
ccatgaggtcgtcttgggcagcaag

SEQ ID NO: 2873614 - DNA, 25 bp, Homo sapien
ccattgctgtccaaagtgtctgtgg

SEQ ID NO: 2873615 - DNA, 25 bp, Homo sapien
gcaggtgagcagtgaactctccggt

SEQ ID NO: 2873616 - DNA, 25 bp, Homo sapien
gagcagaagtgggaaggcgggaccc

SEQ ID NO: 2873617 - DNA, 25 bp, Homo sapien
ctggacagggtgtcagagcagaagt

SEQ ID NO: 2873618 - DNA, 25 bp, Homo sapien
ggacagggtgtcagagcagaagtgg

SEQ ID NO: 2873619 - DNA, 25 bp, Homo sapien
tgggaaggcgggacccacagagctc

SEQ ID NO: 2873620 - DNA, 25 bp, Homo sapien
gcttgttgacgaatctggagcggta

SEQ ID NO: 2873621 - DNA, 25 bp, Homo sapien
ttgggcagcttgttgacgaatctgg

SEQ ID NO: 2873622 - DNA, 25 bp, Homo sapien
tgacgaatctggagcggtagccacc

SEQ ID NO: 2873623 - DNA, 25 bp, Homo sapien
ggcagcttgttgacgaatctggagc

SEQ ID NO: 2873624 - DNA, 25 bp, Homo sapien
ggacccacagagcagtgggctggtg

SEQ ID NO: 2873625 - DNA, 25 bp, Homo sapien
gacccacagagcagtgggctggtgg

SEQ ID NO: 2873626 - DNA, 25 bp, Homo sapien
ccacagagcagtgggctggtgggtg

SEQ ID NO: 2873627 - DNA, 25 bp, Homo sapien
ctttcacgaggacccacagagcagt

SEQ ID NO: 2873628 - DNA, 25 bp, Homo sapien
tgcttgccgggccatttatcactgg

SEQ ID NO: 2873629 - DNA, 25 bp, Homo sapien
gcactgctgcttgccgggccattta

SEQ ID NO: 2873630 - DNA, 25 bp, Homo sapien
tgctgcttgccgggccatttatcac

SEQ ID NO: 2873631 - DNA, 25 bp, Homo sapien
ggcactgctgcttgccgggccattt

SEQ ID NO: 2873632 - DNA, 25 bp, Homo sapien
gagcccgagcagaacaggtggtgcg

SEQ ID NO: 2873633 - DNA, 25 bp, Homo sapien
ggaatgaactcttctggcaccagct

SEQ ID NO: 2873634 - DNA, 25 bp, Homo sapien
ggtggtgcgttgaggaagggagtga

SEQ ID NO: 2873635 - DNA, 25 bp, Homo sapien
aatgaactcttctggcaccagctcc

SEQ ID NO: 2873636 - DNA, 25 bp, Homo sapien
cccaggaaccgccagtggcggggag

SEQ ID NO: 2873637 - DNA, 25 bp, Homo sapien
cccacttctgcgtttactgtcatac

SEQ ID NO: 2873638 - DNA, 25 bp, Homo sapien
tcatgcttcatctcccacttctgcg

SEQ ID NO: 2873639 - DNA, 25 bp, Homo sapien
tcatctcccacttctgcgtttactg

SEQ ID NO: 2873640 - DNA, 25 bp, Homo sapien
tgcttcatctcccacttctgcgttt

SEQ ID NO: 2873641 - DNA, 25 bp, Homo sapien
tgggtgttcctggccacacagatag

SEQ ID NO: 2873642 - DNA, 25 bp, Homo sapien
gtgggtgttcctggccacacagata

SEQ ID NO: 2873643 - DNA, 25 bp, Homo sapien
ccaagtgggtgttcctggccacaca

SEQ ID NO: 2873644 - DNA, 25 bp, Homo sapien
gagagctgcttgtggaccgtggtcg

SEQ ID NO: 2873645 - DNA, 25 bp, Homo sapien
acctcgccagctggacacctctggg

SEQ ID NO: 2873646 - DNA, 25 bp, Homo sapien
ttgtggaccgtggtcggccacctcg

SEQ ID NO: 2873647 - DNA, 25 bp, Homo sapien
ggcgggagagctgcttgtggaccgt

SEQ ID NO: 2873648 - DNA, 25 bp, Homo sapien
tccaagggtagcagccctctctgag

SEQ ID NO: 2873649 - DNA, 25 bp, Homo sapien
agattccaagggtagcagccctctc

SEQ ID NO: 2873650 - DNA, 25 bp, Homo sapien
ctcccctcccgcaagggcctcttct

SEQ ID NO: 2873651 - DNA, 25 bp, Homo sapien
gattccaagggtagcagccctctct

SEQ ID NO: 2873652 - DNA, 25 bp, Homo sapien
cctcctctgtttcagccagctccat

SEQ ID NO: 2873653 - DNA, 25 bp, Homo sapien
gcagcccactgggttccagctctcc

SEQ ID NO: 2873654 - DNA, 25 bp, Homo sapien
tgccctggccgtctctgctcctcct

SEQ ID NO: 2873655 - DNA, 25 bp, Homo sapien
agctctccatctgccctggccgtct

SEQ ID NO: 2873656 - DNA, 25 bp, Homo sapien
ccagggccaggcaacttgcaaacaa

SEQ ID NO: 2873657 - DNA, 25 bp, Homo sapien
gggccaggcaacttgcaaacaatac

SEQ ID NO: 2873658 - DNA, 25 bp, Homo sapien
ggcaacttgcaaacaatacagatat

SEQ ID NO: 2873659 - DNA, 25 bp, Homo sapien
tttgcaaaatgtccaataaatgatt

SEQ ID NO: 2873660 - DNA, 25 bp, Homo sapien
tctgagctgttgtcttatggcaggt

SEQ ID NO: 2873661 - DNA, 25 bp, Homo sapien
acctggaggtgtcccgctcattgct

SEQ ID NO: 2873662 - DNA, 25 bp, Homo sapien
gctcattgctctggggacgttttta

SEQ ID NO: 2873663 - DNA, 25 bp, Homo sapien
tcaccaagggctgtcgggagcccct

SEQ ID NO: 2873664 - DNA, 25 bp, Homo sapien
acagatgagcgtgggaagcccagat

SEQ ID NO: 2873665 - DNA, 25 bp, Homo sapien
gaaaaacacgatccactgccagctt

SEQ ID NO: 2873666 - DNA, 25 bp, Homo sapien
gccgtgccggcatacagatgagcgt

SEQ ID NO: 2873667 - DNA, 25 bp, Homo sapien
cccagatgcagggaaaaacacgatc

SEQ ID NO: 2873668 - DNA, 25 bp, Homo sapien
ccacctgacccacacacgagagacc

SEQ ID NO: 2873669 - DNA, 25 bp, Homo sapien
tgacccacacacgagagaccagcag

SEQ ID NO: 2873670 - DNA, 25 bp, Homo sapien
acccacacacgagagaccagcagag

SEQ ID NO: 2873671 - DNA, 25 bp, Homo sapien
acctgacccacacacgagagaccag

SEQ ID NO: 2873672 - DNA, 25 bp, Homo sapien
tggaaacatacaggcgccttgctct

SEQ ID NO: 2873673 - DNA, 25 bp, Homo sapien
cagtgaagcgcgctaaggagagcaa

SEQ ID NO: 2873674 - DNA, 25 bp, Homo sapien
tatcaagcacctaccaggttccggg

SEQ ID NO: 2873675 - DNA, 25 bp, Homo sapien
cagaaaagcgtgttggcggcagtaa

SEQ ID NO: 2873676 - DNA, 25 bp, Homo sapien
gcagaaacggagatgcctggtatca

SEQ ID NO: 2873677 - DNA, 25 bp, Homo sapien
tggtatcaaggctgggtatgaaccc

SEQ ID NO: 2873678 - DNA, 25 bp, Homo sapien
cacgcgggctggcttctttaacgag

SEQ ID NO: 2873679 - DNA, 25 bp, Homo sapien
ggtccactggacgagtctcaaagaa

SEQ ID NO: 2873680 - DNA, 25 bp, Homo sapien
gatggggactgcatcgacttctgag

SEQ ID NO: 2873681 - DNA, 25 bp, Homo sapien
aaacagggaagaacttgaccagatg

SEQ ID NO: 2873682 - DNA, 25 bp, Homo sapien
cccgtcgtgggtcactgctgatggg

SEQ ID NO: 2873683 - DNA, 25 bp, Homo sapien
actgcatcgacttctgagtggtccc

SEQ ID NO: 2873684 - DNA, 25 bp, Homo sapien
tggatgagccccggggcctcacaga

SEQ ID NO: 2873685 - DNA, 25 bp, Homo sapien
gatgagccccggggcctcacagaag

SEQ ID NO: 2873686 - DNA, 25 bp, Homo sapien
aggcctcccagcatggatgagcccc

SEQ ID NO: 2873687 - DNA, 25 bp, Homo sapien
ccagcatggatgagccccggggcct

SEQ ID NO: 2873688 - DNA, 25 bp, Homo sapien
tcagggctctaaggcccccgaatgt

SEQ ID NO: 2873689 - DNA, 25 bp, Homo sapien
gaaacacagccgggcttttcagggc

SEQ ID NO: 2873690 - DNA, 25 bp, Homo sapien
tgggtgccccggagaaggacagggc

SEQ ID NO: 2873691 - DNA, 25 bp, Homo sapien
tgtggctggcgtacgcgttgggagc

SEQ ID NO: 2873692 - DNA, 25 bp, Homo sapien
aggcgaagcggtgcgggagggaggc

SEQ ID NO: 2873693 - DNA, 25 bp, Homo sapien
gcgaagcggtgcgggagggaggcgg

SEQ ID NO: 2873694 - DNA, 25 bp, Homo sapien
gaggcgaagcggtgcgggagggagg

SEQ ID NO: 2873695 - DNA, 25 bp, Homo sapien
ggcgaagcggtgcgggagggaggcg

SEQ ID NO: 2873696 - DNA, 25 bp, Homo sapien
ttagtgcgcttaagaggcattcggc

SEQ ID NO: 2873697 - DNA, 25 bp, Homo sapien
ggaggcctgtttaccagcacgacaa

SEQ ID NO: 2873698 - DNA, 25 bp, Homo sapien
tgctccccggaatctgctgaaatgg

SEQ ID NO: 2873699 - DNA, 25 bp, Homo sapien
tttatcccggcaaacatgcgcagcg

SEQ ID NO: 2873700 - DNA, 25 bp, Homo sapien
ggctcagcgtcaaggctccaaagcc

SEQ ID NO: 2873701 - DNA, 25 bp, Homo sapien
gcggagtcgggcattcaggctgcag

SEQ ID NO: 2873702 - DNA, 25 bp, Homo sapien
cagaggctcagcgtcaaggctccaa

SEQ ID NO: 2873703 - DNA, 25 bp, Homo sapien
aggctcagcgtcaaggctccaaagc

SEQ ID NO: 2873704 - DNA, 25 bp, Homo sapien
agagacgttccctgctgctcgaagg

SEQ ID NO: 2873705 - DNA, 25 bp, Homo sapien
tcttgaccagcctttggctaagaga

SEQ ID NO: 2873706 - DNA, 25 bp, Homo sapien
ttaatgtcgaatgtctaatgtgtcc

SEQ ID NO: 2873707 - DNA, 25 bp, Homo sapien
tgtctaatgtgtcctcgttcttcct

SEQ ID NO: 2873708 - DNA, 25 bp, Homo sapien
cctcccctgcagagccgatgggcag

SEQ ID NO: 2873709 - DNA, 25 bp, Homo sapien
tgaggcagccggccctctctgtcag

SEQ ID NO: 2873710 - DNA, 25 bp, Homo sapien
agcagaaagccacgcggctccctgg

SEQ ID NO: 2873711 - DNA, 25 bp, Homo sapien
tcagctgctttatggcttttggagc

SEQ ID NO: 2873712 - DNA, 25 bp, Homo sapien
tcggccgtcgtcatttttcctcagc

SEQ ID NO: 2873713 - DNA, 25 bp, Homo sapien
gttcttcaaccaggcccacggggca

SEQ ID NO: 2873714 - DNA, 25 bp, Homo sapien
cctggggctgccagttcttcaacca

SEQ ID NO: 2873715 - DNA, 25 bp, Homo sapien
acggggcacccacttgctggctgaa

SEQ ID NO: 2873716 - DNA, 25 bp, Homo sapien
cacccacttgctggctgaatttctc

SEQ ID NO: 2873717 - DNA, 25 bp, Homo sapien
gcccccagccgagccaccaggtgct

SEQ ID NO: 2873718 - DNA, 25 bp, Homo sapien
ctgagcaaaccagcccccagccgag

SEQ ID NO: 2873719 - DNA, 25 bp, Homo sapien
ccccagccgagccaccaggtgctgc

SEQ ID NO: 2873720 - DNA, 25 bp, Homo sapien
gcactgctgagcaaaccagccccca

SEQ ID NO: 2873721 - DNA, 25 bp, Homo sapien
gatggaaagttgaggaaccaggggc

SEQ ID NO: 2873722 - DNA, 25 bp, Homo sapien
gaaatttagatggaaagttgaggaa

SEQ ID NO: 2873723 - DNA, 25 bp, Homo sapien
ttagatggaaagttgaggaaccagg

SEQ ID NO: 2873724 - DNA, 25 bp, Homo sapien
atttagatggaaagttgaggaacca

SEQ ID NO: 2873725 - DNA, 25 bp, Homo sapien
ctgcgagcagagcactcgaaggtcc

SEQ ID NO: 2873726 - DNA, 25 bp, Homo sapien
ttccgactggccctgcgagcagagc

SEQ ID NO: 2873727 - DNA, 25 bp, Homo sapien
tcagccttccgactggccctgcgag

SEQ ID NO: 2873728 - DNA, 25 bp, Homo sapien
gagcactcgaaggtcccaggtccct

SEQ ID NO: 2873729 - DNA, 25 bp, Homo sapien
ctgctctagctgctggatgcgcccg

SEQ ID NO: 2873730 - DNA, 25 bp, Homo sapien
tagctgctggatgcgcccgacttca

SEQ ID NO: 2873731 - DNA, 25 bp, Homo sapien
aagtggatcattacgaggttaataa

SEQ ID NO: 2873732 - DNA, 25 bp, Homo sapien
tggatcattacgaggttaataaaac

SEQ ID NO: 2873733 - DNA, 25 bp, Homo sapien
gggcagtggcggcaagcctggggtg

SEQ ID NO: 2873734 - DNA, 25 bp, Homo sapien
cagtggcggcaagcctggggtgggg

SEQ ID NO: 2873735 - DNA, 25 bp, Homo sapien
tccaggcacagggggaataggggct

SEQ ID NO: 2873736 - DNA, 25 bp, Homo sapien
gcagtggcggcaagcctggggtggg

SEQ ID NO: 2873737 - DNA, 25 bp, Homo sapien
ggtccactttcagggggtgccctga

SEQ ID NO: 2873738 - DNA, 25 bp, Homo sapien
caggttccaagacgttcccggcgtg

SEQ ID NO: 2873739 - DNA, 25 bp, Homo sapien
gggtgccctgatacaggttccaaga

SEQ ID NO: 2873740 - DNA, 25 bp, Homo sapien
gaaaaattccatctcgatgaaatgt

SEQ ID NO: 2873741 - DNA, 25 bp, Homo sapien
gtctcccaggggtccgcagggtagc

SEQ ID NO: 2873742 - DNA, 25 bp, Homo sapien
ggggtccgcagggtagccagtgtgc

SEQ ID NO: 2873743 - DNA, 25 bp, Homo sapien
tctcccaggggtccgcagggtagcc

SEQ ID NO: 2873744 - DNA, 25 bp, Homo sapien
gtccgcagggtagccagtgtgccct

SEQ ID NO: 2873745 - DNA, 25 bp, Homo sapien
tttggatgccaaagaaagctgtgtc

SEQ ID NO: 2873746 - DNA, 25 bp, Homo sapien
gatcagaacacagggggccaattga

SEQ ID NO: 2873747 - DNA, 25 bp, Homo sapien
ctgggtgtctgagcgatcagaacac

SEQ ID NO: 2873748 - DNA, 25 bp, Homo sapien
attgatgcggtgtgggcagagctcc

SEQ ID NO: 2873749 - DNA, 25 bp, Homo sapien
atccactccgggtttcagactcctg

SEQ ID NO: 2873750 - DNA, 25 bp, Homo sapien
tccggagcaccgatccactccgggt

SEQ ID NO: 2873751 - DNA, 25 bp, Homo sapien
cgcgagagcccggatccggagcacc

SEQ ID NO: 2873752 - DNA, 25 bp, Homo sapien
tgtgcgcagactggcgggcccgcga

SEQ ID NO: 2873753 - DNA, 25 bp, Homo sapien
ctggcgctgcgctccgccccggctg

SEQ ID NO: 2873754 - DNA, 25 bp, Homo sapien
ggctggctcggtgcgcggcgcggct

SEQ ID NO: 2873755 - DNA, 25 bp, Homo sapien
ctcggtgcgcggcgcggctggcgct

SEQ ID NO: 2873756 - DNA, 25 bp, Homo sapien
tccgcggcgcggctggctcggtgcg

SEQ ID NO: 2873757 - DNA, 25 bp, Homo sapien
ccaagggagccacgcgccgcgtgcg

SEQ ID NO: 2873758 - DNA, 25 bp, Homo sapien
cagcgcagtccgctggcatgggccc

SEQ ID NO: 2873759 - DNA, 25 bp, Homo sapien
aggcagcgcagtccgctggcatggg

SEQ ID NO: 2873760 - DNA, 25 bp, Homo sapien
ccacgcgccgcgtgcgcccggcagc

SEQ ID NO: 2873761 - DNA, 25 bp, Homo sapien
cggttgataaaactggcagcagcag

SEQ ID NO: 2873762 - DNA, 25 bp, Homo sapien
gggtgtgcggagcaggatctgcggt

SEQ ID NO: 2873763 - DNA, 25 bp, Homo sapien
atctgagcaggatcttcgattgatg

SEQ ID NO: 2873764 - DNA, 25 bp, Homo sapien
tgagcaggatcttcgattgatgaaa

SEQ ID NO: 2873765 - DNA, 25 bp, Homo sapien
atcttgggaaggtgttcattcttgg

SEQ ID NO: 2873766 - DNA, 25 bp, Homo sapien
ggtgttcattcttggataatgagca

SEQ ID NO: 2873767 - DNA, 25 bp, Homo sapien
tgcaggcctggaatcttgggaaggt

SEQ ID NO: 2873768 - DNA, 25 bp, Homo sapien
cttggataatgagcattcatgaggg

SEQ ID NO: 2873769 - DNA, 25 bp, Homo sapien
actgggctttctggacggatggctc

SEQ ID NO: 2873770 - DNA, 25 bp, Homo sapien
aactgggctttctggacggatggct

SEQ ID NO: 2873771 - DNA, 25 bp, Homo sapien
gggctttctggacggatggctccat

SEQ ID NO: 2873772 - DNA, 25 bp, Homo sapien
agaactgggctttctggacggatgg

SEQ ID NO: 2873773 - DNA, 25 bp, Homo sapien
tcgagggggttggtagtttctctgc

SEQ ID NO: 2873774 - DNA, 25 bp, Homo sapien
ctcgagggggttggtagtttctctg

SEQ ID NO: 2873775 - DNA, 25 bp, Homo sapien
ggttggtagtttctctgccgcccat

SEQ ID NO: 2873776 - DNA, 25 bp, Homo sapien
gggttggtagtttctctgccgccca

SEQ ID NO: 2873777 - DNA, 25 bp, Homo sapien
ggctttggcgaaggacccgccgatg

SEQ ID NO: 2873778 - DNA, 25 bp, Homo sapien
gaaggacccgccgatgaggcctgga

SEQ ID NO: 2873779 - DNA, 25 bp, Homo sapien
ctttggcgaaggacccgccgatgag

SEQ ID NO: 2873780 - DNA, 25 bp, Homo sapien
aggacccgccgatgaggcctggagg

SEQ ID NO: 2873781 - DNA, 25 bp, Homo sapien
gtgcccaccctgcgcttcctgggca

SEQ ID NO: 2873782 - DNA, 25 bp, Homo sapien
tgcccaccctgcgcttcctgggcat

SEQ ID NO: 2873783 - DNA, 25 bp, Homo sapien
tgtgcccaccctgcgcttcctgggc

SEQ ID NO: 2873784 - DNA, 25 bp, Homo sapien
ctgtgcccaccctgcgcttcctggg

SEQ ID NO: 2873785 - DNA, 25 bp, Homo sapien
ctggcgttggcccaggttgtgggga

SEQ ID NO: 2873786 - DNA, 25 bp, Homo sapien
tcacgccttgctggcgttggcccag

SEQ ID NO: 2873787 - DNA, 25 bp, Homo sapien
tgctggcgttggcccaggttgtggg

SEQ ID NO: 2873788 - DNA, 25 bp, Homo sapien
cttgctggcgttggcccaggttgtg

SEQ ID NO: 2873789 - DNA, 25 bp, Homo sapien
caggggcttgtaaggaacccgctgg

SEQ ID NO: 2873790 - DNA, 25 bp, Homo sapien
tatcagagggcggtggtcttgccct

SEQ ID NO: 2873791 - DNA, 25 bp, Homo sapien
ccccaccttatcagagggcggtggt

SEQ ID NO: 2873792 - DNA, 25 bp, Homo sapien
tgggttggtggctcgcagcttgccg

SEQ ID NO: 2873793 - DNA, 25 bp, Homo sapien
cagacagcagcagttccacacttgg

SEQ ID NO: 2873794 - DNA, 25 bp, Homo sapien
cgttatgcactgcacctgtgcttgc

SEQ ID NO: 2873795 - DNA, 25 bp, Homo sapien
tgctggcttcccctgctggacgatg

SEQ ID NO: 2873796 - DNA, 25 bp, Homo sapien
ctgaggcagggcgttatgcactgca

SEQ ID NO: 2873797 - DNA, 25 bp, Homo sapien
tgctggacgatgagtgccccacaga

SEQ ID NO: 2873798 - DNA, 25 bp, Homo sapien
cctcccacaagtgggcgggctctag

SEQ ID NO: 2873799 - DNA, 25 bp, Homo sapien
ggtgaatctaagctgctgcccagga

SEQ ID NO: 2873800 - DNA, 25 bp, Homo sapien
cacttggatgatctcaccagtatct

SEQ ID NO: 2873801 - DNA, 25 bp, Homo sapien
gacctgcttggtgaatctaagctgc

SEQ ID NO: 2873802 - DNA, 25 bp, Homo sapien
gtggtcttcgctgatgaaaggatgc

SEQ ID NO: 2873803 - DNA, 25 bp, Homo sapien
atgaaaatgccccgttcccatccag

SEQ ID NO: 2873804 - DNA, 25 bp, Homo sapien
catgcccgacggctggagccaggcc

SEQ ID NO: 2873805 - DNA, 25 bp, Homo sapien
cgttcgttgaagtcgggcgccggct

SEQ ID NO: 2873806 - DNA, 25 bp, Homo sapien
gcagcgcctgcgtttccatggtaac

SEQ ID NO: 2873807 - DNA, 25 bp, Homo sapien
cagatgacatggaagcagcgcctgc

SEQ ID NO: 2873808 - DNA, 25 bp, Homo sapien
gacatggaagcagcgcctgcgtttc

SEQ ID NO: 2873809 - DNA, 25 bp, Homo sapien
tggaagcagcgcctgcgtttccatg

SEQ ID NO: 2873810 - DNA, 25 bp, Homo sapien
tgggggctctgatgaggagggttcc

SEQ ID NO: 2873811 - DNA, 25 bp, Homo sapien
ctggggcaatggacagccgacctct

SEQ ID NO: 2873812 - DNA, 25 bp, Homo sapien
ggggctctgatgaggagggttccca

SEQ ID NO: 2873813 - DNA, 25 bp, Homo sapien
ccgacctctccgcctctgtccaggc

SEQ ID NO: 2873814 - DNA, 25 bp, Homo sapien
aagggcaggaagagcggggcagaga

SEQ ID NO: 2873815 - DNA, 25 bp, Homo sapien
gcaagggcaggaagagcggggcaga

SEQ ID NO: 2873816 - DNA, 25 bp, Homo sapien
ctggcaagggcaggaagagcggggc

SEQ ID NO: 2873817 - DNA, 25 bp, Homo sapien
tggcaagggcaggaagagcggggca

SEQ ID NO: 2873818 - DNA, 25 bp, Homo sapien
tttgaagtgtgagatcggattctct

SEQ ID NO: 2873819 - DNA, 25 bp, Homo sapien
actgcagggtatgggttggtgacca

SEQ ID NO: 2873820 - DNA, 25 bp, Homo sapien
ctgctgtgttagttgtatgggaacc

SEQ ID NO: 2873821 - DNA, 25 bp, Homo sapien
aaatagcgaggttgaggacggcact

SEQ ID NO: 2873822 - DNA, 25 bp, Homo sapien
ggtgtggagggatccctagaggcga

SEQ ID NO: 2873823 - DNA, 25 bp, Homo sapien
aagacgccgccggtgtggagggatc

SEQ ID NO: 2873824 - DNA, 25 bp, Homo sapien
gggatccctagaggcgaggccagca

SEQ ID NO: 2873825 - DNA, 25 bp, Homo sapien
gtggcgaagacgccgccggtgtgga

SEQ ID NO: 2873826 - DNA, 25 bp, Homo sapien
ctccccatgcccggacatccgagca

SEQ ID NO: 2873827 - DNA, 25 bp, Homo sapien
tccccatgcccggacatccgagcac

SEQ ID NO: 2873828 - DNA, 25 bp, Homo sapien
actccccatgcccggacatccgagc

SEQ ID NO: 2873829 - DNA, 25 bp, Homo sapien
caccagctccagctgacgtgggcag

SEQ ID NO: 2873830 - DNA, 25 bp, Homo sapien
agctccagctgacgtgggcagccag

SEQ ID NO: 2873831 - DNA, 25 bp, Homo sapien
gcaccagctccagctgacgtgggca

SEQ ID NO: 2873832 - DNA, 25 bp, Homo sapien
tccagctgacgtgggcagccagttc

SEQ ID NO: 2873833 - DNA, 25 bp, Homo sapien
aatgcccgcattaagcagccttgtg

SEQ ID NO: 2873834 - DNA, 25 bp, Homo sapien
catggaccgaggatgcacagtctgg

SEQ ID NO: 2873835 - DNA, 25 bp, Homo sapien
tgcacggcatggaccgaggatgcac

SEQ ID NO: 2873836 - DNA, 25 bp, Homo sapien
ccccagttgctaatgcccgcattaa

SEQ ID NO: 2873837 - DNA, 25 bp, Homo sapien
tgtccttgctagagggcatagctgc

SEQ ID NO: 2873838 - DNA, 25 bp, Homo sapien
gaatgtccttgctagagggcatagc

SEQ ID NO: 2873839 - DNA, 25 bp, Homo sapien
gctacaatgtccttgctagagggca

SEQ ID NO: 2873840 - DNA, 25 bp, Homo sapien
tagaatgtccttgctagagggcata

SEQ ID NO: 2873841 - DNA, 25 bp, Homo sapien
agctgctagaatgtccttgctagag

SEQ ID NO: 2873842 - DNA, 25 bp, Homo sapien
tgctagaatgtccttgctagagggc

SEQ ID NO: 2873843 - DNA, 25 bp, Homo sapien
gctgctagaatgtccttgctagagg

SEQ ID NO: 2873844 - DNA, 25 bp, Homo sapien
ctagaatgtccttgctagagggcat

SEQ ID NO: 2873845 - DNA, 25 bp, Homo sapien
gaggcaccagcaacatgacctatgg

SEQ ID NO: 2873846 - DNA, 25 bp, Homo sapien
ttctcccgggcgacagaactgtaca

SEQ ID NO: 2873847 - DNA, 25 bp, Homo sapien
taaatgtaggtgtgcctccgagctc

SEQ ID NO: 2873848 - DNA, 25 bp, Homo sapien
gctttaatcgccgtgtctgtgcaga

SEQ ID NO: 2873849 - DNA, 25 bp, Homo sapien
tatatattgctaacctgagtgctac

SEQ ID NO: 2873850 - DNA, 25 bp, Homo sapien
aatggccgcagaggggtcacacatg

SEQ ID NO: 2873851 - DNA, 25 bp, Homo sapien
cacatgggatgtcccaggagtcctg

SEQ ID NO: 2873852 - DNA, 25 bp, Homo sapien
cagggagcaaggccaaatggccgca

SEQ ID NO: 2873853 - DNA, 25 bp, Homo sapien
tcagacacgagtcaactgcgcaagg

SEQ ID NO: 2873854 - DNA, 25 bp, Homo sapien
tgaccagggccgcacctttgccgga

SEQ ID NO: 2873855 - DNA, 25 bp, Homo sapien
tttgccggacccatcctctgactgc

SEQ ID NO: 2873856 - DNA, 25 bp, Homo sapien
ctctgactgcaggaacgtgaccaca

SEQ ID NO: 2873857 - DNA, 25 bp, Homo sapien
ggtagccccagatcctctaggatgg

SEQ ID NO: 2873858 - DNA, 25 bp, Homo sapien
cgggtgcagcttgtagagcgttcca

SEQ ID NO: 2873859 - DNA, 25 bp, Homo sapien
ccatcagggcgtcatctgaggtcag

SEQ ID NO: 2873860 - DNA, 25 bp, Homo sapien
gatcctctaggatggctcggacctg

SEQ ID NO: 2873861 - DNA, 25 bp, Homo sapien
acagggaggtgggtcgtgacttctc

SEQ ID NO: 2873862 - DNA, 25 bp, Homo sapien
ggaggtgggtcgtgacttctcccac

SEQ ID NO: 2873863 - DNA, 25 bp, Homo sapien
gtgggtcgtgacttctcccacttca

SEQ ID NO: 2873864 - DNA, 25 bp, Homo sapien
gcacagggaggtgggtcgtgacttc

SEQ ID NO: 2873865 - DNA, 25 bp, Homo sapien
ctcgtcaccacccatggccagcaat

SEQ ID NO: 2873866 - DNA, 25 bp, Homo sapien
gggaggcaatgtaggcctcaggcac

SEQ ID NO: 2873867 - DNA, 25 bp, Homo sapien
tcgtcaccacccatggccagcaatc

SEQ ID NO: 2873868 - DNA, 25 bp, Homo sapien
aagtgggggaggcaatgtaggcctc

SEQ ID NO: 2873869 - DNA, 25 bp, Homo sapien
tctgaaggcgctggatctgctggcc

SEQ ID NO: 2873870 - DNA, 25 bp, Homo sapien
gaacttggtcttgaagatgtccctg

SEQ ID NO: 2873871 - DNA, 25 bp, Homo sapien
ttcgatctcagagaggaacttggtc

SEQ ID NO: 2873872 - DNA, 25 bp, Homo sapien
gaacgccaaggctggttaaatgtaa

SEQ ID NO: 2873873 - DNA, 25 bp, Homo sapien
agagagccatcgtccccaaaggcgc

SEQ ID NO: 2873874 - DNA, 25 bp, Homo sapien
gttgatggacgcctggtccacactt

SEQ ID NO: 2873875 - DNA, 25 bp, Homo sapien
catcaaagcgggtgctgagcatggc

SEQ ID NO: 2873876 - DNA, 25 bp, Homo sapien
catgttgatgcacatgcggcctgag

SEQ ID NO: 2873877 - DNA, 25 bp, Homo sapien
tgcagagaggccagacaacgtggaa

SEQ ID NO: 2873878 - DNA, 25 bp, Homo sapien
ctgcagagaggccagacaacgtgga

SEQ ID NO: 2873879 - DNA, 25 bp, Homo sapien
gcagagaggccagacaacgtggaag

SEQ ID NO: 2873880 - DNA, 25 bp, Homo sapien
acaatgaggcctatctcgcaacggg

SEQ ID NO: 2873881 - DNA, 25 bp, Homo sapien
tggcaaccacattcagctccactgc

SEQ ID NO: 2873882 - DNA, 25 bp, Homo sapien
tggtccccaccgtgtcattgacaat

SEQ ID NO: 2873883 - DNA, 25 bp, Homo sapien
aacgggggtcctcatagccacagga

SEQ ID NO: 2873884 - DNA, 25 bp, Homo sapien
cagtctgatgccttgaaacccttgg

SEQ ID NO: 2873885 - DNA, 25 bp, Homo sapien
tgaaacccttggtccagttcaggag

SEQ ID NO: 2873886 - DNA, 25 bp, Homo sapien
gacatcttggccctcgcagtctgat

SEQ ID NO: 2873887 - DNA, 25 bp, Homo sapien
gcgagtgatggcttcccgcaacaga

SEQ ID NO: 2873888 - DNA, 25 bp, Homo sapien
aacccagtgggaggctctgcccgct

SEQ ID NO: 2873889 - DNA, 25 bp, Homo sapien
tgcagtccacgatgtggtcaaagag

SEQ ID NO: 2873890 - DNA, 25 bp, Homo sapien
gcttctgctggaagtccacgatgca

SEQ ID NO: 2873891 - DNA, 25 bp, Homo sapien
ctaggccaagctgcctacatgggaa

SEQ ID NO: 2873892 - DNA, 25 bp, Homo sapien
agatctcgctggtgatctgcacgcc

SEQ ID NO: 2873893 - DNA, 25 bp, Homo sapien
gctggtgatctgcacgcctgtggtc

SEQ ID NO: 2873894 - DNA, 25 bp, Homo sapien
aatggagtagatctcgctggtgatc

SEQ ID NO: 2873895 - DNA, 25 bp, Homo sapien
ccacagtctcgggaatggagtagat

SEQ ID NO: 2873896 - DNA, 25 bp, Homo sapien
caggaggacacggaagttcgtgccc

SEQ ID NO: 2873897 - DNA, 25 bp, Homo sapien
cccggacgaaagtgggcagcatgcg

SEQ ID NO: 2873898 - DNA, 25 bp, Homo sapien
gattaaggagacatcgcattccggg

SEQ ID NO: 2873899 - DNA, 25 bp, Homo sapien
catggccttccgcatctgtgcctga

SEQ ID NO: 2873900 - DNA, 25 bp, Homo sapien
ttgatcatggttcaaccggaatggg

SEQ ID NO: 2873901 - DNA, 25 bp, Homo sapien
tgcacacggccgcacagacgtgctg

SEQ ID NO: 2873902 - DNA, 25 bp, Homo sapien
cagcaacctggagtgtttgttgctc

SEQ ID NO: 2873903 - DNA, 25 bp, Homo sapien
agtgtttgttgctcccggctgtgct

SEQ ID NO: 2873904 - DNA, 25 bp, Homo sapien
ctgcaggatagcatggacacgggct

SEQ ID NO: 2873905 - DNA, 25 bp, Homo sapien
agccccatggctaccttgggaacag

SEQ ID NO: 2873906 - DNA, 25 bp, Homo sapien
taaagccccatggctaccttgggaa

SEQ ID NO: 2873907 - DNA, 25 bp, Homo sapien
aagccccatggctaccttgggaaca

SEQ ID NO: 2873908 - DNA, 25 bp, Homo sapien
ctaaagccccatggctaccttggga

SEQ ID NO: 2873909 - DNA, 25 bp, Homo sapien
aggatgctgccttggctcagcaggg

SEQ ID NO: 2873910 - DNA, 25 bp, Homo sapien
gaggatgctgccttggctcagcagg

SEQ ID NO: 2873911 - DNA, 25 bp, Homo sapien
caggaggatgctgccttggctcagc

SEQ ID NO: 2873912 - DNA, 25 bp, Homo sapien
aggaggatgctgccttggctcagca

SEQ ID NO: 2873913 - DNA, 25 bp, Homo sapien
acaggcctccgatcatcttctcaaa

SEQ ID NO: 2873914 - DNA, 25 bp, Homo sapien
cccctctgacataggttacattcag

SEQ ID NO: 2873915 - DNA, 25 bp, Homo sapien
gagcagtttgctcaaccacttccag

SEQ ID NO: 2873916 - DNA, 25 bp, Homo sapien
ccccaaactgtcagggcaggccaga

SEQ ID NO: 2873917 - DNA, 25 bp, Homo sapien
ggagactccagaagcaacgaatagc

SEQ ID NO: 2873918 - DNA, 25 bp, Homo sapien
actcatggtccagggtatggtcgaa

SEQ ID NO: 2873919 - DNA, 25 bp, Homo sapien
ggtcttcgtccagcactgccacatg

SEQ ID NO: 2873920 - DNA, 25 bp, Homo sapien
atgtaacacgcgttggtgcccgtgt

SEQ ID NO: 2873921 - DNA, 25 bp, Homo sapien
caccaggattcagggactcatggtc

SEQ ID NO: 2873922 - DNA, 25 bp, Homo sapien
actagcccaacctcacacggcctga

SEQ ID NO: 2873923 - DNA, 25 bp, Homo sapien
ctacaactagcccaacctcacacgg

SEQ ID NO: 2873924 - DNA, 25 bp, Homo sapien
caactagcccaacctcacacggcct

SEQ ID NO: 2873925 - DNA, 25 bp, Homo sapien
tagcccaacctcacacggcctgacc

SEQ ID NO: 2873926 - DNA, 25 bp, Homo sapien
ccacagcaaccacgtcgatgttgta

SEQ ID NO: 2873927 - DNA, 25 bp, Homo sapien
caccacagcaaccacgtcgatgttg

SEQ ID NO: 2873928 - DNA, 25 bp, Homo sapien
cacagcaaccacgtcgatgttgtag

SEQ ID NO: 2873929 - DNA, 25 bp, Homo sapien
acagcaaccacgtcgatgttgtagg

SEQ ID NO: 2873930 - DNA, 25 bp, Homo sapien
tgcacctaaaacctttggtccagga

SEQ ID NO: 2873931 - DNA, 25 bp, Homo sapien
tgcagaccctgtttgttcacaggct

SEQ ID NO: 2873932 - DNA, 25 bp, Homo sapien
tttgttcacaggctgcgcatccagg

SEQ ID NO: 2873933 - DNA, 25 bp, Homo sapien
ccaagcccgtctggtgacaagggaa

SEQ ID NO: 2873934 - DNA, 25 bp, Homo sapien
gcatcacctcttgggggatcacaaa

SEQ ID NO: 2873935 - DNA, 25 bp, Homo sapien
gcccctcaatgccagttagagtcac

SEQ ID NO: 2873936 - DNA, 25 bp, Homo sapien
ttagagtcacccacaaaacacgcag

SEQ ID NO: 2873937 - DNA, 25 bp, Homo sapien
aaaacacgcagtgaggcccctgtgg

SEQ ID NO: 2873938 - DNA, 25 bp, Homo sapien
gccatgcagctggcaagaccagagc

SEQ ID NO: 2873939 - DNA, 25 bp, Homo sapien
ccatgcagctggcaagaccagagcc

SEQ ID NO: 2873940 - DNA, 25 bp, Homo sapien
cccaaattcctaaggcctgcaaagt

SEQ ID NO: 2873941 - DNA, 25 bp, Homo sapien
tcccaaattcctaaggcctgcaaag

SEQ ID NO: 2873942 - DNA, 25 bp, Homo sapien
accccacgtatgtaggcagcatccg

SEQ ID NO: 2873943 - DNA, 25 bp, Homo sapien
ccaagaggctggcttggatctgctg

SEQ ID NO: 2873944 - DNA, 25 bp, Homo sapien
aagaggctggcttggatctgctgta

SEQ ID NO: 2873945 - DNA, 25 bp, Homo sapien
ggtggaccccacgtatgtaggcagc

SEQ ID NO: 2873946 - DNA, 25 bp, Homo sapien
cactaaaatcgtctgtgtgcctgat

SEQ ID NO: 2873947 - DNA, 25 bp, Homo sapien
tgtagcggctacattgagggagaca

SEQ ID NO: 2873948 - DNA, 25 bp, Homo sapien
tgtgtgcctgattgtagcggctaca

SEQ ID NO: 2873949 - DNA, 25 bp, Homo sapien
tcaggcatgagtttggcactaaaat

SEQ ID NO: 2873950 - DNA, 25 bp, Homo sapien
tgccgcaaccctgaagacccaatgg

SEQ ID NO: 2873951 - DNA, 25 bp, Homo sapien
gagggcccgggcaagccctcctcag

SEQ ID NO: 2873952 - DNA, 25 bp, Homo sapien
ctgtctgagggcccgggcaagccct

SEQ ID NO: 2873953 - DNA, 25 bp, Homo sapien
cctcctcagagcaactcagggtttc

SEQ ID NO: 2873954 - DNA, 25 bp, Homo sapien
gagcttccacagtggaaggtggcca

SEQ ID NO: 2873955 - DNA, 25 bp, Homo sapien
agcttccacagtggaaggtggccac

SEQ ID NO: 2873956 - DNA, 25 bp, Homo sapien
acacagagaagctagtcactctcct

SEQ ID NO: 2873957 - DNA, 25 bp, Homo sapien
acagagaagctagtcactctcctca

SEQ ID NO: 2873958 - DNA, 25 bp, Homo sapien
aggtctgagctcttgtctggcaata

SEQ ID NO: 2873959 - DNA, 25 bp, Homo sapien
tcaggtctgagctcttgtctggcaa

SEQ ID NO: 2873960 - DNA, 25 bp, Homo sapien
tactgggagcttagagaggttcact

SEQ ID NO: 2873961 - DNA, 25 bp, Homo sapien
tagaatgtgccttagagttgtccct

SEQ ID NO: 2873962 - DNA, 25 bp, Homo sapien
cctctcaggttcatacgggtgccaa

SEQ ID NO: 2873963 - DNA, 25 bp, Homo sapien
tatacagcagaatggcgaatgcctg

SEQ ID NO: 2873964 - DNA, 25 bp, Homo sapien
aataggtagtgggagtcaatgcccc

SEQ ID NO: 2873965 - DNA, 25 bp, Homo sapien
caatgttcggaattgtgcagtacac

SEQ ID NO: 2873966 - DNA, 25 bp, Homo sapien
tgcataggcatctaataacagagtg

SEQ ID NO: 2873967 - DNA, 25 bp, Homo sapien
cagtcaagggagtaaccaatgttcg

SEQ ID NO: 2873968 - DNA, 25 bp, Homo sapien
actagggaccactatggcttaatga

SEQ ID NO: 2873969 - DNA, 25 bp, Homo sapien
ggcttaatgaacatggcccacccct

SEQ ID NO: 2873970 - DNA, 25 bp, Homo sapien
tggtgaaaactgcagggctaaaact

SEQ ID NO: 2873971 - DNA, 25 bp, Homo sapien
cttgctcaacaatgaactagggacc

SEQ ID NO: 2873972 - DNA, 25 bp, Homo sapien
gccagctttggtccgtgtccgacta

SEQ ID NO: 2873973 - DNA, 25 bp, Homo sapien
ccagctttggtccgtgtccgactac

SEQ ID NO: 2873974 - DNA, 25 bp, Homo sapien
tctgccagctttggtccgtgtccga

SEQ ID NO: 2873975 - DNA, 25 bp, Homo sapien
tgccagctttggtccgtgtccgact

SEQ ID NO: 2873976 - DNA, 25 bp, Homo sapien
caaaagacttgacgggagattcatt

SEQ ID NO: 2873977 - DNA, 25 bp, Homo sapien
cacgacgtgtgaaagaactctgcat

SEQ ID NO: 2873978 - DNA, 25 bp, Homo sapien
gagattcatttaagtcacgacgtgt

SEQ ID NO: 2873979 - DNA, 25 bp, Homo sapien
tttaaagtccactaagcaatctgtg

SEQ ID NO: 2873980 - DNA, 25 bp, Homo sapien
gagaggtcataatagttccacagtg

SEQ ID NO: 2873981 - DNA, 25 bp, Homo sapien
cagagtcatactgagagagaggtca

SEQ ID NO: 2873982 - DNA, 25 bp, Homo sapien
gcaacagtctgagtatcacactaca

SEQ ID NO: 2873983 - DNA, 25 bp, Homo sapien
caaggcctgcacttttcagaaatgc

SEQ ID NO: 2873984 - DNA, 25 bp, Homo sapien
tcctgtttctgaagacttgatgtct

SEQ ID NO: 2873985 - DNA, 25 bp, Homo sapien
cctgtttctgaagacttgatgtctg

SEQ ID NO: 2873986 - DNA, 25 bp, Homo sapien
gtttctgaagacttgatgtctgcat

SEQ ID NO: 2873987 - DNA, 25 bp, Homo sapien
ctgaaggctcctgtttctgaagact

SEQ ID NO: 2873988 - DNA, 25 bp, Homo sapien
ggtagtagtgttggtaatcatagca

SEQ ID NO: 2873989 - DNA, 25 bp, Homo sapien
tgcttctcatcaggcctatccaggt

SEQ ID NO: 2873990 - DNA, 25 bp, Homo sapien
actgatcttttgcttccgtgctcta

SEQ ID NO: 2873991 - DNA, 25 bp, Homo sapien
tatccaggtagcacagatccccaat

SEQ ID NO: 2873992 - DNA, 25 bp, Homo sapien
taaatactacgcacaaacgctcagg

SEQ ID NO: 2873993 - DNA, 25 bp, Homo sapien
tcaggatcacaggttgcgacactaa

SEQ ID NO: 2873994 - DNA, 25 bp, Homo sapien
gcttgtcgtattcccctgtgttttg

SEQ ID NO: 2873995 - DNA, 25 bp, Homo sapien
tatgaggtttggcattactaactcc

SEQ ID NO: 2873996 - DNA, 25 bp, Homo sapien
agaaactaaggagtcggccttcact

SEQ ID NO: 2873997 - DNA, 25 bp, Homo sapien
ctaaggagtcggccttcactgtggc

SEQ ID NO: 2873998 - DNA, 25 bp, Homo sapien
gaaactaaggagtcggccttcactg

SEQ ID NO: 2873999 - DNA, 25 bp, Homo sapien
aactaaggagtcggccttcactgtg

SEQ ID NO: 2874000 - DNA, 25 bp, Homo sapien
gaagagaatacatcgctatgcccag

SEQ ID NO: 2874001 - DNA, 25 bp, Homo sapien
cacacgtgttcatagaagagaaaag

SEQ ID NO: 2874002 - DNA, 25 bp, Homo sapien
tgtcagagtctaaaatacaacttcc

SEQ ID NO: 2874003 - DNA, 25 bp, Homo sapien
taataaacgagggtttcacaagtga

SEQ ID NO: 2874004 - DNA, 25 bp, Homo sapien
cctaaggagttcgacagagttgatc

SEQ ID NO: 2874005 - DNA, 25 bp, Homo sapien
gcaatttggcaggtttcgagacact

SEQ ID NO: 2874006 - DNA, 25 bp, Homo sapien
cggtaaccctagaatatggagctgc

SEQ ID NO: 2874007 - DNA, 25 bp, Homo sapien
tacagtgactcctttgtcggtaacc

SEQ ID NO: 2874008 - DNA, 25 bp, Homo sapien
ggagacaggagtccacatgacactg

SEQ ID NO: 2874009 - DNA, 25 bp, Homo sapien
cactgatactctctaaatgggacca

SEQ ID NO: 2874010 - DNA, 25 bp, Homo sapien
tgggaccagggatttacagaggtaa

SEQ ID NO: 2874011 - DNA, 25 bp, Homo sapien
ttggtcagcctttgcaagctggaga

SEQ ID NO: 2874012 - DNA, 25 bp, Homo sapien
caatctgcaacatcaactaagaagt

SEQ ID NO: 2874013 - DNA, 25 bp, Homo sapien
gacatttttaccagggtggatgaac

SEQ ID NO: 2874014 - DNA, 25 bp, Homo sapien
gagcaccaagagcattaaattaagt

SEQ ID NO: 2874015 - DNA, 25 bp, Homo sapien
tgtggttctgccagaggcttttgcg

SEQ ID NO: 2874016 - DNA, 25 bp, Homo sapien
gcagctgtcccactgtcactcttgg

SEQ ID NO: 2874017 - DNA, 25 bp, Homo sapien
ccactgtcactcttggtcttggcct

SEQ ID NO: 2874018 - DNA, 25 bp, Homo sapien
gtcaatgtctagagaagtctgggca

SEQ ID NO: 2874019 - DNA, 25 bp, Homo sapien
tggcctctttttgtctccgagtcaa

SEQ ID NO: 2874020 - DNA, 25 bp, Homo sapien
tagtcttggtaggacatatggtctc

SEQ ID NO: 2874021 - DNA, 25 bp, Homo sapien
tactcaactctgcactgttagcagg

SEQ ID NO: 2874022 - DNA, 25 bp, Homo sapien
tacgagtaacttaggttgtgaagca

SEQ ID NO: 2874023 - DNA, 25 bp, Homo sapien
gataatttagcagggttacgagtaa

SEQ ID NO: 2874024 - DNA, 25 bp, Homo sapien
tgccagagactttataaacatcttt

SEQ ID NO: 2874025 - DNA, 25 bp, Homo sapien
caacaaccctacaaagaatatatca

SEQ ID NO: 2874026 - DNA, 25 bp, Homo sapien
aagagctcttgttttatgaggacct

SEQ ID NO: 2874027 - DNA, 25 bp, Homo sapien
tatgaggacctattttgtgccagag

SEQ ID NO: 2874028 - DNA, 25 bp, Homo sapien
taaaattgggcaaggagcggtggct

SEQ ID NO: 2874029 - DNA, 25 bp, Homo sapien
tattggctaggtaaggtggcccacg

SEQ ID NO: 2874030 - DNA, 25 bp, Homo sapien
aaaattgaattcctcagtcccatga

SEQ ID NO: 2874031 - DNA, 25 bp, Homo sapien
gctaccatatttgacagcacagcta

SEQ ID NO: 2874032 - DNA, 25 bp, Homo sapien
cctgcatctaaagtggtaccagcta

SEQ ID NO: 2874033 - DNA, 25 bp, Homo sapien
tataagtcaatttctgtcccctgca

SEQ ID NO: 2874034 - DNA, 25 bp, Homo sapien
caagagaggagtaagcctaatgccc

SEQ ID NO: 2874035 - DNA, 25 bp, Homo sapien
ggcacccaccaaatgttataagtca

SEQ ID NO: 2874036 - DNA, 25 bp, Homo sapien
agcgagccaaggttccactactgca

SEQ ID NO: 2874037 - DNA, 25 bp, Homo sapien
cgaagtcatcattaacccagttgct

SEQ ID NO: 2874038 - DNA, 25 bp, Homo sapien
tatggtcaaagcaaacatcagatct

SEQ ID NO: 2874039 - DNA, 25 bp, Homo sapien
gtgttcccgctctcaaacaacgaag

SEQ ID NO: 2874040 - DNA, 25 bp, Homo sapien
tcatttggttattcactgggcatct

SEQ ID NO: 2874041 - DNA, 25 bp, Homo sapien
tagcaggtgctcataaatggtagct

SEQ ID NO: 2874042 - DNA, 25 bp, Homo sapien
caagcatttcctttatatacggccg

SEQ ID NO: 2874043 - DNA, 25 bp, Homo sapien
aatgttgcttaatgttaagcatggc

SEQ ID NO: 2874044 - DNA, 25 bp, Homo sapien
taagcatggcttataaagatgcggc

SEQ ID NO: 2874045 - DNA, 25 bp, Homo sapien
gaggcttccacggtcttctcaaaca

SEQ ID NO: 2874046 - DNA, 25 bp, Homo sapien
tgcttactgcctgacaatgcaagtg

SEQ ID NO: 2874047 - DNA, 25 bp, Homo sapien
tatgtcacatggacgctgttcacca

SEQ ID NO: 2874048 - DNA, 25 bp, Homo sapien
tgctttcctgaaaccgactgaggct

SEQ ID NO: 2874049 - DNA, 25 bp, Homo sapien
gagtcagagtaagcagtcatgtccc

SEQ ID NO: 2874050 - DNA, 25 bp, Homo sapien
tgaaaccgtgaatcaagccacaagt

SEQ ID NO: 2874051 - DNA, 25 bp, Homo sapien
gaactaccatgactgaccctagatg

SEQ ID NO: 2874052 - DNA, 25 bp, Homo sapien
tacagtgactacaccgtaagtggac

SEQ ID NO: 2874053 - DNA, 25 bp, Homo sapien
ccaaaccaagcacgtctaggatccg

SEQ ID NO: 2874054 - DNA, 25 bp, Homo sapien
tacacagccaaaccaagcacgtcta

SEQ ID NO: 2874055 - DNA, 25 bp, Homo sapien
cagccaaaccaagcacgtctaggat

SEQ ID NO: 2874056 - DNA, 25 bp, Homo sapien
tttcttttacacagccaaaccaagc

SEQ ID NO: 2874057 - DNA, 25 bp, Homo sapien
tgatgccgagaatacagggactttc

SEQ ID NO: 2874058 - DNA, 25 bp, Homo sapien
gcgatatccagagtgtaaatccaac

SEQ ID NO: 2874059 - DNA, 25 bp, Homo sapien
gggtattcgcatcaaagctataaag

SEQ ID NO: 2874060 - DNA, 25 bp, Homo sapien
agacatcttcacatggaggtctggg

SEQ ID NO: 2874061 - DNA, 25 bp, Homo sapien
tgtaattaaacgatatctgacagtt

SEQ ID NO: 2874062 - DNA, 25 bp, Homo sapien
gaagaccggcttaacagcaattatc

SEQ ID NO: 2874063 - DNA, 25 bp, Homo sapien
ccagtaaggaagaccggcttaacag

SEQ ID NO: 2874064 - DNA, 25 bp, Homo sapien
cagcaattatcttgtaattaaacga

SEQ ID NO: 2874065 - DNA, 25 bp, Homo sapien
cattggtcacatagcgggcaggata

SEQ ID NO: 2874066 - DNA, 25 bp, Homo sapien
ggtggaaagcattggtcacatagcg

SEQ ID NO: 2874067 - DNA, 25 bp, Homo sapien
cattgcagtacatggcatgtcgttc

SEQ ID NO: 2874068 - DNA, 25 bp, Homo sapien
cttcctccatcagaccattgcagta

SEQ ID NO: 2874069 - DNA, 25 bp, Homo sapien
aaggtagaaatagctacttccttct

SEQ ID NO: 2874070 - DNA, 25 bp, Homo sapien
tacaacgaactgcaagagactccac

SEQ ID NO: 2874071 - DNA, 25 bp, Homo sapien
gagtcaatacttattcagtgcctta

SEQ ID NO: 2874072 - DNA, 25 bp, Homo sapien
caacagcttatcaaattcaggagta

SEQ ID NO: 2874073 - DNA, 25 bp, Homo sapien
tgacaaacagcaatcataacagctt

SEQ ID NO: 2874074 - DNA, 25 bp, Homo sapien
ctgactccatccaagatatctctgc

SEQ ID NO: 2874075 - DNA, 25 bp, Homo sapien
actccatccaagatatctctgctac

SEQ ID NO: 2874076 - DNA, 25 bp, Homo sapien
tgactccatccaagatatctctgct

SEQ ID NO: 2874077 - DNA, 25 bp, Homo sapien
gagagacttctctttcaaggtcaaa

SEQ ID NO: 2874078 - DNA, 25 bp, Homo sapien
taaggactaagcttctcttactggt

SEQ ID NO: 2874079 - DNA, 25 bp, Homo sapien
agaactctctggcataaggactaag

SEQ ID NO: 2874080 - DNA, 25 bp, Homo sapien
tctcttactggtcaaagcagcaaca

SEQ ID NO: 2874081 - DNA, 25 bp, Homo sapien
tctggcataaggactaagcttctct

SEQ ID NO: 2874082 - DNA, 25 bp, Homo sapien
ctttgtgaagcaggtacagagtttc

SEQ ID NO: 2874083 - DNA, 25 bp, Homo sapien
tttcttcaacaatcccttgggaaga

SEQ ID NO: 2874084 - DNA, 25 bp, Homo sapien
tgaagcaggtacagagtttccctct

SEQ ID NO: 2874085 - DNA, 25 bp, Homo sapien
tcagaagtttcttcaacaatccctt

SEQ ID NO: 2874086 - DNA, 25 bp, Homo sapien
taattgttcaatgttctccctcaac

SEQ ID NO: 2874087 - DNA, 25 bp, Homo sapien
ctgcaaagaaatacgtagtatctta

SEQ ID NO: 2874088 - DNA, 25 bp, Homo sapien
gcacatcctgtaaagtcagaagact

SEQ ID NO: 2874089 - DNA, 25 bp, Homo sapien
tgtgattgggtaaatgacatctgaa

SEQ ID NO: 2874090 - DNA, 25 bp, Homo sapien
gagaaaaaccaagccataacacagg

SEQ ID NO: 2874091 - DNA, 25 bp, Homo sapien
gcacttcataacatgcaagacctgt

SEQ ID NO: 2874092 - DNA, 25 bp, Homo sapien
aatactgagttgagataaacactgc

SEQ ID NO: 2874093 - DNA, 25 bp, Homo sapien
caggacatctaaagggaaggttaca

SEQ ID NO: 2874094 - DNA, 25 bp, Homo sapien
tgccttaggctaaagcatatctcaa

SEQ ID NO: 2874095 - DNA, 25 bp, Homo sapien
gtaagttagttataaggcacctcca

SEQ ID NO: 2874096 - DNA, 25 bp, Homo sapien
tgaatctcgctaccattcaggtaaa

SEQ ID NO: 2874097 - DNA, 25 bp, Homo sapien
taccaaaggactaaaatacaacagc

SEQ ID NO: 2874098 - DNA, 25 bp, Homo sapien
aaaaaaattattgtgctttggccag

SEQ ID NO: 2874099 - DNA, 25 bp, Homo sapien
aaaaattattgtgctttggccaggc

SEQ ID NO: 2874100 - DNA, 25 bp, Homo sapien
aattattgtgctttggccaggcgcg

SEQ ID NO: 2874101 - DNA, 25 bp, Homo sapien
aaattattgtgctttggccaggcgc

SEQ ID NO: 2874102 - DNA, 25 bp, Homo sapien
gtttggcaaatcaaagtcagttctc

SEQ ID NO: 2874103 - DNA, 25 bp, Homo sapien
catacatcagcgtgaagtttggcaa

SEQ ID NO: 2874104 - DNA, 25 bp, Homo sapien
ggtctgagtattctggtcactgaaa

SEQ ID NO: 2874105 - DNA, 25 bp, Homo sapien
tatttcaaccctccagatactgtca

SEQ ID NO: 2874106 - DNA, 25 bp, Homo sapien
tgacaagtaacctccatcaagccac

SEQ ID NO: 2874107 - DNA, 25 bp, Homo sapien
caccaaatgggccataaatcctttc

SEQ ID NO: 2874108 - DNA, 25 bp, Homo sapien
attagcagtgggcttacagccaatt

SEQ ID NO: 2874109 - DNA, 25 bp, Homo sapien
tgactgggctactgacaccaaatgg

SEQ ID NO: 2874110 - DNA, 25 bp, Homo sapien
tctatgatgtagagctctggcccct

SEQ ID NO: 2874111 - DNA, 25 bp, Homo sapien
gaatgacctttgatcccttagagag

SEQ ID NO: 2874112 - DNA, 25 bp, Homo sapien
tggcccctgggatcttgcaagctaa

SEQ ID NO: 2874113 - DNA, 25 bp, Homo sapien
taagaagcagcatctccgaattgga

SEQ ID NO: 2874114 - DNA, 25 bp, Homo sapien
ataatccttgttttaatctgtgaat

SEQ ID NO: 2874115 - DNA, 25 bp, Homo sapien
taataatcaaggaggggaagaccac

SEQ ID NO: 2874116 - DNA, 25 bp, Homo sapien
tctgtgaataaatcatccttaatta

SEQ ID NO: 2874117 - DNA, 25 bp, Homo sapien
atccttgttttaatctgtgaataaa

SEQ ID NO: 2874118 - DNA, 25 bp, Homo sapien
catcagggcagaatggaatacccca

SEQ ID NO: 2874119 - DNA, 25 bp, Homo sapien
ggttagggtctactccatcagggca

SEQ ID NO: 2874120 - DNA, 25 bp, Homo sapien
tctgctagggtaggtagacagtgcc

SEQ ID NO: 2874121 - DNA, 25 bp, Homo sapien
tgtcctggagacctttggcatctgc

SEQ ID NO: 2874122 - DNA, 25 bp, Homo sapien
gctcagccgagtggccagtacatct

SEQ ID NO: 2874123 - DNA, 25 bp, Homo sapien
ggcttgactggtcccagcttcctga

SEQ ID NO: 2874124 - DNA, 25 bp, Homo sapien
gcctcgtttccctgactgatatgtg

SEQ ID NO: 2874125 - DNA, 25 bp, Homo sapien
gagctgccagagaccggctcctctt

SEQ ID NO: 2874126 - DNA, 25 bp, Homo sapien
cagtgatggaggtaccagctgccat

SEQ ID NO: 2874127 - DNA, 25 bp, Homo sapien
acagtgatggaggtaccagctgcca

SEQ ID NO: 2874128 - DNA, 25 bp, Homo sapien
tttccttggagataaaagtatgccg

SEQ ID NO: 2874129 - DNA, 25 bp, Homo sapien
tttattatcaccaaaaggatctggg

SEQ ID NO: 2874130 - DNA, 25 bp, Homo sapien
tacataatatgggtaagaaaggctc

SEQ ID NO: 2874131 - DNA, 25 bp, Homo sapien
ctcagcatgagatccctgtggtaca

SEQ ID NO: 2874132 - DNA, 25 bp, Homo sapien
ccagaggtcgagatctggtagcgga

SEQ ID NO: 2874133 - DNA, 25 bp, Homo sapien
gaggtcgagatctggtagcggaagc

SEQ ID NO: 2874134 - DNA, 25 bp, Homo sapien
ggtcgagatctggtagcggaagcat

SEQ ID NO: 2874135 - DNA, 25 bp, Homo sapien
agtggccagaggtcgagatctggta

SEQ ID NO: 2874136 - DNA, 25 bp, Homo sapien
taaaaagatggttcaggacctgcca

SEQ ID NO: 2874137 - DNA, 25 bp, Homo sapien
ggaggccaccgttcataagactttc

SEQ ID NO: 2874138 - DNA, 25 bp, Homo sapien
tgtgcaaagtgttgtactagatcac

SEQ ID NO: 2874139 - DNA, 25 bp, Homo sapien
tgccactggcaagtatccttcacat

SEQ ID NO: 2874140 - DNA, 25 bp, Homo sapien
ttgggttaaccaacaattcaacaca

SEQ ID NO: 2874141 - DNA, 25 bp, Homo sapien
ggtgaaaaccctataaatgactaca

SEQ ID NO: 2874142 - DNA, 25 bp, Homo sapien
aatgactacagctagttcctaatgc

SEQ ID NO: 2874143 - DNA, 25 bp, Homo sapien
tagagaagttagcatcttatcttgc

SEQ ID NO: 2874144 - DNA, 25 bp, Homo sapien
cagaagtcaaaaatatagctgatca

SEQ ID NO: 2874145 - DNA, 25 bp, Homo sapien
aaaaatatagctgatcaatctccac

SEQ ID NO: 2874146 - DNA, 25 bp, Homo sapien
cacagaagtcaaaaatatagctgat

SEQ ID NO: 2874147 - DNA, 25 bp, Homo sapien
tcaaaaatatagctgatcaatctcc

SEQ ID NO: 2874148 - DNA, 25 bp, Homo sapien
ctggctgttcacctccctagcttcc

SEQ ID NO: 2874149 - DNA, 25 bp, Homo sapien
acctccctagcttcctgctcactca

SEQ ID NO: 2874150 - DNA, 25 bp, Homo sapien
ggctgttcacctccctagcttcctg

SEQ ID NO: 2874151 - DNA, 25 bp, Homo sapien
gttcacctccctagcttcctgctca

SEQ ID NO: 2874152 - DNA, 25 bp, Homo sapien
tcgttttctgcaacccattttcctc

SEQ ID NO: 2874153 - DNA, 25 bp, Homo sapien
caaacactttgctctattcgactgt

SEQ ID NO: 2874154 - DNA, 25 bp, Homo sapien
cactttgctctattcgactgttttg

SEQ ID NO: 2874155 - DNA, 25 bp, Homo sapien
gctctattcgactgttttgtcttcg

SEQ ID NO: 2874156 - DNA, 25 bp, Homo sapien
ggatttcaggccttaacactcagca

SEQ ID NO: 2874157 - DNA, 25 bp, Homo sapien
caggtggtaactgcaagtgttcaca

SEQ ID NO: 2874158 - DNA, 25 bp, Homo sapien
aggtctcccggaaatactataatgg

SEQ ID NO: 2874159 - DNA, 25 bp, Homo sapien
gatttgcactcaatgtgggtgaaca

SEQ ID NO: 2874160 - DNA, 25 bp, Homo sapien
gagccatactactggcatcccaggg

SEQ ID NO: 2874161 - DNA, 25 bp, Homo sapien
aatagactattgtggggacttttca

SEQ ID NO: 2874162 - DNA, 25 bp, Homo sapien
ttcagacttccactgagccatacta

SEQ ID NO: 2874163 - DNA, 25 bp, Homo sapien
cctaataaattccatccgtctgtcc

SEQ ID NO: 2874164 - DNA, 25 bp, Homo sapien
catagtttgagagctacagctctac

SEQ ID NO: 2874165 - DNA, 25 bp, Homo sapien
agcatagtttgagagctacagctct

SEQ ID NO: 2874166 - DNA, 25 bp, Homo sapien
aagcatagtttgagagctacagctc

SEQ ID NO: 2874167 - DNA, 25 bp, Homo sapien
gcatagtttgagagctacagctcta

SEQ ID NO: 2874168 - DNA, 25 bp, Homo sapien
ccgagattcggagacttctttaact

SEQ ID NO: 2874169 - DNA, 25 bp, Homo sapien
caatgaatgcatcctcaagtctacg

SEQ ID NO: 2874170 - DNA, 25 bp, Homo sapien
cactatcggatatcacaatgaatgc

SEQ ID NO: 2874171 - DNA, 25 bp, Homo sapien
tctccatcactatcggatatcacaa

SEQ ID NO: 2874172 - DNA, 25 bp, Homo sapien
ctagaataaaaggacaataattttg

SEQ ID NO: 2874173 - DNA, 25 bp, Homo sapien
ataagttttctagaagctattcaac

SEQ ID NO: 2874174 - DNA, 25 bp, Homo sapien
ttttctagaagctattcaacttagt

SEQ ID NO: 2874175 - DNA, 25 bp, Homo sapien
tctagaagctattcaacttagtctt

SEQ ID NO: 2874176 - DNA, 25 bp, Homo sapien
taagttttctagaagctattcaact

SEQ ID NO: 2874177 - DNA, 25 bp, Homo sapien
agattcaggtctgctactaccataa

SEQ ID NO: 2874178 - DNA, 25 bp, Homo sapien
actaccataatgaagactacccaaa

SEQ ID NO: 2874179 - DNA, 25 bp, Homo sapien
tgctactaccataatgaagactacc

SEQ ID NO: 2874180 - DNA, 25 bp, Homo sapien
tttagattcaggtctgctactacca

SEQ ID NO: 2874181 - DNA, 25 bp, Homo sapien
aagaagcaagcgatattaacaaact

SEQ ID NO: 2874182 - DNA, 25 bp, Homo sapien
taaaaaacacttgggtaatgcagca

SEQ ID NO: 2874183 - DNA, 25 bp, Homo sapien
ttacatctctaggtggattccaaaa

SEQ ID NO: 2874184 - DNA, 25 bp, Homo sapien
caaaagcagatatactaaaggccaa

SEQ ID NO: 2874185 - DNA, 25 bp, Homo sapien
ctcgagaagcctgcggcgctgccta

SEQ ID NO: 2874186 - DNA, 25 bp, Homo sapien
tggcgctcgagaagcctgcggcgct

SEQ ID NO: 2874187 - DNA, 25 bp, Homo sapien
ccagcccgccggctgtggcgctcga

SEQ ID NO: 2874188 - DNA, 25 bp, Homo sapien
ttaactgagcggcagggcaccagcc

SEQ ID NO: 2874189 - DNA, 25 bp, Homo sapien
tggagaagcccaacccggcaccagt

SEQ ID NO: 2874190 - DNA, 25 bp, Homo sapien
cagtaatggccggtcccggcgtccg

SEQ ID NO: 2874191 - DNA, 25 bp, Homo sapien
ccgagcccacttcggcgtccggagg

SEQ ID NO: 2874192 - DNA, 25 bp, Homo sapien
caacccggcaccagtaatggccggt

SEQ ID NO: 2874193 - DNA, 25 bp, Homo sapien
ggaagcgcccctcccggagagtagc

SEQ ID NO: 2874194 - DNA, 25 bp, Homo sapien
ctcccggagagtagcgggccgcgga

SEQ ID NO: 2874195 - DNA, 25 bp, Homo sapien
tcccggagagtagcgggccgcggac

SEQ ID NO: 2874196 - DNA, 25 bp, Homo sapien
ccctcccggagagtagcgggccgcg

SEQ ID NO: 2874197 - DNA, 25 bp, Homo sapien
ggtgggcggagctgtgcgcaggcgg

SEQ ID NO: 2874198 - DNA, 25 bp, Homo sapien
gcgcagcgcgcggagacttaaccaa

SEQ ID NO: 2874199 - DNA, 25 bp, Homo sapien
tccgatgccagagacacgctctcgg

SEQ ID NO: 2874200 - DNA, 25 bp, Homo sapien
tctgtagaccttctccgggttgccg

SEQ ID NO: 2874201 - DNA, 25 bp, Homo sapien
tcgcgagccgccacacgttgggagc

SEQ ID NO: 2874202 - DNA, 25 bp, Homo sapien
agaggaaaagcttatatttaaattg

SEQ ID NO: 2874203 - DNA, 25 bp, Homo sapien
agtcccccagaggaaaagcttatat

SEQ ID NO: 2874204 - DNA, 25 bp, Homo sapien
aagcttatatttaaattgggtcttg

SEQ ID NO: 2874205 - DNA, 25 bp, Homo sapien
tatttaaattgggtcttgaaggcta

SEQ ID NO: 2874206 - DNA, 25 bp, Homo sapien
caggccacgcataccatgagagcat

SEQ ID NO: 2874207 - DNA, 25 bp, Homo sapien
taactcaggagtgccaaagtcctcc

SEQ ID NO: 2874208 - DNA, 25 bp, Homo sapien
tgaagcagcagtccactaaggtgga

SEQ ID NO: 2874209 - DNA, 25 bp, Homo sapien
tgagtagtgctatagtgggacccct

SEQ ID NO: 2874210 - DNA, 25 bp, Homo sapien
tggacgtggtgacacacgcctatag

SEQ ID NO: 2874211 - DNA, 25 bp, Homo sapien
tcccagctacttaggaggctgaggc

SEQ ID NO: 2874212 - DNA, 25 bp, Homo sapien
aggagaattgcttgaacccgggagg

SEQ ID NO: 2874213 - DNA, 25 bp, Homo sapien
agctggacgtggtgacacacgccta

SEQ ID NO: 2874214 - DNA, 25 bp, Homo sapien
gctgaatggcaggtatctggtagaa

SEQ ID NO: 2874215 - DNA, 25 bp, Homo sapien
tgctgaatggcaggtatctggtaga

SEQ ID NO: 2874216 - DNA, 25 bp, Homo sapien
gaatggcaggtatctggtagaatgc

SEQ ID NO: 2874217 - DNA, 25 bp, Homo sapien
ctgaatggcaggtatctggtagaat

SEQ ID NO: 2874218 - DNA, 25 bp, Homo sapien
tcactgcagctgcgaaacagcaggt

SEQ ID NO: 2874219 - DNA, 25 bp, Homo sapien
tgcagctgcgaaacagcaggtgtct

SEQ ID NO: 2874220 - DNA, 25 bp, Homo sapien
cactgcagctgcgaaacagcaggtg

SEQ ID NO: 2874221 - DNA, 25 bp, Homo sapien
agctgcgaaacagcaggtgtcttgg

SEQ ID NO: 2874222 - DNA, 25 bp, Homo sapien
cacttcccagctgtcggtcctcctc

SEQ ID NO: 2874223 - DNA, 25 bp, Homo sapien
agctgtcggtcctcctccaaacaga

SEQ ID NO: 2874224 - DNA, 25 bp, Homo sapien
acttcccagctgtcggtcctcctcc

SEQ ID NO: 2874225 - DNA, 25 bp, Homo sapien
ggtcctcctccaaacagacgtgcat

SEQ ID NO: 2874226 - DNA, 25 bp, Homo sapien
tcgaaatttgaccttcgtcggcacc

SEQ ID NO: 2874227 - DNA, 25 bp, Homo sapien
aatttgaccttcgtcggcacctggg

SEQ ID NO: 2874228 - DNA, 25 bp, Homo sapien
ctatcgaaatttgaccttcgtcggc

SEQ ID NO: 2874229 - DNA, 25 bp, Homo sapien
gaaatttgaccttcgtcggcacctg

SEQ ID NO: 2874230 - DNA, 25 bp, Homo sapien
attccacagcgccagccctttccgg

SEQ ID NO: 2874231 - DNA, 25 bp, Homo sapien
cgcgctggtactcgggggcgcagcc

SEQ ID NO: 2874232 - DNA, 25 bp, Homo sapien
agcctcacgttctcgcgctggtact

SEQ ID NO: 2874233 - DNA, 25 bp, Homo sapien
cagtgccagcctcacgttctcgcgc

SEQ ID NO: 2874234 - DNA, 25 bp, Homo sapien
ctgggcacctaccataggccaggta

SEQ ID NO: 2874235 - DNA, 25 bp, Homo sapien
ttgaaaggctcagtaaatcaagaaa

SEQ ID NO: 2874236 - DNA, 25 bp, Homo sapien
gagttgtggagtgttgggaattgaa

SEQ ID NO: 2874237 - DNA, 25 bp, Homo sapien
tgaccagatagaggaaggcgtgcag

SEQ ID NO: 2874238 - DNA, 25 bp, Homo sapien
tgcagggtagttgacatttttctcg

SEQ ID NO: 2874239 - DNA, 25 bp, Homo sapien
tggttgcagggtagttgacattttt

SEQ ID NO: 2874240 - DNA, 25 bp, Homo sapien
ggttgcagggtagttgacatttttc

SEQ ID NO: 2874241 - DNA, 25 bp, Homo sapien
ctacagcggcactactggtgatctg

SEQ ID NO: 2874242 - DNA, 25 bp, Homo sapien
attggctgccctttgccggcgcaac

SEQ ID NO: 2874243 - DNA, 25 bp, Homo sapien
tgccctttgccggcgcaacccaacg

SEQ ID NO: 2874244 - DNA, 25 bp, Homo sapien
aggaattggctgccctttgccggcg

SEQ ID NO: 2874245 - DNA, 25 bp, Homo sapien
gaattggctgccctttgccggcgca

SEQ ID NO: 2874246 - DNA, 25 bp, Homo sapien
taggaggcgttctcccaggaatgcg

SEQ ID NO: 2874247 - DNA, 25 bp, Homo sapien
agccacctgaccgaacggaccaata

SEQ ID NO: 2874248 - DNA, 25 bp, Homo sapien
aatgcggcccgcgtgtggccgggag

SEQ ID NO: 2874249 - DNA, 25 bp, Homo sapien
tgattggcccgtggcagccacctga

SEQ ID NO: 2874250 - DNA, 25 bp, Homo sapien
ttcagaaggaggtttaagaagaaga

SEQ ID NO: 2874251 - DNA, 25 bp, Homo sapien
tacaggctcaggttagcgacaggac

SEQ ID NO: 2874252 - DNA, 25 bp, Homo sapien
taaaggtggatgcttgagtccttcg

SEQ ID NO: 2874253 - DNA, 25 bp, Homo sapien
gaaaacttaaaggtggatgcttgag

SEQ ID NO: 2874254 - DNA, 25 bp, Homo sapien
acgcggtcgtgctagattcggtgct

SEQ ID NO: 2874255 - DNA, 25 bp, Homo sapien
gcttagcgccctagggaccaggtaa

SEQ ID NO: 2874256 - DNA, 25 bp, Homo sapien
ggctggagtcgcaagttcaggccca

SEQ ID NO: 2874257 - DNA, 25 bp, Homo sapien
tctctgaacagcgagaaggcgctta

SEQ ID NO: 2874258 - DNA, 25 bp, Homo sapien
ttacttctgtgttcatgatgacatc

SEQ ID NO: 2874259 - DNA, 25 bp, Homo sapien
attatcctattcatctcaaagctgg

SEQ ID NO: 2874260 - DNA, 25 bp, Homo sapien
tttgaacccatctcttttattgcca

SEQ ID NO: 2874261 - DNA, 25 bp, Homo sapien
ttttattgccaaacacgcatttact

SEQ ID NO: 2874262 - DNA, 25 bp, Homo sapien
ctctgtcgccaggttcactgcaagc

SEQ ID NO: 2874263 - DNA, 25 bp, Homo sapien
cctctgtcgccaggttcactgcaag

SEQ ID NO: 2874264 - DNA, 25 bp, Homo sapien
tctccctctgtcgccaggttcactg

SEQ ID NO: 2874265 - DNA, 25 bp, Homo sapien
tccctctgtcgccaggttcactgca

SEQ ID NO: 2874266 - DNA, 25 bp, Homo sapien
ttataggcgtgtgccctcaacgcct

SEQ ID NO: 2874267 - DNA, 25 bp, Homo sapien
aggcgtgtgccctcaacgcctgggt

SEQ ID NO: 2874268 - DNA, 25 bp, Homo sapien
tataggcgtgtgccctcaacgcctg

SEQ ID NO: 2874269 - DNA, 25 bp, Homo sapien
cgtgtgccctcaacgcctgggtaat

SEQ ID NO: 2874270 - DNA, 25 bp, Homo sapien
ccacgcctggctaattttgtatttt

SEQ ID NO: 2874271 - DNA, 25 bp, Homo sapien
tctccgtgttgagactggtctcgaa

SEQ ID NO: 2874272 - DNA, 25 bp, Homo sapien
tgttagagatggggtttctccgtgt

SEQ ID NO: 2874273 - DNA, 25 bp, Homo sapien
attgcaggcatataccaccacgcct

SEQ ID NO: 2874274 - DNA, 25 bp, Homo sapien
aggacactgccctccaggttgggca

SEQ ID NO: 2874275 - DNA, 25 bp, Homo sapien
caggacactgccctccaggttgggc

SEQ ID NO: 2874276 - DNA, 25 bp, Homo sapien
tgagatcaggacactgccctccagg

SEQ ID NO: 2874277 - DNA, 25 bp, Homo sapien
gatcaggacactgccctccaggttg

SEQ ID NO: 2874278 - DNA, 25 bp, Homo sapien
cattgaggtagaagttagattggac

SEQ ID NO: 2874279 - DNA, 25 bp, Homo sapien
gaaaccatcgaaagtgaagtctcac

SEQ ID NO: 2874280 - DNA, 25 bp, Homo sapien
gtggagatcacgagtaccttttttg

SEQ ID NO: 2874281 - DNA, 25 bp, Homo sapien
ttttgctgagtgttgcctagagagc

SEQ ID NO: 2874282 - DNA, 25 bp, Homo sapien
aacagtatgatgttcccaaggggtc

SEQ ID NO: 2874283 - DNA, 25 bp, Homo sapien
agttggacagtgaagaagatatgcc

SEQ ID NO: 2874284 - DNA, 25 bp, Homo sapien
gagtaaatgggaagccagtgttgga

SEQ ID NO: 2874285 - DNA, 25 bp, Homo sapien
gtattcctggttcaatcaagttgga

SEQ ID NO: 2874286 - DNA, 25 bp, Homo sapien
tactaagagtgcagagcctggaacc

SEQ ID NO: 2874287 - DNA, 25 bp, Homo sapien
tactaggcgcaactgtggacgatca

SEQ ID NO: 2874288 - DNA, 25 bp, Homo sapien
tacctggcttactgtccgacaagag

SEQ ID NO: 2874289 - DNA, 25 bp, Homo sapien
gatggaagcagtgacctggatccca

SEQ ID NO: 2874290 - DNA, 25 bp, Homo sapien
gagtataatgatgcgatctcaagtc

SEQ ID NO: 2874291 - DNA, 25 bp, Homo sapien
cctagaatggcattggtggaacata

SEQ ID NO: 2874292 - DNA, 25 bp, Homo sapien
tgcacccagtgatgttcatttcttt

SEQ ID NO: 2874293 - DNA, 25 bp, Homo sapien
tggtggaacatagggtaattctact

SEQ ID NO: 2874294 - DNA, 25 bp, Homo sapien
tggtcatgatgtatatttctttttt

SEQ ID NO: 2874295 - DNA, 25 bp, Homo sapien
ctgcaagctccacctcccggattga

SEQ ID NO: 2874296 - DNA, 25 bp, Homo sapien
tggcgtgccgtggcgcaatctcggg

SEQ ID NO: 2874297 - DNA, 25 bp, Homo sapien
cgtgccgtggcgcaatctcgggtca

SEQ ID NO: 2874298 - DNA, 25 bp, Homo sapien
cagtggcttagatctgctctccaga

SEQ ID NO: 2874299 - DNA, 25 bp, Homo sapien
gatactcagtgtatgaattaccaag

SEQ ID NO: 2874300 - DNA, 25 bp, Homo sapien
gcagagtgtgccatagtttttcgtt

SEQ ID NO: 2874301 - DNA, 25 bp, Homo sapien
ctagtaaatagggtcatatgggtgc

SEQ ID NO: 2874302 - DNA, 25 bp, Homo sapien
ttgcctgggctggcctcgacttcct

SEQ ID NO: 2874303 - DNA, 25 bp, Homo sapien
gcctgggctggcctcgacttcctgg

SEQ ID NO: 2874304 - DNA, 25 bp, Homo sapien
cgttgcctgggctggcctcgacttc

SEQ ID NO: 2874305 - DNA, 25 bp, Homo sapien
cagctcagtaaacctccaccttcca

SEQ ID NO: 2874306 - DNA, 25 bp, Homo sapien
gcttgttgaagagaattattaagta

SEQ ID NO: 2874307 - DNA, 25 bp, Homo sapien
gcccttttggccgaaactgccatct

SEQ ID NO: 2874308 - DNA, 25 bp, Homo sapien
aggcccttttggccgaaactgccat

SEQ ID NO: 2874309 - DNA, 25 bp, Homo sapien
cccttttggccgaaactgccatctt

SEQ ID NO: 2874310 - DNA, 25 bp, Homo sapien
gcacatcctgtagtctgtggagcag

SEQ ID NO: 2874311 - DNA, 25 bp, Homo sapien
acaaccgtctaggaatgctcagccc

SEQ ID NO: 2874312 - DNA, 25 bp, Homo sapien
ttattggcataaatgcagccatcta

SEQ ID NO: 2874313 - DNA, 25 bp, Homo sapien
ggagccccacaaccgtctaggaatg

SEQ ID NO: 2874314 - DNA, 25 bp, Homo sapien
aatctaggttgatggtgaagtcccg

SEQ ID NO: 2874315 - DNA, 25 bp, Homo sapien
atctaggttgatggtgaagtcccgg

SEQ ID NO: 2874316 - DNA, 25 bp, Homo sapien
ctaggttgatggtgaagtcccggtc

SEQ ID NO: 2874317 - DNA, 25 bp, Homo sapien
tctaggttgatggtgaagtcccggt

SEQ ID NO: 2874318 - DNA, 25 bp, Homo sapien
gtcctcttgtggcagtgcgtaaact

SEQ ID NO: 2874319 - DNA, 25 bp, Homo sapien
agtgcgtgtacagggactcgggtat

SEQ ID NO: 2874320 - DNA, 25 bp, Homo sapien
ggcagtgcgtaaactcgatgttgaa

SEQ ID NO: 2874321 - DNA, 25 bp, Homo sapien
cagggactcgggtatggtggagaag

SEQ ID NO: 2874322 - DNA, 25 bp, Homo sapien
caccttgacggtgtagatgtctacc

SEQ ID NO: 2874323 - DNA, 25 bp, Homo sapien
gggtgtgcacgtagtcattctgctt

SEQ ID NO: 2874324 - DNA, 25 bp, Homo sapien
ggtcaggtcttccaccttgacggtg

SEQ ID NO: 2874325 - DNA, 25 bp, Homo sapien
tgtgcacgtagtcattctgcttcac

SEQ ID NO: 2874326 - DNA, 25 bp, Homo sapien
ggtaaccagctgtttgaggtccacc

SEQ ID NO: 2874327 - DNA, 25 bp, Homo sapien
atatatcgaagccataaacgttctc

SEQ ID NO: 2874328 - DNA, 25 bp, Homo sapien
aaccagctgtttgaggtccaccaca

SEQ ID NO: 2874329 - DNA, 25 bp, Homo sapien
taaccagctgtttgaggtccaccac

SEQ ID NO: 2874330 - DNA, 25 bp, Homo sapien
cttgtccgggcatagagcacagtgt

SEQ ID NO: 2874331 - DNA, 25 bp, Homo sapien
tggtcaccaagtggtctaacttgtt

SEQ ID NO: 2874332 - DNA, 25 bp, Homo sapien
ggtgatggtcaccaagtggtctaac

SEQ ID NO: 2874333 - DNA, 25 bp, Homo sapien
ccccttggtgatggtcaccaagtgg

SEQ ID NO: 2874334 - DNA, 25 bp, Homo sapien
ttttccaccgggagctctatctcct

SEQ ID NO: 2874335 - DNA, 25 bp, Homo sapien
gggcccggccttggcggcgaacatg

SEQ ID NO: 2874336 - DNA, 25 bp, Homo sapien
ccttggcggcgaacatgcagaggat

SEQ ID NO: 2874337 - DNA, 25 bp, Homo sapien
ccggccttggcggcgaacatgcaga

SEQ ID NO: 2874338 - DNA, 25 bp, Homo sapien
cgggcccggccttggcggcgaacat

SEQ ID NO: 2874339 - DNA, 25 bp, Homo sapien
gacgttcggcttctcgctgctttcc

SEQ ID NO: 2874340 - DNA, 25 bp, Homo sapien
atgatgcagttcacgacctcggcgg

SEQ ID NO: 2874341 - DNA, 25 bp, Homo sapien
taaagaggtggcggttgtgaaacat

SEQ ID NO: 2874342 - DNA, 25 bp, Homo sapien
agttgccgaagtgggcgtaggagtc

SEQ ID NO: 2874343 - DNA, 25 bp, Homo sapien
tgggccctgggaaaagcctcatcac

SEQ ID NO: 2874344 - DNA, 25 bp, Homo sapien
cagtcttgctggtctgctgggagca

SEQ ID NO: 2874345 - DNA, 25 bp, Homo sapien
cagaagtagtaccaatcaatgtcac

SEQ ID NO: 2874346 - DNA, 25 bp, Homo sapien
tccagtcacaagtgtgcagaatcag

SEQ ID NO: 2874347 - DNA, 25 bp, Homo sapien
tatggccagttagttctcagctgag

SEQ ID NO: 2874348 - DNA, 25 bp, Homo sapien
tcagctgagcttcctagggccagtg

SEQ ID NO: 2874349 - DNA, 25 bp, Homo sapien
tagttgctgtgggagcctgtcattg

SEQ ID NO: 2874350 - DNA, 25 bp, Homo sapien
gccaggttagaggagcccagtgtcc

SEQ ID NO: 2874351 - DNA, 25 bp, Homo sapien
tcttgacacctaatccacacagcag

SEQ ID NO: 2874352 - DNA, 25 bp, Homo sapien
tacagccccagtatctcagcggtaa

SEQ ID NO: 2874353 - DNA, 25 bp, Homo sapien
gacccttttatttcgaagcaactca

SEQ ID NO: 2874354 - DNA, 25 bp, Homo sapien
taatataagcagtgaggccagccgg

SEQ ID NO: 2874355 - DNA, 25 bp, Homo sapien
gccacttaaataatctgcagacaca

SEQ ID NO: 2874356 - DNA, 25 bp, Homo sapien
aagccacttaaataatctgcagaca

SEQ ID NO: 2874357 - DNA, 25 bp, Homo sapien
ccacttaaataatctgcagacacaa

SEQ ID NO: 2874358 - DNA, 25 bp, Homo sapien
aaagccacttaaataatctgcagac

SEQ ID NO: 2874359 - DNA, 25 bp, Homo sapien
aaatcagccttatccctcctcatgc

SEQ ID NO: 2874360 - DNA, 25 bp, Homo sapien
aggcaggcgccactctgctgacatg

SEQ ID NO: 2874361 - DNA, 25 bp, Homo sapien
gacatttgactacccaagcccagaa

SEQ ID NO: 2874362 - DNA, 25 bp, Homo sapien
cagtcagcccaatgctgtctccgtt

SEQ ID NO: 2874363 - DNA, 25 bp, Homo sapien
aacagctgtagaagtaggggtttgg

SEQ ID NO: 2874364 - DNA, 25 bp, Homo sapien
tggcccagatccacgcccttgtcct

SEQ ID NO: 2874365 - DNA, 25 bp, Homo sapien
tctggcccagatccacgcccttgtc

SEQ ID NO: 2874366 - DNA, 25 bp, Homo sapien
tagaagtaggggtttggcttctggc

SEQ ID NO: 2874367 - DNA, 25 bp, Homo sapien
tcaaaaagagaggtggcagctcagc

SEQ ID NO: 2874368 - DNA, 25 bp, Homo sapien
aaaaagagaggtggcagctcagcac

SEQ ID NO: 2874369 - DNA, 25 bp, Homo sapien
tgtcaaaaagagaggtggcagctca

SEQ ID NO: 2874370 - DNA, 25 bp, Homo sapien
ctgtcaaaaagagaggtggcagctc

SEQ ID NO: 2874371 - DNA, 25 bp, Homo sapien
gggcctagagtaagtctccataaag

SEQ ID NO: 2874372 - DNA, 25 bp, Homo sapien
gctagatgctgtgggcctagagtaa

SEQ ID NO: 2874373 - DNA, 25 bp, Homo sapien
gatgctgtgggcctagagtaagtct

SEQ ID NO: 2874374 - DNA, 25 bp, Homo sapien
taactcaggaaaggggctagatgct

SEQ ID NO: 2874375 - DNA, 25 bp, Homo sapien
cactgacgtaatcctctgccacttt

SEQ ID NO: 2874376 - DNA, 25 bp, Homo sapien
ctgacgtaatcctctgccactttct

SEQ ID NO: 2874377 - DNA, 25 bp, Homo sapien
cacactgacgtaatcctctgccact

SEQ ID NO: 2874378 - DNA, 25 bp, Homo sapien
gccacactgacgtaatcctctgcca

SEQ ID NO: 2874379 - DNA, 25 bp, Homo sapien
atgatgatcagcgagggcccaatgc

SEQ ID NO: 2874380 - DNA, 25 bp, Homo sapien
aaatgatgatcagcgagggcccaat

SEQ ID NO: 2874381 - DNA, 25 bp, Homo sapien
aaaaatgatgatcagcgagggccca

SEQ ID NO: 2874382 - DNA, 25 bp, Homo sapien
gatgatcagcgagggcccaatgcca

SEQ ID NO: 2874383 - DNA, 25 bp, Homo sapien
tgtgccctattcagcttcctctggt

SEQ ID NO: 2874384 - DNA, 25 bp, Homo sapien
tctgtgccctattcagcttcctctg

SEQ ID NO: 2874385 - DNA, 25 bp, Homo sapien
ctctgtgccctattcagcttcctct

SEQ ID NO: 2874386 - DNA, 25 bp, Homo sapien
ctgtgccctattcagcttcctctgg

SEQ ID NO: 2874387 - DNA, 25 bp, Homo sapien
ctctggcctgtcttgctggatgttt

SEQ ID NO: 2874388 - DNA, 25 bp, Homo sapien
tctggcctgtcttgctggatgtttc

SEQ ID NO: 2874389 - DNA, 25 bp, Homo sapien
actctggcctgtcttgctggatgtt

SEQ ID NO: 2874390 - DNA, 25 bp, Homo sapien
tggcctgtcttgctggatgtttcaa

SEQ ID NO: 2874391 - DNA, 25 bp, Homo sapien
acagacaaaagggagggctagcagt

SEQ ID NO: 2874392 - DNA, 25 bp, Homo sapien
tacctgagaattagataaacagaca

SEQ ID NO: 2874393 - DNA, 25 bp, Homo sapien
agacaaaagggagggctagcagttc

SEQ ID NO: 2874394 - DNA, 25 bp, Homo sapien
ctaaagcctcatacctgagaattag

SEQ ID NO: 2874395 - DNA, 25 bp, Homo sapien
ggcagccaaggcagtccctattttc

SEQ ID NO: 2874396 - DNA, 25 bp, Homo sapien
tttctttgatccacccagacagcca

SEQ ID NO: 2874397 - DNA, 25 bp, Homo sapien
ccaggaagacctcctagagcacctt

SEQ ID NO: 2874398 - DNA, 25 bp, Homo sapien
ggaagacctcctagagcaccttgcc

SEQ ID NO: 2874399 - DNA, 25 bp, Homo sapien
tcctggacgtcgtggaagtccacac

SEQ ID NO: 2874400 - DNA, 25 bp, Homo sapien
tctgcatagtcctggacgtcgtgga

SEQ ID NO: 2874401 - DNA, 25 bp, Homo sapien
gcatagtcctggacgtcgtggaagt

SEQ ID NO: 2874402 - DNA, 25 bp, Homo sapien
atagtcctggacgtcgtggaagtcc

SEQ ID NO: 2874403 - DNA, 25 bp, Homo sapien
cttccagcaggtcactcttggtgcc

SEQ ID NO: 2874404 - DNA, 25 bp, Homo sapien
agcaggtcactcttggtgccacata

SEQ ID NO: 2874405 - DNA, 25 bp, Homo sapien
acgcctccggtcttcttccagcagg

SEQ ID NO: 2874406 - DNA, 25 bp, Homo sapien
cttggtgccacataagtagatttgg

SEQ ID NO: 2874407 - DNA, 25 bp, Homo sapien
gcagttccttcacccagaactttgc

SEQ ID NO: 2874408 - DNA, 25 bp, Homo sapien
cgcagttccttcacccagaactttg

SEQ ID NO: 2874409 - DNA, 25 bp, Homo sapien
cccagaactttgctcgctcaaagct

SEQ ID NO: 2874410 - DNA, 25 bp, Homo sapien
aactttgctcgctcaaagctgctgc

SEQ ID NO: 2874411 - DNA, 25 bp, Homo sapien
gcagccttggcaccccgatagtaga

SEQ ID NO: 2874412 - DNA, 25 bp, Homo sapien
tagtagattctactcatggcctcat

SEQ ID NO: 2874413 - DNA, 25 bp, Homo sapien
catagcagacgatggcagccttggc

SEQ ID NO: 2874414 - DNA, 25 bp, Homo sapien
gcctcatagcgctcagagcctgctg

SEQ ID NO: 2874415 - DNA, 25 bp, Homo sapien
tgtgaggccacaaatcaaccagtaa

SEQ ID NO: 2874416 - DNA, 25 bp, Homo sapien
tgagtcaaacttaaggccacgttct

SEQ ID NO: 2874417 - DNA, 25 bp, Homo sapien
gagtctcccaagaatagatggccgg

SEQ ID NO: 2874418 - DNA, 25 bp, Homo sapien
tatgagaaatgggtctgtgaggcca

SEQ ID NO: 2874419 - DNA, 25 bp, Homo sapien
tacctaatgtcacagtccggtctcc

SEQ ID NO: 2874420 - DNA, 25 bp, Homo sapien
acagtccggtctccgaccgacatca

SEQ ID NO: 2874421 - DNA, 25 bp, Homo sapien
taatgtcacagtccggtctccgacc

SEQ ID NO: 2874422 - DNA, 25 bp, Homo sapien
ctaatgtcacagtccggtctccgac

SEQ ID NO: 2874423 - DNA, 25 bp, Homo sapien
tggccacgaaggcggccccgatggt

SEQ ID NO: 2874424 - DNA, 25 bp, Homo sapien
ttggccacgaaggcggccccgatgg

SEQ ID NO: 2874425 - DNA, 25 bp, Homo sapien
acgagagggaagagatcggggccat

SEQ ID NO: 2874426 - DNA, 25 bp, Homo sapien
caacgagagggaagagatcggggcc

SEQ ID NO: 2874427 - DNA, 25 bp, Homo sapien
tgcaacgagagggaagagatcgggg

SEQ ID NO: 2874428 - DNA, 25 bp, Homo sapien
ctgcaacgagagggaagagatcggg

SEQ ID NO: 2874429 - DNA, 25 bp, Homo sapien
gtgcagattaccggccccccactcc

SEQ ID NO: 2874430 - DNA, 25 bp, Homo sapien
aggtgcagattaccggccccccact

SEQ ID NO: 2874431 - DNA, 25 bp, Homo sapien
ggtgcagattaccggccccccactc

SEQ ID NO: 2874432 - DNA, 25 bp, Homo sapien
tgcagattaccggccccccactccc

SEQ ID NO: 2874433 - DNA, 25 bp, Homo sapien
atcaccaccttgacgtccacgcgct

SEQ ID NO: 2874434 - DNA, 25 bp, Homo sapien
cgtagcgctccaccaggctagtctt

SEQ ID NO: 2874435 - DNA, 25 bp, Homo sapien
gctagtcttgcccacgtactccttg

SEQ ID NO: 2874436 - DNA, 25 bp, Homo sapien
cagaaagcggtcgtgcacgtagcgc

SEQ ID NO: 2874437 - DNA, 25 bp, Homo sapien
gggccgcttcagccacgtcagggtc

SEQ ID NO: 2874438 - DNA, 25 bp, Homo sapien
tcccggggccgcttcagccacgtca

SEQ ID NO: 2874439 - DNA, 25 bp, Homo sapien
gctcccggggccgcttcagccacgt

SEQ ID NO: 2874440 - DNA, 25 bp, Homo sapien
cggggccgcttcagccacgtcaggg

SEQ ID NO: 2874441 - DNA, 25 bp, Homo sapien
aggcagcgcccaagcctcagacccc

SEQ ID NO: 2874442 - DNA, 25 bp, Homo sapien
tccgctcggcccaggcagcgcccaa

SEQ ID NO: 2874443 - DNA, 25 bp, Homo sapien
cgggaggcaaaccccgatctccgct

SEQ ID NO: 2874444 - DNA, 25 bp, Homo sapien
ccgatctccgctcggcccaggcagc

SEQ ID NO: 2874445 - DNA, 25 bp, Homo sapien
ggccgtggccttgcacttcggcagc

SEQ ID NO: 2874446 - DNA, 25 bp, Homo sapien
taagctccgttctggctgggaatcc

SEQ ID NO: 2874447 - DNA, 25 bp, Homo sapien
gtgcagctcgctactccgtcattcg

SEQ ID NO: 2874448 - DNA, 25 bp, Homo sapien
gattatccttcgaagaccccaagcc

SEQ ID NO: 2874449 - DNA, 25 bp, Homo sapien
ccgtgaagtggagacagaacagcct

SEQ ID NO: 2874450 - DNA, 25 bp, Homo sapien
tggaaggcggctaaaacactgcatg

SEQ ID NO: 2874451 - DNA, 25 bp, Homo sapien
tacttgttgaattcagttggcccca

SEQ ID NO: 2874452 - DNA, 25 bp, Homo sapien
tgctagactgtaagcccgacaaggg

SEQ ID NO: 2874453 - DNA, 25 bp, Homo sapien
ggagcacctgttcccacacaagggt

SEQ ID NO: 2874454 - DNA, 25 bp, Homo sapien
tcctgcctggcaagtgggcctggca

SEQ ID NO: 2874455 - DNA, 25 bp, Homo sapien
cattccaacaggtgactccgagcag

SEQ ID NO: 2874456 - DNA, 25 bp, Homo sapien
gaggtcctgatgagtcctgcccctt

SEQ ID NO: 2874457 - DNA, 25 bp, Homo sapien
agtagctgtgctcctggccggcgac

SEQ ID NO: 2874458 - DNA, 25 bp, Homo sapien
cgtgcgagtagctgtgctcctggcc

SEQ ID NO: 2874459 - DNA, 25 bp, Homo sapien
ccgccgccgtgcgagtagctgtgct

SEQ ID NO: 2874460 - DNA, 25 bp, Homo sapien
agctgtgctcctggccggcgacgaa

SEQ ID NO: 2874461 - DNA, 25 bp, Homo sapien
ggtcagaagacctggctcgccccga

SEQ ID NO: 2874462 - DNA, 25 bp, Homo sapien
gaggggtccggtcagaagacctggc

SEQ ID NO: 2874463 - DNA, 25 bp, Homo sapien
gccacacaacccctcagcctcgggg

SEQ ID NO: 2874464 - DNA, 25 bp, Homo sapien
cagaagacctggctcgccccgaggg

SEQ ID NO: 2874465 - DNA, 25 bp, Homo sapien
tctccttgagctgtcgggcccgctg

SEQ ID NO: 2874466 - DNA, 25 bp, Homo sapien
gcttgctgcgcagcctctccttgag

SEQ ID NO: 2874467 - DNA, 25 bp, Homo sapien
ggtctgagtctgagcgctcagagga

SEQ ID NO: 2874468 - DNA, 25 bp, Homo sapien
gaggcctgaggagtccagactgtcc

SEQ ID NO: 2874469 - DNA, 25 bp, Homo sapien
tgcactgctgcgtgtacactctggc

SEQ ID NO: 2874470 - DNA, 25 bp, Homo sapien
ggccatgcacacgtcctgtcagggt

SEQ ID NO: 2874471 - DNA, 25 bp, Homo sapien
aggccccagagggttgcacccacat

SEQ ID NO: 2874472 - DNA, 25 bp, Homo sapien
gcaggtggcgactaaatccaggccc

SEQ ID NO: 2874473 - DNA, 25 bp, Homo sapien
aattccctagtctcggcctcacaag

SEQ ID NO: 2874474 - DNA, 25 bp, Homo sapien
aagcaattccctagtctcggcctca

SEQ ID NO: 2874475 - DNA, 25 bp, Homo sapien
attccctagtctcggcctcacaagt

SEQ ID NO: 2874476 - DNA, 25 bp, Homo sapien
gcaattccctagtctcggcctcaca

SEQ ID NO: 2874477 - DNA, 25 bp, Homo sapien
gaatagggcctagcagaaccagtgc

SEQ ID NO: 2874478 - DNA, 25 bp, Homo sapien
aactgggcatgggtcctgaatctgc

SEQ ID NO: 2874479 - DNA, 25 bp, Homo sapien
agcgcataggtctttgtgtgccaca

SEQ ID NO: 2874480 - DNA, 25 bp, Homo sapien
tgtcagaggagataacgcaagccag

SEQ ID NO: 2874481 - DNA, 25 bp, Homo sapien
tcagcgtggtgtaccgggcacagtc

SEQ ID NO: 2874482 - DNA, 25 bp, Homo sapien
ctccaggcaccgcttcaactgggcc

SEQ ID NO: 2874483 - DNA, 25 bp, Homo sapien
caggcaccgcttcaactgggccctc

SEQ ID NO: 2874484 - DNA, 25 bp, Homo sapien
ggctcagcgtggtgtaccgggcaca

SEQ ID NO: 2874485 - DNA, 25 bp, Homo sapien
accttgccggccacaggaatggcag

SEQ ID NO: 2874486 - DNA, 25 bp, Homo sapien
cccaccttgccggccacaggaatgg

SEQ ID NO: 2874487 - DNA, 25 bp, Homo sapien
caccttgccggccacaggaatggca

SEQ ID NO: 2874488 - DNA, 25 bp, Homo sapien
agccccaccttgccggccacaggaa

SEQ ID NO: 2874489 - DNA, 25 bp, Homo sapien
ctgcgcttctccagttcattgtgca

SEQ ID NO: 2874490 - DNA, 25 bp, Homo sapien
gccccaaacaagtcccctgtggaga

SEQ ID NO: 2874491 - DNA, 25 bp, Homo sapien
gaaggggaatcagctactgcccatg

SEQ ID NO: 2874492 - DNA, 25 bp, Homo sapien
caggtgggtatgagggccctaacaa

SEQ ID NO: 2874493 - DNA, 25 bp, Homo sapien
caccagagtcccctggcagggcgag

SEQ ID NO: 2874494 - DNA, 25 bp, Homo sapien
gatgtttcccaagccggtactggag

SEQ ID NO: 2874495 - DNA, 25 bp, Homo sapien
taactgcggaaacagatgtttccca

SEQ ID NO: 2874496 - DNA, 25 bp, Homo sapien
atgtttcccaagccggtactggagg

SEQ ID NO: 2874497 - DNA, 25 bp, Homo sapien
agatgtttcccaagccggtactgga

SEQ ID NO: 2874498 - DNA, 25 bp, Homo sapien
aactgctgttggcagttcccggcac

SEQ ID NO: 2874499 - DNA, 25 bp, Homo sapien
gcacatctagaggtgctcaagaaat

SEQ ID NO: 2874500 - DNA, 25 bp, Homo sapien
tctgaacgcttcctggagcgggaca

SEQ ID NO: 2874501 - DNA, 25 bp, Homo sapien
ggcccaaaagatgcaagcaacaagt

SEQ ID NO: 2874502 - DNA, 25 bp, Homo sapien
cgatgcgggcacagggacgcataac

SEQ ID NO: 2874503 - DNA, 25 bp, Homo sapien
ggcctggactgcgatgcgggcacag

SEQ ID NO: 2874504 - DNA, 25 bp, Homo sapien
ctgggggggtcgcttcttcctcctg

SEQ ID NO: 2874505 - DNA, 25 bp, Homo sapien
cagggacgcataaccatgctcggcc

SEQ ID NO: 2874506 - DNA, 25 bp, Homo sapien
ggaaaggcttttggcgccaggacca

SEQ ID NO: 2874507 - DNA, 25 bp, Homo sapien
gaggcgccccgggattactgtccta

SEQ ID NO: 2874508 - DNA, 25 bp, Homo sapien
ggcacagcacggtcaaggaaaggct

SEQ ID NO: 2874509 - DNA, 25 bp, Homo sapien
gcatccttcaagctgggagccaggt

SEQ ID NO: 2874510 - DNA, 25 bp, Homo sapien
ctggatgttgctggccaagggttcc

SEQ ID NO: 2874511 - DNA, 25 bp, Homo sapien
ggatgttgctggccaagggttccat

SEQ ID NO: 2874512 - DNA, 25 bp, Homo sapien
caggacctggatgttgctggccaag

SEQ ID NO: 2874513 - DNA, 25 bp, Homo sapien
ctgcagcaggacctggatgttgctg

SEQ ID NO: 2874514 - DNA, 25 bp, Homo sapien
gctaaccggtgctgcttcttgcccg

SEQ ID NO: 2874515 - DNA, 25 bp, Homo sapien
ggctcattggcgtctttgatctcag

SEQ ID NO: 2874516 - DNA, 25 bp, Homo sapien
ttccagccccgtgctagtgactagc

SEQ ID NO: 2874517 - DNA, 25 bp, Homo sapien
ctgacacggtgcaacaaacacaggg

SEQ ID NO: 2874518 - DNA, 25 bp, Homo sapien
gctgaagcgcaatggctcagtctcg

SEQ ID NO: 2874519 - DNA, 25 bp, Homo sapien
ggctgaagcgcaatggctcagtctc

SEQ ID NO: 2874520 - DNA, 25 bp, Homo sapien
gaagcgcaatggctcagtctcgact

SEQ ID NO: 2874521 - DNA, 25 bp, Homo sapien
ctgaagcgcaatggctcagtctcga

SEQ ID NO: 2874522 - DNA, 25 bp, Homo sapien
tccatggacactccatggtgcagga

SEQ ID NO: 2874523 - DNA, 25 bp, Homo sapien
atggccctgcgttccccagatccct

SEQ ID NO: 2874524 - DNA, 25 bp, Homo sapien
atggacactccatggtgcaggagga

SEQ ID NO: 2874525 - DNA, 25 bp, Homo sapien
tcctccactccatggacactccatg

SEQ ID NO: 2874526 - DNA, 25 bp, Homo sapien
tggagggcaatggatggcgcggtct

SEQ ID NO: 2874527 - DNA, 25 bp, Homo sapien
gctggagggcaatggatggcgcggt

SEQ ID NO: 2874528 - DNA, 25 bp, Homo sapien
gagggcaatggatggcgcggtctcg

SEQ ID NO: 2874529 - DNA, 25 bp, Homo sapien
agggcaatggatggcgcggtctcgg

SEQ ID NO: 2874530 - DNA, 25 bp, Homo sapien
gtgacttgcctatcaagcctctcgt

SEQ ID NO: 2874531 - DNA, 25 bp, Homo sapien
gcctatcaagcctctcgttgacaga

SEQ ID NO: 2874532 - DNA, 25 bp, Homo sapien
tcctgccacgacttacacttcctgg

SEQ ID NO: 2874533 - DNA, 25 bp, Homo sapien
caagcctctcgttgacagacagaac

SEQ ID NO: 2874534 - DNA, 25 bp, Homo sapien
caggcagcactggcaagcggtgggg

SEQ ID NO: 2874535 - DNA, 25 bp, Homo sapien
aggcagcactggcaagcggtggggc

SEQ ID NO: 2874536 - DNA, 25 bp, Homo sapien
ggaatatctcgcaattctggaggct

SEQ ID NO: 2874537 - DNA, 25 bp, Homo sapien
ttagtctgttttctgaatacctgaa

SEQ ID NO: 2874538 - DNA, 25 bp, Homo sapien
agtctgttttctgaatacctgaaac

SEQ ID NO: 2874539 - DNA, 25 bp, Homo sapien
aagaaaaggaatatctcgcaattct

SEQ ID NO: 2874540 - DNA, 25 bp, Homo sapien
aataacctgtgatgtttctcctcaa

SEQ ID NO: 2874541 - DNA, 25 bp, Homo sapien
aacttcccacttgtatgagttagga

SEQ ID NO: 2874542 - DNA, 25 bp, Homo sapien
ggcccagcgacagtggaggtccact

SEQ ID NO: 2874543 - DNA, 25 bp, Homo sapien
tctcccatgtaaatgctgtccccaa

SEQ ID NO: 2874544 - DNA, 25 bp, Homo sapien
ggaactggaggccctcgtcggcagg

SEQ ID NO: 2874545 - DNA, 25 bp, Homo sapien
actggaggccctcgtcggcaggctc

SEQ ID NO: 2874546 - DNA, 25 bp, Homo sapien
aactggaggccctcgtcggcaggct

SEQ ID NO: 2874547 - DNA, 25 bp, Homo sapien
ggaggccctcgtcggcaggctcggg

SEQ ID NO: 2874548 - DNA, 25 bp, Homo sapien
tacacatcgatcgttctagggaagc

SEQ ID NO: 2874549 - DNA, 25 bp, Homo sapien
gaactccaatacacagccaaggctg

SEQ ID NO: 2874550 - DNA, 25 bp, Homo sapien
gttatgtgcctcaatcgctccgaag

SEQ ID NO: 2874551 - DNA, 25 bp, Homo sapien
gatatttctcacgtcgcacggcagg

SEQ ID NO: 2874552 - DNA, 25 bp, Homo sapien
aaatcacttccccacgtcctcagga

SEQ ID NO: 2874553 - DNA, 25 bp, Homo sapien
cacagcccatctgtagacacagacc

SEQ ID NO: 2874554 - DNA, 25 bp, Homo sapien
gcctcacttgagcatctgtctcagg

SEQ ID NO: 2874555 - DNA, 25 bp, Homo sapien
agttcaggccttatccgtcgccaca

SEQ ID NO: 2874556 - DNA, 25 bp, Homo sapien
aaagttcacattggctcctgggccc

SEQ ID NO: 2874557 - DNA, 25 bp, Homo sapien
aggtcatcttgttgttcttttataa

SEQ ID NO: 2874558 - DNA, 25 bp, Homo sapien
aaaaaagttcacattggctcctggg

SEQ ID NO: 2874559 - DNA, 25 bp, Homo sapien
gaaacagttaagaaataaggtcatc

SEQ ID NO: 2874560 - DNA, 25 bp, Homo sapien
gatgcccaggagagcgcacagcagc

SEQ ID NO: 2874561 - DNA, 25 bp, Homo sapien
acggcgcagacaacgatgcccagga

SEQ ID NO: 2874562 - DNA, 25 bp, Homo sapien
tgttccgctcctgccgcttctggaa

SEQ ID NO: 2874563 - DNA, 25 bp, Homo sapien
tagaagcgcttgttccgctcctgcc

SEQ ID NO: 2874564 - DNA, 25 bp, Homo sapien
gaagccagttaaaaccagactcctg

SEQ ID NO: 2874565 - DNA, 25 bp, Homo sapien
ttgtacaggcggagagaagacactg

SEQ ID NO: 2874566 - DNA, 25 bp, Homo sapien
gaggcccaggagtctacatatccaa

SEQ ID NO: 2874567 - DNA, 25 bp, Homo sapien
cagcgacaagcctgggctgccttct

SEQ ID NO: 2874568 - DNA, 25 bp, Homo sapien
aggaagttgacgctgggctcgatct

SEQ ID NO: 2874569 - DNA, 25 bp, Homo sapien
tgggctcgatcttggtccagtcgat

SEQ ID NO: 2874570 - DNA, 25 bp, Homo sapien
ttggtccagtcgatgctctcctcgt

SEQ ID NO: 2874571 - DNA, 25 bp, Homo sapien
cgtcgggcgtgtgctccaccatcag

SEQ ID NO: 2874572 - DNA, 25 bp, Homo sapien
cttcatggagatgatgtcatgattg

SEQ ID NO: 2874573 - DNA, 25 bp, Homo sapien
ttcatggagatgatgtcatgattgt

SEQ ID NO: 2874574 - DNA, 25 bp, Homo sapien
ggaccaagaataaacctgtgacagc

SEQ ID NO: 2874575 - DNA, 25 bp, Homo sapien
aggaccaagaataaacctgtgacag

SEQ ID NO: 2874576 - DNA, 25 bp, Homo sapien
acaggtcgccggtgccggcggaggc

SEQ ID NO: 2874577 - DNA, 25 bp, Homo sapien
ggcgcactcccgtgatgtcaatgca

SEQ ID NO: 2874578 - DNA, 25 bp, Homo sapien
gtagtagccggtgggcaggcgcact

SEQ ID NO: 2874579 - DNA, 25 bp, Homo sapien
ccccgaagtagtagccggtgggcag

SEQ ID NO: 2874580 - DNA, 25 bp, Homo sapien
gggagccattgttcaccatcaccga

SEQ ID NO: 2874581 - DNA, 25 bp, Homo sapien
tcaccgagatgtacgggaacacgcg

SEQ ID NO: 2874582 - DNA, 25 bp, Homo sapien
gttgcggaagtcagccgtgcagccc

SEQ ID NO: 2874583 - DNA, 25 bp, Homo sapien
ggtccagcgcccatccttgctgtgg

SEQ ID NO: 2874584 - DNA, 25 bp, Homo sapien
ccaggaagatggctaagccgtggaa

SEQ ID NO: 2874585 - DNA, 25 bp, Homo sapien
caggaagatggctaagccgtggaag

SEQ ID NO: 2874586 - DNA, 25 bp, Homo sapien
agcagatgctctcagaatgggagaa

SEQ ID NO: 2874587 - DNA, 25 bp, Homo sapien
tagaattataagcagatgctctcag

SEQ ID NO: 2874588 - DNA, 25 bp, Homo sapien
gaatgggagaaacaggagccgtccc

SEQ ID NO: 2874589 - DNA, 25 bp, Homo sapien
gaaacaggagccgtcccatgggtac

SEQ ID NO: 2874590 - DNA, 25 bp, Homo sapien
cgtctccatggaggttcttcttccc

SEQ ID NO: 2874591 - DNA, 25 bp, Homo sapien
gacgtgcatttcccagtctttgagg

SEQ ID NO: 2874592 - DNA, 25 bp, Homo sapien
tccctgtgccgtggactttgaagtg

SEQ ID NO: 2874593 - DNA, 25 bp, Homo sapien
gtcccgggtgtaccacaaggcgatg

SEQ ID NO: 2874594 - DNA, 25 bp, Homo sapien
ggcaacacagcaagactccatctct

SEQ ID NO: 2874595 - DNA, 25 bp, Homo sapien
gccatcatgggaggtttgcttgagc

SEQ ID NO: 2874596 - DNA, 25 bp, Homo sapien
ctgggcaacacagcaagactccatc

SEQ ID NO: 2874597 - DNA, 25 bp, Homo sapien
caaggagttcaagaccagcctgggc

SEQ ID NO: 2874598 - DNA, 25 bp, Homo sapien
gagattctacttcctgggtatatac

SEQ ID NO: 2874599 - DNA, 25 bp, Homo sapien
tcaaagagcatgatcaagagggtga

SEQ ID NO: 2874600 - DNA, 25 bp, Homo sapien
gtgcagttgctacagaaaaccgttt

SEQ ID NO: 2874601 - DNA, 25 bp, Homo sapien
tagaatgaccgtatgatccagagat

SEQ ID NO: 2874602 - DNA, 25 bp, Homo sapien
ggtgacatcctactgagatctcatg

SEQ ID NO: 2874603 - DNA, 25 bp, Homo sapien
tactgaacttgtcttattctgacag

SEQ ID NO: 2874604 - DNA, 25 bp, Homo sapien
taattactcaaaaactgtgtaatgc

SEQ ID NO: 2874605 - DNA, 25 bp, Homo sapien
ctgacagtattatccatccagatgg

SEQ ID NO: 2874606 - DNA, 25 bp, Homo sapien
tggacatggcagtgcgcgcctgtaa

SEQ ID NO: 2874607 - DNA, 25 bp, Homo sapien
gtcggagaccagcctcgcaaacatg

SEQ ID NO: 2874608 - DNA, 25 bp, Homo sapien
ttagctggacatggcagtgcgcgcc

SEQ ID NO: 2874609 - DNA, 25 bp, Homo sapien
gctggacatggcagtgcgcgcctgt

SEQ ID NO: 2874610 - DNA, 25 bp, Homo sapien
cagatagagccctctttgctgcgct

SEQ ID NO: 2874611 - DNA, 25 bp, Homo sapien
aggggcatagagctggaaccgaccc

SEQ ID NO: 2874612 - DNA, 25 bp, Homo sapien
catagtgctgccctggaagtcccag

SEQ ID NO: 2874613 - DNA, 25 bp, Homo sapien
gggtcagacgtacgtactggctcgt

SEQ ID NO: 2874614 - DNA, 25 bp, Homo sapien
ctgctcaggagaaagggcacgcctt

SEQ ID NO: 2874615 - DNA, 25 bp, Homo sapien
caggagaaagggcacgccttcccct

SEQ ID NO: 2874616 - DNA, 25 bp, Homo sapien
gtgctaagaggccacgccaggactg

SEQ ID NO: 2874617 - DNA, 25 bp, Homo sapien
cctgttcagcctcgccctcactctt

SEQ ID NO: 2874618 - DNA, 25 bp, Homo sapien
gagatgttcactgttgccgtcagtt

SEQ ID NO: 2874619 - DNA, 25 bp, Homo sapien
gaatgctcccgcttgagatgttcac

SEQ ID NO: 2874620 - DNA, 25 bp, Homo sapien
gttatatccgcagtcacagacccca

SEQ ID NO: 2874621 - DNA, 25 bp, Homo sapien
ttggtagggcttaatgagcgaatgc

SEQ ID NO: 2874622 - DNA, 25 bp, Homo sapien
catctattggcctccggccggaagc

SEQ ID NO: 2874623 - DNA, 25 bp, Homo sapien
ggcggcagctgcattggccgggcag

SEQ ID NO: 2874624 - DNA, 25 bp, Homo sapien
tctcggccacttccgccctagaact

SEQ ID NO: 2874625 - DNA, 25 bp, Homo sapien
caactttactgtcgccagggagtca

SEQ ID NO: 2874626 - DNA, 25 bp, Homo sapien
ctttcgttgggggatttgactctgc

SEQ ID NO: 2874627 - DNA, 25 bp, Homo sapien
tcctgtcgccgtgggaagcaccgac

SEQ ID NO: 2874628 - DNA, 25 bp, Homo sapien
gtggggactttctcctgtcgccgtg

SEQ ID NO: 2874629 - DNA, 25 bp, Homo sapien
ctcggagtggggactttctcctgtc

SEQ ID NO: 2874630 - DNA, 25 bp, Homo sapien
taaatgcattaaactggccccagag

SEQ ID NO: 2874631 - DNA, 25 bp, Homo sapien
tggctgctcaatcccggacaaggtt

SEQ ID NO: 2874632 - DNA, 25 bp, Homo sapien
ggagcattacagtctcacggagcaa

SEQ ID NO: 2874633 - DNA, 25 bp, Homo sapien
aatttcccacatatctgcagaccgg

SEQ ID NO: 2874634 - DNA, 25 bp, Homo sapien
ataggcgctggagccgttaccagga

SEQ ID NO: 2874635 - DNA, 25 bp, Homo sapien
gatctgtggatgggacaaagtgccc

SEQ ID NO: 2874636 - DNA, 25 bp, Homo sapien
gagctgctaggaaggtaaaaagaga

SEQ ID NO: 2874637 - DNA, 25 bp, Homo sapien
ggccacattgcatgagtgggagata

SEQ ID NO: 2874638 - DNA, 25 bp, Homo sapien
gggcccaataggcaacacgtgcgat

SEQ ID NO: 2874639 - DNA, 25 bp, Homo sapien
tcttggacctactgaacctgaatct

SEQ ID NO: 2874640 - DNA, 25 bp, Homo sapien
atcttgtgccctcccacggtggtaa

SEQ ID NO: 2874641 - DNA, 25 bp, Homo sapien
cacgtgcgatagtaagatcactggc

SEQ ID NO: 2874642 - DNA, 25 bp, Homo sapien
taaaactctcctcaggcattcggaa

SEQ ID NO: 2874643 - DNA, 25 bp, Homo sapien
cctggccctaccttagtgagtccaa

SEQ ID NO: 2874644 - DNA, 25 bp, Homo sapien
ttgctctccatcaatggcaaaggga

SEQ ID NO: 2874645 - DNA, 25 bp, Homo sapien
gcaagtgtaaggaggattctgcacc

SEQ ID NO: 2874646 - DNA, 25 bp, Homo sapien
acagtttatttggcccgcgctacca

SEQ ID NO: 2874647 - DNA, 25 bp, Homo sapien
atttggcccgcgctaccagtgggcg

SEQ ID NO: 2874648 - DNA, 25 bp, Homo sapien
cgcgctaccagtgggcggcctggct

SEQ ID NO: 2874649 - DNA, 25 bp, Homo sapien
tttatttggcccgcgctaccagtgg

SEQ ID NO: 2874650 - DNA, 25 bp, Homo sapien
tgcgcagcccgcgtatgagttcgtg

SEQ ID NO: 2874651 - DNA, 25 bp, Homo sapien
gcactgcactgatgtagaccttcca

SEQ ID NO: 2874652 - DNA, 25 bp, Homo sapien
tggccacgtcgtcgatgcgctggtc

SEQ ID NO: 2874653 - DNA, 25 bp, Homo sapien
tgagttcgtgcaccgtcttgttgag

SEQ ID NO: 2874654 - DNA, 25 bp, Homo sapien
tccgagtgcgcccagccgcctcgca

SEQ ID NO: 2874655 - DNA, 25 bp, Homo sapien
ctgcggcgctgtgaggcaggctggg

SEQ ID NO: 2874656 - DNA, 25 bp, Homo sapien
gcctcgcacctctcggggaaatata

SEQ ID NO: 2874657 - DNA, 25 bp, Homo sapien
tgtgacgtcacacaaggcgccgtcc

SEQ ID NO: 2874658 - DNA, 25 bp, Homo sapien
tcctgcgccatcctggcgcggagct

SEQ ID NO: 2874659 - DNA, 25 bp, Homo sapien
gggaatgggacacaatcttgccttc

SEQ ID NO: 2874660 - DNA, 25 bp, Homo sapien
ctggcgcggagctggccgcactggg

SEQ ID NO: 2874661 - DNA, 25 bp, Homo sapien
tctctcactgcggaatcaccaagga

SEQ ID NO: 2874662 - DNA, 25 bp, Homo sapien
agacgcctggcttgttgcggtcacc

SEQ ID NO: 2874663 - DNA, 25 bp, Homo sapien
ttgttgcggtcaccacagcccgatc

SEQ ID NO: 2874664 - DNA, 25 bp, Homo sapien
caggtagtaggccacatcggtgtag

SEQ ID NO: 2874665 - DNA, 25 bp, Homo sapien
ctgatgatgccttgcagggtgagcc

SEQ ID NO: 2874666 - DNA, 25 bp, Homo sapien
tgagatttgtgcctgacggcctcgg

SEQ ID NO: 2874667 - DNA, 25 bp, Homo sapien
gggcgccaaccgggctaagagctca

SEQ ID NO: 2874668 - DNA, 25 bp, Homo sapien
gcagctcagcgctgtggacctgaga

SEQ ID NO: 2874669 - DNA, 25 bp, Homo sapien
ctgggtcggaaacacgcagctcagc

SEQ ID NO: 2874670 - DNA, 25 bp, Homo sapien
gaggatggaggatccgtgcacgtcc

SEQ ID NO: 2874671 - DNA, 25 bp, Homo sapien
ggagaggaacggtacctgcgcctcc

SEQ ID NO: 2874672 - DNA, 25 bp, Homo sapien
acgcatcggtgccgccctcgaggaa

SEQ ID NO: 2874673 - DNA, 25 bp, Homo sapien
aggaaccctgcgcagagcatgccgg

SEQ ID NO: 2874674 - DNA, 25 bp, Homo sapien
tgcgaacacagagcgccttcttcac

SEQ ID NO: 2874675 - DNA, 25 bp, Homo sapien
cccggacgatggacaaagctgctcc

SEQ ID NO: 2874676 - DNA, 25 bp, Homo sapien
caggcgcttgtaaacccactcatgc

SEQ ID NO: 2874677 - DNA, 25 bp, Homo sapien
gaggaggtgccattaattcaatttc

SEQ ID NO: 2874678 - DNA, 25 bp, Homo sapien
tccgcctaacccagtgatcaaaggt

SEQ ID NO: 2874679 - DNA, 25 bp, Homo sapien
gggattctacctgggattcacctac

SEQ ID NO: 2874680 - DNA, 25 bp, Homo sapien
gaacgataccaaagtcgcgggcttc

SEQ ID NO: 2874681 - DNA, 25 bp, Homo sapien
cattctgtaggcacccggaacgata

SEQ ID NO: 2874682 - DNA, 25 bp, Homo sapien
accggctgaacgtaaggcgacagga

SEQ ID NO: 2874683 - DNA, 25 bp, Homo sapien
caggcacaccggctgaacgtaaggc

SEQ ID NO: 2874684 - DNA, 25 bp, Homo sapien
agcgtggtctcggagggtcgcgcgg

SEQ ID NO: 2874685 - DNA, 25 bp, Homo sapien
ttggcaggcacaccggctgaacgta

SEQ ID NO: 2874686 - DNA, 25 bp, Homo sapien
ctgccgtccgcatcctcctgaaggc

SEQ ID NO: 2874687 - DNA, 25 bp, Homo sapien
gtccgcatcctcctgaaggcgcaac

SEQ ID NO: 2874688 - DNA, 25 bp, Homo sapien
tgccgtccgcatcctcctgaaggcg

SEQ ID NO: 2874689 - DNA, 25 bp, Homo sapien
gcatcctcctgaaggcgcaacagag

SEQ ID NO: 2874690 - DNA, 25 bp, Homo sapien
gagcgtgaggcggggacgccggggc

SEQ ID NO: 2874691 - DNA, 25 bp, Homo sapien
cacagctgtggttacggcgttcctg

SEQ ID NO: 2874692 - DNA, 25 bp, Homo sapien
caccgtcagatcctcgggtgcgggc

SEQ ID NO: 2874693 - DNA, 25 bp, Homo sapien
caacgtctggcacggctcacagctg

SEQ ID NO: 2874694 - DNA, 25 bp, Homo sapien
cggtaggagcgcacggccaacgtct

SEQ ID NO: 2874695 - DNA, 25 bp, Homo sapien
gtaggggagaggcagcgctctcaga

SEQ ID NO: 2874696 - DNA, 25 bp, Homo sapien
taggggagaggcagcgctctcagac

SEQ ID NO: 2874697 - DNA, 25 bp, Homo sapien
gggtaggggagaggcagcgctctca

SEQ ID NO: 2874698 - DNA, 25 bp, Homo sapien
ggggggtaggggagaggcagcgctc

SEQ ID NO: 2874699 - DNA, 25 bp, Homo sapien
ggtagggcacgggttcgggtgcagc

SEQ ID NO: 2874700 - DNA, 25 bp, Homo sapien
cgggttcgggtgcagcgtggaagct

SEQ ID NO: 2874701 - DNA, 25 bp, Homo sapien
cctgctcccgaaccccaatcccgtg

SEQ ID NO: 2874702 - DNA, 25 bp, Homo sapien
ccccaatcccgtgttccagcttcct

SEQ ID NO: 2874703 - DNA, 25 bp, Homo sapien
gccgcggcccctggggcggctctgg

SEQ ID NO: 2874704 - DNA, 25 bp, Homo sapien
tgggagacggaggagccgcggcccc

SEQ ID NO: 2874705 - DNA, 25 bp, Homo sapien
tggggcggctctgggcgggcgggta

SEQ ID NO: 2874706 - DNA, 25 bp, Homo sapien
cccctggggcggctctgggcgggcg

SEQ ID NO: 2874707 - DNA, 25 bp, Homo sapien
ggtcctgcaggcagtgagcggccgt

SEQ ID NO: 2874708 - DNA, 25 bp, Homo sapien
cggtcctgcaggcagtgagcggccg

SEQ ID NO: 2874709 - DNA, 25 bp, Homo sapien
tcctgcaggcagtgagcggccgtca

SEQ ID NO: 2874710 - DNA, 25 bp, Homo sapien
tgcaggcagtgagcggccgtcagca

SEQ ID NO: 2874711 - DNA, 25 bp, Homo sapien
cgcgggtcatcgaagacagactctt

SEQ ID NO: 2874712 - DNA, 25 bp, Homo sapien
tcgaagacagactcttgcggagccg

SEQ ID NO: 2874713 - DNA, 25 bp, Homo sapien
ccccagtacagcgcggcgatgtagg

SEQ ID NO: 2874714 - DNA, 25 bp, Homo sapien
ccaacgacgcgggtcatcgaagaca

SEQ ID NO: 2874715 - DNA, 25 bp, Homo sapien
cgcagctcagtgggccgttcctggt

SEQ ID NO: 2874716 - DNA, 25 bp, Homo sapien
cagtgggccgttcctggtcagggaa

SEQ ID NO: 2874717 - DNA, 25 bp, Homo sapien
ctcagtgggccgttcctggtcaggg

SEQ ID NO: 2874718 - DNA, 25 bp, Homo sapien
agctcagtgggccgttcctggtcag

SEQ ID NO: 2874719 - DNA, 25 bp, Homo sapien
ggctggccggaatctagctcgcccg

SEQ ID NO: 2874720 - DNA, 25 bp, Homo sapien
cggccggctggccggaatctagctc

SEQ ID NO: 2874721 - DNA, 25 bp, Homo sapien
tggccggaatctagctcgcccggcg

SEQ ID NO: 2874722 - DNA, 25 bp, Homo sapien
gggctgaggacggggagcccgcggc

SEQ ID NO: 2874723 - DNA, 25 bp, Homo sapien
ggctgaggcttcggcggtgccggct

SEQ ID NO: 2874724 - DNA, 25 bp, Homo sapien
ggtccgggtcgtgggctgaggcttc

SEQ ID NO: 2874725 - DNA, 25 bp, Homo sapien
ggcttcggcggtgccggctgcgcgg

SEQ ID NO: 2874726 - DNA, 25 bp, Homo sapien
gaggcttcggcggtgccggctgcgc

SEQ ID NO: 2874727 - DNA, 25 bp, Homo sapien
gaggcgccgcctgggttggggtctg

SEQ ID NO: 2874728 - DNA, 25 bp, Homo sapien
gacatgaagcctaggggacaccggg

SEQ ID NO: 2874729 - DNA, 25 bp, Homo sapien
gagtgggacatgaagcctaggggac

SEQ ID NO: 2874730 - DNA, 25 bp, Homo sapien
tgggacatgaagcctaggggacacc

SEQ ID NO: 2874731 - DNA, 25 bp, Homo sapien
agcacgaagcaccacgggcggatgt

SEQ ID NO: 2874732 - DNA, 25 bp, Homo sapien
cagctcagccggtcgcggttcagca

SEQ ID NO: 2874733 - DNA, 25 bp, Homo sapien
ggtcgcggttcagcacgaagcacca

SEQ ID NO: 2874734 - DNA, 25 bp, Homo sapien
caccacgggcggatgtcgttgtccg

SEQ ID NO: 2874735 - DNA, 25 bp, Homo sapien
ctgtagccacacgacggggcgccgt

SEQ ID NO: 2874736 - DNA, 25 bp, Homo sapien
cgacggggcgccgttagagcgccgg

SEQ ID NO: 2874737 - DNA, 25 bp, Homo sapien
gtagccacacgacggggcgccgtta

SEQ ID NO: 2874738 - DNA, 25 bp, Homo sapien
ggcgccgttagagcgccgggagccc

SEQ ID NO: 2874739 - DNA, 25 bp, Homo sapien
gcacccgagagcgtggtcctggcca

SEQ ID NO: 2874740 - DNA, 25 bp, Homo sapien
taggtggcctccgaggcccacggct

SEQ ID NO: 2874741 - DNA, 25 bp, Homo sapien
agcccgcggccatcatagcagcttg

SEQ ID NO: 2874742 - DNA, 25 bp, Homo sapien
gcgcttgctcggcagtcacgttccg

SEQ ID NO: 2874743 - DNA, 25 bp, Homo sapien
cccatggaggcacgggttggtgcgg

SEQ ID NO: 2874744 - DNA, 25 bp, Homo sapien
tccacctctaggcagcgacccccat

SEQ ID NO: 2874745 - DNA, 25 bp, Homo sapien
ccacgtcgcagaagggtccggtgta

SEQ ID NO: 2874746 - DNA, 25 bp, Homo sapien
cagaagggtccggtgtagcccaccg

SEQ ID NO: 2874747 - DNA, 25 bp, Homo sapien
gggaacgcagtgagccacccctggg

SEQ ID NO: 2874748 - DNA, 25 bp, Homo sapien
ggagggaacgcagtgagccacccct

SEQ ID NO: 2874749 - DNA, 25 bp, Homo sapien
agggaacgcagtgagccacccctgg

SEQ ID NO: 2874750 - DNA, 25 bp, Homo sapien
gggagggaacgcagtgagccacccc

SEQ ID NO: 2874751 - DNA, 25 bp, Homo sapien
tggaaaaaccggagaagctgaggct

SEQ ID NO: 2874752 - DNA, 25 bp, Homo sapien
tataccatatctcattcttgtggaa

SEQ ID NO: 2874753 - DNA, 25 bp, Homo sapien
tgcttgctcagttctataccatatc

SEQ ID NO: 2874754 - DNA, 25 bp, Homo sapien
agccgctggcagtgggcatcaggac

SEQ ID NO: 2874755 - DNA, 25 bp, Homo sapien
tgttcacacaggtccctcctttctg

SEQ ID NO: 2874756 - DNA, 25 bp, Homo sapien
tttccagtgaggtgttgtggacaga

SEQ ID NO: 2874757 - DNA, 25 bp, Homo sapien
gggccgcttggcatgttcacacagg

SEQ ID NO: 2874758 - DNA, 25 bp, Homo sapien
tggcaggggctgtgtttgctgcagt

SEQ ID NO: 2874759 - DNA, 25 bp, Homo sapien
actttcttgggctccaaacagtatc

SEQ ID NO: 2874760 - DNA, 25 bp, Homo sapien
acagtatccccatcgctggtcctga

SEQ ID NO: 2874761 - DNA, 25 bp, Homo sapien
catcgctggtcctgatcaaagttgg

SEQ ID NO: 2874762 - DNA, 25 bp, Homo sapien
tccaaacagtatccccatcgctggt

SEQ ID NO: 2874763 - DNA, 25 bp, Homo sapien
cccttgtgggtacatttgtggtaca

SEQ ID NO: 2874764 - DNA, 25 bp, Homo sapien
tgggtacatttgtggtacagctgcc

SEQ ID NO: 2874765 - DNA, 25 bp, Homo sapien
acatttgtggtacagctgccggtgg

SEQ ID NO: 2874766 - DNA, 25 bp, Homo sapien
cctggccggcccttgtgggtacatt

SEQ ID NO: 2874767 - DNA, 25 bp, Homo sapien
gctttgtacttatgctccttggggg

SEQ ID NO: 2874768 - DNA, 25 bp, Homo sapien
tttgtacttatgctccttgggggct

SEQ ID NO: 2874769 - DNA, 25 bp, Homo sapien
cagctttgtacttatgctccttggg

SEQ ID NO: 2874770 - DNA, 25 bp, Homo sapien
ctttgtacttatgctccttgggggc

SEQ ID NO: 2874771 - DNA, 25 bp, Homo sapien
accccaggagcagcagagccctcat

SEQ ID NO: 2874772 - DNA, 25 bp, Homo sapien
cagcaggaaccccaggagcagcaga

SEQ ID NO: 2874773 - DNA, 25 bp, Homo sapien
gaaccccaggagcagcagagccctc

SEQ ID NO: 2874774 - DNA, 25 bp, Homo sapien
gcaggaaccccaggagcagcagagc

SEQ ID NO: 2874775 - DNA, 25 bp, Homo sapien
tccgtccgttggtccagctgcctat

SEQ ID NO: 2874776 - DNA, 25 bp, Homo sapien
gctgcctatccaggagtccagatca

SEQ ID NO: 2874777 - DNA, 25 bp, Homo sapien
cagctgcctatccaggagtccagat

SEQ ID NO: 2874778 - DNA, 25 bp, Homo sapien
tgcctatccaggagtccagatcaat

SEQ ID NO: 2874779 - DNA, 25 bp, Homo sapien
ctagagaagcctagatggatccggc

SEQ ID NO: 2874780 - DNA, 25 bp, Homo sapien
tactcgcggagtttgggcaagcctg

SEQ ID NO: 2874781 - DNA, 25 bp, Homo sapien
gagcagttgtcactctctgaaacca

SEQ ID NO: 2874782 - DNA, 25 bp, Homo sapien
ggtgtgaactcatcccgaggtctag

SEQ ID NO: 2874783 - DNA, 25 bp, Homo sapien
aaacagccgggtattgcagtcctga

SEQ ID NO: 2874784 - DNA, 25 bp, Homo sapien
atatgtgaagcggagagccatgcca

SEQ ID NO: 2874785 - DNA, 25 bp, Homo sapien
gagtgcccatttatgccagaccctg

SEQ ID NO: 2874786 - DNA, 25 bp, Homo sapien
taaagcaagctacgaagatggcaga

SEQ ID NO: 2874787 - DNA, 25 bp, Homo sapien
aaagtgtacaattcggctgggcgtg

SEQ ID NO: 2874788 - DNA, 25 bp, Homo sapien
taacagctctattgagtttaattta

SEQ ID NO: 2874789 - DNA, 25 bp, Homo sapien
aagtgtacaattcggctgggcgtgg

SEQ ID NO: 2874790 - DNA, 25 bp, Homo sapien
gctctattgagtttaatttatatga

SEQ ID NO: 2874791 - DNA, 25 bp, Homo sapien
tttgtgtgtgcagatgccgccattt

SEQ ID NO: 2874792 - DNA, 25 bp, Homo sapien
cagttggtagacattaagattgttc

SEQ ID NO: 2874793 - DNA, 25 bp, Homo sapien
gtgtgtgcagatgccgccatttctc

SEQ ID NO: 2874794 - DNA, 25 bp, Homo sapien
ggtagacattaagattgttcccact

SEQ ID NO: 2874795 - DNA, 25 bp, Homo sapien
ccatccctgggacaaaggtgcgtcc

SEQ ID NO: 2874796 - DNA, 25 bp, Homo sapien
tgggacaaaggtgcgtcccttcagc

SEQ ID NO: 2874797 - DNA, 25 bp, Homo sapien
gaacacagacggagctgtccccagt

SEQ ID NO: 2874798 - DNA, 25 bp, Homo sapien
ggaacacagacggagctgtccccag

SEQ ID NO: 2874799 - DNA, 25 bp, Homo sapien
gctgcctgtgatacccatcagccca

SEQ ID NO: 2874800 - DNA, 25 bp, Homo sapien
gcctctgagtaagactcgtgcctcc

SEQ ID NO: 2874801 - DNA, 25 bp, Homo sapien
agggtggtcacacccctgagccttc

SEQ ID NO: 2874802 - DNA, 25 bp, Homo sapien
tatatagcgaccagagcattcttaa

SEQ ID NO: 2874803 - DNA, 25 bp, Homo sapien
gccacatgtctctgtgtgaatagtc

SEQ ID NO: 2874804 - DNA, 25 bp, Homo sapien
ctttcttgcttccggtgctccaggg

SEQ ID NO: 2874805 - DNA, 25 bp, Homo sapien
gaatagtccgagcacaaacctggct

SEQ ID NO: 2874806 - DNA, 25 bp, Homo sapien
tgtccaacgtaagctgccacatgtc

SEQ ID NO: 2874807 - DNA, 25 bp, Homo sapien
ctggctgcctaaatgtggacgtaag

SEQ ID NO: 2874808 - DNA, 25 bp, Homo sapien
ttctgactgctggtaaggcgggccc

SEQ ID NO: 2874809 - DNA, 25 bp, Homo sapien
tgggctcacccagtgggtttcccaa

SEQ ID NO: 2874810 - DNA, 25 bp, Homo sapien
caggctttggtagcctttgggctca

SEQ ID NO: 2874811 - DNA, 25 bp, Homo sapien
gcccttgacacattatgggcaaaga

SEQ ID NO: 2874812 - DNA, 25 bp, Homo sapien
aaagacctagacagtgggtgacgct

SEQ ID NO: 2874813 - DNA, 25 bp, Homo sapien
gagccggcctcgaagtggacattca

SEQ ID NO: 2874814 - DNA, 25 bp, Homo sapien
gttctctgaagacggtggttgagcc

SEQ ID NO: 2874815 - DNA, 25 bp, Homo sapien
taaagctcttaacacagtgggtcct

SEQ ID NO: 2874816 - DNA, 25 bp, Homo sapien
tccatgcccagctctatggtgggaa

SEQ ID NO: 2874817 - DNA, 25 bp, Homo sapien
tggagctcagtctggtagggaggca

SEQ ID NO: 2874818 - DNA, 25 bp, Homo sapien
ccagatggagacgaggcccctggca

SEQ ID NO: 2874819 - DNA, 25 bp, Homo sapien
cagcccagttaagaggccgatggac

SEQ ID NO: 2874820 - DNA, 25 bp, Homo sapien
tccccgtggcttcctagtaggcatg

SEQ ID NO: 2874821 - DNA, 25 bp, Homo sapien
cgatggacagccaacttcagagtgg

SEQ ID NO: 2874822 - DNA, 25 bp, Homo sapien
tgtgggttcggcactaggtcctcct

SEQ ID NO: 2874823 - DNA, 25 bp, Homo sapien
gggtcgtgagttgggagggagccac

SEQ ID NO: 2874824 - DNA, 25 bp, Homo sapien
gtcgtgagttgggagggagccacgt

SEQ ID NO: 2874825 - DNA, 25 bp, Homo sapien
tagcgagaggggtcgtgagttggga

SEQ ID NO: 2874826 - DNA, 25 bp, Homo sapien
gagaggggtcgtgagttgggaggga

SEQ ID NO: 2874827 - DNA, 25 bp, Homo sapien
tgtctgagcacaatgccccaactgt

SEQ ID NO: 2874828 - DNA, 25 bp, Homo sapien
cattgtctggatcacaagtgcccct

SEQ ID NO: 2874829 - DNA, 25 bp, Homo sapien
tgttcttagccaccattctccaggg

SEQ ID NO: 2874830 - DNA, 25 bp, Homo sapien
ggaaaggatattgctgacccaggga

SEQ ID NO: 2874831 - DNA, 25 bp, Homo sapien
ggtatgacctgactgtccaattttc

SEQ ID NO: 2874832 - DNA, 25 bp, Homo sapien
gtccaattttcaagatgaaccagaa

SEQ ID NO: 2874833 - DNA, 25 bp, Homo sapien
actgtccaattttcaagatgaacca

SEQ ID NO: 2874834 - DNA, 25 bp, Homo sapien
gaaatgtggacttggtatgacctga

SEQ ID NO: 2874835 - DNA, 25 bp, Homo sapien
cctcccctgggaggtcagatcatta

SEQ ID NO: 2874836 - DNA, 25 bp, Homo sapien
caccctggtcctactgctgaagaaa

SEQ ID NO: 2874837 - DNA, 25 bp, Homo sapien
agggagttctgttgtcccctcggca

SEQ ID NO: 2874838 - DNA, 25 bp, Homo sapien
tccagctcaggtatgggagtagcca

SEQ ID NO: 2874839 - DNA, 25 bp, Homo sapien
gagaaacaggcaacagaacgtgagt

SEQ ID NO: 2874840 - DNA, 25 bp, Homo sapien
gtaatcaaatggcagacttcggtcc

SEQ ID NO: 2874841 - DNA, 25 bp, Homo sapien
catcgctccgagcacctgaatgtgt

SEQ ID NO: 2874842 - DNA, 25 bp, Homo sapien
tattggctactaccagtctggagca

SEQ ID NO: 2874843 - DNA, 25 bp, Homo sapien
aaccaccacagacaaggtggtgttg

SEQ ID NO: 2874844 - DNA, 25 bp, Homo sapien
ggtacaaccaccacagacaaggtgg

SEQ ID NO: 2874845 - DNA, 25 bp, Homo sapien
tacaaccaccacagacaaggtggtg

SEQ ID NO: 2874846 - DNA, 25 bp, Homo sapien
gggtacaaccaccacagacaaggtg

SEQ ID NO: 2874847 - DNA, 25 bp, Homo sapien
caggctagagttttgtggccaggcc

SEQ ID NO: 2874848 - DNA, 25 bp, Homo sapien
aagaggcccacaaagtagcccaggc

SEQ ID NO: 2874849 - DNA, 25 bp, Homo sapien
cattgtctgttctggaacgcaggcc

SEQ ID NO: 2874850 - DNA, 25 bp, Homo sapien
cctgtggctctcgaagcagtgtgtg

SEQ ID NO: 2874851 - DNA, 25 bp, Homo sapien
cggccctggagctacccgcgccaag

SEQ ID NO: 2874852 - DNA, 25 bp, Homo sapien
ctacgcacctgtcggtgccgccacg

SEQ ID NO: 2874853 - DNA, 25 bp, Homo sapien
tcggtgccgccacggccctggagct

SEQ ID NO: 2874854 - DNA, 25 bp, Homo sapien
ccgcctacgcacctgtcggtgccgc

SEQ ID NO: 2874855 - DNA, 25 bp, Homo sapien
gcaagatcgtcacgcccttcctgag

SEQ ID NO: 2874856 - DNA, 25 bp, Homo sapien
tgagtcgccgcgacagcgcggagaa

SEQ ID NO: 2874857 - DNA, 25 bp, Homo sapien
ctatagcgaggtgctcacggacacg

SEQ ID NO: 2874858 - DNA, 25 bp, Homo sapien
cggacatgtccaaaccaccgtgtta

SEQ ID NO: 2874859 - DNA, 25 bp, Homo sapien
tctttattaacagacatgagcacga

SEQ ID NO: 2874860 - DNA, 25 bp, Homo sapien
gacatgagcacgacccgttacagaa

SEQ ID NO: 2874861 - DNA, 25 bp, Homo sapien
atagccctgacctgaaccgcgccta

SEQ ID NO: 2874862 - DNA, 25 bp, Homo sapien
cacgacccgttacagaagtttgtgc

SEQ ID NO: 2874863 - DNA, 25 bp, Homo sapien
gggtggaatttgcaacagcgtctca

SEQ ID NO: 2874864 - DNA, 25 bp, Homo sapien
ctaccaacgagaggaaagccagtca

SEQ ID NO: 2874865 - DNA, 25 bp, Homo sapien
taagagctacaatctggaccaggga

SEQ ID NO: 2874866 - DNA, 25 bp, Homo sapien
gaaaagctgtaaaagtcaggccctg

SEQ ID NO: 2874867 - DNA, 25 bp, Homo sapien
gcatcccagcatgtgatgtcgatct

SEQ ID NO: 2874868 - DNA, 25 bp, Homo sapien
tgcatcccagcatgtgatgtcgatc

SEQ ID NO: 2874869 - DNA, 25 bp, Homo sapien
gcacagagctcttccgattgggcaa

SEQ ID NO: 2874870 - DNA, 25 bp, Homo sapien
gctcttccgattgggcaaactcctc

SEQ ID NO: 2874871 - DNA, 25 bp, Homo sapien
ctgtgattgactgaagtacccctca

SEQ ID NO: 2874872 - DNA, 25 bp, Homo sapien
aggaggcggagccttggcacagagc

SEQ ID NO: 2874873 - DNA, 25 bp, Homo sapien
cgttgttggcaacagtggtgtcagc

SEQ ID NO: 2874874 - DNA, 25 bp, Homo sapien
caaagttgagaagggtggcacagcc

SEQ ID NO: 2874875 - DNA, 25 bp, Homo sapien
cagggtgacctcagtacccgagggt

SEQ ID NO: 2874876 - DNA, 25 bp, Homo sapien
cgttgccaggccataggtcaatgag

SEQ ID NO: 2874877 - DNA, 25 bp, Homo sapien
ctgcatcgtggacctccgtggcgtc

SEQ ID NO: 2874878 - DNA, 25 bp, Homo sapien
tgcatcgtggacctccgtggcgtca

SEQ ID NO: 2874879 - DNA, 25 bp, Homo sapien
gcatcgtggacctccgtggcgtcag

SEQ ID NO: 2874880 - DNA, 25 bp, Homo sapien
ctcctcactgtctaggatggggctg

SEQ ID NO: 2874881 - DNA, 25 bp, Homo sapien
ccatgaacatcaagtcctctgcagg

SEQ ID NO: 2874882 - DNA, 25 bp, Homo sapien
gtctcctcactgtctaggatggggc

SEQ ID NO: 2874883 - DNA, 25 bp, Homo sapien
tgaacatcaagtcctctgcagggct

SEQ ID NO: 2874884 - DNA, 25 bp, Homo sapien
aggctgcgaggaggtgacctcatcc

SEQ ID NO: 2874885 - DNA, 25 bp, Homo sapien
tgggcgccatcctccggtggctgtc

SEQ ID NO: 2874886 - DNA, 25 bp, Homo sapien
ccgctctatctgctcagcgacaggg

SEQ ID NO: 2874887 - DNA, 25 bp, Homo sapien
agggcccgctctatctgctcagcga

SEQ ID NO: 2874888 - DNA, 25 bp, Homo sapien
agaccctgtaagctaggcccctgga

SEQ ID NO: 2874889 - DNA, 25 bp, Homo sapien
aggggccagactacagctccagacc

SEQ ID NO: 2874890 - DNA, 25 bp, Homo sapien
agccgggtgagacaggattgtccac

SEQ ID NO: 2874891 - DNA, 25 bp, Homo sapien
ccctgggggcaaacaccagagatca

SEQ ID NO: 2874892 - DNA, 25 bp, Homo sapien
tgcggtggcaggtgatatagggaaa

SEQ ID NO: 2874893 - DNA, 25 bp, Homo sapien
ggcccactgtccgatgcctttatga

SEQ ID NO: 2874894 - DNA, 25 bp, Homo sapien
aggaaggcccactgtccgatgcctt

SEQ ID NO: 2874895 - DNA, 25 bp, Homo sapien
gatgcctttatgaaagggcagtacg

SEQ ID NO: 2874896 - DNA, 25 bp, Homo sapien
actcccttgggttgtcaggccgctg

SEQ ID NO: 2874897 - DNA, 25 bp, Homo sapien
tgaagggcgagggtacatcacagct

SEQ ID NO: 2874898 - DNA, 25 bp, Homo sapien
ggccgctgggcaataatagctgctg

SEQ ID NO: 2874899 - DNA, 25 bp, Homo sapien
gaggccgatgcgactctttcctgct

SEQ ID NO: 2874900 - DNA, 25 bp, Homo sapien
ctccacctccgactctgacttcttc

SEQ ID NO: 2874901 - DNA, 25 bp, Homo sapien
tccacctccgactctgacttcttca

SEQ ID NO: 2874902 - DNA, 25 bp, Homo sapien
cttcctcctcatcccgatggtcacc

SEQ ID NO: 2874903 - DNA, 25 bp, Homo sapien
tcttcctcctcatcccgatggtcac

SEQ ID NO: 2874904 - DNA, 25 bp, Homo sapien
tctttcgcaatctggcaggaagggt

SEQ ID NO: 2874905 - DNA, 25 bp, Homo sapien
gaggtggtacctctgccccgtcaaa

SEQ ID NO: 2874906 - DNA, 25 bp, Homo sapien
tatctaagcaggtgcctagggccct

SEQ ID NO: 2874907 - DNA, 25 bp, Homo sapien
tgttttgcagataacttcttggacc

SEQ ID NO: 2874908 - DNA, 25 bp, Homo sapien
agcacgacgcagtcagttcccagaa

SEQ ID NO: 2874909 - DNA, 25 bp, Homo sapien
tgtagacatcaagtcctcagcacga

SEQ ID NO: 2874910 - DNA, 25 bp, Homo sapien
agttcccagaacaggcacacccgtt

SEQ ID NO: 2874911 - DNA, 25 bp, Homo sapien
gcctcagcatgggagactggcctcc

SEQ ID NO: 2874912 - DNA, 25 bp, Homo sapien
ctcttccgcttctaaagtctgctgt

SEQ ID NO: 2874913 - DNA, 25 bp, Homo sapien
tggcctcttccgcttctaaagtctg

SEQ ID NO: 2874914 - DNA, 25 bp, Homo sapien
agactgctccttcaaccgcctcttg

SEQ ID NO: 2874915 - DNA, 25 bp, Homo sapien
tcttggcctcttccgcttctaaagt

SEQ ID NO: 2874916 - DNA, 25 bp, Homo sapien
tccgctcctgctcgaacctgagcct

SEQ ID NO: 2874917 - DNA, 25 bp, Homo sapien
tccatccgctcctgctcgaacctga

SEQ ID NO: 2874918 - DNA, 25 bp, Homo sapien
tcctgctcgaacctgagcctctcat

SEQ ID NO: 2874919 - DNA, 25 bp, Homo sapien
gctcctgctcgaacctgagcctctc

SEQ ID NO: 2874920 - DNA, 25 bp, Homo sapien
ccatggggtccatgaggggtggctc

SEQ ID NO: 2874921 - DNA, 25 bp, Homo sapien
ccaggccgggctcagggttccatac

SEQ ID NO: 2874922 - DNA, 25 bp, Homo sapien
catggggtccatgaggggtggctca

SEQ ID NO: 2874923 - DNA, 25 bp, Homo sapien
atggggtccatgaggggtggctcag

SEQ ID NO: 2874924 - DNA, 25 bp, Homo sapien
cggttaatccgcttcatttccacag

SEQ ID NO: 2874925 - DNA, 25 bp, Homo sapien
actgctctcggttaatccgcttcat

SEQ ID NO: 2874926 - DNA, 25 bp, Homo sapien
acagctgcatccgtcttctggtagg

SEQ ID NO: 2874927 - DNA, 25 bp, Homo sapien
agctgcatccgtcttctggtaggtg

SEQ ID NO: 2874928 - DNA, 25 bp, Homo sapien
ggacccagcataagcaggctgaatg

SEQ ID NO: 2874929 - DNA, 25 bp, Homo sapien
agcataagcaggctgaatgccccag

SEQ ID NO: 2874930 - DNA, 25 bp, Homo sapien
tcgaaggacccagcataagcaggct

SEQ ID NO: 2874931 - DNA, 25 bp, Homo sapien
gcagtgtcgaaggacccagcataag

SEQ ID NO: 2874932 - DNA, 25 bp, Homo sapien
agagtcgcgccagcccgttagagag

SEQ ID NO: 2874933 - DNA, 25 bp, Homo sapien
cgcagccgcagtcggtgcagcacag

SEQ ID NO: 2874934 - DNA, 25 bp, Homo sapien
gctggcgttcacgatcacgtcgaca

SEQ ID NO: 2874935 - DNA, 25 bp, Homo sapien
gatggcacccgcgtctatgtcttcc

SEQ ID NO: 2874936 - DNA, 25 bp, Homo sapien
tccgcaagaagacggcagtgctcag

SEQ ID NO: 2874937 - DNA, 25 bp, Homo sapien
tgtccccacccccaagagcgctggc

SEQ ID NO: 2874938 - DNA, 25 bp, Homo sapien
aggcggcaccatcctcccgccatcc

SEQ ID NO: 2874939 - DNA, 25 bp, Homo sapien
cccaagagcgctggcccctgacacg

SEQ ID NO: 2874940 - DNA, 25 bp, Homo sapien
ctggaagaactctgccaccttagcc

SEQ ID NO: 2874941 - DNA, 25 bp, Homo sapien
gcacaagcgcacttgcgggcatcag

SEQ ID NO: 2874942 - DNA, 25 bp, Homo sapien
tagccacgtggctggcacaagcgca

SEQ ID NO: 2874943 - DNA, 25 bp, Homo sapien
ttgcgggcatcaggcacatcttcgc

SEQ ID NO: 2874944 - DNA, 25 bp, Homo sapien
tgagcacgtattttggcagagcagc

SEQ ID NO: 2874945 - DNA, 25 bp, Homo sapien
agtgtcccgaaagctcctgcaagcc

SEQ ID NO: 2874946 - DNA, 25 bp, Homo sapien
cagcttgggagtccttgacactgca

SEQ ID NO: 2874947 - DNA, 25 bp, Homo sapien
tgacactgcagaagccgtacatcac

SEQ ID NO: 2874948 - DNA, 25 bp, Homo sapien
caagcttgaggtcatcggagccatc

SEQ ID NO: 2874949 - DNA, 25 bp, Homo sapien
gcaagcttgaggtcatcggagccat

SEQ ID NO: 2874950 - DNA, 25 bp, Homo sapien
catcggagccatcttcatatgtgta

SEQ ID NO: 2874951 - DNA, 25 bp, Homo sapien
gccatcttcatatgtgtacagagcc

SEQ ID NO: 2874952 - DNA, 25 bp, Homo sapien
gctttggccacacggatgctgctgg

SEQ ID NO: 2874953 - DNA, 25 bp, Homo sapien
gccttggcaataggccaccagagct

SEQ ID NO: 2874954 - DNA, 25 bp, Homo sapien
cagtgatgaataactcgctttggcc

SEQ ID NO: 2874955 - DNA, 25 bp, Homo sapien
gtgtggccttggcaataggccacca

SEQ ID NO: 2874956 - DNA, 25 bp, Homo sapien
ggtgttggtagacaacacccctcca

SEQ ID NO: 2874957 - DNA, 25 bp, Homo sapien
gtgttggtagacaacacccctccag

SEQ ID NO: 2874958 - DNA, 25 bp, Homo sapien
cagtaccatgccatggatgcccagc

SEQ ID NO: 2874959 - DNA, 25 bp, Homo sapien
gagagcttgtctctcgcgtccatcc

SEQ ID NO: 2874960 - DNA, 25 bp, Homo sapien
cacgagagcttgtctctcgcgtcca

SEQ ID NO: 2874961 - DNA, 25 bp, Homo sapien
tgcaggacacgagagcttgtctctc

SEQ ID NO: 2874962 - DNA, 25 bp, Homo sapien
tcatcctctcctccagaagccccca

SEQ ID NO: 2874963 - DNA, 25 bp, Homo sapien
ctcatcctctcctccagaagccccc

SEQ ID NO: 2874964 - DNA, 25 bp, Homo sapien
atcctctcctccagaagcccccagg

SEQ ID NO: 2874965 - DNA, 25 bp, Homo sapien
cctctcctccagaagcccccaggtc

SEQ ID NO: 2874966 - DNA, 25 bp, Homo sapien
agcggggtccctcagacctgccctc

SEQ ID NO: 2874967 - DNA, 25 bp, Homo sapien
caagcggggtccctcagacctgccc

SEQ ID NO: 2874968 - DNA, 25 bp, Homo sapien
cccaagcggggtccctcagacctgc

SEQ ID NO: 2874969 - DNA, 25 bp, Homo sapien
gcccaagcggggtccctcagacctg

SEQ ID NO: 2874970 - DNA, 25 bp, Homo sapien
cctaggaaccagatgggcaccttcc

SEQ ID NO: 2874971 - DNA, 25 bp, Homo sapien
agaggaggcctaggaaccagatggg

SEQ ID NO: 2874972 - DNA, 25 bp, Homo sapien
ggcctaggaaccagatgggcacctt

SEQ ID NO: 2874973 - DNA, 25 bp, Homo sapien
gggagaggaggcctaggaaccagat

SEQ ID NO: 2874974 - DNA, 25 bp, Homo sapien
acctcgcccgctcgaaggtggcgaa

SEQ ID NO: 2874975 - DNA, 25 bp, Homo sapien
gctgcgctggctccgctagctcggt

SEQ ID NO: 2874976 - DNA, 25 bp, Homo sapien
cttcgcggtcgccatgtggcagcaa

SEQ ID NO: 2874977 - DNA, 25 bp, Homo sapien
ccgcggcggtaagggagtcacttcg

SEQ ID NO: 2874978 - DNA, 25 bp, Homo sapien
tctcctctcggatcacctcctcgta

SEQ ID NO: 2874979 - DNA, 25 bp, Homo sapien
ggccgctgaagctgacgccggccat

SEQ ID NO: 2874980 - DNA, 25 bp, Homo sapien
aggcggtggccgctgaagctgacgc

SEQ ID NO: 2874981 - DNA, 25 bp, Homo sapien
tcacctcctcgtaagccgccagcag

SEQ ID NO: 2874982 - DNA, 25 bp, Homo sapien
acagacgcgcggacggacgggcgga

SEQ ID NO: 2874983 - DNA, 25 bp, Homo sapien
gaccgggccgaacggacagacgcgc

SEQ ID NO: 2874984 - DNA, 25 bp, Homo sapien
ctcggagcctctgcagcgtcgcgag

SEQ ID NO: 2874985 - DNA, 25 bp, Homo sapien
cgagccgagcgagccagcggccggg

SEQ ID NO: 2874986 - DNA, 25 bp, Homo sapien
taggcagtctcaagttcaaagggcg

SEQ ID NO: 2874987 - DNA, 25 bp, Homo sapien
tatgtcgtccaagccaggaagggtc

SEQ ID NO: 2874988 - DNA, 25 bp, Homo sapien
gagtcagtgacttgcccggagacac

SEQ ID NO: 2874989 - DNA, 25 bp, Homo sapien
gattgcatcatgtttccggcctacg

SEQ ID NO: 2874990 - DNA, 25 bp, Homo sapien
ctgtcgataaactggcagatctggc

SEQ ID NO: 2874991 - DNA, 25 bp, Homo sapien
gctacagttaccatccgtccctgtg

SEQ ID NO: 2874992 - DNA, 25 bp, Homo sapien
tcacagttcaagagaagtgggagag

SEQ ID NO: 2874993 - DNA, 25 bp, Homo sapien
tgtatccatgggaaccgaggacgga

SEQ ID NO: 2874994 - DNA, 25 bp, Homo sapien
tcctgaactcctaagctggagccct

SEQ ID NO: 2874995 - DNA, 25 bp, Homo sapien
accactgaaggacgggcagccatgg

SEQ ID NO: 2874996 - DNA, 25 bp, Homo sapien
gtcctcatgccagggaccactgaag

SEQ ID NO: 2874997 - DNA, 25 bp, Homo sapien
taacagatgtgttgcaggtcctcat

SEQ ID NO: 2874998 - DNA, 25 bp, Homo sapien
gccaccatgctaactacccttccta

SEQ ID NO: 2874999 - DNA, 25 bp, Homo sapien
tggctcccctcatgtctgtgggcac

SEQ ID NO: 2875000 - DNA, 25 bp, Homo sapien
tgccacccaggctcgcgcgcagtgg

SEQ ID NO: 2875001 - DNA, 25 bp, Homo sapien
agaccagtggctcccctcatgtctg

SEQ ID NO: 2875002 - DNA, 25 bp, Homo sapien
aaatgcagggccacgactccaggcc

SEQ ID NO: 2875003 - DNA, 25 bp, Homo sapien
ctgggtacaggtttattgtggcact

SEQ ID NO: 2875004 - DNA, 25 bp, Homo sapien
gccagccctacccagaaatgcaggg

SEQ ID NO: 2875005 - DNA, 25 bp, Homo sapien
taaggcaaccattgccagccctacc

SEQ ID NO: 2875006 - DNA, 25 bp, Homo sapien
tttccttccaggttgatctgacata

SEQ ID NO: 2875007 - DNA, 25 bp, Homo sapien
ttccttccaggttgatctgacatat

SEQ ID NO: 2875008 - DNA, 25 bp, Homo sapien
gaagtcacagccatggcatttcgtg

SEQ ID NO: 2875009 - DNA, 25 bp, Homo sapien
cagccatggcatttcgtgccaaaca

SEQ ID NO: 2875010 - DNA, 25 bp, Homo sapien
tccaggaagcggtccccagcgtcga

SEQ ID NO: 2875011 - DNA, 25 bp, Homo sapien
cagcgtcgatcttgaagtcacagcc

SEQ ID NO: 2875012 - DNA, 25 bp, Homo sapien
cctcctccatgtagaaggccctgtt

SEQ ID NO: 2875013 - DNA, 25 bp, Homo sapien
cctgttccggatgggcgtcttgcag

SEQ ID NO: 2875014 - DNA, 25 bp, Homo sapien
caggtcatcttcagggcgtgcatga

SEQ ID NO: 2875015 - DNA, 25 bp, Homo sapien
ggtaaagcagtgcacgtgccaggtc

SEQ ID NO: 2875016 - DNA, 25 bp, Homo sapien
tctgagtggacgaccactgcgcctt

SEQ ID NO: 2875017 - DNA, 25 bp, Homo sapien
tccttctcgcggtaaacactacatc

SEQ ID NO: 2875018 - DNA, 25 bp, Homo sapien
tgccatgtccagcactcagttcctg

SEQ ID NO: 2875019 - DNA, 25 bp, Homo sapien
tgccctgggtcacgggaacacagga

SEQ ID NO: 2875020 - DNA, 25 bp, Homo sapien
ctgggcttgacaccggctgtcccct

SEQ ID NO: 2875021 - DNA, 25 bp, Homo sapien
ggcctcttgcctgaaactggcacac

SEQ ID NO: 2875022 - DNA, 25 bp, Homo sapien
gcctgaaactggcacaccaggcaca

SEQ ID NO: 2875023 - DNA, 25 bp, Homo sapien
cagatatctctaggctcacccctca

SEQ ID NO: 2875024 - DNA, 25 bp, Homo sapien
ctcaggctgaaatctaggtgttaaa

SEQ ID NO: 2875025 - DNA, 25 bp, Homo sapien
ttcttctgggagcagtactactggt

SEQ ID NO: 2875026 - DNA, 25 bp, Homo sapien
gactgtgtcacacggaggaggacct

SEQ ID NO: 2875027 - DNA, 25 bp, Homo sapien
gaggatggccctgagtttaaatcca

SEQ ID NO: 2875028 - DNA, 25 bp, Homo sapien
cagcttcagcgtgtcaagttggccg

SEQ ID NO: 2875029 - DNA, 25 bp, Homo sapien
tcatgtgactgggttctgaccaaca

SEQ ID NO: 2875030 - DNA, 25 bp, Homo sapien
catttattacgctggtaaggacccg

SEQ ID NO: 2875031 - DNA, 25 bp, Homo sapien
taagagcatcctgactaatgcaggg

SEQ ID NO: 2875032 - DNA, 25 bp, Homo sapien
catagcgcacgtcatagcatggtgg

SEQ ID NO: 2875033 - DNA, 25 bp, Homo sapien
tcctccgggtggtacgcgtggccca

SEQ ID NO: 2875034 - DNA, 25 bp, Homo sapien
gcacagctgggtgcatagcgcacgt

SEQ ID NO: 2875035 - DNA, 25 bp, Homo sapien
ctcctcaaagaagccaccctcttcc

SEQ ID NO: 2875036 - DNA, 25 bp, Homo sapien
ggagggacagttcattctccccatt

SEQ ID NO: 2875037 - DNA, 25 bp, Homo sapien
tccacataggatagaagacaggctt

SEQ ID NO: 2875038 - DNA, 25 bp, Homo sapien
tctccccattttccacataggatag

SEQ ID NO: 2875039 - DNA, 25 bp, Homo sapien
tgaagcttacagagccagtccgcca

SEQ ID NO: 2875040 - DNA, 25 bp, Homo sapien
gccaggcctgcgaattaggaaggct

SEQ ID NO: 2875041 - DNA, 25 bp, Homo sapien
aggctctagaatccggcacgctgat

SEQ ID NO: 2875042 - DNA, 25 bp, Homo sapien
tagaatccggcacgctgatgctggg

SEQ ID NO: 2875043 - DNA, 25 bp, Homo sapien
aattaggaaggctctagaatccggc

SEQ ID NO: 2875044 - DNA, 25 bp, Homo sapien
cactggtgacacacgggagtcttgc

SEQ ID NO: 2875045 - DNA, 25 bp, Homo sapien
tgcacaatggaggtgcggctctgca

SEQ ID NO: 2875046 - DNA, 25 bp, Homo sapien
atagcgctcggcaaacgcagggtcc

SEQ ID NO: 2875047 - DNA, 25 bp, Homo sapien
cagcactgtgctcgttttgtccggg

SEQ ID NO: 2875048 - DNA, 25 bp, Homo sapien
ctggggtgtagatgaggctggggct

SEQ ID NO: 2875049 - DNA, 25 bp, Homo sapien
agggctcctggggtgtagatgaggc

SEQ ID NO: 2875050 - DNA, 25 bp, Homo sapien
ctggggcttctgtcctgggcacctg

SEQ ID NO: 2875051 - DNA, 25 bp, Homo sapien
ggctcctggggtgtagatgaggctg

SEQ ID NO: 2875052 - DNA, 25 bp, Homo sapien
gcaagatctgccattcaaggccctg

SEQ ID NO: 2875053 - DNA, 25 bp, Homo sapien
ctgcaagatctgccattcaaggccc

SEQ ID NO: 2875054 - DNA, 25 bp, Homo sapien
agatctgccattcaaggccctgcat

SEQ ID NO: 2875055 - DNA, 25 bp, Homo sapien
aagatctgccattcaaggccctgca

SEQ ID NO: 2875056 - DNA, 25 bp, Homo sapien
tgtccagttagctggtgtgcggtct

SEQ ID NO: 2875057 - DNA, 25 bp, Homo sapien
tgcggtctctagctgggagacgagg

SEQ ID NO: 2875058 - DNA, 25 bp, Homo sapien
gggcagcttctcctagcaatgtcca

SEQ ID NO: 2875059 - DNA, 25 bp, Homo sapien
aaactgccgagttggattccaggtc

SEQ ID NO: 2875060 - DNA, 25 bp, Homo sapien
cactgaaaacaaggacggcagggcc

SEQ ID NO: 2875061 - DNA, 25 bp, Homo sapien
cagggcccaaacagtccgaaccacg

SEQ ID NO: 2875062 - DNA, 25 bp, Homo sapien
gcaaaccaggtccacaaagatagaa

SEQ ID NO: 2875063 - DNA, 25 bp, Homo sapien
cccaaatgcaaaccaggtccacaaa

SEQ ID NO: 2875064 - DNA, 25 bp, Homo sapien
gggctgagaatgtttattccatgcc

SEQ ID NO: 2875065 - DNA, 25 bp, Homo sapien
gctgagaatgtttattccatgccca

SEQ ID NO: 2875066 - DNA, 25 bp, Homo sapien
cagggctgagaatgtttattccatg

SEQ ID NO: 2875067 - DNA, 25 bp, Homo sapien
tgagaatgtttattccatgcccaag

SEQ ID NO: 2875068 - DNA, 25 bp, Homo sapien
ggaaggcagtgtcagatgaacccag

SEQ ID NO: 2875069 - DNA, 25 bp, Homo sapien
gggaaggcagtgtcagatgaaccca

SEQ ID NO: 2875070 - DNA, 25 bp, Homo sapien
tggaggcactaagggggtgccctgg

SEQ ID NO: 2875071 - DNA, 25 bp, Homo sapien
cgctggtggtgccagtcccggaggc

SEQ ID NO: 2875072 - DNA, 25 bp, Homo sapien
gaggcgggtgtagcgtgggctctgc

SEQ ID NO: 2875073 - DNA, 25 bp, Homo sapien
ctggtggtgccagtcccggaggcgg

SEQ ID NO: 2875074 - DNA, 25 bp, Homo sapien
tcccggaggcgggtgtagcgtgggc

SEQ ID NO: 2875075 - DNA, 25 bp, Homo sapien
aaggaaggagagatggaagggaggc

SEQ ID NO: 2875076 - DNA, 25 bp, Homo sapien
ggaaggagagatggaagggaggcag

SEQ ID NO: 2875077 - DNA, 25 bp, Homo sapien
agagagggaggaagaagtggaagga

SEQ ID NO: 2875078 - DNA, 25 bp, Homo sapien
gagagagagggaggaagaagtggaa

SEQ ID NO: 2875079 - DNA, 25 bp, Homo sapien
caggagtagacacagggcagtagct

SEQ ID NO: 2875080 - DNA, 25 bp, Homo sapien
gagcctcaggagtagacacagggca

SEQ ID NO: 2875081 - DNA, 25 bp, Homo sapien
cctcaggagtagacacagggcagta

SEQ ID NO: 2875082 - DNA, 25 bp, Homo sapien
agctgggagcctcaggagtagacac

SEQ ID NO: 2875083 - DNA, 25 bp, Homo sapien
ttcaggtgctcctcatccgggtctt

SEQ ID NO: 2875084 - DNA, 25 bp, Homo sapien
aggtgctcctcatccgggtcttgca

SEQ ID NO: 2875085 - DNA, 25 bp, Homo sapien
tcttcaggtgctcctcatccgggtc

SEQ ID NO: 2875086 - DNA, 25 bp, Homo sapien
tcaggtgctcctcatccgggtcttg

SEQ ID NO: 2875087 - DNA, 25 bp, Homo sapien
cagggatcacgcctgggctgggggc

SEQ ID NO: 2875088 - DNA, 25 bp, Homo sapien
aggaacgcgactggcctgtccccgg

SEQ ID NO: 2875089 - DNA, 25 bp, Homo sapien
gatgcggaaggaacgcgactggcct

SEQ ID NO: 2875090 - DNA, 25 bp, Homo sapien
gcaaggatgcggaaggaacgcgact

SEQ ID NO: 2875091 - DNA, 25 bp, Homo sapien
tgaactcggtgcctgtgaggtgggc

SEQ ID NO: 2875092 - DNA, 25 bp, Homo sapien
caggatttggtgcatgtgggtttgg

SEQ ID NO: 2875093 - DNA, 25 bp, Homo sapien
agggtgtggctcagaaccccacact

SEQ ID NO: 2875094 - DNA, 25 bp, Homo sapien
gcgcagcacagactgagcagcagcg

SEQ ID NO: 2875095 - DNA, 25 bp, Homo sapien
cagacagataaagggacaaagggac

SEQ ID NO: 2875096 - DNA, 25 bp, Homo sapien
gggcgcggcgtcattcagagacccc

SEQ ID NO: 2875097 - DNA, 25 bp, Homo sapien
tgccgcacggttccgccgggctggg

SEQ ID NO: 2875098 - DNA, 25 bp, Homo sapien
caaagggccgggccgtcttgttgag

SEQ ID NO: 2875099 - DNA, 25 bp, Homo sapien
tgcaaaggtgtaccgcggagggtcc

SEQ ID NO: 2875100 - DNA, 25 bp, Homo sapien
tcttgttgagggagacgctgggtgc

SEQ ID NO: 2875101 - DNA, 25 bp, Homo sapien
tgagggagacgctgggtgcaaaggt

SEQ ID NO: 2875102 - DNA, 25 bp, Homo sapien
cacagccgggcagggcgggcgggca

SEQ ID NO: 2875103 - DNA, 25 bp, Homo sapien
agccgggcagggcgggcgggcaggg

SEQ ID NO: 2875104 - DNA, 25 bp, Homo sapien
gacacagccgggcagggcgggcggg

SEQ ID NO: 2875105 - DNA, 25 bp, Homo sapien
cagggcgggcgggcagggtaaggtg

SEQ ID NO: 2875106 - DNA, 25 bp, Homo sapien
agggctgaccgagtgcgggcgagca

SEQ ID NO: 2875107 - DNA, 25 bp, Homo sapien
cagacaggcggacatgcgtggtgcc

SEQ ID NO: 2875108 - DNA, 25 bp, Homo sapien
ggcccatttgggagtggcgatctca

SEQ ID NO: 2875109 - DNA, 25 bp, Homo sapien
gagaggacgactcaggtttcaaggg

SEQ ID NO: 2875110 - DNA, 25 bp, Homo sapien
ctgcggtttgctctgaaccggctgg

SEQ ID NO: 2875111 - DNA, 25 bp, Homo sapien
tctgcggtttgctctgaaccggctg

SEQ ID NO: 2875112 - DNA, 25 bp, Homo sapien
cttctgcggtttgctctgaaccggc

SEQ ID NO: 2875113 - DNA, 25 bp, Homo sapien
cggtttgctctgaaccggctgggcc

SEQ ID NO: 2875114 - DNA, 25 bp, Homo sapien
aaggaaagcgtgacagcgggccggg

SEQ ID NO: 2875115 - DNA, 25 bp, Homo sapien
agcgcgggcgcacccatccatgtcc

SEQ ID NO: 2875116 - DNA, 25 bp, Homo sapien
gcattctcgccatcgatgctcagca

SEQ ID NO: 2875117 - DNA, 25 bp, Homo sapien
ttctgagcttcgatgtgtgtgaggc

SEQ ID NO: 2875118 - DNA, 25 bp, Homo sapien
tgtgtgtgaggctacccgcattctc

SEQ ID NO: 2875119 - DNA, 25 bp, Homo sapien
caggcccggatcttgttctgagctt

SEQ ID NO: 2875120 - DNA, 25 bp, Homo sapien
caagccaggctgacggtggtaacac

SEQ ID NO: 2875121 - DNA, 25 bp, Homo sapien
cagagagctcttcattcaacatagt

SEQ ID NO: 2875122 - DNA, 25 bp, Homo sapien
tcaacatagttctaggcagctgctg

SEQ ID NO: 2875123 - DNA, 25 bp, Homo sapien
gcagctgctggacactaaagcaacc

SEQ ID NO: 2875124 - DNA, 25 bp, Homo sapien
tggcccctccagcactactttgaag

SEQ ID NO: 2875125 - DNA, 25 bp, Homo sapien
cccctccagcactactttgaaggaa

SEQ ID NO: 2875126 - DNA, 25 bp, Homo sapien
cccttgcagccggaagccccaaggt

SEQ ID NO: 2875127 - DNA, 25 bp, Homo sapien
ccttgcagccggaagccccaaggtg

SEQ ID NO: 2875128 - DNA, 25 bp, Homo sapien
ggagagaagagaaggtgagtggcca

SEQ ID NO: 2875129 - DNA, 25 bp, Homo sapien
aagagaaggtgagtggccagcatgg

SEQ ID NO: 2875130 - DNA, 25 bp, Homo sapien
gagaagagaaggtgagtggccagca

SEQ ID NO: 2875131 - DNA, 25 bp, Homo sapien
gagaaggtgagtggccagcatggtg

SEQ ID NO: 2875132 - DNA, 25 bp, Homo sapien
gctggctggcggacctcactttgga

SEQ ID NO: 2875133 - DNA, 25 bp, Homo sapien
gagcacgcccaagccataggaggca

SEQ ID NO: 2875134 - DNA, 25 bp, Homo sapien
cacgcccaagccataggaggcaggt

SEQ ID NO: 2875135 - DNA, 25 bp, Homo sapien
cccaagccataggaggcaggtattt

SEQ ID NO: 2875136 - DNA, 25 bp, Homo sapien
gctccagggagcctcgttgggatcg

SEQ ID NO: 2875137 - DNA, 25 bp, Homo sapien
gctgctctgcgtcgggctccaggga

SEQ ID NO: 2875138 - DNA, 25 bp, Homo sapien
gcgctgctctgcgtcgggctccagg

SEQ ID NO: 2875139 - DNA, 25 bp, Homo sapien
tccagggagcctcgttgggatcggc

SEQ ID NO: 2875140 - DNA, 25 bp, Homo sapien
tgtgtgtccgtcatgaaaatgaggt

SEQ ID NO: 2875141 - DNA, 25 bp, Homo sapien
gagcaaaaattgtgtgtccgtcatg

SEQ ID NO: 2875142 - DNA, 25 bp, Homo sapien
ggagagagcaaaaattgtgtgtccg

SEQ ID NO: 2875143 - DNA, 25 bp, Homo sapien
caaaaattgtgtgtccgtcatgaaa

SEQ ID NO: 2875144 - DNA, 25 bp, Homo sapien
ctggaatgtcggctcccggagaaca

SEQ ID NO: 2875145 - DNA, 25 bp, Homo sapien
tgcgtgcatggctggctcctaggat

SEQ ID NO: 2875146 - DNA, 25 bp, Homo sapien
caaggctgtcctgaacacggctgtg

SEQ ID NO: 2875147 - DNA, 25 bp, Homo sapien
gaacgcagcatggaagtcttcagga

SEQ ID NO: 2875148 - DNA, 25 bp, Homo sapien
tctgcacactattcatgaggagggc

SEQ ID NO: 2875149 - DNA, 25 bp, Homo sapien
caaattgttggagtttcagcaggga

SEQ ID NO: 2875150 - DNA, 25 bp, Homo sapien
gagtctgacaagtaagcctcacagc

SEQ ID NO: 2875151 - DNA, 25 bp, Homo sapien
actcggccgtgcagagcaacatgga

SEQ ID NO: 2875152 - DNA, 25 bp, Homo sapien
tcacaaggggctgggcccttcctcc

SEQ ID NO: 2875153 - DNA, 25 bp, Homo sapien
caaggggctgggcccttcctccgct

SEQ ID NO: 2875154 - DNA, 25 bp, Homo sapien
ggggctgggcccttcctccgctcac

SEQ ID NO: 2875155 - DNA, 25 bp, Homo sapien
tcagggccggtcacaaggggctggg

SEQ ID NO: 2875156 - DNA, 25 bp, Homo sapien
cacacacaggttctcatagaggtgc

SEQ ID NO: 2875157 - DNA, 25 bp, Homo sapien
cattttcctggacgtgggtggctca

SEQ ID NO: 2875158 - DNA, 25 bp, Homo sapien
tccgggctcggccaggtgcattttc

SEQ ID NO: 2875159 - DNA, 25 bp, Homo sapien
acactgaagcgtagagcccggacgc

SEQ ID NO: 2875160 - DNA, 25 bp, Homo sapien
cttgtcggagccgaacttgcgcagg

SEQ ID NO: 2875161 - DNA, 25 bp, Homo sapien
tgtcggagccgaacttgcgcaggaa

SEQ ID NO: 2875162 - DNA, 25 bp, Homo sapien
cttgcgcaggaagtggtagggccag

SEQ ID NO: 2875163 - DNA, 25 bp, Homo sapien
aacttgcgcaggaagtggtagggcc

SEQ ID NO: 2875164 - DNA, 25 bp, Homo sapien
ctgcaccaccacgggaaactcgccc

SEQ ID NO: 2875165 - DNA, 25 bp, Homo sapien
gctggatggcgtctgggcccagcac

SEQ ID NO: 2875166 - DNA, 25 bp, Homo sapien
tggagttttcctccatggggaccag

SEQ ID NO: 2875167 - DNA, 25 bp, Homo sapien
caggaggagtagatggagttttcct

SEQ ID NO: 2875168 - DNA, 25 bp, Homo sapien
tcttgggagactgggcatctgtgga

SEQ ID NO: 2875169 - DNA, 25 bp, Homo sapien
gatggagttttcctccatggggacc

SEQ ID NO: 2875170 - DNA, 25 bp, Homo sapien
tcttaaagtgtatcatcagtgctct

SEQ ID NO: 2875171 - DNA, 25 bp, Homo sapien
tacatcttaaagtgtatcatcagtg

SEQ ID NO: 2875172 - DNA, 25 bp, Homo sapien
tttacatcttaaagtgtatcatcag

SEQ ID NO: 2875173 - DNA, 25 bp, Homo sapien
catcttaaagtgtatcatcagtgct

SEQ ID NO: 2875174 - DNA, 25 bp, Homo sapien
tagtattccatcttgcggacggacc

SEQ ID NO: 2875175 - DNA, 25 bp, Homo sapien
tggcctagggcatttcagccgctct

SEQ ID NO: 2875176 - DNA, 25 bp, Homo sapien
taagctctgtgagttggcttcctcc

SEQ ID NO: 2875177 - DNA, 25 bp, Homo sapien
catgtccggcttaaaccctccaaag

SEQ ID NO: 2875178 - DNA, 25 bp, Homo sapien
ggaaggccagctggcagatggggcc

SEQ ID NO: 2875179 - DNA, 25 bp, Homo sapien
aggccagctggcagatggggcccat

SEQ ID NO: 2875180 - DNA, 25 bp, Homo sapien
aaggccagctggcagatggggccca

SEQ ID NO: 2875181 - DNA, 25 bp, Homo sapien
cgggaaggccagctggcagatgggg

SEQ ID NO: 2875182 - DNA, 25 bp, Homo sapien
tcagccaggcggatgacccgtcgct

SEQ ID NO: 2875183 - DNA, 25 bp, Homo sapien
agcaggaaggcaccggtgtcccggg

SEQ ID NO: 2875184 - DNA, 25 bp, Homo sapien
tgggcctcctgcatacagcagagcc

SEQ ID NO: 2875185 - DNA, 25 bp, Homo sapien
ccagtagatggcttcgctcggtggt

SEQ ID NO: 2875186 - DNA, 25 bp, Homo sapien
aaactgacggtttatctgcctgggc

SEQ ID NO: 2875187 - DNA, 25 bp, Homo sapien
tatgcttgggattggtcagccctgg

SEQ ID NO: 2875188 - DNA, 25 bp, Homo sapien
tcgagctgggactgctactgggtca

SEQ ID NO: 2875189 - DNA, 25 bp, Homo sapien
tgtttgtaaagcatccagtggccgg

SEQ ID NO: 2875190 - DNA, 25 bp, Homo sapien
ggtctgcctgggctgtccgaggcag

SEQ ID NO: 2875191 - DNA, 25 bp, Homo sapien
ctgggtgggatcctccaccctgact

SEQ ID NO: 2875192 - DNA, 25 bp, Homo sapien
gccatccttgataggggtctccaga

SEQ ID NO: 2875193 - DNA, 25 bp, Homo sapien
gatgccatccttgataggggtctcc

SEQ ID NO: 2875194 - DNA, 25 bp, Homo sapien
tgccatccttgataggggtctccag

SEQ ID NO: 2875195 - DNA, 25 bp, Homo sapien
gaggatgccatccttgataggggtc

SEQ ID NO: 2875196 - DNA, 25 bp, Homo sapien
aggagcagggccgccgcttcaagac

SEQ ID NO: 2875197 - DNA, 25 bp, Homo sapien
ccaggagcagggccgccgcttcaag

SEQ ID NO: 2875198 - DNA, 25 bp, Homo sapien
caggagcagggccgccgcttcaaga

SEQ ID NO: 2875199 - DNA, 25 bp, Homo sapien
agactgatgacaggctggacgggaa

SEQ ID NO: 2875200 - DNA, 25 bp, Homo sapien
gagactgatgacaggctggacggga

SEQ ID NO: 2875201 - DNA, 25 bp, Homo sapien
ggagactgatgacaggctggacggg

SEQ ID NO: 2875202 - DNA, 25 bp, Homo sapien
ggggggaggggagcctgtcttcagc

SEQ ID NO: 2875203 - DNA, 25 bp, Homo sapien
gttctggctgcccaaggtgcccaca

SEQ ID NO: 2875204 - DNA, 25 bp, Homo sapien
gggttctggctgcccaaggtgccca

SEQ ID NO: 2875205 - DNA, 25 bp, Homo sapien
ccctggggttctggctgcccaaggt

SEQ ID NO: 2875206 - DNA, 25 bp, Homo sapien
ctggggttctggctgcccaaggtgc

SEQ ID NO: 2875207 - DNA, 25 bp, Homo sapien
gcccccggccacctgaaggcagcct

SEQ ID NO: 2875208 - DNA, 25 bp, Homo sapien
gagcccccggccacctgaaggcagc

SEQ ID NO: 2875209 - DNA, 25 bp, Homo sapien
tggagggagcccccggccacctgaa

SEQ ID NO: 2875210 - DNA, 25 bp, Homo sapien
gggagcccccggccacctgaaggca

SEQ ID NO: 2875211 - DNA, 25 bp, Homo sapien
cgcgcgtctgatcgcagtctggctc

SEQ ID NO: 2875212 - DNA, 25 bp, Homo sapien
gttcagctgggcacgcgcgtctgat

SEQ ID NO: 2875213 - DNA, 25 bp, Homo sapien
tgatcgcagtctggctccccgagtc

SEQ ID NO: 2875214 - DNA, 25 bp, Homo sapien
ctgggcacgcgcgtctgatcgcagt

SEQ ID NO: 2875215 - DNA, 25 bp, Homo sapien
ggcgtcctggtttgagcgcctcacc

SEQ ID NO: 2875216 - DNA, 25 bp, Homo sapien
tcccactcggcgtcctggtttgagc

SEQ ID NO: 2875217 - DNA, 25 bp, Homo sapien
ctccacctcacgagccactgaacat

SEQ ID NO: 2875218 - DNA, 25 bp, Homo sapien
tctccctgaaatctctctcgtgttc

SEQ ID NO: 2875219 - DNA, 25 bp, Homo sapien
tctccccttcctggggtgcagacca

SEQ ID NO: 2875220 - DNA, 25 bp, Homo sapien
ggctcctcagcccaacactcaggga

SEQ ID NO: 2875221 - DNA, 25 bp, Homo sapien
tcagcccaacactcagggacctgtg

SEQ ID NO: 2875222 - DNA, 25 bp, Homo sapien
caacactcagggacctgtgtgttct

SEQ ID NO: 2875223 - DNA, 25 bp, Homo sapien
cgagagctcaaaggccctcacggta

SEQ ID NO: 2875224 - DNA, 25 bp, Homo sapien
aaggccctcacggtatacactcacg

SEQ ID NO: 2875225 - DNA, 25 bp, Homo sapien
tccacgctgtccgagagctcaaagg

SEQ ID NO: 2875226 - DNA, 25 bp, Homo sapien
actccacgctgtccgagagctcaaa

SEQ ID NO: 2875227 - DNA, 25 bp, Homo sapien
tatgtgtagactggtggcagtcttg

SEQ ID NO: 2875228 - DNA, 25 bp, Homo sapien
ttaatggcagctggggtaaaaggaa

SEQ ID NO: 2875229 - DNA, 25 bp, Homo sapien
gtatgtgtagactggtggcagtctt

SEQ ID NO: 2875230 - DNA, 25 bp, Homo sapien
agaggtttgggctttaatggcagct

SEQ ID NO: 2875231 - DNA, 25 bp, Homo sapien
tgggccaggtagtccttgcgaccga

SEQ ID NO: 2875232 - DNA, 25 bp, Homo sapien
caggtagtccttgcgaccgatgttg

SEQ ID NO: 2875233 - DNA, 25 bp, Homo sapien
ctgtgggccaggtagtccttgcgac

SEQ ID NO: 2875234 - DNA, 25 bp, Homo sapien
tagtccttgcgaccgatgttgctga

SEQ ID NO: 2875235 - DNA, 25 bp, Homo sapien
tctgcatagcctcgagtttggggca

SEQ ID NO: 2875236 - DNA, 25 bp, Homo sapien
ccccgcagaaggcacagccgcgctc

SEQ ID NO: 2875237 - DNA, 25 bp, Homo sapien
ggcagtcagtgatccgatgacccag

SEQ ID NO: 2875238 - DNA, 25 bp, Homo sapien
tcgagtttggggcagtcagtgatcc

SEQ ID NO: 2875239 - DNA, 25 bp, Homo sapien
gactcggggatcccgctctgcagtc

SEQ ID NO: 2875240 - DNA, 25 bp, Homo sapien
ctccaatgtccagcatggactcatc

SEQ ID NO: 2875241 - DNA, 25 bp, Homo sapien
ggcttctagcagcagcgctttgagg

SEQ ID NO: 2875242 - DNA, 25 bp, Homo sapien
gcatggactcatccccgcaatgcag

SEQ ID NO: 2875243 - DNA, 25 bp, Homo sapien
gctttgaggtccatcagcactgact

SEQ ID NO: 2875244 - DNA, 25 bp, Homo sapien
ggcgatgcctgtgtttcccgagcgc

SEQ ID NO: 2875245 - DNA, 25 bp, Homo sapien
cgctttgttgatgaaggtagtggcg

SEQ ID NO: 2875246 - DNA, 25 bp, Homo sapien
cgcccggtgcggccaatccggtgta

SEQ ID NO: 2875247 - DNA, 25 bp, Homo sapien
aaggtagtggcgatgcctgtgtttc

SEQ ID NO: 2875248 - DNA, 25 bp, Homo sapien
tcgctggacactaggggcctggctt

SEQ ID NO: 2875249 - DNA, 25 bp, Homo sapien
tctggcccatcgctggacactaggg

SEQ ID NO: 2875250 - DNA, 25 bp, Homo sapien
tccggcctaacccatgcccttgggc

SEQ ID NO: 2875251 - DNA, 25 bp, Homo sapien
ccatcgctggacactaggggcctgg

SEQ ID NO: 2875252 - DNA, 25 bp, Homo sapien
cataattgatgacgtgctggatggc

SEQ ID NO: 2875253 - DNA, 25 bp, Homo sapien
ttgccctcccggaatgcctcgatgg

SEQ ID NO: 2875254 - DNA, 25 bp, Homo sapien
tgtggctactaggacatccttcttg

SEQ ID NO: 2875255 - DNA, 25 bp, Homo sapien
cttggaggcaacgtctgtggctact

SEQ ID NO: 2875256 - DNA, 25 bp, Homo sapien
gacactgtcagagccaccatgggat

SEQ ID NO: 2875257 - DNA, 25 bp, Homo sapien
agacactgtcagagccaccatggga

SEQ ID NO: 2875258 - DNA, 25 bp, Homo sapien
ctgtcagagccaccatgggataggg

SEQ ID NO: 2875259 - DNA, 25 bp, Homo sapien
cactgtcagagccaccatgggatag

SEQ ID NO: 2875260 - DNA, 25 bp, Homo sapien
ttgagcagcaggtactcgtggatgg

SEQ ID NO: 2875261 - DNA, 25 bp, Homo sapien
tttgcccccatggatggctacggcc

SEQ ID NO: 2875262 - DNA, 25 bp, Homo sapien
ggcctcaacccccttgagcagcagg

SEQ ID NO: 2875263 - DNA, 25 bp, Homo sapien
ctcgtggatggcgtccacgtctgcc

SEQ ID NO: 2875264 - DNA, 25 bp, Homo sapien
tctgcaggcactcgagcaggtacac

SEQ ID NO: 2875265 - DNA, 25 bp, Homo sapien
gagcaggtacaccatcttggcctcc

SEQ ID NO: 2875266 - DNA, 25 bp, Homo sapien
ggtgtcttctgcaggcactcgagca

SEQ ID NO: 2875267 - DNA, 25 bp, Homo sapien
gcctcctccttcacatattctacct

SEQ ID NO: 2875268 - DNA, 25 bp, Homo sapien
aatcttcttcggcatggtggcactg

SEQ ID NO: 2875269 - DNA, 25 bp, Homo sapien
gttctgaatcttcttcggcatggtg

SEQ ID NO: 2875270 - DNA, 25 bp, Homo sapien
tacaagggcactcttagcaaagttc

SEQ ID NO: 2875271 - DNA, 25 bp, Homo sapien
gtcacaggctttacaagggcactct

SEQ ID NO: 2875272 - DNA, 25 bp, Homo sapien
gcaaatccatgaggcgccccggggt

SEQ ID NO: 2875273 - DNA, 25 bp, Homo sapien
aagatggtacggatgtcaccctcga

SEQ ID NO: 2875274 - DNA, 25 bp, Homo sapien
catgtcgatcatgcggtcagcctcg

SEQ ID NO: 2875275 - DNA, 25 bp, Homo sapien
gacagatgtctaggctgaccatctt

SEQ ID NO: 2875276 - DNA, 25 bp, Homo sapien
ttcaccttttctgtgctcaccatct

SEQ ID NO: 2875277 - DNA, 25 bp, Homo sapien
tggcccatctgtgaacagagggcct

SEQ ID NO: 2875278 - DNA, 25 bp, Homo sapien
actcagaagtccgtggaggaaggcc

SEQ ID NO: 2875279 - DNA, 25 bp, Homo sapien
gaagcgctgtcatcaagctccagag

SEQ ID NO: 2875280 - DNA, 25 bp, Homo sapien
tgtggagtggctaaggtaaagggtc

SEQ ID NO: 2875281 - DNA, 25 bp, Homo sapien
tgagggtcgcactcacagcagccct

SEQ ID NO: 2875282 - DNA, 25 bp, Homo sapien
cttttccacagactcgcaggtggca

SEQ ID NO: 2875283 - DNA, 25 bp, Homo sapien
gggagctccttgagggtcgcactca

SEQ ID NO: 2875284 - DNA, 25 bp, Homo sapien
gcggcagtagtactccaggatgcca

SEQ ID NO: 2875285 - DNA, 25 bp, Homo sapien
cgcaggagtggtgagctgtcctcct

SEQ ID NO: 2875286 - DNA, 25 bp, Homo sapien
atgccatgggtctgccgggccagct

SEQ ID NO: 2875287 - DNA, 25 bp, Homo sapien
tttcacggacatgcccccaatgcag

SEQ ID NO: 2875288 - DNA, 25 bp, Homo sapien
aggctggcaccagatggcagcccca

SEQ ID NO: 2875289 - DNA, 25 bp, Homo sapien
gccccaatctctggcctgccctcca

SEQ ID NO: 2875290 - DNA, 25 bp, Homo sapien
ggctggcaccagatggcagccccaa

SEQ ID NO: 2875291 - DNA, 25 bp, Homo sapien
ggcagatgatgagtccatagggccc

SEQ ID NO: 2875292 - DNA, 25 bp, Homo sapien
gcccctcgcgctttgagaagggtaa

SEQ ID NO: 2875293 - DNA, 25 bp, Homo sapien
tccatagggcccctcgcgctttgag

SEQ ID NO: 2875294 - DNA, 25 bp, Homo sapien
atgatgagtccatagggcccctcgc

SEQ ID NO: 2875295 - DNA, 25 bp, Homo sapien
agtgtcttgcctgaacccgtgaaag

SEQ ID NO: 2875296 - DNA, 25 bp, Homo sapien
cgggcaacgtgaacaccagtgtctt

SEQ ID NO: 2875297 - DNA, 25 bp, Homo sapien
gaaagcgatgcctatcatgtcacgg

SEQ ID NO: 2875298 - DNA, 25 bp, Homo sapien
ggcagaacatgatgacgggcaacgt

SEQ ID NO: 2875299 - DNA, 25 bp, Homo sapien
cctggatctgaatgggtgttgggtg

SEQ ID NO: 2875300 - DNA, 25 bp, Homo sapien
tgaacacgtacagctgaggcaacaa

SEQ ID NO: 2875301 - DNA, 25 bp, Homo sapien
tatgcccaatggcactttcctcctg

SEQ ID NO: 2875302 - DNA, 25 bp, Homo sapien
aggatttgtacccagtgtctatgcc

SEQ ID NO: 2875303 - DNA, 25 bp, Homo sapien
cccagtgactggatccaatgcagat

SEQ ID NO: 2875304 - DNA, 25 bp, Homo sapien
tgggtggtgggataccgtctccctc

SEQ ID NO: 2875305 - DNA, 25 bp, Homo sapien
gatgtggtatttcttccgcacgcgc

SEQ ID NO: 2875306 - DNA, 25 bp, Homo sapien
gcacgcgctcatgtcgctcttcaga

SEQ ID NO: 2875307 - DNA, 25 bp, Homo sapien
tcagacatgctcagaacataacggg

SEQ ID NO: 2875308 - DNA, 25 bp, Homo sapien
aagggcaactgcagactgtacagac

SEQ ID NO: 2875309 - DNA, 25 bp, Homo sapien
cctgggaatagctggcctgggagca

SEQ ID NO: 2875310 - DNA, 25 bp, Homo sapien
tgcatgtaccatcctaagcaagggc

SEQ ID NO: 2875311 - DNA, 25 bp, Homo sapien
taacagggatcaagagagccctggg

SEQ ID NO: 2875312 - DNA, 25 bp, Homo sapien
tgatggggtcatcatacgtaatgcc

SEQ ID NO: 2875313 - DNA, 25 bp, Homo sapien
gggtcatcatacgtaatgcccttag

SEQ ID NO: 2875314 - DNA, 25 bp, Homo sapien
tacgtaatgcccttagccatctcct

SEQ ID NO: 2875315 - DNA, 25 bp, Homo sapien
catcatacgtaatgcccttagccat

SEQ ID NO: 2875316 - DNA, 25 bp, Homo sapien
cttctcactatcctggctacaacca

SEQ ID NO: 2875317 - DNA, 25 bp, Homo sapien
tgggaggagaagactcagtccacct

SEQ ID NO: 2875318 - DNA, 25 bp, Homo sapien
gaagactcagtccaccttctcacta

SEQ ID NO: 2875319 - DNA, 25 bp, Homo sapien
atcccttgagatataacatgcctgg

SEQ ID NO: 2875320 - DNA, 25 bp, Homo sapien
ccctcggcaacactctccaggatct

SEQ ID NO: 2875321 - DNA, 25 bp, Homo sapien
gccctcggcaacactctccaggatc

SEQ ID NO: 2875322 - DNA, 25 bp, Homo sapien
gggttcactaccgctgtcctgctgc

SEQ ID NO: 2875323 - DNA, 25 bp, Homo sapien
atccaggaggctgacgttggactga

SEQ ID NO: 2875324 - DNA, 25 bp, Homo sapien
gctcccttgcgtcttcgctgcagca

SEQ ID NO: 2875325 - DNA, 25 bp, Homo sapien
agggcctagcgggatgtcgtcctca

SEQ ID NO: 2875326 - DNA, 25 bp, Homo sapien
cacaaggtcagcgtcaggatcctgg

SEQ ID NO: 2875327 - DNA, 25 bp, Homo sapien
gttccacccgggatccacagatagg

SEQ ID NO: 2875328 - DNA, 25 bp, Homo sapien
cacccgggatccacagataggatgg

SEQ ID NO: 2875329 - DNA, 25 bp, Homo sapien
gataggatgggcatggagtccacaa

SEQ ID NO: 2875330 - DNA, 25 bp, Homo sapien
cgaggatcctgtgcccgaggcgcaa

SEQ ID NO: 2875331 - DNA, 25 bp, Homo sapien
ggccgcgccctggtgtactgaagct

SEQ ID NO: 2875332 - DNA, 25 bp, Homo sapien
ctacccctcagatcaagccgtcggt

SEQ ID NO: 2875333 - DNA, 25 bp, Homo sapien
agccgtcggtccctcgtttgtctgg

SEQ ID NO: 2875334 - DNA, 25 bp, Homo sapien
taacggcacatagggcacgtagtcc

SEQ ID NO: 2875335 - DNA, 25 bp, Homo sapien
tcctccggcaggcacctcgtcggtg

SEQ ID NO: 2875336 - DNA, 25 bp, Homo sapien
gcctcggagcggcttcctccggcag

SEQ ID NO: 2875337 - DNA, 25 bp, Homo sapien
gccggcgctgccgtaacggcacata

SEQ ID NO: 2875338 - DNA, 25 bp, Homo sapien
tgcaagcacacgccagtcaggcacg

SEQ ID NO: 2875339 - DNA, 25 bp, Homo sapien
tgctcccctcttcacgcccgctccc

SEQ ID NO: 2875340 - DNA, 25 bp, Homo sapien
acgccagtcaggcacggcctgctcc

SEQ ID NO: 2875341 - DNA, 25 bp, Homo sapien
ttcacgcccgctcccacacgcgcgg

SEQ ID NO: 2875342 - DNA, 25 bp, Homo sapien
tgttccggagatactatcgcacggc

SEQ ID NO: 2875343 - DNA, 25 bp, Homo sapien
ccggatcgcgcagagggacaaattt

SEQ ID NO: 2875344 - DNA, 25 bp, Homo sapien
aacgacctcggagttccggatcgcg

SEQ ID NO: 2875345 - DNA, 25 bp, Homo sapien
ccaatccgatgtgaagaggcgaacg

SEQ ID NO: 2875346 - DNA, 25 bp, Homo sapien
ggtgtgcgaggagcttatgtagatt

SEQ ID NO: 2875347 - DNA, 25 bp, Homo sapien
tgcgaggagcttatgtagattgaga

SEQ ID NO: 2875348 - DNA, 25 bp, Homo sapien
ctggtgtgcgaggagcttatgtaga

SEQ ID NO: 2875349 - DNA, 25 bp, Homo sapien
tgtgcgaggagcttatgtagattga

SEQ ID NO: 2875350 - DNA, 25 bp, Homo sapien
tgccagtcccatggtgggtctcaac

SEQ ID NO: 2875351 - DNA, 25 bp, Homo sapien
cacaaagagagcagtgttgggccag

SEQ ID NO: 2875352 - DNA, 25 bp, Homo sapien
ccagcacagtgtggcatccgttcag

SEQ ID NO: 2875353 - DNA, 25 bp, Homo sapien
aattatacgccttcagctggcagtc

SEQ ID NO: 2875354 - DNA, 25 bp, Homo sapien
tttcggcacgaaagatcttcacagt

SEQ ID NO: 2875355 - DNA, 25 bp, Homo sapien
gggggacaatccttgagtagatcca

SEQ ID NO: 2875356 - DNA, 25 bp, Homo sapien
gcagaggatgcaggttaacgggttg

SEQ ID NO: 2875357 - DNA, 25 bp, Homo sapien
agtaagcaatgagccatgctccagc

SEQ ID NO: 2875358 - DNA, 25 bp, Homo sapien
aaaagagcagaatcacagtaagcaa

SEQ ID NO: 2875359 - DNA, 25 bp, Homo sapien
aagtttgctgcttaggcccagagag

SEQ ID NO: 2875360 - DNA, 25 bp, Homo sapien
ctgagggtccaggaagtttgctgct

SEQ ID NO: 2875361 - DNA, 25 bp, Homo sapien
tccaggaagtttgctgcttaggccc

SEQ ID NO: 2875362 - DNA, 25 bp, Homo sapien
tctgaaggctgtcctggctgcaggc

SEQ ID NO: 2875363 - DNA, 25 bp, Homo sapien
tcagctgggaagtaccttggtagcc

SEQ ID NO: 2875364 - DNA, 25 bp, Homo sapien
gctggccccttcttatactgcttca

SEQ ID NO: 2875365 - DNA, 25 bp, Homo sapien
cccacgatgttcactcagggctggc

SEQ ID NO: 2875366 - DNA, 25 bp, Homo sapien
tccatgcctaaatgacccacgatgt

SEQ ID NO: 2875367 - DNA, 25 bp, Homo sapien
aagaccctgatggttatgccttagg

SEQ ID NO: 2875368 - DNA, 25 bp, Homo sapien
gttatgccttaggagatgccagtcc

SEQ ID NO: 2875369 - DNA, 25 bp, Homo sapien
tgaaatcagctggttaagaccctga

SEQ ID NO: 2875370 - DNA, 25 bp, Homo sapien
gcccagggaggagtaatagaacaga

SEQ ID NO: 2875371 - DNA, 25 bp, Homo sapien
caactttctgacgagtctgctttgc

SEQ ID NO: 2875372 - DNA, 25 bp, Homo sapien
cacagcaactttctgacgagtctgc

SEQ ID NO: 2875373 - DNA, 25 bp, Homo sapien
ttcacagcaactttctgacgagtct

SEQ ID NO: 2875374 - DNA, 25 bp, Homo sapien
tgagctgtgctaggagtggttttct

SEQ ID NO: 2875375 - DNA, 25 bp, Homo sapien
aggtaccatgtccccatcactaaga

SEQ ID NO: 2875376 - DNA, 25 bp, Homo sapien
ctaagagaccaggttctctacaaaa

SEQ ID NO: 2875377 - DNA, 25 bp, Homo sapien
tggctctcaggtgctagggtttagc

SEQ ID NO: 2875378 - DNA, 25 bp, Homo sapien
caggtgctagggtttagcaggcata

SEQ ID NO: 2875379 - DNA, 25 bp, Homo sapien
cagactcctggtctagactgcttca

SEQ ID NO: 2875380 - DNA, 25 bp, Homo sapien
gactgtatgccgtgtttctttcacc

SEQ ID NO: 2875381 - DNA, 25 bp, Homo sapien
gcagagaatgtgcaagtgaagacac

SEQ ID NO: 2875382 - DNA, 25 bp, Homo sapien
tctatgccatttatcagtaggctgc

SEQ ID NO: 2875383 - DNA, 25 bp, Homo sapien
acctctcggtcagtctcatccatct

SEQ ID NO: 2875384 - DNA, 25 bp, Homo sapien
tccaccccgtccatgtccttgggca

SEQ ID NO: 2875385 - DNA, 25 bp, Homo sapien
ctccacctctcggtcagtctcatcc

SEQ ID NO: 2875386 - DNA, 25 bp, Homo sapien
atctccaccccgtccatgtccttgg

SEQ ID NO: 2875387 - DNA, 25 bp, Homo sapien
cctttggggttatgctctgggggca

SEQ ID NO: 2875388 - DNA, 25 bp, Homo sapien
agccgctcagttcctggtgcactca

SEQ ID NO: 2875389 - DNA, 25 bp, Homo sapien
ggcagcgctgtctacacacaaaggc

SEQ ID NO: 2875390 - DNA, 25 bp, Homo sapien
ccctccaccccgtggactggctggg

SEQ ID NO: 2875391 - DNA, 25 bp, Homo sapien
gctggcacggatggagtctttgaca

SEQ ID NO: 2875392 - DNA, 25 bp, Homo sapien
gaaacacgatttgcctgctttagag

SEQ ID NO: 2875393 - DNA, 25 bp, Homo sapien
tttgggaagctctaggaccctgcct

SEQ ID NO: 2875394 - DNA, 25 bp, Homo sapien
cagatcacccgggataggttgggca

SEQ ID NO: 2875395 - DNA, 25 bp, Homo sapien
ggcacaatgtgatacctgacccatc

SEQ ID NO: 2875396 - DNA, 25 bp, Homo sapien
cagtttcagtggactaatctgcaaa

SEQ ID NO: 2875397 - DNA, 25 bp, Homo sapien
caagaggcagttttagcaggaggct

SEQ ID NO: 2875398 - DNA, 25 bp, Homo sapien
agcaaagccttaaaatcctagcctg

SEQ ID NO: 2875399 - DNA, 25 bp, Homo sapien
gatggcttttaaggtagtggcagta

SEQ ID NO: 2875400 - DNA, 25 bp, Homo sapien
gggcaatgtccagccactgatggct

SEQ ID NO: 2875401 - DNA, 25 bp, Homo sapien
gtagggtggagagcggtggactggt

SEQ ID NO: 2875402 - DNA, 25 bp, Homo sapien
tgagctatcagcgatgtggcatgga

SEQ ID NO: 2875403 - DNA, 25 bp, Homo sapien
cgcctggcgacacgggaactcggca

SEQ ID NO: 2875404 - DNA, 25 bp, Homo sapien
gggaatggacgtgctaaggtacagg

SEQ ID NO: 2875405 - DNA, 25 bp, Homo sapien
cagggaaccatgagaggcccgcctg

SEQ ID NO: 2875406 - DNA, 25 bp, Homo sapien
gggaactcggcaatcgggagcccac

SEQ ID NO: 2875407 - DNA, 25 bp, Homo sapien
ggctggctgccacagattcactcat

SEQ ID NO: 2875408 - DNA, 25 bp, Homo sapien
gattcactcatgtgcttttcttgag

SEQ ID NO: 2875409 - DNA, 25 bp, Homo sapien
ccacagattcactcatgtgcttttc

SEQ ID NO: 2875410 - DNA, 25 bp, Homo sapien
gctggctgccacagattcactcatg

SEQ ID NO: 2875411 - DNA, 25 bp, Homo sapien
cattcaagtgggtgagaaacggatt

SEQ ID NO: 2875412 - DNA, 25 bp, Homo sapien
ccattcaagtgggtgagaaacggat

SEQ ID NO: 2875413 - DNA, 25 bp, Homo sapien
attcaagtgggtgagaaacggattg

SEQ ID NO: 2875414 - DNA, 25 bp, Homo sapien
tcaagtgggtgagaaacggattgac

SEQ ID NO: 2875415 - DNA, 25 bp, Homo sapien
acagaagacacaaagacaaggtgag

SEQ ID NO: 2875416 - DNA, 25 bp, Homo sapien
acatctcggtggtccacggcgggct

SEQ ID NO: 2875417 - DNA, 25 bp, Homo sapien
ggctccgtgctgttgatgaattcca

SEQ ID NO: 2875418 - DNA, 25 bp, Homo sapien
tttttcagcttgtgccgggcccgct

SEQ ID NO: 2875419 - DNA, 25 bp, Homo sapien
agcagctcatccacatctcggtggt

SEQ ID NO: 2875420 - DNA, 25 bp, Homo sapien
tcccggatctcggtatagttccgac

SEQ ID NO: 2875421 - DNA, 25 bp, Homo sapien
ctcggtatagttccgactcgtcggg

SEQ ID NO: 2875422 - DNA, 25 bp, Homo sapien
ggatctcggtatagttccgactcgt

SEQ ID NO: 2875423 - DNA, 25 bp, Homo sapien
gcagctcctctttccgcctggtcag

SEQ ID NO: 2875424 - DNA, 25 bp, Homo sapien
gtgctgacattacaccctgggcctg

SEQ ID NO: 2875425 - DNA, 25 bp, Homo sapien
gataataacccctagctcaaaggtg

SEQ ID NO: 2875426 - DNA, 25 bp, Homo sapien
ccttgggcgagtcaccgagtctttg

SEQ ID NO: 2875427 - DNA, 25 bp, Homo sapien
tcccacgggcaccaagtatgtgatg

SEQ ID NO: 2875428 - DNA, 25 bp, Homo sapien
cacttgggggactgagagccttttt

SEQ ID NO: 2875429 - DNA, 25 bp, Homo sapien
tatgagacttctgcactgcttcctc

SEQ ID NO: 2875430 - DNA, 25 bp, Homo sapien
cagcatgccctctgatctgagcctc

SEQ ID NO: 2875431 - DNA, 25 bp, Homo sapien
ttcctggcgccgtctgtgctcacgg

SEQ ID NO: 2875432 - DNA, 25 bp, Homo sapien
cgtatacatactcatcagaatcata

SEQ ID NO: 2875433 - DNA, 25 bp, Homo sapien
cacgtatacatactcatcagaatca

SEQ ID NO: 2875434 - DNA, 25 bp, Homo sapien
gtatacatactcatcagaatcatag

SEQ ID NO: 2875435 - DNA, 25 bp, Homo sapien
cacacgtatacatactcatcagaat

SEQ ID NO: 2875436 - DNA, 25 bp, Homo sapien
ctggcccccagccctctctagcctg

SEQ ID NO: 2875437 - DNA, 25 bp, Homo sapien
tctctagcctgggcaggctcactca

SEQ ID NO: 2875438 - DNA, 25 bp, Homo sapien
gcccccagccctctctagcctgggc

SEQ ID NO: 2875439 - DNA, 25 bp, Homo sapien
ctctagcctgggcaggctcactcac

SEQ ID NO: 2875440 - DNA, 25 bp, Homo sapien
cgcattgtggccgaagaactcacag

SEQ ID NO: 2875441 - DNA, 25 bp, Homo sapien
aactcacagtagcagcagtcacaga

SEQ ID NO: 2875442 - DNA, 25 bp, Homo sapien
gcagcagtcacagaacttcccatct

SEQ ID NO: 2875443 - DNA, 25 bp, Homo sapien
gcattgtggccgaagaactcacagt

SEQ ID NO: 2875444 - DNA, 25 bp, Homo sapien
tgtgcaaacttgtgccccttgcacc

SEQ ID NO: 2875445 - DNA, 25 bp, Homo sapien
gatgaggtgcaggagcttcgctcag

SEQ ID NO: 2875446 - DNA, 25 bp, Homo sapien
aggatgaggtgcaggagcttcgctc

SEQ ID NO: 2875447 - DNA, 25 bp, Homo sapien
ggccactgtgtgcaaacttgtgccc

SEQ ID NO: 2875448 - DNA, 25 bp, Homo sapien
ctcctgacctagttgatccacctgc

SEQ ID NO: 2875449 - DNA, 25 bp, Homo sapien
tcgatctcctgacctagttgatcca

SEQ ID NO: 2875450 - DNA, 25 bp, Homo sapien
tctcctgacctagttgatccacctg

SEQ ID NO: 2875451 - DNA, 25 bp, Homo sapien
cctgacctagttgatccacctgcct

SEQ ID NO: 2875452 - DNA, 25 bp, Homo sapien
ctgtgagtgctagggagtggctgag

SEQ ID NO: 2875453 - DNA, 25 bp, Homo sapien
acagtgcccgctgcaggggtggctg

SEQ ID NO: 2875454 - DNA, 25 bp, Homo sapien
cacagtgcccgctgcaggggtggct

SEQ ID NO: 2875455 - DNA, 25 bp, Homo sapien
cagtgcccgctgcaggggtggctgc

SEQ ID NO: 2875456 - DNA, 25 bp, Homo sapien
gtgcccgctgcaggggtggctgcac

SEQ ID NO: 2875457 - DNA, 25 bp, Homo sapien
gcatcttcaggagcggcatgctggt

SEQ ID NO: 2875458 - DNA, 25 bp, Homo sapien
gtgggggcatcttcaggagcggcat

SEQ ID NO: 2875459 - DNA, 25 bp, Homo sapien
gggtagatgggagctctgacatggc

SEQ ID NO: 2875460 - DNA, 25 bp, Homo sapien
gctggtggagggtagatgggagctc

SEQ ID NO: 2875461 - DNA, 25 bp, Homo sapien
ggagtgtggggggcagtggcagcag

SEQ ID NO: 2875462 - DNA, 25 bp, Homo sapien
tggagtgtggggggcagtggcagca

SEQ ID NO: 2875463 - DNA, 25 bp, Homo sapien
agtggcagcagcaacagggcactct

SEQ ID NO: 2875464 - DNA, 25 bp, Homo sapien
gcagcagcaacagggcactctgaag

SEQ ID NO: 2875465 - DNA, 25 bp, Homo sapien
gacgggattagagatgctggctgcg

SEQ ID NO: 2875466 - DNA, 25 bp, Homo sapien
cagggaaaggtgctgccggggtggt

SEQ ID NO: 2875467 - DNA, 25 bp, Homo sapien
gggtgagacgggattagagatgctg

SEQ ID NO: 2875468 - DNA, 25 bp, Homo sapien
gattagagatgctggctgcgggtgg

SEQ ID NO: 2875469 - DNA, 25 bp, Homo sapien
taataactattacggcttacactgc

SEQ ID NO: 2875470 - DNA, 25 bp, Homo sapien
gaaatcaaggcctaggaagacaagg

SEQ ID NO: 2875471 - DNA, 25 bp, Homo sapien
tcaggtgatctaagtcctatgactc

SEQ ID NO: 2875472 - DNA, 25 bp, Homo sapien
aattcagtgcttttatacccatccc

SEQ ID NO: 2875473 - DNA, 25 bp, Homo sapien
aatgtgaactaccagagccaatgac

SEQ ID NO: 2875474 - DNA, 25 bp, Homo sapien
tgacaactttgagaggcaaacgttt

SEQ ID NO: 2875475 - DNA, 25 bp, Homo sapien
cagagccaatgacaactttgagagg

SEQ ID NO: 2875476 - DNA, 25 bp, Homo sapien
cctcttgatccaatgtgaactacca

SEQ ID NO: 2875477 - DNA, 25 bp, Homo sapien
tatttttcaagttcagagttgtggg

SEQ ID NO: 2875478 - DNA, 25 bp, Homo sapien
actcccaagagagctgcctggcatg

SEQ ID NO: 2875479 - DNA, 25 bp, Homo sapien
aagagagctgcctggcatggcccca

SEQ ID NO: 2875480 - DNA, 25 bp, Homo sapien
aggaggactcccaagagagctgcct

SEQ ID NO: 2875481 - DNA, 25 bp, Homo sapien
cccaagagagctgcctggcatggcc

SEQ ID NO: 2875482 - DNA, 25 bp, Homo sapien
aatgtggggaattccagaggcccga

SEQ ID NO: 2875483 - DNA, 25 bp, Homo sapien
ggaatgtggggaattccagaggccc

SEQ ID NO: 2875484 - DNA, 25 bp, Homo sapien
gtggggaattccagaggcccgagag

SEQ ID NO: 2875485 - DNA, 25 bp, Homo sapien
ctggaatgtggggaattccagaggc

SEQ ID NO: 2875486 - DNA, 25 bp, Homo sapien
caggaacgagctaggatcccagtct

SEQ ID NO: 2875487 - DNA, 25 bp, Homo sapien
gaagacgaggacgaatgagagtcat

SEQ ID NO: 2875488 - DNA, 25 bp, Homo sapien
cttatgtgccgacaggaacgagcta

SEQ ID NO: 2875489 - DNA, 25 bp, Homo sapien
cgaggacgaatgagagtcatctcca

SEQ ID NO: 2875490 - DNA, 25 bp, Homo sapien
cagagactgcctgtgaactgcgggc

SEQ ID NO: 2875491 - DNA, 25 bp, Homo sapien
gactctggtaggggcagagactgcc

SEQ ID NO: 2875492 - DNA, 25 bp, Homo sapien
gcagagactgcctgtgaactgcggg

SEQ ID NO: 2875493 - DNA, 25 bp, Homo sapien
actggggagagagactctggtaggg

SEQ ID NO: 2875494 - DNA, 25 bp, Homo sapien
caggaagggccttttgaccaggagt

SEQ ID NO: 2875495 - DNA, 25 bp, Homo sapien
agcggccaatgacaggaagggcctt

SEQ ID NO: 2875496 - DNA, 25 bp, Homo sapien
agtagagagcggccaatgacaggaa

SEQ ID NO: 2875497 - DNA, 25 bp, Homo sapien
agggccttttgaccaggagtcctga

SEQ ID NO: 2875498 - DNA, 25 bp, Homo sapien
gcagcccagaagtctctcagtgcct

SEQ ID NO: 2875499 - DNA, 25 bp, Homo sapien
tctgaacttgagctgccaatgctgt

SEQ ID NO: 2875500 - DNA, 25 bp, Homo sapien
gccagtgcagcccagaagtctctca

SEQ ID NO: 2875501 - DNA, 25 bp, Homo sapien
aacttgagctgccaatgctgtgcca

SEQ ID NO: 2875502 - DNA, 25 bp, Homo sapien
gaggcatctcgcctaggagattctt

SEQ ID NO: 2875503 - DNA, 25 bp, Homo sapien
gccactgcatgttctcgacctgtct

SEQ ID NO: 2875504 - DNA, 25 bp, Homo sapien
tcttgacgagctttggcatgaagtc

SEQ ID NO: 2875505 - DNA, 25 bp, Homo sapien
tgcaacaccagtccattttgagaag

SEQ ID NO: 2875506 - DNA, 25 bp, Homo sapien
aaaagctagcgagtggttgaaccct

SEQ ID NO: 2875507 - DNA, 25 bp, Homo sapien
tccacaattcttgggctgcctgtac

SEQ ID NO: 2875508 - DNA, 25 bp, Homo sapien
tgtaacagctctgcaaacgaggtgt

SEQ ID NO: 2875509 - DNA, 25 bp, Homo sapien
gaaccctagtgagtctggctccaaa

SEQ ID NO: 2875510 - DNA, 25 bp, Homo sapien
ctgggtaacatgtgtctgcagaggc

SEQ ID NO: 2875511 - DNA, 25 bp, Homo sapien
acactgggtaacatgtgtctgcaga

SEQ ID NO: 2875512 - DNA, 25 bp, Homo sapien
caacactgggtaacatgtgtctgca

SEQ ID NO: 2875513 - DNA, 25 bp, Homo sapien
ccaacactgggtaacatgtgtctgc

SEQ ID NO: 2875514 - DNA, 25 bp, Homo sapien
tttctcccgtgaaattactttctca

SEQ ID NO: 2875515 - DNA, 25 bp, Homo sapien
ttctcccgtgaaattactttctcat

SEQ ID NO: 2875516 - DNA, 25 bp, Homo sapien
gctgatggaactgattcttgaatcc

SEQ ID NO: 2875517 - DNA, 25 bp, Homo sapien
ctgatggaactgattcttgaatcca

SEQ ID NO: 2875518 - DNA, 25 bp, Homo sapien
ccaattgtgctaagtgccgggaaac

SEQ ID NO: 2875519 - DNA, 25 bp, Homo sapien
tctggtcaaaggtcaatgaagctct

SEQ ID NO: 2875520 - DNA, 25 bp, Homo sapien
ggattgccccaagacacatgctgta

SEQ ID NO: 2875521 - DNA, 25 bp, Homo sapien
tttaagtatgcccaggaacctaggc

SEQ ID NO: 2875522 - DNA, 25 bp, Homo sapien
aggtgctcaatacccgttagtttct

SEQ ID NO: 2875523 - DNA, 25 bp, Homo sapien
gaagaataccctaggtctcctcaaa

SEQ ID NO: 2875524 - DNA, 25 bp, Homo sapien
cctcttaagtccacaggaagaatga

SEQ ID NO: 2875525 - DNA, 25 bp, Homo sapien
cacagagtaggcacaggtaagtgtt

SEQ ID NO: 2875526 - DNA, 25 bp, Homo sapien
cagtcattcagcagaagctgtagca

SEQ ID NO: 2875527 - DNA, 25 bp, Homo sapien
caaaaacacgcttgtaggcagagca

SEQ ID NO: 2875528 - DNA, 25 bp, Homo sapien
taaaagggccaaatgctactcagag

SEQ ID NO: 2875529 - DNA, 25 bp, Homo sapien
gagcaatgactgaaccctaccctta

SEQ ID NO: 2875530 - DNA, 25 bp, Homo sapien
tgccttgtggaaaagtggacccagc

SEQ ID NO: 2875531 - DNA, 25 bp, Homo sapien
tttgggcaaatgtttagttgctctg

SEQ ID NO: 2875532 - DNA, 25 bp, Homo sapien
ctacagttggagtcatttgggcaaa

SEQ ID NO: 2875533 - DNA, 25 bp, Homo sapien
caaatgtttagttgctctgagtttc

SEQ ID NO: 2875534 - DNA, 25 bp, Homo sapien
cttttgtctgacacctacagttgga

SEQ ID NO: 2875535 - DNA, 25 bp, Homo sapien
ttggggttggaagctagacccagta

SEQ ID NO: 2875536 - DNA, 25 bp, Homo sapien
acggaagtgtcagcctaggatagga

SEQ ID NO: 2875537 - DNA, 25 bp, Homo sapien
caacctggggagtctcctacggaag

SEQ ID NO: 2875538 - DNA, 25 bp, Homo sapien
tctcctacggaagtgtcagcctagg

SEQ ID NO: 2875539 - DNA, 25 bp, Homo sapien
aagatcagagaaagatggcatagcc

SEQ ID NO: 2875540 - DNA, 25 bp, Homo sapien
cagggcaggcaacagacatatcaac

SEQ ID NO: 2875541 - DNA, 25 bp, Homo sapien
tttattctgtgttagcaaggccctg

SEQ ID NO: 2875542 - DNA, 25 bp, Homo sapien
caataagcacgggttctggaccgat

SEQ ID NO: 2875543 - DNA, 25 bp, Homo sapien
actagaaggctgtcaagagccatgc

SEQ ID NO: 2875544 - DNA, 25 bp, Homo sapien
aattccagagattctactagaaggc

SEQ ID NO: 2875545 - DNA, 25 bp, Homo sapien
ctgcagagccaaacgcatcttccgc

SEQ ID NO: 2875546 - DNA, 25 bp, Homo sapien
ccagagtcccctgctgcccgatgca

SEQ ID NO: 2875547 - DNA, 25 bp, Homo sapien
cccgagtgccacaaccctcccagag

SEQ ID NO: 2875548 - DNA, 25 bp, Homo sapien
ctcccagagcaaccgtggcccatgt

SEQ ID NO: 2875549 - DNA, 25 bp, Homo sapien
cccgcctctcagtgaactttggcag

SEQ ID NO: 2875550 - DNA, 25 bp, Homo sapien
ttgtcagagcaagcttagggagagc

SEQ ID NO: 2875551 - DNA, 25 bp, Homo sapien
tgctcaaaagaaagtgaccttcttc

SEQ ID NO: 2875552 - DNA, 25 bp, Homo sapien
gctcaaaagaaagtgaccttcttcc

SEQ ID NO: 2875553 - DNA, 25 bp, Homo sapien
tgttcgctctcagcaggattctcca

SEQ ID NO: 2875554 - DNA, 25 bp, Homo sapien
tctcagcaggattctccaaacctgg

SEQ ID NO: 2875555 - DNA, 25 bp, Homo sapien
ttcgctctcagcaggattctccaaa

SEQ ID NO: 2875556 - DNA, 25 bp, Homo sapien
cagcaggattctccaaacctgggat

SEQ ID NO: 2875557 - DNA, 25 bp, Homo sapien
gctgggtatggcgaggaggcgccag

SEQ ID NO: 2875558 - DNA, 25 bp, Homo sapien
tgggtatggcgaggaggcgccagga

SEQ ID NO: 2875559 - DNA, 25 bp, Homo sapien
ctgggtatggcgaggaggcgccagg

SEQ ID NO: 2875560 - DNA, 25 bp, Homo sapien
ctgctgggtatggcgaggaggcgcc

SEQ ID NO: 2875561 - DNA, 25 bp, Homo sapien
agaggctgcagtcgtccagtcccag

SEQ ID NO: 2875562 - DNA, 25 bp, Homo sapien
agtggagccgttcccgggggcagag

SEQ ID NO: 2875563 - DNA, 25 bp, Homo sapien
ggctgcagtcgtccagtcccagagc

SEQ ID NO: 2875564 - DNA, 25 bp, Homo sapien
gaagaggctgcagtcgtccagtccc

SEQ ID NO: 2875565 - DNA, 25 bp, Homo sapien
tcccagtgtgggtgtacggccagaa

SEQ ID NO: 2875566 - DNA, 25 bp, Homo sapien
agtgtgggtgtacggccagaacgcc

SEQ ID NO: 2875567 - DNA, 25 bp, Homo sapien
agtcccagtgtgggtgtacggccag

SEQ ID NO: 2875568 - DNA, 25 bp, Homo sapien
cccagtgtgggtgtacggccagaac

SEQ ID NO: 2875569 - DNA, 25 bp, Homo sapien
gggcaccaggttgggttcgtcatcc

SEQ ID NO: 2875570 - DNA, 25 bp, Homo sapien
tggggccgtcgtggtcgggctccgc

SEQ ID NO: 2875571 - DNA, 25 bp, Homo sapien
ccgtcgtggtcgggctccgccggcg

SEQ ID NO: 2875572 - DNA, 25 bp, Homo sapien
ctggggccgtcgtggtcgggctccg

SEQ ID NO: 2875573 - DNA, 25 bp, Homo sapien
ggcccgagcccgctcgcgcctgccc

SEQ ID NO: 2875574 - DNA, 25 bp, Homo sapien
tcggcctgctccgcctccgcgtcat

SEQ ID NO: 2875575 - DNA, 25 bp, Homo sapien
gctcggcctgctccgcctccgcgtc

SEQ ID NO: 2875576 - DNA, 25 bp, Homo sapien
ccgctcggcctgctccgcctccgcg

SEQ ID NO: 2875577 - DNA, 25 bp, Homo sapien
accgccgctcggcctgctccgcctc

SEQ ID NO: 2875578 - DNA, 25 bp, Homo sapien
cgctcccctcacaggacaacagcca

SEQ ID NO: 2875579 - DNA, 25 bp, Homo sapien
gctcccctcacaggacaacagccaa

SEQ ID NO: 2875580 - DNA, 25 bp, Homo sapien
gattttgcaggatagaaccctggaa

SEQ ID NO: 2875581 - DNA, 25 bp, Homo sapien
caggtgcccggccagttgggtgagg

SEQ ID NO: 2875582 - DNA, 25 bp, Homo sapien
ccacggtgtggtcagaggtccagca

SEQ ID NO: 2875583 - DNA, 25 bp, Homo sapien
gagaagccccggaagcactctgttt

SEQ ID NO: 2875584 - DNA, 25 bp, Homo sapien
aaatagatttcttaactctcagatc

SEQ ID NO: 2875585 - DNA, 25 bp, Homo sapien
tagatttcttaactctcagatctcc

SEQ ID NO: 2875586 - DNA, 25 bp, Homo sapien
ggaaatagatttcttaactctcaga

SEQ ID NO: 2875587 - DNA, 25 bp, Homo sapien
agatttcttaactctcagatctcca

SEQ ID NO: 2875588 - DNA, 25 bp, Homo sapien
gactgtgcactgtgtgaggccaaca

SEQ ID NO: 2875589 - DNA, 25 bp, Homo sapien
gattagagaagcctcgagctccagg

SEQ ID NO: 2875590 - DNA, 25 bp, Homo sapien
gaaagagcagaactaccagcgggtg

SEQ ID NO: 2875591 - DNA, 25 bp, Homo sapien
tacgagtgcgacagctggtggaaca

SEQ ID NO: 2875592 - DNA, 25 bp, Homo sapien
gtcctcatgccagggaccactgaag

SEQ ID NO: 2875593 - DNA, 25 bp, Homo sapien
tcctgaactcctaagctggagccct

SEQ ID NO: 2875594 - DNA, 25 bp, Homo sapien
accactgaaggacgggcagccatgg

SEQ ID NO: 2875595 - DNA, 25 bp, Homo sapien
taacagatgtgttgcaggtcctcat

SEQ ID NO: 2875596 - DNA, 25 bp, Homo sapien
tggctcccctcatgtctgtgggcac

SEQ ID NO: 2875597 - DNA, 25 bp, Homo sapien
tgccacccaggctcgcgcgcagtgg

SEQ ID NO: 2875598 - DNA, 25 bp, Homo sapien
agaccagtggctcccctcatgtctg

SEQ ID NO: 2875599 - DNA, 25 bp, Homo sapien
gccaccatgctaactacccttccta

SEQ ID NO: 2875600 - DNA, 25 bp, Homo sapien
gccacgtgcctcaaattctgcccct

SEQ ID NO: 2875601 - DNA, 25 bp, Homo sapien
catcttactctccaccctgccacgt

SEQ ID NO: 2875602 - DNA, 25 bp, Homo sapien
gtctgcatcacgaggaccacccaga

SEQ ID NO: 2875603 - DNA, 25 bp, Homo sapien
tctgcatcacgaggaccacccagat

SEQ ID NO: 2875604 - DNA, 25 bp, Homo sapien
gctgggtacaggtttattgtggcac

SEQ ID NO: 2875605 - DNA, 25 bp, Homo sapien
aaatgcagggccacgactccaggcc

SEQ ID NO: 2875606 - DNA, 25 bp, Homo sapien
gccagccctacccagaaatgcaggg

SEQ ID NO: 2875607 - DNA, 25 bp, Homo sapien
taaggcaaccattgccagccctacc

SEQ ID NO: 2875608 - DNA, 25 bp, Homo sapien
tttccttccaggttgatctgacata

SEQ ID NO: 2875609 - DNA, 25 bp, Homo sapien
ttccttccaggttgatctgacatat

SEQ ID NO: 2875610 - DNA, 25 bp, Homo sapien
aaggacagcaaaggcccagtcacat

SEQ ID NO: 2875611 - DNA, 25 bp, Homo sapien
ggacagcaaaggcccagtcacatgg

SEQ ID NO: 2875612 - DNA, 25 bp, Homo sapien
acagcaaaggcccagtcacatgggg

SEQ ID NO: 2875613 - DNA, 25 bp, Homo sapien
ctaaggacagcaaaggcccagtcac

SEQ ID NO: 2875614 - DNA, 25 bp, Homo sapien
cagccatggcatttcgtgccaaaca

SEQ ID NO: 2875615 - DNA, 25 bp, Homo sapien
tccaggaagcggtccccagcgtcga

SEQ ID NO: 2875616 - DNA, 25 bp, Homo sapien
gaagtcacagccatggcatttcgtg

SEQ ID NO: 2875617 - DNA, 25 bp, Homo sapien
cagcgtcgatcttgaagtcacagcc

SEQ ID NO: 2875618 - DNA, 25 bp, Homo sapien
ggtaaagcagtgcacgtgccaggtc

SEQ ID NO: 2875619 - DNA, 25 bp, Homo sapien
caggtcatcttcagggcgtgcatga

SEQ ID NO: 2875620 - DNA, 25 bp, Homo sapien
cctcctccatgtagaaggccctgtt

SEQ ID NO: 2875621 - DNA, 25 bp, Homo sapien
cctgttccggatgggcgtcttgcag

SEQ ID NO: 2875622 - DNA, 25 bp, Homo sapien
tctgagtggacgaccactgcgcctt

SEQ ID NO: 2875623 - DNA, 25 bp, Homo sapien
tgccatgtccagcactcagttcctg

SEQ ID NO: 2875624 - DNA, 25 bp, Homo sapien
tgccctgggtcacgggaacacagga

SEQ ID NO: 2875625 - DNA, 25 bp, Homo sapien
tccttctcgcggtaaacactacatc

SEQ ID NO: 2875626 - DNA, 25 bp, Homo sapien
ctgggcttgacaccggctgtcccct

SEQ ID NO: 2875627 - DNA, 25 bp, Homo sapien
ggcctcttgcctgaaactggcacac

SEQ ID NO: 2875628 - DNA, 25 bp, Homo sapien
gcctgaaactggcacaccaggcaca

SEQ ID NO: 2875629 - DNA, 25 bp, Homo sapien
cagatatctctaggctcacccctca

SEQ ID NO: 2875630 - DNA, 25 bp, Homo sapien
ggctgttcatccctaggaccctcgg

SEQ ID NO: 2875631 - DNA, 25 bp, Homo sapien
gtcgactggcctccgcaggaggtgg

SEQ ID NO: 2875632 - DNA, 25 bp, Homo sapien
gctgttcatccctaggaccctcggg

SEQ ID NO: 2875633 - DNA, 25 bp, Homo sapien
ctttgtgggtgagtcgactggcctc

SEQ ID NO: 2875634 - DNA, 25 bp, Homo sapien
ctcctcaaagaagccaccctcttcc

SEQ ID NO: 2875635 - DNA, 25 bp, Homo sapien
catagcgcacgtcatagcatggtgg

SEQ ID NO: 2875636 - DNA, 25 bp, Homo sapien
tcctccgggtggtacgcgtggccca

SEQ ID NO: 2875637 - DNA, 25 bp, Homo sapien
gcacagctgggtgcatagcgcacgt

SEQ ID NO: 2875638 - DNA, 25 bp, Homo sapien
ggagggacagttcattctccccatt

SEQ ID NO: 2875639 - DNA, 25 bp, Homo sapien
tccacataggatagaagacaggctt

SEQ ID NO: 2875640 - DNA, 25 bp, Homo sapien
tctccccattttccacataggatag

SEQ ID NO: 2875641 - DNA, 25 bp, Homo sapien
tgaagcttacagagccagtccgcca

SEQ ID NO: 2875642 - DNA, 25 bp, Homo sapien
cactggtgacacacgggagtcttgc

SEQ ID NO: 2875643 - DNA, 25 bp, Homo sapien
cagcactgtgctcgttttgtccggg

SEQ ID NO: 2875644 - DNA, 25 bp, Homo sapien
tgcacaatggaggtgcggctctgca

SEQ ID NO: 2875645 - DNA, 25 bp, Homo sapien
atagcgctcggcaaacgcagggtcc

SEQ ID NO: 2875646 - DNA, 25 bp, Homo sapien
ctggggtgtagatgaggctggggct

SEQ ID NO: 2875647 - DNA, 25 bp, Homo sapien
ggctcctggggtgtagatgaggctg

SEQ ID NO: 2875648 - DNA, 25 bp, Homo sapien
agggctcctggggtgtagatgaggc

SEQ ID NO: 2875649 - DNA, 25 bp, Homo sapien
ctggggcttctgtcctgggcacctg

SEQ ID NO: 2875650 - DNA, 25 bp, Homo sapien
ctgcaagatctgccattcaaggccc

SEQ ID NO: 2875651 - DNA, 25 bp, Homo sapien
gcaagatctgccattcaaggccctg

SEQ ID NO: 2875652 - DNA, 25 bp, Homo sapien
aagatctgccattcaaggccctgca

SEQ ID NO: 2875653 - DNA, 25 bp, Homo sapien
agatctgccattcaaggccctgcat

SEQ ID NO: 2875654 - DNA, 25 bp, Homo sapien
gtggaaactgccgagttggattcca

SEQ ID NO: 2875655 - DNA, 25 bp, Homo sapien
tgtccagttagctggtgtgcggtct

SEQ ID NO: 2875656 - DNA, 25 bp, Homo sapien
aaactgccgagttggattccaggtc

SEQ ID NO: 2875657 - DNA, 25 bp, Homo sapien
agggcagcttctcctagcaatgtcc

SEQ ID NO: 2875658 - DNA, 25 bp, Homo sapien
gggttcccctcatgccaggaagcca

SEQ ID NO: 2875659 - DNA, 25 bp, Homo sapien
ggcagggcccaaacagtccgaacca

SEQ ID NO: 2875660 - DNA, 25 bp, Homo sapien
tgcaaaccaggtccacaaagataga

SEQ ID NO: 2875661 - DNA, 25 bp, Homo sapien
tcccactgaaaacgaggacggcagg

SEQ ID NO: 2875662 - DNA, 25 bp, Homo sapien
tgagaatgtttattccatgcccaag

SEQ ID NO: 2875663 - DNA, 25 bp, Homo sapien
gggctgagaatgtttattccatgcc

SEQ ID NO: 2875664 - DNA, 25 bp, Homo sapien
gctgagaatgtttattccatgccca

SEQ ID NO: 2875665 - DNA, 25 bp, Homo sapien
cagggctgagaatgtttattccatg

SEQ ID NO: 2875666 - DNA, 25 bp, Homo sapien
ggaaggcagtgtcagatgaacccag

SEQ ID NO: 2875667 - DNA, 25 bp, Homo sapien
gggaaggcagtgtcagatgaaccca

SEQ ID NO: 2875668 - DNA, 25 bp, Homo sapien
tggaggcactaagggggtgccctgg

SEQ ID NO: 2875669 - DNA, 25 bp, Homo sapien
ctggtggtgccagtcccggaggcgg

SEQ ID NO: 2875670 - DNA, 25 bp, Homo sapien
tcccggaggcgggtgtagcgtgggc

SEQ ID NO: 2875671 - DNA, 25 bp, Homo sapien
gaggcgggtgtagcgtgggctctgc

SEQ ID NO: 2875672 - DNA, 25 bp, Homo sapien
cgctggtggtgccagtcccggaggc

SEQ ID NO: 2875673 - DNA, 25 bp, Homo sapien
cctcaggagtagacacagggcagta

SEQ ID NO: 2875674 - DNA, 25 bp, Homo sapien
gagcctcaggagtagacacagggca

SEQ ID NO: 2875675 - DNA, 25 bp, Homo sapien
caggagtagacacagggcagtagct

SEQ ID NO: 2875676 - DNA, 25 bp, Homo sapien
agctgggagcctcaggagtagacac

SEQ ID NO: 2875677 - DNA, 25 bp, Homo sapien
ttcaggtgctcctcatccgggtctt

SEQ ID NO: 2875678 - DNA, 25 bp, Homo sapien
aggtgctcctcatccgggtcttgca

SEQ ID NO: 2875679 - DNA, 25 bp, Homo sapien
tcttcaggtgctcctcatccgggtc

SEQ ID NO: 2875680 - DNA, 25 bp, Homo sapien
tcaggtgctcctcatccgggtcttg

SEQ ID NO: 2875681 - DNA, 25 bp, Homo sapien
aggaacgcgactggcctgtccccgg

SEQ ID NO: 2875682 - DNA, 25 bp, Homo sapien
gatgcggaaggaacgcgactggcct

SEQ ID NO: 2875683 - DNA, 25 bp, Homo sapien
gcaaggatgcggaaggaacgcgact

SEQ ID NO: 2875684 - DNA, 25 bp, Homo sapien
tgaactcggtgcctgtgaggtgggc

SEQ ID NO: 2875685 - DNA, 25 bp, Homo sapien
catctgggaccagcggtcggagcgg

SEQ ID NO: 2875686 - DNA, 25 bp, Homo sapien
gccgctgcttgctggcatctgggac

SEQ ID NO: 2875687 - DNA, 25 bp, Homo sapien
ttgctggcatctgggaccagcggtc

SEQ ID NO: 2875688 - DNA, 25 bp, Homo sapien
cgctgcttgctggcatctgggacca

SEQ ID NO: 2875689 - DNA, 25 bp, Homo sapien
caggatttggtgcatgtgggtttgg

SEQ ID NO: 2875690 - DNA, 25 bp, Homo sapien
agggtgtggctcagaaccccacact

SEQ ID NO: 2875691 - DNA, 25 bp, Homo sapien
cagacagataaagggacaaagggac

SEQ ID NO: 2875692 - DNA, 25 bp, Homo sapien
tgccgcacggttccgccgggctggg

SEQ ID NO: 2875693 - DNA, 25 bp, Homo sapien
gggcgcggcgtcattcagagacccc

SEQ ID NO: 2875694 - DNA, 25 bp, Homo sapien
gcgcagcacagactgagcagcagcg

SEQ ID NO: 2875695 - DNA, 25 bp, Homo sapien
tgcaaaggtgtaccgcggagggtcc

SEQ ID NO: 2875696 - DNA, 25 bp, Homo sapien
caaagggccgggccgtcttgttgag

SEQ ID NO: 2875697 - DNA, 25 bp, Homo sapien
tgagggagacgctgggtgcaaaggt

SEQ ID NO: 2875698 - DNA, 25 bp, Homo sapien
tcttgttgagggagacgctgggtgc

SEQ ID NO: 2875699 - DNA, 25 bp, Homo sapien
cagggcgggcgggcagggtaaggtg

SEQ ID NO: 2875700 - DNA, 25 bp, Homo sapien
ggcccatttgggagtggcgatctca

SEQ ID NO: 2875701 - DNA, 25 bp, Homo sapien
agggctgaccgagtgcgggcgagca

SEQ ID NO: 2875702 - DNA, 25 bp, Homo sapien
cagacaggcggacatgcgtggtgcc

SEQ ID NO: 2875703 - DNA, 25 bp, Homo sapien
gagaggacgactcaggtttcaaggg

SEQ ID NO: 2875704 - DNA, 25 bp, Homo sapien
tctgcggtttgctctgaaccggctg

SEQ ID NO: 2875705 - DNA, 25 bp, Homo sapien
cggtttgctctgaaccggctgggcc

SEQ ID NO: 2875706 - DNA, 25 bp, Homo sapien
cttctgcggtttgctctgaaccggc

SEQ ID NO: 2875707 - DNA, 25 bp, Homo sapien
ctgcggtttgctctgaaccggctgg

SEQ ID NO: 2875708 - DNA, 25 bp, Homo sapien
aaggaaagcgtgacagcgggccggg

SEQ ID NO: 2875709 - DNA, 25 bp, Homo sapien
agcgcgggcgcacccatccatgtcc

SEQ ID NO: 2875710 - DNA, 25 bp, Homo sapien
tgtgtgtgaggctacccgcattctc

SEQ ID NO: 2875711 - DNA, 25 bp, Homo sapien
caggcccggatcttgttctgagctt

SEQ ID NO: 2875712 - DNA, 25 bp, Homo sapien
ttctgagcttcgatgtgtgtgaggc

SEQ ID NO: 2875713 - DNA, 25 bp, Homo sapien
gcattctcgccatcgatgctcagca

SEQ ID NO: 2875714 - DNA, 25 bp, Homo sapien
gcagctgctggacactaaagcaacc

SEQ ID NO: 2875715 - DNA, 25 bp, Homo sapien
caagccaggctgacggtggtaacac

SEQ ID NO: 2875716 - DNA, 25 bp, Homo sapien
cagagagctcttcattcaacatagt

SEQ ID NO: 2875717 - DNA, 25 bp, Homo sapien
tcaacatagttctaggcagctgctg

SEQ ID NO: 2875718 - DNA, 25 bp, Homo sapien
cccctccagcactactttgaaggaa

SEQ ID NO: 2875719 - DNA, 25 bp, Homo sapien
tggcccctccagcactactttgaag

SEQ ID NO: 2875720 - DNA, 25 bp, Homo sapien
cccttgcagccggaagccccaaggt

SEQ ID NO: 2875721 - DNA, 25 bp, Homo sapien
ccttgcagccggaagccccaaggtg

SEQ ID NO: 2875722 - DNA, 25 bp, Homo sapien
gagaaggtgagtggccagcatggtg

SEQ ID NO: 2875723 - DNA, 25 bp, Homo sapien
ggagagaagagaaggtgagtggcca

SEQ ID NO: 2875724 - DNA, 25 bp, Homo sapien
aagagaaggtgagtggccagcatgg

SEQ ID NO: 2875725 - DNA, 25 bp, Homo sapien
gagaagagaaggtgagtggccagca

SEQ ID NO: 2875726 - DNA, 25 bp, Homo sapien
gctggctggcggacctcactttgga

SEQ ID NO: 2875727 - DNA, 25 bp, Homo sapien
gagcacgcccaagccataggaggca

SEQ ID NO: 2875728 - DNA, 25 bp, Homo sapien
cacgcccaagccataggaggcaggt

SEQ ID NO: 2875729 - DNA, 25 bp, Homo sapien
cccaagccataggaggcaggtattt

SEQ ID NO: 2875730 - DNA, 25 bp, Homo sapien
gctccagggagcctcgttgggatcg

SEQ ID NO: 2875731 - DNA, 25 bp, Homo sapien
gctgctctgcgtcgggctccaggga

SEQ ID NO: 2875732 - DNA, 25 bp, Homo sapien
gcgctgctctgcgtcgggctccagg

SEQ ID NO: 2875733 - DNA, 25 bp, Homo sapien
tccagggagcctcgttgggatcggc

SEQ ID NO: 2875734 - DNA, 25 bp, Homo sapien
acatctgagcctaggaccctgggaa

SEQ ID NO: 2875735 - DNA, 25 bp, Homo sapien
agggttgagctacactacatctgag

SEQ ID NO: 2875736 - DNA, 25 bp, Homo sapien
cacttgcagatacggtgggagagcc

SEQ ID NO: 2875737 - DNA, 25 bp, Homo sapien
cggtactggccgcactaaaggaagt

SEQ ID NO: 2875738 - DNA, 25 bp, Homo sapien
tctgcacactattcatgaggagggc

SEQ ID NO: 2875739 - DNA, 25 bp, Homo sapien
actcggccgtgcagagcaacatgga

SEQ ID NO: 2875740 - DNA, 25 bp, Homo sapien
caaattgttggagtttcagcaggga

SEQ ID NO: 2875741 - DNA, 25 bp, Homo sapien
gagtctgacaagtaagcctcacagc

SEQ ID NO: 2875742 - DNA, 25 bp, Homo sapien
ggggctgggcccttcctccgctcac

SEQ ID NO: 2875743 - DNA, 25 bp, Homo sapien
tcagggccggtcacaaggggctggg

SEQ ID NO: 2875744 - DNA, 25 bp, Homo sapien
tcacaaggggctgggcccttcctcc

SEQ ID NO: 2875745 - DNA, 25 bp, Homo sapien
caaggggctgggcccttcctccgct

SEQ ID NO: 2875746 - DNA, 25 bp, Homo sapien
acactgaagcgtagagcccggacgc

SEQ ID NO: 2875747 - DNA, 25 bp, Homo sapien
tccgggctcggccaggtgcattttc

SEQ ID NO: 2875748 - DNA, 25 bp, Homo sapien
cattttcctggacgtgggtggctca

SEQ ID NO: 2875749 - DNA, 25 bp, Homo sapien
cacacacaggttctcatagaggtgc

SEQ ID NO: 2875750 - DNA, 25 bp, Homo sapien
ggtggggattagcaggagggtccag

SEQ ID NO: 2875751 - DNA, 25 bp, Homo sapien
tgtcggagccgaacttgcgcaggaa

SEQ ID NO: 2875752 - DNA, 25 bp, Homo sapien
cttgtcggagccgaacttgcgcagg

SEQ ID NO: 2875753 - DNA, 25 bp, Homo sapien
cttgcgcaggaagtggtagggccag

SEQ ID NO: 2875754 - DNA, 25 bp, Homo sapien
aacttgcgcaggaagtggtagggcc

SEQ ID NO: 2875755 - DNA, 25 bp, Homo sapien
gctggatggcgtctgggcccagcac

SEQ ID NO: 2875756 - DNA, 25 bp, Homo sapien
ctgcaccaccacgggaaactcgccc

SEQ ID NO: 2875757 - DNA, 25 bp, Homo sapien
tggagttttcctccatggggaccag

SEQ ID NO: 2875758 - DNA, 25 bp, Homo sapien
gatggagttttcctccatggggacc

SEQ ID NO: 2875759 - DNA, 25 bp, Homo sapien
tcttgggagactgggcatctgtgga

SEQ ID NO: 2875760 - DNA, 25 bp, Homo sapien
caggaggagtagatggagttttcct

SEQ ID NO: 2875761 - DNA, 25 bp, Homo sapien
tacatcttaaagtgtatcatcagtg

SEQ ID NO: 2875762 - DNA, 25 bp, Homo sapien
tcttaaagtgtatcatcagtgctct

SEQ ID NO: 2875763 - DNA, 25 bp, Homo sapien
tttacatcttaaagtgtatcatcag

SEQ ID NO: 2875764 - DNA, 25 bp, Homo sapien
catcttaaagtgtatcatcagtgct

SEQ ID NO: 2875765 - DNA, 25 bp, Homo sapien
taagctctgtgagttggcttcctcc

SEQ ID NO: 2875766 - DNA, 25 bp, Homo sapien
tggcctagggcatttcagccgctct

SEQ ID NO: 2875767 - DNA, 25 bp, Homo sapien
tagtattccatcttgcggacggacc

SEQ ID NO: 2875768 - DNA, 25 bp, Homo sapien
catgtccggcttaaaccctccaaag

SEQ ID NO: 2875769 - DNA, 25 bp, Homo sapien
tcagccaggcggatgacccgtcgct

SEQ ID NO: 2875770 - DNA, 25 bp, Homo sapien
ccagtagatggcttcgctcggtggt

SEQ ID NO: 2875771 - DNA, 25 bp, Homo sapien
tgggcctcctgcatacagcagagcc

SEQ ID NO: 2875772 - DNA, 25 bp, Homo sapien
agcaggaaggcaccggtgtcccggg

SEQ ID NO: 2875773 - DNA, 25 bp, Homo sapien
tgtttgtaaagcatccagtggccgg

SEQ ID NO: 2875774 - DNA, 25 bp, Homo sapien
aaactgacggtttatctgcctgggc

SEQ ID NO: 2875775 - DNA, 25 bp, Homo sapien
tcgagctgggactgctactgggtca

SEQ ID NO: 2875776 - DNA, 25 bp, Homo sapien
tatgcttgggattggtcagccctgg

SEQ ID NO: 2875777 - DNA, 25 bp, Homo sapien
ggtctgcctgggctgtccgaggcag

SEQ ID NO: 2875778 - DNA, 25 bp, Homo sapien
ctgggtgggatcctccaccctgact

SEQ ID NO: 2875779 - DNA, 25 bp, Homo sapien
gccatccttgataggggtctccaga

SEQ ID NO: 2875780 - DNA, 25 bp, Homo sapien
gaggatgccatccttgataggggtc

SEQ ID NO: 2875781 - DNA, 25 bp, Homo sapien
gatgccatccttgataggggtctcc

SEQ ID NO: 2875782 - DNA, 25 bp, Homo sapien
tgccatccttgataggggtctccag

SEQ ID NO: 2875783 - DNA, 25 bp, Homo sapien
caggagcagggccgccgcttcaaga

SEQ ID NO: 2875784 - DNA, 25 bp, Homo sapien
ccaggagcagggccgccgcttcaag

SEQ ID NO: 2875785 - DNA, 25 bp, Homo sapien
aggagcagggccgccgcttcaagac

SEQ ID NO: 2875786 - DNA, 25 bp, Homo sapien
agactgatgacaggctggacgggaa

SEQ ID NO: 2875787 - DNA, 25 bp, Homo sapien
gagactgatgacaggctggacggga

SEQ ID NO: 2875788 - DNA, 25 bp, Homo sapien
ggagactgatgacaggctggacggg

SEQ ID NO: 2875789 - DNA, 25 bp, Homo sapien
ggggggaggggagcctgtcttcagc

SEQ ID NO: 2875790 - DNA, 25 bp, Homo sapien
ggtgcccacacctacctggagggag

SEQ ID NO: 2875791 - DNA, 25 bp, Homo sapien
caaggtgcccacacctacctggagg

SEQ ID NO: 2875792 - DNA, 25 bp, Homo sapien
gggttctggctgcccaaggtgccca

SEQ ID NO: 2875793 - DNA, 25 bp, Homo sapien
ggagcccccggccacctgaaggcag

SEQ ID NO: 2875794 - DNA, 25 bp, Homo sapien
ctgggcacgcgcgtctgatcgcagt

SEQ ID NO: 2875795 - DNA, 25 bp, Homo sapien
gttcagctgggcacgcgcgtctgat

SEQ ID NO: 2875796 - DNA, 25 bp, Homo sapien
tgatcgcagtctggctccccgagtc

SEQ ID NO: 2875797 - DNA, 25 bp, Homo sapien
cgcgcgtctgatcgcagtctggctc

SEQ ID NO: 2875798 - DNA, 25 bp, Homo sapien
ggcgtcctggtttgagcgcctcacc

SEQ ID NO: 2875799 - DNA, 25 bp, Homo sapien
tcccactcggcgtcctggtttgagc

SEQ ID NO: 2875800 - DNA, 25 bp, Homo sapien
tctccctgaaatctctctcgtgttc

SEQ ID NO: 2875801 - DNA, 25 bp, Homo sapien
ctccacctcacgagccactgaacat

SEQ ID NO: 2875802 - DNA, 25 bp, Homo sapien
aaggccctcacggtatacactcacg

SEQ ID NO: 2875803 - DNA, 25 bp, Homo sapien
cgagagctcaaaggccctcacggta

SEQ ID NO: 2875804 - DNA, 25 bp, Homo sapien
actccacgctgtccgagagctcaaa

SEQ ID NO: 2875805 - DNA, 25 bp, Homo sapien
tccacgctgtccgagagctcaaagg

SEQ ID NO: 2875806 - DNA, 25 bp, Homo sapien
cactggaatgagcatgtggccatac

SEQ ID NO: 2875807 - DNA, 25 bp, Homo sapien
tgcctcatctgctagcggtcttgtg

SEQ ID NO: 2875808 - DNA, 25 bp, Homo sapien
caccacctctgggagagaacatgga

SEQ ID NO: 2875809 - DNA, 25 bp, Homo sapien
tgagcaaccgctgtctcactggaat

SEQ ID NO: 2875810 - DNA, 25 bp, Homo sapien
tatgtgtagactggtggcagtcttg

SEQ ID NO: 2875811 - DNA, 25 bp, Homo sapien
agaggtttgggctttaatggcagct

SEQ ID NO: 2875812 - DNA, 25 bp, Homo sapien
gtatgtgtagactggtggcagtctt

SEQ ID NO: 2875813 - DNA, 25 bp, Homo sapien
ttaatggcagctggggtaaaaggaa

SEQ ID NO: 2875814 - DNA, 25 bp, Homo sapien
tgggccaggtagtccttgcgaccga

SEQ ID NO: 2875815 - DNA, 25 bp, Homo sapien
tagtccttgcgaccgatgttgctga

SEQ ID NO: 2875816 - DNA, 25 bp, Homo sapien
ctgtgggccaggtagtccttgcgac

SEQ ID NO: 2875817 - DNA, 25 bp, Homo sapien
caggtagtccttgcgaccgatgttg

SEQ ID NO: 2875818 - DNA, 25 bp, Homo sapien
tcgagtttggggcagtcagtgatcc

SEQ ID NO: 2875819 - DNA, 25 bp, Homo sapien
catagcctcgagtttggggcagtca

SEQ ID NO: 2875820 - DNA, 25 bp, Homo sapien
tctgcatagcctcgagtttggggca

SEQ ID NO: 2875821 - DNA, 25 bp, Homo sapien
ggcagtcagtgatccgatgacccag

SEQ ID NO: 2875822 - DNA, 25 bp, Homo sapien
ccccgcagaaggcacagccgcgctc

SEQ ID NO: 2875823 - DNA, 25 bp, Homo sapien
gcccccgcagaaggcacagccgcgc

SEQ ID NO: 2875824 - DNA, 25 bp, Homo sapien
cccccgcagaaggcacagccgcgct

SEQ ID NO: 2875825 - DNA, 25 bp, Homo sapien
gactcggggatcccgctctgcagtc

SEQ ID NO: 2875826 - DNA, 25 bp, Homo sapien
atccccgcaatgcagcacctgcagc

SEQ ID NO: 2875827 - DNA, 25 bp, Homo sapien
ctccaatgtccagcatggactcatc

SEQ ID NO: 2875828 - DNA, 25 bp, Homo sapien
aatgtccagcatggactcatccccg

SEQ ID NO: 2875829 - DNA, 25 bp, Homo sapien
gcatggactcatccccgcaatgcag

SEQ ID NO: 2875830 - DNA, 25 bp, Homo sapien
gctttgaggtccatcagcactgact

SEQ ID NO: 2875831 - DNA, 25 bp, Homo sapien
cagcgctttgaggtccatcagcact

SEQ ID NO: 2875832 - DNA, 25 bp, Homo sapien
ctttgaggtccatcagcactgactc

SEQ ID NO: 2875833 - DNA, 25 bp, Homo sapien
gcgctttgaggtccatcagcactga

SEQ ID NO: 2875834 - DNA, 25 bp, Homo sapien
cgcccggtgcggccaatccggtgta

SEQ ID NO: 2875835 - DNA, 25 bp, Homo sapien
aaggtagtggcgatgcctgtgtttc

SEQ ID NO: 2875836 - DNA, 25 bp, Homo sapien
cgctttgttgatgaaggtagtggcg

SEQ ID NO: 2875837 - DNA, 25 bp, Homo sapien
ggcgatgcctgtgtttcccgagcgc

SEQ ID NO: 2875838 - DNA, 25 bp, Homo sapien
tcgctggacactaggggcctggctt

SEQ ID NO: 2875839 - DNA, 25 bp, Homo sapien
tctggcccatcgctggacactaggg

SEQ ID NO: 2875840 - DNA, 25 bp, Homo sapien
ccatcgctggacactaggggcctgg

SEQ ID NO: 2875841 - DNA, 25 bp, Homo sapien
tccggcctaacccatgcccttgggc

SEQ ID NO: 2875842 - DNA, 25 bp, Homo sapien
tgtggctactaggacatccttcttg

SEQ ID NO: 2875843 - DNA, 25 bp, Homo sapien
cataattgatgacgtgctggatggc

SEQ ID NO: 2875844 - DNA, 25 bp, Homo sapien
ttgccctcccggaatgcctcgatgg

SEQ ID NO: 2875845 - DNA, 25 bp, Homo sapien
cttggaggcaacgtctgtggctact

SEQ ID NO: 2875846 - DNA, 25 bp, Homo sapien
cagggtccaagccagtgcttgcacc

SEQ ID NO: 2875847 - DNA, 25 bp, Homo sapien
caagccagtgcttgcaccaccctga

SEQ ID NO: 2875848 - DNA, 25 bp, Homo sapien
gtccaagccagtgcttgcaccaccc

SEQ ID NO: 2875849 - DNA, 25 bp, Homo sapien
aagccagtgcttgcaccaccctgac

SEQ ID NO: 2875850 - DNA, 25 bp, Homo sapien
ttgagcagcaggtactcgtggatgg

SEQ ID NO: 2875851 - DNA, 25 bp, Homo sapien
ggcctcaacccccttgagcagcagg

SEQ ID NO: 2875852 - DNA, 25 bp, Homo sapien
ctcgtggatggcgtccacgtctgcc

SEQ ID NO: 2875853 - DNA, 25 bp, Homo sapien
tttgcccccatggatggctacggcc

SEQ ID NO: 2875854 - DNA, 25 bp, Homo sapien
tctgcaggcactcgagcaggtacac

SEQ ID NO: 2875855 - DNA, 25 bp, Homo sapien
gcctcctccttcacatattctacct

SEQ ID NO: 2875856 - DNA, 25 bp, Homo sapien
ggtgtcttctgcaggcactcgagca

SEQ ID NO: 2875857 - DNA, 25 bp, Homo sapien
gagcaggtacaccatcttggcctcc

SEQ ID NO: 2875858 - DNA, 25 bp, Homo sapien
gtcacaggctttacaagggcactct

SEQ ID NO: 2875859 - DNA, 25 bp, Homo sapien
tacaagggcactcttagcaaagttc

SEQ ID NO: 2875860 - DNA, 25 bp, Homo sapien
aatcttcttcggcatggtggcactg

SEQ ID NO: 2875861 - DNA, 25 bp, Homo sapien
gttctgaatcttcttcggcatggtg

SEQ ID NO: 2875862 - DNA, 25 bp, Homo sapien
aagctgagcaactgagacacagccc

SEQ ID NO: 2875863 - DNA, 25 bp, Homo sapien
cctgcagtctgatgtggcgtgcagt

SEQ ID NO: 2875864 - DNA, 25 bp, Homo sapien
gctgagcaactgagacacagcccac

SEQ ID NO: 2875865 - DNA, 25 bp, Homo sapien
gggtccctgcagtctgatgtggcgt

SEQ ID NO: 2875866 - DNA, 25 bp, Homo sapien
gacagatgtctaggctgaccatctt

SEQ ID NO: 2875867 - DNA, 25 bp, Homo sapien
gcaaatccatgaggcgccccggggt

SEQ ID NO: 2875868 - DNA, 25 bp, Homo sapien
catgtcgatcatgcggtcagcctcg

SEQ ID NO: 2875869 - DNA, 25 bp, Homo sapien
aagatggtacggatgtcaccctcga

SEQ ID NO: 2875870 - DNA, 25 bp, Homo sapien
ttcaccttttctgtgctcaccatct

SEQ ID NO: 2875871 - DNA, 25 bp, Homo sapien
actcagaagtccgtggaggaaggcc

SEQ ID NO: 2875872 - DNA, 25 bp, Homo sapien
tggcccatctgtgaacagagggcct

SEQ ID NO: 2875873 - DNA, 25 bp, Homo sapien
gaagcgctgtcatcaagctccagag

SEQ ID NO: 2875874 - DNA, 25 bp, Homo sapien
tgtggagtggctaaggtaaagggtc

SEQ ID NO: 2875875 - DNA, 25 bp, Homo sapien
gggagctccttgagggtcgcactca

SEQ ID NO: 2875876 - DNA, 25 bp, Homo sapien
tgagggtcgcactcacagcagccct

SEQ ID NO: 2875877 - DNA, 25 bp, Homo sapien
cttttccacagactcgcaggtggca

SEQ ID NO: 2875878 - DNA, 25 bp, Homo sapien
gcggcagtagtactccaggatgcca

SEQ ID NO: 2875879 - DNA, 25 bp, Homo sapien
cgcaggagtggtgagctgtcctcct

SEQ ID NO: 2875880 - DNA, 25 bp, Homo sapien
tttcacggacatgcccccaatgcag

SEQ ID NO: 2875881 - DNA, 25 bp, Homo sapien
atgccatgggtctgccgggccagct

SEQ ID NO: 2875882 - DNA, 25 bp, Homo sapien
gccccaatctctggcctgccctcca

SEQ ID NO: 2875883 - DNA, 25 bp, Homo sapien
ggctggcaccagatggcagccccaa

SEQ ID NO: 2875884 - DNA, 25 bp, Homo sapien
aggctggcaccagatggcagcccca

SEQ ID NO: 2875885 - DNA, 25 bp, Homo sapien
atgatgagtccatagggcccctcgc

SEQ ID NO: 2875886 - DNA, 25 bp, Homo sapien
tccatagggcccctcgcgctttgag

SEQ ID NO: 2875887 - DNA, 25 bp, Homo sapien
ggcagatgatgagtccatagggccc

SEQ ID NO: 2875888 - DNA, 25 bp, Homo sapien
gcccctcgcgctttgagaagggtaa

SEQ ID NO: 2875889 - DNA, 25 bp, Homo sapien
ggcaacgtgaacaccagtgtcttgc

SEQ ID NO: 2875890 - DNA, 25 bp, Homo sapien
gcagaacatgatgacgggcaacgtg

SEQ ID NO: 2875891 - DNA, 25 bp, Homo sapien
catgatgacgggcaacgtgaacacc

SEQ ID NO: 2875892 - DNA, 25 bp, Homo sapien
tgacgggcaacgtgaacaccagtgt

SEQ ID NO: 2875893 - DNA, 25 bp, Homo sapien
gaaagcgatgcctatcatgtcacgg

SEQ ID NO: 2875894 - DNA, 25 bp, Homo sapien
gcctatcatgtcacggccagataga

SEQ ID NO: 2875895 - DNA, 25 bp, Homo sapien
ctgaacccgtgaaagcgatgcctat

SEQ ID NO: 2875896 - DNA, 25 bp, Homo sapien
ccgtgaaagcgatgcctatcatgtc

SEQ ID NO: 2875897 - DNA, 25 bp, Homo sapien
cctggatctgaatgggtgttgggtg

SEQ ID NO: 2875898 - DNA, 25 bp, Homo sapien
aaaaccaaccgacatcgtcttcatg

SEQ ID NO: 2875899 - DNA, 25 bp, Homo sapien
gactcacaggtactttctcagagcc

SEQ ID NO: 2875900 - DNA, 25 bp, Homo sapien
aaccgacatcgtcttcatgactcac

SEQ ID NO: 2875901 - DNA, 25 bp, Homo sapien
gagccccaaagcctgtaaaactggc

SEQ ID NO: 2875902 - DNA, 25 bp, Homo sapien
aggatttgtacccagtgtctatgcc

SEQ ID NO: 2875903 - DNA, 25 bp, Homo sapien
tatgcccaatggcactttcctcctg

SEQ ID NO: 2875904 - DNA, 25 bp, Homo sapien
tgaacacgtacagctgaggcaacaa

SEQ ID NO: 2875905 - DNA, 25 bp, Homo sapien
cccagtgactggatccaatgcagat

SEQ ID NO: 2875906 - DNA, 25 bp, Homo sapien
gatgtggtatttcttccgcacgcgc

SEQ ID NO: 2875907 - DNA, 25 bp, Homo sapien
tcagacatgctcagaacataacggg

SEQ ID NO: 2875908 - DNA, 25 bp, Homo sapien
gcacgcgctcatgtcgctcttcaga

SEQ ID NO: 2875909 - DNA, 25 bp, Homo sapien
tgggtggtgggataccgtctccctc

SEQ ID NO: 2875910 - DNA, 25 bp, Homo sapien
cctgggaatagctggcctgggagca

SEQ ID NO: 2875911 - DNA, 25 bp, Homo sapien
aagggcaactgcagactgtacagac

SEQ ID NO: 2875912 - DNA, 25 bp, Homo sapien
tgcatgtaccatcctaagcaagggc

SEQ ID NO: 2875913 - DNA, 25 bp, Homo sapien
taacagggatcaagagagccctggg

SEQ ID NO: 2875914 - DNA, 25 bp, Homo sapien
tacgtaatgcccttagccatctcct

SEQ ID NO: 2875915 - DNA, 25 bp, Homo sapien
catcatacgtaatgcccttagccat

SEQ ID NO: 2875916 - DNA, 25 bp, Homo sapien
tgatggggtcatcatacgtaatgcc

SEQ ID NO: 2875917 - DNA, 25 bp, Homo sapien
gggtcatcatacgtaatgcccttag

SEQ ID NO: 2875918 - DNA, 25 bp, Homo sapien
atcccttgagatataacatgcctgg

SEQ ID NO: 2875919 - DNA, 25 bp, Homo sapien
tgggaggagaagactcagtccacct

SEQ ID NO: 2875920 - DNA, 25 bp, Homo sapien
cttctcactatcctggctacaacca

SEQ ID NO: 2875921 - DNA, 25 bp, Homo sapien
gaagactcagtccaccttctcacta

SEQ ID NO: 2875922 - DNA, 25 bp, Homo sapien
ccctcggcaacactctccaggatct

SEQ ID NO: 2875923 - DNA, 25 bp, Homo sapien
gccctcggcaacactctccaggatc

SEQ ID NO: 2875924 - DNA, 25 bp, Homo sapien
gggttcactaccgctgtcctgctgc

SEQ ID NO: 2875925 - DNA, 25 bp, Homo sapien
gctcccttgcgtcttcgctgcagca

SEQ ID NO: 2875926 - DNA, 25 bp, Homo sapien
agggcctagcgggatgtcgtcctca

SEQ ID NO: 2875927 - DNA, 25 bp, Homo sapien
atccaggaggctgacgttggactga

SEQ ID NO: 2875928 - DNA, 25 bp, Homo sapien
cacaaggtcagcgtcaggatcctgg

SEQ ID NO: 2875929 - DNA, 25 bp, Homo sapien
gttccacccgggatccacagatagg

SEQ ID NO: 2875930 - DNA, 25 bp, Homo sapien
gataggatgggcatggagtccacaa

SEQ ID NO: 2875931 - DNA, 25 bp, Homo sapien
cacccgggatccacagataggatgg

SEQ ID NO: 2875932 - DNA, 25 bp, Homo sapien
ggccgcgccctggtgtactgaagct

SEQ ID NO: 2875933 - DNA, 25 bp, Homo sapien
ctacccctcagatcaagccgtcggt

SEQ ID NO: 2875934 - DNA, 25 bp, Homo sapien
cgaggatcctgtgcccgaggcgcaa

SEQ ID NO: 2875935 - DNA, 25 bp, Homo sapien
agccgtcggtccctcgtttgtctgg

SEQ ID NO: 2875936 - DNA, 25 bp, Homo sapien
taacggcacatagggcacgtagtcc

SEQ ID NO: 2875937 - DNA, 25 bp, Homo sapien
tcctccggcaggcacctcgtcggtg

SEQ ID NO: 2875938 - DNA, 25 bp, Homo sapien
gccggcgctgccgtaacggcacata

SEQ ID NO: 2875939 - DNA, 25 bp, Homo sapien
gcctcggagcggcttcctccggcag

SEQ ID NO: 2875940 - DNA, 25 bp, Homo sapien
ttcacgcccgctcccacacgcgcgg

SEQ ID NO: 2875941 - DNA, 25 bp, Homo sapien
tgcaagcacacgccagtcaggcacg

SEQ ID NO: 2875942 - DNA, 25 bp, Homo sapien
tgctcccctcttcacgcccgctccc

SEQ ID NO: 2875943 - DNA, 25 bp, Homo sapien
acgccagtcaggcacggcctgctcc

SEQ ID NO: 2875944 - DNA, 25 bp, Homo sapien
tggacgctttcatgggtggttacgc

SEQ ID NO: 2875945 - DNA, 25 bp, Homo sapien
tggttacgcgacagttgccaggacc

SEQ ID NO: 2875946 - DNA, 25 bp, Homo sapien
gatactatcgcacggcgaggcatgg

SEQ ID NO: 2875947 - DNA, 25 bp, Homo sapien
tatgcgctagaaggctcaatccaag

SEQ ID NO: 2875948 - DNA, 25 bp, Homo sapien
ggtgtgcgaggagcttatgtagatt

SEQ ID NO: 2875949 - DNA, 25 bp, Homo sapien
tgcgaggagcttatgtagattgaga

SEQ ID NO: 2875950 - DNA, 25 bp, Homo sapien
ctggtgtgcgaggagcttatgtaga

SEQ ID NO: 2875951 - DNA, 25 bp, Homo sapien
tgtgcgaggagcttatgtagattga

SEQ ID NO: 2875952 - DNA, 25 bp, Homo sapien
tgccagtcccatggtgggtctcaac

SEQ ID NO: 2875953 - DNA, 25 bp, Homo sapien
cacaaagagagcagtgttgggccag

SEQ ID NO: 2875954 - DNA, 25 bp, Homo sapien
ccagcacagtgtggcatccgttcag

SEQ ID NO: 2875955 - DNA, 25 bp, Homo sapien
tttcggcacgaaagatcttcacagt

SEQ ID NO: 2875956 - DNA, 25 bp, Homo sapien
aattatacgccttcagctggcagtc

SEQ ID NO: 2875957 - DNA, 25 bp, Homo sapien
gcagaggatgcaggttaacgggttg

SEQ ID NO: 2875958 - DNA, 25 bp, Homo sapien
aaaagagcagaatcacagtaagcaa

SEQ ID NO: 2875959 - DNA, 25 bp, Homo sapien
gggggacaatccttgagtagatcca

SEQ ID NO: 2875960 - DNA, 25 bp, Homo sapien
agtaagcaatgagccatgctccagc

SEQ ID NO: 2875961 - DNA, 25 bp, Homo sapien
tctgaaggctgtcctggctgcaggc

SEQ ID NO: 2875962 - DNA, 25 bp, Homo sapien
ctgagggtccaggaagtttgctgct

SEQ ID NO: 2875963 - DNA, 25 bp, Homo sapien
tccaggaagtttgctgcttaggccc

SEQ ID NO: 2875964 - DNA, 25 bp, Homo sapien
aagtttgctgcttaggcccagagag

SEQ ID NO: 2875965 - DNA, 25 bp, Homo sapien
tccatgcctaaatgacccacgatgt

SEQ ID NO: 2875966 - DNA, 25 bp, Homo sapien
cccacgatgttcactcagggctggc

SEQ ID NO: 2875967 - DNA, 25 bp, Homo sapien
tcagctgggaagtaccttggtagcc

SEQ ID NO: 2875968 - DNA, 25 bp, Homo sapien
gctggccccttcttatactgcttca

SEQ ID NO: 2875969 - DNA, 25 bp, Homo sapien
aagaccctgatggttatgccttagg

SEQ ID NO: 2875970 - DNA, 25 bp, Homo sapien
gttatgccttaggagatgccagtcc

SEQ ID NO: 2875971 - DNA, 25 bp, Homo sapien
tgaaatcagctggttaagaccctga

SEQ ID NO: 2875972 - DNA, 25 bp, Homo sapien
gcccagggaggagtaatagaacaga

SEQ ID NO: 2875973 - DNA, 25 bp, Homo sapien
cacagcaactttctgacgagtctgc

SEQ ID NO: 2875974 - DNA, 25 bp, Homo sapien
caactttctgacgagtctgctttgc

SEQ ID NO: 2875975 - DNA, 25 bp, Homo sapien
ttcacagcaactttctgacgagtct

SEQ ID NO: 2875976 - DNA, 25 bp, Homo sapien
tgagctgtgctaggagtggttttct

SEQ ID NO: 2875977 - DNA, 25 bp, Homo sapien
agaagcacaatcagaggttcattct

SEQ ID NO: 2875978 - DNA, 25 bp, Homo sapien
tttgggggacacatgagaagcacaa

SEQ ID NO: 2875979 - DNA, 25 bp, Homo sapien
taaggtaccatgtccccatcactaa

SEQ ID NO: 2875980 - DNA, 25 bp, Homo sapien
tcctaaggtaccatgtccccatcac

SEQ ID NO: 2875981 - DNA, 25 bp, Homo sapien
gcccagggaactatgtatgaagaca

SEQ ID NO: 2875982 - DNA, 25 bp, Homo sapien
taagtacagtcgtccctctgaatct

SEQ ID NO: 2875983 - DNA, 25 bp, Homo sapien
ggctggcttccgtcattcccttaag

SEQ ID NO: 2875984 - DNA, 25 bp, Homo sapien
gattctctagctctgctaggctggc

SEQ ID NO: 2875985 - DNA, 25 bp, Homo sapien
gagccaccgcgcttggccaaaaata

SEQ ID NO: 2875986 - DNA, 25 bp, Homo sapien
ctaggatgagaagcatgagccaccg

SEQ ID NO: 2875987 - DNA, 25 bp, Homo sapien
atgagccaccgcgcttggccaaaaa

SEQ ID NO: 2875988 - DNA, 25 bp, Homo sapien
gcatgagccaccgcgcttggccaaa

SEQ ID NO: 2875989 - DNA, 25 bp, Homo sapien
ctccacctctcggtcagtctcatcc

SEQ ID NO: 2875990 - DNA, 25 bp, Homo sapien
tccaccccgtccatgtccttgggca

SEQ ID NO: 2875991 - DNA, 25 bp, Homo sapien
atctccaccccgtccatgtccttgg

SEQ ID NO: 2875992 - DNA, 25 bp, Homo sapien
acctctcggtcagtctcatccatct

SEQ ID NO: 2875993 - DNA, 25 bp, Homo sapien
cctttggggttatgctctgggggca

SEQ ID NO: 2875994 - DNA, 25 bp, Homo sapien
ggcagcgctgtctacacacaaaggc

SEQ ID NO: 2875995 - DNA, 25 bp, Homo sapien
ccctccaccccgtggactggctggg

SEQ ID NO: 2875996 - DNA, 25 bp, Homo sapien
agccgctcagttcctggtgcactca

SEQ ID NO: 2875997 - DNA, 25 bp, Homo sapien
gctggcacggatggagtctttgaca

SEQ ID NO: 2875998 - DNA, 25 bp, Homo sapien
gaaacacgatttgcctgctttagag

SEQ ID NO: 2875999 - DNA, 25 bp, Homo sapien
tttgggaagctctaggaccctgcct

SEQ ID NO: 2876000 - DNA, 25 bp, Homo sapien
cagatcacccgggataggttgggca

SEQ ID NO: 2876001 - DNA, 25 bp, Homo sapien
cagtttcagtggactaatctgcaaa

SEQ ID NO: 2876002 - DNA, 25 bp, Homo sapien
agcaaagccttaaaatcctagcctg

SEQ ID NO: 2876003 - DNA, 25 bp, Homo sapien
ggcacaatgtgatacctgacccatc

SEQ ID NO: 2876004 - DNA, 25 bp, Homo sapien
caagaggcagttttagcaggaggct

SEQ ID NO: 2876005 - DNA, 25 bp, Homo sapien
gatggcttttaaggtagtggcagta

SEQ ID NO: 2876006 - DNA, 25 bp, Homo sapien
tgagctatcagcgatgtggcatgga

SEQ ID NO: 2876007 - DNA, 25 bp, Homo sapien
gggcaatgtccagccactgatggct

SEQ ID NO: 2876008 - DNA, 25 bp, Homo sapien
gtagggtggagagcggtggactggt

SEQ ID NO: 2876009 - DNA, 25 bp, Homo sapien
cgcctggcgacacgggaactcggca

SEQ ID NO: 2876010 - DNA, 25 bp, Homo sapien
cagggaaccatgagaggcccgcctg

SEQ ID NO: 2876011 - DNA, 25 bp, Homo sapien
gggaatggacgtgctaaggtacagg

SEQ ID NO: 2876012 - DNA, 25 bp, Homo sapien
gggaactcggcaatcgggagcccac

SEQ ID NO: 2876013 - DNA, 25 bp, Homo sapien
ccacagattcactcatgtgcttttc

SEQ ID NO: 2876014 - DNA, 25 bp, Homo sapien
ggctggctgccacagattcactcat

SEQ ID NO: 2876015 - DNA, 25 bp, Homo sapien
gctggctgccacagattcactcatg

SEQ ID NO: 2876016 - DNA, 25 bp, Homo sapien
gattcactcatgtgcttttcttgag

SEQ ID NO: 2876017 - DNA, 25 bp, Homo sapien
acagaagacacaaagacaaggtgag

SEQ ID NO: 2876018 - DNA, 25 bp, Homo sapien
ggctccgtgctgttgatgaattcca

SEQ ID NO: 2876019 - DNA, 25 bp, Homo sapien
acatctcggtggtccacggcgggct

SEQ ID NO: 2876020 - DNA, 25 bp, Homo sapien
tttttcagcttgtgccgggcccgct

SEQ ID NO: 2876021 - DNA, 25 bp, Homo sapien
agcagctcatccacatctcggtggt

SEQ ID NO: 2876022 - DNA, 25 bp, Homo sapien
ggatctcggtatagttccgactcgt

SEQ ID NO: 2876023 - DNA, 25 bp, Homo sapien
gcagctcctctttccgcctggtcag

SEQ ID NO: 2876024 - DNA, 25 bp, Homo sapien
tcccggatctcggtatagttccgac

SEQ ID NO: 2876025 - DNA, 25 bp, Homo sapien
ctcggtatagttccgactcgtcggg

SEQ ID NO: 2876026 - DNA, 25 bp, Homo sapien
cagcatgccctctgatctgagcctc

SEQ ID NO: 2876027 - DNA, 25 bp, Homo sapien
tatgagacttctgcactgcttcctc

SEQ ID NO: 2876028 - DNA, 25 bp, Homo sapien
ggcgccgtctgtgctcacggcctgt

SEQ ID NO: 2876029 - DNA, 25 bp, Homo sapien
ttcctggcgccgtctgtgctcacgg

SEQ ID NO: 2876030 - DNA, 25 bp, Homo sapien
tcacacttgggggactgagagcctt

SEQ ID NO: 2876031 - DNA, 25 bp, Homo sapien
cacttgggggactgagagccttttt

SEQ ID NO: 2876032 - DNA, 25 bp, Homo sapien
cttcatcactcccaagcgttcactt

SEQ ID NO: 2876033 - DNA, 25 bp, Homo sapien
tcatcactcccaagcgttcacttct

SEQ ID NO: 2876034 - DNA, 25 bp, Homo sapien
cgtatacatactcatcagaatcata

SEQ ID NO: 2876035 - DNA, 25 bp, Homo sapien
cacgtatacatactcatcagaatca

SEQ ID NO: 2876036 - DNA, 25 bp, Homo sapien
gtatacatactcatcagaatcatag

SEQ ID NO: 2876037 - DNA, 25 bp, Homo sapien
cacacgtatacatactcatcagaat

SEQ ID NO: 2876038 - DNA, 25 bp, Homo sapien
ctctagcctgggcaggctcactcac

SEQ ID NO: 2876039 - DNA, 25 bp, Homo sapien
gcccccagccctctctagcctgggc

SEQ ID NO: 2876040 - DNA, 25 bp, Homo sapien
tctctagcctgggcaggctcactca

SEQ ID NO: 2876041 - DNA, 25 bp, Homo sapien
ctggcccccagccctctctagcctg

SEQ ID NO: 2876042 - DNA, 25 bp, Homo sapien
aactcacagtagcagcagtcacaga

SEQ ID NO: 2876043 - DNA, 25 bp, Homo sapien
cgcattgtggccgaagaactcacag

SEQ ID NO: 2876044 - DNA, 25 bp, Homo sapien
gcagcagtcacagaacttcccatct

SEQ ID NO: 2876045 - DNA, 25 bp, Homo sapien
gcattgtggccgaagaactcacagt

SEQ ID NO: 2876046 - DNA, 25 bp, Homo sapien
aggatgaggtgcaggagcttcgctc

SEQ ID NO: 2876047 - DNA, 25 bp, Homo sapien
ggccactgtgtgcaaacttgtgccc

SEQ ID NO: 2876048 - DNA, 25 bp, Homo sapien
gatgaggtgcaggagcttcgctcag

SEQ ID NO: 2876049 - DNA, 25 bp, Homo sapien
tgtgcaaacttgtgccccttgcacc

SEQ ID NO: 2876050 - DNA, 25 bp, Homo sapien
ctcctgacctagttgatccacctgc

SEQ ID NO: 2876051 - DNA, 25 bp, Homo sapien
tctcctgacctagttgatccacctg

SEQ ID NO: 2876052 - DNA, 25 bp, Homo sapien
tcgatctcctgacctagttgatcca

SEQ ID NO: 2876053 - DNA, 25 bp, Homo sapien
cctgacctagttgatccacctgcct

SEQ ID NO: 2876054 - DNA, 25 bp, Homo sapien
atgctcacagcaaccctaaactcct

SEQ ID NO: 2876055 - DNA, 25 bp, Homo sapien
caaaattctaagttcaagtgggtag

SEQ ID NO: 2876056 - DNA, 25 bp, Homo sapien
gcgagtttgcccttcatgcagcaca

SEQ ID NO: 2876057 - DNA, 25 bp, Homo sapien
agacatagtctactttttaattgcc

SEQ ID NO: 2876058 - DNA, 25 bp, Homo sapien
ctgtgagtgctagggagtggctgag

SEQ ID NO: 2876059 - DNA, 25 bp, Homo sapien
cacagtgcccgctgcaggggtggct

SEQ ID NO: 2876060 - DNA, 25 bp, Homo sapien
cagtgcccgctgcaggggtggctgc

SEQ ID NO: 2876061 - DNA, 25 bp, Homo sapien
gtgcccgctgcaggggtggctgcac

SEQ ID NO: 2876062 - DNA, 25 bp, Homo sapien
acagtgcccgctgcaggggtggctg

SEQ ID NO: 2876063 - DNA, 25 bp, Homo sapien
aatggtgggggcatcttcaggagcg

SEQ ID NO: 2876064 - DNA, 25 bp, Homo sapien
cccgagaatggtgggggcatcttca

SEQ ID NO: 2876065 - DNA, 25 bp, Homo sapien
ggtgggggcatcttcaggagcggca

SEQ ID NO: 2876066 - DNA, 25 bp, Homo sapien
tgggggcatcttcaggagcggcatg

SEQ ID NO: 2876067 - DNA, 25 bp, Homo sapien
gggtagatgggagctctgacatggc

SEQ ID NO: 2876068 - DNA, 25 bp, Homo sapien
gagggtagatgggagctctgacatg

SEQ ID NO: 2876069 - DNA, 25 bp, Homo sapien
ctggtggagggtagatgggagctct

SEQ ID NO: 2876070 - DNA, 25 bp, Homo sapien
gtggagggtagatgggagctctgac

SEQ ID NO: 2876071 - DNA, 25 bp, Homo sapien
ggagtgtggggggcagtggcagcag

SEQ ID NO: 2876072 - DNA, 25 bp, Homo sapien
agtggcagcagcaacagggcactct

SEQ ID NO: 2876073 - DNA, 25 bp, Homo sapien
gcagcagcaacagggcactctgaag

SEQ ID NO: 2876074 - DNA, 25 bp, Homo sapien
tggagtgtggggggcagtggcagca

SEQ ID NO: 2876075 - DNA, 25 bp, Homo sapien
gacgggattagagatgctggctgcg

SEQ ID NO: 2876076 - DNA, 25 bp, Homo sapien
gattagagatgctggctgcgggtgg

SEQ ID NO: 2876077 - DNA, 25 bp, Homo sapien
cagggaaaggtgctgccggggtggt

SEQ ID NO: 2876078 - DNA, 25 bp, Homo sapien
gggtgagacgggattagagatgctg

SEQ ID NO: 2876079 - DNA, 25 bp, Homo sapien
gatccaatgtgaactaccagagcca

SEQ ID NO: 2876080 - DNA, 25 bp, Homo sapien
gaaatcaaggcctaggaagacaagg

SEQ ID NO: 2876081 - DNA, 25 bp, Homo sapien
cagagccaatgacaactttgagagg

SEQ ID NO: 2876082 - DNA, 25 bp, Homo sapien
agacctcaccggatgccctcttgat

SEQ ID NO: 2876083 - DNA, 25 bp, Homo sapien
aggaggactcccaagagagctgcct

SEQ ID NO: 2876084 - DNA, 25 bp, Homo sapien
actcccaagagagctgcctggcatg

SEQ ID NO: 2876085 - DNA, 25 bp, Homo sapien
ctggcatggccccactggaatgtgg

SEQ ID NO: 2876086 - DNA, 25 bp, Homo sapien
aagagagctgcctggcatggcccca

SEQ ID NO: 2876087 - DNA, 25 bp, Homo sapien
caggaacgagctaggatcccagtct

SEQ ID NO: 2876088 - DNA, 25 bp, Homo sapien
cttatgtgccgacaggaacgagcta

SEQ ID NO: 2876089 - DNA, 25 bp, Homo sapien
cgaggacgaatgagagtcatctcca

SEQ ID NO: 2876090 - DNA, 25 bp, Homo sapien
gaagacgaggacgaatgagagtcat

SEQ ID NO: 2876091 - DNA, 25 bp, Homo sapien
cagagactgcctgtgaactgcgggc

SEQ ID NO: 2876092 - DNA, 25 bp, Homo sapien
gactgcctgtgaactgcgggccttt

SEQ ID NO: 2876093 - DNA, 25 bp, Homo sapien
agtagagagcggccaatgacaggaa

SEQ ID NO: 2876094 - DNA, 25 bp, Homo sapien
agggccttttgaccaggagtcctga

SEQ ID NO: 2876095 - DNA, 25 bp, Homo sapien
tctgaacttgagctgccaatgctgt

SEQ ID NO: 2876096 - DNA, 25 bp, Homo sapien
gcagcccagaagtctctcagtgcct

SEQ ID NO: 2876097 - DNA, 25 bp, Homo sapien
aacttgagctgccaatgctgtgcca

SEQ ID NO: 2876098 - DNA, 25 bp, Homo sapien
gccagtgcagcccagaagtctctca

SEQ ID NO: 2876099 - DNA, 25 bp, Homo sapien
gccactgcatgttctcgacctgtct

SEQ ID NO: 2876100 - DNA, 25 bp, Homo sapien
ccactgcatgttctcgacctgtctg

SEQ ID NO: 2876101 - DNA, 25 bp, Homo sapien
actgcatgttctcgacctgtctgcc

SEQ ID NO: 2876102 - DNA, 25 bp, Homo sapien
cgccactgcatgttctcgacctgtc

SEQ ID NO: 2876103 - DNA, 25 bp, Homo sapien
tcttgacgagctttggcatgaagtc

SEQ ID NO: 2876104 - DNA, 25 bp, Homo sapien
tgcaacaccagtccattttgagaag

SEQ ID NO: 2876105 - DNA, 25 bp, Homo sapien
ttcccagcctttgcgttcccggtga

SEQ ID NO: 2876106 - DNA, 25 bp, Homo sapien
gaggcatctcgcctaggagattctt

SEQ ID NO: 2876107 - DNA, 25 bp, Homo sapien
tccacaattcttgggctgcctgtac

SEQ ID NO: 2876108 - DNA, 25 bp, Homo sapien
gaaccctagtgagtctggctccaaa

SEQ ID NO: 2876109 - DNA, 25 bp, Homo sapien
aaaagctagcgagtggttgaaccct

SEQ ID NO: 2876110 - DNA, 25 bp, Homo sapien
tgtaacagctctgcaaacgaggtgt

SEQ ID NO: 2876111 - DNA, 25 bp, Homo sapien
ccaccatgagtttgacagcttccaa

SEQ ID NO: 2876112 - DNA, 25 bp, Homo sapien
ctatttagacttgggtattggcaga

SEQ ID NO: 2876113 - DNA, 25 bp, Homo sapien
tcaaagcactggctcgaccaataga

SEQ ID NO: 2876114 - DNA, 25 bp, Homo sapien
tgaaacttgcatctaccaccatgag

SEQ ID NO: 2876115 - DNA, 25 bp, Homo sapien
ccaattgtgctaagtgccgggaaac

SEQ ID NO: 2876116 - DNA, 25 bp, Homo sapien
ggattgccccaagacacatgctgta

SEQ ID NO: 2876117 - DNA, 25 bp, Homo sapien
tctggtcaaaggtcaatgaagctct

SEQ ID NO: 2876118 - DNA, 25 bp, Homo sapien
tttaagtatgcccaggaacctaggc

SEQ ID NO: 2876119 - DNA, 25 bp, Homo sapien
aggtgctcaatacccgttagtttct

SEQ ID NO: 2876120 - DNA, 25 bp, Homo sapien
tcaacaatagatacctgggatccag

SEQ ID NO: 2876121 - DNA, 25 bp, Homo sapien
taccacttgtgttaagcataccgca

SEQ ID NO: 2876122 - DNA, 25 bp, Homo sapien
tctccaaatgagtggtgctcgccct

SEQ ID NO: 2876123 - DNA, 25 bp, Homo sapien
gcataccgcacttgttggaccctaa

SEQ ID NO: 2876124 - DNA, 25 bp, Homo sapien
gagcaatgactgaaccctaccctta

SEQ ID NO: 2876125 - DNA, 25 bp, Homo sapien
caaaaacacgcttgtaggcagagca

SEQ ID NO: 2876126 - DNA, 25 bp, Homo sapien
tgccttgtggaaaagtggacccagc

SEQ ID NO: 2876127 - DNA, 25 bp, Homo sapien
taaaagggccaaatgctactcagag

SEQ ID NO: 2876128 - DNA, 25 bp, Homo sapien
ctacagttggagtcatttgggcaaa

SEQ ID NO: 2876129 - DNA, 25 bp, Homo sapien
cttttgtctgacacctacagttgga

SEQ ID NO: 2876130 - DNA, 25 bp, Homo sapien
caaatgtttagttgctctgagtttc

SEQ ID NO: 2876131 - DNA, 25 bp, Homo sapien
tttgggcaaatgtttagttgctctg

SEQ ID NO: 2876132 - DNA, 25 bp, Homo sapien
tctcctacggaagtgtcagcctagg

SEQ ID NO: 2876133 - DNA, 25 bp, Homo sapien
acggaagtgtcagcctaggatagga

SEQ ID NO: 2876134 - DNA, 25 bp, Homo sapien
ttggggttggaagctagacccagta

SEQ ID NO: 2876135 - DNA, 25 bp, Homo sapien
caacctggggagtctcctacggaag

SEQ ID NO: 2876136 - DNA, 25 bp, Homo sapien
aagatcagagaaagatggcatagcc

SEQ ID NO: 2876137 - DNA, 25 bp, Homo sapien
caataagcacgggttctggaccgat

SEQ ID NO: 2876138 - DNA, 25 bp, Homo sapien
cagggcaggcaacagacatatcaac

SEQ ID NO: 2876139 - DNA, 25 bp, Homo sapien
tttattctgtgttagcaaggccctg

SEQ ID NO: 2876140 - DNA, 25 bp, Homo sapien
ccagagtcccctgctgcccgatgca

SEQ ID NO: 2876141 - DNA, 25 bp, Homo sapien
actagaaggctgtcaagagccatgc

SEQ ID NO: 2876142 - DNA, 25 bp, Homo sapien
aattccagagattctactagaaggc

SEQ ID NO: 2876143 - DNA, 25 bp, Homo sapien
ctgcagagccaaacgcatcttccgc

SEQ ID NO: 2876144 - DNA, 25 bp, Homo sapien
ttgtcagagcaagcttagggagagc

SEQ ID NO: 2876145 - DNA, 25 bp, Homo sapien
cccgcctctcagtgaactttggcag

SEQ ID NO: 2876146 - DNA, 25 bp, Homo sapien
ctcccagagcaaccgtggcccatgt

SEQ ID NO: 2876147 - DNA, 25 bp, Homo sapien
cccgagtgccacaaccctcccagag

SEQ ID NO: 2876148 - DNA, 25 bp, Homo sapien
tgttcgctctcagcaggattctcca

SEQ ID NO: 2876149 - DNA, 25 bp, Homo sapien
gctcaaaagaaagtgaccttcttcc

SEQ ID NO: 2876150 - DNA, 25 bp, Homo sapien
cagcaggattctccaaacctgggat

SEQ ID NO: 2876151 - DNA, 25 bp, Homo sapien
gggaatcctcctactgttcgctctc

SEQ ID NO: 2876152 - DNA, 25 bp, Homo sapien
ctgggtatggcgaggaggcgccagg

SEQ ID NO: 2876153 - DNA, 25 bp, Homo sapien
ctgctgggtatggcgaggaggcgcc

SEQ ID NO: 2876154 - DNA, 25 bp, Homo sapien
gctgggtatggcgaggaggcgccag

SEQ ID NO: 2876155 - DNA, 25 bp, Homo sapien
tgggtatggcgaggaggcgccagga

SEQ ID NO: 2876156 - DNA, 25 bp, Homo sapien
cagagccccgagatggcctgtggct

SEQ ID NO: 2876157 - DNA, 25 bp, Homo sapien
gtgaaagcgcccgagccgccgaagt

SEQ ID NO: 2876158 - DNA, 25 bp, Homo sapien
gaagaggctgcagtcgtccagtccc

SEQ ID NO: 2876159 - DNA, 25 bp, Homo sapien
gggagcagcttcagcctagtcgcag

SEQ ID NO: 2876160 - DNA, 25 bp, Homo sapien
tggggccgtcgtggtcgggctccgc

SEQ ID NO: 2876161 - DNA, 25 bp, Homo sapien
gggcaccaggttgggttcgtcatcc

SEQ ID NO: 2876162 - DNA, 25 bp, Homo sapien
ctggggccgtcgtggtcgggctccg

SEQ ID NO: 2876163 - DNA, 25 bp, Homo sapien
ccgtcgtggtcgggctccgccggcg

SEQ ID NO: 2876164 - DNA, 25 bp, Homo sapien
ggcccgagcccgctcgcgcctgccc

SEQ ID NO: 2876165 - DNA, 25 bp, Homo sapien
tcggcctgctccgcctccgcgtcat

SEQ ID NO: 2876166 - DNA, 25 bp, Homo sapien
gctcggcctgctccgcctccgcgtc

SEQ ID NO: 2876167 - DNA, 25 bp, Homo sapien
accgccgctcggcctgctccgcctc

SEQ ID NO: 2876168 - DNA, 25 bp, Homo sapien
ccgctcggcctgctccgcctccgcg

SEQ ID NO: 2876169 - DNA, 25 bp, Homo sapien
cgctcccctcacaggacaacagcca

SEQ ID NO: 2876170 - DNA, 25 bp, Homo sapien
gctcccctcacaggacaacagccaa

SEQ ID NO: 2876171 - DNA, 25 bp, Homo sapien
gaaagctgctgtagatcacactccc

SEQ ID NO: 2876172 - DNA, 25 bp, Homo sapien
cctactagggaagaggtgcaatact

SEQ ID NO: 2876173 - DNA, 25 bp, Homo sapien
tctgctgaggcactgatgacatcat

SEQ ID NO: 2876174 - DNA, 25 bp, Homo sapien
cagtaagccatctaggagtctggga

SEQ ID NO: 2876175 - DNA, 25 bp, Homo sapien
gagaagccccggaagcactctgttt

SEQ ID NO: 2876176 - DNA, 25 bp, Homo sapien
ccacggtgtggtcagaggtccagca

SEQ ID NO: 2876177 - DNA, 25 bp, Homo sapien
gattttgcaggatagaaccctggaa

SEQ ID NO: 2876178 - DNA, 25 bp, Homo sapien
caggtgcccggccagttgggtgagg

SEQ ID NO: 2876179 - DNA, 25 bp, Homo sapien
agatttcttaactctcagatctcca

SEQ ID NO: 2876180 - DNA, 25 bp, Homo sapien
tagatttcttaactctcagatctcc

SEQ ID NO: 2876181 - DNA, 25 bp, Homo sapien
ggaaatagatttcttaactctcaga

SEQ ID NO: 2876182 - DNA, 25 bp, Homo sapien
aaatagatttcttaactctcagatc

SEQ ID NO: 2876183 - DNA, 25 bp, Homo sapien
cagaaatcaagtaggagctggcgct

SEQ ID NO: 2876184 - DNA, 25 bp, Homo sapien
ttcaaggccccgtgagaacgggaga

SEQ ID NO: 2876185 - DNA, 25 bp, Homo sapien
cagccagccgtttttgagaaggtga

SEQ ID NO: 2876186 - DNA, 25 bp, Homo sapien
tgccgcccgcactgcagaagtgcag

SEQ ID NO: 2876187 - DNA, 25 bp, Homo sapien
gaatgctggattcttaagtgatatc

SEQ ID NO: 2876188 - DNA, 25 bp, Homo sapien
cttctgatttttcgaaagaaactag

SEQ ID NO: 2876189 - DNA, 25 bp, Homo sapien
gaacagccagcaccgctctagctgg

SEQ ID NO: 2876190 - DNA, 25 bp, Homo sapien
ctggttgttgccatgccggaatgtg

SEQ ID NO: 2876191 - DNA, 25 bp, Homo sapien
gagcagctggagtgttcctggcacc

SEQ ID NO: 2876192 - DNA, 25 bp, Homo sapien
ggatcatcatgtgcaaaggcaggca

SEQ ID NO: 2876193 - DNA, 25 bp, Homo sapien
cttccccgaggaggcaaagtcttgc

SEQ ID NO: 2876194 - DNA, 25 bp, Homo sapien
tgtgaatgccacactaagcaacttg

SEQ ID NO: 2876195 - DNA, 25 bp, Homo sapien
catatgaaataaatcctgttaaatt

SEQ ID NO: 2876196 - DNA, 25 bp, Homo sapien
cacatatgaaataaatcctgttaaa

SEQ ID NO: 2876197 - DNA, 25 bp, Homo sapien
acatatgaaataaatcctgttaaat

SEQ ID NO: 2876198 - DNA, 25 bp, Homo sapien
ggagaccgctgatctacgttcatga

SEQ ID NO: 2876199 - DNA, 25 bp, Homo sapien
gacaacaaaaccactgggtctggtg

SEQ ID NO: 2876200 - DNA, 25 bp, Homo sapien
gaagagaatgtagagaattggtacc

SEQ ID NO: 2876201 - DNA, 25 bp, Homo sapien
caggcctgggactagtaacagtatc

SEQ ID NO: 2876202 - DNA, 25 bp, Homo sapien
gttttctagcaggtgcacttgtcct

SEQ ID NO: 2876203 - DNA, 25 bp, Homo sapien
gatcagtagtgatgacccctttctc

SEQ ID NO: 2876204 - DNA, 25 bp, Homo sapien
gacccatctggtatctagaagtgtt

SEQ ID NO: 2876205 - DNA, 25 bp, Homo sapien
taatatctaccatgtctgccgctgt

SEQ ID NO: 2876206 - DNA, 25 bp, Homo sapien
tctctaagcttactggatccgtggc

SEQ ID NO: 2876207 - DNA, 25 bp, Homo sapien
ggatcagttagttggctatgcccct

SEQ ID NO: 2876208 - DNA, 25 bp, Homo sapien
tcgtttcctgtataagtaagctggg

SEQ ID NO: 2876209 - DNA, 25 bp, Homo sapien
gaagagcctaggtctattctgaaga

SEQ ID NO: 2876210 - DNA, 25 bp, Homo sapien
gtttctactcttccagagcacacca

SEQ ID NO: 2876211 - DNA, 25 bp, Homo sapien
tttctactcttccagagcacaccac

SEQ ID NO: 2876212 - DNA, 25 bp, Homo sapien
gagggagataaagacacagtggcta

SEQ ID NO: 2876213 - DNA, 25 bp, Homo sapien
tggagggagataaagacacagtggc

SEQ ID NO: 2876214 - DNA, 25 bp, Homo sapien
agggagataaagacacagtggctac

SEQ ID NO: 2876215 - DNA, 25 bp, Homo sapien
ctggagggagataaagacacagtgg

SEQ ID NO: 2876216 - DNA, 25 bp, Homo sapien
catctgcaccagatgcatgagtttc

SEQ ID NO: 2876217 - DNA, 25 bp, Homo sapien
tctgctcaaggctgtcatcagtgtc

SEQ ID NO: 2876218 - DNA, 25 bp, Homo sapien
cctggactgtcagagccactccggg

SEQ ID NO: 2876219 - DNA, 25 bp, Homo sapien
tttcctgatacagcgaaatctcagc

SEQ ID NO: 2876220 - DNA, 25 bp, Homo sapien
tcagggctcgtcttatctggaggtt

SEQ ID NO: 2876221 - DNA, 25 bp, Homo sapien
ccaaaatgcttcagggctcgtctta

SEQ ID NO: 2876222 - DNA, 25 bp, Homo sapien
atgcatctgtgaagactggccttcc

SEQ ID NO: 2876223 - DNA, 25 bp, Homo sapien
atctgttttctgatgcaaccaaaat

SEQ ID NO: 2876224 - DNA, 25 bp, Homo sapien
gacggagaagcaccagccaacctct

SEQ ID NO: 2876225 - DNA, 25 bp, Homo sapien
agaagcaccagccaacctctccaca

SEQ ID NO: 2876226 - DNA, 25 bp, Homo sapien
gaagacggagaagcaccagccaacc

SEQ ID NO: 2876227 - DNA, 25 bp, Homo sapien
gaagcaccagccaacctctccacaa

SEQ ID NO: 2876228 - DNA, 25 bp, Homo sapien
gttctcatggaacatcctctgatgg

SEQ ID NO: 2876229 - DNA, 25 bp, Homo sapien
cctctgatggtccctctcggtgctg

SEQ ID NO: 2876230 - DNA, 25 bp, Homo sapien
agttctcatggaacatcctctgatg

SEQ ID NO: 2876231 - DNA, 25 bp, Homo sapien
tattgaacctttgcatgtagggact

SEQ ID NO: 2876232 - DNA, 25 bp, Homo sapien
gtctaacccatgcaaagcctcctgg

SEQ ID NO: 2876233 - DNA, 25 bp, Homo sapien
caaagtcatacccttcttggagaca

SEQ ID NO: 2876234 - DNA, 25 bp, Homo sapien
tccagatggaacataagcagacgtg

SEQ ID NO: 2876235 - DNA, 25 bp, Homo sapien
tttgatattagggtgtatcacgcta

SEQ ID NO: 2876236 - DNA, 25 bp, Homo sapien
tgatattagggtgtatcacgctact

SEQ ID NO: 2876237 - DNA, 25 bp, Homo sapien
gatattagggtgtatcacgctacta

SEQ ID NO: 2876238 - DNA, 25 bp, Homo sapien
tattagggtgtatcacgctactaat

SEQ ID NO: 2876239 - DNA, 25 bp, Homo sapien
cttagctagattcccacctctacaa

SEQ ID NO: 2876240 - DNA, 25 bp, Homo sapien
gtgacgcatgcttgttttcccagct

SEQ ID NO: 2876241 - DNA, 25 bp, Homo sapien
tagctgagtatggtgacgcatgctt

SEQ ID NO: 2876242 - DNA, 25 bp, Homo sapien
ctgggcaacttagctagattcccac

SEQ ID NO: 2876243 - DNA, 25 bp, Homo sapien
tgttgtgtgttgtttagttgccaca

SEQ ID NO: 2876244 - DNA, 25 bp, Homo sapien
tgtggcccaacatgtcgtctatctg

SEQ ID NO: 2876245 - DNA, 25 bp, Homo sapien
tatagtcaggttgttggtttgagag

SEQ ID NO: 2876246 - DNA, 25 bp, Homo sapien
ttttcctactttagatatagtcagg

SEQ ID NO: 2876247 - DNA, 25 bp, Homo sapien
aattcttgtgcccgagtagctgaga

SEQ ID NO: 2876248 - DNA, 25 bp, Homo sapien
tcttgtagccttttcaggcctcctt

SEQ ID NO: 2876249 - DNA, 25 bp, Homo sapien
tatatgtcttgtagccttttcaggc

SEQ ID NO: 2876250 - DNA, 25 bp, Homo sapien
ttcctatatgtcttgtagccttttc

SEQ ID NO: 2876251 - DNA, 25 bp, Homo sapien
cctagttgaactatgctttgcaggg

SEQ ID NO: 2876252 - DNA, 25 bp, Homo sapien
tcttggttaggcattggcctgggca

SEQ ID NO: 2876253 - DNA, 25 bp, Homo sapien
taattcggctctagagttctcacag

SEQ ID NO: 2876254 - DNA, 25 bp, Homo sapien
tgttggcgcgcaaaatgccacaaac

SEQ ID NO: 2876255 - DNA, 25 bp, Homo sapien
tcccctacagaagatataatcttat

SEQ ID NO: 2876256 - DNA, 25 bp, Homo sapien
aacttcccctacagaagatataatc

SEQ ID NO: 2876257 - DNA, 25 bp, Homo sapien
cttcccctacagaagatataatctt

SEQ ID NO: 2876258 - DNA, 25 bp, Homo sapien
taaaacttcccctacagaagatata

SEQ ID NO: 2876259 - DNA, 25 bp, Homo sapien
ttcctccatgacataggtgagcagt

SEQ ID NO: 2876260 - DNA, 25 bp, Homo sapien
cctccatgacataggtgagcagttt

SEQ ID NO: 2876261 - DNA, 25 bp, Homo sapien
ccatgacataggtgagcagtttcca

SEQ ID NO: 2876262 - DNA, 25 bp, Homo sapien
ctcttcctccatgacataggtgagc

SEQ ID NO: 2876263 - DNA, 25 bp, Homo sapien
tttcatgagaagcatgtaggcctcc

SEQ ID NO: 2876264 - DNA, 25 bp, Homo sapien
atttctcttggtgggtaatgctggg

SEQ ID NO: 2876265 - DNA, 25 bp, Homo sapien
gagccactgagcaagattttctgga

SEQ ID NO: 2876266 - DNA, 25 bp, Homo sapien
tgctggggtgacacaaagtccatca

SEQ ID NO: 2876267 - DNA, 25 bp, Homo sapien
tcttagtcttcgatgagggatgggt

SEQ ID NO: 2876268 - DNA, 25 bp, Homo sapien
ttagtcttcgatgagggatgggttc

SEQ ID NO: 2876269 - DNA, 25 bp, Homo sapien
agtcttcgatgagggatgggttcta

SEQ ID NO: 2876270 - DNA, 25 bp, Homo sapien
cttcgatgagggatgggttctaatt

SEQ ID NO: 2876271 - DNA, 25 bp, Homo sapien
ctgaactgtttcaagctggtttttc

SEQ ID NO: 2876272 - DNA, 25 bp, Homo sapien
tgacactgaactgtttcaagctggt

SEQ ID NO: 2876273 - DNA, 25 bp, Homo sapien
agcataccttttgacactgaactgt

SEQ ID NO: 2876274 - DNA, 25 bp, Homo sapien
gcttgaatgaggagagcataccttt

SEQ ID NO: 2876275 - DNA, 25 bp, Homo sapien
actccagtcacactgaccttctcct

SEQ ID NO: 2876276 - DNA, 25 bp, Homo sapien
aaagaacagatgatgaaccggaggt

SEQ ID NO: 2876277 - DNA, 25 bp, Homo sapien
agaacagatgatgaaccggaggtcg

SEQ ID NO: 2876278 - DNA, 25 bp, Homo sapien
gaacagatgatgaaccggaggtcgt

SEQ ID NO: 2876279 - DNA, 25 bp, Homo sapien
acagatgatgaaccggaggtcgtaa

SEQ ID NO: 2876280 - DNA, 25 bp, Homo sapien
gaggggacgcagctgagatatccat

SEQ ID NO: 2876281 - DNA, 25 bp, Homo sapien
tgttgaggatgccataacgagtctt

SEQ ID NO: 2876282 - DNA, 25 bp, Homo sapien
gatgccataacgagtcttgaggtgg

SEQ ID NO: 2876283 - DNA, 25 bp, Homo sapien
acaaggtgaggctctcagtgggcaa

SEQ ID NO: 2876284 - DNA, 25 bp, Homo sapien
aggctggcacatgtctgaagactgg

SEQ ID NO: 2876285 - DNA, 25 bp, Homo sapien
caccgctttgccagagaggctggca

SEQ ID NO: 2876286 - DNA, 25 bp, Homo sapien
ggcacatgtctgaagactggttggc

SEQ ID NO: 2876287 - DNA, 25 bp, Homo sapien
atgtctgaagactggttggctccct

SEQ ID NO: 2876288 - DNA, 25 bp, Homo sapien
caagagtggcaataggtctattttc

SEQ ID NO: 2876289 - DNA, 25 bp, Homo sapien
actgcgatcttttgtccttggtctg

SEQ ID NO: 2876290 - DNA, 25 bp, Homo sapien
tctaaagttaagtcaagagtggcaa

SEQ ID NO: 2876291 - DNA, 25 bp, Homo sapien
ctgggaaggagtgacaggttctaaa

SEQ ID NO: 2876292 - DNA, 25 bp, Homo sapien
gaatagaagtgccaagaacagacat

SEQ ID NO: 2876293 - DNA, 25 bp, Homo sapien
ccaagcttcgctggcaccttgtagt

SEQ ID NO: 2876294 - DNA, 25 bp, Homo sapien
cagtggagtgatcctatgacctcag

SEQ ID NO: 2876295 - DNA, 25 bp, Homo sapien
tattcggctatcttggaacctagga

SEQ ID NO: 2876296 - DNA, 25 bp, Homo sapien
tgttttccctctcttagttgtttgc

SEQ ID NO: 2876297 - DNA, 25 bp, Homo sapien
ctgttttccctctcttagttgtttg

SEQ ID NO: 2876298 - DNA, 25 bp, Homo sapien
tccctctcttagttgtttgcttcat

SEQ ID NO: 2876299 - DNA, 25 bp, Homo sapien
tttccctctcttagttgtttgcttc

SEQ ID NO: 2876300 - DNA, 25 bp, Homo sapien
ttgccttatccctgatcttagtagg

SEQ ID NO: 2876301 - DNA, 25 bp, Homo sapien
acaatgctgaaaaggagtagtgagg

SEQ ID NO: 2876302 - DNA, 25 bp, Homo sapien
gaggagacatccttgccttatccct

SEQ ID NO: 2876303 - DNA, 25 bp, Homo sapien
tacaatgctgaaaaggagtagtgag

SEQ ID NO: 2876304 - DNA, 25 bp, Homo sapien
tgtagaattgaccttgcatacctgg

SEQ ID NO: 2876305 - DNA, 25 bp, Homo sapien
tagcctactgatgtggtgaattgca

SEQ ID NO: 2876306 - DNA, 25 bp, Homo sapien
catacctgggagaaatcctacttgg

SEQ ID NO: 2876307 - DNA, 25 bp, Homo sapien
catagagctagttagcaagtagtcc

SEQ ID NO: 2876308 - DNA, 25 bp, Homo sapien
ggagttctgtacactcctagtgttc

SEQ ID NO: 2876309 - DNA, 25 bp, Homo sapien
gaaactaggatgtcacaaggaatga

SEQ ID NO: 2876310 - DNA, 25 bp, Homo sapien
gtgttctgagattcagaaactagga

SEQ ID NO: 2876311 - DNA, 25 bp, Homo sapien
gttctgtacactcctagtgttctga

SEQ ID NO: 2876312 - DNA, 25 bp, Homo sapien
ccttccctgagtcgccaaagtcatt

SEQ ID NO: 2876313 - DNA, 25 bp, Homo sapien
tccattcctgagtaattatgttttt

SEQ ID NO: 2876314 - DNA, 25 bp, Homo sapien
taatgaccatgcaagaggattcatc

SEQ ID NO: 2876315 - DNA, 25 bp, Homo sapien
taaaatcaataagagactggctaag

SEQ ID NO: 2876316 - DNA, 25 bp, Homo sapien
ggtgaggtgataattctcttttaac

SEQ ID NO: 2876317 - DNA, 25 bp, Homo sapien
cctccagtatatcctgattctgtgc

SEQ ID NO: 2876318 - DNA, 25 bp, Homo sapien
gctttaacggcctgacactgaaatg

SEQ ID NO: 2876319 - DNA, 25 bp, Homo sapien
tccagctctaactctgctttaacgg

SEQ ID NO: 2876320 - DNA, 25 bp, Homo sapien
gctttcctgcatcggcccggccagt

SEQ ID NO: 2876321 - DNA, 25 bp, Homo sapien
accacaggccgaagaattacgcgct

SEQ ID NO: 2876322 - DNA, 25 bp, Homo sapien
agaattacgcgctcccgctttcctg

SEQ ID NO: 2876323 - DNA, 25 bp, Homo sapien
gtgtccaccacaggccgaagaatta

SEQ ID NO: 2876324 - DNA, 25 bp, Homo sapien
ggcagcgcgccggaggttcgcgaca

SEQ ID NO: 2876325 - DNA, 25 bp, Homo sapien
gccgctgtcgtccgagatcacgatg

SEQ ID NO: 2876326 - DNA, 25 bp, Homo sapien
agcgcgccggaggttcgcgacaggg

SEQ ID NO: 2876327 - DNA, 25 bp, Homo sapien
ccggagctctcagagccgctgtcgt

SEQ ID NO: 2876328 - DNA, 25 bp, Homo sapien
ttaggacaccaattcaagccaaatt

SEQ ID NO: 2876329 - DNA, 25 bp, Homo sapien
caagccaaattgcattaatgaccac

SEQ ID NO: 2876330 - DNA, 25 bp, Homo sapien
ggttttgaccaagtatgaggtctac

SEQ ID NO: 2876331 - DNA, 25 bp, Homo sapien
ggtaactgcataaaaccaggcattc

SEQ ID NO: 2876332 - DNA, 25 bp, Homo sapien
gttttagattatgattttctccttc

SEQ ID NO: 2876333 - DNA, 25 bp, Homo sapien
cttttgttgcgattttctcctctgg

SEQ ID NO: 2876334 - DNA, 25 bp, Homo sapien
attttctcctctggatgttttagat

SEQ ID NO: 2876335 - DNA, 25 bp, Homo sapien
caatctgacaccatttgctctccat

SEQ ID NO: 2876336 - DNA, 25 bp, Homo sapien
tgaaattcagccatagtgacccttc

SEQ ID NO: 2876337 - DNA, 25 bp, Homo sapien
gcatccctaggtcatggaaaactct

SEQ ID NO: 2876338 - DNA, 25 bp, Homo sapien
tatgaaatgcttagtccctggcaga

SEQ ID NO: 2876339 - DNA, 25 bp, Homo sapien
caaatccttaagatgacctgccagt

SEQ ID NO: 2876340 - DNA, 25 bp, Homo sapien
tcactgggaagaatggatggactgc

SEQ ID NO: 2876341 - DNA, 25 bp, Homo sapien
cagctcctgtgtcgtggtgcacgta

SEQ ID NO: 2876342 - DNA, 25 bp, Homo sapien
gacactcaaggctggtataccacgt

SEQ ID NO: 2876343 - DNA, 25 bp, Homo sapien
tgtagccagtgaagatagaatccgg

SEQ ID NO: 2876344 - DNA, 25 bp, Homo sapien
cacactgaagtccaaatggcctcac

SEQ ID NO: 2876345 - DNA, 25 bp, Homo sapien
tcacactgaagtccaaatggcctca

SEQ ID NO: 2876346 - DNA, 25 bp, Homo sapien
ttattcaaagcccgtcctctccttc

SEQ ID NO: 2876347 - DNA, 25 bp, Homo sapien
tccttggaaaacgtggcagtgccgg

SEQ ID NO: 2876348 - DNA, 25 bp, Homo sapien
cagcatctacaactctagtcaccaa

SEQ ID NO: 2876349 - DNA, 25 bp, Homo sapien
cgtgatgggctggtgacatgcatct

SEQ ID NO: 2876350 - DNA, 25 bp, Homo sapien
gaattttagaactcaatcagaactt

SEQ ID NO: 2876351 - DNA, 25 bp, Homo sapien
tatgaagaattccaatcttcaaaag

SEQ ID NO: 2876352 - DNA, 25 bp, Homo sapien
gaagaattccaatcttcaaaagaat

SEQ ID NO: 2876353 - DNA, 25 bp, Homo sapien
gaacttgagaacttctttcagtagg

SEQ ID NO: 2876354 - DNA, 25 bp, Homo sapien
actgacactttaggctactgttttc

SEQ ID NO: 2876355 - DNA, 25 bp, Homo sapien
ggttgaaactgacactttaggctac

SEQ ID NO: 2876356 - DNA, 25 bp, Homo sapien
gaaactgacactttaggctactgtt

SEQ ID NO: 2876357 - DNA, 25 bp, Homo sapien
ttgaaactgacactttaggctactg

SEQ ID NO: 2876358 - DNA, 25 bp, Homo sapien
gcaaatgctagccactggttgatct

SEQ ID NO: 2876359 - DNA, 25 bp, Homo sapien
gggaaggtgcaggcatttcttatca

SEQ ID NO: 2876360 - DNA, 25 bp, Homo sapien
cactggttgatctgaatgaagaata

SEQ ID NO: 2876361 - DNA, 25 bp, Homo sapien
aggtggcaaatgctagccactggtt

SEQ ID NO: 2876362 - DNA, 25 bp, Homo sapien
ctgactaggatcacctgtaggtaac

SEQ ID NO: 2876363 - DNA, 25 bp, Homo sapien
tgactaggatcacctgtaggtaact

SEQ ID NO: 2876364 - DNA, 25 bp, Homo sapien
gactaggatcacctgtaggtaactt

SEQ ID NO: 2876365 - DNA, 25 bp, Homo sapien
ctaggatcacctgtaggtaacttaa

SEQ ID NO: 2876366 - DNA, 25 bp, Homo sapien
ctgtttttatacttgacatgagaaa

SEQ ID NO: 2876367 - DNA, 25 bp, Homo sapien
gacacgttatcaaagcttagggtag

SEQ ID NO: 2876368 - DNA, 25 bp, Homo sapien
atgagaaaactgttataacttcagt

SEQ ID NO: 2876369 - DNA, 25 bp, Homo sapien
cttagggtaggataaatgtgccatc

SEQ ID NO: 2876370 - DNA, 25 bp, Homo sapien
tgcaattaacattaagagtctcaaa

SEQ ID NO: 2876371 - DNA, 25 bp, Homo sapien
taaaacactctaagatcagatacat

SEQ ID NO: 2876372 - DNA, 25 bp, Homo sapien
gacttagccatttcacctccaataa

SEQ ID NO: 2876373 - DNA, 25 bp, Homo sapien
tcagatacatttaggtcaataattc

SEQ ID NO: 2876374 - DNA, 25 bp, Homo sapien
aaactagtgtggcataggtcactgt

SEQ ID NO: 2876375 - DNA, 25 bp, Homo sapien
cttccaagcttgtcagtaatgtaag

SEQ ID NO: 2876376 - DNA, 25 bp, Homo sapien
cattttccaataaactagtgtggca

SEQ ID NO: 2876377 - DNA, 25 bp, Homo sapien
gcttgtcagtaatgtaagtttctca

SEQ ID NO: 2876378 - DNA, 25 bp, Homo sapien
acagaatgtaaatcaccacaaaaca

SEQ ID NO: 2876379 - DNA, 25 bp, Homo sapien
tgcaccaggccattaacatttatat

SEQ ID NO: 2876380 - DNA, 25 bp, Homo sapien
ctgcaccaggccattaacatttata

SEQ ID NO: 2876381 - DNA, 25 bp, Homo sapien
cataaaaatactccatattgatgta

SEQ ID NO: 2876382 - DNA, 25 bp, Homo sapien
cacaaaagaagtctatcaaaattac

SEQ ID NO: 2876383 - DNA, 25 bp, Homo sapien
caatttgtgccctctgaaaaacaga

SEQ ID NO: 2876384 - DNA, 25 bp, Homo sapien
tgaaaaacagaggttaaagtcagaa

SEQ ID NO: 2876385 - DNA, 25 bp, Homo sapien
atggaaacaatacaagaacaatttg

SEQ ID NO: 2876386 - DNA, 25 bp, Homo sapien
gaaatgatcacgatccacatcaagt

SEQ ID NO: 2876387 - DNA, 25 bp, Homo sapien
ccacatcaagtctgagccatgttga

SEQ ID NO: 2876388 - DNA, 25 bp, Homo sapien
ggagtaacacatttcccgaaatgat

SEQ ID NO: 2876389 - DNA, 25 bp, Homo sapien
agccatgttgacatccccacgtcgg

SEQ ID NO: 2876390 - DNA, 25 bp, Homo sapien
gcacgttgaacatgcatagcttcct

SEQ ID NO: 2876391 - DNA, 25 bp, Homo sapien
aagagctgcacgttgaacatgcata

SEQ ID NO: 2876392 - DNA, 25 bp, Homo sapien
agagctgcacgttgaacatgcatag

SEQ ID NO: 2876393 - DNA, 25 bp, Homo sapien
tgcacgttgaacatgcatagcttcc

SEQ ID NO: 2876394 - DNA, 25 bp, Homo sapien
tcaaaccctcccaagtgagcatggc

SEQ ID NO: 2876395 - DNA, 25 bp, Homo sapien
tcctcaggatgaactagtgatgctc

SEQ ID NO: 2876396 - DNA, 25 bp, Homo sapien
tgcttgacaccaggacctactgagg

SEQ ID NO: 2876397 - DNA, 25 bp, Homo sapien
ggcctgctggcctgcaatactgggt

SEQ ID NO: 2876398 - DNA, 25 bp, Homo sapien
tttcaggacattccaccggcttttc

SEQ ID NO: 2876399 - DNA, 25 bp, Homo sapien
acattccaccggcttttcttgctgg

SEQ ID NO: 2876400 - DNA, 25 bp, Homo sapien
caggacattccaccggcttttcttg

SEQ ID NO: 2876401 - DNA, 25 bp, Homo sapien
atttcaggacattccaccggctttt

SEQ ID NO: 2876402 - DNA, 25 bp, Homo sapien
ttccactttggtcttttctgttgct

SEQ ID NO: 2876403 - DNA, 25 bp, Homo sapien
tgcaggtgcagaggaaggacttgct

SEQ ID NO: 2876404 - DNA, 25 bp, Homo sapien
cttctgcaggtgcagaggaaggact

SEQ ID NO: 2876405 - DNA, 25 bp, Homo sapien
gtgcagaggaaggacttgctgacat

SEQ ID NO: 2876406 - DNA, 25 bp, Homo sapien
tgcctgtaatggtggagtcttccaa

SEQ ID NO: 2876407 - DNA, 25 bp, Homo sapien
gtggctgcctgtaatggtggagtct

SEQ ID NO: 2876408 - DNA, 25 bp, Homo sapien
gctgcctgtaatggtggagtcttcc

SEQ ID NO: 2876409 - DNA, 25 bp, Homo sapien
gcctgtaatggtggagtcttccaat

SEQ ID NO: 2876410 - DNA, 25 bp, Homo sapien
gagagaaccactcagaccccgctgt

SEQ ID NO: 2876411 - DNA, 25 bp, Homo sapien
tagagtcgagagaaccactcagacc

SEQ ID NO: 2876412 - DNA, 25 bp, Homo sapien
ggagagttagagtcgagagaaccac

SEQ ID NO: 2876413 - DNA, 25 bp, Homo sapien
aagcatcagagtgtccggaggagca

SEQ ID NO: 2876414 - DNA, 25 bp, Homo sapien
ggcctttatgaaggcactgctcaca

SEQ ID NO: 2876415 - DNA, 25 bp, Homo sapien
attagtactactgctctgtccactg

SEQ ID NO: 2876416 - DNA, 25 bp, Homo sapien
ctccctgggctctgtgaactcaggg

SEQ ID NO: 2876417 - DNA, 25 bp, Homo sapien
catgagcccatgtacagagacacaa

SEQ ID NO: 2876418 - DNA, 25 bp, Homo sapien
tcaactctgcagcgtgtccatctga

SEQ ID NO: 2876419 - DNA, 25 bp, Homo sapien
tccatctgaggactgggtatattaa

SEQ ID NO: 2876420 - DNA, 25 bp, Homo sapien
tctgaggactgggtatattaaactt

SEQ ID NO: 2876421 - DNA, 25 bp, Homo sapien
cagcgtgtccatctgaggactgggt

SEQ ID NO: 2876422 - DNA, 25 bp, Homo sapien
ctgtgcccggtgtgactcttagtag

SEQ ID NO: 2876423 - DNA, 25 bp, Homo sapien
accagagtggcccttgagcaaaagc

SEQ ID NO: 2876424 - DNA, 25 bp, Homo sapien
catttctggcagaaagctcaaacca

SEQ ID NO: 2876425 - DNA, 25 bp, Homo sapien
tggcagaaagctcaaaccagagtgg

SEQ ID NO: 2876426 - DNA, 25 bp, Homo sapien
taaacaaagagatgatcccagaata

SEQ ID NO: 2876427 - DNA, 25 bp, Homo sapien
caaagagatgatcccagaatacgta

SEQ ID NO: 2876428 - DNA, 25 bp, Homo sapien
ctaaacaaagagatgatcccagaat

SEQ ID NO: 2876429 - DNA, 25 bp, Homo sapien
aacaaagagatgatcccagaatacg

SEQ ID NO: 2876430 - DNA, 25 bp, Homo sapien
ccagtgtggctgggtccacctgcat

SEQ ID NO: 2876431 - DNA, 25 bp, Homo sapien
cagagactgtctgctctggcacatg

SEQ ID NO: 2876432 - DNA, 25 bp, Homo sapien
catgtgaacccctgtggcttcctca

SEQ ID NO: 2876433 - DNA, 25 bp, Homo sapien
cttcctcagagactgtctgctctgg

SEQ ID NO: 2876434 - DNA, 25 bp, Homo sapien
tctggcacatgctcctccaggtctt

SEQ ID NO: 2876435 - DNA, 25 bp, Homo sapien
tctttgccagcgtggctgggtccac

SEQ ID NO: 2876436 - DNA, 25 bp, Homo sapien
tgccagcgtggctgggtccacctgc

SEQ ID NO: 2876437 - DNA, 25 bp, Homo sapien
ccagcgtggctgggtccacctgcat

SEQ ID NO: 2876438 - DNA, 25 bp, Homo sapien
ctttgccagcgtggctgggtccacc

SEQ ID NO: 2876439 - DNA, 25 bp, Homo sapien
gtctgccctggcacatgctcctcca

SEQ ID NO: 2876440 - DNA, 25 bp, Homo sapien
catgtgaacccctgtggcttcctca

SEQ ID NO: 2876441 - DNA, 25 bp, Homo sapien
cagagactgtctgccctggcacatg

SEQ ID NO: 2876442 - DNA, 25 bp, Homo sapien
tcctcagagactgtctgccctggca

SEQ ID NO: 2876443 - DNA, 25 bp, Homo sapien
cacgttgtggaactcccaaggatgt

SEQ ID NO: 2876444 - DNA, 25 bp, Homo sapien
ggacagctcctgaagtacatccctg

SEQ ID NO: 2876445 - DNA, 25 bp, Homo sapien
gctcctgaagtacatccctgatcag

SEQ ID NO: 2876446 - DNA, 25 bp, Homo sapien
tcctgaagtacatccctgatcagaa

SEQ ID NO: 2876447 - DNA, 25 bp, Homo sapien
cctcctcaccgttgtaactggacag

SEQ ID NO: 2876448 - DNA, 25 bp, Homo sapien
tcggccagtgtgtctgggtccccct

SEQ ID NO: 2876449 - DNA, 25 bp, Homo sapien
ccagtgtgtctgggtccccctccat

SEQ ID NO: 2876450 - DNA, 25 bp, Homo sapien
attcggccagtgtgtctgggtcccc

SEQ ID NO: 2876451 - DNA, 25 bp, Homo sapien
ggccagtgtgtctgggtccccctcc

SEQ ID NO: 2876452 - DNA, 25 bp, Homo sapien
cgtgtgaacttctgtggcttcctca

SEQ ID NO: 2876453 - DNA, 25 bp, Homo sapien
cttcctcagagactgtctgccctgg

SEQ ID NO: 2876454 - DNA, 25 bp, Homo sapien
gtggcttcctcagagactgtctgcc

SEQ ID NO: 2876455 - DNA, 25 bp, Homo sapien
cagagactgtctgccctggcccatg

SEQ ID NO: 2876456 - DNA, 25 bp, Homo sapien
cgttggtttgggtgcctgcgtctgc

SEQ ID NO: 2876457 - DNA, 25 bp, Homo sapien
ttctgctataaactcctctagatga

SEQ ID NO: 2876458 - DNA, 25 bp, Homo sapien
agactctgattggatgcttcaggga

SEQ ID NO: 2876459 - DNA, 25 bp, Homo sapien
tctgctataaactcctctagatgat

SEQ ID NO: 2876460 - DNA, 25 bp, Homo sapien
gagactctgattggatgcttcaggg

SEQ ID NO: 2876461 - DNA, 25 bp, Homo sapien
cttctgatggaaagcataccctttt

SEQ ID NO: 2876462 - DNA, 25 bp, Homo sapien
tctcgggtggacacaatggcttgcc

SEQ ID NO: 2876463 - DNA, 25 bp, Homo sapien
gagcctggcaacgtctccgagagta

SEQ ID NO: 2876464 - DNA, 25 bp, Homo sapien
tccgagagtatctcgggtggacaca

SEQ ID NO: 2876465 - DNA, 25 bp, Homo sapien
tggcttgcccaaggagccttcgtca

SEQ ID NO: 2876466 - DNA, 25 bp, Homo sapien
cacagagtaattgtcagcacgttgg

SEQ ID NO: 2876467 - DNA, 25 bp, Homo sapien
aacacagagtaattgtcagcacgtt

SEQ ID NO: 2876468 - DNA, 25 bp, Homo sapien
agagtaattgtcagcacgttgggtg

SEQ ID NO: 2876469 - DNA, 25 bp, Homo sapien
cagagtaattgtcagcacgttgggt

SEQ ID NO: 2876470 - DNA, 25 bp, Homo sapien
aaggaatccgtcaggcagacttgtg

SEQ ID NO: 2876471 - DNA, 25 bp, Homo sapien
aggaatccgtcaggcagacttgtgt

SEQ ID NO: 2876472 - DNA, 25 bp, Homo sapien
tgtacctttaatcgctcacagcaga

SEQ ID NO: 2876473 - DNA, 25 bp, Homo sapien
gcccaacgggcagctgtctatgaat

SEQ ID NO: 2876474 - DNA, 25 bp, Homo sapien
caaatcatgttcctctgcaggccca

SEQ ID NO: 2876475 - DNA, 25 bp, Homo sapien
tgtctctcgcatagagcccaacggg

SEQ ID NO: 2876476 - DNA, 25 bp, Homo sapien
tataggtggagctcccgtagtcgcc

SEQ ID NO: 2876477 - DNA, 25 bp, Homo sapien
tagtcgccgtagttgccgtttcatc

SEQ ID NO: 2876478 - DNA, 25 bp, Homo sapien
ggtacttcttccatgtgctgtatag

SEQ ID NO: 2876479 - DNA, 25 bp, Homo sapien
catcgcctcttggtacttcttccat

SEQ ID NO: 2876480 - DNA, 25 bp, Homo sapien
tagaatttttcctcagcataggggt

SEQ ID NO: 2876481 - DNA, 25 bp, Homo sapien
ctttgtcaacactagaatttttcct

SEQ ID NO: 2876482 - DNA, 25 bp, Homo sapien
cactagaatttttcctcagcatagg

SEQ ID NO: 2876483 - DNA, 25 bp, Homo sapien
gaatttttcctcagcataggggtga

SEQ ID NO: 2876484 - DNA, 25 bp, Homo sapien
tgtctctctctgtgtctttgtccac

SEQ ID NO: 2876485 - DNA, 25 bp, Homo sapien
atgaacgcccaggacatcttcagat

SEQ ID NO: 2876486 - DNA, 25 bp, Homo sapien
ttcagatgaagcttcctgcaccagg

SEQ ID NO: 2876487 - DNA, 25 bp, Homo sapien
tcagatgaagcttcctgcaccaggt

SEQ ID NO: 2876488 - DNA, 25 bp, Homo sapien
aacgcccaggacatcttcagatgaa

SEQ ID NO: 2876489 - DNA, 25 bp, Homo sapien
ctaggaaacacagagtaactgtcat

SEQ ID NO: 2876490 - DNA, 25 bp, Homo sapien
cccttaggcaaccttggatgctaag

SEQ ID NO: 2876491 - DNA, 25 bp, Homo sapien
cttggatgctaaggacagggggctg

SEQ ID NO: 2876492 - DNA, 25 bp, Homo sapien
ccttaggcaaccttggatgctaagg

SEQ ID NO: 2876493 - DNA, 25 bp, Homo sapien
tcccttaggcaaccttggatgctaa

SEQ ID NO: 2876494 - DNA, 25 bp, Homo sapien
tgattggcttctcacgctcgcggtg

SEQ ID NO: 2876495 - DNA, 25 bp, Homo sapien
ccgggatgccagtgataccagtgat

SEQ ID NO: 2876496 - DNA, 25 bp, Homo sapien
ctagggtatatatggccgggatgcc

SEQ ID NO: 2876497 - DNA, 25 bp, Homo sapien
tggcagacggtggattcccctggca

SEQ ID NO: 2876498 - DNA, 25 bp, Homo sapien
gtcctctgagacaactaagctgcgt

SEQ ID NO: 2876499 - DNA, 25 bp, Homo sapien
caacgttcagttgccagaatggcag

SEQ ID NO: 2876500 - DNA, 25 bp, Homo sapien
gacaactaagctgcgtttactgcca

SEQ ID NO: 2876501 - DNA, 25 bp, Homo sapien
gaaaggcaagacctatatcatcaga

SEQ ID NO: 2876502 - DNA, 25 bp, Homo sapien
cacgtggatgacagagatcttcttg

SEQ ID NO: 2876503 - DNA, 25 bp, Homo sapien
cgtggatgacagagatcttcttggc

SEQ ID NO: 2876504 - DNA, 25 bp, Homo sapien
tcacgtggatgacagagatcttctt

SEQ ID NO: 2876505 - DNA, 25 bp, Homo sapien
ctgtcacgtggatgacagagatctt

SEQ ID NO: 2876506 - DNA, 25 bp, Homo sapien
ggatgaagacagctgggaagccctg

SEQ ID NO: 2876507 - DNA, 25 bp, Homo sapien
tggatgaagacagctgggaagccct

SEQ ID NO: 2876508 - DNA, 25 bp, Homo sapien
ctggatgaagacagctgggaagccc

SEQ ID NO: 2876509 - DNA, 25 bp, Homo sapien
atgaagacagctgggaagccctggg

SEQ ID NO: 2876510 - DNA, 25 bp, Homo sapien
tccatggggatggcaatgtacacca

SEQ ID NO: 2876511 - DNA, 25 bp, Homo sapien
ccatggggatggcaatgtacaccaa

SEQ ID NO: 2876512 - DNA, 25 bp, Homo sapien
gagaaacctggctgacaccagtgaa

SEQ ID NO: 2876513 - DNA, 25 bp, Homo sapien
ctccatggggatggcaatgtacacc

SEQ ID NO: 2876514 - DNA, 25 bp, Homo sapien
ccagtcagatcgagtgtcaacatct

SEQ ID NO: 2876515 - DNA, 25 bp, Homo sapien
atcgagtgtcaacatctggcctggg

SEQ ID NO: 2876516 - DNA, 25 bp, Homo sapien
tgggcccagtcagatcgagtgtcaa

SEQ ID NO: 2876517 - DNA, 25 bp, Homo sapien
tcagatcgagtgtcaacatctggcc

SEQ ID NO: 2876518 - DNA, 25 bp, Homo sapien
ccctgtgaggcagctatgggcatct

SEQ ID NO: 2876519 - DNA, 25 bp, Homo sapien
cctgtgaggcagctatgggcatctg

SEQ ID NO: 2876520 - DNA, 25 bp, Homo sapien
tgtgaggcagctatgggcatctgca

SEQ ID NO: 2876521 - DNA, 25 bp, Homo sapien
gccctgtgaggcagctatgggcatc

SEQ ID NO: 2876522 - DNA, 25 bp, Homo sapien
gaacaaactggctggcctcgatgag

SEQ ID NO: 2876523 - DNA, 25 bp, Homo sapien
cccaataagcacgagtgtgaacaaa

SEQ ID NO: 2876524 - DNA, 25 bp, Homo sapien
ggatggtaagagaacaccttggctg

SEQ ID NO: 2876525 - DNA, 25 bp, Homo sapien
gggctggctatcgtgtggatggtaa

SEQ ID NO: 2876526 - DNA, 25 bp, Homo sapien
tcagattgcacaggtaaagggctca

SEQ ID NO: 2876527 - DNA, 25 bp, Homo sapien
cataggaatcagaccagcaacaggg

SEQ ID NO: 2876528 - DNA, 25 bp, Homo sapien
taagttttagtgtgccattccgaga

SEQ ID NO: 2876529 - DNA, 25 bp, Homo sapien
tgtgaatcgtcctgcagtgcaccca

SEQ ID NO: 2876530 - DNA, 25 bp, Homo sapien
aatgcttgcccctttccctagtagg

SEQ ID NO: 2876531 - DNA, 25 bp, Homo sapien
gagaagcttaagaaacaccggcgtg

SEQ ID NO: 2876532 - DNA, 25 bp, Homo sapien
tcatgcaagagaaactagtaccagg

SEQ ID NO: 2876533 - DNA, 25 bp, Homo sapien
ggaaccacgcctcacattcagagag

SEQ ID NO: 2876534 - DNA, 25 bp, Homo sapien
taaagatacttccttagtgacacaa

SEQ ID NO: 2876535 - DNA, 25 bp, Homo sapien
taacaggtaatacagttcacccttg

SEQ ID NO: 2876536 - DNA, 25 bp, Homo sapien
tacgagaaagggattgttgagttcc

SEQ ID NO: 2876537 - DNA, 25 bp, Homo sapien
gctgcaggagttcatttatatgcag

SEQ ID NO: 2876538 - DNA, 25 bp, Homo sapien
tggattgtaagttttaagaatcttc

SEQ ID NO: 2876539 - DNA, 25 bp, Homo sapien
ctggattgtaagttttaagaatctt

SEQ ID NO: 2876540 - DNA, 25 bp, Homo sapien
cgtacttctatatctattgtcacct

SEQ ID NO: 2876541 - DNA, 25 bp, Homo sapien
cttaatgtttggtaaatgtgtaatc

SEQ ID NO: 2876542 - DNA, 25 bp, Homo sapien
tcctcgctggctaaaacaaaataca

SEQ ID NO: 2876543 - DNA, 25 bp, Homo sapien
aatacatcttcgcacatcaacgtac

SEQ ID NO: 2876544 - DNA, 25 bp, Homo sapien
gatggtctcaatctcaatctcctga

SEQ ID NO: 2876545 - DNA, 25 bp, Homo sapien
ggatggtctcaatctcaatctcctg

SEQ ID NO: 2876546 - DNA, 25 bp, Homo sapien
tccttctaagaaccttcagtaaaga

SEQ ID NO: 2876547 - DNA, 25 bp, Homo sapien
cacaggtggatacggatgtaaaacg

SEQ ID NO: 2876548 - DNA, 25 bp, Homo sapien
ctacacaggtggatacggatgtaaa

SEQ ID NO: 2876549 - DNA, 25 bp, Homo sapien
gtggatacggatgtaaaacggacag

SEQ ID NO: 2876550 - DNA, 25 bp, Homo sapien
caggtggatacggatgtaaaacgga

SEQ ID NO: 2876551 - DNA, 25 bp, Homo sapien
cttcaaggtggtgagttcttctcag

SEQ ID NO: 2876552 - DNA, 25 bp, Homo sapien
tgtcaccttttcactccccctcgcc

SEQ ID NO: 2876553 - DNA, 25 bp, Homo sapien
tcttcaaggtggtgagttcttctca

SEQ ID NO: 2876554 - DNA, 25 bp, Homo sapien
tgatccctggcgctgggcaatccac

SEQ ID NO: 2876555 - DNA, 25 bp, Homo sapien
ggtctgagggtctgctcctcctgga

SEQ ID NO: 2876556 - DNA, 25 bp, Homo sapien
gaagccgaccgcctgactttgctgc

SEQ ID NO: 2876557 - DNA, 25 bp, Homo sapien
aggatgagactcatcggctgctggc

SEQ ID NO: 2876558 - DNA, 25 bp, Homo sapien
gtcacttggcaccaatgccgtcggc

SEQ ID NO: 2876559 - DNA, 25 bp, Homo sapien
tgccgtcggcccgtgggtatctgag

SEQ ID NO: 2876560 - DNA, 25 bp, Homo sapien
agttggactggagccacaagctgca

SEQ ID NO: 2876561 - DNA, 25 bp, Homo sapien
gcactgtgaacctggtcacttggca

SEQ ID NO: 2876562 - DNA, 25 bp, Homo sapien
tcagtcaacaggtggatgcccaagc

SEQ ID NO: 2876563 - DNA, 25 bp, Homo sapien
caggttgacaccaaggctccaggta

SEQ ID NO: 2876564 - DNA, 25 bp, Homo sapien
ggtgaatatctatgccccagctgaa

SEQ ID NO: 2876565 - DNA, 25 bp, Homo sapien
catgtggattactaggacccgggca

SEQ ID NO: 2876566 - DNA, 25 bp, Homo sapien
ccagttggacaccaagtcacatggg

SEQ ID NO: 2876567 - DNA, 25 bp, Homo sapien
tgtcccagttggacaccaagtcaca

SEQ ID NO: 2876568 - DNA, 25 bp, Homo sapien
tccaatgtcccagttggacaccaag

SEQ ID NO: 2876569 - DNA, 25 bp, Homo sapien
cggtgtccaatgtcccagttggaca

SEQ ID NO: 2876570 - DNA, 25 bp, Homo sapien
gggccctggagcttcgccccatcct

SEQ ID NO: 2876571 - DNA, 25 bp, Homo sapien
gccgtcgtgccacaggccgctggat

SEQ ID NO: 2876572 - DNA, 25 bp, Homo sapien
ccacaggccgctggatgcttccaaa

SEQ ID NO: 2876573 - DNA, 25 bp, Homo sapien
gcttccaaatcaggtgctggaattg

SEQ ID NO: 2876574 - DNA, 25 bp, Homo sapien
ttcacttttcttatactgaatacgt

SEQ ID NO: 2876575 - DNA, 25 bp, Homo sapien
tgaatacgtaggtcccacgtttcca

SEQ ID NO: 2876576 - DNA, 25 bp, Homo sapien
ccttctcgtactttctttgtgttct

SEQ ID NO: 2876577 - DNA, 25 bp, Homo sapien
aacgtcgggccccaagtgcacactg

SEQ ID NO: 2876578 - DNA, 25 bp, Homo sapien
cataaggccccagcggacacaaagg

SEQ ID NO: 2876579 - DNA, 25 bp, Homo sapien
tggacaacaggtcccagagggactc

SEQ ID NO: 2876580 - DNA, 25 bp, Homo sapien
tggactcaaggtggacgttggacac

SEQ ID NO: 2876581 - DNA, 25 bp, Homo sapien
ctggacatcaggtcgcagtttggcg

SEQ ID NO: 2876582 - DNA, 25 bp, Homo sapien
tcaggtcgcagtttggcgtggaggc

SEQ ID NO: 2876583 - DNA, 25 bp, Homo sapien
acatcaggtcgcagtttggcgtgga

SEQ ID NO: 2876584 - DNA, 25 bp, Homo sapien
aggtcgcagtttggcgtggaggccc

SEQ ID NO: 2876585 - DNA, 25 bp, Homo sapien
actccaaacggacatcgggtcctgg

SEQ ID NO: 2876586 - DNA, 25 bp, Homo sapien
cacttgactccaaacggacatcggg

SEQ ID NO: 2876587 - DNA, 25 bp, Homo sapien
caggtggacgacacttgactccaaa

SEQ ID NO: 2876588 - DNA, 25 bp, Homo sapien
ctgggccccaggtggacgacacttg

SEQ ID NO: 2876589 - DNA, 25 bp, Homo sapien
ggtacacatctaggtcccacgtgga

SEQ ID NO: 2876590 - DNA, 25 bp, Homo sapien
tggacatccgggcccagaacgtcct

SEQ ID NO: 2876591 - DNA, 25 bp, Homo sapien
tggctcctggtgaacattagacccc

SEQ ID NO: 2876592 - DNA, 25 bp, Homo sapien
agaacgtcctcaggcaccgagaaac

SEQ ID NO: 2876593 - DNA, 25 bp, Homo sapien
agccagacaccaaatgccagggtgt

SEQ ID NO: 2876594 - DNA, 25 bp, Homo sapien
tagccagacaccaaatgccagggtg

SEQ ID NO: 2876595 - DNA, 25 bp, Homo sapien
ttagccagacaccaaatgccagggt

SEQ ID NO: 2876596 - DNA, 25 bp, Homo sapien
cacatatgcagaacgtacttgactt

SEQ ID NO: 2876597 - DNA, 25 bp, Homo sapien
acacatatgcagaacgtacttgact

SEQ ID NO: 2876598 - DNA, 25 bp, Homo sapien
catatgcagaacgtacttgacttta

SEQ ID NO: 2876599 - DNA, 25 bp, Homo sapien
atgcagaacgtacttgactttactc

SEQ ID NO: 2876600 - DNA, 25 bp, Homo sapien
ctatcacccaggagcaagaagagag

SEQ ID NO: 2876601 - DNA, 25 bp, Homo sapien
caggagcaagaagagagacaggggc

SEQ ID NO: 2876602 - DNA, 25 bp, Homo sapien
atcacccaggagcaagaagagagac

SEQ ID NO: 2876603 - DNA, 25 bp, Homo sapien
cccaggagcaagaagagagacaggg

SEQ ID NO: 2876604 - DNA, 25 bp, Homo sapien
cactgtggttccccagcccttgccc

SEQ ID NO: 2876605 - DNA, 25 bp, Homo sapien
cccagcccttgccctctcgctccat

SEQ ID NO: 2876606 - DNA, 25 bp, Homo sapien
ccactgtggttccccagcccttgcc

SEQ ID NO: 2876607 - DNA, 25 bp, Homo sapien
ggttccccagcccttgccctctcgc

SEQ ID NO: 2876608 - DNA, 25 bp, Homo sapien
tagtatcttttattaatagtctaaa

SEQ ID NO: 2876609 - DNA, 25 bp, Homo sapien
taatagtctaaaacttataaaatgc

SEQ ID NO: 2876610 - DNA, 25 bp, Homo sapien
ttgtgcattaatattggtaacattt

SEQ ID NO: 2876611 - DNA, 25 bp, Homo sapien
tgttaagaacatagcttttccatct

SEQ ID NO: 2876612 - DNA, 25 bp, Homo sapien
gggaagctgactttgatgttgccca

SEQ ID NO: 2876613 - DNA, 25 bp, Homo sapien
agctgactttgatgttgcccagaag

SEQ ID NO: 2876614 - DNA, 25 bp, Homo sapien
gaagctgactttgatgttgcccaga

SEQ ID NO: 2876615 - DNA, 25 bp, Homo sapien
caggggaagctgactttgatgttgc

SEQ ID NO: 2876616 - DNA, 25 bp, Homo sapien
gaaggaacctcactctgatgtttgg

SEQ ID NO: 2876617 - DNA, 25 bp, Homo sapien
cacactgcttgtctccaccagaagg

SEQ ID NO: 2876618 - DNA, 25 bp, Homo sapien
gagaactgcgggatttgtcttcaga

SEQ ID NO: 2876619 - DNA, 25 bp, Homo sapien
tcaggagtgtggaaacccgtctggt

SEQ ID NO: 2876620 - DNA, 25 bp, Homo sapien
atgaaggggtttagcatagaggtca

SEQ ID NO: 2876621 - DNA, 25 bp, Homo sapien
gaaggggtttagcatagaggtcacc

SEQ ID NO: 2876622 - DNA, 25 bp, Homo sapien
cagtgtacatgatggttgctatggt

SEQ ID NO: 2876623 - DNA, 25 bp, Homo sapien
aggggtttagcatagaggtcaccac

SEQ ID NO: 2876624 - DNA, 25 bp, Homo sapien
ggacagttccatagaacagggtgac

SEQ ID NO: 2876625 - DNA, 25 bp, Homo sapien
aggacagttccatagaacagggtga

SEQ ID NO: 2876626 - DNA, 25 bp, Homo sapien
ccaggacagttccatagaacagggt

SEQ ID NO: 2876627 - DNA, 25 bp, Homo sapien
caggacagttccatagaacagggtg

SEQ ID NO: 2876628 - DNA, 25 bp, Homo sapien
gaatccggaggatggctgcagcaat

SEQ ID NO: 2876629 - DNA, 25 bp, Homo sapien
aatccggaggatggctgcagcaatg

SEQ ID NO: 2876630 - DNA, 25 bp, Homo sapien
catgccttgcgccttcttgtaggag

SEQ ID NO: 2876631 - DNA, 25 bp, Homo sapien
gtgggagctacatatggaacatgcc

SEQ ID NO: 2876632 - DNA, 25 bp, Homo sapien
cttcatgagcaggtaggcgtcacgg

SEQ ID NO: 2876633 - DNA, 25 bp, Homo sapien
taggcgtcacggtagaagtgtgaaa

SEQ ID NO: 2876634 - DNA, 25 bp, Homo sapien
tcatgatgaccgtgtggaccaggga

SEQ ID NO: 2876635 - DNA, 25 bp, Homo sapien
gaagtgtgaaatctgggcggaggag

SEQ ID NO: 2876636 - DNA, 25 bp, Homo sapien
gccgggggtgatgatggagcagtac

SEQ ID NO: 2876637 - DNA, 25 bp, Homo sapien
gagccgggggtgatgatggagcagt

SEQ ID NO: 2876638 - DNA, 25 bp, Homo sapien
agagccgggggtgatgatggagcag

SEQ ID NO: 2876639 - DNA, 25 bp, Homo sapien
agccgggggtgatgatggagcagta

SEQ ID NO: 2876640 - DNA, 25 bp, Homo sapien
cacatagtggtccagtgccatgatg

SEQ ID NO: 2876641 - DNA, 25 bp, Homo sapien
tggccagcagaaaggtgtccacgtt

SEQ ID NO: 2876642 - DNA, 25 bp, Homo sapien
tgccatgatggccagcagaaaggtg

SEQ ID NO: 2876643 - DNA, 25 bp, Homo sapien
aaaggtgtccacgttggcaaaggag

SEQ ID NO: 2876644 - DNA, 25 bp, Homo sapien
tcaggttggtgatgaagcagatgtt

SEQ ID NO: 2876645 - DNA, 25 bp, Homo sapien
gactaagtgcatacacaggaagagc

SEQ ID NO: 2876646 - DNA, 25 bp, Homo sapien
ggaactcgccaactcctgtctcatt

SEQ ID NO: 2876647 - DNA, 25 bp, Homo sapien
tggtgatgaagcagatgttgacaaa

SEQ ID NO: 2876648 - DNA, 25 bp, Homo sapien
ccactacagctcagggaggtagcag

SEQ ID NO: 2876649 - DNA, 25 bp, Homo sapien
cactacagctcagggaggtagcagg

SEQ ID NO: 2876650 - DNA, 25 bp, Homo sapien
ggatgacccatagtgcccctaaagg

SEQ ID NO: 2876651 - DNA, 25 bp, Homo sapien
gttcccataggcctgcttacagagt

SEQ ID NO: 2876652 - DNA, 25 bp, Homo sapien
gaaacatgcaggtatgagtggtcca

SEQ ID NO: 2876653 - DNA, 25 bp, Homo sapien
gctcttgctcaaaaacctggtggag

SEQ ID NO: 2876654 - DNA, 25 bp, Homo sapien
agggccgctcgttgtcttcccctga

SEQ ID NO: 2876655 - DNA, 25 bp, Homo sapien
tgggaagggccgctcgttgtcttcc

SEQ ID NO: 2876656 - DNA, 25 bp, Homo sapien
gtctttagagacacatgatgggggt

SEQ ID NO: 2876657 - DNA, 25 bp, Homo sapien
caggaggtctttgtcccgaagtcag

SEQ ID NO: 2876658 - DNA, 25 bp, Homo sapien
tctaattatcttccagttgttctgc

SEQ ID NO: 2876659 - DNA, 25 bp, Homo sapien
attctaattatcttccagttgttct

SEQ ID NO: 2876660 - DNA, 25 bp, Homo sapien
taattatcttccagttgttctgctt

SEQ ID NO: 2876661 - DNA, 25 bp, Homo sapien
gataattctaattatcttccagttg

SEQ ID NO: 2876662 - DNA, 25 bp, Homo sapien
tacccatatgttgaggctttgccag

SEQ ID NO: 2876663 - DNA, 25 bp, Homo sapien
tgaatgaccctgaagtccccaagac

SEQ ID NO: 2876664 - DNA, 25 bp, Homo sapien
tatggcctgattctgccttgaatga

SEQ ID NO: 2876665 - DNA, 25 bp, Homo sapien
caaaggacttatacttcaagactcc

SEQ ID NO: 2876666 - DNA, 25 bp, Homo sapien
aaatttcttagtttgattttgatca

SEQ ID NO: 2876667 - DNA, 25 bp, Homo sapien
aatttcttagtttgattttgatcag

SEQ ID NO: 2876668 - DNA, 25 bp, Homo sapien
atttcttagtttgattttgatcagc

SEQ ID NO: 2876669 - DNA, 25 bp, Homo sapien
ttcttagtttgattttgatcagctc

SEQ ID NO: 2876670 - DNA, 25 bp, Homo sapien
gagttaactcgcgtggactctgcag

SEQ ID NO: 2876671 - DNA, 25 bp, Homo sapien
ctctgcagtgcgagtagtgacccca

SEQ ID NO: 2876672 - DNA, 25 bp, Homo sapien
ttctctcggagttggtgggcaccct

SEQ ID NO: 2876673 - DNA, 25 bp, Homo sapien
aaattgtaaacgtctctggtcaggc

SEQ ID NO: 2876674 - DNA, 25 bp, Homo sapien
agtgtcctggacgtgaagatggtca

SEQ ID NO: 2876675 - DNA, 25 bp, Homo sapien
gaggtgagtgcaggacaggggacag

SEQ ID NO: 2876676 - DNA, 25 bp, Homo sapien
cgtcagtgtcctggacgtgaagatg

SEQ ID NO: 2876677 - DNA, 25 bp, Homo sapien
tgggggggcgttgctgcagcttgga

SEQ ID NO: 2876678 - DNA, 25 bp, Homo sapien
ttctttgtgggaaagatgtcacact

SEQ ID NO: 2876679 - DNA, 25 bp, Homo sapien
gacagagaagctttagcttggagac

SEQ ID NO: 2876680 - DNA, 25 bp, Homo sapien
gatgtcacactgctgatgggcagaa

SEQ ID NO: 2876681 - DNA, 25 bp, Homo sapien
ctggttctttgtgggaaagatgtca

SEQ ID NO: 2876682 - DNA, 25 bp, Homo sapien
tggatctcttcccaccgactttaat

SEQ ID NO: 2876683 - DNA, 25 bp, Homo sapien
ctttaattttattcagcgtgcttat

SEQ ID NO: 2876684 - DNA, 25 bp, Homo sapien
taattttattcagcgtgcttatcat

SEQ ID NO: 2876685 - DNA, 25 bp, Homo sapien
tgttaatgtagcctccctttgcccc

SEQ ID NO: 2876686 - DNA, 25 bp, Homo sapien
agcctgtgcctgtttggatgtcaga

SEQ ID NO: 2876687 - DNA, 25 bp, Homo sapien
gggtgggaagcctgtgcctgtttgg

SEQ ID NO: 2876688 - DNA, 25 bp, Homo sapien
gtgcctgtttggatgtcagagccca

SEQ ID NO: 2876689 - DNA, 25 bp, Homo sapien
ggtgggaagcctgtgcctgtttgga

SEQ ID NO: 2876690 - DNA, 25 bp, Homo sapien
cttcagaggaggtggctttggaatt

SEQ ID NO: 2876691 - DNA, 25 bp, Homo sapien
aggtcctgatgtgggtgaaagcact

SEQ ID NO: 2876692 - DNA, 25 bp, Homo sapien
catggaggtcctgatgtgggtgaaa

SEQ ID NO: 2876693 - DNA, 25 bp, Homo sapien
gaaagcacttttggactggggtgca

SEQ ID NO: 2876694 - DNA, 25 bp, Homo sapien
tggagaagttgacaggataactgca

SEQ ID NO: 2876695 - DNA, 25 bp, Homo sapien
gagaagttgacaggataactgcaat

SEQ ID NO: 2876696 - DNA, 25 bp, Homo sapien
tgacaggataactgcaatcctaggg

SEQ ID NO: 2876697 - DNA, 25 bp, Homo sapien
gataactgcaatcctaggggcatct

SEQ ID NO: 2876698 - DNA, 25 bp, Homo sapien
tgaattgttcgattttaacgtccgc

SEQ ID NO: 2876699 - DNA, 25 bp, Homo sapien
gagtgctccacccaatgatccgtga

SEQ ID NO: 2876700 - DNA, 25 bp, Homo sapien
taacgtccgcctggtgtcagtaagc

SEQ ID NO: 2876701 - DNA, 25 bp, Homo sapien
tgtgtgagtgcgagatactactgct

SEQ ID NO: 2876702 - DNA, 25 bp, Homo sapien
tacaggcagtgaggcgctggaatcc

SEQ ID NO: 2876703 - DNA, 25 bp, Homo sapien
cactcatcaggcaagacaggtctgt

SEQ ID NO: 2876704 - DNA, 25 bp, Homo sapien
tggcggatgcccaaacactcatcag

SEQ ID NO: 2876705 - DNA, 25 bp, Homo sapien
gtagtgaaggactttggtgatgccc

SEQ ID NO: 2876706 - DNA, 25 bp, Homo sapien
gggacagtatccatgggtctcactt

SEQ ID NO: 2876707 - DNA, 25 bp, Homo sapien
tgggacagtatccatgggtctcact

SEQ ID NO: 2876708 - DNA, 25 bp, Homo sapien
gacagtatccatgggtctcactttt

SEQ ID NO: 2876709 - DNA, 25 bp, Homo sapien
ctgggacagtatccatgggtctcac

SEQ ID NO: 2876710 - DNA, 25 bp, Homo sapien
acattggcatcgatgtggcactggg

SEQ ID NO: 2876711 - DNA, 25 bp, Homo sapien
tcacattggcatcgatgtggcactg

SEQ ID NO: 2876712 - DNA, 25 bp, Homo sapien
tctcacattggcatcgatgtggcac

SEQ ID NO: 2876713 - DNA, 25 bp, Homo sapien
gatagaaaggtggatgggacaccat

SEQ ID NO: 2876714 - DNA, 25 bp, Homo sapien
aggcatggggcggtcgggcttagcg

SEQ ID NO: 2876715 - DNA, 25 bp, Homo sapien
gggcaggcatggggcggtcgggctt

SEQ ID NO: 2876716 - DNA, 25 bp, Homo sapien
ggggcggtcgggcttagcgccgcac

SEQ ID NO: 2876717 - DNA, 25 bp, Homo sapien
catggggcggtcgggcttagcgccg

SEQ ID NO: 2876718 - DNA, 25 bp, Homo sapien
gatggcaaagacgacatccggtgcg

SEQ ID NO: 2876719 - DNA, 25 bp, Homo sapien
gagccgagctttgagaagcaccttt

SEQ ID NO: 2876720 - DNA, 25 bp, Homo sapien
ccagtgcaaaggtggcccagagtgc

SEQ ID NO: 2876721 - DNA, 25 bp, Homo sapien
atccggtgcgccgaggctgctcaca

SEQ ID NO: 2876722 - DNA, 25 bp, Homo sapien
gcccgcgagcagcggggctggtgcc

SEQ ID NO: 2876723 - DNA, 25 bp, Homo sapien
cgcgagcagcggggctggtgcccag

SEQ ID NO: 2876724 - DNA, 25 bp, Homo sapien
ctgacaggagcaggcgcccgcgagc

SEQ ID NO: 2876725 - DNA, 25 bp, Homo sapien
gagcagcggggctggtgcccagaac

SEQ ID NO: 2876726 - DNA, 25 bp, Homo sapien
agtgggagttcccagcgtggttgtc

SEQ ID NO: 2876727 - DNA, 25 bp, Homo sapien
ccagcgtggttgtcccaagcaccaa

SEQ ID NO: 2876728 - DNA, 25 bp, Homo sapien
gcgtggttgtcccaagcaccaaagc

SEQ ID NO: 2876729 - DNA, 25 bp, Homo sapien
tggttgtcccaagcaccaaagccgg

SEQ ID NO: 2876730 - DNA, 25 bp, Homo sapien
tcagggacaacacttatgggtgcaa

SEQ ID NO: 2876731 - DNA, 25 bp, Homo sapien
gaggtcagggacaacacttatgggt

SEQ ID NO: 2876732 - DNA, 25 bp, Homo sapien
caacacttatgggtgcaagttttgg

SEQ ID NO: 2876733 - DNA, 25 bp, Homo sapien
tgggaggtcagggacaacacttatg

SEQ ID NO: 2876734 - DNA, 25 bp, Homo sapien
gggcgaaggagacatccggtgctgc

SEQ ID NO: 2876735 - DNA, 25 bp, Homo sapien
gggccagcgcgaaggtggccccgtg

SEQ ID NO: 2876736 - DNA, 25 bp, Homo sapien
cagagccgccggtcagaaccaccgt

SEQ ID NO: 2876737 - DNA, 25 bp, Homo sapien
tttctgcgcgaccccggtgcgcagg

SEQ ID NO: 2876738 - DNA, 25 bp, Homo sapien
gggcagggcgggtggcccgggcatc

SEQ ID NO: 2876739 - DNA, 25 bp, Homo sapien
gggtggcccgggcatcaaaaggcat

SEQ ID NO: 2876740 - DNA, 25 bp, Homo sapien
gtgcgggttttgggactgggtgtca

SEQ ID NO: 2876741 - DNA, 25 bp, Homo sapien
tttgggactgggtgtcagaggacag

SEQ ID NO: 2876742 - DNA, 25 bp, Homo sapien
agtccgtccgcctgtggacagcagc

SEQ ID NO: 2876743 - DNA, 25 bp, Homo sapien
gagtccgtccgcctgtggacagcag

SEQ ID NO: 2876744 - DNA, 25 bp, Homo sapien
gtccgtccgcctgtggacagcagct

SEQ ID NO: 2876745 - DNA, 25 bp, Homo sapien
agagtccgtccgcctgtggacagca

SEQ ID NO: 2876746 - DNA, 25 bp, Homo sapien
tggaattatcccagcaacagccgtc

SEQ ID NO: 2876747 - DNA, 25 bp, Homo sapien
tgaaagctagttcataaccacgctg

SEQ ID NO: 2876748 - DNA, 25 bp, Homo sapien
tgaagctttaaagcctcctggagtg

SEQ ID NO: 2876749 - DNA, 25 bp, Homo sapien
tgtttggagcgaagaaaactacctg

SEQ ID NO: 2876750 - DNA, 25 bp, Homo sapien
tcagtgtttccctcggtcctgagga

SEQ ID NO: 2876751 - DNA, 25 bp, Homo sapien
ctcagtgtttccctcggtcctgagg

SEQ ID NO: 2876752 - DNA, 25 bp, Homo sapien
gtttccctcggtcctgaggatgctc

SEQ ID NO: 2876753 - DNA, 25 bp, Homo sapien
ctcagtgttttcctcggtcctgggg

SEQ ID NO: 2876754 - DNA, 25 bp, Homo sapien
tatagctcccccatcacctttcccg

SEQ ID NO: 2876755 - DNA, 25 bp, Homo sapien
ttatagctcccccatcacctttccc

SEQ ID NO: 2876756 - DNA, 25 bp, Homo sapien
tagctcccccatcacctttcccgga

SEQ ID NO: 2876757 - DNA, 25 bp, Homo sapien
atagctcccccatcacctttcccgg

SEQ ID NO: 2876758 - DNA, 25 bp, Homo sapien
aaacttttcaccaattctgacatct

SEQ ID NO: 2876759 - DNA, 25 bp, Homo sapien
tgcgacctcacctccggtcactgga

SEQ ID NO: 2876760 - DNA, 25 bp, Homo sapien
aattctgacatctaaacaactaacg

SEQ ID NO: 2876761 - DNA, 25 bp, Homo sapien
acaactaacgccagagacaggctct

SEQ ID NO: 2876762 - DNA, 25 bp, Homo sapien
ggcgatgcaggcagactcatctgta

SEQ ID NO: 2876763 - DNA, 25 bp, Homo sapien
gatgcaggcagactcatctgtaccc

SEQ ID NO: 2876764 - DNA, 25 bp, Homo sapien
gcaggcagactcatctgtaccctca

SEQ ID NO: 2876765 - DNA, 25 bp, Homo sapien
tggcgatgcaggcagactcatctgt

SEQ ID NO: 2876766 - DNA, 25 bp, Homo sapien
atgccgggagccatggagattgtcc

SEQ ID NO: 2876767 - DNA, 25 bp, Homo sapien
ggagattgtcctcatcccgatcatc

SEQ ID NO: 2876768 - DNA, 25 bp, Homo sapien
gctgggcccacgatggcatcaggcc

SEQ ID NO: 2876769 - DNA, 25 bp, Homo sapien
gaagggatcagatgccgggagccat

SEQ ID NO: 2876770 - DNA, 25 bp, Homo sapien
actatgagccgtgccttgttgacag

SEQ ID NO: 2876771 - DNA, 25 bp, Homo sapien
ctgaaggctctcgactatgagccgt

SEQ ID NO: 2876772 - DNA, 25 bp, Homo sapien
cgactatgagccgtgccttgttgac

SEQ ID NO: 2876773 - DNA, 25 bp, Homo sapien
gctctcgactatgagccgtgccttg

SEQ ID NO: 2876774 - DNA, 25 bp, Homo sapien
gctccgggttgaaaggcacccacag

SEQ ID NO: 2876775 - DNA, 25 bp, Homo sapien
cctcaccatcggctccgggttgaaa

SEQ ID NO: 2876776 - DNA, 25 bp, Homo sapien
tcctgtcccgtcctcaccatcggct

SEQ ID NO: 2876777 - DNA, 25 bp, Homo sapien
catcggctccgggttgaaaggcacc

SEQ ID NO: 2876778 - DNA, 25 bp, Homo sapien
cccaggattttagcagatacacaag

SEQ ID NO: 2876779 - DNA, 25 bp, Homo sapien
ataaaatctgtacgtacttgggaat

SEQ ID NO: 2876780 - DNA, 25 bp, Homo sapien
tagagacgaggtttagcgtgtctat

SEQ ID NO: 2876781 - DNA, 25 bp, Homo sapien
tagcgtgtctatgtgacaccccagg

SEQ ID NO: 2876782 - DNA, 25 bp, Homo sapien
ttatcatctgtcctcaatggtgcca

SEQ ID NO: 2876783 - DNA, 25 bp, Homo sapien
tgattatcatctgtcctcaatggtg

SEQ ID NO: 2876784 - DNA, 25 bp, Homo sapien
gattatcatctgtcctcaatggtgc

SEQ ID NO: 2876785 - DNA, 25 bp, Homo sapien
cctcaatggtgccaatgctgactca

SEQ ID NO: 2876786 - DNA, 25 bp, Homo sapien
gccatggctgacattgaggaaggag

SEQ ID NO: 2876787 - DNA, 25 bp, Homo sapien
ccatggctgacattgaggaaggagc

SEQ ID NO: 2876788 - DNA, 25 bp, Homo sapien
atggctgacattgaggaaggagctg

SEQ ID NO: 2876789 - DNA, 25 bp, Homo sapien
gaaacttggcagattgcgcacttca

SEQ ID NO: 2876790 - DNA, 25 bp, Homo sapien
gaatcagtttcaaagcctaggcaga

SEQ ID NO: 2876791 - DNA, 25 bp, Homo sapien
tcagggccagtgctaagtcccaggg

SEQ ID NO: 2876792 - DNA, 25 bp, Homo sapien
gagaggctcccttcggtgctggaaa

SEQ ID NO: 2876793 - DNA, 25 bp, Homo sapien
agagtggctagccgcccagtcggac

SEQ ID NO: 2876794 - DNA, 25 bp, Homo sapien
aagtggggcagagtggctagccgcc

SEQ ID NO: 2876795 - DNA, 25 bp, Homo sapien
gagaacaaggggtggagagaagtgg

SEQ ID NO: 2876796 - DNA, 25 bp, Homo sapien
ttagagaggagaacaaggggtggag

SEQ ID NO: 2876797 - DNA, 25 bp, Homo sapien
gcaggttttaatcccaacagcagtg

SEQ ID NO: 2876798 - DNA, 25 bp, Homo sapien
caagcacaagttgaagcggatggat

SEQ ID NO: 2876799 - DNA, 25 bp, Homo sapien
ggtcacacttgagaaacatgggcag

SEQ ID NO: 2876800 - DNA, 25 bp, Homo sapien
gcctcatggactctggtggccactt

SEQ ID NO: 2876801 - DNA, 25 bp, Homo sapien
gaggaatggagtataggaactcccg

SEQ ID NO: 2876802 - DNA, 25 bp, Homo sapien
aggaggaatggagtataggaactcc

SEQ ID NO: 2876803 - DNA, 25 bp, Homo sapien
aggaatggagtataggaactcccgg

SEQ ID NO: 2876804 - DNA, 25 bp, Homo sapien
tgaggaggaatggagtataggaact

SEQ ID NO: 2876805 - DNA, 25 bp, Homo sapien
tgccattacggcagtaaggcgctcc

SEQ ID NO: 2876806 - DNA, 25 bp, Homo sapien
gctgcttgtagggtgccattacggc

SEQ ID NO: 2876807 - DNA, 25 bp, Homo sapien
attacggcagtaaggcgctccctgg

SEQ ID NO: 2876808 - DNA, 25 bp, Homo sapien
tagggtgccattacggcagtaaggc

SEQ ID NO: 2876809 - DNA, 25 bp, Homo sapien
agcaggtccctttgcatcccgcggg

SEQ ID NO: 2876810 - DNA, 25 bp, Homo sapien
ttcgctgggccgacggcgcggagat

SEQ ID NO: 2876811 - DNA, 25 bp, Homo sapien
gggccgccaggtgcaattttcgctg

SEQ ID NO: 2876812 - DNA, 25 bp, Homo sapien
agctcgtcccacgacggagcaggtc

SEQ ID NO: 2876813 - DNA, 25 bp, Homo sapien
tcttgtcttttcacgagggccgcag

SEQ ID NO: 2876814 - DNA, 25 bp, Homo sapien
taaatttctaatcgctgagctgacc

SEQ ID NO: 2876815 - DNA, 25 bp, Homo sapien
tcacccatagatggaaaggaagcca

SEQ ID NO: 2876816 - DNA, 25 bp, Homo sapien
tcgtgatctcaattaatgaaggccc

SEQ ID NO: 2876817 - DNA, 25 bp, Homo sapien
ggcagggcagatggccggcaggggc

SEQ ID NO: 2876818 - DNA, 25 bp, Homo sapien
cggcaggggctgggtgcaaggtagg

SEQ ID NO: 2876819 - DNA, 25 bp, Homo sapien
cagggcagatggccggcaggggctg

SEQ ID NO: 2876820 - DNA, 25 bp, Homo sapien
caggggctgggtgcaaggtagggta

SEQ ID NO: 2876821 - DNA, 25 bp, Homo sapien
ccgttgcttagctctgcggttctgg

SEQ ID NO: 2876822 - DNA, 25 bp, Homo sapien
ggtggtggtgctgcgtaagaatagg

SEQ ID NO: 2876823 - DNA, 25 bp, Homo sapien
caaaggcgcctcctgtggagggctg

SEQ ID NO: 2876824 - DNA, 25 bp, Homo sapien
agaggctgaagcagtgagcgctctt

SEQ ID NO: 2876825 - DNA, 25 bp, Homo sapien
gcaagactctctcgggcccagatgt

SEQ ID NO: 2876826 - DNA, 25 bp, Homo sapien
gcctcactgaggccagtgtcccggg

SEQ ID NO: 2876827 - DNA, 25 bp, Homo sapien
gatgtcggggtactggttcctccca

SEQ ID NO: 2876828 - DNA, 25 bp, Homo sapien
cagtgtcccgggcaagactctctcg

SEQ ID NO: 2876829 - DNA, 25 bp, Homo sapien
gggctgaaggtggtgcggtggcggc

SEQ ID NO: 2876830 - DNA, 25 bp, Homo sapien
tgggctgaaggtggtgcggtggcgg

SEQ ID NO: 2876831 - DNA, 25 bp, Homo sapien
cctccttgcggggagaaccttgatc

SEQ ID NO: 2876832 - DNA, 25 bp, Homo sapien
tgtcctccttgcggggagaaccttg

SEQ ID NO: 2876833 - DNA, 25 bp, Homo sapien
gagaaccttgatctcccccctcctg

SEQ ID NO: 2876834 - DNA, 25 bp, Homo sapien
ccttgcggggagaaccttgatctcc

SEQ ID NO: 2876835 - DNA, 25 bp, Homo sapien
aggcaacaggttgctgccgactcgc

SEQ ID NO: 2876836 - DNA, 25 bp, Homo sapien
gtcccagtggccgggtgtctctcag

SEQ ID NO: 2876837 - DNA, 25 bp, Homo sapien
caccgtggtggtcggggtcccagtg

SEQ ID NO: 2876838 - DNA, 25 bp, Homo sapien
tctcaggcaacaggttgctgccgac

SEQ ID NO: 2876839 - DNA, 25 bp, Homo sapien
cggggaccaagtgtccctgaatctc

SEQ ID NO: 2876840 - DNA, 25 bp, Homo sapien
gccacggggaccaagtgtccctgaa

SEQ ID NO: 2876841 - DNA, 25 bp, Homo sapien
tcgccacggggaccaagtgtccctg

SEQ ID NO: 2876842 - DNA, 25 bp, Homo sapien
accaagtgtccctgaatctctgact

SEQ ID NO: 2876843 - DNA, 25 bp, Homo sapien
ggccaagggctcgtattcccagagg

SEQ ID NO: 2876844 - DNA, 25 bp, Homo sapien
gaaggtgttctgtcggagggtccag

SEQ ID NO: 2876845 - DNA, 25 bp, Homo sapien
gatcacaagccggatgagggaaggt

SEQ ID NO: 2876846 - DNA, 25 bp, Homo sapien
ttggaggagtgacctcctcctcgcc

SEQ ID NO: 2876847 - DNA, 25 bp, Homo sapien
ggaggagaaaatgcattcctcccga

SEQ ID NO: 2876848 - DNA, 25 bp, Homo sapien
agaaaatgcattcctcccgagaccc

SEQ ID NO: 2876849 - DNA, 25 bp, Homo sapien
gaggagaaaatgcattcctcccgag

SEQ ID NO: 2876850 - DNA, 25 bp, Homo sapien
ggagaaaatgcattcctcccgagac

SEQ ID NO: 2876851 - DNA, 25 bp, Homo sapien
tgccaggacaccttcacttctgcca

SEQ ID NO: 2876852 - DNA, 25 bp, Homo sapien
ccctctgtagaatacacatcccaga

SEQ ID NO: 2876853 - DNA, 25 bp, Homo sapien
ctgccaggacaccttcacttctgcc

SEQ ID NO: 2876854 - DNA, 25 bp, Homo sapien
cagagcgggcttctgttacacacta

SEQ ID NO: 2876855 - DNA, 25 bp, Homo sapien
ctggctgcccagctacagactagat

SEQ ID NO: 2876856 - DNA, 25 bp, Homo sapien
cactttaacagaaccatcccttgag

SEQ ID NO: 2876857 - DNA, 25 bp, Homo sapien
cgcgcctggcaagggactttggtct

SEQ ID NO: 2876858 - DNA, 25 bp, Homo sapien
gaagagctgcgattgaacaaacctg

SEQ ID NO: 2876859 - DNA, 25 bp, Homo sapien
agcgatgcacttgaccctgaggaca

SEQ ID NO: 2876860 - DNA, 25 bp, Homo sapien
gaactggcccagcaactaagattgt

SEQ ID NO: 2876861 - DNA, 25 bp, Homo sapien
cattcctaaattgcctccccggtgg

SEQ ID NO: 2876862 - DNA, 25 bp, Homo sapien
gacaatacagggcaatgggtaggat

SEQ ID NO: 2876863 - DNA, 25 bp, Homo sapien
caatgggtaggatgaccagacattt

SEQ ID NO: 2876864 - DNA, 25 bp, Homo sapien
gacagctgacaatacagggcaatgg

SEQ ID NO: 2876865 - DNA, 25 bp, Homo sapien
tgggtaggatgaccagacatttgaa

SEQ ID NO: 2876866 - DNA, 25 bp, Homo sapien
ttccaaatacatcaaccttcctgaa

SEQ ID NO: 2876867 - DNA, 25 bp, Homo sapien
tccaaatacatcaaccttcctgaag

SEQ ID NO: 2876868 - DNA, 25 bp, Homo sapien
tttaggaccattgcctcaaccactg

SEQ ID NO: 2876869 - DNA, 25 bp, Homo sapien
tcagatggcattcttagatgacacc

SEQ ID NO: 2876870 - DNA, 25 bp, Homo sapien
gaagtgtcttcgaggctttaggacc

SEQ ID NO: 2876871 - DNA, 25 bp, Homo sapien
ttaccaggtaagaaatgatctcaga

SEQ ID NO: 2876872 - DNA, 25 bp, Homo sapien
ataacaatgacgtgctccaggaagc

SEQ ID NO: 2876873 - DNA, 25 bp, Homo sapien
caatgacgtgctccaggaagctatg

SEQ ID NO: 2876874 - DNA, 25 bp, Homo sapien
ggcaataacaatgacgtgctccagg

SEQ ID NO: 2876875 - DNA, 25 bp, Homo sapien
caataacaatgacgtgctccaggaa

SEQ ID NO: 2876876 - DNA, 25 bp, Homo sapien
ggccataggtgagcagaagggtaca

SEQ ID NO: 2876877 - DNA, 25 bp, Homo sapien
caggcacgtggccataggtgagcag

SEQ ID NO: 2876878 - DNA, 25 bp, Homo sapien
cgtggccataggtgagcagaagggt

SEQ ID NO: 2876879 - DNA, 25 bp, Homo sapien
ggcacgtggccataggtgagcagaa

SEQ ID NO: 2876880 - DNA, 25 bp, Homo sapien
agatgggacccaccagcaagagggc

SEQ ID NO: 2876881 - DNA, 25 bp, Homo sapien
gttggaggtggcagctacctctgtg

SEQ ID NO: 2876882 - DNA, 25 bp, Homo sapien
catacgtagccccctttggatctca

SEQ ID NO: 2876883 - DNA, 25 bp, Homo sapien
ccaccagcaagagggccctgtgttg

SEQ ID NO: 2876884 - DNA, 25 bp, Homo sapien
taaaagatgccaaagtggctgggcg

SEQ ID NO: 2876885 - DNA, 25 bp, Homo sapien
aaaatatagtatacaagggctcggc

SEQ ID NO: 2876886 - DNA, 25 bp, Homo sapien
tcggaacatacaccccgcagataag

SEQ ID NO: 2876887 - DNA, 25 bp, Homo sapien
agggctcggcattatctgtggtttc

SEQ ID NO: 2876888 - DNA, 25 bp, Homo sapien
tttaggccagtgtttactgagagac

SEQ ID NO: 2876889 - DNA, 25 bp, Homo sapien
gacctcttgctagaaaagtgacatc

SEQ ID NO: 2876890 - DNA, 25 bp, Homo sapien
cagacgttcctgagaggagacttcc

SEQ ID NO: 2876891 - DNA, 25 bp, Homo sapien
gcatccaccagcttgtaatcacttg

SEQ ID NO: 2876892 - DNA, 25 bp, Homo sapien
caatagcacaaaggcaaaagttgta

SEQ ID NO: 2876893 - DNA, 25 bp, Homo sapien
agctttgcattccagcaatagcaca

SEQ ID NO: 2876894 - DNA, 25 bp, Homo sapien
caaaagttgtatttggtcggaggct

SEQ ID NO: 2876895 - DNA, 25 bp, Homo sapien
ttggtcggaggctacatataaggga

SEQ ID NO: 2876896 - DNA, 25 bp, Homo sapien
ccagagcttgccatggcccagaagt

SEQ ID NO: 2876897 - DNA, 25 bp, Homo sapien
gctgtcagaatagccgtgcttcaga

SEQ ID NO: 2876898 - DNA, 25 bp, Homo sapien
gctgctgccgagctaaggctctgaa

SEQ ID NO: 2876899 - DNA, 25 bp, Homo sapien
caagtgatgagcaccaagaccaggg

SEQ ID NO: 2876900 - DNA, 25 bp, Homo sapien
tgtcatgctgggtggccactcgagt

SEQ ID NO: 2876901 - DNA, 25 bp, Homo sapien
gggaggctgcctgtcatgctgggtg

SEQ ID NO: 2876902 - DNA, 25 bp, Homo sapien
gctgcctgtcatgctgggtggccac

SEQ ID NO: 2876903 - DNA, 25 bp, Homo sapien
gggtggccactcgagttctccattc

SEQ ID NO: 2876904 - DNA, 25 bp, Homo sapien
tggagtccggactccgtctggttga

SEQ ID NO: 2876905 - DNA, 25 bp, Homo sapien
cttctcgttattgccacgtggtgga

SEQ ID NO: 2876906 - DNA, 25 bp, Homo sapien
gacgtctgtgagcaacaccaggaca

SEQ ID NO: 2876907 - DNA, 25 bp, Homo sapien
acaaacctcgttctgtccaactgtg

SEQ ID NO: 2876908 - DNA, 25 bp, Homo sapien
gagtgggctgcattgttcaggtggg

SEQ ID NO: 2876909 - DNA, 25 bp, Homo sapien
agggagtgggctgcattgttcaggt

SEQ ID NO: 2876910 - DNA, 25 bp, Homo sapien
acagggagtgggctgcattgttcag

SEQ ID NO: 2876911 - DNA, 25 bp, Homo sapien
ggagtgggctgcattgttcaggtgg

SEQ ID NO: 2876912 - DNA, 25 bp, Homo sapien
ctggagatgaggaggtaggcgggcg

SEQ ID NO: 2876913 - DNA, 25 bp, Homo sapien
aaagaggcggttgaatcacctgcag

SEQ ID NO: 2876914 - DNA, 25 bp, Homo sapien
catcctgcacaaaagaggcggttga

SEQ ID NO: 2876915 - DNA, 25 bp, Homo sapien
gaaacccagactggcggtcatcctg

SEQ ID NO: 2876916 - DNA, 25 bp, Homo sapien
gccacagcctttggcccaagtgagg

SEQ ID NO: 2876917 - DNA, 25 bp, Homo sapien
tgcagctgcgggtctgcgggtaggg

SEQ ID NO: 2876918 - DNA, 25 bp, Homo sapien
gggacattcctaggtcttgaccgcc

SEQ ID NO: 2876919 - DNA, 25 bp, Homo sapien
ggtcttgaccgccagagcacccggt

SEQ ID NO: 2876920 - DNA, 25 bp, Homo sapien
cccacgaggctattgtggagatgaa

SEQ ID NO: 2876921 - DNA, 25 bp, Homo sapien
gtttgcccccacgaggctattgtgg

SEQ ID NO: 2876922 - DNA, 25 bp, Homo sapien
aatggcgtgagggtaattactgtcc

SEQ ID NO: 2876923 - DNA, 25 bp, Homo sapien
gagggtaattactgtcctgtttgcc

SEQ ID NO: 2876924 - DNA, 25 bp, Homo sapien
ggtggctacctctagctcagggact

SEQ ID NO: 2876925 - DNA, 25 bp, Homo sapien
tgtttgctgctggacgtgaccgtct

SEQ ID NO: 2876926 - DNA, 25 bp, Homo sapien
tctgcaccgtgtcctctaacatggg

SEQ ID NO: 2876927 - DNA, 25 bp, Homo sapien
tcggttatctcctcgagacaggaag

SEQ ID NO: 2876928 - DNA, 25 bp, Homo sapien
ggtgaggtgggcgtatttggcactg

SEQ ID NO: 2876929 - DNA, 25 bp, Homo sapien
ttggggtgaggtgggcgtatttggc

SEQ ID NO: 2876930 - DNA, 25 bp, Homo sapien
ctgaggcggtgtgcatttggggtga

SEQ ID NO: 2876931 - DNA, 25 bp, Homo sapien
gaggcggtgtgcatttggggtgagg

SEQ ID NO: 2876932 - DNA, 25 bp, Homo sapien
catctcctatgtagcctgcaacgtg

SEQ ID NO: 2876933 - DNA, 25 bp, Homo sapien
tggggtgtgcaaacccggattcgcc

SEQ ID NO: 2876934 - DNA, 25 bp, Homo sapien
ctggatgcatctcctatgtagcctg

SEQ ID NO: 2876935 - DNA, 25 bp, Homo sapien
cctatgtagcctgcaacgtgcgttc

SEQ ID NO: 2876936 - DNA, 25 bp, Homo sapien
tttggctaccctggccgtgcctggc

SEQ ID NO: 2876937 - DNA, 25 bp, Homo sapien
tgagaagttatctgcagagagcccc

SEQ ID NO: 2876938 - DNA, 25 bp, Homo sapien
acctcactccctttggctaccctgg

SEQ ID NO: 2876939 - DNA, 25 bp, Homo sapien
ctgagaagttatctgcagagagccc

SEQ ID NO: 2876940 - DNA, 25 bp, Homo sapien
ctgtgtcccagacagatcccctagg

SEQ ID NO: 2876941 - DNA, 25 bp, Homo sapien
ccagtctgtcttggcactggccagg

SEQ ID NO: 2876942 - DNA, 25 bp, Homo sapien
gaatgaggcgtgtgcactgtctgct

SEQ ID NO: 2876943 - DNA, 25 bp, Homo sapien
tgtgtttatggccatgtaagtggca

SEQ ID NO: 2876944 - DNA, 25 bp, Homo sapien
agacccatacaggcccacacctgag

SEQ ID NO: 2876945 - DNA, 25 bp, Homo sapien
atctgagacccatacaggcccacac

SEQ ID NO: 2876946 - DNA, 25 bp, Homo sapien
ctatctgagacccatacaggcccac

SEQ ID NO: 2876947 - DNA, 25 bp, Homo sapien
tgagacccatacaggcccacacctg

SEQ ID NO: 2876948 - DNA, 25 bp, Homo sapien
tggcaagcccttgtagccctctgag

SEQ ID NO: 2876949 - DNA, 25 bp, Homo sapien
ttggcaagcccttgtagccctctga

SEQ ID NO: 2876950 - DNA, 25 bp, Homo sapien
cttggcaagcccttgtagccctctg

SEQ ID NO: 2876951 - DNA, 25 bp, Homo sapien
ggcaagcccttgtagccctctgagc

SEQ ID NO: 2876952 - DNA, 25 bp, Homo sapien
tctgaatgttcgttcaccatccgtg

SEQ ID NO: 2876953 - DNA, 25 bp, Homo sapien
gctgccattcgttccagtgatgtat

SEQ ID NO: 2876954 - DNA, 25 bp, Homo sapien
cagctgccattcgttccagtgatgt

SEQ ID NO: 2876955 - DNA, 25 bp, Homo sapien
cgttcaccatccgtgggcaccaggt

SEQ ID NO: 2876956 - DNA, 25 bp, Homo sapien
gacggttcagatattgataacccat

SEQ ID NO: 2876957 - DNA, 25 bp, Homo sapien
gtttctgcaaagagggcgcaggccc

SEQ ID NO: 2876958 - DNA, 25 bp, Homo sapien
tttctgcaaagagggcgcaggccct

SEQ ID NO: 2876959 - DNA, 25 bp, Homo sapien
cgcaggccctgcagtgacggttcag

SEQ ID NO: 2876960 - DNA, 25 bp, Homo sapien
ccgcggcttccggttccgatgacag

SEQ ID NO: 2876961 - DNA, 25 bp, Homo sapien
gtgaggcgcaaagccgcgggctcgt

SEQ ID NO: 2876962 - DNA, 25 bp, Homo sapien
tccgcaaaaccgccaatgggcgggc

SEQ ID NO: 2876963 - DNA, 25 bp, Homo sapien
ctacaggcgcggcttttctggccgc

SEQ ID NO: 2876964 - DNA, 25 bp, Homo sapien
gagagaggggaagaatagggacaaa

SEQ ID NO: 2876965 - DNA, 25 bp, Homo sapien
aaaaggccctgcatggaccacttac

SEQ ID NO: 2876966 - DNA, 25 bp, Homo sapien
gaatagggacaaaagggaatacata

SEQ ID NO: 2876967 - DNA, 25 bp, Homo sapien
caaaggagaaaaggccctgcatgga

SEQ ID NO: 2876968 - DNA, 25 bp, Homo sapien
caggagtgttcatggtgggactaca

SEQ ID NO: 2876969 - DNA, 25 bp, Homo sapien
aactcaggagtgttcatggtgggac

SEQ ID NO: 2876970 - DNA, 25 bp, Homo sapien
agtgttcatggtgggactacatggt

SEQ ID NO: 2876971 - DNA, 25 bp, Homo sapien
ctcaggagtgttcatggtgggacta

SEQ ID NO: 2876972 - DNA, 25 bp, Homo sapien
gacacaagatgttgctttattgcat

SEQ ID NO: 2876973 - DNA, 25 bp, Homo sapien
ttgcagaacgtctctcaatttggag

SEQ ID NO: 2876974 - DNA, 25 bp, Homo sapien
gcccggctgttcaggaattttcata

SEQ ID NO: 2876975 - DNA, 25 bp, Homo sapien
agcattaaggccaattattttgcag

SEQ ID NO: 2876976 - DNA, 25 bp, Homo sapien
ggtcgctgctaaggttttccactgt

SEQ ID NO: 2876977 - DNA, 25 bp, Homo sapien
taatcactaagtagtttgtgggctg

SEQ ID NO: 2876978 - DNA, 25 bp, Homo sapien
acttagttaagatggtcgctgctaa

SEQ ID NO: 2876979 - DNA, 25 bp, Homo sapien
tgtaatcactaagtagtttgtgggc

SEQ ID NO: 2876980 - DNA, 25 bp, Homo sapien
tacagagttgtacaatcttcaccac

SEQ ID NO: 2876981 - DNA, 25 bp, Homo sapien
aaatacaggtattagccagtctcat

SEQ ID NO: 2876982 - DNA, 25 bp, Homo sapien
aagtccaactcagcggttttcagca

SEQ ID NO: 2876983 - DNA, 25 bp, Homo sapien
gaaacctaacccattgactgtctct

SEQ ID NO: 2876984 - DNA, 25 bp, Homo sapien
tatatccttcggagtggaactgctg

SEQ ID NO: 2876985 - DNA, 25 bp, Homo sapien
tagagctaaggtctgctgccaaggc

SEQ ID NO: 2876986 - DNA, 25 bp, Homo sapien
gatcaggtggtaactctaggtctaa

SEQ ID NO: 2876987 - DNA, 25 bp, Homo sapien
caaagatacggtgcagaaactggct

SEQ ID NO: 2876988 - DNA, 25 bp, Homo sapien
gatggacagaagactagcattacct

SEQ ID NO: 2876989 - DNA, 25 bp, Homo sapien
gaagatgccgtcagtgtgggtgggc

SEQ ID NO: 2876990 - DNA, 25 bp, Homo sapien
ggaacagcctttagttctacaggaa

SEQ ID NO: 2876991 - DNA, 25 bp, Homo sapien
ctagcattaccttcatgaaagggct

SEQ ID NO: 2876992 - DNA, 25 bp, Homo sapien
caggcactcatcgtaagcctcctgg

SEQ ID NO: 2876993 - DNA, 25 bp, Homo sapien
cactcatcgtaagcctcctggtact

SEQ ID NO: 2876994 - DNA, 25 bp, Homo sapien
ggcactcatcgtaagcctcctggta

SEQ ID NO: 2876995 - DNA, 25 bp, Homo sapien
tcctccaggcactcatcgtaagcct

SEQ ID NO: 2876996 - DNA, 25 bp, Homo sapien
ggattcccactttacaagatgggaa

SEQ ID NO: 2876997 - DNA, 25 bp, Homo sapien
gctgggattcccactttacaagatg

SEQ ID NO: 2876998 - DNA, 25 bp, Homo sapien
tgggattcccactttacaagatggg

SEQ ID NO: 2876999 - DNA, 25 bp, Homo sapien
ctgggattcccactttacaagatgg

SEQ ID NO: 2877000 - DNA, 25 bp, Homo sapien
gcagtatacctcaatgggcagtgtg

SEQ ID NO: 2877001 - DNA, 25 bp, Homo sapien
cagtatacctcaatgggcagtgtgt

SEQ ID NO: 2877002 - DNA, 25 bp, Homo sapien
gtatacctcaatgggcagtgtgtct

SEQ ID NO: 2877003 - DNA, 25 bp, Homo sapien
agtatacctcaatgggcagtgtgtc

SEQ ID NO: 2877004 - DNA, 25 bp, Homo sapien
tcctttgttgacaaatttctgaacc

SEQ ID NO: 2877005 - DNA, 25 bp, Homo sapien
tttctcctttgttgacaaatttctg

SEQ ID NO: 2877006 - DNA, 25 bp, Homo sapien
ctcctttgttgacaaatttctgaac

SEQ ID NO: 2877007 - DNA, 25 bp, Homo sapien
ccggccacgccgccgtccgcctcac

SEQ ID NO: 2877008 - DNA, 25 bp, Homo sapien
ccatcccggccacgccgccgtccgc

SEQ ID NO: 2877009 - DNA, 25 bp, Homo sapien
tcccggccacgccgccgtccgcctc

SEQ ID NO: 2877010 - DNA, 25 bp, Homo sapien
atcccggccacgccgccgtccgcct

SEQ ID NO: 2877011 - DNA, 25 bp, Homo sapien
gtcgggatctgcctttattttggtc

SEQ ID NO: 2877012 - DNA, 25 bp, Homo sapien
catttgtagagcttccgcgtgaggc

SEQ ID NO: 2877013 - DNA, 25 bp, Homo sapien
ctgagcctcgggcccgtcgggatct

SEQ ID NO: 2877014 - DNA, 25 bp, Homo sapien
gatgcatttgtagagcttccgcgtg

SEQ ID NO: 2877015 - DNA, 25 bp, Homo sapien
gaagccgccgtacaacacggccaat

SEQ ID NO: 2877016 - DNA, 25 bp, Homo sapien
acttccaggtcatcagctgcgcgag

SEQ ID NO: 2877017 - DNA, 25 bp, Homo sapien
ccaatcaggaaaggaagtctccgac

SEQ ID NO: 2877018 - DNA, 25 bp, Homo sapien
gtctccgactcagcccaatcgttga

SEQ ID NO: 2877019 - DNA, 25 bp, Homo sapien
cttcttccgggttgaatctccccat

SEQ ID NO: 2877020 - DNA, 25 bp, Homo sapien
tttttacattaatgcgtcatcagct

SEQ ID NO: 2877021 - DNA, 25 bp, Homo sapien
cagcttctatgttagatcctctgac

SEQ ID NO: 2877022 - DNA, 25 bp, Homo sapien
tcatctcagagggtatcaagtcctg

SEQ ID NO: 2877023 - DNA, 25 bp, Homo sapien
ggaaagctttaaatgccccagctca

SEQ ID NO: 2877024 - DNA, 25 bp, Homo sapien
caaaagaagccaagcgtaatctaaa

SEQ ID NO: 2877025 - DNA, 25 bp, Homo sapien
tcaaaagaagccaagcgtaatctaa

SEQ ID NO: 2877026 - DNA, 25 bp, Homo sapien
cccgtccaacaccagtagtattcac

SEQ ID NO: 2877027 - DNA, 25 bp, Homo sapien
acccgtccaacaccagtagtattca

SEQ ID NO: 2877028 - DNA, 25 bp, Homo sapien
gagtggtgtatacatccatctccac

SEQ ID NO: 2877029 - DNA, 25 bp, Homo sapien
attctgaaggtactataccatcttg

SEQ ID NO: 2877030 - DNA, 25 bp, Homo sapien
ccacttttttagagtggtgtataca

SEQ ID NO: 2877031 - DNA, 25 bp, Homo sapien
ttcttgaggccctacctcacggtct

SEQ ID NO: 2877032 - DNA, 25 bp, Homo sapien
caaattgtttagaagccattcaagg

SEQ ID NO: 2877033 - DNA, 25 bp, Homo sapien
attgtttagaagccattcaaggcac

SEQ ID NO: 2877034 - DNA, 25 bp, Homo sapien
aaattgtttagaagccattcaaggc

SEQ ID NO: 2877035 - DNA, 25 bp, Homo sapien
aattgtttagaagccattcaaggca

SEQ ID NO: 2877036 - DNA, 25 bp, Homo sapien
gaatctaatccatagatctctactg

SEQ ID NO: 2877037 - DNA, 25 bp, Homo sapien
tactgatgtgtaataaccgcataca

SEQ ID NO: 2877038 - DNA, 25 bp, Homo sapien
gatctctactgatgtgtaataaccg

SEQ ID NO: 2877039 - DNA, 25 bp, Homo sapien
ccatagatctctactgatgtgtaat

SEQ ID NO: 2877040 - DNA, 25 bp, Homo sapien
catcaatgttctggtcaggaatctc

SEQ ID NO: 2877041 - DNA, 25 bp, Homo sapien
cattcttctcctagagcacaaatct

SEQ ID NO: 2877042 - DNA, 25 bp, Homo sapien
tgaacatactagaaaagtagccaga

SEQ ID NO: 2877043 - DNA, 25 bp, Homo sapien
tcatgctggattctttccaagaacc

SEQ ID NO: 2877044 - DNA, 25 bp, Homo sapien
gaagccgtagctcgccgcatcgtct

SEQ ID NO: 2877045 - DNA, 25 bp, Homo sapien
tgcccgggcagtaacagaagccgta

SEQ ID NO: 2877046 - DNA, 25 bp, Homo sapien
gactgcccgggcagtaacagaagcc

SEQ ID NO: 2877047 - DNA, 25 bp, Homo sapien
gcagtaacagaagccgtagctcgcc

SEQ ID NO: 2877048 - DNA, 25 bp, Homo sapien
caggtgcctacaccgccaccttctc

SEQ ID NO: 2877049 - DNA, 25 bp, Homo sapien
tacaccgccaccttctcacgcgcag

SEQ ID NO: 2877050 - DNA, 25 bp, Homo sapien
tgcctacaccgccaccttctcacgc

SEQ ID NO: 2877051 - DNA, 25 bp, Homo sapien
ctacaccgccaccttctcacgcgca

SEQ ID NO: 2877052 - DNA, 25 bp, Homo sapien
ggggcttcttgcgtttcctgttcac

SEQ ID NO: 2877053 - DNA, 25 bp, Homo sapien
tgtgctgggaacggccagagctggg

SEQ ID NO: 2877054 - DNA, 25 bp, Homo sapien
tcttgcgtttcctgttcacacccgc

SEQ ID NO: 2877055 - DNA, 25 bp, Homo sapien
gtgctgggaacggccagagctgggg

SEQ ID NO: 2877056 - DNA, 25 bp, Homo sapien
gacttccagtttcctgcgggataaa

SEQ ID NO: 2877057 - DNA, 25 bp, Homo sapien
accgccatagcagtattcactgact

SEQ ID NO: 2877058 - DNA, 25 bp, Homo sapien
tgaaccctttgtcgtggcacccaaa

SEQ ID NO: 2877059 - DNA, 25 bp, Homo sapien
cctgcgggataaatctgaacccttt

SEQ ID NO: 2877060 - DNA, 25 bp, Homo sapien
tgccaatgctgggatggagtcctcg

SEQ ID NO: 2877061 - DNA, 25 bp, Homo sapien
agtcctcgagagcaagagaccagcg

SEQ ID NO: 2877062 - DNA, 25 bp, Homo sapien
gatgtcaatcgttcaggtggtgcca

SEQ ID NO: 2877063 - DNA, 25 bp, Homo sapien
cgacgagcttacaatccgattaggc

SEQ ID NO: 2877064 - DNA, 25 bp, Homo sapien
tttgttgggtcgactttggcgccgc

SEQ ID NO: 2877065 - DNA, 25 bp, Homo sapien
gaaacatcgagttccttgaaacgag

SEQ ID NO: 2877066 - DNA, 25 bp, Homo sapien
tatgagtggttaggtcccatacccc

SEQ ID NO: 2877067 - DNA, 25 bp, Homo sapien
tcacggtctgaaccctgggcgggct

SEQ ID NO: 2877068 - DNA, 25 bp, Homo sapien
caaggtaaggtgttcccagctctgc

SEQ ID NO: 2877069 - DNA, 25 bp, Homo sapien
tatttctctgaagcgtatgctgccc

SEQ ID NO: 2877070 - DNA, 25 bp, Homo sapien
gaaagacttctcaggctgggaggac

SEQ ID NO: 2877071 - DNA, 25 bp, Homo sapien
tgaatagagcaggttgagtagcctc

SEQ ID NO: 2877072 - DNA, 25 bp, Homo sapien
aatccagggtcagttgtgctttcaa

SEQ ID NO: 2877073 - DNA, 25 bp, Homo sapien
cagggtcctggccagcttaaatcca

SEQ ID NO: 2877074 - DNA, 25 bp, Homo sapien
tccagtggacagtgatagaggcctt

SEQ ID NO: 2877075 - DNA, 25 bp, Homo sapien
gaactcctggaagtctctatcctgg

SEQ ID NO: 2877076 - DNA, 25 bp, Homo sapien
taatttgccaattaaaagtatgact

SEQ ID NO: 2877077 - DNA, 25 bp, Homo sapien
ttgccaattaaaagtatgactggga

SEQ ID NO: 2877078 - DNA, 25 bp, Homo sapien
cagattgcattattttaatttgcca

SEQ ID NO: 2877079 - DNA, 25 bp, Homo sapien
tttgccaattaaaagtatgactggg

SEQ ID NO: 2877080 - DNA, 25 bp, Homo sapien
tatttttaatgggtgtgcatgtcag

SEQ ID NO: 2877081 - DNA, 25 bp, Homo sapien
tactatttttaatgggtgtgcatgt

SEQ ID NO: 2877082 - DNA, 25 bp, Homo sapien
ggtgtgcatgtcaggattttcttta

SEQ ID NO: 2877083 - DNA, 25 bp, Homo sapien
ttaatgggtgtgcatgtcaggattt

SEQ ID NO: 2877084 - DNA, 25 bp, Homo sapien
tcaggctcgccttctcaatagcgtg

SEQ ID NO: 2877085 - DNA, 25 bp, Homo sapien
tgggttattccaacagaccagtggt

SEQ ID NO: 2877086 - DNA, 25 bp, Homo sapien
caatagcgtgtatttggatgagatg

SEQ ID NO: 2877087 - DNA, 25 bp, Homo sapien
tagcattatggcctcgggcaggccc

SEQ ID NO: 2877088 - DNA, 25 bp, Homo sapien
gatgcatatcaagcgcgtggcacag

SEQ ID NO: 2877089 - DNA, 25 bp, Homo sapien
gtatgctaaatggtccacgggcccc

SEQ ID NO: 2877090 - DNA, 25 bp, Homo sapien
tggaatcagggctacggcaactact

SEQ ID NO: 2877091 - DNA, 25 bp, Homo sapien
tttagtgtgagatcaaggtggccca

SEQ ID NO: 2877092 - DNA, 25 bp, Homo sapien
cagcaggagcgaccaactgatcgca

SEQ ID NO: 2877093 - DNA, 25 bp, Homo sapien
caaactttctattgcctgtcccatg

SEQ ID NO: 2877094 - DNA, 25 bp, Homo sapien
tgatcgcacacatgctttgtttgga

SEQ ID NO: 2877095 - DNA, 25 bp, Homo sapien
tacaagccatactgaggcggcagca

SEQ ID NO: 2877096 - DNA, 25 bp, Homo sapien
tacagccccataggtttcaagggag

SEQ ID NO: 2877097 - DNA, 25 bp, Homo sapien
tccaggtctggtatttagggcataa

SEQ ID NO: 2877098 - DNA, 25 bp, Homo sapien
tatagctgttcctgccatcaagtgc

SEQ ID NO: 2877099 - DNA, 25 bp, Homo sapien
caagctaagcattggagaatttcca

SEQ ID NO: 2877100 - DNA, 25 bp, Homo sapien
aaaaaaggctcagcttgccgaggct

SEQ ID NO: 2877101 - DNA, 25 bp, Homo sapien
aaaggctcagcttgccgaggctgct

SEQ ID NO: 2877102 - DNA, 25 bp, Homo sapien
cttgctgctgatggtaaggaacccg

SEQ ID NO: 2877103 - DNA, 25 bp, Homo sapien
tgtgcatcttcaagagtaagaagca

SEQ ID NO: 2877104 - DNA, 25 bp, Homo sapien
ctggagtacacttaggcagagcagg

SEQ ID NO: 2877105 - DNA, 25 bp, Homo sapien
tacacttaggcagagcagggctggc

SEQ ID NO: 2877106 - DNA, 25 bp, Homo sapien
agtacacttaggcagagcagggctg

SEQ ID NO: 2877107 - DNA, 25 bp, Homo sapien
ggagtacacttaggcagagcagggc

SEQ ID NO: 2877108 - DNA, 25 bp, Homo sapien
gctggagcctcagcgtttcacaact

SEQ ID NO: 2877109 - DNA, 25 bp, Homo sapien
agcgtttcacaacttctcaccttct

SEQ ID NO: 2877110 - DNA, 25 bp, Homo sapien
agcctcagcgtttcacaacttctca

SEQ ID NO: 2877111 - DNA, 25 bp, Homo sapien
tcagcgtttcacaacttctcacctt

SEQ ID NO: 2877112 - DNA, 25 bp, Homo sapien
aggcccagtactgctttgtcctgca

SEQ ID NO: 2877113 - DNA, 25 bp, Homo sapien
tgctttgtcctgcatacatctgatg

SEQ ID NO: 2877114 - DNA, 25 bp, Homo sapien
catacatctgatgcctgctcaggca

SEQ ID NO: 2877115 - DNA, 25 bp, Homo sapien
tcaggcccagtactgctttgtcctg

SEQ ID NO: 2877116 - DNA, 25 bp, Homo sapien
cttccacctcctgacagcccaggaa

SEQ ID NO: 2877117 - DNA, 25 bp, Homo sapien
ccacctcctgacagcccaggaagct

SEQ ID NO: 2877118 - DNA, 25 bp, Homo sapien
acctcctgacagcccaggaagctct

SEQ ID NO: 2877119 - DNA, 25 bp, Homo sapien
ttccacctcctgacagcccaggaag

SEQ ID NO: 2877120 - DNA, 25 bp, Homo sapien
taggaggctctagttgctggcttca

SEQ ID NO: 2877121 - DNA, 25 bp, Homo sapien
gaataggagcagattgggccatgaa

SEQ ID NO: 2877122 - DNA, 25 bp, Homo sapien
gatatggccaagctcaggcttcaag

SEQ ID NO: 2877123 - DNA, 25 bp, Homo sapien
gagttctagagatatggccaagctc

SEQ ID NO: 2877124 - DNA, 25 bp, Homo sapien
ccagggccatcagtgctcagcaaaa

SEQ ID NO: 2877125 - DNA, 25 bp, Homo sapien
caccacctgccgtgcattgtccagg

SEQ ID NO: 2877126 - DNA, 25 bp, Homo sapien
tccaggctgaagcacattgggggct

SEQ ID NO: 2877127 - DNA, 25 bp, Homo sapien
cagcaaaacgtagttctccttcagc

SEQ ID NO: 2877128 - DNA, 25 bp, Homo sapien
agcctgcttggagtgcactgcacct

SEQ ID NO: 2877129 - DNA, 25 bp, Homo sapien
acagtccaagccaagaatgaatggc

SEQ ID NO: 2877130 - DNA, 25 bp, Homo sapien
ggtgtaatgagctccacgtgcccct

SEQ ID NO: 2877131 - DNA, 25 bp, Homo sapien
cagggaaacgccagactgcaagagt

SEQ ID NO: 2877132 - DNA, 25 bp, Homo sapien
tttgatcagatccacaccaatgaag

SEQ ID NO: 2877133 - DNA, 25 bp, Homo sapien
ggcctcatctttgatcagatccaca

SEQ ID NO: 2877134 - DNA, 25 bp, Homo sapien
ccttgtggcctcatctttgatcaga

SEQ ID NO: 2877135 - DNA, 25 bp, Homo sapien
agatccacaccaatgaagagcccaa

SEQ ID NO: 2877136 - DNA, 25 bp, Homo sapien
tcaggaagctgcctacactggtggc

SEQ ID NO: 2877137 - DNA, 25 bp, Homo sapien
atccccgacgatgggatgtttgatt

SEQ ID NO: 2877138 - DNA, 25 bp, Homo sapien
aagacattcaggacggccagcccca

SEQ ID NO: 2877139 - DNA, 25 bp, Homo sapien
tgattttttgctgcccgaggagctg

SEQ ID NO: 2877140 - DNA, 25 bp, Homo sapien
gaaaggctgtgacgtactcctggga

SEQ ID NO: 2877141 - DNA, 25 bp, Homo sapien
taggagcccctagaagatacagaat

SEQ ID NO: 2877142 - DNA, 25 bp, Homo sapien
ggcgcacagtcctcagcagtagtaa

SEQ ID NO: 2877143 - DNA, 25 bp, Homo sapien
tgtgtaacctccctcgcagtgaagt

SEQ ID NO: 2877144 - DNA, 25 bp, Homo sapien
ccaaaacagagtctaatgatagata

SEQ ID NO: 2877145 - DNA, 25 bp, Homo sapien
gaaaatttgaagttgataagcacaa

SEQ ID NO: 2877146 - DNA, 25 bp, Homo sapien
gaagcatttactagagaggctcaac

SEQ ID NO: 2877147 - DNA, 25 bp, Homo sapien
gtcttaccaaaacagagtctaatga

SEQ ID NO: 2877148 - DNA, 25 bp, Homo sapien
tcagaacccatgttgctcccttgac

SEQ ID NO: 2877149 - DNA, 25 bp, Homo sapien
catgttgctcccttgacttagagcc

SEQ ID NO: 2877150 - DNA, 25 bp, Homo sapien
tgctcccttgacttagagccatcac

SEQ ID NO: 2877151 - DNA, 25 bp, Homo sapien
gaacccatgttgctcccttgactta

SEQ ID NO: 2877152 - DNA, 25 bp, Homo sapien
tggccgttgccaatggacttgccca

SEQ ID NO: 2877153 - DNA, 25 bp, Homo sapien
ttcaaatgccctcgccacaggctgg

SEQ ID NO: 2877154 - DNA, 25 bp, Homo sapien
tgttgaagtactcaacgccggtggc

SEQ ID NO: 2877155 - DNA, 25 bp, Homo sapien
ccacgcaggcaacagggtggccgtt

SEQ ID NO: 2877156 - DNA, 25 bp, Homo sapien
atgtcagggacgaagtcttttccct

SEQ ID NO: 2877157 - DNA, 25 bp, Homo sapien
agaagtgcttgcctacccggccaaa

SEQ ID NO: 2877158 - DNA, 25 bp, Homo sapien
aagtgcttgcctacccggccaaagc

SEQ ID NO: 2877159 - DNA, 25 bp, Homo sapien
cggccaaagccaacctggatctcat

SEQ ID NO: 2877160 - DNA, 25 bp, Homo sapien
aggcccagaagtgcttgcctacccg

SEQ ID NO: 2877161 - DNA, 25 bp, Homo sapien
caacaaagacccctccggccttgcg

SEQ ID NO: 2877162 - DNA, 25 bp, Homo sapien
ctgcaacaaagacccctccggcctt

SEQ ID NO: 2877163 - DNA, 25 bp, Homo sapien
gcaacaaagacccctccggccttgc

SEQ ID NO: 2877164 - DNA, 25 bp, Homo sapien
tgcaacaaagacccctccggccttg

SEQ ID NO: 2877165 - DNA, 25 bp, Homo sapien
ttggaccagaggttggaaaacctca

SEQ ID NO: 2877166 - DNA, 25 bp, Homo sapien
ctgccctccctagagcagaccccgc

SEQ ID NO: 2877167 - DNA, 25 bp, Homo sapien
tggaaaacctcattagacccctgcc

SEQ ID NO: 2877168 - DNA, 25 bp, Homo sapien
cagaggttggaaaacctcattagac

SEQ ID NO: 2877169 - DNA, 25 bp, Homo sapien
gaatgatctgccctcccacactggg

SEQ ID NO: 2877170 - DNA, 25 bp, Homo sapien
gagaagtagccagcagggggaatga

SEQ ID NO: 2877171 - DNA, 25 bp, Homo sapien
acactgggcagagactcagcgaaga

SEQ ID NO: 2877172 - DNA, 25 bp, Homo sapien
cagagactcagcgaagaaggctgca

SEQ ID NO: 2877173 - DNA, 25 bp, Homo sapien
actgaatgccttttccagtccatcc

SEQ ID NO: 2877174 - DNA, 25 bp, Homo sapien
tggccaccagggtgatgatgcctca

SEQ ID NO: 2877175 - DNA, 25 bp, Homo sapien
actcctgcagaggtcttctaactga

SEQ ID NO: 2877176 - DNA, 25 bp, Homo sapien
gatgcctcaacccagagaactgagc

SEQ ID NO: 2877177 - DNA, 25 bp, Homo sapien
tatagaagtggtcgcagagcacctg

SEQ ID NO: 2877178 - DNA, 25 bp, Homo sapien
tgttgtcaccgtaggtaacacacct

SEQ ID NO: 2877179 - DNA, 25 bp, Homo sapien
tattctgccttacaggtgggagggc

SEQ ID NO: 2877180 - DNA, 25 bp, Homo sapien
ggctcccctggtcgggttctgctaa

SEQ ID NO: 2877181 - DNA, 25 bp, Homo sapien
acctgacctcaagccgccgcattcc

SEQ ID NO: 2877182 - DNA, 25 bp, Homo sapien
tgctggccacttcacggtcacctga

SEQ ID NO: 2877183 - DNA, 25 bp, Homo sapien
ctcaagccgccgcattccaatccat

SEQ ID NO: 2877184 - DNA, 25 bp, Homo sapien
aagccgccgcattccaatccatcct

SEQ ID NO: 2877185 - DNA, 25 bp, Homo sapien
cacacgtttcacctcgttggcatag

SEQ ID NO: 2877186 - DNA, 25 bp, Homo sapien
gtttcacctcgttggcataggccat

SEQ ID NO: 2877187 - DNA, 25 bp, Homo sapien
tggcataggccatagctgggttggg

SEQ ID NO: 2877188 - DNA, 25 bp, Homo sapien
tgctgaccacacgtttcacctcgtt

SEQ ID NO: 2877189 - DNA, 25 bp, Homo sapien
gtggggagtgacagcgccatgttat

SEQ ID NO: 2877190 - DNA, 25 bp, Homo sapien
catgttatccgggcttggggacagg

SEQ ID NO: 2877191 - DNA, 25 bp, Homo sapien
tggggagtgacagcgccatgttatc

SEQ ID NO: 2877192 - DNA, 25 bp, Homo sapien
atgttatccgggcttggggacaggc

SEQ ID NO: 2877193 - DNA, 25 bp, Homo sapien
ctgttgttgagttgggcagtgcata

SEQ ID NO: 2877194 - DNA, 25 bp, Homo sapien
tgttgttgagttgggcagtgcatac

SEQ ID NO: 2877195 - DNA, 25 bp, Homo sapien
ggagctcaggtggccgtgatacgca

SEQ ID NO: 2877196 - DNA, 25 bp, Homo sapien
acgtggacccactccttctggccat

SEQ ID NO: 2877197 - DNA, 25 bp, Homo sapien
ccaggttgcggaacttgtagggact

SEQ ID NO: 2877198 - DNA, 25 bp, Homo sapien
ttgtagggactgatgtcaatcaggg

SEQ ID NO: 2877199 - DNA, 25 bp, Homo sapien
cacacttgtcttcagtagcccaggc

SEQ ID NO: 2877200 - DNA, 25 bp, Homo sapien
gagtcagtctcacggatcaccaaga

SEQ ID NO: 2877201 - DNA, 25 bp, Homo sapien
gtcagcctcggctttgtgcacatca

SEQ ID NO: 2877202 - DNA, 25 bp, Homo sapien
tgcaagactgctgactggctatgtg

SEQ ID NO: 2877203 - DNA, 25 bp, Homo sapien
tgtcccgtgtagtggcgagccagcc

SEQ ID NO: 2877204 - DNA, 25 bp, Homo sapien
tgatctaataccaccacgtcctggt

SEQ ID NO: 2877205 - DNA, 25 bp, Homo sapien
acgtcctggtgtcccgtgtagtggc

SEQ ID NO: 2877206 - DNA, 25 bp, Homo sapien
caccacgtcctggtgtcccgtgtag

SEQ ID NO: 2877207 - DNA, 25 bp, Homo sapien
gagagagtagtctaagagcttccca

SEQ ID NO: 2877208 - DNA, 25 bp, Homo sapien
cctgggcaccagtagcaagtctggg

SEQ ID NO: 2877209 - DNA, 25 bp, Homo sapien
tatgaccgaaaaggtgggcatgact

SEQ ID NO: 2877210 - DNA, 25 bp, Homo sapien
tgcctcctatgtactagaagctggg

SEQ ID NO: 2877211 - DNA, 25 bp, Homo sapien
ggtgacctttggaacttctgaccga

SEQ ID NO: 2877212 - DNA, 25 bp, Homo sapien
caagttgaggttcccacaattccct

SEQ ID NO: 2877213 - DNA, 25 bp, Homo sapien
cttcaagttgaggttcccacaattc

SEQ ID NO: 2877214 - DNA, 25 bp, Homo sapien
gaggttcccacaattccctctgtag

SEQ ID NO: 2877215 - DNA, 25 bp, Homo sapien
cagcattccttctagcaggatatgg

SEQ ID NO: 2877216 - DNA, 25 bp, Homo sapien
agcattccttctagcaggatatggg

SEQ ID NO: 2877217 - DNA, 25 bp, Homo sapien
tccctgggcgcaccacccttctaga

SEQ ID NO: 2877218 - DNA, 25 bp, Homo sapien
ccttctagaacctctgtatgttcag

SEQ ID NO: 2877219 - DNA, 25 bp, Homo sapien
gaggctccagctcttgacatggcaa

SEQ ID NO: 2877220 - DNA, 25 bp, Homo sapien
taagtgctacgatggatgccctggg

SEQ ID NO: 2877221 - DNA, 25 bp, Homo sapien
gaacctcgagttggaacacatggga

SEQ ID NO: 2877222 - DNA, 25 bp, Homo sapien
tatgacccaccatcagaaaggtagg

SEQ ID NO: 2877223 - DNA, 25 bp, Homo sapien
aaggaaactggatccaacagagaaa

SEQ ID NO: 2877224 - DNA, 25 bp, Homo sapien
gagacaaggaaactggatccaacag

SEQ ID NO: 2877225 - DNA, 25 bp, Homo sapien
agacaaggaaactggatccaacaga

SEQ ID NO: 2877226 - DNA, 25 bp, Homo sapien
gacaaggaaactggatccaacagag

SEQ ID NO: 2877227 - DNA, 25 bp, Homo sapien
tccggcagggtctctgacagcctct

SEQ ID NO: 2877228 - DNA, 25 bp, Homo sapien
acagcctctgcgcatagtccacgat

SEQ ID NO: 2877229 - DNA, 25 bp, Homo sapien
gctgttggtgttgagcacctggttc

SEQ ID NO: 2877230 - DNA, 25 bp, Homo sapien
tgtcatgcaggtaccggctgttggt

SEQ ID NO: 2877231 - DNA, 25 bp, Homo sapien
accacgagagggtggcagtgcccaa

SEQ ID NO: 2877232 - DNA, 25 bp, Homo sapien
gaccacgagagggtggcagtgccca

SEQ ID NO: 2877233 - DNA, 25 bp, Homo sapien
cttggaccacgagagggtggcagtg

SEQ ID NO: 2877234 - DNA, 25 bp, Homo sapien
tggaccacgagagggtggcagtgcc

SEQ ID NO: 2877235 - DNA, 25 bp, Homo sapien
gaaagcccatgtctttaaggaggac

SEQ ID NO: 2877236 - DNA, 25 bp, Homo sapien
gcttcagcagaagaaccctgtctag

SEQ ID NO: 2877237 - DNA, 25 bp, Homo sapien
cccagccagaagagatgtagttcta

SEQ ID NO: 2877238 - DNA, 25 bp, Homo sapien
ccaggagttcctgagattctggcag

SEQ ID NO: 2877239 - DNA, 25 bp, Homo sapien
ttgcccgagatcacaagttagtaag

SEQ ID NO: 2877240 - DNA, 25 bp, Homo sapien
ccttaaagtgggtacctagtatcat

SEQ ID NO: 2877241 - DNA, 25 bp, Homo sapien
tcaaaggccaaggataataacagtg

SEQ ID NO: 2877242 - DNA, 25 bp, Homo sapien
gaatatgtactgagagctcaccatg

SEQ ID NO: 2877243 - DNA, 25 bp, Homo sapien
tctcggcaatctcaggtcaccttgg

SEQ ID NO: 2877244 - DNA, 25 bp, Homo sapien
gtcccaagtggaactagactcacag

SEQ ID NO: 2877245 - DNA, 25 bp, Homo sapien
ttgggaccaggttcacagcactgcc

SEQ ID NO: 2877246 - DNA, 25 bp, Homo sapien
gctatattgcgaaggctgagcctcc

SEQ ID NO: 2877247 - DNA, 25 bp, Homo sapien
tgggcccggacaatcttaacaggat

SEQ ID NO: 2877248 - DNA, 25 bp, Homo sapien
atcgtacatgtactgcccttgggcc

SEQ ID NO: 2877249 - DNA, 25 bp, Homo sapien
tgtactgcccttgggcccggacaat

SEQ ID NO: 2877250 - DNA, 25 bp, Homo sapien
tattctgccccctgttcatcgtaca

SEQ ID NO: 2877251 - DNA, 25 bp, Homo sapien
ctcgggaaaaaagagtctgcaggaa

SEQ ID NO: 2877252 - DNA, 25 bp, Homo sapien
cgggaaaaaagagtctgcaggaaga

SEQ ID NO: 2877253 - DNA, 25 bp, Homo sapien
tcgggaaaaaagagtctgcaggaag

SEQ ID NO: 2877254 - DNA, 25 bp, Homo sapien
gggaaaaaagagtctgcaggaagag

SEQ ID NO: 2877255 - DNA, 25 bp, Homo sapien
tggggacaggcaaggagtggacagc

SEQ ID NO: 2877256 - DNA, 25 bp, Homo sapien
tgtggggacaggcaaggagtggaca

SEQ ID NO: 2877257 - DNA, 25 bp, Homo sapien
acaggcaaggagtggacagccatgt

SEQ ID NO: 2877258 - DNA, 25 bp, Homo sapien
ggacaggcaaggagtggacagccat

SEQ ID NO: 2877259 - DNA, 25 bp, Homo sapien
ctgaagaccgaaagggtgaagtcta

SEQ ID NO: 2877260 - DNA, 25 bp, Homo sapien
gggtgaagtctactcatcgcagacc

SEQ ID NO: 2877261 - DNA, 25 bp, Homo sapien
gtgaagtctactcatcgcagacccc

SEQ ID NO: 2877262 - DNA, 25 bp, Homo sapien
ctggtggcgggggggaaatgagagc

SEQ ID NO: 2877263 - DNA, 25 bp, Homo sapien
ccatggggactccataaggccgcgt

SEQ ID NO: 2877264 - DNA, 25 bp, Homo sapien
atttctgcatgtgtccgcgtcagtc

SEQ ID NO: 2877265 - DNA, 25 bp, Homo sapien
ggtaacaagtcgctgaaacttcgga

SEQ ID NO: 2877266 - DNA, 25 bp, Homo sapien
actccacaggtggttgcaaagcagg

SEQ ID NO: 2877267 - DNA, 25 bp, Homo sapien
accaacattaggtgcctggctctca

SEQ ID NO: 2877268 - DNA, 25 bp, Homo sapien
tctcaggcgccagggtgaaggtctt

SEQ ID NO: 2877269 - DNA, 25 bp, Homo sapien
tcttctccggagtaaaggctgccaa

SEQ ID NO: 2877270 - DNA, 25 bp, Homo sapien
cctaagctccagtgggaggcgacct

SEQ ID NO: 2877271 - DNA, 25 bp, Homo sapien
ttgcctcagggccagcgtgtcggcc

SEQ ID NO: 2877272 - DNA, 25 bp, Homo sapien
cgtgtcggccttcgggcgctggtct

SEQ ID NO: 2877273 - DNA, 25 bp, Homo sapien
agccgttgcctcagggccagcgtgt

SEQ ID NO: 2877274 - DNA, 25 bp, Homo sapien
ctgatgagccgttgcctcagggcca

SEQ ID NO: 2877275 - DNA, 25 bp, Homo sapien
gtgccttggcagtcccgcgcaggaa

SEQ ID NO: 2877276 - DNA, 25 bp, Homo sapien
tcatttcttcgcttgcccactgggc

SEQ ID NO: 2877277 - DNA, 25 bp, Homo sapien
ttccggcccgtggtcgtgccttggc

SEQ ID NO: 2877278 - DNA, 25 bp, Homo sapien
gccgtcagtcggtgccgtgacgcca

SEQ ID NO: 2877279 - DNA, 25 bp, Homo sapien
tacttcgtttctgaggatcaagacc

SEQ ID NO: 2877280 - DNA, 25 bp, Homo sapien
gtttctgaggatcaagacctcacag

SEQ ID NO: 2877281 - DNA, 25 bp, Homo sapien
catacccagcctgtacttcgtttct

SEQ ID NO: 2877282 - DNA, 25 bp, Homo sapien
gagtgcagcattgcagtctctacct

SEQ ID NO: 2877283 - DNA, 25 bp, Homo sapien
tttcccactactggcttccctgttg

SEQ ID NO: 2877284 - DNA, 25 bp, Homo sapien
tgtgaccttccacttattgccagtt

SEQ ID NO: 2877285 - DNA, 25 bp, Homo sapien
ctggcttccctgttgacccagacaa

SEQ ID NO: 2877286 - DNA, 25 bp, Homo sapien
ccagacaactggctgagcgatgtga

SEQ ID NO: 2877287 - DNA, 25 bp, Homo sapien
accacccacctaatttacaggcatt

SEQ ID NO: 2877288 - DNA, 25 bp, Homo sapien
acccacctaatttacaggcattaca

SEQ ID NO: 2877289 - DNA, 25 bp, Homo sapien
ccacccacctaatttacaggcatta

SEQ ID NO: 2877290 - DNA, 25 bp, Homo sapien
cacccacctaatttacaggcattac

SEQ ID NO: 2877291 - DNA, 25 bp, Homo sapien
gaaatggaaggcaagcagccaggat

SEQ ID NO: 2877292 - DNA, 25 bp, Homo sapien
gtgatctccatctacacggaaatgg

SEQ ID NO: 2877293 - DNA, 25 bp, Homo sapien
aacacttgctggaggtggaaaagcc

SEQ ID NO: 2877294 - DNA, 25 bp, Homo sapien
gaaaagcctctcgtcagagcgtggg

SEQ ID NO: 2877295 - DNA, 25 bp, Homo sapien
tggccagaggacatgtgctctcatg

SEQ ID NO: 2877296 - DNA, 25 bp, Homo sapien
ccatcctcgacactctgctccctgg

SEQ ID NO: 2877297 - DNA, 25 bp, Homo sapien
tgggtccacatcacagcgatcacag

SEQ ID NO: 2877298 - DNA, 25 bp, Homo sapien
ggtccacatcacagcgatcacagag

SEQ ID NO: 2877299 - DNA, 25 bp, Homo sapien
cccagccgcaagtgctgggcgagtc

SEQ ID NO: 2877300 - DNA, 25 bp, Homo sapien
gttgagtttggaggctgatgaggcc

SEQ ID NO: 2877301 - DNA, 25 bp, Homo sapien
gctagaccctcgtgggggatttcca

SEQ ID NO: 2877302 - DNA, 25 bp, Homo sapien
gccaagtcttgtccaactgcagagg

SEQ ID NO: 2877303 - DNA, 25 bp, Homo sapien
tgttaaaaggccacaggtagcgcat

SEQ ID NO: 2877304 - DNA, 25 bp, Homo sapien
aagggtgcccctcaggtacacatct

SEQ ID NO: 2877305 - DNA, 25 bp, Homo sapien
tacagggcagtaccacagctgagag

SEQ ID NO: 2877306 - DNA, 25 bp, Homo sapien
gactgaaggcccaacgtagcatctt

SEQ ID NO: 2877307 - DNA, 25 bp, Homo sapien
agacacccagaggtttgagtgacag

SEQ ID NO: 2877308 - DNA, 25 bp, Homo sapien
cacccagaggtttgagtgacagcac

SEQ ID NO: 2877309 - DNA, 25 bp, Homo sapien
ccctggagacttccctgcacggtac

SEQ ID NO: 2877310 - DNA, 25 bp, Homo sapien
cccagaggtttgagtgacagcaccc

SEQ ID NO: 2877311 - DNA, 25 bp, Homo sapien
tatgccagcagccaggcacaggcag

SEQ ID NO: 2877312 - DNA, 25 bp, Homo sapien
gccaggcacaggcagcccgtcgggg

SEQ ID NO: 2877313 - DNA, 25 bp, Homo sapien
cttatgccagcagccaggcacaggc

SEQ ID NO: 2877314 - DNA, 25 bp, Homo sapien
caggcacaggcagcccgtcggggcc

SEQ ID NO: 2877315 - DNA, 25 bp, Homo sapien
cacgggacacggctggtccaggcct

SEQ ID NO: 2877316 - DNA, 25 bp, Homo sapien
acgggacacggctggtccaggcctg

SEQ ID NO: 2877317 - DNA, 25 bp, Homo sapien
cttctctccacgctcgctccgatca

SEQ ID NO: 2877318 - DNA, 25 bp, Homo sapien
tccacgctcgctccgatcacctttc

SEQ ID NO: 2877319 - DNA, 25 bp, Homo sapien
tctccacgctcgctccgatcacctt

SEQ ID NO: 2877320 - DNA, 25 bp, Homo sapien
acgctcgctccgatcacctttctct

SEQ ID NO: 2877321 - DNA, 25 bp, Homo sapien
tacactgctgggtacaaggctgatg

SEQ ID NO: 2877322 - DNA, 25 bp, Homo sapien
tgggcttgctccaaagtagtcgctg

SEQ ID NO: 2877323 - DNA, 25 bp, Homo sapien
gaattggattcattgtggccgggca

SEQ ID NO: 2877324 - DNA, 25 bp, Homo sapien
catgcatttacgatgccagctgggc

SEQ ID NO: 2877325 - DNA, 25 bp, Homo sapien
ctagtcctggctccccgggtctgcc

SEQ ID NO: 2877326 - DNA, 25 bp, Homo sapien
cctgcgaagtgcagggacccagtga

SEQ ID NO: 2877327 - DNA, 25 bp, Homo sapien
gttggagagggagttccgaatgagg

SEQ ID NO: 2877328 - DNA, 25 bp, Homo sapien
gaactctggccctgcgaagtgcagg

SEQ ID NO: 2877329 - DNA, 25 bp, Homo sapien
gagggagttccgaatgaggcggtta

SEQ ID NO: 2877330 - DNA, 25 bp, Homo sapien
ctggcagcccaataaggcccggtgg

SEQ ID NO: 2877331 - DNA, 25 bp, Homo sapien
caataaggcccggtgggccaactgg

SEQ ID NO: 2877332 - DNA, 25 bp, Homo sapien
gcagcccaataaggcccggtgggcc

SEQ ID NO: 2877333 - DNA, 25 bp, Homo sapien
ccaataaggcccggtgggccaactg

SEQ ID NO: 2877334 - DNA, 25 bp, Homo sapien
ggcaggccgctggggcctctctcac

SEQ ID NO: 2877335 - DNA, 25 bp, Homo sapien
aggcaggccgctggggcctctctca

SEQ ID NO: 2877336 - DNA, 25 bp, Homo sapien
cttctctccctttgctccatccaag

SEQ ID NO: 2877337 - DNA, 25 bp, Homo sapien
ttctctccctttgctccatccaagc

SEQ ID NO: 2877338 - DNA, 25 bp, Homo sapien
tctctccctttgctccatccaagcc

SEQ ID NO: 2877339 - DNA, 25 bp, Homo sapien
ccttctctccctttgctccatccaa

SEQ ID NO: 2877340 - DNA, 25 bp, Homo sapien
tgggaccctggattccctggaggcc

SEQ ID NO: 2877341 - DNA, 25 bp, Homo sapien
cttgggaccctggattccctggagg

SEQ ID NO: 2877342 - DNA, 25 bp, Homo sapien
ttgggaccctggattccctggaggc

SEQ ID NO: 2877343 - DNA, 25 bp, Homo sapien
agggggccctggctccactatgagc

SEQ ID NO: 2877344 - DNA, 25 bp, Homo sapien
ccagggggccctggctccactatga

SEQ ID NO: 2877345 - DNA, 25 bp, Homo sapien
ggggccctggctccactatgagctg

SEQ ID NO: 2877346 - DNA, 25 bp, Homo sapien
ggccctggctccactatgagctgag

SEQ ID NO: 2877347 - DNA, 25 bp, Homo sapien
cttctcccccttgaggccgtcagcg

SEQ ID NO: 2877348 - DNA, 25 bp, Homo sapien
tgtaggctgtcagacgccgactccc

SEQ ID NO: 2877349 - DNA, 25 bp, Homo sapien
tctcctgtaggctgtcagacgccga

SEQ ID NO: 2877350 - DNA, 25 bp, Homo sapien
caggctctcctgtaggctgtcagac

SEQ ID NO: 2877351 - DNA, 25 bp, Homo sapien
cctgtgagtcctttgtgtccagcac

SEQ ID NO: 2877352 - DNA, 25 bp, Homo sapien
tgcaggacggcaatggcctgtgagt

SEQ ID NO: 2877353 - DNA, 25 bp, Homo sapien
aggacggcaatggcctgtgagtcct

SEQ ID NO: 2877354 - DNA, 25 bp, Homo sapien
gcctgtgagtcctttgtgtccagca

SEQ ID NO: 2877355 - DNA, 25 bp, Homo sapien
cgggaggccggacaagcccatctcg

SEQ ID NO: 2877356 - DNA, 25 bp, Homo sapien
gaggccggacaagcccatctcgcct

SEQ ID NO: 2877357 - DNA, 25 bp, Homo sapien
gggaggccggacaagcccatctcgc

SEQ ID NO: 2877358 - DNA, 25 bp, Homo sapien
ggccggacaagcccatctcgcctgc

SEQ ID NO: 2877359 - DNA, 25 bp, Homo sapien
gggcaccgggcaatccaagctcgcc

SEQ ID NO: 2877360 - DNA, 25 bp, Homo sapien
tggggcaccgggcaatccaagctcg

SEQ ID NO: 2877361 - DNA, 25 bp, Homo sapien
cttctctccatcgattcctggggca

SEQ ID NO: 2877362 - DNA, 25 bp, Homo sapien
tccatcgattcctggggcaccgggc

SEQ ID NO: 2877363 - DNA, 25 bp, Homo sapien
tggctccagggatccctggtggccc

SEQ ID NO: 2877364 - DNA, 25 bp, Homo sapien
ggctccagggatccctggtggccct

SEQ ID NO: 2877365 - DNA, 25 bp, Homo sapien
cttggctccagggatccctggtggc

SEQ ID NO: 2877366 - DNA, 25 bp, Homo sapien
ttggctccagggatccctggtggcc

SEQ ID NO: 2877367 - DNA, 25 bp, Homo sapien
cttgagggcatccaagatcctgcca

SEQ ID NO: 2877368 - DNA, 25 bp, Homo sapien
gtctccctgctcgcccttgaggcct

SEQ ID NO: 2877369 - DNA, 25 bp, Homo sapien
agtcgatcaccactgtgtctccctg

SEQ ID NO: 2877370 - DNA, 25 bp, Homo sapien
tcatagtcgatcaccactgtgtctc

SEQ ID NO: 2877371 - DNA, 25 bp, Homo sapien
catagtcgatcaccactgtgtctcc

SEQ ID NO: 2877372 - DNA, 25 bp, Homo sapien
aggcaggaagaagagtaagaatttc

SEQ ID NO: 2877373 - DNA, 25 bp, Homo sapien
gtaagaatttcagggaagagctaca

SEQ ID NO: 2877374 - DNA, 25 bp, Homo sapien
aagaagagtaagaatttcagggaag

SEQ ID NO: 2877375 - DNA, 25 bp, Homo sapien
aagagtaagaatttcagggaagagc

SEQ ID NO: 2877376 - DNA, 25 bp, Homo sapien
caggcgggggctcagatccattttt

SEQ ID NO: 2877377 - DNA, 25 bp, Homo sapien
aggcgggggctcagatccatttttt

SEQ ID NO: 2877378 - DNA, 25 bp, Homo sapien
gccaggcgggggctcagatccattt

SEQ ID NO: 2877379 - DNA, 25 bp, Homo sapien
acagccaggcgggggctcagatcca

SEQ ID NO: 2877380 - DNA, 25 bp, Homo sapien
agccgaggccaggatcccggacgtc

SEQ ID NO: 2877381 - DNA, 25 bp, Homo sapien
cgaggccaggatcccggacgtcacc

SEQ ID NO: 2877382 - DNA, 25 bp, Homo sapien
ccgaggccaggatcccggacgtcac

SEQ ID NO: 2877383 - DNA, 25 bp, Homo sapien
gccgaggccaggatcccggacgtca

SEQ ID NO: 2877384 - DNA, 25 bp, Homo sapien
agctccatccgtgcctcggtggcca

SEQ ID NO: 2877385 - DNA, 25 bp, Homo sapien
ctccatccgtgcctcggtggccagg

SEQ ID NO: 2877386 - DNA, 25 bp, Homo sapien
gcagctccatccgtgcctcggtggc

SEQ ID NO: 2877387 - DNA, 25 bp, Homo sapien
ctgcagctccatccgtgcctcggtg

SEQ ID NO: 2877388 - DNA, 25 bp, Homo sapien
agacatgcatttgcagccagaggtg

SEQ ID NO: 2877389 - DNA, 25 bp, Homo sapien
acatgcatttgcagccagaggtgca

SEQ ID NO: 2877390 - DNA, 25 bp, Homo sapien
ctgtggagacatgcatttgcagcca

SEQ ID NO: 2877391 - DNA, 25 bp, Homo sapien
gtggagacatgcatttgcagccaga

SEQ ID NO: 2877392 - DNA, 25 bp, Homo sapien
cccactcccgactgggtggaggtct

SEQ ID NO: 2877393 - DNA, 25 bp, Homo sapien
aatgagagctgaaaccacatctccc

SEQ ID NO: 2877394 - DNA, 25 bp, Homo sapien
tctcccactcccgactgggtggagg

SEQ ID NO: 2877395 - DNA, 25 bp, Homo sapien
cgcaggcgccagagcagagagctct

SEQ ID NO: 2877396 - DNA, 25 bp, Homo sapien
cttcggtcctggggcaccgtccaca

SEQ ID NO: 2877397 - DNA, 25 bp, Homo sapien
ccgtccacaccgttctctccccgag

SEQ ID NO: 2877398 - DNA, 25 bp, Homo sapien
tggggcaccgtccacaccgttctct

SEQ ID NO: 2877399 - DNA, 25 bp, Homo sapien
ccgaggccccatgctccctggctcg

SEQ ID NO: 2877400 - DNA, 25 bp, Homo sapien
gcatgaggatgacacccagttcctg

SEQ ID NO: 2877401 - DNA, 25 bp, Homo sapien
gcagcgcaggggctcaagggacatt

SEQ ID NO: 2877402 - DNA, 25 bp, Homo sapien
gatttggtggctgttgcgaggggtt

SEQ ID NO: 2877403 - DNA, 25 bp, Homo sapien
agcgcaggggctcaagggacatttt

SEQ ID NO: 2877404 - DNA, 25 bp, Homo sapien
gctggcttggtgtcccatcgtcgcc

SEQ ID NO: 2877405 - DNA, 25 bp, Homo sapien
ggctggcttggtgtcccatcgtcgc

SEQ ID NO: 2877406 - DNA, 25 bp, Homo sapien
tcagaccctcgggtggccagtgggc

SEQ ID NO: 2877407 - DNA, 25 bp, Homo sapien
ccggtcagaccctcgggtggccagt

SEQ ID NO: 2877408 - DNA, 25 bp, Homo sapien
ggcttgccggtcagaccctcgggtg

SEQ ID NO: 2877409 - DNA, 25 bp, Homo sapien
ttgccggtcagaccctcgggtggcc

SEQ ID NO: 2877410 - DNA, 25 bp, Homo sapien
ctgcactggcacatggtaccaggca

SEQ ID NO: 2877411 - DNA, 25 bp, Homo sapien
ggcacatggtaccaggcagctcctc

SEQ ID NO: 2877412 - DNA, 25 bp, Homo sapien
cagctcctccccaccctccttgccc

SEQ ID NO: 2877413 - DNA, 25 bp, Homo sapien
gcagctcctccccaccctccttgcc

SEQ ID NO: 2877414 - DNA, 25 bp, Homo sapien
tggtcaaacaaactctggccccatc

SEQ ID NO: 2877415 - DNA, 25 bp, Homo sapien
taatgctcattcagtgttttcaagc

SEQ ID NO: 2877416 - DNA, 25 bp, Homo sapien
tcaagcttgagctcacatcagtggc

SEQ ID NO: 2877417 - DNA, 25 bp, Homo sapien
gagggttttgctgagacctgaatga

SEQ ID NO: 2877418 - DNA, 25 bp, Homo sapien
tctttccaggtactccaggctcacc

SEQ ID NO: 2877419 - DNA, 25 bp, Homo sapien
ttctttccaggtactccaggctcac

SEQ ID NO: 2877420 - DNA, 25 bp, Homo sapien
cttctttccaggtactccaggctca

SEQ ID NO: 2877421 - DNA, 25 bp, Homo sapien
gttcctcgggtagaagtggcactga

SEQ ID NO: 2877422 - DNA, 25 bp, Homo sapien
agaggtgactcctgccgtctcagag

SEQ ID NO: 2877423 - DNA, 25 bp, Homo sapien
gctgcggcggacagtcttgaattcc

SEQ ID NO: 2877424 - DNA, 25 bp, Homo sapien
gacaagctaacatggtgggaaacca

SEQ ID NO: 2877425 - DNA, 25 bp, Homo sapien
ccacagtggtggatacttgtcaaca

SEQ ID NO: 2877426 - DNA, 25 bp, Homo sapien
taatgtaaacgacggcatctgggtg

SEQ ID NO: 2877427 - DNA, 25 bp, Homo sapien
cagagcatgtttagggcagggtaaa

SEQ ID NO: 2877428 - DNA, 25 bp, Homo sapien
cgaatccagagtgtaccacagcaag

SEQ ID NO: 2877429 - DNA, 25 bp, Homo sapien
cctgctgtcggcgtgtgtgggaaag

SEQ ID NO: 2877430 - DNA, 25 bp, Homo sapien
gaaccatgatcctagcagcccaggc

SEQ ID NO: 2877431 - DNA, 25 bp, Homo sapien
aggtctgggaaccatgatcctagca

SEQ ID NO: 2877432 - DNA, 25 bp, Homo sapien
tctgggaaccatgatcctagcagcc

SEQ ID NO: 2877433 - DNA, 25 bp, Homo sapien
atctcgccgtcttgtccgggctctc

SEQ ID NO: 2877434 - DNA, 25 bp, Homo sapien
catctcgccgtcttgtccgggctct

SEQ ID NO: 2877435 - DNA, 25 bp, Homo sapien
atctttcccagtgtcgccaggaggg

SEQ ID NO: 2877436 - DNA, 25 bp, Homo sapien
tcccagtgtcgccaggagggccccg

SEQ ID NO: 2877437 - DNA, 25 bp, Homo sapien
tttcccagtgtcgccaggagggccc

SEQ ID NO: 2877438 - DNA, 25 bp, Homo sapien
tctttcccagtgtcgccaggagggc

SEQ ID NO: 2877439 - DNA, 25 bp, Homo sapien
gggcttggcatgactctgaggggga

SEQ ID NO: 2877440 - DNA, 25 bp, Homo sapien
gcttggcatgactctgagggggagg

SEQ ID NO: 2877441 - DNA, 25 bp, Homo sapien
atggggcttggcatgactctgaggg

SEQ ID NO: 2877442 - DNA, 25 bp, Homo sapien
ttggcatgactctgagggggagggg

SEQ ID NO: 2877443 - DNA, 25 bp, Homo sapien
gcgattgtacaggtgatggtctcta

SEQ ID NO: 2877444 - DNA, 25 bp, Homo sapien
ccggattgagccgtgggaaaaccat

SEQ ID NO: 2877445 - DNA, 25 bp, Homo sapien
tggtctctacttataaagcccggat

SEQ ID NO: 2877446 - DNA, 25 bp, Homo sapien
tcagccagtctaccttgaggatccg

SEQ ID NO: 2877447 - DNA, 25 bp, Homo sapien
gagcgcccaccagcatccacgccac

SEQ ID NO: 2877448 - DNA, 25 bp, Homo sapien
cagctgagcgcccaccagcatccac

SEQ ID NO: 2877449 - DNA, 25 bp, Homo sapien
tgagcgcccaccagcatccacgcca

SEQ ID NO: 2877450 - DNA, 25 bp, Homo sapien
gctgagcgcccaccagcatccacgc

SEQ ID NO: 2877451 - DNA, 25 bp, Homo sapien
gggcttccaccggtgctatgggtgg

SEQ ID NO: 2877452 - DNA, 25 bp, Homo sapien
tggtaagcatggagacctggccgtc

SEQ ID NO: 2877453 - DNA, 25 bp, Homo sapien
agagacactccacctgcgcaagagg

SEQ ID NO: 2877454 - DNA, 25 bp, Homo sapien
gacctggccgtcttccagagacact

SEQ ID NO: 2877455 - DNA, 25 bp, Homo sapien
ccgggggccaaagtctcctggtgca

SEQ ID NO: 2877456 - DNA, 25 bp, Homo sapien
gggggccaaagtctcctggtgcacc

SEQ ID NO: 2877457 - DNA, 25 bp, Homo sapien
cgggggccaaagtctcctggtgcac

SEQ ID NO: 2877458 - DNA, 25 bp, Homo sapien
acaaaagacagggagaggcatcacc

SEQ ID NO: 2877459 - DNA, 25 bp, Homo sapien
gggaacaaaagacagggagaggcat

SEQ ID NO: 2877460 - DNA, 25 bp, Homo sapien
ctgggaacaaaagacagggagaggc

SEQ ID NO: 2877461 - DNA, 25 bp, Homo sapien
gaacaaaagacagggagaggcatca

SEQ ID NO: 2877462 - DNA, 25 bp, Homo sapien
ggcttgccatccaaacccaggggtc

SEQ ID NO: 2877463 - DNA, 25 bp, Homo sapien
gcttgccatccaaacccaggggtcc

SEQ ID NO: 2877464 - DNA, 25 bp, Homo sapien
cagctgacgggaagtgtgaccttca

SEQ ID NO: 2877465 - DNA, 25 bp, Homo sapien
cagctcattttggtgccagccgtgg

SEQ ID NO: 2877466 - DNA, 25 bp, Homo sapien
tggaaatccagagtagggagcagca

SEQ ID NO: 2877467 - DNA, 25 bp, Homo sapien
tgaccttcacagaagggtgaccgcc

SEQ ID NO: 2877468 - DNA, 25 bp, Homo sapien
ctcctgccccacatacccatccttc

SEQ ID NO: 2877469 - DNA, 25 bp, Homo sapien
tgggctgctgccaggaggatgcaaa

SEQ ID NO: 2877470 - DNA, 25 bp, Homo sapien
ctgggctgctgccaggaggatgcaa

SEQ ID NO: 2877471 - DNA, 25 bp, Homo sapien
ggctgctgccaggaggatgcaaaaa

SEQ ID NO: 2877472 - DNA, 25 bp, Homo sapien
gctgctgccaggaggatgcaaaaaa

SEQ ID NO: 2877473 - DNA, 25 bp, Homo sapien
tggggtggccgcctcctgtgaatgg

SEQ ID NO: 2877474 - DNA, 25 bp, Homo sapien
ggccccactgacctggggtggccgc

SEQ ID NO: 2877475 - DNA, 25 bp, Homo sapien
ctcgggccccactgacctggggtgg

SEQ ID NO: 2877476 - DNA, 25 bp, Homo sapien
ggggtggccgcctcctgtgaatggg

SEQ ID NO: 2877477 - DNA, 25 bp, Homo sapien
cagtgctggaccaagacaagaggct

SEQ ID NO: 2877478 - DNA, 25 bp, Homo sapien
tgctggaccaagacaagaggctgga

SEQ ID NO: 2877479 - DNA, 25 bp, Homo sapien
tggaccaagacaagaggctggactc

SEQ ID NO: 2877480 - DNA, 25 bp, Homo sapien
gaccaagacaagaggctggactcaa

SEQ ID NO: 2877481 - DNA, 25 bp, Homo sapien
cgacctcaggaagaaggccatcatg

SEQ ID NO: 2877482 - DNA, 25 bp, Homo sapien
gggtctgtgtgtaagctggggctgg

SEQ ID NO: 2877483 - DNA, 25 bp, Homo sapien
gggtagccatctcgtcctgattgcc

SEQ ID NO: 2877484 - DNA, 25 bp, Homo sapien
cgggtagccatctcgtcctgattgc

SEQ ID NO: 2877485 - DNA, 25 bp, Homo sapien
cacagtccaggacacttactggagg

SEQ ID NO: 2877486 - DNA, 25 bp, Homo sapien
cagtccaggacacttactggaggac

SEQ ID NO: 2877487 - DNA, 25 bp, Homo sapien
gcaacagagagagaaccaaacatct

SEQ ID NO: 2877488 - DNA, 25 bp, Homo sapien
gagagagaaccaaacatcttatctt

SEQ ID NO: 2877489 - DNA, 25 bp, Homo sapien
acctctccccggaaggctttgatgc

SEQ ID NO: 2877490 - DNA, 25 bp, Homo sapien
cctctccccggaaggctttgatgct

SEQ ID NO: 2877491 - DNA, 25 bp, Homo sapien
ctctccccggaaggctttgatgctg

SEQ ID NO: 2877492 - DNA, 25 bp, Homo sapien
cagaaggagcacctttgcccttgga

SEQ ID NO: 2877493 - DNA, 25 bp, Homo sapien
agagcagaaggagcacctttgccct

SEQ ID NO: 2877494 - DNA, 25 bp, Homo sapien
gtggtggtgacagttcccacatgca

SEQ ID NO: 2877495 - DNA, 25 bp, Homo sapien
tggtggtgacagttcccacatgcat

SEQ ID NO: 2877496 - DNA, 25 bp, Homo sapien
tccacctgcccctcctcctcgatct

SEQ ID NO: 2877497 - DNA, 25 bp, Homo sapien
cacctgcccctcctcctcgatctgt

SEQ ID NO: 2877498 - DNA, 25 bp, Homo sapien
ctgtacctgcctttccacctgcccc

SEQ ID NO: 2877499 - DNA, 25 bp, Homo sapien
cctgcccctcctcctcgatctgttc

SEQ ID NO: 2877500 - DNA, 25 bp, Homo sapien
catcttcggagccctctgcacttga

SEQ ID NO: 2877501 - DNA, 25 bp, Homo sapien
ctggaggccgtcacatcttcggagc

SEQ ID NO: 2877502 - DNA, 25 bp, Homo sapien
ctggagatggactgtacggcctgca

SEQ ID NO: 2877503 - DNA, 25 bp, Homo sapien
ttgacttcttgtactaggtttgtgc

SEQ ID NO: 2877504 - DNA, 25 bp, Homo sapien
tatggtggtgtcccgaggtccagcc

SEQ ID NO: 2877505 - DNA, 25 bp, Homo sapien
tggtgtcccgaggtccagcccttct

SEQ ID NO: 2877506 - DNA, 25 bp, Homo sapien
tctgcgcacggccttcaaacatgtg

SEQ ID NO: 2877507 - DNA, 25 bp, Homo sapien
tgttccaagcataggatggttccac

SEQ ID NO: 2877508 - DNA, 25 bp, Homo sapien
tgccgctctgtgtgtgccggagcac

SEQ ID NO: 2877509 - DNA, 25 bp, Homo sapien
gccgctctgtgtgtgccggagcacg

SEQ ID NO: 2877510 - DNA, 25 bp, Homo sapien
gagagccctggacatccatggtgag

SEQ ID NO: 2877511 - DNA, 25 bp, Homo sapien
gctaggcttgaaggacaaagggtaa

SEQ ID NO: 2877512 - DNA, 25 bp, Homo sapien
gagatgttctgggtgcgggaagaca

SEQ ID NO: 2877513 - DNA, 25 bp, Homo sapien
gaagacataagagtgaaggctcaga

SEQ ID NO: 2877514 - DNA, 25 bp, Homo sapien
gttgtgctgaaggacccatggggga

SEQ ID NO: 2877515 - DNA, 25 bp, Homo sapien
tgtgctgaaggacccatgggggagg

SEQ ID NO: 2877516 - DNA, 25 bp, Homo sapien
ccggttgtgctgaaggacccatggg

SEQ ID NO: 2877517 - DNA, 25 bp, Homo sapien
tgaaggacccatgggggagggtgtg

SEQ ID NO: 2877518 - DNA, 25 bp, Homo sapien
cagggtcgcctcttctcccaggctt

SEQ ID NO: 2877519 - DNA, 25 bp, Homo sapien
tcttctcccaggcttgccgcgccgt

SEQ ID NO: 2877520 - DNA, 25 bp, Homo sapien
cgcctcttctcccaggcttgccgcg

SEQ ID NO: 2877521 - DNA, 25 bp, Homo sapien
aggcttgccgcgccgtccagggggc

SEQ ID NO: 2877522 - DNA, 25 bp, Homo sapien
tccgctcgcaacagctttctgggag

SEQ ID NO: 2877523 - DNA, 25 bp, Homo sapien
ctgtccgctcgcaacagctttctgg

SEQ ID NO: 2877524 - DNA, 25 bp, Homo sapien
cgctcgcaacagctttctgggagtg

SEQ ID NO: 2877525 - DNA, 25 bp, Homo sapien
tgtccgctcgcaacagctttctggg

SEQ ID NO: 2877526 - DNA, 25 bp, Homo sapien
cccttctcgcccctgtttcagtgaa

SEQ ID NO: 2877527 - DNA, 25 bp, Homo sapien
tttcagtgaagttgggtgcaggtac

SEQ ID NO: 2877528 - DNA, 25 bp, Homo sapien
gcatttgatacgtcttgctcaccca

SEQ ID NO: 2877529 - DNA, 25 bp, Homo sapien
gggtgcaggtacaagattgcaatgt

SEQ ID NO: 2877530 - DNA, 25 bp, Homo sapien
ccagagccagtcacaccggatgact

SEQ ID NO: 2877531 - DNA, 25 bp, Homo sapien
ctgggaacctccagagccagtcaca

SEQ ID NO: 2877532 - DNA, 25 bp, Homo sapien
tatctccacgtgcttgtcccaccag

SEQ ID NO: 2877533 - DNA, 25 bp, Homo sapien
agcatctcagaccagttgtggccca

SEQ ID NO: 2877534 - DNA, 25 bp, Homo sapien
ctcggcccagcgaagcagtaggccc

SEQ ID NO: 2877535 - DNA, 25 bp, Homo sapien
gcttcggggctcttgccaggcctca

SEQ ID NO: 2877536 - DNA, 25 bp, Homo sapien
acccacaaagcttcggggctcttgc

SEQ ID NO: 2877537 - DNA, 25 bp, Homo sapien
cagcgaagcagtaggccccgggccc

SEQ ID NO: 2877538 - DNA, 25 bp, Homo sapien
tgtttggaacaacggttactgtcca

SEQ ID NO: 2877539 - DNA, 25 bp, Homo sapien
cgtcttcgtcatgtttgtttggaac

SEQ ID NO: 2877540 - DNA, 25 bp, Homo sapien
gccagggttttaaggcaccgccata

SEQ ID NO: 2877541 - DNA, 25 bp, Homo sapien
atccatcatgctgaaccgggagccg

SEQ ID NO: 2877542 - DNA, 25 bp, Homo sapien
gcttggacacggtgccattcggtgg

SEQ ID NO: 2877543 - DNA, 25 bp, Homo sapien
gtgacagaccccgaccaccccagtg

SEQ ID NO: 2877544 - DNA, 25 bp, Homo sapien
aaggtggcttggacacggtgccatt

SEQ ID NO: 2877545 - DNA, 25 bp, Homo sapien
gacacggtgccattcggtggatgaa

SEQ ID NO: 2877546 - DNA, 25 bp, Homo sapien
gtgctgcagccccaacacaccgtgt

SEQ ID NO: 2877547 - DNA, 25 bp, Homo sapien
ctgcagccccaacacaccgtgttct

SEQ ID NO: 2877548 - DNA, 25 bp, Homo sapien
cagccgtgctgcagccccaacacac

SEQ ID NO: 2877549 - DNA, 25 bp, Homo sapien
agccgtgctgcagccccaacacacc

SEQ ID NO: 2877550 - DNA, 25 bp, Homo sapien
acacaatcatgaacatcttgaagac

SEQ ID NO: 2877551 - DNA, 25 bp, Homo sapien
caacacaatcatgaacatcttgaag

SEQ ID NO: 2877552 - DNA, 25 bp, Homo sapien
ttttgttggaggtatgcagattttc

SEQ ID NO: 2877553 - DNA, 25 bp, Homo sapien
cttttgttggaggtatgcagatttt

SEQ ID NO: 2877554 - DNA, 25 bp, Homo sapien
taaacaggaccaaggtggacattca

SEQ ID NO: 2877555 - DNA, 25 bp, Homo sapien
caatgaccatgcaaagaggctccca

SEQ ID NO: 2877556 - DNA, 25 bp, Homo sapien
tccctttttaactgtcgtgcctgcg

SEQ ID NO: 2877557 - DNA, 25 bp, Homo sapien
cctgggtctgatgtttgccgtgcac

SEQ ID NO: 2877558 - DNA, 25 bp, Homo sapien
ccctgtgactatggcgccatcagtt

SEQ ID NO: 2877559 - DNA, 25 bp, Homo sapien
tgactatggcgccatcagttgaaag

SEQ ID NO: 2877560 - DNA, 25 bp, Homo sapien
tcctcatcccctgtgactatggcgc

SEQ ID NO: 2877561 - DNA, 25 bp, Homo sapien
cggcggaggcctgggtagcgtcctc

SEQ ID NO: 2877562 - DNA, 25 bp, Homo sapien
tgacagcagcgcagcaggttgctcc

SEQ ID NO: 2877563 - DNA, 25 bp, Homo sapien
ttaatgacagcagcgcagcaggttg

SEQ ID NO: 2877564 - DNA, 25 bp, Homo sapien
gaagccctttaatgacagcagcgca

SEQ ID NO: 2877565 - DNA, 25 bp, Homo sapien
tcctggaagccctttaatgacagca

SEQ ID NO: 2877566 - DNA, 25 bp, Homo sapien
tgggtcactggccagcaccgggaat

SEQ ID NO: 2877567 - DNA, 25 bp, Homo sapien
tcggcttgtgtttggtgggaaccat

SEQ ID NO: 2877568 - DNA, 25 bp, Homo sapien
cagcaccgggtaaggtgttgctcct

SEQ ID NO: 2877569 - DNA, 25 bp, Homo sapien
ccagcatcgggtagagaagtcggct

SEQ ID NO: 2877570 - DNA, 25 bp, Homo sapien
tgagcaaaggggtcccccagtgaag

SEQ ID NO: 2877571 - DNA, 25 bp, Homo sapien
ctgagcaaaggggtcccccagtgaa

SEQ ID NO: 2877572 - DNA, 25 bp, Homo sapien
tggagctccagcaggtctgggatgg

SEQ ID NO: 2877573 - DNA, 25 bp, Homo sapien
agcaggtctgggatggggactgcca

SEQ ID NO: 2877574 - DNA, 25 bp, Homo sapien
tccagcaggtctgggatggggactg

SEQ ID NO: 2877575 - DNA, 25 bp, Homo sapien
ctggagctccagcaggtctgggatg

SEQ ID NO: 2877576 - DNA, 25 bp, Homo sapien
actcatccgaaggtggcctcacagg

SEQ ID NO: 2877577 - DNA, 25 bp, Homo sapien
ccccttgatacctgcagtttcctgg

SEQ ID NO: 2877578 - DNA, 25 bp, Homo sapien
tttcctgggcggagacacaggctgc

SEQ ID NO: 2877579 - DNA, 25 bp, Homo sapien
cagtggctcaaaggcccccttgata

SEQ ID NO: 2877580 - DNA, 25 bp, Homo sapien
aagagtcttcatgtggacagtctca

SEQ ID NO: 2877581 - DNA, 25 bp, Homo sapien
gggcgatctgtgtctggcattacca

SEQ ID NO: 2877582 - DNA, 25 bp, Homo sapien
cgtagagaatttgggtctcgatcca

SEQ ID NO: 2877583 - DNA, 25 bp, Homo sapien
gacagtctcagggacaacacgtaga

SEQ ID NO: 2877584 - DNA, 25 bp, Homo sapien
cgcgcactgaggcactgggagccgc

SEQ ID NO: 2877585 - DNA, 25 bp, Homo sapien
gggagccgcactggcccgagacctt

SEQ ID NO: 2877586 - DNA, 25 bp, Homo sapien
ctgaggcactgggagccgcactggc

SEQ ID NO: 2877587 - DNA, 25 bp, Homo sapien
cactgggagccgcactggcccgaga

SEQ ID NO: 2877588 - DNA, 25 bp, Homo sapien
ggttgccgaccctgagaaggccaaa

SEQ ID NO: 2877589 - DNA, 25 bp, Homo sapien
atgcccagcaagagacacggagacg

SEQ ID NO: 2877590 - DNA, 25 bp, Homo sapien
aggaaagtcacgcttcgcagctcca

SEQ ID NO: 2877591 - DNA, 25 bp, Homo sapien
gtgtcaggacgctcacgatgaatga

SEQ ID NO: 2877592 - DNA, 25 bp, Homo sapien
ggaggtgagcagggggattctggct

SEQ ID NO: 2877593 - DNA, 25 bp, Homo sapien
ctggaggtgagcagggggattctgg

SEQ ID NO: 2877594 - DNA, 25 bp, Homo sapien
tggaggtgagcagggggattctggc

SEQ ID NO: 2877595 - DNA, 25 bp, Homo sapien
caaacctttggatgagcaataacgg

SEQ ID NO: 2877596 - DNA, 25 bp, Homo sapien
attttctcccgctgtagaagcaaac

SEQ ID NO: 2877597 - DNA, 25 bp, Homo sapien
gtagaagcaaacctttggatgagca

SEQ ID NO: 2877598 - DNA, 25 bp, Homo sapien
gatgagcaataacgggtgtgcacag

SEQ ID NO: 2877599 - DNA, 25 bp, Homo sapien
caggatcgactgcctcaggagaggg

SEQ ID NO: 2877600 - DNA, 25 bp, Homo sapien
aggatcgactgcctcaggagagggg

SEQ ID NO: 2877601 - DNA, 25 bp, Homo sapien
ggatcgactgcctcaggagaggggc

SEQ ID NO: 2877602 - DNA, 25 bp, Homo sapien
accgtccgctggggaaacaagtgag

SEQ ID NO: 2877603 - DNA, 25 bp, Homo sapien
ctgtgcgcctttgaggttttaaccg

SEQ ID NO: 2877604 - DNA, 25 bp, Homo sapien
ccgtccgctggggaaacaagtgagt

SEQ ID NO: 2877605 - DNA, 25 bp, Homo sapien
ttttgttcagaaccagatgtcaaat

SEQ ID NO: 2877606 - DNA, 25 bp, Homo sapien
gttcagaaccagatgtcaaatccaa

SEQ ID NO: 2877607 - DNA, 25 bp, Homo sapien
aatccaactgtctaataaaaggctt

SEQ ID NO: 2877608 - DNA, 25 bp, Homo sapien
caactgtctaataaaaggcttctga

SEQ ID NO: 2877609 - DNA, 25 bp, Homo sapien
cttaacctcgagcagctgtgtgggc

SEQ ID NO: 2877610 - DNA, 25 bp, Homo sapien
ctggggcttaacctcgagcagctgt

SEQ ID NO: 2877611 - DNA, 25 bp, Homo sapien
agctgtgtgggctttatcaggccaa

SEQ ID NO: 2877612 - DNA, 25 bp, Homo sapien
gctgtgtgggctttatcaggccaac

SEQ ID NO: 2877613 - DNA, 25 bp, Homo sapien
gaacaacagaagacgtttttgacat

SEQ ID NO: 2877614 - DNA, 25 bp, Homo sapien
gaagaacaacagaagacgtttttga

SEQ ID NO: 2877615 - DNA, 25 bp, Homo sapien
ctgaagaacaacagaagacgttttt

SEQ ID NO: 2877616 - DNA, 25 bp, Homo sapien
agaacaacagaagacgtttttgaca

SEQ ID NO: 2877617 - DNA, 25 bp, Homo sapien
tgtgagaccagctcccaatgcatgt

SEQ ID NO: 2877618 - DNA, 25 bp, Homo sapien
gagaccagctcccaatgcatgtgga

SEQ ID NO: 2877619 - DNA, 25 bp, Homo sapien
gatcatgtgagaccagctcccaatg

SEQ ID NO: 2877620 - DNA, 25 bp, Homo sapien
cagctcccaatgcatgtggaaggaa

SEQ ID NO: 2877621 - DNA, 25 bp, Homo sapien
aagtgttgatctgaaggcgcttgtg

SEQ ID NO: 2877622 - DNA, 25 bp, Homo sapien
cagcttctcgtaacaaaagcctcaa

SEQ ID NO: 2877623 - DNA, 25 bp, Homo sapien
ttgtccagcttctcgtaacaaaagc

SEQ ID NO: 2877624 - DNA, 25 bp, Homo sapien
ctgaaggcgcttgtgagccttttgg

SEQ ID NO: 2877625 - DNA, 25 bp, Homo sapien
gagaagttcaaaggatcttttctgg

SEQ ID NO: 2877626 - DNA, 25 bp, Homo sapien
aagagaagttcaaaggatcttttct

SEQ ID NO: 2877627 - DNA, 25 bp, Homo sapien
agaagttcaaaggatcttttctggc

SEQ ID NO: 2877628 - DNA, 25 bp, Homo sapien
ctaaagagaagttcaaaggatcttt

SEQ ID NO: 2877629 - DNA, 25 bp, Homo sapien
tgagattcccgggaacagagaggca

SEQ ID NO: 2877630 - DNA, 25 bp, Homo sapien
tttggtgagattcccgggaacagag

SEQ ID NO: 2877631 - DNA, 25 bp, Homo sapien
ttcccgggaacagagaggcaaggaa

SEQ ID NO: 2877632 - DNA, 25 bp, Homo sapien
ctttggtgagattcccgggaacaga

SEQ ID NO: 2877633 - DNA, 25 bp, Homo sapien
ccagttccggcgttctctcttcaga

SEQ ID NO: 2877634 - DNA, 25 bp, Homo sapien
agaaccggaagacggcagccattcg

SEQ ID NO: 2877635 - DNA, 25 bp, Homo sapien
agccattcgcggagcgcctactgtg

SEQ ID NO: 2877636 - DNA, 25 bp, Homo sapien
tcatgtagtgaacagtcagaaccgg

SEQ ID NO: 2877637 - DNA, 25 bp, Homo sapien
ctcccgcattcgcaccacaggccac

SEQ ID NO: 2877638 - DNA, 25 bp, Homo sapien
acaggccacaaacactggcagccca

SEQ ID NO: 2877639 - DNA, 25 bp, Homo sapien
acaaacactggcagcccaagggcca

SEQ ID NO: 2877640 - DNA, 25 bp, Homo sapien
gcccaagggccagatgggcttgcat

SEQ ID NO: 2877641 - DNA, 25 bp, Homo sapien
agtgaaatggcgacatctcggctca

SEQ ID NO: 2877642 - DNA, 25 bp, Homo sapien
ctgcaatctccgcctcctggattca

SEQ ID NO: 2877643 - DNA, 25 bp, Homo sapien
tggattcaagcgattctcttgcctc

SEQ ID NO: 2877644 - DNA, 25 bp, Homo sapien
gctggagtgaaatggcgacatctcg

SEQ ID NO: 2877645 - DNA, 25 bp, Homo sapien
cacaccaagtcctttgtaggtggca

SEQ ID NO: 2877646 - DNA, 25 bp, Homo sapien
gccacaccaagtcctttgtaggtgg

SEQ ID NO: 2877647 - DNA, 25 bp, Homo sapien
caccaagtcctttgtaggtggcagg

SEQ ID NO: 2877648 - DNA, 25 bp, Homo sapien
ctaagctgtggccacaccaagtcct

SEQ ID NO: 2877649 - DNA, 25 bp, Homo sapien
tgttctcgtcaaggttgacattggt

SEQ ID NO: 2877650 - DNA, 25 bp, Homo sapien
ctctgactgggtttttgctctcagt

SEQ ID NO: 2877651 - DNA, 25 bp, Homo sapien
tcagtccctagagccaaatgtcttc

SEQ ID NO: 2877652 - DNA, 25 bp, Homo sapien
caggaactctgttctcgtcaaggtt

SEQ ID NO: 2877653 - DNA, 25 bp, Homo sapien
taacgttagacacgatgtcagcctt

SEQ ID NO: 2877654 - DNA, 25 bp, Homo sapien
aagctcctgcacgttcttgcccgaa

SEQ ID NO: 2877655 - DNA, 25 bp, Homo sapien
cagcaccttctaggtacaaagctcc

SEQ ID NO: 2877656 - DNA, 25 bp, Homo sapien
tctgcttaacgttagacacgatgtc

SEQ ID NO: 2877657 - DNA, 25 bp, Homo sapien
tgggccaccctgttttcgtgcacac

SEQ ID NO: 2877658 - DNA, 25 bp, Homo sapien
gccccattgggaatgcctgggccac

SEQ ID NO: 2877659 - DNA, 25 bp, Homo sapien
atccgggcgcagatcctgctctggc

SEQ ID NO: 2877660 - DNA, 25 bp, Homo sapien
tccacctgcgatcgcgctctgtgct

SEQ ID NO: 2877661 - DNA, 25 bp, Homo sapien
ctgagtgagtgtccggagtgactgc

SEQ ID NO: 2877662 - DNA, 25 bp, Homo sapien
tgagtgtccggagtgactgccagct

SEQ ID NO: 2877663 - DNA, 25 bp, Homo sapien
ccttgtgacaaggactgagtgagtg

SEQ ID NO: 2877664 - DNA, 25 bp, Homo sapien
ttctgctgctcggaactccttgtga

SEQ ID NO: 2877665 - DNA, 25 bp, Homo sapien
gggcctcttggatgctcctcctggc

SEQ ID NO: 2877666 - DNA, 25 bp, Homo sapien
gcccagcacccggggtgcgggtgta

SEQ ID NO: 2877667 - DNA, 25 bp, Homo sapien
taccttcttttctgctcgtgattgg

SEQ ID NO: 2877668 - DNA, 25 bp, Homo sapien
ccttcttttctgctcgtgattggct

SEQ ID NO: 2877669 - DNA, 25 bp, Homo sapien
cagcacccggggtgcgggtgtacct

SEQ ID NO: 2877670 - DNA, 25 bp, Homo sapien
cagggtcgccctttcatgttccttg

SEQ ID NO: 2877671 - DNA, 25 bp, Homo sapien
tgtgcagggtcgccctttcatgttc

SEQ ID NO: 2877672 - DNA, 25 bp, Homo sapien
gcagggtcgccctttcatgttcctt

SEQ ID NO: 2877673 - DNA, 25 bp, Homo sapien
tgcagggtcgccctttcatgttcct

SEQ ID NO: 2877674 - DNA, 25 bp, Homo sapien
gggccccaggttcctgggtctctgc

SEQ ID NO: 2877675 - DNA, 25 bp, Homo sapien
gtctctgcccactggaattctgcca

SEQ ID NO: 2877676 - DNA, 25 bp, Homo sapien
aggtgacttcactggggccccaggt

SEQ ID NO: 2877677 - DNA, 25 bp, Homo sapien
tgcccactggaattctgccactcac

SEQ ID NO: 2877678 - DNA, 25 bp, Homo sapien
gggttccgatttcctaaggacatca

SEQ ID NO: 2877679 - DNA, 25 bp, Homo sapien
gatttcctaaggacatcaatggcac

SEQ ID NO: 2877680 - DNA, 25 bp, Homo sapien
taaggacatcaatggcaccagttgc

SEQ ID NO: 2877681 - DNA, 25 bp, Homo sapien
gacatcaatggcaccagttgcacaa

SEQ ID NO: 2877682 - DNA, 25 bp, Homo sapien
cctgggtgagttcatacagacgtaa

SEQ ID NO: 2877683 - DNA, 25 bp, Homo sapien
tacagacgtaaagacatgagcggcc

SEQ ID NO: 2877684 - DNA, 25 bp, Homo sapien
gagttcatacagacgtaaagacatg

SEQ ID NO: 2877685 - DNA, 25 bp, Homo sapien
gatgccctgggtgagttcatacaga

SEQ ID NO: 2877686 - DNA, 25 bp, Homo sapien
gggcagtgtctagggcggtcctgag

SEQ ID NO: 2877687 - DNA, 25 bp, Homo sapien
tgtctagggcggtcctgaggcagga

SEQ ID NO: 2877688 - DNA, 25 bp, Homo sapien
cacagggcagtgtctagggcggtcc

SEQ ID NO: 2877689 - DNA, 25 bp, Homo sapien
gtgtctagggcggtcctgaggcagg

SEQ ID NO: 2877690 - DNA, 25 bp, Homo sapien
ctggcccctctgtggccagacctac

SEQ ID NO: 2877691 - DNA, 25 bp, Homo sapien
gcgggagtcaagaagcaaacccagt

SEQ ID NO: 2877692 - DNA, 25 bp, Homo sapien
gagggtgcttgtgggacgggaccca

SEQ ID NO: 2877693 - DNA, 25 bp, Homo sapien
ttcatcagccaagatgcgggagtca

SEQ ID NO: 2877694 - DNA, 25 bp, Homo sapien
tccttcccaatgttcatcagccaag

SEQ ID NO: 2877695 - DNA, 25 bp, Homo sapien
ctgaagggatgtgactgctgatctg

SEQ ID NO: 2877696 - DNA, 25 bp, Homo sapien
tgatctggccatgcatgatgcatgg

SEQ ID NO: 2877697 - DNA, 25 bp, Homo sapien
gcatgatgcatggacaggcaagagc

SEQ ID NO: 2877698 - DNA, 25 bp, Homo sapien
atgtgggaaccttctgaagggatgt

SEQ ID NO: 2877699 - DNA, 25 bp, Homo sapien
tccagatggaagtcttgctcccaag

SEQ ID NO: 2877700 - DNA, 25 bp, Homo sapien
catcgcagtccagatggaagtcttg

SEQ ID NO: 2877701 - DNA, 25 bp, Homo sapien
gcagtccagatggaagtcttgctcc

SEQ ID NO: 2877702 - DNA, 25 bp, Homo sapien
ggaagtcttgctcccaagtcacctc

SEQ ID NO: 2877703 - DNA, 25 bp, Homo sapien
gttctgttagtgctagtcgcagtcc

SEQ ID NO: 2877704 - DNA, 25 bp, Homo sapien
tctgttagtgctagtcgcagtccgt

SEQ ID NO: 2877705 - DNA, 25 bp, Homo sapien
tgttctgttagtgctagtcgcagtc

SEQ ID NO: 2877706 - DNA, 25 bp, Homo sapien
tgttagtgctagtcgcagtccgttt

SEQ ID NO: 2877707 - DNA, 25 bp, Homo sapien
ggattacaggccagaattatgagaa

SEQ ID NO: 2877708 - DNA, 25 bp, Homo sapien
aaaggtcttaccagccgtatgttgc

SEQ ID NO: 2877709 - DNA, 25 bp, Homo sapien
agtaggatggaccagccgtctagcc

SEQ ID NO: 2877710 - DNA, 25 bp, Homo sapien
taataacctgttcatccaaactggg

SEQ ID NO: 2877711 - DNA, 25 bp, Homo sapien
gtctagccaccgagacagggcagtg

SEQ ID NO: 2877712 - DNA, 25 bp, Homo sapien
ctagctgtaatggctgtttccacca

SEQ ID NO: 2877713 - DNA, 25 bp, Homo sapien
gtttccaccacaaggggcagccgcg

SEQ ID NO: 2877714 - DNA, 25 bp, Homo sapien
gcggcaaagacaggcccatcaccca

SEQ ID NO: 2877715 - DNA, 25 bp, Homo sapien
gggcagccgcggcaaagacaggccc

SEQ ID NO: 2877716 - DNA, 25 bp, Homo sapien
gggtcggccttccagttgttaatca

SEQ ID NO: 2877717 - DNA, 25 bp, Homo sapien
gcgtgtacacggaacccatcagaaa

SEQ ID NO: 2877718 - DNA, 25 bp, Homo sapien
tcagaacgctgacaggtgaaagctt

SEQ ID NO: 2877719 - DNA, 25 bp, Homo sapien
ccatcagaaaacaggggtcggcctt

SEQ ID NO: 2877720 - DNA, 25 bp, Homo sapien
ccacgtattgctgtttcctgtgtcc

SEQ ID NO: 2877721 - DNA, 25 bp, Homo sapien
agtccagggacccacgtattgctgt

SEQ ID NO: 2877722 - DNA, 25 bp, Homo sapien
gacccacgtattgctgtttcctgtg

SEQ ID NO: 2877723 - DNA, 25 bp, Homo sapien
cagggacccacgtattgctgtttcc

SEQ ID NO: 2877724 - DNA, 25 bp, Homo sapien
gggtgccatactgggctccaaaatg

SEQ ID NO: 2877725 - DNA, 25 bp, Homo sapien
ttctggattcgggtgccatactggg

SEQ ID NO: 2877726 - DNA, 25 bp, Homo sapien
tccagaaaggcatgcggcacagact

SEQ ID NO: 2877727 - DNA, 25 bp, Homo sapien
aaaggcatgcggcacagactctgcc

SEQ ID NO: 2877728 - DNA, 25 bp, Homo sapien
cttcagaccagagtacatgggaccc

SEQ ID NO: 2877729 - DNA, 25 bp, Homo sapien
catgggacccgttcccaggaagtgg

SEQ ID NO: 2877730 - DNA, 25 bp, Homo sapien
gctctttaatacaccccaggaagac

SEQ ID NO: 2877731 - DNA, 25 bp, Homo sapien
cacagctctttaatacaccccagga

SEQ ID NO: 2877732 - DNA, 25 bp, Homo sapien
caatgcggccatctttacccacaaa

SEQ ID NO: 2877733 - DNA, 25 bp, Homo sapien
caaagcacgtggagcccgtgcagcg

SEQ ID NO: 2877734 - DNA, 25 bp, Homo sapien
ccgtgcagcggggttcctcttcaaa

SEQ ID NO: 2877735 - DNA, 25 bp, Homo sapien
cagtattaggttacggggcccatct

SEQ ID NO: 2877736 - DNA, 25 bp, Homo sapien
tgggagtgttcgacaagattcaggc

SEQ ID NO: 2877737 - DNA, 25 bp, Homo sapien
tacacatgtaaagctgggtaccaga

SEQ ID NO: 2877738 - DNA, 25 bp, Homo sapien
ggtcactttctgatgtggacgtgca

SEQ ID NO: 2877739 - DNA, 25 bp, Homo sapien
tgaacaaccttgaatgtcctgaaga

SEQ ID NO: 2877740 - DNA, 25 bp, Homo sapien
ctggacttctgcaaggtcagcaaac

SEQ ID NO: 2877741 - DNA, 25 bp, Homo sapien
accagctctccaacgggtgcttcac

SEQ ID NO: 2877742 - DNA, 25 bp, Homo sapien
gctctccaacgggtgcttcactgca

SEQ ID NO: 2877743 - DNA, 25 bp, Homo sapien
tccaacgggtgcttcactgcacttc

SEQ ID NO: 2877744 - DNA, 25 bp, Homo sapien
tcccaggacaattagccttgacttg

SEQ ID NO: 2877745 - DNA, 25 bp, Homo sapien
gcccagagacacatgtggatggcat

SEQ ID NO: 2877746 - DNA, 25 bp, Homo sapien
tgcaccagcacacgcacatctgcct

SEQ ID NO: 2877747 - DNA, 25 bp, Homo sapien
agttttcagccccaataatgacatg

SEQ ID NO: 2877748 - DNA, 25 bp, Homo sapien
tctgggtcccggaacgcccagagac

SEQ ID NO: 2877749 - DNA, 25 bp, Homo sapien
tgatggtgacagctgctgcgatgtg

SEQ ID NO: 2877750 - DNA, 25 bp, Homo sapien
gttggggccttcagactataaatga

SEQ ID NO: 2877751 - DNA, 25 bp, Homo sapien
tttcccataggacatacccactctg

SEQ ID NO: 2877752 - DNA, 25 bp, Homo sapien
tgaggtttcccataggacataccca

SEQ ID NO: 2877753 - DNA, 25 bp, Homo sapien
tcagactataaatgaggtttcccat

SEQ ID NO: 2877754 - DNA, 25 bp, Homo sapien
tgcagcagagccggtgaagcacgtg

SEQ ID NO: 2877755 - DNA, 25 bp, Homo sapien
tgaagcacgtggtaggccgggtctg

SEQ ID NO: 2877756 - DNA, 25 bp, Homo sapien
agccggtgaagcacgtggtaggccg

SEQ ID NO: 2877757 - DNA, 25 bp, Homo sapien
gcagagccggtgaagcacgtggtag

SEQ ID NO: 2877758 - DNA, 25 bp, Homo sapien
cagctggtgcgtgcactccagggac

SEQ ID NO: 2877759 - DNA, 25 bp, Homo sapien
tccagggacttgatcagaaaccagg

SEQ ID NO: 2877760 - DNA, 25 bp, Homo sapien
gcagctggtgcgtgcactccaggga

SEQ ID NO: 2877761 - DNA, 25 bp, Homo sapien
agctggtgcgtgcactccagggact

SEQ ID NO: 2877762 - DNA, 25 bp, Homo sapien
gatcaccgtgggacattcactgagg

SEQ ID NO: 2877763 - DNA, 25 bp, Homo sapien
tctttagtgacaccaaaagaagatt

SEQ ID NO: 2877764 - DNA, 25 bp, Homo sapien
aattccagtatatgggatctgacag

SEQ ID NO: 2877765 - DNA, 25 bp, Homo sapien
gattcaaagatcaccgtgggacatt

SEQ ID NO: 2877766 - DNA, 25 bp, Homo sapien
acagcttgaggtagtcagcactgca

SEQ ID NO: 2877767 - DNA, 25 bp, Homo sapien
aagatggtaacagcttgaggtagtc

SEQ ID NO: 2877768 - DNA, 25 bp, Homo sapien
ccagcggaggcgagtgtcctcggag

SEQ ID NO: 2877769 - DNA, 25 bp, Homo sapien
ctctagagggaaagcaaactcatac

SEQ ID NO: 2877770 - DNA, 25 bp, Homo sapien
gctggagtgcggtggcgtgatttcg

SEQ ID NO: 2877771 - DNA, 25 bp, Homo sapien
gctcactgcaacctctgcctccagt

SEQ ID NO: 2877772 - DNA, 25 bp, Homo sapien
tgcctccagtgttcaagcgattctc

SEQ ID NO: 2877773 - DNA, 25 bp, Homo sapien
gcagagtttcacttttgtcgcccag

SEQ ID NO: 2877774 - DNA, 25 bp, Homo sapien
agagggtgggcatcccgccatgtgg

SEQ ID NO: 2877775 - DNA, 25 bp, Homo sapien
ggcatcccgccatgtggccctgagg

SEQ ID NO: 2877776 - DNA, 25 bp, Homo sapien
ctgtgagagggtgggcatcccgcca

SEQ ID NO: 2877777 - DNA, 25 bp, Homo sapien
ccccagccccatcgtggagagggct

SEQ ID NO: 2877778 - DNA, 25 bp, Homo sapien
cttccagagacacatacggcactgg

SEQ ID NO: 2877779 - DNA, 25 bp, Homo sapien
gagacacatacggcactggcctggg

SEQ ID NO: 2877780 - DNA, 25 bp, Homo sapien
agacacatacggcactggcctgggc

SEQ ID NO: 2877781 - DNA, 25 bp, Homo sapien
ccagagacacatacggcactggcct

SEQ ID NO: 2877782 - DNA, 25 bp, Homo sapien
acaccacggtctgccgaaggcggct

SEQ ID NO: 2877783 - DNA, 25 bp, Homo sapien
gtaaaatggacaccacggtctgccg

SEQ ID NO: 2877784 - DNA, 25 bp, Homo sapien
cacggtctgccgaaggcggctgtgg

SEQ ID NO: 2877785 - DNA, 25 bp, Homo sapien
aaaatggacaccacggtctgccgaa

SEQ ID NO: 2877786 - DNA, 25 bp, Homo sapien
caattctattcagcactactgaagg

SEQ ID NO: 2877787 - DNA, 25 bp, Homo sapien
gaaaagtcatcaccaacagaaagca

SEQ ID NO: 2877788 - DNA, 25 bp, Homo sapien
tagatacaagaccaacatgaaaagt

SEQ ID NO: 2877789 - DNA, 25 bp, Homo sapien
catgtggcaaggtaactagatacaa

SEQ ID NO: 2877790 - DNA, 25 bp, Homo sapien
gggcagacacattcggatggagctt

SEQ ID NO: 2877791 - DNA, 25 bp, Homo sapien
cattcggatggagcttcccgagcag

SEQ ID NO: 2877792 - DNA, 25 bp, Homo sapien
gcttcccgagcagtccggatcttcg

SEQ ID NO: 2877793 - DNA, 25 bp, Homo sapien
ggatcttcgctagtccgtccaactt

SEQ ID NO: 2877794 - DNA, 25 bp, Homo sapien
ttttcaaatagaataccaagagtta

SEQ ID NO: 2877795 - DNA, 25 bp, Homo sapien
gcaggtttctgctttgttacagcat

SEQ ID NO: 2877796 - DNA, 25 bp, Homo sapien
ttactggtgagtccctgaaaaggtg

SEQ ID NO: 2877797 - DNA, 25 bp, Homo sapien
ccctgaaaaggtggcaggtttctgc

SEQ ID NO: 2877798 - DNA, 25 bp, Homo sapien
gacagaaacagcgtcctgcaagtca

SEQ ID NO: 2877799 - DNA, 25 bp, Homo sapien
aaacagcgtcctgcaagtcaaaagc

SEQ ID NO: 2877800 - DNA, 25 bp, Homo sapien
gaaacagcgtcctgcaagtcaaaag

SEQ ID NO: 2877801 - DNA, 25 bp, Homo sapien
cagaaacagcgtcctgcaagtcaaa

SEQ ID NO: 2877802 - DNA, 25 bp, Homo sapien
gagaactgctttaacgcgagaggcg

SEQ ID NO: 2877803 - DNA, 25 bp, Homo sapien
agaactgctttaacgcgagaggcgg

SEQ ID NO: 2877804 - DNA, 25 bp, Homo sapien
agctcccacaaggtgagggacccac

SEQ ID NO: 2877805 - DNA, 25 bp, Homo sapien
tcccacaaggtgagggacccacgca

SEQ ID NO: 2877806 - DNA, 25 bp, Homo sapien
aacaaagctcccacaaggtgaggga

SEQ ID NO: 2877807 - DNA, 25 bp, Homo sapien
caaagctcccacaaggtgagggacc

SEQ ID NO: 2877808 - DNA, 25 bp, Homo sapien
gcagcctcccgaattgaagacatgg

SEQ ID NO: 2877809 - DNA, 25 bp, Homo sapien
aaaaggattctagggcaccgcagac

SEQ ID NO: 2877810 - DNA, 25 bp, Homo sapien
gaggatccccttcgagtaggaggca

SEQ ID NO: 2877811 - DNA, 25 bp, Homo sapien
tggagagatgaaagccaccaagatc

SEQ ID NO: 2877812 - DNA, 25 bp, Homo sapien
aggacaggacccggggaatccgctg

SEQ ID NO: 2877813 - DNA, 25 bp, Homo sapien
ccggggaatccgctggggctttcag

SEQ ID NO: 2877814 - DNA, 25 bp, Homo sapien
aatccgctggggctttcagcagggc

SEQ ID NO: 2877815 - DNA, 25 bp, Homo sapien
gggaatccgctggggctttcagcag

SEQ ID NO: 2877816 - DNA, 25 bp, Homo sapien
catgctgagcgcttgggatacatcc

SEQ ID NO: 2877817 - DNA, 25 bp, Homo sapien
tgttcagggtgtgcacgacatgctg

SEQ ID NO: 2877818 - DNA, 25 bp, Homo sapien
tgggacctcgattagcaaacagatg

SEQ ID NO: 2877819 - DNA, 25 bp, Homo sapien
ctcagaggctggacatgtgctaaca

SEQ ID NO: 2877820 - DNA, 25 bp, Homo sapien
ccccgtgagaacattccccaggaag

SEQ ID NO: 2877821 - DNA, 25 bp, Homo sapien
tgagaacactccccgtgagaacatt

SEQ ID NO: 2877822 - DNA, 25 bp, Homo sapien
ggccagagacatcctctgagaacac

SEQ ID NO: 2877823 - DNA, 25 bp, Homo sapien
ccagagacatcctctgagaacactc

SEQ ID NO: 2877824 - DNA, 25 bp, Homo sapien
gctgacgctcaggtaacactctatg

SEQ ID NO: 2877825 - DNA, 25 bp, Homo sapien
gggtaacactccacggctgaccctg

SEQ ID NO: 2877826 - DNA, 25 bp, Homo sapien
tggccccagctgactctagggtaac

SEQ ID NO: 2877827 - DNA, 25 bp, Homo sapien
tgactgatgtgtgggtaacactcca

SEQ ID NO: 2877828 - DNA, 25 bp, Homo sapien
caggtgcggctcggcccaggcgtcc

SEQ ID NO: 2877829 - DNA, 25 bp, Homo sapien
gctcctcctcgagcgccgccacccg

SEQ ID NO: 2877830 - DNA, 25 bp, Homo sapien
ggtgcggctcggcccaggcgtccag

SEQ ID NO: 2877831 - DNA, 25 bp, Homo sapien
ctccaggtgcggctcggcccaggcg

SEQ ID NO: 2877832 - DNA, 25 bp, Homo sapien
gacccggccgtcgtcgccgagcgcc

SEQ ID NO: 2877833 - DNA, 25 bp, Homo sapien
ggacccggccgtcgtcgccgagcgc

SEQ ID NO: 2877834 - DNA, 25 bp, Homo sapien
gccgccgagcccacggagagcagca

SEQ ID NO: 2877835 - DNA, 25 bp, Homo sapien
gcagccgccgagcccacggagagca

SEQ ID NO: 2877836 - DNA, 25 bp, Homo sapien
cccgccgcattgcccttccccgcgt

SEQ ID NO: 2877837 - DNA, 25 bp, Homo sapien
ttagcctccgggtagcagcggatcg

SEQ ID NO: 2877838 - DNA, 25 bp, Homo sapien
cacagcggccactttgggcagtttc

SEQ ID NO: 2877839 - DNA, 25 bp, Homo sapien
gttcgtcgcgcgtggactctccgag

SEQ ID NO: 2877840 - DNA, 25 bp, Homo sapien
tgcaaatagaccctgccagaaaagg

SEQ ID NO: 2877841 - DNA, 25 bp, Homo sapien
tgctgtcagcaggagtcaattgaat

SEQ ID NO: 2877842 - DNA, 25 bp, Homo sapien
cccttctagagtactcagaggagta

SEQ ID NO: 2877843 - DNA, 25 bp, Homo sapien
gtcacaattactgggagatttggcc

SEQ ID NO: 2877844 - DNA, 25 bp, Homo sapien
gaaagcacaatggtagaatctggca

SEQ ID NO: 2877845 - DNA, 25 bp, Homo sapien
tggccaatgttaagactcctaagga

SEQ ID NO: 2877846 - DNA, 25 bp, Homo sapien
gaggtgacctccatgtacaaaaggc

SEQ ID NO: 2877847 - DNA, 25 bp, Homo sapien
catgaatgtctggttatcaccctga

SEQ ID NO: 2877848 - DNA, 25 bp, Homo sapien
tttgataaacagatgctggccaatg

SEQ ID NO: 2877849 - DNA, 25 bp, Homo sapien
aaggatgctgcaatgcttcatccaa

SEQ ID NO: 2877850 - DNA, 25 bp, Homo sapien
gaaaggatgctgcaatgcttcatcc

SEQ ID NO: 2877851 - DNA, 25 bp, Homo sapien
tcatccaaggtaattctttgagttg

SEQ ID NO: 2877852 - DNA, 25 bp, Homo sapien
gagttggatcatattctaacattct

SEQ ID NO: 2877853 - DNA, 25 bp, Homo sapien
cttcatcatgacaaagcataaattc

SEQ ID NO: 2877854 - DNA, 25 bp, Homo sapien
caggtcaaacagtttctcatgttct

SEQ ID NO: 2877855 - DNA, 25 bp, Homo sapien
tcttcatcatgacaaagcataaatt

SEQ ID NO: 2877856 - DNA, 25 bp, Homo sapien
taatagtgcaaacacgtggtttatt

SEQ ID NO: 2877857 - DNA, 25 bp, Homo sapien
ttaatagtgcaaacacgtggtttat

SEQ ID NO: 2877858 - DNA, 25 bp, Homo sapien
tattaatagtgcaaacacgtggttt

SEQ ID NO: 2877859 - DNA, 25 bp, Homo sapien
attattaatagtgcaaacacgtggt

SEQ ID NO: 2877860 - DNA, 25 bp, Homo sapien
cttcaacggtttgcagcgtctccta

SEQ ID NO: 2877861 - DNA, 25 bp, Homo sapien
caatctagctggttatggtgaaaat

SEQ ID NO: 2877862 - DNA, 25 bp, Homo sapien
tgtgttcatcccaatctagctggtt

SEQ ID NO: 2877863 - DNA, 25 bp, Homo sapien
taacatatctaccagcagaactgtg

SEQ ID NO: 2877864 - DNA, 25 bp, Homo sapien
gtatctttaccctgcacccatgagg

SEQ ID NO: 2877865 - DNA, 25 bp, Homo sapien
gggacccctgcactagatcacaagg

SEQ ID NO: 2877866 - DNA, 25 bp, Homo sapien
taaggaaccttcatgcaacgtagat

SEQ ID NO: 2877867 - DNA, 25 bp, Homo sapien
aaacatggcctagtgcagtgactca

SEQ ID NO: 2877868 - DNA, 25 bp, Homo sapien
ggtatgggtcctaatattcgttcca

SEQ ID NO: 2877869 - DNA, 25 bp, Homo sapien
tcatgtgttgtggtatgggtcctaa

SEQ ID NO: 2877870 - DNA, 25 bp, Homo sapien
tgttttctgaatcatgtgttgtggt

SEQ ID NO: 2877871 - DNA, 25 bp, Homo sapien
gttgtggtatgggtcctaatattcg

SEQ ID NO: 2877872 - DNA, 25 bp, Homo sapien
caaaaccagacaatacctcccagaa

SEQ ID NO: 2877873 - DNA, 25 bp, Homo sapien
tgcaaaaccagacaatacctcccag

SEQ ID NO: 2877874 - DNA, 25 bp, Homo sapien
cctcccagaactgattaataaccat

SEQ ID NO: 2877875 - DNA, 25 bp, Homo sapien
acctcccagaactgattaataacca

SEQ ID NO: 2877876 - DNA, 25 bp, Homo sapien
taagtgactcttagcccatcatagc

SEQ ID NO: 2877877 - DNA, 25 bp, Homo sapien
cgaggtgccccacgaacagggaatt

SEQ ID NO: 2877878 - DNA, 25 bp, Homo sapien
atcaacctcaacagtactagctggg

SEQ ID NO: 2877879 - DNA, 25 bp, Homo sapien
acagggaattcatcattgtgcaaca

SEQ ID NO: 2877880 - DNA, 25 bp, Homo sapien
tgtgaaaccaaggtaatattcaata

SEQ ID NO: 2877881 - DNA, 25 bp, Homo sapien
ctgtgaaaccaaggtaatattcaat

SEQ ID NO: 2877882 - DNA, 25 bp, Homo sapien
atcatcatacgttgcacttccaaag

SEQ ID NO: 2877883 - DNA, 25 bp, Homo sapien
caccaaagtactgtgatgttcatca

SEQ ID NO: 2877884 - DNA, 25 bp, Homo sapien
gagctctgtagtgccgggtagacac

SEQ ID NO: 2877885 - DNA, 25 bp, Homo sapien
aaagtcaacaactttgatatctgtg

SEQ ID NO: 2877886 - DNA, 25 bp, Homo sapien
ttgactacatagtcagacttcacaa

SEQ ID NO: 2877887 - DNA, 25 bp, Homo sapien
caggcttcagatctgtatgggttaa

SEQ ID NO: 2877888 - DNA, 25 bp, Homo sapien
gactacatagtcagacttcacaaac

SEQ ID NO: 2877889 - DNA, 25 bp, Homo sapien
aggcttcagatctgtatgggttaat

SEQ ID NO: 2877890 - DNA, 25 bp, Homo sapien
caaacacaatacaaacatgaccatg

SEQ ID NO: 2877891 - DNA, 25 bp, Homo sapien
gatctgatacgccatctgcctgatg

SEQ ID NO: 2877892 - DNA, 25 bp, Homo sapien
ctgcctgatgtggtcaatttgaaat

SEQ ID NO: 2877893 - DNA, 25 bp, Homo sapien
gatgatcaaaccattctagcatctg

SEQ ID NO: 2877894 - DNA, 25 bp, Homo sapien
tgcttcacggtaacggcctacattt

SEQ ID NO: 2877895 - DNA, 25 bp, Homo sapien
gatttctgaacgagctgcttcacgg

SEQ ID NO: 2877896 - DNA, 25 bp, Homo sapien
gggatcagtactatttaagtgctct

SEQ ID NO: 2877897 - DNA, 25 bp, Homo sapien
ttttacgattttcactgctacatgc

SEQ ID NO: 2877898 - DNA, 25 bp, Homo sapien
tgcactctacaactttgccaaaggc

SEQ ID NO: 2877899 - DNA, 25 bp, Homo sapien
tcacccaaagtgtccacgatttcat

SEQ ID NO: 2877900 - DNA, 25 bp, Homo sapien
ctctacaactttgccaaaggctcct

SEQ ID NO: 2877901 - DNA, 25 bp, Homo sapien
atgatcaatgcactctacaactttg

SEQ ID NO: 2877902 - DNA, 25 bp, Homo sapien
gatagagctatctttcttgctctaa

SEQ ID NO: 2877903 - DNA, 25 bp, Homo sapien
aatgatctctaacaaagcataacta

SEQ ID NO: 2877904 - DNA, 25 bp, Homo sapien
taactaaggtttcagcactcaaatt

SEQ ID NO: 2877905 - DNA, 25 bp, Homo sapien
caaagcataactaaggtttcagcac

SEQ ID NO: 2877906 - DNA, 25 bp, Homo sapien
cttaaaaagattattctttctgcaa

SEQ ID NO: 2877907 - DNA, 25 bp, Homo sapien
ttctgcaaagtttaaaaagtgttga

SEQ ID NO: 2877908 - DNA, 25 bp, Homo sapien
gattattctttctgcaaagtttaaa

SEQ ID NO: 2877909 - DNA, 25 bp, Homo sapien
taaaaagattattctttctgcaaag

SEQ ID NO: 2877910 - DNA, 25 bp, Homo sapien
tgctcttagaacgtctccactttga

SEQ ID NO: 2877911 - DNA, 25 bp, Homo sapien
tcttgctcttagaacgtctccactt

SEQ ID NO: 2877912 - DNA, 25 bp, Homo sapien
tcttagaacgtctccactttgacag

SEQ ID NO: 2877913 - DNA, 25 bp, Homo sapien
ttgctcttagaacgtctccactttg

SEQ ID NO: 2877914 - DNA, 25 bp, Homo sapien
tatcagctcgttaagagtacacaca

SEQ ID NO: 2877915 - DNA, 25 bp, Homo sapien
caggttagtaacattcaggtgtcca

SEQ ID NO: 2877916 - DNA, 25 bp, Homo sapien
gacaatgatgcactggactatggaa

SEQ ID NO: 2877917 - DNA, 25 bp, Homo sapien
gactatggaactatgctctatgcag

SEQ ID NO: 2877918 - DNA, 25 bp, Homo sapien
ttctcctgctgcggactgaagattt

SEQ ID NO: 2877919 - DNA, 25 bp, Homo sapien
attgcgcttccttttaggactgctt

SEQ ID NO: 2877920 - DNA, 25 bp, Homo sapien
ctcctgctgcggactgaagatttac

SEQ ID NO: 2877921 - DNA, 25 bp, Homo sapien
ctattgcgcttccttttaggactgc

SEQ ID NO: 2877922 - DNA, 25 bp, Homo sapien
tttcaatgtctctgtgataatgtct

SEQ ID NO: 2877923 - DNA, 25 bp, Homo sapien
tgtctaggaacatatccttcacagt

SEQ ID NO: 2877924 - DNA, 25 bp, Homo sapien
ggaacatatccttcacagtagtcat

SEQ ID NO: 2877925 - DNA, 25 bp, Homo sapien
tgtctctgtgataatgtctaggaac

SEQ ID NO: 2877926 - DNA, 25 bp, Homo sapien
tctcgctcattcaaggaccttgctt

SEQ ID NO: 2877927 - DNA, 25 bp, Homo sapien
ggtcccgataatctcgctcattcaa

SEQ ID NO: 2877928 - DNA, 25 bp, Homo sapien
tcctgtattcgtcaacgtatctccg

SEQ ID NO: 2877929 - DNA, 25 bp, Homo sapien
cgtatctccggtcccgataatctcg

SEQ ID NO: 2877930 - DNA, 25 bp, Homo sapien
aacacattaaaagatttcaaattat

SEQ ID NO: 2877931 - DNA, 25 bp, Homo sapien
cacattaaaagatttcaaattattc

SEQ ID NO: 2877932 - DNA, 25 bp, Homo sapien
gcaaacacattaaaagatttcaaat

SEQ ID NO: 2877933 - DNA, 25 bp, Homo sapien
ctgcaaacacattaaaagatttcaa

SEQ ID NO: 2877934 - DNA, 25 bp, Homo sapien
gtgtcctcttcaacagagtgcgaag

SEQ ID NO: 2877935 - DNA, 25 bp, Homo sapien
aacagagtgcgaagcttcaagaggg

SEQ ID NO: 2877936 - DNA, 25 bp, Homo sapien
tcctcttcaacagagtgcgaagctt

SEQ ID NO: 2877937 - DNA, 25 bp, Homo sapien
tcttcaacagagtgcgaagcttcaa

SEQ ID NO: 2877938 - DNA, 25 bp, Homo sapien
taacaagcaatggagtgacggatgt

SEQ ID NO: 2877939 - DNA, 25 bp, Homo sapien
cccagtcagacacatcggctaaaat

SEQ ID NO: 2877940 - DNA, 25 bp, Homo sapien
cagacacatcggctaaaataagcct

SEQ ID NO: 2877941 - DNA, 25 bp, Homo sapien
gagtgacggatgttgactagattgc

SEQ ID NO: 2877942 - DNA, 25 bp, Homo sapien
caactactacccaatagggctagca

SEQ ID NO: 2877943 - DNA, 25 bp, Homo sapien
gaagcatctttacaactactaccca

SEQ ID NO: 2877944 - DNA, 25 bp, Homo sapien
ccagaatatgctgtcattctttttc

SEQ ID NO: 2877945 - DNA, 25 bp, Homo sapien
tcccagggggctggtttaggcagaa

SEQ ID NO: 2877946 - DNA, 25 bp, Homo sapien
gacgtgaccatactcttaagggcat

SEQ ID NO: 2877947 - DNA, 25 bp, Homo sapien
caaatagccaagacggatgagggta

SEQ ID NO: 2877948 - DNA, 25 bp, Homo sapien
gtctacagaattacacaggctatgg

SEQ ID NO: 2877949 - DNA, 25 bp, Homo sapien
caatacaataagctagacgtgacca

SEQ ID NO: 2877950 - DNA, 25 bp, Homo sapien
cagccaagattggtgagagcatgaa

SEQ ID NO: 2877951 - DNA, 25 bp, Homo sapien
ggagcacgttgtataatttggcaaa

SEQ ID NO: 2877952 - DNA, 25 bp, Homo sapien
aagaaatatgaacctgtagcaagaa

SEQ ID NO: 2877953 - DNA, 25 bp, Homo sapien
tatgacagcggacaaattcgttaga

SEQ ID NO: 2877954 - DNA, 25 bp, Homo sapien
gaatattctggatcatggtaaacgc

SEQ ID NO: 2877955 - DNA, 25 bp, Homo sapien
cgttactggcagttgggactcacca

SEQ ID NO: 2877956 - DNA, 25 bp, Homo sapien
tacaaatatcaaagcaggcactggc

SEQ ID NO: 2877957 - DNA, 25 bp, Homo sapien
gcactggcctggtggttaactggac

SEQ ID NO: 2877958 - DNA, 25 bp, Homo sapien
tgtgacttccacgatagctttcatg

SEQ ID NO: 2877959 - DNA, 25 bp, Homo sapien
caatgcctgttctcttgtgtgctac

SEQ ID NO: 2877960 - DNA, 25 bp, Homo sapien
tgtgtgctactatgagatctcctct

SEQ ID NO: 2877961 - DNA, 25 bp, Homo sapien
gctttctctgctatcccaatcagga

SEQ ID NO: 2877962 - DNA, 25 bp, Homo sapien
aatatcagtgtcatgcagctttggc

SEQ ID NO: 2877963 - DNA, 25 bp, Homo sapien
ccagcagacaagagtatttagctaa

SEQ ID NO: 2877964 - DNA, 25 bp, Homo sapien
aggttcaggcctagtgtttccagca

SEQ ID NO: 2877965 - DNA, 25 bp, Homo sapien
ttcaactaacacttgctaactgcct

SEQ ID NO: 2877966 - DNA, 25 bp, Homo sapien
cagtgcataacctgggttccttcca

SEQ ID NO: 2877967 - DNA, 25 bp, Homo sapien
tgcgctcaaacaatataacccctat

SEQ ID NO: 2877968 - DNA, 25 bp, Homo sapien
caaacgataacggtgacagctgact

SEQ ID NO: 2877969 - DNA, 25 bp, Homo sapien
aaaaagaactcaacctacaaggatg

SEQ ID NO: 2877970 - DNA, 25 bp, Homo sapien
ccttcggccgagaaatgtcgccaaa

SEQ ID NO: 2877971 - DNA, 25 bp, Homo sapien
agcaaatggcccttcggccgagaaa

SEQ ID NO: 2877972 - DNA, 25 bp, Homo sapien
gccgagaaatgtcgccaaactgccg

SEQ ID NO: 2877973 - DNA, 25 bp, Homo sapien
aaatgtcgccaaactgccgtcttcc

SEQ ID NO: 2877974 - DNA, 25 bp, Homo sapien
ctctagcaccacctacgccgcgcga

SEQ ID NO: 2877975 - DNA, 25 bp, Homo sapien
ctacgccgcgcgaacgcgcctgcgt

SEQ ID NO: 2877976 - DNA, 25 bp, Homo sapien
ctagaatcccccgagtcgcctctag

SEQ ID NO: 2877977 - DNA, 25 bp, Homo sapien
gcgcgaacgcgcctgcgtgacagaa

SEQ ID NO: 2877978 - DNA, 25 bp, Homo sapien
cctcaggcagttcccccgtgtaagt

SEQ ID NO: 2877979 - DNA, 25 bp, Homo sapien
ccccgtgtaagtatgtaacatgaga

SEQ ID NO: 2877980 - DNA, 25 bp, Homo sapien
taacatgagaaatattagggtcaaa

SEQ ID NO: 2877981 - DNA, 25 bp, Homo sapien
aaataaggtattctgcagttctgag

SEQ ID NO: 2877982 - DNA, 25 bp, Homo sapien
gagcaaacatgctgagtccatcttt

SEQ ID NO: 2877983 - DNA, 25 bp, Homo sapien
tcattagagcaaacatgctgagtcc

SEQ ID NO: 2877984 - DNA, 25 bp, Homo sapien
cattagagcaaacatgctgagtcca

SEQ ID NO: 2877985 - DNA, 25 bp, Homo sapien
ttagagcaaacatgctgagtccatc

SEQ ID NO: 2877986 - DNA, 25 bp, Homo sapien
gagaggagccctctcttcagggcct

SEQ ID NO: 2877987 - DNA, 25 bp, Homo sapien
gccccacagcttgaaggagaggagc

SEQ ID NO: 2877988 - DNA, 25 bp, Homo sapien
gcttgaaggagaggagccctctctt

SEQ ID NO: 2877989 - DNA, 25 bp, Homo sapien
gaggagccctctcttcagggcctgc

SEQ ID NO: 2877990 - DNA, 25 bp, Homo sapien
tgacgacacattccaaactgatttg

SEQ ID NO: 2877991 - DNA, 25 bp, Homo sapien
gctttgcattccaatgacgacacat

SEQ ID NO: 2877992 - DNA, 25 bp, Homo sapien
aactgatttggcagcactgtttaag

SEQ ID NO: 2877993 - DNA, 25 bp, Homo sapien
gctttcacccactttagaccagtgt

SEQ ID NO: 2877994 - DNA, 25 bp, Homo sapien
tggcagctcatagcacccagagctt

SEQ ID NO: 2877995 - DNA, 25 bp, Homo sapien
cctggtccacgtgatgctctatggg

SEQ ID NO: 2877996 - DNA, 25 bp, Homo sapien
ggcccttatctgagcctggacacat

SEQ ID NO: 2877997 - DNA, 25 bp, Homo sapien
tgtaaaaccgtaaggccagggagca

SEQ ID NO: 2877998 - DNA, 25 bp, Homo sapien
cttctgtgaggccaagttcctaatg

SEQ ID NO: 2877999 - DNA, 25 bp, Homo sapien
aatgttctgcatgcccgtggtccca

SEQ ID NO: 2878000 - DNA, 25 bp, Homo sapien
gttcctaatgttctgcatgcccgtg

SEQ ID NO: 2878001 - DNA, 25 bp, Homo sapien
caagttcctaatgttctgcatgccc

SEQ ID NO: 2878002 - DNA, 25 bp, Homo sapien
ccgggtatccttcctgctcgccaac

SEQ ID NO: 2878003 - DNA, 25 bp, Homo sapien
agtgaccgggtatccttcctgctcg

SEQ ID NO: 2878004 - DNA, 25 bp, Homo sapien
tgaccgggtatccttcctgctcgcc

SEQ ID NO: 2878005 - DNA, 25 bp, Homo sapien
accgggtatccttcctgctcgccaa

SEQ ID NO: 2878006 - DNA, 25 bp, Homo sapien
caggggcaaggccatgggggtcagg

SEQ ID NO: 2878007 - DNA, 25 bp, Homo sapien
ccatgggggtcagggaggtctccat

SEQ ID NO: 2878008 - DNA, 25 bp, Homo sapien
ggggcaaggccatgggggtcaggga

SEQ ID NO: 2878009 - DNA, 25 bp, Homo sapien
aggccatgggggtcagggaggtctc

SEQ ID NO: 2878010 - DNA, 25 bp, Homo sapien
cacccaacaagctagggctgactgg

SEQ ID NO: 2878011 - DNA, 25 bp, Homo sapien
gagctctcgggatggcatgttccac

SEQ ID NO: 2878012 - DNA, 25 bp, Homo sapien
tccccagtgtacacagaagggctct

SEQ ID NO: 2878013 - DNA, 25 bp, Homo sapien
catggtcagcagtaagaacaagagc

SEQ ID NO: 2878014 - DNA, 25 bp, Homo sapien
ttaggtaagaaaggcctgcgaagga

SEQ ID NO: 2878015 - DNA, 25 bp, Homo sapien
gcttaggtaagaaaggcctgcgaag

SEQ ID NO: 2878016 - DNA, 25 bp, Homo sapien
ggtaagaaaggcctgcgaaggacag

SEQ ID NO: 2878017 - DNA, 25 bp, Homo sapien
taagaaaggcctgcgaaggacaggg

SEQ ID NO: 2878018 - DNA, 25 bp, Homo sapien
cagctccgttcctgtgtaacacaca

SEQ ID NO: 2878019 - DNA, 25 bp, Homo sapien
ccagtctgaggtattccagtacctg

SEQ ID NO: 2878020 - DNA, 25 bp, Homo sapien
gcagctccgttcctgtgtaacacac

SEQ ID NO: 2878021 - DNA, 25 bp, Homo sapien
gctccgttcctgtgtaacacacatg

SEQ ID NO: 2878022 - DNA, 25 bp, Homo sapien
agactatgggaacgccataggcctg

SEQ ID NO: 2878023 - DNA, 25 bp, Homo sapien
gaaagactatgggaacgccataggc

SEQ ID NO: 2878024 - DNA, 25 bp, Homo sapien
ctcgggaggtgcgaggttaaccaca

SEQ ID NO: 2878025 - DNA, 25 bp, Homo sapien
ggtgcgaggttaaccacatctgcac

SEQ ID NO: 2878026 - DNA, 25 bp, Homo sapien
gccccagggccatgtccattctgaa

SEQ ID NO: 2878027 - DNA, 25 bp, Homo sapien
tctgaacaagtccacgaacaaagtc

SEQ ID NO: 2878028 - DNA, 25 bp, Homo sapien
cacgaacaaagtcctcagaattatt

SEQ ID NO: 2878029 - DNA, 25 bp, Homo sapien
cagggccatgtccattctgaacaag

SEQ ID NO: 2878030 - DNA, 25 bp, Homo sapien
ctgagaagacgctgatcttccatct

SEQ ID NO: 2878031 - DNA, 25 bp, Homo sapien
tgagaagacgctgatcttccatctg

SEQ ID NO: 2878032 - DNA, 25 bp, Homo sapien
tgcttgagacgctgagcaattgctt

SEQ ID NO: 2878033 - DNA, 25 bp, Homo sapien
cggatttcctggtcactccaaggtt

SEQ ID NO: 2878034 - DNA, 25 bp, Homo sapien
tgtacacctcacgttcaagaaattc

SEQ ID NO: 2878035 - DNA, 25 bp, Homo sapien
actccggatttcctggtcactccaa

SEQ ID NO: 2878036 - DNA, 25 bp, Homo sapien
atccctgtggggccttttactgtca

SEQ ID NO: 2878037 - DNA, 25 bp, Homo sapien
tccctgggctgtgttttcctgctcc

SEQ ID NO: 2878038 - DNA, 25 bp, Homo sapien
ctgatccctgggctgtgttttcctg

SEQ ID NO: 2878039 - DNA, 25 bp, Homo sapien
tgagggcttttctgatccctgggct

SEQ ID NO: 2878040 - DNA, 25 bp, Homo sapien
ctgagggcttttctgatccctgggc

SEQ ID NO: 2878041 - DNA, 25 bp, Homo sapien
tagtttcagtgggaagtattactat

SEQ ID NO: 2878042 - DNA, 25 bp, Homo sapien
tttctggatgtttatggtagtttca

SEQ ID NO: 2878043 - DNA, 25 bp, Homo sapien
gatgtttatggtagtttcagtggga

SEQ ID NO: 2878044 - DNA, 25 bp, Homo sapien
cagtctgtggctctgtctgctataa

SEQ ID NO: 2878045 - DNA, 25 bp, Homo sapien
tggcagagggggtgcattctataat

SEQ ID NO: 2878046 - DNA, 25 bp, Homo sapien
actgcggctctgctgggatggtggc

SEQ ID NO: 2878047 - DNA, 25 bp, Homo sapien
ccagcgctgttgcactgcggctctg

SEQ ID NO: 2878048 - DNA, 25 bp, Homo sapien
tgactccaccgattttaccataaaa

SEQ ID NO: 2878049 - DNA, 25 bp, Homo sapien
tctactcgagctttaacatttgtca

SEQ ID NO: 2878050 - DNA, 25 bp, Homo sapien
actccttagcttggcaaataaggcc

SEQ ID NO: 2878051 - DNA, 25 bp, Homo sapien
tttggcttctgccttctactcgagc

SEQ ID NO: 2878052 - DNA, 25 bp, Homo sapien
aatccatgcataagtttgacatcag

SEQ ID NO: 2878053 - DNA, 25 bp, Homo sapien
cacccactcggatatctgtttctga

SEQ ID NO: 2878054 - DNA, 25 bp, Homo sapien
catatacgtctgtaggaaaagggaa

SEQ ID NO: 2878055 - DNA, 25 bp, Homo sapien
tatagctgaggtttatccatggaat

SEQ ID NO: 2878056 - DNA, 25 bp, Homo sapien
tcaaggatgtattcttcgatgagct

SEQ ID NO: 2878057 - DNA, 25 bp, Homo sapien
tggccaaaagatatcccacattcct

SEQ ID NO: 2878058 - DNA, 25 bp, Homo sapien
ccttcgatgctgaataagagctgaa

SEQ ID NO: 2878059 - DNA, 25 bp, Homo sapien
gatgacctatggttgaaaagtttcc

SEQ ID NO: 2878060 - DNA, 25 bp, Homo sapien
ctaggggtcctcttcgatatgaatt

SEQ ID NO: 2878061 - DNA, 25 bp, Homo sapien
ctgcaactagatgccttcctacccg

SEQ ID NO: 2878062 - DNA, 25 bp, Homo sapien
caactagatgccttcctacccggat

SEQ ID NO: 2878063 - DNA, 25 bp, Homo sapien
tagatgccttcctacccggattata

SEQ ID NO: 2878064 - DNA, 25 bp, Homo sapien
gatgccttcctacccggattatact

SEQ ID NO: 2878065 - DNA, 25 bp, Homo sapien
catctgtaggatttctccacagtat

SEQ ID NO: 2878066 - DNA, 25 bp, Homo sapien
gtaggatttctccacagtatgggtt

SEQ ID NO: 2878067 - DNA, 25 bp, Homo sapien
tttacatctgtaggatttctccaca

SEQ ID NO: 2878068 - DNA, 25 bp, Homo sapien
tctgtaggatttctccacagtatgg

SEQ ID NO: 2878069 - DNA, 25 bp, Homo sapien
gactacatttatagcgtttatctgc

SEQ ID NO: 2878070 - DNA, 25 bp, Homo sapien
aaagggatgtactgagagtaaaggc

SEQ ID NO: 2878071 - DNA, 25 bp, Homo sapien
cagtatgcgttatttgatgttgaat

SEQ ID NO: 2878072 - DNA, 25 bp, Homo sapien
gaagtatctgttgcctaataagcac

SEQ ID NO: 2878073 - DNA, 25 bp, Homo sapien
gagtcttgtgtttgcgttgactttg

SEQ ID NO: 2878074 - DNA, 25 bp, Homo sapien
tttcaaatcccaaggtacattcctg

SEQ ID NO: 2878075 - DNA, 25 bp, Homo sapien
ggatcttttcagtatcagtccctga

SEQ ID NO: 2878076 - DNA, 25 bp, Homo sapien
tgtggttttatgactgctcttcgat

SEQ ID NO: 2878077 - DNA, 25 bp, Homo sapien
tcttaggcgtccttaacatggtgaa

SEQ ID NO: 2878078 - DNA, 25 bp, Homo sapien
tatgtggcaaacttccttaaggtcc

SEQ ID NO: 2878079 - DNA, 25 bp, Homo sapien
tggcttcttgccaggtatgctgaac

SEQ ID NO: 2878080 - DNA, 25 bp, Homo sapien
agacagggttccagcctttaaggag

SEQ ID NO: 2878081 - DNA, 25 bp, Homo sapien
cttccctaggcagtcatcaaaatct

SEQ ID NO: 2878082 - DNA, 25 bp, Homo sapien
ccctaggcagtcatcaaaatcttca

SEQ ID NO: 2878083 - DNA, 25 bp, Homo sapien
tatttttatcttgcgtagtgacagg

SEQ ID NO: 2878084 - DNA, 25 bp, Homo sapien
gcacactgccaagcttggctaatat

SEQ ID NO: 2878085 - DNA, 25 bp, Homo sapien
ctagagaggagacgccagaaccgtc

SEQ ID NO: 2878086 - DNA, 25 bp, Homo sapien
gagacgccagaaccgtctttctcca

SEQ ID NO: 2878087 - DNA, 25 bp, Homo sapien
cagggagatcacttttggtttggta

SEQ ID NO: 2878088 - DNA, 25 bp, Homo sapien
gctgcaacagggagatcacttttgg

SEQ ID NO: 2878089 - DNA, 25 bp, Homo sapien
gctgagatatcccaatttttgaatt

SEQ ID NO: 2878090 - DNA, 25 bp, Homo sapien
ctgagatatcccaatttttgaattc

SEQ ID NO: 2878091 - DNA, 25 bp, Homo sapien
gagatatcccaatttttgaattctg

SEQ ID NO: 2878092 - DNA, 25 bp, Homo sapien
gtgctgagatatcccaatttttgaa

SEQ ID NO: 2878093 - DNA, 25 bp, Homo sapien
ttctccactcatctcgggtaaacag

SEQ ID NO: 2878094 - DNA, 25 bp, Homo sapien
ccactcatctcgggtaaacagcaca

SEQ ID NO: 2878095 - DNA, 25 bp, Homo sapien
actcatctcgggtaaacagcacagc

SEQ ID NO: 2878096 - DNA, 25 bp, Homo sapien
ctccactcatctcgggtaaacagca

SEQ ID NO: 2878097 - DNA, 25 bp, Homo sapien
gacaagtcgttccagctcacccagg

SEQ ID NO: 2878098 - DNA, 25 bp, Homo sapien
aggacaagtcgttccagctcaccca

SEQ ID NO: 2878099 - DNA, 25 bp, Homo sapien
ctgtaaggacaagtcgttccagctc

SEQ ID NO: 2878100 - DNA, 25 bp, Homo sapien
taaggacaagtcgttccagctcacc

SEQ ID NO: 2878101 - DNA, 25 bp, Homo sapien
cctcgcttcccgctgcccagcagcc

SEQ ID NO: 2878102 - DNA, 25 bp, Homo sapien
tcgcttcccgctgcccagcagccat

SEQ ID NO: 2878103 - DNA, 25 bp, Homo sapien
ctggggcctcgcttcccgctgccca

SEQ ID NO: 2878104 - DNA, 25 bp, Homo sapien
ggcctcgcttcccgctgcccagcag

SEQ ID NO: 2878105 - DNA, 25 bp, Homo sapien
ctctcccgggaggacggcgcagtct

SEQ ID NO: 2878106 - DNA, 25 bp, Homo sapien
aggacggcgcagtctccagaaggca

SEQ ID NO: 2878107 - DNA, 25 bp, Homo sapien
tctcccgggaggacggcgcagtctc

SEQ ID NO: 2878108 - DNA, 25 bp, Homo sapien
gggaggacggcgcagtctccagaag

SEQ ID NO: 2878109 - DNA, 25 bp, Homo sapien
cagggccagggctcgccccacgccg

SEQ ID NO: 2878110 - DNA, 25 bp, Homo sapien
agtggcagcagcgacccgctgagcc

SEQ ID NO: 2878111 - DNA, 25 bp, Homo sapien
ctgagttcctcggcgccagctggca

SEQ ID NO: 2878112 - DNA, 25 bp, Homo sapien
gccccacgccgctgagttcctcggc

SEQ ID NO: 2878113 - DNA, 25 bp, Homo sapien
gggtgcaccagcaacggcgagggag

SEQ ID NO: 2878114 - DNA, 25 bp, Homo sapien
tccgcgaggcccacatggagtgggc

SEQ ID NO: 2878115 - DNA, 25 bp, Homo sapien
ccagcgcccacaaaggctttcggag

SEQ ID NO: 2878116 - DNA, 25 bp, Homo sapien
tctgaagaggaaagcgctgggtgtc

SEQ ID NO: 2878117 - DNA, 25 bp, Homo sapien
ctccctaagctcgagcgtcccgggc

SEQ ID NO: 2878118 - DNA, 25 bp, Homo sapien
cgccccgacggcgtctgggcgacct

SEQ ID NO: 2878119 - DNA, 25 bp, Homo sapien
gccgcgcctccccagccgcgaggct

SEQ ID NO: 2878120 - DNA, 25 bp, Homo sapien
ctccggaaccgccggccgggatgca

SEQ ID NO: 2878121 - DNA, 25 bp, Homo sapien
tggagtccacgagaggacacctgca

SEQ ID NO: 2878122 - DNA, 25 bp, Homo sapien
ggagtccacgagaggacacctgcat

SEQ ID NO: 2878123 - DNA, 25 bp, Homo sapien
gaaatggagtccacgagaggacacc

SEQ ID NO: 2878124 - DNA, 25 bp, Homo sapien
aatggagtccacgagaggacacctg

SEQ ID NO: 2878125 - DNA, 25 bp, Homo sapien
gaacggatgactgcgttgcagctca

SEQ ID NO: 2878126 - DNA, 25 bp, Homo sapien
tcaaagtgaacgagaagatgccacc

SEQ ID NO: 2878127 - DNA, 25 bp, Homo sapien
tagagcccagctaccatctatgaag

SEQ ID NO: 2878128 - DNA, 25 bp, Homo sapien
ggcagtgaccaagctcacaggctgt

SEQ ID NO: 2878129 - DNA, 25 bp, Homo sapien
gccactactagagttcgtctgagag

SEQ ID NO: 2878130 - DNA, 25 bp, Homo sapien
gagagtttacctccttcaactggca

SEQ ID NO: 2878131 - DNA, 25 bp, Homo sapien
gaaatggctgtttcggctggacgca

SEQ ID NO: 2878132 - DNA, 25 bp, Homo sapien
cagatgcattgtggctccgtgattc

SEQ ID NO: 2878133 - DNA, 25 bp, Homo sapien
gggacttatgtgcccacatgggcaa

SEQ ID NO: 2878134 - DNA, 25 bp, Homo sapien
cacgcacgctaaattctctgcaggg

SEQ ID NO: 2878135 - DNA, 25 bp, Homo sapien
ggtaaaggcagcacgcacgctaaat

SEQ ID NO: 2878136 - DNA, 25 bp, Homo sapien
catgggcaatctattgtggttactg

SEQ ID NO: 2878137 - DNA, 25 bp, Homo sapien
tccagacgcagtgcgagcatgcccg

SEQ ID NO: 2878138 - DNA, 25 bp, Homo sapien
cagacgcagtgcgagcatgcccgcc

SEQ ID NO: 2878139 - DNA, 25 bp, Homo sapien
gacgcagtgcgagcatgcccgccat

SEQ ID NO: 2878140 - DNA, 25 bp, Homo sapien
ctccagacgcagtgcgagcatgccc

SEQ ID NO: 2878141 - DNA, 25 bp, Homo sapien
cagaattgtgacatcggcgtcgcag

SEQ ID NO: 2878142 - DNA, 25 bp, Homo sapien
taaggcaccagggttcagtttctcc

SEQ ID NO: 2878143 - DNA, 25 bp, Homo sapien
tcaatttgcaaggtcaaccaggcct

SEQ ID NO: 2878144 - DNA, 25 bp, Homo sapien
gaaaccggtattgttgcaagctccc

SEQ ID NO: 2878145 - DNA, 25 bp, Homo sapien
caggagtcgttaccaaaactgcagt

SEQ ID NO: 2878146 - DNA, 25 bp, Homo sapien
gaagtacccacgatatcaaaagagg

SEQ ID NO: 2878147 - DNA, 25 bp, Homo sapien
tagggttatactcaggatcgtggcc

SEQ ID NO: 2878148 - DNA, 25 bp, Homo sapien
tattattggcaggaaatggctaggc

SEQ ID NO: 2878149 - DNA, 25 bp, Homo sapien
actcctgcgccaggccattcaaggt

SEQ ID NO: 2878150 - DNA, 25 bp, Homo sapien
ggactcctgcgccaggccattcaag

SEQ ID NO: 2878151 - DNA, 25 bp, Homo sapien
ccagggactcctgcgccaggccatt

SEQ ID NO: 2878152 - DNA, 25 bp, Homo sapien
cattcaaggtttccatcctccctgt

SEQ ID NO: 2878153 - DNA, 25 bp, Homo sapien
gttgctccatggcttttcgagcgat

SEQ ID NO: 2878154 - DNA, 25 bp, Homo sapien
tcgttgctccatggcttttcgagcg

SEQ ID NO: 2878155 - DNA, 25 bp, Homo sapien
cctcgttgctccatggcttttcgag

SEQ ID NO: 2878156 - DNA, 25 bp, Homo sapien
cacctcgttgctccatggcttttcg

SEQ ID NO: 2878157 - DNA, 25 bp, Homo sapien
tcccgctgtgagatggaaatggctc

SEQ ID NO: 2878158 - DNA, 25 bp, Homo sapien
catgtcacttcgtgtggtgtcgccg

SEQ ID NO: 2878159 - DNA, 25 bp, Homo sapien
tgtgccccactacgcttcatgcagg

SEQ ID NO: 2878160 - DNA, 25 bp, Homo sapien
ttagggatctaagcgccggcttccg

SEQ ID NO: 2878161 - DNA, 25 bp, Homo sapien
agaaatcctgctaccgtttcctcca

SEQ ID NO: 2878162 - DNA, 25 bp, Homo sapien
aaatcctgctaccgtttcctccagg

SEQ ID NO: 2878163 - DNA, 25 bp, Homo sapien
gctggtaaaatatagcggcctcccc

SEQ ID NO: 2878164 - DNA, 25 bp, Homo sapien
ctggtaaaatatagcggcctcccct

SEQ ID NO: 2878165 - DNA, 25 bp, Homo sapien
ggctgggcacatgccgcacagacaa

SEQ ID NO: 2878166 - DNA, 25 bp, Homo sapien
aggcgtgcccagaggctgtcttcag

SEQ ID NO: 2878167 - DNA, 25 bp, Homo sapien
ggaaggcgtgcccagaggctgtctt

SEQ ID NO: 2878168 - DNA, 25 bp, Homo sapien
aggctgggcacatgccgcacagaca

SEQ ID NO: 2878169 - DNA, 25 bp, Homo sapien
gacaggagagggcacacattcacac

SEQ ID NO: 2878170 - DNA, 25 bp, Homo sapien
agacaggagagggcacacattcaca

SEQ ID NO: 2878171 - DNA, 25 bp, Homo sapien
acaggagagggcacacattcacaca

SEQ ID NO: 2878172 - DNA, 25 bp, Homo sapien
tttgccgagggagctgtttcacaag

SEQ ID NO: 2878173 - DNA, 25 bp, Homo sapien
catttgccgagggagctgtttcaca

SEQ ID NO: 2878174 - DNA, 25 bp, Homo sapien
tggagggacatttgccgagggagct

SEQ ID NO: 2878175 - DNA, 25 bp, Homo sapien
tgccgagggagctgtttcacaagtg

SEQ ID NO: 2878176 - DNA, 25 bp, Homo sapien
ctgccgaaccgcggggttgagcgtg

SEQ ID NO: 2878177 - DNA, 25 bp, Homo sapien
cgaaccgcggggttgagcgtgccgt

SEQ ID NO: 2878178 - DNA, 25 bp, Homo sapien
gccgaaccgcggggttgagcgtgcc

SEQ ID NO: 2878179 - DNA, 25 bp, Homo sapien
aaccgcggggttgagcgtgccgtca

SEQ ID NO: 2878180 - DNA, 25 bp, Homo sapien
ctggaaagcgagaaaaagtcagggc

SEQ ID NO: 2878181 - DNA, 25 bp, Homo sapien
tggaaagcgagaaaaagtcagggct

SEQ ID NO: 2878182 - DNA, 25 bp, Homo sapien
ggaaagcgagaaaaagtcagggcta

SEQ ID NO: 2878183 - DNA, 25 bp, Homo sapien
agccgagcatgatgacgcccccggt

SEQ ID NO: 2878184 - DNA, 25 bp, Homo sapien
cagcagtcgccatgagccctgatac

SEQ ID NO: 2878185 - DNA, 25 bp, Homo sapien
tgatgctgcagcagtcgccatgagc

SEQ ID NO: 2878186 - DNA, 25 bp, Homo sapien
cccggtcttcgggttgatgctgcag

SEQ ID NO: 2878187 - DNA, 25 bp, Homo sapien
acaggagcatctggagacacctctg

SEQ ID NO: 2878188 - DNA, 25 bp, Homo sapien
caggaaagaacgagccacgtcttgg

SEQ ID NO: 2878189 - DNA, 25 bp, Homo sapien
acacctctgagtggagcgcaggaaa

SEQ ID NO: 2878190 - DNA, 25 bp, Homo sapien
ccaggaattcacagagggcgggacc

SEQ ID NO: 2878191 - DNA, 25 bp, Homo sapien
aagcgcatctctgccgctttgcaac

SEQ ID NO: 2878192 - DNA, 25 bp, Homo sapien
tcctcctgaagtaaggccccaaaga

SEQ ID NO: 2878193 - DNA, 25 bp, Homo sapien
tgccgctttgcaacacgagaagtca

SEQ ID NO: 2878194 - DNA, 25 bp, Homo sapien
aacacgagaagtcatctgccttagc

SEQ ID NO: 2878195 - DNA, 25 bp, Homo sapien
aagccacaaccaagccttctacagg

SEQ ID NO: 2878196 - DNA, 25 bp, Homo sapien
tgacattgtgaaggcgacactgcca

SEQ ID NO: 2878197 - DNA, 25 bp, Homo sapien
cacaaccaagccttctacagggatg

SEQ ID NO: 2878198 - DNA, 25 bp, Homo sapien
ccattcatgtgacattgtgaaggcg

SEQ ID NO: 2878199 - DNA, 25 bp, Homo sapien
gaatttggagaaatacgccttcctg

SEQ ID NO: 2878200 - DNA, 25 bp, Homo sapien
gctggcaagggatcggcttagtaca

SEQ ID NO: 2878201 - DNA, 25 bp, Homo sapien
tgtgtgggctggcaagggatcggct

SEQ ID NO: 2878202 - DNA, 25 bp, Homo sapien
ttcctgtacttgttgccgttctcat

SEQ ID NO: 2878203 - DNA, 25 bp, Homo sapien
tggtatgggagaattaaaaataagc

SEQ ID NO: 2878204 - DNA, 25 bp, Homo sapien
gctattacttattacgcaatattcc

SEQ ID NO: 2878205 - DNA, 25 bp, Homo sapien
cttaagctattacttattacgcaat

SEQ ID NO: 2878206 - DNA, 25 bp, Homo sapien
tattacgcaatattccagacataca

SEQ ID NO: 2878207 - DNA, 25 bp, Homo sapien
cttccgtaagcggaattcctagatc

SEQ ID NO: 2878208 - DNA, 25 bp, Homo sapien
cacagggcacatatgcatcttcagc

SEQ ID NO: 2878209 - DNA, 25 bp, Homo sapien
ttcactgactgctcccgcattgctc

SEQ ID NO: 2878210 - DNA, 25 bp, Homo sapien
cggaattcctagatcacagggcaca

SEQ ID NO: 2878211 - DNA, 25 bp, Homo sapien
cttcctagcacagctgggtttctag

SEQ ID NO: 2878212 - DNA, 25 bp, Homo sapien
ccttcctagcacagctgggtttcta

SEQ ID NO: 2878213 - DNA, 25 bp, Homo sapien
agcaggagactatcccttccatgac

SEQ ID NO: 2878214 - DNA, 25 bp, Homo sapien
ccatgaccgggctctcagatgctca

SEQ ID NO: 2878215 - DNA, 25 bp, Homo sapien
tgaccgggctctcagatgctcagag

SEQ ID NO: 2878216 - DNA, 25 bp, Homo sapien
gagactatcccttccatgaccgggc

SEQ ID NO: 2878217 - DNA, 25 bp, Homo sapien
ctggggaccaggagccggtgggtgt

SEQ ID NO: 2878218 - DNA, 25 bp, Homo sapien
acaggaagaaacagttggcggagcc

SEQ ID NO: 2878219 - DNA, 25 bp, Homo sapien
ggaagaaacagttggcggagccatc

SEQ ID NO: 2878220 - DNA, 25 bp, Homo sapien
caggaagaaacagttggcggagcca

SEQ ID NO: 2878221 - DNA, 25 bp, Homo sapien
aagaaacagttggcggagccatcac

SEQ ID NO: 2878222 - DNA, 25 bp, Homo sapien
cttcctcattccacgcatccacggc

SEQ ID NO: 2878223 - DNA, 25 bp, Homo sapien
atccacggccatgcccaggttccag

SEQ ID NO: 2878224 - DNA, 25 bp, Homo sapien
attccacgcatccacggccatgccc

SEQ ID NO: 2878225 - DNA, 25 bp, Homo sapien
ctcattccacgcatccacggccatg

SEQ ID NO: 2878226 - DNA, 25 bp, Homo sapien
ctttatacacaggaagagaaatatt

SEQ ID NO: 2878227 - DNA, 25 bp, Homo sapien
acaggaagagaaatattctggccca

SEQ ID NO: 2878228 - DNA, 25 bp, Homo sapien
tatacacaggaagagaaatattctg

SEQ ID NO: 2878229 - DNA, 25 bp, Homo sapien
cacaggaagagaaatattctggccc

SEQ ID NO: 2878230 - DNA, 25 bp, Homo sapien
ctgtagacacactcgttgctctagg

SEQ ID NO: 2878231 - DNA, 25 bp, Homo sapien
tgtagacacactcgttgctctaggc

SEQ ID NO: 2878232 - DNA, 25 bp, Homo sapien
ccttctcttccagcaccgacagcca

SEQ ID NO: 2878233 - DNA, 25 bp, Homo sapien
ggccttctcttccagcaccgacagc

SEQ ID NO: 2878234 - DNA, 25 bp, Homo sapien
acggccttctcttccagcaccgaca

SEQ ID NO: 2878235 - DNA, 25 bp, Homo sapien
ccggcttcacggccttctcttccag

SEQ ID NO: 2878236 - DNA, 25 bp, Homo sapien
ggtcgctgcaccgaagcatgagaca

SEQ ID NO: 2878237 - DNA, 25 bp, Homo sapien
cttatttctagcgagtactgtaggg

SEQ ID NO: 2878238 - DNA, 25 bp, Homo sapien
gggcactcatgccacgtcttatttc

SEQ ID NO: 2878239 - DNA, 25 bp, Homo sapien
cgaagcatgagacagcgtcagggcc

SEQ ID NO: 2878240 - DNA, 25 bp, Homo sapien
ctaaaccattgggacccggtgcctg

SEQ ID NO: 2878241 - DNA, 25 bp, Homo sapien
gacccggtgcctgcaactgcctgga

SEQ ID NO: 2878242 - DNA, 25 bp, Homo sapien
aaactgcacaagacgctctcccagg

SEQ ID NO: 2878243 - DNA, 25 bp, Homo sapien
ctgcctcgccaaactgcacaagacg

SEQ ID NO: 2878244 - DNA, 25 bp, Homo sapien
gacgctctcccaggcagggtaaagg

SEQ ID NO: 2878245 - DNA, 25 bp, Homo sapien
aggcagggtaaaggccacatccaca

SEQ ID NO: 2878246 - DNA, 25 bp, Homo sapien
cccagagcatgttgggcacgggcac

SEQ ID NO: 2878247 - DNA, 25 bp, Homo sapien
actcctgtggccagaatggacacca

SEQ ID NO: 2878248 - DNA, 25 bp, Homo sapien
gggagccatcgtacaagaccacggc

SEQ ID NO: 2878249 - DNA, 25 bp, Homo sapien
gagccatcgtacaagaccacggcca

SEQ ID NO: 2878250 - DNA, 25 bp, Homo sapien
atcccgttccgcatcatccagccca

SEQ ID NO: 2878251 - DNA, 25 bp, Homo sapien
aagagacgttcagaacagcgcctgg

SEQ ID NO: 2878252 - DNA, 25 bp, Homo sapien
gaggtctgggctgacgcggaaccgc

SEQ ID NO: 2878253 - DNA, 25 bp, Homo sapien
tgggctgacgcggaaccgcctccaa

SEQ ID NO: 2878254 - DNA, 25 bp, Homo sapien
gagggaagcaattaagcagccatga

SEQ ID NO: 2878255 - DNA, 25 bp, Homo sapien
gaggtctgggctgacgcggaaccgt

SEQ ID NO: 2878256 - DNA, 25 bp, Homo sapien
tgacgcggaaccgtctccaagacat

SEQ ID NO: 2878257 - DNA, 25 bp, Homo sapien
ctgacgcggaaccgtctccaagaca

SEQ ID NO: 2878258 - DNA, 25 bp, Homo sapien
gctgacgcggaaccgtctccaagac

SEQ ID NO: 2878259 - DNA, 25 bp, Homo sapien
taaattgcggtgtcccagggaggca

SEQ ID NO: 2878260 - DNA, 25 bp, Homo sapien
tgcactgatgctgctgcccgggctt

SEQ ID NO: 2878261 - DNA, 25 bp, Homo sapien
tgcagctccataaggacgctgcact

SEQ ID NO: 2878262 - DNA, 25 bp, Homo sapien
ctgctgggagctttctgcagctcca

SEQ ID NO: 2878263 - DNA, 25 bp, Homo sapien
gcactgatgctgctgcccgggcttc

SEQ ID NO: 2878264 - DNA, 25 bp, Homo sapien
ggcaggaagccctctaacacctgaa

SEQ ID NO: 2878265 - DNA, 25 bp, Homo sapien
gtctttcagtgctcaacaagggcag

SEQ ID NO: 2878266 - DNA, 25 bp, Homo sapien
aagccctctaacacctgaagttggg

SEQ ID NO: 2878267 - DNA, 25 bp, Homo sapien
ggaagccctctaacacctgaagttg

SEQ ID NO: 2878268 - DNA, 25 bp, Homo sapien
aggctggtgcctgtggaagccttta

SEQ ID NO: 2878269 - DNA, 25 bp, Homo sapien
ggctggtgcctgtggaagcctttac

SEQ ID NO: 2878270 - DNA, 25 bp, Homo sapien
atgtagcacagaaggatgtcaccgc

SEQ ID NO: 2878271 - DNA, 25 bp, Homo sapien
tgatgtagcacagaaggatgtcacc

SEQ ID NO: 2878272 - DNA, 25 bp, Homo sapien
gatgtagcacagaaggatgtcaccg

SEQ ID NO: 2878273 - DNA, 25 bp, Homo sapien
acatgccactcagacgctaccagaa

SEQ ID NO: 2878274 - DNA, 25 bp, Homo sapien
tggtccacatgccactcagacgcta

SEQ ID NO: 2878275 - DNA, 25 bp, Homo sapien
gccactcagacgctaccagaagcag

SEQ ID NO: 2878276 - DNA, 25 bp, Homo sapien
ggtgatgagccatgcccccacgtcc

SEQ ID NO: 2878277 - DNA, 25 bp, Homo sapien
ccaaaagctgagcgtggcttgtagc

SEQ ID NO: 2878278 - DNA, 25 bp, Homo sapien
cccaaaagctgagcgtggcttgtag

SEQ ID NO: 2878279 - DNA, 25 bp, Homo sapien
cacccaaaagctgagcgtggcttgt

SEQ ID NO: 2878280 - DNA, 25 bp, Homo sapien
acccaaaagctgagcgtggcttgta

SEQ ID NO: 2878281 - DNA, 25 bp, Homo sapien
tctcagtaccctggccatcgagggc

SEQ ID NO: 2878282 - DNA, 25 bp, Homo sapien
gtaccctggccatcgagggcaccat

SEQ ID NO: 2878283 - DNA, 25 bp, Homo sapien
gaaaaaccctgacactcctgcctgc

SEQ ID NO: 2878284 - DNA, 25 bp, Homo sapien
tgagttctcagtaccctggccatcg

SEQ ID NO: 2878285 - DNA, 25 bp, Homo sapien
cccaccagcttcgggcaaaagagaa

SEQ ID NO: 2878286 - DNA, 25 bp, Homo sapien
gcccaccagcttcgggcaaaagaga

SEQ ID NO: 2878287 - DNA, 25 bp, Homo sapien
caccagcttcgggcaaaagagaagt

SEQ ID NO: 2878288 - DNA, 25 bp, Homo sapien
ccaccagcttcgggcaaaagagaag

SEQ ID NO: 2878289 - DNA, 25 bp, Homo sapien
gccagacacagatactgaaatcatg

SEQ ID NO: 2878290 - DNA, 25 bp, Homo sapien
cagaaaccatagtgtccattcacaa

SEQ ID NO: 2878291 - DNA, 25 bp, Homo sapien
gtcatcgggagccacatggttgaac

SEQ ID NO: 2878292 - DNA, 25 bp, Homo sapien
gaaaccatagtgtccattcacaatg

SEQ ID NO: 2878293 - DNA, 25 bp, Homo sapien
tgaggaaactgtgggatatccgcac

SEQ ID NO: 2878294 - DNA, 25 bp, Homo sapien
atactcctcggccacatgcaaatca

SEQ ID NO: 2878295 - DNA, 25 bp, Homo sapien
gccacatgcaaatcatgtccttctc

SEQ ID NO: 2878296 - DNA, 25 bp, Homo sapien
tgggatatccgcacaacacaatact

SEQ ID NO: 2878297 - DNA, 25 bp, Homo sapien
gagaagcccgcacagaaggaagctc

SEQ ID NO: 2878298 - DNA, 25 bp, Homo sapien
ggtcctgagggaacggagctcttct

SEQ ID NO: 2878299 - DNA, 25 bp, Homo sapien
gaaaaatgctggagcagtcgcgctg

SEQ ID NO: 2878300 - DNA, 25 bp, Homo sapien
tggaagctgccagcggcacccagtg

SEQ ID NO: 2878301 - DNA, 25 bp, Homo sapien
cagaaaaggtggtttggccctgcct

SEQ ID NO: 2878302 - DNA, 25 bp, Homo sapien
aacacacatgcgcaccatgtgcggg

SEQ ID NO: 2878303 - DNA, 25 bp, Homo sapien
cctgctgctcacagtgcgcgtggca

SEQ ID NO: 2878304 - DNA, 25 bp, Homo sapien
tcacagtgcgcgtggcacgcaggct

SEQ ID NO: 2878305 - DNA, 25 bp, Homo sapien
gatgaatgcgtttagtgatatacac

SEQ ID NO: 2878306 - DNA, 25 bp, Homo sapien
tgggtaagctatgtccctattttca

SEQ ID NO: 2878307 - DNA, 25 bp, Homo sapien
tctagttcctttatgtaccaaatta

SEQ ID NO: 2878308 - DNA, 25 bp, Homo sapien
ttgcttctgcaagctttgaggttgg

SEQ ID NO: 2878309 - DNA, 25 bp, Homo sapien
gccagaggtcatcccttactaatca

SEQ ID NO: 2878310 - DNA, 25 bp, Homo sapien
aaaattcacattgaagaggactcct

SEQ ID NO: 2878311 - DNA, 25 bp, Homo sapien
gaatgtaatgcatgtgggaaactct

SEQ ID NO: 2878312 - DNA, 25 bp, Homo sapien
ccttaaaagccgatttgcatgtgtg

SEQ ID NO: 2878313 - DNA, 25 bp, Homo sapien
tcatattcctagtgtgatgtgagtt

SEQ ID NO: 2878314 - DNA, 25 bp, Homo sapien
gaataaggacattccctcatattcc

SEQ ID NO: 2878315 - DNA, 25 bp, Homo sapien
gatccctgttatcagaataaggaca

SEQ ID NO: 2878316 - DNA, 25 bp, Homo sapien
gcccctgccagaaaaattgtttgtg

SEQ ID NO: 2878317 - DNA, 25 bp, Homo sapien
agctgagtgtccttcggcgctgtcc

SEQ ID NO: 2878318 - DNA, 25 bp, Homo sapien
cgcgcgccatccgtgagtcttgtag

SEQ ID NO: 2878319 - DNA, 25 bp, Homo sapien
gaaatgtagtctggcgctccgggct

SEQ ID NO: 2878320 - DNA, 25 bp, Homo sapien
cccaaggttccaagagtcgctcgga

SEQ ID NO: 2878321 - DNA, 25 bp, Homo sapien
ggtctccggacccgccctctggatc

SEQ ID NO: 2878322 - DNA, 25 bp, Homo sapien
ccattgggagctcgggtgagctcat

SEQ ID NO: 2878323 - DNA, 25 bp, Homo sapien
ggagaaggcaatggctgcttggcct

SEQ ID NO: 2878324 - DNA, 25 bp, Homo sapien
ctgctcaggacagggttattgaaat

SEQ ID NO: 2878325 - DNA, 25 bp, Homo sapien
tgctgttgcaggagtcttgtttctc

SEQ ID NO: 2878326 - DNA, 25 bp, Homo sapien
ggtagagactagtttccatagggtg

SEQ ID NO: 2878327 - DNA, 25 bp, Homo sapien
ccatagggtgatggctatttgccga

SEQ ID NO: 2878328 - DNA, 25 bp, Homo sapien
aggacacaagccctcgggccttgag

SEQ ID NO: 2878329 - DNA, 25 bp, Homo sapien
gtgatggctatttgccgatgcagtg

SEQ ID NO: 2878330 - DNA, 25 bp, Homo sapien
gccatcaaaaatctttctggtgaat

SEQ ID NO: 2878331 - DNA, 25 bp, Homo sapien
tgcagccatcaaaaatctttctggt

SEQ ID NO: 2878332 - DNA, 25 bp, Homo sapien
tttaatgctttgcagccatcaaaaa

SEQ ID NO: 2878333 - DNA, 25 bp, Homo sapien
aaaaatctttctggtgaatttgcac

SEQ ID NO: 2878334 - DNA, 25 bp, Homo sapien
ccaagagcagcactcggaattctgt

SEQ ID NO: 2878335 - DNA, 25 bp, Homo sapien
tgtagcacctgaacagttcttccaa

SEQ ID NO: 2878336 - DNA, 25 bp, Homo sapien
cactcatccttgtagcacctgaaca

SEQ ID NO: 2878337 - DNA, 25 bp, Homo sapien
tcgacacataggtcattgcaaaagt

SEQ ID NO: 2878338 - DNA, 25 bp, Homo sapien
tcctcggcactggagttggactccc

SEQ ID NO: 2878339 - DNA, 25 bp, Homo sapien
gactcctcggcactggagttggact

SEQ ID NO: 2878340 - DNA, 25 bp, Homo sapien
caaggaagactcctcggcactggag

SEQ ID NO: 2878341 - DNA, 25 bp, Homo sapien
aagactcctcggcactggagttgga

SEQ ID NO: 2878342 - DNA, 25 bp, Homo sapien
aaggctatctctacttggcatgcca

SEQ ID NO: 2878343 - DNA, 25 bp, Homo sapien
ggtcccattgacaaggctatctcta

SEQ ID NO: 2878344 - DNA, 25 bp, Homo sapien
ttcttggtcccattgacaaggctat

SEQ ID NO: 2878345 - DNA, 25 bp, Homo sapien
cattgacaaggctatctctacttgg

SEQ ID NO: 2878346 - DNA, 25 bp, Homo sapien
tgacatggttgtgcgtctgttctgg

SEQ ID NO: 2878347 - DNA, 25 bp, Homo sapien
tattggaaacacacttgacatggtt

SEQ ID NO: 2878348 - DNA, 25 bp, Homo sapien
tagtagtgaaaccaaatacatcctc

SEQ ID NO: 2878349 - DNA, 25 bp, Homo sapien
tggagaactcctcaatattggaaac

SEQ ID NO: 2878350 - DNA, 25 bp, Homo sapien
tcactcatgatagggaggacagtac

SEQ ID NO: 2878351 - DNA, 25 bp, Homo sapien
tataggcattgggtcaacactcctg

SEQ ID NO: 2878352 - DNA, 25 bp, Homo sapien
tgtatctcatatccagggcactctg

SEQ ID NO: 2878353 - DNA, 25 bp, Homo sapien
tcaagtctgagtagctacaaggtcc

SEQ ID NO: 2878354 - DNA, 25 bp, Homo sapien
cgcaagcgcagttcggctcccggct

SEQ ID NO: 2878355 - DNA, 25 bp, Homo sapien
gcaagcgcagttcggctcccggctg

SEQ ID NO: 2878356 - DNA, 25 bp, Homo sapien
tcaccaaagaattcacactggcgag

SEQ ID NO: 2878357 - DNA, 25 bp, Homo sapien
cttatccatcaccaaagaattcaca

SEQ ID NO: 2878358 - DNA, 25 bp, Homo sapien
tccatcaccaaagaattcacactgg

SEQ ID NO: 2878359 - DNA, 25 bp, Homo sapien
catcaccaaagaattcacactggcg

SEQ ID NO: 2878360 - DNA, 25 bp, Homo sapien
catctgcagcttcacgcagctgaca

SEQ ID NO: 2878361 - DNA, 25 bp, Homo sapien
tctgcagcttcacgcagctgacacc

SEQ ID NO: 2878362 - DNA, 25 bp, Homo sapien
tgcagcttcacgcagctgacaccct

SEQ ID NO: 2878363 - DNA, 25 bp, Homo sapien
atctgcagcttcacgcagctgacac

SEQ ID NO: 2878364 - DNA, 25 bp, Homo sapien
caggaactagcgtcagcggcattaa

SEQ ID NO: 2878365 - DNA, 25 bp, Homo sapien
acgcatgagaactaccactacttgg

SEQ ID NO: 2878366 - DNA, 25 bp, Homo sapien
gaatccctgagaagcacgtttctaa

SEQ ID NO: 2878367 - DNA, 25 bp, Homo sapien
tatgtgcctaccgttgagccaggac

SEQ ID NO: 2878368 - DNA, 25 bp, Homo sapien
ctagaaagagcagttcattccatac

SEQ ID NO: 2878369 - DNA, 25 bp, Homo sapien
tcttgtagtcctaatggccatgtcg

SEQ ID NO: 2878370 - DNA, 25 bp, Homo sapien
agtcctaatggccatgtcgacatac

SEQ ID NO: 2878371 - DNA, 25 bp, Homo sapien
tgtagtcctaatggccatgtcgaca

SEQ ID NO: 2878372 - DNA, 25 bp, Homo sapien
tgctcttgtagtcctaatggccatg

SEQ ID NO: 2878373 - DNA, 25 bp, Homo sapien
acaagactgctctggtacaccacga

SEQ ID NO: 2878374 - DNA, 25 bp, Homo sapien
ccacgatttgggactcttcagggac

SEQ ID NO: 2878375 - DNA, 25 bp, Homo sapien
cacctggtgatgtgccaccttcagc

SEQ ID NO: 2878376 - DNA, 25 bp, Homo sapien
gcctgcgcctgcttcatgtagtaca

SEQ ID NO: 2878377 - DNA, 25 bp, Homo sapien
gaccttcacatgaggccagtctccc

SEQ ID NO: 2878378 - DNA, 25 bp, Homo sapien
accttcacatgaggccagtctcccc

SEQ ID NO: 2878379 - DNA, 25 bp, Homo sapien
cacatgaggccagtctccccgcccc

SEQ ID NO: 2878380 - DNA, 25 bp, Homo sapien
atgaggccagtctccccgcccctca

SEQ ID NO: 2878381 - DNA, 25 bp, Homo sapien
agcgttccgagacccatcacagtgc

SEQ ID NO: 2878382 - DNA, 25 bp, Homo sapien
cctcccacctcggagcgttccgaga

SEQ ID NO: 2878383 - DNA, 25 bp, Homo sapien
tctcctcccacctcggagcgttccg

SEQ ID NO: 2878384 - DNA, 25 bp, Homo sapien
ctgggccatagaaaaaggtaagagc

SEQ ID NO: 2878385 - DNA, 25 bp, Homo sapien
gaagagagggtgtggtaaggtccca

SEQ ID NO: 2878386 - DNA, 25 bp, Homo sapien
ctggagcctaaggaggtgaggttca

SEQ ID NO: 2878387 - DNA, 25 bp, Homo sapien
aggtcccacgcaggcaaaccacaga

SEQ ID NO: 2878388 - DNA, 25 bp, Homo sapien
tccaagagtagaagtgaggggtcca

SEQ ID NO: 2878389 - DNA, 25 bp, Homo sapien
tagactcttgtaacaaacctctttc

SEQ ID NO: 2878390 - DNA, 25 bp, Homo sapien
ttttcctgccatagactcttgtaac

SEQ ID NO: 2878391 - DNA, 25 bp, Homo sapien
ccacgttttcctgccatagactctt

SEQ ID NO: 2878392 - DNA, 25 bp, Homo sapien
cgttttcctgccatagactcttgta

SEQ ID NO: 2878393 - DNA, 25 bp, Homo sapien
gtgttttgccgagatggtgtttcgc

SEQ ID NO: 2878394 - DNA, 25 bp, Homo sapien
taagcatcagtattccactctggct

SEQ ID NO: 2878395 - DNA, 25 bp, Homo sapien
tgtccatactacagcagtttttccc

SEQ ID NO: 2878396 - DNA, 25 bp, Homo sapien
taatttacttctctacacccttgcg

SEQ ID NO: 2878397 - DNA, 25 bp, Homo sapien
tggactctttacagtaagcaatgaa

SEQ ID NO: 2878398 - DNA, 25 bp, Homo sapien
ttacagtaagcaatgaatgtaataa

SEQ ID NO: 2878399 - DNA, 25 bp, Homo sapien
ctggactctttacagtaagcaatga

SEQ ID NO: 2878400 - DNA, 25 bp, Homo sapien
actctttacagtaagcaatgaatgt

SEQ ID NO: 2878401 - DNA, 25 bp, Homo sapien
caaatgggacaaaaccttcggtgca

SEQ ID NO: 2878402 - DNA, 25 bp, Homo sapien
tgtggagataccctgcaagtagacc

SEQ ID NO: 2878403 - DNA, 25 bp, Homo sapien
cacaccgagtgtggaaaagccctct

SEQ ID NO: 2878404 - DNA, 25 bp, Homo sapien
caagtagaccgaatgtgagaaagcc

SEQ ID NO: 2878405 - DNA, 25 bp, Homo sapien
gagaagagccctatacaatcacgag

SEQ ID NO: 2878406 - DNA, 25 bp, Homo sapien
gaagcacctagtcccacggtcaaaa

SEQ ID NO: 2878407 - DNA, 25 bp, Homo sapien
tgtgcactatagagaagccctagga

SEQ ID NO: 2878408 - DNA, 25 bp, Homo sapien
gagtcagtagcgcaacagaaatgtt

SEQ ID NO: 2878409 - DNA, 25 bp, Homo sapien
actgactgttcaccgtggacccggg

SEQ ID NO: 2878410 - DNA, 25 bp, Homo sapien
tctagagctagaaccttctcggtgg

SEQ ID NO: 2878411 - DNA, 25 bp, Homo sapien
gacgcggagcatggtcttggcaaac

SEQ ID NO: 2878412 - DNA, 25 bp, Homo sapien
agaggaatcctacccaggcctgagt

SEQ ID NO: 2878413 - DNA, 25 bp, Homo sapien
ttgaggctccgctttcgcttctgca

SEQ ID NO: 2878414 - DNA, 25 bp, Homo sapien
ttttgggtacgtagagcatgccgag

SEQ ID NO: 2878415 - DNA, 25 bp, Homo sapien
ttagcgtggttgtctggatgtagat

SEQ ID NO: 2878416 - DNA, 25 bp, Homo sapien
gcactcaggctcaaggacacggtta

SEQ ID NO: 2878417 - DNA, 25 bp, Homo sapien
ggaaacaggcagcgagacctcctgg

SEQ ID NO: 2878418 - DNA, 25 bp, Homo sapien
gaacaagcatttaatctcatgaatg

SEQ ID NO: 2878419 - DNA, 25 bp, Homo sapien
taatctcatgaatgaatcgaccagc

SEQ ID NO: 2878420 - DNA, 25 bp, Homo sapien
atgaatcgaccagcctgacaggcag

SEQ ID NO: 2878421 - DNA, 25 bp, Homo sapien
gccttgatggcgtacactgtgcacg

SEQ ID NO: 2878422 - DNA, 25 bp, Homo sapien
gccgatgagagacagatccgacatg

SEQ ID NO: 2878423 - DNA, 25 bp, Homo sapien
cctcatagtcaatcacgctgtgtgg

SEQ ID NO: 2878424 - DNA, 25 bp, Homo sapien
tctcgggcacgccacgggccttgat

SEQ ID NO: 2878425 - DNA, 25 bp, Homo sapien
cccttcaaggtagatggatgtggcc

SEQ ID NO: 2878426 - DNA, 25 bp, Homo sapien
gctgtgccgcccgtatatgttggca

SEQ ID NO: 2878427 - DNA, 25 bp, Homo sapien
tgttcactgtacgagagcgcctgat

SEQ ID NO: 2878428 - DNA, 25 bp, Homo sapien
gaagccacctgcataaaggcgggac

SEQ ID NO: 2878429 - DNA, 25 bp, Homo sapien
atgtgaactcgtccacctggaagcg

SEQ ID NO: 2878430 - DNA, 25 bp, Homo sapien
caggacaggcctcgcatgtgaactc

SEQ ID NO: 2878431 - DNA, 25 bp, Homo sapien
ttgttgtaccgcacgaaggtggcca

SEQ ID NO: 2878432 - DNA, 25 bp, Homo sapien
gaggacgtagctgagctctcggccc

SEQ ID NO: 2878433 - DNA, 25 bp, Homo sapien
ggctggggcgtctgcctccgggatc

SEQ ID NO: 2878434 - DNA, 25 bp, Homo sapien
acctggggctcggtctgcacactca

SEQ ID NO: 2878435 - DNA, 25 bp, Homo sapien
tgcctccgggatcctgggcccatgc

SEQ ID NO: 2878436 - DNA, 25 bp, Homo sapien
ctgggacgcacaaaacacaggctgg

SEQ ID NO: 2878437 - DNA, 25 bp, Homo sapien
gtactggaagatgtcgtaccgcccg

SEQ ID NO: 2878438 - DNA, 25 bp, Homo sapien
tccgttctcgttgaacatcacaggg

SEQ ID NO: 2878439 - DNA, 25 bp, Homo sapien
tgctggcactgccattggtcgcctg

SEQ ID NO: 2878440 - DNA, 25 bp, Homo sapien
gggcgcatctccgttctcgttgaac

SEQ ID NO: 2878441 - DNA, 25 bp, Homo sapien
cagcagttccactcccgggtagata

SEQ ID NO: 2878442 - DNA, 25 bp, Homo sapien
gcagcgttattcacatagccacaag

SEQ ID NO: 2878443 - DNA, 25 bp, Homo sapien
tgacagaagaatggacgaacacgac

SEQ ID NO: 2878444 - DNA, 25 bp, Homo sapien
tgcagaaaacagtgtggagcctcct

SEQ ID NO: 2878445 - DNA, 25 bp, Homo sapien
aagcggacagctcgaatgtactgca

SEQ ID NO: 2878446 - DNA, 25 bp, Homo sapien
tgtactgcagaagcatccgcccatc

SEQ ID NO: 2878447 - DNA, 25 bp, Homo sapien
tccatcgccgggcacaggcctgtgt

SEQ ID NO: 2878448 - DNA, 25 bp, Homo sapien
catcagtgggttccatcgccgggca

SEQ ID NO: 2878449 - DNA, 25 bp, Homo sapien
caatggcgtacaccgcatcaatcac

SEQ ID NO: 2878450 - DNA, 25 bp, Homo sapien
cctcctgctcgtaggtggagtcccg

SEQ ID NO: 2878451 - DNA, 25 bp, Homo sapien
gtgggcaatggcgtacaccgcatca

SEQ ID NO: 2878452 - DNA, 25 bp, Homo sapien
ggagtcccggccgatgcgttcctcg

SEQ ID NO: 2878453 - DNA, 25 bp, Homo sapien
tgttctccagggatcgagtcatgaa

SEQ ID NO: 2878454 - DNA, 25 bp, Homo sapien
tgggtacctgagctggtcagtttgc

SEQ ID NO: 2878455 - DNA, 25 bp, Homo sapien
gaactcggcgaaccagatgttcctg

SEQ ID NO: 2878456 - DNA, 25 bp, Homo sapien
catttgcgggtggaatcgtctgact

SEQ ID NO: 2878457 - DNA, 25 bp, Homo sapien
tgtctgagccgacccacaggaagtg

SEQ ID NO: 2878458 - DNA, 25 bp, Homo sapien
tccaggctcaagatgggtgaggtct

SEQ ID NO: 2878459 - DNA, 25 bp, Homo sapien
cgtcgatggaggcccttttgggcag

SEQ ID NO: 2878460 - DNA, 25 bp, Homo sapien
tggtgatggccccaacggccacgtc

SEQ ID NO: 2878461 - DNA, 25 bp, Homo sapien
atgccccgggcgttgggcgtctcca

SEQ ID NO: 2878462 - DNA, 25 bp, Homo sapien
gcaaagatgatgatgccccgggcgt

SEQ ID NO: 2878463 - DNA, 25 bp, Homo sapien
gttgggcgtctccatgagtctcctg

SEQ ID NO: 2878464 - DNA, 25 bp, Homo sapien
gagtctcctgatcaccttgctgaac

SEQ ID NO: 2878465 - DNA, 25 bp, Homo sapien
caccgctgcagaggactgtgtaggc

SEQ ID NO: 2878466 - DNA, 25 bp, Homo sapien
gggccccgggcccacactatgtaga

SEQ ID NO: 2878467 - DNA, 25 bp, Homo sapien
tatgtagactccttggtgcctcgga

SEQ ID NO: 2878468 - DNA, 25 bp, Homo sapien
gggctgagtcgtccaaaacaaagag

SEQ ID NO: 2878469 - DNA, 25 bp, Homo sapien
agaagtcatagcgtgtggagtcgct

SEQ ID NO: 2878470 - DNA, 25 bp, Homo sapien
tcgggagatctgaacgaaggcctca

SEQ ID NO: 2878471 - DNA, 25 bp, Homo sapien
ggcctcaaccccactttcgccatag

SEQ ID NO: 2878472 - DNA, 25 bp, Homo sapien
catagttgccctcggaggccagcgt

SEQ ID NO: 2878473 - DNA, 25 bp, Homo sapien
gggcaggaaggacagctgggctgtg

SEQ ID NO: 2878474 - DNA, 25 bp, Homo sapien
ggaaggacagctgggctgtggatgg

SEQ ID NO: 2878475 - DNA, 25 bp, Homo sapien
caggaaggacagctgggctgtggat

SEQ ID NO: 2878476 - DNA, 25 bp, Homo sapien
ctgggctgtggatggaggtcagtaa

SEQ ID NO: 2878477 - DNA, 25 bp, Homo sapien
gggcaggaccgccacatatactggt

SEQ ID NO: 2878478 - DNA, 25 bp, Homo sapien
actggtacaagctgtgtcctgaaca

SEQ ID NO: 2878479 - DNA, 25 bp, Homo sapien
gcatggacctgggacacagatggga

SEQ ID NO: 2878480 - DNA, 25 bp, Homo sapien
tgagaattccgtgaatgctgtgcag

SEQ ID NO: 2878481 - DNA, 25 bp, Homo sapien
gttgcaatatcactcgagcgctccg

SEQ ID NO: 2878482 - DNA, 25 bp, Homo sapien
tccttcacagagagccggatgcaca

SEQ ID NO: 2878483 - DNA, 25 bp, Homo sapien
tgcgtcgggctcaactgacagggct

SEQ ID NO: 2878484 - DNA, 25 bp, Homo sapien
cgggacagttccctacatttgagga

SEQ ID NO: 2878485 - DNA, 25 bp, Homo sapien
gcacgttggcgaccatgatggagac

SEQ ID NO: 2878486 - DNA, 25 bp, Homo sapien
agcgcctgctccagcgcgtaggtgt

SEQ ID NO: 2878487 - DNA, 25 bp, Homo sapien
ggccgcggatcagcgcctgcacgaa

SEQ ID NO: 2878488 - DNA, 25 bp, Homo sapien
cggtccagcgcgtacagcatggcct

SEQ ID NO: 2878489 - DNA, 25 bp, Homo sapien
ggcccgccgcgccccgcgcgtgcac

SEQ ID NO: 2878490 - DNA, 25 bp, Homo sapien
ctgcccgcacgcccggcccgccgcg

SEQ ID NO: 2878491 - DNA, 25 bp, Homo sapien
cgcccggcccgccgcgccccgcgcg

SEQ ID NO: 2878492 - DNA, 25 bp, Homo sapien
cccggcccgccgcgccccgcgcgtg

SEQ ID NO: 2878493 - DNA, 25 bp, Homo sapien
gcgcacagagcccgccgcgcgcgcc

SEQ ID NO: 2878494 - DNA, 25 bp, Homo sapien
cacagagcccgccgcgcgcgccagg

SEQ ID NO: 2878495 - DNA, 25 bp, Homo sapien
aggcgcacagagcccgccgcgcgcg

SEQ ID NO: 2878496 - DNA, 25 bp, Homo sapien
agcgccacgagcagcggctcccggg

SEQ ID NO: 2878497 - DNA, 25 bp, Homo sapien
tctggggagttagctcagccggcct

SEQ ID NO: 2878498 - DNA, 25 bp, Homo sapien
gctctggggagttagctcagccggc

SEQ ID NO: 2878499 - DNA, 25 bp, Homo sapien
acttcggctctggggagttagctca

SEQ ID NO: 2878500 - DNA, 25 bp, Homo sapien
tcggctctggggagttagctcagcc

SEQ ID NO: 2878501 - DNA, 25 bp, Homo sapien
aagccagtcacctgcgccagccgct

SEQ ID NO: 2878502 - DNA, 25 bp, Homo sapien
gtctgtgacagatgcggccgaggcc

SEQ ID NO: 2878503 - DNA, 25 bp, Homo sapien
tgcgccagccgctgtcggttcagga

SEQ ID NO: 2878504 - DNA, 25 bp, Homo sapien
ccgctgtcggttcaggacaagtctg

SEQ ID NO: 2878505 - DNA, 25 bp, Homo sapien
ggtcgttctggctccgtataaagtc

SEQ ID NO: 2878506 - DNA, 25 bp, Homo sapien
cagccctcgaggagtgagttgagtt

SEQ ID NO: 2878507 - DNA, 25 bp, Homo sapien
tctgaggcagccactcgagctgcgg

SEQ ID NO: 2878508 - DNA, 25 bp, Homo sapien
gagctgcggtgctcactgtgccaac

SEQ ID NO: 2878509 - DNA, 25 bp, Homo sapien
cagcgattaatgaggctctgggtct

SEQ ID NO: 2878510 - DNA, 25 bp, Homo sapien
ttaatgaggctctgggtctgcaagt

SEQ ID NO: 2878511 - DNA, 25 bp, Homo sapien
ctggaagaggccagcgattaatgag

SEQ ID NO: 2878512 - DNA, 25 bp, Homo sapien
ggcagctgccaaacagtagggcaac

SEQ ID NO: 2878513 - DNA, 25 bp, Homo sapien
gaatatcataactgttggcaaagtc

SEQ ID NO: 2878514 - DNA, 25 bp, Homo sapien
tgagaatatcataactgttggcaaa

SEQ ID NO: 2878515 - DNA, 25 bp, Homo sapien
tatcataactgttggcaaagtcccg

SEQ ID NO: 2878516 - DNA, 25 bp, Homo sapien
ctgagaatatcataactgttggcaa

SEQ ID NO: 2878517 - DNA, 25 bp, Homo sapien
gccccagtagataaagtccatcctt

SEQ ID NO: 2878518 - DNA, 25 bp, Homo sapien
agtgtgctcaggcatgccccagtag

SEQ ID NO: 2878519 - DNA, 25 bp, Homo sapien
tcaggcatgccccagtagataaagt

SEQ ID NO: 2878520 - DNA, 25 bp, Homo sapien
ccagtgagtgtgctcaggcatgccc

SEQ ID NO: 2878521 - DNA, 25 bp, Homo sapien
tctgttcattgaacttcaccacggc

SEQ ID NO: 2878522 - DNA, 25 bp, Homo sapien
gcgaaagtgccggatcctggctccg

SEQ ID NO: 2878523 - DNA, 25 bp, Homo sapien
actgcccgcgtgtgcccgcgaaagt

SEQ ID NO: 2878524 - DNA, 25 bp, Homo sapien
agtccacgctaaacactgcccgcgt

SEQ ID NO: 2878525 - DNA, 25 bp, Homo sapien
tcacaccccatagctttgcagaccc

SEQ ID NO: 2878526 - DNA, 25 bp, Homo sapien
tgtggtcacaccccatagctttgca

SEQ ID NO: 2878527 - DNA, 25 bp, Homo sapien
gtggtcacaccccatagctttgcag

SEQ ID NO: 2878528 - DNA, 25 bp, Homo sapien
tggtcacaccccatagctttgcaga

SEQ ID NO: 2878529 - DNA, 25 bp, Homo sapien
tcacattgtgccaaatctcattttt

SEQ ID NO: 2878530 - DNA, 25 bp, Homo sapien
cagcacactgatcctcctaaatgaa

SEQ ID NO: 2878531 - DNA, 25 bp, Homo sapien
ctacagcacactgatcctcctaaat

SEQ ID NO: 2878532 - DNA, 25 bp, Homo sapien
cactgatcctcctaaatgaatctaa

SEQ ID NO: 2878533 - DNA, 25 bp, Homo sapien
tgttttttcaaactactccgcttgc

SEQ ID NO: 2878534 - DNA, 25 bp, Homo sapien
cctttgagagctctcgttggcggag

SEQ ID NO: 2878535 - DNA, 25 bp, Homo sapien
gagacctcctgcctcgtgtgcggcg

SEQ ID NO: 2878536 - DNA, 25 bp, Homo sapien
tgtgcggcgtgcgtactccctcgca

SEQ ID NO: 2878537 - DNA, 25 bp, Homo sapien
ttaacaagtgcgcgggctgtaggca

SEQ ID NO: 2878538 - DNA, 25 bp, Homo sapien
ctgctaacagatagggtggcggtac

SEQ ID NO: 2878539 - DNA, 25 bp, Homo sapien
ttgggccatccaggcttggctagga

SEQ ID NO: 2878540 - DNA, 25 bp, Homo sapien
gatgccagccttttgtcgttgttca

SEQ ID NO: 2878541 - DNA, 25 bp, Homo sapien
aaaagcaatagctgatgcccgccga

SEQ ID NO: 2878542 - DNA, 25 bp, Homo sapien
gcacccgctggaactggcctggcag

SEQ ID NO: 2878543 - DNA, 25 bp, Homo sapien
ccgaggccttgtgtggcagcttccc

SEQ ID NO: 2878544 - DNA, 25 bp, Homo sapien
aggaggtgcgcttcgtcgcgtaacc

SEQ ID NO: 2878545 - DNA, 25 bp, Homo sapien
gctggtcgaggcacccgctggaact

SEQ ID NO: 2878546 - DNA, 25 bp, Homo sapien
ggtgtttgggcagcgacggctgttt

SEQ ID NO: 2878547 - DNA, 25 bp, Homo sapien
tggtgtttgggcagcgacggctgtt

SEQ ID NO: 2878548 - DNA, 25 bp, Homo sapien
tgtttgggcagcgacggctgtttct

SEQ ID NO: 2878549 - DNA, 25 bp, Homo sapien
ggcagcgacggctgtttctggttgt

SEQ ID NO: 2878550 - DNA, 25 bp, Homo sapien
gtctttttcatcagttggcttctgg

SEQ ID NO: 2878551 - DNA, 25 bp, Homo sapien
ttctggattcagagatggtagacat

SEQ ID NO: 2878552 - DNA, 25 bp, Homo sapien
atggctgtggatctgctgtctgctc

SEQ ID NO: 2878553 - DNA, 25 bp, Homo sapien
aggtgagagtgagtgaaggttgtct

SEQ ID NO: 2878554 - DNA, 25 bp, Homo sapien
cagagttggtataggacaactggac

SEQ ID NO: 2878555 - DNA, 25 bp, Homo sapien
tccagagttggtataggacaactgg

SEQ ID NO: 2878556 - DNA, 25 bp, Homo sapien
agtccagagttggtataggacaact

SEQ ID NO: 2878557 - DNA, 25 bp, Homo sapien
agaggaacaagttgaattacacagt

SEQ ID NO: 2878558 - DNA, 25 bp, Homo sapien
tattccagatttcgggagggatgaa

SEQ ID NO: 2878559 - DNA, 25 bp, Homo sapien
agtattccagatttcgggagggatg

SEQ ID NO: 2878560 - DNA, 25 bp, Homo sapien
gtattccagatttcgggagggatga

SEQ ID NO: 2878561 - DNA, 25 bp, Homo sapien
gggtgatgttcttcaagcgactgac

SEQ ID NO: 2878562 - DNA, 25 bp, Homo sapien
cagggtgatgttcttcaagcgactg

SEQ ID NO: 2878563 - DNA, 25 bp, Homo sapien
ggtgatgttcttcaagcgactgacc

SEQ ID NO: 2878564 - DNA, 25 bp, Homo sapien
tccagggtgatgttcttcaagcgac

SEQ ID NO: 2878565 - DNA, 25 bp, Homo sapien
agattaagacaagagacataaccaa

SEQ ID NO: 2878566 - DNA, 25 bp, Homo sapien
tgagttacgtaggataatgttctaa

SEQ ID NO: 2878567 - DNA, 25 bp, Homo sapien
caaaaagtggtctctgctagattaa

SEQ ID NO: 2878568 - DNA, 25 bp, Homo sapien
agtgtgatcctttattagcttctga

SEQ ID NO: 2878569 - DNA, 25 bp, Homo sapien
tatttgatctttgacaaacttgagg

SEQ ID NO: 2878570 - DNA, 25 bp, Homo sapien
tttgatctttgacaaacttgaggaa

SEQ ID NO: 2878571 - DNA, 25 bp, Homo sapien
ctttgacaaacttgaggaaagcaat

SEQ ID NO: 2878572 - DNA, 25 bp, Homo sapien
gatctttgacaaacttgaggaaagc

SEQ ID NO: 2878573 - DNA, 25 bp, Homo sapien
gatttgcgtcgtttctcagagcccg

SEQ ID NO: 2878574 - DNA, 25 bp, Homo sapien
tctagtgcagcggaaggtctgagtc

SEQ ID NO: 2878575 - DNA, 25 bp, Homo sapien
gactgttactaagccggttctccaa

SEQ ID NO: 2878576 - DNA, 25 bp, Homo sapien
aagtggtccccagctcagagatttg

SEQ ID NO: 2878577 - DNA, 25 bp, Homo sapien
ttagacttggccgtagggagattcc

SEQ ID NO: 2878578 - DNA, 25 bp, Homo sapien
gaatgtcatgcatctccgccaagga

SEQ ID NO: 2878579 - DNA, 25 bp, Homo sapien
tcattactttcgcaggtggaggaca

SEQ ID NO: 2878580 - DNA, 25 bp, Homo sapien
tactcatctcggcaacgggtcagtt

SEQ ID NO: 2878581 - DNA, 25 bp, Homo sapien
gagcaatagcgggacaagacttcca

SEQ ID NO: 2878582 - DNA, 25 bp, Homo sapien
cgtcaatgtcgttgtgcttcccagg

SEQ ID NO: 2878583 - DNA, 25 bp, Homo sapien
tacaggttacaggacttgcagcaca

SEQ ID NO: 2878584 - DNA, 25 bp, Homo sapien
gaatattgacttgtcgccttggcag

SEQ ID NO: 2878585 - DNA, 25 bp, Homo sapien
tctgtagtggttcacacgcgtgggc

SEQ ID NO: 2878586 - DNA, 25 bp, Homo sapien
cgcatggcctcgtcaaagttggaag

SEQ ID NO: 2878587 - DNA, 25 bp, Homo sapien
agtgctacatggatcgcggctcagg

SEQ ID NO: 2878588 - DNA, 25 bp, Homo sapien
gagagaagccgtctgcacttggaaa

SEQ ID NO: 2878589 - DNA, 25 bp, Homo sapien
agcagcgacggcggtggcagccggg

SEQ ID NO: 2878590 - DNA, 25 bp, Homo sapien
tcagcaaagggtcggcggcagcagc

SEQ ID NO: 2878591 - DNA, 25 bp, Homo sapien
agcgacggcggtggcagccgggaag

SEQ ID NO: 2878592 - DNA, 25 bp, Homo sapien
gacggcggtggcagccgggaagcac

SEQ ID NO: 2878593 - DNA, 25 bp, Homo sapien
ctggcagtgccggaaactcggggtg

SEQ ID NO: 2878594 - DNA, 25 bp, Homo sapien
tggcagtgccggaaactcggggtgg

SEQ ID NO: 2878595 - DNA, 25 bp, Homo sapien
gtccccgcacgacgccgcgagaccg

SEQ ID NO: 2878596 - DNA, 25 bp, Homo sapien
gtggggtccccgcacgacgccgcga

SEQ ID NO: 2878597 - DNA, 25 bp, Homo sapien
ctgcaaccacgacagatctttgccc

SEQ ID NO: 2878598 - DNA, 25 bp, Homo sapien
gcaaccacgacagatctttgcccct

SEQ ID NO: 2878599 - DNA, 25 bp, Homo sapien
acgacagatctttgcccctttacaa

SEQ ID NO: 2878600 - DNA, 25 bp, Homo sapien
accacgacagatctttgccccttta

SEQ ID NO: 2878601 - DNA, 25 bp, Homo sapien
tcagaggcccgggagaaaacggtca

SEQ ID NO: 2878602 - DNA, 25 bp, Homo sapien
gcccggagcggacgccgagctcaga

SEQ ID NO: 2878603 - DNA, 25 bp, Homo sapien
cgcggcccggagcggacgccgagct

SEQ ID NO: 2878604 - DNA, 25 bp, Homo sapien
cggcccggagcggacgccgagctca

SEQ ID NO: 2878605 - DNA, 25 bp, Homo sapien
caaggcaagctccacagggcgcagg

SEQ ID NO: 2878606 - DNA, 25 bp, Homo sapien
aggcaagctccacagggcgcagggc

SEQ ID NO: 2878607 - DNA, 25 bp, Homo sapien
gagctttccatagacagagaggagg

SEQ ID NO: 2878608 - DNA, 25 bp, Homo sapien
cccaaggcaagctccacagggcgca

SEQ ID NO: 2878609 - DNA, 25 bp, Homo sapien
ggcagaggcagagttataaacgggt

SEQ ID NO: 2878610 - DNA, 25 bp, Homo sapien
cagaggcagagttataaacgggtcg

SEQ ID NO: 2878611 - DNA, 25 bp, Homo sapien
ggagggcagaggcagagttataaac

SEQ ID NO: 2878612 - DNA, 25 bp, Homo sapien
agggcagaggcagagttataaacgg

SEQ ID NO: 2878613 - DNA, 25 bp, Homo sapien
gggacagccactgaactacgtagct

SEQ ID NO: 2878614 - DNA, 25 bp, Homo sapien
cactgaactacgtagctcttcttgg

SEQ ID NO: 2878615 - DNA, 25 bp, Homo sapien
aactacgtagctcttcttggaggga

SEQ ID NO: 2878616 - DNA, 25 bp, Homo sapien
gtccgggcgggacagccactgaact

SEQ ID NO: 2878617 - DNA, 25 bp, Homo sapien
ggcaggcacggtccagtcttgaact

SEQ ID NO: 2878618 - DNA, 25 bp, Homo sapien
gggaagcgtcattcaaggccctcgc

SEQ ID NO: 2878619 - DNA, 25 bp, Homo sapien
tctatagaagggaactgtggcaggc

SEQ ID NO: 2878620 - DNA, 25 bp, Homo sapien
gaatgagagatcctggatacaccct

SEQ ID NO: 2878621 - DNA, 25 bp, Homo sapien
gcattccctagctggccgagtcctg

SEQ ID NO: 2878622 - DNA, 25 bp, Homo sapien
tggccgagtcctgctgtcaccgtga

SEQ ID NO: 2878623 - DNA, 25 bp, Homo sapien
accagcattccctagctggccgagt

SEQ ID NO: 2878624 - DNA, 25 bp, Homo sapien
agctggccgagtcctgctgtcaccg

SEQ ID NO: 2878625 - DNA, 25 bp, Homo sapien
tgccgttgccacaggttactgagca

SEQ ID NO: 2878626 - DNA, 25 bp, Homo sapien
actggccgctcctgggtgccgttgc

SEQ ID NO: 2878627 - DNA, 25 bp, Homo sapien
tgcaggtcctcgctgtctcaggacg

SEQ ID NO: 2878628 - DNA, 25 bp, Homo sapien
tggcagatgccgaagctgtcgtccg

SEQ ID NO: 2878629 - DNA, 25 bp, Homo sapien
gagtcgccaggcagggttcacctcc

SEQ ID NO: 2878630 - DNA, 25 bp, Homo sapien
gagagtcgccaggcagggttcacct

SEQ ID NO: 2878631 - DNA, 25 bp, Homo sapien
agagtcgccaggcagggttcacctc

SEQ ID NO: 2878632 - DNA, 25 bp, Homo sapien
gtcgccaggcagggttcacctccca

SEQ ID NO: 2878633 - DNA, 25 bp, Homo sapien
tggaaggctccacctattaagagtg

SEQ ID NO: 2878634 - DNA, 25 bp, Homo sapien
gtagctgaccccattgaaaaccctg

SEQ ID NO: 2878635 - DNA, 25 bp, Homo sapien
gaggccttgagtcaccagtaccagt

SEQ ID NO: 2878636 - DNA, 25 bp, Homo sapien
ggccaacgcctgttttcaagactgg

SEQ ID NO: 2878637 - DNA, 25 bp, Homo sapien
ctcaggccgggcgtcattgcagtgc

SEQ ID NO: 2878638 - DNA, 25 bp, Homo sapien
tgggaccagggcccggctcgccaat

SEQ ID NO: 2878639 - DNA, 25 bp, Homo sapien
tcattgcagtgcttggcatgcacgg

SEQ ID NO: 2878640 - DNA, 25 bp, Homo sapien
tgatcagggcagagctcgctgctgc

SEQ ID NO: 2878641 - DNA, 25 bp, Homo sapien
tacatggctcccattcgcctgtgac

SEQ ID NO: 2878642 - DNA, 25 bp, Homo sapien
acaggtctggctacatggctcccat

SEQ ID NO: 2878643 - DNA, 25 bp, Homo sapien
acggagcgcacctgcatgcctgtcc

SEQ ID NO: 2878644 - DNA, 25 bp, Homo sapien
tcattgcagtgcttggcgtgcacgg

SEQ ID NO: 2878645 - DNA, 25 bp, Homo sapien
agtcaggcttccgcagcacctggag

SEQ ID NO: 2878646 - DNA, 25 bp, Homo sapien
acagtcaggcttccgcagcacctgg

SEQ ID NO: 2878647 - DNA, 25 bp, Homo sapien
tcaggcttccgcagcacctggagaa

SEQ ID NO: 2878648 - DNA, 25 bp, Homo sapien
caggcttccgcagcacctggagaac

SEQ ID NO: 2878649 - DNA, 25 bp, Homo sapien
agcctccggcggcagccatacttgg

SEQ ID NO: 2878650 - DNA, 25 bp, Homo sapien
cacgctctgcggatggctttgggct

SEQ ID NO: 2878651 - DNA, 25 bp, Homo sapien
tcgagagggcggcacagaagccacg

SEQ ID NO: 2878652 - DNA, 25 bp, Homo sapien
ccacggtgtaccatcttgtggtcca

SEQ ID NO: 2878653 - DNA, 25 bp, Homo sapien
cgtagaccacagagtcctcttccag

SEQ ID NO: 2878654 - DNA, 25 bp, Homo sapien
gtcgtcgacattcagtgagtcctca

SEQ ID NO: 2878655 - DNA, 25 bp, Homo sapien
tatttgtacgtcagtgagacccggg

SEQ ID NO: 2878656 - DNA, 25 bp, Homo sapien
ttcttcagggcccactcgtagacca

SEQ ID NO: 2878657 - DNA, 25 bp, Homo sapien
ggccgtcctcgtctctgtactccca

SEQ ID NO: 2878658 - DNA, 25 bp, Homo sapien
gtctgcagcgtctcccggccgtcct

SEQ ID NO: 2878659 - DNA, 25 bp, Homo sapien
tttggaactggcatccacgtcattc

SEQ ID NO: 2878660 - DNA, 25 bp, Homo sapien
actcccactccacgcccatggcaat

SEQ ID NO: 2878661 - DNA, 25 bp, Homo sapien
tggcaagaccaagtcccccgttgtg

SEQ ID NO: 2878662 - DNA, 25 bp, Homo sapien
aatggcaagaccaagtcccccgttg

SEQ ID NO: 2878663 - DNA, 25 bp, Homo sapien
atggcaagaccaagtcccccgttgt

SEQ ID NO: 2878664 - DNA, 25 bp, Homo sapien
agaatggcaagaccaagtcccccgt

SEQ ID NO: 2878665 - DNA, 25 bp, Homo sapien
gccagtttcctctgtgccacgacag

SEQ ID NO: 2878666 - DNA, 25 bp, Homo sapien
cagtttcctctgtgccacgacagcc

SEQ ID NO: 2878667 - DNA, 25 bp, Homo sapien
gccacgacagcccagatggctctgg

SEQ ID NO: 2878668 - DNA, 25 bp, Homo sapien
gtttcctctgtgccacgacagccca

SEQ ID NO: 2878669 - DNA, 25 bp, Homo sapien
gcgtctacctcctgaatgagcaggt

SEQ ID NO: 2878670 - DNA, 25 bp, Homo sapien
atggtggctggtggcgtctacctcc

SEQ ID NO: 2878671 - DNA, 25 bp, Homo sapien
tggtggcgtctacctcctgaatgag

SEQ ID NO: 2878672 - DNA, 25 bp, Homo sapien
ggctggtggcgtctacctcctgaat

SEQ ID NO: 2878673 - DNA, 25 bp, Homo sapien
aaggaggggcctcgctcttgaaggc

SEQ ID NO: 2878674 - DNA, 25 bp, Homo sapien
caaggaggggcctcgctcttgaagg

SEQ ID NO: 2878675 - DNA, 25 bp, Homo sapien
aaattcgcaccatgcaaggaggggc

SEQ ID NO: 2878676 - DNA, 25 bp, Homo sapien
tcaaattcgcaccatgcaaggaggg

SEQ ID NO: 2878677 - DNA, 25 bp, Homo sapien
gaacgtgcccttgaccactttgcag

SEQ ID NO: 2878678 - DNA, 25 bp, Homo sapien
ctgcttgctggagccgatcacaccg

SEQ ID NO: 2878679 - DNA, 25 bp, Homo sapien
tcttgggtgaccgtgtgaacgtgcc

SEQ ID NO: 2878680 - DNA, 25 bp, Homo sapien
gctggagccgatcacaccgtcacag

SEQ ID NO: 2878681 - DNA, 25 bp, Homo sapien
ggtctccctggactcgcagtacagg

SEQ ID NO: 2878682 - DNA, 25 bp, Homo sapien
tgcaccatgcgcttcatggacacca

SEQ ID NO: 2878683 - DNA, 25 bp, Homo sapien
taggagcagcgcgtcccgtcatgca

SEQ ID NO: 2878684 - DNA, 25 bp, Homo sapien
acagaggctgaaggcgtccttgtag

SEQ ID NO: 2878685 - DNA, 25 bp, Homo sapien
gtggtgctgggcgtcgccgtgctcg

SEQ ID NO: 2878686 - DNA, 25 bp, Homo sapien
agtcgtaggcaaggcccgagcaggt

SEQ ID NO: 2878687 - DNA, 25 bp, Homo sapien
ctgggcgtcgccgtgctcgaagtac

SEQ ID NO: 2878688 - DNA, 25 bp, Homo sapien
gtgctcgaagtacaggtcccactgg

SEQ ID NO: 2878689 - DNA, 25 bp, Homo sapien
ctggaggagaaagcaaaggccttgc

SEQ ID NO: 2878690 - DNA, 25 bp, Homo sapien
aagcaaaggccttgccgctccgtgc

SEQ ID NO: 2878691 - DNA, 25 bp, Homo sapien
caaaggccttgccgctccgtgccat

SEQ ID NO: 2878692 - DNA, 25 bp, Homo sapien
gaaagcaaaggccttgccgctccgt

SEQ ID NO: 2878693 - DNA, 25 bp, Homo sapien
ctgtgattgggtgtttaggttctgt

SEQ ID NO: 2878694 - DNA, 25 bp, Homo sapien
atgaacaggaagctgtgattgggtg

SEQ ID NO: 2878695 - DNA, 25 bp, Homo sapien
tccccacagggcgaaaaccccagca

SEQ ID NO: 2878696 - DNA, 25 bp, Homo sapien
ggaagctgtgattgggtgtttaggt

SEQ ID NO: 2878697 - DNA, 25 bp, Homo sapien
tgaggatgtcaggtgtcagccagat

SEQ ID NO: 2878698 - DNA, 25 bp, Homo sapien
ccccagctgccgtcccgtttgagga

SEQ ID NO: 2878699 - DNA, 25 bp, Homo sapien
tgaacttcacgcccgtgccacaggt

SEQ ID NO: 2878700 - DNA, 25 bp, Homo sapien
gagcaggagccaaacggactccaag

SEQ ID NO: 2878701 - DNA, 25 bp, Homo sapien
tgccatcagagcttgaaagcagcta

SEQ ID NO: 2878702 - DNA, 25 bp, Homo sapien
gtagcactgtttccacaaagagaac

SEQ ID NO: 2878703 - DNA, 25 bp, Homo sapien
gcccggccgactgcatactctttaa

SEQ ID NO: 2878704 - DNA, 25 bp, Homo sapien
gagaacagaaagagaacgcagccat

SEQ ID NO: 2878705 - DNA, 25 bp, Homo sapien
tctctctctggtgggatggccaaga

SEQ ID NO: 2878706 - DNA, 25 bp, Homo sapien
tagggcacaagctctgctccaggta

SEQ ID NO: 2878707 - DNA, 25 bp, Homo sapien
caagaatggtggacctgatagcccc

SEQ ID NO: 2878708 - DNA, 25 bp, Homo sapien
tgccctagctcagtgtgacagaagc

SEQ ID NO: 2878709 - DNA, 25 bp, Homo sapien
cagacctccctctgccccacttcta

SEQ ID NO: 2878710 - DNA, 25 bp, Homo sapien
agacctccctctgccccacttctac

SEQ ID NO: 2878711 - DNA, 25 bp, Homo sapien
cagaaagcaggttggtgctagccag

SEQ ID NO: 2878712 - DNA, 25 bp, Homo sapien
gaggtgactgataaatggcgcttcc

SEQ ID NO: 2878713 - DNA, 25 bp, Homo sapien
tgaaattccggaataggcaactcta

SEQ ID NO: 2878714 - DNA, 25 bp, Homo sapien
tactaaatgccaccgaatggtgcac

SEQ ID NO: 2878715 - DNA, 25 bp, Homo sapien
caggtgcacacatagtcccgtccaa

SEQ ID NO: 2878716 - DNA, 25 bp, Homo sapien
gtgcacacatagtcccgtccaaggg

SEQ ID NO: 2878717 - DNA, 25 bp, Homo sapien
cttgccaggtgcacacatagtcccg

SEQ ID NO: 2878718 - DNA, 25 bp, Homo sapien
ttgccaggtgcacacatagtcccgt

SEQ ID NO: 2878719 - DNA, 25 bp, Homo sapien
gccgtgcacatcatgtagcccaggc

SEQ ID NO: 2878720 - DNA, 25 bp, Homo sapien
aagtcaaagcggcattgctcgttca

SEQ ID NO: 2878721 - DNA, 25 bp, Homo sapien
catcatgtagcccaggccgaagtca

SEQ ID NO: 2878722 - DNA, 25 bp, Homo sapien
caggccgaagtcaaagcggcattgc

SEQ ID NO: 2878723 - DNA, 25 bp, Homo sapien
ggcagcgccggccagtcgtgggcga

SEQ ID NO: 2878724 - DNA, 25 bp, Homo sapien
gcgccggccagtcgtgggcgaaggg

SEQ ID NO: 2878725 - DNA, 25 bp, Homo sapien
agcgccggccagtcgtgggcgaagg

SEQ ID NO: 2878726 - DNA, 25 bp, Homo sapien
cagtcgtgggcgaaggggtcatcca

SEQ ID NO: 2878727 - DNA, 25 bp, Homo sapien
cctggcttgagcggaccccagggta

SEQ ID NO: 2878728 - DNA, 25 bp, Homo sapien
ctggcttgagcggaccccagggtag

SEQ ID NO: 2878729 - DNA, 25 bp, Homo sapien
ggacctggcttgagcggaccccagg

SEQ ID NO: 2878730 - DNA, 25 bp, Homo sapien
gacctggcttgagcggaccccaggg

SEQ ID NO: 2878731 - DNA, 25 bp, Homo sapien
agcggttgccctgcccgtcgtgctc

SEQ ID NO: 2878732 - DNA, 25 bp, Homo sapien
ctcgtcgccacagcggttgccctgc

SEQ ID NO: 2878733 - DNA, 25 bp, Homo sapien
gccgcacctcgtcgccacagcggtt

SEQ ID NO: 2878734 - DNA, 25 bp, Homo sapien
tgcccagccgcacctcgtcgccaca

SEQ ID NO: 2878735 - DNA, 25 bp, Homo sapien
cctcatggttcagggtgcagctgcg

SEQ ID NO: 2878736 - DNA, 25 bp, Homo sapien
ggccagtctcatgggccaccacaaa

SEQ ID NO: 2878737 - DNA, 25 bp, Homo sapien
ggccaccacaaacgctgaggagaag

SEQ ID NO: 2878738 - DNA, 25 bp, Homo sapien
agctgcggaccggatggcacatgcc

SEQ ID NO: 2878739 - DNA, 25 bp, Homo sapien
tggtattcatcgtggcccgtgtctg

SEQ ID NO: 2878740 - DNA, 25 bp, Homo sapien
ttgcatgccggaaggcccaaagtcc

SEQ ID NO: 2878741 - DNA, 25 bp, Homo sapien
gaagatggcgtgatcgtggtattca

SEQ ID NO: 2878742 - DNA, 25 bp, Homo sapien
taggcccagcggcagacattctcca

SEQ ID NO: 2878743 - DNA, 25 bp, Homo sapien
gttccctccaagagaaccgagagcc

SEQ ID NO: 2878744 - DNA, 25 bp, Homo sapien
caccgaagtagttccctccaagaga

SEQ ID NO: 2878745 - DNA, 25 bp, Homo sapien
catagactccaaacaccgaagtagt

SEQ ID NO: 2878746 - DNA, 25 bp, Homo sapien
tagactccaaacaccgaagtagttc

SEQ ID NO: 2878747 - DNA, 25 bp, Homo sapien
aaaagttctgttccaatcgttgctc

SEQ ID NO: 2878748 - DNA, 25 bp, Homo sapien
taggcccggccgaaatatctcatct

SEQ ID NO: 2878749 - DNA, 25 bp, Homo sapien
ggcttccgcccatgacagttcaggc

SEQ ID NO: 2878750 - DNA, 25 bp, Homo sapien
tccttcagtcaaggagacgtgggag

SEQ ID NO: 2878751 - DNA, 25 bp, Homo sapien
gctgtcttgtctgctgctactgcct

SEQ ID NO: 2878752 - DNA, 25 bp, Homo sapien
cactctgtcgctgtcttgtctgctg

SEQ ID NO: 2878753 - DNA, 25 bp, Homo sapien
tctgtcgctgtcttgtctgctgcta

SEQ ID NO: 2878754 - DNA, 25 bp, Homo sapien
tctcccctcctcgttcatgcacctc

SEQ ID NO: 2878755 - DNA, 25 bp, Homo sapien
tccccgggatggagcggaccccatg

SEQ ID NO: 2878756 - DNA, 25 bp, Homo sapien
catcactgcctcctgtgcttgatct

SEQ ID NO: 2878757 - DNA, 25 bp, Homo sapien
ggagatccccgggatggagcggacc

SEQ ID NO: 2878758 - DNA, 25 bp, Homo sapien
tcactgcctcctgtgcttgatctgg

SEQ ID NO: 2878759 - DNA, 25 bp, Homo sapien
ctatgtcctctctgttctctttgta

SEQ ID NO: 2878760 - DNA, 25 bp, Homo sapien
tatgtcctctctgttctctttgtac

SEQ ID NO: 2878761 - DNA, 25 bp, Homo sapien
tgccctggtttgctggctatggatc

SEQ ID NO: 2878762 - DNA, 25 bp, Homo sapien
ggtttgctggctatggatctcagca

SEQ ID NO: 2878763 - DNA, 25 bp, Homo sapien
ccagggcctgcacatgtccccatgt

SEQ ID NO: 2878764 - DNA, 25 bp, Homo sapien
ggtcgcagaagttgcccggtgccca

SEQ ID NO: 2878765 - DNA, 25 bp, Homo sapien
acaggaagcgtgagctagcgcccat

SEQ ID NO: 2878766 - DNA, 25 bp, Homo sapien
gccacaggaagcgtgagctagcgcc

SEQ ID NO: 2878767 - DNA, 25 bp, Homo sapien
ttcaggtggacccgctgcaggtgga

SEQ ID NO: 2878768 - DNA, 25 bp, Homo sapien
ccagccacaggaagcgtgagctagc

SEQ ID NO: 2878769 - DNA, 25 bp, Homo sapien
ccattcttgaccgtccatgttgctt

SEQ ID NO: 2878770 - DNA, 25 bp, Homo sapien
cagccattcttgaccgtccatgttg

SEQ ID NO: 2878771 - DNA, 25 bp, Homo sapien
attcttgaccgtccatgttgctttg

SEQ ID NO: 2878772 - DNA, 25 bp, Homo sapien
ccatgcttgaccgttcatgttcctt

SEQ ID NO: 2878773 - DNA, 25 bp, Homo sapien
caccgccaggaaaggacgtcccagg

SEQ ID NO: 2878774 - DNA, 25 bp, Homo sapien
acccatgcacaccgccaggaaagga

SEQ ID NO: 2878775 - DNA, 25 bp, Homo sapien
tgcacaccgccaggaaaggacgtcc

SEQ ID NO: 2878776 - DNA, 25 bp, Homo sapien
catgcacaccgccaggaaaggacgt

SEQ ID NO: 2878777 - DNA, 25 bp, Homo sapien
ggatgatccgcaccaggaccacgtt

SEQ ID NO: 2878778 - DNA, 25 bp, Homo sapien
caaggactcgtcatggtagatttca

SEQ ID NO: 2878779 - DNA, 25 bp, Homo sapien
ttccatagctcaggaggatgatccg

SEQ ID NO: 2878780 - DNA, 25 bp, Homo sapien
gaccacgttgatgtgggcacccaag

SEQ ID NO: 2878781 - DNA, 25 bp, Homo sapien
catgcccagagccaggctaagcagc

SEQ ID NO: 2878782 - DNA, 25 bp, Homo sapien
ctccctgcttgcatgcccagagcca

SEQ ID NO: 2878783 - DNA, 25 bp, Homo sapien
cttgcatgcccagagccaggctaag

SEQ ID NO: 2878784 - DNA, 25 bp, Homo sapien
ccctgcttgcatgcccagagccagg

SEQ ID NO: 2878785 - DNA, 25 bp, Homo sapien
cagggatacccgctgaaaggctgaa

SEQ ID NO: 2878786 - DNA, 25 bp, Homo sapien
caggcactcagggatacccgctgaa

SEQ ID NO: 2878787 - DNA, 25 bp, Homo sapien
cactcagggatacccgctgaaaggc

SEQ ID NO: 2878788 - DNA, 25 bp, Homo sapien
ggcactcagggatacccgctgaaag

SEQ ID NO: 2878789 - DNA, 25 bp, Homo sapien
tggcaccatcaagaagtggagaaac

SEQ ID NO: 2878790 - DNA, 25 bp, Homo sapien
ggctgtgtgcagaccgagcccaggg

SEQ ID NO: 2878791 - DNA, 25 bp, Homo sapien
gcaccatcaagaagtggagaaacag

SEQ ID NO: 2878792 - DNA, 25 bp, Homo sapien
ggagaaacagggactggctgtgtgc

SEQ ID NO: 2878793 - DNA, 25 bp, Homo sapien
gggaaccactgggagtaatcagtgt

SEQ ID NO: 2878794 - DNA, 25 bp, Homo sapien
tcagtaaggacacagcggcaacatt

SEQ ID NO: 2878795 - DNA, 25 bp, Homo sapien
aaaacactggcgtcctcagtaagga

SEQ ID NO: 2878796 - DNA, 25 bp, Homo sapien
tgtaattcccgacaaaacactggcg

SEQ ID NO: 2878797 - DNA, 25 bp, Homo sapien
tgtgggctggggacggattttacaa

SEQ ID NO: 2878798 - DNA, 25 bp, Homo sapien
gggaagaatattactaagtatcttc

SEQ ID NO: 2878799 - DNA, 25 bp, Homo sapien
caaagtagattcacaagggcgggtc

SEQ ID NO: 2878800 - DNA, 25 bp, Homo sapien
gtggggaagaatattactaagtatc

SEQ ID NO: 2878801 - DNA, 25 bp, Homo sapien
cagcatggacgatggagacacagcc

SEQ ID NO: 2878802 - DNA, 25 bp, Homo sapien
tagaaactgtatcccgggacctggc

SEQ ID NO: 2878803 - DNA, 25 bp, Homo sapien
agtgagtgttatccccgctgtgcca

SEQ ID NO: 2878804 - DNA, 25 bp, Homo sapien
catcatgggccgagtgaacaactgc

SEQ ID NO: 2878805 - DNA, 25 bp, Homo sapien
gacaagctccgaggctgcctcaagc

SEQ ID NO: 2878806 - DNA, 25 bp, Homo sapien
gggactctaactcccattctgacaa

SEQ ID NO: 2878807 - DNA, 25 bp, Homo sapien
tcaagctgtcatccgggtgtgtgga

SEQ ID NO: 2878808 - DNA, 25 bp, Homo sapien
acaagacaagctccgaggctgcctc

SEQ ID NO: 2878809 - DNA, 25 bp, Homo sapien
tcagcactcgtgaaagttggtgaga

SEQ ID NO: 2878810 - DNA, 25 bp, Homo sapien
tgccttcggattgtttgcaaaccct

SEQ ID NO: 2878811 - DNA, 25 bp, Homo sapien
gaaattgagcccatatgccttcgga

SEQ ID NO: 2878812 - DNA, 25 bp, Homo sapien
tggcaaggctctggtaagtccaggc

SEQ ID NO: 2878813 - DNA, 25 bp, Homo sapien
tcctggtagcaataggttgagcgct

SEQ ID NO: 2878814 - DNA, 25 bp, Homo sapien
ggtatcacccactgcaatggtctgc

SEQ ID NO: 2878815 - DNA, 25 bp, Homo sapien
gccagagtttgccaacacagcttta

SEQ ID NO: 2878816 - DNA, 25 bp, Homo sapien
cctgagagtacgtgttcctggtagc

SEQ ID NO: 2878817 - DNA, 25 bp, Homo sapien
ggcattcatcgtcagggcaatgcca

SEQ ID NO: 2878818 - DNA, 25 bp, Homo sapien
agtgaggacgcagggcattcatcgt

SEQ ID NO: 2878819 - DNA, 25 bp, Homo sapien
gcacggccgcgccttatctccctcg

SEQ ID NO: 2878820 - DNA, 25 bp, Homo sapien
ccacgctgcgctcttgcagtgggag

SEQ ID NO: 2878821 - DNA, 25 bp, Homo sapien
aaagttggacggcaaaagtgagaga

SEQ ID NO: 2878822 - DNA, 25 bp, Homo sapien
tgagagaacgttctagacatcctcc

SEQ ID NO: 2878823 - DNA, 25 bp, Homo sapien
aagtgagagaacgttctagacatcc

SEQ ID NO: 2878824 - DNA, 25 bp, Homo sapien
tgaataaagttggacggcaaaagtg

SEQ ID NO: 2878825 - DNA, 25 bp, Homo sapien
cacccacgatgtgcagacgagagaa

SEQ ID NO: 2878826 - DNA, 25 bp, Homo sapien
aagttaccatcacccacgatgtgca

SEQ ID NO: 2878827 - DNA, 25 bp, Homo sapien
tgaagagcctcaccaagttaccatc

SEQ ID NO: 2878828 - DNA, 25 bp, Homo sapien
gtgaagagcctcaccaagttaccat

SEQ ID NO: 2878829 - DNA, 25 bp, Homo sapien
ttctgtacgtgctccttcccgtgga

SEQ ID NO: 2878830 - DNA, 25 bp, Homo sapien
tgttgtagtcatcgtccgcagcatg

SEQ ID NO: 2878831 - DNA, 25 bp, Homo sapien
gctgttggcgtgctcctctaggacg

SEQ ID NO: 2878832 - DNA, 25 bp, Homo sapien
ttcccgtggaactgcaccacagagt

SEQ ID NO: 2878833 - DNA, 25 bp, Homo sapien
gcccccagggtgtgcccctggccac

SEQ ID NO: 2878834 - DNA, 25 bp, Homo sapien
cccagggtgtgcccctggccacttg

SEQ ID NO: 2878835 - DNA, 25 bp, Homo sapien
cagggtgtgcccctggccacttggg

SEQ ID NO: 2878836 - DNA, 25 bp, Homo sapien
ctgcccccagggtgtgcccctggcc

SEQ ID NO: 2878837 - DNA, 25 bp, Homo sapien
tgcgatgccctttttgctgctgccg

SEQ ID NO: 2878838 - DNA, 25 bp, Homo sapien
cctttttgctgctgccgctgtgctg

SEQ ID NO: 2878839 - DNA, 25 bp, Homo sapien
ctgctgccgctgtgctggccaaatt

SEQ ID NO: 2878840 - DNA, 25 bp, Homo sapien
gctgtgctggccaaatttaggcccc

SEQ ID NO: 2878841 - DNA, 25 bp, Homo sapien
ccatgggccattgttcggccccatg

SEQ ID NO: 2878842 - DNA, 25 bp, Homo sapien
tggactggcttgcagatgggcaaac

SEQ ID NO: 2878843 - DNA, 25 bp, Homo sapien
cccatggactggcttgcagatgggc

SEQ ID NO: 2878844 - DNA, 25 bp, Homo sapien
tgggccattgttcggccccatggac

SEQ ID NO: 2878845 - DNA, 25 bp, Homo sapien
taggggatggcctgagggcagacag

SEQ ID NO: 2878846 - DNA, 25 bp, Homo sapien
atggcctgagggcagacaggcacac

SEQ ID NO: 2878847 - DNA, 25 bp, Homo sapien
tggcctgagggcagacaggcacact

SEQ ID NO: 2878848 - DNA, 25 bp, Homo sapien
cctgagggcagacaggcacactcac

SEQ ID NO: 2878849 - DNA, 25 bp, Homo sapien
taggtaggggatggcctgagggcag

SEQ ID NO: 2878850 - DNA, 25 bp, Homo sapien
taggggatggcctgagggcagacgg

SEQ ID NO: 2878851 - DNA, 25 bp, Homo sapien
ggcctgagggcagacggcacactca

SEQ ID NO: 2878852 - DNA, 25 bp, Homo sapien
gggatggcctgagggcagacggcac

SEQ ID NO: 2878853 - DNA, 25 bp, Homo sapien
accaccaggctcaggaggaccaaag

SEQ ID NO: 2878854 - DNA, 25 bp, Homo sapien
caggctcaggaggaccaaagcctgg

SEQ ID NO: 2878855 - DNA, 25 bp, Homo sapien
gctcaggaggaccaaagcctggagc

SEQ ID NO: 2878856 - DNA, 25 bp, Homo sapien
tcaggaggaccaaagcctggagcac

SEQ ID NO: 2878857 - DNA, 25 bp, Homo sapien
gtgcacctccggctgcactgccagc

SEQ ID NO: 2878858 - DNA, 25 bp, Homo sapien
cagtccggtacatgctccagagccc

SEQ ID NO: 2878859 - DNA, 25 bp, Homo sapien
ggcctcaggtacctcacactcagaa

SEQ ID NO: 2878860 - DNA, 25 bp, Homo sapien
cctgatttggacatcatctggaagc

SEQ ID NO: 2878861 - DNA, 25 bp, Homo sapien
gttgtggccttcacgtcctttgatg

SEQ ID NO: 2878862 - DNA, 25 bp, Homo sapien
ggccttcacgtcctttgatgttgag

SEQ ID NO: 2878863 - DNA, 25 bp, Homo sapien
ccttgttgtggccttcacgtccttt

SEQ ID NO: 2878864 - DNA, 25 bp, Homo sapien
ccttcacgtcctttgatgttgagcc

SEQ ID NO: 2878865 - DNA, 25 bp, Homo sapien
caagagggagctgaaagtaccaggg

SEQ ID NO: 2878866 - DNA, 25 bp, Homo sapien
ccaagagggagctgaaagtaccagg

SEQ ID NO: 2878867 - DNA, 25 bp, Homo sapien
cgagcagcttttcagtgtatgagaa

SEQ ID NO: 2878868 - DNA, 25 bp, Homo sapien
agtgtatgagaagacgctcgacctc

SEQ ID NO: 2878869 - DNA, 25 bp, Homo sapien
gacgctcgacctcacccttaattaa

SEQ ID NO: 2878870 - DNA, 25 bp, Homo sapien
tgagaagacgctcgacctcaccctt

SEQ ID NO: 2878871 - DNA, 25 bp, Homo sapien
ggtgccttcaccacggcctcctcat

SEQ ID NO: 2878872 - DNA, 25 bp, Homo sapien
aaagccagcggacatccactgcctg

SEQ ID NO: 2878873 - DNA, 25 bp, Homo sapien
tcatccagcatccacaactctggag

SEQ ID NO: 2878874 - DNA, 25 bp, Homo sapien
tggagctaggaagcccggtgctcct

SEQ ID NO: 2878875 - DNA, 25 bp, Homo sapien
gtggtcacttatgcgctccagggcc

SEQ ID NO: 2878876 - DNA, 25 bp, Homo sapien
ggcattgatgccgagatgctcagct

SEQ ID NO: 2878877 - DNA, 25 bp, Homo sapien
gcactcacagggcattgatgccgag

SEQ ID NO: 2878878 - DNA, 25 bp, Homo sapien
gtctggtggtcacttatgcgctcca

SEQ ID NO: 2878879 - DNA, 25 bp, Homo sapien
ctgggagaccgtgggagtcaccgca

SEQ ID NO: 2878880 - DNA, 25 bp, Homo sapien
ctcctgggagaccgtgggagtcacc

SEQ ID NO: 2878881 - DNA, 25 bp, Homo sapien
tgggtgtccacggattcacccccag

SEQ ID NO: 2878882 - DNA, 25 bp, Homo sapien
tgctgggtgtccacggattcacccc

SEQ ID NO: 2878883 - DNA, 25 bp, Homo sapien
gatggctttactgggaattctacct

SEQ ID NO: 2878884 - DNA, 25 bp, Homo sapien
tcctcaatgatattctagcaaacca

SEQ ID NO: 2878885 - DNA, 25 bp, Homo sapien
ggcttatatacaatcaccaagtggg

SEQ ID NO: 2878886 - DNA, 25 bp, Homo sapien
tatccgtggaatgcaagagtggttc

SEQ ID NO: 2878887 - DNA, 25 bp, Homo sapien
tgggcggagctgagcgcgctgaccc

SEQ ID NO: 2878888 - DNA, 25 bp, Homo sapien
ggagctgagcgcgctgacccctgca

SEQ ID NO: 2878889 - DNA, 25 bp, Homo sapien
cagcatgctgggcggagctgagcgc

SEQ ID NO: 2878890 - DNA, 25 bp, Homo sapien
gcaccaacagcagcatgccgggcgg

SEQ ID NO: 2878891 - DNA, 25 bp, Homo sapien
cggggatgggccagaaacagattct

SEQ ID NO: 2878892 - DNA, 25 bp, Homo sapien
ggctcttgagatgagaagcctgtcc

SEQ ID NO: 2878893 - DNA, 25 bp, Homo sapien
actcgggtgagtcctaaatgtaatc

SEQ ID NO: 2878894 - DNA, 25 bp, Homo sapien
aatgtaatcaaggcatccttgcaag

SEQ ID NO: 2878895 - DNA, 25 bp, Homo sapien
ttggagatgcctgtcagaatgcctg

SEQ ID NO: 2878896 - DNA, 25 bp, Homo sapien
cagagaacagggattggagatgcct

SEQ ID NO: 2878897 - DNA, 25 bp, Homo sapien
tattgtttcaagctccgtgaggact

SEQ ID NO: 2878898 - DNA, 25 bp, Homo sapien
cagagaggacaatgccacagggtgc

SEQ ID NO: 2878899 - DNA, 25 bp, Homo sapien
ggacacaggggttgctaatgccact

SEQ ID NO: 2878900 - DNA, 25 bp, Homo sapien
cagaaccaccctgaatcttccagga

SEQ ID NO: 2878901 - DNA, 25 bp, Homo sapien
agcacaagtgaccagcccctgagct

SEQ ID NO: 2878902 - DNA, 25 bp, Homo sapien
atgccactgggcttgcccgacagca

SEQ ID NO: 2878903 - DNA, 25 bp, Homo sapien
tttctgggcccagggcacacgtggg

SEQ ID NO: 2878904 - DNA, 25 bp, Homo sapien
tctgggcccagggcacacgtgggtt

SEQ ID NO: 2878905 - DNA, 25 bp, Homo sapien
tcacgtttctgggcccagggcacac

SEQ ID NO: 2878906 - DNA, 25 bp, Homo sapien
cgtttctgggcccagggcacacgtg

SEQ ID NO: 2878907 - DNA, 25 bp, Homo sapien
ttctccaagggttcgatgaagaact

SEQ ID NO: 2878908 - DNA, 25 bp, Homo sapien
tgggtggccggcgatacaccacatg

SEQ ID NO: 2878909 - DNA, 25 bp, Homo sapien
caagggttcgatgaagaactcctcc

SEQ ID NO: 2878910 - DNA, 25 bp, Homo sapien
gatacaccacatgcacacggccttg

SEQ ID NO: 2878911 - DNA, 25 bp, Homo sapien
gctgggtgcaccctgccgagccacc

SEQ ID NO: 2878912 - DNA, 25 bp, Homo sapien
ggctgggtgcaccctgccgagccac

SEQ ID NO: 2878913 - DNA, 25 bp, Homo sapien
tggtgagggagattgtaggcagccc

SEQ ID NO: 2878914 - DNA, 25 bp, Homo sapien
tctggggggagccttgatctgattc

SEQ ID NO: 2878915 - DNA, 25 bp, Homo sapien
tccagttcagaagcatggtggctgc

SEQ ID NO: 2878916 - DNA, 25 bp, Homo sapien
gggggagccttgatctgattccagt

SEQ ID NO: 2878917 - DNA, 25 bp, Homo sapien
gaccgaggtcggagaaggaggtcag

SEQ ID NO: 2878918 - DNA, 25 bp, Homo sapien
caagaccgaggtcggagaaggaggt

SEQ ID NO: 2878919 - DNA, 25 bp, Homo sapien
cagggcaagaccgaggtcggagaag

SEQ ID NO: 2878920 - DNA, 25 bp, Homo sapien
gggcaagaccgaggtcggagaagga

SEQ ID NO: 2878921 - DNA, 25 bp, Homo sapien
tgaagtctgtggatgtctggcaaac

SEQ ID NO: 2878922 - DNA, 25 bp, Homo sapien
aagtctgtggatgtctggcaaaccc

SEQ ID NO: 2878923 - DNA, 25 bp, Homo sapien
gaagtctgtggatgtctggcaaacc

SEQ ID NO: 2878924 - DNA, 25 bp, Homo sapien
attcctgaaagtattctaactccaa

SEQ ID NO: 2878925 - DNA, 25 bp, Homo sapien
cctgaaagtattctaactccaagat

SEQ ID NO: 2878926 - DNA, 25 bp, Homo sapien
tgaaagtattctaactccaagattc

SEQ ID NO: 2878927 - DNA, 25 bp, Homo sapien
tcctgaaagtattctaactccaaga

SEQ ID NO: 2878928 - DNA, 25 bp, Homo sapien
cagcatcccagaggatttcacacac

SEQ ID NO: 2878929 - DNA, 25 bp, Homo sapien
ttccaaaagggacgccagcgggcag

SEQ ID NO: 2878930 - DNA, 25 bp, Homo sapien
cacttttccaaaagggacgccagcg

SEQ ID NO: 2878931 - DNA, 25 bp, Homo sapien
ccagaggatttcacacactgacttt

SEQ ID NO: 2878932 - DNA, 25 bp, Homo sapien
tccacttaatgactgggaactgggg

SEQ ID NO: 2878933 - DNA, 25 bp, Homo sapien
ttccacttaatgactgggaactggg

SEQ ID NO: 2878934 - DNA, 25 bp, Homo sapien
tggtgactcaatcccatgaacaggg

SEQ ID NO: 2878935 - DNA, 25 bp, Homo sapien
aggatcaacccgacccagggatgct

SEQ ID NO: 2878936 - DNA, 25 bp, Homo sapien
gatgttgatgaaggcacgcagccta

SEQ ID NO: 2878937 - DNA, 25 bp, Homo sapien
agaaacacgtccagccagccaatta

SEQ ID NO: 2878938 - DNA, 25 bp, Homo sapien
ggatgccccgctcacagtgtgctgt

SEQ ID NO: 2878939 - DNA, 25 bp, Homo sapien
gagagccggtggcagcagggcgtgc

SEQ ID NO: 2878940 - DNA, 25 bp, Homo sapien
gctgaacttcagttttgacgcagaa

SEQ ID NO: 2878941 - DNA, 25 bp, Homo sapien
tggagacaacccatcctctgggaaa

SEQ ID NO: 2878942 - DNA, 25 bp, Homo sapien
gcccacaggcacctaaaactctaag

SEQ ID NO: 2878943 - DNA, 25 bp, Homo sapien
cagctttctggccagagagatttaa

SEQ ID NO: 2878944 - DNA, 25 bp, Homo sapien
tcctcccaggagtgtagttgcagga

SEQ ID NO: 2878945 - DNA, 25 bp, Homo sapien
gaagtgctgtggtcctagaaaggtg

SEQ ID NO: 2878946 - DNA, 25 bp, Homo sapien
cagagtgggccaagtttgccgcctt

SEQ ID NO: 2878947 - DNA, 25 bp, Homo sapien
gtccctgtggtgcagagtgggccaa

SEQ ID NO: 2878948 - DNA, 25 bp, Homo sapien
tcgggatggtgtaaggtttccttgc

SEQ ID NO: 2878949 - DNA, 25 bp, Homo sapien
gatggtgtaaggtttccttgccaag

SEQ ID NO: 2878950 - DNA, 25 bp, Homo sapien
atccgtggagctcagcggtgcccag

SEQ ID NO: 2878951 - DNA, 25 bp, Homo sapien
gatgtcgggagtcaccaggaccatc

SEQ ID NO: 2878952 - DNA, 25 bp, Homo sapien
ccatctgacaaatgaccgccttggg

SEQ ID NO: 2878953 - DNA, 25 bp, Homo sapien
cactcgaaatgccagctggaaaggt

SEQ ID NO: 2878954 - DNA, 25 bp, Homo sapien
gtgcacagcttcctagcccggcccc

SEQ ID NO: 2878955 - DNA, 25 bp, Homo sapien
gacctgaccttcaactctaactgtg

SEQ ID NO: 2878956 - DNA, 25 bp, Homo sapien
gacccagacctgaccttcaactcta

SEQ ID NO: 2878957 - DNA, 25 bp, Homo sapien
ccttcaactctaactgtgcacagct

SEQ ID NO: 2878958 - DNA, 25 bp, Homo sapien
tcggattgggcgcagcctgggagca

SEQ ID NO: 2878959 - DNA, 25 bp, Homo sapien
gaggcttcggattgggcgcagcctg

SEQ ID NO: 2878960 - DNA, 25 bp, Homo sapien
gactggcatttcccgggctcctggt

SEQ ID NO: 2878961 - DNA, 25 bp, Homo sapien
ccacacggaggcttcggattgggcg

SEQ ID NO: 2878962 - DNA, 25 bp, Homo sapien
cctccggggacacgagctgggatct

SEQ ID NO: 2878963 - DNA, 25 bp, Homo sapien
gctgggatctgagtggcgcaggtac

SEQ ID NO: 2878964 - DNA, 25 bp, Homo sapien
ggcgcaggtactatgttctagagag

SEQ ID NO: 2878965 - DNA, 25 bp, Homo sapien
ctgagtggcgcaggtactatgttct

SEQ ID NO: 2878966 - DNA, 25 bp, Homo sapien
gatctggacagagctctcgctgtgt

SEQ ID NO: 2878967 - DNA, 25 bp, Homo sapien
gaaacaacgatccttccagagacaa

SEQ ID NO: 2878968 - DNA, 25 bp, Homo sapien
ccatggcacgcagaggaaaactgaa

SEQ ID NO: 2878969 - DNA, 25 bp, Homo sapien
tggctgcaccgaagagcagaacaga

SEQ ID NO: 2878970 - DNA, 25 bp, Homo sapien
ctgaagatggactcagctagcagag

SEQ ID NO: 2878971 - DNA, 25 bp, Homo sapien
cagtggtttcttggtagttcctcat

SEQ ID NO: 2878972 - DNA, 25 bp, Homo sapien
ggctacagctatccttgtccctgaa

SEQ ID NO: 2878973 - DNA, 25 bp, Homo sapien
tcataaatccatgcgtaggtctggc

SEQ ID NO: 2878974 - DNA, 25 bp, Homo sapien
gcagagccagccgactcccaggaga

SEQ ID NO: 2878975 - DNA, 25 bp, Homo sapien
cagagccagccgactcccaggagag

SEQ ID NO: 2878976 - DNA, 25 bp, Homo sapien
aggagagctgtagaggctggtcagc

SEQ ID NO: 2878977 - DNA, 25 bp, Homo sapien
aaaaagttgccagccatcgtgagtc

SEQ ID NO: 2878978 - DNA, 25 bp, Homo sapien
gacaggacaaaaagttgccagccat

SEQ ID NO: 2878979 - DNA, 25 bp, Homo sapien
gccatcgtgagtcaccccaggactg

SEQ ID NO: 2878980 - DNA, 25 bp, Homo sapien
ggacaaaaagttgccagccatcgtg

SEQ ID NO: 2878981 - DNA, 25 bp, Homo sapien
gatggaaaatccatccgtggtcccc

SEQ ID NO: 2878982 - DNA, 25 bp, Homo sapien
accgagccagccagtgtcagggagc

SEQ ID NO: 2878983 - DNA, 25 bp, Homo sapien
cctcgagaggcaggcaccgagccag

SEQ ID NO: 2878984 - DNA, 25 bp, Homo sapien
gagcaggtctgcacatctgatggaa

SEQ ID NO: 2878985 - DNA, 25 bp, Homo sapien
gagaccgcgtgcttatcatgggcag

SEQ ID NO: 2878986 - DNA, 25 bp, Homo sapien
acggaagggagaccgcgtgcttatc

SEQ ID NO: 2878987 - DNA, 25 bp, Homo sapien
gggcacggaagggagaccgcgtgct

SEQ ID NO: 2878988 - DNA, 25 bp, Homo sapien
aagggagaccgcgtgcttatcatgg

SEQ ID NO: 2878989 - DNA, 25 bp, Homo sapien
cttctgccccggttttctgtcactt

SEQ ID NO: 2878990 - DNA, 25 bp, Homo sapien
agccgcttctgccccggttttctgt

SEQ ID NO: 2878991 - DNA, 25 bp, Homo sapien
ccagccgcttctgccccggttttct

SEQ ID NO: 2878992 - DNA, 25 bp, Homo sapien
ccctgagccccgcattccccctttg

SEQ ID NO: 2878993 - DNA, 25 bp, Homo sapien
aatgtccctagtcccgagaatgcag

SEQ ID NO: 2878994 - DNA, 25 bp, Homo sapien
cctgcaactgccccggctttggttt

SEQ ID NO: 2878995 - DNA, 25 bp, Homo sapien
cgtagtcaccacagctgagactgcc

SEQ ID NO: 2878996 - DNA, 25 bp, Homo sapien
ggccccaaaggccacagcgtagtca

SEQ ID NO: 2878997 - DNA, 25 bp, Homo sapien
ccagcacattgggatggctcgttgt

SEQ ID NO: 2878998 - DNA, 25 bp, Homo sapien
aggaggtacagatttcatctggtgc

SEQ ID NO: 2878999 - DNA, 25 bp, Homo sapien
tgttggttcccagaatgtaccagga

SEQ ID NO: 2879000 - DNA, 25 bp, Homo sapien
tgtaccaggaaggtacaggtgcaga

SEQ ID NO: 2879001 - DNA, 25 bp, Homo sapien
atggagctccaggtggccgccaagt

SEQ ID NO: 2879002 - DNA, 25 bp, Homo sapien
tctgcaggatcagtgctcaacgccc

SEQ ID NO: 2879003 - DNA, 25 bp, Homo sapien
gatcagtgctcaacgcccatggagc

SEQ ID NO: 2879004 - DNA, 25 bp, Homo sapien
atcaggtctgcaggatcagtgctca

SEQ ID NO: 2879005 - DNA, 25 bp, Homo sapien
gagccgacaccgctgtggcagcttc

SEQ ID NO: 2879006 - DNA, 25 bp, Homo sapien
gaatttccaggtgagagacccgaga

SEQ ID NO: 2879007 - DNA, 25 bp, Homo sapien
tgccggggctctgaatttccaggtg

SEQ ID NO: 2879008 - DNA, 25 bp, Homo sapien
cagcttcccgcatcccaagccgggc

SEQ ID NO: 2879009 - DNA, 25 bp, Homo sapien
ctcagcatcgatccaggcttcctct

SEQ ID NO: 2879010 - DNA, 25 bp, Homo sapien
cttgtgctgagccacggtccctcct

SEQ ID NO: 2879011 - DNA, 25 bp, Homo sapien
ctcctccctcagcatcgatccaggc

SEQ ID NO: 2879012 - DNA, 25 bp, Homo sapien
ccccttgtgctgagccacggtccct

SEQ ID NO: 2879013 - DNA, 25 bp, Homo sapien
gggcagagggctaactgggcatttc

SEQ ID NO: 2879014 - DNA, 25 bp, Homo sapien
ggcagagggctaactgggcatttca

SEQ ID NO: 2879015 - DNA, 25 bp, Homo sapien
caggtgcaggtctcggccaaagacc

SEQ ID NO: 2879016 - DNA, 25 bp, Homo sapien
ttgctgagcgccacagaggaggctt

SEQ ID NO: 2879017 - DNA, 25 bp, Homo sapien
gtacccctgctctggacgtagctgc

SEQ ID NO: 2879018 - DNA, 25 bp, Homo sapien
gtctccgacgtagagacagctcccg

SEQ ID NO: 2879019 - DNA, 25 bp, Homo sapien
cctccggagaccttgcctgccaaga

SEQ ID NO: 2879020 - DNA, 25 bp, Homo sapien
cggggctccgccactccccagccgt

SEQ ID NO: 2879021 - DNA, 25 bp, Homo sapien
ttccctcctccggagaccttgcctg

SEQ ID NO: 2879022 - DNA, 25 bp, Homo sapien
ctcctccggagaccttgcctgccaa

SEQ ID NO: 2879023 - DNA, 25 bp, Homo sapien
tcggcttccccgagcacgagcggcc

SEQ ID NO: 2879024 - DNA, 25 bp, Homo sapien
ggtggaacagggtccctccgatctc

SEQ ID NO: 2879025 - DNA, 25 bp, Homo sapien
ctcggcgggcccctgccgcccgagt

SEQ ID NO: 2879026 - DNA, 25 bp, Homo sapien
gagcacgagcggcctgtcctgcctg

SEQ ID NO: 2879027 - DNA, 25 bp, Homo sapien
gcggcgagcctggcgttcgcgggcg

SEQ ID NO: 2879028 - DNA, 25 bp, Homo sapien
cggcgagcctggcgttcgcgggcgg

SEQ ID NO: 2879029 - DNA, 25 bp, Homo sapien
cactcgcagccggcgcgaaagttcc

SEQ ID NO: 2879030 - DNA, 25 bp, Homo sapien
cgcagccggcgcgaaagttccccgc

SEQ ID NO: 2879031 - DNA, 25 bp, Homo sapien
agccggcgcgaaagttccccgcgag

SEQ ID NO: 2879032 - DNA, 25 bp, Homo sapien
agttccccgcgagccgcccagccca

SEQ ID NO: 2879033 - DNA, 25 bp, Homo sapien
cagaggacccggagatgactcaggc

SEQ ID NO: 2879034 - DNA, 25 bp, Homo sapien
ggccagggctttggtctttgctttg

SEQ ID NO: 2879035 - DNA, 25 bp, Homo sapien
gacccggagatgactcaggcctctc

SEQ ID NO: 2879036 - DNA, 25 bp, Homo sapien
tgctggccaggaggtcccagtcgtt

SEQ ID NO: 2879037 - DNA, 25 bp, Homo sapien
tgatctcacgtccttggttctttcg

SEQ ID NO: 2879038 - DNA, 25 bp, Homo sapien
agcaggctctaactgtgatctcacg

SEQ ID NO: 2879039 - DNA, 25 bp, Homo sapien
ctgtgatctcacgtccttggttctt

SEQ ID NO: 2879040 - DNA, 25 bp, Homo sapien
tctaactgtgatctcacgtccttgg

SEQ ID NO: 2879041 - DNA, 25 bp, Homo sapien
gtgagagcatcgcagctggacagcc

SEQ ID NO: 2879042 - DNA, 25 bp, Homo sapien
tcttcacctgcaagctgtactcttt

SEQ ID NO: 2879043 - DNA, 25 bp, Homo sapien
ctaagggtgcccgaggctggatcca

SEQ ID NO: 2879044 - DNA, 25 bp, Homo sapien
gctgtactctttctgtgtcacctaa

SEQ ID NO: 2879045 - DNA, 25 bp, Homo sapien
tctcctcactctctgtaggcatctg

SEQ ID NO: 2879046 - DNA, 25 bp, Homo sapien
ctctgtaggcatctgctctcgtgac

SEQ ID NO: 2879047 - DNA, 25 bp, Homo sapien
gcagtttgtggcaggtcccgcctct

SEQ ID NO: 2879048 - DNA, 25 bp, Homo sapien
ctcactctctgtaggcatctgctct

SEQ ID NO: 2879049 - DNA, 25 bp, Homo sapien
tggttccagagaaagttggaactgg

SEQ ID NO: 2879050 - DNA, 25 bp, Homo sapien
gttccagagaaagttggaactggaa

SEQ ID NO: 2879051 - DNA, 25 bp, Homo sapien
ctggttccagagaaagttggaactg

SEQ ID NO: 2879052 - DNA, 25 bp, Homo sapien
tccagagaaagttggaactggaatc

SEQ ID NO: 2879053 - DNA, 25 bp, Homo sapien
ccaggtaaaatacgggacatagaag

SEQ ID NO: 2879054 - DNA, 25 bp, Homo sapien
atagaagtccccagtggctctctgc

SEQ ID NO: 2879055 - DNA, 25 bp, Homo sapien
ctcttccaggtaaaatacgggacat

SEQ ID NO: 2879056 - DNA, 25 bp, Homo sapien
aaatacgggacatagaagtccccag

SEQ ID NO: 2879057 - DNA, 25 bp, Homo sapien
gtcgaggggccttgaggacagcagc

SEQ ID NO: 2879058 - DNA, 25 bp, Homo sapien
aggacagcagctctgtccaactttg

SEQ ID NO: 2879059 - DNA, 25 bp, Homo sapien
cttgtcgaggggccttgaggacagc

SEQ ID NO: 2879060 - DNA, 25 bp, Homo sapien
tgaggacagcagctctgtccaactt

SEQ ID NO: 2879061 - DNA, 25 bp, Homo sapien
ttcacgggatcaaggatgtgggcct

SEQ ID NO: 2879062 - DNA, 25 bp, Homo sapien
ggcaatgtccttccatccagtccag

SEQ ID NO: 2879063 - DNA, 25 bp, Homo sapien
taggtcaccctctgtggcaatgtcc

SEQ ID NO: 2879064 - DNA, 25 bp, Homo sapien
taaagacaccgaagcttctggctgg

SEQ ID NO: 2879065 - DNA, 25 bp, Homo sapien
gaatctgtgcgatgatgaggtgcat

SEQ ID NO: 2879066 - DNA, 25 bp, Homo sapien
gattggagctatcactggtttccct

SEQ ID NO: 2879067 - DNA, 25 bp, Homo sapien
tctcacaccgaaagtggacattgac

SEQ ID NO: 2879068 - DNA, 25 bp, Homo sapien
atagtaaagcacgtctctcacaccg

SEQ ID NO: 2879069 - DNA, 25 bp, Homo sapien
atcctgcggtcacagctccgccggt

SEQ ID NO: 2879070 - DNA, 25 bp, Homo sapien
gggaacaagagccatcctgcggtca

SEQ ID NO: 2879071 - DNA, 25 bp, Homo sapien
cagggaacaagagccatcctgcggt

SEQ ID NO: 2879072 - DNA, 25 bp, Homo sapien
aagagccatcctgcggtcacagctc

SEQ ID NO: 2879073 - DNA, 25 bp, Homo sapien
gaaccagtgcctgcctttctgacct

SEQ ID NO: 2879074 - DNA, 25 bp, Homo sapien
aagggtagcagaggtgtcccacagt

SEQ ID NO: 2879075 - DNA, 25 bp, Homo sapien
gggattggcccatgtcacccaagca

SEQ ID NO: 2879076 - DNA, 25 bp, Homo sapien
gcttaaacaggccatgcagttccca

SEQ ID NO: 2879077 - DNA, 25 bp, Homo sapien
ccagaacctggacgcaggagaagga

SEQ ID NO: 2879078 - DNA, 25 bp, Homo sapien
gtttattcacatccacttagcaggc

SEQ ID NO: 2879079 - DNA, 25 bp, Homo sapien
gctctgtgggtttcagaaacgggac

SEQ ID NO: 2879080 - DNA, 25 bp, Homo sapien
cctcccaatcaaggctgctctgtgg

SEQ ID NO: 2879081 - DNA, 25 bp, Homo sapien
agggtgcaggtcaccccagagctca

SEQ ID NO: 2879082 - DNA, 25 bp, Homo sapien
ccaccgccatgccatcgtggtgagg

SEQ ID NO: 2879083 - DNA, 25 bp, Homo sapien
aaaccagtggggcacagcttcggcc

SEQ ID NO: 2879084 - DNA, 25 bp, Homo sapien
gcatccatagcgtgtgaactgtagg

SEQ ID NO: 2879085 - DNA, 25 bp, Homo sapien
gcttcctggacacgccatcaaccac

SEQ ID NO: 2879086 - DNA, 25 bp, Homo sapien
cagagtagtgagagcttgggcttca

SEQ ID NO: 2879087 - DNA, 25 bp, Homo sapien
tgttctccaagcacagaagcttcac

SEQ ID NO: 2879088 - DNA, 25 bp, Homo sapien
tggggccttcatgcacccctcaggg

SEQ ID NO: 2879089 - DNA, 25 bp, Homo sapien
tcctgacagtctcgggcagagcagc

SEQ ID NO: 2879090 - DNA, 25 bp, Homo sapien
agcgtaaaagcatgcgtcggccaca

SEQ ID NO: 2879091 - DNA, 25 bp, Homo sapien
aaagcaaggccgtgatgacagcgta

SEQ ID NO: 2879092 - DNA, 25 bp, Homo sapien
accaactcctgacagtctcgggcag

SEQ ID NO: 2879093 - DNA, 25 bp, Homo sapien
gagtcactgcgcctggccaaggtgc

SEQ ID NO: 2879094 - DNA, 25 bp, Homo sapien
ctccagatctcaggtgatctgctcg

SEQ ID NO: 2879095 - DNA, 25 bp, Homo sapien
gagtgagtcactgcgcctggccaag

SEQ ID NO: 2879096 - DNA, 25 bp, Homo sapien
tcaaggtgctggcagtttcttttta

SEQ ID NO: 2879097 - DNA, 25 bp, Homo sapien
aaagtcatatataagcaccaaactg

SEQ ID NO: 2879098 - DNA, 25 bp, Homo sapien
agtcatatataagcaccaaactgtg

SEQ ID NO: 2879099 - DNA, 25 bp, Homo sapien
tcaatctatgaagatacttgatatc

SEQ ID NO: 2879100 - DNA, 25 bp, Homo sapien
caaactgtggttttctcaatctatg

SEQ ID NO: 2879101 - DNA, 25 bp, Homo sapien
tcacagggattcaacaaactggttg

SEQ ID NO: 2879102 - DNA, 25 bp, Homo sapien
tcaacaaactggttgagtatctcca

SEQ ID NO: 2879103 - DNA, 25 bp, Homo sapien
gcggatactcgaggccaggtgttct

SEQ ID NO: 2879104 - DNA, 25 bp, Homo sapien
gaacctggacaaagcctgagatggg

SEQ ID NO: 2879105 - DNA, 25 bp, Homo sapien
gagcgtccttcgttaggtcaataac

SEQ ID NO: 2879106 - DNA, 25 bp, Homo sapien
tacagcggggtattgcagagccatg

SEQ ID NO: 2879107 - DNA, 25 bp, Homo sapien
caataacggtacttcctacagcggg

SEQ ID NO: 2879108 - DNA, 25 bp, Homo sapien
ccatgaaaacgaggctctcagaccc

SEQ ID NO: 2879109 - DNA, 25 bp, Homo sapien
tgctgcccatgaggctttcagggag

SEQ ID NO: 2879110 - DNA, 25 bp, Homo sapien
gctgcccatgaggctttcagggagg

SEQ ID NO: 2879111 - DNA, 25 bp, Homo sapien
cttgctgcccatgaggctttcaggg

SEQ ID NO: 2879112 - DNA, 25 bp, Homo sapien
ttgctgcccatgaggctttcaggga

SEQ ID NO: 2879113 - DNA, 25 bp, Homo sapien
ctttactccgcaggaccacggcttg

SEQ ID NO: 2879114 - DNA, 25 bp, Homo sapien
ggttcaacactcaggtctgcatggc

SEQ ID NO: 2879115 - DNA, 25 bp, Homo sapien
ttcaaggtcaaatggcccgctctga

SEQ ID NO: 2879116 - DNA, 25 bp, Homo sapien
tggcttgaggcacttgccactttgg

SEQ ID NO: 2879117 - DNA, 25 bp, Homo sapien
cataacggtgaggtgagtagctgct

SEQ ID NO: 2879118 - DNA, 25 bp, Homo sapien
taaagcatgttccactcttcttgcc

SEQ ID NO: 2879119 - DNA, 25 bp, Homo sapien
ctggtagtgcccgttggctgctact

SEQ ID NO: 2879120 - DNA, 25 bp, Homo sapien
gctactccccacataacggtgaggt

SEQ ID NO: 2879121 - DNA, 25 bp, Homo sapien
cgtgggcagcgaaccagggaataaa

SEQ ID NO: 2879122 - DNA, 25 bp, Homo sapien
tgcagaaacagagactgccccgtgg

SEQ ID NO: 2879123 - DNA, 25 bp, Homo sapien
ctttccccaacagcgtcaggaggca

SEQ ID NO: 2879124 - DNA, 25 bp, Homo sapien
gaatctgtgtgcaagccgggacctc

SEQ ID NO: 2879125 - DNA, 25 bp, Homo sapien
tgacttctcggtatcagtgacctgt

SEQ ID NO: 2879126 - DNA, 25 bp, Homo sapien
gacttctcggtatcagtgacctgtt

SEQ ID NO: 2879127 - DNA, 25 bp, Homo sapien
ctgacttctcggtatcagtgacctg

SEQ ID NO: 2879128 - DNA, 25 bp, Homo sapien
tcaggaatctgtgagctcgccagag

SEQ ID NO: 2879129 - DNA, 25 bp, Homo sapien
gtgagctcgccagaggtcaggacct

SEQ ID NO: 2879130 - DNA, 25 bp, Homo sapien
ggaatctgtgagctcgccagaggtc

SEQ ID NO: 2879131 - DNA, 25 bp, Homo sapien
ctgtgagctcgccagaggtcaggac

SEQ ID NO: 2879132 - DNA, 25 bp, Homo sapien
cccaactgtcactgaactacatgag

SEQ ID NO: 2879133 - DNA, 25 bp, Homo sapien
ggctagcccaactgtcactgaacta

SEQ ID NO: 2879134 - DNA, 25 bp, Homo sapien
gctggggcaaggctagcccaactgt

SEQ ID NO: 2879135 - DNA, 25 bp, Homo sapien
gcaaggctagcccaactgtcactga

SEQ ID NO: 2879136 - DNA, 25 bp, Homo sapien
ccagatgcagatgtacgcttcataa

SEQ ID NO: 2879137 - DNA, 25 bp, Homo sapien
aagagattcaatggcctgttcatcc

SEQ ID NO: 2879138 - DNA, 25 bp, Homo sapien
cagatgtacgcttcataacggagtg

SEQ ID NO: 2879139 - DNA, 25 bp, Homo sapien
aaatgcgaaggtagcaaagccagtt

SEQ ID NO: 2879140 - DNA, 25 bp, Homo sapien
gaaggtcgcatataggcctaactgg

SEQ ID NO: 2879141 - DNA, 25 bp, Homo sapien
tggctagacaatagtactcggttat

SEQ ID NO: 2879142 - DNA, 25 bp, Homo sapien
tataatgagaagttttttggctgat

SEQ ID NO: 2879143 - DNA, 25 bp, Homo sapien
tgcaaatcaaacaaggtgaaggtcg

SEQ ID NO: 2879144 - DNA, 25 bp, Homo sapien
ttcacagtctggccctgatcttccc

SEQ ID NO: 2879145 - DNA, 25 bp, Homo sapien
ttccctccgggtgctcgacagcttg

SEQ ID NO: 2879146 - DNA, 25 bp, Homo sapien
ccgggtgctcgacagcttgaatgtg

SEQ ID NO: 2879147 - DNA, 25 bp, Homo sapien
gatcttccctccgggtgctcgacag

SEQ ID NO: 2879148 - DNA, 25 bp, Homo sapien
tatgatactgccactgcacaaagct

SEQ ID NO: 2879149 - DNA, 25 bp, Homo sapien
tcaattagcaataatcacgcctcgg

SEQ ID NO: 2879150 - DNA, 25 bp, Homo sapien
ttggctatgatactgccactgcaca

SEQ ID NO: 2879151 - DNA, 25 bp, Homo sapien
ttagcaataatcacgcctcggataa

SEQ ID NO: 2879152 - DNA, 25 bp, Homo sapien
ggccacatctctaggttttctgacg

SEQ ID NO: 2879153 - DNA, 25 bp, Homo sapien
aggtgccgggcagccttccaagact

SEQ ID NO: 2879154 - DNA, 25 bp, Homo sapien
gcctccctctcacaaaaggtctggg

SEQ ID NO: 2879155 - DNA, 25 bp, Homo sapien
caagactccaagactaggtgggctc

SEQ ID NO: 2879156 - DNA, 25 bp, Homo sapien
gagcctaggacacaaggtttatacc

SEQ ID NO: 2879157 - DNA, 25 bp, Homo sapien
ctcggggcttataaccagggcctag

SEQ ID NO: 2879158 - DNA, 25 bp, Homo sapien
aaaggacacagaacttatattcagg

SEQ ID NO: 2879159 - DNA, 25 bp, Homo sapien
cttatattcagggcctagaacccgg

SEQ ID NO: 2879160 - DNA, 25 bp, Homo sapien
catccacggaagtcctccgcaggga

SEQ ID NO: 2879161 - DNA, 25 bp, Homo sapien
gcatccacggaagtcctccgcaggg

SEQ ID NO: 2879162 - DNA, 25 bp, Homo sapien
agcatccacggaagtcctccgcagg

SEQ ID NO: 2879163 - DNA, 25 bp, Homo sapien
cagcatccacggaagtcctccgcag

SEQ ID NO: 2879164 - DNA, 25 bp, Homo sapien
tcaagaaacccagggacacgtagct

SEQ ID NO: 2879165 - DNA, 25 bp, Homo sapien
ttcggaaactcagttggctgctgct

SEQ ID NO: 2879166 - DNA, 25 bp, Homo sapien
ggtctcatggtccacctttccctgg

SEQ ID NO: 2879167 - DNA, 25 bp, Homo sapien
tggcctgtggaccttatctcccagc

SEQ ID NO: 2879168 - DNA, 25 bp, Homo sapien
ccaaggtaggcatttcactgtacat

SEQ ID NO: 2879169 - DNA, 25 bp, Homo sapien
ttggccaccaccaaggtaggcattt

SEQ ID NO: 2879170 - DNA, 25 bp, Homo sapien
caccaccaaggtaggcatttcactg

SEQ ID NO: 2879171 - DNA, 25 bp, Homo sapien
caccaaggtaggcatttcactgtac

SEQ ID NO: 2879172 - DNA, 25 bp, Homo sapien
gagggctcccacgacttattcagag

SEQ ID NO: 2879173 - DNA, 25 bp, Homo sapien
tctccaaagtgaacatcagtcgctc

SEQ ID NO: 2879174 - DNA, 25 bp, Homo sapien
tgaacatgctgaagaccctgaagtc

SEQ ID NO: 2879175 - DNA, 25 bp, Homo sapien
aattacaagatctggccgctctggg

SEQ ID NO: 2879176 - DNA, 25 bp, Homo sapien
agtgttccagtgaccggaggtgagg

SEQ ID NO: 2879177 - DNA, 25 bp, Homo sapien
cggaggtgaggtcgcagctgctggt

SEQ ID NO: 2879178 - DNA, 25 bp, Homo sapien
tgtctctggcgttagttgtttagat

SEQ ID NO: 2879179 - DNA, 25 bp, Homo sapien
tctggcgttagttgtttagatgtca

SEQ ID NO: 2879180 - DNA, 25 bp, Homo sapien
cttgtgagagtcaaagcagtacagt

SEQ ID NO: 2879181 - DNA, 25 bp, Homo sapien
aaaatccatcaagtcgacacgcttg

SEQ ID NO: 2879182 - DNA, 25 bp, Homo sapien
ccgctgacggctatatttacaaaaa

SEQ ID NO: 2879183 - DNA, 25 bp, Homo sapien
ggacaagaggcatccgctgacggct

SEQ ID NO: 2879184 - DNA, 25 bp, Homo sapien
tgctaggaaccaccggccacgtggg

SEQ ID NO: 2879185 - DNA, 25 bp, Homo sapien
ctgctaggaaccaccggccacgtgg

SEQ ID NO: 2879186 - DNA, 25 bp, Homo sapien
ctccatagagtcccttgggtctcca

SEQ ID NO: 2879187 - DNA, 25 bp, Homo sapien
ttcacacaagccacatgggcgttcc

SEQ ID NO: 2879188 - DNA, 25 bp, Homo sapien
gggtatctgtcatccctcagctcct

SEQ ID NO: 2879189 - DNA, 25 bp, Homo sapien
tccatgccgtcatcagtcccgaaga

SEQ ID NO: 2879190 - DNA, 25 bp, Homo sapien
tcctgggttactcagaggtgtgcca

SEQ ID NO: 2879191 - DNA, 25 bp, Homo sapien
gatttgaaaccattcccgtgacagg

SEQ ID NO: 2879192 - DNA, 25 bp, Homo sapien
taattgtgcccctgccgtatggatg

SEQ ID NO: 2879193 - DNA, 25 bp, Homo sapien
tgcttccccaatgtatgccatgagg

SEQ ID NO: 2879194 - DNA, 25 bp, Homo sapien
tgatgctagtaacactctgcctacc

SEQ ID NO: 2879195 - DNA, 25 bp, Homo sapien
tagccagacatctcggcgcagggat

SEQ ID NO: 2879196 - DNA, 25 bp, Homo sapien
taccagacctgtgacttaggtaagt

SEQ ID NO: 2879197 - DNA, 25 bp, Homo sapien
tgttacaacgaccacttagccagac

SEQ ID NO: 2879198 - DNA, 25 bp, Homo sapien
ccacttttactttgaacaagctgga

SEQ ID NO: 2879199 - DNA, 25 bp, Homo sapien
tcccatctgataaaccgaatattta

SEQ ID NO: 2879200 - DNA, 25 bp, Homo sapien
ccatgatatttaggggtttctacta

SEQ ID NO: 2879201 - DNA, 25 bp, Homo sapien
ttgccacttttactttgaacaagct

SEQ ID NO: 2879202 - DNA, 25 bp, Homo sapien
cgcccgtaaaggaagctgactctca

SEQ ID NO: 2879203 - DNA, 25 bp, Homo sapien
gagcacatcttgtcagacgcccgta

SEQ ID NO: 2879204 - DNA, 25 bp, Homo sapien
tctgacaagtggcaaatacccgtgg

SEQ ID NO: 2879205 - DNA, 25 bp, Homo sapien
caacgtattcgactgttcagagccc

SEQ ID NO: 2879206 - DNA, 25 bp, Homo sapien
ccttggagttagtcgcatttacaat

SEQ ID NO: 2879207 - DNA, 25 bp, Homo sapien
taagtttgctttgagcctgcttcaa

SEQ ID NO: 2879208 - DNA, 25 bp, Homo sapien
tgcaaaaatccacgcttgtgtatga

SEQ ID NO: 2879209 - DNA, 25 bp, Homo sapien
ggcggatgacgcgactaagtttgct

SEQ ID NO: 2879210 - DNA, 25 bp, Homo sapien
tccccgctgatttcgaggtctacag

SEQ ID NO: 2879211 - DNA, 25 bp, Homo sapien
gcatcctgccctttgtcagcgctgg

SEQ ID NO: 2879212 - DNA, 25 bp, Homo sapien
tctgtggacgcggatccgaatcgga

SEQ ID NO: 2879213 - DNA, 25 bp, Homo sapien
gcagagctcccgtccagagtgtgct

SEQ ID NO: 2879214 - DNA, 25 bp, Homo sapien
ctctgcgcttgcgtccagggcgccc

SEQ ID NO: 2879215 - DNA, 25 bp, Homo sapien
tcggccccacgtactcttcctgcct

SEQ ID NO: 2879216 - DNA, 25 bp, Homo sapien
tcaggaggggcgacactctccggct

SEQ ID NO: 2879217 - DNA, 25 bp, Homo sapien
ggacaatgggcgggtgcttcgcagg

SEQ ID NO: 2879218 - DNA, 25 bp, Homo sapien
cattctcctggtcaatgccctaagg

SEQ ID NO: 2879219 - DNA, 25 bp, Homo sapien
gaaacccactctctcgctacgaaaa

SEQ ID NO: 2879220 - DNA, 25 bp, Homo sapien
gaagatgatatcaccgtctacctag

SEQ ID NO: 2879221 - DNA, 25 bp, Homo sapien
ctagaaagaaaccaccggctgggcg

SEQ ID NO: 2879222 - DNA, 25 bp, Homo sapien
tagctgcactcctggggtactccca

SEQ ID NO: 2879223 - DNA, 25 bp, Homo sapien
tcagcaagcccagtggatacttcat

SEQ ID NO: 2879224 - DNA, 25 bp, Homo sapien
ccagcatcccttcatggttgtctgt

SEQ ID NO: 2879225 - DNA, 25 bp, Homo sapien
cttgggctgacgtacaccagcatcc

SEQ ID NO: 2879226 - DNA, 25 bp, Homo sapien
gaagaaactctctgtatgtcctaga

SEQ ID NO: 2879227 - DNA, 25 bp, Homo sapien
tgaagaaactctctgtatgtcctag

SEQ ID NO: 2879228 - DNA, 25 bp, Homo sapien
aagaaactctctgtatgtcctagaa

SEQ ID NO: 2879229 - DNA, 25 bp, Homo sapien
tgtcctagaataagaagcaatgatg

SEQ ID NO: 2879230 - DNA, 25 bp, Homo sapien
catgacttcatagacatgctctaga

SEQ ID NO: 2879231 - DNA, 25 bp, Homo sapien
ctctagaatctgtacctttacccaa

SEQ ID NO: 2879232 - DNA, 25 bp, Homo sapien
cagccatcatctttagcacggtgat

SEQ ID NO: 2879233 - DNA, 25 bp, Homo sapien
cggtgatatcaccatgacttcatag

SEQ ID NO: 2879234 - DNA, 25 bp, Homo sapien
cctcggagaaagttcaagaggaact

SEQ ID NO: 2879235 - DNA, 25 bp, Homo sapien
gccgggaatacgcacactttttatg

SEQ ID NO: 2879236 - DNA, 25 bp, Homo sapien
cgggcagggtgcacaactgtcctcg

SEQ ID NO: 2879237 - DNA, 25 bp, Homo sapien
tgtcacaaagacaacgacggccagg

SEQ ID NO: 2879238 - DNA, 25 bp, Homo sapien
gggagtctgacttctgtgctctgct

SEQ ID NO: 2879239 - DNA, 25 bp, Homo sapien
agggggagtctgacttctgtgctct

SEQ ID NO: 2879240 - DNA, 25 bp, Homo sapien
tgcaatccattagggctgtagtaag

SEQ ID NO: 2879241 - DNA, 25 bp, Homo sapien
taagggggagtctgacttctgtgct

SEQ ID NO: 2879242 - DNA, 25 bp, Homo sapien
tcttctggagtgaattatcattaag

SEQ ID NO: 2879243 - DNA, 25 bp, Homo sapien
tgaattgataattaccaccatccat

SEQ ID NO: 2879244 - DNA, 25 bp, Homo sapien
tattggtcatcttataagtctcagc

SEQ ID NO: 2879245 - DNA, 25 bp, Homo sapien
atgtatcaagtggtatgtaaatacc

SEQ ID NO: 2879246 - DNA, 25 bp, Homo sapien
tgctcatcctgaaaccttggtctgc

SEQ ID NO: 2879247 - DNA, 25 bp, Homo sapien
gagacgctgactactgtgacccagg

SEQ ID NO: 2879248 - DNA, 25 bp, Homo sapien
taagggttgtgtcgagccatttgcg

SEQ ID NO: 2879249 - DNA, 25 bp, Homo sapien
gatgtggatgttactgagctctggc

SEQ ID NO: 2879250 - DNA, 25 bp, Homo sapien
tgcactcttgctggtgtcgcatcca

SEQ ID NO: 2879251 - DNA, 25 bp, Homo sapien
taaacaaagtggtacgtctgtgcgg

SEQ ID NO: 2879252 - DNA, 25 bp, Homo sapien
gagctgaatctccacgtgttaaaac

SEQ ID NO: 2879253 - DNA, 25 bp, Homo sapien
gaagtatgactcagccgtagaaagg

SEQ ID NO: 2879254 - DNA, 25 bp, Homo sapien
acagggctcctcacgtggtccagct

SEQ ID NO: 2879255 - DNA, 25 bp, Homo sapien
ccctgcagggttcgtatgttatccc

SEQ ID NO: 2879256 - DNA, 25 bp, Homo sapien
tatgttatccctagggagctccctc

SEQ ID NO: 2879257 - DNA, 25 bp, Homo sapien
tccagaagatctggccactctcaaa

SEQ ID NO: 2879258 - DNA, 25 bp, Homo sapien
ccagctggggtgacagagctagacc

SEQ ID NO: 2879259 - DNA, 25 bp, Homo sapien
gagggacaggatccgttctgtttgc

SEQ ID NO: 2879260 - DNA, 25 bp, Homo sapien
gatccgttctgtttgcggatggtca

SEQ ID NO: 2879261 - DNA, 25 bp, Homo sapien
gtgggtggtaggctcgcaggagagg

SEQ ID NO: 2879262 - DNA, 25 bp, Homo sapien
ttgcggatggtcattggctcctgtg

SEQ ID NO: 2879263 - DNA, 25 bp, Homo sapien
tccgaggccgtgtggaacatttgcc

SEQ ID NO: 2879264 - DNA, 25 bp, Homo sapien
gggtccagcaggccttcactgtctg

SEQ ID NO: 2879265 - DNA, 25 bp, Homo sapien
ctcagttccatggaggaccctctca

SEQ ID NO: 2879266 - DNA, 25 bp, Homo sapien
tgtgggcttcagagggcgagagaag

SEQ ID NO: 2879267 - DNA, 25 bp, Homo sapien
ctcctttattctgcttcagaatgct

SEQ ID NO: 2879268 - DNA, 25 bp, Homo sapien
tcctttattctgcttcagaatgctt

SEQ ID NO: 2879269 - DNA, 25 bp, Homo sapien
gtcagcgagctcttagttaattcag

SEQ ID NO: 2879270 - DNA, 25 bp, Homo sapien
tattccttagcttcatatccagggc

SEQ ID NO: 2879271 - DNA, 25 bp, Homo sapien
gccatttaggagctcagtccgccgt

SEQ ID NO: 2879272 - DNA, 25 bp, Homo sapien
gccgttcacggatgagctctcagga

SEQ ID NO: 2879273 - DNA, 25 bp, Homo sapien
cactgcggactgtggaacttgccca

SEQ ID NO: 2879274 - DNA, 25 bp, Homo sapien
tcagggcgcatggttgcaagtaaca

SEQ ID NO: 2879275 - DNA, 25 bp, Homo sapien
tagcttttctcctcgagtcagggcg

SEQ ID NO: 2879276 - DNA, 25 bp, Homo sapien
tctagataggttgctgtggacgcct

SEQ ID NO: 2879277 - DNA, 25 bp, Homo sapien
tacccatgcctgacataagcaccat

SEQ ID NO: 2879278 - DNA, 25 bp, Homo sapien
ctttgtgcatagctgccaggatcac

SEQ ID NO: 2879279 - DNA, 25 bp, Homo sapien
tgtagagtctagtactattaagaaa

SEQ ID NO: 2879280 - DNA, 25 bp, Homo sapien
cgagattgaccctgctcccgagtac

SEQ ID NO: 2879281 - DNA, 25 bp, Homo sapien
ggtcccctcctagtggaccatagac

SEQ ID NO: 2879282 - DNA, 25 bp, Homo sapien
tttcctctttacattggatggacag

SEQ ID NO: 2879283 - DNA, 25 bp, Homo sapien
ctttacattggatggacagcaaggc

SEQ ID NO: 2879284 - DNA, 25 bp, Homo sapien
ggcagtgtcacaggtcccctcctag

SEQ ID NO: 2879285 - DNA, 25 bp, Homo sapien
cctataccggatgacagagatggca

SEQ ID NO: 2879286 - DNA, 25 bp, Homo sapien
tacattagctacaggaacagtttcc

SEQ ID NO: 2879287 - DNA, 25 bp, Homo sapien
ttccaaatcccagtgtgagctgcct

SEQ ID NO: 2879288 - DNA, 25 bp, Homo sapien
gagctgcctcccgatctttagtaaa

SEQ ID NO: 2879289 - DNA, 25 bp, Homo sapien
cagcagccgggacttctaggtaata

SEQ ID NO: 2879290 - DNA, 25 bp, Homo sapien
tccccagggctggtcaagaatcagg

SEQ ID NO: 2879291 - DNA, 25 bp, Homo sapien
cagttcagctagcacttcggccagt

SEQ ID NO: 2879292 - DNA, 25 bp, Homo sapien
tatcccaacagtcaggtgagagcgt

SEQ ID NO: 2879293 - DNA, 25 bp, Homo sapien
aactgggagctaaaggaaacactgc

SEQ ID NO: 2879294 - DNA, 25 bp, Homo sapien
caacccgagtttcaggcagtgcctt

SEQ ID NO: 2879295 - DNA, 25 bp, Homo sapien
tgtaacatggactagcagctcactg

SEQ ID NO: 2879296 - DNA, 25 bp, Homo sapien
gatcacatgtgtctacaaggcctgg

SEQ ID NO: 2879297 - DNA, 25 bp, Homo sapien
tcctttgggctcttcctccgaagca

SEQ ID NO: 2879298 - DNA, 25 bp, Homo sapien
tggtagatgcttgcatggcaccctc

SEQ ID NO: 2879299 - DNA, 25 bp, Homo sapien
ttgggctcttcctccgaagcaggct

SEQ ID NO: 2879300 - DNA, 25 bp, Homo sapien
cctggtcagccctggtagatgcttg

SEQ ID NO: 2879301 - DNA, 25 bp, Homo sapien
cttagcgcaatatacctaaaaggaa

SEQ ID NO: 2879302 - DNA, 25 bp, Homo sapien
aaagatttaaatcaaggcctcagaa

SEQ ID NO: 2879303 - DNA, 25 bp, Homo sapien
caagtttcacttagcgcaatatacc

SEQ ID NO: 2879304 - DNA, 25 bp, Homo sapien
taaatcaaggcctcagaatttcata

SEQ ID NO: 2879305 - DNA, 25 bp, Homo sapien
ccaagagtcagtgatcaggatcgat

SEQ ID NO: 2879306 - DNA, 25 bp, Homo sapien
tcaatttaacgtggcaaagggcaac

SEQ ID NO: 2879307 - DNA, 25 bp, Homo sapien
tcctgatttccacttagagtaagca

SEQ ID NO: 2879308 - DNA, 25 bp, Homo sapien
gcttcactgttacatcctagatgag

SEQ ID NO: 2879309 - DNA, 25 bp, Homo sapien
ttcacgcccatagatgcacggcttc

SEQ ID NO: 2879310 - DNA, 25 bp, Homo sapien
ctcccattccgttcacgcccataga

SEQ ID NO: 2879311 - DNA, 25 bp, Homo sapien
gcccatagatgcacggcttccacta

SEQ ID NO: 2879312 - DNA, 25 bp, Homo sapien
tccgttcacgcccatagatgcacgg

SEQ ID NO: 2879313 - DNA, 25 bp, Homo sapien
ttcacaatgtgtccctcgaatggca

SEQ ID NO: 2879314 - DNA, 25 bp, Homo sapien
tgctgtccaagtggcgagacgcatg

SEQ ID NO: 2879315 - DNA, 25 bp, Homo sapien
aaagtatacgagtacaaatggctgc

SEQ ID NO: 2879316 - DNA, 25 bp, Homo sapien
gcaactcactgtgcccaaatggcag

SEQ ID NO: 2879317 - DNA, 25 bp, Homo sapien
caatgtttgattgaaaatcactgga

SEQ ID NO: 2879318 - DNA, 25 bp, Homo sapien
cactggagttttcctgtaaaacttg

SEQ ID NO: 2879319 - DNA, 25 bp, Homo sapien
gtttgattgaaaatcactggagttt

SEQ ID NO: 2879320 - DNA, 25 bp, Homo sapien
tatgcaatgtttgattgaaaatcac

SEQ ID NO: 2879321 - DNA, 25 bp, Homo sapien
tattttctggctcgacagtattcca

SEQ ID NO: 2879322 - DNA, 25 bp, Homo sapien
caatttcaccgaaaggagcctgcat

SEQ ID NO: 2879323 - DNA, 25 bp, Homo sapien
taataaatacgatcctgaacccaac

SEQ ID NO: 2879324 - DNA, 25 bp, Homo sapien
gcatcttcccaactaaaggcacctg

SEQ ID NO: 2879325 - DNA, 25 bp, Homo sapien
ctggccaccgtagccgcctccgtaa

SEQ ID NO: 2879326 - DNA, 25 bp, Homo sapien
ctggctgggcccccgtagctggact

SEQ ID NO: 2879327 - DNA, 25 bp, Homo sapien
ctgggcccccgtagctggactggtt

SEQ ID NO: 2879328 - DNA, 25 bp, Homo sapien
tgctgctctggccaccgtagccgcc

SEQ ID NO: 2879329 - DNA, 25 bp, Homo sapien
ggtaccgggcttgtaattctatagc

SEQ ID NO: 2879330 - DNA, 25 bp, Homo sapien
caacatgattccgtaagtagaggca

SEQ ID NO: 2879331 - DNA, 25 bp, Homo sapien
ctaacggtacacacatcagcaggac

SEQ ID NO: 2879332 - DNA, 25 bp, Homo sapien
taaggaacttcataactcacaagga

SEQ ID NO: 2879333 - DNA, 25 bp, Homo sapien
acaagcccatgcctcccatcatttg

SEQ ID NO: 2879334 - DNA, 25 bp, Homo sapien
cccatgcctcccatcatttggctac

SEQ ID NO: 2879335 - DNA, 25 bp, Homo sapien
aagcccatgcctcccatcatttggc

SEQ ID NO: 2879336 - DNA, 25 bp, Homo sapien
gcccatgcctcccatcatttggcta

SEQ ID NO: 2879337 - DNA, 25 bp, Homo sapien
accaccgcttgctcctgctgtagaa

SEQ ID NO: 2879338 - DNA, 25 bp, Homo sapien
gaaaaggcatacaaggttagcttaa

SEQ ID NO: 2879339 - DNA, 25 bp, Homo sapien
aacccatgcctcctagcatttggct

SEQ ID NO: 2879340 - DNA, 25 bp, Homo sapien
acaaacccatgcctcctagcatttg

SEQ ID NO: 2879341 - DNA, 25 bp, Homo sapien
aaacccatgcctcctagcatttggc

SEQ ID NO: 2879342 - DNA, 25 bp, Homo sapien
cccatgcctcctagcatttggctac

SEQ ID NO: 2879343 - DNA, 25 bp, Homo sapien
accaccgcttgctcctgctgtagaa

SEQ ID NO: 2879344 - DNA, 25 bp, Homo sapien
caagatgtgcatatcacaaatccgt

SEQ ID NO: 2879345 - DNA, 25 bp, Homo sapien
tagctacttctcttaggtgatctac

SEQ ID NO: 2879346 - DNA, 25 bp, Homo sapien
taaggatatacacttcaagatgtgc

SEQ ID NO: 2879347 - DNA, 25 bp, Homo sapien
tgttaagagcccacaaatgctcaat

SEQ ID NO: 2879348 - DNA, 25 bp, Homo sapien
tcacagggttgagcggtgaaaaaaa

SEQ ID NO: 2879349 - DNA, 25 bp, Homo sapien
ctcacagggttgagcggtgaaaaaa

SEQ ID NO: 2879350 - DNA, 25 bp, Homo sapien
tctcacagggttgagcggtgaaaaa

SEQ ID NO: 2879351 - DNA, 25 bp, Homo sapien
taatccccgcatgtgtacacagtgt

SEQ ID NO: 2879352 - DNA, 25 bp, Homo sapien
gcatgtgtacacagtgtcctgttgt

SEQ ID NO: 2879353 - DNA, 25 bp, Homo sapien
ccgcatgtgtacacagtgtcctgtt

SEQ ID NO: 2879354 - DNA, 25 bp, Homo sapien
tccccgcatgtgtacacagtgtcct

SEQ ID NO: 2879355 - DNA, 25 bp, Homo sapien
ggacaagagtgtaagcatccttcaa

SEQ ID NO: 2879356 - DNA, 25 bp, Homo sapien
gagtgtaagcatccttcaactgaga

SEQ ID NO: 2879357 - DNA, 25 bp, Homo sapien
gtgtaagcatccttcaactgagaaa

SEQ ID NO: 2879358 - DNA, 25 bp, Homo sapien
caagagtgtaagcatccttcaactg

SEQ ID NO: 2879359 - DNA, 25 bp, Homo sapien
catcattatagccattgtaatcatc

SEQ ID NO: 2879360 - DNA, 25 bp, Homo sapien
gccattgtaatcatcatagcctcca

SEQ ID NO: 2879361 - DNA, 25 bp, Homo sapien
aatccatagccatcattatagccat

SEQ ID NO: 2879362 - DNA, 25 bp, Homo sapien
tatagccattgtaatcatcatagcc

SEQ ID NO: 2879363 - DNA, 25 bp, Homo sapien
ccataagctttcgtggtggatcata

SEQ ID NO: 2879364 - DNA, 25 bp, Homo sapien
gctgttataccctctaccagcccca

SEQ ID NO: 2879365 - DNA, 25 bp, Homo sapien
cagctctactgctcttaaagatttc

SEQ ID NO: 2879366 - DNA, 25 bp, Homo sapien
atgagttctaacttcagctctactg

SEQ ID NO: 2879367 - DNA, 25 bp, Homo sapien
taagaatcagcataggtaagcgcat

SEQ ID NO: 2879368 - DNA, 25 bp, Homo sapien
caagcagaccaattaactagggaca

SEQ ID NO: 2879369 - DNA, 25 bp, Homo sapien
tagcaagtgggctaaaaagccagcc

SEQ ID NO: 2879370 - DNA, 25 bp, Homo sapien
tattacagctaaagccaggtttgca

SEQ ID NO: 2879371 - DNA, 25 bp, Homo sapien
tcccctggaagtccaccggcaatgt

SEQ ID NO: 2879372 - DNA, 25 bp, Homo sapien
cctggaagtccaccggcaatgttat

SEQ ID NO: 2879373 - DNA, 25 bp, Homo sapien
gaagtccaccggcaatgttatccca

SEQ ID NO: 2879374 - DNA, 25 bp, Homo sapien
aagtccaccggcaatgttatcccat

SEQ ID NO: 2879375 - DNA, 25 bp, Homo sapien
tactttaggcccaggaacaatttca

SEQ ID NO: 2879376 - DNA, 25 bp, Homo sapien
ggtcacatgacccaaatacgtgtct

SEQ ID NO: 2879377 - DNA, 25 bp, Homo sapien
taacttgaggtacttagctggacac

SEQ ID NO: 2879378 - DNA, 25 bp, Homo sapien
tagttaagctgttgagggcaatcct

SEQ ID NO: 2879379 - DNA, 25 bp, Homo sapien
catcattggccgtgtcaggactatt

SEQ ID NO: 2879380 - DNA, 25 bp, Homo sapien
atcattggccgtgtcaggactattt

SEQ ID NO: 2879381 - DNA, 25 bp, Homo sapien
gatgaccatttccatgcagtcaaat

SEQ ID NO: 2879382 - DNA, 25 bp, Homo sapien
gagctgccacaaactcccttagatg

SEQ ID NO: 2879383 - DNA, 25 bp, Homo sapien
cctgggtctttagataagctaggaa

SEQ ID NO: 2879384 - DNA, 25 bp, Homo sapien
taacaaagttcagacttcctgggtc

SEQ ID NO: 2879385 - DNA, 25 bp, Homo sapien
ttatttactgtaactagggcaatgt

SEQ ID NO: 2879386 - DNA, 25 bp, Homo sapien
gtaactagggcaatgtaaatcaaac

SEQ ID NO: 2879387 - DNA, 25 bp, Homo sapien
ctgtaactagggcaatgtaaatcaa

SEQ ID NO: 2879388 - DNA, 25 bp, Homo sapien
ttactgtaactagggcaatgtaaat

SEQ ID NO: 2879389 - DNA, 25 bp, Homo sapien
ttcaacaaaagcctcgccacttggt

SEQ ID NO: 2879390 - DNA, 25 bp, Homo sapien
ggactgtgtgactttacggcaaaca

SEQ ID NO: 2879391 - DNA, 25 bp, Homo sapien
gcaaacatacttcgttgcgagctgt

SEQ ID NO: 2879392 - DNA, 25 bp, Homo sapien
tcagaagattatcaagcctggactg

SEQ ID NO: 2879393 - DNA, 25 bp, Homo sapien
ccagtagccacattacggtttctca

SEQ ID NO: 2879394 - DNA, 25 bp, Homo sapien
tgaggaggaaatcccacctatgcca

SEQ ID NO: 2879395 - DNA, 25 bp, Homo sapien
tgtcttcaactgtatagtgagccag

SEQ ID NO: 2879396 - DNA, 25 bp, Homo sapien
actggaaacaagaggttacacttca

SEQ ID NO: 2879397 - DNA, 25 bp, Homo sapien
cagtgttaccaagctaaaatgctcc

SEQ ID NO: 2879398 - DNA, 25 bp, Homo sapien
ttcatcggccgagcaagaccagggc

SEQ ID NO: 2879399 - DNA, 25 bp, Homo sapien
gaccttcaccacgaatccctctcca

SEQ ID NO: 2879400 - DNA, 25 bp, Homo sapien
aaaacctctgcacttcatcggccga

SEQ ID NO: 2879401 - DNA, 25 bp, Homo sapien
cctctccaccttccgtgcccaacat

SEQ ID NO: 2879402 - DNA, 25 bp, Homo sapien
tctcttacgcggtccggcgtcgaaa

SEQ ID NO: 2879403 - DNA, 25 bp, Homo sapien
gtctcttacgcggtccggcgtcgaa

SEQ ID NO: 2879404 - DNA, 25 bp, Homo sapien
cgtctcttacgcggtccggcgtcga

SEQ ID NO: 2879405 - DNA, 25 bp, Homo sapien
tcttacgcggtccggcgtcgaaaca

SEQ ID NO: 2879406 - DNA, 25 bp, Homo sapien
tctcacacaatagagtcggcgcggc

SEQ ID NO: 2879407 - DNA, 25 bp, Homo sapien
gagattcagcgaaccactcgcggct

SEQ ID NO: 2879408 - DNA, 25 bp, Homo sapien
gaccagaactgagagcgccaattaa

SEQ ID NO: 2879409 - DNA, 25 bp, Homo sapien
aattaagctgtccttcgcctccgag

SEQ ID NO: 2879410 - DNA, 25 bp, Homo sapien
tggtcgctgaactgcaagcgaggac

SEQ ID NO: 2879411 - DNA, 25 bp, Homo sapien
tcgctgaactgcaagcgaggaccca

SEQ ID NO: 2879412 - DNA, 25 bp, Homo sapien
cgtggtcgctgaactgcaagcgagg

SEQ ID NO: 2879413 - DNA, 25 bp, Homo sapien
gctgaactgcaagcgaggacccacc

SEQ ID NO: 2879414 - DNA, 25 bp, Homo sapien
tctgcgtggctaagacgaaatggcc

SEQ ID NO: 2879415 - DNA, 25 bp, Homo sapien
tcacaaagagctctggcgcatgcgt

SEQ ID NO: 2879416 - DNA, 25 bp, Homo sapien
ggcgcctgcgcaacctaaataaggt

SEQ ID NO: 2879417 - DNA, 25 bp, Homo sapien
taaggtcccttgtgcgagttctgcg

SEQ ID NO: 2879418 - DNA, 25 bp, Homo sapien
gattgtcgaacgtcctgggagctgc

SEQ ID NO: 2879419 - DNA, 25 bp, Homo sapien
cgaagccacccgtatggtgcctggg

SEQ ID NO: 2879420 - DNA, 25 bp, Homo sapien
aaccggccgaagctggtcagctgca

SEQ ID NO: 2879421 - DNA, 25 bp, Homo sapien
ggcgcggccttcaggcgttcccact

SEQ ID NO: 2879422 - DNA, 25 bp, Homo sapien
ggtaagagtgcgtccattcaccagg

SEQ ID NO: 2879423 - DNA, 25 bp, Homo sapien
cgtagacgctgcattcgaggaggcc

SEQ ID NO: 2879424 - DNA, 25 bp, Homo sapien
gtaggttaccgctgcatctcccaga

SEQ ID NO: 2879425 - DNA, 25 bp, Homo sapien
catgctgcgagatgactaatgttcg

SEQ ID NO: 2879426 - DNA, 25 bp, Homo sapien
aagccctgggattattctacatgtg

SEQ ID NO: 2879427 - DNA, 25 bp, Homo sapien
caaattgctgggatatgccaggtgc

SEQ ID NO: 2879428 - DNA, 25 bp, Homo sapien
gctcggccctgatttatgattgcct

SEQ ID NO: 2879429 - DNA, 25 bp, Homo sapien
ttattctacatgtgagccatgatgc

SEQ ID NO: 2879430 - DNA, 25 bp, Homo sapien
gttggtgttgcctctactcgccggg

SEQ ID NO: 2879431 - DNA, 25 bp, Homo sapien
gtgttgcctctactcgccgggtcgc

SEQ ID NO: 2879432 - DNA, 25 bp, Homo sapien
gagacccctcgctaaggaggagtgt

SEQ ID NO: 2879433 - DNA, 25 bp, Homo sapien
tggtgttgcctctactcgccgggtc

SEQ ID NO: 2879434 - DNA, 25 bp, Homo sapien
ccctcgctggacctctgaccgcagg

SEQ ID NO: 2879435 - DNA, 25 bp, Homo sapien
ccgggactgccgttgtacgtggcct

SEQ ID NO: 2879436 - DNA, 25 bp, Homo sapien
tggagctcacttccgctctccccct

SEQ ID NO: 2879437 - DNA, 25 bp, Homo sapien
tcacacaggtcgtgctgatggcggg

SEQ ID NO: 2879438 - DNA, 25 bp, Homo sapien
ggtgcacagctgatgttatccctcc

SEQ ID NO: 2879439 - DNA, 25 bp, Homo sapien
tgtgactcagggaactgcagagaac

SEQ ID NO: 2879440 - DNA, 25 bp, Homo sapien
caatttgtgattcatccagccgtgg

SEQ ID NO: 2879441 - DNA, 25 bp, Homo sapien
gaagtttgcaggtctacacgtggaa

SEQ ID NO: 2879442 - DNA, 25 bp, Homo sapien
tattcggtgtccatgggagtgtctg

SEQ ID NO: 2879443 - DNA, 25 bp, Homo sapien
gcgtccagcagcgttggcacatcca

SEQ ID NO: 2879444 - DNA, 25 bp, Homo sapien
cccaattgttcgtggatgtcggata

SEQ ID NO: 2879445 - DNA, 25 bp, Homo sapien
gtcctcaggagattcccaattgttc

SEQ ID NO: 2879446 - DNA, 25 bp, Homo sapien
cagtttcggaatcagcctgcatgga

SEQ ID NO: 2879447 - DNA, 25 bp, Homo sapien
tcttcgggactgatgacggcatgga

SEQ ID NO: 2879448 - DNA, 25 bp, Homo sapien
cccaggttgggatcactgcagcgac

SEQ ID NO: 2879449 - DNA, 25 bp, Homo sapien
cggatcactcgagggctagaaggca

SEQ ID NO: 2879450 - DNA, 25 bp, Homo sapien
ctcccggattcaccccattctccca

SEQ ID NO: 2879451 - DNA, 25 bp, Homo sapien
ttgcttagctttctgacttcctttt

SEQ ID NO: 2879452 - DNA, 25 bp, Homo sapien
cttagctttctgacttccttttatt

SEQ ID NO: 2879453 - DNA, 25 bp, Homo sapien
tcccggattcaccccattctcccac

SEQ ID NO: 2879454 - DNA, 25 bp, Homo sapien
tagctccgacttcaggcacccgcca

SEQ ID NO: 2879455 - DNA, 25 bp, Homo sapien
gagtagctccgacttcaggcacccg

SEQ ID NO: 2879456 - DNA, 25 bp, Homo sapien
agtagctccgacttcaggcacccgc

SEQ ID NO: 2879457 - DNA, 25 bp, Homo sapien
ccgagtagctccgacttcaggcacc

SEQ ID NO: 2879458 - DNA, 25 bp, Homo sapien
cgcggaacacgaaggcctggttgct

SEQ ID NO: 2879459 - DNA, 25 bp, Homo sapien
cagagcgcacggctggatcatgagc

SEQ ID NO: 2879460 - DNA, 25 bp, Homo sapien
tgcgcgccatggtctcagtcagcat

SEQ ID NO: 2879461 - DNA, 25 bp, Homo sapien
tgtgatcggcccaaaactgctgcag

SEQ ID NO: 2879462 - DNA, 25 bp, Homo sapien
ctcgaaggttgccagggcgtggacc

SEQ ID NO: 2879463 - DNA, 25 bp, Homo sapien
agcgctggcgactcgtgctgcgctc

SEQ ID NO: 2879464 - DNA, 25 bp, Homo sapien
gggagcctcgggagcgctggcgact

SEQ ID NO: 2879465 - DNA, 25 bp, Homo sapien
ctcgggagcgctggcgactcgtgct

SEQ ID NO: 2879466 - DNA, 25 bp, Homo sapien
ctggcgactcgtgctgcgctcttgt

SEQ ID NO: 2879467 - DNA, 25 bp, Homo sapien
ggagcccggatgtccagaatgatga

SEQ ID NO: 2879468 - DNA, 25 bp, Homo sapien
tccagaatgatgaaggcgagccagg

SEQ ID NO: 2879469 - DNA, 25 bp, Homo sapien
ccagaatgatgaaggcgagccaggg

SEQ ID NO: 2879470 - DNA, 25 bp, Homo sapien
ctcgggagcccggatgtccagaatg

SEQ ID NO: 2879471 - DNA, 25 bp, Homo sapien
tacatatgcagatgaaggacgggag

SEQ ID NO: 2879472 - DNA, 25 bp, Homo sapien
gaggccggcggacatgtcttagccc

SEQ ID NO: 2879473 - DNA, 25 bp, Homo sapien
gctgcggctgtgtctcaccagctgc

SEQ ID NO: 2879474 - DNA, 25 bp, Homo sapien
gagggccttgttctgagttgcagct

SEQ ID NO: 2879475 - DNA, 25 bp, Homo sapien
gatgtgaacacgagcttggatagga

SEQ ID NO: 2879476 - DNA, 25 bp, Homo sapien
tctgaaagcaatctgggaggatatc

SEQ ID NO: 2879477 - DNA, 25 bp, Homo sapien
tacaggcaggctcggaagcttagac

SEQ ID NO: 2879478 - DNA, 25 bp, Homo sapien
ggaggatatctagcatagccaacag

SEQ ID NO: 2879479 - DNA, 25 bp, Homo sapien
ggcccacccttgagattgtatcttc

SEQ ID NO: 2879480 - DNA, 25 bp, Homo sapien
cacccttgagattgtatcttctcgg

SEQ ID NO: 2879481 - DNA, 25 bp, Homo sapien
cttgagattgtatcttctcggagga

SEQ ID NO: 2879482 - DNA, 25 bp, Homo sapien
acatccaggcccacccttgagattg

SEQ ID NO: 2879483 - DNA, 25 bp, Homo sapien
agatggggtggagttgctgagctgc

SEQ ID NO: 2879484 - DNA, 25 bp, Homo sapien
agctgctgtcccagggctagtccca

SEQ ID NO: 2879485 - DNA, 25 bp, Homo sapien
ctggaagatggggtggagttgctga

SEQ ID NO: 2879486 - DNA, 25 bp, Homo sapien
gctgctgtcccagggctagtcccat

SEQ ID NO: 2879487 - DNA, 25 bp, Homo sapien
tctcacgtggagactagcttccgct

SEQ ID NO: 2879488 - DNA, 25 bp, Homo sapien
tctctcaggaagctaacagagcgtg

SEQ ID NO: 2879489 - DNA, 25 bp, Homo sapien
caagacagggcgagaaaaaggctaa

SEQ ID NO: 2879490 - DNA, 25 bp, Homo sapien
cgtgtcatgggtcaggttccctaga

SEQ ID NO: 2879491 - DNA, 25 bp, Homo sapien
tagtggttcaagtctttttgcctat

SEQ ID NO: 2879492 - DNA, 25 bp, Homo sapien
agtggttcaagtctttttgcctatt

SEQ ID NO: 2879493 - DNA, 25 bp, Homo sapien
ttagtggttcaagtctttttgccta

SEQ ID NO: 2879494 - DNA, 25 bp, Homo sapien
tggagtctattggtggtgtgatcat

SEQ ID NO: 2879495 - DNA, 25 bp, Homo sapien
atcaggagtcaaggatactcctgcc

SEQ ID NO: 2879496 - DNA, 25 bp, Homo sapien
ctcaatcaggagtcaaggatactcc

SEQ ID NO: 2879497 - DNA, 25 bp, Homo sapien
gcctcctcaatcaggagtcaaggat

SEQ ID NO: 2879498 - DNA, 25 bp, Homo sapien
tgcagcctcctcaatcaggagtcaa

SEQ ID NO: 2879499 - DNA, 25 bp, Homo sapien
gaatttcttatctcagtatccctgg

SEQ ID NO: 2879500 - DNA, 25 bp, Homo sapien
tatgtagtgtaaaccgagattcaac

SEQ ID NO: 2879501 - DNA, 25 bp, Homo sapien
gcaaaaggctcccttaacctcagga

SEQ ID NO: 2879502 - DNA, 25 bp, Homo sapien
catggcactacgcaggaccttcttt

SEQ ID NO: 2879503 - DNA, 25 bp, Homo sapien
ttttgacaccaaacataggccgtgc

SEQ ID NO: 2879504 - DNA, 25 bp, Homo sapien
ctctcataggtgcaaaagctggctt

SEQ ID NO: 2879505 - DNA, 25 bp, Homo sapien
tgcagaaaaacagcacggcctatgt

SEQ ID NO: 2879506 - DNA, 25 bp, Homo sapien
cactggatcctgaggttaagggagc

SEQ ID NO: 2879507 - DNA, 25 bp, Homo sapien
aaagaaggtcctgcgtagtgccatg

SEQ ID NO: 2879508 - DNA, 25 bp, Homo sapien
atgatcgaggcagctgaagagcgcc

SEQ ID NO: 2879509 - DNA, 25 bp, Homo sapien
gccgatttaagaattggagagccag

SEQ ID NO: 2879510 - DNA, 25 bp, Homo sapien
aagccagcttttgcacctatgagag

SEQ ID NO: 2879511 - DNA, 25 bp, Homo sapien
cattttcagcaacggactgcaagct

SEQ ID NO: 2879512 - DNA, 25 bp, Homo sapien
taaatgcccaagtgccacatgaagc

SEQ ID NO: 2879513 - DNA, 25 bp, Homo sapien
tatcatcggtacatttgaaagcctc

SEQ ID NO: 2879514 - DNA, 25 bp, Homo sapien
gaagacatctattccggagctcacg

SEQ ID NO: 2879515 - DNA, 25 bp, Homo sapien
gctatgtagctaaggtcactgtgac

SEQ ID NO: 2879516 - DNA, 25 bp, Homo sapien
gaggctctgatagcacccatctgca

SEQ ID NO: 2879517 - DNA, 25 bp, Homo sapien
taagcagacccatacctttccaggg

SEQ ID NO: 2879518 - DNA, 25 bp, Homo sapien
cacagtgaccttagctacatagcag

SEQ ID NO: 2879519 - DNA, 25 bp, Homo sapien
tgcagatgggtgctatcagagcctc

SEQ ID NO: 2879520 - DNA, 25 bp, Homo sapien
tgcagcttgcagtccgttgctgaaa

SEQ ID NO: 2879521 - DNA, 25 bp, Homo sapien
catggcacgtgagctccggaataga

SEQ ID NO: 2879522 - DNA, 25 bp, Homo sapien
gaggctttcaaatgtaccgatgata

SEQ ID NO: 2879523 - DNA, 25 bp, Homo sapien
caggtaaccagcatgtaaaatcaaa

SEQ ID NO: 2879524 - DNA, 25 bp, Homo sapien
ttgacaacaatggaacaggtaacca

SEQ ID NO: 2879525 - DNA, 25 bp, Homo sapien
actaaataaccctggaaaggcaatg

SEQ ID NO: 2879526 - DNA, 25 bp, Homo sapien
gctgctggtcattcattaatgtgtc

SEQ ID NO: 2879527 - DNA, 25 bp, Homo sapien
gctctaatgatttaaagctcagcta

SEQ ID NO: 2879528 - DNA, 25 bp, Homo sapien
ggaaaggcaatgaacgatctgacaa

SEQ ID NO: 2879529 - DNA, 25 bp, Homo sapien
taaattgtcagatcgttcattgcct

SEQ ID NO: 2879530 - DNA, 25 bp, Homo sapien
tagctgagctttaaatcattagagc

SEQ ID NO: 2879531 - DNA, 25 bp, Homo sapien
tcattgcctttccagggttatttag

SEQ ID NO: 2879532 - DNA, 25 bp, Homo sapien
tttgattttacatgctggttacctg

SEQ ID NO: 2879533 - DNA, 25 bp, Homo sapien
tggttacctgttccattgttgtcaa

SEQ ID NO: 2879534 - DNA, 25 bp, Homo sapien
gacacattaatgaatgaccagcagc

SEQ ID NO: 2879535 - DNA, 25 bp, Homo sapien
caccatttagtaacatgacaaattg

SEQ ID NO: 2879536 - DNA, 25 bp, Homo sapien
tgaggagtactttgtggataagaaa

SEQ ID NO: 2879537 - DNA, 25 bp, Homo sapien
aatgtaacaccatttagtaacatga

SEQ ID NO: 2879538 - DNA, 25 bp, Homo sapien
taacatgacaaattgaaaagtgagg

SEQ ID NO: 2879539 - DNA, 25 bp, Homo sapien
caaattgaaaagtgaggagtacttt

SEQ ID NO: 2879540 - DNA, 25 bp, Homo sapien
gtaacaccatttagtaacatgacaa

SEQ ID NO: 2879541 - DNA, 25 bp, Homo sapien
cacaaagtactcctcacttttcaat

SEQ ID NO: 2879542 - DNA, 25 bp, Homo sapien
caatttgtcatgttactaaatggtg

SEQ ID NO: 2879543 - DNA, 25 bp, Homo sapien
cacttttcaatttgtcatgttacta

SEQ ID NO: 2879544 - DNA, 25 bp, Homo sapien
ttgtcatgttactaaatggtgttac

SEQ ID NO: 2879545 - DNA, 25 bp, Homo sapien
tcttatccacaaagtactcctcact

SEQ ID NO: 2879546 - DNA, 25 bp, Homo sapien
tcatgttactaaatggtgttacatt

SEQ ID NO: 2879547 - DNA, 25 bp, Homo sapien
ttatggcacttttgccttggtggcc

SEQ ID NO: 2879548 - DNA, 25 bp, Homo sapien
cacagaatgtagtgctcctagttac

SEQ ID NO: 2879549 - DNA, 25 bp, Homo sapien
tttctgctgcgtttgtatgaagaca

SEQ ID NO: 2879550 - DNA, 25 bp, Homo sapien
tctggtgtaaaatttgtttgaatgc

SEQ ID NO: 2879551 - DNA, 25 bp, Homo sapien
gaggccccgccttcttccgagaggc

SEQ ID NO: 2879552 - DNA, 25 bp, Homo sapien
cgaggccccgccttcttccgagagg

SEQ ID NO: 2879553 - DNA, 25 bp, Homo sapien
gcggccgcggcggtagcgcggaaaa

SEQ ID NO: 2879554 - DNA, 25 bp, Homo sapien
aggcttgaggtaggcagcaagcgcc

SEQ ID NO: 2879555 - DNA, 25 bp, Homo sapien
ccgcggcggtagcgcggaaaacaat

SEQ ID NO: 2879556 - DNA, 25 bp, Homo sapien
gaggtaggcagcaagcgccggctgg

SEQ ID NO: 2879557 - DNA, 25 bp, Homo sapien
gtagccgcggggagcgaagcccgca

SEQ ID NO: 2879558 - DNA, 25 bp, Homo sapien
cggagaggggtagccgcggggagcg

SEQ ID NO: 2879559 - DNA, 25 bp, Homo sapien
gaggggtagccgcggggagcgaagc

SEQ ID NO: 2879560 - DNA, 25 bp, Homo sapien
ggtagccgcggggagcgaagcccgc

SEQ ID NO: 2879561 - DNA, 25 bp, Homo sapien
cgcacactaccacgcttggcttatt

SEQ ID NO: 2879562 - DNA, 25 bp, Homo sapien
aggcgcacactaccacgcttggctt

SEQ ID NO: 2879563 - DNA, 25 bp, Homo sapien
cactaccacgcttggcttattttgg
